United States Patent Application Publication US 2005/0244851 A1 - sequence listing, part 6

SEQ ID NO: 199337 - DNA, 25 bp, Homo sapien
tgacctagagctatcccagcattct

SEQ ID NO: 199338 - DNA, 25 bp, Homo sapien
gagaatctatgtcacttgccctaag

SEQ ID NO: 199339 - DNA, 25 bp, Homo sapien
gcacagtggtcttgaatttgccttt

SEQ ID NO: 199340 - DNA, 25 bp, Homo sapien
tttgagaaggatcttgagagacaga

SEQ ID NO: 199341 - DNA, 25 bp, Homo sapien
tgcctttgaactagtgagattttgg

SEQ ID NO: 199342 - DNA, 25 bp, Homo sapien
agaggtgggcgaacaaaaatgatac

SEQ ID NO: 199343 - DNA, 25 bp, Homo sapien
gaagacccttcaccaatactctgct

SEQ ID NO: 199344 - DNA, 25 bp, Homo sapien
gctttacttgcactcaagaggagag

SEQ ID NO: 199345 - DNA, 25 bp, Homo sapien
agtatgaataggtggagagatgccc

SEQ ID NO: 199346 - DNA, 25 bp, Homo sapien
tggcaagtgccaggagtgaacatag

SEQ ID NO: 199347 - DNA, 25 bp, Homo sapien
tccaaggaacagaagtaagcataat

SEQ ID NO: 199348 - DNA, 25 bp, Homo sapien
tctgctcggagagaatcaccgggaa

SEQ ID NO: 199349 - DNA, 25 bp, Homo sapien
cagagagtcggcattgtgcatttta

SEQ ID NO: 199350 - DNA, 25 bp, Homo sapien
tagtgaaattcaggaaagccgcaaa

SEQ ID NO: 199351 - DNA, 25 bp, Homo sapien
tgaattgtaaaacaaactgggcact

SEQ ID NO: 199352 - DNA, 25 bp, Homo sapien
ttacatgaattgtaaaacaaactgg

SEQ ID NO: 199353 - DNA, 25 bp, Homo sapien
ttatcgaatttttacatgaattgta

SEQ ID NO: 199354 - DNA, 25 bp, Homo sapien
catgaattgtaaaacaaactgggca

SEQ ID NO: 199355 - DNA, 25 bp, Homo sapien
tggtgtggacactgaaagcagcaga

SEQ ID NO: 199356 - DNA, 25 bp, Homo sapien
catagcagctgcagggcatcctggc

SEQ ID NO: 199357 - DNA, 25 bp, Homo sapien
gggagcccagttgaggaaaggctga

SEQ ID NO: 199358 - DNA, 25 bp, Homo sapien
agcagcagagtcctcacaacccagg

SEQ ID NO: 199359 - DNA, 25 bp, Homo sapien
ccccactaatgtgttttagttcata

SEQ ID NO: 199360 - DNA, 25 bp, Homo sapien
tagttcatagagtgcctgctgattt

SEQ ID NO: 199361 - DNA, 25 bp, Homo sapien
tgttgaaaacacaacccaggggagc

SEQ ID NO: 199362 - DNA, 25 bp, Homo sapien
tccagttccattagaagtactccag

SEQ ID NO: 199363 - DNA, 25 bp, Homo sapien
ctgattgtgggagccccctcatcct

SEQ ID NO: 199364 - DNA, 25 bp, Homo sapien
ccctgctactgagcgtgcccactca

SEQ ID NO: 199365 - DNA, 25 bp, Homo sapien
gctactgagcgtgcccactcaggct

SEQ ID NO: 199366 - DNA, 25 bp, Homo sapien
tgtgcctccccctgctactgagcgt

SEQ ID NO: 199367 - DNA, 25 bp, Homo sapien
gatccaagtcctaactgaaaagttg

SEQ ID NO: 199368 - DNA, 25 bp, Homo sapien
gagcggccttctgaacctgggccta

SEQ ID NO: 199369 - DNA, 25 bp, Homo sapien
tacatcagaatcacaggagcggcct

SEQ ID NO: 199370 - DNA, 25 bp, Homo sapien
accctcagggccatctacatcagaa

SEQ ID NO: 199371 - DNA, 25 bp, Homo sapien
tctgggaataaacagctaatagagc

SEQ ID NO: 199372 - DNA, 25 bp, Homo sapien
accagcagtagccaggacaccaatt

SEQ ID NO: 199373 - DNA, 25 bp, Homo sapien
tgaccagcagtagccaggacaccaa

SEQ ID NO: 199374 - DNA, 25 bp, Homo sapien
cagagctgctactgatgtttccaag

SEQ ID NO: 199375 - DNA, 25 bp, Homo sapien
cttctgggtgttctgaacccctgaa

SEQ ID NO: 199376 - DNA, 25 bp, Homo sapien
gctgtgcatcttaacttcatctcca

SEQ ID NO: 199377 - DNA, 25 bp, Homo sapien
ggctgctgtgcatcttaacttcatc

SEQ ID NO: 199378 - DNA, 25 bp, Homo sapien
gaacatcagggcagtttggctgctg

SEQ ID NO: 199379 - DNA, 25 bp, Homo sapien
ctgatataatctaaagaggaagtat

SEQ ID NO: 199380 - DNA, 25 bp, Homo sapien
tgatataatctaaagaggaagtatt

SEQ ID NO: 199381 - DNA, 25 bp, Homo sapien
tattttccttgtgacctttctcatt

SEQ ID NO: 199382 - DNA, 25 bp, Homo sapien
gtattttccttgtgacctttctcat

SEQ ID NO: 199383 - DNA, 25 bp, Homo sapien
gtgttacacgtttggaagtgtgctc

SEQ ID NO: 199384 - DNA, 25 bp, Homo sapien
gaagtgtgctctataacagtgttgt

SEQ ID NO: 199385 - DNA, 25 bp, Homo sapien
cacgtttggaagtgtgctctataac

SEQ ID NO: 199386 - DNA, 25 bp, Homo sapien
gctctataacagtgttgttgaccaa

SEQ ID NO: 199387 - DNA, 25 bp, Homo sapien
tagggactatgctctgtagcctgaa

SEQ ID NO: 199388 - DNA, 25 bp, Homo sapien
gctgccctgctcttgatagggacta

SEQ ID NO: 199389 - DNA, 25 bp, Homo sapien
ttcttaacaagtcctcgcccagggc

SEQ ID NO: 199390 - DNA, 25 bp, Homo sapien
tgagtagtaagccataaattgatct

SEQ ID NO: 199391 - DNA, 25 bp, Homo sapien
gagagacacgtgtcttaaacatctc

SEQ ID NO: 199392 - DNA, 25 bp, Homo sapien
tgagagacacgtgtcttaaacatct

SEQ ID NO: 199393 - DNA, 25 bp, Homo sapien
gagacacgtgtcttaaacatctcac

SEQ ID NO: 199394 - DNA, 25 bp, Homo sapien
cttgagagacacgtgtcttaaacat

SEQ ID NO: 199395 - DNA, 25 bp, Homo sapien
gaggtgatatctcataacagagaac

SEQ ID NO: 199396 - DNA, 25 bp, Homo sapien
caaaagcacctgaggtgatatctca

SEQ ID NO: 199397 - DNA, 25 bp, Homo sapien
cataacagagaacccacacagccat

SEQ ID NO: 199398 - DNA, 25 bp, Homo sapien
ggcaaaagcacctgaggtgatatct

SEQ ID NO: 199399 - DNA, 25 bp, Homo sapien
tccatttgtatcataatccagtgct

SEQ ID NO: 199400 - DNA, 25 bp, Homo sapien
cagtgttgtgcaaccctaatcacaa

SEQ ID NO: 199401 - DNA, 25 bp, Homo sapien
tacccgcagtctgacaactaccaat

SEQ ID NO: 199402 - DNA, 25 bp, Homo sapien
caatctgctttcagtatccatggat

SEQ ID NO: 199403 - DNA, 25 bp, Homo sapien
tgcttctctgacactagatgaagat

SEQ ID NO: 199404 - DNA, 25 bp, Homo sapien
gaattgttggaaattagagccagcc

SEQ ID NO: 199405 - DNA, 25 bp, Homo sapien
gatgaagatggcatttgtgcctgtg

SEQ ID NO: 199406 - DNA, 25 bp, Homo sapien
attagagccagccaaaaattgtata

SEQ ID NO: 199407 - DNA, 25 bp, Homo sapien
aagaattatcgcttacaagtccaga

SEQ ID NO: 199408 - DNA, 25 bp, Homo sapien
catcaagagctagagccatggtaga

SEQ ID NO: 199409 - DNA, 25 bp, Homo sapien
aaaaagcttctgtggttgcaataca

SEQ ID NO: 199410 - DNA, 25 bp, Homo sapien
gcatagctcagtaacaactcagaag

SEQ ID NO: 199411 - DNA, 25 bp, Homo sapien
ccaggaaagtttaatggatctctcc

SEQ ID NO: 199412 - DNA, 25 bp, Homo sapien
tggcgaggccttagatggaagtcat

SEQ ID NO: 199413 - DNA, 25 bp, Homo sapien
cacattgtgttgttatgttccctca

SEQ ID NO: 199414 - DNA, 25 bp, Homo sapien
gaatgaccattccagtaccagcatg

SEQ ID NO: 199415 - DNA, 25 bp, Homo sapien
gagactggacgcttaccttaaatga

SEQ ID NO: 199416 - DNA, 25 bp, Homo sapien
gttatggtgatgaagacagtccccg

SEQ ID NO: 199417 - DNA, 25 bp, Homo sapien
taaatattgtgaggagccagatccc

SEQ ID NO: 199418 - DNA, 25 bp, Homo sapien
gaatcaccgtgtatcagtcagacca

SEQ ID NO: 199419 - DNA, 25 bp, Homo sapien
gctacaggaagaggatctgagacca

SEQ ID NO: 199420 - DNA, 25 bp, Homo sapien
gggcagcctgaacaatcaagaacca

SEQ ID NO: 199421 - DNA, 25 bp, Homo sapien
cacccaggagagtgggctacaggaa

SEQ ID NO: 199422 - DNA, 25 bp, Homo sapien
gagccagaatagagcaagtccagcc

SEQ ID NO: 199423 - DNA, 25 bp, Homo sapien
tccattcaaccgtgtttcatctcca

SEQ ID NO: 199424 - DNA, 25 bp, Homo sapien
aatttccattcaaccgtgtttcatc

SEQ ID NO: 199425 - DNA, 25 bp, Homo sapien
tgaaatttccattcaaccgtgtttc

SEQ ID NO: 199426 - DNA, 25 bp, Homo sapien
ttcaaccgtgtttcatctccagcca

SEQ ID NO: 199427 - DNA, 25 bp, Homo sapien
tattgtaaccacaccattttgtggc

SEQ ID NO: 199428 - DNA, 25 bp, Homo sapien
cacttaatgagggaagacattggat

SEQ ID NO: 199429 - DNA, 25 bp, Homo sapien
tcagctttagtccacattactttgg

SEQ ID NO: 199430 - DNA, 25 bp, Homo sapien
gatagtccgtcgtcccacttaatga

SEQ ID NO: 199431 - DNA, 25 bp, Homo sapien
ctgatgggatgttaacatatctgca

SEQ ID NO: 199432 - DNA, 25 bp, Homo sapien
tgatgggatgttaacatatctgcac

SEQ ID NO: 199433 - DNA, 25 bp, Homo sapien
ggtcctcggtgtaactgatgggatg

SEQ ID NO: 199434 - DNA, 25 bp, Homo sapien
gcatttcattgcagggtcctcggtg

SEQ ID NO: 199435 - DNA, 25 bp, Homo sapien
aatgaatgtcagcagagcaagctgt

SEQ ID NO: 199436 - DNA, 25 bp, Homo sapien
tcctgtgcctctgaatggtcttgct

SEQ ID NO: 199437 - DNA, 25 bp, Homo sapien
tgtgttgtaccagcagacagttggc

SEQ ID NO: 199438 - DNA, 25 bp, Homo sapien
tggctgctgcacgtatattcctgtg

SEQ ID NO: 199439 - DNA, 25 bp, Homo sapien
ctccacgcctctgtactcccaacct

SEQ ID NO: 199440 - DNA, 25 bp, Homo sapien
tctccacgcctctgtactcccaacc

SEQ ID NO: 199441 - DNA, 25 bp, Homo sapien
tctccagagagtgtcaagccaggaa

SEQ ID NO: 199442 - DNA, 25 bp, Homo sapien
tccagagagtgtcaagccaggaatc

SEQ ID NO: 199443 - DNA, 25 bp, Homo sapien
aggatctccagagagtgtcaagcca

SEQ ID NO: 199444 - DNA, 25 bp, Homo sapien
gatctccagagagtgtcaagccagg

SEQ ID NO: 199445 - DNA, 25 bp, Homo sapien
tgagaggataggaagttgagatgtc

SEQ ID NO: 199446 - DNA, 25 bp, Homo sapien
ggtggatgtagaaaggcgcatgaga

SEQ ID NO: 199447 - DNA, 25 bp, Homo sapien
acctctaagactgagggaaggacag

SEQ ID NO: 199448 - DNA, 25 bp, Homo sapien
caacctctaagactgagggaaggac

SEQ ID NO: 199449 - DNA, 25 bp, Homo sapien
aataactaaattgcgctggctgggc

SEQ ID NO: 199450 - DNA, 25 bp, Homo sapien
cactgcctgactgttggtccatatt

SEQ ID NO: 199451 - DNA, 25 bp, Homo sapien
tattcctgccgtaaagttctattcc

SEQ ID NO: 199452 - DNA, 25 bp, Homo sapien
gccaataactaaattgcgctggctg

SEQ ID NO: 199453 - DNA, 25 bp, Homo sapien
tataggtccccattaagcactgtga

SEQ ID NO: 199454 - DNA, 25 bp, Homo sapien
taagcactgtgagaggggtgacgtg

SEQ ID NO: 199455 - DNA, 25 bp, Homo sapien
ttataggtccccattaagcactgtg

SEQ ID NO: 199456 - DNA, 25 bp, Homo sapien
gcactgtgagaggggtgacgtgagg

SEQ ID NO: 199457 - DNA, 25 bp, Homo sapien
tgtaccacacatacttgcaatgcag

SEQ ID NO: 199458 - DNA, 25 bp, Homo sapien
gcaaatggcatcttatcagcgcaga

SEQ ID NO: 199459 - DNA, 25 bp, Homo sapien
taggaaactgacctagagcaaatgg

SEQ ID NO: 199460 - DNA, 25 bp, Homo sapien
gaagcatgctaccactggctaggaa

SEQ ID NO: 199461 - DNA, 25 bp, Homo sapien
gatgtgggtggttccgcattgttca

SEQ ID NO: 199462 - DNA, 25 bp, Homo sapien
tccttccatgggtaataagctgagt

SEQ ID NO: 199463 - DNA, 25 bp, Homo sapien
tccattgagactgggagcctccaga

SEQ ID NO: 199464 - DNA, 25 bp, Homo sapien
agtgagagcggatagcatagtgcca

SEQ ID NO: 199465 - DNA, 25 bp, Homo sapien
ggctactgctccgggagccacagct

SEQ ID NO: 199466 - DNA, 25 bp, Homo sapien
ctactgctccgggagccacagctga

SEQ ID NO: 199467 - DNA, 25 bp, Homo sapien
cgggctactgctccgggagccacag

SEQ ID NO: 199468 - DNA, 25 bp, Homo sapien
tgccgggctactgctccgggagcca

SEQ ID NO: 199469 - DNA, 25 bp, Homo sapien
gattttacaacctggctcccgcaat

SEQ ID NO: 199470 - DNA, 25 bp, Homo sapien
tagattttacaacctggctcccgca

SEQ ID NO: 199471 - DNA, 25 bp, Homo sapien
gctagattttacaacctggctcccg

SEQ ID NO: 199472 - DNA, 25 bp, Homo sapien
agattttacaacctggctcccgcaa

SEQ ID NO: 199473 - DNA, 25 bp, Homo sapien
tacatacttctctgccgagttcaca

SEQ ID NO: 199474 - DNA, 25 bp, Homo sapien
ttctctgccgagttcacacacaaaa

SEQ ID NO: 199475 - DNA, 25 bp, Homo sapien
tacttctctgccgagttcacacaca

SEQ ID NO: 199476 - DNA, 25 bp, Homo sapien
acatacttctctgccgagttcacac

SEQ ID NO: 199477 - DNA, 25 bp, Homo sapien
tgctggaagcctacagtagcactgt

SEQ ID NO: 199478 - DNA, 25 bp, Homo sapien
caagttcaccctttcgatcagtggc

SEQ ID NO: 199479 - DNA, 25 bp, Homo sapien
tcaatagacacttggcaggctcagc

SEQ ID NO: 199480 - DNA, 25 bp, Homo sapien
gaaggttcccttgtctcacgattat

SEQ ID NO: 199481 - DNA, 25 bp, Homo sapien
tgttggtattctcaagaaagccagc

SEQ ID NO: 199482 - DNA, 25 bp, Homo sapien
tgttatgcttataacctacccaggg

SEQ ID NO: 199483 - DNA, 25 bp, Homo sapien
tggccaggctgtacatgcgtattct

SEQ ID NO: 199484 - DNA, 25 bp, Homo sapien
cataaatgctctttgccagtggaac

SEQ ID NO: 199485 - DNA, 25 bp, Homo sapien
tacacctctcaaaataaggctatgg

SEQ ID NO: 199486 - DNA, 25 bp, Homo sapien
taattgtcaacatactatcctggtg

SEQ ID NO: 199487 - DNA, 25 bp, Homo sapien
tatcctggtgtctagaaaatacctg

SEQ ID NO: 199488 - DNA, 25 bp, Homo sapien
aaggctatggccatcatgctttaaa

SEQ ID NO: 199489 - DNA, 25 bp, Homo sapien
tgagggcgtttttgccacccgtggc

SEQ ID NO: 199490 - DNA, 25 bp, Homo sapien
ttcagttctaatggcatggttcccc

SEQ ID NO: 199491 - DNA, 25 bp, Homo sapien
gaggcacactttcaaccagtaacag

SEQ ID NO: 199492 - DNA, 25 bp, Homo sapien
tgccggattatctcagtaggtacca

SEQ ID NO: 199493 - DNA, 25 bp, Homo sapien
ccaggaggttgacgccctgcgggtc

SEQ ID NO: 199494 - DNA, 25 bp, Homo sapien
agcccaggaggttgacgccctgcgg

SEQ ID NO: 199495 - DNA, 25 bp, Homo sapien
tctcctttcgtgtgcggttcccagc

SEQ ID NO: 199496 - DNA, 25 bp, Homo sapien
ttcgtgtgcggttcccagcagcagg

SEQ ID NO: 199497 - DNA, 25 bp, Homo sapien
tccatccagcgtgaaacccacgagg

SEQ ID NO: 199498 - DNA, 25 bp, Homo sapien
ttccttgtgctataaaaaatcttcc

SEQ ID NO: 199499 - DNA, 25 bp, Homo sapien
cagaccccgaggtggcaatgaaacc

SEQ ID NO: 199500 - DNA, 25 bp, Homo sapien
ggctgtgtctacctgaggaactgga

SEQ ID NO: 199501 - DNA, 25 bp, Homo sapien
ctgaggctcgcctcgcttcctgggt

SEQ ID NO: 199502 - DNA, 25 bp, Homo sapien
cgctttagtaagacgacactcaggc

SEQ ID NO: 199503 - DNA, 25 bp, Homo sapien
gaaaggccctgatcgccgtggtcca

SEQ ID NO: 199504 - DNA, 25 bp, Homo sapien
ggaccgccttctctcggagtggcct

SEQ ID NO: 199505 - DNA, 25 bp, Homo sapien
cccaagtggccgcacccctccgcgg

SEQ ID NO: 199506 - DNA, 25 bp, Homo sapien
ccccaagtggccgcacccctccgcg

SEQ ID NO: 199507 - DNA, 25 bp, Homo sapien
cgggcgggcgctccccgtactgccg

SEQ ID NO: 199508 - DNA, 25 bp, Homo sapien
ggcgggcgggcgctccccgtactgc

SEQ ID NO: 199509 - DNA, 25 bp, Homo sapien
gcgctccccgtactgccgcgagctc

SEQ ID NO: 199510 - DNA, 25 bp, Homo sapien
cgggcgctccccgtactgccgcgag

SEQ ID NO: 199511 - DNA, 25 bp, Homo sapien
gggctgcgccgtgccgcctgttgtg

SEQ ID NO: 199512 - DNA, 25 bp, Homo sapien
tgggcgccgggactagcacccgagt

SEQ ID NO: 199513 - DNA, 25 bp, Homo sapien
ggactagcacccgagtcccgcgctc

SEQ ID NO: 199514 - DNA, 25 bp, Homo sapien
agaggccggacagcccggctgcggg

SEQ ID NO: 199515 - DNA, 25 bp, Homo sapien
gcagaatttgggtttctggaggagc

SEQ ID NO: 199516 - DNA, 25 bp, Homo sapien
ttgggggtgcggcctgcagaatttg

SEQ ID NO: 199517 - DNA, 25 bp, Homo sapien
gagttgggggtgcggcctgcagaat

SEQ ID NO: 199518 - DNA, 25 bp, Homo sapien
gaatttgggtttctggaggagctta

SEQ ID NO: 199519 - DNA, 25 bp, Homo sapien
tgcggtccacccgtgtaagtgtaaa

SEQ ID NO: 199520 - DNA, 25 bp, Homo sapien
cgaacaggagcaccggattcggctc

SEQ ID NO: 199521 - DNA, 25 bp, Homo sapien
ccaggcactgtcaggtatggacagc

SEQ ID NO: 199522 - DNA, 25 bp, Homo sapien
cccaggcgaacaggagcaccggatt

SEQ ID NO: 199523 - DNA, 25 bp, Homo sapien
agagattaaaacaacacctcgagtc

SEQ ID NO: 199524 - DNA, 25 bp, Homo sapien
cagagattaaaacaacacctcgagt

SEQ ID NO: 199525 - DNA, 25 bp, Homo sapien
ctacagagattaaaacaacacctcg

SEQ ID NO: 199526 - DNA, 25 bp, Homo sapien
acagagattaaaacaacacctcgag

SEQ ID NO: 199527 - DNA, 25 bp, Homo sapien
tttaaagagtaccactgactggccc

SEQ ID NO: 199528 - DNA, 25 bp, Homo sapien
ttcttttaaagagtaccactgactg

SEQ ID NO: 199529 - DNA, 25 bp, Homo sapien
ttttaaagagtaccactgactggcc

SEQ ID NO: 199530 - DNA, 25 bp, Homo sapien
taaagagtaccactgactggcccat

SEQ ID NO: 199531 - DNA, 25 bp, Homo sapien
cttctccttccgctgcgtccgagct

SEQ ID NO: 199532 - DNA, 25 bp, Homo sapien
ctggcttctccttccgctgcgtccg

SEQ ID NO: 199533 - DNA, 25 bp, Homo sapien
ggcttctccttccgctgcgtccgag

SEQ ID NO: 199534 - DNA, 25 bp, Homo sapien
cacttcgtctacctcatgtttctgc

SEQ ID NO: 199535 - DNA, 25 bp, Homo sapien
ctagacacacccattaaaagtagaa

SEQ ID NO: 199536 - DNA, 25 bp, Homo sapien
aatatatgaaatactagacacaccc

SEQ ID NO: 199537 - DNA, 25 bp, Homo sapien
tctctatgtcaaaaacctgataagt

SEQ ID NO: 199538 - DNA, 25 bp, Homo sapien
tattctgcaagatctcactaatgca

SEQ ID NO: 199539 - DNA, 25 bp, Homo sapien
caaactcctctccagtaagcggttg

SEQ ID NO: 199540 - DNA, 25 bp, Homo sapien
ctaggttacgtaggatggaggcttc

SEQ ID NO: 199541 - DNA, 25 bp, Homo sapien
tggaggcttccccactaccagaaaa

SEQ ID NO: 199542 - DNA, 25 bp, Homo sapien
cagtaagcggttggaccaaagaagg

SEQ ID NO: 199543 - DNA, 25 bp, Homo sapien
aagacgtagtgtatgagaaagggcc

SEQ ID NO: 199544 - DNA, 25 bp, Homo sapien
aacgtagttcacacttcaggagaga

SEQ ID NO: 199545 - DNA, 25 bp, Homo sapien
tttaagacagttacctgttgtgctg

SEQ ID NO: 199546 - DNA, 25 bp, Homo sapien
ggagagaacttcatagcacaatgtc

SEQ ID NO: 199547 - DNA, 25 bp, Homo sapien
cataagcagtgttacccctggctgg

SEQ ID NO: 199548 - DNA, 25 bp, Homo sapien
tgagctggaacatgccctgtctgtg

SEQ ID NO: 199549 - DNA, 25 bp, Homo sapien
taaggagcccagatcataatgcagt

SEQ ID NO: 199550 - DNA, 25 bp, Homo sapien
ggcaacattgccttatcacgctagg

SEQ ID NO: 199551 - DNA, 25 bp, Homo sapien
tatttcatggtaagattagcagtca

SEQ ID NO: 199552 - DNA, 25 bp, Homo sapien
tatctatcgcttgtcagtatacccg

SEQ ID NO: 199553 - DNA, 25 bp, Homo sapien
gcaacagtgagctttatatctacat

SEQ ID NO: 199554 - DNA, 25 bp, Homo sapien
ttggtatatattgcctctgcacatc

SEQ ID NO: 199555 - DNA, 25 bp, Homo sapien
gtaatcatgctccaatctagccatg

SEQ ID NO: 199556 - DNA, 25 bp, Homo sapien
gccttggacgcccaaatgaggacac

SEQ ID NO: 199557 - DNA, 25 bp, Homo sapien
ccttttggcttgagtaatcatgctc

SEQ ID NO: 199558 - DNA, 25 bp, Homo sapien
ccatgaaagccttggacgcccaaat

SEQ ID NO: 199559 - DNA, 25 bp, Homo sapien
gaaatggcccaagtcaattgctcca

SEQ ID NO: 199560 - DNA, 25 bp, Homo sapien
tgtctggtaacccaaagcctttgct

SEQ ID NO: 199561 - DNA, 25 bp, Homo sapien
tcccgtttctttggcgagaacagcc

SEQ ID NO: 199562 - DNA, 25 bp, Homo sapien
gctgtttgtagtgaaggcgccagaa

SEQ ID NO: 199563 - DNA, 25 bp, Homo sapien
tttttgctagggtgttgatggcatc

SEQ ID NO: 199564 - DNA, 25 bp, Homo sapien
ggaggggctgtagcaaagcttcaca

SEQ ID NO: 199565 - DNA, 25 bp, Homo sapien
tgctttttgctagggtgttgatggc

SEQ ID NO: 199566 - DNA, 25 bp, Homo sapien
atttgctttttgctagggtgttgat

SEQ ID NO: 199567 - DNA, 25 bp, Homo sapien
atgattgtggacacgcagtcgcatg

SEQ ID NO: 199568 - DNA, 25 bp, Homo sapien
attgtggacacgcagtcgcatggca

SEQ ID NO: 199569 - DNA, 25 bp, Homo sapien
catggcagagtcatctctcatgctg

SEQ ID NO: 199570 - DNA, 25 bp, Homo sapien
catctctcatgctggctgcctgaca

SEQ ID NO: 199571 - DNA, 25 bp, Homo sapien
ccaggaatggtgtcgtggagtcagg

SEQ ID NO: 199572 - DNA, 25 bp, Homo sapien
tggtgtcgtggagtcagggatgtac

SEQ ID NO: 199573 - DNA, 25 bp, Homo sapien
gaatggtgtcgtggagtcagggatg

SEQ ID NO: 199574 - DNA, 25 bp, Homo sapien
tgtcgtggagtcagggatgtacgct

SEQ ID NO: 199575 - DNA, 25 bp, Homo sapien
agcctttttcgacccacactgcaaa

SEQ ID NO: 199576 - DNA, 25 bp, Homo sapien
ttcgacccacactgcaaaaggaatg

SEQ ID NO: 199577 - DNA, 25 bp, Homo sapien
gtattgagattagaacgtgctgccg

SEQ ID NO: 199578 - DNA, 25 bp, Homo sapien
agaaggtattgagattagaacgtgc

SEQ ID NO: 199579 - DNA, 25 bp, Homo sapien
gaaacatctgacaggtgagacccat

SEQ ID NO: 199580 - DNA, 25 bp, Homo sapien
gttccataaaatcaggaaacatctg

SEQ ID NO: 199581 - DNA, 25 bp, Homo sapien
catctgacaggtgagacccataggt

SEQ ID NO: 199582 - DNA, 25 bp, Homo sapien
ctgttccataaaatcaggaaacatc

SEQ ID NO: 199583 - DNA, 25 bp, Homo sapien
aaattgtacagctgggcatctaaaa

SEQ ID NO: 199584 - DNA, 25 bp, Homo sapien
aatcaaattgtacagctgggcatct

SEQ ID NO: 199585 - DNA, 25 bp, Homo sapien
tcaaattgtacagctgggcatctaa

SEQ ID NO: 199586 - DNA, 25 bp, Homo sapien
caatcaaattgtacagctgggcatc

SEQ ID NO: 199587 - DNA, 25 bp, Homo sapien
agagggtgacatttggctacaaact

SEQ ID NO: 199588 - DNA, 25 bp, Homo sapien
acatttggctacaaactggtcatag

SEQ ID NO: 199589 - DNA, 25 bp, Homo sapien
ggtgacatttggctacaaactggtc

SEQ ID NO: 199590 - DNA, 25 bp, Homo sapien
gacatttggctacaaactggtcata

SEQ ID NO: 199591 - DNA, 25 bp, Homo sapien
gcctccaaaaatggcaaagagagac

SEQ ID NO: 199592 - DNA, 25 bp, Homo sapien
aggagtatgtctgtcttccatgcct

SEQ ID NO: 199593 - DNA, 25 bp, Homo sapien
tcaggagtatgtctgtcttccatgc

SEQ ID NO: 199594 - DNA, 25 bp, Homo sapien
ttccatgcctccaaaaatggcaaag

SEQ ID NO: 199595 - DNA, 25 bp, Homo sapien
agcgccatgaccaggcacgtggaca

SEQ ID NO: 199596 - DNA, 25 bp, Homo sapien
ccagcgccatgaccaggcacgtgga

SEQ ID NO: 199597 - DNA, 25 bp, Homo sapien
ccccagcgccatgaccaggcacgtg

SEQ ID NO: 199598 - DNA, 25 bp, Homo sapien
gcgccatgaccaggcacgtggacag

SEQ ID NO: 199599 - DNA, 25 bp, Homo sapien
ctgccgttctggatcctctgagctt

SEQ ID NO: 199600 - DNA, 25 bp, Homo sapien
ctgttagattctgtgggtctctaga

SEQ ID NO: 199601 - DNA, 25 bp, Homo sapien
atggctccttggaggaagtcgagag

SEQ ID NO: 199602 - DNA, 25 bp, Homo sapien
ctgatggctccttggaggaagtcga

SEQ ID NO: 199603 - DNA, 25 bp, Homo sapien
ccggaactgatggctccttggagga

SEQ ID NO: 199604 - DNA, 25 bp, Homo sapien
actgatggctccttggaggaagtcg

SEQ ID NO: 199605 - DNA, 25 bp, Homo sapien
cctcagtaagggttcatgatgccat

SEQ ID NO: 199606 - DNA, 25 bp, Homo sapien
ggaaatgtgcactaataactgggag

SEQ ID NO: 199607 - DNA, 25 bp, Homo sapien
caagctgcatagaacacagagctca

SEQ ID NO: 199608 - DNA, 25 bp, Homo sapien
aagaagattcctgagagagatcccc

SEQ ID NO: 199609 - DNA, 25 bp, Homo sapien
tgctgggccatgaccacggagaaca

SEQ ID NO: 199610 - DNA, 25 bp, Homo sapien
ctctgctgggccatgaccacggaga

SEQ ID NO: 199611 - DNA, 25 bp, Homo sapien
tgggccatgaccacggagaacaggt

SEQ ID NO: 199612 - DNA, 25 bp, Homo sapien
tctgctgggccatgaccacggagaa

SEQ ID NO: 199613 - DNA, 25 bp, Homo sapien
cgcagcctccgcagggcgctttgaa

SEQ ID NO: 199614 - DNA, 25 bp, Homo sapien
aggatgcaagagatcatgagattcg

SEQ ID NO: 199615 - DNA, 25 bp, Homo sapien
gcgctttgaatgtccctgtttctct

SEQ ID NO: 199616 - DNA, 25 bp, Homo sapien
gctgcgcagcctccgcagggcgctt

SEQ ID NO: 199617 - DNA, 25 bp, Homo sapien
gagccacaggtagcgaaggctttat

SEQ ID NO: 199618 - DNA, 25 bp, Homo sapien
gtgagagccacaggtagcgaaggct

SEQ ID NO: 199619 - DNA, 25 bp, Homo sapien
gagagccacaggtagcgaaggcttt

SEQ ID NO: 199620 - DNA, 25 bp, Homo sapien
aggtgagagccacaggtagcgaagg

SEQ ID NO: 199621 - DNA, 25 bp, Homo sapien
ttcggtttatcacactccaggcagc

SEQ ID NO: 199622 - DNA, 25 bp, Homo sapien
cttcggtttatcacactccaggcag

SEQ ID NO: 199623 - DNA, 25 bp, Homo sapien
ctggtggtcagaagggagtcgtttg

SEQ ID NO: 199624 - DNA, 25 bp, Homo sapien
tggtcagaagggagtcgtttggtag

SEQ ID NO: 199625 - DNA, 25 bp, Homo sapien
cagaagggagtcgtttggtaggaag

SEQ ID NO: 199626 - DNA, 25 bp, Homo sapien
ctctggtggtcagaagggagtcgtt

SEQ ID NO: 199627 - DNA, 25 bp, Homo sapien
ccgtggcacgctgatcttgacagct

SEQ ID NO: 199628 - DNA, 25 bp, Homo sapien
gctcctttgctaagcctggggttat

SEQ ID NO: 199629 - DNA, 25 bp, Homo sapien
tccttgttttgcctccgtggcacgc

SEQ ID NO: 199630 - DNA, 25 bp, Homo sapien
tgcctccgtggcacgctgatcttga

SEQ ID NO: 199631 - DNA, 25 bp, Homo sapien
attttagctgcattgctgcctttca

SEQ ID NO: 199632 - DNA, 25 bp, Homo sapien
cattttagctgcattgctgcctttc

SEQ ID NO: 199633 - DNA, 25 bp, Homo sapien
gggcacctgaaaccgctgaggcctg

SEQ ID NO: 199634 - DNA, 25 bp, Homo sapien
acctgaaaccgctgaggcctgagag

SEQ ID NO: 199635 - DNA, 25 bp, Homo sapien
ttggctggggcacctgaaaccgctg

SEQ ID NO: 199636 - DNA, 25 bp, Homo sapien
tgaaaccgctgaggcctgagagcgc

SEQ ID NO: 199637 - DNA, 25 bp, Homo sapien
cagtcctcttaggatcgtgcctctt

SEQ ID NO: 199638 - DNA, 25 bp, Homo sapien
tcctcttaggatcgtgcctcttcat

SEQ ID NO: 199639 - DNA, 25 bp, Homo sapien
ctcctccagtcctcttaggatcgtg

SEQ ID NO: 199640 - DNA, 25 bp, Homo sapien
tccagtcctcttaggatcgtgcctc

SEQ ID NO: 199641 - DNA, 25 bp, Homo sapien
tgggaaaagaagggtcgagtctcac

SEQ ID NO: 199642 - DNA, 25 bp, Homo sapien
tgctctttccataagaagcctcacg

SEQ ID NO: 199643 - DNA, 25 bp, Homo sapien
tttccataagaagcctcacgtggga

SEQ ID NO: 199644 - DNA, 25 bp, Homo sapien
taagaagcctcacgtgggaaaagaa

SEQ ID NO: 199645 - DNA, 25 bp, Homo sapien
tccactgtcaaatggctttgaaaga

SEQ ID NO: 199646 - DNA, 25 bp, Homo sapien
ccactgtcaaatggctttgaaagac

SEQ ID NO: 199647 - DNA, 25 bp, Homo sapien
tatccactgtcaaatggctttgaaa

SEQ ID NO: 199648 - DNA, 25 bp, Homo sapien
ctatccactgtcaaatggctttgaa

SEQ ID NO: 199649 - DNA, 25 bp, Homo sapien
caagtaagatggaactctgattaac

SEQ ID NO: 199650 - DNA, 25 bp, Homo sapien
taacatattcctagaaagatcacag

SEQ ID NO: 199651 - DNA, 25 bp, Homo sapien
gatcacagagggtgcatgcaggcct

SEQ ID NO: 199652 - DNA, 25 bp, Homo sapien
gacagaagtagcatcagccaagtaa

SEQ ID NO: 199653 - DNA, 25 bp, Homo sapien
gtcaaaaaccgctcacttgggctgc

SEQ ID NO: 199654 - DNA, 25 bp, Homo sapien
tgtggccacttcaggataggacaga

SEQ ID NO: 199655 - DNA, 25 bp, Homo sapien
catggatgagtggttctacctctgc

SEQ ID NO: 199656 - DNA, 25 bp, Homo sapien
tcattgcctcttgatggtccatggc

SEQ ID NO: 199657 - DNA, 25 bp, Homo sapien
tttggggactttctctagaatacat

SEQ ID NO: 199658 - DNA, 25 bp, Homo sapien
tgggcagttctgtttggggactttc

SEQ ID NO: 199659 - DNA, 25 bp, Homo sapien
tctgtttggggactttctctagaat

SEQ ID NO: 199660 - DNA, 25 bp, Homo sapien
tgtttggggactttctctagaatac

SEQ ID NO: 199661 - DNA, 25 bp, Homo sapien
gattgtgcagacagtcctgccatca

SEQ ID NO: 199662 - DNA, 25 bp, Homo sapien
ggtctgcggtgagcgctttcacaca

SEQ ID NO: 199663 - DNA, 25 bp, Homo sapien
cagtctccggcaaggctgctttgtg

SEQ ID NO: 199664 - DNA, 25 bp, Homo sapien
catgagttatttggtgccactgtgg

SEQ ID NO: 199665 - DNA, 25 bp, Homo sapien
ggtgtctgctagttcatctagttct

SEQ ID NO: 199666 - DNA, 25 bp, Homo sapien
tctagttcttggcaacccattatct

SEQ ID NO: 199667 - DNA, 25 bp, Homo sapien
tcatctagttcttggcaacccatta

SEQ ID NO: 199668 - DNA, 25 bp, Homo sapien
ctaggtgtctgctagttcatctagt

SEQ ID NO: 199669 - DNA, 25 bp, Homo sapien
gaaccaccaactatctttgccactt

SEQ ID NO: 199670 - DNA, 25 bp, Homo sapien
tataaccagttcatcacagcagtat

SEQ ID NO: 199671 - DNA, 25 bp, Homo sapien
cagtattgctgtgtgccatctgctg

SEQ ID NO: 199672 - DNA, 25 bp, Homo sapien
attactttcacataagaaccaccaa

SEQ ID NO: 199673 - DNA, 25 bp, Homo sapien
gtcttgagatccattcaacaatagc

SEQ ID NO: 199674 - DNA, 25 bp, Homo sapien
tcaacaatagcatcagactgccttg

SEQ ID NO: 199675 - DNA, 25 bp, Homo sapien
gacagcctcatcatgcaataccaac

SEQ ID NO: 199676 - DNA, 25 bp, Homo sapien
actgaattagtaaacatggcccctg

SEQ ID NO: 199677 - DNA, 25 bp, Homo sapien
tcctgggtaaggataggcacttgcc

SEQ ID NO: 199678 - DNA, 25 bp, Homo sapien
tctcaatattgagattgctaaagcc

SEQ ID NO: 199679 - DNA, 25 bp, Homo sapien
ggataccaatgccactgggtcctgg

SEQ ID NO: 199680 - DNA, 25 bp, Homo sapien
gcctctgtcttacgctcctgtgttg

SEQ ID NO: 199681 - DNA, 25 bp, Homo sapien
taagaagctttatgttcctgtacag

SEQ ID NO: 199682 - DNA, 25 bp, Homo sapien
cctgtacagtgtctgttgcatcttt

SEQ ID NO: 199683 - DNA, 25 bp, Homo sapien
ctcggtctgggagcatgacactttg

SEQ ID NO: 199684 - DNA, 25 bp, Homo sapien
ggtctgggagcatgacactttgtct

SEQ ID NO: 199685 - DNA, 25 bp, Homo sapien
atctataaaatgttccacacaaaat

SEQ ID NO: 199686 - DNA, 25 bp, Homo sapien
gtcccctgtgacatctataaaatgt

SEQ ID NO: 199687 - DNA, 25 bp, Homo sapien
gacatctataaaatgttccacacaa

SEQ ID NO: 199688 - DNA, 25 bp, Homo sapien
tgacatctataaaatgttccacaca

SEQ ID NO: 199689 - DNA, 25 bp, Homo sapien
tcatgatgtcacagtgaagaggagg

SEQ ID NO: 199690 - DNA, 25 bp, Homo sapien
tgaagttgctggtgactctgctgtt

SEQ ID NO: 199691 - DNA, 25 bp, Homo sapien
ggtgactctgctgttgttgacagcc

SEQ ID NO: 199692 - DNA, 25 bp, Homo sapien
gaggaggaggagtttctctaagtca

SEQ ID NO: 199693 - DNA, 25 bp, Homo sapien
ggtgacgaatgccacttggtctctg

SEQ ID NO: 199694 - DNA, 25 bp, Homo sapien
tctgtaagcgggagtgtcaacccca

SEQ ID NO: 199695 - DNA, 25 bp, Homo sapien
tcagcacagaggagaggtgacgaat

SEQ ID NO: 199696 - DNA, 25 bp, Homo sapien
accatgaggcacagggcgtcgcctt

SEQ ID NO: 199697 - DNA, 25 bp, Homo sapien
cagaagaagttgtggttcttgagga

SEQ ID NO: 199698 - DNA, 25 bp, Homo sapien
ctagtgttggaggaatgcagagatt

SEQ ID NO: 199699 - DNA, 25 bp, Homo sapien
aagaatgctgaggaatagacacact

SEQ ID NO: 199700 - DNA, 25 bp, Homo sapien
gatttgcagtcctggacacctgtgg

SEQ ID NO: 199701 - DNA, 25 bp, Homo sapien
aagggctggctttgctggcacagct

SEQ ID NO: 199702 - DNA, 25 bp, Homo sapien
tgcagcccacacatgcactcaaggg

SEQ ID NO: 199703 - DNA, 25 bp, Homo sapien
ccacacatgcactcaagggctggct

SEQ ID NO: 199704 - DNA, 25 bp, Homo sapien
gctttgctggcacagctgatggctc

SEQ ID NO: 199705 - DNA, 25 bp, Homo sapien
actaggtacgactcctttatcttgg

SEQ ID NO: 199706 - DNA, 25 bp, Homo sapien
ggtacgactcctttatcttggacag

SEQ ID NO: 199707 - DNA, 25 bp, Homo sapien
ttatggactaggtacgactccttta

SEQ ID NO: 199708 - DNA, 25 bp, Homo sapien
gactcctttatcttggacagtcatc

SEQ ID NO: 199709 - DNA, 25 bp, Homo sapien
gactggttgaagtccaatggctcct

SEQ ID NO: 199710 - DNA, 25 bp, Homo sapien
tatggcccctagagagtatgctgct

SEQ ID NO: 199711 - DNA, 25 bp, Homo sapien
taggtccaggtactgaagacttttg

SEQ ID NO: 199712 - DNA, 25 bp, Homo sapien
tgaagtgtctggcattggatcaagg

SEQ ID NO: 199713 - DNA, 25 bp, Homo sapien
gttgctacatctgggtaaagacgct

SEQ ID NO: 199714 - DNA, 25 bp, Homo sapien
taaagacgcttgctgggcctttccc

SEQ ID NO: 199715 - DNA, 25 bp, Homo sapien
tctgggtaaagacgcttgctgggcc

SEQ ID NO: 199716 - DNA, 25 bp, Homo sapien
ccccatgtaaagttgctacatctgg

SEQ ID NO: 199717 - DNA, 25 bp, Homo sapien
cacagtctaatctgtgactatacta

SEQ ID NO: 199718 - DNA, 25 bp, Homo sapien
tgggtacagaattcacagtctaatc

SEQ ID NO: 199719 - DNA, 25 bp, Homo sapien
accatgcccggtccttgggtttgct

SEQ ID NO: 199720 - DNA, 25 bp, Homo sapien
tgatagtggtgatgggtacagaatt

SEQ ID NO: 199721 - DNA, 25 bp, Homo sapien
tcaggaccaacattgtaatatctgg

SEQ ID NO: 199722 - DNA, 25 bp, Homo sapien
tttcctgagtacacgagatttgtgg

SEQ ID NO: 199723 - DNA, 25 bp, Homo sapien
gcttttagccgctcaactgctgtga

SEQ ID NO: 199724 - DNA, 25 bp, Homo sapien
agccaaggttggagttttggtgtca

SEQ ID NO: 199725 - DNA, 25 bp, Homo sapien
actgtggccaccttatgaagtcctg

SEQ ID NO: 199726 - DNA, 25 bp, Homo sapien
cactgtggccaccttatgaagtcct

SEQ ID NO: 199727 - DNA, 25 bp, Homo sapien
tatgggtttccttagtttgatcatc

SEQ ID NO: 199728 - DNA, 25 bp, Homo sapien
tgagactttgtaatgtcaggcagct

SEQ ID NO: 199729 - DNA, 25 bp, Homo sapien
agctgtagaagtgatggcccccata

SEQ ID NO: 199730 - DNA, 25 bp, Homo sapien
aactaaggaggcaggttgtcatctt

SEQ ID NO: 199731 - DNA, 25 bp, Homo sapien
caagtagacagactgtcattggctc

SEQ ID NO: 199732 - DNA, 25 bp, Homo sapien
tagacagactgtcattggctctgcc

SEQ ID NO: 199733 - DNA, 25 bp, Homo sapien
gccaagtagacagactgtcattggc

SEQ ID NO: 199734 - DNA, 25 bp, Homo sapien
tgatggccaagtagacagactgtca

SEQ ID NO: 199735 - DNA, 25 bp, Homo sapien
ctctttcagtctgaatgacaagaca

SEQ ID NO: 199736 - DNA, 25 bp, Homo sapien
agctgaatttgccatagaagtcaac

SEQ ID NO: 199737 - DNA, 25 bp, Homo sapien
tgaatttgccatagaagtcaaccat

SEQ ID NO: 199738 - DNA, 25 bp, Homo sapien
atgacaagacaagttccaaaagagc

SEQ ID NO: 199739 - DNA, 25 bp, Homo sapien
tttctggatcctatgatcccggtga

SEQ ID NO: 199740 - DNA, 25 bp, Homo sapien
gtgatgtcccttggattcagtcccc

SEQ ID NO: 199741 - DNA, 25 bp, Homo sapien
ttcatttgaaggtttgataaccaaa

SEQ ID NO: 199742 - DNA, 25 bp, Homo sapien
ggatcctatgatcccggtgatgtcc

SEQ ID NO: 199743 - DNA, 25 bp, Homo sapien
tacactgtcatcaggcaaggccaaa

SEQ ID NO: 199744 - DNA, 25 bp, Homo sapien
gtcactcacttacgcataactttgg

SEQ ID NO: 199745 - DNA, 25 bp, Homo sapien
tcagctactaagagatgttggccac

SEQ ID NO: 199746 - DNA, 25 bp, Homo sapien
tgttggccacgtttagagcttaagt

SEQ ID NO: 199747 - DNA, 25 bp, Homo sapien
tagctgatagtgtctaaccagaggc

SEQ ID NO: 199748 - DNA, 25 bp, Homo sapien
ggaacacatccattatttgccccgt

SEQ ID NO: 199749 - DNA, 25 bp, Homo sapien
tagttgagaatagtgcaccgttggc

SEQ ID NO: 199750 - DNA, 25 bp, Homo sapien
tttgccccgtagagataaatggagt

SEQ ID NO: 199751 - DNA, 25 bp, Homo sapien
ggatgccagtgttataacatctcaa

SEQ ID NO: 199752 - DNA, 25 bp, Homo sapien
tgccagtgttataacatctcaaagt

SEQ ID NO: 199753 - DNA, 25 bp, Homo sapien
taggatgccagtgttataacatctc

SEQ ID NO: 199754 - DNA, 25 bp, Homo sapien
ctaggatgccagtgttataacatct

SEQ ID NO: 199755 - DNA, 25 bp, Homo sapien
agagcctggtgaaagcatgactgtg

SEQ ID NO: 199756 - DNA, 25 bp, Homo sapien
ctgattttatctacactgccaggca

SEQ ID NO: 199757 - DNA, 25 bp, Homo sapien
gtgggcagagcctggtgaaagcatg

SEQ ID NO: 199758 - DNA, 25 bp, Homo sapien
gattttatctacactgccaggcatg

SEQ ID NO: 199759 - DNA, 25 bp, Homo sapien
tgagccccaagtgtaaagcacaaga

SEQ ID NO: 199760 - DNA, 25 bp, Homo sapien
gccccaagtgtaaagcacaagaaaa

SEQ ID NO: 199761 - DNA, 25 bp, Homo sapien
aagcacaagaaaatcgcatcccatt

SEQ ID NO: 199762 - DNA, 25 bp, Homo sapien
aaaatcgcatcccatttgtcagaca

SEQ ID NO: 199763 - DNA, 25 bp, Homo sapien
ggctggttgccttcatactgcaatc

SEQ ID NO: 199764 - DNA, 25 bp, Homo sapien
ctgtgagacgtagcatcctccaggg

SEQ ID NO: 199765 - DNA, 25 bp, Homo sapien
tactgcaatcgcctctgtaatcttc

SEQ ID NO: 199766 - DNA, 25 bp, Homo sapien
tctgtaatcttcctgtgagacgtag

SEQ ID NO: 199767 - DNA, 25 bp, Homo sapien
aaaatttgatgcctagtaatggacc

SEQ ID NO: 199768 - DNA, 25 bp, Homo sapien
taatggaccacaggatttaatcagc

SEQ ID NO: 199769 - DNA, 25 bp, Homo sapien
gactgagatcactaaagcgacctta

SEQ ID NO: 199770 - DNA, 25 bp, Homo sapien
aaagcgaccttaccgtgctcctttg

SEQ ID NO: 199771 - DNA, 25 bp, Homo sapien
acaaagcaacaggtgggcacaatac

SEQ ID NO: 199772 - DNA, 25 bp, Homo sapien
cacaaagcaacaggtgggcacaata

SEQ ID NO: 199773 - DNA, 25 bp, Homo sapien
gcacaaagcaacaggtgggcacaat

SEQ ID NO: 199774 - DNA, 25 bp, Homo sapien
aagcacaaagcaacaggtgggcaca

SEQ ID NO: 199775 - DNA, 25 bp, Homo sapien
tagctgccaggtccatatagcaggc

SEQ ID NO: 199776 - DNA, 25 bp, Homo sapien
agaagggatttttagctgccaggtc

SEQ ID NO: 199777 - DNA, 25 bp, Homo sapien
tagcaggcacaagatggctgcccat

SEQ ID NO: 199778 - DNA, 25 bp, Homo sapien
caggtccatatagcaggcacaagat

SEQ ID NO: 199779 - DNA, 25 bp, Homo sapien
cattttggtttatccaggacccagg

SEQ ID NO: 199780 - DNA, 25 bp, Homo sapien
taagctgagctgtcccgtgtagatg

SEQ ID NO: 199781 - DNA, 25 bp, Homo sapien
caaattccttgcaactagagcgctc

SEQ ID NO: 199782 - DNA, 25 bp, Homo sapien
gagattacttcagagccttagccac

SEQ ID NO: 199783 - DNA, 25 bp, Homo sapien
ttgaaggagattgcctaccaaggac

SEQ ID NO: 199784 - DNA, 25 bp, Homo sapien
tgttacagttaggacgcccatgaag

SEQ ID NO: 199785 - DNA, 25 bp, Homo sapien
cattagaaggcccagacgatttcca

SEQ ID NO: 199786 - DNA, 25 bp, Homo sapien
tctttggtggtgactgaggcatcat

SEQ ID NO: 199787 - DNA, 25 bp, Homo sapien
gcatttcttactaggtctgtacatc

SEQ ID NO: 199788 - DNA, 25 bp, Homo sapien
aaaagcatttcttactaggtctgta

SEQ ID NO: 199789 - DNA, 25 bp, Homo sapien
taggtctgtacatcttgggtacagc

SEQ ID NO: 199790 - DNA, 25 bp, Homo sapien
tcttactaggtctgtacatcttggg

SEQ ID NO: 199791 - DNA, 25 bp, Homo sapien
tctttaataagctggtcacattgta

SEQ ID NO: 199792 - DNA, 25 bp, Homo sapien
ttctttaataagctggtcacattgt

SEQ ID NO: 199793 - DNA, 25 bp, Homo sapien
aaggcccttgagaggccccacttgg

SEQ ID NO: 199794 - DNA, 25 bp, Homo sapien
ggtgctctttgtcaaccacatcatg

SEQ ID NO: 199795 - DNA, 25 bp, Homo sapien
aatctcaactacctggctctcaagg

SEQ ID NO: 199796 - DNA, 25 bp, Homo sapien
cacttggctaatcccatcttgccat

SEQ ID NO: 199797 - DNA, 25 bp, Homo sapien
tgtctccttcagtgtgctgtgagtt

SEQ ID NO: 199798 - DNA, 25 bp, Homo sapien
ctccttcagtgtgctgtgagttcat

SEQ ID NO: 199799 - DNA, 25 bp, Homo sapien
tctccttcagtgtgctgtgagttca

SEQ ID NO: 199800 - DNA, 25 bp, Homo sapien
cctgtctccttcagtgtgctgtgag

SEQ ID NO: 199801 - DNA, 25 bp, Homo sapien
taattacagctaagtggtgcctcct

SEQ ID NO: 199802 - DNA, 25 bp, Homo sapien
tccgctaggtttcccgcaattggca

SEQ ID NO: 199803 - DNA, 25 bp, Homo sapien
tgctggtcagttctcagaaggcgcc

SEQ ID NO: 199804 - DNA, 25 bp, Homo sapien
aattggcaccgctatcactccatgg

SEQ ID NO: 199805 - DNA, 25 bp, Homo sapien
cgtctttcgtctgcagatgctcttt

SEQ ID NO: 199806 - DNA, 25 bp, Homo sapien
tttgcagccagaagccgaaggtcat

SEQ ID NO: 199807 - DNA, 25 bp, Homo sapien
gaagccgaaggtcattttgatctag

SEQ ID NO: 199808 - DNA, 25 bp, Homo sapien
cgcgtctttcgtctgcagatgctct

SEQ ID NO: 199809 - DNA, 25 bp, Homo sapien
gagtctcaatcacccacaataatgg

SEQ ID NO: 199810 - DNA, 25 bp, Homo sapien
caatgctgagttgtaaacgggaggt

SEQ ID NO: 199811 - DNA, 25 bp, Homo sapien
gtatatgtcttgtctgctagcagct

SEQ ID NO: 199812 - DNA, 25 bp, Homo sapien
tgctttttctgagcctaggacagga

SEQ ID NO: 199813 - DNA, 25 bp, Homo sapien
caagttggtcaaaggatttctgagg

SEQ ID NO: 199814 - DNA, 25 bp, Homo sapien
aatgagatttcccagccctctaagg

SEQ ID NO: 199815 - DNA, 25 bp, Homo sapien
gaaccctggcaagtctgaacctaaa

SEQ ID NO: 199816 - DNA, 25 bp, Homo sapien
gcaggatcagggcaaatctgtagga

SEQ ID NO: 199817 - DNA, 25 bp, Homo sapien
tccattcagaataggtcaaagaact

SEQ ID NO: 199818 - DNA, 25 bp, Homo sapien
ggacactccattcagaataggtcaa

SEQ ID NO: 199819 - DNA, 25 bp, Homo sapien
cattcagaataggtcaaagaactcc

SEQ ID NO: 199820 - DNA, 25 bp, Homo sapien
tgttggacactccattcagaatagg

SEQ ID NO: 199821 - DNA, 25 bp, Homo sapien
ttaagccacgattggcgaaggccgc

SEQ ID NO: 199822 - DNA, 25 bp, Homo sapien
tatttgagcgtcgacgtgcgccgac

SEQ ID NO: 199823 - DNA, 25 bp, Homo sapien
tccccagccggagccgcgattggtg

SEQ ID NO: 199824 - DNA, 25 bp, Homo sapien
ttgccggcggccaccgcttttaagc

SEQ ID NO: 199825 - DNA, 25 bp, Homo sapien
cgccctctcgccgcgtcgccggtgc

SEQ ID NO: 199826 - DNA, 25 bp, Homo sapien
tgcccgccctctcgccgcgtcgccg

SEQ ID NO: 199827 - DNA, 25 bp, Homo sapien
cgcctgcccgccctctcgccgcgtc

SEQ ID NO: 199828 - DNA, 25 bp, Homo sapien
cctgcccgccctctcgccgcgtcgc

SEQ ID NO: 199829 - DNA, 25 bp, Homo sapien
cgaggcccgggggaccagagcgaga

SEQ ID NO: 199830 - DNA, 25 bp, Homo sapien
gggaccagagcgagaagcggggacc

SEQ ID NO: 199831 - DNA, 25 bp, Homo sapien
gcccgggggaccagagcgagaagcg

SEQ ID NO: 199832 - DNA, 25 bp, Homo sapien
gaccagagcgagaagcggggaccat

SEQ ID NO: 199833 - DNA, 25 bp, Homo sapien
tctgtccccgatgctagataggcca

SEQ ID NO: 199834 - DNA, 25 bp, Homo sapien
gaatcccagtaatctgaaagaggtc

SEQ ID NO: 199835 - DNA, 25 bp, Homo sapien
gattttaagcactataaccctgtgg

SEQ ID NO: 199836 - DNA, 25 bp, Homo sapien
tgataaatatcactctacccagaag

SEQ ID NO: 199837 - DNA, 25 bp, Homo sapien
gctaagcatgctcgtcatttcgcag

SEQ ID NO: 199838 - DNA, 25 bp, Homo sapien
caaaaatgtgtattcgtgctaagca

SEQ ID NO: 199839 - DNA, 25 bp, Homo sapien
tgcctaccataatgaaatgccttgg

SEQ ID NO: 199840 - DNA, 25 bp, Homo sapien
catttcgcagttttagtgagggtaa

SEQ ID NO: 199841 - DNA, 25 bp, Homo sapien
gatatccattctacgttctacaact

SEQ ID NO: 199842 - DNA, 25 bp, Homo sapien
gaacatttcttctggtatggccgtg

SEQ ID NO: 199843 - DNA, 25 bp, Homo sapien
aaaggatagcttacttcagtgcttc

SEQ ID NO: 199844 - DNA, 25 bp, Homo sapien
gaagaaaggatgacaggtacacagc

SEQ ID NO: 199845 - DNA, 25 bp, Homo sapien
tggtgtcatctcaaaagataccagc

SEQ ID NO: 199846 - DNA, 25 bp, Homo sapien
gataccagcctataacaatttagtg

SEQ ID NO: 199847 - DNA, 25 bp, Homo sapien
taactactatttgaggcatatggta

SEQ ID NO: 199848 - DNA, 25 bp, Homo sapien
cagtctagtgtacttataagcattt

SEQ ID NO: 199849 - DNA, 25 bp, Homo sapien
ccatgctggctgaaaggttcgtaca

SEQ ID NO: 199850 - DNA, 25 bp, Homo sapien
taaagcagacagagcctacgtagat

SEQ ID NO: 199851 - DNA, 25 bp, Homo sapien
taagacagtaacagcctggctcaac

SEQ ID NO: 199852 - DNA, 25 bp, Homo sapien
taatcagcaggaagtacagactgtc

SEQ ID NO: 199853 - DNA, 25 bp, Homo sapien
tgttctagagatttaccaccattgc

SEQ ID NO: 199854 - DNA, 25 bp, Homo sapien
tgcgattgctgcacatagaggagct

SEQ ID NO: 199855 - DNA, 25 bp, Homo sapien
gcaattattgctgatccaaagacag

SEQ ID NO: 199856 - DNA, 25 bp, Homo sapien
agttgggaaccatacacttctggca

SEQ ID NO: 199857 - DNA, 25 bp, Homo sapien
tcttggccagaaggaatccatggca

SEQ ID NO: 199858 - DNA, 25 bp, Homo sapien
tgctcaggaacgtctaatggccaat

SEQ ID NO: 199859 - DNA, 25 bp, Homo sapien
tcactgttctttagggtccaggttc

SEQ ID NO: 199860 - DNA, 25 bp, Homo sapien
ggtacttctatagaggcactacagg

SEQ ID NO: 199861 - DNA, 25 bp, Homo sapien
aaggagcatcctaaagcatactttt

SEQ ID NO: 199862 - DNA, 25 bp, Homo sapien
gcagttatcccgtagaggtgagatc

SEQ ID NO: 199863 - DNA, 25 bp, Homo sapien
gttctgggagatactcatcagtaaa

SEQ ID NO: 199864 - DNA, 25 bp, Homo sapien
cagtaggggtagactgcagttatcc

SEQ ID NO: 199865 - DNA, 25 bp, Homo sapien
gatactcatcagtaaactggccact

SEQ ID NO: 199866 - DNA, 25 bp, Homo sapien
caagtggtgtgtcctctggaacagt

SEQ ID NO: 199867 - DNA, 25 bp, Homo sapien
tagataaagaagtcagtcagccaca

SEQ ID NO: 199868 - DNA, 25 bp, Homo sapien
tgaaggatcttatctgccaatgagg

SEQ ID NO: 199869 - DNA, 25 bp, Homo sapien
tagctcatggtatcaagggtagtct

SEQ ID NO: 199870 - DNA, 25 bp, Homo sapien
tctgtgtggtagaagtgatctgcat

SEQ ID NO: 199871 - DNA, 25 bp, Homo sapien
tgttttgaatgacacgccgtccagt

SEQ ID NO: 199872 - DNA, 25 bp, Homo sapien
tctgcatagcttacgatgctgaagg

SEQ ID NO: 199873 - DNA, 25 bp, Homo sapien
tccagttccatcaggtagtgtacac

SEQ ID NO: 199874 - DNA, 25 bp, Homo sapien
aaaggttaagccattgggcaatcca

SEQ ID NO: 199875 - DNA, 25 bp, Homo sapien
aagatgacgtttcaattttaggagc

SEQ ID NO: 199876 - DNA, 25 bp, Homo sapien
tctgtattgatcagaattcttctgt

SEQ ID NO: 199877 - DNA, 25 bp, Homo sapien
gttttctccatctaaagatgacgtt

SEQ ID NO: 199878 - DNA, 25 bp, Homo sapien
tgtaaaagaatagccatgtagcctg

SEQ ID NO: 199879 - DNA, 25 bp, Homo sapien
gtaaaagaatagccatgtagcctgt

SEQ ID NO: 199880 - DNA, 25 bp, Homo sapien
aatcctgtatgtcacatttgatgac

SEQ ID NO: 199881 - DNA, 25 bp, Homo sapien
aacaaatcctgtatgtcacatttga

SEQ ID NO: 199882 - DNA, 25 bp, Homo sapien
cctgtatgtcacatttgatgacctt

SEQ ID NO: 199883 - DNA, 25 bp, Homo sapien
tatgtcacatttgatgaccttagca

SEQ ID NO: 199884 - DNA, 25 bp, Homo sapien
tttaaaacccaagggcttcacatca

SEQ ID NO: 199885 - DNA, 25 bp, Homo sapien
ctcggattggatccacagcgatggc

SEQ ID NO: 199886 - DNA, 25 bp, Homo sapien
cctcggattggatccacagcgatgg

SEQ ID NO: 199887 - DNA, 25 bp, Homo sapien
tcggattggatccacagcgatggca

SEQ ID NO: 199888 - DNA, 25 bp, Homo sapien
cggattggatccacagcgatggcac

SEQ ID NO: 199889 - DNA, 25 bp, Homo sapien
gtgtagaagaggaccttgcgctcag

SEQ ID NO: 199890 - DNA, 25 bp, Homo sapien
tgtgtagaagaggaccttgcgctca

SEQ ID NO: 199891 - DNA, 25 bp, Homo sapien
atctgtgtagaagaggaccttgcgc

SEQ ID NO: 199892 - DNA, 25 bp, Homo sapien
tctgtgtagaagaggaccttgcgct

SEQ ID NO: 199893 - DNA, 25 bp, Homo sapien
tgttctgcggatgtggtctatggca

SEQ ID NO: 199894 - DNA, 25 bp, Homo sapien
tccagcagggcgctctctatcttat

SEQ ID NO: 199895 - DNA, 25 bp, Homo sapien
tctatcttatccaggacactgtccg

SEQ ID NO: 199896 - DNA, 25 bp, Homo sapien
aggacactgtccgtccagtacattg

SEQ ID NO: 199897 - DNA, 25 bp, Homo sapien
ctgattgtccgtccagcaacatctg

SEQ ID NO: 199898 - DNA, 25 bp, Homo sapien
acggctgattgtccgtccagcaaca

SEQ ID NO: 199899 - DNA, 25 bp, Homo sapien
gaccagcacggctgattgtccgtcc

SEQ ID NO: 199900 - DNA, 25 bp, Homo sapien
gttccagaccagcacggctgattgt

SEQ ID NO: 199901 - DNA, 25 bp, Homo sapien
tcgtaatcaattcccacgattatgg

SEQ ID NO: 199902 - DNA, 25 bp, Homo sapien
aatcaattcccacgattatggagcc

SEQ ID NO: 199903 - DNA, 25 bp, Homo sapien
ggcagtcgtaatcaattcccacgat

SEQ ID NO: 199904 - DNA, 25 bp, Homo sapien
cctctcccggcagtcgtaatcaatt

SEQ ID NO: 199905 - DNA, 25 bp, Homo sapien
tgggcatttaacctctatgcgtttg

SEQ ID NO: 199906 - DNA, 25 bp, Homo sapien
tctaggctcagccacttagtagcca

SEQ ID NO: 199907 - DNA, 25 bp, Homo sapien
ggcactcgggtgaaatctaggctca

SEQ ID NO: 199908 - DNA, 25 bp, Homo sapien
tagtgtacctgcctcatatggttgc

SEQ ID NO: 199909 - DNA, 25 bp, Homo sapien
gaatgagatctttcctctacctgaa

SEQ ID NO: 199910 - DNA, 25 bp, Homo sapien
ccctgactcttaggaggcaagatgt

SEQ ID NO: 199911 - DNA, 25 bp, Homo sapien
tactaaagaaagtgtagtcaggcac

SEQ ID NO: 199912 - DNA, 25 bp, Homo sapien
aatcagccccttcagtaattagagg

SEQ ID NO: 199913 - DNA, 25 bp, Homo sapien
cattaacccgggaatcatgggattc

SEQ ID NO: 199914 - DNA, 25 bp, Homo sapien
gccgtactattctttctcagggatg

SEQ ID NO: 199915 - DNA, 25 bp, Homo sapien
ccctgggagcgtagtcagccaagaa

SEQ ID NO: 199916 - DNA, 25 bp, Homo sapien
ggttagctggctgtccctgaggtca

SEQ ID NO: 199917 - DNA, 25 bp, Homo sapien
tgccattgaggggtaagtagccaat

SEQ ID NO: 199918 - DNA, 25 bp, Homo sapien
tgcccacagatggaggggtcacatc

SEQ ID NO: 199919 - DNA, 25 bp, Homo sapien
catgggtggagcgacggtgggtata

SEQ ID NO: 199920 - DNA, 25 bp, Homo sapien
gggcgtgggccggaccatgggtgga

SEQ ID NO: 199921 - DNA, 25 bp, Homo sapien
ggagcgggggcggccaggtgcttac

SEQ ID NO: 199922 - DNA, 25 bp, Homo sapien
aggggagcgggggcggccaggtgct

SEQ ID NO: 199923 - DNA, 25 bp, Homo sapien
tgaggggagcgggggcggccaggtg

SEQ ID NO: 199924 - DNA, 25 bp, Homo sapien
ttagatacagctgaggggagcgggg

SEQ ID NO: 199925 - DNA, 25 bp, Homo sapien
cctccagcgctcacagatggtcggg

SEQ ID NO: 199926 - DNA, 25 bp, Homo sapien
cagaagtcgctctttccgtggcact

SEQ ID NO: 199927 - DNA, 25 bp, Homo sapien
ggggtgccaccgtagtgctccagca

SEQ ID NO: 199928 - DNA, 25 bp, Homo sapien
ggtcatcgcactggggcacgtactg

SEQ ID NO: 199929 - DNA, 25 bp, Homo sapien
acagtgccattgaggctttgtccaa

SEQ ID NO: 199930 - DNA, 25 bp, Homo sapien
agtgccattgaggctttgtccaaaa

SEQ ID NO: 199931 - DNA, 25 bp, Homo sapien
cacagtgccattgaggctttgtcca

SEQ ID NO: 199932 - DNA, 25 bp, Homo sapien
cagtgccattgaggctttgtccaaa

SEQ ID NO: 199933 - DNA, 25 bp, Homo sapien
ggaacttcatgaccatcagggtcca

SEQ ID NO: 199934 - DNA, 25 bp, Homo sapien
ccagtgctgccatgacactgtaggg

SEQ ID NO: 199935 - DNA, 25 bp, Homo sapien
ccccagggtaggcatactgggcctg

SEQ ID NO: 199936 - DNA, 25 bp, Homo sapien
aagttgccctgctcgtcgcattggg

SEQ ID NO: 199937 - DNA, 25 bp, Homo sapien
cagggtgtcaggcttgaggtggagt

SEQ ID NO: 199938 - DNA, 25 bp, Homo sapien
tcacagggtgtcaggcttgaggtgg

SEQ ID NO: 199939 - DNA, 25 bp, Homo sapien
ttgttcacagggtgtcaggcttgag

SEQ ID NO: 199940 - DNA, 25 bp, Homo sapien
ctgttgttcacagggtgtcaggctt

SEQ ID NO: 199941 - DNA, 25 bp, Homo sapien
gcttgatctcaacacttcatccaaa

SEQ ID NO: 199942 - DNA, 25 bp, Homo sapien
atcactagggcagttaaccagaggg

SEQ ID NO: 199943 - DNA, 25 bp, Homo sapien
aaggctctgcttaataagcttgatc

SEQ ID NO: 199944 - DNA, 25 bp, Homo sapien
aattgcactcatcaaggtcaagcag

SEQ ID NO: 199945 - DNA, 25 bp, Homo sapien
tatgaggtaggacgatgggtgggtc

SEQ ID NO: 199946 - DNA, 25 bp, Homo sapien
tgggtgggtcgtctcccgcaggcct

SEQ ID NO: 199947 - DNA, 25 bp, Homo sapien
ctccagaaatgttacgaatcagtga

SEQ ID NO: 199948 - DNA, 25 bp, Homo sapien
tacgaatcagtgaactatcagtaaa

SEQ ID NO: 199949 - DNA, 25 bp, Homo sapien
tccccataatatccgggttgacaac

SEQ ID NO: 199950 - DNA, 25 bp, Homo sapien
caggagtattgtagcaggtagctgc

SEQ ID NO: 199951 - DNA, 25 bp, Homo sapien
aaggaaccaggagtattgtagcagg

SEQ ID NO: 199952 - DNA, 25 bp, Homo sapien
tatccgggttgacaacggcaggaga

SEQ ID NO: 199953 - DNA, 25 bp, Homo sapien
tgtgcgactgcatgggctttggata

SEQ ID NO: 199954 - DNA, 25 bp, Homo sapien
tggatatgtggatcaacacccagtg

SEQ ID NO: 199955 - DNA, 25 bp, Homo sapien
acaatctgtgcgactgcatgggctt

SEQ ID NO: 199956 - DNA, 25 bp, Homo sapien
ttcagaagacctttgagcatgagca

SEQ ID NO: 199957 - DNA, 25 bp, Homo sapien
ggcaccatctccctgtaacattcgt

SEQ ID NO: 199958 - DNA, 25 bp, Homo sapien
aggcaggcacagctgaacgtgctgc

SEQ ID NO: 199959 - DNA, 25 bp, Homo sapien
tgcactggtgcccatcgccggcata

SEQ ID NO: 199960 - DNA, 25 bp, Homo sapien
atcgccggcataaccaggcaggcag

SEQ ID NO: 199961 - DNA, 25 bp, Homo sapien
ccatggtgaacacaccgggcctgcc

SEQ ID NO: 199962 - DNA, 25 bp, Homo sapien
tctatctaaagagctggaggtgttt

SEQ ID NO: 199963 - DNA, 25 bp, Homo sapien
tacagaaggagctctttagccagtc

SEQ ID NO: 199964 - DNA, 25 bp, Homo sapien
tgatccatttttaggtctgtagtat

SEQ ID NO: 199965 - DNA, 25 bp, Homo sapien
catgcatcagtgaattataaatcca

SEQ ID NO: 199966 - DNA, 25 bp, Homo sapien
ttaaagagcaccattttggccacac

SEQ ID NO: 199967 - DNA, 25 bp, Homo sapien
cactgacagattaaagagcaagatt

SEQ ID NO: 199968 - DNA, 25 bp, Homo sapien
aacactgacagattaaagagcaaga

SEQ ID NO: 199969 - DNA, 25 bp, Homo sapien
taaagagcaagattaaagagcacca

SEQ ID NO: 199970 - DNA, 25 bp, Homo sapien
caagtatgccggtcatctgcaaact

SEQ ID NO: 199971 - DNA, 25 bp, Homo sapien
agatgcaagtatgccggtcatctgc

SEQ ID NO: 199972 - DNA, 25 bp, Homo sapien
atgcaagtatgccggtcatctgcaa

SEQ ID NO: 199973 - DNA, 25 bp, Homo sapien
actcataaccactccggcactcaca

SEQ ID NO: 199974 - DNA, 25 bp, Homo sapien
ggcaagttgatacatacagagttgg

SEQ ID NO: 199975 - DNA, 25 bp, Homo sapien
cagagttggggccacagcgatgaaa

SEQ ID NO: 199976 - DNA, 25 bp, Homo sapien
tccaggcaagttgatacatacagag

SEQ ID NO: 199977 - DNA, 25 bp, Homo sapien
gggccacagcgatgaaagccagttg

SEQ ID NO: 199978 - DNA, 25 bp, Homo sapien
tacccagatgcgcactcacaggtgt

SEQ ID NO: 199979 - DNA, 25 bp, Homo sapien
catcatagcaaggattccccggagt

SEQ ID NO: 199980 - DNA, 25 bp, Homo sapien
gatggcaccgtgctgttgtgtcaca

SEQ ID NO: 199981 - DNA, 25 bp, Homo sapien
acaggtgtaatctacacctgtccct

SEQ ID NO: 199982 - DNA, 25 bp, Homo sapien
gcgctgtttcacatgaattccaaca

SEQ ID NO: 199983 - DNA, 25 bp, Homo sapien
tgggaaagacaccccagttctgcat

SEQ ID NO: 199984 - DNA, 25 bp, Homo sapien
tgaattccaacaactatcgttccct

SEQ ID NO: 199985 - DNA, 25 bp, Homo sapien
accacacccacatcaggtgtggaca

SEQ ID NO: 199986 - DNA, 25 bp, Homo sapien
cattatacaaggcaaagacccggtc

SEQ ID NO: 199987 - DNA, 25 bp, Homo sapien
tctctggaacttgtagaggtcacag

SEQ ID NO: 199988 - DNA, 25 bp, Homo sapien
caaaagtcagagagtagtctctgga

SEQ ID NO: 199989 - DNA, 25 bp, Homo sapien
gaccgggccaatttgattggtcaca

SEQ ID NO: 199990 - DNA, 25 bp, Homo sapien
tctcccgggtagaatgtaacttcca

SEQ ID NO: 199991 - DNA, 25 bp, Homo sapien
tagtggtacagctccttgtagggag

SEQ ID NO: 199992 - DNA, 25 bp, Homo sapien
cctcagcagtttgagtgatacgaac

SEQ ID NO: 199993 - DNA, 25 bp, Homo sapien
tttgctgagacgtaaggcacctggc

SEQ ID NO: 199994 - DNA, 25 bp, Homo sapien
catcattgcccacgatatacgcatg

SEQ ID NO: 199995 - DNA, 25 bp, Homo sapien
gctgatggccgtgtaggctctgcca

SEQ ID NO: 199996 - DNA, 25 bp, Homo sapien
aagtgcacgggtgtatggcccacgt

SEQ ID NO: 199997 - DNA, 25 bp, Homo sapien
gatatacgcatgcaggtccacatca

SEQ ID NO: 199998 - DNA, 25 bp, Homo sapien
aatccagttaggcttggacgtcatc

SEQ ID NO: 199999 - DNA, 25 bp, Homo sapien
caaatccagttaggcttggacgtca

SEQ ID NO: 200000 - DNA, 25 bp, Homo sapien
cagcaaatccagttaggcttggacg

SEQ ID NO: 200001 - DNA, 25 bp, Homo sapien
taaaagacagcaaatccagttaggc

SEQ ID NO: 200002 - DNA, 25 bp, Homo sapien
cgtgcagaaggcatgccgggagcat

SEQ ID NO: 200003 - DNA, 25 bp, Homo sapien
gcagaagccagtggcatagtccgtg

SEQ ID NO: 200004 - DNA, 25 bp, Homo sapien
taaaacttggattggcagtggcagc

SEQ ID NO: 200005 - DNA, 25 bp, Homo sapien
tgtctgtggttgtgttcacaggttt

SEQ ID NO: 200006 - DNA, 25 bp, Homo sapien
tgatagaaggcttgggatacaacaa

SEQ ID NO: 200007 - DNA, 25 bp, Homo sapien
gctaggtgttgctcatcaatgtcgt

SEQ ID NO: 200008 - DNA, 25 bp, Homo sapien
aagccttggatttctgagctaggtg

SEQ ID NO: 200009 - DNA, 25 bp, Homo sapien
taatctgaccaattggcagctcctg

SEQ ID NO: 200010 - DNA, 25 bp, Homo sapien
tccactagcaccgagtcagagacag

SEQ ID NO: 200011 - DNA, 25 bp, Homo sapien
cagagacaggtacacggcaggtgct

SEQ ID NO: 200012 - DNA, 25 bp, Homo sapien
ttgacttgacaacaaaacgaccaga

SEQ ID NO: 200013 - DNA, 25 bp, Homo sapien
tgggtaactttttgacttgacaaca

SEQ ID NO: 200014 - DNA, 25 bp, Homo sapien
tcatcccagggctcaacttggcctt

SEQ ID NO: 200015 - DNA, 25 bp, Homo sapien
tgtgacctgaagcagggtaacttcg

SEQ ID NO: 200016 - DNA, 25 bp, Homo sapien
gaacctatgttgtcttccagtccca

SEQ ID NO: 200017 - DNA, 25 bp, Homo sapien
tcatacgtccctcgacttaagggtg

SEQ ID NO: 200018 - DNA, 25 bp, Homo sapien
tcagaatctggaggggagatcctac

SEQ ID NO: 200019 - DNA, 25 bp, Homo sapien
tggccaataagtaggtgttggatgc

SEQ ID NO: 200020 - DNA, 25 bp, Homo sapien
ctgtttcaggatagaatggccaata

SEQ ID NO: 200021 - DNA, 25 bp, Homo sapien
caagggggaggacagatcagaatct

SEQ ID NO: 200022 - DNA, 25 bp, Homo sapien
tctaaaggctttgtatccactttgg

SEQ ID NO: 200023 - DNA, 25 bp, Homo sapien
aaggctttgtatccactttggattg

SEQ ID NO: 200024 - DNA, 25 bp, Homo sapien
cctctaaaggctttgtatccacttt

SEQ ID NO: 200025 - DNA, 25 bp, Homo sapien
gctttgtatccactttggattggaa

SEQ ID NO: 200026 - DNA, 25 bp, Homo sapien
cccggaaggtattcagcttcctcct

SEQ ID NO: 200027 - DNA, 25 bp, Homo sapien
cagcggaaaggtctccaactgcagc

SEQ ID NO: 200028 - DNA, 25 bp, Homo sapien
tggttcacccggaaggtattcagct

SEQ ID NO: 200029 - DNA, 25 bp, Homo sapien
tgctgccgatatggaaagcccacac

SEQ ID NO: 200030 - DNA, 25 bp, Homo sapien
caggccgttggcaggataaagaaag

SEQ ID NO: 200031 - DNA, 25 bp, Homo sapien
agaaagagggcgtagctatcagacc

SEQ ID NO: 200032 - DNA, 25 bp, Homo sapien
gctgaagctggacattgtaagactc

SEQ ID NO: 200033 - DNA, 25 bp, Homo sapien
tgctagtcaagctgaaatatggtcc

SEQ ID NO: 200034 - DNA, 25 bp, Homo sapien
tccaaggtcaggttcagcgcaagag

SEQ ID NO: 200035 - DNA, 25 bp, Homo sapien
gggtcgctgccccagaatttaagcc

SEQ ID NO: 200036 - DNA, 25 bp, Homo sapien
gagtaggctcagaaacaactccgag

SEQ ID NO: 200037 - DNA, 25 bp, Homo sapien
ttttcctcaagggagtgaccacctg

SEQ ID NO: 200038 - DNA, 25 bp, Homo sapien
tcgtaagcgcctacctgctcccagg

SEQ ID NO: 200039 - DNA, 25 bp, Homo sapien
tgggtgggggtaaagcgcgcagagc

SEQ ID NO: 200040 - DNA, 25 bp, Homo sapien
gccccgcgcttgacctcctcgtaag

SEQ ID NO: 200041 - DNA, 25 bp, Homo sapien
gaagccagcgcgcacatagcgggcg

SEQ ID NO: 200042 - DNA, 25 bp, Homo sapien
tctgccgtggctcgtgtcgatgtcc

SEQ ID NO: 200043 - DNA, 25 bp, Homo sapien
agtggagatgatgccgttggtgccc

SEQ ID NO: 200044 - DNA, 25 bp, Homo sapien
tagtccacatactgcgtttccctgg

SEQ ID NO: 200045 - DNA, 25 bp, Homo sapien
tcgtgtcgatgtccgccagaaaagg

SEQ ID NO: 200046 - DNA, 25 bp, Homo sapien
gcaggcagcggcatcgctctctggc

SEQ ID NO: 200047 - DNA, 25 bp, Homo sapien
ctctggccgggtaccaccgcaaggg

SEQ ID NO: 200048 - DNA, 25 bp, Homo sapien
cgggtaccaccgcaagggtgctggg

SEQ ID NO: 200049 - DNA, 25 bp, Homo sapien
ggcatcgctctctggccgggtacca

SEQ ID NO: 200050 - DNA, 25 bp, Homo sapien
tttcgtcgtcgccttcctgcaggag

SEQ ID NO: 200051 - DNA, 25 bp, Homo sapien
tccccgtgtgggaagagctcgtctg

SEQ ID NO: 200052 - DNA, 25 bp, Homo sapien
tgaatcgggcttcgtagaagtgcag

SEQ ID NO: 200053 - DNA, 25 bp, Homo sapien
tcaccacggctgagctttcgtcgtc

SEQ ID NO: 200054 - DNA, 25 bp, Homo sapien
gcagtagcactggtaacgacgacag

SEQ ID NO: 200055 - DNA, 25 bp, Homo sapien
tggtaacgacgacagcaccggccgc

SEQ ID NO: 200056 - DNA, 25 bp, Homo sapien
actggtaacgacgacagcaccggcc

SEQ ID NO: 200057 - DNA, 25 bp, Homo sapien
tagcactggtaacgacgacagcacc

SEQ ID NO: 200058 - DNA, 25 bp, Homo sapien
agcaagctaattggctgaggccctc

SEQ ID NO: 200059 - DNA, 25 bp, Homo sapien
agaaagttcggcagtggccaccaca

SEQ ID NO: 200060 - DNA, 25 bp, Homo sapien
agcctcgaacctggatctccgcggg

SEQ ID NO: 200061 - DNA, 25 bp, Homo sapien
caatcaccggctctgagaaagttcg

SEQ ID NO: 200062 - DNA, 25 bp, Homo sapien
tggcggggtaaaagctcctggccag

SEQ ID NO: 200063 - DNA, 25 bp, Homo sapien
gctggcggggtaaaagctcctggcc

SEQ ID NO: 200064 - DNA, 25 bp, Homo sapien
ctggcggggtaaaagctcctggcca

SEQ ID NO: 200065 - DNA, 25 bp, Homo sapien
gagatgagctcagcgcaaagggaac

SEQ ID NO: 200066 - DNA, 25 bp, Homo sapien
gcctggccatcggtccgaaaagcaa

SEQ ID NO: 200067 - DNA, 25 bp, Homo sapien
ggacattgtcgtggtcccctcggcc

SEQ ID NO: 200068 - DNA, 25 bp, Homo sapien
ggttgcggtatgagctttgctccct

SEQ ID NO: 200069 - DNA, 25 bp, Homo sapien
tttgtacgaaggcagagggctgact

SEQ ID NO: 200070 - DNA, 25 bp, Homo sapien
aaggccggccgctagggaagacttg

SEQ ID NO: 200071 - DNA, 25 bp, Homo sapien
gagggctgactcctaagttctgtcc

SEQ ID NO: 200072 - DNA, 25 bp, Homo sapien
tagggaagacttggccaccctctgg

SEQ ID NO: 200073 - DNA, 25 bp, Homo sapien
tgaaatactactgtgtgtgatccgc

SEQ ID NO: 200074 - DNA, 25 bp, Homo sapien
actgtgtgtgatccgctccgtttgg

SEQ ID NO: 200075 - DNA, 25 bp, Homo sapien
aatactactgtgtgtgatccgctcc

SEQ ID NO: 200076 - DNA, 25 bp, Homo sapien
tactactgtgtgtgatccgctccgt

SEQ ID NO: 200077 - DNA, 25 bp, Homo sapien
gggaagaccctgatctcttgcccat

SEQ ID NO: 200078 - DNA, 25 bp, Homo sapien
caggcagaaaggggcgagtcgcggg

SEQ ID NO: 200079 - DNA, 25 bp, Homo sapien
gggatgggaagaccctgatctcttg

SEQ ID NO: 200080 - DNA, 25 bp, Homo sapien
ggggcgagtcgcggggatgggaaga

SEQ ID NO: 200081 - DNA, 25 bp, Homo sapien
tggaaaccgcacaacctcgaaacca

SEQ ID NO: 200082 - DNA, 25 bp, Homo sapien
gctgctccgcaggactggaaaccgc

SEQ ID NO: 200083 - DNA, 25 bp, Homo sapien
cgcggccacggaggcggtaacctga

SEQ ID NO: 200084 - DNA, 25 bp, Homo sapien
tgctgcggccgtcggagatgccctc

SEQ ID NO: 200085 - DNA, 25 bp, Homo sapien
ctgcgcaggagaaggggaaccccat

SEQ ID NO: 200086 - DNA, 25 bp, Homo sapien
tgcgcaggagaaggggaaccccatc

SEQ ID NO: 200087 - DNA, 25 bp, Homo sapien
gagaaggggaaccccatccaccata

SEQ ID NO: 200088 - DNA, 25 bp, Homo sapien
gcaggagaaggggaaccccatccac

SEQ ID NO: 200089 - DNA, 25 bp, Homo sapien
ttggttgtgaagttaggtgccttgg

SEQ ID NO: 200090 - DNA, 25 bp, Homo sapien
tgtgaagttaggtgccttggtctct

SEQ ID NO: 200091 - DNA, 25 bp, Homo sapien
ttgtgaagttaggtgccttggtctc

SEQ ID NO: 200092 - DNA, 25 bp, Homo sapien
ggttgtgaagttaggtgccttggtc

SEQ ID NO: 200093 - DNA, 25 bp, Homo sapien
gacacagtattccttgtaaggtgga

SEQ ID NO: 200094 - DNA, 25 bp, Homo sapien
tgtcagacatcttggaagtttgagc

SEQ ID NO: 200095 - DNA, 25 bp, Homo sapien
gctttgggtccaagcttagctgcct

SEQ ID NO: 200096 - DNA, 25 bp, Homo sapien
tggaagcatgctaaagtgggaacct

SEQ ID NO: 200097 - DNA, 25 bp, Homo sapien
taggagaaggggctatctacaggcc

SEQ ID NO: 200098 - DNA, 25 bp, Homo sapien
ctccagagattccaatggtgttagg

SEQ ID NO: 200099 - DNA, 25 bp, Homo sapien
gaagagatgtataggtcgaggtata

SEQ ID NO: 200100 - DNA, 25 bp, Homo sapien
gttacaaagcatacagatgaaagaa

SEQ ID NO: 200101 - DNA, 25 bp, Homo sapien
gtcagttcgctgctattcccatggg

SEQ ID NO: 200102 - DNA, 25 bp, Homo sapien
aacacacttgttggctatgatctgg

SEQ ID NO: 200103 - DNA, 25 bp, Homo sapien
gctctccgggtaacatacttctaca

SEQ ID NO: 200104 - DNA, 25 bp, Homo sapien
gatgaggaatttgatgctctccggg

SEQ ID NO: 200105 - DNA, 25 bp, Homo sapien
atttatatttgaagcaacagccaag

SEQ ID NO: 200106 - DNA, 25 bp, Homo sapien
tttatatttgaagcaacagccaagg

SEQ ID NO: 200107 - DNA, 25 bp, Homo sapien
tttgcttatttgagtaatcttactg

SEQ ID NO: 200108 - DNA, 25 bp, Homo sapien
actgttactagttattctgatgttc

SEQ ID NO: 200109 - DNA, 25 bp, Homo sapien
cgaggatgcagtgaatccagatcgt

SEQ ID NO: 200110 - DNA, 25 bp, Homo sapien
gtggtggtgtggcgcctgttgtccc

SEQ ID NO: 200111 - DNA, 25 bp, Homo sapien
tgtggtggtgtggcgcctgttgtcc

SEQ ID NO: 200112 - DNA, 25 bp, Homo sapien
ggaggtcgaggatgcagtgaatcca

SEQ ID NO: 200113 - DNA, 25 bp, Homo sapien
tcttcttatgcttcaagtcatagct

SEQ ID NO: 200114 - DNA, 25 bp, Homo sapien
cattgactgtgaactcttagatcac

SEQ ID NO: 200115 - DNA, 25 bp, Homo sapien
tagctcaatgcttcgccctccttga

SEQ ID NO: 200116 - DNA, 25 bp, Homo sapien
gtgttctaggatccagcattgactg

SEQ ID NO: 200117 - DNA, 25 bp, Homo sapien
gtggccatagcccatcttttgaact

SEQ ID NO: 200118 - DNA, 25 bp, Homo sapien
ctgtggccatagcccatcttttgaa

SEQ ID NO: 200119 - DNA, 25 bp, Homo sapien
ggccatagcccatcttttgaactca

SEQ ID NO: 200120 - DNA, 25 bp, Homo sapien
gccatagcccatcttttgaactcat

SEQ ID NO: 200121 - DNA, 25 bp, Homo sapien
gtcccgccgatcctggccccatttg

SEQ ID NO: 200122 - DNA, 25 bp, Homo sapien
agtggtcccgccgatcctggcccca

SEQ ID NO: 200123 - DNA, 25 bp, Homo sapien
tcaggcaagtggtcccgccgatcct

SEQ ID NO: 200124 - DNA, 25 bp, Homo sapien
caggcaagtggtcccgccgatcctg

SEQ ID NO: 200125 - DNA, 25 bp, Homo sapien
cactcagccctactggtttaaatcc

SEQ ID NO: 200126 - DNA, 25 bp, Homo sapien
taaatcctacctctctaactgtcac

SEQ ID NO: 200127 - DNA, 25 bp, Homo sapien
ttctgccacatttgtcatgttggac

SEQ ID NO: 200128 - DNA, 25 bp, Homo sapien
tctgccacatttgtcatgttggact

SEQ ID NO: 200129 - DNA, 25 bp, Homo sapien
gtagcaggccccaatctgttgtcag

SEQ ID NO: 200130 - DNA, 25 bp, Homo sapien
ttagaacccatagtatcaaaggagg

SEQ ID NO: 200131 - DNA, 25 bp, Homo sapien
taagaaggtccctgaagagatgtgg

SEQ ID NO: 200132 - DNA, 25 bp, Homo sapien
tattcactttgaccaggtggaagga

SEQ ID NO: 200133 - DNA, 25 bp, Homo sapien
gaggctgacagggaccgccgcccac

SEQ ID NO: 200134 - DNA, 25 bp, Homo sapien
accccggctcggctttgccggcagt

SEQ ID NO: 200135 - DNA, 25 bp, Homo sapien
agtcagctgtcttccacggcttctt

SEQ ID NO: 200136 - DNA, 25 bp, Homo sapien
gctttgccggcagtgagtcagctgt

SEQ ID NO: 200137 - DNA, 25 bp, Homo sapien
tccagttccagaaggagtgcgggcc

SEQ ID NO: 200138 - DNA, 25 bp, Homo sapien
gagcaacttgcagatacgggcagcc

SEQ ID NO: 200139 - DNA, 25 bp, Homo sapien
tgcgggcctgacaataagtgcgaga

SEQ ID NO: 200140 - DNA, 25 bp, Homo sapien
gctttggagaaccatactgaggtcc

SEQ ID NO: 200141 - DNA, 25 bp, Homo sapien
aaccagcaatgcctttagtattgcc

SEQ ID NO: 200142 - DNA, 25 bp, Homo sapien
ccaatgtgcaatatagtgacccttg

SEQ ID NO: 200143 - DNA, 25 bp, Homo sapien
tgccaatgtgcaatatagtgaccct

SEQ ID NO: 200144 - DNA, 25 bp, Homo sapien
gcctttagtattgccaatgtgcaat

SEQ ID NO: 200145 - DNA, 25 bp, Homo sapien
gacgagttgcatggtccctccttct

SEQ ID NO: 200146 - DNA, 25 bp, Homo sapien
tccctgtatgcatttatccctgatg

SEQ ID NO: 200147 - DNA, 25 bp, Homo sapien
aagaccagggagtctatatgagtgg

SEQ ID NO: 200148 - DNA, 25 bp, Homo sapien
aataaggtgggatttgagagactga

SEQ ID NO: 200149 - DNA, 25 bp, Homo sapien
cctgtttttctccttacttgtgcca

SEQ ID NO: 200150 - DNA, 25 bp, Homo sapien
cctgttcactcttgactttgttcca

SEQ ID NO: 200151 - DNA, 25 bp, Homo sapien
tggatcttcttgatgaaatcctgtt

SEQ ID NO: 200152 - DNA, 25 bp, Homo sapien
tgttccatgctactttttcctgaga

SEQ ID NO: 200153 - DNA, 25 bp, Homo sapien
ctgagaggcacagtttatgagaaga

SEQ ID NO: 200154 - DNA, 25 bp, Homo sapien
gctgagaggcacagtttatgagaag

SEQ ID NO: 200155 - DNA, 25 bp, Homo sapien
cttcaggttgaaccccaaagttgtg

SEQ ID NO: 200156 - DNA, 25 bp, Homo sapien
gggttgatggagctttctgatgagt

SEQ ID NO: 200157 - DNA, 25 bp, Homo sapien
gtgttgtccaggcaagtgaaccgga

SEQ ID NO: 200158 - DNA, 25 bp, Homo sapien
agcaataccccagcactgctgagtg

SEQ ID NO: 200159 - DNA, 25 bp, Homo sapien
gcctgcagatgaaaagggtctatga

SEQ ID NO: 200160 - DNA, 25 bp, Homo sapien
caaaggggaagcaacatcggtggac

SEQ ID NO: 200161 - DNA, 25 bp, Homo sapien
gcaacatcggtggaccagctgacta

SEQ ID NO: 200162 - DNA, 25 bp, Homo sapien
gggaagcaacatcggtggaccagct

SEQ ID NO: 200163 - DNA, 25 bp, Homo sapien
gaagcaacatcggtggaccagctga

SEQ ID NO: 200164 - DNA, 25 bp, Homo sapien
ccacttgtctgcctgagttcctgtt

SEQ ID NO: 200165 - DNA, 25 bp, Homo sapien
cacttgtctgcctgagttcctgttt

SEQ ID NO: 200166 - DNA, 25 bp, Homo sapien
acttgtctgcctgagttcctgtttc

SEQ ID NO: 200167 - DNA, 25 bp, Homo sapien
gaagcctgtgccaaagaaggttcca

SEQ ID NO: 200168 - DNA, 25 bp, Homo sapien
tccaagaagcctgtgccaaagaagg

SEQ ID NO: 200169 - DNA, 25 bp, Homo sapien
aggtgctggacacattcacaggaag

SEQ ID NO: 200170 - DNA, 25 bp, Homo sapien
ctagtccaagaagcctgtgccaaag

SEQ ID NO: 200171 - DNA, 25 bp, Homo sapien
gagaagttgttaagattccctccgc

SEQ ID NO: 200172 - DNA, 25 bp, Homo sapien
gctgagtccagtgtaaggtgtcttc

SEQ ID NO: 200173 - DNA, 25 bp, Homo sapien
taatgttgagtttgcacgcttcctg

SEQ ID NO: 200174 - DNA, 25 bp, Homo sapien
ccgacttcagatgggcgagggcatc

SEQ ID NO: 200175 - DNA, 25 bp, Homo sapien
caaagtttgaaagtctgggagctga

SEQ ID NO: 200176 - DNA, 25 bp, Homo sapien
ccacaatctgtcatgtacaagctgg

SEQ ID NO: 200177 - DNA, 25 bp, Homo sapien
aaagtatcaactcatgcaattgtgg

SEQ ID NO: 200178 - DNA, 25 bp, Homo sapien
gaagagccagtggtgtagattccag

SEQ ID NO: 200179 - DNA, 25 bp, Homo sapien
taggtccatccaatcaagggtcatt

SEQ ID NO: 200180 - DNA, 25 bp, Homo sapien
gcaagataggctcttcagcaggcaa

SEQ ID NO: 200181 - DNA, 25 bp, Homo sapien
tttgagatgcatattcccaggacca

SEQ ID NO: 200182 - DNA, 25 bp, Homo sapien
tgctgacatgtgaaaaccggcctgt

SEQ ID NO: 200183 - DNA, 25 bp, Homo sapien
tgttccacgtgctggtgaccgagct

SEQ ID NO: 200184 - DNA, 25 bp, Homo sapien
tggtactggcttcgtacgcgcggaa

SEQ ID NO: 200185 - DNA, 25 bp, Homo sapien
tcattgtctcggtgctcgcctgcaa

SEQ ID NO: 200186 - DNA, 25 bp, Homo sapien
gggaacctcatagcactggcgctgc

SEQ ID NO: 200187 - DNA, 25 bp, Homo sapien
ggaggagaagtaactttatcctatc

SEQ ID NO: 200188 - DNA, 25 bp, Homo sapien
ggagaagtaactttatcctatctcc

SEQ ID NO: 200189 - DNA, 25 bp, Homo sapien
ctggaggagaagtaactttatccta

SEQ ID NO: 200190 - DNA, 25 bp, Homo sapien
agaagtaactttatcctatctcctg

SEQ ID NO: 200191 - DNA, 25 bp, Homo sapien
ttttccttactcatctgccaaatct

SEQ ID NO: 200192 - DNA, 25 bp, Homo sapien
ctccattccctatgccaagattctc

SEQ ID NO: 200193 - DNA, 25 bp, Homo sapien
ttccctatgccaagattctccggca

SEQ ID NO: 200194 - DNA, 25 bp, Homo sapien
tccttactcatctgccaaatctttt

SEQ ID NO: 200195 - DNA, 25 bp, Homo sapien
tcatcggtaaggatcctggaactca

SEQ ID NO: 200196 - DNA, 25 bp, Homo sapien
ggatagatgatcaggagatcagtca

SEQ ID NO: 200197 - DNA, 25 bp, Homo sapien
cttggaagtgtcctcaagaagttca

SEQ ID NO: 200198 - DNA, 25 bp, Homo sapien
catgacaggaattgcaagtgtagga

SEQ ID NO: 200199 - DNA, 25 bp, Homo sapien
cacaagattgcaatttgtggttatc

SEQ ID NO: 200200 - DNA, 25 bp, Homo sapien
gagctaccagcatttctccgtccta

SEQ ID NO: 200201 - DNA, 25 bp, Homo sapien
tcttcttgagctaccagcatttctc

SEQ ID NO: 200202 - DNA, 25 bp, Homo sapien
cctacttctacaattgatgtcacca

SEQ ID NO: 200203 - DNA, 25 bp, Homo sapien
taaaagatacaaatggatctaccat

SEQ ID NO: 200204 - DNA, 25 bp, Homo sapien
caaatggatctaccatttcctctgt

SEQ ID NO: 200205 - DNA, 25 bp, Homo sapien
tacaaatggatctaccatttcctct

SEQ ID NO: 200206 - DNA, 25 bp, Homo sapien
agatacaaatggatctaccatttcc

SEQ ID NO: 200207 - DNA, 25 bp, Homo sapien
tggcccatccccttatcttccattt

SEQ ID NO: 200208 - DNA, 25 bp, Homo sapien
ctgctttccggtatagaggttggaa

SEQ ID NO: 200209 - DNA, 25 bp, Homo sapien
gcaggtgggagtggctatatggccc

SEQ ID NO: 200210 - DNA, 25 bp, Homo sapien
tccattgctgctttccggtatagag

SEQ ID NO: 200211 - DNA, 25 bp, Homo sapien
ttcttcctgccttaaatacatgtca

SEQ ID NO: 200212 - DNA, 25 bp, Homo sapien
tcagatgcttgagcttcagcaagca

SEQ ID NO: 200213 - DNA, 25 bp, Homo sapien
gccttaaatacatgtcagatgcttg

SEQ ID NO: 200214 - DNA, 25 bp, Homo sapien
cctgccttaaatacatgtcagatgc

SEQ ID NO: 200215 - DNA, 25 bp, Homo sapien
gcccactataagtcaagaagctggt

SEQ ID NO: 200216 - DNA, 25 bp, Homo sapien
gaaggagtttcatggcacaaagaac

SEQ ID NO: 200217 - DNA, 25 bp, Homo sapien
aaatactgacgtgcaattttgccca

SEQ ID NO: 200218 - DNA, 25 bp, Homo sapien
tagatgcaatagtcactctcagtac

SEQ ID NO: 200219 - DNA, 25 bp, Homo sapien
ttgccagggtatgggacagacaccc

SEQ ID NO: 200220 - DNA, 25 bp, Homo sapien
cccagggtggacttggaaatctcac

SEQ ID NO: 200221 - DNA, 25 bp, Homo sapien
ggtccccatggcaaagctgaagttt

SEQ ID NO: 200222 - DNA, 25 bp, Homo sapien
ggagttccaactttccatgctggtt

SEQ ID NO: 200223 - DNA, 25 bp, Homo sapien
caacggagacacttggcagctaaag

SEQ ID NO: 200224 - DNA, 25 bp, Homo sapien
cacaagcggttcatgggttcctggg

SEQ ID NO: 200225 - DNA, 25 bp, Homo sapien
caaccccatgcttggcttcaaggga

SEQ ID NO: 200226 - DNA, 25 bp, Homo sapien
ttcgtcatcttcaggccaacggaga

SEQ ID NO: 200227 - DNA, 25 bp, Homo sapien
cagagacgcttcagatgagggagcc

SEQ ID NO: 200228 - DNA, 25 bp, Homo sapien
tggcacgactaccatttcgggcagg

SEQ ID NO: 200229 - DNA, 25 bp, Homo sapien
aatatcccctgaggttgacaaacgc

SEQ ID NO: 200230 - DNA, 25 bp, Homo sapien
tgcaagggtagatttcagagacgct

SEQ ID NO: 200231 - DNA, 25 bp, Homo sapien
tgaaatatggctactcggaagtaag

SEQ ID NO: 200232 - DNA, 25 bp, Homo sapien
ggatggcactagtctgcaaacttga

SEQ ID NO: 200233 - DNA, 25 bp, Homo sapien
tgtctagtactgaactgtccaatac

SEQ ID NO: 200234 - DNA, 25 bp, Homo sapien
tcgctattttgggtatactactggg

SEQ ID NO: 200235 - DNA, 25 bp, Homo sapien
gggaactttcctagtgccacgttga

SEQ ID NO: 200236 - DNA, 25 bp, Homo sapien
tgcggcatctatcatacttagaaaa

SEQ ID NO: 200237 - DNA, 25 bp, Homo sapien
gccacgttgagatgttgcggcatct

SEQ ID NO: 200238 - DNA, 25 bp, Homo sapien
tgagcatcctaactctttatcacgt

SEQ ID NO: 200239 - DNA, 25 bp, Homo sapien
taatcttgagttacagtccatggga

SEQ ID NO: 200240 - DNA, 25 bp, Homo sapien
tagcaatgcagacagttaagtgaac

SEQ ID NO: 200241 - DNA, 25 bp, Homo sapien
gaaaagatccctataccatgtggtg

SEQ ID NO: 200242 - DNA, 25 bp, Homo sapien
tctgaggagtttaagagctacagct

SEQ ID NO: 200243 - DNA, 25 bp, Homo sapien
cacacatacaaaccttatttcagga

SEQ ID NO: 200244 - DNA, 25 bp, Homo sapien
gatgggtttggtgtaatgattgacc

SEQ ID NO: 200245 - DNA, 25 bp, Homo sapien
gaatgagaatttgtataccagagtg

SEQ ID NO: 200246 - DNA, 25 bp, Homo sapien
gactctgtcatggaacagtatcaaa

SEQ ID NO: 200247 - DNA, 25 bp, Homo sapien
ggttttcttcaattatagcctggtc

SEQ ID NO: 200248 - DNA, 25 bp, Homo sapien
caattatagcctggtctgaaggaaa

SEQ ID NO: 200249 - DNA, 25 bp, Homo sapien
tgatatgattttctagtcctgcttc

SEQ ID NO: 200250 - DNA, 25 bp, Homo sapien
gccacaatacaaggttttcttcaat

SEQ ID NO: 200251 - DNA, 25 bp, Homo sapien
ggatcaaaatatgccctcaagattc

SEQ ID NO: 200252 - DNA, 25 bp, Homo sapien
agaggatcaaaatatgccctcaaga

SEQ ID NO: 200253 - DNA, 25 bp, Homo sapien
tcaaaatatgccctcaagattcctc

SEQ ID NO: 200254 - DNA, 25 bp, Homo sapien
aaaatatgccctcaagattcctctc

SEQ ID NO: 200255 - DNA, 25 bp, Homo sapien
gcttttttatactgaggatttacag

SEQ ID NO: 200256 - DNA, 25 bp, Homo sapien
gctttaccagtgtcaatattgcttt

SEQ ID NO: 200257 - DNA, 25 bp, Homo sapien
ccagcatggagtaaatgaatccaag

SEQ ID NO: 200258 - DNA, 25 bp, Homo sapien
tttctgaagtctgaaataactggga

SEQ ID NO: 200259 - DNA, 25 bp, Homo sapien
gcagggatttcagacatagggaaca

SEQ ID NO: 200260 - DNA, 25 bp, Homo sapien
aaaagtgtaaagactagactggcct

SEQ ID NO: 200261 - DNA, 25 bp, Homo sapien
taagatcttgacagactgaggtgtg

SEQ ID NO: 200262 - DNA, 25 bp, Homo sapien
ggaattgatatttgagctggaccct

SEQ ID NO: 200263 - DNA, 25 bp, Homo sapien
gatgtaaacttttagcagtggactc

SEQ ID NO: 200264 - DNA, 25 bp, Homo sapien
ctggattaagcacgtgaactgaact

SEQ ID NO: 200265 - DNA, 25 bp, Homo sapien
tgaactgaacttcggccacactagt

SEQ ID NO: 200266 - DNA, 25 bp, Homo sapien
gccacactagtctcagcaagatgta

SEQ ID NO: 200267 - DNA, 25 bp, Homo sapien
ctctattttgccttctgtgtgtctg

SEQ ID NO: 200268 - DNA, 25 bp, Homo sapien
gctagtgggatgctctctattttgc

SEQ ID NO: 200269 - DNA, 25 bp, Homo sapien
tagtgggatgctctctattttgcct

SEQ ID NO: 200270 - DNA, 25 bp, Homo sapien
gctagctagtgggatgctctctatt

SEQ ID NO: 200271 - DNA, 25 bp, Homo sapien
gtgataacatatccttttaggtagt

SEQ ID NO: 200272 - DNA, 25 bp, Homo sapien
ttccagtgataacatatccttttag

SEQ ID NO: 200273 - DNA, 25 bp, Homo sapien
taaattccagtgataacatatcctt

SEQ ID NO: 200274 - DNA, 25 bp, Homo sapien
cagtgataacatatccttttaggta

SEQ ID NO: 200275 - DNA, 25 bp, Homo sapien
aaagaaccatttgcggctgggcagc

SEQ ID NO: 200276 - DNA, 25 bp, Homo sapien
gcccagcgggtacaccatttggtca

SEQ ID NO: 200277 - DNA, 25 bp, Homo sapien
tcagacatctgaggcctttaactag

SEQ ID NO: 200278 - DNA, 25 bp, Homo sapien
catttggtcactctatgcttccggg

SEQ ID NO: 200279 - DNA, 25 bp, Homo sapien
tctcagacaaatattcttaaactct

SEQ ID NO: 200280 - DNA, 25 bp, Homo sapien
tctactatgtgcaaacataatgcta

SEQ ID NO: 200281 - DNA, 25 bp, Homo sapien
aagatatgctctctaggattttgcc

SEQ ID NO: 200282 - DNA, 25 bp, Homo sapien
gccttcaaagatgataagccacagg

SEQ ID NO: 200283 - DNA, 25 bp, Homo sapien
tactgacacactagaatacaagatg

SEQ ID NO: 200284 - DNA, 25 bp, Homo sapien
agatgaggtctttatataattcccc

SEQ ID NO: 200285 - DNA, 25 bp, Homo sapien
gcttcttggatcgatgttatattca

SEQ ID NO: 200286 - DNA, 25 bp, Homo sapien
tggactaaatagtcccaatactgac

SEQ ID NO: 200287 - DNA, 25 bp, Homo sapien
gggttctcgcctttcttgtacatct

SEQ ID NO: 200288 - DNA, 25 bp, Homo sapien
tagtacatacatcagaccaatctgc

SEQ ID NO: 200289 - DNA, 25 bp, Homo sapien
ggagatcttcggttcctaacattcc

SEQ ID NO: 200290 - DNA, 25 bp, Homo sapien
taacattccagcataagatactggg

SEQ ID NO: 200291 - DNA, 25 bp, Homo sapien
ccaagatggccgctctgtcttccct

SEQ ID NO: 200292 - DNA, 25 bp, Homo sapien
aagatggccgctctgtcttcccttc

SEQ ID NO: 200293 - DNA, 25 bp, Homo sapien
gccagccatgtgtgctgtaaggagc

SEQ ID NO: 200294 - DNA, 25 bp, Homo sapien
cagccatgtgtgctgtaaggagcag

SEQ ID NO: 200295 - DNA, 25 bp, Homo sapien
tgacatagttttacaaatagctaca

SEQ ID NO: 200296 - DNA, 25 bp, Homo sapien
tttcagtttaactgccacatcaata

SEQ ID NO: 200297 - DNA, 25 bp, Homo sapien
ggattgcaaaaatgccatggatact

SEQ ID NO: 200298 - DNA, 25 bp, Homo sapien
gattgcaaaaatgccatggatactg

SEQ ID NO: 200299 - DNA, 25 bp, Homo sapien
gccacatcaatataggattgcaaaa

SEQ ID NO: 200300 - DNA, 25 bp, Homo sapien
tacagatttatgaggtttcccaaaa

SEQ ID NO: 200301 - DNA, 25 bp, Homo sapien
tatatctacaaagcatccacactga

SEQ ID NO: 200302 - DNA, 25 bp, Homo sapien
tagtccaaccacttaagagagtttc

SEQ ID NO: 200303 - DNA, 25 bp, Homo sapien
gattttccgcacttgtactgcaagg

SEQ ID NO: 200304 - DNA, 25 bp, Homo sapien
taatatgtaacagtcctctaaaggc

SEQ ID NO: 200305 - DNA, 25 bp, Homo sapien
tttaaatgtcctaatatgtaacagt

SEQ ID NO: 200306 - DNA, 25 bp, Homo sapien
tgtaacagtcctctaaaggctcata

SEQ ID NO: 200307 - DNA, 25 bp, Homo sapien
tgtcctaatatgtaacagtcctcta

SEQ ID NO: 200308 - DNA, 25 bp, Homo sapien
catagaagagtactatgctgtcaga

SEQ ID NO: 200309 - DNA, 25 bp, Homo sapien
tatgctgtcagaagccatcactgtt

SEQ ID NO: 200310 - DNA, 25 bp, Homo sapien
actatgctgtcagaagccatcactg

SEQ ID NO: 200311 - DNA, 25 bp, Homo sapien
aaccagcatagaagagtactatgct

SEQ ID NO: 200312 - DNA, 25 bp, Homo sapien
cttcttgtatttcctcaatgtgcat

SEQ ID NO: 200313 - DNA, 25 bp, Homo sapien
tattaaatcaacatcatgtaatacc

SEQ ID NO: 200314 - DNA, 25 bp, Homo sapien
caacatcatgtaataccaaaaattc

SEQ ID NO: 200315 - DNA, 25 bp, Homo sapien
gagatattattaaatcaacatcatg

SEQ ID NO: 200316 - DNA, 25 bp, Homo sapien
tgtaataccaaaaattccactggaa

SEQ ID NO: 200317 - DNA, 25 bp, Homo sapien
tttgaagaccacattagcatcttga

SEQ ID NO: 200318 - DNA, 25 bp, Homo sapien
ttttgaagaccacattagcatcttg

SEQ ID NO: 200319 - DNA, 25 bp, Homo sapien
ttgaagaccacattagcatcttgag

SEQ ID NO: 200320 - DNA, 25 bp, Homo sapien
aagtagcctgttggctaacaataaa

SEQ ID NO: 200321 - DNA, 25 bp, Homo sapien
gacagttgaaacttgttgaggatct

SEQ ID NO: 200322 - DNA, 25 bp, Homo sapien
caagagtagaactcctgcttttccc

SEQ ID NO: 200323 - DNA, 25 bp, Homo sapien
agcttcataagtagcctgttggcta

SEQ ID NO: 200324 - DNA, 25 bp, Homo sapien
tagatgtctcccagacaagactcaa

SEQ ID NO: 200325 - DNA, 25 bp, Homo sapien
gggtccatctgagcactgcttggcg

SEQ ID NO: 200326 - DNA, 25 bp, Homo sapien
gcttggcgttcccaggacatttgaa

SEQ ID NO: 200327 - DNA, 25 bp, Homo sapien
cagagaatgtgtgagaatctgcaac

SEQ ID NO: 200328 - DNA, 25 bp, Homo sapien
tcaagggcagcttacaatggtgcca

SEQ ID NO: 200329 - DNA, 25 bp, Homo sapien
gggcagcttacaatggtgccacctt

SEQ ID NO: 200330 - DNA, 25 bp, Homo sapien
aagggcagcttacaatggtgccacc

SEQ ID NO: 200331 - DNA, 25 bp, Homo sapien
tgtcaagggcagcttacaatggtgc

SEQ ID NO: 200332 - DNA, 25 bp, Homo sapien
atcttgtgggtttcctaattatgac

SEQ ID NO: 200333 - DNA, 25 bp, Homo sapien
taccatacaagttggtataattctt

SEQ ID NO: 200334 - DNA, 25 bp, Homo sapien
tctgtctcttaccatacaagttggt

SEQ ID NO: 200335 - DNA, 25 bp, Homo sapien
cctgcccctcaaaatttggagtata

SEQ ID NO: 200336 - DNA, 25 bp, Homo sapien
accggggcttctggagcctctgcct

SEQ ID NO: 200337 - DNA, 25 bp, Homo sapien
taccggggcttctggagcctctgcc

SEQ ID NO: 200338 - DNA, 25 bp, Homo sapien
ctctgcctgaatcctatatccaagt

SEQ ID NO: 200339 - DNA, 25 bp, Homo sapien
atttcagtgtctaccggggcttctg

SEQ ID NO: 200340 - DNA, 25 bp, Homo sapien
caaaacgaacacaaatcagaagggc

SEQ ID NO: 200341 - DNA, 25 bp, Homo sapien
gagagaacagtttgctgatcaccat

SEQ ID NO: 200342 - DNA, 25 bp, Homo sapien
cccttcaacttttcggagagaacag

SEQ ID NO: 200343 - DNA, 25 bp, Homo sapien
tattccttaaggagccctctactga

SEQ ID NO: 200344 - DNA, 25 bp, Homo sapien
caattatacaggcagtagaaagcaa

SEQ ID NO: 200345 - DNA, 25 bp, Homo sapien
tgagtgctcaccaagacccagagtt

SEQ ID NO: 200346 - DNA, 25 bp, Homo sapien
cagagttcattattactaccacaga

SEQ ID NO: 200347 - DNA, 25 bp, Homo sapien
tacacaatgctctatttgggtttca

SEQ ID NO: 200348 - DNA, 25 bp, Homo sapien
cattagtgttcttctacattgctgg

SEQ ID NO: 200349 - DNA, 25 bp, Homo sapien
tgttcagtgtagtcaatggctgttc

SEQ ID NO: 200350 - DNA, 25 bp, Homo sapien
gggtcaagtccaagactagtttaca

SEQ ID NO: 200351 - DNA, 25 bp, Homo sapien
aaaaaagtagagatgtgcatattcc

SEQ ID NO: 200352 - DNA, 25 bp, Homo sapien
taggcaagcctataacctttcttcc

SEQ ID NO: 200353 - DNA, 25 bp, Homo sapien
tacagttgcttttctagagctatgc

SEQ ID NO: 200354 - DNA, 25 bp, Homo sapien
gagctttcgcattcccttcagcatg

SEQ ID NO: 200355 - DNA, 25 bp, Homo sapien
caccttgcggacaatgagattatct

SEQ ID NO: 200356 - DNA, 25 bp, Homo sapien
caaattggtatgtagtcccatacac

SEQ ID NO: 200357 - DNA, 25 bp, Homo sapien
gacaaattggtatgtagtcccatac

SEQ ID NO: 200358 - DNA, 25 bp, Homo sapien
taagacaaattggtatgtagtccca

SEQ ID NO: 200359 - DNA, 25 bp, Homo sapien
tggttaagacaaattggtatgtagt

SEQ ID NO: 200360 - DNA, 25 bp, Homo sapien
tactccctctcttgtgttgggtcct

SEQ ID NO: 200361 - DNA, 25 bp, Homo sapien
tccaatatgaactcttgctacctag

SEQ ID NO: 200362 - DNA, 25 bp, Homo sapien
tgctacctagcctgctgcacaactg

SEQ ID NO: 200363 - DNA, 25 bp, Homo sapien
ggtcctttttgcctgttatccaata

SEQ ID NO: 200364 - DNA, 25 bp, Homo sapien
ttctatgttctgaaggtcttccagg

SEQ ID NO: 200365 - DNA, 25 bp, Homo sapien
gtcttccaggttggtaatatatttc

SEQ ID NO: 200366 - DNA, 25 bp, Homo sapien
tctgaaggtcttccaggttggtaat

SEQ ID NO: 200367 - DNA, 25 bp, Homo sapien
tccaggttggtaatatatttcactt

SEQ ID NO: 200368 - DNA, 25 bp, Homo sapien
gagaacatgggcgacaatggcattc

SEQ ID NO: 200369 - DNA, 25 bp, Homo sapien
gtcagtagggaattctctgagcaat

SEQ ID NO: 200370 - DNA, 25 bp, Homo sapien
aacatgggcgacaatggcattcaca

SEQ ID NO: 200371 - DNA, 25 bp, Homo sapien
gcattcacatcaaacaaggtgtcag

SEQ ID NO: 200372 - DNA, 25 bp, Homo sapien
tttccacagtatcttgatatttctt

SEQ ID NO: 200373 - DNA, 25 bp, Homo sapien
ttccacagtatcttgatatttcttc

SEQ ID NO: 200374 - DNA, 25 bp, Homo sapien
tccacagtatcttgatatttcttct

SEQ ID NO: 200375 - DNA, 25 bp, Homo sapien
tacttaagttttagcatatatatca

SEQ ID NO: 200376 - DNA, 25 bp, Homo sapien
aagagtatacttaagttttagcata

SEQ ID NO: 200377 - DNA, 25 bp, Homo sapien
gttttagcatatatatcaaaaggtc

SEQ ID NO: 200378 - DNA, 25 bp, Homo sapien
ttagcatatatatcaaaaggtcaag

SEQ ID NO: 200379 - DNA, 25 bp, Homo sapien
ttggcaactgaaattccatagtcct

SEQ ID NO: 200380 - DNA, 25 bp, Homo sapien
cttggcaactgaaattccatagtcc

SEQ ID NO: 200381 - DNA, 25 bp, Homo sapien
tagtcctgcagaggtctaacagcct

SEQ ID NO: 200382 - DNA, 25 bp, Homo sapien
aattccatagtcctgcagaggtcta

SEQ ID NO: 200383 - DNA, 25 bp, Homo sapien
tgaatgtttatgaattgccccttaa

SEQ ID NO: 200384 - DNA, 25 bp, Homo sapien
catgaatgtttatgaattgcccctt

SEQ ID NO: 200385 - DNA, 25 bp, Homo sapien
tcatgaatgtttatgaattgcccct

SEQ ID NO: 200386 - DNA, 25 bp, Homo sapien
gaatgtttatgaattgccccttaaa

SEQ ID NO: 200387 - DNA, 25 bp, Homo sapien
agaggcttttcctggttgcaatgta

SEQ ID NO: 200388 - DNA, 25 bp, Homo sapien
aggcttttcctggttgcaatgtact

SEQ ID NO: 200389 - DNA, 25 bp, Homo sapien
aagaggcttttcctggttgcaatgt

SEQ ID NO: 200390 - DNA, 25 bp, Homo sapien
gaggcttttcctggttgcaatgtac

SEQ ID NO: 200391 - DNA, 25 bp, Homo sapien
gcacattatgacaaaagagatccca

SEQ ID NO: 200392 - DNA, 25 bp, Homo sapien
aaaatgcacattatgacaaaagaga

SEQ ID NO: 200393 - DNA, 25 bp, Homo sapien
cattatgacaaaagagatcccaact

SEQ ID NO: 200394 - DNA, 25 bp, Homo sapien
aatgcacattatgacaaaagagatc

SEQ ID NO: 200395 - DNA, 25 bp, Homo sapien
ctaaagacattgaagccggaaaaca

SEQ ID NO: 200396 - DNA, 25 bp, Homo sapien
taaagacattgaagccggaaaacat

SEQ ID NO: 200397 - DNA, 25 bp, Homo sapien
cagttgtatctgagcggattttgtc

SEQ ID NO: 200398 - DNA, 25 bp, Homo sapien
gctgcagttgtatctgagcggattt

SEQ ID NO: 200399 - DNA, 25 bp, Homo sapien
tgcagttgtatctgagcggattttg

SEQ ID NO: 200400 - DNA, 25 bp, Homo sapien
tgtatctgagcggattttgtctgtt

SEQ ID NO: 200401 - DNA, 25 bp, Homo sapien
tccatgctgtcctctgtatctgctg

SEQ ID NO: 200402 - DNA, 25 bp, Homo sapien
ttccatgctgtcctctgtatctgct

SEQ ID NO: 200403 - DNA, 25 bp, Homo sapien
gaagttttctactgatgatctatgt

SEQ ID NO: 200404 - DNA, 25 bp, Homo sapien
caagaagttttctactgatgatcta

SEQ ID NO: 200405 - DNA, 25 bp, Homo sapien
ttcaagaagttttctactgatgatc

SEQ ID NO: 200406 - DNA, 25 bp, Homo sapien
acttcaagaagttttctactgatga

SEQ ID NO: 200407 - DNA, 25 bp, Homo sapien
tctacgtttgaaagaaccagcttcc

SEQ ID NO: 200408 - DNA, 25 bp, Homo sapien
gccggcccaatatacgttagtcgat

SEQ ID NO: 200409 - DNA, 25 bp, Homo sapien
gattattcctcggttcttcacagca

SEQ ID NO: 200410 - DNA, 25 bp, Homo sapien
aaaagtcaacaactatgtgccggcc

SEQ ID NO: 200411 - DNA, 25 bp, Homo sapien
gaaccacttcgccaacctgcaaagg

SEQ ID NO: 200412 - DNA, 25 bp, Homo sapien
actagccgggtagcctggaaccact

SEQ ID NO: 200413 - DNA, 25 bp, Homo sapien
cgactcggcggagtcggcctcctgg

SEQ ID NO: 200414 - DNA, 25 bp, Homo sapien
tgcaaaggcgtagcacttctccctc

SEQ ID NO: 200415 - DNA, 25 bp, Homo sapien
agtgcggagcgagcgcctcaaatgc

SEQ ID NO: 200416 - DNA, 25 bp, Homo sapien
tgtctccagccgagagttgtttttt

SEQ ID NO: 200417 - DNA, 25 bp, Homo sapien
tcaaatgctcgggtttctcagctga

SEQ ID NO: 200418 - DNA, 25 bp, Homo sapien
caatcggcgcgagcccacagtgcgg

SEQ ID NO: 200419 - DNA, 25 bp, Homo sapien
aggcggaggcgccgtcgctgcagcc

SEQ ID NO: 200420 - DNA, 25 bp, Homo sapien
gaggcggaggcgccgtcgctgcagc

SEQ ID NO: 200421 - DNA, 25 bp, Homo sapien
ggaggcggaggcgccgtcgctgcag

SEQ ID NO: 200422 - DNA, 25 bp, Homo sapien
cgccgcgctgttcgcctttgcctac

SEQ ID NO: 200423 - DNA, 25 bp, Homo sapien
ctctacgccgcgctgttcgcctttg

SEQ ID NO: 200424 - DNA, 25 bp, Homo sapien
tacgccgcgctgttcgcctttgcct

SEQ ID NO: 200425 - DNA, 25 bp, Homo sapien
acgccctgctctacgccgcgctgtt

SEQ ID NO: 200426 - DNA, 25 bp, Homo sapien
gtctcctgtgggcagcgctcaggac

SEQ ID NO: 200427 - DNA, 25 bp, Homo sapien
cgctcagcggctccctgcccttgct

SEQ ID NO: 200428 - DNA, 25 bp, Homo sapien
gcggctgagttaccagagcctctgc

SEQ ID NO: 200429 - DNA, 25 bp, Homo sapien
cgcgagcggcggctgagttaccaga

SEQ ID NO: 200430 - DNA, 25 bp, Homo sapien
tttcgccttaaacttaagtggctga

SEQ ID NO: 200431 - DNA, 25 bp, Homo sapien
tggagtgtgagccagtgttttcgcc

SEQ ID NO: 200432 - DNA, 25 bp, Homo sapien
taagtggctgattggcttgattact

SEQ ID NO: 200433 - DNA, 25 bp, Homo sapien
tgagccagtgttttcgccttaaact

SEQ ID NO: 200434 - DNA, 25 bp, Homo sapien
tctgacaacttaaaacagcaacgga

SEQ ID NO: 200435 - DNA, 25 bp, Homo sapien
tgtctgacaacttaaaacagcaacg

SEQ ID NO: 200436 - DNA, 25 bp, Homo sapien
tgacaacttaaaacagcaacggaac

SEQ ID NO: 200437 - DNA, 25 bp, Homo sapien
tgtgtctgacaacttaaaacagcaa

SEQ ID NO: 200438 - DNA, 25 bp, Homo sapien
ggtggcaccaacaaagtggcatcgc

SEQ ID NO: 200439 - DNA, 25 bp, Homo sapien
tctggccctccgaggtaaggcgttg

SEQ ID NO: 200440 - DNA, 25 bp, Homo sapien
ggcatcgcaagaagtagcagccccg

SEQ ID NO: 200441 - DNA, 25 bp, Homo sapien
tttgttcggtgttctggccctccga

SEQ ID NO: 200442 - DNA, 25 bp, Homo sapien
gagggaggttggatgctgaggtagc

SEQ ID NO: 200443 - DNA, 25 bp, Homo sapien
agggaggttggatgctgaggtagca

SEQ ID NO: 200444 - DNA, 25 bp, Homo sapien
tggtggtcaccatatctcaggatac

SEQ ID NO: 200445 - DNA, 25 bp, Homo sapien
tctgtgccagactgtcgtcgtgggc

SEQ ID NO: 200446 - DNA, 25 bp, Homo sapien
gagtgcattgcaagaggtgaccata

SEQ ID NO: 200447 - DNA, 25 bp, Homo sapien
tgaaagcaaatagcataggaactct

SEQ ID NO: 200448 - DNA, 25 bp, Homo sapien
catgtggttccttgtggcagattct

SEQ ID NO: 200449 - DNA, 25 bp, Homo sapien
tagagctgagctgagtgacttaaca

SEQ ID NO: 200450 - DNA, 25 bp, Homo sapien
ggtgtccaggtatttgctatcgtaa

SEQ ID NO: 200451 - DNA, 25 bp, Homo sapien
gagagcattcgtagttccttgggtg

SEQ ID NO: 200452 - DNA, 25 bp, Homo sapien
tctgccatgctctatttacaggctc

SEQ ID NO: 200453 - DNA, 25 bp, Homo sapien
tgccagcatggtcggtggtactgtt

SEQ ID NO: 200454 - DNA, 25 bp, Homo sapien
gtatatagtatttggaatggtcctc

SEQ ID NO: 200455 - DNA, 25 bp, Homo sapien
tctttctgtgggaacatgtgccagc

SEQ ID NO: 200456 - DNA, 25 bp, Homo sapien
tagtcacagttatagttccagagct

SEQ ID NO: 200457 - DNA, 25 bp, Homo sapien
tgatgatgacctgccaagactggga

SEQ ID NO: 200458 - DNA, 25 bp, Homo sapien
cagtagatgttaaacccagggtggg

SEQ ID NO: 200459 - DNA, 25 bp, Homo sapien
cagggtgggacctgcattatcagga

SEQ ID NO: 200460 - DNA, 25 bp, Homo sapien
catttcaagtccgtaactagtacac

SEQ ID NO: 200461 - DNA, 25 bp, Homo sapien
catgccctccttgttacaaaaccat

SEQ ID NO: 200462 - DNA, 25 bp, Homo sapien
aagtccgtaactagtacactattga

SEQ ID NO: 200463 - DNA, 25 bp, Homo sapien
tttcaagtccgtaactagtacacta

SEQ ID NO: 200464 - DNA, 25 bp, Homo sapien
ctgaagccatgaagcataatggctt

SEQ ID NO: 200465 - DNA, 25 bp, Homo sapien
gctgaagccatgaagcataatggct

SEQ ID NO: 200466 - DNA, 25 bp, Homo sapien
aaagcttaatggctgaagccatgaa

SEQ ID NO: 200467 - DNA, 25 bp, Homo sapien
aagccatgaagcataatggcttcag

SEQ ID NO: 200468 - DNA, 25 bp, Homo sapien
gcaaagtttgggctggtatggcacc

SEQ ID NO: 200469 - DNA, 25 bp, Homo sapien
gcagcagcagttacacagtcactcc

SEQ ID NO: 200470 - DNA, 25 bp, Homo sapien
gaatggacctatgacagatactgct

SEQ ID NO: 200471 - DNA, 25 bp, Homo sapien
gctggtcttacctagtgaatcagga

SEQ ID NO: 200472 - DNA, 25 bp, Homo sapien
tacaatttcagctttattgaccccc

SEQ ID NO: 200473 - DNA, 25 bp, Homo sapien
aatacaatttcagctttattgaccc

SEQ ID NO: 200474 - DNA, 25 bp, Homo sapien
gaatacaatttcagctttattgacc

SEQ ID NO: 200475 - DNA, 25 bp, Homo sapien
tgaatacaatttcagctttattgac

SEQ ID NO: 200476 - DNA, 25 bp, Homo sapien
tatttggaatataggtaggacctct

SEQ ID NO: 200477 - DNA, 25 bp, Homo sapien
taaagtctacaaatccttgggactc

SEQ ID NO: 200478 - DNA, 25 bp, Homo sapien
gaatataggtaggacctctaatata

SEQ ID NO: 200479 - DNA, 25 bp, Homo sapien
aggtaggacctctaatataataaag

SEQ ID NO: 200480 - DNA, 25 bp, Homo sapien
ccagaacattcggtggaggaaacac

SEQ ID NO: 200481 - DNA, 25 bp, Homo sapien
tagatgactctccttgagtggagca

SEQ ID NO: 200482 - DNA, 25 bp, Homo sapien
agcatttaccaaggcgggaggcctg

SEQ ID NO: 200483 - DNA, 25 bp, Homo sapien
gaaatgcttatgtcaggcctgcaag

SEQ ID NO: 200484 - DNA, 25 bp, Homo sapien
gaccttgtacaccaaacagaggagt

SEQ ID NO: 200485 - DNA, 25 bp, Homo sapien
gaagaccttgtacaccaaacagagg

SEQ ID NO: 200486 - DNA, 25 bp, Homo sapien
tcagaagaccttgtacaccaaacag

SEQ ID NO: 200487 - DNA, 25 bp, Homo sapien
tgtacaccaaacagaggagtttggc

SEQ ID NO: 200488 - DNA, 25 bp, Homo sapien
gaagggactgttaaccagagagcca

SEQ ID NO: 200489 - DNA, 25 bp, Homo sapien
tacccaagcgtgagaagtggtgttg

SEQ ID NO: 200490 - DNA, 25 bp, Homo sapien
gatattagggagtaacactgtcaga

SEQ ID NO: 200491 - DNA, 25 bp, Homo sapien
tctagaaagcctgctgtggtaacat

SEQ ID NO: 200492 - DNA, 25 bp, Homo sapien
ttcagcccagtcgttcaagttccag

SEQ ID NO: 200493 - DNA, 25 bp, Homo sapien
taagacatatgtaaagagggcacga

SEQ ID NO: 200494 - DNA, 25 bp, Homo sapien
tgtaccaggccttagggacacagaa

SEQ ID NO: 200495 - DNA, 25 bp, Homo sapien
caatgtttagaaatctcctgtgcct

SEQ ID NO: 200496 - DNA, 25 bp, Homo sapien
cagtagtattatacatagacttaac

SEQ ID NO: 200497 - DNA, 25 bp, Homo sapien
gactgtcattgctattatgcctttg

SEQ ID NO: 200498 - DNA, 25 bp, Homo sapien
actctttcgcctccattgtccagaa

SEQ ID NO: 200499 - DNA, 25 bp, Homo sapien
aaagtattacttttactcacagtag

SEQ ID NO: 200500 - DNA, 25 bp, Homo sapien
aatattctgtaacaagttcctgaag

SEQ ID NO: 200501 - DNA, 25 bp, Homo sapien
atattctgtaacaagttcctgaagt

SEQ ID NO: 200502 - DNA, 25 bp, Homo sapien
attctgtaacaagttcctgaagttt

SEQ ID NO: 200503 - DNA, 25 bp, Homo sapien
tattctgtaacaagttcctgaagtt

SEQ ID NO: 200504 - DNA, 25 bp, Homo sapien
cccagtattttttgaggccaagacg

SEQ ID NO: 200505 - DNA, 25 bp, Homo sapien
taaggtgcataaaccatttaatgta

SEQ ID NO: 200506 - DNA, 25 bp, Homo sapien
tatctgtaaaagttattcactttgc

SEQ ID NO: 200507 - DNA, 25 bp, Homo sapien
gtgtgtgccatgtagtcgtagctac

SEQ ID NO: 200508 - DNA, 25 bp, Homo sapien
ccaaatgcgttgaataatgatacta

SEQ ID NO: 200509 - DNA, 25 bp, Homo sapien
aaaataagatcttcagagcagtgcc

SEQ ID NO: 200510 - DNA, 25 bp, Homo sapien
ctatttcttgtctggttagatggaa

SEQ ID NO: 200511 - DNA, 25 bp, Homo sapien
taactaggtccactttctggcatat

SEQ ID NO: 200512 - DNA, 25 bp, Homo sapien
tattcatgcaaagggtaaatgagaa

SEQ ID NO: 200513 - DNA, 25 bp, Homo sapien
attattcatgcaaagggtaaatgag

SEQ ID NO: 200514 - DNA, 25 bp, Homo sapien
ttattcatgcaaagggtaaatgaga

SEQ ID NO: 200515 - DNA, 25 bp, Homo sapien
aagctttccccacagacgacattta

SEQ ID NO: 200516 - DNA, 25 bp, Homo sapien
gctttccccacagacgacatttaaa

SEQ ID NO: 200517 - DNA, 25 bp, Homo sapien
agctttccccacagacgacatttaa

SEQ ID NO: 200518 - DNA, 25 bp, Homo sapien
cacagacgacatttaaaacaaccaa

SEQ ID NO: 200519 - DNA, 25 bp, Homo sapien
atttctaaaatgcagtcgaaagtcc

SEQ ID NO: 200520 - DNA, 25 bp, Homo sapien
ttctaaaatgcagtcgaaagtcctc

SEQ ID NO: 200521 - DNA, 25 bp, Homo sapien
tttctaaaatgcagtcgaaagtcct

SEQ ID NO: 200522 - DNA, 25 bp, Homo sapien
ggtaacttgcctaaattcccacatc

SEQ ID NO: 200523 - DNA, 25 bp, Homo sapien
caaggtgtccattgtaggtgattaa

SEQ ID NO: 200524 - DNA, 25 bp, Homo sapien
tgagcaggttctatgtgcctaacac

SEQ ID NO: 200525 - DNA, 25 bp, Homo sapien
tagagagcatcatttaccagaagga

SEQ ID NO: 200526 - DNA, 25 bp, Homo sapien
ataataattcaaccacagcccttct

SEQ ID NO: 200527 - DNA, 25 bp, Homo sapien
tcataataattcaaccacagccctt

SEQ ID NO: 200528 - DNA, 25 bp, Homo sapien
taataattcaaccacagcccttctt

SEQ ID NO: 200529 - DNA, 25 bp, Homo sapien
cataataattcaaccacagcccttc

SEQ ID NO: 200530 - DNA, 25 bp, Homo sapien
ggcagattatataagcactgaggta

SEQ ID NO: 200531 - DNA, 25 bp, Homo sapien
cttcataggacattaaaggtgagtg

SEQ ID NO: 200532 - DNA, 25 bp, Homo sapien
ttaaaaagagctgatgccagaacac

SEQ ID NO: 200533 - DNA, 25 bp, Homo sapien
tctagttcctggaagctgtttaggc

SEQ ID NO: 200534 - DNA, 25 bp, Homo sapien
gaatttcaaggtagcaatgagccgt

SEQ ID NO: 200535 - DNA, 25 bp, Homo sapien
agctgcacgctggtattcataactg

SEQ ID NO: 200536 - DNA, 25 bp, Homo sapien
gggtatggaatctgttctttcccca

SEQ ID NO: 200537 - DNA, 25 bp, Homo sapien
tgccttctcccactaatgaagatct

SEQ ID NO: 200538 - DNA, 25 bp, Homo sapien
ccccagcaaaaaatgaattctcatc

SEQ ID NO: 200539 - DNA, 25 bp, Homo sapien
gtgtgcttcttttttatccccagca

SEQ ID NO: 200540 - DNA, 25 bp, Homo sapien
aatgaattctcatcaaaatgcaaag

SEQ ID NO: 200541 - DNA, 25 bp, Homo sapien
tttatccccagcaaaaaatgaattc

SEQ ID NO: 200542 - DNA, 25 bp, Homo sapien
tccatcaaatcgctgttgaaattct

SEQ ID NO: 200543 - DNA, 25 bp, Homo sapien
gctcgaagaatggtaacactttgga

SEQ ID NO: 200544 - DNA, 25 bp, Homo sapien
cactttggataaagcccttagttct

SEQ ID NO: 200545 - DNA, 25 bp, Homo sapien
taaagagttgaaaatctgggcgctc

SEQ ID NO: 200546 - DNA, 25 bp, Homo sapien
aattctaggtaattacgccacatag

SEQ ID NO: 200547 - DNA, 25 bp, Homo sapien
taagcaacgcctgccctttcagtgg

SEQ ID NO: 200548 - DNA, 25 bp, Homo sapien
tcactacgctgtacaaaaatatctc

SEQ ID NO: 200549 - DNA, 25 bp, Homo sapien
ggcaagagcaagtgacattgtcagc

SEQ ID NO: 200550 - DNA, 25 bp, Homo sapien
tcaacagtattaaggcatcaacagc

SEQ ID NO: 200551 - DNA, 25 bp, Homo sapien
gcaaactgtgctgttaggaactatt

SEQ ID NO: 200552 - DNA, 25 bp, Homo sapien
agtgatatggacaattttgagcagc

SEQ ID NO: 200553 - DNA, 25 bp, Homo sapien
ccaggcctgatacgagcacacaaat

SEQ ID NO: 200554 - DNA, 25 bp, Homo sapien
taaaagatatcttgcactcaaatgc

SEQ ID NO: 200555 - DNA, 25 bp, Homo sapien
cagatataagtctgtagaatgctct

SEQ ID NO: 200556 - DNA, 25 bp, Homo sapien
aagatatcttgcactcaaatgcaca

SEQ ID NO: 200557 - DNA, 25 bp, Homo sapien
gcacattaatgcttgcatgtaggcc

SEQ ID NO: 200558 - DNA, 25 bp, Homo sapien
atttcatatgtgaatcttgtagaca

SEQ ID NO: 200559 - DNA, 25 bp, Homo sapien
aagaaaaagcagtgacttagaaata

SEQ ID NO: 200560 - DNA, 25 bp, Homo sapien
aaatttcatatgtgaatcttgtaga

SEQ ID NO: 200561 - DNA, 25 bp, Homo sapien
aatttcatatgtgaatcttgtagac

SEQ ID NO: 200562 - DNA, 25 bp, Homo sapien
ttctagccaactgtaaaaagtgttc

SEQ ID NO: 200563 - DNA, 25 bp, Homo sapien
tctagccaactgtaaaaagtgttct

SEQ ID NO: 200564 - DNA, 25 bp, Homo sapien
cttctagccaactgtaaaaagtgtt

SEQ ID NO: 200565 - DNA, 25 bp, Homo sapien
ttagcattgccttaggttgacccag

SEQ ID NO: 200566 - DNA, 25 bp, Homo sapien
cctaacggtccaagtcttaattgca

SEQ ID NO: 200567 - DNA, 25 bp, Homo sapien
taaagcattatagcaaatttgtgcc

SEQ ID NO: 200568 - DNA, 25 bp, Homo sapien
gccttgataacaattcatgccatga

SEQ ID NO: 200569 - DNA, 25 bp, Homo sapien
tgttttctactaaagttgcttacag

SEQ ID NO: 200570 - DNA, 25 bp, Homo sapien
cactatctaactagtgaacatggta

SEQ ID NO: 200571 - DNA, 25 bp, Homo sapien
tttgctacagagatgataaacactg

SEQ ID NO: 200572 - DNA, 25 bp, Homo sapien
taatggaaggaatggcaaagggaat

SEQ ID NO: 200573 - DNA, 25 bp, Homo sapien
cagaagccaaaggatttaaaggtct

SEQ ID NO: 200574 - DNA, 25 bp, Homo sapien
taaaggtcttttaattgtctgtggc

SEQ ID NO: 200575 - DNA, 25 bp, Homo sapien
cttgaccagaagccaaaggatttaa

SEQ ID NO: 200576 - DNA, 25 bp, Homo sapien
tgaccagaagccaaaggatttaaag

SEQ ID NO: 200577 - DNA, 25 bp, Homo sapien
gaaaatatcagccaagctcttctct

SEQ ID NO: 200578 - DNA, 25 bp, Homo sapien
gatcttctcccattgtggcggccag

SEQ ID NO: 200579 - DNA, 25 bp, Homo sapien
cctctaattgctttaagggagggtg

SEQ ID NO: 200580 - DNA, 25 bp, Homo sapien
cggccagcaggccatttcctaatca

SEQ ID NO: 200581 - DNA, 25 bp, Homo sapien
caaatctacatattcagcttcaggg

SEQ ID NO: 200582 - DNA, 25 bp, Homo sapien
gcgctcaggattaagaagcaaatct

SEQ ID NO: 200583 - DNA, 25 bp, Homo sapien
cattccatattttccaagcatctgg

SEQ ID NO: 200584 - DNA, 25 bp, Homo sapien
cttgtaaccagtgtagcgctcagga

SEQ ID NO: 200585 - DNA, 25 bp, Homo sapien
caattatcataagctattcagacaa

SEQ ID NO: 200586 - DNA, 25 bp, Homo sapien
cagatccaatctggccaaaagcaaa

SEQ ID NO: 200587 - DNA, 25 bp, Homo sapien
cacacagccacattaattgtacaca

SEQ ID NO: 200588 - DNA, 25 bp, Homo sapien
tgtacactgcgtgttaccaaatact

SEQ ID NO: 200589 - DNA, 25 bp, Homo sapien
catggaatcatctagttcaggaatg

SEQ ID NO: 200590 - DNA, 25 bp, Homo sapien
ggcaagtgccacatataaattataa

SEQ ID NO: 200591 - DNA, 25 bp, Homo sapien
gaatcatctagttcaggaatggata

SEQ ID NO: 200592 - DNA, 25 bp, Homo sapien
acaaattagcatggaatcatctagt

SEQ ID NO: 200593 - DNA, 25 bp, Homo sapien
acaatgcatactatcaaaaatatta

SEQ ID NO: 200594 - DNA, 25 bp, Homo sapien
caatgcatactatcaaaaatattat

SEQ ID NO: 200595 - DNA, 25 bp, Homo sapien
gaatcatcatgcttggtccactgaa

SEQ ID NO: 200596 - DNA, 25 bp, Homo sapien
ttcatccactgctccaagtcgttca

SEQ ID NO: 200597 - DNA, 25 bp, Homo sapien
cactgctccaagtcgttcagcttgt

SEQ ID NO: 200598 - DNA, 25 bp, Homo sapien
ctccaagtcgttcagcttgttcaca

SEQ ID NO: 200599 - DNA, 25 bp, Homo sapien
tccactgctccaagtcgttcagctt

SEQ ID NO: 200600 - DNA, 25 bp, Homo sapien
cataaaattgcccataatcaggcca

SEQ ID NO: 200601 - DNA, 25 bp, Homo sapien
ttcataaaattgcccataatcaggc

SEQ ID NO: 200602 - DNA, 25 bp, Homo sapien
tagataataacttattgcattttta

SEQ ID NO: 200603 - DNA, 25 bp, Homo sapien
ataaaattgcccataatcaggccag

SEQ ID NO: 200604 - DNA, 25 bp, Homo sapien
gctaatgacttatttaggaggaggt

SEQ ID NO: 200605 - DNA, 25 bp, Homo sapien
aaatccatctagctaatgacttatt

SEQ ID NO: 200606 - DNA, 25 bp, Homo sapien
atttaggaggaggtatactgatgcc

SEQ ID NO: 200607 - DNA, 25 bp, Homo sapien
aaaaataagatgttctaatggatgg

SEQ ID NO: 200608 - DNA, 25 bp, Homo sapien
gcagatttaattccatcaggaactt

SEQ ID NO: 200609 - DNA, 25 bp, Homo sapien
cttgtagctcgcagatttaattcca

SEQ ID NO: 200610 - DNA, 25 bp, Homo sapien
tagctcgcagatttaattccatcag

SEQ ID NO: 200611 - DNA, 25 bp, Homo sapien
gctcgcagatttaattccatcagga

SEQ ID NO: 200612 - DNA, 25 bp, Homo sapien
aaaccaggtgttttgtccactcaca

SEQ ID NO: 200613 - DNA, 25 bp, Homo sapien
tcaatctccctaataagtcaaagga

SEQ ID NO: 200614 - DNA, 25 bp, Homo sapien
gctatatatataacttggttcagaa

SEQ ID NO: 200615 - DNA, 25 bp, Homo sapien
tatgaaggcagtgtaattcaaaata

SEQ ID NO: 200616 - DNA, 25 bp, Homo sapien
ggtttgacagcacagtcccttcttc

SEQ ID NO: 200617 - DNA, 25 bp, Homo sapien
tggtttgacagcacagtcccttctt

SEQ ID NO: 200618 - DNA, 25 bp, Homo sapien
gacatggtttgacagcacagtccct

SEQ ID NO: 200619 - DNA, 25 bp, Homo sapien
gattgacatggtttgacagcacagt

SEQ ID NO: 200620 - DNA, 25 bp, Homo sapien
gatgtcattccagaaaggacacggc

SEQ ID NO: 200621 - DNA, 25 bp, Homo sapien
ctgatgtcattccagaaaggacacg

SEQ ID NO: 200622 - DNA, 25 bp, Homo sapien
ccagaaaggacacggcctcttcagg

SEQ ID NO: 200623 - DNA, 25 bp, Homo sapien
ttccagaaaggacacggcctcttca

SEQ ID NO: 200624 - DNA, 25 bp, Homo sapien
ctaaagtagtcactttcaagaagtt

SEQ ID NO: 200625 - DNA, 25 bp, Homo sapien
aggtacaatcatccaagtaaccact

SEQ ID NO: 200626 - DNA, 25 bp, Homo sapien
tttgtagtcttgggaaaagcctgta

SEQ ID NO: 200627 - DNA, 25 bp, Homo sapien
cacaggtacaatcatccaagtaacc

SEQ ID NO: 200628 - DNA, 25 bp, Homo sapien
tctagggacaaaaaatagctgtttc

SEQ ID NO: 200629 - DNA, 25 bp, Homo sapien
gagagcaagtttcaaggcatccatt

SEQ ID NO: 200630 - DNA, 25 bp, Homo sapien
tgaatacacaagaatctcagagtcc

SEQ ID NO: 200631 - DNA, 25 bp, Homo sapien
tcaaccttaagagcagaacttctag

SEQ ID NO: 200632 - DNA, 25 bp, Homo sapien
gtttgatttgaccaaatgcaaaagg

SEQ ID NO: 200633 - DNA, 25 bp, Homo sapien
aattaccacgtaccgcttgttcact

SEQ ID NO: 200634 - DNA, 25 bp, Homo sapien
taccacgtaccgcttgttcactact

SEQ ID NO: 200635 - DNA, 25 bp, Homo sapien
atttgaccaaatgcaaaaggcagga

SEQ ID NO: 200636 - DNA, 25 bp, Homo sapien
actgcagcctcgatcactgaagcag

SEQ ID NO: 200637 - DNA, 25 bp, Homo sapien
gcctcgatcactgaagcagtgggct

SEQ ID NO: 200638 - DNA, 25 bp, Homo sapien
taactatatgatcctcaatttactt

SEQ ID NO: 200639 - DNA, 25 bp, Homo sapien
gggtaggcacaatctaatcacctgc

SEQ ID NO: 200640 - DNA, 25 bp, Homo sapien
aagaaacacagatagccactctcgt

SEQ ID NO: 200641 - DNA, 25 bp, Homo sapien
agaaacacagatagccactctcgtt

SEQ ID NO: 200642 - DNA, 25 bp, Homo sapien
taacatcgaaatctgagatcagccc

SEQ ID NO: 200643 - DNA, 25 bp, Homo sapien
tgggtacacaagttcctggtcaaga

SEQ ID NO: 200644 - DNA, 25 bp, Homo sapien
gaaaggctggcgaaatgcacgcagc

SEQ ID NO: 200645 - DNA, 25 bp, Homo sapien
cacaaacgtcttagccagaaaggct

SEQ ID NO: 200646 - DNA, 25 bp, Homo sapien
cctcagcaccaacgcgcacatcgct

SEQ ID NO: 200647 - DNA, 25 bp, Homo sapien
ggcgtgcgggacagtgcacgccgcg

SEQ ID NO: 200648 - DNA, 25 bp, Homo sapien
gccagggcgtgcgggacagtgcacg

SEQ ID NO: 200649 - DNA, 25 bp, Homo sapien
cagggcgtgcgggacagtgcacgcc

SEQ ID NO: 200650 - DNA, 25 bp, Homo sapien
ctcctctccgtggcccgagctgagc

SEQ ID NO: 200651 - DNA, 25 bp, Homo sapien
tccgtggcccgagctgagcagccac

SEQ ID NO: 200652 - DNA, 25 bp, Homo sapien
acaagaatccccagccgcggcccat

SEQ ID NO: 200653 - DNA, 25 bp, Homo sapien
cacacggcgcccaggaggccaaaca

SEQ ID NO: 200654 - DNA, 25 bp, Homo sapien
gccctcagatgaagcccgtgcgggc

SEQ ID NO: 200655 - DNA, 25 bp, Homo sapien
cgcttgggaggccagtccgcacgct

SEQ ID NO: 200656 - DNA, 25 bp, Homo sapien
agttcccagagcgagagcgaaagcc

SEQ ID NO: 200657 - DNA, 25 bp, Homo sapien
ggttccttcccgccgcgtgaggctg

SEQ ID NO: 200658 - DNA, 25 bp, Homo sapien
ttgcttgaacacaaggagatcgacg

SEQ ID NO: 200659 - DNA, 25 bp, Homo sapien
aaagaacttaccaagcagtatgaaa

SEQ ID NO: 200660 - DNA, 25 bp, Homo sapien
aagaacttaccaagcagtatgaaaa

SEQ ID NO: 200661 - DNA, 25 bp, Homo sapien
agaacttaccaagcagtatgaaaag

SEQ ID NO: 200662 - DNA, 25 bp, Homo sapien
gtgaagtgcttaaacagttaactga

SEQ ID NO: 200663 - DNA, 25 bp, Homo sapien
cgtgggtgaagtgcttaaacagtta

SEQ ID NO: 200664 - DNA, 25 bp, Homo sapien
atcgtgggtgaagtgcttaaacagt

SEQ ID NO: 200665 - DNA, 25 bp, Homo sapien
tgggtgaagtgcttaaacagttaac

SEQ ID NO: 200666 - DNA, 25 bp, Homo sapien
aatggaccaagatatgttgtgggtt

SEQ ID NO: 200667 - DNA, 25 bp, Homo sapien
tggaccaagatatgttgtgggttgt

SEQ ID NO: 200668 - DNA, 25 bp, Homo sapien
accaagatatgttgtgggttgtcgt

SEQ ID NO: 200669 - DNA, 25 bp, Homo sapien
gaccaagatatgttgtgggttgtcg

SEQ ID NO: 200670 - DNA, 25 bp, Homo sapien
tatatgattccgaaattgtattggc

SEQ ID NO: 200671 - DNA, 25 bp, Homo sapien
tgtattggcacgcagttttttaaac

SEQ ID NO: 200672 - DNA, 25 bp, Homo sapien
cctgtgacaagtggtcagtaattta

SEQ ID NO: 200673 - DNA, 25 bp, Homo sapien
tagatgtaaacattgaaatagcttc

SEQ ID NO: 200674 - DNA, 25 bp, Homo sapien
tatttgccgagagaggtggatccac

SEQ ID NO: 200675 - DNA, 25 bp, Homo sapien
gatccactggtttataacatgtctc

SEQ ID NO: 200676 - DNA, 25 bp, Homo sapien
ctcatgaggaccctgggaatgtttc

SEQ ID NO: 200677 - DNA, 25 bp, Homo sapien
tattctgagattggagggctatcag

SEQ ID NO: 200678 - DNA, 25 bp, Homo sapien
tacaggtatgttcgcaattcgtgct

SEQ ID NO: 200679 - DNA, 25 bp, Homo sapien
taatctcttgacattgcaatctgcc

SEQ ID NO: 200680 - DNA, 25 bp, Homo sapien
ctgattctaagaagctggagtctaa

SEQ ID NO: 200681 - DNA, 25 bp, Homo sapien
ttattgcagcaagttacaaagggaa

SEQ ID NO: 200682 - DNA, 25 bp, Homo sapien
cagcggcatggcggccgggtgtaag

SEQ ID NO: 200683 - DNA, 25 bp, Homo sapien
tggcggccgggtgtaagacgcccga

SEQ ID NO: 200684 - DNA, 25 bp, Homo sapien
ggcatggcggccgggtgtaagacgc

SEQ ID NO: 200685 - DNA, 25 bp, Homo sapien
catggcggccgggtgtaagacgccc

SEQ ID NO: 200686 - DNA, 25 bp, Homo sapien
gatgtacagtggtctagtggagtca

SEQ ID NO: 200687 - DNA, 25 bp, Homo sapien
gacattcagttagtccagatctgcc

SEQ ID NO: 200688 - DNA, 25 bp, Homo sapien
gatgactttagggtagcacaaacaa

SEQ ID NO: 200689 - DNA, 25 bp, Homo sapien
aaagctttcttacccagcatagtgg

SEQ ID NO: 200690 - DNA, 25 bp, Homo sapien
tacttcttgcttttatattaccatc

SEQ ID NO: 200691 - DNA, 25 bp, Homo sapien
tgagagaatcgtgtttaaaggaaag

SEQ ID NO: 200692 - DNA, 25 bp, Homo sapien
gattagttgagcaagtttggagttg

SEQ ID NO: 200693 - DNA, 25 bp, Homo sapien
tatttttaaggattagttgagcaag

SEQ ID NO: 200694 - DNA, 25 bp, Homo sapien
cacggtagccgacatatgtaatccc

SEQ ID NO: 200695 - DNA, 25 bp, Homo sapien
ccaaagatgtgaacggccagacacg

SEQ ID NO: 200696 - DNA, 25 bp, Homo sapien
ggcaccactaaaagacagtgtattg

SEQ ID NO: 200697 - DNA, 25 bp, Homo sapien
taagatcacctcacaactataccat

SEQ ID NO: 200698 - DNA, 25 bp, Homo sapien
ggagtgggacagtgtctctttaaaa

SEQ ID NO: 200699 - DNA, 25 bp, Homo sapien
tggagtgggacagtgtctctttaaa

SEQ ID NO: 200700 - DNA, 25 bp, Homo sapien
gtgatggagtgggacagtgtctctt

SEQ ID NO: 200701 - DNA, 25 bp, Homo sapien
ctgggtgatggagtgggacagtgtc

SEQ ID NO: 200702 - DNA, 25 bp, Homo sapien
gggcaacatagactccacacaaaaa

SEQ ID NO: 200703 - DNA, 25 bp, Homo sapien
ctgggcaacatagactccacacaaa

SEQ ID NO: 200704 - DNA, 25 bp, Homo sapien
gcaacatagactccacacaaaaaat

SEQ ID NO: 200705 - DNA, 25 bp, Homo sapien
attagctgggtgtggtggcatgcac

SEQ ID NO: 200706 - DNA, 25 bp, Homo sapien
taaagggatttactgaagtgccaac

SEQ ID NO: 200707 - DNA, 25 bp, Homo sapien
caaattgttcagtggtaagaaaggt

SEQ ID NO: 200708 - DNA, 25 bp, Homo sapien
aaaaggctatctattgtgggtacac

SEQ ID NO: 200709 - DNA, 25 bp, Homo sapien
gcatttagttgtgcctttaagtagg

SEQ ID NO: 200710 - DNA, 25 bp, Homo sapien
gccaactatagctggctgcatggag

SEQ ID NO: 200711 - DNA, 25 bp, Homo sapien
gcgtttcacgaaggacagatcagtt

SEQ ID NO: 200712 - DNA, 25 bp, Homo sapien
tataagcaggtaagtagtgcactct

SEQ ID NO: 200713 - DNA, 25 bp, Homo sapien
caaaatccagatgacgtggtgtgag

SEQ ID NO: 200714 - DNA, 25 bp, Homo sapien
ataaacaggtttaatgcaacatgga

SEQ ID NO: 200715 - DNA, 25 bp, Homo sapien
aggtttaatgcaacatggaatgcaa

SEQ ID NO: 200716 - DNA, 25 bp, Homo sapien
caggtttaatgcaacatggaatgca

SEQ ID NO: 200717 - DNA, 25 bp, Homo sapien
aacaggtttaatgcaacatggaatg

SEQ ID NO: 200718 - DNA, 25 bp, Homo sapien
gaggcttcagatacccatgaaaaga

SEQ ID NO: 200719 - DNA, 25 bp, Homo sapien
cagggtagaaacacataggctgagg

SEQ ID NO: 200720 - DNA, 25 bp, Homo sapien
tacagaggaccttagatgtcccact

SEQ ID NO: 200721 - DNA, 25 bp, Homo sapien
tgcctgtattgggatcaacgaatgt

SEQ ID NO: 200722 - DNA, 25 bp, Homo sapien
caactctaggaagagtgtagccttg

SEQ ID NO: 200723 - DNA, 25 bp, Homo sapien
taaattcacagcatgtcccaccagc

SEQ ID NO: 200724 - DNA, 25 bp, Homo sapien
cagtatttatggaggtcactcggct

SEQ ID NO: 200725 - DNA, 25 bp, Homo sapien
tagccttgtagcattagcccctttg

SEQ ID NO: 200726 - DNA, 25 bp, Homo sapien
taacagttcagtttcttgcttagca

SEQ ID NO: 200727 - DNA, 25 bp, Homo sapien
aatttgccaagctgctttcctctgc

SEQ ID NO: 200728 - DNA, 25 bp, Homo sapien
aacaacaacatcttctactcttcct

SEQ ID NO: 200729 - DNA, 25 bp, Homo sapien
ctctgcattcatcactaacaacaac

SEQ ID NO: 200730 - DNA, 25 bp, Homo sapien
gcattcatcactaacaacaacatct

SEQ ID NO: 200731 - DNA, 25 bp, Homo sapien
tttacaatgtttaaaggagtaagca

SEQ ID NO: 200732 - DNA, 25 bp, Homo sapien
caatgtttaaaggagtaagcattta

SEQ ID NO: 200733 - DNA, 25 bp, Homo sapien
atgtttaaaggagtaagcatttact

SEQ ID NO: 200734 - DNA, 25 bp, Homo sapien
tacaatgtttaaaggagtaagcatt

SEQ ID NO: 200735 - DNA, 25 bp, Homo sapien
aatctgtcctagagtcacatcttct

SEQ ID NO: 200736 - DNA, 25 bp, Homo sapien
actccagtctctgttagctgaccca

SEQ ID NO: 200737 - DNA, 25 bp, Homo sapien
cagtctctgttagctgacccaatac

SEQ ID NO: 200738 - DNA, 25 bp, Homo sapien
tcataaattgttcagggctgacaac

SEQ ID NO: 200739 - DNA, 25 bp, Homo sapien
ttgttcagggctgacaactccagtc

SEQ ID NO: 200740 - DNA, 25 bp, Homo sapien
tgactccagtccacttctttgagta

SEQ ID NO: 200741 - DNA, 25 bp, Homo sapien
aaatgtagctgtattctgactccag

SEQ ID NO: 200742 - DNA, 25 bp, Homo sapien
tcagcagtacaaagaggcctcaaaa

SEQ ID NO: 200743 - DNA, 25 bp, Homo sapien
gagtagacttgggtcaaacatagga

SEQ ID NO: 200744 - DNA, 25 bp, Homo sapien
tttcctctgggttggtgctactaaa

SEQ ID NO: 200745 - DNA, 25 bp, Homo sapien
ttcatgggctcttaaattttttaca

SEQ ID NO: 200746 - DNA, 25 bp, Homo sapien
gcccggctattatcaggtcttttaa

SEQ ID NO: 200747 - DNA, 25 bp, Homo sapien
aaatgaatagctgacttttcatggg

SEQ ID NO: 200748 - DNA, 25 bp, Homo sapien
aatgagcaggttctcactagttgta

SEQ ID NO: 200749 - DNA, 25 bp, Homo sapien
gtgatcatgatatttccccctcttt

SEQ ID NO: 200750 - DNA, 25 bp, Homo sapien
gatgcttcccaacaattaaaagttg

SEQ ID NO: 200751 - DNA, 25 bp, Homo sapien
taacagagaagtaacgataggaagg

SEQ ID NO: 200752 - DNA, 25 bp, Homo sapien
gatgggacccaagtcaaaattcatt

SEQ ID NO: 200753 - DNA, 25 bp, Homo sapien
cataagtcacagtatgctttagggc

SEQ ID NO: 200754 - DNA, 25 bp, Homo sapien
cattataccagatgtggaattttcc

SEQ ID NO: 200755 - DNA, 25 bp, Homo sapien
ttttaatgagagaacaatttgccca

SEQ ID NO: 200756 - DNA, 25 bp, Homo sapien
tcaggcactgtgctggttacaggaa

SEQ ID NO: 200757 - DNA, 25 bp, Homo sapien
ctttaattcatgaatcaggcactgt

SEQ ID NO: 200758 - DNA, 25 bp, Homo sapien
atcaggcactgtgctggttacagga

SEQ ID NO: 200759 - DNA, 25 bp, Homo sapien
taattcatgaatcaggcactgtgct

SEQ ID NO: 200760 - DNA, 25 bp, Homo sapien
gctggcgaggattaacgcccagctc

SEQ ID NO: 200761 - DNA, 25 bp, Homo sapien
ccagctggcgaggattaacgcccag

SEQ ID NO: 200762 - DNA, 25 bp, Homo sapien
ggcgaggattaacgcccagctcctc

SEQ ID NO: 200763 - DNA, 25 bp, Homo sapien
acccagctggcgaggattaacgccc

SEQ ID NO: 200764 - DNA, 25 bp, Homo sapien
agaggccctgcggtcggcgctccta

SEQ ID NO: 200765 - DNA, 25 bp, Homo sapien
ccacagttgggaaccgcggcccaga

SEQ ID NO: 200766 - DNA, 25 bp, Homo sapien
cccagacgtggcagcgccaacgcct

SEQ ID NO: 200767 - DNA, 25 bp, Homo sapien
ggcgctcctagccaggcgcgtcgga

SEQ ID NO: 200768 - DNA, 25 bp, Homo sapien
cagaatgtggtggtatgcatccgta

SEQ ID NO: 200769 - DNA, 25 bp, Homo sapien
aaacatcagtgagttgatggcatcc

SEQ ID NO: 200770 - DNA, 25 bp, Homo sapien
caaaagaatatatagggcatgagca

SEQ ID NO: 200771 - DNA, 25 bp, Homo sapien
aagaaccccatagatcatataccag

SEQ ID NO: 200772 - DNA, 25 bp, Homo sapien
gacaagactgaaattccgtcaaaaa

SEQ ID NO: 200773 - DNA, 25 bp, Homo sapien
aatttcaacgtatttccatatgttc

SEQ ID NO: 200774 - DNA, 25 bp, Homo sapien
taattgaagtgaaggcaaaacctgg

SEQ ID NO: 200775 - DNA, 25 bp, Homo sapien
cctcatccaggtggtcaagtacaat

SEQ ID NO: 200776 - DNA, 25 bp, Homo sapien
tggtcacgttcagagattaacagcc

SEQ ID NO: 200777 - DNA, 25 bp, Homo sapien
taaaaagtctacatgaacagccttt

SEQ ID NO: 200778 - DNA, 25 bp, Homo sapien
atttaaaaagtctacatgaacagcc

SEQ ID NO: 200779 - DNA, 25 bp, Homo sapien
accatttaaaaagtctacatgaaca

SEQ ID NO: 200780 - DNA, 25 bp, Homo sapien
catcaaagagatcttcaaaaccatt

SEQ ID NO: 200781 - DNA, 25 bp, Homo sapien
tgtgggccaatataaacttcaaaac

SEQ ID NO: 200782 - DNA, 25 bp, Homo sapien
ctgtgggccaatataaacttcaaaa

SEQ ID NO: 200783 - DNA, 25 bp, Homo sapien
caacactgtcttctcatcttggaat

SEQ ID NO: 200784 - DNA, 25 bp, Homo sapien
tgatgtaaagccactgatcggcctg

SEQ ID NO: 200785 - DNA, 25 bp, Homo sapien
gatcggcctgtggttatttcgtgct

SEQ ID NO: 200786 - DNA, 25 bp, Homo sapien
tatggatgaagtagggccaaaatag

SEQ ID NO: 200787 - DNA, 25 bp, Homo sapien
gaaaagccttttgatgtaaagccac

SEQ ID NO: 200788 - DNA, 25 bp, Homo sapien
tgccctatttcattgggtaagagtc

SEQ ID NO: 200789 - DNA, 25 bp, Homo sapien
attgggtaagagtctatttatttca

SEQ ID NO: 200790 - DNA, 25 bp, Homo sapien
aaggtaaaaacgttcagtctgatca

SEQ ID NO: 200791 - DNA, 25 bp, Homo sapien
gaatggccaagcttcagcacactct

SEQ ID NO: 200792 - DNA, 25 bp, Homo sapien
ctcatttggatagatgtatgctggc

SEQ ID NO: 200793 - DNA, 25 bp, Homo sapien
ttctgataggcaaaactgcaggaat

SEQ ID NO: 200794 - DNA, 25 bp, Homo sapien
gagccatcgcacctggccatatcta

SEQ ID NO: 200795 - DNA, 25 bp, Homo sapien
atcgcacctggccatatctatttct

SEQ ID NO: 200796 - DNA, 25 bp, Homo sapien
gccatcgcacctggccatatctatt

SEQ ID NO: 200797 - DNA, 25 bp, Homo sapien
catcgcacctggccatatctatttc

SEQ ID NO: 200798 - DNA, 25 bp, Homo sapien
aggggctgattgagttcatctggaa

SEQ ID NO: 200799 - DNA, 25 bp, Homo sapien
aaaaagaatagagtaaggggctgat

SEQ ID NO: 200800 - DNA, 25 bp, Homo sapien
tagagtaaggggctgattgagttca

SEQ ID NO: 200801 - DNA, 25 bp, Homo sapien
agttcatctggaagaacccgtggcc

SEQ ID NO: 200802 - DNA, 25 bp, Homo sapien
tgtctaaggagcctacagagtggga

SEQ ID NO: 200803 - DNA, 25 bp, Homo sapien
gaaatgcgggtaactgaggactgtt

SEQ ID NO: 200804 - DNA, 25 bp, Homo sapien
ggcagccccctccaatttcttggag

SEQ ID NO: 200805 - DNA, 25 bp, Homo sapien
tcccacgtcaccgacagtgacggca

SEQ ID NO: 200806 - DNA, 25 bp, Homo sapien
tctaacaagagcagcatgtgtgccc

SEQ ID NO: 200807 - DNA, 25 bp, Homo sapien
agagcagcatgtgtgcccgtatgtg

SEQ ID NO: 200808 - DNA, 25 bp, Homo sapien
ctgtctaacaagagcagcatgtgtg

SEQ ID NO: 200809 - DNA, 25 bp, Homo sapien
taacaagagcagcatgtgtgcccgt

SEQ ID NO: 200810 - DNA, 25 bp, Homo sapien
ctctggtgtcgagtgcgttgtcaag

SEQ ID NO: 200811 - DNA, 25 bp, Homo sapien
ggtgtcgagtgcgttgtcaagcccc

SEQ ID NO: 200812 - DNA, 25 bp, Homo sapien
tgtcgagtgcgttgtcaagcccctg

SEQ ID NO: 200813 - DNA, 25 bp, Homo sapien
ctggtgtcgagtgcgttgtcaagcc

SEQ ID NO: 200814 - DNA, 25 bp, Homo sapien
gaatttggatgacggtgacagcaat

SEQ ID NO: 200815 - DNA, 25 bp, Homo sapien
atttggatgacggtgacagcaatga

SEQ ID NO: 200816 - DNA, 25 bp, Homo sapien
aatttggatgacggtgacagcaatg

SEQ ID NO: 200817 - DNA, 25 bp, Homo sapien
tttggatgacggtgacagcaatgac

SEQ ID NO: 200818 - DNA, 25 bp, Homo sapien
cagcgcaacagactagaacatggcc

SEQ ID NO: 200819 - DNA, 25 bp, Homo sapien
catttatacagtctttgaaccatgg

SEQ ID NO: 200820 - DNA, 25 bp, Homo sapien
aattttctgactagcaccaatacag

SEQ ID NO: 200821 - DNA, 25 bp, Homo sapien
ccctcgcacccttttgggctatgtg

SEQ ID NO: 200822 - DNA, 25 bp, Homo sapien
cagttttcaattcatggccctaagg

SEQ ID NO: 200823 - DNA, 25 bp, Homo sapien
gagttcatataggttaagccctgga

SEQ ID NO: 200824 - DNA, 25 bp, Homo sapien
caagcacgacggactaatagcattt

SEQ ID NO: 200825 - DNA, 25 bp, Homo sapien
cattactaaatatcaggcctcctgc

SEQ ID NO: 200826 - DNA, 25 bp, Homo sapien
agttaaatattgttatggccgtgga

SEQ ID NO: 200827 - DNA, 25 bp, Homo sapien
tttcaagcttactttattaagcagc

SEQ ID NO: 200828 - DNA, 25 bp, Homo sapien
ggccgtggagtttcattaaacagta

SEQ ID NO: 200829 - DNA, 25 bp, Homo sapien
tattaagcagcatataacaaacagc

SEQ ID NO: 200830 - DNA, 25 bp, Homo sapien
cttttgcacgtgttgagagaaatat

SEQ ID NO: 200831 - DNA, 25 bp, Homo sapien
ccactttgcaatctacttcagtaca

SEQ ID NO: 200832 - DNA, 25 bp, Homo sapien
tatgtagccaccaatgaattcatga

SEQ ID NO: 200833 - DNA, 25 bp, Homo sapien
aactctcgttttggtcttttgcacg

SEQ ID NO: 200834 - DNA, 25 bp, Homo sapien
aggtggtggtacaaataatcatcag

SEQ ID NO: 200835 - DNA, 25 bp, Homo sapien
gtatcagagaaggactatattcaag

SEQ ID NO: 200836 - DNA, 25 bp, Homo sapien
taactgggctaattatgaaataggc

SEQ ID NO: 200837 - DNA, 25 bp, Homo sapien
tctgtctgtactttaagaggtggtg

SEQ ID NO: 200838 - DNA, 25 bp, Homo sapien
cagtctgttgtatgcaattccaata

SEQ ID NO: 200839 - DNA, 25 bp, Homo sapien
gctggcatccatccgaatcagtctg

SEQ ID NO: 200840 - DNA, 25 bp, Homo sapien
gtgctggcatccatccgaatcagtc

SEQ ID NO: 200841 - DNA, 25 bp, Homo sapien
atcagtctgttgtatgcaattccaa

SEQ ID NO: 200842 - DNA, 25 bp, Homo sapien
tggcttcaattagactcatctgagc

SEQ ID NO: 200843 - DNA, 25 bp, Homo sapien
gatgccaaattcaggtagtgactgc

SEQ ID NO: 200844 - DNA, 25 bp, Homo sapien
ggtagtgactgccaagcttgaataa

SEQ ID NO: 200845 - DNA, 25 bp, Homo sapien
gagctacattctgatgggcctccaa

SEQ ID NO: 200846 - DNA, 25 bp, Homo sapien
tccaaatgcatacacctaacggtac

SEQ ID NO: 200847 - DNA, 25 bp, Homo sapien
caaaagattgaattacgcaccccgt

SEQ ID NO: 200848 - DNA, 25 bp, Homo sapien
tattaggagtacatagttgccacac

SEQ ID NO: 200849 - DNA, 25 bp, Homo sapien
ggtactactattacagaacagcaca

SEQ ID NO: 200850 - DNA, 25 bp, Homo sapien
gatggcaatgcgaggaaagaaaaag

SEQ ID NO: 200851 - DNA, 25 bp, Homo sapien
gcataaaataagtgcagtgcccatc

SEQ ID NO: 200852 - DNA, 25 bp, Homo sapien
gaaaaagttgcggtcacctgcaaac

SEQ ID NO: 200853 - DNA, 25 bp, Homo sapien
tcgtgtacccagttctcaccggtta

SEQ ID NO: 200854 - DNA, 25 bp, Homo sapien
gaaaactacgagtctatgcccaggt

SEQ ID NO: 200855 - DNA, 25 bp, Homo sapien
catcatggtcgctattctctggaaa

SEQ ID NO: 200856 - DNA, 25 bp, Homo sapien
gagatgccgtatactacatgaggaa

SEQ ID NO: 200857 - DNA, 25 bp, Homo sapien
tacttactaggcaccagggcaataa

SEQ ID NO: 200858 - DNA, 25 bp, Homo sapien
cagtagatgaagtaaaatgaagtaa

SEQ ID NO: 200859 - DNA, 25 bp, Homo sapien
cagcacagtagatgaagtaaaatga

SEQ ID NO: 200860 - DNA, 25 bp, Homo sapien
agatgaagtaaaatgaagtaagtac

SEQ ID NO: 200861 - DNA, 25 bp, Homo sapien
gtagatgaagtaaaatgaagtaagt

SEQ ID NO: 200862 - DNA, 25 bp, Homo sapien
tctggtattaactgaggatctgggt

SEQ ID NO: 200863 - DNA, 25 bp, Homo sapien
gttgtaagaactgtccgccatggtc

SEQ ID NO: 200864 - DNA, 25 bp, Homo sapien
tatatcagtcgtgatctgctctggt

SEQ ID NO: 200865 - DNA, 25 bp, Homo sapien
ctttggaggctaatctgcaggctgc

SEQ ID NO: 200866 - DNA, 25 bp, Homo sapien
ctggaatcaggagtttaatgttaaa

SEQ ID NO: 200867 - DNA, 25 bp, Homo sapien
aactggaatcaggagtttaatgtta

SEQ ID NO: 200868 - DNA, 25 bp, Homo sapien
cacaacgaagccagatttcattcat

SEQ ID NO: 200869 - DNA, 25 bp, Homo sapien
attgtcacaacgaagccagatttca

SEQ ID NO: 200870 - DNA, 25 bp, Homo sapien
tgatcatgcagtaggctctacgaag

SEQ ID NO: 200871 - DNA, 25 bp, Homo sapien
tcagaatttcactttgtaggaggct

SEQ ID NO: 200872 - DNA, 25 bp, Homo sapien
ggcataacagctggcataaacaagt

SEQ ID NO: 200873 - DNA, 25 bp, Homo sapien
ggctttacagaagggagtgcagatt

SEQ ID NO: 200874 - DNA, 25 bp, Homo sapien
agtttcttctgcgactacctctcat

SEQ ID NO: 200875 - DNA, 25 bp, Homo sapien
ctgccagtttcttctgcgactacct

SEQ ID NO: 200876 - DNA, 25 bp, Homo sapien
cagtttcttctgcgactacctctca

SEQ ID NO: 200877 - DNA, 25 bp, Homo sapien
gccagtttcttctgcgactacctct

SEQ ID NO: 200878 - DNA, 25 bp, Homo sapien
gcccagccaagttgtaccttttcta

SEQ ID NO: 200879 - DNA, 25 bp, Homo sapien
cgcgcccagccaagttgtacctttt

SEQ ID NO: 200880 - DNA, 25 bp, Homo sapien
ttagataacaaatacttactattgt

SEQ ID NO: 200881 - DNA, 25 bp, Homo sapien
tagataacaaatacttactattgtg

SEQ ID NO: 200882 - DNA, 25 bp, Homo sapien
ttgtttgtaacctttcagagtcagc

SEQ ID NO: 200883 - DNA, 25 bp, Homo sapien
caagaaatggatgtgtctttgaagg

SEQ ID NO: 200884 - DNA, 25 bp, Homo sapien
ccctgaggttcatctgatgagctgg

SEQ ID NO: 200885 - DNA, 25 bp, Homo sapien
tgaaggtgcaccaatattgtttgta

SEQ ID NO: 200886 - DNA, 25 bp, Homo sapien
ggtcagcgtcttattagtcagtgct

SEQ ID NO: 200887 - DNA, 25 bp, Homo sapien
cttggtcagcgtcttattagtcagt

SEQ ID NO: 200888 - DNA, 25 bp, Homo sapien
gctactgttactggatgcgagcctc

SEQ ID NO: 200889 - DNA, 25 bp, Homo sapien
aaattgatcccccttggtcagcgtc

SEQ ID NO: 200890 - DNA, 25 bp, Homo sapien
cagcgttccgaggagaaaggcagta

SEQ ID NO: 200891 - DNA, 25 bp, Homo sapien
tctgcagctgtagccatcacatcta

SEQ ID NO: 200892 - DNA, 25 bp, Homo sapien
tagaagatcccacaaacagcgttcc

SEQ ID NO: 200893 - DNA, 25 bp, Homo sapien
ggcctgtgttccagtattctgcagc

SEQ ID NO: 200894 - DNA, 25 bp, Homo sapien
tgtctgcaggattgccttggagcct

SEQ ID NO: 200895 - DNA, 25 bp, Homo sapien
ctagatcctgtaattacctgcaggt

SEQ ID NO: 200896 - DNA, 25 bp, Homo sapien
gtttatgggtgtctgcaggattgcc

SEQ ID NO: 200897 - DNA, 25 bp, Homo sapien
tatgggtgtctgcaggattgccttg

SEQ ID NO: 200898 - DNA, 25 bp, Homo sapien
tgcccttatctcagaagttccatat

SEQ ID NO: 200899 - DNA, 25 bp, Homo sapien
gatgcaaatttacctggcaggactg

SEQ ID NO: 200900 - DNA, 25 bp, Homo sapien
tgaactgctgtatgttcagctatgg

SEQ ID NO: 200901 - DNA, 25 bp, Homo sapien
ggtagtggatctgaaatcatgccct

SEQ ID NO: 200902 - DNA, 25 bp, Homo sapien
gggctgtgccactgtattactatgt

SEQ ID NO: 200903 - DNA, 25 bp, Homo sapien
gccgagctctcttgattctgtggaa

SEQ ID NO: 200904 - DNA, 25 bp, Homo sapien
gaaataatcgctggcagtgacacag

SEQ ID NO: 200905 - DNA, 25 bp, Homo sapien
tgcgctctgaacgaggaaataatcg

SEQ ID NO: 200906 - DNA, 25 bp, Homo sapien
gtagtcagcaagttcaggaatggaa

SEQ ID NO: 200907 - DNA, 25 bp, Homo sapien
atgtagtcagcaagttcaggaatgg

SEQ ID NO: 200908 - DNA, 25 bp, Homo sapien
tgtagtcagcaagttcaggaatgga

SEQ ID NO: 200909 - DNA, 25 bp, Homo sapien
atggaatgcatcaattcaagctaaa

SEQ ID NO: 200910 - DNA, 25 bp, Homo sapien
ctttgaacctaaatccacaaaatgg

SEQ ID NO: 200911 - DNA, 25 bp, Homo sapien
actttgaacctaaatccacaaaatg

SEQ ID NO: 200912 - DNA, 25 bp, Homo sapien
tcaattcaagctaaattagtaggta

SEQ ID NO: 200913 - DNA, 25 bp, Homo sapien
ccccttccagagtaatctccaggtc

SEQ ID NO: 200914 - DNA, 25 bp, Homo sapien
cccttccagagtaatctccaggtct

SEQ ID NO: 200915 - DNA, 25 bp, Homo sapien
caatacgggatcctaactggctcat

SEQ ID NO: 200916 - DNA, 25 bp, Homo sapien
gaagaaagccataaccacgtgaggg

SEQ ID NO: 200917 - DNA, 25 bp, Homo sapien
gatgtcccaaggagagtatacttcg

SEQ ID NO: 200918 - DNA, 25 bp, Homo sapien
tacaaccttagggtcagtctctgag

SEQ ID NO: 200919 - DNA, 25 bp, Homo sapien
taggctgaacctagaatcccgtcat

SEQ ID NO: 200920 - DNA, 25 bp, Homo sapien
cgtcataactgggaatacttgccaa

SEQ ID NO: 200921 - DNA, 25 bp, Homo sapien
acaccaacttcatcaggactttagg

SEQ ID NO: 200922 - DNA, 25 bp, Homo sapien
tgccaaagcattactcgggtatctg

SEQ ID NO: 200923 - DNA, 25 bp, Homo sapien
taagtcccatttactagacctttca

SEQ ID NO: 200924 - DNA, 25 bp, Homo sapien
tcccatttactagacctttcaacta

SEQ ID NO: 200925 - DNA, 25 bp, Homo sapien
caggagaatggcccatttggcctgc

SEQ ID NO: 200926 - DNA, 25 bp, Homo sapien
tggcctgctcgtaaagctgattgat

SEQ ID NO: 200927 - DNA, 25 bp, Homo sapien
gctgattgattctgattgcatcata

SEQ ID NO: 200928 - DNA, 25 bp, Homo sapien
cgtaaagctgattgattctgattgc

SEQ ID NO: 200929 - DNA, 25 bp, Homo sapien
atacttgaatcggagcagcaaggcc

SEQ ID NO: 200930 - DNA, 25 bp, Homo sapien
catcttgttccatgagagatcttga

SEQ ID NO: 200931 - DNA, 25 bp, Homo sapien
aaaaaagctgtaatacttgaatcgg

SEQ ID NO: 200932 - DNA, 25 bp, Homo sapien
cacatcttgttccatgagagatctt

SEQ ID NO: 200933 - DNA, 25 bp, Homo sapien
gctttatcaagaagagcttgaggct

SEQ ID NO: 200934 - DNA, 25 bp, Homo sapien
aaccaagcagaagttggtgacaagg

SEQ ID NO: 200935 - DNA, 25 bp, Homo sapien
tgacagcaagtataccaggattgcc

SEQ ID NO: 200936 - DNA, 25 bp, Homo sapien
gacgtgattggttgactgacagcaa

SEQ ID NO: 200937 - DNA, 25 bp, Homo sapien
gccttctgacaaagcactgtcacca

SEQ ID NO: 200938 - DNA, 25 bp, Homo sapien
agtcctgggcttgaatatatacttc

SEQ ID NO: 200939 - DNA, 25 bp, Homo sapien
tgttttactatacagtcctgggctt

SEQ ID NO: 200940 - DNA, 25 bp, Homo sapien
tctcagtgaataaacaggtttcaac

SEQ ID NO: 200941 - DNA, 25 bp, Homo sapien
gaactgaattcatatagattaagaa

SEQ ID NO: 200942 - DNA, 25 bp, Homo sapien
cctagaaagagtctaaacagagata

SEQ ID NO: 200943 - DNA, 25 bp, Homo sapien
gtctgccctagaaagagtctaaaca

SEQ ID NO: 200944 - DNA, 25 bp, Homo sapien
attttcaccaaaatacctatcttat

SEQ ID NO: 200945 - DNA, 25 bp, Homo sapien
tagatatttaaaacccgatataatc

SEQ ID NO: 200946 - DNA, 25 bp, Homo sapien
tcaaaaagcactacagtctgagtcc

SEQ ID NO: 200947 - DNA, 25 bp, Homo sapien
taatcaaacaactcctaaatattgc

SEQ ID NO: 200948 - DNA, 25 bp, Homo sapien
tagctcccaggcaagtgatttagcc

SEQ ID NO: 200949 - DNA, 25 bp, Homo sapien
taagtaaaagctaggttgtggcatc

SEQ ID NO: 200950 - DNA, 25 bp, Homo sapien
tgcacagtgcaatggtgaaagctct

SEQ ID NO: 200951 - DNA, 25 bp, Homo sapien
tctaccagttaccagggattagctc

SEQ ID NO: 200952 - DNA, 25 bp, Homo sapien
tttattgattcaactattaacacct

SEQ ID NO: 200953 - DNA, 25 bp, Homo sapien
ctttattgattcaactattaacacc

SEQ ID NO: 200954 - DNA, 25 bp, Homo sapien
acatgatgatttgcacatgagagaa

SEQ ID NO: 200955 - DNA, 25 bp, Homo sapien
tcatcttcagactggtcatctagct

SEQ ID NO: 200956 - DNA, 25 bp, Homo sapien
ctgatccaggagtgataagaggccc

SEQ ID NO: 200957 - DNA, 25 bp, Homo sapien
agaggcccctctaattcaagtgcct

SEQ ID NO: 200958 - DNA, 25 bp, Homo sapien
tcagactggtcatctagcttcttct

SEQ ID NO: 200959 - DNA, 25 bp, Homo sapien
gcagtttacagctttaggagcccat

SEQ ID NO: 200960 - DNA, 25 bp, Homo sapien
tcatcacaaggagacggaaaatttt

SEQ ID NO: 200961 - DNA, 25 bp, Homo sapien
taggatcctaccatgctgctacaga

SEQ ID NO: 200962 - DNA, 25 bp, Homo sapien
tgtgtatcacaatgtctggcagcac

SEQ ID NO: 200963 - DNA, 25 bp, Homo sapien
tcagctttaaatgccagtggggcca

SEQ ID NO: 200964 - DNA, 25 bp, Homo sapien
cctcagctttaaatgccagtggggc

SEQ ID NO: 200965 - DNA, 25 bp, Homo sapien
ctcagctttaaatgccagtggggcc

SEQ ID NO: 200966 - DNA, 25 bp, Homo sapien
cagctttaaatgccagtggggccat

SEQ ID NO: 200967 - DNA, 25 bp, Homo sapien
tgaagactctatcagagaaattcac

SEQ ID NO: 200968 - DNA, 25 bp, Homo sapien
gaagactctatcagagaaattcact

SEQ ID NO: 200969 - DNA, 25 bp, Homo sapien
ttgaagactctatcagagaaattca

SEQ ID NO: 200970 - DNA, 25 bp, Homo sapien
gcatctgcctgaataccatacttat

SEQ ID NO: 200971 - DNA, 25 bp, Homo sapien
gaataccatacttatctaaggtcca

SEQ ID NO: 200972 - DNA, 25 bp, Homo sapien
tgcaggcggagcagtttgtgctgag

SEQ ID NO: 200973 - DNA, 25 bp, Homo sapien
gggtgaactgaagcttagcatctgc

SEQ ID NO: 200974 - DNA, 25 bp, Homo sapien
cacacatccatggatatgccccaga

SEQ ID NO: 200975 - DNA, 25 bp, Homo sapien
aatattcagattcctggagactcag

SEQ ID NO: 200976 - DNA, 25 bp, Homo sapien
ctttttgagataatattcagattcc

SEQ ID NO: 200977 - DNA, 25 bp, Homo sapien
tggatatgccccagatttgacttgg

SEQ ID NO: 200978 - DNA, 25 bp, Homo sapien
tttgctaaggcaacatgtcattgtg

SEQ ID NO: 200979 - DNA, 25 bp, Homo sapien
tgtcattgtgacttataagcacaga

SEQ ID NO: 200980 - DNA, 25 bp, Homo sapien
gtattctcacacgtccataaactag

SEQ ID NO: 200981 - DNA, 25 bp, Homo sapien
gataacttttctgggcacgtgactt

SEQ ID NO: 200982 - DNA, 25 bp, Homo sapien
aggatcctcttgagccccaaatgag

SEQ ID NO: 200983 - DNA, 25 bp, Homo sapien
gccccaaatgagatataactattac

SEQ ID NO: 200984 - DNA, 25 bp, Homo sapien
ccaaatgagatataactattaccat

SEQ ID NO: 200985 - DNA, 25 bp, Homo sapien
ttttgttttaggatcctcttgagcc

SEQ ID NO: 200986 - DNA, 25 bp, Homo sapien
tcactttggtccttcaataataaaa

SEQ ID NO: 200987 - DNA, 25 bp, Homo sapien
cacctcgccggtcactctcagggtg

SEQ ID NO: 200988 - DNA, 25 bp, Homo sapien
taagcatcacgcctccaatgtgcac

SEQ ID NO: 200989 - DNA, 25 bp, Homo sapien
tcagggtgacatcgcggttcaggtc

SEQ ID NO: 200990 - DNA, 25 bp, Homo sapien
aggtccgtcacatggacactcagtt

SEQ ID NO: 200991 - DNA, 25 bp, Homo sapien
ctgcgagcgcggaggaaatggctct

SEQ ID NO: 200992 - DNA, 25 bp, Homo sapien
gaggaaatggctctcgtaagcgtca

SEQ ID NO: 200993 - DNA, 25 bp, Homo sapien
aatggctctcgtaagcgtcactccc

SEQ ID NO: 200994 - DNA, 25 bp, Homo sapien
ggaaatggctctcgtaagcgtcact

SEQ ID NO: 200995 - DNA, 25 bp, Homo sapien
ttcggcagaaactcgggagggcggc

SEQ ID NO: 200996 - DNA, 25 bp, Homo sapien
tcggcagaaactcgggagggcggcg

SEQ ID NO: 200997 - DNA, 25 bp, Homo sapien
tggaggacccggggctttcggcaga

SEQ ID NO: 200998 - DNA, 25 bp, Homo sapien
gctcgccccgcagcgttcctcggtc

SEQ ID NO: 200999 - DNA, 25 bp, Homo sapien
tgcgggaggaccctacgccccgctc

SEQ ID NO: 201000 - DNA, 25 bp, Homo sapien
cagcgttcctcggtcccggcgccgc

SEQ ID NO: 201001 - DNA, 25 bp, Homo sapien
cccgcagcgttcctcggtcccggcg

SEQ ID NO: 201002 - DNA, 25 bp, Homo sapien
cccgagacacagcgcgggctgactc

SEQ ID NO: 201003 - DNA, 25 bp, Homo sapien
gccccgagacacagcgcgggctgac

SEQ ID NO: 201004 - DNA, 25 bp, Homo sapien
ccccgagacacagcgcgggctgact

SEQ ID NO: 201005 - DNA, 25 bp, Homo sapien
cgcggggcggcggtgtccgcgtccg

SEQ ID NO: 201006 - DNA, 25 bp, Homo sapien
gtgtccgcgtccggttcctcggctg

SEQ ID NO: 201007 - DNA, 25 bp, Homo sapien
cgcgtccggttcctcggctggcgaa

SEQ ID NO: 201008 - DNA, 25 bp, Homo sapien
ccggttcctcggctggcgaagcgct

SEQ ID NO: 201009 - DNA, 25 bp, Homo sapien
cggctaatggagtcccgtcgtcgcg

SEQ ID NO: 201010 - DNA, 25 bp, Homo sapien
gagcggctaatggagtcccgtcgtc

SEQ ID NO: 201011 - DNA, 25 bp, Homo sapien
taatggagtcccgtcgtcgcggccc

SEQ ID NO: 201012 - DNA, 25 bp, Homo sapien
tggccggagcggctaatggagtccc

SEQ ID NO: 201013 - DNA, 25 bp, Homo sapien
ggcttgtccgtgagaaacggcccca

SEQ ID NO: 201014 - DNA, 25 bp, Homo sapien
cgcggcgtgtgtccgcgctggcagc

SEQ ID NO: 201015 - DNA, 25 bp, Homo sapien
ttttcggagaacaaagtcctctcgc

SEQ ID NO: 201016 - DNA, 25 bp, Homo sapien
ttgtccgtgagaaacggccccagga

SEQ ID NO: 201017 - DNA, 25 bp, Homo sapien
gatggggaacggtcctcctgcttcc

SEQ ID NO: 201018 - DNA, 25 bp, Homo sapien
gctagtgatggggaacggtcctcct

SEQ ID NO: 201019 - DNA, 25 bp, Homo sapien
ctgttgaagactggctagtgatggg

SEQ ID NO: 201020 - DNA, 25 bp, Homo sapien
tccacttcccccattaactgttgta

SEQ ID NO: 201021 - DNA, 25 bp, Homo sapien
tgtacatgccatgacattcacgatg

SEQ ID NO: 201022 - DNA, 25 bp, Homo sapien
cacgatgatagacactggatacagc

SEQ ID NO: 201023 - DNA, 25 bp, Homo sapien
cagctactgactgaacgatggacag

SEQ ID NO: 201024 - DNA, 25 bp, Homo sapien
ttgcatccagcatttcagtttctct

SEQ ID NO: 201025 - DNA, 25 bp, Homo sapien
tagttacagaaagttttatgtagga

SEQ ID NO: 201026 - DNA, 25 bp, Homo sapien
cagaaagttttatgtaggaaaccat

SEQ ID NO: 201027 - DNA, 25 bp, Homo sapien
atttactgctttagttacagaaagt

SEQ ID NO: 201028 - DNA, 25 bp, Homo sapien
tgctttagttacagaaagttttatg

SEQ ID NO: 201029 - DNA, 25 bp, Homo sapien
ccacagagtgaagccaaaccaggaa

SEQ ID NO: 201030 - DNA, 25 bp, Homo sapien
aatccacaggccaagaatccagtcc

SEQ ID NO: 201031 - DNA, 25 bp, Homo sapien
tccacaggccaagaatccagtcctc

SEQ ID NO: 201032 - DNA, 25 bp, Homo sapien
cacaggccaagaatccagtcctcac

SEQ ID NO: 201033 - DNA, 25 bp, Homo sapien
aaatccacaggccaagaatccagtc

SEQ ID NO: 201034 - DNA, 25 bp, Homo sapien
tatcacccaatgtttcttgtttaca

SEQ ID NO: 201035 - DNA, 25 bp, Homo sapien
taagcttagagaatgaggatcaaat

SEQ ID NO: 201036 - DNA, 25 bp, Homo sapien
gaggaaagtacaaagatatcccata

SEQ ID NO: 201037 - DNA, 25 bp, Homo sapien
gttctgacagatatataatgacacg

SEQ ID NO: 201038 - DNA, 25 bp, Homo sapien
cacccacagtgttccagtctgcagt

SEQ ID NO: 201039 - DNA, 25 bp, Homo sapien
tttcaacctatccttctgccctcct

SEQ ID NO: 201040 - DNA, 25 bp, Homo sapien
ttttcaacctatccttctgccctcc

SEQ ID NO: 201041 - DNA, 25 bp, Homo sapien
ccttactggcatgttattagacttc

SEQ ID NO: 201042 - DNA, 25 bp, Homo sapien
actgttgatgggcagccacgttgat

SEQ ID NO: 201043 - DNA, 25 bp, Homo sapien
ttgggaaataaacccatatgctggg

SEQ ID NO: 201044 - DNA, 25 bp, Homo sapien
gtgcagagtgctttaattaggtccc

SEQ ID NO: 201045 - DNA, 25 bp, Homo sapien
gcatccaactgggaaaagaaatcaa

SEQ ID NO: 201046 - DNA, 25 bp, Homo sapien
catccaactgggaaaagaaatcaaa

SEQ ID NO: 201047 - DNA, 25 bp, Homo sapien
gacaacttcattaggaatgtggagg

SEQ ID NO: 201048 - DNA, 25 bp, Homo sapien
acagcacggcactggtacaataaca

SEQ ID NO: 201049 - DNA, 25 bp, Homo sapien
aagcagtaattaacttcaaccaggg

SEQ ID NO: 201050 - DNA, 25 bp, Homo sapien
tcagcaaagctgatacaagcaagca

SEQ ID NO: 201051 - DNA, 25 bp, Homo sapien
tgtcatgaattgataaaaggcccac

SEQ ID NO: 201052 - DNA, 25 bp, Homo sapien
tacggccatgtgtcagattaaagct

SEQ ID NO: 201053 - DNA, 25 bp, Homo sapien
tctgaggcataaacggaagtctgtc

SEQ ID NO: 201054 - DNA, 25 bp, Homo sapien
tttgagagatcaagcagggaccgca

SEQ ID NO: 201055 - DNA, 25 bp, Homo sapien
cactagctgtgatacggtactgaca

SEQ ID NO: 201056 - DNA, 25 bp, Homo sapien
gaatgacagcggaatacagataagg

SEQ ID NO: 201057 - DNA, 25 bp, Homo sapien
catgtctgaggcctttagcgtgagt

SEQ ID NO: 201058 - DNA, 25 bp, Homo sapien
taagttcagccagagtaccatcaga

SEQ ID NO: 201059 - DNA, 25 bp, Homo sapien
ggaagcagacatattcctatggcta

SEQ ID NO: 201060 - DNA, 25 bp, Homo sapien
ggaacataccttttactcagtgata

SEQ ID NO: 201061 - DNA, 25 bp, Homo sapien
tagcaagggtttcttagtgagtcac

SEQ ID NO: 201062 - DNA, 25 bp, Homo sapien
ggccgatttagtacttgctggaata

SEQ ID NO: 201063 - DNA, 25 bp, Homo sapien
gcaccttaagtggaacctagtggaa

SEQ ID NO: 201064 - DNA, 25 bp, Homo sapien
gatggctactgatcccctctaggta

SEQ ID NO: 201065 - DNA, 25 bp, Homo sapien
tgagagatacagctgaccaactttg

SEQ ID NO: 201066 - DNA, 25 bp, Homo sapien
tagaaatcaagcagggaaacaccgg

SEQ ID NO: 201067 - DNA, 25 bp, Homo sapien
caggtgtacaccactacaagtggct

SEQ ID NO: 201068 - DNA, 25 bp, Homo sapien
tgtacaccactacaagtggctaatt

SEQ ID NO: 201069 - DNA, 25 bp, Homo sapien
tgtcagtttttgcagagaagagggt

SEQ ID NO: 201070 - DNA, 25 bp, Homo sapien
ctggcttcaacccaagcttttcttt

SEQ ID NO: 201071 - DNA, 25 bp, Homo sapien
tagttagtggcatcacatcccttca

SEQ ID NO: 201072 - DNA, 25 bp, Homo sapien
cctcaagaagctagtacatgggtta

SEQ ID NO: 201073 - DNA, 25 bp, Homo sapien
tactccgtgtcaagtttagagaaac

SEQ ID NO: 201074 - DNA, 25 bp, Homo sapien
gaatcctgacttactgtgccttgtg

SEQ ID NO: 201075 - DNA, 25 bp, Homo sapien
tacatgtaacataataaaaagttta

SEQ ID NO: 201076 - DNA, 25 bp, Homo sapien
acatgtaacataataaaaagtttat

SEQ ID NO: 201077 - DNA, 25 bp, Homo sapien
catgtaacataataaaaagtttatt

SEQ ID NO: 201078 - DNA, 25 bp, Homo sapien
tgaaatctccgtatcttgacacaca

SEQ ID NO: 201079 - DNA, 25 bp, Homo sapien
tatatgttgccctaaagaaaactga

SEQ ID NO: 201080 - DNA, 25 bp, Homo sapien
tatagaatatgctgaaccttgacca

SEQ ID NO: 201081 - DNA, 25 bp, Homo sapien
tagcctttacatgcagtttacccaa

SEQ ID NO: 201082 - DNA, 25 bp, Homo sapien
gacgtgacagctgaccaatagcggc

SEQ ID NO: 201083 - DNA, 25 bp, Homo sapien
gagttcaaaatcaatcctgtgatcc

SEQ ID NO: 201084 - DNA, 25 bp, Homo sapien
ccaataggcagtatgcgacgtgaca

SEQ ID NO: 201085 - DNA, 25 bp, Homo sapien
taaattgggttttgcatcatcatcg

SEQ ID NO: 201086 - DNA, 25 bp, Homo sapien
tgtgcctgggacatacaaacgctca

SEQ ID NO: 201087 - DNA, 25 bp, Homo sapien
gatttacgggccaggcttgcatgca

SEQ ID NO: 201088 - DNA, 25 bp, Homo sapien
tagtgtccatccagtcagcagggtc

SEQ ID NO: 201089 - DNA, 25 bp, Homo sapien
caaaagaagaacatgcagggtggct

SEQ ID NO: 201090 - DNA, 25 bp, Homo sapien
tacattctgacacagtagacgggaa

SEQ ID NO: 201091 - DNA, 25 bp, Homo sapien
caacactgcctttcattgagtaggc

SEQ ID NO: 201092 - DNA, 25 bp, Homo sapien
gaagctagcttgtacttgatgaacc

SEQ ID NO: 201093 - DNA, 25 bp, Homo sapien
tcaagcacaatgaagatgagtcaag

SEQ ID NO: 201094 - DNA, 25 bp, Homo sapien
gctgggatctcatagaagaactgat

SEQ ID NO: 201095 - DNA, 25 bp, Homo sapien
gccctgtaacgtgttttgtcaaaga

SEQ ID NO: 201096 - DNA, 25 bp, Homo sapien
gaaatagcaaacctctttggagcct

SEQ ID NO: 201097 - DNA, 25 bp, Homo sapien
aatggtaacactgaagctgggatct

SEQ ID NO: 201098 - DNA, 25 bp, Homo sapien
gattaaagaacgattcttgaagtct

SEQ ID NO: 201099 - DNA, 25 bp, Homo sapien
ttattctgcattacattttccggaa

SEQ ID NO: 201100 - DNA, 25 bp, Homo sapien
aagaacgattcttgaagtctgaaat

SEQ ID NO: 201101 - DNA, 25 bp, Homo sapien
ttctgcattacattttccggaaaaa

SEQ ID NO: 201102 - DNA, 25 bp, Homo sapien
ctgtaaagggttggctgatgattaa

SEQ ID NO: 201103 - DNA, 25 bp, Homo sapien
gctgtaaagggttggctgatgatta

SEQ ID NO: 201104 - DNA, 25 bp, Homo sapien
gatgctgtaaagggttggctgatga

SEQ ID NO: 201105 - DNA, 25 bp, Homo sapien
tgctgtaaagggttggctgatgatt

SEQ ID NO: 201106 - DNA, 25 bp, Homo sapien
cagatctttgcattatatgttagaa

SEQ ID NO: 201107 - DNA, 25 bp, Homo sapien
aataggtttcaattgacaacactag

SEQ ID NO: 201108 - DNA, 25 bp, Homo sapien
tcctaacctagatgcaaaacaatgc

SEQ ID NO: 201109 - DNA, 25 bp, Homo sapien
gacaacactagttcttcacataaag

SEQ ID NO: 201110 - DNA, 25 bp, Homo sapien
gcctgtagattctatacatacgttt

SEQ ID NO: 201111 - DNA, 25 bp, Homo sapien
gtagattctatacatacgttttcat

SEQ ID NO: 201112 - DNA, 25 bp, Homo sapien
agagcctgtagattctatacatacg

SEQ ID NO: 201113 - DNA, 25 bp, Homo sapien
tctatacatacgttttcattaccct

SEQ ID NO: 201114 - DNA, 25 bp, Homo sapien
tctaaggatggatggcaatgaatgc

SEQ ID NO: 201115 - DNA, 25 bp, Homo sapien
ggaagaattattcagcctctaggag

SEQ ID NO: 201116 - DNA, 25 bp, Homo sapien
taaaaatgctgttggcccaagtagg

SEQ ID NO: 201117 - DNA, 25 bp, Homo sapien
tcaaactttctaagtccaccggaga

SEQ ID NO: 201118 - DNA, 25 bp, Homo sapien
ggtctgtgtccctacggtggtagca

SEQ ID NO: 201119 - DNA, 25 bp, Homo sapien
tagcagaaggtgaggcaactggctt

SEQ ID NO: 201120 - DNA, 25 bp, Homo sapien
atgcagaatcgaggaagccagaact

SEQ ID NO: 201121 - DNA, 25 bp, Homo sapien
ccagaactgctatgtggaagggtct

SEQ ID NO: 201122 - DNA, 25 bp, Homo sapien
gattctccatagtgtcggcgggaca

SEQ ID NO: 201123 - DNA, 25 bp, Homo sapien
gcttggtatggttgaaatgccttca

SEQ ID NO: 201124 - DNA, 25 bp, Homo sapien
ggttctttagctgggttgagaaagc

SEQ ID NO: 201125 - DNA, 25 bp, Homo sapien
gagaaagcttggcttcatatgttca

SEQ ID NO: 201126 - DNA, 25 bp, Homo sapien
tgtttcagtattaatggttctaatc

SEQ ID NO: 201127 - DNA, 25 bp, Homo sapien
ctggacaggtgaaatgttgctgtag

SEQ ID NO: 201128 - DNA, 25 bp, Homo sapien
agtgtttcagtattaatggttctaa

SEQ ID NO: 201129 - DNA, 25 bp, Homo sapien
tagtgtttcagtattaatggttcta

SEQ ID NO: 201130 - DNA, 25 bp, Homo sapien
tccagtatttcctgggcggatgcca

SEQ ID NO: 201131 - DNA, 25 bp, Homo sapien
aaaatatggtcttgacttccagtat

SEQ ID NO: 201132 - DNA, 25 bp, Homo sapien
agtaaccggttacaaatctctctag

SEQ ID NO: 201133 - DNA, 25 bp, Homo sapien
gatgccacgcaacgccaagaaaact

SEQ ID NO: 201134 - DNA, 25 bp, Homo sapien
tcatagatgatgctttcaatccgtg

SEQ ID NO: 201135 - DNA, 25 bp, Homo sapien
gatgatgctttcaatccgtgaagcc

SEQ ID NO: 201136 - DNA, 25 bp, Homo sapien
ctttcaatccgtgaagccgttcttc

SEQ ID NO: 201137 - DNA, 25 bp, Homo sapien
gtgtcatagatgatgctttcaatcc

SEQ ID NO: 201138 - DNA, 25 bp, Homo sapien
ccgagtattgccaaacatgacattt

SEQ ID NO: 201139 - DNA, 25 bp, Homo sapien
taaaagatagtatcaggagggccac

SEQ ID NO: 201140 - DNA, 25 bp, Homo sapien
taaggattctatgcagtgactaagc

SEQ ID NO: 201141 - DNA, 25 bp, Homo sapien
gataaggcatgtaactagagatgaa

SEQ ID NO: 201142 - DNA, 25 bp, Homo sapien
tttgcagcaactgttcatacagccg

SEQ ID NO: 201143 - DNA, 25 bp, Homo sapien
tgtgatactattgagactttacccc

SEQ ID NO: 201144 - DNA, 25 bp, Homo sapien
aagtaattacacatcccaaggaatg

SEQ ID NO: 201145 - DNA, 25 bp, Homo sapien
catagctcatccatcgttcatcagg

SEQ ID NO: 201146 - DNA, 25 bp, Homo sapien
gaaatactacatggctctgtctgaa

SEQ ID NO: 201147 - DNA, 25 bp, Homo sapien
aaaggccactgaatgattgaagaaa

SEQ ID NO: 201148 - DNA, 25 bp, Homo sapien
tttgttactcaaacccatcctgggc

SEQ ID NO: 201149 - DNA, 25 bp, Homo sapien
gttcccactaagttggcaatacaga

SEQ ID NO: 201150 - DNA, 25 bp, Homo sapien
taatacattatgtccattgcactgc

SEQ ID NO: 201151 - DNA, 25 bp, Homo sapien
gtataatacattatgtccattgcac

SEQ ID NO: 201152 - DNA, 25 bp, Homo sapien
taaagtggactagtataatacatta

SEQ ID NO: 201153 - DNA, 25 bp, Homo sapien
ttcatctctataaagtggactagta

SEQ ID NO: 201154 - DNA, 25 bp, Homo sapien
ctcgtactttgtcaggagtaatgga

SEQ ID NO: 201155 - DNA, 25 bp, Homo sapien
taaacctcgtactttgtcaggagta

SEQ ID NO: 201156 - DNA, 25 bp, Homo sapien
aacctcgtactttgtcaggagtaat

SEQ ID NO: 201157 - DNA, 25 bp, Homo sapien
cttaaacctcgtactttgtcaggag

SEQ ID NO: 201158 - DNA, 25 bp, Homo sapien
ttttgaccgccactcaacaggcaga

SEQ ID NO: 201159 - DNA, 25 bp, Homo sapien
catcaagagtaagttttgaccgcca

SEQ ID NO: 201160 - DNA, 25 bp, Homo sapien
gagtaagttttgaccgccactcaac

SEQ ID NO: 201161 - DNA, 25 bp, Homo sapien
agttttgaccgccactcaacaggca

SEQ ID NO: 201162 - DNA, 25 bp, Homo sapien
tataatcatacaatatggggccttt

SEQ ID NO: 201163 - DNA, 25 bp, Homo sapien
ttcaaagagttatgcagctatcacc

SEQ ID NO: 201164 - DNA, 25 bp, Homo sapien
tttcataacacgttcatcaccccag

SEQ ID NO: 201165 - DNA, 25 bp, Homo sapien
tcatccatgttgcatcataaatcag

SEQ ID NO: 201166 - DNA, 25 bp, Homo sapien
tgtggtgacgtgtgactgtagttcc

SEQ ID NO: 201167 - DNA, 25 bp, Homo sapien
tgagataggagaatttcttcaaccc

SEQ ID NO: 201168 - DNA, 25 bp, Homo sapien
cgggtgtggtgacgtgtgactgtag

SEQ ID NO: 201169 - DNA, 25 bp, Homo sapien
gagataggagaatttcttcaaccca

SEQ ID NO: 201170 - DNA, 25 bp, Homo sapien
caaggacaaaggataatgagggaag

SEQ ID NO: 201171 - DNA, 25 bp, Homo sapien
tctagaagactctaaatggggacac

SEQ ID NO: 201172 - DNA, 25 bp, Homo sapien
gggacacaaggacaaaggataatga

SEQ ID NO: 201173 - DNA, 25 bp, Homo sapien
tgttttgtgaactacatgtatgtcc

SEQ ID NO: 201174 - DNA, 25 bp, Homo sapien
tatgggtagtctgtgatggcttgtc

SEQ ID NO: 201175 - DNA, 25 bp, Homo sapien
ggcttcttctacataacctctatga

SEQ ID NO: 201176 - DNA, 25 bp, Homo sapien
tgcccaatgccatgcacaacaaata

SEQ ID NO: 201177 - DNA, 25 bp, Homo sapien
tgaagtctggtaccactacttgatg

SEQ ID NO: 201178 - DNA, 25 bp, Homo sapien
gcactgtatttcaagcctgtaaccc

SEQ ID NO: 201179 - DNA, 25 bp, Homo sapien
tacgcttcaacccatgccgatctgg

SEQ ID NO: 201180 - DNA, 25 bp, Homo sapien
gacctccagatcactaaatacaatg

SEQ ID NO: 201181 - DNA, 25 bp, Homo sapien
taagaaggtatatattgatcagctg

SEQ ID NO: 201182 - DNA, 25 bp, Homo sapien
cagtttttgggtaactgttcttgca

SEQ ID NO: 201183 - DNA, 25 bp, Homo sapien
tgtgccagtccacatggtttcgact

SEQ ID NO: 201184 - DNA, 25 bp, Homo sapien
ttagatgttgttgcatcactataaa

SEQ ID NO: 201185 - DNA, 25 bp, Homo sapien
cgactcaacttgaaactatgaacag

SEQ ID NO: 201186 - DNA, 25 bp, Homo sapien
acctctaatatacagcttctatgtg

SEQ ID NO: 201187 - DNA, 25 bp, Homo sapien
taatcctgctacagggaatggcaac

SEQ ID NO: 201188 - DNA, 25 bp, Homo sapien
aactcagatatggaacttaattcaa

SEQ ID NO: 201189 - DNA, 25 bp, Homo sapien
tgtgaagcaagtaatggatagggac

SEQ ID NO: 201190 - DNA, 25 bp, Homo sapien
tactaaaaatatcaaaggatttgta

SEQ ID NO: 201191 - DNA, 25 bp, Homo sapien
cagtttcttctactgattttactaa

SEQ ID NO: 201192 - DNA, 25 bp, Homo sapien
ttcagtttcttctactgattttact

SEQ ID NO: 201193 - DNA, 25 bp, Homo sapien
ctgattttactaaaaatatcaaagg

SEQ ID NO: 201194 - DNA, 25 bp, Homo sapien
tcgtttaagacctgtcgcatctgta

SEQ ID NO: 201195 - DNA, 25 bp, Homo sapien
tgggaatgctttcgtttaagacctg

SEQ ID NO: 201196 - DNA, 25 bp, Homo sapien
catctgtactctccttatatcttct

SEQ ID NO: 201197 - DNA, 25 bp, Homo sapien
taagacctgtcgcatctgtactctc

SEQ ID NO: 201198 - DNA, 25 bp, Homo sapien
atgatttctaagaatcagtaaagca

SEQ ID NO: 201199 - DNA, 25 bp, Homo sapien
gatttctaagaatcagtaaagcaaa

SEQ ID NO: 201200 - DNA, 25 bp, Homo sapien
tgatttctaagaatcagtaaagcaa

SEQ ID NO: 201201 - DNA, 25 bp, Homo sapien
cttacatagcaatgaaaaagattta

SEQ ID NO: 201202 - DNA, 25 bp, Homo sapien
gtatcacaaaagagggttactgctg

SEQ ID NO: 201203 - DNA, 25 bp, Homo sapien
tttctgcattatataactctgaaag

SEQ ID NO: 201204 - DNA, 25 bp, Homo sapien
cagtattagcaaaagatgcataacc

SEQ ID NO: 201205 - DNA, 25 bp, Homo sapien
tagttagaaggtgagcacccctcca

SEQ ID NO: 201206 - DNA, 25 bp, Homo sapien
tagtcaggtcttgcgttcttaaaca

SEQ ID NO: 201207 - DNA, 25 bp, Homo sapien
agaaggtgggaatcctcttagtcac

SEQ ID NO: 201208 - DNA, 25 bp, Homo sapien
tgctatggcacctgaaattacctgg

SEQ ID NO: 201209 - DNA, 25 bp, Homo sapien
gcttcattctgtaaatcacctgatc

SEQ ID NO: 201210 - DNA, 25 bp, Homo sapien
gaaacctcccaaataaagactagca

SEQ ID NO: 201211 - DNA, 25 bp, Homo sapien
caaattctaatctacctgtacagtt

SEQ ID NO: 201212 - DNA, 25 bp, Homo sapien
aatcccctgccaacttaaagcttag

SEQ ID NO: 201213 - DNA, 25 bp, Homo sapien
aagtttactcaagatttagacacac

SEQ ID NO: 201214 - DNA, 25 bp, Homo sapien
agtttactcaagatttagacacaca

SEQ ID NO: 201215 - DNA, 25 bp, Homo sapien
gaagtttactcaagatttagacaca

SEQ ID NO: 201216 - DNA, 25 bp, Homo sapien
gtaaactgtgttaatatcatgacac

SEQ ID NO: 201217 - DNA, 25 bp, Homo sapien
gattaaatagggagtgcattgtaac

SEQ ID NO: 201218 - DNA, 25 bp, Homo sapien
taaacctcctgaattattatgtcaa

SEQ ID NO: 201219 - DNA, 25 bp, Homo sapien
caacaacttacttggtttgtagaat

SEQ ID NO: 201220 - DNA, 25 bp, Homo sapien
tctgctggcccctaaaacaattgag

SEQ ID NO: 201221 - DNA, 25 bp, Homo sapien
cacttcaatatcgaaattttcctgc

SEQ ID NO: 201222 - DNA, 25 bp, Homo sapien
aaacaattgagatgttcttgctcaa

SEQ ID NO: 201223 - DNA, 25 bp, Homo sapien
tgccgtcaataaaccactgtccacg

SEQ ID NO: 201224 - DNA, 25 bp, Homo sapien
gaggtgccccgttcatttcattgga

SEQ ID NO: 201225 - DNA, 25 bp, Homo sapien
tggaaaaatgaacccacggagagtg

SEQ ID NO: 201226 - DNA, 25 bp, Homo sapien
aggaccctgggcttcaagcacataa

SEQ ID NO: 201227 - DNA, 25 bp, Homo sapien
tcacttccacttcacctgggaagcg

SEQ ID NO: 201228 - DNA, 25 bp, Homo sapien
cgtgaagaatcctcagccatttggt

SEQ ID NO: 201229 - DNA, 25 bp, Homo sapien
gccatttggtagaactaaacaccat

SEQ ID NO: 201230 - DNA, 25 bp, Homo sapien
cctcagccatttggtagaactaaac

SEQ ID NO: 201231 - DNA, 25 bp, Homo sapien
gaagaatcctcagccatttggtaga

SEQ ID NO: 201232 - DNA, 25 bp, Homo sapien
aaataaaaaccttatgccatgacag

SEQ ID NO: 201233 - DNA, 25 bp, Homo sapien
tctaaaataaaaaccttatgccatg

SEQ ID NO: 201234 - DNA, 25 bp, Homo sapien
aaaataaaaaccttatgccatgaca

SEQ ID NO: 201235 - DNA, 25 bp, Homo sapien
taaaataaaaaccttatgccatgac

SEQ ID NO: 201236 - DNA, 25 bp, Homo sapien
taacattttggccatacgtaaggtg

SEQ ID NO: 201237 - DNA, 25 bp, Homo sapien
tcagaggattccttgaccagcacat

SEQ ID NO: 201238 - DNA, 25 bp, Homo sapien
caaatgccatggtcaggtgccaagt

SEQ ID NO: 201239 - DNA, 25 bp, Homo sapien
tgtaggttccagacatcaaagttct

SEQ ID NO: 201240 - DNA, 25 bp, Homo sapien
tactgtaaaccgagcagtcagggtt

SEQ ID NO: 201241 - DNA, 25 bp, Homo sapien
ctaaagcagacttgatctaggatga

SEQ ID NO: 201242 - DNA, 25 bp, Homo sapien
tgatctaggatgaggtgggttctca

SEQ ID NO: 201243 - DNA, 25 bp, Homo sapien
cagtccaaggctgctttccagtcca

SEQ ID NO: 201244 - DNA, 25 bp, Homo sapien
cctgtgccacacaaaggattgttat

SEQ ID NO: 201245 - DNA, 25 bp, Homo sapien
caacactttttcagggtcaggcacg

SEQ ID NO: 201246 - DNA, 25 bp, Homo sapien
actggtcaaaaaagagtgccttcta

SEQ ID NO: 201247 - DNA, 25 bp, Homo sapien
gctttattggagacagaaactggtc

SEQ ID NO: 201248 - DNA, 25 bp, Homo sapien
cacttttattaccactaaccagaca

SEQ ID NO: 201249 - DNA, 25 bp, Homo sapien
cttttattaccactaaccagacagt

SEQ ID NO: 201250 - DNA, 25 bp, Homo sapien
tattaccactaaccagacagtttcc

SEQ ID NO: 201251 - DNA, 25 bp, Homo sapien
taccactaaccagacagtttccaaa

SEQ ID NO: 201252 - DNA, 25 bp, Homo sapien
catctgctcgtttacccttcagctg

SEQ ID NO: 201253 - DNA, 25 bp, Homo sapien
tgctcgtttacccttcagctgccga

SEQ ID NO: 201254 - DNA, 25 bp, Homo sapien
ttcagctgccgacgctccctgctca

SEQ ID NO: 201255 - DNA, 25 bp, Homo sapien
ttgccatctgctcgtttacccttca

SEQ ID NO: 201256 - DNA, 25 bp, Homo sapien
catcttctccggaactggaggctgg

SEQ ID NO: 201257 - DNA, 25 bp, Homo sapien
gaagtcatagttctcgtcactgagg

SEQ ID NO: 201258 - DNA, 25 bp, Homo sapien
cgggtagcactctccttgggtcaca

SEQ ID NO: 201259 - DNA, 25 bp, Homo sapien
gagtcgtagccgatgaagggcttcc

SEQ ID NO: 201260 - DNA, 25 bp, Homo sapien
cgcctcggccgttatgctcggggct

SEQ ID NO: 201261 - DNA, 25 bp, Homo sapien
gaacgctggcctcgcgtctgagccc

SEQ ID NO: 201262 - DNA, 25 bp, Homo sapien
tcggccgttatgctcggggctccgt

SEQ ID NO: 201263 - DNA, 25 bp, Homo sapien
gccgccgaacgctggcctcgcgtct

SEQ ID NO: 201264 - DNA, 25 bp, Homo sapien
cagcgcttccgccacacattcaacg

SEQ ID NO: 201265 - DNA, 25 bp, Homo sapien
aatctttcaaatcccgacccgagct

SEQ ID NO: 201266 - DNA, 25 bp, Homo sapien
gccggctgtccggcggcgcgcggag

SEQ ID NO: 201267 - DNA, 25 bp, Homo sapien
tccacccgaagtttctaatctttca

SEQ ID NO: 201268 - DNA, 25 bp, Homo sapien
tgactggtgaagtcacttagctcag

SEQ ID NO: 201269 - DNA, 25 bp, Homo sapien
ttgggtttgtcttgcagagccagtc

SEQ ID NO: 201270 - DNA, 25 bp, Homo sapien
ggtgaagtcacttagctcagtgcct

SEQ ID NO: 201271 - DNA, 25 bp, Homo sapien
cctagaatgcctacattttctgctc

SEQ ID NO: 201272 - DNA, 25 bp, Homo sapien
tcctgatcccaagaaatcccctcac

SEQ ID NO: 201273 - DNA, 25 bp, Homo sapien
catttaaattaagattagggtgcta

SEQ ID NO: 201274 - DNA, 25 bp, Homo sapien
tgctatccacctggagtgatttggg

SEQ ID NO: 201275 - DNA, 25 bp, Homo sapien
agctagaatgagctcttctgttata

SEQ ID NO: 201276 - DNA, 25 bp, Homo sapien
gataaatctcacttgctcataatgt

SEQ ID NO: 201277 - DNA, 25 bp, Homo sapien
cagggatattggcttacagggagtt

SEQ ID NO: 201278 - DNA, 25 bp, Homo sapien
tatatatattaaaccatccttgtat

SEQ ID NO: 201279 - DNA, 25 bp, Homo sapien
ttttggtaccaaggttatgctggct

SEQ ID NO: 201280 - DNA, 25 bp, Homo sapien
gaagatgagttaatacttgaattac

SEQ ID NO: 201281 - DNA, 25 bp, Homo sapien
gatgagttaatacttgaattacaac

SEQ ID NO: 201282 - DNA, 25 bp, Homo sapien
ccaataaaagactacactgaagttt

SEQ ID NO: 201283 - DNA, 25 bp, Homo sapien
ttacaaccaataaaagactacactg

SEQ ID NO: 201284 - DNA, 25 bp, Homo sapien
gctggggtcctggatagctccaacc

SEQ ID NO: 201285 - DNA, 25 bp, Homo sapien
agctacagcattcgcaggcagtact

SEQ ID NO: 201286 - DNA, 25 bp, Homo sapien
agctcatgctgtgcccctttgcctg

SEQ ID NO: 201287 - DNA, 25 bp, Homo sapien
gcagtactggcaagctcatgctgtg

SEQ ID NO: 201288 - DNA, 25 bp, Homo sapien
ccatttcaatgcatttgtcatcatc

SEQ ID NO: 201289 - DNA, 25 bp, Homo sapien
acaggcgtgaaccgccgtgcctggg

SEQ ID NO: 201290 - DNA, 25 bp, Homo sapien
agtcgttttaatgaactcaacgtgg

SEQ ID NO: 201291 - DNA, 25 bp, Homo sapien
gccttggcatgtcgccgtgctctga

SEQ ID NO: 201292 - DNA, 25 bp, Homo sapien
ctgagtgggagcctcgctgcctcca

SEQ ID NO: 201293 - DNA, 25 bp, Homo sapien
tcaacgtggttgtttccgatttggc

SEQ ID NO: 201294 - DNA, 25 bp, Homo sapien
gattcagcagctctactatccttag

SEQ ID NO: 201295 - DNA, 25 bp, Homo sapien
gcagctctactatccttagagtctt

SEQ ID NO: 201296 - DNA, 25 bp, Homo sapien
gagtcttgtctcatcccacacaaag

SEQ ID NO: 201297 - DNA, 25 bp, Homo sapien
ccttagagtcttgtctcatcccaca

SEQ ID NO: 201298 - DNA, 25 bp, Homo sapien
gccacaatttgtccttcgctgatta

SEQ ID NO: 201299 - DNA, 25 bp, Homo sapien
gacagccacaatttgtccttcgctg

SEQ ID NO: 201300 - DNA, 25 bp, Homo sapien
caatttgtccttcgctgattaacat

SEQ ID NO: 201301 - DNA, 25 bp, Homo sapien
gaaatgacagccacaatttgtcctt

SEQ ID NO: 201302 - DNA, 25 bp, Homo sapien
tatggggacatagtaggcgctacag

SEQ ID NO: 201303 - DNA, 25 bp, Homo sapien
tggggacatagtaggcgctacagct

SEQ ID NO: 201304 - DNA, 25 bp, Homo sapien
gggacatagtaggcgctacagctgg

SEQ ID NO: 201305 - DNA, 25 bp, Homo sapien
gacatagtaggcgctacagctggct

SEQ ID NO: 201306 - DNA, 25 bp, Homo sapien
tcaggcaaggatctgagaatttccc

SEQ ID NO: 201307 - DNA, 25 bp, Homo sapien
gactggatgttcaagccatccaaag

SEQ ID NO: 201308 - DNA, 25 bp, Homo sapien
aaactcagtgactggatgttcaagc

SEQ ID NO: 201309 - DNA, 25 bp, Homo sapien
tattcgtaacagttgttctctcctc

SEQ ID NO: 201310 - DNA, 25 bp, Homo sapien
tgttattcgtaacagttgttctctc

SEQ ID NO: 201311 - DNA, 25 bp, Homo sapien
tactgagtgtgttcagtgttttgtc

SEQ ID NO: 201312 - DNA, 25 bp, Homo sapien
ctgtggctgatctgtatacttgtac

SEQ ID NO: 201313 - DNA, 25 bp, Homo sapien
tgaaatttctttacacgttgcccta

SEQ ID NO: 201314 - DNA, 25 bp, Homo sapien
gccctaatctgctgcttggacattt

SEQ ID NO: 201315 - DNA, 25 bp, Homo sapien
gagtgggagtggcagccataactca

SEQ ID NO: 201316 - DNA, 25 bp, Homo sapien
tcctccatgatgcatgtgggaagtg

SEQ ID NO: 201317 - DNA, 25 bp, Homo sapien
taaccttgccaaccagatgactgac

SEQ ID NO: 201318 - DNA, 25 bp, Homo sapien
aaagaagggacttcataagtggtct

SEQ ID NO: 201319 - DNA, 25 bp, Homo sapien
cttctcctccaaaattgcgaaatgc

SEQ ID NO: 201320 - DNA, 25 bp, Homo sapien
tctcctccaaaattgcgaaatgcat

SEQ ID NO: 201321 - DNA, 25 bp, Homo sapien
gatgtgtactaactgtagctgctgc

SEQ ID NO: 201322 - DNA, 25 bp, Homo sapien
gaacactgcctgtcgaatggctcca

SEQ ID NO: 201323 - DNA, 25 bp, Homo sapien
tctataaacagatgaccgattgggt

SEQ ID NO: 201324 - DNA, 25 bp, Homo sapien
ttgcttgaagatgccggtcccacac

SEQ ID NO: 201325 - DNA, 25 bp, Homo sapien
gccaaaattattcttggttgctttg

SEQ ID NO: 201326 - DNA, 25 bp, Homo sapien
ggctgtgttcttgaactgaataggg

SEQ ID NO: 201327 - DNA, 25 bp, Homo sapien
catttgctaaactctcaggggtaaa

SEQ ID NO: 201328 - DNA, 25 bp, Homo sapien
ggttagctgtataaagggcaagcag

SEQ ID NO: 201329 - DNA, 25 bp, Homo sapien
tgtgtttgaattcacccaaacttgc

SEQ ID NO: 201330 - DNA, 25 bp, Homo sapien
cttgcgtaaatcctttacacagctg

SEQ ID NO: 201331 - DNA, 25 bp, Homo sapien
ctttacacagctgtcgaaattgcac

SEQ ID NO: 201332 - DNA, 25 bp, Homo sapien
atcatttgttccagttgccttttat

SEQ ID NO: 201333 - DNA, 25 bp, Homo sapien
ttgatcttcgctctgctcaaatgtt

SEQ ID NO: 201334 - DNA, 25 bp, Homo sapien
ttcccattgatcttcgctctgctca

SEQ ID NO: 201335 - DNA, 25 bp, Homo sapien
cattgatcttcgctctgctcaaatg

SEQ ID NO: 201336 - DNA, 25 bp, Homo sapien
cccattgatcttcgctctgctcaaa

SEQ ID NO: 201337 - DNA, 25 bp, Homo sapien
gctgcagagtactctggaggtgccc

SEQ ID NO: 201338 - DNA, 25 bp, Homo sapien
cattccgtacaagggcaatatgtgc

SEQ ID NO: 201339 - DNA, 25 bp, Homo sapien
tatcaccagggcaagcagcatgcta

SEQ ID NO: 201340 - DNA, 25 bp, Homo sapien
caggcatctttcatggtcccaagtg

SEQ ID NO: 201341 - DNA, 25 bp, Homo sapien
gccatccacatcatatacccgtttt

SEQ ID NO: 201342 - DNA, 25 bp, Homo sapien
tctacatgtatacagcataatactt

SEQ ID NO: 201343 - DNA, 25 bp, Homo sapien
tcatatacccgttttggtttcagaa

SEQ ID NO: 201344 - DNA, 25 bp, Homo sapien
tcttctggtgcaactcgtcctctcg

SEQ ID NO: 201345 - DNA, 25 bp, Homo sapien
gcatgttgaaagggcgagaggcctt

SEQ ID NO: 201346 - DNA, 25 bp, Homo sapien
ggtggggctcggatgcatgttgaaa

SEQ ID NO: 201347 - DNA, 25 bp, Homo sapien
gagggtggggctcggatgcatgttg

SEQ ID NO: 201348 - DNA, 25 bp, Homo sapien
tgttgaaagggcgagaggcctttta

SEQ ID NO: 201349 - DNA, 25 bp, Homo sapien
tttgggcattgaagaatcaggtagt

SEQ ID NO: 201350 - DNA, 25 bp, Homo sapien
actcacagatgtaccgccttgctgg

SEQ ID NO: 201351 - DNA, 25 bp, Homo sapien
tagggtataccccacagtgatgctg

SEQ ID NO: 201352 - DNA, 25 bp, Homo sapien
caggtagttattgtagtcttcccag

SEQ ID NO: 201353 - DNA, 25 bp, Homo sapien
tattgtaggtgatgtaaaaaccgaa

SEQ ID NO: 201354 - DNA, 25 bp, Homo sapien
ccgaaactatgaaattttgaagctc

SEQ ID NO: 201355 - DNA, 25 bp, Homo sapien
cagagtgaagctgccaatattgaat

SEQ ID NO: 201356 - DNA, 25 bp, Homo sapien
gaatgagtactgaatcgaaatttgc

SEQ ID NO: 201357 - DNA, 25 bp, Homo sapien
tcaagtctactttctagtgccaagt

SEQ ID NO: 201358 - DNA, 25 bp, Homo sapien
tgagtcacagccttctcccactttt

SEQ ID NO: 201359 - DNA, 25 bp, Homo sapien
ctagtgccaagttttcccctaagat

SEQ ID NO: 201360 - DNA, 25 bp, Homo sapien
agccttctcccacttttcaagtcta

SEQ ID NO: 201361 - DNA, 25 bp, Homo sapien
gatgaatacttaagggaacacgatt

SEQ ID NO: 201362 - DNA, 25 bp, Homo sapien
caagtagaccttattatagctggag

SEQ ID NO: 201363 - DNA, 25 bp, Homo sapien
taaattgccaccagtgggcagggat

SEQ ID NO: 201364 - DNA, 25 bp, Homo sapien
aaagacagttggaattcatggcacc

SEQ ID NO: 201365 - DNA, 25 bp, Homo sapien
tcacacctgcattcagattgctggg

SEQ ID NO: 201366 - DNA, 25 bp, Homo sapien
tgggacaaagctttgtaccactgcc

SEQ ID NO: 201367 - DNA, 25 bp, Homo sapien
aacaaagaagccttttagccacctg

SEQ ID NO: 201368 - DNA, 25 bp, Homo sapien
aggtacttgtttgtagctgcgctac

SEQ ID NO: 201369 - DNA, 25 bp, Homo sapien
caacagccagtgactgcattgttcc

SEQ ID NO: 201370 - DNA, 25 bp, Homo sapien
gtttcagcaacagccagtgactgca

SEQ ID NO: 201371 - DNA, 25 bp, Homo sapien
tacagagtttcagcaacagccagtg

SEQ ID NO: 201372 - DNA, 25 bp, Homo sapien
tcagcaacagccagtgactgcattg

SEQ ID NO: 201373 - DNA, 25 bp, Homo sapien
ggcatccactttgttgaaggttttg

SEQ ID NO: 201374 - DNA, 25 bp, Homo sapien
catccactttgttgaaggttttgta

SEQ ID NO: 201375 - DNA, 25 bp, Homo sapien
gaggcatccactttgttgaaggttt

SEQ ID NO: 201376 - DNA, 25 bp, Homo sapien
tgaggcatccactttgttgaaggtt

SEQ ID NO: 201377 - DNA, 25 bp, Homo sapien
gaggacccattcttactgatttacc

SEQ ID NO: 201378 - DNA, 25 bp, Homo sapien
taaaaatagacatccaggtcaatgg

SEQ ID NO: 201379 - DNA, 25 bp, Homo sapien
gatttacctcctagaaagctacagt

SEQ ID NO: 201380 - DNA, 25 bp, Homo sapien
tgagaatctagaactaaacccttat

SEQ ID NO: 201381 - DNA, 25 bp, Homo sapien
taagaatgtagagacattggaaccc

SEQ ID NO: 201382 - DNA, 25 bp, Homo sapien
taatcatggagctactataggaccc

SEQ ID NO: 201383 - DNA, 25 bp, Homo sapien
tggaacccctcatgtattgctggtg

SEQ ID NO: 201384 - DNA, 25 bp, Homo sapien
tatgacagctattcctccaagaatg

SEQ ID NO: 201385 - DNA, 25 bp, Homo sapien
tactttgaaagtgggatgctctgag

SEQ ID NO: 201386 - DNA, 25 bp, Homo sapien
cacattgctcacaaatgcacttgag

SEQ ID NO: 201387 - DNA, 25 bp, Homo sapien
aatgcacttgagaaactgtgtttca

SEQ ID NO: 201388 - DNA, 25 bp, Homo sapien
taacactttgagcaccaggtacaaa

SEQ ID NO: 201389 - DNA, 25 bp, Homo sapien
tagctggcgtaaacaaatacttatt

SEQ ID NO: 201390 - DNA, 25 bp, Homo sapien
tatcatctatatgctagggctgcca

SEQ ID NO: 201391 - DNA, 25 bp, Homo sapien
caaggttaaggtgccaccaggtttg

SEQ ID NO: 201392 - DNA, 25 bp, Homo sapien
cacagactagctggcgtaaacaaat

SEQ ID NO: 201393 - DNA, 25 bp, Homo sapien
tgaccttccatagcatctttcctga

SEQ ID NO: 201394 - DNA, 25 bp, Homo sapien
ctacggtgctcagggtgaaatcttc

SEQ ID NO: 201395 - DNA, 25 bp, Homo sapien
gcaaaagcacccacactacggtgct

SEQ ID NO: 201396 - DNA, 25 bp, Homo sapien
tcctgatatctgctcttccaacagg

SEQ ID NO: 201397 - DNA, 25 bp, Homo sapien
tatttaaactcgattaatctgtact

SEQ ID NO: 201398 - DNA, 25 bp, Homo sapien
tactattatggtgatgtgcaggtgc

SEQ ID NO: 201399 - DNA, 25 bp, Homo sapien
cttctgtgttccgaattagacacat

SEQ ID NO: 201400 - DNA, 25 bp, Homo sapien
gtgttccgaattagacacatcttta

SEQ ID NO: 201401 - DNA, 25 bp, Homo sapien
atttctttgccggagacaagccttc

SEQ ID NO: 201402 - DNA, 25 bp, Homo sapien
aagctgtgatttctcgatgagaatg

SEQ ID NO: 201403 - DNA, 25 bp, Homo sapien
ctctgtggatagtttaagctgtgat

SEQ ID NO: 201404 - DNA, 25 bp, Homo sapien
gaaactataatggagctcaacttga

SEQ ID NO: 201405 - DNA, 25 bp, Homo sapien
aatgtaagccgcgtgagaccagaga

SEQ ID NO: 201406 - DNA, 25 bp, Homo sapien
gatgaaccacatatagtgcccaacc

SEQ ID NO: 201407 - DNA, 25 bp, Homo sapien
gagaccacgtctgtcttgcttatga

SEQ ID NO: 201408 - DNA, 25 bp, Homo sapien
tagtagtgaagcaaggtatgaatcc

SEQ ID NO: 201409 - DNA, 25 bp, Homo sapien
aattaatcataactgtcggtgctga

SEQ ID NO: 201410 - DNA, 25 bp, Homo sapien
tcttgaagggttacacagataagcc

SEQ ID NO: 201411 - DNA, 25 bp, Homo sapien
tcggtgctgattgctacttagagaa

SEQ ID NO: 201412 - DNA, 25 bp, Homo sapien
tattcccaatgttgaaaagctcgct

SEQ ID NO: 201413 - DNA, 25 bp, Homo sapien
taactatattggtgtgtccttacat

SEQ ID NO: 201414 - DNA, 25 bp, Homo sapien
ccgatggagatagatgggctttgca

SEQ ID NO: 201415 - DNA, 25 bp, Homo sapien
ccttggactctcagtcaaatagaat

SEQ ID NO: 201416 - DNA, 25 bp, Homo sapien
aaagaaatcataagaaggtcaccag

SEQ ID NO: 201417 - DNA, 25 bp, Homo sapien
tatagagagaagacaacgagggtaa

SEQ ID NO: 201418 - DNA, 25 bp, Homo sapien
tgcaagacagcttgcgatggaagag

SEQ ID NO: 201419 - DNA, 25 bp, Homo sapien
taggcaattccctctcctgggataa

SEQ ID NO: 201420 - DNA, 25 bp, Homo sapien
tagagatagtgcacttgaaggcacc

SEQ ID NO: 201421 - DNA, 25 bp, Homo sapien
aatatgatttaaattggccaggtgc

SEQ ID NO: 201422 - DNA, 25 bp, Homo sapien
tggcctctagatgttttaaaatggg

SEQ ID NO: 201423 - DNA, 25 bp, Homo sapien
aggtatttatcaagtgtgtctgtgg

SEQ ID NO: 201424 - DNA, 25 bp, Homo sapien
tgtctgtggatggtgtttcaaatat

SEQ ID NO: 201425 - DNA, 25 bp, Homo sapien
gctttccatgcttttgtcatcattt

SEQ ID NO: 201426 - DNA, 25 bp, Homo sapien
tccttcttctgtcttctcttcagct

SEQ ID NO: 201427 - DNA, 25 bp, Homo sapien
ttagctttccatgcttttgtcatca

SEQ ID NO: 201428 - DNA, 25 bp, Homo sapien
ttccatgcttttgtcatcatttttc

SEQ ID NO: 201429 - DNA, 25 bp, Homo sapien
gcgttctctgactcggaaacaaaat

SEQ ID NO: 201430 - DNA, 25 bp, Homo sapien
tctgttgtatacctgttccaaatcc

SEQ ID NO: 201431 - DNA, 25 bp, Homo sapien
cctgctaacccatttgtaaacctga

SEQ ID NO: 201432 - DNA, 25 bp, Homo sapien
cctgagaacactgcgagtctttagc

SEQ ID NO: 201433 - DNA, 25 bp, Homo sapien
ccagacaattcacacagcttgctct

SEQ ID NO: 201434 - DNA, 25 bp, Homo sapien
ctgccattccgcaaatttactccat

SEQ ID NO: 201435 - DNA, 25 bp, Homo sapien
tgccattccgcaaatttactccatc

SEQ ID NO: 201436 - DNA, 25 bp, Homo sapien
gacaattcacacagcttgctcttcc

SEQ ID NO: 201437 - DNA, 25 bp, Homo sapien
aaaagcgttgtgtggaaaaatggtg

SEQ ID NO: 201438 - DNA, 25 bp, Homo sapien
agggcaaagtgcacaggagctccgt

SEQ ID NO: 201439 - DNA, 25 bp, Homo sapien
tcctcttagaagctcattgccgaaa

SEQ ID NO: 201440 - DNA, 25 bp, Homo sapien
ggtgctcagaaagcagtaacctctt

SEQ ID NO: 201441 - DNA, 25 bp, Homo sapien
ttcctgttggattagctctggctga

SEQ ID NO: 201442 - DNA, 25 bp, Homo sapien
ttgatggtgcccgtaagtgactccc

SEQ ID NO: 201443 - DNA, 25 bp, Homo sapien
gctctggctgaatccaaagtttctc

SEQ ID NO: 201444 - DNA, 25 bp, Homo sapien
taaataattgcccatatccctggag

SEQ ID NO: 201445 - DNA, 25 bp, Homo sapien
tcagcaaagacatagtaagagcata

SEQ ID NO: 201446 - DNA, 25 bp, Homo sapien
ggtggtctccccacaagcgttctca

SEQ ID NO: 201447 - DNA, 25 bp, Homo sapien
aaaatggaaccatgcctcatcaaga

SEQ ID NO: 201448 - DNA, 25 bp, Homo sapien
gacgcctcggattactaagacttca

SEQ ID NO: 201449 - DNA, 25 bp, Homo sapien
gtttggttataggaacaaggctgtc

SEQ ID NO: 201450 - DNA, 25 bp, Homo sapien
gatggaagaagacctttctcacctg

SEQ ID NO: 201451 - DNA, 25 bp, Homo sapien
taaatacactgacgtgggcctggac

SEQ ID NO: 201452 - DNA, 25 bp, Homo sapien
tcatgatgaatgacagagctcttgc

SEQ ID NO: 201453 - DNA, 25 bp, Homo sapien
cattcttatgcccaccactgactcc

SEQ ID NO: 201454 - DNA, 25 bp, Homo sapien
gctcacattcttatgcccaccactg

SEQ ID NO: 201455 - DNA, 25 bp, Homo sapien
tgggaagtcaagctcctttcccaga

SEQ ID NO: 201456 - DNA, 25 bp, Homo sapien
cagggctcacattcttatgcccacc

SEQ ID NO: 201457 - DNA, 25 bp, Homo sapien
gttgttaatcttgctagggagtcca

SEQ ID NO: 201458 - DNA, 25 bp, Homo sapien
caaatcctatgaacggtgtttcaag

SEQ ID NO: 201459 - DNA, 25 bp, Homo sapien
gattttggccctgtggatcttgacc

SEQ ID NO: 201460 - DNA, 25 bp, Homo sapien
ccaactaaccgtgttataagagctt

SEQ ID NO: 201461 - DNA, 25 bp, Homo sapien
tacctagcaagcaacacactttctg

SEQ ID NO: 201462 - DNA, 25 bp, Homo sapien
tctgaacctcaagttttcctggaaa

SEQ ID NO: 201463 - DNA, 25 bp, Homo sapien
tccgcaacctgaagatattttgact

SEQ ID NO: 201464 - DNA, 25 bp, Homo sapien
aaagttgttcctgatgaactcccct

SEQ ID NO: 201465 - DNA, 25 bp, Homo sapien
agtggtcagggtatgaaaaagccca

SEQ ID NO: 201466 - DNA, 25 bp, Homo sapien
tgaagtgagcctacaggacctgtcc

SEQ ID NO: 201467 - DNA, 25 bp, Homo sapien
tgcaagtatcagaaatcaaggagac

SEQ ID NO: 201468 - DNA, 25 bp, Homo sapien
ttcaaatgtgtagccattatgggcc

SEQ ID NO: 201469 - DNA, 25 bp, Homo sapien
tttggtgtgaaaagtcccctgctcc

SEQ ID NO: 201470 - DNA, 25 bp, Homo sapien
tatcggacctcagttgggcatccag

SEQ ID NO: 201471 - DNA, 25 bp, Homo sapien
gcatccagggttaatgggatatcct

SEQ ID NO: 201472 - DNA, 25 bp, Homo sapien
gagaattaacgctgtatcatatccc

SEQ ID NO: 201473 - DNA, 25 bp, Homo sapien
ttctctaggtgaggcccgaatgact

SEQ ID NO: 201474 - DNA, 25 bp, Homo sapien
cttgggaaatgtaggacaccaacca

SEQ ID NO: 201475 - DNA, 25 bp, Homo sapien
cacaagctcagggtgaactttaggg

SEQ ID NO: 201476 - DNA, 25 bp, Homo sapien
tctaataacaggtgaggacatcact

SEQ ID NO: 201477 - DNA, 25 bp, Homo sapien
actttagtccctggtgagtcacctg

SEQ ID NO: 201478 - DNA, 25 bp, Homo sapien
acattgtcccgtgacttcaccaggg

SEQ ID NO: 201479 - DNA, 25 bp, Homo sapien
ggtggtgatgctttcacattgtccc

SEQ ID NO: 201480 - DNA, 25 bp, Homo sapien
gagactctgcctttggccctgagga

SEQ ID NO: 201481 - DNA, 25 bp, Homo sapien
tgtcagaccaggtatgaagtttacg

SEQ ID NO: 201482 - DNA, 25 bp, Homo sapien
tgtgctccatggttaaaaagtgtca

SEQ ID NO: 201483 - DNA, 25 bp, Homo sapien
ggatttcacccacgaaaaaatgtgc

SEQ ID NO: 201484 - DNA, 25 bp, Homo sapien
tatttagggtgaagattgcctgacc

SEQ ID NO: 201485 - DNA, 25 bp, Homo sapien
ctttcggtccttccccacttgcttg

SEQ ID NO: 201486 - DNA, 25 bp, Homo sapien
ctctttcggtccttccccacttgct

SEQ ID NO: 201487 - DNA, 25 bp, Homo sapien
caagatgaaggttactgcatggttc

SEQ ID NO: 201488 - DNA, 25 bp, Homo sapien
tacgtatggccctttggtctctgtc

SEQ ID NO: 201489 - DNA, 25 bp, Homo sapien
ccagccgagcttcaaaggagtgtgt

SEQ ID NO: 201490 - DNA, 25 bp, Homo sapien
tctctgggaaccgtagggagtagac

SEQ ID NO: 201491 - DNA, 25 bp, Homo sapien
ctgggttaaatttggtgaagggcat

SEQ ID NO: 201492 - DNA, 25 bp, Homo sapien
tctgggttaaatttggtgaagggca

SEQ ID NO: 201493 - DNA, 25 bp, Homo sapien
tcttcatatggggtgacaagtggac

SEQ ID NO: 201494 - DNA, 25 bp, Homo sapien
gatgaatcccatgggcaagctgctg

SEQ ID NO: 201495 - DNA, 25 bp, Homo sapien
agttgtgtgaatttgctccttctgc

SEQ ID NO: 201496 - DNA, 25 bp, Homo sapien
tctccccatgatgaatcccatgggc

SEQ ID NO: 201497 - DNA, 25 bp, Homo sapien
agtgggtaggtgcattctctgctct

SEQ ID NO: 201498 - DNA, 25 bp, Homo sapien
aagtgaagtgggtaggtgcattctc

SEQ ID NO: 201499 - DNA, 25 bp, Homo sapien
tgaagtgggtaggtgcattctctgc

SEQ ID NO: 201500 - DNA, 25 bp, Homo sapien
tagtgaagtgaagtgggtaggtgca

SEQ ID NO: 201501 - DNA, 25 bp, Homo sapien
tatggctattgcaggaagtaaaagc

SEQ ID NO: 201502 - DNA, 25 bp, Homo sapien
taggtatggctattgcaggaagtaa

SEQ ID NO: 201503 - DNA, 25 bp, Homo sapien
agggaagcagataggtatggctatt

SEQ ID NO: 201504 - DNA, 25 bp, Homo sapien
gcagataggtatggctattgcagga

SEQ ID NO: 201505 - DNA, 25 bp, Homo sapien
taggatcagacacaatacttggccc

SEQ ID NO: 201506 - DNA, 25 bp, Homo sapien
ggcgctaccatttgcttcttgaagg

SEQ ID NO: 201507 - DNA, 25 bp, Homo sapien
catttagagaattgcggaagtatag

SEQ ID NO: 201508 - DNA, 25 bp, Homo sapien
tacttggcccattcgcaaggggtgg

SEQ ID NO: 201509 - DNA, 25 bp, Homo sapien
gggctgcttgggataacaccacacc

SEQ ID NO: 201510 - DNA, 25 bp, Homo sapien
caacccatttcctgaacgggctttg

SEQ ID NO: 201511 - DNA, 25 bp, Homo sapien
cctgaacgggctttgtgaaatcact

SEQ ID NO: 201512 - DNA, 25 bp, Homo sapien
tgggggctgcttgggataacaccac

SEQ ID NO: 201513 - DNA, 25 bp, Homo sapien
ctgttgggttacaaggacctgttgg

SEQ ID NO: 201514 - DNA, 25 bp, Homo sapien
ttacaaggtccggttctatggaatg

SEQ ID NO: 201515 - DNA, 25 bp, Homo sapien
ctgggctgttgggttacaaggacct

SEQ ID NO: 201516 - DNA, 25 bp, Homo sapien
ccggttctatggaatgaaggccaga

SEQ ID NO: 201517 - DNA, 25 bp, Homo sapien
cagccaatttgttgaccagatccag

SEQ ID NO: 201518 - DNA, 25 bp, Homo sapien
tgctggtgaatcaatgctctgtgga

SEQ ID NO: 201519 - DNA, 25 bp, Homo sapien
tgccaacagtatggatgtcagcttc

SEQ ID NO: 201520 - DNA, 25 bp, Homo sapien
ttgaggctaaagaacactgtgtcca

SEQ ID NO: 201521 - DNA, 25 bp, Homo sapien
cagcagtcctctgtgtacttgatgc

SEQ ID NO: 201522 - DNA, 25 bp, Homo sapien
cagatgtgtcgttctaggtccagca

SEQ ID NO: 201523 - DNA, 25 bp, Homo sapien
ttctgccactcgtccactcagggta

SEQ ID NO: 201524 - DNA, 25 bp, Homo sapien
tctgtgtacttgatgctgctcctgg

SEQ ID NO: 201525 - DNA, 25 bp, Homo sapien
gtgtcatgatagaccatggaagttt

SEQ ID NO: 201526 - DNA, 25 bp, Homo sapien
ctgtgtcatgatagaccatggaagt

SEQ ID NO: 201527 - DNA, 25 bp, Homo sapien
tcatgatagaccatggaagttttgc

SEQ ID NO: 201528 - DNA, 25 bp, Homo sapien
gtcatgatagaccatggaagttttg

SEQ ID NO: 201529 - DNA, 25 bp, Homo sapien
agaagaaaggctcctttgttatatt

SEQ ID NO: 201530 - DNA, 25 bp, Homo sapien
tctctcaaatcgtctggagtgcctc

SEQ ID NO: 201531 - DNA, 25 bp, Homo sapien
tattttctctcaaatcgtctggagt

SEQ ID NO: 201532 - DNA, 25 bp, Homo sapien
taagcaattgaaagataaaagccag

SEQ ID NO: 201533 - DNA, 25 bp, Homo sapien
aagtaatgagcacagataagcctaa

SEQ ID NO: 201534 - DNA, 25 bp, Homo sapien
tgaagtaatgagcacagataagcct

SEQ ID NO: 201535 - DNA, 25 bp, Homo sapien
ctgaagtaatgagcacagataagcc

SEQ ID NO: 201536 - DNA, 25 bp, Homo sapien
gaagtaatgagcacagataagccta

SEQ ID NO: 201537 - DNA, 25 bp, Homo sapien
gggcccatccgacaattaaagcttg

SEQ ID NO: 201538 - DNA, 25 bp, Homo sapien
cattccagaatgtaagggcccatcc

SEQ ID NO: 201539 - DNA, 25 bp, Homo sapien
gcaaagggcgagctaatttctctct

SEQ ID NO: 201540 - DNA, 25 bp, Homo sapien
tcagttttagcttggagacatggct

SEQ ID NO: 201541 - DNA, 25 bp, Homo sapien
gcaccaagtggcagggatcttggct

SEQ ID NO: 201542 - DNA, 25 bp, Homo sapien
caatacaaacagtggactgcactgg

SEQ ID NO: 201543 - DNA, 25 bp, Homo sapien
gaaatgttggtcaaatcagggaatc

SEQ ID NO: 201544 - DNA, 25 bp, Homo sapien
gcagggtctgtcacttattcactaa

SEQ ID NO: 201545 - DNA, 25 bp, Homo sapien
ttggacttgaagtagggtgcacccg

SEQ ID NO: 201546 - DNA, 25 bp, Homo sapien
catgggaaccagctgcatccaggta

SEQ ID NO: 201547 - DNA, 25 bp, Homo sapien
gaaaggactagctcgatagcacact

SEQ ID NO: 201548 - DNA, 25 bp, Homo sapien
tttcataacagccattgccatggga

SEQ ID NO: 201549 - DNA, 25 bp, Homo sapien
tataagccatctgtacccaagtcct

SEQ ID NO: 201550 - DNA, 25 bp, Homo sapien
tttgcaaacagctaccctaggtgag

SEQ ID NO: 201551 - DNA, 25 bp, Homo sapien
tcagaattgttgtcagaagccactc

SEQ ID NO: 201552 - DNA, 25 bp, Homo sapien
gacatgattagaagcagccattcca

SEQ ID NO: 201553 - DNA, 25 bp, Homo sapien
tagtgctgccctaagagagcgtcag

SEQ ID NO: 201554 - DNA, 25 bp, Homo sapien
tccctgcaactcttgcagtggggtc

SEQ ID NO: 201555 - DNA, 25 bp, Homo sapien
tcccttagcttcacctccatttcca

SEQ ID NO: 201556 - DNA, 25 bp, Homo sapien
tttccctgcaactcttgcagtgggg

SEQ ID NO: 201557 - DNA, 25 bp, Homo sapien
cagtggggtctctgttttcccttag

SEQ ID NO: 201558 - DNA, 25 bp, Homo sapien
tctcttagccaggatacggcggctg

SEQ ID NO: 201559 - DNA, 25 bp, Homo sapien
gatacggcggctgtgtcctcttttc

SEQ ID NO: 201560 - DNA, 25 bp, Homo sapien
gaatcctctcttagccaggatacgg

SEQ ID NO: 201561 - DNA, 25 bp, Homo sapien
ttagccaggatacggcggctgtgtc

SEQ ID NO: 201562 - DNA, 25 bp, Homo sapien
gaatacatggaaacagtggtccctt

SEQ ID NO: 201563 - DNA, 25 bp, Homo sapien
gtctctcacaaatccatgactgaca

SEQ ID NO: 201564 - DNA, 25 bp, Homo sapien
gaggagctgcagaacataatgtgat

SEQ ID NO: 201565 - DNA, 25 bp, Homo sapien
gcagatctggagagaattcctgaca

SEQ ID NO: 201566 - DNA, 25 bp, Homo sapien
tccttgtatctagaacatatactca

SEQ ID NO: 201567 - DNA, 25 bp, Homo sapien
gagatttgccgtagtcctatattct

SEQ ID NO: 201568 - DNA, 25 bp, Homo sapien
ttctccttgtatctagaacatatac

SEQ ID NO: 201569 - DNA, 25 bp, Homo sapien
tccttctccctaaagggagatttgc

SEQ ID NO: 201570 - DNA, 25 bp, Homo sapien
ccagtccttgaatccaagtcctcct

SEQ ID NO: 201571 - DNA, 25 bp, Homo sapien
tgtgacactcatcattccgatcctt

SEQ ID NO: 201572 - DNA, 25 bp, Homo sapien
cagtccttgaatccaagtcctcctt

SEQ ID NO: 201573 - DNA, 25 bp, Homo sapien
gtccagcccgaaggaattgggccat

SEQ ID NO: 201574 - DNA, 25 bp, Homo sapien
gctgagcagtttcttggcaggtcca

SEQ ID NO: 201575 - DNA, 25 bp, Homo sapien
ggcaggtccagcccgaaggaattgg

SEQ ID NO: 201576 - DNA, 25 bp, Homo sapien
ggctgagcagtttcttggcaggtcc

SEQ ID NO: 201577 - DNA, 25 bp, Homo sapien
tctgattggcgcttatcagtaggtg

SEQ ID NO: 201578 - DNA, 25 bp, Homo sapien
tgattggcgcttatcagtaggtgtc

SEQ ID NO: 201579 - DNA, 25 bp, Homo sapien
ggttctgattggcgcttatcagtag

SEQ ID NO: 201580 - DNA, 25 bp, Homo sapien
gattggcgcttatcagtaggtgtca

SEQ ID NO: 201581 - DNA, 25 bp, Homo sapien
gaccaaaaatttgctgtctgggtat

SEQ ID NO: 201582 - DNA, 25 bp, Homo sapien
gcaaacatctgtttgtacctatggg

SEQ ID NO: 201583 - DNA, 25 bp, Homo sapien
ccagatgtcatttggtaagagtatc

SEQ ID NO: 201584 - DNA, 25 bp, Homo sapien
taagcagtacagaaaccagatgtca

SEQ ID NO: 201585 - DNA, 25 bp, Homo sapien
atacactcatgttctattggcagaa

SEQ ID NO: 201586 - DNA, 25 bp, Homo sapien
cagaatggagaaactaacccattca

SEQ ID NO: 201587 - DNA, 25 bp, Homo sapien
ccattcattataagaccagatgatt

SEQ ID NO: 201588 - DNA, 25 bp, Homo sapien
tataagaccagatgattagaatttt

SEQ ID NO: 201589 - DNA, 25 bp, Homo sapien
tgcccaatctctccactcagatatg

SEQ ID NO: 201590 - DNA, 25 bp, Homo sapien
tcgctgagcaggtgaaagcagtggg

SEQ ID NO: 201591 - DNA, 25 bp, Homo sapien
gcagtgggacctcagtccactcatg

SEQ ID NO: 201592 - DNA, 25 bp, Homo sapien
tccactcatggacagagaccattgc

SEQ ID NO: 201593 - DNA, 25 bp, Homo sapien
attgtaactgaatgagtcagcaatc

SEQ ID NO: 201594 - DNA, 25 bp, Homo sapien
gagagcccttaggtaatacagagga

SEQ ID NO: 201595 - DNA, 25 bp, Homo sapien
tgtaactgaatgagtcagcaatctt

SEQ ID NO: 201596 - DNA, 25 bp, Homo sapien
tctaaatatggagagcccttaggta

SEQ ID NO: 201597 - DNA, 25 bp, Homo sapien
tccataattatttccgatatgggtg

SEQ ID NO: 201598 - DNA, 25 bp, Homo sapien
tatttccgatatgggtgcctgcaat

SEQ ID NO: 201599 - DNA, 25 bp, Homo sapien
taattatttccgatatgggtgcctg

SEQ ID NO: 201600 - DNA, 25 bp, Homo sapien
atatgggtgcctgcaattaacctca

SEQ ID NO: 201601 - DNA, 25 bp, Homo sapien
gataaatactgaattcaagatatta

SEQ ID NO: 201602 - DNA, 25 bp, Homo sapien
ggataaatactgaattcaagatatt

SEQ ID NO: 201603 - DNA, 25 bp, Homo sapien
ataaatactgaattcaagatattaa

SEQ ID NO: 201604 - DNA, 25 bp, Homo sapien
ccccatggagtctgagttattcaaa

SEQ ID NO: 201605 - DNA, 25 bp, Homo sapien
caaaatatagcaaagaacagaattc

SEQ ID NO: 201606 - DNA, 25 bp, Homo sapien
tattagcagttccaaatataccagc

SEQ ID NO: 201607 - DNA, 25 bp, Homo sapien
caatttgctacacacagtagtaaga

SEQ ID NO: 201608 - DNA, 25 bp, Homo sapien
tcaactctaggctccgaggcatctg

SEQ ID NO: 201609 - DNA, 25 bp, Homo sapien
tcctgctgaccagctcaaccggtgg

SEQ ID NO: 201610 - DNA, 25 bp, Homo sapien
tttttctggcacgtcaaacttcctg

SEQ ID NO: 201611 - DNA, 25 bp, Homo sapien
catctggataagttggaaaaatgcc

SEQ ID NO: 201612 - DNA, 25 bp, Homo sapien
tatatctgaactgactctttcggct

SEQ ID NO: 201613 - DNA, 25 bp, Homo sapien
gactctttcggctgtactttctcaa

SEQ ID NO: 201614 - DNA, 25 bp, Homo sapien
tgactctttcggctgtactttctca

SEQ ID NO: 201615 - DNA, 25 bp, Homo sapien
ggcttgttccacataaacaaaactg

SEQ ID NO: 201616 - DNA, 25 bp, Homo sapien
agtcaaatatccagactctgtgtcc

SEQ ID NO: 201617 - DNA, 25 bp, Homo sapien
ggtgccttgatgtcttttaaacaca

SEQ ID NO: 201618 - DNA, 25 bp, Homo sapien
ttttctttcacgactccctctcgga

SEQ ID NO: 201619 - DNA, 25 bp, Homo sapien
ctgttccatgcagctccattcattt

SEQ ID NO: 201620 - DNA, 25 bp, Homo sapien
ttcatttggggtcctcttctgctac

SEQ ID NO: 201621 - DNA, 25 bp, Homo sapien
gttccatgcagctccattcatttgg

SEQ ID NO: 201622 - DNA, 25 bp, Homo sapien
tccatgcagctccattcatttgggg

SEQ ID NO: 201623 - DNA, 25 bp, Homo sapien
ggcctctgggcttgtctcacaggcc

SEQ ID NO: 201624 - DNA, 25 bp, Homo sapien
ggaacctggcaaagtgtacttgtat

SEQ ID NO: 201625 - DNA, 25 bp, Homo sapien
cctctgggcttgtctcacaggccat

SEQ ID NO: 201626 - DNA, 25 bp, Homo sapien
ttgtattgtgtacatggggcctctg

SEQ ID NO: 201627 - DNA, 25 bp, Homo sapien
tcagagagcattgccaaaagaatgc

SEQ ID NO: 201628 - DNA, 25 bp, Homo sapien
tgagaaggcctaaactggaccaagg

SEQ ID NO: 201629 - DNA, 25 bp, Homo sapien
tgcgtgggaaataagttttccacac

SEQ ID NO: 201630 - DNA, 25 bp, Homo sapien
gaccaagggttctgcgtgggaaata

SEQ ID NO: 201631 - DNA, 25 bp, Homo sapien
gtagagattccagtaagtgcaggaa

SEQ ID NO: 201632 - DNA, 25 bp, Homo sapien
caggaagatctgcataggctaaaat

SEQ ID NO: 201633 - DNA, 25 bp, Homo sapien
aaataagttgtaacgcaggtaaatg

SEQ ID NO: 201634 - DNA, 25 bp, Homo sapien
cataggctaaaataagttgtaacgc

SEQ ID NO: 201635 - DNA, 25 bp, Homo sapien
ggtgctgcaggaaatcgtccctcct

SEQ ID NO: 201636 - DNA, 25 bp, Homo sapien
tcctcctcctcgcatggtacacgtt

SEQ ID NO: 201637 - DNA, 25 bp, Homo sapien
catggtacacgttctctttgactta

SEQ ID NO: 201638 - DNA, 25 bp, Homo sapien
cggtgctgcaggaaatcgtccctcc

SEQ ID NO: 201639 - DNA, 25 bp, Homo sapien
cgggccttgatgctcatctccctct

SEQ ID NO: 201640 - DNA, 25 bp, Homo sapien
gacacgggccttgatgctcatctcc

SEQ ID NO: 201641 - DNA, 25 bp, Homo sapien
cagacacgggccttgatgctcatct

SEQ ID NO: 201642 - DNA, 25 bp, Homo sapien
ctgcagacacgggccttgatgctca

SEQ ID NO: 201643 - DNA, 25 bp, Homo sapien
acacaccatgatcccaatctagact

SEQ ID NO: 201644 - DNA, 25 bp, Homo sapien
caatctagactttctcctaagtgca

SEQ ID NO: 201645 - DNA, 25 bp, Homo sapien
tattttggtactgttgcaaggcctt

SEQ ID NO: 201646 - DNA, 25 bp, Homo sapien
aagtgcaatcttcagccctactctc

SEQ ID NO: 201647 - DNA, 25 bp, Homo sapien
ttcttccttgatgttagttgaattc

SEQ ID NO: 201648 - DNA, 25 bp, Homo sapien
ctttcttccttgatgttagttgaat

SEQ ID NO: 201649 - DNA, 25 bp, Homo sapien
cctttcttccttgatgttagttgaa

SEQ ID NO: 201650 - DNA, 25 bp, Homo sapien
tcttccttgatgttagttgaattca

SEQ ID NO: 201651 - DNA, 25 bp, Homo sapien
gagtcaggttgaacagagttagcca

SEQ ID NO: 201652 - DNA, 25 bp, Homo sapien
gatcagttggaaagtatagctgcca

SEQ ID NO: 201653 - DNA, 25 bp, Homo sapien
tttctacttgtgatgagccccagag

SEQ ID NO: 201654 - DNA, 25 bp, Homo sapien
tgccatgtaagatcaagagtcaggt

SEQ ID NO: 201655 - DNA, 25 bp, Homo sapien
tgaaggactgttggtaaaatatgga

SEQ ID NO: 201656 - DNA, 25 bp, Homo sapien
tctctgaaggactgttggtaaaata

SEQ ID NO: 201657 - DNA, 25 bp, Homo sapien
gttctggaaattgacaacactggga

SEQ ID NO: 201658 - DNA, 25 bp, Homo sapien
ggtagttctggaaattgacaacact

SEQ ID NO: 201659 - DNA, 25 bp, Homo sapien
tgatggccaagtggtcaagctcctc

SEQ ID NO: 201660 - DNA, 25 bp, Homo sapien
ctcagggctgtcttccgtggatact

SEQ ID NO: 201661 - DNA, 25 bp, Homo sapien
ttccgtggatacttgagctgcccca

SEQ ID NO: 201662 - DNA, 25 bp, Homo sapien
gatggccaagtggtcaagctcctca

SEQ ID NO: 201663 - DNA, 25 bp, Homo sapien
gcctcttatccttttccattgttct

SEQ ID NO: 201664 - DNA, 25 bp, Homo sapien
ctgcctcttatccttttccattgtt

SEQ ID NO: 201665 - DNA, 25 bp, Homo sapien
ttgttctacatctgtcctccaccat

SEQ ID NO: 201666 - DNA, 25 bp, Homo sapien
cattgttctacatctgtcctccacc

SEQ ID NO: 201667 - DNA, 25 bp, Homo sapien
tgaagcaaaaccacacgtatctggt

SEQ ID NO: 201668 - DNA, 25 bp, Homo sapien
ggttctaaagcaacatattgagtca

SEQ ID NO: 201669 - DNA, 25 bp, Homo sapien
gtatgttctctactgaattcctcaa

SEQ ID NO: 201670 - DNA, 25 bp, Homo sapien
ttctgctgacacgaagtatgttctc

SEQ ID NO: 201671 - DNA, 25 bp, Homo sapien
ttctgccttcagtgttcaaacaatc

SEQ ID NO: 201672 - DNA, 25 bp, Homo sapien
tgtgtgcactttaactttgcagctc

SEQ ID NO: 201673 - DNA, 25 bp, Homo sapien
taaataagctataagtgaactggac

SEQ ID NO: 201674 - DNA, 25 bp, Homo sapien
catatgtcatgtaggtaagccactg

SEQ ID NO: 201675 - DNA, 25 bp, Homo sapien
tatggtatgataaacacaagtccag

SEQ ID NO: 201676 - DNA, 25 bp, Homo sapien
tgtacagaaccagttttccctccac

SEQ ID NO: 201677 - DNA, 25 bp, Homo sapien
taagtgtgcatgttttacgttggtg

SEQ ID NO: 201678 - DNA, 25 bp, Homo sapien
tacgttggtgtcattgaagagcaca

SEQ ID NO: 201679 - DNA, 25 bp, Homo sapien
ttattgcctatagtcgtcccgttgt

SEQ ID NO: 201680 - DNA, 25 bp, Homo sapien
tagatatacaacctaaatacatttt

SEQ ID NO: 201681 - DNA, 25 bp, Homo sapien
gtacttattaacatctctcattctc

SEQ ID NO: 201682 - DNA, 25 bp, Homo sapien
tgaggtatccatccccctaggcact

SEQ ID NO: 201683 - DNA, 25 bp, Homo sapien
tatatctgtctatcctcaaggactg

SEQ ID NO: 201684 - DNA, 25 bp, Homo sapien
gtccagctataaggaagcagtctgt

SEQ ID NO: 201685 - DNA, 25 bp, Homo sapien
taaggtcaaggtgaatgtttaggga

SEQ ID NO: 201686 - DNA, 25 bp, Homo sapien
tggtgtgtatatctgtctatcctca

SEQ ID NO: 201687 - DNA, 25 bp, Homo sapien
tcctggcccgctgtgagtgatgctt

SEQ ID NO: 201688 - DNA, 25 bp, Homo sapien
cagtagtcgtgtgatgaggtgccca

SEQ ID NO: 201689 - DNA, 25 bp, Homo sapien
tcccttgaggtaacgatcggctaat

SEQ ID NO: 201690 - DNA, 25 bp, Homo sapien
gaccgcagggctcacatcaaaagtt

SEQ ID NO: 201691 - DNA, 25 bp, Homo sapien
cagaggagatcacctcgttctcagg

SEQ ID NO: 201692 - DNA, 25 bp, Homo sapien
gcagaggagatcacctcgttctcag

SEQ ID NO: 201693 - DNA, 25 bp, Homo sapien
tgcagaggagatcacctcgttctca

SEQ ID NO: 201694 - DNA, 25 bp, Homo sapien
ctgcagaggagatcacctcgttctc

SEQ ID NO: 201695 - DNA, 25 bp, Homo sapien
caaaaaataagttcggcggcagctc

SEQ ID NO: 201696 - DNA, 25 bp, Homo sapien
tggaaaagaaacatccgctaggaaa

SEQ ID NO: 201697 - DNA, 25 bp, Homo sapien
gctagcccacgtctgagtgctgtca

SEQ ID NO: 201698 - DNA, 25 bp, Homo sapien
tcagatcggattacaaggcccctat

SEQ ID NO: 201699 - DNA, 25 bp, Homo sapien
gactgaagccggtaaagatcccgca

SEQ ID NO: 201700 - DNA, 25 bp, Homo sapien
gaatgacggcactcttgctaggctg

SEQ ID NO: 201701 - DNA, 25 bp, Homo sapien
ggtatcaaactagcatggctcgcgc

SEQ ID NO: 201702 - DNA, 25 bp, Homo sapien
catctgcagaagtgtcgcctcgaag

SEQ ID NO: 201703 - DNA, 25 bp, Homo sapien
cttggcataataaaacgaccatcag

SEQ ID NO: 201704 - DNA, 25 bp, Homo sapien
ggcataataaaacgaccatcagcat

SEQ ID NO: 201705 - DNA, 25 bp, Homo sapien
ttggcataataaaacgaccatcagc

SEQ ID NO: 201706 - DNA, 25 bp, Homo sapien
tggcataataaaacgaccatcagca

SEQ ID NO: 201707 - DNA, 25 bp, Homo sapien
cagcgtggcttcttgaaggataaac

SEQ ID NO: 201708 - DNA, 25 bp, Homo sapien
aaatggcattgctctccactttaga

SEQ ID NO: 201709 - DNA, 25 bp, Homo sapien
tgtcctaactgctatctgggccatg

SEQ ID NO: 201710 - DNA, 25 bp, Homo sapien
gaattgccctgtaattacttggtct

SEQ ID NO: 201711 - DNA, 25 bp, Homo sapien
ttgagggcttattttattgtggccg

SEQ ID NO: 201712 - DNA, 25 bp, Homo sapien
ttgtggccgatgagtttgaaatatt

SEQ ID NO: 201713 - DNA, 25 bp, Homo sapien
aaaagtgcctgatcgtgcccgctca

SEQ ID NO: 201714 - DNA, 25 bp, Homo sapien
gccaaaagtgcctgatcgtgcccgc

SEQ ID NO: 201715 - DNA, 25 bp, Homo sapien
cagggaaggggtgagagacgattcc

SEQ ID NO: 201716 - DNA, 25 bp, Homo sapien
gggtgagagacgattccggagagac

SEQ ID NO: 201717 - DNA, 25 bp, Homo sapien
gtgagagacgattccggagagacct

SEQ ID NO: 201718 - DNA, 25 bp, Homo sapien
gaaggggtgagagacgattccggag

SEQ ID NO: 201719 - DNA, 25 bp, Homo sapien
tgacaagagagtgggaacgcgccac

SEQ ID NO: 201720 - DNA, 25 bp, Homo sapien
tttcttgcaacgctgagagggcgag

SEQ ID NO: 201721 - DNA, 25 bp, Homo sapien
gagtggttagccctcaaggtacaac

SEQ ID NO: 201722 - DNA, 25 bp, Homo sapien
tgcgcgctagcagcactttaaaagg

SEQ ID NO: 201723 - DNA, 25 bp, Homo sapien
cgttgctcgggatggcactacggaa

SEQ ID NO: 201724 - DNA, 25 bp, Homo sapien
tgattcttgacagccaatcttgaac

SEQ ID NO: 201725 - DNA, 25 bp, Homo sapien
gaagctgcagcagtgcgttgctcgg

SEQ ID NO: 201726 - DNA, 25 bp, Homo sapien
gaaaacaaggcatataataacagtc

SEQ ID NO: 201727 - DNA, 25 bp, Homo sapien
tatttgaatataatgagactccacc

SEQ ID NO: 201728 - DNA, 25 bp, Homo sapien
actccaccgcagacaggctctgttt

SEQ ID NO: 201729 - DNA, 25 bp, Homo sapien
ccaccgcagacaggctctgtttttc

SEQ ID NO: 201730 - DNA, 25 bp, Homo sapien
gaatataatgagactccaccgcaga

SEQ ID NO: 201731 - DNA, 25 bp, Homo sapien
gctgttagtcattgctccgggtcca

SEQ ID NO: 201732 - DNA, 25 bp, Homo sapien
tcaccaccgagaggcacttaaaaag

SEQ ID NO: 201733 - DNA, 25 bp, Homo sapien
gaagctccgggcagattcagaaaga

SEQ ID NO: 201734 - DNA, 25 bp, Homo sapien
gaacgcctgctaaggctccgaagag

SEQ ID NO: 201735 - DNA, 25 bp, Homo sapien
gcaccagcagcagagtcgcacgcag

SEQ ID NO: 201736 - DNA, 25 bp, Homo sapien
aaacggtgaacagctttcggcctgc

SEQ ID NO: 201737 - DNA, 25 bp, Homo sapien
cgcagcaaatactccttcaagaatt

SEQ ID NO: 201738 - DNA, 25 bp, Homo sapien
ctcgacctctgcgtctgcgtctctc

SEQ ID NO: 201739 - DNA, 25 bp, Homo sapien
caagcagttactgggatgtcctgac

SEQ ID NO: 201740 - DNA, 25 bp, Homo sapien
taggcgcaactcagcgttcagcagg

SEQ ID NO: 201741 - DNA, 25 bp, Homo sapien
tgcgcaagggcctcttcgaaaaccc

SEQ ID NO: 201742 - DNA, 25 bp, Homo sapien
tgactaatcgaagatgctgccgcgc

SEQ ID NO: 201743 - DNA, 25 bp, Homo sapien
cttcttaggggcattggcaggtaga

SEQ ID NO: 201744 - DNA, 25 bp, Homo sapien
tgctttgggtcgctccggagctcaa

SEQ ID NO: 201745 - DNA, 25 bp, Homo sapien
cactctccacgcacatacttggttt

SEQ ID NO: 201746 - DNA, 25 bp, Homo sapien
cggagctcaagaactcgggttgcct

SEQ ID NO: 201747 - DNA, 25 bp, Homo sapien
taaaggatcgaacagctcagccctc

SEQ ID NO: 201748 - DNA, 25 bp, Homo sapien
gtggatgcccggagtcgaccaacac

SEQ ID NO: 201749 - DNA, 25 bp, Homo sapien
aagaaaagtaaaggatcgaacagct

SEQ ID NO: 201750 - DNA, 25 bp, Homo sapien
tcccgaccgtggatgcccggagtcg

SEQ ID NO: 201751 - DNA, 25 bp, Homo sapien
cgcccggcaagagccgcgcggcttt

SEQ ID NO: 201752 - DNA, 25 bp, Homo sapien
ggcaagagccgcgcggctttcgcct

SEQ ID NO: 201753 - DNA, 25 bp, Homo sapien
agccgcgcggctttcgcctttgctg

SEQ ID NO: 201754 - DNA, 25 bp, Homo sapien
gcccctgcgcgaccgtccgcgcccg

SEQ ID NO: 201755 - DNA, 25 bp, Homo sapien
aaagcagacggaggcaagctgtgcc

SEQ ID NO: 201756 - DNA, 25 bp, Homo sapien
gcagtgcttggaggcctctaaggcc

SEQ ID NO: 201757 - DNA, 25 bp, Homo sapien
cgaaatgtgtttacaggtagcctca

SEQ ID NO: 201758 - DNA, 25 bp, Homo sapien
tcaactcacaaaccgcgatccttgg

SEQ ID NO: 201759 - DNA, 25 bp, Homo sapien
tctagggaccctacaccgtgaaatg

SEQ ID NO: 201760 - DNA, 25 bp, Homo sapien
tccgcaagtcgacgaaaatagctcg

SEQ ID NO: 201761 - DNA, 25 bp, Homo sapien
ggatcttggctgtcgtctctaggga

SEQ ID NO: 201762 - DNA, 25 bp, Homo sapien
aatagctcgtggagaaggcgcgtcc

SEQ ID NO: 201763 - DNA, 25 bp, Homo sapien
agttcgcaagctctcagggcgcccc

SEQ ID NO: 201764 - DNA, 25 bp, Homo sapien
ttcgcaagctctcagggcgccccgc

SEQ ID NO: 201765 - DNA, 25 bp, Homo sapien
gcagttcgcaagctctcagggcgcc

SEQ ID NO: 201766 - DNA, 25 bp, Homo sapien
ctgcagttcgcaagctctcagggcg

SEQ ID NO: 201767 - DNA, 25 bp, Homo sapien
caggactgcgctctctaccgcagaa

SEQ ID NO: 201768 - DNA, 25 bp, Homo sapien
gggccagattgggtgacactcccct

SEQ ID NO: 201769 - DNA, 25 bp, Homo sapien
aacctgctccagctaggtgttctct

SEQ ID NO: 201770 - DNA, 25 bp, Homo sapien
tggacctcagagccggttctctcct

SEQ ID NO: 201771 - DNA, 25 bp, Homo sapien
ctccagcaccactattggaaaataa

SEQ ID NO: 201772 - DNA, 25 bp, Homo sapien
cactattggaaaataattaggccac

SEQ ID NO: 201773 - DNA, 25 bp, Homo sapien
ccagcaccactattggaaaataatt

SEQ ID NO: 201774 - DNA, 25 bp, Homo sapien
gcaccactattggaaaataattagg

SEQ ID NO: 201775 - DNA, 25 bp, Homo sapien
aaggaggctcctagaccccctctgc

SEQ ID NO: 201776 - DNA, 25 bp, Homo sapien
tcctagaccccctctgcctgtctcc

SEQ ID NO: 201777 - DNA, 25 bp, Homo sapien
ccaaggaggctcctagaccccctct

SEQ ID NO: 201778 - DNA, 25 bp, Homo sapien
gaggctcctagaccccctctgcctg

SEQ ID NO: 201779 - DNA, 25 bp, Homo sapien
cctggggacctctgaacggttgcag

SEQ ID NO: 201780 - DNA, 25 bp, Homo sapien
gggacctctgaacggttgcagtgaa

SEQ ID NO: 201781 - DNA, 25 bp, Homo sapien
ggtccctgcagtagcgggctcgcca

SEQ ID NO: 201782 - DNA, 25 bp, Homo sapien
gtccctgcagtagcgggctcgccag

SEQ ID NO: 201783 - DNA, 25 bp, Homo sapien
gctcgagatagcttggacgggaatc

SEQ ID NO: 201784 - DNA, 25 bp, Homo sapien
tagcttggacgggaatcccatcggg

SEQ ID NO: 201785 - DNA, 25 bp, Homo sapien
tggcgctgcaggctcgagatagctt

SEQ ID NO: 201786 - DNA, 25 bp, Homo sapien
cgctgcaggctcgagatagcttgga

SEQ ID NO: 201787 - DNA, 25 bp, Homo sapien
tccctcagctcggatgccacactca

SEQ ID NO: 201788 - DNA, 25 bp, Homo sapien
aggctcgcgtccctcagctcggatg

SEQ ID NO: 201789 - DNA, 25 bp, Homo sapien
agcagcagcggcgtctcaggctcgc

SEQ ID NO: 201790 - DNA, 25 bp, Homo sapien
agcagcggcgtctcaggctcgcgtc

SEQ ID NO: 201791 - DNA, 25 bp, Homo sapien
tctgccttctcgcatcttccttcct

SEQ ID NO: 201792 - DNA, 25 bp, Homo sapien
ctcctctgccttctcgcatcttcct

SEQ ID NO: 201793 - DNA, 25 bp, Homo sapien
tagcttccgggccgggctccgcgct

SEQ ID NO: 201794 - DNA, 25 bp, Homo sapien
cgggctccgcgctccttccctccct

SEQ ID NO: 201795 - DNA, 25 bp, Homo sapien
aatgtttctcctgcagcatcaggca

SEQ ID NO: 201796 - DNA, 25 bp, Homo sapien
atgtttctcctgcagcatcaggcat

SEQ ID NO: 201797 - DNA, 25 bp, Homo sapien
taatgtttctcctgcagcatcaggc

SEQ ID NO: 201798 - DNA, 25 bp, Homo sapien
ctaatgtttctcctgcagcatcagg

SEQ ID NO: 201799 - DNA, 25 bp, Homo sapien
gaatgacagctattgtctcattttg

SEQ ID NO: 201800 - DNA, 25 bp, Homo sapien
tgagtctgtgacactcacagtccag

SEQ ID NO: 201801 - DNA, 25 bp, Homo sapien
gagtttccaattaagctacccgaca

SEQ ID NO: 201802 - DNA, 25 bp, Homo sapien
tgcagcccagacactaaagtggcca

SEQ ID NO: 201803 - DNA, 25 bp, Homo sapien
ggcacgttccttaaactcatgggag

SEQ ID NO: 201804 - DNA, 25 bp, Homo sapien
cctaatctttggtcctctggtggcc

SEQ ID NO: 201805 - DNA, 25 bp, Homo sapien
cagttgtaccaaccaaggcctggcc

SEQ ID NO: 201806 - DNA, 25 bp, Homo sapien
taaccactggaccagaacagaagct

SEQ ID NO: 201807 - DNA, 25 bp, Homo sapien
gaaacaatggaccatccccagaatg

SEQ ID NO: 201808 - DNA, 25 bp, Homo sapien
gcctaccagaacttggaaacaatgg

SEQ ID NO: 201809 - DNA, 25 bp, Homo sapien
ggaatttgcatccatccgcacgaga

SEQ ID NO: 201810 - DNA, 25 bp, Homo sapien
aggaggtcttaacgccctggcagcg

SEQ ID NO: 201811 - DNA, 25 bp, Homo sapien
ttatggattatagtaggtgcgttgc

SEQ ID NO: 201812 - DNA, 25 bp, Homo sapien
agtgctttagccactgcggtgtggt

SEQ ID NO: 201813 - DNA, 25 bp, Homo sapien
ttgctggaggtcaagacccaaaagc

SEQ ID NO: 201814 - DNA, 25 bp, Homo sapien
tcaggtagccgggaaattttgcaaa

SEQ ID NO: 201815 - DNA, 25 bp, Homo sapien
cacttaactctaggtatattggcct

SEQ ID NO: 201816 - DNA, 25 bp, Homo sapien
gtcaaggaacacttaactctaggta

SEQ ID NO: 201817 - DNA, 25 bp, Homo sapien
taatattacatacaaacctcatttg

SEQ ID NO: 201818 - DNA, 25 bp, Homo sapien
tgatcacaccacttaaggtcaagga

SEQ ID NO: 201819 - DNA, 25 bp, Homo sapien
tgacttatccctctggccaagtgcc

SEQ ID NO: 201820 - DNA, 25 bp, Homo sapien
ggctatgtgcataggaatctccttg

SEQ ID NO: 201821 - DNA, 25 bp, Homo sapien
tttgaaccctgaatgcagctggctg

SEQ ID NO: 201822 - DNA, 25 bp, Homo sapien
gacatttgacaccactttgaaccct

SEQ ID NO: 201823 - DNA, 25 bp, Homo sapien
ttttatgaaactcctggtcacctgc

SEQ ID NO: 201824 - DNA, 25 bp, Homo sapien
acagctgtggttcagggaaacacat

SEQ ID NO: 201825 - DNA, 25 bp, Homo sapien
tctgacaaagacaacagtaagctaa

SEQ ID NO: 201826 - DNA, 25 bp, Homo sapien
ttcttctgacaaagacaacagtaag

SEQ ID NO: 201827 - DNA, 25 bp, Homo sapien
tcttctgacaaagacaacagtaagc

SEQ ID NO: 201828 - DNA, 25 bp, Homo sapien
actttcttctgacaaagacaacagt

SEQ ID NO: 201829 - DNA, 25 bp, Homo sapien
gaatgcatcctgtaaagtacgcccc

SEQ ID NO: 201830 - DNA, 25 bp, Homo sapien
tatagtagatactcatgctctcggc

SEQ ID NO: 201831 - DNA, 25 bp, Homo sapien
cttatacgagatgacagacttgaac

SEQ ID NO: 201832 - DNA, 25 bp, Homo sapien
tgctgttggccagactgtattcctg

SEQ ID NO: 201833 - DNA, 25 bp, Homo sapien
aatggaggaatgaatagcgccacac

SEQ ID NO: 201834 - DNA, 25 bp, Homo sapien
tggaggaatgaatagcgccacacag

SEQ ID NO: 201835 - DNA, 25 bp, Homo sapien
agcaatggaggaatgaatagcgcca

SEQ ID NO: 201836 - DNA, 25 bp, Homo sapien
gaggaatgaatagcgccacacagtc

SEQ ID NO: 201837 - DNA, 25 bp, Homo sapien
tcaggcaccttgataccagcttttt

SEQ ID NO: 201838 - DNA, 25 bp, Homo sapien
ttcttgttgtcttcaggcaccttga

SEQ ID NO: 201839 - DNA, 25 bp, Homo sapien
tgaggacacaccaataaggaggtgt

SEQ ID NO: 201840 - DNA, 25 bp, Homo sapien
ggaggtgtttcttgttgtcttcagg

SEQ ID NO: 201841 - DNA, 25 bp, Homo sapien
cagcttgggcgtattttgctgctgc

SEQ ID NO: 201842 - DNA, 25 bp, Homo sapien
ctcagcttgggcgtattttgctgct

SEQ ID NO: 201843 - DNA, 25 bp, Homo sapien
cttgggcgtattttgctgctgctac

SEQ ID NO: 201844 - DNA, 25 bp, Homo sapien
tcagcttgggcgtattttgctgctg

SEQ ID NO: 201845 - DNA, 25 bp, Homo sapien
tgatggactttagtcgcttggtaac

SEQ ID NO: 201846 - DNA, 25 bp, Homo sapien
gaagttgctgtatttcgaacttgaa

SEQ ID NO: 201847 - DNA, 25 bp, Homo sapien
ggtaacatctttcgaagttgctgta

SEQ ID NO: 201848 - DNA, 25 bp, Homo sapien
cagtgatgcccgcatgagagaacat

SEQ ID NO: 201849 - DNA, 25 bp, Homo sapien
cgcagccctgctgaaagtcggtgat

SEQ ID NO: 201850 - DNA, 25 bp, Homo sapien
agccgcagccctgctgaaagtcggt

SEQ ID NO: 201851 - DNA, 25 bp, Homo sapien
ccgcagccctgctgaaagtcggtga

SEQ ID NO: 201852 - DNA, 25 bp, Homo sapien
ggtagccgcagccctgctgaaagtc

SEQ ID NO: 201853 - DNA, 25 bp, Homo sapien
tgctgccagagagttctgtccagtg

SEQ ID NO: 201854 - DNA, 25 bp, Homo sapien
cctgatgctgccagagagttctgtc

SEQ ID NO: 201855 - DNA, 25 bp, Homo sapien
agagttctgtccagtgtcgacaggc

SEQ ID NO: 201856 - DNA, 25 bp, Homo sapien
agttctgtccagtgtcgacaggcat

SEQ ID NO: 201857 - DNA, 25 bp, Homo sapien
gctgacatgatgacactagaccact

SEQ ID NO: 201858 - DNA, 25 bp, Homo sapien
aatcaagccttgtagactgtggtca

SEQ ID NO: 201859 - DNA, 25 bp, Homo sapien
cacagaggtccagtgtaaatggctt

SEQ ID NO: 201860 - DNA, 25 bp, Homo sapien
taatggcttataagtggctcctgag

SEQ ID NO: 201861 - DNA, 25 bp, Homo sapien
accaacaagcttgggtacagcctgc

SEQ ID NO: 201862 - DNA, 25 bp, Homo sapien
gactaaaccagagatcaaggaattt

SEQ ID NO: 201863 - DNA, 25 bp, Homo sapien
cccatctgaataccatttgagcaca

SEQ ID NO: 201864 - DNA, 25 bp, Homo sapien
caactggaagctatatcctgtctcc

SEQ ID NO: 201865 - DNA, 25 bp, Homo sapien
ggctttgatcagaaaccacagattg

SEQ ID NO: 201866 - DNA, 25 bp, Homo sapien
ttatgctttgcgtggatcctcctgg

SEQ ID NO: 201867 - DNA, 25 bp, Homo sapien
cttgccacgttttatgatatttatg

SEQ ID NO: 201868 - DNA, 25 bp, Homo sapien
gatcctcctggtcttatgatgacaa

SEQ ID NO: 201869 - DNA, 25 bp, Homo sapien
caatgtcagggcatcgatagtaaca

SEQ ID NO: 201870 - DNA, 25 bp, Homo sapien
acagtaaccaaggtgcctccaggga

SEQ ID NO: 201871 - DNA, 25 bp, Homo sapien
cctatttggacagcccctaaggatg

SEQ ID NO: 201872 - DNA, 25 bp, Homo sapien
tttgagagcatcagagacccatggg

SEQ ID NO: 201873 - DNA, 25 bp, Homo sapien
caggcacggaatggtatgcttggaa

SEQ ID NO: 201874 - DNA, 25 bp, Homo sapien
ggatcaagcttatcccttttccctg

SEQ ID NO: 201875 - DNA, 25 bp, Homo sapien
gtgctgtgcccacgttccattggca

SEQ ID NO: 201876 - DNA, 25 bp, Homo sapien
taaagctctccagccttgaacattg

SEQ ID NO: 201877 - DNA, 25 bp, Homo sapien
tataacgctgtcttcaacttgtgtg

SEQ ID NO: 201878 - DNA, 25 bp, Homo sapien
taaaacaaacatgctggtgatgcct

SEQ ID NO: 201879 - DNA, 25 bp, Homo sapien
ccaagtagataccttttagacagag

SEQ ID NO: 201880 - DNA, 25 bp, Homo sapien
tggagagcagtaaaccacacttgtt

SEQ ID NO: 201881 - DNA, 25 bp, Homo sapien
ctggcattgatctctgtggtacctc

SEQ ID NO: 201882 - DNA, 25 bp, Homo sapien
tcaataatgccctctggcattgatc

SEQ ID NO: 201883 - DNA, 25 bp, Homo sapien
ttgtttaggtgacccttggcctctg

SEQ ID NO: 201884 - DNA, 25 bp, Homo sapien
ctggagtcaatgtttgtcttctaaa

SEQ ID NO: 201885 - DNA, 25 bp, Homo sapien
ggttcgcgcacacacatccagcagt

SEQ ID NO: 201886 - DNA, 25 bp, Homo sapien
ctgaagaagacctgtggttcgcgca

SEQ ID NO: 201887 - DNA, 25 bp, Homo sapien
cagtgcataaggctaaggtctgact

SEQ ID NO: 201888 - DNA, 25 bp, Homo sapien
tacaatgactcaacaccatccaagt

SEQ ID NO: 201889 - DNA, 25 bp, Homo sapien
atttcctctgagaaaaatttctcag

SEQ ID NO: 201890 - DNA, 25 bp, Homo sapien
cctctgagaaaaatttctcaggact

SEQ ID NO: 201891 - DNA, 25 bp, Homo sapien
tctgagaaaaatttctcaggacttc

SEQ ID NO: 201892 - DNA, 25 bp, Homo sapien
ttcctctgagaaaaatttctcagga

SEQ ID NO: 201893 - DNA, 25 bp, Homo sapien
ttaggggtggttccacttcagctct

SEQ ID NO: 201894 - DNA, 25 bp, Homo sapien
gagctgccatatgaggccccatctg

SEQ ID NO: 201895 - DNA, 25 bp, Homo sapien
gtcagcacacaataaagggacactc

SEQ ID NO: 201896 - DNA, 25 bp, Homo sapien
acagcaatgtcagcacacaataaag

SEQ ID NO: 201897 - DNA, 25 bp, Homo sapien
gaggaaactcctgtaggtccatcca

SEQ ID NO: 201898 - DNA, 25 bp, Homo sapien
tataggactgtccacttgaggaaac

SEQ ID NO: 201899 - DNA, 25 bp, Homo sapien
ttcccaggagccaagtataggactg

SEQ ID NO: 201900 - DNA, 25 bp, Homo sapien
tgtgatcaatggaagaagccttagc

SEQ ID NO: 201901 - DNA, 25 bp, Homo sapien
cacttcctgtgtcacgtgacctata

SEQ ID NO: 201902 - DNA, 25 bp, Homo sapien
tgctgagtcactcaaaacatgctca

SEQ ID NO: 201903 - DNA, 25 bp, Homo sapien
ccaccctaaggagtttgcctgatga

SEQ ID NO: 201904 - DNA, 25 bp, Homo sapien
tctagggagagatgacacgggcatg

SEQ ID NO: 201905 - DNA, 25 bp, Homo sapien
cttcttctacaatgagatactggtg

SEQ ID NO: 201906 - DNA, 25 bp, Homo sapien
attgcttcttctacaatgagatact

SEQ ID NO: 201907 - DNA, 25 bp, Homo sapien
gatgagagcagcggtggagtccatg

SEQ ID NO: 201908 - DNA, 25 bp, Homo sapien
tctacaatgagatactggtgctcag

SEQ ID NO: 201909 - DNA, 25 bp, Homo sapien
tgtggcagacacggcatccagcagt

SEQ ID NO: 201910 - DNA, 25 bp, Homo sapien
gtggcagacacggcatccagcagtg

SEQ ID NO: 201911 - DNA, 25 bp, Homo sapien
ctgtggcagacacggcatccagcag

SEQ ID NO: 201912 - DNA, 25 bp, Homo sapien
ttagagagtctggagactactggag

SEQ ID NO: 201913 - DNA, 25 bp, Homo sapien
cttagagagtctggagactactgga

SEQ ID NO: 201914 - DNA, 25 bp, Homo sapien
tgtttcccatgattcctactgggcc

SEQ ID NO: 201915 - DNA, 25 bp, Homo sapien
cccatgattcctactgggccccagg

SEQ ID NO: 201916 - DNA, 25 bp, Homo sapien
catgattcctactgggccccagggt

SEQ ID NO: 201917 - DNA, 25 bp, Homo sapien
gccccagggtggagcagtataacat

SEQ ID NO: 201918 - DNA, 25 bp, Homo sapien
tccatcagttccaagctaaaatgtt

SEQ ID NO: 201919 - DNA, 25 bp, Homo sapien
catcagttccaagctaaaatgtttc

SEQ ID NO: 201920 - DNA, 25 bp, Homo sapien
tttctccatcagttccaagctaaaa

SEQ ID NO: 201921 - DNA, 25 bp, Homo sapien
tctccatcagttccaagctaaaatg

SEQ ID NO: 201922 - DNA, 25 bp, Homo sapien
tacaaagatcggtgtaggcgaggct

SEQ ID NO: 201923 - DNA, 25 bp, Homo sapien
gctgattgggtctccggagatctca

SEQ ID NO: 201924 - DNA, 25 bp, Homo sapien
ccctgaaattcgtggtaaagcaccg

SEQ ID NO: 201925 - DNA, 25 bp, Homo sapien
taaagcaccgtcttgtgggttccca

SEQ ID NO: 201926 - DNA, 25 bp, Homo sapien
ctttaggtgtgtaactgcctgcctg

SEQ ID NO: 201927 - DNA, 25 bp, Homo sapien
tgcaccccgcggaatctcgctttag

SEQ ID NO: 201928 - DNA, 25 bp, Homo sapien
gacccttgctctccgcagcctgact

SEQ ID NO: 201929 - DNA, 25 bp, Homo sapien
caaggcgcggccgactcgcaaatgg

SEQ ID NO: 201930 - DNA, 25 bp, Homo sapien
actgacttgatttgcgaagacacgc

SEQ ID NO: 201931 - DNA, 25 bp, Homo sapien
tttccgagttggactgacgcacgcc

SEQ ID NO: 201932 - DNA, 25 bp, Homo sapien
atccgcagcccagttcggcgctcac

SEQ ID NO: 201933 - DNA, 25 bp, Homo sapien
gctgtttgcactttacttcaataac

SEQ ID NO: 201934 - DNA, 25 bp, Homo sapien
ctttatcttgctggggggacccgca

SEQ ID NO: 201935 - DNA, 25 bp, Homo sapien
gctgcattcccgtaatgagcatccc

SEQ ID NO: 201936 - DNA, 25 bp, Homo sapien
gagcccccggctgcattcccgtaat

SEQ ID NO: 201937 - DNA, 25 bp, Homo sapien
cgtaatgagcatccccctggaactg

SEQ ID NO: 201938 - DNA, 25 bp, Homo sapien
tagattgtgttggtgcactgacttg

SEQ ID NO: 201939 - DNA, 25 bp, Homo sapien
tgttggtgcactgacttgttaactg

SEQ ID NO: 201940 - DNA, 25 bp, Homo sapien
ctgccatctgtagattgtgttggtg

SEQ ID NO: 201941 - DNA, 25 bp, Homo sapien
ccatctgtagattgtgttggtgcac

SEQ ID NO: 201942 - DNA, 25 bp, Homo sapien
aggcgcaaagcgctgcaatcccggg

SEQ ID NO: 201943 - DNA, 25 bp, Homo sapien
agaaacacttgagccaagctgttgc

SEQ ID NO: 201944 - DNA, 25 bp, Homo sapien
cgtttcgggtcacggtcctgccttg

SEQ ID NO: 201945 - DNA, 25 bp, Homo sapien
cacggtcctgccttgtatgagggca

SEQ ID NO: 201946 - DNA, 25 bp, Homo sapien
tagcctgccaggtccctgcagccat

SEQ ID NO: 201947 - DNA, 25 bp, Homo sapien
ttagcctgccaggtccctgcagcca

SEQ ID NO: 201948 - DNA, 25 bp, Homo sapien
tggcaaagatgggataaaattcatg

SEQ ID NO: 201949 - DNA, 25 bp, Homo sapien
tatacttatgatccattaagtggaa

SEQ ID NO: 201950 - DNA, 25 bp, Homo sapien
tggaccttcacagtttaaacctgtg

SEQ ID NO: 201951 - DNA, 25 bp, Homo sapien
aagtggatcattcatctttgttgtc

SEQ ID NO: 201952 - DNA, 25 bp, Homo sapien
cagggagaagaaacttcctgagcgt

SEQ ID NO: 201953 - DNA, 25 bp, Homo sapien
ccagggagaagaaacttcctgagcg

SEQ ID NO: 201954 - DNA, 25 bp, Homo sapien
gggagaagaaacttcctgagcgtgc

SEQ ID NO: 201955 - DNA, 25 bp, Homo sapien
cccagggagaagaaacttcctgagc

SEQ ID NO: 201956 - DNA, 25 bp, Homo sapien
tggctaggccagagagggattcatc

SEQ ID NO: 201957 - DNA, 25 bp, Homo sapien
tggccttaatatagcaccaaggagc

SEQ ID NO: 201958 - DNA, 25 bp, Homo sapien
gattcatctaccatggggttaatag

SEQ ID NO: 201959 - DNA, 25 bp, Homo sapien
gggttaatagttccatgcagaggtg

SEQ ID NO: 201960 - DNA, 25 bp, Homo sapien
tgaacgagatttgcaggtgtgtgta

SEQ ID NO: 201961 - DNA, 25 bp, Homo sapien
ggcaagcccggatgaatgggaatgt

SEQ ID NO: 201962 - DNA, 25 bp, Homo sapien
ctgacgccatgtgaacgagatttgc

SEQ ID NO: 201963 - DNA, 25 bp, Homo sapien
cagcaatgatgaatctgacgccatg

SEQ ID NO: 201964 - DNA, 25 bp, Homo sapien
ccacacgccgtgacaactatggata

SEQ ID NO: 201965 - DNA, 25 bp, Homo sapien
tcaaccacacgccgtgacaactatg

SEQ ID NO: 201966 - DNA, 25 bp, Homo sapien
caaccacacgccgtgacaactatgg

SEQ ID NO: 201967 - DNA, 25 bp, Homo sapien
accacacgccgtgacaactatggat

SEQ ID NO: 201968 - DNA, 25 bp, Homo sapien
cctcctccatctcgtattaaataga

SEQ ID NO: 201969 - DNA, 25 bp, Homo sapien
tcctccatctcgtattaaatagaga

SEQ ID NO: 201970 - DNA, 25 bp, Homo sapien
gtacctcctccatctcgtattaaat

SEQ ID NO: 201971 - DNA, 25 bp, Homo sapien
acctcctccatctcgtattaaatag

SEQ ID NO: 201972 - DNA, 25 bp, Homo sapien
ctgctggaaccactgaaagagggat

SEQ ID NO: 201973 - DNA, 25 bp, Homo sapien
gcacattcaagggaatgccctggag

SEQ ID NO: 201974 - DNA, 25 bp, Homo sapien
tatactttcaatcctaaatgcatgc

SEQ ID NO: 201975 - DNA, 25 bp, Homo sapien
gaaagagggatcctaaggaagatac

SEQ ID NO: 201976 - DNA, 25 bp, Homo sapien
cacactggtacttgtaatggctgat

SEQ ID NO: 201977 - DNA, 25 bp, Homo sapien
acagaaaggttgttccaatggccca

SEQ ID NO: 201978 - DNA, 25 bp, Homo sapien
cctgtggccaaccaagtatccagag

SEQ ID NO: 201979 - DNA, 25 bp, Homo sapien
tggctgatattctgaccctgtggcc

SEQ ID NO: 201980 - DNA, 25 bp, Homo sapien
gagaccgcccaccactggattcata

SEQ ID NO: 201981 - DNA, 25 bp, Homo sapien
tcataattcaaacacgtcttggaaa

SEQ ID NO: 201982 - DNA, 25 bp, Homo sapien
acacgtcttggaaagtgtattgttt

SEQ ID NO: 201983 - DNA, 25 bp, Homo sapien
caaagctattctgcacaaaacttag

SEQ ID NO: 201984 - DNA, 25 bp, Homo sapien
tacccttaggctcttcaggatctaa

SEQ ID NO: 201985 - DNA, 25 bp, Homo sapien
tagagggattccgaagcgtttgctg

SEQ ID NO: 201986 - DNA, 25 bp, Homo sapien
gaaaccttgcatcgagccgagtcca

SEQ ID NO: 201987 - DNA, 25 bp, Homo sapien
gagtccacgagggagctgagctcct

SEQ ID NO: 201988 - DNA, 25 bp, Homo sapien
gcttctttagctcaataggattcct

SEQ ID NO: 201989 - DNA, 25 bp, Homo sapien
aaggaaacacccgacaagcaaggtg

SEQ ID NO: 201990 - DNA, 25 bp, Homo sapien
catccatgagcagcccgtgatcttt

SEQ ID NO: 201991 - DNA, 25 bp, Homo sapien
aaagaggcatatagaaaagcgcttc

SEQ ID NO: 201992 - DNA, 25 bp, Homo sapien
gttggctgtgccatgaattccaatc

SEQ ID NO: 201993 - DNA, 25 bp, Homo sapien
cagtgggcctttacagaacctttca

SEQ ID NO: 201994 - DNA, 25 bp, Homo sapien
ctttcattgtttttgaggttggctg

SEQ ID NO: 201995 - DNA, 25 bp, Homo sapien
accatgatcaccagtgggcctttac

SEQ ID NO: 201996 - DNA, 25 bp, Homo sapien
aaaaccacattttcagctctattac

SEQ ID NO: 201997 - DNA, 25 bp, Homo sapien
taaaaccacattttcagctctatta

SEQ ID NO: 201998 - DNA, 25 bp, Homo sapien
ttaaaaccacattttcagctctatt

SEQ ID NO: 201999 - DNA, 25 bp, Homo sapien
ttgaaaggcacgctcatgaggtcat

SEQ ID NO: 202000 - DNA, 25 bp, Homo sapien
tatactgaggatctgcaggccacaa

SEQ ID NO: 202001 - DNA, 25 bp, Homo sapien
ttggtgtaaaccagagcgaccggcc

SEQ ID NO: 202002 - DNA, 25 bp, Homo sapien
ctttgagtggccactgggtcgcaga

SEQ ID NO: 202003 - DNA, 25 bp, Homo sapien
ctaagcagccgccagacactgcaaa

SEQ ID NO: 202004 - DNA, 25 bp, Homo sapien
aagcagccgccagacactgcaaaat

SEQ ID NO: 202005 - DNA, 25 bp, Homo sapien
taagcagccgccagacactgcaaaa

SEQ ID NO: 202006 - DNA, 25 bp, Homo sapien
gaacagaactactggatggccttgc

SEQ ID NO: 202007 - DNA, 25 bp, Homo sapien
ccggactggggatttctgcacaaga

SEQ ID NO: 202008 - DNA, 25 bp, Homo sapien
taatcagatttgaatcccggactgg

SEQ ID NO: 202009 - DNA, 25 bp, Homo sapien
gatttctgcacaagagggagatgtt

SEQ ID NO: 202010 - DNA, 25 bp, Homo sapien
tcacatcctgctgacgccagaggtg

SEQ ID NO: 202011 - DNA, 25 bp, Homo sapien
cactctaagggactgggatttcctt

SEQ ID NO: 202012 - DNA, 25 bp, Homo sapien
ggatttccttcatcaccgggagtgg

SEQ ID NO: 202013 - DNA, 25 bp, Homo sapien
ggcagaatttgcacgacactctaag

SEQ ID NO: 202014 - DNA, 25 bp, Homo sapien
tcatctggaaactggcctattttca

SEQ ID NO: 202015 - DNA, 25 bp, Homo sapien
gaaagccttgggttcttatcaagac

SEQ ID NO: 202016 - DNA, 25 bp, Homo sapien
tgaacccgattttttatctactggc

SEQ ID NO: 202017 - DNA, 25 bp, Homo sapien
tagggtatggccctttagagtccca

SEQ ID NO: 202018 - DNA, 25 bp, Homo sapien
aaatgccagacccacatctctgcat

SEQ ID NO: 202019 - DNA, 25 bp, Homo sapien
cccaaatgccagacccacatctctg

SEQ ID NO: 202020 - DNA, 25 bp, Homo sapien
ccaaatgccagacccacatctctgc

SEQ ID NO: 202021 - DNA, 25 bp, Homo sapien
ccccaaatgccagacccacatctct

SEQ ID NO: 202022 - DNA, 25 bp, Homo sapien
gcaattgtctctcggttctttgggt

SEQ ID NO: 202023 - DNA, 25 bp, Homo sapien
ggcagcaattgtctctcggttcttt

SEQ ID NO: 202024 - DNA, 25 bp, Homo sapien
aggcagcaattgtctctcggttctt

SEQ ID NO: 202025 - DNA, 25 bp, Homo sapien
cagcaattgtctctcggttctttgg

SEQ ID NO: 202026 - DNA, 25 bp, Homo sapien
cctagcctggtagcagtgcgactgg

SEQ ID NO: 202027 - DNA, 25 bp, Homo sapien
gatgaagccggtgagtcggacgtgc

SEQ ID NO: 202028 - DNA, 25 bp, Homo sapien
gacgaaccagtgagctaagctgcgg

SEQ ID NO: 202029 - DNA, 25 bp, Homo sapien
agggaggcggcactggtctcgacgt

SEQ ID NO: 202030 - DNA, 25 bp, Homo sapien
gagcagggtcggtggccgacgaagg

SEQ ID NO: 202031 - DNA, 25 bp, Homo sapien
cggacattcgctgtgcacctgctgt

SEQ ID NO: 202032 - DNA, 25 bp, Homo sapien
aaggaaagacggacattcgctgtgc

SEQ ID NO: 202033 - DNA, 25 bp, Homo sapien
gcccagcacgggcacgagagacgaa

SEQ ID NO: 202034 - DNA, 25 bp, Homo sapien
tcagcgatgagtgggcgcgataccc

SEQ ID NO: 202035 - DNA, 25 bp, Homo sapien
ggaaaccgagccgaagagcttgagt

SEQ ID NO: 202036 - DNA, 25 bp, Homo sapien
gccgagcctcgttgtaccgaggaaa

SEQ ID NO: 202037 - DNA, 25 bp, Homo sapien
tgcggggtctcataagcctcccagc

SEQ ID NO: 202038 - DNA, 25 bp, Homo sapien
gtacgaatgccacgccgcggcttgt

SEQ ID NO: 202039 - DNA, 25 bp, Homo sapien
cggcttgtgggcgacaccaccgctg

SEQ ID NO: 202040 - DNA, 25 bp, Homo sapien
ttgtgggcgacaccaccgctgtcac

SEQ ID NO: 202041 - DNA, 25 bp, Homo sapien
gggaaaccttgagtacgaatgccac

SEQ ID NO: 202042 - DNA, 25 bp, Homo sapien
gttgccatgtggagggacatcagct

SEQ ID NO: 202043 - DNA, 25 bp, Homo sapien
tggagggacatcagctgtccttcac

SEQ ID NO: 202044 - DNA, 25 bp, Homo sapien
tgttgccatgtggagggacatcagc

SEQ ID NO: 202045 - DNA, 25 bp, Homo sapien
ctatgttgccatgtggagggacatc

SEQ ID NO: 202046 - DNA, 25 bp, Homo sapien
gaacaccagtatctcaactttttct

SEQ ID NO: 202047 - DNA, 25 bp, Homo sapien
ggaactgaacaccagtatctcaact

SEQ ID NO: 202048 - DNA, 25 bp, Homo sapien
ccattgagttatctgatccccgagt

SEQ ID NO: 202049 - DNA, 25 bp, Homo sapien
gagttatctgatccccgagtttgga

SEQ ID NO: 202050 - DNA, 25 bp, Homo sapien
ccacctgtgactgggtggatacatt

SEQ ID NO: 202051 - DNA, 25 bp, Homo sapien
catggccacctgtgactgggtggat

SEQ ID NO: 202052 - DNA, 25 bp, Homo sapien
gactgggtggatacatttgtctaat

SEQ ID NO: 202053 - DNA, 25 bp, Homo sapien
ctgtgactgggtggatacatttgtc

SEQ ID NO: 202054 - DNA, 25 bp, Homo sapien
tggggtgaacaaggggcaagcccac

SEQ ID NO: 202055 - DNA, 25 bp, Homo sapien
cacgtggcaacagctttaagctgca

SEQ ID NO: 202056 - DNA, 25 bp, Homo sapien
ccacgtggcaacagctttaagctgc

SEQ ID NO: 202057 - DNA, 25 bp, Homo sapien
aaggggcaagcccacgtggcaacag

SEQ ID NO: 202058 - DNA, 25 bp, Homo sapien
ttatttcattaagttggtctccaat

SEQ ID NO: 202059 - DNA, 25 bp, Homo sapien
attaagttggtctccaatctctgat

SEQ ID NO: 202060 - DNA, 25 bp, Homo sapien
tatttcattaagttggtctccaatc

SEQ ID NO: 202061 - DNA, 25 bp, Homo sapien
aagttggtctccaatctctgatatc

SEQ ID NO: 202062 - DNA, 25 bp, Homo sapien
cttcgaggaacctataactaacact

SEQ ID NO: 202063 - DNA, 25 bp, Homo sapien
ttcgaggaacctataactaacacta

SEQ ID NO: 202064 - DNA, 25 bp, Homo sapien
tcgaggaacctataactaacactac

SEQ ID NO: 202065 - DNA, 25 bp, Homo sapien
caaaatataagtttgctaagactca

SEQ ID NO: 202066 - DNA, 25 bp, Homo sapien
tctggcaaaacatcatttacaagtc

SEQ ID NO: 202067 - DNA, 25 bp, Homo sapien
ggccctaaacatggtgttccctgga

SEQ ID NO: 202068 - DNA, 25 bp, Homo sapien
atataagtttgctaagactcaaagg

SEQ ID NO: 202069 - DNA, 25 bp, Homo sapien
gccattatgtactgttttaatctta

SEQ ID NO: 202070 - DNA, 25 bp, Homo sapien
aataatgccattatgtactgtttta

SEQ ID NO: 202071 - DNA, 25 bp, Homo sapien
aaaatgttagcaaaaataatgccat

SEQ ID NO: 202072 - DNA, 25 bp, Homo sapien
aaaaatgttagcaaaaataatgcca

SEQ ID NO: 202073 - DNA, 25 bp, Homo sapien
gcacatctatcatcaagagattcac

SEQ ID NO: 202074 - DNA, 25 bp, Homo sapien
aattagctgcacatctatcatcaag

SEQ ID NO: 202075 - DNA, 25 bp, Homo sapien
gctgcacatctatcatcaagagatt

SEQ ID NO: 202076 - DNA, 25 bp, Homo sapien
catgagtttcgggacaaattagctg

SEQ ID NO: 202077 - DNA, 25 bp, Homo sapien
ggtgaaagctcacccctacagggta

SEQ ID NO: 202078 - DNA, 25 bp, Homo sapien
ttaagggcgttttctgtggacagcg

SEQ ID NO: 202079 - DNA, 25 bp, Homo sapien
tcttagtagttttagggtctgccca

SEQ ID NO: 202080 - DNA, 25 bp, Homo sapien
tatgcaggtcaagatgttctccaca

SEQ ID NO: 202081 - DNA, 25 bp, Homo sapien
cagttcatggtacaatcagtgaggc

SEQ ID NO: 202082 - DNA, 25 bp, Homo sapien
caggagtggtcgtcaaggtgaaaac

SEQ ID NO: 202083 - DNA, 25 bp, Homo sapien
tgttgccatgtgagagaccattatc

SEQ ID NO: 202084 - DNA, 25 bp, Homo sapien
aagagacacatactgcaaactgctg

SEQ ID NO: 202085 - DNA, 25 bp, Homo sapien
gagtacctaaatgaacagctgttgc

SEQ ID NO: 202086 - DNA, 25 bp, Homo sapien
tttgctaagagaggcagggttcacg

SEQ ID NO: 202087 - DNA, 25 bp, Homo sapien
ggaataataggctagggccacccca

SEQ ID NO: 202088 - DNA, 25 bp, Homo sapien
tggccaggtcttgcatgatcaaaag

SEQ ID NO: 202089 - DNA, 25 bp, Homo sapien
aaatgacagcaacatgtctttatca

SEQ ID NO: 202090 - DNA, 25 bp, Homo sapien
ttttaatctcaaacaatgcactgaa

SEQ ID NO: 202091 - DNA, 25 bp, Homo sapien
aaaacccataatgtagtacgtcact

SEQ ID NO: 202092 - DNA, 25 bp, Homo sapien
cataatgtagtacgtcactttttaa

SEQ ID NO: 202093 - DNA, 25 bp, Homo sapien
cagggataatattcaagcgaaggga

SEQ ID NO: 202094 - DNA, 25 bp, Homo sapien
tatgggaaatctctcattcatgcaa

SEQ ID NO: 202095 - DNA, 25 bp, Homo sapien
gcaagttcaaacctgtcaacaccag

SEQ ID NO: 202096 - DNA, 25 bp, Homo sapien
gcttccaatgtactaggacagtcag

SEQ ID NO: 202097 - DNA, 25 bp, Homo sapien
cacaggctactcttggacaggatct

SEQ ID NO: 202098 - DNA, 25 bp, Homo sapien
gatagaatcccttcatttggtggct

SEQ ID NO: 202099 - DNA, 25 bp, Homo sapien
gacaggatcttgctggatagaatcc

SEQ ID NO: 202100 - DNA, 25 bp, Homo sapien
gctttttgcatgcacttaactggac

SEQ ID NO: 202101 - DNA, 25 bp, Homo sapien
ctaagagctcaccaaaacatagatc

SEQ ID NO: 202102 - DNA, 25 bp, Homo sapien
aagagctcaccaaaacatagatcat

SEQ ID NO: 202103 - DNA, 25 bp, Homo sapien
agagctcaccaaaacatagatcatg

SEQ ID NO: 202104 - DNA, 25 bp, Homo sapien
taagagctcaccaaaacatagatca

SEQ ID NO: 202105 - DNA, 25 bp, Homo sapien
ttttagcaagtagaacggcacagct

SEQ ID NO: 202106 - DNA, 25 bp, Homo sapien
cagctgaaagcttaatggcggatca

SEQ ID NO: 202107 - DNA, 25 bp, Homo sapien
tctacagagtgctatgggaacggca

SEQ ID NO: 202108 - DNA, 25 bp, Homo sapien
tcaaggagtcctagaaggcaggtac

SEQ ID NO: 202109 - DNA, 25 bp, Homo sapien
tataggtagtaaaaaaatgctagaa

SEQ ID NO: 202110 - DNA, 25 bp, Homo sapien
agctaatttgcaccatccttccttc

SEQ ID NO: 202111 - DNA, 25 bp, Homo sapien
aaagctaatttgcaccatccttcct

SEQ ID NO: 202112 - DNA, 25 bp, Homo sapien
aaaagctaatttgcaccatccttcc

SEQ ID NO: 202113 - DNA, 25 bp, Homo sapien
tgtagggtcatagagtcctgggcca

SEQ ID NO: 202114 - DNA, 25 bp, Homo sapien
tcctgggccactcatcactggtcta

SEQ ID NO: 202115 - DNA, 25 bp, Homo sapien
atgatggttgtagggtcatagagtc

SEQ ID NO: 202116 - DNA, 25 bp, Homo sapien
gccactcatcactggtctactcata

SEQ ID NO: 202117 - DNA, 25 bp, Homo sapien
ttgagacccagtgtaagccactctg

SEQ ID NO: 202118 - DNA, 25 bp, Homo sapien
cgtggatgaggtactctgggagtac

SEQ ID NO: 202119 - DNA, 25 bp, Homo sapien
tatgatatgccaagaggggcatatt

SEQ ID NO: 202120 - DNA, 25 bp, Homo sapien
agaaagcgtggatgaggtactctgg

SEQ ID NO: 202121 - DNA, 25 bp, Homo sapien
acacctttaatgcaattttgactct

SEQ ID NO: 202122 - DNA, 25 bp, Homo sapien
cacctttaatgcaattttgactctt

SEQ ID NO: 202123 - DNA, 25 bp, Homo sapien
acctttaatgcaattttgactcttt

SEQ ID NO: 202124 - DNA, 25 bp, Homo sapien
cactggtctataggattcttgtaat

SEQ ID NO: 202125 - DNA, 25 bp, Homo sapien
ggattcttgtaatcagtcttcagct

SEQ ID NO: 202126 - DNA, 25 bp, Homo sapien
gggattcagggtattacactggtct

SEQ ID NO: 202127 - DNA, 25 bp, Homo sapien
ggtattacactggtctataggattc

SEQ ID NO: 202128 - DNA, 25 bp, Homo sapien
ttcaatttcgtcaatgcctctgctc

SEQ ID NO: 202129 - DNA, 25 bp, Homo sapien
gttatttcaacttatctctactcga

SEQ ID NO: 202130 - DNA, 25 bp, Homo sapien
actcgaaataatcttctgagtagaa

SEQ ID NO: 202131 - DNA, 25 bp, Homo sapien
tcaattttcaatttcgtcaatgcct

SEQ ID NO: 202132 - DNA, 25 bp, Homo sapien
agaagatgagcgcggcagtgagcag

SEQ ID NO: 202133 - DNA, 25 bp, Homo sapien
aagaagatgagcgcggcagtgagca

SEQ ID NO: 202134 - DNA, 25 bp, Homo sapien
gaagatgagcgcggcagtgagcagc

SEQ ID NO: 202135 - DNA, 25 bp, Homo sapien
aagatgagcgcggcagtgagcagca

SEQ ID NO: 202136 - DNA, 25 bp, Homo sapien
agaaggccgcgaacgtgaacgccat

SEQ ID NO: 202137 - DNA, 25 bp, Homo sapien
tagcagaaggccgcgaacgtgaacg

SEQ ID NO: 202138 - DNA, 25 bp, Homo sapien
gcagaaggccgcgaacgtgaacgcc

SEQ ID NO: 202139 - DNA, 25 bp, Homo sapien
gtagcagaaggccgcgaacgtgaac

SEQ ID NO: 202140 - DNA, 25 bp, Homo sapien
gccgttgccagcggagaaaggcggc

SEQ ID NO: 202141 - DNA, 25 bp, Homo sapien
ggcgccgttgccagcggagaaaggc

SEQ ID NO: 202142 - DNA, 25 bp, Homo sapien
gcgccgttgccagcggagaaaggcg

SEQ ID NO: 202143 - DNA, 25 bp, Homo sapien
cgttgccagcggagaaaggcggcgc

SEQ ID NO: 202144 - DNA, 25 bp, Homo sapien
ttcccccggccacagccgcgaccgc

SEQ ID NO: 202145 - DNA, 25 bp, Homo sapien
cgcggcgccagccctctcagcgcgc

SEQ ID NO: 202146 - DNA, 25 bp, Homo sapien
acagccgcgaccgccaccgctaccg

SEQ ID NO: 202147 - DNA, 25 bp, Homo sapien
ccccggccacagccgcgaccgccac

SEQ ID NO: 202148 - DNA, 25 bp, Homo sapien
gccctctgatggccggagtctgcgt

SEQ ID NO: 202149 - DNA, 25 bp, Homo sapien
tgatggccggagtctgcgttgcact

SEQ ID NO: 202150 - DNA, 25 bp, Homo sapien
gccggagtctgcgttgcactgacat

SEQ ID NO: 202151 - DNA, 25 bp, Homo sapien
ctctgatggccggagtctgcgttgc

SEQ ID NO: 202152 - DNA, 25 bp, Homo sapien
tgtccgcacagttgttgattgattt

SEQ ID NO: 202153 - DNA, 25 bp, Homo sapien
gtccgcacagttgttgattgatttt

SEQ ID NO: 202154 - DNA, 25 bp, Homo sapien
ccgcacagttgttgattgatttttc

SEQ ID NO: 202155 - DNA, 25 bp, Homo sapien
cgcacagttgttgattgatttttcc

SEQ ID NO: 202156 - DNA, 25 bp, Homo sapien
agctgaacttgattaactggatgcc

SEQ ID NO: 202157 - DNA, 25 bp, Homo sapien
tagtagttgggagacaagctcagct

SEQ ID NO: 202158 - DNA, 25 bp, Homo sapien
tagattggaaatcgggtcccacggc

SEQ ID NO: 202159 - DNA, 25 bp, Homo sapien
gtcccacggcaatggtccaagcaaa

SEQ ID NO: 202160 - DNA, 25 bp, Homo sapien
gacagctagacacaagtcagctgct

SEQ ID NO: 202161 - DNA, 25 bp, Homo sapien
ccactagccatgttcccaatctgga

SEQ ID NO: 202162 - DNA, 25 bp, Homo sapien
tgttcccaatctggacagctagaca

SEQ ID NO: 202163 - DNA, 25 bp, Homo sapien
tggacagctagacacaagtcagctg

SEQ ID NO: 202164 - DNA, 25 bp, Homo sapien
ctatggatctagacatgtgactcag

SEQ ID NO: 202165 - DNA, 25 bp, Homo sapien
gtgggtgggctatggatctagacat

SEQ ID NO: 202166 - DNA, 25 bp, Homo sapien
gactcagacataagacttggaaaga

SEQ ID NO: 202167 - DNA, 25 bp, Homo sapien
taagacttggaaagaatagttatga

SEQ ID NO: 202168 - DNA, 25 bp, Homo sapien
ccaaaaccttgggttacggcagcat

SEQ ID NO: 202169 - DNA, 25 bp, Homo sapien
ctcaatattggtggctgtgtcatcc

SEQ ID NO: 202170 - DNA, 25 bp, Homo sapien
catgcaagtagagagcttcaggctg

SEQ ID NO: 202171 - DNA, 25 bp, Homo sapien
tgggttacggcagcatgcaagtaga

SEQ ID NO: 202172 - DNA, 25 bp, Homo sapien
ccttcggagagtcatactagtgtcc

SEQ ID NO: 202173 - DNA, 25 bp, Homo sapien
tgatcactgtagcagaacggacaga

SEQ ID NO: 202174 - DNA, 25 bp, Homo sapien
cattattggtggtctcccttcggag

SEQ ID NO: 202175 - DNA, 25 bp, Homo sapien
agggttgtcctctctatgatgccac

SEQ ID NO: 202176 - DNA, 25 bp, Homo sapien
ctgtccttcctgcaaaaattcccaa

SEQ ID NO: 202177 - DNA, 25 bp, Homo sapien
tgcaatgagggctttcacaggaggc

SEQ ID NO: 202178 - DNA, 25 bp, Homo sapien
caatgagggctttcacaggaggcaa

SEQ ID NO: 202179 - DNA, 25 bp, Homo sapien
ggcaaggaagcctaaagggattcat

SEQ ID NO: 202180 - DNA, 25 bp, Homo sapien
caaaaagaactggagtaagatttct

SEQ ID NO: 202181 - DNA, 25 bp, Homo sapien
aaaagaactggagtaagatttctgg

SEQ ID NO: 202182 - DNA, 25 bp, Homo sapien
aaaaagaactggagtaagatttctg

SEQ ID NO: 202183 - DNA, 25 bp, Homo sapien
tgcgttttggacttaccaggacctg

SEQ ID NO: 202184 - DNA, 25 bp, Homo sapien
cctaccccagtgtgtcttgaaagtg

SEQ ID NO: 202185 - DNA, 25 bp, Homo sapien
gggtcaccctagacctcagactggt

SEQ ID NO: 202186 - DNA, 25 bp, Homo sapien
ggcatgtgactgcaacccaggacag

SEQ ID NO: 202187 - DNA, 25 bp, Homo sapien
aggaatgggtcctcaacagacacca

SEQ ID NO: 202188 - DNA, 25 bp, Homo sapien
gattaggtaatgagggctctatcct

SEQ ID NO: 202189 - DNA, 25 bp, Homo sapien
gaactgtgagccataattactgctg

SEQ ID NO: 202190 - DNA, 25 bp, Homo sapien
gtgagaacccagaagatgccctcta

SEQ ID NO: 202191 - DNA, 25 bp, Homo sapien
gaatcctcgctttatgccaagagta

SEQ ID NO: 202192 - DNA, 25 bp, Homo sapien
gagtaccatcatctaacaagactgg

SEQ ID NO: 202193 - DNA, 25 bp, Homo sapien
atctaaatcagtgggaactgccctg

SEQ ID NO: 202194 - DNA, 25 bp, Homo sapien
taagagtgctaacgtatggcaggtc

SEQ ID NO: 202195 - DNA, 25 bp, Homo sapien
atatgaagttgattttattacaaat

SEQ ID NO: 202196 - DNA, 25 bp, Homo sapien
tgaagttgattttattacaaatttc

SEQ ID NO: 202197 - DNA, 25 bp, Homo sapien
aagttgattttattacaaatttcag

SEQ ID NO: 202198 - DNA, 25 bp, Homo sapien
agttgattttattacaaatttcaga

SEQ ID NO: 202199 - DNA, 25 bp, Homo sapien
tccctggagaaaagtagtccaccta

SEQ ID NO: 202200 - DNA, 25 bp, Homo sapien
tatgtctgattccagtatggtcagg

SEQ ID NO: 202201 - DNA, 25 bp, Homo sapien
tcacaagagtgcaaaaagtccctgg

SEQ ID NO: 202202 - DNA, 25 bp, Homo sapien
ccaaatgtggaatactggcagtgta

SEQ ID NO: 202203 - DNA, 25 bp, Homo sapien
tactttagaaacacagaagttcaca

SEQ ID NO: 202204 - DNA, 25 bp, Homo sapien
taatacataaatactttagaaacac

SEQ ID NO: 202205 - DNA, 25 bp, Homo sapien
ataaatactttagaaacacagaagt

SEQ ID NO: 202206 - DNA, 25 bp, Homo sapien
ttaatacataaatactttagaaaca

SEQ ID NO: 202207 - DNA, 25 bp, Homo sapien
cttcagttaggtcttcggtatttct

SEQ ID NO: 202208 - DNA, 25 bp, Homo sapien
tcttcagttaggtcttcggtatttc

SEQ ID NO: 202209 - DNA, 25 bp, Homo sapien
gacttgaggccgttaacagctcctt

SEQ ID NO: 202210 - DNA, 25 bp, Homo sapien
tcaacttcagcactgtagggcatcc

SEQ ID NO: 202211 - DNA, 25 bp, Homo sapien
aatttactgttatgcaaccctgagc

SEQ ID NO: 202212 - DNA, 25 bp, Homo sapien
tccccaggattagaacagacttgag

SEQ ID NO: 202213 - DNA, 25 bp, Homo sapien
cttggttagttcagctgtctggact

SEQ ID NO: 202214 - DNA, 25 bp, Homo sapien
tagttcagctgtctggactagctta

SEQ ID NO: 202215 - DNA, 25 bp, Homo sapien
ctgtctggactagcttattcttact

SEQ ID NO: 202216 - DNA, 25 bp, Homo sapien
tcagctgtctggactagcttattct

SEQ ID NO: 202217 - DNA, 25 bp, Homo sapien
tagatcctgacttttagagccttgc

SEQ ID NO: 202218 - DNA, 25 bp, Homo sapien
ttattgcaggcctgaacagtggtga

SEQ ID NO: 202219 - DNA, 25 bp, Homo sapien
tctttctagggatgcatgcacacag

SEQ ID NO: 202220 - DNA, 25 bp, Homo sapien
caagaacaagtctacaggttggcaa

SEQ ID NO: 202221 - DNA, 25 bp, Homo sapien
gatatttataactatacacaatgaa

SEQ ID NO: 202222 - DNA, 25 bp, Homo sapien
taaagttactgctctcagacaggta

SEQ ID NO: 202223 - DNA, 25 bp, Homo sapien
actaaagttactgctctcagacagg

SEQ ID NO: 202224 - DNA, 25 bp, Homo sapien
tactgctctcagacaggtatttacc

SEQ ID NO: 202225 - DNA, 25 bp, Homo sapien
aagttactgctctcagacaggtatt

SEQ ID NO: 202226 - DNA, 25 bp, Homo sapien
tttagatgtttaacaaatgagctca

SEQ ID NO: 202227 - DNA, 25 bp, Homo sapien
ttagatgtttaacaaatgagctcac

SEQ ID NO: 202228 - DNA, 25 bp, Homo sapien
ttttagatgtttaacaaatgagctc

SEQ ID NO: 202229 - DNA, 25 bp, Homo sapien
gttcaggtagttcatctttaagttc

SEQ ID NO: 202230 - DNA, 25 bp, Homo sapien
tcaggtagttcatctttaagttcat

SEQ ID NO: 202231 - DNA, 25 bp, Homo sapien
ttcaggtagttcatctttaagttca

SEQ ID NO: 202232 - DNA, 25 bp, Homo sapien
catccagtaccaccaggcgtttatc

SEQ ID NO: 202233 - DNA, 25 bp, Homo sapien
ccagtaccaccaggcgtttatcctt

SEQ ID NO: 202234 - DNA, 25 bp, Homo sapien
ctcctcatccagtaccaccaggcgt

SEQ ID NO: 202235 - DNA, 25 bp, Homo sapien
ctcatccagtaccaccaggcgttta

SEQ ID NO: 202236 - DNA, 25 bp, Homo sapien
tcattacccaaggaccaagacgacc

SEQ ID NO: 202237 - DNA, 25 bp, Homo sapien
ggtcactgcagatgggaatcctcat

SEQ ID NO: 202238 - DNA, 25 bp, Homo sapien
cattttcagaagatagtgccagtgc

SEQ ID NO: 202239 - DNA, 25 bp, Homo sapien
tgtcagatatagctcacagtgggag

SEQ ID NO: 202240 - DNA, 25 bp, Homo sapien
ttataatagcagcgttgttcgtttc

SEQ ID NO: 202241 - DNA, 25 bp, Homo sapien
aatcttcggcaacatcacaaacaac

SEQ ID NO: 202242 - DNA, 25 bp, Homo sapien
ctaaatcttcggcaacatcacaaac

SEQ ID NO: 202243 - DNA, 25 bp, Homo sapien
catcacaaacaaccaaagactcact

SEQ ID NO: 202244 - DNA, 25 bp, Homo sapien
tgcttaatcctacaaatttgttcat

SEQ ID NO: 202245 - DNA, 25 bp, Homo sapien
ggatctacattgcttaatcctacaa

SEQ ID NO: 202246 - DNA, 25 bp, Homo sapien
ttggatctacattgcttaatcctac

SEQ ID NO: 202247 - DNA, 25 bp, Homo sapien
ctttggatctacattgcttaatcct

SEQ ID NO: 202248 - DNA, 25 bp, Homo sapien
tctctttggctaatgaatgtctcaa

SEQ ID NO: 202249 - DNA, 25 bp, Homo sapien
tttctctttggctaatgaatgtctc

SEQ ID NO: 202250 - DNA, 25 bp, Homo sapien
ctttggctaatgaatgtctcaaaaa

SEQ ID NO: 202251 - DNA, 25 bp, Homo sapien
ttggctaatgaatgtctcaaaaacc

SEQ ID NO: 202252 - DNA, 25 bp, Homo sapien
gcccagtgccaaagctttgggtcga

SEQ ID NO: 202253 - DNA, 25 bp, Homo sapien
tttaaggcccagtgccaaagctttg

SEQ ID NO: 202254 - DNA, 25 bp, Homo sapien
ggtcgaaaggtttccaactgccata

SEQ ID NO: 202255 - DNA, 25 bp, Homo sapien
gataaggagaaatcctctgtaggaa

SEQ ID NO: 202256 - DNA, 25 bp, Homo sapien
agaagctgaagccctccaaccagaa

SEQ ID NO: 202257 - DNA, 25 bp, Homo sapien
gaagctgaagccctccaaccagaag

SEQ ID NO: 202258 - DNA, 25 bp, Homo sapien
tcagaagctgaagccctccaaccag

SEQ ID NO: 202259 - DNA, 25 bp, Homo sapien
agctcagaagctgaagccctccaac

SEQ ID NO: 202260 - DNA, 25 bp, Homo sapien
gcgcctttaagaatggcacggcggc

SEQ ID NO: 202261 - DNA, 25 bp, Homo sapien
acactcgggcgcctttaagaatggc

SEQ ID NO: 202262 - DNA, 25 bp, Homo sapien
ttccttccggccgtcagcggcctgt

SEQ ID NO: 202263 - DNA, 25 bp, Homo sapien
gcggcctgtcgcctacactcgggcg

SEQ ID NO: 202264 - DNA, 25 bp, Homo sapien
aacagcaatgaccactgggccacag

SEQ ID NO: 202265 - DNA, 25 bp, Homo sapien
ctacttagaatttgccggcggaaca

SEQ ID NO: 202266 - DNA, 25 bp, Homo sapien
tgggccacagcgcttaagacgcccg

SEQ ID NO: 202267 - DNA, 25 bp, Homo sapien
ttaagacgcccgctgggtaccaatc

SEQ ID NO: 202268 - DNA, 25 bp, Homo sapien
catcccaggtctgcgtagccaatag

SEQ ID NO: 202269 - DNA, 25 bp, Homo sapien
tgcgagtcgggccccccccatccca

SEQ ID NO: 202270 - DNA, 25 bp, Homo sapien
ccatcccaggtctgcgtagccaata

SEQ ID NO: 202271 - DNA, 25 bp, Homo sapien
gggcactgtagtggcttttaccctg

SEQ ID NO: 202272 - DNA, 25 bp, Homo sapien
tacaaagtttgtccgctccggggca

SEQ ID NO: 202273 - DNA, 25 bp, Homo sapien
ctgtagtggcttttaccctggccgg

SEQ ID NO: 202274 - DNA, 25 bp, Homo sapien
cgctccggggcactgtagtggcttt

SEQ ID NO: 202275 - DNA, 25 bp, Homo sapien
tgatggctgcggtgtttctggtaac

SEQ ID NO: 202276 - DNA, 25 bp, Homo sapien
gcttttctacatcgcggtggtcttt

SEQ ID NO: 202277 - DNA, 25 bp, Homo sapien
tctggtaacgctttatgaatactcg

SEQ ID NO: 202278 - DNA, 25 bp, Homo sapien
accctgatggctgcggtgtttctgg

SEQ ID NO: 202279 - DNA, 25 bp, Homo sapien
caccggcctggtattgggatggtaa

SEQ ID NO: 202280 - DNA, 25 bp, Homo sapien
tgaccaccggcctggtattgggatg

SEQ ID NO: 202281 - DNA, 25 bp, Homo sapien
tgcttcatcgtgaccaccggcctgg

SEQ ID NO: 202282 - DNA, 25 bp, Homo sapien
cctggtattgggatggtaagtgtcc

SEQ ID NO: 202283 - DNA, 25 bp, Homo sapien
tgccctgcatcaccgtttggtccgt

SEQ ID NO: 202284 - DNA, 25 bp, Homo sapien
tgcgtcactgccctgcatcaccgtt

SEQ ID NO: 202285 - DNA, 25 bp, Homo sapien
tcaccgtttggtccgtgtcgctggg

SEQ ID NO: 202286 - DNA, 25 bp, Homo sapien
cgcattggggtgttttactcagctt

SEQ ID NO: 202287 - DNA, 25 bp, Homo sapien
agtgcttctctagtaggcttctgtc

SEQ ID NO: 202288 - DNA, 25 bp, Homo sapien
gcttctctagtaggcttctgtcccg

SEQ ID NO: 202289 - DNA, 25 bp, Homo sapien
agaaagtgcttctctagtaggcttc

SEQ ID NO: 202290 - DNA, 25 bp, Homo sapien
ctctagtaggcttctgtcccggatt

SEQ ID NO: 202291 - DNA, 25 bp, Homo sapien
ctctactgttcatgtgttttctgtc

SEQ ID NO: 202292 - DNA, 25 bp, Homo sapien
ctgttcatgtgttttctgtcatggt

SEQ ID NO: 202293 - DNA, 25 bp, Homo sapien
tactgttcatgtgttttctgtcatg

SEQ ID NO: 202294 - DNA, 25 bp, Homo sapien
tctactgttcatgtgttttctgtca

SEQ ID NO: 202295 - DNA, 25 bp, Homo sapien
tgtattgacctaatccagctcctgg

SEQ ID NO: 202296 - DNA, 25 bp, Homo sapien
gctgccagactgagaaccatgaaac

SEQ ID NO: 202297 - DNA, 25 bp, Homo sapien
gtctggagaagacagcctatgctgg

SEQ ID NO: 202298 - DNA, 25 bp, Homo sapien
tccaagttataaacctggctctggc

SEQ ID NO: 202299 - DNA, 25 bp, Homo sapien
ttcatttgcaacgtcctgctccctt

SEQ ID NO: 202300 - DNA, 25 bp, Homo sapien
tctatggaccattcttgtctattca

SEQ ID NO: 202301 - DNA, 25 bp, Homo sapien
cccttgcgtctatggaccattcttg

SEQ ID NO: 202302 - DNA, 25 bp, Homo sapien
acgtcctgctcccttgcgtctatgg

SEQ ID NO: 202303 - DNA, 25 bp, Homo sapien
gttccacaggtctgaaaatacactg

SEQ ID NO: 202304 - DNA, 25 bp, Homo sapien
catgtcttcgaagagtgaataaagc

SEQ ID NO: 202305 - DNA, 25 bp, Homo sapien
tgaatcctgattctagccctggcaa

SEQ ID NO: 202306 - DNA, 25 bp, Homo sapien
tttgagagaccatgtcttcgaagag

SEQ ID NO: 202307 - DNA, 25 bp, Homo sapien
ataggccttatgacatggctttgag

SEQ ID NO: 202308 - DNA, 25 bp, Homo sapien
tacctgtcctgaatcgagtccagag

SEQ ID NO: 202309 - DNA, 25 bp, Homo sapien
acctgtgctcacttgcaaactctca

SEQ ID NO: 202310 - DNA, 25 bp, Homo sapien
ttgtcaacggttctgtacctgtcct

SEQ ID NO: 202311 - DNA, 25 bp, Homo sapien
catccagatccgaataacctgtgct

SEQ ID NO: 202312 - DNA, 25 bp, Homo sapien
tatatactgtgcacttctacatgac

SEQ ID NO: 202313 - DNA, 25 bp, Homo sapien
ggatcctaggaataaataaggtgct

SEQ ID NO: 202314 - DNA, 25 bp, Homo sapien
ggtaaaaacaccctcatgagctggg

SEQ ID NO: 202315 - DNA, 25 bp, Homo sapien
tgacaggtcctatgaacatattgag

SEQ ID NO: 202316 - DNA, 25 bp, Homo sapien
cgtgttgttggaagctagcggctcc

SEQ ID NO: 202317 - DNA, 25 bp, Homo sapien
tccgcccgagaagttctgggagccg

SEQ ID NO: 202318 - DNA, 25 bp, Homo sapien
cccgcagccgaactttctttgctgt

SEQ ID NO: 202319 - DNA, 25 bp, Homo sapien
tgtgcctgcggcgccgatccgcatt

SEQ ID NO: 202320 - DNA, 25 bp, Homo sapien
ccgcattgcaagttttctgcgcggg

SEQ ID NO: 202321 - DNA, 25 bp, Homo sapien
tggcgttcttaagcacggcgcccga

SEQ ID NO: 202322 - DNA, 25 bp, Homo sapien
gctgctcacggcctaaatccagagg

SEQ ID NO: 202323 - DNA, 25 bp, Homo sapien
tatttttgtctcgagctgctgccgc

SEQ ID NO: 202324 - DNA, 25 bp, Homo sapien
ggcggctggatttcggcgaacccaa

SEQ ID NO: 202325 - DNA, 25 bp, Homo sapien
tctccttccagtggtgatcgccgct

SEQ ID NO: 202326 - DNA, 25 bp, Homo sapien
gaatagcccatctcccacatcgggt

SEQ ID NO: 202327 - DNA, 25 bp, Homo sapien
gcaggcttctcgctgttacccggtg

SEQ ID NO: 202328 - DNA, 25 bp, Homo sapien
aatcagccagaaccaccggaacgta

SEQ ID NO: 202329 - DNA, 25 bp, Homo sapien
gaaacatttccgtgctactgtctgt

SEQ ID NO: 202330 - DNA, 25 bp, Homo sapien
gctactgtctgtcatcgtctctggg

SEQ ID NO: 202331 - DNA, 25 bp, Homo sapien
tgtgtgccttgtgggggatttttaa

SEQ ID NO: 202332 - DNA, 25 bp, Homo sapien
tggaacaggaacgcgtctccggccg

SEQ ID NO: 202333 - DNA, 25 bp, Homo sapien
ccttggaacaggaacgcgtctccgg

SEQ ID NO: 202334 - DNA, 25 bp, Homo sapien
cttggaacaggaacgcgtctccggc

SEQ ID NO: 202335 - DNA, 25 bp, Homo sapien
ttggaacaggaacgcgtctccggcc

SEQ ID NO: 202336 - DNA, 25 bp, Homo sapien
gggggctctgtagaccgagggcggc

SEQ ID NO: 202337 - DNA, 25 bp, Homo sapien
ggctctgtagaccgagggcggcccc

SEQ ID NO: 202338 - DNA, 25 bp, Homo sapien
tctgtagaccgagggcggcccccta

SEQ ID NO: 202339 - DNA, 25 bp, Homo sapien
gggctctgtagaccgagggcggccc

SEQ ID NO: 202340 - DNA, 25 bp, Homo sapien
ctggagcactcgctggccgactgcg

SEQ ID NO: 202341 - DNA, 25 bp, Homo sapien
tttaagggctggaacgagtgcgagc

SEQ ID NO: 202342 - DNA, 25 bp, Homo sapien
cagactgttgcgctgctgtcgctgc

SEQ ID NO: 202343 - DNA, 25 bp, Homo sapien
catgatgtttcgcgaccaggtcggg

SEQ ID NO: 202344 - DNA, 25 bp, Homo sapien
tgcacgtcctcgaacgcgaggccaa

SEQ ID NO: 202345 - DNA, 25 bp, Homo sapien
ctgcacgtcctcgaacgcgaggcca

SEQ ID NO: 202346 - DNA, 25 bp, Homo sapien
caacagccccggtaagtgtgcggcg

SEQ ID NO: 202347 - DNA, 25 bp, Homo sapien
gaggccaacagccccggtaagtgtg

SEQ ID NO: 202348 - DNA, 25 bp, Homo sapien
ccgcgccgggacctggacggcgtgg

SEQ ID NO: 202349 - DNA, 25 bp, Homo sapien
ccagccgcgccgggacctggacggc

SEQ ID NO: 202350 - DNA, 25 bp, Homo sapien
ctgccagccgcgccgggacctggac

SEQ ID NO: 202351 - DNA, 25 bp, Homo sapien
gacctggacggcgtggccccgaggc

SEQ ID NO: 202352 - DNA, 25 bp, Homo sapien
gtagctacggtagcatgaatgattg

SEQ ID NO: 202353 - DNA, 25 bp, Homo sapien
tccgccggccgctttgggattttgc

SEQ ID NO: 202354 - DNA, 25 bp, Homo sapien
cagccctttccgtgtggtagctacg

SEQ ID NO: 202355 - DNA, 25 bp, Homo sapien
tgtgaactccgtcagccctttccgt

SEQ ID NO: 202356 - DNA, 25 bp, Homo sapien
gacaggactgcacccgaaagatcct

SEQ ID NO: 202357 - DNA, 25 bp, Homo sapien
aggactgcacccgaaagatcctgca

SEQ ID NO: 202358 - DNA, 25 bp, Homo sapien
ggactgcacccgaaagatcctgcat

SEQ ID NO: 202359 - DNA, 25 bp, Homo sapien
caggactgcacccgaaagatcctgc

SEQ ID NO: 202360 - DNA, 25 bp, Homo sapien
gatcctctgagaggcatgagtggaa

SEQ ID NO: 202361 - DNA, 25 bp, Homo sapien
agtggaagagccagtttagttcaga

SEQ ID NO: 202362 - DNA, 25 bp, Homo sapien
tgcatgatcctctgagaggcatgag

SEQ ID NO: 202363 - DNA, 25 bp, Homo sapien
gccagtttagttcagacagtttcca

SEQ ID NO: 202364 - DNA, 25 bp, Homo sapien
ttataattatgtgccagactgactt

SEQ ID NO: 202365 - DNA, 25 bp, Homo sapien
tataattatgtgccagactgacttc

SEQ ID NO: 202366 - DNA, 25 bp, Homo sapien
atggagtgtcttgcatgtgcaggag

SEQ ID NO: 202367 - DNA, 25 bp, Homo sapien
tgagccctgtttcagtcaaagtgac

SEQ ID NO: 202368 - DNA, 25 bp, Homo sapien
tctccatgagccctgtttcagtcaa

SEQ ID NO: 202369 - DNA, 25 bp, Homo sapien
cctgtttcagtcaaagtgacttgct

SEQ ID NO: 202370 - DNA, 25 bp, Homo sapien
tccatgagccctgtttcagtcaaag

SEQ ID NO: 202371 - DNA, 25 bp, Homo sapien
gggaccagtatcaaggacatcacct

SEQ ID NO: 202372 - DNA, 25 bp, Homo sapien
cgaggcggaccatgtgacttggcat

SEQ ID NO: 202373 - DNA, 25 bp, Homo sapien
ccatgcccgttagcctgtgaaattg

SEQ ID NO: 202374 - DNA, 25 bp, Homo sapien
gacatcacctgagatcttcttggaa

SEQ ID NO: 202375 - DNA, 25 bp, Homo sapien
acagcaatagtcagtcagtgtgtgc

SEQ ID NO: 202376 - DNA, 25 bp, Homo sapien
cagaaaggatacagcacggatatac

SEQ ID NO: 202377 - DNA, 25 bp, Homo sapien
aataaatacaacctttcaggatgct

SEQ ID NO: 202378 - DNA, 25 bp, Homo sapien
cagtgtgtgcttcaggatgaattta

SEQ ID NO: 202379 - DNA, 25 bp, Homo sapien
tgtgaggttgtagggaatggaatgt

SEQ ID NO: 202380 - DNA, 25 bp, Homo sapien
ctgcatttctgcttcgtgacattct

SEQ ID NO: 202381 - DNA, 25 bp, Homo sapien
catttctgcttcgtgacattctgtc

SEQ ID NO: 202382 - DNA, 25 bp, Homo sapien
ttctgtcattagtcttccctgcacc

SEQ ID NO: 202383 - DNA, 25 bp, Homo sapien
gagtctgctgtaacccaacctgcag

SEQ ID NO: 202384 - DNA, 25 bp, Homo sapien
tgagagctgcgttacacagtgtcac

SEQ ID NO: 202385 - DNA, 25 bp, Homo sapien
ccctgcatgcgtgaacatggtgtga

SEQ ID NO: 202386 - DNA, 25 bp, Homo sapien
tagtcaagaggaagcgagtctgctg

SEQ ID NO: 202387 - DNA, 25 bp, Homo sapien
ccccgatatggagctcactgagtag

SEQ ID NO: 202388 - DNA, 25 bp, Homo sapien
tatggagctcactgagtagcctcat

SEQ ID NO: 202389 - DNA, 25 bp, Homo sapien
ctttccaaatggtcttccccgatat

SEQ ID NO: 202390 - DNA, 25 bp, Homo sapien
tggtcttccccgatatggagctcac

SEQ ID NO: 202391 - DNA, 25 bp, Homo sapien
tcctctccgatgaggtggaggaata

SEQ ID NO: 202392 - DNA, 25 bp, Homo sapien
tctgaagtagtacggaaactccaca

SEQ ID NO: 202393 - DNA, 25 bp, Homo sapien
acattcttcagaccaacttgcggca

SEQ ID NO: 202394 - DNA, 25 bp, Homo sapien
aacttgcggcatgccagcacattcc

SEQ ID NO: 202395 - DNA, 25 bp, Homo sapien
tacagggaaggcattggctttgctc

SEQ ID NO: 202396 - DNA, 25 bp, Homo sapien
tttgtaggtcaaagttccaggtaca

SEQ ID NO: 202397 - DNA, 25 bp, Homo sapien
gtcatctcattgaagagccaaggag

SEQ ID NO: 202398 - DNA, 25 bp, Homo sapien
cattgaagagccaaggagaggcaaa

SEQ ID NO: 202399 - DNA, 25 bp, Homo sapien
gatgacgttgccagcatgcagggaa

SEQ ID NO: 202400 - DNA, 25 bp, Homo sapien
tttttgtggccacgttgtgaacgca

SEQ ID NO: 202401 - DNA, 25 bp, Homo sapien
cagggaacgctttgcaccaagaatc

SEQ ID NO: 202402 - DNA, 25 bp, Homo sapien
tatgctgcgttttgagggattccct

SEQ ID NO: 202403 - DNA, 25 bp, Homo sapien
tgcgacagggccctagcaggaagct

SEQ ID NO: 202404 - DNA, 25 bp, Homo sapien
tgaatgtggcaatgaaccagctgcc

SEQ ID NO: 202405 - DNA, 25 bp, Homo sapien
ggcatgaaatcaaagcttggattat

SEQ ID NO: 202406 - DNA, 25 bp, Homo sapien
ggctcaacgcataggcctgaattga

SEQ ID NO: 202407 - DNA, 25 bp, Homo sapien
tgactaagagtgaaatatcaccgtg

SEQ ID NO: 202408 - DNA, 25 bp, Homo sapien
cattttgccggcattagagactcac

SEQ ID NO: 202409 - DNA, 25 bp, Homo sapien
tcttcccacgaagtgactaagagtg

SEQ ID NO: 202410 - DNA, 25 bp, Homo sapien
acagttaggagagtgattttctggc

SEQ ID NO: 202411 - DNA, 25 bp, Homo sapien
aagagatcttgaatgatctccagag

SEQ ID NO: 202412 - DNA, 25 bp, Homo sapien
cggaagagatcttgaatgatctcca

SEQ ID NO: 202413 - DNA, 25 bp, Homo sapien
atcttgaatgatctccagagaggta

SEQ ID NO: 202414 - DNA, 25 bp, Homo sapien
tcttgaatgatctccagagaggtac

SEQ ID NO: 202415 - DNA, 25 bp, Homo sapien
catatttgtaaatgatgggaagtat

SEQ ID NO: 202416 - DNA, 25 bp, Homo sapien
tttgtaaatgatgggaagtatttgc

SEQ ID NO: 202417 - DNA, 25 bp, Homo sapien
taccttgcaggcttggaaggtagac

SEQ ID NO: 202418 - DNA, 25 bp, Homo sapien
tttctcgaaggttaccttgcaggct

SEQ ID NO: 202419 - DNA, 25 bp, Homo sapien
gaagagtaaagtttgccccacagct

SEQ ID NO: 202420 - DNA, 25 bp, Homo sapien
acagccaagtcaccccaatttcaat

SEQ ID NO: 202421 - DNA, 25 bp, Homo sapien
ggagcagcacatgtttgtccagagc

SEQ ID NO: 202422 - DNA, 25 bp, Homo sapien
caatttcaatgggagcagcacatgt

SEQ ID NO: 202423 - DNA, 25 bp, Homo sapien
gatcatccgtatgggatcccagaag

SEQ ID NO: 202424 - DNA, 25 bp, Homo sapien
gaggcacgtctccagatagatccag

SEQ ID NO: 202425 - DNA, 25 bp, Homo sapien
aaatcgctgggccacttccaaaggg

SEQ ID NO: 202426 - DNA, 25 bp, Homo sapien
tacacagaagaacaggaggcacgtc

SEQ ID NO: 202427 - DNA, 25 bp, Homo sapien
agaggcattaagtgtagccagagga

SEQ ID NO: 202428 - DNA, 25 bp, Homo sapien
tcaaagaggcattaagtgtagccag

SEQ ID NO: 202429 - DNA, 25 bp, Homo sapien
caaagaggcattaagtgtagccaga

SEQ ID NO: 202430 - DNA, 25 bp, Homo sapien
tttcaaagaggcattaagtgtagcc

SEQ ID NO: 202431 - DNA, 25 bp, Homo sapien
ggttgcttccaccttatgacttgtg

SEQ ID NO: 202432 - DNA, 25 bp, Homo sapien
tatgcatccgaagggtaacatctgg

SEQ ID NO: 202433 - DNA, 25 bp, Homo sapien
tacaaccagaacagagagaaccaga

SEQ ID NO: 202434 - DNA, 25 bp, Homo sapien
tcttcagtggtggaaaggctcccca

SEQ ID NO: 202435 - DNA, 25 bp, Homo sapien
gaagcttcagcactgttcacggtgg

SEQ ID NO: 202436 - DNA, 25 bp, Homo sapien
tcattcccactgcaaacaagttgtg

SEQ ID NO: 202437 - DNA, 25 bp, Homo sapien
gtatgttactaagccggtgacacag

SEQ ID NO: 202438 - DNA, 25 bp, Homo sapien
tggcaccagggcattactgcatgat

SEQ ID NO: 202439 - DNA, 25 bp, Homo sapien
tggctatctctgataccacaaatgt

SEQ ID NO: 202440 - DNA, 25 bp, Homo sapien
atctctgataccacaaatgtcattg

SEQ ID NO: 202441 - DNA, 25 bp, Homo sapien
ctttccctttggctatctctgatac

SEQ ID NO: 202442 - DNA, 25 bp, Homo sapien
tccctttggctatctctgataccac

SEQ ID NO: 202443 - DNA, 25 bp, Homo sapien
gagggcagacaatggttagtttcca

SEQ ID NO: 202444 - DNA, 25 bp, Homo sapien
tccaaaggtgatggtatgaagctag

SEQ ID NO: 202445 - DNA, 25 bp, Homo sapien
agtttccaaactccctggacatagg

SEQ ID NO: 202446 - DNA, 25 bp, Homo sapien
caaacaacacagtaggccagtgctg

SEQ ID NO: 202447 - DNA, 25 bp, Homo sapien
cagggaaatgacctagcagaaagct

SEQ ID NO: 202448 - DNA, 25 bp, Homo sapien
ttttcaaggatgtacactagccacc

SEQ ID NO: 202449 - DNA, 25 bp, Homo sapien
aaagctagggagttcctcagcctca

SEQ ID NO: 202450 - DNA, 25 bp, Homo sapien
tacagtaggcttacagcataacccc

SEQ ID NO: 202451 - DNA, 25 bp, Homo sapien
tttttcttgctagagacagctgcat

SEQ ID NO: 202452 - DNA, 25 bp, Homo sapien
tcaatctatatgcaattcagagacc

SEQ ID NO: 202453 - DNA, 25 bp, Homo sapien
gagaatttaaagctgtgtatggtca

SEQ ID NO: 202454 - DNA, 25 bp, Homo sapien
ttctgttggtgattctctctttttc

SEQ ID NO: 202455 - DNA, 25 bp, Homo sapien
ggtgctagagaagcagttgcccaga

SEQ ID NO: 202456 - DNA, 25 bp, Homo sapien
tgctagagaagcagttgcccagaga

SEQ ID NO: 202457 - DNA, 25 bp, Homo sapien
gggtgctagagaagcagttgcccag

SEQ ID NO: 202458 - DNA, 25 bp, Homo sapien
ctagagaagcagttgcccagagaaa

SEQ ID NO: 202459 - DNA, 25 bp, Homo sapien
cacgtctgcatgtctgcgtgtgagc

SEQ ID NO: 202460 - DNA, 25 bp, Homo sapien
aagcactcaactgggatagagctgg

SEQ ID NO: 202461 - DNA, 25 bp, Homo sapien
gtcacactcgtgaccatctctccat

SEQ ID NO: 202462 - DNA, 25 bp, Homo sapien
ttaagcactcaactgggatagagct

SEQ ID NO: 202463 - DNA, 25 bp, Homo sapien
gaatagccacaaagtggccaagaaa

SEQ ID NO: 202464 - DNA, 25 bp, Homo sapien
gtgtttttggctgccccagcaatgg

SEQ ID NO: 202465 - DNA, 25 bp, Homo sapien
tagccacaaagtggccaagaaagaa

SEQ ID NO: 202466 - DNA, 25 bp, Homo sapien
gcttcactactggaagaatagccac

SEQ ID NO: 202467 - DNA, 25 bp, Homo sapien
gaccattctgccaccctaaatgaca

SEQ ID NO: 202468 - DNA, 25 bp, Homo sapien
tccagagatgttaaccctgtgagac

SEQ ID NO: 202469 - DNA, 25 bp, Homo sapien
actgagagaaacgaagcatgtcctg

SEQ ID NO: 202470 - DNA, 25 bp, Homo sapien
cactacatcatattgggtaaatggt

SEQ ID NO: 202471 - DNA, 25 bp, Homo sapien
ctctcaagagcttcctcttcaagct

SEQ ID NO: 202472 - DNA, 25 bp, Homo sapien
caagagcttcctcttcaagctctta

SEQ ID NO: 202473 - DNA, 25 bp, Homo sapien
aagagcttcctcttcaagctcttac

SEQ ID NO: 202474 - DNA, 25 bp, Homo sapien
ctcaagagcttcctcttcaagctct

SEQ ID NO: 202475 - DNA, 25 bp, Homo sapien
ctgcctgaagatcacgttgccacat

SEQ ID NO: 202476 - DNA, 25 bp, Homo sapien
caataggatgttgcctatttctaat

SEQ ID NO: 202477 - DNA, 25 bp, Homo sapien
gatagtaatcttcccaccataactc

SEQ ID NO: 202478 - DNA, 25 bp, Homo sapien
tctaatagttaaaatgagggctgca

SEQ ID NO: 202479 - DNA, 25 bp, Homo sapien
gaagtttgtcagtataggtgaagat

SEQ ID NO: 202480 - DNA, 25 bp, Homo sapien
gtttgtcagtataggtgaagatttt

SEQ ID NO: 202481 - DNA, 25 bp, Homo sapien
gcagaagtttgtcagtataggtgaa

SEQ ID NO: 202482 - DNA, 25 bp, Homo sapien
cagaagtttgtcagtataggtgaag

SEQ ID NO: 202483 - DNA, 25 bp, Homo sapien
cccaagtagatgagttgagagcaat

SEQ ID NO: 202484 - DNA, 25 bp, Homo sapien
gcgctgaattatgccaggaacctcg

SEQ ID NO: 202485 - DNA, 25 bp, Homo sapien
ttgcacaactgatttataataccca

SEQ ID NO: 202486 - DNA, 25 bp, Homo sapien
ctggaacggtcctgggcgctgaatt

SEQ ID NO: 202487 - DNA, 25 bp, Homo sapien
aaaggacaccctgatgatttgttca

SEQ ID NO: 202488 - DNA, 25 bp, Homo sapien
caacaaggtgtaaaaggacaccctg

SEQ ID NO: 202489 - DNA, 25 bp, Homo sapien
tcttgacaagtgctggtagcaacaa

SEQ ID NO: 202490 - DNA, 25 bp, Homo sapien
tggtagcaacaaggtgtaaaaggac

SEQ ID NO: 202491 - DNA, 25 bp, Homo sapien
ccccggaatgaggtggagtccaaag

SEQ ID NO: 202492 - DNA, 25 bp, Homo sapien
gggcttgtcaggaacatcccgtcca

SEQ ID NO: 202493 - DNA, 25 bp, Homo sapien
gtccaccaaccacatctttgctttg

SEQ ID NO: 202494 - DNA, 25 bp, Homo sapien
tgttctaagcactggtttttcaagc

SEQ ID NO: 202495 - DNA, 25 bp, Homo sapien
ggccaggacctcttaattcaagaag

SEQ ID NO: 202496 - DNA, 25 bp, Homo sapien
aattgaaggtatacagcacacaggt

SEQ ID NO: 202497 - DNA, 25 bp, Homo sapien
catagggcatgatgagagcacagaa

SEQ ID NO: 202498 - DNA, 25 bp, Homo sapien
gcaaatcatctctatgtggctggac

SEQ ID NO: 202499 - DNA, 25 bp, Homo sapien
caaggtatgctcattgagtgctgcc

SEQ ID NO: 202500 - DNA, 25 bp, Homo sapien
taaggaggatcctatagaagggcca

SEQ ID NO: 202501 - DNA, 25 bp, Homo sapien
ttgcagtttagctgacaggtcagac

SEQ ID NO: 202502 - DNA, 25 bp, Homo sapien
caagaaagcctgtgttgcggttcta

SEQ ID NO: 202503 - DNA, 25 bp, Homo sapien
ccttgtgtgggaacaaggctgttca

SEQ ID NO: 202504 - DNA, 25 bp, Homo sapien
tcgggtgctgcatggtctgttgatc

SEQ ID NO: 202505 - DNA, 25 bp, Homo sapien
tcatgctgcattcgatattgggctc

SEQ ID NO: 202506 - DNA, 25 bp, Homo sapien
cacccctacgtgagcccttgtgtgg

SEQ ID NO: 202507 - DNA, 25 bp, Homo sapien
cccagttctaactggagccctgctt

SEQ ID NO: 202508 - DNA, 25 bp, Homo sapien
gaactgttgtacacaccgcacagcc

SEQ ID NO: 202509 - DNA, 25 bp, Homo sapien
tgcattagagacaagcactcccagt

SEQ ID NO: 202510 - DNA, 25 bp, Homo sapien
ccctgcttctgtgtgaactgttgta

SEQ ID NO: 202511 - DNA, 25 bp, Homo sapien
gattcacccacttctgtggctaaaa

SEQ ID NO: 202512 - DNA, 25 bp, Homo sapien
tcccagagctctagcatggctctca

SEQ ID NO: 202513 - DNA, 25 bp, Homo sapien
tcaccccatgctctttgccagagag

SEQ ID NO: 202514 - DNA, 25 bp, Homo sapien
tgcacttccccctgaaagtctgcta

SEQ ID NO: 202515 - DNA, 25 bp, Homo sapien
tgaatcaaaggagtcatctccagct

SEQ ID NO: 202516 - DNA, 25 bp, Homo sapien
gatcttcaagtactgtcaatttcca

SEQ ID NO: 202517 - DNA, 25 bp, Homo sapien
ccaggccagcctttacattgatagc

SEQ ID NO: 202518 - DNA, 25 bp, Homo sapien
cacgcatcccaagccatcatcagga

SEQ ID NO: 202519 - DNA, 25 bp, Homo sapien
taagcctgcgccttttcttcaaaca

SEQ ID NO: 202520 - DNA, 25 bp, Homo sapien
ctcttgggttcagatctgagacccc

SEQ ID NO: 202521 - DNA, 25 bp, Homo sapien
aatgcttctctgtaagcctgcgcct

SEQ ID NO: 202522 - DNA, 25 bp, Homo sapien
ctgagacccccaattccatcaagtg

SEQ ID NO: 202523 - DNA, 25 bp, Homo sapien
aagggtgctagattgatttccattc

SEQ ID NO: 202524 - DNA, 25 bp, Homo sapien
caagggtgctagattgatttccatt

SEQ ID NO: 202525 - DNA, 25 bp, Homo sapien
agtcaagggtgctagattgatttcc

SEQ ID NO: 202526 - DNA, 25 bp, Homo sapien
tcaagggtgctagattgatttccat

SEQ ID NO: 202527 - DNA, 25 bp, Homo sapien
caggagtccagtagggtccggtgaa

SEQ ID NO: 202528 - DNA, 25 bp, Homo sapien
aggagtccagtagggtccggtgaag

SEQ ID NO: 202529 - DNA, 25 bp, Homo sapien
gtccggtgaagggagacgcccagca

SEQ ID NO: 202530 - DNA, 25 bp, Homo sapien
ggtccggtgaagggagacgcccagc

SEQ ID NO: 202531 - DNA, 25 bp, Homo sapien
gctggccgtgaaatcgactgctgcg

SEQ ID NO: 202532 - DNA, 25 bp, Homo sapien
gaaatcgactgctgcgggtccagtg

SEQ ID NO: 202533 - DNA, 25 bp, Homo sapien
agagtgaccgcgctggccgtgaaat

SEQ ID NO: 202534 - DNA, 25 bp, Homo sapien
tgaagacgagagtgaccgcgctggc

SEQ ID NO: 202535 - DNA, 25 bp, Homo sapien
tttgtgagagcgtaggtcatcctcg

SEQ ID NO: 202536 - DNA, 25 bp, Homo sapien
ccacagaaggatatcgcgggcacgt

SEQ ID NO: 202537 - DNA, 25 bp, Homo sapien
taggagacacataagaggacagcag

SEQ ID NO: 202538 - DNA, 25 bp, Homo sapien
cgtgcacccaaagcaagatagtggc

SEQ ID NO: 202539 - DNA, 25 bp, Homo sapien
tgacccccaccaaatgcaactgttt

SEQ ID NO: 202540 - DNA, 25 bp, Homo sapien
tcaaacagttgcatgcatgaggctg

SEQ ID NO: 202541 - DNA, 25 bp, Homo sapien
tcctgtgttgactacaggtatatag

SEQ ID NO: 202542 - DNA, 25 bp, Homo sapien
ctgtgttgactacaggtatatagct

SEQ ID NO: 202543 - DNA, 25 bp, Homo sapien
tgtgtacaagacatgaaacattgct

SEQ ID NO: 202544 - DNA, 25 bp, Homo sapien
caagcaaaatagatgtggctgggtc

SEQ ID NO: 202545 - DNA, 25 bp, Homo sapien
tattcatagtggcttcttaccagaa

SEQ ID NO: 202546 - DNA, 25 bp, Homo sapien
cagaaacagtaggaagaaacacatg

SEQ ID NO: 202547 - DNA, 25 bp, Homo sapien
aaggttgtagatgttattccccagg

SEQ ID NO: 202548 - DNA, 25 bp, Homo sapien
caaaagcatgcaaccagaaggcggg

SEQ ID NO: 202549 - DNA, 25 bp, Homo sapien
cctcttgtagctactgccggtgcaa

SEQ ID NO: 202550 - DNA, 25 bp, Homo sapien
cttggctgccttttacgggatggga

SEQ ID NO: 202551 - DNA, 25 bp, Homo sapien
gaagcagcctgaccaaggcgctcag

SEQ ID NO: 202552 - DNA, 25 bp, Homo sapien
catcagagatgtttgcaaagtgagt

SEQ ID NO: 202553 - DNA, 25 bp, Homo sapien
gcctagttcatgttgccaagcaatg

SEQ ID NO: 202554 - DNA, 25 bp, Homo sapien
cacatggagctgtgataacactaat

SEQ ID NO: 202555 - DNA, 25 bp, Homo sapien
tcttttgttgcatgccctgtgcagg

SEQ ID NO: 202556 - DNA, 25 bp, Homo sapien
cttgctacaatgtatttattattca

SEQ ID NO: 202557 - DNA, 25 bp, Homo sapien
gtggtttaaacttgctacaatgtat

SEQ ID NO: 202558 - DNA, 25 bp, Homo sapien
tgtggtttaaacttgctacaatgta

SEQ ID NO: 202559 - DNA, 25 bp, Homo sapien
ccttgtggtttaaacttgctacaat

SEQ ID NO: 202560 - DNA, 25 bp, Homo sapien
gaaatgattaatacaaggttttgta

SEQ ID NO: 202561 - DNA, 25 bp, Homo sapien
tatatttcatatcaacgttatattg

SEQ ID NO: 202562 - DNA, 25 bp, Homo sapien
tcctcccatgtaactaagaatcatg

SEQ ID NO: 202563 - DNA, 25 bp, Homo sapien
caacgttatattgaaagtgaaggga

SEQ ID NO: 202564 - DNA, 25 bp, Homo sapien
gggtgacctcctgttacgctcccag

SEQ ID NO: 202565 - DNA, 25 bp, Homo sapien
ggagcttaaagtggcgtcatcagac

SEQ ID NO: 202566 - DNA, 25 bp, Homo sapien
tgcaggatcactagggtcccagggc

SEQ ID NO: 202567 - DNA, 25 bp, Homo sapien
tcatcagacgaggtcatgtcctggg

SEQ ID NO: 202568 - DNA, 25 bp, Homo sapien
caggagttattagctacaaagtctt

SEQ ID NO: 202569 - DNA, 25 bp, Homo sapien
ccgatgacaggagttattagctaca

SEQ ID NO: 202570 - DNA, 25 bp, Homo sapien
cttcactcaggccattcccagcact

SEQ ID NO: 202571 - DNA, 25 bp, Homo sapien
ctcgtcagccgatgacaggagttat

SEQ ID NO: 202572 - DNA, 25 bp, Homo sapien
agggaaaggggaagccatgcgcagc

SEQ ID NO: 202573 - DNA, 25 bp, Homo sapien
acatttttccccggcgaatctgaca

SEQ ID NO: 202574 - DNA, 25 bp, Homo sapien
aaggggaagccatgcgcagctggcg

SEQ ID NO: 202575 - DNA, 25 bp, Homo sapien
tttccccggcgaatctgacacattt

SEQ ID NO: 202576 - DNA, 25 bp, Homo sapien
ctggggaggcggcaccagaacagcc

SEQ ID NO: 202577 - DNA, 25 bp, Homo sapien
ccagggaatgaagcggtttctctca

SEQ ID NO: 202578 - DNA, 25 bp, Homo sapien
cagggaatgaagcggtttctctcac

SEQ ID NO: 202579 - DNA, 25 bp, Homo sapien
agcctgaccgctcttccgggagcac

SEQ ID NO: 202580 - DNA, 25 bp, Homo sapien
tgaaactggcagaacactttgtgat

SEQ ID NO: 202581 - DNA, 25 bp, Homo sapien
cctggtatcagatccatccctggac

SEQ ID NO: 202582 - DNA, 25 bp, Homo sapien
tccagggaggagcacacactgccag

SEQ ID NO: 202583 - DNA, 25 bp, Homo sapien
tctttgtgggtccatgaggaaccaa

SEQ ID NO: 202584 - DNA, 25 bp, Homo sapien
aatctttgtgggtccatgaggaacc

SEQ ID NO: 202585 - DNA, 25 bp, Homo sapien
tctaatctttgtgggtccatgagga

SEQ ID NO: 202586 - DNA, 25 bp, Homo sapien
gctctaatctttgtgggtccatgag

SEQ ID NO: 202587 - DNA, 25 bp, Homo sapien
aaatgaagtccacttccaggtctag

SEQ ID NO: 202588 - DNA, 25 bp, Homo sapien
atgaagtccacttccaggtctagct

SEQ ID NO: 202589 - DNA, 25 bp, Homo sapien
aatgaagtccacttccaggtctagc

SEQ ID NO: 202590 - DNA, 25 bp, Homo sapien
ggctctaggactttgttgtagaaac

SEQ ID NO: 202591 - DNA, 25 bp, Homo sapien
taggactttgttgtagaaacagaaa

SEQ ID NO: 202592 - DNA, 25 bp, Homo sapien
gactttgttgtagaaacagaaaagc

SEQ ID NO: 202593 - DNA, 25 bp, Homo sapien
tctaggactttgttgtagaaacaga

SEQ ID NO: 202594 - DNA, 25 bp, Homo sapien
gatatatttccatgagtgcttgttg

SEQ ID NO: 202595 - DNA, 25 bp, Homo sapien
tccatgagtgcttgttggaaaaggt

SEQ ID NO: 202596 - DNA, 25 bp, Homo sapien
gagtgcttgttggaaaaggtattac

SEQ ID NO: 202597 - DNA, 25 bp, Homo sapien
tcaagttgatatatttccatgagtg

SEQ ID NO: 202598 - DNA, 25 bp, Homo sapien
taattgccagtctaatttccctttc

SEQ ID NO: 202599 - DNA, 25 bp, Homo sapien
tgaagcctgtaattgccagtctaat

SEQ ID NO: 202600 - DNA, 25 bp, Homo sapien
tgctactgtctcaccgtcagctatc

SEQ ID NO: 202601 - DNA, 25 bp, Homo sapien
ccttctgaggatgtgacacatcatt

SEQ ID NO: 202602 - DNA, 25 bp, Homo sapien
agcccagatggctggagctctttgc

SEQ ID NO: 202603 - DNA, 25 bp, Homo sapien
cacacccaggcatttcatcacagga

SEQ ID NO: 202604 - DNA, 25 bp, Homo sapien
gcagcacagtcagttccagattgaa

SEQ ID NO: 202605 - DNA, 25 bp, Homo sapien
cctgagaggaagttgtacatacaca

SEQ ID NO: 202606 - DNA, 25 bp, Homo sapien
tgcaggtgccaggagttatcctacc

SEQ ID NO: 202607 - DNA, 25 bp, Homo sapien
gataagatttgctacccaacggtcc

SEQ ID NO: 202608 - DNA, 25 bp, Homo sapien
gcaggccccagtacttggacatgct

SEQ ID NO: 202609 - DNA, 25 bp, Homo sapien
caatcttcggtgacaaaactcagaa

SEQ ID NO: 202610 - DNA, 25 bp, Homo sapien
caactcgggcttagctgagcagctc

SEQ ID NO: 202611 - DNA, 25 bp, Homo sapien
tttaaatatttatagtggtggttga

SEQ ID NO: 202612 - DNA, 25 bp, Homo sapien
atatttatagtggtggttgaaaaag

SEQ ID NO: 202613 - DNA, 25 bp, Homo sapien
tatttatagtggtggttgaaaaaga

SEQ ID NO: 202614 - DNA, 25 bp, Homo sapien
taaatatttatagtggtggttgaaa

SEQ ID NO: 202615 - DNA, 25 bp, Homo sapien
ggtactcaagccaaccatcactgta

SEQ ID NO: 202616 - DNA, 25 bp, Homo sapien
cagcctgtggatacattagaccttt

SEQ ID NO: 202617 - DNA, 25 bp, Homo sapien
ttactaataagacaacagcctgtgg

SEQ ID NO: 202618 - DNA, 25 bp, Homo sapien
ccaaacatgagttgagtgctcagaa

SEQ ID NO: 202619 - DNA, 25 bp, Homo sapien
caagacccacatagaccacaaagga

SEQ ID NO: 202620 - DNA, 25 bp, Homo sapien
gcattttcacagatcgttggtacga

SEQ ID NO: 202621 - DNA, 25 bp, Homo sapien
tctatacggagttacaatgaggaca

SEQ ID NO: 202622 - DNA, 25 bp, Homo sapien
tgctcgttcaggtgcgtggaagcta

SEQ ID NO: 202623 - DNA, 25 bp, Homo sapien
gaatacactcgtaaacaacaccagg

SEQ ID NO: 202624 - DNA, 25 bp, Homo sapien
ccttggtgactaacattacgactgc

SEQ ID NO: 202625 - DNA, 25 bp, Homo sapien
taaatccctgtatgttgacacgaga

SEQ ID NO: 202626 - DNA, 25 bp, Homo sapien
tctacatggatcacacaaaggaaac

SEQ ID NO: 202627 - DNA, 25 bp, Homo sapien
agaagaaagtagagggctcaaccct

SEQ ID NO: 202628 - DNA, 25 bp, Homo sapien
tcactttaatattgccacaaaaagg

SEQ ID NO: 202629 - DNA, 25 bp, Homo sapien
aatattgccacaaaaaggtggcaag

SEQ ID NO: 202630 - DNA, 25 bp, Homo sapien
ttgccacaaaaaggtggcaagaaga

SEQ ID NO: 202631 - DNA, 25 bp, Homo sapien
tactggcagtacgatcggcaaccaa

SEQ ID NO: 202632 - DNA, 25 bp, Homo sapien
acaagaccggacagacagacaatgc

SEQ ID NO: 202633 - DNA, 25 bp, Homo sapien
tgacaaggaataaagttcacatctg

SEQ ID NO: 202634 - DNA, 25 bp, Homo sapien
aatgtacaaacaagaccggacagac

SEQ ID NO: 202635 - DNA, 25 bp, Homo sapien
tcagctcctaatgagagtcaggaac

SEQ ID NO: 202636 - DNA, 25 bp, Homo sapien
tcccgagtctttggatcctcccgga

SEQ ID NO: 202637 - DNA, 25 bp, Homo sapien
agctcctaatgagagtcaggaactc

SEQ ID NO: 202638 - DNA, 25 bp, Homo sapien
gtctttggatcctcccggaacacac

SEQ ID NO: 202639 - DNA, 25 bp, Homo sapien
tgttcattttctgtacacctcgcat

SEQ ID NO: 202640 - DNA, 25 bp, Homo sapien
cattttctgtacacctcgcattacc

SEQ ID NO: 202641 - DNA, 25 bp, Homo sapien
tgtacacctcgcattaccatacaca

SEQ ID NO: 202642 - DNA, 25 bp, Homo sapien
acctcgcattaccatacacatgtgt

SEQ ID NO: 202643 - DNA, 25 bp, Homo sapien
tctcagctcacagttaccaagtata

SEQ ID NO: 202644 - DNA, 25 bp, Homo sapien
tatcccttcttacacaaatgttatc

SEQ ID NO: 202645 - DNA, 25 bp, Homo sapien
ccaagtatatcgaaatatcccttct

SEQ ID NO: 202646 - DNA, 25 bp, Homo sapien
gctcacagttaccaagtatatcgaa

SEQ ID NO: 202647 - DNA, 25 bp, Homo sapien
gcctaggtgttcagataaatgctca

SEQ ID NO: 202648 - DNA, 25 bp, Homo sapien
tcaggaccaagacagcactatgcta

SEQ ID NO: 202649 - DNA, 25 bp, Homo sapien
tattagaaaaactcggcttggagca

SEQ ID NO: 202650 - DNA, 25 bp, Homo sapien
tagaacagagttcacaccacgtcac

SEQ ID NO: 202651 - DNA, 25 bp, Homo sapien
tttttaaaaaatggcgattgagctg

SEQ ID NO: 202652 - DNA, 25 bp, Homo sapien
tttaaaaaatggcgattgagctggg

SEQ ID NO: 202653 - DNA, 25 bp, Homo sapien
aaaaatggcgattgagctgggcgca

SEQ ID NO: 202654 - DNA, 25 bp, Homo sapien
taaaaaatggcgattgagctgggcg

SEQ ID NO: 202655 - DNA, 25 bp, Homo sapien
gacgttactaaaggcagatgcagac

SEQ ID NO: 202656 - DNA, 25 bp, Homo sapien
catcacctggtgctacaaaatatga

SEQ ID NO: 202657 - DNA, 25 bp, Homo sapien
cagttatcatatcagttgtgtggca

SEQ ID NO: 202658 - DNA, 25 bp, Homo sapien
tcacttctagtgcaccattatgacg

SEQ ID NO: 202659 - DNA, 25 bp, Homo sapien
caaggcttccgtgattgctacagca

SEQ ID NO: 202660 - DNA, 25 bp, Homo sapien
aatttgttttgtaaggcgctcctga

SEQ ID NO: 202661 - DNA, 25 bp, Homo sapien
tccagcaggccgcaaggcttccgtg

SEQ ID NO: 202662 - DNA, 25 bp, Homo sapien
tacagcaatttgttttgtaaggcgc

SEQ ID NO: 202663 - DNA, 25 bp, Homo sapien
gatgtgataaggagctcagtttgag

SEQ ID NO: 202664 - DNA, 25 bp, Homo sapien
tgataaggagctcagtttgagagtc

SEQ ID NO: 202665 - DNA, 25 bp, Homo sapien
ttgagagtctgacacaaacagctgg

SEQ ID NO: 202666 - DNA, 25 bp, Homo sapien
cagtttgagagtctgacacaaacag

SEQ ID NO: 202667 - DNA, 25 bp, Homo sapien
cagagaggcccggattcaactccct

SEQ ID NO: 202668 - DNA, 25 bp, Homo sapien
agaggcccggattcaactccctcac

SEQ ID NO: 202669 - DNA, 25 bp, Homo sapien
agagaggcccggattcaactccctc

SEQ ID NO: 202670 - DNA, 25 bp, Homo sapien
gagaggcccggattcaactccctca

SEQ ID NO: 202671 - DNA, 25 bp, Homo sapien
aacaacacagtactggttaccaagc

SEQ ID NO: 202672 - DNA, 25 bp, Homo sapien
agtactggttaccaagcacctccat

SEQ ID NO: 202673 - DNA, 25 bp, Homo sapien
aacacagtactggttaccaagcacc

SEQ ID NO: 202674 - DNA, 25 bp, Homo sapien
cacagtactggttaccaagcacctc

SEQ ID NO: 202675 - DNA, 25 bp, Homo sapien
ggaggtaaagtagtgcagcaaataa

SEQ ID NO: 202676 - DNA, 25 bp, Homo sapien
cttgtagtcttctactatagatttc

SEQ ID NO: 202677 - DNA, 25 bp, Homo sapien
tagtcttctactatagatttctaca

SEQ ID NO: 202678 - DNA, 25 bp, Homo sapien
tgtagtcttctactatagatttcta

SEQ ID NO: 202679 - DNA, 25 bp, Homo sapien
gtagtcttctactatagatttctac

SEQ ID NO: 202680 - DNA, 25 bp, Homo sapien
aagtaccacagggagatgtagtcta

SEQ ID NO: 202681 - DNA, 25 bp, Homo sapien
catttgaagtaaaattgataagcct

SEQ ID NO: 202682 - DNA, 25 bp, Homo sapien
gatgacagaaagatacaagtaccac

SEQ ID NO: 202683 - DNA, 25 bp, Homo sapien
gacattgttgaagcaagtgggctgc

SEQ ID NO: 202684 - DNA, 25 bp, Homo sapien
gattcaacctcgctctattaaggaa

SEQ ID NO: 202685 - DNA, 25 bp, Homo sapien
tactttttggcaagtctcaaactgc

SEQ ID NO: 202686 - DNA, 25 bp, Homo sapien
gtgtggagaaacatacaccacccct

SEQ ID NO: 202687 - DNA, 25 bp, Homo sapien
cataatatcaaaaattcggctaccc

SEQ ID NO: 202688 - DNA, 25 bp, Homo sapien
gaaatatcaggaccaccatttcaca

SEQ ID NO: 202689 - DNA, 25 bp, Homo sapien
cagttgtcagattgctggagtagtt

SEQ ID NO: 202690 - DNA, 25 bp, Homo sapien
acaactgtgttaaatcccagggcct

SEQ ID NO: 202691 - DNA, 25 bp, Homo sapien
ggaacaactttagagggcagttgtc

SEQ ID NO: 202692 - DNA, 25 bp, Homo sapien
tgcttgttaggaagataaccaatat

SEQ ID NO: 202693 - DNA, 25 bp, Homo sapien
ggccaaggacttgcttgttaggaag

SEQ ID NO: 202694 - DNA, 25 bp, Homo sapien
tgttaggaagataaccaatatggac

SEQ ID NO: 202695 - DNA, 25 bp, Homo sapien
cttgttaggaagataaccaatatgg

SEQ ID NO: 202696 - DNA, 25 bp, Homo sapien
aaatggaaccaagtgatgctcacac

SEQ ID NO: 202697 - DNA, 25 bp, Homo sapien
caaatggaaccaagtgatgctcaca

SEQ ID NO: 202698 - DNA, 25 bp, Homo sapien
atcaaatatagcatcgtttaggaca

SEQ ID NO: 202699 - DNA, 25 bp, Homo sapien
ctacaggcgtctgccaccaccccag

SEQ ID NO: 202700 - DNA, 25 bp, Homo sapien
acaggcgtctgccaccaccccagct

SEQ ID NO: 202701 - DNA, 25 bp, Homo sapien
ggcgtctgccaccaccccagctaat

SEQ ID NO: 202702 - DNA, 25 bp, Homo sapien
gactacaggcgtctgccaccacccc

SEQ ID NO: 202703 - DNA, 25 bp, Homo sapien
catctgtaggtaataagaacagaac

SEQ ID NO: 202704 - DNA, 25 bp, Homo sapien
ttaatttcctgcctgttatcagcag

SEQ ID NO: 202705 - DNA, 25 bp, Homo sapien
ggaaacagggatttatggcattctg

SEQ ID NO: 202706 - DNA, 25 bp, Homo sapien
accctggaaacagggatttatggca

SEQ ID NO: 202707 - DNA, 25 bp, Homo sapien
ctgaggaagccggacacctgacgca

SEQ ID NO: 202708 - DNA, 25 bp, Homo sapien
ttagtgccgtctggagtatctggtg

SEQ ID NO: 202709 - DNA, 25 bp, Homo sapien
ccgtctggagtatctggtgatcagc

SEQ ID NO: 202710 - DNA, 25 bp, Homo sapien
aggaagccggacacctgacgcatct

SEQ ID NO: 202711 - DNA, 25 bp, Homo sapien
ccacactgacgcctgccatagacat

SEQ ID NO: 202712 - DNA, 25 bp, Homo sapien
ctgtcattggcccattccttcccca

SEQ ID NO: 202713 - DNA, 25 bp, Homo sapien
gccaggtaatagactctcctgtctc

SEQ ID NO: 202714 - DNA, 25 bp, Homo sapien
actccaggacctctttgagccaggt

SEQ ID NO: 202715 - DNA, 25 bp, Homo sapien
tgggagaagtcctggataaaattct

SEQ ID NO: 202716 - DNA, 25 bp, Homo sapien
tctttgagccaggtaatagactctc

SEQ ID NO: 202717 - DNA, 25 bp, Homo sapien
ccataagcaacagttgttgataagc

SEQ ID NO: 202718 - DNA, 25 bp, Homo sapien
aagcaacagttgttgataagcaaga

SEQ ID NO: 202719 - DNA, 25 bp, Homo sapien
gctgcttgttcacagaagtctccat

SEQ ID NO: 202720 - DNA, 25 bp, Homo sapien
ggctgcttgttcacagaagtctcca

SEQ ID NO: 202721 - DNA, 25 bp, Homo sapien
cataatctctaaaccagcatggaca

SEQ ID NO: 202722 - DNA, 25 bp, Homo sapien
gaccataatctctaaaccagcatgg

SEQ ID NO: 202723 - DNA, 25 bp, Homo sapien
ttagaccataatctctaaaccagca

SEQ ID NO: 202724 - DNA, 25 bp, Homo sapien
aatctctaaaccagcatggacacgt

SEQ ID NO: 202725 - DNA, 25 bp, Homo sapien
gtatgtctgtgtagggcacttacca

SEQ ID NO: 202726 - DNA, 25 bp, Homo sapien
gagtcagtgaatgcatggtaagtga

SEQ ID NO: 202727 - DNA, 25 bp, Homo sapien
cacggtagagcctattattcctagg

SEQ ID NO: 202728 - DNA, 25 bp, Homo sapien
agtttcatatcgcaaacactgaagg

SEQ ID NO: 202729 - DNA, 25 bp, Homo sapien
ggaagccccgactgtgccccacgca

SEQ ID NO: 202730 - DNA, 25 bp, Homo sapien
agccccgactgtgccccacgcaggg

SEQ ID NO: 202731 - DNA, 25 bp, Homo sapien
aagccccgactgtgccccacgcagg

SEQ ID NO: 202732 - DNA, 25 bp, Homo sapien
cgagttccggggctgagaggtcgct

SEQ ID NO: 202733 - DNA, 25 bp, Homo sapien
caggttagggaggttcagctcgtta

SEQ ID NO: 202734 - DNA, 25 bp, Homo sapien
gggaacccattgctgcacctggcgc

SEQ ID NO: 202735 - DNA, 25 bp, Homo sapien
agctcgttatcctcctcgctgcggg

SEQ ID NO: 202736 - DNA, 25 bp, Homo sapien
tctcgcccagcgagctcaggatgga

SEQ ID NO: 202737 - DNA, 25 bp, Homo sapien
cagccgctgccgttcgggaaggacc

SEQ ID NO: 202738 - DNA, 25 bp, Homo sapien
gccgcagccgctgccgttcgggaag

SEQ ID NO: 202739 - DNA, 25 bp, Homo sapien
cgcagccgctgccgttcgggaagga

SEQ ID NO: 202740 - DNA, 25 bp, Homo sapien
ccgccgcagccgctgccgttcggga

SEQ ID NO: 202741 - DNA, 25 bp, Homo sapien
tgcggctaaactccgccggtggccg

SEQ ID NO: 202742 - DNA, 25 bp, Homo sapien
gtctgcggctaaactccgccggtgg

SEQ ID NO: 202743 - DNA, 25 bp, Homo sapien
cttcgaggtctgcggctaaactccg

SEQ ID NO: 202744 - DNA, 25 bp, Homo sapien
cgaggtctgcggctaaactccgccg

SEQ ID NO: 202745 - DNA, 25 bp, Homo sapien
gaaggtacgcaacctgcttagatca

SEQ ID NO: 202746 - DNA, 25 bp, Homo sapien
tacgcaacctgcttagatcacactc

SEQ ID NO: 202747 - DNA, 25 bp, Homo sapien
ctgaggaaggtacgcaacctgctta

SEQ ID NO: 202748 - DNA, 25 bp, Homo sapien
ctgcttagatcacactccgagccgg

SEQ ID NO: 202749 - DNA, 25 bp, Homo sapien
cctccacttattgcggaatgagccg

SEQ ID NO: 202750 - DNA, 25 bp, Homo sapien
aaagacgcggtctgggcgcccagtc

SEQ ID NO: 202751 - DNA, 25 bp, Homo sapien
ttcaggccaagagggcgctgcattg

SEQ ID NO: 202752 - DNA, 25 bp, Homo sapien
tgagccgaacccgaaaagaggcagt

SEQ ID NO: 202753 - DNA, 25 bp, Homo sapien
caagggtctaacctgacattttctt

SEQ ID NO: 202754 - DNA, 25 bp, Homo sapien
ccacacaagggtctaacctgacatt

SEQ ID NO: 202755 - DNA, 25 bp, Homo sapien
tgttgataatcaagagagagacctg

SEQ ID NO: 202756 - DNA, 25 bp, Homo sapien
ttgataatcaagagagagacctggg

SEQ ID NO: 202757 - DNA, 25 bp, Homo sapien
ctccactagacccttgatcatccct

SEQ ID NO: 202758 - DNA, 25 bp, Homo sapien
tccactagacccttgatcatccctc

SEQ ID NO: 202759 - DNA, 25 bp, Homo sapien
ccactagacccttgatcatccctca

SEQ ID NO: 202760 - DNA, 25 bp, Homo sapien
cactagacccttgatcatccctcat

SEQ ID NO: 202761 - DNA, 25 bp, Homo sapien
ttctttggagtaattatggcattgt

SEQ ID NO: 202762 - DNA, 25 bp, Homo sapien
tttctttggagtaattatggcattg

SEQ ID NO: 202763 - DNA, 25 bp, Homo sapien
tttattcttagggtacatgctggga

SEQ ID NO: 202764 - DNA, 25 bp, Homo sapien
tccaaagggactacctggcatctgt

SEQ ID NO: 202765 - DNA, 25 bp, Homo sapien
gctgcacagatatgagaggctttag

SEQ ID NO: 202766 - DNA, 25 bp, Homo sapien
gaggctttagatcatagcacagtcc

SEQ ID NO: 202767 - DNA, 25 bp, Homo sapien
gataatcagagtatcccaccaagag

SEQ ID NO: 202768 - DNA, 25 bp, Homo sapien
tagagaagcgggtctccgaacctag

SEQ ID NO: 202769 - DNA, 25 bp, Homo sapien
cacacttggaaagaggactattgtc

SEQ ID NO: 202770 - DNA, 25 bp, Homo sapien
gaaggctagaatttgggtcaccggc

SEQ ID NO: 202771 - DNA, 25 bp, Homo sapien
tgagtttcccaaagactcgagtcta

SEQ ID NO: 202772 - DNA, 25 bp, Homo sapien
catttggaggcagagtaatctgcaa

SEQ ID NO: 202773 - DNA, 25 bp, Homo sapien
caaattcaaattggttggagcttca

SEQ ID NO: 202774 - DNA, 25 bp, Homo sapien
ggagcttcaactcagtaattacaat

SEQ ID NO: 202775 - DNA, 25 bp, Homo sapien
cactttcatcaaccacacgttttcg

SEQ ID NO: 202776 - DNA, 25 bp, Homo sapien
cttaaatgcaaaagctgatagtttc

SEQ ID NO: 202777 - DNA, 25 bp, Homo sapien
tttcgcttctttgcttcagttcctt

SEQ ID NO: 202778 - DNA, 25 bp, Homo sapien
acacgttttcgcttctttgcttcag

SEQ ID NO: 202779 - DNA, 25 bp, Homo sapien
caatactctaaatcgaatcattcct

SEQ ID NO: 202780 - DNA, 25 bp, Homo sapien
ccacatctggaacccggtctttggc

SEQ ID NO: 202781 - DNA, 25 bp, Homo sapien
ggattgtcagacaaaatattacttc

SEQ ID NO: 202782 - DNA, 25 bp, Homo sapien
tcttcagttgacaatactctaaatc

SEQ ID NO: 202783 - DNA, 25 bp, Homo sapien
aaagtgcctcatgattttaagttag

SEQ ID NO: 202784 - DNA, 25 bp, Homo sapien
taatcaaccataagtctctgacatc

SEQ ID NO: 202785 - DNA, 25 bp, Homo sapien
ttaagttagtaatcaaccataagtc

SEQ ID NO: 202786 - DNA, 25 bp, Homo sapien
aagacagagtttaaagtgcctcatg

SEQ ID NO: 202787 - DNA, 25 bp, Homo sapien
tttctggaaataggatgctgcagat

SEQ ID NO: 202788 - DNA, 25 bp, Homo sapien
cctcagttttattagtttgagaatt

SEQ ID NO: 202789 - DNA, 25 bp, Homo sapien
ttcagtgttttgaggaggacatata

SEQ ID NO: 202790 - DNA, 25 bp, Homo sapien
aggaggacatatagctggggtttca

SEQ ID NO: 202791 - DNA, 25 bp, Homo sapien
ctgcttaggcttcggctttggaatc

SEQ ID NO: 202792 - DNA, 25 bp, Homo sapien
tgtagttcgactaagtgcagtggat

SEQ ID NO: 202793 - DNA, 25 bp, Homo sapien
tcagaggctttataatgggagactt

SEQ ID NO: 202794 - DNA, 25 bp, Homo sapien
cattgacatggctggttctttggaa

SEQ ID NO: 202795 - DNA, 25 bp, Homo sapien
aaagggatttactcgtccttggctg

SEQ ID NO: 202796 - DNA, 25 bp, Homo sapien
actcgtccttggctgctaaaggtaa

SEQ ID NO: 202797 - DNA, 25 bp, Homo sapien
gggatttactcgtccttggctgcta

SEQ ID NO: 202798 - DNA, 25 bp, Homo sapien
tttactcgtccttggctgctaaagg

SEQ ID NO: 202799 - DNA, 25 bp, Homo sapien
ctgaaacatcagaggaatttgtact

SEQ ID NO: 202800 - DNA, 25 bp, Homo sapien
tgaaacatcagaggaatttgtactt

SEQ ID NO: 202801 - DNA, 25 bp, Homo sapien
gctgaaacatcagaggaatttgtac

SEQ ID NO: 202802 - DNA, 25 bp, Homo sapien
agctgaaacatcagaggaatttgta

SEQ ID NO: 202803 - DNA, 25 bp, Homo sapien
caggcttatgtatttctggtttttc

SEQ ID NO: 202804 - DNA, 25 bp, Homo sapien
gcattcagcttttttctgaaatctt

SEQ ID NO: 202805 - DNA, 25 bp, Homo sapien
cattcagcttttttctgaaatcttc

SEQ ID NO: 202806 - DNA, 25 bp, Homo sapien
ccagcattcagcttttttctgaaat

SEQ ID NO: 202807 - DNA, 25 bp, Homo sapien
cagcattcagcttttttctgaaatc

SEQ ID NO: 202808 - DNA, 25 bp, Homo sapien
ggaattctcgctccagtttacaaga

SEQ ID NO: 202809 - DNA, 25 bp, Homo sapien
gagccagtattaatttccgagagcg

SEQ ID NO: 202810 - DNA, 25 bp, Homo sapien
tgggttgctgtcaattcggctgcct

SEQ ID NO: 202811 - DNA, 25 bp, Homo sapien
gagtcattagatcagcaagttccac

SEQ ID NO: 202812 - DNA, 25 bp, Homo sapien
aatcaaggtggttgtgaaatataac

SEQ ID NO: 202813 - DNA, 25 bp, Homo sapien
tttagctaaataatcaaggtggttg

SEQ ID NO: 202814 - DNA, 25 bp, Homo sapien
tggttgtgaaatataactgaacgcc

SEQ ID NO: 202815 - DNA, 25 bp, Homo sapien
tgtgaaatataactgaacgccaaaa

SEQ ID NO: 202816 - DNA, 25 bp, Homo sapien
gcttaaaggataatatagcaacagc

SEQ ID NO: 202817 - DNA, 25 bp, Homo sapien
taatatagcaacagcagggcgtgga

SEQ ID NO: 202818 - DNA, 25 bp, Homo sapien
ctctgttgcaatctgacagtaagga

SEQ ID NO: 202819 - DNA, 25 bp, Homo sapien
tctgacagtaaggaagcttaaagga

SEQ ID NO: 202820 - DNA, 25 bp, Homo sapien
ggtagagagcaaattagactgtaac

SEQ ID NO: 202821 - DNA, 25 bp, Homo sapien
gcaaattagactgtaacacagcaaa

SEQ ID NO: 202822 - DNA, 25 bp, Homo sapien
agttttcaagcacattaaataactc

SEQ ID NO: 202823 - DNA, 25 bp, Homo sapien
gaaggtctctgttggtagagagcaa

SEQ ID NO: 202824 - DNA, 25 bp, Homo sapien
tcaactttagacttcttttaatagc

SEQ ID NO: 202825 - DNA, 25 bp, Homo sapien
tccttctgaatccacgtaacaaggg

SEQ ID NO: 202826 - DNA, 25 bp, Homo sapien
taggagtccacgtattaccaagtcc

SEQ ID NO: 202827 - DNA, 25 bp, Homo sapien
taccaaccacccagtagtgatcaga

SEQ ID NO: 202828 - DNA, 25 bp, Homo sapien
aagtcctctgttaagcattcgaaca

SEQ ID NO: 202829 - DNA, 25 bp, Homo sapien
aaaacattggatttgatatgactaa

SEQ ID NO: 202830 - DNA, 25 bp, Homo sapien
taccaaggattcaactttgctttca

SEQ ID NO: 202831 - DNA, 25 bp, Homo sapien
aacagaagcaaataatctaagatta

SEQ ID NO: 202832 - DNA, 25 bp, Homo sapien
cattaaccatataaagtaagaccta

SEQ ID NO: 202833 - DNA, 25 bp, Homo sapien
gtgtacccaggctggagggcagtgg

SEQ ID NO: 202834 - DNA, 25 bp, Homo sapien
agatggagtcttgctgtgtacccag

SEQ ID NO: 202835 - DNA, 25 bp, Homo sapien
gtaggatttccttgtaagaggaaga

SEQ ID NO: 202836 - DNA, 25 bp, Homo sapien
aggatttccttgtaagaggaagagg

SEQ ID NO: 202837 - DNA, 25 bp, Homo sapien
tttccttgtaagaggaagagggtca

SEQ ID NO: 202838 - DNA, 25 bp, Homo sapien
ttccttgtaagaggaagagggtcac

SEQ ID NO: 202839 - DNA, 25 bp, Homo sapien
tccaaggcactgatccccatcaaat

SEQ ID NO: 202840 - DNA, 25 bp, Homo sapien
cccagctctagcagttgaactccaa

SEQ ID NO: 202841 - DNA, 25 bp, Homo sapien
gcactgatccccatcaaatcctgta

SEQ ID NO: 202842 - DNA, 25 bp, Homo sapien
tagcagttgaactccaaggcactga

SEQ ID NO: 202843 - DNA, 25 bp, Homo sapien
tagtaaacaatcgaagaagcagggc

SEQ ID NO: 202844 - DNA, 25 bp, Homo sapien
tgccattgacaccacaggtccagca

SEQ ID NO: 202845 - DNA, 25 bp, Homo sapien
tccttgaccgagacatatggcttca

SEQ ID NO: 202846 - DNA, 25 bp, Homo sapien
cattctgaggcaagtctattatcca

SEQ ID NO: 202847 - DNA, 25 bp, Homo sapien
gcttcgtgggaaagatctgctattg

SEQ ID NO: 202848 - DNA, 25 bp, Homo sapien
cacatctatggcattgtcttgctca

SEQ ID NO: 202849 - DNA, 25 bp, Homo sapien
gaataattccaatagagttccacac

SEQ ID NO: 202850 - DNA, 25 bp, Homo sapien
catgccaacaaaatagcttcgtggg

SEQ ID NO: 202851 - DNA, 25 bp, Homo sapien
agaacctgactgaaatggcttttgc

SEQ ID NO: 202852 - DNA, 25 bp, Homo sapien
gggagttggcatgggtccatcataa

SEQ ID NO: 202853 - DNA, 25 bp, Homo sapien
tggcatgggtccatcataaaatggc

SEQ ID NO: 202854 - DNA, 25 bp, Homo sapien
tctgtgagtgagatgcaacggtgta

SEQ ID NO: 202855 - DNA, 25 bp, Homo sapien
caagtggtagattgtgaatgctgcc

SEQ ID NO: 202856 - DNA, 25 bp, Homo sapien
tttgggatgttacaagtggtagatt

SEQ ID NO: 202857 - DNA, 25 bp, Homo sapien
cctcctctttgagaagactagaacc

SEQ ID NO: 202858 - DNA, 25 bp, Homo sapien
tgagaagactagaaccagtttttag

SEQ ID NO: 202859 - DNA, 25 bp, Homo sapien
ccagcattactcatatcatctccat

SEQ ID NO: 202860 - DNA, 25 bp, Homo sapien
taggacgacctgaagccatcatgag

SEQ ID NO: 202861 - DNA, 25 bp, Homo sapien
taggatgtgacttcgctgtctagga

SEQ ID NO: 202862 - DNA, 25 bp, Homo sapien
gaagggatctcaactgcattgtcat

SEQ ID NO: 202863 - DNA, 25 bp, Homo sapien
gaccacaagtaggatgccatgccag

SEQ ID NO: 202864 - DNA, 25 bp, Homo sapien
agccctagatttccttccgcatcag

SEQ ID NO: 202865 - DNA, 25 bp, Homo sapien
aaacattctctagaagccctagatt

SEQ ID NO: 202866 - DNA, 25 bp, Homo sapien
tccgcatcagtatacgatattcgac

SEQ ID NO: 202867 - DNA, 25 bp, Homo sapien
tactacctgcagctaaatattgccc

SEQ ID NO: 202868 - DNA, 25 bp, Homo sapien
tccaaactatgattagaccattaat

SEQ ID NO: 202869 - DNA, 25 bp, Homo sapien
cagggagaccaggttactatattga

SEQ ID NO: 202870 - DNA, 25 bp, Homo sapien
taaatattgcccacagggagaccag

SEQ ID NO: 202871 - DNA, 25 bp, Homo sapien
aattgatgactccaagattctcttc

SEQ ID NO: 202872 - DNA, 25 bp, Homo sapien
gatttttccacaggaattgccagta

SEQ ID NO: 202873 - DNA, 25 bp, Homo sapien
agatttttccacaggaattgccagt

SEQ ID NO: 202874 - DNA, 25 bp, Homo sapien
aagatcaaattgatgactccaagat

SEQ ID NO: 202875 - DNA, 25 bp, Homo sapien
tccagttttcaggagggaactgcta

SEQ ID NO: 202876 - DNA, 25 bp, Homo sapien
tggttgttcctatgcattcagtggt

SEQ ID NO: 202877 - DNA, 25 bp, Homo sapien
gtggggagccgcagaccagtcttct

SEQ ID NO: 202878 - DNA, 25 bp, Homo sapien
cagcttaagatcactcagtggttgt

SEQ ID NO: 202879 - DNA, 25 bp, Homo sapien
gttgaggagcaccgaactcaggagc

SEQ ID NO: 202880 - DNA, 25 bp, Homo sapien
tcaggttgaggagcaccgaactcag

SEQ ID NO: 202881 - DNA, 25 bp, Homo sapien
ctcccacaggaaatggtgccacaca

SEQ ID NO: 202882 - DNA, 25 bp, Homo sapien
aggaaatggtgccacacatgcgaac

SEQ ID NO: 202883 - DNA, 25 bp, Homo sapien
ccacaggaaatggtgccacacatgc

SEQ ID NO: 202884 - DNA, 25 bp, Homo sapien
acaggaaatggtgccacacatgcga

SEQ ID NO: 202885 - DNA, 25 bp, Homo sapien
tgctgttgcatgggatggtagtgtc

SEQ ID NO: 202886 - DNA, 25 bp, Homo sapien
ttcctggatcggcatccaccacatc

SEQ ID NO: 202887 - DNA, 25 bp, Homo sapien
ctgttgcatgggatggtagtgtcca

SEQ ID NO: 202888 - DNA, 25 bp, Homo sapien
cccttgctgttgcatgggatggtag

SEQ ID NO: 202889 - DNA, 25 bp, Homo sapien
gacacagagcaatggtaggtacgtt

SEQ ID NO: 202890 - DNA, 25 bp, Homo sapien
aggtacgttaacataagatgcctct

SEQ ID NO: 202891 - DNA, 25 bp, Homo sapien
ggtacgttaacataagatgcctctg

SEQ ID NO: 202892 - DNA, 25 bp, Homo sapien
tgtgacacagagcaatggtaggtac

SEQ ID NO: 202893 - DNA, 25 bp, Homo sapien
atcagcactgggattagtcaccata

SEQ ID NO: 202894 - DNA, 25 bp, Homo sapien
cactgggattagtcaccataagaag

SEQ ID NO: 202895 - DNA, 25 bp, Homo sapien
tgggattagtcaccataagaagctg

SEQ ID NO: 202896 - DNA, 25 bp, Homo sapien
attagtcaccataagaagctgtggc

SEQ ID NO: 202897 - DNA, 25 bp, Homo sapien
aagcagccagcaactggagtgactc

SEQ ID NO: 202898 - DNA, 25 bp, Homo sapien
gcagccagcaactggagtgactcca

SEQ ID NO: 202899 - DNA, 25 bp, Homo sapien
tgaagcagccagcaactggagtgac

SEQ ID NO: 202900 - DNA, 25 bp, Homo sapien
gtgaagcagccagcaactggagtga

SEQ ID NO: 202901 - DNA, 25 bp, Homo sapien
tatgacactgacattgaaagagttt

SEQ ID NO: 202902 - DNA, 25 bp, Homo sapien
tgaaagagttttcaacagcaacaat

SEQ ID NO: 202903 - DNA, 25 bp, Homo sapien
cactgacattgaaagagttttcaac

SEQ ID NO: 202904 - DNA, 25 bp, Homo sapien
acaatggcacaagctcccaggagaa

SEQ ID NO: 202905 - DNA, 25 bp, Homo sapien
aagacaaagctggtgctacctaagt

SEQ ID NO: 202906 - DNA, 25 bp, Homo sapien
ctacctaagtgggttcctcctgcaa

SEQ ID NO: 202907 - DNA, 25 bp, Homo sapien
ctggaagacaaagctggtgctacct

SEQ ID NO: 202908 - DNA, 25 bp, Homo sapien
ggaagacaaagctggtgctacctaa

SEQ ID NO: 202909 - DNA, 25 bp, Homo sapien
gggaatccagaacaacatcataagg

SEQ ID NO: 202910 - DNA, 25 bp, Homo sapien
cctttaagttacgatgggaatccag

SEQ ID NO: 202911 - DNA, 25 bp, Homo sapien
ttacgatgggaatccagaacaacat

SEQ ID NO: 202912 - DNA, 25 bp, Homo sapien
ggaatccagaacaacatcataagga

SEQ ID NO: 202913 - DNA, 25 bp, Homo sapien
caagcaagtctgcagattgattttg

SEQ ID NO: 202914 - DNA, 25 bp, Homo sapien
catttttgtagcagtggccaactaa

SEQ ID NO: 202915 - DNA, 25 bp, Homo sapien
ttttgcatttatcacatcgttgcat

SEQ ID NO: 202916 - DNA, 25 bp, Homo sapien
gcagtggccaactaatagcacatgt

SEQ ID NO: 202917 - DNA, 25 bp, Homo sapien
aatttgccacactctgacagatcca

SEQ ID NO: 202918 - DNA, 25 bp, Homo sapien
tctgacagatccatcacaactagct

SEQ ID NO: 202919 - DNA, 25 bp, Homo sapien
ctgaaatttgccacactctgacaga

SEQ ID NO: 202920 - DNA, 25 bp, Homo sapien
actctgacagatccatcacaactag

SEQ ID NO: 202921 - DNA, 25 bp, Homo sapien
tttctctatagtcatagccataata

SEQ ID NO: 202922 - DNA, 25 bp, Homo sapien
catttctctatagtcatagccataa

SEQ ID NO: 202923 - DNA, 25 bp, Homo sapien
atttctctatagtcatagccataat

SEQ ID NO: 202924 - DNA, 25 bp, Homo sapien
cagaaagatgtccttaggatcaaag

SEQ ID NO: 202925 - DNA, 25 bp, Homo sapien
gggcatcatgtcctcgaaatgtttt

SEQ ID NO: 202926 - DNA, 25 bp, Homo sapien
tttctgttggctgctatccatcaca

SEQ ID NO: 202927 - DNA, 25 bp, Homo sapien
ggctgctatccatcacatccacaat

SEQ ID NO: 202928 - DNA, 25 bp, Homo sapien
tgaagcgagtcaatataccatctgg

SEQ ID NO: 202929 - DNA, 25 bp, Homo sapien
gcagcaattttagtaccatccccat

SEQ ID NO: 202930 - DNA, 25 bp, Homo sapien
ccttcaggaaatgtgtggacttgaa

SEQ ID NO: 202931 - DNA, 25 bp, Homo sapien
accacatggtttgcatttgtagtga

SEQ ID NO: 202932 - DNA, 25 bp, Homo sapien
ttctccaacattaatgaacttagga

SEQ ID NO: 202933 - DNA, 25 bp, Homo sapien
attaatgaacttaggatcatcatca

SEQ ID NO: 202934 - DNA, 25 bp, Homo sapien
tccaacattaatgaacttaggatca

SEQ ID NO: 202935 - DNA, 25 bp, Homo sapien
caacattaatgaacttaggatcatc

SEQ ID NO: 202936 - DNA, 25 bp, Homo sapien
tcattggcttccgtgtggcaggcat

SEQ ID NO: 202937 - DNA, 25 bp, Homo sapien
agaatcatcaaaacagacctccgtg

SEQ ID NO: 202938 - DNA, 25 bp, Homo sapien
tctgtatgcccatatctcattggct

SEQ ID NO: 202939 - DNA, 25 bp, Homo sapien
agacctccgtgtgtccctctgtatg

SEQ ID NO: 202940 - DNA, 25 bp, Homo sapien
ctagggataggaagagagcttagtc

SEQ ID NO: 202941 - DNA, 25 bp, Homo sapien
gaaaagcagcgaggctagggatagg

SEQ ID NO: 202942 - DNA, 25 bp, Homo sapien
ttagtctcctctagggcccgttctc

SEQ ID NO: 202943 - DNA, 25 bp, Homo sapien
ttataaaagccagtcttattatttc

SEQ ID NO: 202944 - DNA, 25 bp, Homo sapien
ccgagtgacaccagcgggataaggc

SEQ ID NO: 202945 - DNA, 25 bp, Homo sapien
agtgacaccagcgggataaggcaga

SEQ ID NO: 202946 - DNA, 25 bp, Homo sapien
tgacaccagcgggataaggcagagg

SEQ ID NO: 202947 - DNA, 25 bp, Homo sapien
acaccagcgggataaggcagagggt

SEQ ID NO: 202948 - DNA, 25 bp, Homo sapien
cgcatctccttggtggacgcgggca

SEQ ID NO: 202949 - DNA, 25 bp, Homo sapien
caataagccggaaagggaacacgca

SEQ ID NO: 202950 - DNA, 25 bp, Homo sapien
ctgtcagacaataagccggaaaggg

SEQ ID NO: 202951 - DNA, 25 bp, Homo sapien
cggaaagggaacacgcatctccttg

SEQ ID NO: 202952 - DNA, 25 bp, Homo sapien
accccagttaagctgcgctccggga

SEQ ID NO: 202953 - DNA, 25 bp, Homo sapien
cgcgtggaaattagccggttgcccg

SEQ ID NO: 202954 - DNA, 25 bp, Homo sapien
taagacctacacgaggtgcaggagt

SEQ ID NO: 202955 - DNA, 25 bp, Homo sapien
gatggcagcagttactcgcacaacc

SEQ ID NO: 202956 - DNA, 25 bp, Homo sapien
gatccacgcaatagagagcttcctt

SEQ ID NO: 202957 - DNA, 25 bp, Homo sapien
tatcatttattcatgagccaaagcc

SEQ ID NO: 202958 - DNA, 25 bp, Homo sapien
tgagccaaagccattaagaagataa

SEQ ID NO: 202959 - DNA, 25 bp, Homo sapien
gactcctatcggtatacaaattcca

SEQ ID NO: 202960 - DNA, 25 bp, Homo sapien
aaagctattactctcatcagtcagg

SEQ ID NO: 202961 - DNA, 25 bp, Homo sapien
ttaatggcctactagaaatgagcag

SEQ ID NO: 202962 - DNA, 25 bp, Homo sapien
tgttaggtaatgtaatgcccaagtg

SEQ ID NO: 202963 - DNA, 25 bp, Homo sapien
gccatggtgtaaaactcaaggaggt

SEQ ID NO: 202964 - DNA, 25 bp, Homo sapien
tttccgccgggaagccgtgaacatc

SEQ ID NO: 202965 - DNA, 25 bp, Homo sapien
aagacaagttagcaatttccgccgg

SEQ ID NO: 202966 - DNA, 25 bp, Homo sapien
tcggaactccggaaactctgggagc

SEQ ID NO: 202967 - DNA, 25 bp, Homo sapien
gcagccactggcgtttcctccgagt

SEQ ID NO: 202968 - DNA, 25 bp, Homo sapien
accgaggtgcatcgagtcacgtcca

SEQ ID NO: 202969 - DNA, 25 bp, Homo sapien
ctgcttcggtactagtgggagtcgt

SEQ ID NO: 202970 - DNA, 25 bp, Homo sapien
tcacgtccagtgctcgggccgtggt

SEQ ID NO: 202971 - DNA, 25 bp, Homo sapien
tggtcgcctgcctggcaccaggact

SEQ ID NO: 202972 - DNA, 25 bp, Homo sapien
taaccgtcaaaaggattcatgtccg

SEQ ID NO: 202973 - DNA, 25 bp, Homo sapien
gatttttaccctaacagccatgaga

SEQ ID NO: 202974 - DNA, 25 bp, Homo sapien
gaaggctgtctgaaatatccatgaa

SEQ ID NO: 202975 - DNA, 25 bp, Homo sapien
catgtccgggtttcatcactgtgta

SEQ ID NO: 202976 - DNA, 25 bp, Homo sapien
tcgaggacctgctatagactaaaat

SEQ ID NO: 202977 - DNA, 25 bp, Homo sapien
cataaagatgggagaatgagccagc

SEQ ID NO: 202978 - DNA, 25 bp, Homo sapien
actgggccgcgtagacacatccatt

SEQ ID NO: 202979 - DNA, 25 bp, Homo sapien
aaaaccctgtcccatatatgaacga

SEQ ID NO: 202980 - DNA, 25 bp, Homo sapien
gaaaaagatgtgctactgagtaata

SEQ ID NO: 202981 - DNA, 25 bp, Homo sapien
tatgaaagctagtctgcttagtatc

SEQ ID NO: 202982 - DNA, 25 bp, Homo sapien
agtgagagaaaaagatgtgctactg

SEQ ID NO: 202983 - DNA, 25 bp, Homo sapien
tagtatcttacaaagcagtgagaga

SEQ ID NO: 202984 - DNA, 25 bp, Homo sapien
tgttccagttggcagatgcactacc

SEQ ID NO: 202985 - DNA, 25 bp, Homo sapien
aataatccgagtgctccatcttcag

SEQ ID NO: 202986 - DNA, 25 bp, Homo sapien
tgccttttggaccagcaccaacagg

SEQ ID NO: 202987 - DNA, 25 bp, Homo sapien
tgctgtgagcaatacaaaacctggc

SEQ ID NO: 202988 - DNA, 25 bp, Homo sapien
gcaagagtgcagtctctcggctcgc

SEQ ID NO: 202989 - DNA, 25 bp, Homo sapien
caagcagttctcgagctcaagatta

SEQ ID NO: 202990 - DNA, 25 bp, Homo sapien
tcccctgtgaggtaagccaaacgag

SEQ ID NO: 202991 - DNA, 25 bp, Homo sapien
gccaaacgagtatccaaacgcagag

SEQ ID NO: 202992 - DNA, 25 bp, Homo sapien
gtcattgggtcatacagcactaaag

SEQ ID NO: 202993 - DNA, 25 bp, Homo sapien
tccctgatgtggtaaactggcacac

SEQ ID NO: 202994 - DNA, 25 bp, Homo sapien
cttagatttggagtagacctgacct

SEQ ID NO: 202995 - DNA, 25 bp, Homo sapien
tagggaaccttaagtcatgcagaca

SEQ ID NO: 202996 - DNA, 25 bp, Homo sapien
aatggggaacagcatcaagaaaggc

SEQ ID NO: 202997 - DNA, 25 bp, Homo sapien
gaaaagcaggcgttttagtggagaa

SEQ ID NO: 202998 - DNA, 25 bp, Homo sapien
cttgttggcattctgggccaaaata

SEQ ID NO: 202999 - DNA, 25 bp, Homo sapien
ttcggtgtggagttaagaaaagcag

SEQ ID NO: 203000 - DNA, 25 bp, Homo sapien
caagacatgctaggctgaaactgat

SEQ ID NO: 203001 - DNA, 25 bp, Homo sapien
tctcaagaatcaagtggagcacttc

SEQ ID NO: 203002 - DNA, 25 bp, Homo sapien
tgaagacaccatttacagctctgac

SEQ ID NO: 203003 - DNA, 25 bp, Homo sapien
tagaccttaggtcgtcattcacacc

SEQ ID NO: 203004 - DNA, 25 bp, Homo sapien
caagattgtagtgttgatcagcgca

SEQ ID NO: 203005 - DNA, 25 bp, Homo sapien
aaattgtaaccagcctttgggcatc

SEQ ID NO: 203006 - DNA, 25 bp, Homo sapien
tcaagtgtgcaaagtaacaggatag

SEQ ID NO: 203007 - DNA, 25 bp, Homo sapien
gatcagcagatactgacttgttgcc

SEQ ID NO: 203008 - DNA, 25 bp, Homo sapien
cttgtgcgaactaggaaaagcagct

SEQ ID NO: 203009 - DNA, 25 bp, Homo sapien
gggtaataagtctccaccttcgatg

SEQ ID NO: 203010 - DNA, 25 bp, Homo sapien
tggaatgaagaggacttgtgcgaac

SEQ ID NO: 203011 - DNA, 25 bp, Homo sapien
gcataagatttctcgtctgaaaggg

SEQ ID NO: 203012 - DNA, 25 bp, Homo sapien
tcaactttttggtgcttgaggtgca

SEQ ID NO: 203013 - DNA, 25 bp, Homo sapien
gtgcttgaggtgcatttttgaatac

SEQ ID NO: 203014 - DNA, 25 bp, Homo sapien
tagtggccgggtaagagttgtcaac

SEQ ID NO: 203015 - DNA, 25 bp, Homo sapien
catttcagaaatatctagtggccgg

SEQ ID NO: 203016 - DNA, 25 bp, Homo sapien
tcttaacattctggcagtcactgcc

SEQ ID NO: 203017 - DNA, 25 bp, Homo sapien
tctgcagcaccggtcatcttaacat

SEQ ID NO: 203018 - DNA, 25 bp, Homo sapien
ggtcatcttaacattctggcagtca

SEQ ID NO: 203019 - DNA, 25 bp, Homo sapien
agcaccggtcatcttaacattctgg

SEQ ID NO: 203020 - DNA, 25 bp, Homo sapien
tctcagcacactattatgctgcagc

SEQ ID NO: 203021 - DNA, 25 bp, Homo sapien
taaagacacgtgttctcagcacact

SEQ ID NO: 203022 - DNA, 25 bp, Homo sapien
tggcaaaattttgcacatccacaat

SEQ ID NO: 203023 - DNA, 25 bp, Homo sapien
ccacaatttaaagacacgtgttctc

SEQ ID NO: 203024 - DNA, 25 bp, Homo sapien
ttatccgcactgacgtcagccacat

SEQ ID NO: 203025 - DNA, 25 bp, Homo sapien
aacagctttcatgagttatccgcac

SEQ ID NO: 203026 - DNA, 25 bp, Homo sapien
agctttcatgagttatccgcactga

SEQ ID NO: 203027 - DNA, 25 bp, Homo sapien
gttatccgcactgacgtcagccaca

SEQ ID NO: 203028 - DNA, 25 bp, Homo sapien
tgaacacgacttgcttcttggctgc

SEQ ID NO: 203029 - DNA, 25 bp, Homo sapien
tgtgaacacgacttgcttcttggct

SEQ ID NO: 203030 - DNA, 25 bp, Homo sapien
gaacacgacttgcttcttggctgcc

SEQ ID NO: 203031 - DNA, 25 bp, Homo sapien
gtgaacacgacttgcttcttggctg

SEQ ID NO: 203032 - DNA, 25 bp, Homo sapien
actttctgaagggttgtgagagcag

SEQ ID NO: 203033 - DNA, 25 bp, Homo sapien
gaagggttgtgagagcagctcaaca

SEQ ID NO: 203034 - DNA, 25 bp, Homo sapien
aagactttctgaagggttgtgagag

SEQ ID NO: 203035 - DNA, 25 bp, Homo sapien
tctgaagggttgtgagagcagctca

SEQ ID NO: 203036 - DNA, 25 bp, Homo sapien
gaaacttgtttatctccaagggaga

SEQ ID NO: 203037 - DNA, 25 bp, Homo sapien
ggaatactatctccatagcaggtaa

SEQ ID NO: 203038 - DNA, 25 bp, Homo sapien
cagagacagaacgagcactgggtgc

SEQ ID NO: 203039 - DNA, 25 bp, Homo sapien
tccaggaatcagttacccagctctg

SEQ ID NO: 203040 - DNA, 25 bp, Homo sapien
agccgctgtctggttgctgatccca

SEQ ID NO: 203041 - DNA, 25 bp, Homo sapien
catgacccggctttgcaaagactgc

SEQ ID NO: 203042 - DNA, 25 bp, Homo sapien
gcgcgaatgagttcttccaccggga

SEQ ID NO: 203043 - DNA, 25 bp, Homo sapien
ggccccttttgagcatcagctgagg

SEQ ID NO: 203044 - DNA, 25 bp, Homo sapien
tgcttttggagccttgacatgggaa

SEQ ID NO: 203045 - DNA, 25 bp, Homo sapien
tgggtttgaattcctacagcacaca

SEQ ID NO: 203046 - DNA, 25 bp, Homo sapien
gaggcttagctccaacagcaccttt

SEQ ID NO: 203047 - DNA, 25 bp, Homo sapien
taggaagaactcacccatgcctcag

SEQ ID NO: 203048 - DNA, 25 bp, Homo sapien
ggcttatcctggacaggcacctcca

SEQ ID NO: 203049 - DNA, 25 bp, Homo sapien
acctccaggcgcctaccctggagca

SEQ ID NO: 203050 - DNA, 25 bp, Homo sapien
caggggcttcctatcctggggccta

SEQ ID NO: 203051 - DNA, 25 bp, Homo sapien
ctggaaacccaaaccctcaaggatg

SEQ ID NO: 203052 - DNA, 25 bp, Homo sapien
ttagatttccaaagagggaatgatg

SEQ ID NO: 203053 - DNA, 25 bp, Homo sapien
ctttaacccacgcttcaatgagaac

SEQ ID NO: 203054 - DNA, 25 bp, Homo sapien
tgtttgcaatacaaagctggataat

SEQ ID NO: 203055 - DNA, 25 bp, Homo sapien
aacaacaggagagtcattgtttgca

SEQ ID NO: 203056 - DNA, 25 bp, Homo sapien
taagtttttatgcaggcaaatcttt

SEQ ID NO: 203057 - DNA, 25 bp, Homo sapien
aatctttagcctccacctttatggc

SEQ ID NO: 203058 - DNA, 25 bp, Homo sapien
tgtatgccacccacgtgtggctaat

SEQ ID NO: 203059 - DNA, 25 bp, Homo sapien
cctttatggcttcacttatgtatcc

SEQ ID NO: 203060 - DNA, 25 bp, Homo sapien
ttgtcacaggttgggtctcccagga

SEQ ID NO: 203061 - DNA, 25 bp, Homo sapien
tcaagaagcttgtgagggagtgtac

SEQ ID NO: 203062 - DNA, 25 bp, Homo sapien
aagcagagagattagatctcaagaa

SEQ ID NO: 203063 - DNA, 25 bp, Homo sapien
gagattagatctcaagaagcttgtg

SEQ ID NO: 203064 - DNA, 25 bp, Homo sapien
gaggagaagccgacatcaaggataa

SEQ ID NO: 203065 - DNA, 25 bp, Homo sapien
aaagacccagccatagaggagaagc

SEQ ID NO: 203066 - DNA, 25 bp, Homo sapien
gaacagctgtaagttttcgaaacaa

SEQ ID NO: 203067 - DNA, 25 bp, Homo sapien
gggtaattcaaataagccatgtagg

SEQ ID NO: 203068 - DNA, 25 bp, Homo sapien
ccacttcccttgagaaagagtatat

SEQ ID NO: 203069 - DNA, 25 bp, Homo sapien
tctaaggaatatataagcattgata

SEQ ID NO: 203070 - DNA, 25 bp, Homo sapien
tagtctaaggaatatataagcattg

SEQ ID NO: 203071 - DNA, 25 bp, Homo sapien
tatctaaaatacactttgatgaaca

SEQ ID NO: 203072 - DNA, 25 bp, Homo sapien
taaatggattactgcagtttagacc

SEQ ID NO: 203073 - DNA, 25 bp, Homo sapien
gcatgttcttgatgtctcctctcca

SEQ ID NO: 203074 - DNA, 25 bp, Homo sapien
tctcctctccagctgagtaaatgga

SEQ ID NO: 203075 - DNA, 25 bp, Homo sapien
tctggcatgttcttgatgtctcctc

SEQ ID NO: 203076 - DNA, 25 bp, Homo sapien
cagtaaagtatccatcaagagtttc

SEQ ID NO: 203077 - DNA, 25 bp, Homo sapien
taaagtatccatcaagagtttcacc

SEQ ID NO: 203078 - DNA, 25 bp, Homo sapien
gtcagtaaagtatccatcaagagtt

SEQ ID NO: 203079 - DNA, 25 bp, Homo sapien
agtcagtaaagtatccatcaagagt

SEQ ID NO: 203080 - DNA, 25 bp, Homo sapien
tatagtggattaattaataacaaaa

SEQ ID NO: 203081 - DNA, 25 bp, Homo sapien
aataaaccgggtgcggtggtgcaca

SEQ ID NO: 203082 - DNA, 25 bp, Homo sapien
ataaaccgggtgcggtggtgcacac

SEQ ID NO: 203083 - DNA, 25 bp, Homo sapien
ctatagtggattaattaataacaaa

SEQ ID NO: 203084 - DNA, 25 bp, Homo sapien
acccaggacttcaagaccagcccga

SEQ ID NO: 203085 - DNA, 25 bp, Homo sapien
accagcccgagcaacatagcaagat

SEQ ID NO: 203086 - DNA, 25 bp, Homo sapien
ttgaacccaggacttcaagaccagc

SEQ ID NO: 203087 - DNA, 25 bp, Homo sapien
gaacccaggacttcaagaccagccc

SEQ ID NO: 203088 - DNA, 25 bp, Homo sapien
taaatggactcaagcagtgtatgca

SEQ ID NO: 203089 - DNA, 25 bp, Homo sapien
gatcctgctgggatctttttactcc

SEQ ID NO: 203090 - DNA, 25 bp, Homo sapien
gaggctgtatcttaagccacttaca

SEQ ID NO: 203091 - DNA, 25 bp, Homo sapien
ttcaagttcaaattatgctactggg

SEQ ID NO: 203092 - DNA, 25 bp, Homo sapien
tatttaattcgtgccatagtgccag

SEQ ID NO: 203093 - DNA, 25 bp, Homo sapien
tgtaaccacaggtgtaaaccataag

SEQ ID NO: 203094 - DNA, 25 bp, Homo sapien
ccagtatcaaaggtatgaatcagac

SEQ ID NO: 203095 - DNA, 25 bp, Homo sapien
cagctctacctaatgtggaatttac

SEQ ID NO: 203096 - DNA, 25 bp, Homo sapien
atataaacaccaaatttttcttcat

SEQ ID NO: 203097 - DNA, 25 bp, Homo sapien
tatataaacaccaaatttttcttca

SEQ ID NO: 203098 - DNA, 25 bp, Homo sapien
gcattcagtagtgagacttttatta

SEQ ID NO: 203099 - DNA, 25 bp, Homo sapien
ttcagtagtgagacttttattatca

SEQ ID NO: 203100 - DNA, 25 bp, Homo sapien
aaggtggcattcagtagtgagactt

SEQ ID NO: 203101 - DNA, 25 bp, Homo sapien
gtggcattcagtagtgagactttta

SEQ ID NO: 203102 - DNA, 25 bp, Homo sapien
gggctactcatcaaaacatcctgtg

SEQ ID NO: 203103 - DNA, 25 bp, Homo sapien
gataaacaatccaccttcaagtctg

SEQ ID NO: 203104 - DNA, 25 bp, Homo sapien
tgttagtattaatatcatctgctac

SEQ ID NO: 203105 - DNA, 25 bp, Homo sapien
gttccattccttccacaacatctga

SEQ ID NO: 203106 - DNA, 25 bp, Homo sapien
aaatctggtaatccaggacactgag

SEQ ID NO: 203107 - DNA, 25 bp, Homo sapien
aattaaatctggtaatccaggacac

SEQ ID NO: 203108 - DNA, 25 bp, Homo sapien
ttcaattaaatctggtaatccagga

SEQ ID NO: 203109 - DNA, 25 bp, Homo sapien
tttcttcaattaaatctggtaatcc

SEQ ID NO: 203110 - DNA, 25 bp, Homo sapien
gttgcagtaagccgaaatcgtacca

SEQ ID NO: 203111 - DNA, 25 bp, Homo sapien
ggtggcgcgtgtctgtagtcctagc

SEQ ID NO: 203112 - DNA, 25 bp, Homo sapien
tactcgggaggctgaggcagaagaa

SEQ ID NO: 203113 - DNA, 25 bp, Homo sapien
gtaagccgaaatcgtaccactgcac

SEQ ID NO: 203114 - DNA, 25 bp, Homo sapien
tgttgacagacttaggtgttccaag

SEQ ID NO: 203115 - DNA, 25 bp, Homo sapien
acttttcgtattctgaggaccggca

SEQ ID NO: 203116 - DNA, 25 bp, Homo sapien
agtttgttgtggaatgcccatctca

SEQ ID NO: 203117 - DNA, 25 bp, Homo sapien
ggaccggcattttctggtgatgtag

SEQ ID NO: 203118 - DNA, 25 bp, Homo sapien
tgaaaaatccagcatcgaacactat

SEQ ID NO: 203119 - DNA, 25 bp, Homo sapien
ttttttatggcagctaggcgatttc

SEQ ID NO: 203120 - DNA, 25 bp, Homo sapien
cagctaggcgatttctcgctgcaat

SEQ ID NO: 203121 - DNA, 25 bp, Homo sapien
tggtttacttgctatacctgagaca

SEQ ID NO: 203122 - DNA, 25 bp, Homo sapien
tgatcagattgttgaatttgtggat

SEQ ID NO: 203123 - DNA, 25 bp, Homo sapien
cacaatcatcaaccagtccttcaaa

SEQ ID NO: 203124 - DNA, 25 bp, Homo sapien
catccagatctgtacaggtagtctc

SEQ ID NO: 203125 - DNA, 25 bp, Homo sapien
tatacctcgtttatattcacaatca

SEQ ID NO: 203126 - DNA, 25 bp, Homo sapien
tcataaggagtcttgtttgaccaac

SEQ ID NO: 203127 - DNA, 25 bp, Homo sapien
tgtcccactcgaagcaatgtgaagt

SEQ ID NO: 203128 - DNA, 25 bp, Homo sapien
ctggaatgtccaattcaagtttcct

SEQ ID NO: 203129 - DNA, 25 bp, Homo sapien
ttcaagtttcctgtcccactcgaag

SEQ ID NO: 203130 - DNA, 25 bp, Homo sapien
gtttcctgtcccactcgaagcaatg

SEQ ID NO: 203131 - DNA, 25 bp, Homo sapien
gatgggacttcttttattggaaggc

SEQ ID NO: 203132 - DNA, 25 bp, Homo sapien
agtgatgggacttcttttattggaa

SEQ ID NO: 203133 - DNA, 25 bp, Homo sapien
tttcaagtgatgggacttcttttat

SEQ ID NO: 203134 - DNA, 25 bp, Homo sapien
ttctttcaagtgatgggacttcttt

SEQ ID NO: 203135 - DNA, 25 bp, Homo sapien
cttgctgtattgtcttggtagagta

SEQ ID NO: 203136 - DNA, 25 bp, Homo sapien
tgtcttggtagagtaagttttacat

SEQ ID NO: 203137 - DNA, 25 bp, Homo sapien
catgccaaacagttagaggacccaa

SEQ ID NO: 203138 - DNA, 25 bp, Homo sapien
ggacccaaaggacatggcaatttat

SEQ ID NO: 203139 - DNA, 25 bp, Homo sapien
tctgggagtcataggtgttacttga

SEQ ID NO: 203140 - DNA, 25 bp, Homo sapien
tgataggtcttcagaccatccagtg

SEQ ID NO: 203141 - DNA, 25 bp, Homo sapien
ggcacttctgggagtcataggtgtt

SEQ ID NO: 203142 - DNA, 25 bp, Homo sapien
cataggtgttacttgataggtcttc

SEQ ID NO: 203143 - DNA, 25 bp, Homo sapien
ccacttgttgcattagtttgtgaat

SEQ ID NO: 203144 - DNA, 25 bp, Homo sapien
tcttcactatcgactttacaagaaa

SEQ ID NO: 203145 - DNA, 25 bp, Homo sapien
tagtttgtgaattcaaagtattttc

SEQ ID NO: 203146 - DNA, 25 bp, Homo sapien
aatccttaggtgcaaaggaattctt

SEQ ID NO: 203147 - DNA, 25 bp, Homo sapien
caggtcttcctttacttggcacctt

SEQ ID NO: 203148 - DNA, 25 bp, Homo sapien
tttctacatttttggcaggtcttcc

SEQ ID NO: 203149 - DNA, 25 bp, Homo sapien
tttggcaggtcttcctttacttggc

SEQ ID NO: 203150 - DNA, 25 bp, Homo sapien
ctttacttggcacctttccttctgg

SEQ ID NO: 203151 - DNA, 25 bp, Homo sapien
ggctttcttgctgtggtagatgaga

SEQ ID NO: 203152 - DNA, 25 bp, Homo sapien
ctggctttcttgctgtggtagatga

SEQ ID NO: 203153 - DNA, 25 bp, Homo sapien
ttagcagctcttgtgactggctttc

SEQ ID NO: 203154 - DNA, 25 bp, Homo sapien
cattagcagctcttgtgactggctt

SEQ ID NO: 203155 - DNA, 25 bp, Homo sapien
gagtagctgatcgagtcattctcaa

SEQ ID NO: 203156 - DNA, 25 bp, Homo sapien
caacgacgtgggcattacaggctgc

SEQ ID NO: 203157 - DNA, 25 bp, Homo sapien
ctgcttgagtagctgatcgagtcat

SEQ ID NO: 203158 - DNA, 25 bp, Homo sapien
cgagtcattctcaacgacgtgggca

SEQ ID NO: 203159 - DNA, 25 bp, Homo sapien
gctcgaacatcactctcgttatcaa

SEQ ID NO: 203160 - DNA, 25 bp, Homo sapien
ttgtcttggaccaggtcggattgct

SEQ ID NO: 203161 - DNA, 25 bp, Homo sapien
gaccaggtcggattgctcgaacatc

SEQ ID NO: 203162 - DNA, 25 bp, Homo sapien
ggtcggattgctcgaacatcactct

SEQ ID NO: 203163 - DNA, 25 bp, Homo sapien
tctgctccatttggtctttggcctt

SEQ ID NO: 203164 - DNA, 25 bp, Homo sapien
taatccgtacagaagatggaatagc

SEQ ID NO: 203165 - DNA, 25 bp, Homo sapien
tgaccttgtaatccgtacagaagat

SEQ ID NO: 203166 - DNA, 25 bp, Homo sapien
cttagtctgctccatttggtctttg

SEQ ID NO: 203167 - DNA, 25 bp, Homo sapien
aacaaggcatatcaggtctataacg

SEQ ID NO: 203168 - DNA, 25 bp, Homo sapien
gaaaacaaggcatatcaggtctata

SEQ ID NO: 203169 - DNA, 25 bp, Homo sapien
gcatatcaggtctataacgacccac

SEQ ID NO: 203170 - DNA, 25 bp, Homo sapien
caaggcatatcaggtctataacgac

SEQ ID NO: 203171 - DNA, 25 bp, Homo sapien
tttcgttgatcacctagaatagttt

SEQ ID NO: 203172 - DNA, 25 bp, Homo sapien
gcatctgttttcgttgatcacctag

SEQ ID NO: 203173 - DNA, 25 bp, Homo sapien
ttggagcatctgttttcgttgatca

SEQ ID NO: 203174 - DNA, 25 bp, Homo sapien
aatattcctcgtttagctttctctc

SEQ ID NO: 203175 - DNA, 25 bp, Homo sapien
tatatccttcctgtgtcgactggca

SEQ ID NO: 203176 - DNA, 25 bp, Homo sapien
tcaacaagaattctaccttccaagg

SEQ ID NO: 203177 - DNA, 25 bp, Homo sapien
caagcccttgagatgtctcatctaa

SEQ ID NO: 203178 - DNA, 25 bp, Homo sapien
ctgagacagtgatttcctatgagca

SEQ ID NO: 203179 - DNA, 25 bp, Homo sapien
caacggaagcgggccagtgttctcc

SEQ ID NO: 203180 - DNA, 25 bp, Homo sapien
cttcaacggaagcgggccagtgttc

SEQ ID NO: 203181 - DNA, 25 bp, Homo sapien
ttcaacggaagcgggccagtgttct

SEQ ID NO: 203182 - DNA, 25 bp, Homo sapien
ggccagtgttctccgtccagctctc

SEQ ID NO: 203183 - DNA, 25 bp, Homo sapien
gcctccacgaaattcaaacttgccg

SEQ ID NO: 203184 - DNA, 25 bp, Homo sapien
tgagccaccttctagcgtgaaacct

SEQ ID NO: 203185 - DNA, 25 bp, Homo sapien
gaaattcaaacttgccgcaccgagc

SEQ ID NO: 203186 - DNA, 25 bp, Homo sapien
aagtaaagaacactcggtctggacg

SEQ ID NO: 203187 - DNA, 25 bp, Homo sapien
gccagttcaaaagatgggtgagaga

SEQ ID NO: 203188 - DNA, 25 bp, Homo sapien
ccgtgcgatatttgaattgattgaa

SEQ ID NO: 203189 - DNA, 25 bp, Homo sapien
ccttccactcaacgaggcttgcgat

SEQ ID NO: 203190 - DNA, 25 bp, Homo sapien
tgcgattggtttgctccgtgcgata

SEQ ID NO: 203191 - DNA, 25 bp, Homo sapien
tgaacactgataacctctgaacgat

SEQ ID NO: 203192 - DNA, 25 bp, Homo sapien
aatgagtacagtttcactaggatgc

SEQ ID NO: 203193 - DNA, 25 bp, Homo sapien
gatgccagcaaattgtatcctccat

SEQ ID NO: 203194 - DNA, 25 bp, Homo sapien
gaaaaggattctgctgctatctgga

SEQ ID NO: 203195 - DNA, 25 bp, Homo sapien
aaactataattcctttgtgccatta

SEQ ID NO: 203196 - DNA, 25 bp, Homo sapien
aagtcgtagaagattatatgcttgt

SEQ ID NO: 203197 - DNA, 25 bp, Homo sapien
tgcttgtttcgcaatgatgatacaa

SEQ ID NO: 203198 - DNA, 25 bp, Homo sapien
ccattatgtatgtacttggaagtcg

SEQ ID NO: 203199 - DNA, 25 bp, Homo sapien
gacagtttttgctcattgcacagaa

SEQ ID NO: 203200 - DNA, 25 bp, Homo sapien
ttgcacagaactgggttatctaatg

SEQ ID NO: 203201 - DNA, 25 bp, Homo sapien
attgacagtttttgctcattgcaca

SEQ ID NO: 203202 - DNA, 25 bp, Homo sapien
ctaatggagcattaattatcgtatc

SEQ ID NO: 203203 - DNA, 25 bp, Homo sapien
agcttgaagaaatccgcaaatgtgg

SEQ ID NO: 203204 - DNA, 25 bp, Homo sapien
aaatgtgggatgaaaaacttctgta

SEQ ID NO: 203205 - DNA, 25 bp, Homo sapien
tgtaacatccaggttgatgaagcta

SEQ ID NO: 203206 - DNA, 25 bp, Homo sapien
ttctgtaacatccaggttgatgaag

SEQ ID NO: 203207 - DNA, 25 bp, Homo sapien
acacccagcagtttctctcagagct

SEQ ID NO: 203208 - DNA, 25 bp, Homo sapien
ttatgtgttgtccctatcttgatca

SEQ ID NO: 203209 - DNA, 25 bp, Homo sapien
tgtgttgtccctatcttgatcaatt

SEQ ID NO: 203210 - DNA, 25 bp, Homo sapien
ttgatcaattttgatcccacaccca

SEQ ID NO: 203211 - DNA, 25 bp, Homo sapien
aaagtccaggttaccattacatggg

SEQ ID NO: 203212 - DNA, 25 bp, Homo sapien
tgttcaaataaggtatatattatca

SEQ ID NO: 203213 - DNA, 25 bp, Homo sapien
aatccttgcaaagcccatccatggg

SEQ ID NO: 203214 - DNA, 25 bp, Homo sapien
ccattacatgggttggtactcaata

SEQ ID NO: 203215 - DNA, 25 bp, Homo sapien
cagcctctaggatgccaactgcact

SEQ ID NO: 203216 - DNA, 25 bp, Homo sapien
taggatgccaactgcactagcaaaa

SEQ ID NO: 203217 - DNA, 25 bp, Homo sapien
cctctaggatgccaactgcactagc

SEQ ID NO: 203218 - DNA, 25 bp, Homo sapien
ggatgccaactgcactagcaaaatc

SEQ ID NO: 203219 - DNA, 25 bp, Homo sapien
gagagaaaccggtgtgagctcgctc

SEQ ID NO: 203220 - DNA, 25 bp, Homo sapien
agagcggccccagcacgacggcgat

SEQ ID NO: 203221 - DNA, 25 bp, Homo sapien
cggttgcagtcaccgcgcagcggtg

SEQ ID NO: 203222 - DNA, 25 bp, Homo sapien
ggcgcgcaagctgaggatggagaga

SEQ ID NO: 203223 - DNA, 25 bp, Homo sapien
attattcacacgatggttctgggcc

SEQ ID NO: 203224 - DNA, 25 bp, Homo sapien
ccagaagcacagatagggtagccca

SEQ ID NO: 203225 - DNA, 25 bp, Homo sapien
ggaccacactgattaccctagagca

SEQ ID NO: 203226 - DNA, 25 bp, Homo sapien
cattataggatattgagcagcggca

SEQ ID NO: 203227 - DNA, 25 bp, Homo sapien
caacctgcctttgaacatgattgag

SEQ ID NO: 203228 - DNA, 25 bp, Homo sapien
gaggataggacaggcaaactctcaa

SEQ ID NO: 203229 - DNA, 25 bp, Homo sapien
ggaaggtgagatccctaggccgatc

SEQ ID NO: 203230 - DNA, 25 bp, Homo sapien
catgagaaaggtagctacgtggaag

SEQ ID NO: 203231 - DNA, 25 bp, Homo sapien
gtgctcggtccgactcagcggtggg

SEQ ID NO: 203232 - DNA, 25 bp, Homo sapien
gcgccgcgctgggtgctcggtccga

SEQ ID NO: 203233 - DNA, 25 bp, Homo sapien
cgcgctgggtgctcggtccgactca

SEQ ID NO: 203234 - DNA, 25 bp, Homo sapien
ttcggggcgagcgttgggcgccgcc

SEQ ID NO: 203235 - DNA, 25 bp, Homo sapien
ggacccagggcggtgaggaagtcag

SEQ ID NO: 203236 - DNA, 25 bp, Homo sapien
gacccagggcggtgaggaagtcagc

SEQ ID NO: 203237 - DNA, 25 bp, Homo sapien
gggacccagggcggtgaggaagtca

SEQ ID NO: 203238 - DNA, 25 bp, Homo sapien
gcccctgtcgcgccctcccgggctc

SEQ ID NO: 203239 - DNA, 25 bp, Homo sapien
tctggactggggtcgcctcgcccct

SEQ ID NO: 203240 - DNA, 25 bp, Homo sapien
ctctggactggggtcgcctcgcccc

SEQ ID NO: 203241 - DNA, 25 bp, Homo sapien
ttcttcaacgacgaggcgggacgga

SEQ ID NO: 203242 - DNA, 25 bp, Homo sapien
cttcttcaacgacgaggcgggacgg

SEQ ID NO: 203243 - DNA, 25 bp, Homo sapien
gacggaggctcggacgcctccccag

SEQ ID NO: 203244 - DNA, 25 bp, Homo sapien
gaggcgggacggaggctcggacgcc

SEQ ID NO: 203245 - DNA, 25 bp, Homo sapien
ggttcgtcctcagtccacgatgaag

SEQ ID NO: 203246 - DNA, 25 bp, Homo sapien
tccacgatgaagtcatagggctgtg

SEQ ID NO: 203247 - DNA, 25 bp, Homo sapien
tctgtgacgtcagaagatgggtcct

SEQ ID NO: 203248 - DNA, 25 bp, Homo sapien
ctggcgcaagtcgactgcggttcgt

SEQ ID NO: 203249 - DNA, 25 bp, Homo sapien
gaatcgcagtggatttgaatcgaaa

SEQ ID NO: 203250 - DNA, 25 bp, Homo sapien
caagcgttgcgagtacagctcagta

SEQ ID NO: 203251 - DNA, 25 bp, Homo sapien
agttgttcggtatcagcattttgca

SEQ ID NO: 203252 - DNA, 25 bp, Homo sapien
gaagttgtcttccacgaacgcttgg

SEQ ID NO: 203253 - DNA, 25 bp, Homo sapien
tgctatcaagtccagaggaaaatac

SEQ ID NO: 203254 - DNA, 25 bp, Homo sapien
acaggtgcttgatctgttgcctagg

SEQ ID NO: 203255 - DNA, 25 bp, Homo sapien
tgtttgttgcagctcaagccctaca

SEQ ID NO: 203256 - DNA, 25 bp, Homo sapien
ccaaagttgaggcttgattcagtta

SEQ ID NO: 203257 - DNA, 25 bp, Homo sapien
tcctgtcatggattcatttagcaca

SEQ ID NO: 203258 - DNA, 25 bp, Homo sapien
cattgtagacagcattataagaact

SEQ ID NO: 203259 - DNA, 25 bp, Homo sapien
attggaccacgataggccctgctga

SEQ ID NO: 203260 - DNA, 25 bp, Homo sapien
gaactttaaatctcacggcacaaac

SEQ ID NO: 203261 - DNA, 25 bp, Homo sapien
ttggttcttactgcagttgtcttgt

SEQ ID NO: 203262 - DNA, 25 bp, Homo sapien
cttggttcttactgcagttgtcttg

SEQ ID NO: 203263 - DNA, 25 bp, Homo sapien
ggagccaactcattcttgaagtggg

SEQ ID NO: 203264 - DNA, 25 bp, Homo sapien
agtggcaaattatccccattcatgg

SEQ ID NO: 203265 - DNA, 25 bp, Homo sapien
gattctggtccattggtttcaggat

SEQ ID NO: 203266 - DNA, 25 bp, Homo sapien
gcgcttattaccgtggtaacaagga

SEQ ID NO: 203267 - DNA, 25 bp, Homo sapien
gatggtaggtaatgctttcctttgg

SEQ ID NO: 203268 - DNA, 25 bp, Homo sapien
aggagttgatggtaggtaatgcttt

SEQ ID NO: 203269 - DNA, 25 bp, Homo sapien
gagttgatggtaggtaatgctttcc

SEQ ID NO: 203270 - DNA, 25 bp, Homo sapien
tttttgttcatcttgagtctgtgta

SEQ ID NO: 203271 - DNA, 25 bp, Homo sapien
acttgaagataagcttgctgaggag

SEQ ID NO: 203272 - DNA, 25 bp, Homo sapien
ttgctgaggagtaccctgccatggg

SEQ ID NO: 203273 - DNA, 25 bp, Homo sapien
gaggagtaccctgccatgggccctt

SEQ ID NO: 203274 - DNA, 25 bp, Homo sapien
taagcttgctgaggagtaccctgcc

SEQ ID NO: 203275 - DNA, 25 bp, Homo sapien
gaaactaggtgctctgtatcctttg

SEQ ID NO: 203276 - DNA, 25 bp, Homo sapien
ctgtatcctttgtcgaagccattat

SEQ ID NO: 203277 - DNA, 25 bp, Homo sapien
cttgaaactaggtgctctgtatcct

SEQ ID NO: 203278 - DNA, 25 bp, Homo sapien
gtatcctttgtcgaagccattatcc

SEQ ID NO: 203279 - DNA, 25 bp, Homo sapien
ggttcgagatccacgctatagagag

SEQ ID NO: 203280 - DNA, 25 bp, Homo sapien
tagagaggatccttgcaaacagtgc

SEQ ID NO: 203281 - DNA, 25 bp, Homo sapien
tacaccgttcaaatgagcgtagccc

SEQ ID NO: 203282 - DNA, 25 bp, Homo sapien
tgctgccaccggtctcagaaaggat

SEQ ID NO: 203283 - DNA, 25 bp, Homo sapien
taaatagttgaaaggctaacctgct

SEQ ID NO: 203284 - DNA, 25 bp, Homo sapien
cctgctcaaaggataccaaataatg

SEQ ID NO: 203285 - DNA, 25 bp, Homo sapien
tgttatattttagtgatccacaaga

SEQ ID NO: 203286 - DNA, 25 bp, Homo sapien
atagttagataataacattcttgtc

SEQ ID NO: 203287 - DNA, 25 bp, Homo sapien
tggcccctgaaccagaaaacagtta

SEQ ID NO: 203288 - DNA, 25 bp, Homo sapien
ttatacagacagttcgtgggcctcc

SEQ ID NO: 203289 - DNA, 25 bp, Homo sapien
cccacggagaggtgtgacaaagcaa

SEQ ID NO: 203290 - DNA, 25 bp, Homo sapien
aaaaatggcgctgatgacttgctca

SEQ ID NO: 203291 - DNA, 25 bp, Homo sapien
caatgacaaagttatccttaattcc

SEQ ID NO: 203292 - DNA, 25 bp, Homo sapien
tccctttaaacaccagatgggagca

SEQ ID NO: 203293 - DNA, 25 bp, Homo sapien
gagaaatctccctttaaacaccaga

SEQ ID NO: 203294 - DNA, 25 bp, Homo sapien
gcatcaatcatgacataactcagga

SEQ ID NO: 203295 - DNA, 25 bp, Homo sapien
gctgtttacatatggttctggcacc

SEQ ID NO: 203296 - DNA, 25 bp, Homo sapien
gaattcctgcaacatgatactgtga

SEQ ID NO: 203297 - DNA, 25 bp, Homo sapien
aaattgagtccttacatgagtcccg

SEQ ID NO: 203298 - DNA, 25 bp, Homo sapien
gatactgtgaggagattctcggaca

SEQ ID NO: 203299 - DNA, 25 bp, Homo sapien
tatatagcacctcggacttggaggc

SEQ ID NO: 203300 - DNA, 25 bp, Homo sapien
tagcatcagccgtaaggatctgcgc

SEQ ID NO: 203301 - DNA, 25 bp, Homo sapien
tcccagcagtgtagaagaacccata

SEQ ID NO: 203302 - DNA, 25 bp, Homo sapien
tatcagaggtgctatcatgccaatc

SEQ ID NO: 203303 - DNA, 25 bp, Homo sapien
gcccagagggaacccaaatcaactg

SEQ ID NO: 203304 - DNA, 25 bp, Homo sapien
aacagtctcagcaccgcaaggacca

SEQ ID NO: 203305 - DNA, 25 bp, Homo sapien
acttaaagtgtcaggaacagtctca

SEQ ID NO: 203306 - DNA, 25 bp, Homo sapien
tgacccatatctgtgggcccggtgg

SEQ ID NO: 203307 - DNA, 25 bp, Homo sapien
tggtctgggtagaaagaccttcgac

SEQ ID NO: 203308 - DNA, 25 bp, Homo sapien
caggccacttggcaaatagaaatgt

SEQ ID NO: 203309 - DNA, 25 bp, Homo sapien
aattatcataagcatgttggtcacc

SEQ ID NO: 203310 - DNA, 25 bp, Homo sapien
gaactttcttgatgcagatttggta

SEQ ID NO: 203311 - DNA, 25 bp, Homo sapien
ttaacggtgtccagtgtaagcttta

SEQ ID NO: 203312 - DNA, 25 bp, Homo sapien
taacggtgtccagtgtaagctttaa

SEQ ID NO: 203313 - DNA, 25 bp, Homo sapien
agctttaaaccaggaggtcaccgag

SEQ ID NO: 203314 - DNA, 25 bp, Homo sapien
ttaaaccaggaggtcaccgaggctg

SEQ ID NO: 203315 - DNA, 25 bp, Homo sapien
gactgggaagggatatcacaaaacc

SEQ ID NO: 203316 - DNA, 25 bp, Homo sapien
gtgctctgactctgggagacttcca

SEQ ID NO: 203317 - DNA, 25 bp, Homo sapien
gtctgtgcccaggtcggtttcttca

SEQ ID NO: 203318 - DNA, 25 bp, Homo sapien
tgctcgtacttcaaagggccctgac

SEQ ID NO: 203319 - DNA, 25 bp, Homo sapien
tcaacaccagaaaatatgccatctt

SEQ ID NO: 203320 - DNA, 25 bp, Homo sapien
accattctcaacaccagaaaatatg

SEQ ID NO: 203321 - DNA, 25 bp, Homo sapien
taacaaccattctcaacaccagaaa

SEQ ID NO: 203322 - DNA, 25 bp, Homo sapien
tctcaacaccagaaaatatgccatc

SEQ ID NO: 203323 - DNA, 25 bp, Homo sapien
cacactcagagttctgacacaggaa

SEQ ID NO: 203324 - DNA, 25 bp, Homo sapien
tgtggaacctatctatgacatgtct

SEQ ID NO: 203325 - DNA, 25 bp, Homo sapien
ggctattcacaaaagtgatcacagt

SEQ ID NO: 203326 - DNA, 25 bp, Homo sapien
tgtctgttatagaggttgtggaacc

SEQ ID NO: 203327 - DNA, 25 bp, Homo sapien
cagagcttggactgaccaggtacat

SEQ ID NO: 203328 - DNA, 25 bp, Homo sapien
gactgaccaggtacattagattcct

SEQ ID NO: 203329 - DNA, 25 bp, Homo sapien
agattcctgagggtatgcagtggtt

SEQ ID NO: 203330 - DNA, 25 bp, Homo sapien
gcagtggttgtaattgatctaaatt

SEQ ID NO: 203331 - DNA, 25 bp, Homo sapien
cgagtaaatttctgcttgcttagat

SEQ ID NO: 203332 - DNA, 25 bp, Homo sapien
gcttgcttagattttcgccacaaaa

SEQ ID NO: 203333 - DNA, 25 bp, Homo sapien
gtttcttcactgctcgagtaaattt

SEQ ID NO: 203334 - DNA, 25 bp, Homo sapien
actgctcgagtaaatttctgcttgc

SEQ ID NO: 203335 - DNA, 25 bp, Homo sapien
caacggctgcgatttaacatatgag

SEQ ID NO: 203336 - DNA, 25 bp, Homo sapien
gatctgcagcaaaccctctgaacat

SEQ ID NO: 203337 - DNA, 25 bp, Homo sapien
ctgcagcaaaccctctgaacatcct

SEQ ID NO: 203338 - DNA, 25 bp, Homo sapien
tcaacggctgcgatttaacatatga

SEQ ID NO: 203339 - DNA, 25 bp, Homo sapien
acttgaaagagccatgataaagatg

SEQ ID NO: 203340 - DNA, 25 bp, Homo sapien
aatagaaacttgaaagagccatgat

SEQ ID NO: 203341 - DNA, 25 bp, Homo sapien
tgaaagagccatgataaagatgaca

SEQ ID NO: 203342 - DNA, 25 bp, Homo sapien
tagaaacttgaaagagccatgataa

SEQ ID NO: 203343 - DNA, 25 bp, Homo sapien
ctgttgcagagctttttgggaagat

SEQ ID NO: 203344 - DNA, 25 bp, Homo sapien
cacagcgcagcactgatggtgtagg

SEQ ID NO: 203345 - DNA, 25 bp, Homo sapien
tgggaagatttacatcaagtatatg

SEQ ID NO: 203346 - DNA, 25 bp, Homo sapien
agctgagttgcatagcacagcgcag

SEQ ID NO: 203347 - DNA, 25 bp, Homo sapien
gggctctcctgacaaccctacggaa

SEQ ID NO: 203348 - DNA, 25 bp, Homo sapien
tctgacctgtgtgaacctgataacg

SEQ ID NO: 203349 - DNA, 25 bp, Homo sapien
taaatgcccaacttgaatgtcacct

SEQ ID NO: 203350 - DNA, 25 bp, Homo sapien
catggcacccactcaatgtacagca

SEQ ID NO: 203351 - DNA, 25 bp, Homo sapien
aaatgtgacactttcatgccatggg

SEQ ID NO: 203352 - DNA, 25 bp, Homo sapien
tactaaatgcccctgaatggttcac

SEQ ID NO: 203353 - DNA, 25 bp, Homo sapien
cacagaaagcaatgtgtggttgcca

SEQ ID NO: 203354 - DNA, 25 bp, Homo sapien
gatttcaaaggatatgctgcttctc

SEQ ID NO: 203355 - DNA, 25 bp, Homo sapien
tgttagggaggctaatccaaggccc

SEQ ID NO: 203356 - DNA, 25 bp, Homo sapien
gctgtagtaggcagagtagtcccca

SEQ ID NO: 203357 - DNA, 25 bp, Homo sapien
ggtgtctccgttgtgatcgtcacag

SEQ ID NO: 203358 - DNA, 25 bp, Homo sapien
tgtaatgctaatgctggtgtctccg

SEQ ID NO: 203359 - DNA, 25 bp, Homo sapien
tgtcctccgggcttcagcaagcttg

SEQ ID NO: 203360 - DNA, 25 bp, Homo sapien
gtaagttgtcctccgggcttcagca

SEQ ID NO: 203361 - DNA, 25 bp, Homo sapien
ttgtcctccgggcttcagcaagctt

SEQ ID NO: 203362 - DNA, 25 bp, Homo sapien
gaggtaagttgtcctccgggcttca

SEQ ID NO: 203363 - DNA, 25 bp, Homo sapien
ggcacagaagcccacacaatgtgag

SEQ ID NO: 203364 - DNA, 25 bp, Homo sapien
cggaaccatgaggtagggctgaaca

SEQ ID NO: 203365 - DNA, 25 bp, Homo sapien
gcccacacaatgtgaggaagacgga

SEQ ID NO: 203366 - DNA, 25 bp, Homo sapien
gataagagcttgctatcagagagga

SEQ ID NO: 203367 - DNA, 25 bp, Homo sapien
caagtaaaaatagcatcccacaaaa

SEQ ID NO: 203368 - DNA, 25 bp, Homo sapien
aatggtacttcagtgtgcagcacaa

SEQ ID NO: 203369 - DNA, 25 bp, Homo sapien
gctagttcagcgtgcagctcagtct

SEQ ID NO: 203370 - DNA, 25 bp, Homo sapien
gttccatgtcttgaactaaccgagg

SEQ ID NO: 203371 - DNA, 25 bp, Homo sapien
tatgggatcgtcgaagatttgccag

SEQ ID NO: 203372 - DNA, 25 bp, Homo sapien
gacagaggtgagctctaatatatgg

SEQ ID NO: 203373 - DNA, 25 bp, Homo sapien
cacccgtctttacttcctcgattgg

SEQ ID NO: 203374 - DNA, 25 bp, Homo sapien
gccagacgctcataatgacttctta

SEQ ID NO: 203375 - DNA, 25 bp, Homo sapien
tgtgctcgactgtaaagcttctgat

SEQ ID NO: 203376 - DNA, 25 bp, Homo sapien
tgcgattatgcctctgaatcttctc

SEQ ID NO: 203377 - DNA, 25 bp, Homo sapien
ggtcaccaagtttgcgattatgcct

SEQ ID NO: 203378 - DNA, 25 bp, Homo sapien
cctttttctcttggtgccgttgtgc

SEQ ID NO: 203379 - DNA, 25 bp, Homo sapien
ttcccttgcaatctaaactgaaagc

SEQ ID NO: 203380 - DNA, 25 bp, Homo sapien
acaaacatgcgtgttttcccttgca

SEQ ID NO: 203381 - DNA, 25 bp, Homo sapien
tgcaaacagttcctgtgtactgcag

SEQ ID NO: 203382 - DNA, 25 bp, Homo sapien
tccaccccacaaacatgcgtgtttt

SEQ ID NO: 203383 - DNA, 25 bp, Homo sapien
tgaggtatctagacacgcatgccca

SEQ ID NO: 203384 - DNA, 25 bp, Homo sapien
tacagtgtgcaccaaagaatagtca

SEQ ID NO: 203385 - DNA, 25 bp, Homo sapien
gaaacttcttaggtgtgccttgggc

SEQ ID NO: 203386 - DNA, 25 bp, Homo sapien
aaggagtcactcaacaactatcgag

SEQ ID NO: 203387 - DNA, 25 bp, Homo sapien
ttgttttaactgttcaatcctcatc

SEQ ID NO: 203388 - DNA, 25 bp, Homo sapien
ttttaactgttcaatcctcatcttg

SEQ ID NO: 203389 - DNA, 25 bp, Homo sapien
tcatttcctttacatattgtttgtt

SEQ ID NO: 203390 - DNA, 25 bp, Homo sapien
actgttcaatcctcatcttgcagga

SEQ ID NO: 203391 - DNA, 25 bp, Homo sapien
tgtttttctagttcaatgcagagaa

SEQ ID NO: 203392 - DNA, 25 bp, Homo sapien
cattacgaaaaagagaacgatgttt

SEQ ID NO: 203393 - DNA, 25 bp, Homo sapien
gcttttgtaactatggaacattacg

SEQ ID NO: 203394 - DNA, 25 bp, Homo sapien
cacaaacgttggtctcttatggtta

SEQ ID NO: 203395 - DNA, 25 bp, Homo sapien
gagagccatcatcaaggagcagttt

SEQ ID NO: 203396 - DNA, 25 bp, Homo sapien
gagctcacagagtgcacgaaattct

SEQ ID NO: 203397 - DNA, 25 bp, Homo sapien
tacggaatgctaagctgacacccaa

SEQ ID NO: 203398 - DNA, 25 bp, Homo sapien
tgataagctgttacgcatgtcccac

SEQ ID NO: 203399 - DNA, 25 bp, Homo sapien
cagctgataagcgtgccgatctcct

SEQ ID NO: 203400 - DNA, 25 bp, Homo sapien
gttcagctgataagcgtgccgatct

SEQ ID NO: 203401 - DNA, 25 bp, Homo sapien
ttcagctgataagcgtgccgatctc

SEQ ID NO: 203402 - DNA, 25 bp, Homo sapien
agctgataagcgtgccgatctcctc

SEQ ID NO: 203403 - DNA, 25 bp, Homo sapien
tgcagggaaggcgtgtgccaagcgc

SEQ ID NO: 203404 - DNA, 25 bp, Homo sapien
ctgcagggaaggcgtgtgccaagcg

SEQ ID NO: 203405 - DNA, 25 bp, Homo sapien
tatccattttccttccatagctttt

SEQ ID NO: 203406 - DNA, 25 bp, Homo sapien
aactgatctgttatccattttcctt

SEQ ID NO: 203407 - DNA, 25 bp, Homo sapien
caactgatctgttatccattttcct

SEQ ID NO: 203408 - DNA, 25 bp, Homo sapien
ctgttatccattttccttccatagc

SEQ ID NO: 203409 - DNA, 25 bp, Homo sapien
tcttgcttgctcttaagtcggctta

SEQ ID NO: 203410 - DNA, 25 bp, Homo sapien
cttgctcttaagtcggcttaacctt

SEQ ID NO: 203411 - DNA, 25 bp, Homo sapien
gcttaacctttccttcttgtcgata

SEQ ID NO: 203412 - DNA, 25 bp, Homo sapien
tgcttgctcttaagtcggcttaacc

SEQ ID NO: 203413 - DNA, 25 bp, Homo sapien
tctttaccaaggaggagacccatgg

SEQ ID NO: 203414 - DNA, 25 bp, Homo sapien
catggaactgaccttctgggagcct

SEQ ID NO: 203415 - DNA, 25 bp, Homo sapien
tgtgtaccggcatgaaaagacgttt

SEQ ID NO: 203416 - DNA, 25 bp, Homo sapien
cataggatattgaggactgtgcatc

SEQ ID NO: 203417 - DNA, 25 bp, Homo sapien
tctgccatgcgcaagtaagcactca

SEQ ID NO: 203418 - DNA, 25 bp, Homo sapien
tgaccttccaaagatacagcgcaat

SEQ ID NO: 203419 - DNA, 25 bp, Homo sapien
gaaaatatctagagggagagaacct

SEQ ID NO: 203420 - DNA, 25 bp, Homo sapien
agcccttggttcactagagcacata

SEQ ID NO: 203421 - DNA, 25 bp, Homo sapien
ctagttaggcgtgttgatgtgcgcc

SEQ ID NO: 203422 - DNA, 25 bp, Homo sapien
tgagagaaggcctacaactgtggag

SEQ ID NO: 203423 - DNA, 25 bp, Homo sapien
gcgtaatacattctaggcatcatgc

SEQ ID NO: 203424 - DNA, 25 bp, Homo sapien
tgaagttagataccctgccatttac

SEQ ID NO: 203425 - DNA, 25 bp, Homo sapien
tctggtagcaaagctccggtgcaga

SEQ ID NO: 203426 - DNA, 25 bp, Homo sapien
tacgctgtcctctggtagcaaagct

SEQ ID NO: 203427 - DNA, 25 bp, Homo sapien
tcctctggtagcaaagctccggtgc

SEQ ID NO: 203428 - DNA, 25 bp, Homo sapien
ctacgctgtcctctggtagcaaagc

SEQ ID NO: 203429 - DNA, 25 bp, Homo sapien
ctcgctggtatctggtgcccggacg

SEQ ID NO: 203430 - DNA, 25 bp, Homo sapien
ccaggttccagccttcggctgcctg

SEQ ID NO: 203431 - DNA, 25 bp, Homo sapien
tcctctcgctggtatctggtgcccg

SEQ ID NO: 203432 - DNA, 25 bp, Homo sapien
tctcgctcctctcgctggtatctgg

SEQ ID NO: 203433 - DNA, 25 bp, Homo sapien
ctggaggacacacagcagaagaaac

SEQ ID NO: 203434 - DNA, 25 bp, Homo sapien
aaatcgccgctctgaacgcatttgg

SEQ ID NO: 203435 - DNA, 25 bp, Homo sapien
acgcatttggcgcaggtcagccgcc

SEQ ID NO: 203436 - DNA, 25 bp, Homo sapien
cgggtagtgttgcacagcgggcagc

SEQ ID NO: 203437 - DNA, 25 bp, Homo sapien
gtcgcggccgtcgaagtagacgaaa

SEQ ID NO: 203438 - DNA, 25 bp, Homo sapien
gttttcaaccgggtgcattctgggc

SEQ ID NO: 203439 - DNA, 25 bp, Homo sapien
tttcaaccgggtgcattctgggcca

SEQ ID NO: 203440 - DNA, 25 bp, Homo sapien
caaccgggtgcattctgggccagga

SEQ ID NO: 203441 - DNA, 25 bp, Homo sapien
tttgttttcaaccgggtgcattctg

SEQ ID NO: 203442 - DNA, 25 bp, Homo sapien
gccgcgtgttcctgtcccgggcact

SEQ ID NO: 203443 - DNA, 25 bp, Homo sapien
tccgccgccgcgtgttcctgtcccg

SEQ ID NO: 203444 - DNA, 25 bp, Homo sapien
cgggcactgttgtttttccggtctg

SEQ ID NO: 203445 - DNA, 25 bp, Homo sapien
aaggggggctgggatgccggcgagc

SEQ ID NO: 203446 - DNA, 25 bp, Homo sapien
ggctccctccattggttctaagtgc

SEQ ID NO: 203447 - DNA, 25 bp, Homo sapien
aggctccctccattggttctaagtg

SEQ ID NO: 203448 - DNA, 25 bp, Homo sapien
gctccctccattggttctaagtgct

SEQ ID NO: 203449 - DNA, 25 bp, Homo sapien
tgtggtaacatttgcggagcactcc

SEQ ID NO: 203450 - DNA, 25 bp, Homo sapien
acatttgcggagcactcctttttga

SEQ ID NO: 203451 - DNA, 25 bp, Homo sapien
gtaacatttgcggagcactcctttt

SEQ ID NO: 203452 - DNA, 25 bp, Homo sapien
gtggtaacatttgcggagcactcct

SEQ ID NO: 203453 - DNA, 25 bp, Homo sapien
acctttttcgtagattcgcatgtat

SEQ ID NO: 203454 - DNA, 25 bp, Homo sapien
tcaaaccagaataatgtgagatgct

SEQ ID NO: 203455 - DNA, 25 bp, Homo sapien
caattaaacgtagaagaatccagct

SEQ ID NO: 203456 - DNA, 25 bp, Homo sapien
ctgtgctgggcttatggacatattc

SEQ ID NO: 203457 - DNA, 25 bp, Homo sapien
ttaggttacttacacagagtcgccc

SEQ ID NO: 203458 - DNA, 25 bp, Homo sapien
ttagaataggatagatgttttcaaa

SEQ ID NO: 203459 - DNA, 25 bp, Homo sapien
ttttagaataggatagatgttttca

SEQ ID NO: 203460 - DNA, 25 bp, Homo sapien
agaataggatagatgttttcaaatg

SEQ ID NO: 203461 - DNA, 25 bp, Homo sapien
cttttagaataggatagatgttttc

SEQ ID NO: 203462 - DNA, 25 bp, Homo sapien
taaataatttggcaactacagccat

SEQ ID NO: 203463 - DNA, 25 bp, Homo sapien
gagaaatggcatttattccgggtaa

SEQ ID NO: 203464 - DNA, 25 bp, Homo sapien
cgggtaaataatttggcaactacag

SEQ ID NO: 203465 - DNA, 25 bp, Homo sapien
ctgagaaatggcatttattccgggt

SEQ ID NO: 203466 - DNA, 25 bp, Homo sapien
gagtgcgtgtaaccggtgttccttc

SEQ ID NO: 203467 - DNA, 25 bp, Homo sapien
agaagagtgcgtgtaaccggtgttc

SEQ ID NO: 203468 - DNA, 25 bp, Homo sapien
tgggagaagagtgcgtgtaaccggt

SEQ ID NO: 203469 - DNA, 25 bp, Homo sapien
aagagtgcgtgtaaccggtgttcct

SEQ ID NO: 203470 - DNA, 25 bp, Homo sapien
agataagcaacacaattcgtggttt

SEQ ID NO: 203471 - DNA, 25 bp, Homo sapien
agcaacacaattcgtggttttacca

SEQ ID NO: 203472 - DNA, 25 bp, Homo sapien
caacacaattcgtggttttaccatt

SEQ ID NO: 203473 - DNA, 25 bp, Homo sapien
taagcaacacaattcgtggttttac

SEQ ID NO: 203474 - DNA, 25 bp, Homo sapien
accaggaaacagttcaggctcgtaa

SEQ ID NO: 203475 - DNA, 25 bp, Homo sapien
aagaccaggaaacagttcaggctcg

SEQ ID NO: 203476 - DNA, 25 bp, Homo sapien
ataagaccaggaaacagttcaggct

SEQ ID NO: 203477 - DNA, 25 bp, Homo sapien
taaataagaccaggaaacagttcag

SEQ ID NO: 203478 - DNA, 25 bp, Homo sapien
gaattttaaaatcgaggaatctggc

SEQ ID NO: 203479 - DNA, 25 bp, Homo sapien
tgaactgctgatgggttagcaccaa

SEQ ID NO: 203480 - DNA, 25 bp, Homo sapien
tttcttgctgcaagtcgagactgct

SEQ ID NO: 203481 - DNA, 25 bp, Homo sapien
gatgggaaatctcacatcacagctt

SEQ ID NO: 203482 - DNA, 25 bp, Homo sapien
ccagagctaaatataagggctgttg

SEQ ID NO: 203483 - DNA, 25 bp, Homo sapien
agaccatcttcccagagctaaatat

SEQ ID NO: 203484 - DNA, 25 bp, Homo sapien
gttgtcctgggctctcggatcctca

SEQ ID NO: 203485 - DNA, 25 bp, Homo sapien
atataagggctgttgtcctgggctc

SEQ ID NO: 203486 - DNA, 25 bp, Homo sapien
tttcttcagatccaacttacaggcc

SEQ ID NO: 203487 - DNA, 25 bp, Homo sapien
aacttacaggccaggtttacagtgg

SEQ ID NO: 203488 - DNA, 25 bp, Homo sapien
caggtttacagtggaaactatattc

SEQ ID NO: 203489 - DNA, 25 bp, Homo sapien
ttgggttatattctgcattttttgc

SEQ ID NO: 203490 - DNA, 25 bp, Homo sapien
cgtcctgttcgctgggtgatggcaa

SEQ ID NO: 203491 - DNA, 25 bp, Homo sapien
cgtgtttgctaatgacaggctggtc

SEQ ID NO: 203492 - DNA, 25 bp, Homo sapien
catatcataaggtacaactgggctg

SEQ ID NO: 203493 - DNA, 25 bp, Homo sapien
tatggatgccagagacaaggagtcg

SEQ ID NO: 203494 - DNA, 25 bp, Homo sapien
agaacctttcctgtctgggctcttc

SEQ ID NO: 203495 - DNA, 25 bp, Homo sapien
tcagaacctttcctgtctgggctct

SEQ ID NO: 203496 - DNA, 25 bp, Homo sapien
tgggctcttctttgctgtgttaaat

SEQ ID NO: 203497 - DNA, 25 bp, Homo sapien
ttctcagaacctttcctgtctgggc

SEQ ID NO: 203498 - DNA, 25 bp, Homo sapien
cgggtaagagggtaagcgcggagcg

SEQ ID NO: 203499 - DNA, 25 bp, Homo sapien
ggagcgagcagcctcggaacccgct

SEQ ID NO: 203500 - DNA, 25 bp, Homo sapien
tgagcggcgcactggtccaggtaga

SEQ ID NO: 203501 - DNA, 25 bp, Homo sapien
ccatggaccgtaatcccactgttgg

SEQ ID NO: 203502 - DNA, 25 bp, Homo sapien
tgttgagaaacattgttcactaggg

SEQ ID NO: 203503 - DNA, 25 bp, Homo sapien
tctccatgaggggaataccttctgg

SEQ ID NO: 203504 - DNA, 25 bp, Homo sapien
tctctggcaagaataatgaagatgg

SEQ ID NO: 203505 - DNA, 25 bp, Homo sapien
actagggggcgcactttcatctcca

SEQ ID NO: 203506 - DNA, 25 bp, Homo sapien
gccaccactaaaggcttccacagct

SEQ ID NO: 203507 - DNA, 25 bp, Homo sapien
gagccaccactaaaggcttccacag

SEQ ID NO: 203508 - DNA, 25 bp, Homo sapien
agccaccactaaaggcttccacagc

SEQ ID NO: 203509 - DNA, 25 bp, Homo sapien
gaagtatggggtccttcttgggcca

SEQ ID NO: 203510 - DNA, 25 bp, Homo sapien
ggactcaaagagacttggcaatcaa

SEQ ID NO: 203511 - DNA, 25 bp, Homo sapien
caatcaatagattcttgatctaact

SEQ ID NO: 203512 - DNA, 25 bp, Homo sapien
tgatctaacttgctaagtaggttgg

SEQ ID NO: 203513 - DNA, 25 bp, Homo sapien
tggaaattgtttcaataccccatgt

SEQ ID NO: 203514 - DNA, 25 bp, Homo sapien
taggttgaggactttcccttctctg

SEQ ID NO: 203515 - DNA, 25 bp, Homo sapien
tccgcttatgtgagctaaacctttg

SEQ ID NO: 203516 - DNA, 25 bp, Homo sapien
aataccccatgtcgccttcctttgg

SEQ ID NO: 203517 - DNA, 25 bp, Homo sapien
ccatgctgtttttgtcccatcttcc

SEQ ID NO: 203518 - DNA, 25 bp, Homo sapien
tccttggtccatgctgtttttgtcc

SEQ ID NO: 203519 - DNA, 25 bp, Homo sapien
ccaagccaactgtccttggtccatg

SEQ ID NO: 203520 - DNA, 25 bp, Homo sapien
taggaaccaagccaactgtccttgg

SEQ ID NO: 203521 - DNA, 25 bp, Homo sapien
gctcaaccccagagtgcatttctcc

SEQ ID NO: 203522 - DNA, 25 bp, Homo sapien
tctaaacgttgttcatacctccgct

SEQ ID NO: 203523 - DNA, 25 bp, Homo sapien
tctgcaatcctgagtctaaacgttg

SEQ ID NO: 203524 - DNA, 25 bp, Homo sapien
ttcatacctccgctccagatcattt

SEQ ID NO: 203525 - DNA, 25 bp, Homo sapien
cctttctggcatctactctgggctc

SEQ ID NO: 203526 - DNA, 25 bp, Homo sapien
tgccacgagtctctgcttccactgc

SEQ ID NO: 203527 - DNA, 25 bp, Homo sapien
gcctctgcatatctcgttccttttg

SEQ ID NO: 203528 - DNA, 25 bp, Homo sapien
cgttccttttgcatagcctatgtac

SEQ ID NO: 203529 - DNA, 25 bp, Homo sapien
tgttagatgagagcacttcagagat

SEQ ID NO: 203530 - DNA, 25 bp, Homo sapien
gcacttactctgtgctttacatgaa

SEQ ID NO: 203531 - DNA, 25 bp, Homo sapien
gaaactaaatcttctatggccatag

SEQ ID NO: 203532 - DNA, 25 bp, Homo sapien
tatgtgcagaaaggttgatactggg

SEQ ID NO: 203533 - DNA, 25 bp, Homo sapien
ccctttgtttccaacagtctgccct

SEQ ID NO: 203534 - DNA, 25 bp, Homo sapien
gcctcttctggaggccctttgtttc

SEQ ID NO: 203535 - DNA, 25 bp, Homo sapien
agcctcttctggaggccctttgttt

SEQ ID NO: 203536 - DNA, 25 bp, Homo sapien
ggccctttgtttccaacagtctgcc

SEQ ID NO: 203537 - DNA, 25 bp, Homo sapien
tgtatcacaatccactaaggactga

SEQ ID NO: 203538 - DNA, 25 bp, Homo sapien
taaggactgatttatgcctttgtac

SEQ ID NO: 203539 - DNA, 25 bp, Homo sapien
ttcctcctgcagtaaagtactagca

SEQ ID NO: 203540 - DNA, 25 bp, Homo sapien
ctgatttatgcctttgtacttctca

SEQ ID NO: 203541 - DNA, 25 bp, Homo sapien
taaaaggactaaagatagagggatc

SEQ ID NO: 203542 - DNA, 25 bp, Homo sapien
tgatgatcttgtacttgttaaaaga

SEQ ID NO: 203543 - DNA, 25 bp, Homo sapien
tagagggatcaattataagggttgg

SEQ ID NO: 203544 - DNA, 25 bp, Homo sapien
tatgatgctgagattatttctgcct

SEQ ID NO: 203545 - DNA, 25 bp, Homo sapien
ctggtcggagtgtagcagtgaaaac

SEQ ID NO: 203546 - DNA, 25 bp, Homo sapien
tcggagtgtagcagtgaaaacaacc

SEQ ID NO: 203547 - DNA, 25 bp, Homo sapien
ttttagactgtatggggtagcttcc

SEQ ID NO: 203548 - DNA, 25 bp, Homo sapien
aaacaaccaaaggtcactctcttca

SEQ ID NO: 203549 - DNA, 25 bp, Homo sapien
atcttcttgctgtataagtagtagg

SEQ ID NO: 203550 - DNA, 25 bp, Homo sapien
cttcttgctgtataagtagtaggag

SEQ ID NO: 203551 - DNA, 25 bp, Homo sapien
gtaatcttcttgctgtataagtagt

SEQ ID NO: 203552 - DNA, 25 bp, Homo sapien
cttgctgtataagtagtaggagtca

SEQ ID NO: 203553 - DNA, 25 bp, Homo sapien
gtgcacagtaatgcatatacataat

SEQ ID NO: 203554 - DNA, 25 bp, Homo sapien
gagatgccattaggctgcatctgca

SEQ ID NO: 203555 - DNA, 25 bp, Homo sapien
tctatggattgagaagtctctctct

SEQ ID NO: 203556 - DNA, 25 bp, Homo sapien
gctgcatctgcatacaactgttgtg

SEQ ID NO: 203557 - DNA, 25 bp, Homo sapien
ccaacctggatgatagagcatgact

SEQ ID NO: 203558 - DNA, 25 bp, Homo sapien
tgatagcgcaacagggtaactataa

SEQ ID NO: 203559 - DNA, 25 bp, Homo sapien
gcaacagggtaactataatcaataa

SEQ ID NO: 203560 - DNA, 25 bp, Homo sapien
tagcgcaacagggtaactataatca

SEQ ID NO: 203561 - DNA, 25 bp, Homo sapien
cagaatactccttataaaaccctgg

SEQ ID NO: 203562 - DNA, 25 bp, Homo sapien
tatgaggccagggattactgggaca

SEQ ID NO: 203563 - DNA, 25 bp, Homo sapien
catcctgctaggtttggaagtcatc

SEQ ID NO: 203564 - DNA, 25 bp, Homo sapien
caccaagtcctctcgtatgaggcca

SEQ ID NO: 203565 - DNA, 25 bp, Homo sapien
ggagcaactggacacctacatggat

SEQ ID NO: 203566 - DNA, 25 bp, Homo sapien
ggcagaagccctatacagatacctg

SEQ ID NO: 203567 - DNA, 25 bp, Homo sapien
tcaagagaataagaagcccaggaga

SEQ ID NO: 203568 - DNA, 25 bp, Homo sapien
tgaaaatgacactgagtccaggcac

SEQ ID NO: 203569 - DNA, 25 bp, Homo sapien
ctgagatatcctcccgtaggtgaat

SEQ ID NO: 203570 - DNA, 25 bp, Homo sapien
taaaaactatgagacaaaactacag

SEQ ID NO: 203571 - DNA, 25 bp, Homo sapien
tggaagaacgtaaaaactatgagac

SEQ ID NO: 203572 - DNA, 25 bp, Homo sapien
tttgaaagcaactgagatatcctcc

SEQ ID NO: 203573 - DNA, 25 bp, Homo sapien
caggctacatggctctcagagaaat

SEQ ID NO: 203574 - DNA, 25 bp, Homo sapien
cctgaccttatttgacttggatacc

SEQ ID NO: 203575 - DNA, 25 bp, Homo sapien
aaagccagggtagatacatgccatc

SEQ ID NO: 203576 - DNA, 25 bp, Homo sapien
ccatatcagatgtctaaggtagcat

SEQ ID NO: 203577 - DNA, 25 bp, Homo sapien
ggcatataaagctgtccacaccacg

SEQ ID NO: 203578 - DNA, 25 bp, Homo sapien
tgagattttggatgtgcgccaccat

SEQ ID NO: 203579 - DNA, 25 bp, Homo sapien
gcacagtagcatggtaacttccctg

SEQ ID NO: 203580 - DNA, 25 bp, Homo sapien
caacatctagatctgagctctgaga

SEQ ID NO: 203581 - DNA, 25 bp, Homo sapien
gcactagttcatatggcagctcaga

SEQ ID NO: 203582 - DNA, 25 bp, Homo sapien
caaggtttcaccagcggcatttatc

SEQ ID NO: 203583 - DNA, 25 bp, Homo sapien
gcagctcagacatagactcaaggat

SEQ ID NO: 203584 - DNA, 25 bp, Homo sapien
tggcaggcacagtctgagaaacact

SEQ ID NO: 203585 - DNA, 25 bp, Homo sapien
ccatatgatacagggctgtgggtcc

SEQ ID NO: 203586 - DNA, 25 bp, Homo sapien
gattctggtggccaggagactcaac

SEQ ID NO: 203587 - DNA, 25 bp, Homo sapien
tacaccgaggtgctcatgagtaggc

SEQ ID NO: 203588 - DNA, 25 bp, Homo sapien
tctgagccaatctctggacaaaggt

SEQ ID NO: 203589 - DNA, 25 bp, Homo sapien
ccggcagaaacagatctgtaaccgt

SEQ ID NO: 203590 - DNA, 25 bp, Homo sapien
aacagatctgtaaccgtcagtgtga

SEQ ID NO: 203591 - DNA, 25 bp, Homo sapien
atctgtaaccgtcagtgtgatgctg

SEQ ID NO: 203592 - DNA, 25 bp, Homo sapien
ctgggttttatgttgttgtggatcc

SEQ ID NO: 203593 - DNA, 25 bp, Homo sapien
tgaggagcggaaaaaaccagtgatg

SEQ ID NO: 203594 - DNA, 25 bp, Homo sapien
gcaattccagatccaagtgtaaaag

SEQ ID NO: 203595 - DNA, 25 bp, Homo sapien
tccaacgtcacgcatctgaggagcg

SEQ ID NO: 203596 - DNA, 25 bp, Homo sapien
caagaggaagacactttgtgggtca

SEQ ID NO: 203597 - DNA, 25 bp, Homo sapien
tctgtccctggggtgtcaaagtgac

SEQ ID NO: 203598 - DNA, 25 bp, Homo sapien
ggcttgcttgcttcagctttatctc

SEQ ID NO: 203599 - DNA, 25 bp, Homo sapien
tagagacttcaatacctcacggagt

SEQ ID NO: 203600 - DNA, 25 bp, Homo sapien
tataatgaggttcccctagagactt

SEQ ID NO: 203601 - DNA, 25 bp, Homo sapien
tacttattgaatggaacaagcccag

SEQ ID NO: 203602 - DNA, 25 bp, Homo sapien
ggtcgtcctatcagagtataagcag

SEQ ID NO: 203603 - DNA, 25 bp, Homo sapien
ttgttctgggaaggcttgcatccat

SEQ ID NO: 203604 - DNA, 25 bp, Homo sapien
ctgttgttctgggaaggcttgcatc

SEQ ID NO: 203605 - DNA, 25 bp, Homo sapien
tgttgttctgggaaggcttgcatcc

SEQ ID NO: 203606 - DNA, 25 bp, Homo sapien
gttgttctgggaaggcttgcatcca

SEQ ID NO: 203607 - DNA, 25 bp, Homo sapien
cctcttcttttggtgatggtgcccc

SEQ ID NO: 203608 - DNA, 25 bp, Homo sapien
tcttcttttggtgatggtgccccag

SEQ ID NO: 203609 - DNA, 25 bp, Homo sapien
cttttggtgatggtgccccaggcat

SEQ ID NO: 203610 - DNA, 25 bp, Homo sapien
ttcttttggtgatggtgccccaggc

SEQ ID NO: 203611 - DNA, 25 bp, Homo sapien
cacctttcacgcaatgagtggcaga

SEQ ID NO: 203612 - DNA, 25 bp, Homo sapien
gaactgcctgtctcgtatagcctgg

SEQ ID NO: 203613 - DNA, 25 bp, Homo sapien
cacgtacatgggaatcggagtcaaa

SEQ ID NO: 203614 - DNA, 25 bp, Homo sapien
tattcattggtcacagcagtcacag

SEQ ID NO: 203615 - DNA, 25 bp, Homo sapien
tccgtctccattacttgggtgaaag

SEQ ID NO: 203616 - DNA, 25 bp, Homo sapien
tagctaatgacttctagatctgcag

SEQ ID NO: 203617 - DNA, 25 bp, Homo sapien
tgaaagtggacctggaatcctccag

SEQ ID NO: 203618 - DNA, 25 bp, Homo sapien
gcagctgaagaagtttcgatgaacc

SEQ ID NO: 203619 - DNA, 25 bp, Homo sapien
acggcttcgcttttcaacaaagctg

SEQ ID NO: 203620 - DNA, 25 bp, Homo sapien
ttctggcacacgctcagaagatagc

SEQ ID NO: 203621 - DNA, 25 bp, Homo sapien
ggactaacggcttcgcttttcaaca

SEQ ID NO: 203622 - DNA, 25 bp, Homo sapien
gaagatagccagtacttcagagaca

SEQ ID NO: 203623 - DNA, 25 bp, Homo sapien
ccagtggacggggaggatcgctgcc

SEQ ID NO: 203624 - DNA, 25 bp, Homo sapien
agtggacggggaggatcgctgccat

SEQ ID NO: 203625 - DNA, 25 bp, Homo sapien
ttgccagtggacggggaggatcgct

SEQ ID NO: 203626 - DNA, 25 bp, Homo sapien
tgccagtggacggggaggatcgctg

SEQ ID NO: 203627 - DNA, 25 bp, Homo sapien
aacgcaggggattccgctgagcctc

SEQ ID NO: 203628 - DNA, 25 bp, Homo sapien
cagcccctgagcgtccaccttcggc

SEQ ID NO: 203629 - DNA, 25 bp, Homo sapien
ccctgagcgtccaccttcggcccag

SEQ ID NO: 203630 - DNA, 25 bp, Homo sapien
gagagcggggctactgaacgcaggg

SEQ ID NO: 203631 - DNA, 25 bp, Homo sapien
gaatcccgagccggccagccgcgag

SEQ ID NO: 203632 - DNA, 25 bp, Homo sapien
ccggaatcccgagccggccagccgc

SEQ ID NO: 203633 - DNA, 25 bp, Homo sapien
gcccggaatcccgagccggccagcc

SEQ ID NO: 203634 - DNA, 25 bp, Homo sapien
aagcccggaatcccgagccggccag

SEQ ID NO: 203635 - DNA, 25 bp, Homo sapien
agcgagtaccggagcgcgtgggcag

SEQ ID NO: 203636 - DNA, 25 bp, Homo sapien
cagcgagtaccggagcgcgtgggca

SEQ ID NO: 203637 - DNA, 25 bp, Homo sapien
aagccgcccgtttcctgccgagcgg

SEQ ID NO: 203638 - DNA, 25 bp, Homo sapien
agacgccaggacgtgccgggtccgc

SEQ ID NO: 203639 - DNA, 25 bp, Homo sapien
tttcctgccgagcggcgcgacggca

SEQ ID NO: 203640 - DNA, 25 bp, Homo sapien
gacggcacctgagcgactgcggcgg

SEQ ID NO: 203641 - DNA, 25 bp, Homo sapien
gaggcggttgggcacggaaagcagc

SEQ ID NO: 203642 - DNA, 25 bp, Homo sapien
tcctcggccggtggacggaggcagc

SEQ ID NO: 203643 - DNA, 25 bp, Homo sapien
acacttacgccatgctggagttcca

SEQ ID NO: 203644 - DNA, 25 bp, Homo sapien
ccctttgcgagtccccaggtcaggg

SEQ ID NO: 203645 - DNA, 25 bp, Homo sapien
acacaataattaaatcctggctggg

SEQ ID NO: 203646 - DNA, 25 bp, Homo sapien
gtctgcacagaaaagcaccactagg

SEQ ID NO: 203647 - DNA, 25 bp, Homo sapien
cagaaaagacggagttgtaggagct

SEQ ID NO: 203648 - DNA, 25 bp, Homo sapien
tcttgctctgcatatgtacacgaag

SEQ ID NO: 203649 - DNA, 25 bp, Homo sapien
caacacgggaaatagaacacatgca

SEQ ID NO: 203650 - DNA, 25 bp, Homo sapien
gcttgcactcgacccatgatgtaca

SEQ ID NO: 203651 - DNA, 25 bp, Homo sapien
caagactaagtagtgttccagtggc

SEQ ID NO: 203652 - DNA, 25 bp, Homo sapien
tactactggcatagatacggaagtc

SEQ ID NO: 203653 - DNA, 25 bp, Homo sapien
tgtatctttagacgccagagtgtca

SEQ ID NO: 203654 - DNA, 25 bp, Homo sapien
gctggtctgtgagtactacccaaaa

SEQ ID NO: 203655 - DNA, 25 bp, Homo sapien
gaaagacctagccaatacagggaag

SEQ ID NO: 203656 - DNA, 25 bp, Homo sapien
tagtttagttcaatcagctggtctg

SEQ ID NO: 203657 - DNA, 25 bp, Homo sapien
gaataccatgaaggctgttttggaa

SEQ ID NO: 203658 - DNA, 25 bp, Homo sapien
tagaaattccgggtgtgatggcatg

SEQ ID NO: 203659 - DNA, 25 bp, Homo sapien
tctttttagcccaggaagttcgcac

SEQ ID NO: 203660 - DNA, 25 bp, Homo sapien
caagttaaactatactttgcagggt

SEQ ID NO: 203661 - DNA, 25 bp, Homo sapien
aattttaggatagatgtggtagctc

SEQ ID NO: 203662 - DNA, 25 bp, Homo sapien
tagacttggatttaatatcagcaca

SEQ ID NO: 203663 - DNA, 25 bp, Homo sapien
gcagagtccatatacaagtgtcaga

SEQ ID NO: 203664 - DNA, 25 bp, Homo sapien
tttggtgcgtgataagtcattaccc

SEQ ID NO: 203665 - DNA, 25 bp, Homo sapien
gaagtaatatgccatcagttgctcc

SEQ ID NO: 203666 - DNA, 25 bp, Homo sapien
aacaaagggtatgtagatgtctgcc

SEQ ID NO: 203667 - DNA, 25 bp, Homo sapien
tcttggcatctatccagttgggcca

SEQ ID NO: 203668 - DNA, 25 bp, Homo sapien
cagtggcattgtcttggcatctatc

SEQ ID NO: 203669 - DNA, 25 bp, Homo sapien
gaccagacatgagtcatgttaggga

SEQ ID NO: 203670 - DNA, 25 bp, Homo sapien
catcatcaccgactttggggcagga

SEQ ID NO: 203671 - DNA, 25 bp, Homo sapien
atcaccgactttggggcaggatagc

SEQ ID NO: 203672 - DNA, 25 bp, Homo sapien
atcatcatcaccgactttggggcag

SEQ ID NO: 203673 - DNA, 25 bp, Homo sapien
ttggggcaggatagcaggaaagtga

SEQ ID NO: 203674 - DNA, 25 bp, Homo sapien
gcagactcttgactcctccatgaag

SEQ ID NO: 203675 - DNA, 25 bp, Homo sapien
caaaagtgtttgctcaagaataagc

SEQ ID NO: 203676 - DNA, 25 bp, Homo sapien
ggcctaatgggatgtggcagactct

SEQ ID NO: 203677 - DNA, 25 bp, Homo sapien
caggccagcacctgcgatgagggct

SEQ ID NO: 203678 - DNA, 25 bp, Homo sapien
tcagtcttggggttcctgaggtgac

SEQ ID NO: 203679 - DNA, 25 bp, Homo sapien
tactgtggcgatgttgacttctctt

SEQ ID NO: 203680 - DNA, 25 bp, Homo sapien
gcagaccattctgactcttcctaca

SEQ ID NO: 203681 - DNA, 25 bp, Homo sapien
cttcttggctctcgtatgcagacca

SEQ ID NO: 203682 - DNA, 25 bp, Homo sapien
catccacacttttcttactgtggcg

SEQ ID NO: 203683 - DNA, 25 bp, Homo sapien
tctggctctgtatccagggcaggag

SEQ ID NO: 203684 - DNA, 25 bp, Homo sapien
ttctggctctgtatccagggcagga

SEQ ID NO: 203685 - DNA, 25 bp, Homo sapien
ctggctctgtatccagggcaggagc

SEQ ID NO: 203686 - DNA, 25 bp, Homo sapien
ctgcacattttctttcagccaggca

SEQ ID NO: 203687 - DNA, 25 bp, Homo sapien
acattttctttcagccaggcaaagc

SEQ ID NO: 203688 - DNA, 25 bp, Homo sapien
tttctttcagccaggcaaagcctac

SEQ ID NO: 203689 - DNA, 25 bp, Homo sapien
tgctgcacattttctttcagccagg

SEQ ID NO: 203690 - DNA, 25 bp, Homo sapien
tttcctggcaggcaaggatgcagag

SEQ ID NO: 203691 - DNA, 25 bp, Homo sapien
actttcctggcaggcaaggatgcag

SEQ ID NO: 203692 - DNA, 25 bp, Homo sapien
cttactttcctggcaggcaaggatg

SEQ ID NO: 203693 - DNA, 25 bp, Homo sapien
tactttcctggcaggcaaggatgca

SEQ ID NO: 203694 - DNA, 25 bp, Homo sapien
cagattagcagccagttcctttatc

SEQ ID NO: 203695 - DNA, 25 bp, Homo sapien
ttcagggcacagattagcagccagt

SEQ ID NO: 203696 - DNA, 25 bp, Homo sapien
acaaggagtgttgggttcagggcac

SEQ ID NO: 203697 - DNA, 25 bp, Homo sapien
cctacaaggagtgttgggttcaggg

SEQ ID NO: 203698 - DNA, 25 bp, Homo sapien
agaaagcaacccagcagaacccaca

SEQ ID NO: 203699 - DNA, 25 bp, Homo sapien
catgacttcagagtgccctaggctg

SEQ ID NO: 203700 - DNA, 25 bp, Homo sapien
ttcagagtgccctaggctgggtcag

SEQ ID NO: 203701 - DNA, 25 bp, Homo sapien
gagagaaaggatcaatccatgactt

SEQ ID NO: 203702 - DNA, 25 bp, Homo sapien
attagttttcgcatggaagggctgc

SEQ ID NO: 203703 - DNA, 25 bp, Homo sapien
gcacctccgggtgtgtgaagttgaa

SEQ ID NO: 203704 - DNA, 25 bp, Homo sapien
gaagttgaagcattagttttcgcat

SEQ ID NO: 203705 - DNA, 25 bp, Homo sapien
aagcagacagagttgtgagcccccg

SEQ ID NO: 203706 - DNA, 25 bp, Homo sapien
tggcgggtaccatgaaccattcact

SEQ ID NO: 203707 - DNA, 25 bp, Homo sapien
ttatgaattttgattgacctctgcc

SEQ ID NO: 203708 - DNA, 25 bp, Homo sapien
caagttatcagcacccatgtttcct

SEQ ID NO: 203709 - DNA, 25 bp, Homo sapien
tcactacttgtgcttgggctgagtc

SEQ ID NO: 203710 - DNA, 25 bp, Homo sapien
ctgattcttgtctaaaagcctgctg

SEQ ID NO: 203711 - DNA, 25 bp, Homo sapien
aatcatcaccagtgttccatatctg

SEQ ID NO: 203712 - DNA, 25 bp, Homo sapien
atcaccagtgttccatatctggtac

SEQ ID NO: 203713 - DNA, 25 bp, Homo sapien
catcaccagtgttccatatctggta

SEQ ID NO: 203714 - DNA, 25 bp, Homo sapien
tcatcaccagtgttccatatctggt

SEQ ID NO: 203715 - DNA, 25 bp, Homo sapien
acattagtacagaggtgctgcacag

SEQ ID NO: 203716 - DNA, 25 bp, Homo sapien
ttagtacagaggtgctgcacagagg

SEQ ID NO: 203717 - DNA, 25 bp, Homo sapien
tgtgataagtcagtagaggtgacat

SEQ ID NO: 203718 - DNA, 25 bp, Homo sapien
aattcaatgtgataagtcagtagag

SEQ ID NO: 203719 - DNA, 25 bp, Homo sapien
tacataagaaatcacaagctgccag

SEQ ID NO: 203720 - DNA, 25 bp, Homo sapien
taagaaatcacaagctgccagccag

SEQ ID NO: 203721 - DNA, 25 bp, Homo sapien
catttacataagaaatcacaagctg

SEQ ID NO: 203722 - DNA, 25 bp, Homo sapien
cataagaaatcacaagctgccagcc

SEQ ID NO: 203723 - DNA, 25 bp, Homo sapien
cactggaagcttccgaaacgccaca

SEQ ID NO: 203724 - DNA, 25 bp, Homo sapien
gaagcttccgaaacgccacaggctc

SEQ ID NO: 203725 - DNA, 25 bp, Homo sapien
ggaagcttccgaaacgccacaggct

SEQ ID NO: 203726 - DNA, 25 bp, Homo sapien
ctggaagcttccgaaacgccacagg

SEQ ID NO: 203727 - DNA, 25 bp, Homo sapien
gggcctcctggagacccatgaatga

SEQ ID NO: 203728 - DNA, 25 bp, Homo sapien
gggccactgtgtttttggacgatgt

SEQ ID NO: 203729 - DNA, 25 bp, Homo sapien
gagacccatgaatgacatctgggcc

SEQ ID NO: 203730 - DNA, 25 bp, Homo sapien
ttggacgatgttcattaggtcagaa

SEQ ID NO: 203731 - DNA, 25 bp, Homo sapien
gaacagtccccccaatattgtccga

SEQ ID NO: 203732 - DNA, 25 bp, Homo sapien
tggtctattctggataaatgcaatc

SEQ ID NO: 203733 - DNA, 25 bp, Homo sapien
tccatggtctattctggataaatgc

SEQ ID NO: 203734 - DNA, 25 bp, Homo sapien
ttgtccgaaaagctcacacctccat

SEQ ID NO: 203735 - DNA, 25 bp, Homo sapien
ccttgctgttctcgaaagatttgag

SEQ ID NO: 203736 - DNA, 25 bp, Homo sapien
gctgttctcgaaagatttgaggtat

SEQ ID NO: 203737 - DNA, 25 bp, Homo sapien
gctccttgctgttctcgaaagattt

SEQ ID NO: 203738 - DNA, 25 bp, Homo sapien
tctcgaaagatttgaggtatttaac

SEQ ID NO: 203739 - DNA, 25 bp, Homo sapien
tcagaggtggccatacgtttggctc

SEQ ID NO: 203740 - DNA, 25 bp, Homo sapien
gaaggaagataaaggcaatgcttgg

SEQ ID NO: 203741 - DNA, 25 bp, Homo sapien
agtggtcagaggtggccatacgttt

SEQ ID NO: 203742 - DNA, 25 bp, Homo sapien
ggcgtgataagctacccagaaatgt

SEQ ID NO: 203743 - DNA, 25 bp, Homo sapien
aacagaaggaacacaatttatattt

SEQ ID NO: 203744 - DNA, 25 bp, Homo sapien
caatttatatttagaaaagtgaagc

SEQ ID NO: 203745 - DNA, 25 bp, Homo sapien
ctagaagccaaaacagaaggaacac

SEQ ID NO: 203746 - DNA, 25 bp, Homo sapien
cacaatttatatttagaaaagtgaa

SEQ ID NO: 203747 - DNA, 25 bp, Homo sapien
caggctcatcaagaagcagctagat

SEQ ID NO: 203748 - DNA, 25 bp, Homo sapien
cttggatgccacatgtaaagactgg

SEQ ID NO: 203749 - DNA, 25 bp, Homo sapien
acaagaagtccaaggcacaagaagc

SEQ ID NO: 203750 - DNA, 25 bp, Homo sapien
aactgcaagtcctgccacacagtga

SEQ ID NO: 203751 - DNA, 25 bp, Homo sapien
cctatgctgtcaccaaaattcagca

SEQ ID NO: 203752 - DNA, 25 bp, Homo sapien
ctatgctgtcaccaaaattcagcat

SEQ ID NO: 203753 - DNA, 25 bp, Homo sapien
gatgagagagctcttggacaggtca

SEQ ID NO: 203754 - DNA, 25 bp, Homo sapien
tgagagagctcttggacaggtcaac

SEQ ID NO: 203755 - DNA, 25 bp, Homo sapien
atgagagagctcttggacaggtcaa

SEQ ID NO: 203756 - DNA, 25 bp, Homo sapien
cacaggcctatacagttctgaaggc

SEQ ID NO: 203757 - DNA, 25 bp, Homo sapien
acatggatgtaaagactggtgccca

SEQ ID NO: 203758 - DNA, 25 bp, Homo sapien
cccctggagtcgttggtaccagtca

SEQ ID NO: 203759 - DNA, 25 bp, Homo sapien
taccagtcagacttgatgggattgt

SEQ ID NO: 203760 - DNA, 25 bp, Homo sapien
gattgtaggtgttatccgccccttg

SEQ ID NO: 203761 - DNA, 25 bp, Homo sapien
gaatcagaaggttaaaagctcccca

SEQ ID NO: 203762 - DNA, 25 bp, Homo sapien
tgtagtatgtgtctcatgggcctga

SEQ ID NO: 203763 - DNA, 25 bp, Homo sapien
cattcttagaagagttaccagggca

SEQ ID NO: 203764 - DNA, 25 bp, Homo sapien
aactactactattccagctctgatg

SEQ ID NO: 203765 - DNA, 25 bp, Homo sapien
ctactactattccagctctgatggc

SEQ ID NO: 203766 - DNA, 25 bp, Homo sapien
ttaactactactattccagctctga

SEQ ID NO: 203767 - DNA, 25 bp, Homo sapien
actactactattccagctctgatgg

SEQ ID NO: 203768 - DNA, 25 bp, Homo sapien
ccctttgatgagtgagtcgctgaga

SEQ ID NO: 203769 - DNA, 25 bp, Homo sapien
tagaatcttgcttgggcagccagtg

SEQ ID NO: 203770 - DNA, 25 bp, Homo sapien
gagtcgctgagaattattccaagcc

SEQ ID NO: 203771 - DNA, 25 bp, Homo sapien
gcttctagatagatgccctttgatg

SEQ ID NO: 203772 - DNA, 25 bp, Homo sapien
tcctcaaaccaagggctcattgctg

SEQ ID NO: 203773 - DNA, 25 bp, Homo sapien
gcttcagctcttaagtgggacccta

SEQ ID NO: 203774 - DNA, 25 bp, Homo sapien
tgaaatgtgcattgatcacctgcct

SEQ ID NO: 203775 - DNA, 25 bp, Homo sapien
caaggtgttggccagctatggtccc

SEQ ID NO: 203776 - DNA, 25 bp, Homo sapien
tactgaagggagctgtatgtggcaa

SEQ ID NO: 203777 - DNA, 25 bp, Homo sapien
agctgtatgtggcaagatgctgcca

SEQ ID NO: 203778 - DNA, 25 bp, Homo sapien
tatgtggcaagatgctgccagttct

SEQ ID NO: 203779 - DNA, 25 bp, Homo sapien
tcagaaagggctactgaagggagct

SEQ ID NO: 203780 - DNA, 25 bp, Homo sapien
tctccaaatgcaggttagactgagc

SEQ ID NO: 203781 - DNA, 25 bp, Homo sapien
tgttaagtcagttaagcaggccata

SEQ ID NO: 203782 - DNA, 25 bp, Homo sapien
caactttgctgagtgcttgggtata

SEQ ID NO: 203783 - DNA, 25 bp, Homo sapien
tgtgtctcattaccttagcctggag

SEQ ID NO: 203784 - DNA, 25 bp, Homo sapien
atctctctgagaccccaaagaggga

SEQ ID NO: 203785 - DNA, 25 bp, Homo sapien
gagtccttgccaccaatctctctga

SEQ ID NO: 203786 - DNA, 25 bp, Homo sapien
ctcttgccagagtgtccttcagctt

SEQ ID NO: 203787 - DNA, 25 bp, Homo sapien
ttgccagagtgtccttcagcttttc

SEQ ID NO: 203788 - DNA, 25 bp, Homo sapien
gatgattcagtaggaggactcacag

SEQ ID NO: 203789 - DNA, 25 bp, Homo sapien
cctggctttgatgattcagtaggag

SEQ ID NO: 203790 - DNA, 25 bp, Homo sapien
ccctggctttgatgattcagtagga

SEQ ID NO: 203791 - DNA, 25 bp, Homo sapien
cccctggctttgatgattcagtagg

SEQ ID NO: 203792 - DNA, 25 bp, Homo sapien
ggggcgagtggcagggtagcaattt

SEQ ID NO: 203793 - DNA, 25 bp, Homo sapien
cgagtggcagggtagcaatttcact

SEQ ID NO: 203794 - DNA, 25 bp, Homo sapien
tgtagggggcgagtggcagggtagc

SEQ ID NO: 203795 - DNA, 25 bp, Homo sapien
tagggggcgagtggcagggtagcaa

SEQ ID NO: 203796 - DNA, 25 bp, Homo sapien
cacagtcatatcttacatggcagaa

SEQ ID NO: 203797 - DNA, 25 bp, Homo sapien
gcacagtcatatcttacatggcaga

SEQ ID NO: 203798 - DNA, 25 bp, Homo sapien
aggtgaaggaggagcacagtcatat

SEQ ID NO: 203799 - DNA, 25 bp, Homo sapien
tgaaggaggagcacagtcatatctt

SEQ ID NO: 203800 - DNA, 25 bp, Homo sapien
aaagctgtagttgcagaaaacttct

SEQ ID NO: 203801 - DNA, 25 bp, Homo sapien
tcacctgggtgaactgtttatcagc

SEQ ID NO: 203802 - DNA, 25 bp, Homo sapien
agcctgggaataaggagacgtttct

SEQ ID NO: 203803 - DNA, 25 bp, Homo sapien
tcaatggtggaccttcaatgtgggc

SEQ ID NO: 203804 - DNA, 25 bp, Homo sapien
caaagtaagatccacaacttgatgg

SEQ ID NO: 203805 - DNA, 25 bp, Homo sapien
agagagactgcatcattactaagcc

SEQ ID NO: 203806 - DNA, 25 bp, Homo sapien
gcatcattactaagcccagcacctg

SEQ ID NO: 203807 - DNA, 25 bp, Homo sapien
tgatggagataccagactgacccag

SEQ ID NO: 203808 - DNA, 25 bp, Homo sapien
tgtcatagctgaggttgaatcatgt

SEQ ID NO: 203809 - DNA, 25 bp, Homo sapien
tcctgtcatagctgaggttgaatca

SEQ ID NO: 203810 - DNA, 25 bp, Homo sapien
catagctgaggttgaatcatgtgac

SEQ ID NO: 203811 - DNA, 25 bp, Homo sapien
cctgtcatagctgaggttgaatcat

SEQ ID NO: 203812 - DNA, 25 bp, Homo sapien
gactcctccatttgcatctctgtct

SEQ ID NO: 203813 - DNA, 25 bp, Homo sapien
tctttctctattcaggcctttctcc

SEQ ID NO: 203814 - DNA, 25 bp, Homo sapien
tttgtctttgactcctccatttgca

SEQ ID NO: 203815 - DNA, 25 bp, Homo sapien
tcaacatttgtctttgactcctcca

SEQ ID NO: 203816 - DNA, 25 bp, Homo sapien
cctttagttggtggatcttgggtag

SEQ ID NO: 203817 - DNA, 25 bp, Homo sapien
cttgcagattgctcaggccatatgc

SEQ ID NO: 203818 - DNA, 25 bp, Homo sapien
gggcagcagcatgacacgtgctgct

SEQ ID NO: 203819 - DNA, 25 bp, Homo sapien
agggagtggagcttgcagattgctc

SEQ ID NO: 203820 - DNA, 25 bp, Homo sapien
taattagtctcttttggatgactca

SEQ ID NO: 203821 - DNA, 25 bp, Homo sapien
gactcattctcccttgatgatccca

SEQ ID NO: 203822 - DNA, 25 bp, Homo sapien
ggatgactcattctcccttgatgat

SEQ ID NO: 203823 - DNA, 25 bp, Homo sapien
ttctcccttgatgatcccattctct

SEQ ID NO: 203824 - DNA, 25 bp, Homo sapien
ccatatgtcatgtaccagccacggg

SEQ ID NO: 203825 - DNA, 25 bp, Homo sapien
gatgggatttctggactctcactgc

SEQ ID NO: 203826 - DNA, 25 bp, Homo sapien
tgcacgaggcaatgactcagcacct

SEQ ID NO: 203827 - DNA, 25 bp, Homo sapien
tcttgcccacagatggtcctgagtg

SEQ ID NO: 203828 - DNA, 25 bp, Homo sapien
ttttaaggcgcctgttgtggattcc

SEQ ID NO: 203829 - DNA, 25 bp, Homo sapien
gtggattccggtgctttgcttctga

SEQ ID NO: 203830 - DNA, 25 bp, Homo sapien
tcagggctgcttttaaggcgcctgt

SEQ ID NO: 203831 - DNA, 25 bp, Homo sapien
ctttgcttctgatctctggtgaaga

SEQ ID NO: 203832 - DNA, 25 bp, Homo sapien
gccaagatgtgacatagaaagcgta

SEQ ID NO: 203833 - DNA, 25 bp, Homo sapien
cacttcctgaaagttgccaagatgt

SEQ ID NO: 203834 - DNA, 25 bp, Homo sapien
caggggatttggtactggtatctca

SEQ ID NO: 203835 - DNA, 25 bp, Homo sapien
atagaaagcgtatgaggaccccagg

SEQ ID NO: 203836 - DNA, 25 bp, Homo sapien
acatcccggtgtgggtctgaccact

SEQ ID NO: 203837 - DNA, 25 bp, Homo sapien
cggaggcaattctgcagctctgatt

SEQ ID NO: 203838 - DNA, 25 bp, Homo sapien
gcagctctgattcacatcccggtgt

SEQ ID NO: 203839 - DNA, 25 bp, Homo sapien
attcacatcccggtgtgggtctgac

SEQ ID NO: 203840 - DNA, 25 bp, Homo sapien
tgccaatgtcttccggttccctgaa

SEQ ID NO: 203841 - DNA, 25 bp, Homo sapien
ccagtccttgataggtgcggcctgt

SEQ ID NO: 203842 - DNA, 25 bp, Homo sapien
tggcccaaggcgaaaccgatctatt

SEQ ID NO: 203843 - DNA, 25 bp, Homo sapien
tgcggcctgttggagtccacgttca

SEQ ID NO: 203844 - DNA, 25 bp, Homo sapien
cctctgggtgatcacggtggccttc

SEQ ID NO: 203845 - DNA, 25 bp, Homo sapien
gggtgatcacggtggccttcattaa

SEQ ID NO: 203846 - DNA, 25 bp, Homo sapien
gggcctctgggtgatcacggtggcc

SEQ ID NO: 203847 - DNA, 25 bp, Homo sapien
tctgggtgatcacggtggccttcat

SEQ ID NO: 203848 - DNA, 25 bp, Homo sapien
tctccgctttctaacctgaggtgag

SEQ ID NO: 203849 - DNA, 25 bp, Homo sapien
gagctgtggagctgtttataacacc

SEQ ID NO: 203850 - DNA, 25 bp, Homo sapien
tataacaccccaaggactgttgttc

SEQ ID NO: 203851 - DNA, 25 bp, Homo sapien
gaatcttgcactttcccaaccaatg

SEQ ID NO: 203852 - DNA, 25 bp, Homo sapien
cattgtgtgccaagttagcaaggta

SEQ ID NO: 203853 - DNA, 25 bp, Homo sapien
cagttatacactctccagttgttgg

SEQ ID NO: 203854 - DNA, 25 bp, Homo sapien
aatctcagccctaagttttccagcc

SEQ ID NO: 203855 - DNA, 25 bp, Homo sapien
tgatcaaagccatgaccaactgccc

SEQ ID NO: 203856 - DNA, 25 bp, Homo sapien
catggtctggtatcatcaagggaac

SEQ ID NO: 203857 - DNA, 25 bp, Homo sapien
gacgggagctctggatcgctgaaca

SEQ ID NO: 203858 - DNA, 25 bp, Homo sapien
ggacccaaaagcattcgtgaaactg

SEQ ID NO: 203859 - DNA, 25 bp, Homo sapien
ggaacatgtgcaatcgagcccgtta

SEQ ID NO: 203860 - DNA, 25 bp, Homo sapien
taggtcgggatgactctggtatcac

SEQ ID NO: 203861 - DNA, 25 bp, Homo sapien
ctaggtcgggatgactctggtatca

SEQ ID NO: 203862 - DNA, 25 bp, Homo sapien
gcaattcccaacagtggacaggatc

SEQ ID NO: 203863 - DNA, 25 bp, Homo sapien
tcccaacagtggacaggatcaagtc

SEQ ID NO: 203864 - DNA, 25 bp, Homo sapien
tgtccttctggctcccattgagatc

SEQ ID NO: 203865 - DNA, 25 bp, Homo sapien
cttctggctcccattgagatcaagc

SEQ ID NO: 203866 - DNA, 25 bp, Homo sapien
cagtgatgatgtttagtccagtcat

SEQ ID NO: 203867 - DNA, 25 bp, Homo sapien
gtgcaattacaagatcaatcatatg

SEQ ID NO: 203868 - DNA, 25 bp, Homo sapien
tactctgccgctatagtttatagaa

SEQ ID NO: 203869 - DNA, 25 bp, Homo sapien
ggtgcctacagccaagactttcatc

SEQ ID NO: 203870 - DNA, 25 bp, Homo sapien
ccctttcaaactcttagctgtcact

SEQ ID NO: 203871 - DNA, 25 bp, Homo sapien
aaggatctgataattgctcctgtca

SEQ ID NO: 203872 - DNA, 25 bp, Homo sapien
ttgttagttacatgagctaaggaca

SEQ ID NO: 203873 - DNA, 25 bp, Homo sapien
gattgcgagtggctaagcagttttt

SEQ ID NO: 203874 - DNA, 25 bp, Homo sapien
aactggaattgggattgcgagtggc

SEQ ID NO: 203875 - DNA, 25 bp, Homo sapien
tggctaagcagtttttgttagttac

SEQ ID NO: 203876 - DNA, 25 bp, Homo sapien
tcttcaagagagtggtctggggtga

SEQ ID NO: 203877 - DNA, 25 bp, Homo sapien
cccaccctggctcttagtgggttgg

SEQ ID NO: 203878 - DNA, 25 bp, Homo sapien
gatgtgggcgggtcatcctcttcaa

SEQ ID NO: 203879 - DNA, 25 bp, Homo sapien
agtgggttggcagatggcacagcca

SEQ ID NO: 203880 - DNA, 25 bp, Homo sapien
cacagtgacgtcgagagagcgctat

SEQ ID NO: 203881 - DNA, 25 bp, Homo sapien
ggagctctattgaccacaagccggg

SEQ ID NO: 203882 - DNA, 25 bp, Homo sapien
gacacctctagttgtaagccgggac

SEQ ID NO: 203883 - DNA, 25 bp, Homo sapien
tagctacatccagtgcaacggtggg

SEQ ID NO: 203884 - DNA, 25 bp, Homo sapien
ctggcagagcagttagtgatccaag

SEQ ID NO: 203885 - DNA, 25 bp, Homo sapien
ttagtgatccaagaactctttcctg

SEQ ID NO: 203886 - DNA, 25 bp, Homo sapien
gagcagttagtgatccaagaactct

SEQ ID NO: 203887 - DNA, 25 bp, Homo sapien
actggcagagcagttagtgatccaa

SEQ ID NO: 203888 - DNA, 25 bp, Homo sapien
ggatggggtcctgagtgctttgtcc

SEQ ID NO: 203889 - DNA, 25 bp, Homo sapien
cctctggagccttgctttccctgga

SEQ ID NO: 203890 - DNA, 25 bp, Homo sapien
ccaagaaacgaggagaaggacccat

SEQ ID NO: 203891 - DNA, 25 bp, Homo sapien
agaaggacccatagccctgtgctct

SEQ ID NO: 203892 - DNA, 25 bp, Homo sapien
gctgatttgaatgtcttaagtttga

SEQ ID NO: 203893 - DNA, 25 bp, Homo sapien
tccaggttcccttgacggtactctg

SEQ ID NO: 203894 - DNA, 25 bp, Homo sapien
caggttcccttgacggtactctgac

SEQ ID NO: 203895 - DNA, 25 bp, Homo sapien
tcccttgacggtactctgaccctgg

SEQ ID NO: 203896 - DNA, 25 bp, Homo sapien
tgctgcctctgtatccgtggaggag

SEQ ID NO: 203897 - DNA, 25 bp, Homo sapien
atactccgcgatgtgggtcagccag

SEQ ID NO: 203898 - DNA, 25 bp, Homo sapien
gccaggctgcatgccttacctctcc

SEQ ID NO: 203899 - DNA, 25 bp, Homo sapien
tgctttgtgtgctcgatactccgcg

SEQ ID NO: 203900 - DNA, 25 bp, Homo sapien
cgttacagggctcagaaaatggctt

SEQ ID NO: 203901 - DNA, 25 bp, Homo sapien
tggctgtttttgtttaaagtagtca

SEQ ID NO: 203902 - DNA, 25 bp, Homo sapien
aatggctttctctaagaaatggctg

SEQ ID NO: 203903 - DNA, 25 bp, Homo sapien
cagagcgttacagggctcagaaaat

SEQ ID NO: 203904 - DNA, 25 bp, Homo sapien
agcacttagtatggggccttgtaca

SEQ ID NO: 203905 - DNA, 25 bp, Homo sapien
tagtatggggccttgtacaggaata

SEQ ID NO: 203906 - DNA, 25 bp, Homo sapien
tatggggccttgtacaggaataaaa

SEQ ID NO: 203907 - DNA, 25 bp, Homo sapien
atctcagcacttagtatggggcctt

SEQ ID NO: 203908 - DNA, 25 bp, Homo sapien
tattgatcagttaatggacagttgg

SEQ ID NO: 203909 - DNA, 25 bp, Homo sapien
gatcacacaggatttagtcttttga

SEQ ID NO: 203910 - DNA, 25 bp, Homo sapien
tgcttgcaactctttgcatggatgt

SEQ ID NO: 203911 - DNA, 25 bp, Homo sapien
tctttttatgaccaagtgatattcc

SEQ ID NO: 203912 - DNA, 25 bp, Homo sapien
ccttcacagtgctaaccacagagat

SEQ ID NO: 203913 - DNA, 25 bp, Homo sapien
tccttcacagtgctaaccacagaga

SEQ ID NO: 203914 - DNA, 25 bp, Homo sapien
atccatggttattgaaaagtgaggg

SEQ ID NO: 203915 - DNA, 25 bp, Homo sapien
tatccatggttattgaaaagtgagg

SEQ ID NO: 203916 - DNA, 25 bp, Homo sapien
taagctttaaacctcatatccatgg

SEQ ID NO: 203917 - DNA, 25 bp, Homo sapien
tacataagctttaaacctcatatcc

SEQ ID NO: 203918 - DNA, 25 bp, Homo sapien
gaatttttacttctagccagtgcat

SEQ ID NO: 203919 - DNA, 25 bp, Homo sapien
tgaatttttacttctagccagtgca

SEQ ID NO: 203920 - DNA, 25 bp, Homo sapien
ctggtgaatttttacttctagccag

SEQ ID NO: 203921 - DNA, 25 bp, Homo sapien
ggtgaatttttacttctagccagtg

SEQ ID NO: 203922 - DNA, 25 bp, Homo sapien
tcgcttccattccatgtggatgtcg

SEQ ID NO: 203923 - DNA, 25 bp, Homo sapien
tgaagagctgaccacctctggaatg

SEQ ID NO: 203924 - DNA, 25 bp, Homo sapien
ttctggagcccacatcgcttccatt

SEQ ID NO: 203925 - DNA, 25 bp, Homo sapien
tcagcctgtaatgaagagctgacca

SEQ ID NO: 203926 - DNA, 25 bp, Homo sapien
agtgataatttgaaaccattgtcag

SEQ ID NO: 203927 - DNA, 25 bp, Homo sapien
acaagttcttgcttcccctgtccgg

SEQ ID NO: 203928 - DNA, 25 bp, Homo sapien
agactgtgacgctgacttgactggt

SEQ ID NO: 203929 - DNA, 25 bp, Homo sapien
cagtgggcttcacaagttcttgctt

SEQ ID NO: 203930 - DNA, 25 bp, Homo sapien
tacaggaaacctgcttaaggacatt

SEQ ID NO: 203931 - DNA, 25 bp, Homo sapien
attgaaatgctaactgtgatcctgc

SEQ ID NO: 203932 - DNA, 25 bp, Homo sapien
gatcctgcagacaacattaacatgg

SEQ ID NO: 203933 - DNA, 25 bp, Homo sapien
taatctgacagcgtagggttcaaac

SEQ ID NO: 203934 - DNA, 25 bp, Homo sapien
actggctgtacctgttgatcatgag

SEQ ID NO: 203935 - DNA, 25 bp, Homo sapien
gatgaaaagtatacacgaccaagtg

SEQ ID NO: 203936 - DNA, 25 bp, Homo sapien
gaccaagtgataaaagaggccgact

SEQ ID NO: 203937 - DNA, 25 bp, Homo sapien
tctataagtcgaggaaaaaatctga

SEQ ID NO: 203938 - DNA, 25 bp, Homo sapien
tttgtaggatgtgctggggtccact

SEQ ID NO: 203939 - DNA, 25 bp, Homo sapien
attttgtaggatgtgctggggtcca

SEQ ID NO: 203940 - DNA, 25 bp, Homo sapien
ttttgtaggatgtgctggggtccac

SEQ ID NO: 203941 - DNA, 25 bp, Homo sapien
gcttcgggagagtcatcaccttatc

SEQ ID NO: 203942 - DNA, 25 bp, Homo sapien
ctcatggcagtgagtggcgttgatc

SEQ ID NO: 203943 - DNA, 25 bp, Homo sapien
ttgatctcctgcacgttcatgatgg

SEQ ID NO: 203944 - DNA, 25 bp, Homo sapien
tgtctgccgagcctgtgtctcatgg

SEQ ID NO: 203945 - DNA, 25 bp, Homo sapien
tgcccaaagggtgttgctagtaccc

SEQ ID NO: 203946 - DNA, 25 bp, Homo sapien
gttgctagtacccatgaggaactcc

SEQ ID NO: 203947 - DNA, 25 bp, Homo sapien
gtatttgcccaaagggtgttgctag

SEQ ID NO: 203948 - DNA, 25 bp, Homo sapien
ttgctagtacccatgaggaactcct

SEQ ID NO: 203949 - DNA, 25 bp, Homo sapien
agcatccggccctgcactgctgttg

SEQ ID NO: 203950 - DNA, 25 bp, Homo sapien
aggtgcccctgttcctgtcgtcagc

SEQ ID NO: 203951 - DNA, 25 bp, Homo sapien
ttcctgtcgtcagcatccggccctg

SEQ ID NO: 203952 - DNA, 25 bp, Homo sapien
ctgttcctgtcgtcagcatccggcc

SEQ ID NO: 203953 - DNA, 25 bp, Homo sapien
gagtgcccagatcctgcagaatctg

SEQ ID NO: 203954 - DNA, 25 bp, Homo sapien
agtgagtgcccagatcctgcagaat

SEQ ID NO: 203955 - DNA, 25 bp, Homo sapien
gagaaagctgcatcacgcttaaggt

SEQ ID NO: 203956 - DNA, 25 bp, Homo sapien
tgcatcacgcttaaggttttctttc

SEQ ID NO: 203957 - DNA, 25 bp, Homo sapien
acgggtacatgctaccgtgagtgga

SEQ ID NO: 203958 - DNA, 25 bp, Homo sapien
agcgctggagaagttacgggtacat

SEQ ID NO: 203959 - DNA, 25 bp, Homo sapien
ccctgtggggtgctctttgactaga

SEQ ID NO: 203960 - DNA, 25 bp, Homo sapien
gagaggactgagaagcctgctagct

SEQ ID NO: 203961 - DNA, 25 bp, Homo sapien
gaaggtgacctaattagaacaaatg

SEQ ID NO: 203962 - DNA, 25 bp, Homo sapien
tagcagttagctttcaaaccggcgc

SEQ ID NO: 203963 - DNA, 25 bp, Homo sapien
tgaaaagaactacagataacctacc

SEQ ID NO: 203964 - DNA, 25 bp, Homo sapien
ggcaactattcagaagttcactgtc

SEQ ID NO: 203965 - DNA, 25 bp, Homo sapien
ggatggtacctcattatctttggct

SEQ ID NO: 203966 - DNA, 25 bp, Homo sapien
cagccgaggcttttcttgtctggcc

SEQ ID NO: 203967 - DNA, 25 bp, Homo sapien
gaaactgtaaagacagccgaggctt

SEQ ID NO: 203968 - DNA, 25 bp, Homo sapien
ttggctgtcctagggacatggccat

SEQ ID NO: 203969 - DNA, 25 bp, Homo sapien
gaggaggactcctctggcagtgagg

SEQ ID NO: 203970 - DNA, 25 bp, Homo sapien
ggaggactgcgtccggcttggccag

SEQ ID NO: 203971 - DNA, 25 bp, Homo sapien
gattcgtattctgctgttgtaagag

SEQ ID NO: 203972 - DNA, 25 bp, Homo sapien
cacagaggagattcgtattctgctg

SEQ ID NO: 203973 - DNA, 25 bp, Homo sapien
tccttatactcttgagcatgaccag

SEQ ID NO: 203974 - DNA, 25 bp, Homo sapien
tactcttgagcatgaccagatccat

SEQ ID NO: 203975 - DNA, 25 bp, Homo sapien
aaatgcccagtccttatactcttga

SEQ ID NO: 203976 - DNA, 25 bp, Homo sapien
ttgagcatgaccagatccatttcct

SEQ ID NO: 203977 - DNA, 25 bp, Homo sapien
gacattaataggagggagttcaggt

SEQ ID NO: 203978 - DNA, 25 bp, Homo sapien
caggaagtgttgctcagtccctgag

SEQ ID NO: 203979 - DNA, 25 bp, Homo sapien
gataagtgggttcgaggcatcagct

SEQ ID NO: 203980 - DNA, 25 bp, Homo sapien
agttcaggtaaggcagccagtggtc

SEQ ID NO: 203981 - DNA, 25 bp, Homo sapien
gctgtctgaaaccatcggtgaatgg

SEQ ID NO: 203982 - DNA, 25 bp, Homo sapien
tgtctgaaaccatcggtgaatgggt

SEQ ID NO: 203983 - DNA, 25 bp, Homo sapien
cttcagctgtctgaaaccatcggtg

SEQ ID NO: 203984 - DNA, 25 bp, Homo sapien
tcagctgtctgaaaccatcggtgaa

SEQ ID NO: 203985 - DNA, 25 bp, Homo sapien
ttggtcctcccagtgacccctgatg

SEQ ID NO: 203986 - DNA, 25 bp, Homo sapien
gccgacccctgttcaaggcctgtaa

SEQ ID NO: 203987 - DNA, 25 bp, Homo sapien
tggcaaatggtgaacaatcgaggac

SEQ ID NO: 203988 - DNA, 25 bp, Homo sapien
ttcaaggcctgtaaggcagtttggt

SEQ ID NO: 203989 - DNA, 25 bp, Homo sapien
acaggctgaggtggggcatcaggct

SEQ ID NO: 203990 - DNA, 25 bp, Homo sapien
gggcccgtccaggaattccgagcag

SEQ ID NO: 203991 - DNA, 25 bp, Homo sapien
cgtccaggaattccgagcagcagct

SEQ ID NO: 203992 - DNA, 25 bp, Homo sapien
gtgaactttggacttcagaggcaca

SEQ ID NO: 203993 - DNA, 25 bp, Homo sapien
tggtgcccactttggtacttctccc

SEQ ID NO: 203994 - DNA, 25 bp, Homo sapien
actgcctgacccagcaaggatttcg

SEQ ID NO: 203995 - DNA, 25 bp, Homo sapien
cccaggttcttgcacatgcgtggct

SEQ ID NO: 203996 - DNA, 25 bp, Homo sapien
atgcgtggctaacccaggcccaggc

SEQ ID NO: 203997 - DNA, 25 bp, Homo sapien
cagcaaggatttcgctcccaggttc

SEQ ID NO: 203998 - DNA, 25 bp, Homo sapien
tccttccatttgcttttcacccctg

SEQ ID NO: 203999 - DNA, 25 bp, Homo sapien
ccatttgcttttcacccctgcccac

SEQ ID NO: 204000 - DNA, 25 bp, Homo sapien
ttccatttgcttttcacccctgccc

SEQ ID NO: 204001 - DNA, 25 bp, Homo sapien
ccttccatttgcttttcacccctgc

SEQ ID NO: 204002 - DNA, 25 bp, Homo sapien
tcactgatgatcagcctcactggcc

SEQ ID NO: 204003 - DNA, 25 bp, Homo sapien
tgcttcttggatgtattccttgctg

SEQ ID NO: 204004 - DNA, 25 bp, Homo sapien
ggcaaaccttgcttcctggattatt

SEQ ID NO: 204005 - DNA, 25 bp, Homo sapien
aggcaaaccttgcttcctggattat

SEQ ID NO: 204006 - DNA, 25 bp, Homo sapien
ctctcttctacgctaacgggtggca

SEQ ID NO: 204007 - DNA, 25 bp, Homo sapien
tctcttctacgctaacgggtggcat

SEQ ID NO: 204008 - DNA, 25 bp, Homo sapien
catcctctcttctacgctaacgggt

SEQ ID NO: 204009 - DNA, 25 bp, Homo sapien
tcctctcttctacgctaacgggtgg

SEQ ID NO: 204010 - DNA, 25 bp, Homo sapien
taatccctgtcatagtggtgccgtg

SEQ ID NO: 204011 - DNA, 25 bp, Homo sapien
tctcagggaagcagggttaatggtc

SEQ ID NO: 204012 - DNA, 25 bp, Homo sapien
gaatgccatgagaagggcagtccat

SEQ ID NO: 204013 - DNA, 25 bp, Homo sapien
caaaggcttgagtactgttaacagg

SEQ ID NO: 204014 - DNA, 25 bp, Homo sapien
aaaagccatcggcactggctggacc

SEQ ID NO: 204015 - DNA, 25 bp, Homo sapien
gatgcactgacggttcctactgaga

SEQ ID NO: 204016 - DNA, 25 bp, Homo sapien
tggacctgtggagcactgcctgatg

SEQ ID NO: 204017 - DNA, 25 bp, Homo sapien
tcctctccctctggtaatgccatgt

SEQ ID NO: 204018 - DNA, 25 bp, Homo sapien
ggtgtccacaaagcatgtgaatgtc

SEQ ID NO: 204019 - DNA, 25 bp, Homo sapien
cacagtgctcgagatggtaaaatca

SEQ ID NO: 204020 - DNA, 25 bp, Homo sapien
tcagattcaaacctggtccagtgtg

SEQ ID NO: 204021 - DNA, 25 bp, Homo sapien
catgcctcacgggataattagtacc

SEQ ID NO: 204022 - DNA, 25 bp, Homo sapien
ttttcagcatcagagtccactagcc

SEQ ID NO: 204023 - DNA, 25 bp, Homo sapien
tgttgagaacacaagcgtacattac

SEQ ID NO: 204024 - DNA, 25 bp, Homo sapien
tcatctgcaggggagccgatactta

SEQ ID NO: 204025 - DNA, 25 bp, Homo sapien
tctgcgatgccatattaaatactgc

SEQ ID NO: 204026 - DNA, 25 bp, Homo sapien
gcgtacattacgtttcttggtagaa

SEQ ID NO: 204027 - DNA, 25 bp, Homo sapien
ctgggcatctgggattgcaaagtaa

SEQ ID NO: 204028 - DNA, 25 bp, Homo sapien
ctgggattgcaaagtaaggcttaat

SEQ ID NO: 204029 - DNA, 25 bp, Homo sapien
aatctgtttatctgtaattgcccag

SEQ ID NO: 204030 - DNA, 25 bp, Homo sapien
tgtaattgcccagttatattttaac

SEQ ID NO: 204031 - DNA, 25 bp, Homo sapien
tccccaccttcatgggatttgtttc

SEQ ID NO: 204032 - DNA, 25 bp, Homo sapien
ccccaccttcatgggatttgtttct

SEQ ID NO: 204033 - DNA, 25 bp, Homo sapien
ctccccaccttcatgggatttgttt

SEQ ID NO: 204034 - DNA, 25 bp, Homo sapien
ccaccttcatgggatttgtttctgc

SEQ ID NO: 204035 - DNA, 25 bp, Homo sapien
aaggcctccaaatcacagcccttgg

SEQ ID NO: 204036 - DNA, 25 bp, Homo sapien
atcacagcccttggctagtactttt

SEQ ID NO: 204037 - DNA, 25 bp, Homo sapien
aaattccaaggcctccaaatcacag

SEQ ID NO: 204038 - DNA, 25 bp, Homo sapien
cacagcccttggctagtactttttt

SEQ ID NO: 204039 - DNA, 25 bp, Homo sapien
gtcagcaaggtcaggagcctcacgt

SEQ ID NO: 204040 - DNA, 25 bp, Homo sapien
cagttttatcctgcaatgaggcctc

SEQ ID NO: 204041 - DNA, 25 bp, Homo sapien
tcagggtgatcctttagacacagtt

SEQ ID NO: 204042 - DNA, 25 bp, Homo sapien
tcacgtcaccagttagaggagagga

SEQ ID NO: 204043 - DNA, 25 bp, Homo sapien
gattttatgtagacgcaggaccgcc

SEQ ID NO: 204044 - DNA, 25 bp, Homo sapien
cacgtgtgctcggagaagtctgcaa

SEQ ID NO: 204045 - DNA, 25 bp, Homo sapien
aaagtgagaccaacgtcctgcagga

SEQ ID NO: 204046 - DNA, 25 bp, Homo sapien
catagaagccctccggcaggagatt

SEQ ID NO: 204047 - DNA, 25 bp, Homo sapien
ctttttgtaatgctgtttatcagag

SEQ ID NO: 204048 - DNA, 25 bp, Homo sapien
tgctgtttatcagaggagggtgaca

SEQ ID NO: 204049 - DNA, 25 bp, Homo sapien
gtaatgctgtttatcagaggagggt

SEQ ID NO: 204050 - DNA, 25 bp, Homo sapien
atgctgtttatcagaggagggtgac

SEQ ID NO: 204051 - DNA, 25 bp, Homo sapien
gatttgccccgatactcatcttgca

SEQ ID NO: 204052 - DNA, 25 bp, Homo sapien
gatatagtcattgttgtgcactccc

SEQ ID NO: 204053 - DNA, 25 bp, Homo sapien
cagtagtagacatggtctgggtact

SEQ ID NO: 204054 - DNA, 25 bp, Homo sapien
tcttgcacggccagaactgtttggt

SEQ ID NO: 204055 - DNA, 25 bp, Homo sapien
agggaggtacatcctctccctgctt

SEQ ID NO: 204056 - DNA, 25 bp, Homo sapien
gcagggaggtacatcctctccctgc

SEQ ID NO: 204057 - DNA, 25 bp, Homo sapien
cagggaggtacatcctctccctgct

SEQ ID NO: 204058 - DNA, 25 bp, Homo sapien
gggaggtacatcctctccctgcttt

SEQ ID NO: 204059 - DNA, 25 bp, Homo sapien
tcaaccaatctttgccgatattttc

SEQ ID NO: 204060 - DNA, 25 bp, Homo sapien
tcttcaaccaatctttgccgatatt

SEQ ID NO: 204061 - DNA, 25 bp, Homo sapien
caaccaatctttgccgatattttcc

SEQ ID NO: 204062 - DNA, 25 bp, Homo sapien
accaatctttgccgatattttcctc

SEQ ID NO: 204063 - DNA, 25 bp, Homo sapien
cctttaagagccataaagtttgtca

SEQ ID NO: 204064 - DNA, 25 bp, Homo sapien
gagccactctccaggcgagttatag

SEQ ID NO: 204065 - DNA, 25 bp, Homo sapien
gaacccgaagagatggcgtctttca

SEQ ID NO: 204066 - DNA, 25 bp, Homo sapien
tctgccagtgatctgagaacaaaag

SEQ ID NO: 204067 - DNA, 25 bp, Homo sapien
tgttactctgccagtgatctgagaa

SEQ ID NO: 204068 - DNA, 25 bp, Homo sapien
tgccttttgatcacgcacaaacact

SEQ ID NO: 204069 - DNA, 25 bp, Homo sapien
taaagcactatttggtaatgtcggt

SEQ ID NO: 204070 - DNA, 25 bp, Homo sapien
tcagttctggcgtagcacatcgggc

SEQ ID NO: 204071 - DNA, 25 bp, Homo sapien
cacctcaatagaactcgtaaagcac

SEQ ID NO: 204072 - DNA, 25 bp, Homo sapien
cctctgtgacctgcaatcataactt

SEQ ID NO: 204073 - DNA, 25 bp, Homo sapien
cctgcaatcataactttaggggttg

SEQ ID NO: 204074 - DNA, 25 bp, Homo sapien
tgacctgcaatcataactttagggg

SEQ ID NO: 204075 - DNA, 25 bp, Homo sapien
caatcataactttaggggttggagg

SEQ ID NO: 204076 - DNA, 25 bp, Homo sapien
tacatgtcaggccatccaagattga

SEQ ID NO: 204077 - DNA, 25 bp, Homo sapien
cagcccttggcgagtcattgtttcc

SEQ ID NO: 204078 - DNA, 25 bp, Homo sapien
gagaaacaagaggtcaagtgaacag

SEQ ID NO: 204079 - DNA, 25 bp, Homo sapien
agcagcaaaagtgccgttatcagcc

SEQ ID NO: 204080 - DNA, 25 bp, Homo sapien
cagccctgagctccctctttaatat

SEQ ID NO: 204081 - DNA, 25 bp, Homo sapien
gctccctctttaatattccagattc

SEQ ID NO: 204082 - DNA, 25 bp, Homo sapien
tgagctccctctttaatattccaga

SEQ ID NO: 204083 - DNA, 25 bp, Homo sapien
cctctttaatattccagattctggt

SEQ ID NO: 204084 - DNA, 25 bp, Homo sapien
aacccaagatattcttatggagcac

SEQ ID NO: 204085 - DNA, 25 bp, Homo sapien
cttcagatgagggataacttctaac

SEQ ID NO: 204086 - DNA, 25 bp, Homo sapien
aacaaacccaagatattcttatgga

SEQ ID NO: 204087 - DNA, 25 bp, Homo sapien
atgtttcttcagatgagggataact

SEQ ID NO: 204088 - DNA, 25 bp, Homo sapien
ggcaagttcctcaaacctggtttgc

SEQ ID NO: 204089 - DNA, 25 bp, Homo sapien
ctttggcaagttcctcaaacctggt

SEQ ID NO: 204090 - DNA, 25 bp, Homo sapien
cctttggcaagttcctcaaacctgg

SEQ ID NO: 204091 - DNA, 25 bp, Homo sapien
tggcaagttcctcaaacctggtttg

SEQ ID NO: 204092 - DNA, 25 bp, Homo sapien
agaataactaagaattgaaggccca

SEQ ID NO: 204093 - DNA, 25 bp, Homo sapien
ctctgagatggcttcgtgggtcatt

SEQ ID NO: 204094 - DNA, 25 bp, Homo sapien
tgtggacattggtcttgactaagaa

SEQ ID NO: 204095 - DNA, 25 bp, Homo sapien
ttcagggcagtgtctgccccatacc

SEQ ID NO: 204096 - DNA, 25 bp, Homo sapien
aagtgtcctcaacttcatgggtgcg

SEQ ID NO: 204097 - DNA, 25 bp, Homo sapien
gggagacttttgcaatggaccaatc

SEQ ID NO: 204098 - DNA, 25 bp, Homo sapien
catgggtgcgttgtgatttgttctc

SEQ ID NO: 204099 - DNA, 25 bp, Homo sapien
gcaacttggacttgtgagacctggc

SEQ ID NO: 204100 - DNA, 25 bp, Homo sapien
ctgttatactctggaattaaaacca

SEQ ID NO: 204101 - DNA, 25 bp, Homo sapien
ttatactctggaattaaaaccaagc

SEQ ID NO: 204102 - DNA, 25 bp, Homo sapien
ctggaattaaaaccaagcctctcac

SEQ ID NO: 204103 - DNA, 25 bp, Homo sapien
tactctggaattaaaaccaagcctc

SEQ ID NO: 204104 - DNA, 25 bp, Homo sapien
ccagcagactctgttaccagaaaca

SEQ ID NO: 204105 - DNA, 25 bp, Homo sapien
gaccagcagactctgttaccagaaa

SEQ ID NO: 204106 - DNA, 25 bp, Homo sapien
agcagactctgttaccagaaacaca

SEQ ID NO: 204107 - DNA, 25 bp, Homo sapien
gggaccagcagactctgttaccaga

SEQ ID NO: 204108 - DNA, 25 bp, Homo sapien
atatgtgtgtctgtactgaccaagc

SEQ ID NO: 204109 - DNA, 25 bp, Homo sapien
tgtactgaccaagcattatcaccat

SEQ ID NO: 204110 - DNA, 25 bp, Homo sapien
gtgtgtctgtactgaccaagcatta

SEQ ID NO: 204111 - DNA, 25 bp, Homo sapien
tgtctgtactgaccaagcattatca

SEQ ID NO: 204112 - DNA, 25 bp, Homo sapien
taacataggatacaaggcacccgct

SEQ ID NO: 204113 - DNA, 25 bp, Homo sapien
gcagtgagctacaccacctctgtgt

SEQ ID NO: 204114 - DNA, 25 bp, Homo sapien
cacagaagcatattgaggatcggat

SEQ ID NO: 204115 - DNA, 25 bp, Homo sapien
ggtcaatgagctaaatgggagttct

SEQ ID NO: 204116 - DNA, 25 bp, Homo sapien
tctggtgtccctttattctgaatga

SEQ ID NO: 204117 - DNA, 25 bp, Homo sapien
tggtgaaagagacatgaaagagctg

SEQ ID NO: 204118 - DNA, 25 bp, Homo sapien
tctacttcgagtgcactaaatcctc

SEQ ID NO: 204119 - DNA, 25 bp, Homo sapien
ggaaagcaatgcctggtgaacatct

SEQ ID NO: 204120 - DNA, 25 bp, Homo sapien
accatgacagctggaaagctctcct

SEQ ID NO: 204121 - DNA, 25 bp, Homo sapien
tcgggtcagttaccatgacagctgg

SEQ ID NO: 204122 - DNA, 25 bp, Homo sapien
cctggaatctatgagtttctagctg

SEQ ID NO: 204123 - DNA, 25 bp, Homo sapien
tcagcgccacatcgggtcagttacc

SEQ ID NO: 204124 - DNA, 25 bp, Homo sapien
tctcagtgtgagtgcctatggccat

SEQ ID NO: 204125 - DNA, 25 bp, Homo sapien
ttctcagtgtgagtgcctatggcca

SEQ ID NO: 204126 - DNA, 25 bp, Homo sapien
ggtcagatgaggctgggacctttgc

SEQ ID NO: 204127 - DNA, 25 bp, Homo sapien
tggtcagatgaggctgggacctttg

SEQ ID NO: 204128 - DNA, 25 bp, Homo sapien
gatcttggaactaatccccagtgga

SEQ ID NO: 204129 - DNA, 25 bp, Homo sapien
gacttagagcatccctgaattttgg

SEQ ID NO: 204130 - DNA, 25 bp, Homo sapien
cacaaggctttgtcgtttctcggag

SEQ ID NO: 204131 - DNA, 25 bp, Homo sapien
aaatctaggtgatctcaactcaggg

SEQ ID NO: 204132 - DNA, 25 bp, Homo sapien
gatgactaaagatagccagttgccc

SEQ ID NO: 204133 - DNA, 25 bp, Homo sapien
ccagttgccccttgttacaggtggg

SEQ ID NO: 204134 - DNA, 25 bp, Homo sapien
attatttctgtctttcgggctgaag

SEQ ID NO: 204135 - DNA, 25 bp, Homo sapien
gaaagctgcagtggagacactgtta

SEQ ID NO: 204136 - DNA, 25 bp, Homo sapien
gttcccatcactcagatgtagagca

SEQ ID NO: 204137 - DNA, 25 bp, Homo sapien
tgtagagcagtgacaatactcaggg

SEQ ID NO: 204138 - DNA, 25 bp, Homo sapien
cagacagactgcatgcttcatcctg

SEQ ID NO: 204139 - DNA, 25 bp, Homo sapien
tgctgtttagttccctccatcagag

SEQ ID NO: 204140 - DNA, 25 bp, Homo sapien
gactcctcaaatccagcggtatctg

SEQ ID NO: 204141 - DNA, 25 bp, Homo sapien
gctcgctaaagcaagccttaagtgt

SEQ ID NO: 204142 - DNA, 25 bp, Homo sapien
tcccactttgcgaggatgtcttgca

SEQ ID NO: 204143 - DNA, 25 bp, Homo sapien
tgtggataaggctcggctcgctaaa

SEQ ID NO: 204144 - DNA, 25 bp, Homo sapien
aatgaggcccgcaaactgtgtctgg

SEQ ID NO: 204145 - DNA, 25 bp, Homo sapien
tatttgaatggattgttacagaaga

SEQ ID NO: 204146 - DNA, 25 bp, Homo sapien
atttaataggcattggaaaatcctg

SEQ ID NO: 204147 - DNA, 25 bp, Homo sapien
aaagtaatttgaatagccaaacttg

SEQ ID NO: 204148 - DNA, 25 bp, Homo sapien
gtcttcatgaaacgcccgccatgga

SEQ ID NO: 204149 - DNA, 25 bp, Homo sapien
ctgtggggtggtcttcatgaaacgc

SEQ ID NO: 204150 - DNA, 25 bp, Homo sapien
gggtggtcttcatgaaacgcccgcc

SEQ ID NO: 204151 - DNA, 25 bp, Homo sapien
tggtcttcatgaaacgcccgccatg

SEQ ID NO: 204152 - DNA, 25 bp, Homo sapien
gcaagctgaaagctcagcatcagtg

SEQ ID NO: 204153 - DNA, 25 bp, Homo sapien
gagggtccggcaagctgaaagctca

SEQ ID NO: 204154 - DNA, 25 bp, Homo sapien
agctgtagaacattttcgattgagg

SEQ ID NO: 204155 - DNA, 25 bp, Homo sapien
aacattttcgattgagggtccggca

SEQ ID NO: 204156 - DNA, 25 bp, Homo sapien
cctctgccagtttcccctgagctct

SEQ ID NO: 204157 - DNA, 25 bp, Homo sapien
tttcctccggtgttgtgcctctgcc

SEQ ID NO: 204158 - DNA, 25 bp, Homo sapien
taagcttctccctttgttctgcggc

SEQ ID NO: 204159 - DNA, 25 bp, Homo sapien
gcggcttgcaaatgttaagcacggg

SEQ ID NO: 204160 - DNA, 25 bp, Homo sapien
ccatcaaaggaagggttgagctcct

SEQ ID NO: 204161 - DNA, 25 bp, Homo sapien
cacaaggcagcttttccgtagttgc

SEQ ID NO: 204162 - DNA, 25 bp, Homo sapien
tcaaataggacaatgggcagcttct

SEQ ID NO: 204163 - DNA, 25 bp, Homo sapien
ctctgctctccaatgagggttctag

SEQ ID NO: 204164 - DNA, 25 bp, Homo sapien
ggtgatgtgtattatcttattccac

SEQ ID NO: 204165 - DNA, 25 bp, Homo sapien
cagttttgcaggtgatgtgtattat

SEQ ID NO: 204166 - DNA, 25 bp, Homo sapien
agctgatgtatgctggtttaggtca

SEQ ID NO: 204167 - DNA, 25 bp, Homo sapien
tcagctttgcagctgatgtatgctg

SEQ ID NO: 204168 - DNA, 25 bp, Homo sapien
tctgcgtgcatttcagatatgaggc

SEQ ID NO: 204169 - DNA, 25 bp, Homo sapien
cgtgcatttcagatatgaggccttg

SEQ ID NO: 204170 - DNA, 25 bp, Homo sapien
tccgcggtgctgttttctgcgtgca

SEQ ID NO: 204171 - DNA, 25 bp, Homo sapien
agcaaaaacctgcttccgcggtgct

SEQ ID NO: 204172 - DNA, 25 bp, Homo sapien
aataaactcatctgcagcgaccatc

SEQ ID NO: 204173 - DNA, 25 bp, Homo sapien
aaataaactcatctgcagcgaccat

SEQ ID NO: 204174 - DNA, 25 bp, Homo sapien
gaaataaactcatctgcagcgacca

SEQ ID NO: 204175 - DNA, 25 bp, Homo sapien
tgggttctttatacctgctgatttc

SEQ ID NO: 204176 - DNA, 25 bp, Homo sapien
ggttgggttctttatacctgctgat

SEQ ID NO: 204177 - DNA, 25 bp, Homo sapien
caggttgggttctttatacctgctg

SEQ ID NO: 204178 - DNA, 25 bp, Homo sapien
ggttctttatacctgctgatttcca

SEQ ID NO: 204179 - DNA, 25 bp, Homo sapien
ggtcttggtatgactggagcatgca

SEQ ID NO: 204180 - DNA, 25 bp, Homo sapien
tggtcttggtatgactggagcatgc

SEQ ID NO: 204181 - DNA, 25 bp, Homo sapien
atggtcttggtatgactggagcatg

SEQ ID NO: 204182 - DNA, 25 bp, Homo sapien
tgttcatcctggcacaattcaaagg

SEQ ID NO: 204183 - DNA, 25 bp, Homo sapien
cagtagccttttcccacttaggttg

SEQ ID NO: 204184 - DNA, 25 bp, Homo sapien
gagataaactctgtttgtccgggac

SEQ ID NO: 204185 - DNA, 25 bp, Homo sapien
tccgggactgtgagtcctaaatcac

SEQ ID NO: 204186 - DNA, 25 bp, Homo sapien
ttccctcagcacagtcctaattata

SEQ ID NO: 204187 - DNA, 25 bp, Homo sapien
cctcagcacagtcctaattataaac

SEQ ID NO: 204188 - DNA, 25 bp, Homo sapien
cagcacagtcctaattataaactga

SEQ ID NO: 204189 - DNA, 25 bp, Homo sapien
caattccctcagcacagtcctaatt

SEQ ID NO: 204190 - DNA, 25 bp, Homo sapien
taaaggtgacaatgctgacatagca

SEQ ID NO: 204191 - DNA, 25 bp, Homo sapien
tctctggagtactggcctcgcccta

SEQ ID NO: 204192 - DNA, 25 bp, Homo sapien
tgacatagcaccagcactgccttta

SEQ ID NO: 204193 - DNA, 25 bp, Homo sapien
tctcagcatctcttatgaacaggac

SEQ ID NO: 204194 - DNA, 25 bp, Homo sapien
acttcctttgcctctagatgggtta

SEQ ID NO: 204195 - DNA, 25 bp, Homo sapien
gacccctgtagatgtcaagtaccac

SEQ ID NO: 204196 - DNA, 25 bp, Homo sapien
gaccgcagtccagagagccatctga

SEQ ID NO: 204197 - DNA, 25 bp, Homo sapien
gcccagctaagagggaagctttgtg

SEQ ID NO: 204198 - DNA, 25 bp, Homo sapien
cattctccagtcacccatttccctc

SEQ ID NO: 204199 - DNA, 25 bp, Homo sapien
cctcaggacctgggttcctcctgtt

SEQ ID NO: 204200 - DNA, 25 bp, Homo sapien
ctcaggacctgggttcctcctgttt

SEQ ID NO: 204201 - DNA, 25 bp, Homo sapien
agtcacccatttccctcaggacctg

SEQ ID NO: 204202 - DNA, 25 bp, Homo sapien
tcttggcattcggtctggtcagctc

SEQ ID NO: 204203 - DNA, 25 bp, Homo sapien
cctggtcccagaacgggcagggtct

SEQ ID NO: 204204 - DNA, 25 bp, Homo sapien
tccggtaaagtactcgcagggttgc

SEQ ID NO: 204205 - DNA, 25 bp, Homo sapien
tcaagggaggcctggcattttctcc

SEQ ID NO: 204206 - DNA, 25 bp, Homo sapien
ctgtgcacagcgcactattgtgtgt

SEQ ID NO: 204207 - DNA, 25 bp, Homo sapien
agcgcactattgtgtgttccagagc

SEQ ID NO: 204208 - DNA, 25 bp, Homo sapien
cacagcgcactattgtgtgttccag

SEQ ID NO: 204209 - DNA, 25 bp, Homo sapien
tgcacagcgcactattgtgtgttcc

SEQ ID NO: 204210 - DNA, 25 bp, Homo sapien
gcttgaacgtcatgctgaggaatct

SEQ ID NO: 204211 - DNA, 25 bp, Homo sapien
ctgaacttcgttcagtaagcagaga

SEQ ID NO: 204212 - DNA, 25 bp, Homo sapien
gctgaggaatctgaacttcgttcag

SEQ ID NO: 204213 - DNA, 25 bp, Homo sapien
gaaaccatagaaagcttgaacgtca

SEQ ID NO: 204214 - DNA, 25 bp, Homo sapien
tagggcagtgtaccttccgtgttgg

SEQ ID NO: 204215 - DNA, 25 bp, Homo sapien
ccgtgttgggttctttgcatgcaag

SEQ ID NO: 204216 - DNA, 25 bp, Homo sapien
tacactcagtatagacgtagggcag

SEQ ID NO: 204217 - DNA, 25 bp, Homo sapien
aataacgttcagatgctgcactgtg

SEQ ID NO: 204218 - DNA, 25 bp, Homo sapien
gcttaatagcatcacatcatcctta

SEQ ID NO: 204219 - DNA, 25 bp, Homo sapien
cttaatagcatcacatcatccttac

SEQ ID NO: 204220 - DNA, 25 bp, Homo sapien
gatgcttaatagcatcacatcatcc

SEQ ID NO: 204221 - DNA, 25 bp, Homo sapien
tgcttaatagcatcacatcatcctt

SEQ ID NO: 204222 - DNA, 25 bp, Homo sapien
ttccttttctattcagtctaggccc

SEQ ID NO: 204223 - DNA, 25 bp, Homo sapien
tccattagctccctactggctttac

SEQ ID NO: 204224 - DNA, 25 bp, Homo sapien
cttttctattcagtctaggccccat

SEQ ID NO: 204225 - DNA, 25 bp, Homo sapien
ccattagctccctactggctttact

SEQ ID NO: 204226 - DNA, 25 bp, Homo sapien
tactgggccctccaaaacatttcat

SEQ ID NO: 204227 - DNA, 25 bp, Homo sapien
ttttaaggagcattcagagtttgac

SEQ ID NO: 204228 - DNA, 25 bp, Homo sapien
catacaggcttatcacatatagatt

SEQ ID NO: 204229 - DNA, 25 bp, Homo sapien
tgtatggacgtacacatgactttct

SEQ ID NO: 204230 - DNA, 25 bp, Homo sapien
ttcattttctcgtctaacatggcag

SEQ ID NO: 204231 - DNA, 25 bp, Homo sapien
ctgctaaggagagatcaaaggtaac

SEQ ID NO: 204232 - DNA, 25 bp, Homo sapien
cagtggtccattgcagcagaggttt

SEQ ID NO: 204233 - DNA, 25 bp, Homo sapien
ttatggctcttactgtacattttga

SEQ ID NO: 204234 - DNA, 25 bp, Homo sapien
gacctggggagaccagacaacactg

SEQ ID NO: 204235 - DNA, 25 bp, Homo sapien
gtggacctggggagaccagacaaca

SEQ ID NO: 204236 - DNA, 25 bp, Homo sapien
acctggggagaccagacaacactgc

SEQ ID NO: 204237 - DNA, 25 bp, Homo sapien
ggacctggggagaccagacaacact

SEQ ID NO: 204238 - DNA, 25 bp, Homo sapien
tgtggataccatgatggttagatgc

SEQ ID NO: 204239 - DNA, 25 bp, Homo sapien
tagatgcatggcaccttctacttcc

SEQ ID NO: 204240 - DNA, 25 bp, Homo sapien
agagggtgctggttgtgtggatacc

SEQ ID NO: 204241 - DNA, 25 bp, Homo sapien
gttctcctacttacagaacaatggg

SEQ ID NO: 204242 - DNA, 25 bp, Homo sapien
tctggcagtaaggaggcccagcttc

SEQ ID NO: 204243 - DNA, 25 bp, Homo sapien
agttctgtctggcagtaaggaggcc

SEQ ID NO: 204244 - DNA, 25 bp, Homo sapien
aactgtgcatcaaagaacctttcca

SEQ ID NO: 204245 - DNA, 25 bp, Homo sapien
tgtgcatcaaagaacctttccaggc

SEQ ID NO: 204246 - DNA, 25 bp, Homo sapien
gaactatgccatcgcctgtgagcgg

SEQ ID NO: 204247 - DNA, 25 bp, Homo sapien
tcttgggttctctgcatggcttagc

SEQ ID NO: 204248 - DNA, 25 bp, Homo sapien
tatttacaaaaggagcacccagtga

SEQ ID NO: 204249 - DNA, 25 bp, Homo sapien
tgagcggatgctgcgtcttcaggca

SEQ ID NO: 204250 - DNA, 25 bp, Homo sapien
tgcactggattagattctagaagag

SEQ ID NO: 204251 - DNA, 25 bp, Homo sapien
catgcttattgggatcagttttaaa

SEQ ID NO: 204252 - DNA, 25 bp, Homo sapien
tgaactgtgtaagggccatgcttat

SEQ ID NO: 204253 - DNA, 25 bp, Homo sapien
ataactaaatattggtcatgaactg

SEQ ID NO: 204254 - DNA, 25 bp, Homo sapien
taggcccctgtatagaaatgctcac

SEQ ID NO: 204255 - DNA, 25 bp, Homo sapien
taatgaataaagtcactcagagtcc

SEQ ID NO: 204256 - DNA, 25 bp, Homo sapien
tgcattcaaagatcactggtgagtc

SEQ ID NO: 204257 - DNA, 25 bp, Homo sapien
tcagcacttcctaagtagaggccag

SEQ ID NO: 204258 - DNA, 25 bp, Homo sapien
caggaatagtcacagttccgtggca

SEQ ID NO: 204259 - DNA, 25 bp, Homo sapien
tgttaaggaccagtgccgagggctt

SEQ ID NO: 204260 - DNA, 25 bp, Homo sapien
gtggagcttgcatggttccctttca

SEQ ID NO: 204261 - DNA, 25 bp, Homo sapien
gcattgtactagcaaaagggtctga

SEQ ID NO: 204262 - DNA, 25 bp, Homo sapien
cctctaaaagcttgacagggccttg

SEQ ID NO: 204263 - DNA, 25 bp, Homo sapien
ttcaagacaagggtgcctctaaaag

SEQ ID NO: 204264 - DNA, 25 bp, Homo sapien
acaagggtgcctctaaaagcttgac

SEQ ID NO: 204265 - DNA, 25 bp, Homo sapien
ggtgcctctaaaagcttgacagggc

SEQ ID NO: 204266 - DNA, 25 bp, Homo sapien
ccttttgaagagtgtcaatagttgt

SEQ ID NO: 204267 - DNA, 25 bp, Homo sapien
cctggacagggttcagagcggaacc

SEQ ID NO: 204268 - DNA, 25 bp, Homo sapien
agctcttgcccctccattctctgga

SEQ ID NO: 204269 - DNA, 25 bp, Homo sapien
gatttgaagatgtccattggagcct

SEQ ID NO: 204270 - DNA, 25 bp, Homo sapien
atcatgggccaagaactttcactga

SEQ ID NO: 204271 - DNA, 25 bp, Homo sapien
caaaaacctgttggagttcagcgtg

SEQ ID NO: 204272 - DNA, 25 bp, Homo sapien
ggctcctactcatcttgaaccagaa

SEQ ID NO: 204273 - DNA, 25 bp, Homo sapien
ttgaaagtaacttctccacagggaa

SEQ ID NO: 204274 - DNA, 25 bp, Homo sapien
agcgttctagcagtgtcccgggagt

SEQ ID NO: 204275 - DNA, 25 bp, Homo sapien
tctgcctggacttcggcctgaagag

SEQ ID NO: 204276 - DNA, 25 bp, Homo sapien
ccccgacattgaggagactgtaatg

SEQ ID NO: 204277 - DNA, 25 bp, Homo sapien
tgactctccacatgcgtcagggccc

SEQ ID NO: 204278 - DNA, 25 bp, Homo sapien
caaagaagcacttggaaggatgtgg

SEQ ID NO: 204279 - DNA, 25 bp, Homo sapien
cttgcacaaagaagcacttggaagg

SEQ ID NO: 204280 - DNA, 25 bp, Homo sapien
cacaaagaagcacttggaaggatgt

SEQ ID NO: 204281 - DNA, 25 bp, Homo sapien
tgcacaaagaagcacttggaaggat

SEQ ID NO: 204282 - DNA, 25 bp, Homo sapien
tggcgtaggtcagaaagcttgcagt

SEQ ID NO: 204283 - DNA, 25 bp, Homo sapien
ggtcagaaagcttgcagtccagagc

SEQ ID NO: 204284 - DNA, 25 bp, Homo sapien
tgcaggcgcttggaggactggcgta

SEQ ID NO: 204285 - DNA, 25 bp, Homo sapien
aggactggcgtaggtcagaaagctt

SEQ ID NO: 204286 - DNA, 25 bp, Homo sapien
gcttcactggacccacaaacggtca

SEQ ID NO: 204287 - DNA, 25 bp, Homo sapien
ctgcatttcattcttgggctatctg

SEQ ID NO: 204288 - DNA, 25 bp, Homo sapien
cttcactggacccacaaacggtcat

SEQ ID NO: 204289 - DNA, 25 bp, Homo sapien
gatctagtcggggattattcttcca

SEQ ID NO: 204290 - DNA, 25 bp, Homo sapien
tattcttccagtccgggtttctctc

SEQ ID NO: 204291 - DNA, 25 bp, Homo sapien
cagtccgggtttctctcttcaggca

SEQ ID NO: 204292 - DNA, 25 bp, Homo sapien
ccagcttgaagacagcaggatctag

SEQ ID NO: 204293 - DNA, 25 bp, Homo sapien
tcctgtccacgctggaggatccaac

SEQ ID NO: 204294 - DNA, 25 bp, Homo sapien
cctgtccacgctggaggatccaacc

SEQ ID NO: 204295 - DNA, 25 bp, Homo sapien
gaattcttccccacaattgtggatg

SEQ ID NO: 204296 - DNA, 25 bp, Homo sapien
cagcctagtgggtctggaatcctgg

SEQ ID NO: 204297 - DNA, 25 bp, Homo sapien
tggaatcctggtggtcgccacccct

SEQ ID NO: 204298 - DNA, 25 bp, Homo sapien
cacaattgtggatgcttccatagga

SEQ ID NO: 204299 - DNA, 25 bp, Homo sapien
caaatgaccggggagactccaagac

SEQ ID NO: 204300 - DNA, 25 bp, Homo sapien
aatgaccggggagactccaagacac

SEQ ID NO: 204301 - DNA, 25 bp, Homo sapien
gaccggggagactccaagacacact

SEQ ID NO: 204302 - DNA, 25 bp, Homo sapien
atcaaatgaccggggagactccaag

SEQ ID NO: 204303 - DNA, 25 bp, Homo sapien
ttaacatcttcaaggccctcttcac

SEQ ID NO: 204304 - DNA, 25 bp, Homo sapien
tgcattaacatcttcaaggccctct

SEQ ID NO: 204305 - DNA, 25 bp, Homo sapien
cagctccagggtattgaacagtgac

SEQ ID NO: 204306 - DNA, 25 bp, Homo sapien
gctccagggtattgaacagtgacct

SEQ ID NO: 204307 - DNA, 25 bp, Homo sapien
ccctactcctctactaatagtactt

SEQ ID NO: 204308 - DNA, 25 bp, Homo sapien
tggtttgcattcatgtacgttggtt

SEQ ID NO: 204309 - DNA, 25 bp, Homo sapien
catgtacgttggttttggtctttct

SEQ ID NO: 204310 - DNA, 25 bp, Homo sapien
ggccagtctttccaccatgggtttg

SEQ ID NO: 204311 - DNA, 25 bp, Homo sapien
tgtcttcctaatcaaacaaaagatg

SEQ ID NO: 204312 - DNA, 25 bp, Homo sapien
gatcacttggccctcactcttctta

SEQ ID NO: 204313 - DNA, 25 bp, Homo sapien
gaactggatcacttggccctcactc

SEQ ID NO: 204314 - DNA, 25 bp, Homo sapien
actggatcacttggccctcactctt

SEQ ID NO: 204315 - DNA, 25 bp, Homo sapien
tggatcacttggccctcactcttct

SEQ ID NO: 204316 - DNA, 25 bp, Homo sapien
cctccccattcaaaacgcttgcatc

SEQ ID NO: 204317 - DNA, 25 bp, Homo sapien
ttcaaaacgcttgcatctcttcata

SEQ ID NO: 204318 - DNA, 25 bp, Homo sapien
tttaggtctgcagatgggctcaatg

SEQ ID NO: 204319 - DNA, 25 bp, Homo sapien
attcttttaggtctgcagatgggct

SEQ ID NO: 204320 - DNA, 25 bp, Homo sapien
tcttacagaaagtccagtgagtttt

SEQ ID NO: 204321 - DNA, 25 bp, Homo sapien
acagaaagtccagtgagttttagga

SEQ ID NO: 204322 - DNA, 25 bp, Homo sapien
gaaagtccagtgagttttaggaaca

SEQ ID NO: 204323 - DNA, 25 bp, Homo sapien
aagtccagtgagttttaggaacatt

SEQ ID NO: 204324 - DNA, 25 bp, Homo sapien
cgatcaggccgatcgggtaaccgct

SEQ ID NO: 204325 - DNA, 25 bp, Homo sapien
ccgatcgggtaaccgctgcttttca

SEQ ID NO: 204326 - DNA, 25 bp, Homo sapien
agtgcagagcccgatcaggccgatc

SEQ ID NO: 204327 - DNA, 25 bp, Homo sapien
cgggtaaccgctgcttttcaaactg

SEQ ID NO: 204328 - DNA, 25 bp, Homo sapien
gcaacaagggccagtccccaagctg

SEQ ID NO: 204329 - DNA, 25 bp, Homo sapien
cttgactgagcaacaagggccagtc

SEQ ID NO: 204330 - DNA, 25 bp, Homo sapien
tgagcaacaagggccagtccccaag

SEQ ID NO: 204331 - DNA, 25 bp, Homo sapien
actgagcaacaagggccagtcccca

SEQ ID NO: 204332 - DNA, 25 bp, Homo sapien
ctcccactgacttttcggaatttgc

SEQ ID NO: 204333 - DNA, 25 bp, Homo sapien
tctcctcaggcagttggtgatctga

SEQ ID NO: 204334 - DNA, 25 bp, Homo sapien
ctctcctcaggcagttggtgatctg

SEQ ID NO: 204335 - DNA, 25 bp, Homo sapien
ctgacttttcggaatttgcctgtcc

SEQ ID NO: 204336 - DNA, 25 bp, Homo sapien
taggatggcttatcaaaataaacca

SEQ ID NO: 204337 - DNA, 25 bp, Homo sapien
cacaccagacccctaggatggctta

SEQ ID NO: 204338 - DNA, 25 bp, Homo sapien
ccagcccttgtttggttcttcttga

SEQ ID NO: 204339 - DNA, 25 bp, Homo sapien
tggttcttcttgattccctcacacc

SEQ ID NO: 204340 - DNA, 25 bp, Homo sapien
cggctcagactgccctttctgggag

SEQ ID NO: 204341 - DNA, 25 bp, Homo sapien
aggccgtcggctcagactgcccttt

SEQ ID NO: 204342 - DNA, 25 bp, Homo sapien
ggcttcctgtctccacgggtggaat

SEQ ID NO: 204343 - DNA, 25 bp, Homo sapien
ggaatttccatactgcaggatacat

SEQ ID NO: 204344 - DNA, 25 bp, Homo sapien
tctgctagattgtcagggcctgctt

SEQ ID NO: 204345 - DNA, 25 bp, Homo sapien
accaaggcacgatctcacatggctt

SEQ ID NO: 204346 - DNA, 25 bp, Homo sapien
ttggcatagtgcacttccccgaagc

SEQ ID NO: 204347 - DNA, 25 bp, Homo sapien
ctcacatggctttcgttctgctaga

SEQ ID NO: 204348 - DNA, 25 bp, Homo sapien
cagccgcttcactctggggaaggca

SEQ ID NO: 204349 - DNA, 25 bp, Homo sapien
cccagttggcggatgtgctgacaga

SEQ ID NO: 204350 - DNA, 25 bp, Homo sapien
cagagaagccttggcggtgggagga

SEQ ID NO: 204351 - DNA, 25 bp, Homo sapien
tatctacaaaatcagccgcttcact

SEQ ID NO: 204352 - DNA, 25 bp, Homo sapien
cttatcccactcggagaactgggcc

SEQ ID NO: 204353 - DNA, 25 bp, Homo sapien
ccttgcttatcccactcggagaact

SEQ ID NO: 204354 - DNA, 25 bp, Homo sapien
ttgcttatcccactcggagaactgg

SEQ ID NO: 204355 - DNA, 25 bp, Homo sapien
tgcttatcccactcggagaactggg

SEQ ID NO: 204356 - DNA, 25 bp, Homo sapien
ctggctaacaatgactctggctctg

SEQ ID NO: 204357 - DNA, 25 bp, Homo sapien
aatgactctggctctgttgttaact

SEQ ID NO: 204358 - DNA, 25 bp, Homo sapien
gctaacaatgactctggctctgttg

SEQ ID NO: 204359 - DNA, 25 bp, Homo sapien
caatgactctggctctgttgttaac

SEQ ID NO: 204360 - DNA, 25 bp, Homo sapien
atgatcacgggagggtagctccagc

SEQ ID NO: 204361 - DNA, 25 bp, Homo sapien
atcacgggagggtagctccagctgc

SEQ ID NO: 204362 - DNA, 25 bp, Homo sapien
ctaatgatcacgggagggtagctcc

SEQ ID NO: 204363 - DNA, 25 bp, Homo sapien
taatgatcacgggagggtagctcca

SEQ ID NO: 204364 - DNA, 25 bp, Homo sapien
caggatttggacttacccgatgctc

SEQ ID NO: 204365 - DNA, 25 bp, Homo sapien
ggtatctatcaacttcagagcaggc

SEQ ID NO: 204366 - DNA, 25 bp, Homo sapien
gcagaggttttagcaatagccaagg

SEQ ID NO: 204367 - DNA, 25 bp, Homo sapien
gattgaaacacagaacgcgtggctt

SEQ ID NO: 204368 - DNA, 25 bp, Homo sapien
aactaaaagagcctggaaactgaag

SEQ ID NO: 204369 - DNA, 25 bp, Homo sapien
gagaactaaaagagcctggaaactg

SEQ ID NO: 204370 - DNA, 25 bp, Homo sapien
gaactaaaagagcctggaaactgaa

SEQ ID NO: 204371 - DNA, 25 bp, Homo sapien
agaactaaaagagcctggaaactga

SEQ ID NO: 204372 - DNA, 25 bp, Homo sapien
tgtcacctcaatcccacctctgttc

SEQ ID NO: 204373 - DNA, 25 bp, Homo sapien
tcagctccagaaggtcccaccctgt

SEQ ID NO: 204374 - DNA, 25 bp, Homo sapien
ctgctccatactggcacacttcctg

SEQ ID NO: 204375 - DNA, 25 bp, Homo sapien
gctccatactggcacacttcctgca

SEQ ID NO: 204376 - DNA, 25 bp, Homo sapien
cccaggtagcatgtggttgtccttt

SEQ ID NO: 204377 - DNA, 25 bp, Homo sapien
acccccttcccaggtagcatgtggt

SEQ ID NO: 204378 - DNA, 25 bp, Homo sapien
atccctcagtaacgaagcggcaccc

SEQ ID NO: 204379 - DNA, 25 bp, Homo sapien
ccttcccaggtagcatgtggttgtc

SEQ ID NO: 204380 - DNA, 25 bp, Homo sapien
tgaaacagtagccattccttataaa

SEQ ID NO: 204381 - DNA, 25 bp, Homo sapien
acaagtaacacctatcatgaaacag

SEQ ID NO: 204382 - DNA, 25 bp, Homo sapien
cagtagccattccttataaaaccaa

SEQ ID NO: 204383 - DNA, 25 bp, Homo sapien
aacaagctcaacaagtaacacctat

SEQ ID NO: 204384 - DNA, 25 bp, Homo sapien
tccctgaatgaatgatagaggccca

SEQ ID NO: 204385 - DNA, 25 bp, Homo sapien
ctttacccacagatgcattcagggc

SEQ ID NO: 204386 - DNA, 25 bp, Homo sapien
gctgtttacatgttgctcttcccca

SEQ ID NO: 204387 - DNA, 25 bp, Homo sapien
ccacagctggtcaacttcctgaaca

SEQ ID NO: 204388 - DNA, 25 bp, Homo sapien
ttaggagccctcgtggtctaaatcc

SEQ ID NO: 204389 - DNA, 25 bp, Homo sapien
taggagccctcgtggtctaaatcca

SEQ ID NO: 204390 - DNA, 25 bp, Homo sapien
ggagccctcgtggtctaaatccaaa

SEQ ID NO: 204391 - DNA, 25 bp, Homo sapien
aggagccctcgtggtctaaatccaa

SEQ ID NO: 204392 - DNA, 25 bp, Homo sapien
gagccctcctgccaatgcatattca

SEQ ID NO: 204393 - DNA, 25 bp, Homo sapien
ataagccaagaggagccctcctgcc

SEQ ID NO: 204394 - DNA, 25 bp, Homo sapien
gcttgctagctgatgttgatatctg

SEQ ID NO: 204395 - DNA, 25 bp, Homo sapien
tgttgatatctgagggatataagcc

SEQ ID NO: 204396 - DNA, 25 bp, Homo sapien
tgcagtgagataaggctatggagtt

SEQ ID NO: 204397 - DNA, 25 bp, Homo sapien
gcagtgagataaggctatggagttc

SEQ ID NO: 204398 - DNA, 25 bp, Homo sapien
ctgcagtgagataaggctatggagt

SEQ ID NO: 204399 - DNA, 25 bp, Homo sapien
tcattgactgcttatggtcactgac

SEQ ID NO: 204400 - DNA, 25 bp, Homo sapien
atcttcattgactgcttatggtcac

SEQ ID NO: 204401 - DNA, 25 bp, Homo sapien
ttcattgactgcttatggtcactga

SEQ ID NO: 204402 - DNA, 25 bp, Homo sapien
aaatcttcattgactgcttatggtc

SEQ ID NO: 204403 - DNA, 25 bp, Homo sapien
gttcgtccaccctgcaaaaatgctg

SEQ ID NO: 204404 - DNA, 25 bp, Homo sapien
cccctccagtatgagctacttggct

SEQ ID NO: 204405 - DNA, 25 bp, Homo sapien
ctacaacaggaatgcgccctcggaa

SEQ ID NO: 204406 - DNA, 25 bp, Homo sapien
gtgcagctgcgtccaacagctctgt

SEQ ID NO: 204407 - DNA, 25 bp, Homo sapien
tctcaggatcacaactcacacacaa

SEQ ID NO: 204408 - DNA, 25 bp, Homo sapien
aaatgcagtcttccgtctctcagga

SEQ ID NO: 204409 - DNA, 25 bp, Homo sapien
gttctggctcatgcataaccaagga

SEQ ID NO: 204410 - DNA, 25 bp, Homo sapien
taaccaaggaggatgcgttctcccc

SEQ ID NO: 204411 - DNA, 25 bp, Homo sapien
gtgtctgataaatactcggactggg

SEQ ID NO: 204412 - DNA, 25 bp, Homo sapien
taacagcaaatcctcctcgacctag

SEQ ID NO: 204413 - DNA, 25 bp, Homo sapien
taaatactcggactgggcttgcttc

SEQ ID NO: 204414 - DNA, 25 bp, Homo sapien
cagatgggcggcatgtgtctgataa

SEQ ID NO: 204415 - DNA, 25 bp, Homo sapien
tgcgtgggtcctgctcgctctccac

SEQ ID NO: 204416 - DNA, 25 bp, Homo sapien
ctgaccgtcggagcagctgcgtggg

SEQ ID NO: 204417 - DNA, 25 bp, Homo sapien
ctctggagcctgaccgtcggagcag

SEQ ID NO: 204418 - DNA, 25 bp, Homo sapien
cgtgggtcctgctcgctctccacgg

SEQ ID NO: 204419 - DNA, 25 bp, Homo sapien
ccagggctttctaccctctcccagg

SEQ ID NO: 204420 - DNA, 25 bp, Homo sapien
gtccagggctttctaccctctccca

SEQ ID NO: 204421 - DNA, 25 bp, Homo sapien
agggagttcccagagcaattaacaa

SEQ ID NO: 204422 - DNA, 25 bp, Homo sapien
ccagggagttcccagagcaattaac

SEQ ID NO: 204423 - DNA, 25 bp, Homo sapien
tgactggagctaaacaagcaggact

SEQ ID NO: 204424 - DNA, 25 bp, Homo sapien
tgtgctgcatgaaggacatgaagca

SEQ ID NO: 204425 - DNA, 25 bp, Homo sapien
taatttgcaaagacatctaggtaac

SEQ ID NO: 204426 - DNA, 25 bp, Homo sapien
gggacctgatcctgttagattgaaa

SEQ ID NO: 204427 - DNA, 25 bp, Homo sapien
ttaagccactctcgacctgccactg

SEQ ID NO: 204428 - DNA, 25 bp, Homo sapien
gccactctcgacctgccactgcctt

SEQ ID NO: 204429 - DNA, 25 bp, Homo sapien
taagccactctcgacctgccactgc

SEQ ID NO: 204430 - DNA, 25 bp, Homo sapien
agccactctcgacctgccactgcct

SEQ ID NO: 204431 - DNA, 25 bp, Homo sapien
gatgcatgtacagtcctcattccta

SEQ ID NO: 204432 - DNA, 25 bp, Homo sapien
atgcatgtacagtcctcattcctac

SEQ ID NO: 204433 - DNA, 25 bp, Homo sapien
tgcatgtacagtcctcattcctact

SEQ ID NO: 204434 - DNA, 25 bp, Homo sapien
cgagaacacgtagcatattcacaca

SEQ ID NO: 204435 - DNA, 25 bp, Homo sapien
caaattcttgccacacgagaacacg

SEQ ID NO: 204436 - DNA, 25 bp, Homo sapien
tattcacacatacagtattgactct

SEQ ID NO: 204437 - DNA, 25 bp, Homo sapien
gactctcttataggtcaactccttc

SEQ ID NO: 204438 - DNA, 25 bp, Homo sapien
cagctaccaaatggactagtaattg

SEQ ID NO: 204439 - DNA, 25 bp, Homo sapien
tttgtcttcaaatgaacagctttca

SEQ ID NO: 204440 - DNA, 25 bp, Homo sapien
caatgccagctgaggttacccatct

SEQ ID NO: 204441 - DNA, 25 bp, Homo sapien
cctagaaagggaatgcatttgaagt

SEQ ID NO: 204442 - DNA, 25 bp, Homo sapien
tcatcattaggcagacattcgttct

SEQ ID NO: 204443 - DNA, 25 bp, Homo sapien
ctctgctgcgcttcataaatgtgtc

SEQ ID NO: 204444 - DNA, 25 bp, Homo sapien
taataacagtgctgggtctgcttgg

SEQ ID NO: 204445 - DNA, 25 bp, Homo sapien
taaatattgaatgccacgcttcccc

SEQ ID NO: 204446 - DNA, 25 bp, Homo sapien
agcccccactcgtggcagtacagta

SEQ ID NO: 204447 - DNA, 25 bp, Homo sapien
cctgctgggaatcgaggtgtggaaa

SEQ ID NO: 204448 - DNA, 25 bp, Homo sapien
ggcagtacagtatcttcctgctggg

SEQ ID NO: 204449 - DNA, 25 bp, Homo sapien
cactcgtggcagtacagtatcttcc

SEQ ID NO: 204450 - DNA, 25 bp, Homo sapien
ttatgttgcttgtcatgcaaatagg

SEQ ID NO: 204451 - DNA, 25 bp, Homo sapien
gattttgctaactgaattatgttgc

SEQ ID NO: 204452 - DNA, 25 bp, Homo sapien
aaaacaaaggcatgttgtaatgtag

SEQ ID NO: 204453 - DNA, 25 bp, Homo sapien
ggcatgttgtaatgtagtaatggaa

SEQ ID NO: 204454 - DNA, 25 bp, Homo sapien
aacttgaggcagtcattatacacca

SEQ ID NO: 204455 - DNA, 25 bp, Homo sapien
gagtttcaatatgttaacaaccagc

SEQ ID NO: 204456 - DNA, 25 bp, Homo sapien
tgagcattgaggcaaggtcctgcag

SEQ ID NO: 204457 - DNA, 25 bp, Homo sapien
caccactagcaataggagtttcaat

SEQ ID NO: 204458 - DNA, 25 bp, Homo sapien
gaactgtttaaaggtgctactcgcc

SEQ ID NO: 204459 - DNA, 25 bp, Homo sapien
ggttaatgaagcacctctgcagggc

SEQ ID NO: 204460 - DNA, 25 bp, Homo sapien
gagtcacacgcttcattagcaaggt

SEQ ID NO: 204461 - DNA, 25 bp, Homo sapien
tgtaaattatcagcgaggccctctc

SEQ ID NO: 204462 - DNA, 25 bp, Homo sapien
tacagccggcagcttcacagcttca

SEQ ID NO: 204463 - DNA, 25 bp, Homo sapien
cggcagcttcacagcttcatcaggt

SEQ ID NO: 204464 - DNA, 25 bp, Homo sapien
cactgcagtctttcctgataggtac

SEQ ID NO: 204465 - DNA, 25 bp, Homo sapien
tcctgataggtacagccggcagctt

SEQ ID NO: 204466 - DNA, 25 bp, Homo sapien
aatttgtcgtatcagttccctcatg

SEQ ID NO: 204467 - DNA, 25 bp, Homo sapien
ttcagaatttgtcgtatcagttccc

SEQ ID NO: 204468 - DNA, 25 bp, Homo sapien
cttttcagaatttgtcgtatcagtt

SEQ ID NO: 204469 - DNA, 25 bp, Homo sapien
cagaatttgtcgtatcagttccctc

SEQ ID NO: 204470 - DNA, 25 bp, Homo sapien
ctggataatggctccacataggaca

SEQ ID NO: 204471 - DNA, 25 bp, Homo sapien
tggataatggctccacataggacat

SEQ ID NO: 204472 - DNA, 25 bp, Homo sapien
ttgtgaagacaaactagcatctcca

SEQ ID NO: 204473 - DNA, 25 bp, Homo sapien
ctagcatctccaatcaaattaagtt

SEQ ID NO: 204474 - DNA, 25 bp, Homo sapien
gttctccgatctgacttacagctct

SEQ ID NO: 204475 - DNA, 25 bp, Homo sapien
aattaagttttctgaacctgcaggc

SEQ ID NO: 204476 - DNA, 25 bp, Homo sapien
gccacgtgcggctgcgagtttcaga

SEQ ID NO: 204477 - DNA, 25 bp, Homo sapien
tcggttccgggaggcaggtactcca

SEQ ID NO: 204478 - DNA, 25 bp, Homo sapien
cttgcgggcaactgcacactcggtt

SEQ ID NO: 204479 - DNA, 25 bp, Homo sapien
tgtctcagttcccacgtcaagagga

SEQ ID NO: 204480 - DNA, 25 bp, Homo sapien
gacgcaggtgtgtactttacagcca

SEQ ID NO: 204481 - DNA, 25 bp, Homo sapien
cgcaggtgtgtactttacagccaga

SEQ ID NO: 204482 - DNA, 25 bp, Homo sapien
caggtgtgtactttacagccagaga

SEQ ID NO: 204483 - DNA, 25 bp, Homo sapien
gtgacgcaggtgtgtactttacagc

SEQ ID NO: 204484 - DNA, 25 bp, Homo sapien
ttcagggattgcactccgaggtggc

SEQ ID NO: 204485 - DNA, 25 bp, Homo sapien
gctggccccgcgaaggaggcctcaa

SEQ ID NO: 204486 - DNA, 25 bp, Homo sapien
gctctcccggacgtgtcgggtccta

SEQ ID NO: 204487 - DNA, 25 bp, Homo sapien
ctggcaggagagccccgcgagctct

SEQ ID NO: 204488 - DNA, 25 bp, Homo sapien
aggtctcgatctgccggagccactg

SEQ ID NO: 204489 - DNA, 25 bp, Homo sapien
gcgaaggtctcgatctgccggagcc

SEQ ID NO: 204490 - DNA, 25 bp, Homo sapien
ggcgtcccgggcgaaggtctcgatc

SEQ ID NO: 204491 - DNA, 25 bp, Homo sapien
gccggagccactgcctttcaggcat

SEQ ID NO: 204492 - DNA, 25 bp, Homo sapien
tgtctctaaagggtactttccagct

SEQ ID NO: 204493 - DNA, 25 bp, Homo sapien
aaactgagatagagggggagcaggc

SEQ ID NO: 204494 - DNA, 25 bp, Homo sapien
cctgtctctaaagggtactttccag

SEQ ID NO: 204495 - DNA, 25 bp, Homo sapien
caaggacctgtctctaaagggtact

SEQ ID NO: 204496 - DNA, 25 bp, Homo sapien
aaaagccagctctttagccagagcg

SEQ ID NO: 204497 - DNA, 25 bp, Homo sapien
aaagccagctctttagccagagcgc

SEQ ID NO: 204498 - DNA, 25 bp, Homo sapien
tcccaggtaactccgactgggcact

SEQ ID NO: 204499 - DNA, 25 bp, Homo sapien
tgttcccaggtaactccgactgggc

SEQ ID NO: 204500 - DNA, 25 bp, Homo sapien
caaagccggaacttaattgagttga

SEQ ID NO: 204501 - DNA, 25 bp, Homo sapien
ccaaagccggaacttaattgagttg

SEQ ID NO: 204502 - DNA, 25 bp, Homo sapien
aaagccggaacttaattgagttgat

SEQ ID NO: 204503 - DNA, 25 bp, Homo sapien
aagagtcacttaattttggtcagct

SEQ ID NO: 204504 - DNA, 25 bp, Homo sapien
cgttacaatcaagagtcacttaatt

SEQ ID NO: 204505 - DNA, 25 bp, Homo sapien
caatcaagagtcacttaattttggt

SEQ ID NO: 204506 - DNA, 25 bp, Homo sapien
taaaacgttacaatcaagagtcact

SEQ ID NO: 204507 - DNA, 25 bp, Homo sapien
tttacaaaatgcaggtacaactgaa

SEQ ID NO: 204508 - DNA, 25 bp, Homo sapien
catgtttacctcagtttttggaagt

SEQ ID NO: 204509 - DNA, 25 bp, Homo sapien
tctgattacactccctctcatgttt

SEQ ID NO: 204510 - DNA, 25 bp, Homo sapien
ttctgattacactccctctcatgtt

SEQ ID NO: 204511 - DNA, 25 bp, Homo sapien
ttcatgttgctggtttgtaggcccc

SEQ ID NO: 204512 - DNA, 25 bp, Homo sapien
ggaacacctctgcttaagaaggcta

SEQ ID NO: 204513 - DNA, 25 bp, Homo sapien
tgaccaatgtctctttactgctagg

SEQ ID NO: 204514 - DNA, 25 bp, Homo sapien
tatgcctctcggaactttgatcaga

SEQ ID NO: 204515 - DNA, 25 bp, Homo sapien
tccagatagacacaggagcactgct

SEQ ID NO: 204516 - DNA, 25 bp, Homo sapien
gggataggacctctgcatgcaggaa

SEQ ID NO: 204517 - DNA, 25 bp, Homo sapien
gaagttgagccagcatatccttgac

SEQ ID NO: 204518 - DNA, 25 bp, Homo sapien
aagcttgaagctccatatccctggg

SEQ ID NO: 204519 - DNA, 25 bp, Homo sapien
aactgtggtaaaagtgaggccacca

SEQ ID NO: 204520 - DNA, 25 bp, Homo sapien
tgagctctctgtatgggtgccgtaa

SEQ ID NO: 204521 - DNA, 25 bp, Homo sapien
cctagtgaggactttggttcaagcc

SEQ ID NO: 204522 - DNA, 25 bp, Homo sapien
ttgacaattctctttaccagccctg

SEQ ID NO: 204523 - DNA, 25 bp, Homo sapien
agcacatctagctgcgcccgagtga

SEQ ID NO: 204524 - DNA, 25 bp, Homo sapien
cctcgactcgggcaagttgattttc

SEQ ID NO: 204525 - DNA, 25 bp, Homo sapien
atgaagatgtctgggtaccgggtct

SEQ ID NO: 204526 - DNA, 25 bp, Homo sapien
ggcaaacagtgcttccagcacatct

SEQ ID NO: 204527 - DNA, 25 bp, Homo sapien
aatgccctgggactgcttcctcaga

SEQ ID NO: 204528 - DNA, 25 bp, Homo sapien
tgttctctgcttggtcagtaaatgc

SEQ ID NO: 204529 - DNA, 25 bp, Homo sapien
tggtcagtaaatgccctgggactgc

SEQ ID NO: 204530 - DNA, 25 bp, Homo sapien
ctgttctctgcttggtcagtaaatg

SEQ ID NO: 204531 - DNA, 25 bp, Homo sapien
ccattgactgcgtaaggcggttgct

SEQ ID NO: 204532 - DNA, 25 bp, Homo sapien
ggcggttgcttaagataagacatca

SEQ ID NO: 204533 - DNA, 25 bp, Homo sapien
tcagactcagcccattgactgcgta

SEQ ID NO: 204534 - DNA, 25 bp, Homo sapien
gtccatacccgaagtggtcagactc

SEQ ID NO: 204535 - DNA, 25 bp, Homo sapien
gaggtgcaaagtcggcccaaatcgg

SEQ ID NO: 204536 - DNA, 25 bp, Homo sapien
taaggttgtttggaggtgcaaagtc

SEQ ID NO: 204537 - DNA, 25 bp, Homo sapien
agctggaagatcttgatgcgcccgg

SEQ ID NO: 204538 - DNA, 25 bp, Homo sapien
gggtacccagctggaagatcttgat

SEQ ID NO: 204539 - DNA, 25 bp, Homo sapien
ggtgggtgggtttggagcagtggaa

SEQ ID NO: 204540 - DNA, 25 bp, Homo sapien
ttggtgggtgggtttggagcagtgg

SEQ ID NO: 204541 - DNA, 25 bp, Homo sapien
cttggtgggtgggtttggagcagtg

SEQ ID NO: 204542 - DNA, 25 bp, Homo sapien
tggtgggtgggtttggagcagtgga

SEQ ID NO: 204543 - DNA, 25 bp, Homo sapien
cttaaaaagagcacggactaggcga

SEQ ID NO: 204544 - DNA, 25 bp, Homo sapien
tttaaaggacttgcagacactcccc

SEQ ID NO: 204545 - DNA, 25 bp, Homo sapien
gctggtttactgcttcggaggcagc

SEQ ID NO: 204546 - DNA, 25 bp, Homo sapien
gactaggcgaggcagaggcttttaa

SEQ ID NO: 204547 - DNA, 25 bp, Homo sapien
gcgagttccggcagccggtcggcga

SEQ ID NO: 204548 - DNA, 25 bp, Homo sapien
acctccgggcgcgagtgcctgggtc

SEQ ID NO: 204549 - DNA, 25 bp, Homo sapien
gctgaccgcggtcgcgcggcgagtt

SEQ ID NO: 204550 - DNA, 25 bp, Homo sapien
tgggtcccgcgttcctgcccggcag

SEQ ID NO: 204551 - DNA, 25 bp, Homo sapien
tcctctctgcttctcgtccgggctg

SEQ ID NO: 204552 - DNA, 25 bp, Homo sapien
tcgggcatcgatttcaagagtcact

SEQ ID NO: 204553 - DNA, 25 bp, Homo sapien
ccaactcggtggaatcctgacaggg

SEQ ID NO: 204554 - DNA, 25 bp, Homo sapien
aagagtcacttgaacgcaacaacgc

SEQ ID NO: 204555 - DNA, 25 bp, Homo sapien
aaatatgtcccgaaatcgggcatcg

SEQ ID NO: 204556 - DNA, 25 bp, Homo sapien
cttacagcctcatgggaggttagaa

SEQ ID NO: 204557 - DNA, 25 bp, Homo sapien
catgaaaagtcaaacacaaccaaaa

SEQ ID NO: 204558 - DNA, 25 bp, Homo sapien
tagaaaccttgcagtcttcaccctt

SEQ ID NO: 204559 - DNA, 25 bp, Homo sapien
ctaaaagaaatcaagagtattgagt

SEQ ID NO: 204560 - DNA, 25 bp, Homo sapien
tcacccttccatgaaaagtcaaaca

SEQ ID NO: 204561 - DNA, 25 bp, Homo sapien
aaagtagatgtggcgagtgagggct

SEQ ID NO: 204562 - DNA, 25 bp, Homo sapien
agtagatgtggcgagtgagggctgc

SEQ ID NO: 204563 - DNA, 25 bp, Homo sapien
aagtagatgtggcgagtgagggctg

SEQ ID NO: 204564 - DNA, 25 bp, Homo sapien
caactttttgacgcaaactctccaa

SEQ ID NO: 204565 - DNA, 25 bp, Homo sapien
gctgtgttggagctgaggccggtcc

SEQ ID NO: 204566 - DNA, 25 bp, Homo sapien
gccggtcccgctctcagggagattt

SEQ ID NO: 204567 - DNA, 25 bp, Homo sapien
gatttgctgagaaagcgcctctctg

SEQ ID NO: 204568 - DNA, 25 bp, Homo sapien
gctggctgtcgcgttcccaggagtc

SEQ ID NO: 204569 - DNA, 25 bp, Homo sapien
ctccagtccggagacccgctggctg

SEQ ID NO: 204570 - DNA, 25 bp, Homo sapien
tcgcgttcccaggagtcaagagttt

SEQ ID NO: 204571 - DNA, 25 bp, Homo sapien
gaggcagcaagctctcggcagccgg

SEQ ID NO: 204572 - DNA, 25 bp, Homo sapien
gagtcatgatgctttcgatgaagga

SEQ ID NO: 204573 - DNA, 25 bp, Homo sapien
cactggttgggtgcgcttggtcaga

SEQ ID NO: 204574 - DNA, 25 bp, Homo sapien
gaaggaaaggcaaatccacctcgat

SEQ ID NO: 204575 - DNA, 25 bp, Homo sapien
ttatgaccctcgtggcgctggctgt

SEQ ID NO: 204576 - DNA, 25 bp, Homo sapien
ccattttggactgggagatccatct

SEQ ID NO: 204577 - DNA, 25 bp, Homo sapien
gaacatgcgcttgtgagctaaacca

SEQ ID NO: 204578 - DNA, 25 bp, Homo sapien
gatccatctgccgtagggtccagtg

SEQ ID NO: 204579 - DNA, 25 bp, Homo sapien
ggtaacctttcaagcccgatgtaga

SEQ ID NO: 204580 - DNA, 25 bp, Homo sapien
taatcgtgtctaatgaaaacctggg

SEQ ID NO: 204581 - DNA, 25 bp, Homo sapien
tcttgagcgcacatggtcatccggc

SEQ ID NO: 204582 - DNA, 25 bp, Homo sapien
tacctgagatacacggtgcaaacgc

SEQ ID NO: 204583 - DNA, 25 bp, Homo sapien
tatatgggcacgacagacttttcct

SEQ ID NO: 204584 - DNA, 25 bp, Homo sapien
acaccctagtgcgtcccaactccag

SEQ ID NO: 204585 - DNA, 25 bp, Homo sapien
gacgtctgcggcctctggtcttttc

SEQ ID NO: 204586 - DNA, 25 bp, Homo sapien
ctccagactgggaggagacgtctgc

SEQ ID NO: 204587 - DNA, 25 bp, Homo sapien
acgtctgcggcctctggtcttttcc

SEQ ID NO: 204588 - DNA, 25 bp, Homo sapien
ctcggacccagtgcgccgagctagg

SEQ ID NO: 204589 - DNA, 25 bp, Homo sapien
cacctcggacccagtgcgccgagct

SEQ ID NO: 204590 - DNA, 25 bp, Homo sapien
cggccacctcggacccagtgcgccg

SEQ ID NO: 204591 - DNA, 25 bp, Homo sapien
tcggacccagtgcgccgagctaggg

SEQ ID NO: 204592 - DNA, 25 bp, Homo sapien
cgcaaaagggtaggcccctcttgct

SEQ ID NO: 204593 - DNA, 25 bp, Homo sapien
cacgaagtgcttcgatgttcgcaaa

SEQ ID NO: 204594 - DNA, 25 bp, Homo sapien
gatcccgccctcgtagcggaaggag

SEQ ID NO: 204595 - DNA, 25 bp, Homo sapien
ccaggactcgaggacgcggtttgcc

SEQ ID NO: 204596 - DNA, 25 bp, Homo sapien
tcaccaaaggttagatgggaggcgt

SEQ ID NO: 204597 - DNA, 25 bp, Homo sapien
gggagttcgcaaagcttctcgcttt

SEQ ID NO: 204598 - DNA, 25 bp, Homo sapien
tcgctttgatcagccgcgcgcagtg

SEQ ID NO: 204599 - DNA, 25 bp, Homo sapien
tgcaggctgacaggcgcaccgtgac

SEQ ID NO: 204600 - DNA, 25 bp, Homo sapien
cttctgggtatgaattgtgggtcat

SEQ ID NO: 204601 - DNA, 25 bp, Homo sapien
aatagtactttaccttctgggtatg

SEQ ID NO: 204602 - DNA, 25 bp, Homo sapien
atagtactttaccttctgggtatga

SEQ ID NO: 204603 - DNA, 25 bp, Homo sapien
caatagtactttaccttctgggtat

SEQ ID NO: 204604 - DNA, 25 bp, Homo sapien
gtgaaaatacaagcttaaaatattc

SEQ ID NO: 204605 - DNA, 25 bp, Homo sapien
tcaggactgagaatagagcatttaa

SEQ ID NO: 204606 - DNA, 25 bp, Homo sapien
tacacttccgtaagagatgtgggca

SEQ ID NO: 204607 - DNA, 25 bp, Homo sapien
gatacttatggaagtacaacagggt

SEQ ID NO: 204608 - DNA, 25 bp, Homo sapien
aatccagacactccatcagcagcct

SEQ ID NO: 204609 - DNA, 25 bp, Homo sapien
gagggtagcatttgccttatggaag

SEQ ID NO: 204610 - DNA, 25 bp, Homo sapien
taaaagttcattaggcttcaggagg

SEQ ID NO: 204611 - DNA, 25 bp, Homo sapien
gcttcaggagggtagcatttgcctt

SEQ ID NO: 204612 - DNA, 25 bp, Homo sapien
aagccacgagggcaactgcctgttc

SEQ ID NO: 204613 - DNA, 25 bp, Homo sapien
cagatgctgttgcttggaagaatct

SEQ ID NO: 204614 - DNA, 25 bp, Homo sapien
gatgctgttgcttggaagaatctct

SEQ ID NO: 204615 - DNA, 25 bp, Homo sapien
ccacgagggcaactgcctgttcagt

SEQ ID NO: 204616 - DNA, 25 bp, Homo sapien
catccaaagaacagtggtggggcat

SEQ ID NO: 204617 - DNA, 25 bp, Homo sapien
gccatccaaagaacagtggtggggc

SEQ ID NO: 204618 - DNA, 25 bp, Homo sapien
ctgtgattgccatccaaagaacagt

SEQ ID NO: 204619 - DNA, 25 bp, Homo sapien
gtgattgccatccaaagaacagtgg

SEQ ID NO: 204620 - DNA, 25 bp, Homo sapien
cacatattattttcgaaaatgtaaa

SEQ ID NO: 204621 - DNA, 25 bp, Homo sapien
ggaggataatagtacaaggcaaggc

SEQ ID NO: 204622 - DNA, 25 bp, Homo sapien
aggcaaggctgtctatttgaaaaaa

SEQ ID NO: 204623 - DNA, 25 bp, Homo sapien
gatgaatgcaatcccggcatcccac

SEQ ID NO: 204624 - DNA, 25 bp, Homo sapien
aacttagtgcgaacatccgattgct

SEQ ID NO: 204625 - DNA, 25 bp, Homo sapien
tccttgggcaacctgttgggtctct

SEQ ID NO: 204626 - DNA, 25 bp, Homo sapien
tgggcaacctgttgggtctcttgct

SEQ ID NO: 204627 - DNA, 25 bp, Homo sapien
gattgctgtagcacaactcctgggc

SEQ ID NO: 204628 - DNA, 25 bp, Homo sapien
gacttccttcaatgctgcaaatttg

SEQ ID NO: 204629 - DNA, 25 bp, Homo sapien
caatgctgcaaatttgtccggacac

SEQ ID NO: 204630 - DNA, 25 bp, Homo sapien
caaatttgtccggacacttccacat

SEQ ID NO: 204631 - DNA, 25 bp, Homo sapien
ctcaaagacttccttcaatgctgca

SEQ ID NO: 204632 - DNA, 25 bp, Homo sapien
ggtatagacaataggtccaggttaa

SEQ ID NO: 204633 - DNA, 25 bp, Homo sapien
gacaataggtccaggttaaggatgt

SEQ ID NO: 204634 - DNA, 25 bp, Homo sapien
atgtaatataacttagggaagatcc

SEQ ID NO: 204635 - DNA, 25 bp, Homo sapien
aaggatgtaatataacttagggaag

SEQ ID NO: 204636 - DNA, 25 bp, Homo sapien
ggcctcagtgacactcgctgcagcg

SEQ ID NO: 204637 - DNA, 25 bp, Homo sapien
gcagctggcctcagtgacactcgct

SEQ ID NO: 204638 - DNA, 25 bp, Homo sapien
agctggcctcagtgacactcgctgc

SEQ ID NO: 204639 - DNA, 25 bp, Homo sapien
tggcctcagtgacactcgctgcagc

SEQ ID NO: 204640 - DNA, 25 bp, Homo sapien
ttctgaagtgcttcccataaacacc

SEQ ID NO: 204641 - DNA, 25 bp, Homo sapien
tacaaccgtgagaacaattacctac

SEQ ID NO: 204642 - DNA, 25 bp, Homo sapien
atgagaagtacaaccgtgagaacaa

SEQ ID NO: 204643 - DNA, 25 bp, Homo sapien
tgcttcccataaacaccaaatgaga

SEQ ID NO: 204644 - DNA, 25 bp, Homo sapien
taccttgattgtgtagtaaaggctc

SEQ ID NO: 204645 - DNA, 25 bp, Homo sapien
gacattaccttgattgtgtagtaaa

SEQ ID NO: 204646 - DNA, 25 bp, Homo sapien
tgaagacattaccttgattgtgtag

SEQ ID NO: 204647 - DNA, 25 bp, Homo sapien
cattaccttgattgtgtagtaaagg

SEQ ID NO: 204648 - DNA, 25 bp, Homo sapien
tgcttgcatctttcccaagttgtat

SEQ ID NO: 204649 - DNA, 25 bp, Homo sapien
tgtgcttgcatctttcccaagttgt

SEQ ID NO: 204650 - DNA, 25 bp, Homo sapien
ctgcatgtgcttgcatctttcccaa

SEQ ID NO: 204651 - DNA, 25 bp, Homo sapien
catgtgcttgcatctttcccaagtt

SEQ ID NO: 204652 - DNA, 25 bp, Homo sapien
aagtctttgtgtgccgctttccgtt

SEQ ID NO: 204653 - DNA, 25 bp, Homo sapien
taagtgaggcggtttggactgcacc

SEQ ID NO: 204654 - DNA, 25 bp, Homo sapien
tccaagggtaattgaggcggcagca

SEQ ID NO: 204655 - DNA, 25 bp, Homo sapien
tgccgctttccgttgttaactccaa

SEQ ID NO: 204656 - DNA, 25 bp, Homo sapien
ggttgactttggataagcacccaca

SEQ ID NO: 204657 - DNA, 25 bp, Homo sapien
tcagacacgggaaggttgactttgg

SEQ ID NO: 204658 - DNA, 25 bp, Homo sapien
cgggaaggttgactttggataagca

SEQ ID NO: 204659 - DNA, 25 bp, Homo sapien
gactttggataagcacccacaaagg

SEQ ID NO: 204660 - DNA, 25 bp, Homo sapien
ttttcttgtgccgtttccacacaca

SEQ ID NO: 204661 - DNA, 25 bp, Homo sapien
gcccttttcttgtgccgtttccaca

SEQ ID NO: 204662 - DNA, 25 bp, Homo sapien
ccttttcttgtgccgtttccacaca

SEQ ID NO: 204663 - DNA, 25 bp, Homo sapien
tttcttgtgccgtttccacacacat

SEQ ID NO: 204664 - DNA, 25 bp, Homo sapien
tcaggttttgagctgttcaaaaatg

SEQ ID NO: 204665 - DNA, 25 bp, Homo sapien
tcaacagcaagggtggaatggttat

SEQ ID NO: 204666 - DNA, 25 bp, Homo sapien
gaaccgtttgatagtgtgtattcaa

SEQ ID NO: 204667 - DNA, 25 bp, Homo sapien
gaatggttatgattagaaccgtttg

SEQ ID NO: 204668 - DNA, 25 bp, Homo sapien
ctcaatagcatgtgataggcactgg

SEQ ID NO: 204669 - DNA, 25 bp, Homo sapien
cactggatggaatttagaggtcttg

SEQ ID NO: 204670 - DNA, 25 bp, Homo sapien
gtgataggcactggatggaatttag

SEQ ID NO: 204671 - DNA, 25 bp, Homo sapien
aactcaatagcatgtgataggcact

SEQ ID NO: 204672 - DNA, 25 bp, Homo sapien
gttcatgcgaaccagagactagctt

SEQ ID NO: 204673 - DNA, 25 bp, Homo sapien
ttttccaaagtgaacgtgattcagg

SEQ ID NO: 204674 - DNA, 25 bp, Homo sapien
ccaaaaccgctcttctagttccatg

SEQ ID NO: 204675 - DNA, 25 bp, Homo sapien
taccacgggactaggttcactccaa

SEQ ID NO: 204676 - DNA, 25 bp, Homo sapien
tatgcttgccaattcgaccctgtct

SEQ ID NO: 204677 - DNA, 25 bp, Homo sapien
ctgcaaactgtcctgcacatcgctg

SEQ ID NO: 204678 - DNA, 25 bp, Homo sapien
gaccctgtcttttcgttgcccacag

SEQ ID NO: 204679 - DNA, 25 bp, Homo sapien
tctgtcttccacatcgattgactgc

SEQ ID NO: 204680 - DNA, 25 bp, Homo sapien
tgttacgctttcaagaaacaggagt

SEQ ID NO: 204681 - DNA, 25 bp, Homo sapien
caagttatcccttgtgcctgagctg

SEQ ID NO: 204682 - DNA, 25 bp, Homo sapien
aggatgctccatagcccttccagga

SEQ ID NO: 204683 - DNA, 25 bp, Homo sapien
tgtatctgctatccctccagcagga

SEQ ID NO: 204684 - DNA, 25 bp, Homo sapien
tttaagtcaagtaggaggaacagcc

SEQ ID NO: 204685 - DNA, 25 bp, Homo sapien
cagatcatttgtgagtgcctacgaa

SEQ ID NO: 204686 - DNA, 25 bp, Homo sapien
gcagtgagcttctagagaccgcgac

SEQ ID NO: 204687 - DNA, 25 bp, Homo sapien
catatgtgcatagcagcagtgagct

SEQ ID NO: 204688 - DNA, 25 bp, Homo sapien
cactgatatgtaaaggccagggaac

SEQ ID NO: 204689 - DNA, 25 bp, Homo sapien
catcgtgggcattggtaggacatcc

SEQ ID NO: 204690 - DNA, 25 bp, Homo sapien
tgcagagaggtgtccaaattttacg

SEQ ID NO: 204691 - DNA, 25 bp, Homo sapien
gggaactccactgtagaaatctgga

SEQ ID NO: 204692 - DNA, 25 bp, Homo sapien
cttcccagggaaaccggtcatgact

SEQ ID NO: 204693 - DNA, 25 bp, Homo sapien
tatctggcatccaagttgatgtaac

SEQ ID NO: 204694 - DNA, 25 bp, Homo sapien
tagttaaataatgtggcttatcctc

SEQ ID NO: 204695 - DNA, 25 bp, Homo sapien
tttttcagcccctgatttttgtata

SEQ ID NO: 204696 - DNA, 25 bp, Homo sapien
tatcacttgctatgaacttcagcct

SEQ ID NO: 204697 - DNA, 25 bp, Homo sapien
agaagtctttatgccctgtacaagg

SEQ ID NO: 204698 - DNA, 25 bp, Homo sapien
taattcaaccataatgcagccatgg

SEQ ID NO: 204699 - DNA, 25 bp, Homo sapien
aattaaccttcaaccatgtatcagc

SEQ ID NO: 204700 - DNA, 25 bp, Homo sapien
tcagtaagaaggattcaacccagcc

SEQ ID NO: 204701 - DNA, 25 bp, Homo sapien
gatgactagtaccacccacataagg

SEQ ID NO: 204702 - DNA, 25 bp, Homo sapien
gttaggatactcagccaggcaggca

SEQ ID NO: 204703 - DNA, 25 bp, Homo sapien
cagaaaattacatggagctccaggc

SEQ ID NO: 204704 - DNA, 25 bp, Homo sapien
tgacagcattggagcttcagcctag

SEQ ID NO: 204705 - DNA, 25 bp, Homo sapien
tgtgtgagagtagaaccagtctctg

SEQ ID NO: 204706 - DNA, 25 bp, Homo sapien
tggagtacttggcaaaacacccgag

SEQ ID NO: 204707 - DNA, 25 bp, Homo sapien
cacccgagcctcttgtttaattcaa

SEQ ID NO: 204708 - DNA, 25 bp, Homo sapien
gcaaaacacccgagcctcttgttta

SEQ ID NO: 204709 - DNA, 25 bp, Homo sapien
gaaactaagacttgcgtgaaccatg

SEQ ID NO: 204710 - DNA, 25 bp, Homo sapien
taggatccatgcaacttaggtgtac

SEQ ID NO: 204711 - DNA, 25 bp, Homo sapien
taggtttgagtcgattgggttgcca

SEQ ID NO: 204712 - DNA, 25 bp, Homo sapien
gcagcacacctagttatcaaacagg

SEQ ID NO: 204713 - DNA, 25 bp, Homo sapien
tccaaactatttgaattgtgaagct

SEQ ID NO: 204714 - DNA, 25 bp, Homo sapien
ggcttcgatcactcaaattacaggt

SEQ ID NO: 204715 - DNA, 25 bp, Homo sapien
ttgttccttgagttgagcaacctca

SEQ ID NO: 204716 - DNA, 25 bp, Homo sapien
gattaatgtggagcagacagactgt

SEQ ID NO: 204717 - DNA, 25 bp, Homo sapien
gcctaactatcatagggtcattttc

SEQ ID NO: 204718 - DNA, 25 bp, Homo sapien
gaaacaggaagccaatcaaggtcaa

SEQ ID NO: 204719 - DNA, 25 bp, Homo sapien
ctaactatcatagggtcattttccc

SEQ ID NO: 204720 - DNA, 25 bp, Homo sapien
ccagcctaactatcatagggtcatt

SEQ ID NO: 204721 - DNA, 25 bp, Homo sapien
tgtttaacagacagcataagaaatg

SEQ ID NO: 204722 - DNA, 25 bp, Homo sapien
taacagacagcataagaaatgaatt

SEQ ID NO: 204723 - DNA, 25 bp, Homo sapien
cagacagcataagaaatgaattttc

SEQ ID NO: 204724 - DNA, 25 bp, Homo sapien
gacagcataagaaatgaattttcca

SEQ ID NO: 204725 - DNA, 25 bp, Homo sapien
gataaaacaggatgccggaagccca

SEQ ID NO: 204726 - DNA, 25 bp, Homo sapien
cggaagcccaagacaatacaagaag

SEQ ID NO: 204727 - DNA, 25 bp, Homo sapien
gcctgagtgttgacagtctctgctg

SEQ ID NO: 204728 - DNA, 25 bp, Homo sapien
tacaagaagctggttcaacgtagca

SEQ ID NO: 204729 - DNA, 25 bp, Homo sapien
cctgctcccgggcatgacgactttt

SEQ ID NO: 204730 - DNA, 25 bp, Homo sapien
gacgacttttgatggcaattgtccc

SEQ ID NO: 204731 - DNA, 25 bp, Homo sapien
ggttcataacgtcttcacaattctg

SEQ ID NO: 204732 - DNA, 25 bp, Homo sapien
tcttgagtcaagtcacctgggttca

SEQ ID NO: 204733 - DNA, 25 bp, Homo sapien
tcctgcagaagtgaaagagttgctt

SEQ ID NO: 204734 - DNA, 25 bp, Homo sapien
tattaggactggaaatactcaagca

SEQ ID NO: 204735 - DNA, 25 bp, Homo sapien
gcataggaagtacaatggagagcac

SEQ ID NO: 204736 - DNA, 25 bp, Homo sapien
caggtttggacatcccacttgacaa

SEQ ID NO: 204737 - DNA, 25 bp, Homo sapien
tgcacccacgtaggctgtagcttct

SEQ ID NO: 204738 - DNA, 25 bp, Homo sapien
caatgaagccgggtagtgcatttga

SEQ ID NO: 204739 - DNA, 25 bp, Homo sapien
ctacatctggtccaacaggaggcac

SEQ ID NO: 204740 - DNA, 25 bp, Homo sapien
gatccagatggatcacacatattgg

SEQ ID NO: 204741 - DNA, 25 bp, Homo sapien
tatggtttcattgcacaagggagga

SEQ ID NO: 204742 - DNA, 25 bp, Homo sapien
aaagctttctctaatcacccaatgg

SEQ ID NO: 204743 - DNA, 25 bp, Homo sapien
taatgtgtggctgttgaaatcctca

SEQ ID NO: 204744 - DNA, 25 bp, Homo sapien
tagaaagggctcaaccttgcaccaa

SEQ ID NO: 204745 - DNA, 25 bp, Homo sapien
ttccaaatggtaatgcgatatcagc

SEQ ID NO: 204746 - DNA, 25 bp, Homo sapien
acttttagtgaaacatgatgtgttg

SEQ ID NO: 204747 - DNA, 25 bp, Homo sapien
cagctgcagacggttgctgatttcc

SEQ ID NO: 204748 - DNA, 25 bp, Homo sapien
acgggaatgcaggagtaattattaa

SEQ ID NO: 204749 - DNA, 25 bp, Homo sapien
ggatcaaagcacattccatcctcac

SEQ ID NO: 204750 - DNA, 25 bp, Homo sapien
aaaaggatcaaagcacattccatcc

SEQ ID NO: 204751 - DNA, 25 bp, Homo sapien
aagcacattccatcctcactttaca

SEQ ID NO: 204752 - DNA, 25 bp, Homo sapien
gcacattccatcctcactttacaat

SEQ ID NO: 204753 - DNA, 25 bp, Homo sapien
cattgatgaccgaactaggtttcac

SEQ ID NO: 204754 - DNA, 25 bp, Homo sapien
gaactaggtttcacataagccagag

SEQ ID NO: 204755 - DNA, 25 bp, Homo sapien
caaactgccatgacattgatgaccg

SEQ ID NO: 204756 - DNA, 25 bp, Homo sapien
gccatgacattgatgaccgaactag

SEQ ID NO: 204757 - DNA, 25 bp, Homo sapien
tggtgcatgcactgccaatcttagc

SEQ ID NO: 204758 - DNA, 25 bp, Homo sapien
tagctgcttgatgcgtctcccgatc

SEQ ID NO: 204759 - DNA, 25 bp, Homo sapien
cctggacccttggaatcagaagttg

SEQ ID NO: 204760 - DNA, 25 bp, Homo sapien
gttgggctgccttcacatcacgtat

SEQ ID NO: 204761 - DNA, 25 bp, Homo sapien
ccaaagttgatatacaatattctca

SEQ ID NO: 204762 - DNA, 25 bp, Homo sapien
gaacacagtatgctccagcctcaaa

SEQ ID NO: 204763 - DNA, 25 bp, Homo sapien
tctctcagctgcatattaccaaagt

SEQ ID NO: 204764 - DNA, 25 bp, Homo sapien
aaagtcactgagttgatactttcag

SEQ ID NO: 204765 - DNA, 25 bp, Homo sapien
gatgatctttatagggacgagttat

SEQ ID NO: 204766 - DNA, 25 bp, Homo sapien
gacgagttatctagtgaactgagtg

SEQ ID NO: 204767 - DNA, 25 bp, Homo sapien
ggtggaatttcaactctatagccga

SEQ ID NO: 204768 - DNA, 25 bp, Homo sapien
ggtggctatgagactatagaagcat

SEQ ID NO: 204769 - DNA, 25 bp, Homo sapien
tggcactatcaaatttccaggtcat

SEQ ID NO: 204770 - DNA, 25 bp, Homo sapien
cccagcaggataaaaactagtttct

SEQ ID NO: 204771 - DNA, 25 bp, Homo sapien
taataagagacaatccccgcaacac

SEQ ID NO: 204772 - DNA, 25 bp, Homo sapien
gaaagcatagtttgtaactctggca

SEQ ID NO: 204773 - DNA, 25 bp, Homo sapien
cttaaattgcctggggtattcagtg

SEQ ID NO: 204774 - DNA, 25 bp, Homo sapien
tgactgcgatcatggtacttggaca

SEQ ID NO: 204775 - DNA, 25 bp, Homo sapien
aactcctcccttttgatccacattt

SEQ ID NO: 204776 - DNA, 25 bp, Homo sapien
ctagtaggaatggtggaagggcttc

SEQ ID NO: 204777 - DNA, 25 bp, Homo sapien
tacacttgagacacatatgacagcc

SEQ ID NO: 204778 - DNA, 25 bp, Homo sapien
caagacaggtcccacaaaaggcaat

SEQ ID NO: 204779 - DNA, 25 bp, Homo sapien
tggcttactgtaatatagcaatgtg

SEQ ID NO: 204780 - DNA, 25 bp, Homo sapien
tgtctaccacagtaaaaatgccaga

SEQ ID NO: 204781 - DNA, 25 bp, Homo sapien
aagatgattctatccttcccaaggg

SEQ ID NO: 204782 - DNA, 25 bp, Homo sapien
ggtactccggcaggtttttcaagca

SEQ ID NO: 204783 - DNA, 25 bp, Homo sapien
catcttctgccaacaaatgcaagga

SEQ ID NO: 204784 - DNA, 25 bp, Homo sapien
gcgtgaaccgttccgtgctgcagaa

SEQ ID NO: 204785 - DNA, 25 bp, Homo sapien
cagacagtgtagtaaaaagggtaat

SEQ ID NO: 204786 - DNA, 25 bp, Homo sapien
cagtgtagtaaaaagggtaatccat

SEQ ID NO: 204787 - DNA, 25 bp, Homo sapien
cctccaagacaggatggcatttttc

SEQ ID NO: 204788 - DNA, 25 bp, Homo sapien
cacctccaagacaggatggcatttt

SEQ ID NO: 204789 - DNA, 25 bp, Homo sapien
ttaaacacctccaagacaggatggc

SEQ ID NO: 204790 - DNA, 25 bp, Homo sapien
aacacctccaagacaggatggcatt

SEQ ID NO: 204791 - DNA, 25 bp, Homo sapien
cttacatgtcaggttttccaaacca

SEQ ID NO: 204792 - DNA, 25 bp, Homo sapien
tcaaaatttacaggcatcccagaca

SEQ ID NO: 204793 - DNA, 25 bp, Homo sapien
tgtaaagaagcgaagatcaaagaac

SEQ ID NO: 204794 - DNA, 25 bp, Homo sapien
taatgctctctagggccagtgtaaa

SEQ ID NO: 204795 - DNA, 25 bp, Homo sapien
ggcacagctaaatccaggagcaaat

SEQ ID NO: 204796 - DNA, 25 bp, Homo sapien
tcaagatttgttgggtgctagcaaa

SEQ ID NO: 204797 - DNA, 25 bp, Homo sapien
taccttcgactatatgtgagcccca

SEQ ID NO: 204798 - DNA, 25 bp, Homo sapien
tctaagtcaagctagtgtaagcctt

SEQ ID NO: 204799 - DNA, 25 bp, Homo sapien
gaattgaacactgcctgtaaagaag

SEQ ID NO: 204800 - DNA, 25 bp, Homo sapien
ccagatggcagttgagacactactc

SEQ ID NO: 204801 - DNA, 25 bp, Homo sapien
tattgggtggaaaaacatgcgtaac

SEQ ID NO: 204802 - DNA, 25 bp, Homo sapien
catgcgtaacaacaactgcaagtcc

SEQ ID NO: 204803 - DNA, 25 bp, Homo sapien
tataactgtatcacacacgaaagtg

SEQ ID NO: 204804 - DNA, 25 bp, Homo sapien
ccaagattcttgagttccaagccta

SEQ ID NO: 204805 - DNA, 25 bp, Homo sapien
tctgggctttacctaaccttatctg

SEQ ID NO: 204806 - DNA, 25 bp, Homo sapien
taactctagctggaaatcataggga

SEQ ID NO: 204807 - DNA, 25 bp, Homo sapien
cctagcacgtgtacgctggccagag

SEQ ID NO: 204808 - DNA, 25 bp, Homo sapien
ctagcacgtgtacgctggccagaga

SEQ ID NO: 204809 - DNA, 25 bp, Homo sapien
caaacactcagtagatgtcatgagc

SEQ ID NO: 204810 - DNA, 25 bp, Homo sapien
acactcagtagatgtcatgagcagg

SEQ ID NO: 204811 - DNA, 25 bp, Homo sapien
catccttcagcaccgtgttgcagtg

SEQ ID NO: 204812 - DNA, 25 bp, Homo sapien
gaaccctttggagatgtagcactca

SEQ ID NO: 204813 - DNA, 25 bp, Homo sapien
gcaagttctttctgcgggaccacga

SEQ ID NO: 204814 - DNA, 25 bp, Homo sapien
ttaggcccacatctttttcacatcc

SEQ ID NO: 204815 - DNA, 25 bp, Homo sapien
gcgctagagtattgtgcttgaccca

SEQ ID NO: 204816 - DNA, 25 bp, Homo sapien
ttcctggcagttaaagagcgctaga

SEQ ID NO: 204817 - DNA, 25 bp, Homo sapien
taaagagcgctagagtattgtgctt

SEQ ID NO: 204818 - DNA, 25 bp, Homo sapien
tgtgcttgacccactgtatgagcat

SEQ ID NO: 204819 - DNA, 25 bp, Homo sapien
gctgaaagagttgggagatactgct

SEQ ID NO: 204820 - DNA, 25 bp, Homo sapien
tatagcagctgaaagagttgggaga

SEQ ID NO: 204821 - DNA, 25 bp, Homo sapien
ccagtttcaagggtatagcagctga

SEQ ID NO: 204822 - DNA, 25 bp, Homo sapien
ttttctatggctcccagtttcaagg

SEQ ID NO: 204823 - DNA, 25 bp, Homo sapien
ctaagtctccaacggtacttgtgtt

SEQ ID NO: 204824 - DNA, 25 bp, Homo sapien
caacggtacttgtgtttcattcatc

SEQ ID NO: 204825 - DNA, 25 bp, Homo sapien
tctcatcttgcaatgtacactcacc

SEQ ID NO: 204826 - DNA, 25 bp, Homo sapien
tcatcacaccaaagatagatgctct

SEQ ID NO: 204827 - DNA, 25 bp, Homo sapien
ttctggagacttagaacaggactcc

SEQ ID NO: 204828 - DNA, 25 bp, Homo sapien
tctggagacttagaacaggactcca

SEQ ID NO: 204829 - DNA, 25 bp, Homo sapien
tctgcttaaatatttgctcagataa

SEQ ID NO: 204830 - DNA, 25 bp, Homo sapien
taatgaagcataacagtgtagagaa

SEQ ID NO: 204831 - DNA, 25 bp, Homo sapien
gcttaaatatttgctcagataatat

SEQ ID NO: 204832 - DNA, 25 bp, Homo sapien
ttaatgaagcataacagtgtagaga

SEQ ID NO: 204833 - DNA, 25 bp, Homo sapien
ttcactgacagatttgtgagggttc

SEQ ID NO: 204834 - DNA, 25 bp, Homo sapien
ttggtttacattcactgacagattt

SEQ ID NO: 204835 - DNA, 25 bp, Homo sapien
acagatttgtgagggttcttccacc

SEQ ID NO: 204836 - DNA, 25 bp, Homo sapien
gatttgtgagggttcttccaccaaa

SEQ ID NO: 204837 - DNA, 25 bp, Homo sapien
ctgggccagcgagtttggctcctct

SEQ ID NO: 204838 - DNA, 25 bp, Homo sapien
tctgggccagcgagtttggctcctc

SEQ ID NO: 204839 - DNA, 25 bp, Homo sapien
atctgggccagcgagtttggctcct

SEQ ID NO: 204840 - DNA, 25 bp, Homo sapien
tgggccagcgagtttggctcctctt

SEQ ID NO: 204841 - DNA, 25 bp, Homo sapien
cttatcaaagtcagagccaaaaaat

SEQ ID NO: 204842 - DNA, 25 bp, Homo sapien
ccaaaaaatatgctggcccctgtag

SEQ ID NO: 204843 - DNA, 25 bp, Homo sapien
acgcttgaaatggtccttgtctggg

SEQ ID NO: 204844 - DNA, 25 bp, Homo sapien
gttcagcatgtgatggacgcttgaa

SEQ ID NO: 204845 - DNA, 25 bp, Homo sapien
agtggttatactgagcaccaaccac

SEQ ID NO: 204846 - DNA, 25 bp, Homo sapien
cagtggttatactgagcaccaacca

SEQ ID NO: 204847 - DNA, 25 bp, Homo sapien
caatagtatcagtcaggagtaggag

SEQ ID NO: 204848 - DNA, 25 bp, Homo sapien
aggcatcagctgaggaaccacaaac

SEQ ID NO: 204849 - DNA, 25 bp, Homo sapien
ggaaccacaaactcagaatcaatag

SEQ ID NO: 204850 - DNA, 25 bp, Homo sapien
ggtgaacttggcaccttggacccac

SEQ ID NO: 204851 - DNA, 25 bp, Homo sapien
ttccaagaaatgtggatttccatcc

SEQ ID NO: 204852 - DNA, 25 bp, Homo sapien
ttccaaaacaaggagcctaactctg

SEQ ID NO: 204853 - DNA, 25 bp, Homo sapien
gaaggagccacagtttaagtatgcc

SEQ ID NO: 204854 - DNA, 25 bp, Homo sapien
tataatccacctcgagaaggagcca

SEQ ID NO: 204855 - DNA, 25 bp, Homo sapien
gataaaggagagatactcaacagct

SEQ ID NO: 204856 - DNA, 25 bp, Homo sapien
aactgccccgaaataaacctgtctg

SEQ ID NO: 204857 - DNA, 25 bp, Homo sapien
tcaagcccaaagcatctagtgtggt

SEQ ID NO: 204858 - DNA, 25 bp, Homo sapien
caacagctgcgggtttcattgcttg

SEQ ID NO: 204859 - DNA, 25 bp, Homo sapien
ttaatactggtttgatgacagtttt

SEQ ID NO: 204860 - DNA, 25 bp, Homo sapien
cttaatactggtttgatgacagttt

SEQ ID NO: 204861 - DNA, 25 bp, Homo sapien
gcttaatactggtttgatgacagtt

SEQ ID NO: 204862 - DNA, 25 bp, Homo sapien
tggtttgcacaaatcaggtctggac

SEQ ID NO: 204863 - DNA, 25 bp, Homo sapien
tctacactgccgatgcaaaatattt

SEQ ID NO: 204864 - DNA, 25 bp, Homo sapien
ggtctggaccacacatcacatcagc

SEQ ID NO: 204865 - DNA, 25 bp, Homo sapien
tgtgccttgacacattctacactgc

SEQ ID NO: 204866 - DNA, 25 bp, Homo sapien
gggcaaggcaagtacaagatgacct

SEQ ID NO: 204867 - DNA, 25 bp, Homo sapien
gaggctacttctgaccaaatttggg

SEQ ID NO: 204868 - DNA, 25 bp, Homo sapien
cccagtatggagtatggaagctcaa

SEQ ID NO: 204869 - DNA, 25 bp, Homo sapien
ttcagtgcttaatggtcaggtttcc

SEQ ID NO: 204870 - DNA, 25 bp, Homo sapien
tctcatgcaagactttcagaatctt

SEQ ID NO: 204871 - DNA, 25 bp, Homo sapien
tgtagaacactaatcagtagattct

SEQ ID NO: 204872 - DNA, 25 bp, Homo sapien
tacagtatttacaacccttctgtta

SEQ ID NO: 204873 - DNA, 25 bp, Homo sapien
catagatgctgtaaagttgtgtgaa

SEQ ID NO: 204874 - DNA, 25 bp, Homo sapien
taactggaagggatacgacactttc

SEQ ID NO: 204875 - DNA, 25 bp, Homo sapien
gctgggaagctgcagacttgataaa

SEQ ID NO: 204876 - DNA, 25 bp, Homo sapien
aaagtgctacaataaaaggccagag

SEQ ID NO: 204877 - DNA, 25 bp, Homo sapien
aaaactctggaagtccaccaatgga

SEQ ID NO: 204878 - DNA, 25 bp, Homo sapien
taaactggctttgtatggtgaggca

SEQ ID NO: 204879 - DNA, 25 bp, Homo sapien
tataaaattcaggatggatggctct

SEQ ID NO: 204880 - DNA, 25 bp, Homo sapien
caggtggtcatccatctaaagatcc

SEQ ID NO: 204881 - DNA, 25 bp, Homo sapien
cctctgaggttgactgctatgtgaa

SEQ ID NO: 204882 - DNA, 25 bp, Homo sapien
ttacgacagaaatctcaaagggctg

SEQ ID NO: 204883 - DNA, 25 bp, Homo sapien
aacctcaaaggtaagtatggctgct

SEQ ID NO: 204884 - DNA, 25 bp, Homo sapien
caaagggctgcatgttgctaaacac

SEQ ID NO: 204885 - DNA, 25 bp, Homo sapien
tgctttctatcaaccgagggctgct

SEQ ID NO: 204886 - DNA, 25 bp, Homo sapien
caaggcgggcagatctataatcagc

SEQ ID NO: 204887 - DNA, 25 bp, Homo sapien
cgaaggagtgaagtatattcttgtc

SEQ ID NO: 204888 - DNA, 25 bp, Homo sapien
tctggggcaactaccagaagattgc

SEQ ID NO: 204889 - DNA, 25 bp, Homo sapien
caaagagcatgcagagtatcaaaaa

SEQ ID NO: 204890 - DNA, 25 bp, Homo sapien
ctgacttatgctcctgggcctattt

SEQ ID NO: 204891 - DNA, 25 bp, Homo sapien
acttatgctcctgggcctatttgca

SEQ ID NO: 204892 - DNA, 25 bp, Homo sapien
tgctcctgggcctatttgcaagttt

SEQ ID NO: 204893 - DNA, 25 bp, Homo sapien
gggcctatttgcaagtttgatgttt

SEQ ID NO: 204894 - DNA, 25 bp, Homo sapien
tatattcggctacatcacaaatggc

SEQ ID NO: 204895 - DNA, 25 bp, Homo sapien
tcctatattcggctacatcacaaat

SEQ ID NO: 204896 - DNA, 25 bp, Homo sapien
ttcggctacatcacaaatggccaac

SEQ ID NO: 204897 - DNA, 25 bp, Homo sapien
tattcggctacatcacaaatggcca

SEQ ID NO: 204898 - DNA, 25 bp, Homo sapien
ttctgttctgcagccaaaatatgct

SEQ ID NO: 204899 - DNA, 25 bp, Homo sapien
gttctgcagccaaaatatgcttcat

SEQ ID NO: 204900 - DNA, 25 bp, Homo sapien
tcttctgttctgcagccaaaatatg

SEQ ID NO: 204901 - DNA, 25 bp, Homo sapien
tatattgaatcaaaacattgttttc

SEQ ID NO: 204902 - DNA, 25 bp, Homo sapien
ctgtccaatcatacaatttaatgtc

SEQ ID NO: 204903 - DNA, 25 bp, Homo sapien
gtttcctctggaattatctgcctca

SEQ ID NO: 204904 - DNA, 25 bp, Homo sapien
tcactaccagtccatgaatgagcaa

SEQ ID NO: 204905 - DNA, 25 bp, Homo sapien
gcaactggagtctcactgatgttaa

SEQ ID NO: 204906 - DNA, 25 bp, Homo sapien
tctgcagtgttagcaacgtcacctt

SEQ ID NO: 204907 - DNA, 25 bp, Homo sapien
tgggaaagagtatgacacgaacagt

SEQ ID NO: 204908 - DNA, 25 bp, Homo sapien
tccctgcagtatgtgtaagccacta

SEQ ID NO: 204909 - DNA, 25 bp, Homo sapien
gaaaagacatccctggttatccatg

SEQ ID NO: 204910 - DNA, 25 bp, Homo sapien
ttgttagcataacggtggacccaac

SEQ ID NO: 204911 - DNA, 25 bp, Homo sapien
tcttctgaaggcattcagataactt

SEQ ID NO: 204912 - DNA, 25 bp, Homo sapien
aatgccagtatccaatttcatctcc

SEQ ID NO: 204913 - DNA, 25 bp, Homo sapien
tctgaaggcattcagataacttagg

SEQ ID NO: 204914 - DNA, 25 bp, Homo sapien
atcaatgccagtatccaatttcatc

SEQ ID NO: 204915 - DNA, 25 bp, Homo sapien
aaatagtattggcctgttgcacaac

SEQ ID NO: 204916 - DNA, 25 bp, Homo sapien
taaagatttgcattcctagaatctg

SEQ ID NO: 204917 - DNA, 25 bp, Homo sapien
aagatttgcattcctagaatctgaa

SEQ ID NO: 204918 - DNA, 25 bp, Homo sapien
cttattagtggcataaggtgatcat

SEQ ID NO: 204919 - DNA, 25 bp, Homo sapien
tattttaatacatcaataatgactt

SEQ ID NO: 204920 - DNA, 25 bp, Homo sapien
ctattttaatacatcaataatgact

SEQ ID NO: 204921 - DNA, 25 bp, Homo sapien
attccacaagaatggtaaaaattct

SEQ ID NO: 204922 - DNA, 25 bp, Homo sapien
gcataatcaatatgctcaatacata

SEQ ID NO: 204923 - DNA, 25 bp, Homo sapien
cagcaagtcctgtttccaaagcata

SEQ ID NO: 204924 - DNA, 25 bp, Homo sapien
tgaaggcattccttggtaagtcaga

SEQ ID NO: 204925 - DNA, 25 bp, Homo sapien
tataggatgtagtcagtgtttcagg

SEQ ID NO: 204926 - DNA, 25 bp, Homo sapien
caagtctaccttttgaaaatgccaa

SEQ ID NO: 204927 - DNA, 25 bp, Homo sapien
catatttatctacaactctcctgac

SEQ ID NO: 204928 - DNA, 25 bp, Homo sapien
gtttttcaaacttggattgcaatcc

SEQ ID NO: 204929 - DNA, 25 bp, Homo sapien
ctccccatgagtatcgatacttggc

SEQ ID NO: 204930 - DNA, 25 bp, Homo sapien
aagtggtaagttggtacgctgtcta

SEQ ID NO: 204931 - DNA, 25 bp, Homo sapien
gaaaagtctccccatgagtatcgat

SEQ ID NO: 204932 - DNA, 25 bp, Homo sapien
gttggtacgctgtctaattctttcc

SEQ ID NO: 204933 - DNA, 25 bp, Homo sapien
gtctccacctcaatatagttctcca

SEQ ID NO: 204934 - DNA, 25 bp, Homo sapien
taggatcatagcacttctgcttttc

SEQ ID NO: 204935 - DNA, 25 bp, Homo sapien
tgtgccaatggatctcttttgatgg

SEQ ID NO: 204936 - DNA, 25 bp, Homo sapien
gatggtttttcgaatcataatagcg

SEQ ID NO: 204937 - DNA, 25 bp, Homo sapien
aaatggcgacagtggcagattggcc

SEQ ID NO: 204938 - DNA, 25 bp, Homo sapien
ccattgctgaagatagggtcataac

SEQ ID NO: 204939 - DNA, 25 bp, Homo sapien
gagatggacttcctcattacggtaa

SEQ ID NO: 204940 - DNA, 25 bp, Homo sapien
tgtgaggcaattaactagtccagaa

SEQ ID NO: 204941 - DNA, 25 bp, Homo sapien
tctctaagagtaacactgacattta

SEQ ID NO: 204942 - DNA, 25 bp, Homo sapien
gcttctgagacaatctctaagagta

SEQ ID NO: 204943 - DNA, 25 bp, Homo sapien
aattcctacagaagatttagagctg

SEQ ID NO: 204944 - DNA, 25 bp, Homo sapien
acaagactccatatgaagcttctga

SEQ ID NO: 204945 - DNA, 25 bp, Homo sapien
tgcatcggacttcctacattcttct

SEQ ID NO: 204946 - DNA, 25 bp, Homo sapien
tattgctctgcatcggacttcctac

SEQ ID NO: 204947 - DNA, 25 bp, Homo sapien
tttgagatattgctctgcatcggac

SEQ ID NO: 204948 - DNA, 25 bp, Homo sapien
tgctctgcatcggacttcctacatt

SEQ ID NO: 204949 - DNA, 25 bp, Homo sapien
ttcactccacagttttgaacctttc

SEQ ID NO: 204950 - DNA, 25 bp, Homo sapien
acattttaccacttctcatatttac

SEQ ID NO: 204951 - DNA, 25 bp, Homo sapien
ctttctgacttacaatccaatcaaa

SEQ ID NO: 204952 - DNA, 25 bp, Homo sapien
tacattttaccacttctcatattta

SEQ ID NO: 204953 - DNA, 25 bp, Homo sapien
gaggatctttatcagtcttaggaat

SEQ ID NO: 204954 - DNA, 25 bp, Homo sapien
ctgtagaggatctttatcagtctta

SEQ ID NO: 204955 - DNA, 25 bp, Homo sapien
tagaggatctttatcagtcttagga

SEQ ID NO: 204956 - DNA, 25 bp, Homo sapien
gtagaggatctttatcagtcttagg

SEQ ID NO: 204957 - DNA, 25 bp, Homo sapien
gatgtctataggcattactccaaaa

SEQ ID NO: 204958 - DNA, 25 bp, Homo sapien
gaaatgctgtacattacatccccac

SEQ ID NO: 204959 - DNA, 25 bp, Homo sapien
aattccttaaggcagcatctcccaa

SEQ ID NO: 204960 - DNA, 25 bp, Homo sapien
gagtacaaacaatagagtcaattcc

SEQ ID NO: 204961 - DNA, 25 bp, Homo sapien
tctttgacagagtattccagcgtct

SEQ ID NO: 204962 - DNA, 25 bp, Homo sapien
caggactgtttctggattactgaag

SEQ ID NO: 204963 - DNA, 25 bp, Homo sapien
actgaagatatctccaacttgtttg

SEQ ID NO: 204964 - DNA, 25 bp, Homo sapien
ttttgaataagtttagccaggactg

SEQ ID NO: 204965 - DNA, 25 bp, Homo sapien
aaacatcaacacaatgggaataacc

SEQ ID NO: 204966 - DNA, 25 bp, Homo sapien
cctggcactgctttatataaacatc

SEQ ID NO: 204967 - DNA, 25 bp, Homo sapien
tataaacatcaacacaatgggaata

SEQ ID NO: 204968 - DNA, 25 bp, Homo sapien
ctcctggcactgctttatataaaca

SEQ ID NO: 204969 - DNA, 25 bp, Homo sapien
cttgcaagaatctggacagttgtat

SEQ ID NO: 204970 - DNA, 25 bp, Homo sapien
tcagctggtagtttggaaatttact

SEQ ID NO: 204971 - DNA, 25 bp, Homo sapien
cagagagtcaaggtcttgggaaaag

SEQ ID NO: 204972 - DNA, 25 bp, Homo sapien
cacatacacagagagtcaaggtctt

SEQ ID NO: 204973 - DNA, 25 bp, Homo sapien
cagctggcattctaaatcatggtat

SEQ ID NO: 204974 - DNA, 25 bp, Homo sapien
tgctgctacttctctcattctggag

SEQ ID NO: 204975 - DNA, 25 bp, Homo sapien
ggtaaactcctgaatcagctggcat

SEQ ID NO: 204976 - DNA, 25 bp, Homo sapien
cctgaatcagctggcattctaaatc

SEQ ID NO: 204977 - DNA, 25 bp, Homo sapien
tcccaggaagtctaactagctgtgt

SEQ ID NO: 204978 - DNA, 25 bp, Homo sapien
tgaacttcagaccaatctattgtga

SEQ ID NO: 204979 - DNA, 25 bp, Homo sapien
gaggctagtatggttcttaacgaac

SEQ ID NO: 204980 - DNA, 25 bp, Homo sapien
tgcagtggcctactctaaatagtga

SEQ ID NO: 204981 - DNA, 25 bp, Homo sapien
tgcaattttggatttaacttctgaa

SEQ ID NO: 204982 - DNA, 25 bp, Homo sapien
gcaattttggatttaacttctgaaa

SEQ ID NO: 204983 - DNA, 25 bp, Homo sapien
ttgcaattttggatttaacttctga

SEQ ID NO: 204984 - DNA, 25 bp, Homo sapien
ctatcaaaaggtaactcttgggcaa

SEQ ID NO: 204985 - DNA, 25 bp, Homo sapien
tcttgggcaattaggtgcaacttct

SEQ ID NO: 204986 - DNA, 25 bp, Homo sapien
taactcttgggcaattaggtgcaac

SEQ ID NO: 204987 - DNA, 25 bp, Homo sapien
caaaaggtaactcttgggcaattag

SEQ ID NO: 204988 - DNA, 25 bp, Homo sapien
ggccacagatatcttgtggcctaga

SEQ ID NO: 204989 - DNA, 25 bp, Homo sapien
ttaaggccacagatatcttgtggcc

SEQ ID NO: 204990 - DNA, 25 bp, Homo sapien
tatcttgtggcctagatatctcttg

SEQ ID NO: 204991 - DNA, 25 bp, Homo sapien
ccacagatatcttgtggcctagata

SEQ ID NO: 204992 - DNA, 25 bp, Homo sapien
gccctgcccaatatagatttttcta

SEQ ID NO: 204993 - DNA, 25 bp, Homo sapien
acgccctgcccaatatagatttttc

SEQ ID NO: 204994 - DNA, 25 bp, Homo sapien
cctgcccaatatagatttttctaag

SEQ ID NO: 204995 - DNA, 25 bp, Homo sapien
ccacgccctgcccaatatagatttt

SEQ ID NO: 204996 - DNA, 25 bp, Homo sapien
gaaatattctatggagtaaatctgg

SEQ ID NO: 204997 - DNA, 25 bp, Homo sapien
aaaaagtgttgcttaattcaaagtg

SEQ ID NO: 204998 - DNA, 25 bp, Homo sapien
gcttttacattccactatctgaaat

SEQ ID NO: 204999 - DNA, 25 bp, Homo sapien
attcaatatgagtggacaatgttgc

SEQ ID NO: 205000 - DNA, 25 bp, Homo sapien
agaatgtccattttcttgcacattt

SEQ ID NO: 205001 - DNA, 25 bp, Homo sapien
gaatgtccattttcttgcacatttt

SEQ ID NO: 205002 - DNA, 25 bp, Homo sapien
agatccataagaatgtccattttct

SEQ ID NO: 205003 - DNA, 25 bp, Homo sapien
tgtccattttcttgcacattttgat

SEQ ID NO: 205004 - DNA, 25 bp, Homo sapien
ccatgtacccttagaccaggagtaa

SEQ ID NO: 205005 - DNA, 25 bp, Homo sapien
ttagaccaggagtaagtgactagtg

SEQ ID NO: 205006 - DNA, 25 bp, Homo sapien
tcaagattgtagagcagccaatacc

SEQ ID NO: 205007 - DNA, 25 bp, Homo sapien
cagccaataccatgtacccttagac

SEQ ID NO: 205008 - DNA, 25 bp, Homo sapien
agaaaagcatctcagcttatcaatg

SEQ ID NO: 205009 - DNA, 25 bp, Homo sapien
tgatttaggtcagaccaccccacca

SEQ ID NO: 205010 - DNA, 25 bp, Homo sapien
gcatctcagcttatcaatgatttag

SEQ ID NO: 205011 - DNA, 25 bp, Homo sapien
ccaccacccaatggactgtcactat

SEQ ID NO: 205012 - DNA, 25 bp, Homo sapien
tgatttggttttatcctctgacagc

SEQ ID NO: 205013 - DNA, 25 bp, Homo sapien
taacacttcatcagcaatctacaag

SEQ ID NO: 205014 - DNA, 25 bp, Homo sapien
cagctactcagtgatttgaagtcta

SEQ ID NO: 205015 - DNA, 25 bp, Homo sapien
ttattgcagctcataattagggcac

SEQ ID NO: 205016 - DNA, 25 bp, Homo sapien
tacatagctaatgtgctcatctagt

SEQ ID NO: 205017 - DNA, 25 bp, Homo sapien
agctaatgtgctcatctagttcttg

SEQ ID NO: 205018 - DNA, 25 bp, Homo sapien
catagctaatgtgctcatctagttc

SEQ ID NO: 205019 - DNA, 25 bp, Homo sapien
tgctacatagctaatgtgctcatct

SEQ ID NO: 205020 - DNA, 25 bp, Homo sapien
cttctttctgacattgttgctctag

SEQ ID NO: 205021 - DNA, 25 bp, Homo sapien
ttctttctgacattgttgctctagt

SEQ ID NO: 205022 - DNA, 25 bp, Homo sapien
tatctggagttcctgaatatgattt

SEQ ID NO: 205023 - DNA, 25 bp, Homo sapien
tcctgaatatgatttacaaattctt

SEQ ID NO: 205024 - DNA, 25 bp, Homo sapien
tggagttcctgaatatgatttacaa

SEQ ID NO: 205025 - DNA, 25 bp, Homo sapien
tctggagttcctgaatatgatttac

SEQ ID NO: 205026 - DNA, 25 bp, Homo sapien
aatatattcatctgccacaaaaggc

SEQ ID NO: 205027 - DNA, 25 bp, Homo sapien
cctggggttctccatacaagacgtt

SEQ ID NO: 205028 - DNA, 25 bp, Homo sapien
ttcaggtccacctctagagcctcct

SEQ ID NO: 205029 - DNA, 25 bp, Homo sapien
taggatcaaaagcttcaggtccacc

SEQ ID NO: 205030 - DNA, 25 bp, Homo sapien
catgtttgagaattaagtcccaagg

SEQ ID NO: 205031 - DNA, 25 bp, Homo sapien
ttctgtcgaaacaagagtggatgcg

SEQ ID NO: 205032 - DNA, 25 bp, Homo sapien
tctagtctgcctcacttctgtcgaa

SEQ ID NO: 205033 - DNA, 25 bp, Homo sapien
caggcattgcctagtattttacata

SEQ ID NO: 205034 - DNA, 25 bp, Homo sapien
caaaacactagctagttggggccat

SEQ ID NO: 205035 - DNA, 25 bp, Homo sapien
cagagggtcttgaaagtcatgctct

SEQ ID NO: 205036 - DNA, 25 bp, Homo sapien
aaacccctgcagagggtcttgaaag

SEQ ID NO: 205037 - DNA, 25 bp, Homo sapien
cctgcagagggtcttgaaagtcatg

SEQ ID NO: 205038 - DNA, 25 bp, Homo sapien
cttgacagtaacggggtgctcctta

SEQ ID NO: 205039 - DNA, 25 bp, Homo sapien
gggtgctccttacttgtgtatctca

SEQ ID NO: 205040 - DNA, 25 bp, Homo sapien
acagtaacggggtgctccttacttg

SEQ ID NO: 205041 - DNA, 25 bp, Homo sapien
taacggggtgctccttacttgtgta

SEQ ID NO: 205042 - DNA, 25 bp, Homo sapien
catgcagcctcgtcaatttcagaac

SEQ ID NO: 205043 - DNA, 25 bp, Homo sapien
gaactctcccgtaatggtagcccaa

SEQ ID NO: 205044 - DNA, 25 bp, Homo sapien
atttctatggcatgccctttgagac

SEQ ID NO: 205045 - DNA, 25 bp, Homo sapien
ggaaagaatgtcctcagtagtacaa

SEQ ID NO: 205046 - DNA, 25 bp, Homo sapien
cagcttcttacaacggacttcacga

SEQ ID NO: 205047 - DNA, 25 bp, Homo sapien
tactgtaaacgctcgaggaaagaca

SEQ ID NO: 205048 - DNA, 25 bp, Homo sapien
cacgtaaatgcctcgagtgtattat

SEQ ID NO: 205049 - DNA, 25 bp, Homo sapien
cagtctatctctcttcagtcgaaag

SEQ ID NO: 205050 - DNA, 25 bp, Homo sapien
tcgaagagctcggccgtggtagcca

SEQ ID NO: 205051 - DNA, 25 bp, Homo sapien
cgaagagctcggccgtggtagccat

SEQ ID NO: 205052 - DNA, 25 bp, Homo sapien
ctcgaagagctcggccgtggtagcc

SEQ ID NO: 205053 - DNA, 25 bp, Homo sapien
ggatgccgtctccgcttcacatgct

SEQ ID NO: 205054 - DNA, 25 bp, Homo sapien
cacatgctgcgcctcagaggcgcgg

SEQ ID NO: 205055 - DNA, 25 bp, Homo sapien
gcggcgcacaggtctccgctcggct

SEQ ID NO: 205056 - DNA, 25 bp, Homo sapien
gggagagcggccatgaagcgaagcc

SEQ ID NO: 205057 - DNA, 25 bp, Homo sapien
gattggttcctactcttagtcctga

SEQ ID NO: 205058 - DNA, 25 bp, Homo sapien
tctgttcatcgataggctgactcca

SEQ ID NO: 205059 - DNA, 25 bp, Homo sapien
tctaaagttgggttacatatgccag

SEQ ID NO: 205060 - DNA, 25 bp, Homo sapien
tcctactcggtagaaaaccagagcc

SEQ ID NO: 205061 - DNA, 25 bp, Homo sapien
tttaatgtctgcagccaaattttta

SEQ ID NO: 205062 - DNA, 25 bp, Homo sapien
ttaagcttattttagtcacatgtag

SEQ ID NO: 205063 - DNA, 25 bp, Homo sapien
gtaaaaattcaaaaggcactctgtg

SEQ ID NO: 205064 - DNA, 25 bp, Homo sapien
tttagacctaatactgctcttgctg

SEQ ID NO: 205065 - DNA, 25 bp, Homo sapien
ttgataagttaatggtaatggagcc

SEQ ID NO: 205066 - DNA, 25 bp, Homo sapien
catttatctagtgagtaggcaaaga

SEQ ID NO: 205067 - DNA, 25 bp, Homo sapien
tcccctaggcaaaagtttataagca

SEQ ID NO: 205068 - DNA, 25 bp, Homo sapien
aaaagaataactgcctgaccaggat

SEQ ID NO: 205069 - DNA, 25 bp, Homo sapien
agtggtcttctttctaacgcaaata

SEQ ID NO: 205070 - DNA, 25 bp, Homo sapien
ttctttctaacgcaaataacactaa

SEQ ID NO: 205071 - DNA, 25 bp, Homo sapien
agctgaagtactcacattgatccag

SEQ ID NO: 205072 - DNA, 25 bp, Homo sapien
tctaacgcaaataacactaaagctg

SEQ ID NO: 205073 - DNA, 25 bp, Homo sapien
tgttccacctattccacagtagcag

SEQ ID NO: 205074 - DNA, 25 bp, Homo sapien
cttaggcgcgggcatgcaatacttt

SEQ ID NO: 205075 - DNA, 25 bp, Homo sapien
ccttgtcatggttggcttaggcgcg

SEQ ID NO: 205076 - DNA, 25 bp, Homo sapien
taagctaatcatgatggtacctacc

SEQ ID NO: 205077 - DNA, 25 bp, Homo sapien
tagacacctggcaaggctgtacatt

SEQ ID NO: 205078 - DNA, 25 bp, Homo sapien
gaagctggcagttaaaatccctgag

SEQ ID NO: 205079 - DNA, 25 bp, Homo sapien
ggcaaggctgtacattcagctttca

SEQ ID NO: 205080 - DNA, 25 bp, Homo sapien
agccactctcatgcttagagcttgt

SEQ ID NO: 205081 - DNA, 25 bp, Homo sapien
cggccaaggggcatccgtgcctccg

SEQ ID NO: 205082 - DNA, 25 bp, Homo sapien
ctcgcctgctgcagcgaggacgagg

SEQ ID NO: 205083 - DNA, 25 bp, Homo sapien
gaggaggacgacgaagagcacgaag

SEQ ID NO: 205084 - DNA, 25 bp, Homo sapien
ggcgggcggagagtcggcgacggtg

SEQ ID NO: 205085 - DNA, 25 bp, Homo sapien
tagtaatgcaagaactgcggtcccc

SEQ ID NO: 205086 - DNA, 25 bp, Homo sapien
tgaccgccgactgcagcttaagaag

SEQ ID NO: 205087 - DNA, 25 bp, Homo sapien
gggtgaacccagcagtgatcgagac

SEQ ID NO: 205088 - DNA, 25 bp, Homo sapien
tatgaatccgagctacaaatgcccg

SEQ ID NO: 205089 - DNA, 25 bp, Homo sapien
tatcttcaccaagggacagttgccc

SEQ ID NO: 205090 - DNA, 25 bp, Homo sapien
catacccttgatccattcagtgaag

SEQ ID NO: 205091 - DNA, 25 bp, Homo sapien
tcaatctccagatatttaccgtcgg

SEQ ID NO: 205092 - DNA, 25 bp, Homo sapien
gaacctgaaaaatgacatacccttg

SEQ ID NO: 205093 - DNA, 25 bp, Homo sapien
tgtgtaggtgccatcgtttgcaagt

SEQ ID NO: 205094 - DNA, 25 bp, Homo sapien
caagttggatatgcacaaaaagatg

SEQ ID NO: 205095 - DNA, 25 bp, Homo sapien
taggtgccatcgtttgcaagttgga

SEQ ID NO: 205096 - DNA, 25 bp, Homo sapien
ccatcgtttgcaagttggatatgca

SEQ ID NO: 205097 - DNA, 25 bp, Homo sapien
gaataatttgccatacgaactcttg

SEQ ID NO: 205098 - DNA, 25 bp, Homo sapien
gctgacatcagggatagctttgtga

SEQ ID NO: 205099 - DNA, 25 bp, Homo sapien
gtgacatttgtgatagagtacctgc

SEQ ID NO: 205100 - DNA, 25 bp, Homo sapien
caatgtaggacagagatgccttctc

SEQ ID NO: 205101 - DNA, 25 bp, Homo sapien
ggtacctcagtgattagtgaatgaa

SEQ ID NO: 205102 - DNA, 25 bp, Homo sapien
cacagaaccagtaagtggaacataa

SEQ ID NO: 205103 - DNA, 25 bp, Homo sapien
aacctgccctagttttctgaagtgg

SEQ ID NO: 205104 - DNA, 25 bp, Homo sapien
ccattcttgaatattggtacctcag

SEQ ID NO: 205105 - DNA, 25 bp, Homo sapien
cgaagaacagcttttacaaagtagc

SEQ ID NO: 205106 - DNA, 25 bp, Homo sapien
tgtgttttggccaatcagtgcaatg

SEQ ID NO: 205107 - DNA, 25 bp, Homo sapien
taaatttcaaggtgcattgtatcca

SEQ ID NO: 205108 - DNA, 25 bp, Homo sapien
aattgagtcagtaaacctgtgatag

SEQ ID NO: 205109 - DNA, 25 bp, Homo sapien
agtagatagatcattggttcaacca

SEQ ID NO: 205110 - DNA, 25 bp, Homo sapien
tgacttgctggttgatacataatgg

SEQ ID NO: 205111 - DNA, 25 bp, Homo sapien
gatgacgttaactgtgtgactaaaa

SEQ ID NO: 205112 - DNA, 25 bp, Homo sapien
caaattgactgaactggttgggtgt

SEQ ID NO: 205113 - DNA, 25 bp, Homo sapien
gcatgggttcacttggctacaactg

SEQ ID NO: 205114 - DNA, 25 bp, Homo sapien
ggactgactgtactatccactgaca

SEQ ID NO: 205115 - DNA, 25 bp, Homo sapien
tacattgggatgaaactactttagc

SEQ ID NO: 205116 - DNA, 25 bp, Homo sapien
cacagatcagaaaccagacggtagt

SEQ ID NO: 205117 - DNA, 25 bp, Homo sapien
tacttttcagtgcaccatgacatca

SEQ ID NO: 205118 - DNA, 25 bp, Homo sapien
ccctgtgttatggtactggctgaca

SEQ ID NO: 205119 - DNA, 25 bp, Homo sapien
cccacttgctcgacaaatctatgta

SEQ ID NO: 205120 - DNA, 25 bp, Homo sapien
tgtaatgttacagggctttcaggtt

SEQ ID NO: 205121 - DNA, 25 bp, Homo sapien
ggtgtaatgtcaggccttctacttg

SEQ ID NO: 205122 - DNA, 25 bp, Homo sapien
taaagagagtggcttccaagccctg

SEQ ID NO: 205123 - DNA, 25 bp, Homo sapien
cagttctcgccattcctgtctcata

SEQ ID NO: 205124 - DNA, 25 bp, Homo sapien
cagtaacagagtccggtgtaatgtc

SEQ ID NO: 205125 - DNA, 25 bp, Homo sapien
taatcagtacgtaggtgacaggatc

SEQ ID NO: 205126 - DNA, 25 bp, Homo sapien
gatcattggtactgcaaacctcagc

SEQ ID NO: 205127 - DNA, 25 bp, Homo sapien
tcagcatcatggagtatacccagtc

SEQ ID NO: 205128 - DNA, 25 bp, Homo sapien
tacccagtcatcatacctgcacatg

SEQ ID NO: 205129 - DNA, 25 bp, Homo sapien
ttgtatcacagtatgaggcactgaa

SEQ ID NO: 205130 - DNA, 25 bp, Homo sapien
gtatcacagtatgaggcactgaaga

SEQ ID NO: 205131 - DNA, 25 bp, Homo sapien
tgtatcacagtatgaggcactgaag

SEQ ID NO: 205132 - DNA, 25 bp, Homo sapien
tttgtatcacagtatgaggcactga

SEQ ID NO: 205133 - DNA, 25 bp, Homo sapien
ctggatgaattctctggcttacctg

SEQ ID NO: 205134 - DNA, 25 bp, Homo sapien
ttctctggcttacctggcagatact

SEQ ID NO: 205135 - DNA, 25 bp, Homo sapien
aactgcctggaactggttgagggat

SEQ ID NO: 205136 - DNA, 25 bp, Homo sapien
ctggcaggtggttttggataagatc

SEQ ID NO: 205137 - DNA, 25 bp, Homo sapien
tcttctccttcagatttcagcccag

SEQ ID NO: 205138 - DNA, 25 bp, Homo sapien
ttctccttcagatttcagcccaggt

SEQ ID NO: 205139 - DNA, 25 bp, Homo sapien
tctccttcagatttcagcccaggta

SEQ ID NO: 205140 - DNA, 25 bp, Homo sapien
tccttcagatttcagcccaggtacc

SEQ ID NO: 205141 - DNA, 25 bp, Homo sapien
agatctaagagccacttccttaggg

SEQ ID NO: 205142 - DNA, 25 bp, Homo sapien
gaacactcatccatgtgaccattag

SEQ ID NO: 205143 - DNA, 25 bp, Homo sapien
cacaggattaatctcaattgataac

SEQ ID NO: 205144 - DNA, 25 bp, Homo sapien
catttgcccttatggaaatatcttc

SEQ ID NO: 205145 - DNA, 25 bp, Homo sapien
tttttgcttttctcctcttgttcat

SEQ ID NO: 205146 - DNA, 25 bp, Homo sapien
ctttttgcttttctcctcttgttca

SEQ ID NO: 205147 - DNA, 25 bp, Homo sapien
gaaggatatataactttggctgcta

SEQ ID NO: 205148 - DNA, 25 bp, Homo sapien
tggaaggatatataactttggctgc

SEQ ID NO: 205149 - DNA, 25 bp, Homo sapien
aggatatataactttggctgctaat

SEQ ID NO: 205150 - DNA, 25 bp, Homo sapien
gatatataactttggctgctaatga

SEQ ID NO: 205151 - DNA, 25 bp, Homo sapien
caagaagaaataatttcttcttggg

SEQ ID NO: 205152 - DNA, 25 bp, Homo sapien
caactgagtatagccccaattggac

SEQ ID NO: 205153 - DNA, 25 bp, Homo sapien
taactgcccgatgtaccacagactg

SEQ ID NO: 205154 - DNA, 25 bp, Homo sapien
ttccatacttccagtgccaggtgct

SEQ ID NO: 205155 - DNA, 25 bp, Homo sapien
caactacacatggaagggactggga

SEQ ID NO: 205156 - DNA, 25 bp, Homo sapien
ctctggcctacagggcagagcactg

SEQ ID NO: 205157 - DNA, 25 bp, Homo sapien
atctctggcctacagggcagagcac

SEQ ID NO: 205158 - DNA, 25 bp, Homo sapien
gggcagagcactgccacccattgct

SEQ ID NO: 205159 - DNA, 25 bp, Homo sapien
ggttctttgctacaggtcagcattc

SEQ ID NO: 205160 - DNA, 25 bp, Homo sapien
tagcatactttctccgaagccttcc

SEQ ID NO: 205161 - DNA, 25 bp, Homo sapien
gccttccctgtagcaatctaaattg

SEQ ID NO: 205162 - DNA, 25 bp, Homo sapien
tattgacttagtttccaattgtgtt

SEQ ID NO: 205163 - DNA, 25 bp, Homo sapien
taatggtcggaccttccataaccta

SEQ ID NO: 205164 - DNA, 25 bp, Homo sapien
ataggtgactcctacaaaagttacg

SEQ ID NO: 205165 - DNA, 25 bp, Homo sapien
ccagtatagtaactctgaattatca

SEQ ID NO: 205166 - DNA, 25 bp, Homo sapien
tccatttgttcacaagtctatttca

SEQ ID NO: 205167 - DNA, 25 bp, Homo sapien
tagttaaatcccagtatagtaactc

SEQ ID NO: 205168 - DNA, 25 bp, Homo sapien
tcacattgtgcaactgagctacctg

SEQ ID NO: 205169 - DNA, 25 bp, Homo sapien
cagctggttttatgatggccgtaca

SEQ ID NO: 205170 - DNA, 25 bp, Homo sapien
gattctaacctgtcgccagcatcga

SEQ ID NO: 205171 - DNA, 25 bp, Homo sapien
cagtgtgcaactgatccaccctgga

SEQ ID NO: 205172 - DNA, 25 bp, Homo sapien
gaagttctgctaggtgactctggca

SEQ ID NO: 205173 - DNA, 25 bp, Homo sapien
taaacaatagtctactccaaaggga

SEQ ID NO: 205174 - DNA, 25 bp, Homo sapien
gagtccttggcttctatcaggtcac

SEQ ID NO: 205175 - DNA, 25 bp, Homo sapien
cctgcagttcggctatcagttaagc

SEQ ID NO: 205176 - DNA, 25 bp, Homo sapien
gaccacaataagtgaggacaccatg

SEQ ID NO: 205177 - DNA, 25 bp, Homo sapien
cataacagaatggtgaagacgtgcc

SEQ ID NO: 205178 - DNA, 25 bp, Homo sapien
gaaagctggctagtcaaacaatgca

SEQ ID NO: 205179 - DNA, 25 bp, Homo sapien
ggtttatgccctcatgtagctcaca

SEQ ID NO: 205180 - DNA, 25 bp, Homo sapien
tgtcaaagatgaaccccaaaggacc

SEQ ID NO: 205181 - DNA, 25 bp, Homo sapien
tgaactcagcaacccacaggaaagt

SEQ ID NO: 205182 - DNA, 25 bp, Homo sapien
gaagaaccacctagctgaactcagc

SEQ ID NO: 205183 - DNA, 25 bp, Homo sapien
gagacaattgcttttgggagccctg

SEQ ID NO: 205184 - DNA, 25 bp, Homo sapien
attcttgatcaaaaaactcatcgaa

SEQ ID NO: 205185 - DNA, 25 bp, Homo sapien
aaactcatcgaaaagtgggattctc

SEQ ID NO: 205186 - DNA, 25 bp, Homo sapien
aactcatcgaaaagtgggattctct

SEQ ID NO: 205187 - DNA, 25 bp, Homo sapien
agtcagagctggaactgtcccagag

SEQ ID NO: 205188 - DNA, 25 bp, Homo sapien
tttcccctgctcatctgagtcagag

SEQ ID NO: 205189 - DNA, 25 bp, Homo sapien
cagagctggaactgtcccagagaag

SEQ ID NO: 205190 - DNA, 25 bp, Homo sapien
tcttgttcatgaagccatgtttcca

SEQ ID NO: 205191 - DNA, 25 bp, Homo sapien
cagggacagtagttattcactgctt

SEQ ID NO: 205192 - DNA, 25 bp, Homo sapien
gggacagtagttattcactgcttga

SEQ ID NO: 205193 - DNA, 25 bp, Homo sapien
gacagtagttattcactgcttgatg

SEQ ID NO: 205194 - DNA, 25 bp, Homo sapien
cagtagttattcactgcttgatgtt

SEQ ID NO: 205195 - DNA, 25 bp, Homo sapien
tttataaggcactccagaaagcaac

SEQ ID NO: 205196 - DNA, 25 bp, Homo sapien
tctgacattcacatcaactctggct

SEQ ID NO: 205197 - DNA, 25 bp, Homo sapien
gttctccagacccatagtactggga

SEQ ID NO: 205198 - DNA, 25 bp, Homo sapien
tgggcaagaatattgcacaggtgac

SEQ ID NO: 205199 - DNA, 25 bp, Homo sapien
cctatttagatagcactggcagata

SEQ ID NO: 205200 - DNA, 25 bp, Homo sapien
tattgaatgtatacagcctggtgag

SEQ ID NO: 205201 - DNA, 25 bp, Homo sapien
gataaccatcttaacgtctgcagcc

SEQ ID NO: 205202 - DNA, 25 bp, Homo sapien
tggctaccctaattcagcaaacggt

SEQ ID NO: 205203 - DNA, 25 bp, Homo sapien
aaaccctgtgtgatttggccctgcc

SEQ ID NO: 205204 - DNA, 25 bp, Homo sapien
aatgaaacgaccacacaatgcctgg

SEQ ID NO: 205205 - DNA, 25 bp, Homo sapien
caagaactaccagaggcaccattca

SEQ ID NO: 205206 - DNA, 25 bp, Homo sapien
gggctcaggaatgccaatcatctct

SEQ ID NO: 205207 - DNA, 25 bp, Homo sapien
tggattcaaagtgacacatccctga

SEQ ID NO: 205208 - DNA, 25 bp, Homo sapien
ctataagacatcaattgtggccagg

SEQ ID NO: 205209 - DNA, 25 bp, Homo sapien
gactgttttcactataagacatcaa

SEQ ID NO: 205210 - DNA, 25 bp, Homo sapien
ccagataagaccagaattttgaagc

SEQ ID NO: 205211 - DNA, 25 bp, Homo sapien
ttctctacactccatcacttccagg

SEQ ID NO: 205212 - DNA, 25 bp, Homo sapien
ttcagaagtcgcagagtgcagcctt

SEQ ID NO: 205213 - DNA, 25 bp, Homo sapien
ttcctttcagaagtcgcagagtgca

SEQ ID NO: 205214 - DNA, 25 bp, Homo sapien
ggagaacatgagctccaaagtctgc

SEQ ID NO: 205215 - DNA, 25 bp, Homo sapien
tctccaagtaggagcagtgtctctt

SEQ ID NO: 205216 - DNA, 25 bp, Homo sapien
tggcccacggcacagcgatctgtgt

SEQ ID NO: 205217 - DNA, 25 bp, Homo sapien
gcagctctctcagcggtgggtcagt

SEQ ID NO: 205218 - DNA, 25 bp, Homo sapien
tagaagttcaagacctccagagaca

SEQ ID NO: 205219 - DNA, 25 bp, Homo sapien
ctaggtgatatcagcagggcttggt

SEQ ID NO: 205220 - DNA, 25 bp, Homo sapien
tggtcccttggactttgcttattaa

SEQ ID NO: 205221 - DNA, 25 bp, Homo sapien
taattcttgcctctccatgaagact

SEQ ID NO: 205222 - DNA, 25 bp, Homo sapien
caacatggttagaaggtcatggtca

SEQ ID NO: 205223 - DNA, 25 bp, Homo sapien
ctttatggtcccttggactttgctt

SEQ ID NO: 205224 - DNA, 25 bp, Homo sapien
ctcagaagtatacattggagtttgc

SEQ ID NO: 205225 - DNA, 25 bp, Homo sapien
tccagcacttgcatcttatgcaaat

SEQ ID NO: 205226 - DNA, 25 bp, Homo sapien
ctcttgtcttttacggatcatttcc

SEQ ID NO: 205227 - DNA, 25 bp, Homo sapien
tctcagaagtatacattggagtttg

SEQ ID NO: 205228 - DNA, 25 bp, Homo sapien
ttgtcctggcttctcgctggctcag

SEQ ID NO: 205229 - DNA, 25 bp, Homo sapien
ggagtcttcctgaagtaattactcg

SEQ ID NO: 205230 - DNA, 25 bp, Homo sapien
ctttgctttgtgcattgtcctggct

SEQ ID NO: 205231 - DNA, 25 bp, Homo sapien
cgtggcaagtcaatgggttcaagct

SEQ ID NO: 205232 - DNA, 25 bp, Homo sapien
aagttcaacgtttagagcagtcagc

SEQ ID NO: 205233 - DNA, 25 bp, Homo sapien
aaagcggcacttatttctgagagca

SEQ ID NO: 205234 - DNA, 25 bp, Homo sapien
agtcagcattcctcatgccatgaga

SEQ ID NO: 205235 - DNA, 25 bp, Homo sapien
taaattatcttaacactttgcaaaa

SEQ ID NO: 205236 - DNA, 25 bp, Homo sapien
gtatagctagctgcagagaacccat

SEQ ID NO: 205237 - DNA, 25 bp, Homo sapien
tccagtacccctgggattggtccag

SEQ ID NO: 205238 - DNA, 25 bp, Homo sapien
caggcatctgggtgaattgtgtagc

SEQ ID NO: 205239 - DNA, 25 bp, Homo sapien
gaaataatccccaacaaatgagctc

SEQ ID NO: 205240 - DNA, 25 bp, Homo sapien
caagaaattccttatgaagcctttt

SEQ ID NO: 205241 - DNA, 25 bp, Homo sapien
ccaagaaattccttatgaagccttt

SEQ ID NO: 205242 - DNA, 25 bp, Homo sapien
ctgtgttccagtgggatgtcaaaat

SEQ ID NO: 205243 - DNA, 25 bp, Homo sapien
tctgtgttccagtgggatgtcaaaa

SEQ ID NO: 205244 - DNA, 25 bp, Homo sapien
tccagtgggatgtcaaaatacatgt

SEQ ID NO: 205245 - DNA, 25 bp, Homo sapien
ctctgtgttccagtgggatgtcaaa

SEQ ID NO: 205246 - DNA, 25 bp, Homo sapien
cttcaggctcagagcttccaatcat

SEQ ID NO: 205247 - DNA, 25 bp, Homo sapien
aggctcagagcttccaatcataatg

SEQ ID NO: 205248 - DNA, 25 bp, Homo sapien
catggcttataaaatatcccaggat

SEQ ID NO: 205249 - DNA, 25 bp, Homo sapien
caatcataatgggaaagaattctgt

SEQ ID NO: 205250 - DNA, 25 bp, Homo sapien
cagttttcttgtaaaggtggcagct

SEQ ID NO: 205251 - DNA, 25 bp, Homo sapien
tggtcctgcagtcttgccagtgaat

SEQ ID NO: 205252 - DNA, 25 bp, Homo sapien
cagtgaatatgaagtcttttcttcc

SEQ ID NO: 205253 - DNA, 25 bp, Homo sapien
agtctctacctctttgttttgcaaa

SEQ ID NO: 205254 - DNA, 25 bp, Homo sapien
aaggtgagtcttagagtgactcagg

SEQ ID NO: 205255 - DNA, 25 bp, Homo sapien
ctaaggtgagtcttagagtgactca

SEQ ID NO: 205256 - DNA, 25 bp, Homo sapien
gagtcttagagtgactcaggcccat

SEQ ID NO: 205257 - DNA, 25 bp, Homo sapien
ggtgagtcttagagtgactcaggcc

SEQ ID NO: 205258 - DNA, 25 bp, Homo sapien
ttcatgtgaaagacattcagaggaa

SEQ ID NO: 205259 - DNA, 25 bp, Homo sapien
tcatgtgaaagacattcagaggaaa

SEQ ID NO: 205260 - DNA, 25 bp, Homo sapien
catgtgaaagacattcagaggaaag

SEQ ID NO: 205261 - DNA, 25 bp, Homo sapien
ttcagaagtttaccctcgctttaca

SEQ ID NO: 205262 - DNA, 25 bp, Homo sapien
ttaccctcgctttacaaagcagtca

SEQ ID NO: 205263 - DNA, 25 bp, Homo sapien
gcatttcagaagtttaccctcgctt

SEQ ID NO: 205264 - DNA, 25 bp, Homo sapien
tcaaagcatttcagaagtttaccct

SEQ ID NO: 205265 - DNA, 25 bp, Homo sapien
ctctttgcattttccacatcatttt

SEQ ID NO: 205266 - DNA, 25 bp, Homo sapien
tctctttgcattttccacatcattt

SEQ ID NO: 205267 - DNA, 25 bp, Homo sapien
tctttgcattttccacatcattttc

SEQ ID NO: 205268 - DNA, 25 bp, Homo sapien
ctttgcattttccacatcattttct

SEQ ID NO: 205269 - DNA, 25 bp, Homo sapien
cttgaagttcccaagaaatagccgt

SEQ ID NO: 205270 - DNA, 25 bp, Homo sapien
atagccgtgtacaagctcctggtgc

SEQ ID NO: 205271 - DNA, 25 bp, Homo sapien
gaaatagccgtgtacaagctcctgg

SEQ ID NO: 205272 - DNA, 25 bp, Homo sapien
tcccaagaaatagccgtgtacaagc

SEQ ID NO: 205273 - DNA, 25 bp, Homo sapien
tcagattgtgatttgatagctcttg

SEQ ID NO: 205274 - DNA, 25 bp, Homo sapien
atttcccagagtcatctacaatctc

SEQ ID NO: 205275 - DNA, 25 bp, Homo sapien
cttgccttagttttgatggatttcc

SEQ ID NO: 205276 - DNA, 25 bp, Homo sapien
gatagctcttgccttagttttgatg

SEQ ID NO: 205277 - DNA, 25 bp, Homo sapien
gcagtatgcaaagcctcgccaatgg

SEQ ID NO: 205278 - DNA, 25 bp, Homo sapien
tgtctgatcttacttcttcctggca

SEQ ID NO: 205279 - DNA, 25 bp, Homo sapien
gggtcccttcaagcatgctcatggg

SEQ ID NO: 205280 - DNA, 25 bp, Homo sapien
gaataccaacttggacccatgccat

SEQ ID NO: 205281 - DNA, 25 bp, Homo sapien
atcacactgacctggatagactcca

SEQ ID NO: 205282 - DNA, 25 bp, Homo sapien
tcccctatcacactgacctggatag

SEQ ID NO: 205283 - DNA, 25 bp, Homo sapien
cctatcacactgacctggatagact

SEQ ID NO: 205284 - DNA, 25 bp, Homo sapien
ttcccctatcacactgacctggata

SEQ ID NO: 205285 - DNA, 25 bp, Homo sapien
caccaattccttgataagcatataa

SEQ ID NO: 205286 - DNA, 25 bp, Homo sapien
cgtttgagtgtacaggtagtgagaa

SEQ ID NO: 205287 - DNA, 25 bp, Homo sapien
aattcagagttaatactgtcgtttg

SEQ ID NO: 205288 - DNA, 25 bp, Homo sapien
cacgtgcattcaaaatatgtccctc

SEQ ID NO: 205289 - DNA, 25 bp, Homo sapien
tctgccccgcaggtgtatgctggga

SEQ ID NO: 205290 - DNA, 25 bp, Homo sapien
tccttcaggctgttgatgaacctca

SEQ ID NO: 205291 - DNA, 25 bp, Homo sapien
atgaacctcagggtgatttcatccc

SEQ ID NO: 205292 - DNA, 25 bp, Homo sapien
gcagccaggcggacaacattgaata

SEQ ID NO: 205293 - DNA, 25 bp, Homo sapien
ttcctatgcctgtttctaagctttg

SEQ ID NO: 205294 - DNA, 25 bp, Homo sapien
gtccatgttacttctagagatttcc

SEQ ID NO: 205295 - DNA, 25 bp, Homo sapien
caccaaagtccatgttacttctaga

SEQ ID NO: 205296 - DNA, 25 bp, Homo sapien
tcctatgcctgtttctaagctttga

SEQ ID NO: 205297 - DNA, 25 bp, Homo sapien
ttctccagtttcattggaccattgg

SEQ ID NO: 205298 - DNA, 25 bp, Homo sapien
taatctgacttagttatctccccag

SEQ ID NO: 205299 - DNA, 25 bp, Homo sapien
tcatgcttatccttcaaggcttagc

SEQ ID NO: 205300 - DNA, 25 bp, Homo sapien
tcattggaccattggagatttttca

SEQ ID NO: 205301 - DNA, 25 bp, Homo sapien
ctgtcccaatggagattaggattgg

SEQ ID NO: 205302 - DNA, 25 bp, Homo sapien
ggagattaggattgggtatgtcagc

SEQ ID NO: 205303 - DNA, 25 bp, Homo sapien
gattgggtatgtcagcaccacccca

SEQ ID NO: 205304 - DNA, 25 bp, Homo sapien
gcactgtcccaatggagattaggat

SEQ ID NO: 205305 - DNA, 25 bp, Homo sapien
gatcaccaagcctagtgcatgctgc

SEQ ID NO: 205306 - DNA, 25 bp, Homo sapien
gacattacaaggactcgaggtgact

SEQ ID NO: 205307 - DNA, 25 bp, Homo sapien
tgagggatgagcaacaacattgggt

SEQ ID NO: 205308 - DNA, 25 bp, Homo sapien
agtgcacaccttaactcatgggagg

SEQ ID NO: 205309 - DNA, 25 bp, Homo sapien
gacaaagtgtgcagcttccccaaag

SEQ ID NO: 205310 - DNA, 25 bp, Homo sapien
atcaaattgaagaaacccaaggtgg

SEQ ID NO: 205311 - DNA, 25 bp, Homo sapien
caaaagaggaccagtgctccacctt

SEQ ID NO: 205312 - DNA, 25 bp, Homo sapien
cagagacagccccatggcagagcag

SEQ ID NO: 205313 - DNA, 25 bp, Homo sapien
tataatgcagatgtagaggctgagc

SEQ ID NO: 205314 - DNA, 25 bp, Homo sapien
tatataatgcagatgtagaggctga

SEQ ID NO: 205315 - DNA, 25 bp, Homo sapien
atgcagatgtagaggctgagcccac

SEQ ID NO: 205316 - DNA, 25 bp, Homo sapien
cttatataatgcagatgtagaggct

SEQ ID NO: 205317 - DNA, 25 bp, Homo sapien
catcatgacaatgccggtaattgcc

SEQ ID NO: 205318 - DNA, 25 bp, Homo sapien
tggaatcagcgtggaaattatctgc

SEQ ID NO: 205319 - DNA, 25 bp, Homo sapien
tctgcatatgccatcatgacaatgc

SEQ ID NO: 205320 - DNA, 25 bp, Homo sapien
cgcaaatgccactcctatgatggaa

SEQ ID NO: 205321 - DNA, 25 bp, Homo sapien
gctgtttgccctcgtttaatttctc

SEQ ID NO: 205322 - DNA, 25 bp, Homo sapien
tatagatgtgggcaataagagctac

SEQ ID NO: 205323 - DNA, 25 bp, Homo sapien
cattcttccggaacatcgcattgaa

SEQ ID NO: 205324 - DNA, 25 bp, Homo sapien
tctcacattccatggcctgattatg

SEQ ID NO: 205325 - DNA, 25 bp, Homo sapien
tgagtgtcccggcattcctggctgg

SEQ ID NO: 205326 - DNA, 25 bp, Homo sapien
tggtgagtgtcccggcattcctggc

SEQ ID NO: 205327 - DNA, 25 bp, Homo sapien
tctggtgagtgtcccggcattcctg

SEQ ID NO: 205328 - DNA, 25 bp, Homo sapien
tgtgatcacattgccgccacctcct

SEQ ID NO: 205329 - DNA, 25 bp, Homo sapien
caatggttggtagcctataggcaga

SEQ ID NO: 205330 - DNA, 25 bp, Homo sapien
ggacagatcttttttggagtcacca

SEQ ID NO: 205331 - DNA, 25 bp, Homo sapien
ttttggacgtaacctcttgcatcag

SEQ ID NO: 205332 - DNA, 25 bp, Homo sapien
tctccaggttcttatgggtggtcca

SEQ ID NO: 205333 - DNA, 25 bp, Homo sapien
tatatgaatgagatctggctcctta

SEQ ID NO: 205334 - DNA, 25 bp, Homo sapien
tgttcatcatagtggcatgccggat

SEQ ID NO: 205335 - DNA, 25 bp, Homo sapien
cttctaaagaagtgttgtctcaata

SEQ ID NO: 205336 - DNA, 25 bp, Homo sapien
gaagtgttgtctcaatatgttcatc

SEQ ID NO: 205337 - DNA, 25 bp, Homo sapien
taatccatattactcctgaaaggaa

SEQ ID NO: 205338 - DNA, 25 bp, Homo sapien
gaaaggaataaactcagaactgaag

SEQ ID NO: 205339 - DNA, 25 bp, Homo sapien
tttaatccatattactcctgaaagg

SEQ ID NO: 205340 - DNA, 25 bp, Homo sapien
atccatattactcctgaaaggaata

SEQ ID NO: 205341 - DNA, 25 bp, Homo sapien
cagacccttcgttcctgaggacaga

SEQ ID NO: 205342 - DNA, 25 bp, Homo sapien
tatccttctatgatgttgcaactgc

SEQ ID NO: 205343 - DNA, 25 bp, Homo sapien
acagcattgtgccattaccagtgac

SEQ ID NO: 205344 - DNA, 25 bp, Homo sapien
tagtgcctcctgttggaatgagctc

SEQ ID NO: 205345 - DNA, 25 bp, Homo sapien
cttcagatttcggtttgtactcaga

SEQ ID NO: 205346 - DNA, 25 bp, Homo sapien
gatttcggtttgtactcagaacaag

SEQ ID NO: 205347 - DNA, 25 bp, Homo sapien
tacagcaactccacgaaacaaagca

SEQ ID NO: 205348 - DNA, 25 bp, Homo sapien
ggtttgtactcagaacaagtgagaa

SEQ ID NO: 205349 - DNA, 25 bp, Homo sapien
tacaacagaacagagcggagacatc

SEQ ID NO: 205350 - DNA, 25 bp, Homo sapien
cagcacaatccatgacagcaagaag

SEQ ID NO: 205351 - DNA, 25 bp, Homo sapien
gaaagagtttcagcgtcagaccatc

SEQ ID NO: 205352 - DNA, 25 bp, Homo sapien
tccgtggccgtcagcttctttaaag

SEQ ID NO: 205353 - DNA, 25 bp, Homo sapien
atgaggttccttggaaaatagccca

SEQ ID NO: 205354 - DNA, 25 bp, Homo sapien
tgaggttccttggaaaatagcccac

SEQ ID NO: 205355 - DNA, 25 bp, Homo sapien
cagaaataccgaaattggtagttgc

SEQ ID NO: 205356 - DNA, 25 bp, Homo sapien
aattggtagttgctgaaatcactag

SEQ ID NO: 205357 - DNA, 25 bp, Homo sapien
cctgaaaagccattctgtcgttttt

SEQ ID NO: 205358 - DNA, 25 bp, Homo sapien
atagtctctggaggttgcctgaaaa

SEQ ID NO: 205359 - DNA, 25 bp, Homo sapien
caaacgagagagggtcaaggctgct

SEQ ID NO: 205360 - DNA, 25 bp, Homo sapien
tgggcaaacgagagagggtcaaggc

SEQ ID NO: 205361 - DNA, 25 bp, Homo sapien
ggcaaacgagagagggtcaaggctg

SEQ ID NO: 205362 - DNA, 25 bp, Homo sapien
gtgggcaaacgagagagggtcaagg

SEQ ID NO: 205363 - DNA, 25 bp, Homo sapien
tctcactgccgaccttctccccttt

SEQ ID NO: 205364 - DNA, 25 bp, Homo sapien
cactgccgaccttctcccctttgtt

SEQ ID NO: 205365 - DNA, 25 bp, Homo sapien
gcttcgggagtaacttctggagtaa

SEQ ID NO: 205366 - DNA, 25 bp, Homo sapien
cttcttggcagatggtattaatgag

SEQ ID NO: 205367 - DNA, 25 bp, Homo sapien
gtaacttcttggcagatggtattaa

SEQ ID NO: 205368 - DNA, 25 bp, Homo sapien
cttcccttgttcagtcatgagagct

SEQ ID NO: 205369 - DNA, 25 bp, Homo sapien
cttgagcagtggctagatgaccaga

SEQ ID NO: 205370 - DNA, 25 bp, Homo sapien
gtggctagatgaccagaataataga

SEQ ID NO: 205371 - DNA, 25 bp, Homo sapien
gagcagtggctagatgaccagaata

SEQ ID NO: 205372 - DNA, 25 bp, Homo sapien
ttcttgagcagtggctagatgacca

SEQ ID NO: 205373 - DNA, 25 bp, Homo sapien
atttttacaatctgtgtagttccaa

SEQ ID NO: 205374 - DNA, 25 bp, Homo sapien
aggacaggcagcgagccttgattct

SEQ ID NO: 205375 - DNA, 25 bp, Homo sapien
ttcagaaccatggacgtgcaggaca

SEQ ID NO: 205376 - DNA, 25 bp, Homo sapien
tgatgatactgacaagatgatcaag

SEQ ID NO: 205377 - DNA, 25 bp, Homo sapien
gacaggcagcgagccttgattctgt

SEQ ID NO: 205378 - DNA, 25 bp, Homo sapien
cagtccatgaggttgctcatgcgga

SEQ ID NO: 205379 - DNA, 25 bp, Homo sapien
gctcatgcggatgttatgctgtttt

SEQ ID NO: 205380 - DNA, 25 bp, Homo sapien
atctgagtcccgatccagtccatga

SEQ ID NO: 205381 - DNA, 25 bp, Homo sapien
caatacagtaagcatctgagtcccg

SEQ ID NO: 205382 - DNA, 25 bp, Homo sapien
gaaagtatgaaactgggaatactaa

SEQ ID NO: 205383 - DNA, 25 bp, Homo sapien
tcattcttttcaggatgggtacatt

SEQ ID NO: 205384 - DNA, 25 bp, Homo sapien
cagtcccgatgaggacaaaagcaga

SEQ ID NO: 205385 - DNA, 25 bp, Homo sapien
cattgtgctgttactgaatccccag

SEQ ID NO: 205386 - DNA, 25 bp, Homo sapien
taggagcagaggaatcttcggtgac

SEQ ID NO: 205387 - DNA, 25 bp, Homo sapien
cagttgtctactgatgccactgtgt

SEQ ID NO: 205388 - DNA, 25 bp, Homo sapien
actcctgaggatccttggttttgaa

SEQ ID NO: 205389 - DNA, 25 bp, Homo sapien
tggctcctggtttacatctagtgac

SEQ ID NO: 205390 - DNA, 25 bp, Homo sapien
agacagagttcacgccagtttgaga

SEQ ID NO: 205391 - DNA, 25 bp, Homo sapien
gaaagacagagttcacgccagtttg

SEQ ID NO: 205392 - DNA, 25 bp, Homo sapien
gacagagttcacgccagtttgagaa

SEQ ID NO: 205393 - DNA, 25 bp, Homo sapien
aaagacagagttcacgccagtttga

SEQ ID NO: 205394 - DNA, 25 bp, Homo sapien
tgtgtagcgagcaagtgttgaatgt

SEQ ID NO: 205395 - DNA, 25 bp, Homo sapien
tggtaacttgtgtgtagcgagcaag

SEQ ID NO: 205396 - DNA, 25 bp, Homo sapien
aaaagttggtaacttgtgtgtagcg

SEQ ID NO: 205397 - DNA, 25 bp, Homo sapien
agcaagtgttgaatgtataagccac

SEQ ID NO: 205398 - DNA, 25 bp, Homo sapien
taaaatattatgtcctggcttccat

SEQ ID NO: 205399 - DNA, 25 bp, Homo sapien
tttcactaaaatattatgtcctggc

SEQ ID NO: 205400 - DNA, 25 bp, Homo sapien
ctaaaatattatgtcctggcttcca

SEQ ID NO: 205401 - DNA, 25 bp, Homo sapien
cactaaaatattatgtcctggcttc

SEQ ID NO: 205402 - DNA, 25 bp, Homo sapien
gatataccgcaaagcccattgcctg

SEQ ID NO: 205403 - DNA, 25 bp, Homo sapien
gagatccaagagtagttcatccatg

SEQ ID NO: 205404 - DNA, 25 bp, Homo sapien
ttaatcactgtcttaaacaatacaa

SEQ ID NO: 205405 - DNA, 25 bp, Homo sapien
cactggtcagtttgtggaagagatc

SEQ ID NO: 205406 - DNA, 25 bp, Homo sapien
catagcagtggggccatcttgggcc

SEQ ID NO: 205407 - DNA, 25 bp, Homo sapien
tagcagtggggccatcttgggccat

SEQ ID NO: 205408 - DNA, 25 bp, Homo sapien
ctgacccatagcagtggggccatct

SEQ ID NO: 205409 - DNA, 25 bp, Homo sapien
cccatagcagtggggccatcttggg

SEQ ID NO: 205410 - DNA, 25 bp, Homo sapien
gccagaggagctccactgttatact

SEQ ID NO: 205411 - DNA, 25 bp, Homo sapien
gaggagctccactgttatacttgtc

SEQ ID NO: 205412 - DNA, 25 bp, Homo sapien
tcttccctgtaatgaccttgtgcaa

SEQ ID NO: 205413 - DNA, 25 bp, Homo sapien
atgcaactagtgacactttccctgg

SEQ ID NO: 205414 - DNA, 25 bp, Homo sapien
ggatttcccactagcttccctgtaa

SEQ ID NO: 205415 - DNA, 25 bp, Homo sapien
gacctcttgagagcatttaggaaaa

SEQ ID NO: 205416 - DNA, 25 bp, Homo sapien
gacagtgtagctggctgttaccact

SEQ ID NO: 205417 - DNA, 25 bp, Homo sapien
tgtaaaagcccaatggtaggcacct

SEQ ID NO: 205418 - DNA, 25 bp, Homo sapien
ttctgtatcactccggtcactgtga

SEQ ID NO: 205419 - DNA, 25 bp, Homo sapien
gagagaatctcttagatgcaccaac

SEQ ID NO: 205420 - DNA, 25 bp, Homo sapien
ggtggcaagttttctcgtgtaagag

SEQ ID NO: 205421 - DNA, 25 bp, Homo sapien
aagagagctggttgattcccaactg

SEQ ID NO: 205422 - DNA, 25 bp, Homo sapien
gcatgctctcctctcgaaatcctaa

SEQ ID NO: 205423 - DNA, 25 bp, Homo sapien
gaaagataatccttctgatgttcac

SEQ ID NO: 205424 - DNA, 25 bp, Homo sapien
tgttcacactgtccggaagatggct

SEQ ID NO: 205425 - DNA, 25 bp, Homo sapien
ttcttgtagaggcagctcttgcagt

SEQ ID NO: 205426 - DNA, 25 bp, Homo sapien
ctttggaataaggtaaaaatgctgc

SEQ ID NO: 205427 - DNA, 25 bp, Homo sapien
taaggtaaaaatgctgctggcatta

SEQ ID NO: 205428 - DNA, 25 bp, Homo sapien
tttggaataaggtaaaaatgctgct

SEQ ID NO: 205429 - DNA, 25 bp, Homo sapien
gaataaggtaaaaatgctgctggca

SEQ ID NO: 205430 - DNA, 25 bp, Homo sapien
tatttcgtggatgactggctgccat

SEQ ID NO: 205431 - DNA, 25 bp, Homo sapien
ttccccacattaggcccttgctggc

SEQ ID NO: 205432 - DNA, 25 bp, Homo sapien
cttgctggctatttcgtggatgact

SEQ ID NO: 205433 - DNA, 25 bp, Homo sapien
taaacattccttgaatccatctcct

SEQ ID NO: 205434 - DNA, 25 bp, Homo sapien
gataccgagagtcctcagtttccaa

SEQ ID NO: 205435 - DNA, 25 bp, Homo sapien
tcacagataccgagagtcctcagtt

SEQ ID NO: 205436 - DNA, 25 bp, Homo sapien
gaaccacctctgaggagtaacccca

SEQ ID NO: 205437 - DNA, 25 bp, Homo sapien
ctcagtttccaaagaaccacctctg

SEQ ID NO: 205438 - DNA, 25 bp, Homo sapien
agttctgtagttctgagcttccagg

SEQ ID NO: 205439 - DNA, 25 bp, Homo sapien
aaatccaaccatcatgggtcctcat

SEQ ID NO: 205440 - DNA, 25 bp, Homo sapien
aaaatccaaccatcatgggtcctca

SEQ ID NO: 205441 - DNA, 25 bp, Homo sapien
tttgcccttaggcactggaactgcc

SEQ ID NO: 205442 - DNA, 25 bp, Homo sapien
gcccttaggcactggaactgcctca

SEQ ID NO: 205443 - DNA, 25 bp, Homo sapien
gaccttctgaggtttgcccttaggc

SEQ ID NO: 205444 - DNA, 25 bp, Homo sapien
ctgaggtttgcccttaggcactgga

SEQ ID NO: 205445 - DNA, 25 bp, Homo sapien
tagtgaaatgcaaagagtgggaaga

SEQ ID NO: 205446 - DNA, 25 bp, Homo sapien
gagggagtttgcagctacaaatctc

SEQ ID NO: 205447 - DNA, 25 bp, Homo sapien
tggacttaacggaccaagaatagcc

SEQ ID NO: 205448 - DNA, 25 bp, Homo sapien
cgttcaacggaggaggattcttgct

SEQ ID NO: 205449 - DNA, 25 bp, Homo sapien
gcgggttttcatgccattcatccac

SEQ ID NO: 205450 - DNA, 25 bp, Homo sapien
cattcatccactgaaggcagcaaag

SEQ ID NO: 205451 - DNA, 25 bp, Homo sapien
ggcagcaaaggtgccattaggggag

SEQ ID NO: 205452 - DNA, 25 bp, Homo sapien
gcagcaaaggtgccattaggggagg

SEQ ID NO: 205453 - DNA, 25 bp, Homo sapien
ggtagtcagttcctactcctgagac

SEQ ID NO: 205454 - DNA, 25 bp, Homo sapien
tacagcatccagtggcagacatatg

SEQ ID NO: 205455 - DNA, 25 bp, Homo sapien
tccaggcaagattgtcaggtagtca

SEQ ID NO: 205456 - DNA, 25 bp, Homo sapien
ttcactggttcgagcagcagatcca

SEQ ID NO: 205457 - DNA, 25 bp, Homo sapien
ctccctcaggcgtcaggatgctcag

SEQ ID NO: 205458 - DNA, 25 bp, Homo sapien
actcctccctcaggcgtcaggatgc

SEQ ID NO: 205459 - DNA, 25 bp, Homo sapien
ttcactcctccctcaggcgtcagga

SEQ ID NO: 205460 - DNA, 25 bp, Homo sapien
cctccctcaggcgtcaggatgctca

SEQ ID NO: 205461 - DNA, 25 bp, Homo sapien
aagatcttaaatgctcagcaaaggc

SEQ ID NO: 205462 - DNA, 25 bp, Homo sapien
gcaatggtaagtgcttccctagcca

SEQ ID NO: 205463 - DNA, 25 bp, Homo sapien
tcccagagccctttcagcaatggta

SEQ ID NO: 205464 - DNA, 25 bp, Homo sapien
agatcttaaatgctcagcaaaggcc

SEQ ID NO: 205465 - DNA, 25 bp, Homo sapien
ctgtttttaactatgggcttaatgt

SEQ ID NO: 205466 - DNA, 25 bp, Homo sapien
ttagcggtgggaattagagccattc

SEQ ID NO: 205467 - DNA, 25 bp, Homo sapien
tgcagttacccgtaatcagtcctgg

SEQ ID NO: 205468 - DNA, 25 bp, Homo sapien
tctagaagtctagcattagcggtgg

SEQ ID NO: 205469 - DNA, 25 bp, Homo sapien
tgaccagtatcactatcaaaaggct

SEQ ID NO: 205470 - DNA, 25 bp, Homo sapien
ggtacagatgacagatgaatcacta

SEQ ID NO: 205471 - DNA, 25 bp, Homo sapien
tcaaaaggctcacctctagtagatg

SEQ ID NO: 205472 - DNA, 25 bp, Homo sapien
gaatgcgaattataaggattgtggg

SEQ ID NO: 205473 - DNA, 25 bp, Homo sapien
gcaggtctaaaacgctgtgaccaag

SEQ ID NO: 205474 - DNA, 25 bp, Homo sapien
gagttgtacaaagcaggtctaaaac

SEQ ID NO: 205475 - DNA, 25 bp, Homo sapien
tgtacaaagcaggtctaaaacgctg

SEQ ID NO: 205476 - DNA, 25 bp, Homo sapien
ctaaaacgctgtgaccaagagggca

SEQ ID NO: 205477 - DNA, 25 bp, Homo sapien
tcgcaaggcaatctcactaaagaca

SEQ ID NO: 205478 - DNA, 25 bp, Homo sapien
atctaatcgcaaggcaatctcacta

SEQ ID NO: 205479 - DNA, 25 bp, Homo sapien
aaggcaatctcactaaagacagaca

SEQ ID NO: 205480 - DNA, 25 bp, Homo sapien
tccttgttatcatctaatcgcaagg

SEQ ID NO: 205481 - DNA, 25 bp, Homo sapien
tgcctttgaccaagggtagacctcc

SEQ ID NO: 205482 - DNA, 25 bp, Homo sapien
gatgtcacatcctgatgaccgtcac

SEQ ID NO: 205483 - DNA, 25 bp, Homo sapien
gggagcatacagactcgcatgcctt

SEQ ID NO: 205484 - DNA, 25 bp, Homo sapien
gccaacccggctgaatagaaccttg

SEQ ID NO: 205485 - DNA, 25 bp, Homo sapien
tttattggatctgcacattgcaagt

SEQ ID NO: 205486 - DNA, 25 bp, Homo sapien
attggatctgcacattgcaagttaa

SEQ ID NO: 205487 - DNA, 25 bp, Homo sapien
agccctttattggatctgcacattg

SEQ ID NO: 205488 - DNA, 25 bp, Homo sapien
aagccctttattggatctgcacatt

SEQ ID NO: 205489 - DNA, 25 bp, Homo sapien
gctattttcgaccatttggacaagg

SEQ ID NO: 205490 - DNA, 25 bp, Homo sapien
tccaaaccgccaccatcaatagggt

SEQ ID NO: 205491 - DNA, 25 bp, Homo sapien
tcaatagggttacaggagagggcct

SEQ ID NO: 205492 - DNA, 25 bp, Homo sapien
acacgtaaacgctggaactgctggc

SEQ ID NO: 205493 - DNA, 25 bp, Homo sapien
tcttttcaatagctcccattttgct

SEQ ID NO: 205494 - DNA, 25 bp, Homo sapien
tcaaacccatgagagactccccggt

SEQ ID NO: 205495 - DNA, 25 bp, Homo sapien
gactccccggtgtcttttcaatagc

SEQ ID NO: 205496 - DNA, 25 bp, Homo sapien
cagctagttcaagtggagtcttgtg

SEQ ID NO: 205497 - DNA, 25 bp, Homo sapien
catagtctcaaatggcatagaacca

SEQ ID NO: 205498 - DNA, 25 bp, Homo sapien
gcctgagtacctgcatgcatctgca

SEQ ID NO: 205499 - DNA, 25 bp, Homo sapien
ccaacttcaccctattttggtgcct

SEQ ID NO: 205500 - DNA, 25 bp, Homo sapien
ggtgcctgagtacctgcatgcatct

SEQ ID NO: 205501 - DNA, 25 bp, Homo sapien
tcccaacttcaccctattttggtgc

SEQ ID NO: 205502 - DNA, 25 bp, Homo sapien
gggctgcaggtgtccgtaccgcgcg

SEQ ID NO: 205503 - DNA, 25 bp, Homo sapien
cagcggacatacttttctccccggg

SEQ ID NO: 205504 - DNA, 25 bp, Homo sapien
agcaccgaggacagcggacatactt

SEQ ID NO: 205505 - DNA, 25 bp, Homo sapien
gaggacagcggacatacttttctcc

SEQ ID NO: 205506 - DNA, 25 bp, Homo sapien
ggagtaacctggataatagccatag

SEQ ID NO: 205507 - DNA, 25 bp, Homo sapien
tagccggtgatccgcaggatccggt

SEQ ID NO: 205508 - DNA, 25 bp, Homo sapien
tggctggagtaacctggataatagc

SEQ ID NO: 205509 - DNA, 25 bp, Homo sapien
aatagccatagtagccggtgatccg

SEQ ID NO: 205510 - DNA, 25 bp, Homo sapien
ggtgctgatcttgcagctcctgctc

SEQ ID NO: 205511 - DNA, 25 bp, Homo sapien
tggtcgccagctttcatcattaacc

SEQ ID NO: 205512 - DNA, 25 bp, Homo sapien
ttgcgcgatccttcccgaaaactag

SEQ ID NO: 205513 - DNA, 25 bp, Homo sapien
acatccatagagagcgcggggcgac

SEQ ID NO: 205514 - DNA, 25 bp, Homo sapien
tgcaacttgtctagaagactgggaa

SEQ ID NO: 205515 - DNA, 25 bp, Homo sapien
gactcatagctgttaatgcgaggca

SEQ ID NO: 205516 - DNA, 25 bp, Homo sapien
accacctctggtctgctgatatgca

SEQ ID NO: 205517 - DNA, 25 bp, Homo sapien
tgggagaaacccaagagggactcat

SEQ ID NO: 205518 - DNA, 25 bp, Homo sapien
cacctgctgctgactcttctataga

SEQ ID NO: 205519 - DNA, 25 bp, Homo sapien
tagagaaaatttgcagaacgaggaa

SEQ ID NO: 205520 - DNA, 25 bp, Homo sapien
gctgcaggaagtgaattgggacctt

SEQ ID NO: 205521 - DNA, 25 bp, Homo sapien
caaagttccagaggcgtgacttagg

SEQ ID NO: 205522 - DNA, 25 bp, Homo sapien
ctataacttttgcacagattcaggg

SEQ ID NO: 205523 - DNA, 25 bp, Homo sapien
aacttttgcacagattcagggttct

SEQ ID NO: 205524 - DNA, 25 bp, Homo sapien
tgcacagattcagggttctctctgt

SEQ ID NO: 205525 - DNA, 25 bp, Homo sapien
ttgcacagattcagggttctctctg

SEQ ID NO: 205526 - DNA, 25 bp, Homo sapien
ttccaaaagatgtgcccaatgtatg

SEQ ID NO: 205527 - DNA, 25 bp, Homo sapien
cgacttggagaagatatcaccagtg

SEQ ID NO: 205528 - DNA, 25 bp, Homo sapien
cttggagaagatatcaccagtgttt

SEQ ID NO: 205529 - DNA, 25 bp, Homo sapien
aaaagatgtgcccaatgtatgtcct

SEQ ID NO: 205530 - DNA, 25 bp, Homo sapien
ctgcgattccaaagctgccctctgg

SEQ ID NO: 205531 - DNA, 25 bp, Homo sapien
tgaagtggagcctgcgattccaaag

SEQ ID NO: 205532 - DNA, 25 bp, Homo sapien
aagctgccctctggtctccttttct

SEQ ID NO: 205533 - DNA, 25 bp, Homo sapien
ctgaagtggagcctgcgattccaaa

SEQ ID NO: 205534 - DNA, 25 bp, Homo sapien
ggtgcagcatatgtgacctgcctca

SEQ ID NO: 205535 - DNA, 25 bp, Homo sapien
ctgggtcagccgtccctgtggatca

SEQ ID NO: 205536 - DNA, 25 bp, Homo sapien
gtttgccaatctgcaagctgtcctg

SEQ ID NO: 205537 - DNA, 25 bp, Homo sapien
cagagatggcccctgcaagtgacac

SEQ ID NO: 205538 - DNA, 25 bp, Homo sapien
accaccacgtggaaacaccaggcat

SEQ ID NO: 205539 - DNA, 25 bp, Homo sapien
cattatactccaacatcctccagtg

SEQ ID NO: 205540 - DNA, 25 bp, Homo sapien
gtgtgaatagaatagaagatgaagt

SEQ ID NO: 205541 - DNA, 25 bp, Homo sapien
tgtgaaagccattatactccaacat

SEQ ID NO: 205542 - DNA, 25 bp, Homo sapien
gggtgtgaatagaatagaagatgaa

SEQ ID NO: 205543 - DNA, 25 bp, Homo sapien
acctggttgcccaggtgtctcatcc

SEQ ID NO: 205544 - DNA, 25 bp, Homo sapien
gtacgcacagcccacctggttgccc

SEQ ID NO: 205545 - DNA, 25 bp, Homo sapien
ggttgcccaggtgtctcatccaact

SEQ ID NO: 205546 - DNA, 25 bp, Homo sapien
ttgcccaggtgtctcatccaactcc

SEQ ID NO: 205547 - DNA, 25 bp, Homo sapien
gccttagcaaagtacaacgcacacg

SEQ ID NO: 205548 - DNA, 25 bp, Homo sapien
tgatgtaacgggactcttcaccaat

SEQ ID NO: 205549 - DNA, 25 bp, Homo sapien
cgcacacgccagtgagttttctgct

SEQ ID NO: 205550 - DNA, 25 bp, Homo sapien
tactgccgagtgtcatgatgtaacg

SEQ ID NO: 205551 - DNA, 25 bp, Homo sapien
cacatttgtccaccatatggataac

SEQ ID NO: 205552 - DNA, 25 bp, Homo sapien
tgattgtcttgacattctgcagaca

SEQ ID NO: 205553 - DNA, 25 bp, Homo sapien
cattatgtcttatctgagggttctc

SEQ ID NO: 205554 - DNA, 25 bp, Homo sapien
gggttctctctcacagtagagtctg

SEQ ID NO: 205555 - DNA, 25 bp, Homo sapien
caatggagaagaaggattcgcctct

SEQ ID NO: 205556 - DNA, 25 bp, Homo sapien
ttattcggatcccaggcctagagtg

SEQ ID NO: 205557 - DNA, 25 bp, Homo sapien
tgtcaacaaccaaaccaatagggaa

SEQ ID NO: 205558 - DNA, 25 bp, Homo sapien
agaagaaggattcgcctctattccc

SEQ ID NO: 205559 - DNA, 25 bp, Homo sapien
ggaacaccagcgacaccttgtagca

SEQ ID NO: 205560 - DNA, 25 bp, Homo sapien
aatgtcgctggtttctggttttctg

SEQ ID NO: 205561 - DNA, 25 bp, Homo sapien
gaacatgtgtaaccagaccatccca

SEQ ID NO: 205562 - DNA, 25 bp, Homo sapien
actgaagccaaagacaacagcccgg

SEQ ID NO: 205563 - DNA, 25 bp, Homo sapien
taatatttagtgatcatttcccacg

SEQ ID NO: 205564 - DNA, 25 bp, Homo sapien
tataatatttagtgatcatttccca

SEQ ID NO: 205565 - DNA, 25 bp, Homo sapien
tagtgatcatttcccacgtggcaga

SEQ ID NO: 205566 - DNA, 25 bp, Homo sapien
tatttagtgatcatttcccacgtgg

SEQ ID NO: 205567 - DNA, 25 bp, Homo sapien
tttcaaggtctccaattgccaggtt

SEQ ID NO: 205568 - DNA, 25 bp, Homo sapien
ggttttttgcaactcacagactgtc

SEQ ID NO: 205569 - DNA, 25 bp, Homo sapien
ggactcttccaaggagactctgaca

SEQ ID NO: 205570 - DNA, 25 bp, Homo sapien
ctgctgcatatcaagtgtgctttct

SEQ ID NO: 205571 - DNA, 25 bp, Homo sapien
gacgctggatgctcttgctgctcag

SEQ ID NO: 205572 - DNA, 25 bp, Homo sapien
ccccagacgctggatgctcttgctg

SEQ ID NO: 205573 - DNA, 25 bp, Homo sapien
tcttgtttccggcactgctgtggct

SEQ ID NO: 205574 - DNA, 25 bp, Homo sapien
cctgttcaaggactcttgtttccgg

SEQ ID NO: 205575 - DNA, 25 bp, Homo sapien
tcaagggtaacctggagtgcctacc

SEQ ID NO: 205576 - DNA, 25 bp, Homo sapien
gaagcgctgcattccacaagtacag

SEQ ID NO: 205577 - DNA, 25 bp, Homo sapien
tatgtaaggcgcttgagcatccatg

SEQ ID NO: 205578 - DNA, 25 bp, Homo sapien
caatgccgaggaccgtgaactgtat

SEQ ID NO: 205579 - DNA, 25 bp, Homo sapien
ttttcatcctatggaggcatcctga

SEQ ID NO: 205580 - DNA, 25 bp, Homo sapien
tatggagacttctttcaactctgtt

SEQ ID NO: 205581 - DNA, 25 bp, Homo sapien
taattgcgcttatggttattcagtc

SEQ ID NO: 205582 - DNA, 25 bp, Homo sapien
caatgtgcgttgtgtttatggagac

SEQ ID NO: 205583 - DNA, 25 bp, Homo sapien
ttgcaccattgcactatagcctgag

SEQ ID NO: 205584 - DNA, 25 bp, Homo sapien
tgcaccattgcactatagcctgagt

SEQ ID NO: 205585 - DNA, 25 bp, Homo sapien
gacagagtaagaccctgtctcaaaa

SEQ ID NO: 205586 - DNA, 25 bp, Homo sapien
ctgggataatacagggtcagcccct

SEQ ID NO: 205587 - DNA, 25 bp, Homo sapien
tcaaaagtcccatgaccctagtcag

SEQ ID NO: 205588 - DNA, 25 bp, Homo sapien
gaaggcagaacactagaccatcgta

SEQ ID NO: 205589 - DNA, 25 bp, Homo sapien
tcatttctgcaaccttggtccaggc

SEQ ID NO: 205590 - DNA, 25 bp, Homo sapien
aaaaagcctgtcttgccaaaatgtc

SEQ ID NO: 205591 - DNA, 25 bp, Homo sapien
ttttttcagttgtgttcctgcctct

SEQ ID NO: 205592 - DNA, 25 bp, Homo sapien
ttttttggcagctggtaggaacatg

SEQ ID NO: 205593 - DNA, 25 bp, Homo sapien
tgtcacgtagctataaccttgcgcc

SEQ ID NO: 205594 - DNA, 25 bp, Homo sapien
ttcatttggacttctacaggaagaa

SEQ ID NO: 205595 - DNA, 25 bp, Homo sapien
ctgtgattggaaataaggtgtttca

SEQ ID NO: 205596 - DNA, 25 bp, Homo sapien
tggctgtgattggaaataaggtgtt

SEQ ID NO: 205597 - DNA, 25 bp, Homo sapien
ttggacttctacaggaagaagacac

SEQ ID NO: 205598 - DNA, 25 bp, Homo sapien
cctatgttaagagatacaggtactt

SEQ ID NO: 205599 - DNA, 25 bp, Homo sapien
gacacagaaggaagagcgaggtatt

SEQ ID NO: 205600 - DNA, 25 bp, Homo sapien
gcactctatgtaattttcggatacc

SEQ ID NO: 205601 - DNA, 25 bp, Homo sapien
tggcttttaacgcttagcatttggg

SEQ ID NO: 205602 - DNA, 25 bp, Homo sapien
gagaagaagacctagttcctgcccc

SEQ ID NO: 205603 - DNA, 25 bp, Homo sapien
gactatagattgagtagcccaaggc

SEQ ID NO: 205604 - DNA, 25 bp, Homo sapien
tagctctgaggaataactgtgcaac

SEQ ID NO: 205605 - DNA, 25 bp, Homo sapien
tttgggtaaacctacaagtgcctga

SEQ ID NO: 205606 - DNA, 25 bp, Homo sapien
tataaggaccaatggtagcccacct

SEQ ID NO: 205607 - DNA, 25 bp, Homo sapien
catatttcaatatcctcatagcggg

SEQ ID NO: 205608 - DNA, 25 bp, Homo sapien
ccatgagctctgttgttcaccagga

SEQ ID NO: 205609 - DNA, 25 bp, Homo sapien
tccctagattcaaatagcgcattgg

SEQ ID NO: 205610 - DNA, 25 bp, Homo sapien
cactatttaagacagcaaacgtaca

SEQ ID NO: 205611 - DNA, 25 bp, Homo sapien
ttttctcggcaaaatcaactagcac

SEQ ID NO: 205612 - DNA, 25 bp, Homo sapien
gaatatctcttaatcataaacatgt

SEQ ID NO: 205613 - DNA, 25 bp, Homo sapien
catgtatgattgagtctgttggact

SEQ ID NO: 205614 - DNA, 25 bp, Homo sapien
caaatgcagtatgtaccatggccca

SEQ ID NO: 205615 - DNA, 25 bp, Homo sapien
gactaacggcctgatagcagcaatg

SEQ ID NO: 205616 - DNA, 25 bp, Homo sapien
catatttatgagttgtagcccacgg

SEQ ID NO: 205617 - DNA, 25 bp, Homo sapien
cagagtcaagcatgccttggtggca

SEQ ID NO: 205618 - DNA, 25 bp, Homo sapien
aaattcatcttcagagctgtcggct

SEQ ID NO: 205619 - DNA, 25 bp, Homo sapien
gagcattactcgatcttgcatgctg

SEQ ID NO: 205620 - DNA, 25 bp, Homo sapien
gctgtcggctaagagcattactcga

SEQ ID NO: 205621 - DNA, 25 bp, Homo sapien
tcttcagagctgtcggctaagagca

SEQ ID NO: 205622 - DNA, 25 bp, Homo sapien
tttgaagccatttctccttcggcga

SEQ ID NO: 205623 - DNA, 25 bp, Homo sapien
ccttcggcgattcataaccttaatg

SEQ ID NO: 205624 - DNA, 25 bp, Homo sapien
accagcatcccagacatgtaaccag

SEQ ID NO: 205625 - DNA, 25 bp, Homo sapien
tgctgtagagggctcccaagatgaa

SEQ ID NO: 205626 - DNA, 25 bp, Homo sapien
tcttttaatttttccatccagcttc

SEQ ID NO: 205627 - DNA, 25 bp, Homo sapien
cttgtcttttaatttttccatccag

SEQ ID NO: 205628 - DNA, 25 bp, Homo sapien
tttaatttttccatccagcttctca

SEQ ID NO: 205629 - DNA, 25 bp, Homo sapien
tgtcttttaatttttccatccagct

SEQ ID NO: 205630 - DNA, 25 bp, Homo sapien
ttaggccaccaagtctataagaagt

SEQ ID NO: 205631 - DNA, 25 bp, Homo sapien
ctataagaagtggatgacaagcagc

SEQ ID NO: 205632 - DNA, 25 bp, Homo sapien
ccaagtctataagaagtggatgaca

SEQ ID NO: 205633 - DNA, 25 bp, Homo sapien
caccaagtctataagaagtggatga

SEQ ID NO: 205634 - DNA, 25 bp, Homo sapien
ttaggtaaggtgataagccacttta

SEQ ID NO: 205635 - DNA, 25 bp, Homo sapien
attttaggtaaggtgataagccact

SEQ ID NO: 205636 - DNA, 25 bp, Homo sapien
tttgccatcttgagatataaccgag

SEQ ID NO: 205637 - DNA, 25 bp, Homo sapien
taaccgaggctttagcaaccataaa

SEQ ID NO: 205638 - DNA, 25 bp, Homo sapien
tatacacgtgacatagaaatgacca

SEQ ID NO: 205639 - DNA, 25 bp, Homo sapien
tacctgagatgcctcacataagtgg

SEQ ID NO: 205640 - DNA, 25 bp, Homo sapien
cctgctagcccctgggaatcagcat

SEQ ID NO: 205641 - DNA, 25 bp, Homo sapien
atacacccatcaatggacactcggg

SEQ ID NO: 205642 - DNA, 25 bp, Homo sapien
cctacgcccacggaatctcgctgat

SEQ ID NO: 205643 - DNA, 25 bp, Homo sapien
tacgcccacggaatctcgctgattg

SEQ ID NO: 205644 - DNA, 25 bp, Homo sapien
ctacgcccacggaatctcgctgatt

SEQ ID NO: 205645 - DNA, 25 bp, Homo sapien
acgcccacggaatctcgctgattgc

SEQ ID NO: 205646 - DNA, 25 bp, Homo sapien
ataagaggcattcccgtaacactga

SEQ ID NO: 205647 - DNA, 25 bp, Homo sapien
ggtgatgataagaggcattcccgta

SEQ ID NO: 205648 - DNA, 25 bp, Homo sapien
tgataagaggcattcccgtaacact

SEQ ID NO: 205649 - DNA, 25 bp, Homo sapien
gatgataagaggcattcccgtaaca

SEQ ID NO: 205650 - DNA, 25 bp, Homo sapien
ttctccagcccttcaaattgctgag

SEQ ID NO: 205651 - DNA, 25 bp, Homo sapien
agcccttcaaattgctgagcgttca

SEQ ID NO: 205652 - DNA, 25 bp, Homo sapien
ttgctgagcgttcaccttggcagtc

SEQ ID NO: 205653 - DNA, 25 bp, Homo sapien
ggcagtcagcactttatgcttgtct

SEQ ID NO: 205654 - DNA, 25 bp, Homo sapien
ctctgtgcgttgctctttcaactgg

SEQ ID NO: 205655 - DNA, 25 bp, Homo sapien
aaagcaaatgctgttagggcaaccc

SEQ ID NO: 205656 - DNA, 25 bp, Homo sapien
gcaacccaccctctagccctgcagg

SEQ ID NO: 205657 - DNA, 25 bp, Homo sapien
cgttgctctttcaactgggaaagca

SEQ ID NO: 205658 - DNA, 25 bp, Homo sapien
cgacctggtgatagtcagtggcaaa

SEQ ID NO: 205659 - DNA, 25 bp, Homo sapien
tctctctacccattcgacctggtga

SEQ ID NO: 205660 - DNA, 25 bp, Homo sapien
tactcaaattcatgccttcctctct

SEQ ID NO: 205661 - DNA, 25 bp, Homo sapien
gtggcaaaccaatcacccatgtgag

SEQ ID NO: 205662 - DNA, 25 bp, Homo sapien
caaaccctgatctgttgggcccaga

SEQ ID NO: 205663 - DNA, 25 bp, Homo sapien
gggccaaaaatcaaaccctgatctg

SEQ ID NO: 205664 - DNA, 25 bp, Homo sapien
tagagcacatgagtgatggcaagga

SEQ ID NO: 205665 - DNA, 25 bp, Homo sapien
gcccagagctcagggtcaagtagag

SEQ ID NO: 205666 - DNA, 25 bp, Homo sapien
ccttcaaaatgctatgatatacttg

SEQ ID NO: 205667 - DNA, 25 bp, Homo sapien
tgctatgatatacttgttcctttac

SEQ ID NO: 205668 - DNA, 25 bp, Homo sapien
tcaaaatgctatgatatacttgttc

SEQ ID NO: 205669 - DNA, 25 bp, Homo sapien
aaatgctatgatatacttgttcctt

SEQ ID NO: 205670 - DNA, 25 bp, Homo sapien
gcctccacatgccagttgagaaagc

SEQ ID NO: 205671 - DNA, 25 bp, Homo sapien
acagccatgccacaaatcctctgcc

SEQ ID NO: 205672 - DNA, 25 bp, Homo sapien
ccagttgagaaagccagtcctgttc

SEQ ID NO: 205673 - DNA, 25 bp, Homo sapien
gccacaaatcctctgcctccacatg

SEQ ID NO: 205674 - DNA, 25 bp, Homo sapien
tgggagagactggtgaaagaagtgg

SEQ ID NO: 205675 - DNA, 25 bp, Homo sapien
atctgtgtaaggacagccagcatag

SEQ ID NO: 205676 - DNA, 25 bp, Homo sapien
tctgtgtaaggacagccagcatagc

SEQ ID NO: 205677 - DNA, 25 bp, Homo sapien
agagactggtgaaagaagtggggag

SEQ ID NO: 205678 - DNA, 25 bp, Homo sapien
tcaggatgataacggatgtgacata

SEQ ID NO: 205679 - DNA, 25 bp, Homo sapien
ggatgataacggatgtgacataggt

SEQ ID NO: 205680 - DNA, 25 bp, Homo sapien
gatgataacggatgtgacataggtg

SEQ ID NO: 205681 - DNA, 25 bp, Homo sapien
aggatgataacggatgtgacatagg

SEQ ID NO: 205682 - DNA, 25 bp, Homo sapien
agctagtattaacttccaagtttct

SEQ ID NO: 205683 - DNA, 25 bp, Homo sapien
ccaggccagaagatcaaattctctt

SEQ ID NO: 205684 - DNA, 25 bp, Homo sapien
cagagtaagtttccaggccagaaga

SEQ ID NO: 205685 - DNA, 25 bp, Homo sapien
tttgtcgttgttgaagaatttcttc

SEQ ID NO: 205686 - DNA, 25 bp, Homo sapien
tttcttcatcattaagcagagtaag

SEQ ID NO: 205687 - DNA, 25 bp, Homo sapien
tggtaggtagctccctccaacaggt

SEQ ID NO: 205688 - DNA, 25 bp, Homo sapien
ctggttcctgggatgtgataccagg

SEQ ID NO: 205689 - DNA, 25 bp, Homo sapien
ccagggagggtaaaacctggcagct

SEQ ID NO: 205690 - DNA, 25 bp, Homo sapien
tgattctgctgttcccactcgaggg

SEQ ID NO: 205691 - DNA, 25 bp, Homo sapien
tcttcatcctcatcttcttgtccct

SEQ ID NO: 205692 - DNA, 25 bp, Homo sapien
cctcttcatcctcatcttcttgtcc

SEQ ID NO: 205693 - DNA, 25 bp, Homo sapien
ctcttcatcctcatcttcttgtccc

SEQ ID NO: 205694 - DNA, 25 bp, Homo sapien
tgactctcggcacagcagttactgc

SEQ ID NO: 205695 - DNA, 25 bp, Homo sapien
agtgcccacaaagttcacagaaggc

SEQ ID NO: 205696 - DNA, 25 bp, Homo sapien
tctctccccttgactctcggcacag

SEQ ID NO: 205697 - DNA, 25 bp, Homo sapien
tggtaagtgcccacaaagttcacag

SEQ ID NO: 205698 - DNA, 25 bp, Homo sapien
taacaccacggattaggtttgctgg

SEQ ID NO: 205699 - DNA, 25 bp, Homo sapien
gcaacattctattgtaccagaagcc

SEQ ID NO: 205700 - DNA, 25 bp, Homo sapien
cattaccccaaaggtaagcactatt

SEQ ID NO: 205701 - DNA, 25 bp, Homo sapien
tcaacccctatattgctgcatgtgg

SEQ ID NO: 205702 - DNA, 25 bp, Homo sapien
tactactggctcaagtgtagacacc

SEQ ID NO: 205703 - DNA, 25 bp, Homo sapien
ctaatctgtgggaaacctatgggac

SEQ ID NO: 205704 - DNA, 25 bp, Homo sapien
tatcactacttgtcctagagcaccg

SEQ ID NO: 205705 - DNA, 25 bp, Homo sapien
tgtagacacctagcacaacaatgat

SEQ ID NO: 205706 - DNA, 25 bp, Homo sapien
tcttccttgcagttaattccttggg

SEQ ID NO: 205707 - DNA, 25 bp, Homo sapien
ctcttccttgcagttaattccttgg

SEQ ID NO: 205708 - DNA, 25 bp, Homo sapien
gcagaagattgaaaccggcccccta

SEQ ID NO: 205709 - DNA, 25 bp, Homo sapien
tatcaagggggtaaacagacaacca

SEQ ID NO: 205710 - DNA, 25 bp, Homo sapien
taaaaaggcttgagacaagatagtc

SEQ ID NO: 205711 - DNA, 25 bp, Homo sapien
cttcaaacaccagtggcaaaatgtt

SEQ ID NO: 205712 - DNA, 25 bp, Homo sapien
tgtagccttaacaatatttagaagg

SEQ ID NO: 205713 - DNA, 25 bp, Homo sapien
gctgggtgcaggagttcacacttgt

SEQ ID NO: 205714 - DNA, 25 bp, Homo sapien
aggcatttatcattgtgagaatatt

SEQ ID NO: 205715 - DNA, 25 bp, Homo sapien
tcgtagaggtatgcctgaaatgagt

SEQ ID NO: 205716 - DNA, 25 bp, Homo sapien
gccctcgtagaggtatgcctgaaat

SEQ ID NO: 205717 - DNA, 25 bp, Homo sapien
taaatacagccctcgtagaggtatg

SEQ ID NO: 205718 - DNA, 25 bp, Homo sapien
caagaaaggctgctaacctgacgta

SEQ ID NO: 205719 - DNA, 25 bp, Homo sapien
cttaaaggataaacagagctgcgga

SEQ ID NO: 205720 - DNA, 25 bp, Homo sapien
tagaggcctccaatacatccaggag

SEQ ID NO: 205721 - DNA, 25 bp, Homo sapien
gctgcacttatattcccgggcaagg

SEQ ID NO: 205722 - DNA, 25 bp, Homo sapien
ccagctgtagtttactgtcctctga

SEQ ID NO: 205723 - DNA, 25 bp, Homo sapien
tacaaaccattcaaaaacaagtggc

SEQ ID NO: 205724 - DNA, 25 bp, Homo sapien
tactgcagattgaatatactcctac

SEQ ID NO: 205725 - DNA, 25 bp, Homo sapien
tgtcctctgatctatactgcagatt

SEQ ID NO: 205726 - DNA, 25 bp, Homo sapien
ccagtccttgaaaagatccccttca

SEQ ID NO: 205727 - DNA, 25 bp, Homo sapien
cagtccttgaaaagatccccttcaa

SEQ ID NO: 205728 - DNA, 25 bp, Homo sapien
cttcagattcaagttggtccaggcc

SEQ ID NO: 205729 - DNA, 25 bp, Homo sapien
gaactggtgtgaactcctcatttgg

SEQ ID NO: 205730 - DNA, 25 bp, Homo sapien
gccatatgaggcagctgtattaaca

SEQ ID NO: 205731 - DNA, 25 bp, Homo sapien
cagaggatgcctccaaagcaggaag

SEQ ID NO: 205732 - DNA, 25 bp, Homo sapien
taacaccaggaacgtcagacacagg

SEQ ID NO: 205733 - DNA, 25 bp, Homo sapien
tccacagtgggagtaacttcaaaag

SEQ ID NO: 205734 - DNA, 25 bp, Homo sapien
tgaaattgtagtggccagaggctcc

SEQ ID NO: 205735 - DNA, 25 bp, Homo sapien
taagctcgagggtagcaacctgctc

SEQ ID NO: 205736 - DNA, 25 bp, Homo sapien
taacaactgctgtcaataattgcaa

SEQ ID NO: 205737 - DNA, 25 bp, Homo sapien
tataacaactgctgtcaataattgc

SEQ ID NO: 205738 - DNA, 25 bp, Homo sapien
ttgtataacaactgctgtcaataat

SEQ ID NO: 205739 - DNA, 25 bp, Homo sapien
gctattgtataacaactgctgtcaa

SEQ ID NO: 205740 - DNA, 25 bp, Homo sapien
tggcttacttgtgctgtctgagaca

SEQ ID NO: 205741 - DNA, 25 bp, Homo sapien
aaacagggcatcgttttccttggtg

SEQ ID NO: 205742 - DNA, 25 bp, Homo sapien
tcagtgaaagcaggtgatctctcat

SEQ ID NO: 205743 - DNA, 25 bp, Homo sapien
catgcgctattagcagggctgtgcc

SEQ ID NO: 205744 - DNA, 25 bp, Homo sapien
cctgactcagtaggtgtggaaacac

SEQ ID NO: 205745 - DNA, 25 bp, Homo sapien
cagtttctggctcaacactcagggt

SEQ ID NO: 205746 - DNA, 25 bp, Homo sapien
tcaacagtcagagaaggagtcgcag

SEQ ID NO: 205747 - DNA, 25 bp, Homo sapien
tgtgatctcttctacaatgggctga

SEQ ID NO: 205748 - DNA, 25 bp, Homo sapien
gccagacaaatgtgcaatacaatcg

SEQ ID NO: 205749 - DNA, 25 bp, Homo sapien
tgtgcaatacaatcggtcctctcat

SEQ ID NO: 205750 - DNA, 25 bp, Homo sapien
aaagcagaaggctacagaaagccag

SEQ ID NO: 205751 - DNA, 25 bp, Homo sapien
gctacagaaagccagacaaatgtgc

SEQ ID NO: 205752 - DNA, 25 bp, Homo sapien
agttgacaagtccagtaattgaatc

SEQ ID NO: 205753 - DNA, 25 bp, Homo sapien
gaaatggcacgtacactggcagagt

SEQ ID NO: 205754 - DNA, 25 bp, Homo sapien
ctggcagagttgacaagtccagtaa

SEQ ID NO: 205755 - DNA, 25 bp, Homo sapien
gaagagaaatggcacgtacactggc

SEQ ID NO: 205756 - DNA, 25 bp, Homo sapien
gacatggataacccagttcatttct

SEQ ID NO: 205757 - DNA, 25 bp, Homo sapien
ctctccaaattcctctattaaccat

SEQ ID NO: 205758 - DNA, 25 bp, Homo sapien
gaagtcacatttgcaatattctctc

SEQ ID NO: 205759 - DNA, 25 bp, Homo sapien
ccttgaagtcacatttgcaatattc

SEQ ID NO: 205760 - DNA, 25 bp, Homo sapien
gcaatattctctccaaattcctcta

SEQ ID NO: 205761 - DNA, 25 bp, Homo sapien
gtcaagcccaccgacaccatttaga

SEQ ID NO: 205762 - DNA, 25 bp, Homo sapien
tgggaaacggctggaggatggccac

SEQ ID NO: 205763 - DNA, 25 bp, Homo sapien
cagcagcgtctgatatttgctggga

SEQ ID NO: 205764 - DNA, 25 bp, Homo sapien
caccgacaccatttagaatgtcaaa

SEQ ID NO: 205765 - DNA, 25 bp, Homo sapien
caaccccataccactggtgcccagt

SEQ ID NO: 205766 - DNA, 25 bp, Homo sapien
atccatctctaataaggcaacccca

SEQ ID NO: 205767 - DNA, 25 bp, Homo sapien
aaacacagcatataatgtccccaaa

SEQ ID NO: 205768 - DNA, 25 bp, Homo sapien
cactggtgcccagtataaacaccat

SEQ ID NO: 205769 - DNA, 25 bp, Homo sapien
ggtagcggcggcgactccctccgct

SEQ ID NO: 205770 - DNA, 25 bp, Homo sapien
ggcggcgactccctccgctgtctgg

SEQ ID NO: 205771 - DNA, 25 bp, Homo sapien
agctgagcagcgcgcggaggacaga

SEQ ID NO: 205772 - DNA, 25 bp, Homo sapien
gcgctcggcatcccagcggcgggcc

SEQ ID NO: 205773 - DNA, 25 bp, Homo sapien
ttaatttgtatgtctccattgacta

SEQ ID NO: 205774 - DNA, 25 bp, Homo sapien
gtatgtctccattgactaatgatgt

SEQ ID NO: 205775 - DNA, 25 bp, Homo sapien
taatttgtatgtctccattgactaa

SEQ ID NO: 205776 - DNA, 25 bp, Homo sapien
tttgtatgtctccattgactaatga

SEQ ID NO: 205777 - DNA, 25 bp, Homo sapien
accatgccgctctacgagggcctgg

SEQ ID NO: 205778 - DNA, 25 bp, Homo sapien
tggccgcggagactgcgaccctctt

SEQ ID NO: 205779 - DNA, 25 bp, Homo sapien
ccgcgagcgccgagacttgttggcc

SEQ ID NO: 205780 - DNA, 25 bp, Homo sapien
ttctctcagtctgccttactaccat

SEQ ID NO: 205781 - DNA, 25 bp, Homo sapien
ctcaactattggaacaatgtactgt

SEQ ID NO: 205782 - DNA, 25 bp, Homo sapien
gttgacacaagtgttgctaaagaac

SEQ ID NO: 205783 - DNA, 25 bp, Homo sapien
gctaaagaacagagccttccctcag

SEQ ID NO: 205784 - DNA, 25 bp, Homo sapien
tccctcagtgatgggtaaattcatt

SEQ ID NO: 205785 - DNA, 25 bp, Homo sapien
aaggacacaaacttgcagttatgag

SEQ ID NO: 205786 - DNA, 25 bp, Homo sapien
tgtacagcatgaggactttagttag

SEQ ID NO: 205787 - DNA, 25 bp, Homo sapien
ttatgagtgatgaataaacctagag

SEQ ID NO: 205788 - DNA, 25 bp, Homo sapien
tagtaacactattctatactgaaaa

SEQ ID NO: 205789 - DNA, 25 bp, Homo sapien
ggatttctccacagattgcttgcag

SEQ ID NO: 205790 - DNA, 25 bp, Homo sapien
tttcgaattcatactccacctgcaa

SEQ ID NO: 205791 - DNA, 25 bp, Homo sapien
cacttggcactaagacatttcgaat

SEQ ID NO: 205792 - DNA, 25 bp, Homo sapien
tctccacagattgcttgcagaaata

SEQ ID NO: 205793 - DNA, 25 bp, Homo sapien
tactgggctgtttatgtgttaatcg

SEQ ID NO: 205794 - DNA, 25 bp, Homo sapien
tgtgggtccactcatatgctgtttt

SEQ ID NO: 205795 - DNA, 25 bp, Homo sapien
gtcttctaaagctagtgagccacat

SEQ ID NO: 205796 - DNA, 25 bp, Homo sapien
tgagccacatatgaaaattggcctc

SEQ ID NO: 205797 - DNA, 25 bp, Homo sapien
tgtcgggaaaactcaaccacctctg

SEQ ID NO: 205798 - DNA, 25 bp, Homo sapien
gaatattataatcagacgggccgta

SEQ ID NO: 205799 - DNA, 25 bp, Homo sapien
tgttctctcaataacccacctttgg

SEQ ID NO: 205800 - DNA, 25 bp, Homo sapien
tacttgggagccgttctgtttcaaa

SEQ ID NO: 205801 - DNA, 25 bp, Homo sapien
gctcgaacccacgaccctgggatta

SEQ ID NO: 205802 - DNA, 25 bp, Homo sapien
gggattaagagtcccatgctctacc

SEQ ID NO: 205803 - DNA, 25 bp, Homo sapien
cgtggggctcgaacccacgaccctg

SEQ ID NO: 205804 - DNA, 25 bp, Homo sapien
cacgaccctgggattaagagtccca

SEQ ID NO: 205805 - DNA, 25 bp, Homo sapien
ggaagacaggttacttcgcgcctac

SEQ ID NO: 205806 - DNA, 25 bp, Homo sapien
gatgccatcaagattctgggtcagg

SEQ ID NO: 205807 - DNA, 25 bp, Homo sapien
cttcacgagagcctgagcacaagga

SEQ ID NO: 205808 - DNA, 25 bp, Homo sapien
tgaacacgtggaatatactagcgct

SEQ ID NO: 205809 - DNA, 25 bp, Homo sapien
ctggaatccctacgcgtccctttgg

SEQ ID NO: 205810 - DNA, 25 bp, Homo sapien
tccctttgggtttagcacgatgagc

SEQ ID NO: 205811 - DNA, 25 bp, Homo sapien
cacgatgagctcaatcggcactggg

SEQ ID NO: 205812 - DNA, 25 bp, Homo sapien
cctgttactagtttgcggcatcctg

SEQ ID NO: 205813 - DNA, 25 bp, Homo sapien
catctattgggcactgagttagtca

SEQ ID NO: 205814 - DNA, 25 bp, Homo sapien
tagggaacggactctttctggacag

SEQ ID NO: 205815 - DNA, 25 bp, Homo sapien
gaactggtatgaaaatacgtgcgcc

SEQ ID NO: 205816 - DNA, 25 bp, Homo sapien
gacaatgagctatatatcctgaagg

SEQ ID NO: 205817 - DNA, 25 bp, Homo sapien
taactgatacgaggcagaggaaaga

SEQ ID NO: 205818 - DNA, 25 bp, Homo sapien
tatcattaataactgatacgaggca

SEQ ID NO: 205819 - DNA, 25 bp, Homo sapien
ttttggtgtctatagagacaaggtc

SEQ ID NO: 205820 - DNA, 25 bp, Homo sapien
gatacgaggcagaggaaagattttt

SEQ ID NO: 205821 - DNA, 25 bp, Homo sapien
ctcccggattcaagggattcttgtg

SEQ ID NO: 205822 - DNA, 25 bp, Homo sapien
gcctcccggattcaagggattcttg

SEQ ID NO: 205823 - DNA, 25 bp, Homo sapien
tcccggattcaagggattcttgtgc

SEQ ID NO: 205824 - DNA, 25 bp, Homo sapien
ctgcctcccggattcaagggattct

SEQ ID NO: 205825 - DNA, 25 bp, Homo sapien
tctgtctctcaggaatatataattt

SEQ ID NO: 205826 - DNA, 25 bp, Homo sapien
ccagctgtgcatccttatctttaaa

SEQ ID NO: 205827 - DNA, 25 bp, Homo sapien
cccaaaatgtcttaaagtgtatatg

SEQ ID NO: 205828 - DNA, 25 bp, Homo sapien
gagtactgaactcataggaattaac

SEQ ID NO: 205829 - DNA, 25 bp, Homo sapien
tcactgaatgggaaagctggtaaca

SEQ ID NO: 205830 - DNA, 25 bp, Homo sapien
tacgaatttgtgtttggccccatgt

SEQ ID NO: 205831 - DNA, 25 bp, Homo sapien
aaagccaggcaagctgcaaagacgg

SEQ ID NO: 205832 - DNA, 25 bp, Homo sapien
tatgtcgtcatcctaatgcagtgaa

SEQ ID NO: 205833 - DNA, 25 bp, Homo sapien
ttagcccaagctcaactgcagatta

SEQ ID NO: 205834 - DNA, 25 bp, Homo sapien
tgttaatgctgtactagaaccctgc

SEQ ID NO: 205835 - DNA, 25 bp, Homo sapien
tgaacagtatccagaccttatgagt

SEQ ID NO: 205836 - DNA, 25 bp, Homo sapien
tgcataggaccacagaatcagctgg

SEQ ID NO: 205837 - DNA, 25 bp, Homo sapien
cactttaattgaggaacactttcag

SEQ ID NO: 205838 - DNA, 25 bp, Homo sapien
atcaggtgttgcaaattatggccca

SEQ ID NO: 205839 - DNA, 25 bp, Homo sapien
agtttgtgacaaaattatgctgtga

SEQ ID NO: 205840 - DNA, 25 bp, Homo sapien
attatgctgtgaatcaggtgttgca

SEQ ID NO: 205841 - DNA, 25 bp, Homo sapien
taagcttacaacaaacctatctagt

SEQ ID NO: 205842 - DNA, 25 bp, Homo sapien
gaagaactgtaaacatcctaagctt

SEQ ID NO: 205843 - DNA, 25 bp, Homo sapien
gatgcaattaattcactaaatacag

SEQ ID NO: 205844 - DNA, 25 bp, Homo sapien
ttcccatcacgctcaacttaacatg

SEQ ID NO: 205845 - DNA, 25 bp, Homo sapien
tctagactgctgtatgagcacccat

SEQ ID NO: 205846 - DNA, 25 bp, Homo sapien
gaaaatcagatgtcttcaccagtcg

SEQ ID NO: 205847 - DNA, 25 bp, Homo sapien
gccagttgcctttagttgtacccaa

SEQ ID NO: 205848 - DNA, 25 bp, Homo sapien
ccaaaatatttgagtccatgccagt

SEQ ID NO: 205849 - DNA, 25 bp, Homo sapien
atgaatcaggaaacttcgattctgg

SEQ ID NO: 205850 - DNA, 25 bp, Homo sapien
tcaggaaacttcgattctggtcttt

SEQ ID NO: 205851 - DNA, 25 bp, Homo sapien
acttcgattctggtctttttcagac

SEQ ID NO: 205852 - DNA, 25 bp, Homo sapien
aaacttcgattctggtctttttcag

SEQ ID NO: 205853 - DNA, 25 bp, Homo sapien
ttctaagaagcctcacgaaggaaga

SEQ ID NO: 205854 - DNA, 25 bp, Homo sapien
tgacctgccgtgatatcgttaaaga

SEQ ID NO: 205855 - DNA, 25 bp, Homo sapien
caatacatgatccatgaagctggct

SEQ ID NO: 205856 - DNA, 25 bp, Homo sapien
gttaaggacatataccattagggtc

SEQ ID NO: 205857 - DNA, 25 bp, Homo sapien
tactacaatgtgaaggccaggttat

SEQ ID NO: 205858 - DNA, 25 bp, Homo sapien
tagcaaggttttagaagaccctcca

SEQ ID NO: 205859 - DNA, 25 bp, Homo sapien
tgttccatgttaggaaagccatccc

SEQ ID NO: 205860 - DNA, 25 bp, Homo sapien
aacactaggaaccaacatgcagcag

SEQ ID NO: 205861 - DNA, 25 bp, Homo sapien
gccaggtacagtcagggaatcactt

SEQ ID NO: 205862 - DNA, 25 bp, Homo sapien
tatctctagtgggtaaagttgcctt

SEQ ID NO: 205863 - DNA, 25 bp, Homo sapien
taatgacgcctcttcctagtgaatc

SEQ ID NO: 205864 - DNA, 25 bp, Homo sapien
caaaaacttctcttggccaggtaca

SEQ ID NO: 205865 - DNA, 25 bp, Homo sapien
gtccaatgtaactatttagccctgg

SEQ ID NO: 205866 - DNA, 25 bp, Homo sapien
tagccctggattatacatactgtcc

SEQ ID NO: 205867 - DNA, 25 bp, Homo sapien
ggttgttgtagcttaacttgcccac

SEQ ID NO: 205868 - DNA, 25 bp, Homo sapien
caccaataatacagagacgggtttt

SEQ ID NO: 205869 - DNA, 25 bp, Homo sapien
tactgtggccgataagaataacttg

SEQ ID NO: 205870 - DNA, 25 bp, Homo sapien
gaaaagcagtactcacagcaggaac

SEQ ID NO: 205871 - DNA, 25 bp, Homo sapien
taaccactgatgagatatgactagc

SEQ ID NO: 205872 - DNA, 25 bp, Homo sapien
taatctagccactgaatttgggtgc

SEQ ID NO: 205873 - DNA, 25 bp, Homo sapien
tttattttaagcaaagactgagtac

SEQ ID NO: 205874 - DNA, 25 bp, Homo sapien
aaatttattttaagcaaagactgag

SEQ ID NO: 205875 - DNA, 25 bp, Homo sapien
aatttattttaagcaaagactgagt

SEQ ID NO: 205876 - DNA, 25 bp, Homo sapien
atttattttaagcaaagactgagta

SEQ ID NO: 205877 - DNA, 25 bp, Homo sapien
taccataaatcatcttgatgctggt

SEQ ID NO: 205878 - DNA, 25 bp, Homo sapien
ttaccataaatcatcttgatgctgg

SEQ ID NO: 205879 - DNA, 25 bp, Homo sapien
ccataaatcatcttgatgctggtac

SEQ ID NO: 205880 - DNA, 25 bp, Homo sapien
accataaatcatcttgatgctggta

SEQ ID NO: 205881 - DNA, 25 bp, Homo sapien
agttttgctttagagattccaaaga

SEQ ID NO: 205882 - DNA, 25 bp, Homo sapien
gattccaaagaatatatttagactt

SEQ ID NO: 205883 - DNA, 25 bp, Homo sapien
taaaagttttgctttagagattcca

SEQ ID NO: 205884 - DNA, 25 bp, Homo sapien
tatatttagacttataaaagcactt

SEQ ID NO: 205885 - DNA, 25 bp, Homo sapien
ctatttgcttttctttattcataga

SEQ ID NO: 205886 - DNA, 25 bp, Homo sapien
ttctatttgcttttctttattcata

SEQ ID NO: 205887 - DNA, 25 bp, Homo sapien
atttgcttttctttattcatagaga

SEQ ID NO: 205888 - DNA, 25 bp, Homo sapien
ctgataagattctatttgcttttct

SEQ ID NO: 205889 - DNA, 25 bp, Homo sapien
cttagtcaaattcccaagtggcttt

SEQ ID NO: 205890 - DNA, 25 bp, Homo sapien
gacatgtgtgactggtttaagaaag

SEQ ID NO: 205891 - DNA, 25 bp, Homo sapien
cactattaagggactgacaagacag

SEQ ID NO: 205892 - DNA, 25 bp, Homo sapien
ctagtactgtagctcaaaacaggac

SEQ ID NO: 205893 - DNA, 25 bp, Homo sapien
gcatgtgtgccacctgggatccttt

SEQ ID NO: 205894 - DNA, 25 bp, Homo sapien
aaacgcatgttatccttcacttcag

SEQ ID NO: 205895 - DNA, 25 bp, Homo sapien
gaaaacttcagctacatgattcatg

SEQ ID NO: 205896 - DNA, 25 bp, Homo sapien
tacactgcaataatcacactggcta

SEQ ID NO: 205897 - DNA, 25 bp, Homo sapien
ttgaccactcaaccccttcaagagg

SEQ ID NO: 205898 - DNA, 25 bp, Homo sapien
tcaagaggtactctattataaagtg

SEQ ID NO: 205899 - DNA, 25 bp, Homo sapien
cacgctgtatctatattgtccaggc

SEQ ID NO: 205900 - DNA, 25 bp, Homo sapien
caatcttccgtgcttaaactatcct

SEQ ID NO: 205901 - DNA, 25 bp, Homo sapien
gttgaactattaagatccatgtgga

SEQ ID NO: 205902 - DNA, 25 bp, Homo sapien
cagtagcaaccaagtgatagcagta

SEQ ID NO: 205903 - DNA, 25 bp, Homo sapien
catttggatgcctacgatgtatcac

SEQ ID NO: 205904 - DNA, 25 bp, Homo sapien
taagatagcaccgaagaaaattctg

SEQ ID NO: 205905 - DNA, 25 bp, Homo sapien
gtggaagacccctccaatgagtgaa

SEQ ID NO: 205906 - DNA, 25 bp, Homo sapien
ggaacatttcctggacacctagtgg

SEQ ID NO: 205907 - DNA, 25 bp, Homo sapien
caaagtgtggttcgaagatcaccta

SEQ ID NO: 205908 - DNA, 25 bp, Homo sapien
aacatgtgagtgaacgaagagccag

SEQ ID NO: 205909 - DNA, 25 bp, Homo sapien
ccctaagatccctaagtgggctatt

SEQ ID NO: 205910 - DNA, 25 bp, Homo sapien
tgcatatatagactaagaaactaag

SEQ ID NO: 205911 - DNA, 25 bp, Homo sapien
ttgaactggcagactcagtaacata

SEQ ID NO: 205912 - DNA, 25 bp, Homo sapien
tgtcccatctgaccaagatctaggc

SEQ ID NO: 205913 - DNA, 25 bp, Homo sapien
aagtggctgggactacacatgcgcg

SEQ ID NO: 205914 - DNA, 25 bp, Homo sapien
gtggctgggactacacatgcgcgcc

SEQ ID NO: 205915 - DNA, 25 bp, Homo sapien
cccaagtggctgggactacacatgc

SEQ ID NO: 205916 - DNA, 25 bp, Homo sapien
ccaagtggctgggactacacatgcg

SEQ ID NO: 205917 - DNA, 25 bp, Homo sapien
taaaaatacggtgctagactgcaac

SEQ ID NO: 205918 - DNA, 25 bp, Homo sapien
agttaaccttgcaaagaacaggtgg

SEQ ID NO: 205919 - DNA, 25 bp, Homo sapien
ggaacatcagccaattcctcaaatg

SEQ ID NO: 205920 - DNA, 25 bp, Homo sapien
tgtaaatacctagcccaatgaccct

SEQ ID NO: 205921 - DNA, 25 bp, Homo sapien
acctatattcctcctaaacaggaga

SEQ ID NO: 205922 - DNA, 25 bp, Homo sapien
tattcctcctaaacaggagacaaaa

SEQ ID NO: 205923 - DNA, 25 bp, Homo sapien
accaccactcagatgcttcagtaaa

SEQ ID NO: 205924 - DNA, 25 bp, Homo sapien
caccaccactcagatgcttcagtaa

SEQ ID NO: 205925 - DNA, 25 bp, Homo sapien
cagtcgtctctgatgtggcttatac

SEQ ID NO: 205926 - DNA, 25 bp, Homo sapien
tcgtctctgatgtggcttatacgaa

SEQ ID NO: 205927 - DNA, 25 bp, Homo sapien
ttcagtcgtctctgatgtggcttat

SEQ ID NO: 205928 - DNA, 25 bp, Homo sapien
agtcgtctctgatgtggcttatacg

SEQ ID NO: 205929 - DNA, 25 bp, Homo sapien
gattggtatgtaattgataatgtaa

SEQ ID NO: 205930 - DNA, 25 bp, Homo sapien
tatatttaatattgtgattggtatg

SEQ ID NO: 205931 - DNA, 25 bp, Homo sapien
tattgtgattggtatgtaattgata

SEQ ID NO: 205932 - DNA, 25 bp, Homo sapien
taattgataatgtaaaagactggct

SEQ ID NO: 205933 - DNA, 25 bp, Homo sapien
caaaaattagtacactctggaagag

SEQ ID NO: 205934 - DNA, 25 bp, Homo sapien
ttctccagggttagctcaaaagtcc

SEQ ID NO: 205935 - DNA, 25 bp, Homo sapien
cataggaggctaactggtgaaatcc

SEQ ID NO: 205936 - DNA, 25 bp, Homo sapien
ccacctactgcatgttttgacgtaa

SEQ ID NO: 205937 - DNA, 25 bp, Homo sapien
agtacgttttggtgaagctctctca

SEQ ID NO: 205938 - DNA, 25 bp, Homo sapien
gcaataataccagtcattcagtcca

SEQ ID NO: 205939 - DNA, 25 bp, Homo sapien
tcaacgtaagttccaccaaatcaag

SEQ ID NO: 205940 - DNA, 25 bp, Homo sapien
ctgcaaggtagatgcctcatatttt

SEQ ID NO: 205941 - DNA, 25 bp, Homo sapien
cccttgcaaatcgatgtgactggtc

SEQ ID NO: 205942 - DNA, 25 bp, Homo sapien
caatgtagggtttgggacaatgcct

SEQ ID NO: 205943 - DNA, 25 bp, Homo sapien
tctgggtgtacagttgtggcatcca

SEQ ID NO: 205944 - DNA, 25 bp, Homo sapien
gccttgatagggactctttgcaaac

SEQ ID NO: 205945 - DNA, 25 bp, Homo sapien
aaacagatcgcagatccaggtttct

SEQ ID NO: 205946 - DNA, 25 bp, Homo sapien
caaacagatcgcagatccaggtttc

SEQ ID NO: 205947 - DNA, 25 bp, Homo sapien
cacaaacagatcgcagatccaggtt

SEQ ID NO: 205948 - DNA, 25 bp, Homo sapien
acaaacagatcgcagatccaggttt

SEQ ID NO: 205949 - DNA, 25 bp, Homo sapien
tgaagaaactaacactccgatacat

SEQ ID NO: 205950 - DNA, 25 bp, Homo sapien
tctatagttaccattaagatattat

SEQ ID NO: 205951 - DNA, 25 bp, Homo sapien
taacactccgatacattctttactt

SEQ ID NO: 205952 - DNA, 25 bp, Homo sapien
ttcatctatagttaccattaagata

SEQ ID NO: 205953 - DNA, 25 bp, Homo sapien
aatggaatgcttcttatgtcatcct

SEQ ID NO: 205954 - DNA, 25 bp, Homo sapien
tccaattttagtaggtgagctgcca

SEQ ID NO: 205955 - DNA, 25 bp, Homo sapien
taaatggaatgcttcttatgtcatc

SEQ ID NO: 205956 - DNA, 25 bp, Homo sapien
ttagtaggtgagctgccaaagcgag

SEQ ID NO: 205957 - DNA, 25 bp, Homo sapien
gcaattacaaatcaatttggtatta

SEQ ID NO: 205958 - DNA, 25 bp, Homo sapien
tggtattaagctaagtatctggaat

SEQ ID NO: 205959 - DNA, 25 bp, Homo sapien
tgacacattcttaatggtcctctaa

SEQ ID NO: 205960 - DNA, 25 bp, Homo sapien
gacacattcttaatggtcctctaaa

SEQ ID NO: 205961 - DNA, 25 bp, Homo sapien
tgttagtattcctaaacatcacttt

SEQ ID NO: 205962 - DNA, 25 bp, Homo sapien
tttgttagtattcctaaacatcact

SEQ ID NO: 205963 - DNA, 25 bp, Homo sapien
tttgtgtagcaaaatgtttcactgt

SEQ ID NO: 205964 - DNA, 25 bp, Homo sapien
cttttgtgtagcaaaatgtttcact

SEQ ID NO: 205965 - DNA, 25 bp, Homo sapien
aaaaagctttctaatggactataca

SEQ ID NO: 205966 - DNA, 25 bp, Homo sapien
tgcctagggtgaagtgcaattccac

SEQ ID NO: 205967 - DNA, 25 bp, Homo sapien
gagaggtccaggataaaatgttcag

SEQ ID NO: 205968 - DNA, 25 bp, Homo sapien
gactatacaagcatccctagcctta

SEQ ID NO: 205969 - DNA, 25 bp, Homo sapien
cctcttgattagcggggaacacagg

SEQ ID NO: 205970 - DNA, 25 bp, Homo sapien
ttagcggggaacacaggtgcacgcc

SEQ ID NO: 205971 - DNA, 25 bp, Homo sapien
tgattagcggggaacacaggtgcac

SEQ ID NO: 205972 - DNA, 25 bp, Homo sapien
tcttgattagcggggaacacaggtg

SEQ ID NO: 205973 - DNA, 25 bp, Homo sapien
cggatgaggcaaaatgtcacagccc

SEQ ID NO: 205974 - DNA, 25 bp, Homo sapien
tagttatcaacttctggcgaccagc

SEQ ID NO: 205975 - DNA, 25 bp, Homo sapien
tccctgcaaaaaggtgtcgcaatgc

SEQ ID NO: 205976 - DNA, 25 bp, Homo sapien
tttttcggtcagttcatgaggcacc

SEQ ID NO: 205977 - DNA, 25 bp, Homo sapien
gcaacgaccttcttagacacaatat

SEQ ID NO: 205978 - DNA, 25 bp, Homo sapien
tagacggtaatgaacaacactagaa

SEQ ID NO: 205979 - DNA, 25 bp, Homo sapien
accacgattacttttgcaacgacct

SEQ ID NO: 205980 - DNA, 25 bp, Homo sapien
caacgtagtccaacatcaaatggca

SEQ ID NO: 205981 - DNA, 25 bp, Homo sapien
gccacgactaggtgctgtcctggag

SEQ ID NO: 205982 - DNA, 25 bp, Homo sapien
caatctacctgatgaaaactccgtt

SEQ ID NO: 205983 - DNA, 25 bp, Homo sapien
taaaatgcgatggagctacggccac

SEQ ID NO: 205984 - DNA, 25 bp, Homo sapien
ggacggccgcacaaaaaccaatcta

SEQ ID NO: 205985 - DNA, 25 bp, Homo sapien
gctaagtttgcttccgcgcggtgaa

SEQ ID NO: 205986 - DNA, 25 bp, Homo sapien
ctgaatggacgaagtggcagtagca

SEQ ID NO: 205987 - DNA, 25 bp, Homo sapien
agccattgaccagcggcagcaactg

SEQ ID NO: 205988 - DNA, 25 bp, Homo sapien
tcccggtgcagttggaagctttgga

SEQ ID NO: 205989 - DNA, 25 bp, Homo sapien
ggtcgctccccgcagttgactgatt

SEQ ID NO: 205990 - DNA, 25 bp, Homo sapien
tggagctccgagttgagcattccgg

SEQ ID NO: 205991 - DNA, 25 bp, Homo sapien
gattatgtctgtgcctgtctttccc

SEQ ID NO: 205992 - DNA, 25 bp, Homo sapien
agcattccgggtcaaagtggccagc

SEQ ID NO: 205993 - DNA, 25 bp, Homo sapien
gatatccccttaactaaattgtagc

SEQ ID NO: 205994 - DNA, 25 bp, Homo sapien
cctactttgtagaggctgttgtgag

SEQ ID NO: 205995 - DNA, 25 bp, Homo sapien
cctagggcatccgtatgttttaaat

SEQ ID NO: 205996 - DNA, 25 bp, Homo sapien
cataactgctgtacatggatataac

SEQ ID NO: 205997 - DNA, 25 bp, Homo sapien
tataaggtgcagagtcccatagcca

SEQ ID NO: 205998 - DNA, 25 bp, Homo sapien
gaagatctgagggactgctggtata

SEQ ID NO: 205999 - DNA, 25 bp, Homo sapien
ccacagtgagagtgaatcttcccca

SEQ ID NO: 206000 - DNA, 25 bp, Homo sapien
gccaattggatggtacttgcccaca

SEQ ID NO: 206001 - DNA, 25 bp, Homo sapien
tatctagatttaccagttcttaaca

SEQ ID NO: 206002 - DNA, 25 bp, Homo sapien
atactctttatctagatttaccagt

SEQ ID NO: 206003 - DNA, 25 bp, Homo sapien
cacacatttgctttacgattccctc

SEQ ID NO: 206004 - DNA, 25 bp, Homo sapien
tgctttacgattccctctctatata

SEQ ID NO: 206005 - DNA, 25 bp, Homo sapien
tacaggctgcctacagagttgccat

SEQ ID NO: 206006 - DNA, 25 bp, Homo sapien
gcagtttgccaatggaggtttgcca

SEQ ID NO: 206007 - DNA, 25 bp, Homo sapien
taagtagtgctgtataaccctgcgg

SEQ ID NO: 206008 - DNA, 25 bp, Homo sapien
tgagcatgctcggaaagacaggaag

SEQ ID NO: 206009 - DNA, 25 bp, Homo sapien
atatgataactttctggacagttct

SEQ ID NO: 206010 - DNA, 25 bp, Homo sapien
tctaaaagcagtataatgtacatta

SEQ ID NO: 206011 - DNA, 25 bp, Homo sapien
tctaaagcatatcgcgtaatactac

SEQ ID NO: 206012 - DNA, 25 bp, Homo sapien
tgtcttggctcttagtccttacact

SEQ ID NO: 206013 - DNA, 25 bp, Homo sapien
tgtctgtaggaacaaagagggctct

SEQ ID NO: 206014 - DNA, 25 bp, Homo sapien
gctgtgtactctgtaggcaatctca

SEQ ID NO: 206015 - DNA, 25 bp, Homo sapien
tccttccatgatagggatctgccca

SEQ ID NO: 206016 - DNA, 25 bp, Homo sapien
cgtgagtcctccagtccagacatgt

SEQ ID NO: 206017 - DNA, 25 bp, Homo sapien
ggaggattatataccaatttccgtg

SEQ ID NO: 206018 - DNA, 25 bp, Homo sapien
gattatataccaatttccgtgacac

SEQ ID NO: 206019 - DNA, 25 bp, Homo sapien
aagttctgataacctctcagaccag

SEQ ID NO: 206020 - DNA, 25 bp, Homo sapien
agtggaggattatataccaatttcc

SEQ ID NO: 206021 - DNA, 25 bp, Homo sapien
agtgacgtgtcatgtgtggccttga

SEQ ID NO: 206022 - DNA, 25 bp, Homo sapien
ccttgaccattgtgctccaagtcca

SEQ ID NO: 206023 - DNA, 25 bp, Homo sapien
cgtgtcatgtgtggccttgaccatt

SEQ ID NO: 206024 - DNA, 25 bp, Homo sapien
tgtgtggccttgaccattgtgctcc

SEQ ID NO: 206025 - DNA, 25 bp, Homo sapien
agaatgcaggtgataaacattttct

SEQ ID NO: 206026 - DNA, 25 bp, Homo sapien
ctgtagaatgcaggtgataaacatt

SEQ ID NO: 206027 - DNA, 25 bp, Homo sapien
tgtagaatgcaggtgataaacattt

SEQ ID NO: 206028 - DNA, 25 bp, Homo sapien
tagaatgcaggtgataaacattttc

SEQ ID NO: 206029 - DNA, 25 bp, Homo sapien
aagtatatgttcagcagtgtgccca

SEQ ID NO: 206030 - DNA, 25 bp, Homo sapien
ccaggattgaaggtgtaaatgggac

SEQ ID NO: 206031 - DNA, 25 bp, Homo sapien
aactacagttgtaataagtcttcca

SEQ ID NO: 206032 - DNA, 25 bp, Homo sapien
cagtggactatcttatcccttgaca

SEQ ID NO: 206033 - DNA, 25 bp, Homo sapien
gagtctgtctcagtccatcaaacag

SEQ ID NO: 206034 - DNA, 25 bp, Homo sapien
tagaactataaatgggcatctggat

SEQ ID NO: 206035 - DNA, 25 bp, Homo sapien
gcatctggatcattaaagtatgtcc

SEQ ID NO: 206036 - DNA, 25 bp, Homo sapien
tttacaggaggttgcatcctgcagc

SEQ ID NO: 206037 - DNA, 25 bp, Homo sapien
tgtttgtgggatacttgtatatctt

SEQ ID NO: 206038 - DNA, 25 bp, Homo sapien
ttctagctgattttgtctgacttcc

SEQ ID NO: 206039 - DNA, 25 bp, Homo sapien
ttgttgaatgcatagattgagaagg

SEQ ID NO: 206040 - DNA, 25 bp, Homo sapien
tttcatgtttgtgggatacttgtat

SEQ ID NO: 206041 - DNA, 25 bp, Homo sapien
aaagaagttacccagctattccact

SEQ ID NO: 206042 - DNA, 25 bp, Homo sapien
ctctttgcccataccaagggttgag

SEQ ID NO: 206043 - DNA, 25 bp, Homo sapien
gacaaaagtatacactctggttcca

SEQ ID NO: 206044 - DNA, 25 bp, Homo sapien
catagcctgctggtgagagtgcaaa

SEQ ID NO: 206045 - DNA, 25 bp, Homo sapien
gctgtgtccgctgagtaaggcaaat

SEQ ID NO: 206046 - DNA, 25 bp, Homo sapien
gaacagagacctaaacgaccactgg

SEQ ID NO: 206047 - DNA, 25 bp, Homo sapien
caatgtgaactaggaggtgaccaaa

SEQ ID NO: 206048 - DNA, 25 bp, Homo sapien
gcagctaggccagtatcatgggact

SEQ ID NO: 206049 - DNA, 25 bp, Homo sapien
gacaagaaaatcagtcaatggcagt

SEQ ID NO: 206050 - DNA, 25 bp, Homo sapien
caaatgtcctttcatataattgtca

SEQ ID NO: 206051 - DNA, 25 bp, Homo sapien
caatggcagttcatatgggaaataa

SEQ ID NO: 206052 - DNA, 25 bp, Homo sapien
gccataactaagtcacactatcatt

SEQ ID NO: 206053 - DNA, 25 bp, Homo sapien
ggatgtgttagccaactcccctcat

SEQ ID NO: 206054 - DNA, 25 bp, Homo sapien
tatgtcaaataactagctggatgtg

SEQ ID NO: 206055 - DNA, 25 bp, Homo sapien
caagtcgtagacttggaagtgggca

SEQ ID NO: 206056 - DNA, 25 bp, Homo sapien
tgggcaaacggagtagcaaagccaa

SEQ ID NO: 206057 - DNA, 25 bp, Homo sapien
tgtcggggctaccttacacttaatg

SEQ ID NO: 206058 - DNA, 25 bp, Homo sapien
tgtgtttagtggagtgatgcctgtc

SEQ ID NO: 206059 - DNA, 25 bp, Homo sapien
aatttattcctaccggcagggcacg

SEQ ID NO: 206060 - DNA, 25 bp, Homo sapien
taaattaattccctatgaatgtcca

SEQ ID NO: 206061 - DNA, 25 bp, Homo sapien
gttacaaactcccttgcatatcaca

SEQ ID NO: 206062 - DNA, 25 bp, Homo sapien
tttaagtgttacaaactcccttgca

SEQ ID NO: 206063 - DNA, 25 bp, Homo sapien
taagtgttacaaactcccttgcata

SEQ ID NO: 206064 - DNA, 25 bp, Homo sapien
agtgttacaaactcccttgcatatc

SEQ ID NO: 206065 - DNA, 25 bp, Homo sapien
ttggctgctttaacacgaagcaagc

SEQ ID NO: 206066 - DNA, 25 bp, Homo sapien
tatgtgtgtgaattgcccaaaatct

SEQ ID NO: 206067 - DNA, 25 bp, Homo sapien
tggcaagccttggaatctatcatat

SEQ ID NO: 206068 - DNA, 25 bp, Homo sapien
tgtatgcatcaactagaatttcctg

SEQ ID NO: 206069 - DNA, 25 bp, Homo sapien
cagtgagaatactatggtaccatac

SEQ ID NO: 206070 - DNA, 25 bp, Homo sapien
gcttggaggatgatcctgattgaaa

SEQ ID NO: 206071 - DNA, 25 bp, Homo sapien
tcaacgtatccacagtccagtgaga

SEQ ID NO: 206072 - DNA, 25 bp, Homo sapien
ggtaccatacagtataaacaactgc

SEQ ID NO: 206073 - DNA, 25 bp, Homo sapien
tctatctcatacatgatcgaacaca

SEQ ID NO: 206074 - DNA, 25 bp, Homo sapien
gatcgaacacataagttgctttaaa

SEQ ID NO: 206075 - DNA, 25 bp, Homo sapien
tacatgatcgaacacataagttgct

SEQ ID NO: 206076 - DNA, 25 bp, Homo sapien
aatttttctatctcatacatgatcg

SEQ ID NO: 206077 - DNA, 25 bp, Homo sapien
gctgaatcataaggcctcaacaaat

SEQ ID NO: 206078 - DNA, 25 bp, Homo sapien
tctaatcaagtgaccaagctgctga

SEQ ID NO: 206079 - DNA, 25 bp, Homo sapien
gatggttgaacatggtggctactgc

SEQ ID NO: 206080 - DNA, 25 bp, Homo sapien
tccatttgccaaacagtcatgacag

SEQ ID NO: 206081 - DNA, 25 bp, Homo sapien
cgtggttggccaaggagtcctgctt

SEQ ID NO: 206082 - DNA, 25 bp, Homo sapien
tggttggccaaggagtcctgctttg

SEQ ID NO: 206083 - DNA, 25 bp, Homo sapien
ctttggctgccagggcttcattctg

SEQ ID NO: 206084 - DNA, 25 bp, Homo sapien
ctatcgtggttggccaaggagtcct

SEQ ID NO: 206085 - DNA, 25 bp, Homo sapien
aatctcatggatattctttgtgtca

SEQ ID NO: 206086 - DNA, 25 bp, Homo sapien
tttctgtaagcaatgttctgaacag

SEQ ID NO: 206087 - DNA, 25 bp, Homo sapien
tgtaagcaatgttctgaacaggtgg

SEQ ID NO: 206088 - DNA, 25 bp, Homo sapien
tctgtaagcaatgttctgaacaggt

SEQ ID NO: 206089 - DNA, 25 bp, Homo sapien
aatagttaagacttctaataggatg

SEQ ID NO: 206090 - DNA, 25 bp, Homo sapien
aatatgagccaccaaagtcaagctt

SEQ ID NO: 206091 - DNA, 25 bp, Homo sapien
gaaaggctgtgccaagtttctctag

SEQ ID NO: 206092 - DNA, 25 bp, Homo sapien
agacttctaataggatgaggttttc

SEQ ID NO: 206093 - DNA, 25 bp, Homo sapien
gaaacagtaactcagcagctgcagg

SEQ ID NO: 206094 - DNA, 25 bp, Homo sapien
aaactcaatgccgtggttcagtggc

SEQ ID NO: 206095 - DNA, 25 bp, Homo sapien
taaatttggcactgttaaactcaat

SEQ ID NO: 206096 - DNA, 25 bp, Homo sapien
tctgacttggtacaatgtaactgtc

SEQ ID NO: 206097 - DNA, 25 bp, Homo sapien
gaattttagtgagtaacacttttca

SEQ ID NO: 206098 - DNA, 25 bp, Homo sapien
gaaggcttgtagaattttagtgagt

SEQ ID NO: 206099 - DNA, 25 bp, Homo sapien
gcttaaggggatcctacttagagtg

SEQ ID NO: 206100 - DNA, 25 bp, Homo sapien
taataagtaggaacaagtgaaatgc

SEQ ID NO: 206101 - DNA, 25 bp, Homo sapien
tgaagtctttaacacagtccaaaaa

SEQ ID NO: 206102 - DNA, 25 bp, Homo sapien
tgtaagtttattgtaggtccccaga

SEQ ID NO: 206103 - DNA, 25 bp, Homo sapien
aaagcaggtctctgtaagtttattg

SEQ ID NO: 206104 - DNA, 25 bp, Homo sapien
gttttacttctcttgttgtgaagtc

SEQ ID NO: 206105 - DNA, 25 bp, Homo sapien
ggtacagtatgatctacagaatagt

SEQ ID NO: 206106 - DNA, 25 bp, Homo sapien
aatgggtacagtatgatctacagaa

SEQ ID NO: 206107 - DNA, 25 bp, Homo sapien
tgaaatcatagttattatgctaact

SEQ ID NO: 206108 - DNA, 25 bp, Homo sapien
ttaaatgggtacagtatgatctaca

SEQ ID NO: 206109 - DNA, 25 bp, Homo sapien
ctgttttatctgatcagattctggt

SEQ ID NO: 206110 - DNA, 25 bp, Homo sapien
tctgatcagattctggtatttgtgc

SEQ ID NO: 206111 - DNA, 25 bp, Homo sapien
ttatctgatcagattctggtatttg

SEQ ID NO: 206112 - DNA, 25 bp, Homo sapien
tgttttatctgatcagattctggta

SEQ ID NO: 206113 - DNA, 25 bp, Homo sapien
ttcttctggtacctttattagtcac

SEQ ID NO: 206114 - DNA, 25 bp, Homo sapien
attcttctggtacctttattagtca

SEQ ID NO: 206115 - DNA, 25 bp, Homo sapien
cttttctgatgcatgagtttccttt

SEQ ID NO: 206116 - DNA, 25 bp, Homo sapien
cctttctgttctggaaaagtagttg

SEQ ID NO: 206117 - DNA, 25 bp, Homo sapien
tctgttctggaaaagtagttgtcca

SEQ ID NO: 206118 - DNA, 25 bp, Homo sapien
tgttctggaaaagtagttgtccaac

SEQ ID NO: 206119 - DNA, 25 bp, Homo sapien
cttgaatgtctccaataaggcctga

SEQ ID NO: 206120 - DNA, 25 bp, Homo sapien
gcttgaatgtctccaataaggcctg

SEQ ID NO: 206121 - DNA, 25 bp, Homo sapien
tgcttgaatgtctccaataaggcct

SEQ ID NO: 206122 - DNA, 25 bp, Homo sapien
caagtgacacttaaacccttagacg

SEQ ID NO: 206123 - DNA, 25 bp, Homo sapien
tctcgcatccgacatcagtacaagg

SEQ ID NO: 206124 - DNA, 25 bp, Homo sapien
ccttagacgccgattcgttataacg

SEQ ID NO: 206125 - DNA, 25 bp, Homo sapien
gccgattcgttataacgcgaggaaa

SEQ ID NO: 206126 - DNA, 25 bp, Homo sapien
agtcgggagctcttcaagtcttgga

SEQ ID NO: 206127 - DNA, 25 bp, Homo sapien
tcttggatgagactgtagagcggtc

SEQ ID NO: 206128 - DNA, 25 bp, Homo sapien
aacacaagtagtattacaagtcggg

SEQ ID NO: 206129 - DNA, 25 bp, Homo sapien
tgtgcggcaatgtgctaccttaaaa

SEQ ID NO: 206130 - DNA, 25 bp, Homo sapien
ggagtgcactgttatggttattgtt

SEQ ID NO: 206131 - DNA, 25 bp, Homo sapien
tgcactgttatggttattgttgctc

SEQ ID NO: 206132 - DNA, 25 bp, Homo sapien
gagtgcactgttatggttattgttg

SEQ ID NO: 206133 - DNA, 25 bp, Homo sapien
actgttatggttattgttgctcctg

SEQ ID NO: 206134 - DNA, 25 bp, Homo sapien
gttgcttagtgctgcttcattttaa

SEQ ID NO: 206135 - DNA, 25 bp, Homo sapien
gcaaaatcttgttttagttaaagca

SEQ ID NO: 206136 - DNA, 25 bp, Homo sapien
ggcaaggtgaaagctggagaaatgt

SEQ ID NO: 206137 - DNA, 25 bp, Homo sapien
tcattttaaacatgacaccccaccc

SEQ ID NO: 206138 - DNA, 25 bp, Homo sapien
gatctcaggtaagctgtttgtgcct

SEQ ID NO: 206139 - DNA, 25 bp, Homo sapien
ggttagcctcaacttgcggtcactc

SEQ ID NO: 206140 - DNA, 25 bp, Homo sapien
ttagcctcaacttgcggtcactcat

SEQ ID NO: 206141 - DNA, 25 bp, Homo sapien
aaagctgtctgcttgacctgaagat

SEQ ID NO: 206142 - DNA, 25 bp, Homo sapien
catgctcttaacacgatctctatgg

SEQ ID NO: 206143 - DNA, 25 bp, Homo sapien
agtataagtccttcaataagactag

SEQ ID NO: 206144 - DNA, 25 bp, Homo sapien
aacacgatctctatggtgagtataa

SEQ ID NO: 206145 - DNA, 25 bp, Homo sapien
ggagccattgccttcaagtatcttt

SEQ ID NO: 206146 - DNA, 25 bp, Homo sapien
gatagcacacgaaaggggcacacca

SEQ ID NO: 206147 - DNA, 25 bp, Homo sapien
gacagcctctgttggtagaagtcca

SEQ ID NO: 206148 - DNA, 25 bp, Homo sapien
cagatagcacacgaaaggggcacac

SEQ ID NO: 206149 - DNA, 25 bp, Homo sapien
ggcacaccaggagacagcctctgtt

SEQ ID NO: 206150 - DNA, 25 bp, Homo sapien
ccagagccctgggttgttgcctttt

SEQ ID NO: 206151 - DNA, 25 bp, Homo sapien
agagccctgggttgttgccttttgc

SEQ ID NO: 206152 - DNA, 25 bp, Homo sapien
gcccagagccctgggttgttgcctt

SEQ ID NO: 206153 - DNA, 25 bp, Homo sapien
agccctgggttgttgccttttgcat

SEQ ID NO: 206154 - DNA, 25 bp, Homo sapien
ggcagaagaacgagaattcagactg

SEQ ID NO: 206155 - DNA, 25 bp, Homo sapien
tgcattgtgccttgcaatctgtgca

SEQ ID NO: 206156 - DNA, 25 bp, Homo sapien
gagtatgggtacagggcagaagaac

SEQ ID NO: 206157 - DNA, 25 bp, Homo sapien
gcaatctgtgcaaaggctctagaaa

SEQ ID NO: 206158 - DNA, 25 bp, Homo sapien
gtggtccagttcttcaagagcaaca

SEQ ID NO: 206159 - DNA, 25 bp, Homo sapien
tgtggtccagttcttcaagagcaac

SEQ ID NO: 206160 - DNA, 25 bp, Homo sapien
tggtccagttcttcaagagcaacat

SEQ ID NO: 206161 - DNA, 25 bp, Homo sapien
ctgtggtccagttcttcaagagcaa

SEQ ID NO: 206162 - DNA, 25 bp, Homo sapien
tccagtctgaatgcagagtacaagg

SEQ ID NO: 206163 - DNA, 25 bp, Homo sapien
cagtctgaatgcagagtacaaggga

SEQ ID NO: 206164 - DNA, 25 bp, Homo sapien
gattccagtctgaatgcagagtaca

SEQ ID NO: 206165 - DNA, 25 bp, Homo sapien
aatgcagagtacaagggatacataa

SEQ ID NO: 206166 - DNA, 25 bp, Homo sapien
tggagagtaaagctgcattagcagt

SEQ ID NO: 206167 - DNA, 25 bp, Homo sapien
gagagtaaagctgcattagcagtgg

SEQ ID NO: 206168 - DNA, 25 bp, Homo sapien
gtaaagctgcattagcagtggatcc

SEQ ID NO: 206169 - DNA, 25 bp, Homo sapien
cttggagagtaaagctgcattagca

SEQ ID NO: 206170 - DNA, 25 bp, Homo sapien
gtgccacgggattagaggaggcggc

SEQ ID NO: 206171 - DNA, 25 bp, Homo sapien
ccacgggattagaggaggcggcgcc

SEQ ID NO: 206172 - DNA, 25 bp, Homo sapien
gaggtgccacgggattagaggaggc

SEQ ID NO: 206173 - DNA, 25 bp, Homo sapien
tggggcaaggcgacccgagccgggc

SEQ ID NO: 206174 - DNA, 25 bp, Homo sapien
aactgatgccccttactttgcttgg

SEQ ID NO: 206175 - DNA, 25 bp, Homo sapien
gaatgttcaccgctggacaaggcat

SEQ ID NO: 206176 - DNA, 25 bp, Homo sapien
tgatcccagaccctcgaatggtggt

SEQ ID NO: 206177 - DNA, 25 bp, Homo sapien
tgtgctcactgaagcctgattgtgg

SEQ ID NO: 206178 - DNA, 25 bp, Homo sapien
aggcagacaccgagcggcagcgcac

SEQ ID NO: 206179 - DNA, 25 bp, Homo sapien
tgacggctctcgctgcccgactggg

SEQ ID NO: 206180 - DNA, 25 bp, Homo sapien
agctggagtacctgcgccagcgcca

SEQ ID NO: 206181 - DNA, 25 bp, Homo sapien
ccagcgccaagagctgctggtcagg

SEQ ID NO: 206182 - DNA, 25 bp, Homo sapien
gaattcgaaacaggcgtgtctgccc

SEQ ID NO: 206183 - DNA, 25 bp, Homo sapien
aacaagccgaaagcaagagggtgcc

SEQ ID NO: 206184 - DNA, 25 bp, Homo sapien
cagtggtcgaaagaatcaaaggccg

SEQ ID NO: 206185 - DNA, 25 bp, Homo sapien
cccgccgcaggagaacaaagttgta

SEQ ID NO: 206186 - DNA, 25 bp, Homo sapien
ggcctgccttggatttcaagagcga

SEQ ID NO: 206187 - DNA, 25 bp, Homo sapien
gccttggatttcaagagcgagggct

SEQ ID NO: 206188 - DNA, 25 bp, Homo sapien
ccttggatttcaagagcgagggctc

SEQ ID NO: 206189 - DNA, 25 bp, Homo sapien
ctgccttggatttcaagagcgaggg

SEQ ID NO: 206190 - DNA, 25 bp, Homo sapien
gagcatccggcaaggtacaggtttt

SEQ ID NO: 206191 - DNA, 25 bp, Homo sapien
tcttttgatcccaaggtcaggtgga

SEQ ID NO: 206192 - DNA, 25 bp, Homo sapien
tatgccaccgaagcgttgacctgaa

SEQ ID NO: 206193 - DNA, 25 bp, Homo sapien
gatagcagcctcgatagggacctta

SEQ ID NO: 206194 - DNA, 25 bp, Homo sapien
actcaagggactcttgtggccaatg

SEQ ID NO: 206195 - DNA, 25 bp, Homo sapien
gctgtgtttaatcggtggttcacca

SEQ ID NO: 206196 - DNA, 25 bp, Homo sapien
actcttgtggccaatggaggtttcc

SEQ ID NO: 206197 - DNA, 25 bp, Homo sapien
tctctataaggctcttctattctct

SEQ ID NO: 206198 - DNA, 25 bp, Homo sapien
gaaccatgtctgcaatggtcatgtt

SEQ ID NO: 206199 - DNA, 25 bp, Homo sapien
ccatgtctgcaatggtcatgttcct

SEQ ID NO: 206200 - DNA, 25 bp, Homo sapien
accatgtctgcaatggtcatgttcc

SEQ ID NO: 206201 - DNA, 25 bp, Homo sapien
atgtctgcaatggtcatgttccttg

SEQ ID NO: 206202 - DNA, 25 bp, Homo sapien
ttgaatttgccaaagatagaggaca

SEQ ID NO: 206203 - DNA, 25 bp, Homo sapien
tcttcctgaggtctgtttttgaatt

SEQ ID NO: 206204 - DNA, 25 bp, Homo sapien
gagcagagtaggaacgggagtgggt

SEQ ID NO: 206205 - DNA, 25 bp, Homo sapien
gctttgagccttgctgatacagagc

SEQ ID NO: 206206 - DNA, 25 bp, Homo sapien
tttattatgcatgctgcaagaatcg

SEQ ID NO: 206207 - DNA, 25 bp, Homo sapien
gcaagaatcgtaatagatgttaagt

SEQ ID NO: 206208 - DNA, 25 bp, Homo sapien
tagagtcaacaaccttctccaaatt

SEQ ID NO: 206209 - DNA, 25 bp, Homo sapien
tgacctgtgggtcatcctattagag

SEQ ID NO: 206210 - DNA, 25 bp, Homo sapien
ccttagttgcatgtgtgaatgagta

SEQ ID NO: 206211 - DNA, 25 bp, Homo sapien
ttccacttcctttagcaagaggaag

SEQ ID NO: 206212 - DNA, 25 bp, Homo sapien
tatttaaaacaatcgctttcatggc

SEQ ID NO: 206213 - DNA, 25 bp, Homo sapien
tagcaagaggaagttgccagctgct

SEQ ID NO: 206214 - DNA, 25 bp, Homo sapien
ggtcttttgaggatggagtccggtg

SEQ ID NO: 206215 - DNA, 25 bp, Homo sapien
tttgaggatggagtccggtgggaga

SEQ ID NO: 206216 - DNA, 25 bp, Homo sapien
tcttttgaggatggagtccggtggg

SEQ ID NO: 206217 - DNA, 25 bp, Homo sapien
tgaggatggagtccggtgggagagg

SEQ ID NO: 206218 - DNA, 25 bp, Homo sapien
gcctcgaagagcaaccataatggag

SEQ ID NO: 206219 - DNA, 25 bp, Homo sapien
tggcattcatggtagcagcttgaac

SEQ ID NO: 206220 - DNA, 25 bp, Homo sapien
tgatacttcctctccctttagccag

SEQ ID NO: 206221 - DNA, 25 bp, Homo sapien
gaactgagatcttagctgaaaaaca

SEQ ID NO: 206222 - DNA, 25 bp, Homo sapien
gaacggtcataggagtcctgcctgt

SEQ ID NO: 206223 - DNA, 25 bp, Homo sapien
gcaacaccttcatgagagtaagtac

SEQ ID NO: 206224 - DNA, 25 bp, Homo sapien
agctgccttggaggcaacaccttca

SEQ ID NO: 206225 - DNA, 25 bp, Homo sapien
atctgcaccagaaggcctagaccct

SEQ ID NO: 206226 - DNA, 25 bp, Homo sapien
gaatctgcaccagaaggcctagacc

SEQ ID NO: 206227 - DNA, 25 bp, Homo sapien
agtgagaaatgaccgccagggctgc

SEQ ID NO: 206228 - DNA, 25 bp, Homo sapien
gctccatagtgagaaatgaccgcca

SEQ ID NO: 206229 - DNA, 25 bp, Homo sapien
catagtgagaaatgaccgccagggc

SEQ ID NO: 206230 - DNA, 25 bp, Homo sapien
aaatgaccgccagggctgcgctcat

SEQ ID NO: 206231 - DNA, 25 bp, Homo sapien
gggagattggcaaaggccattctct

SEQ ID NO: 206232 - DNA, 25 bp, Homo sapien
ttctaggcaaggtgagctaaggctc

SEQ ID NO: 206233 - DNA, 25 bp, Homo sapien
cttttgcaggtagccctttgccaag

SEQ ID NO: 206234 - DNA, 25 bp, Homo sapien
ctaaggctctgtttaggtgggagat

SEQ ID NO: 206235 - DNA, 25 bp, Homo sapien
ggcttacacggcaactgtataggga

SEQ ID NO: 206236 - DNA, 25 bp, Homo sapien
tctctggcaatctgcaaatctgcca

SEQ ID NO: 206237 - DNA, 25 bp, Homo sapien
cggcaactgtatagggaatttttct

SEQ ID NO: 206238 - DNA, 25 bp, Homo sapien
tctgccatggcttacacggcaactg

SEQ ID NO: 206239 - DNA, 25 bp, Homo sapien
gaggaatgagctctctccgttggcc

SEQ ID NO: 206240 - DNA, 25 bp, Homo sapien
tcagagtgatcgaagaggaatgagc

SEQ ID NO: 206241 - DNA, 25 bp, Homo sapien
ctccgctctacatttatcagagtga

SEQ ID NO: 206242 - DNA, 25 bp, Homo sapien
tctccgttggccaaaagctcgtggt

SEQ ID NO: 206243 - DNA, 25 bp, Homo sapien
gcgaacaagtattcctgtgctgctt

SEQ ID NO: 206244 - DNA, 25 bp, Homo sapien
ccaaagcttgtctgactcaaaactc

SEQ ID NO: 206245 - DNA, 25 bp, Homo sapien
tttggtgtcagcgaacaagtattcc

SEQ ID NO: 206246 - DNA, 25 bp, Homo sapien
tgcttttttggtgtcagcgaacaag

SEQ ID NO: 206247 - DNA, 25 bp, Homo sapien
gggattgggagctcaacctttgact

SEQ ID NO: 206248 - DNA, 25 bp, Homo sapien
tatgagtatagcaactcgagacctc

SEQ ID NO: 206249 - DNA, 25 bp, Homo sapien
gactcttgtattgctcaggaagttc

SEQ ID NO: 206250 - DNA, 25 bp, Homo sapien
gattcagatcaatgtccccttggca

SEQ ID NO: 206251 - DNA, 25 bp, Homo sapien
cagggattcatgtagcacactggca

SEQ ID NO: 206252 - DNA, 25 bp, Homo sapien
agtgttagccgagcagcatttcccg

SEQ ID NO: 206253 - DNA, 25 bp, Homo sapien
ttagaactctgggaatgcatgtgcc

SEQ ID NO: 206254 - DNA, 25 bp, Homo sapien
ctcctggtgggaatgacttgaagac

SEQ ID NO: 206255 - DNA, 25 bp, Homo sapien
gcttcaaatcaaggaaaccgtgtgg

SEQ ID NO: 206256 - DNA, 25 bp, Homo sapien
catcctgtttgctattgggctcggt

SEQ ID NO: 206257 - DNA, 25 bp, Homo sapien
gaatccctggactcagatgtgactg

SEQ ID NO: 206258 - DNA, 25 bp, Homo sapien
tggcttgccctatcatgccccagga

SEQ ID NO: 206259 - DNA, 25 bp, Homo sapien
atttccaagaatgctccatatatta

SEQ ID NO: 206260 - DNA, 25 bp, Homo sapien
tatttccaagaatgctccatatatt

SEQ ID NO: 206261 - DNA, 25 bp, Homo sapien
tccaagaatgctccatatattaaga

SEQ ID NO: 206262 - DNA, 25 bp, Homo sapien
atttatttccaagaatgctccatat

SEQ ID NO: 206263 - DNA, 25 bp, Homo sapien
cagttaggctgcttgatgcctttca

SEQ ID NO: 206264 - DNA, 25 bp, Homo sapien
tgggcagttaggctgcttgatgcct

SEQ ID NO: 206265 - DNA, 25 bp, Homo sapien
ggcagttaggctgcttgatgccttt

SEQ ID NO: 206266 - DNA, 25 bp, Homo sapien
ttaggctgcttgatgcctttcagct

SEQ ID NO: 206267 - DNA, 25 bp, Homo sapien
ttttatgatttcctggaccagagtt

SEQ ID NO: 206268 - DNA, 25 bp, Homo sapien
tggttttatgatttcctggaccaga

SEQ ID NO: 206269 - DNA, 25 bp, Homo sapien
ggttttatgatttcctggaccagag

SEQ ID NO: 206270 - DNA, 25 bp, Homo sapien
gctggttttatgatttcctggacca

SEQ ID NO: 206271 - DNA, 25 bp, Homo sapien
gatccattactcaagcaggttgctg

SEQ ID NO: 206272 - DNA, 25 bp, Homo sapien
caggttgctgctagcctggattcat

SEQ ID NO: 206273 - DNA, 25 bp, Homo sapien
agccacattccactgttgcttgctt

SEQ ID NO: 206274 - DNA, 25 bp, Homo sapien
tcaggcgactgtatcgattgtactg

SEQ ID NO: 206275 - DNA, 25 bp, Homo sapien
agcacactcggtgggtggtgaatcc

SEQ ID NO: 206276 - DNA, 25 bp, Homo sapien
gaatcctcaaaactgcaagaagcca

SEQ ID NO: 206277 - DNA, 25 bp, Homo sapien
tgggtggtgaatcctcaaaactgca

SEQ ID NO: 206278 - DNA, 25 bp, Homo sapien
cttttggagagcacactcggtgggt

SEQ ID NO: 206279 - DNA, 25 bp, Homo sapien
tcattcctattacaggcctcctcct

SEQ ID NO: 206280 - DNA, 25 bp, Homo sapien
tcttcattcctattacaggcctcct

SEQ ID NO: 206281 - DNA, 25 bp, Homo sapien
ggctcttcattcctattacaggcct

SEQ ID NO: 206282 - DNA, 25 bp, Homo sapien
attcctattacaggcctcctcctct

SEQ ID NO: 206283 - DNA, 25 bp, Homo sapien
ctttctttgggtatgccaaattgag

SEQ ID NO: 206284 - DNA, 25 bp, Homo sapien
tgagtttgtttaggctctgtgctgt

SEQ ID NO: 206285 - DNA, 25 bp, Homo sapien
aaattgagtttgtttaggctctgtg

SEQ ID NO: 206286 - DNA, 25 bp, Homo sapien
gagatgatgtctgctgtcgtcagga

SEQ ID NO: 206287 - DNA, 25 bp, Homo sapien
gaaatgaaatctttagcctgaaaca

SEQ ID NO: 206288 - DNA, 25 bp, Homo sapien
gactttcagggatgttcaaaacaaa

SEQ ID NO: 206289 - DNA, 25 bp, Homo sapien
ccagtttacaatgattgtcaggtgc

SEQ ID NO: 206290 - DNA, 25 bp, Homo sapien
tgtcaggtgccttctttttagactt

SEQ ID NO: 206291 - DNA, 25 bp, Homo sapien
ccccactttgaaataaaggcaggca

SEQ ID NO: 206292 - DNA, 25 bp, Homo sapien
gtgccgtggtaccagggtagacttc

SEQ ID NO: 206293 - DNA, 25 bp, Homo sapien
tctcccgtgccgtggtaccagggta

SEQ ID NO: 206294 - DNA, 25 bp, Homo sapien
acagccccactttgaaataaaggca

SEQ ID NO: 206295 - DNA, 25 bp, Homo sapien
tgtctgcaaagtgcatgggatttaa

SEQ ID NO: 206296 - DNA, 25 bp, Homo sapien
gatctgttctgaagcgggcagcatg

SEQ ID NO: 206297 - DNA, 25 bp, Homo sapien
gtctgcaaagtgcatgggatttaag

SEQ ID NO: 206298 - DNA, 25 bp, Homo sapien
tgttctgaagcgggcagcatgtctg

SEQ ID NO: 206299 - DNA, 25 bp, Homo sapien
gcaattgcaacaagtcaatacagat

SEQ ID NO: 206300 - DNA, 25 bp, Homo sapien
ggttgaagcaattgcaacaagtcaa

SEQ ID NO: 206301 - DNA, 25 bp, Homo sapien
tgggttgaagcaattgcaacaagtc

SEQ ID NO: 206302 - DNA, 25 bp, Homo sapien
tgaagcaattgcaacaagtcaatac

SEQ ID NO: 206303 - DNA, 25 bp, Homo sapien
acccttgtagcttgtgccttgctgg

SEQ ID NO: 206304 - DNA, 25 bp, Homo sapien
tggaccacactctttgggaagcagg

SEQ ID NO: 206305 - DNA, 25 bp, Homo sapien
gtaacccttgtagcttgtgccttgc

SEQ ID NO: 206306 - DNA, 25 bp, Homo sapien
accacactctttgggaagcaggagc

SEQ ID NO: 206307 - DNA, 25 bp, Homo sapien
gcagaagcatatgtagaggccgcca

SEQ ID NO: 206308 - DNA, 25 bp, Homo sapien
gtagaggccgccaattcagaagatc

SEQ ID NO: 206309 - DNA, 25 bp, Homo sapien
agcatatgtagaggccgccaattca

SEQ ID NO: 206310 - DNA, 25 bp, Homo sapien
tgtagaggccgccaattcagaagat

SEQ ID NO: 206311 - DNA, 25 bp, Homo sapien
cactcgcaccatgggatagaaaaat

SEQ ID NO: 206312 - DNA, 25 bp, Homo sapien
agctgcatccactcgcaccatggga

SEQ ID NO: 206313 - DNA, 25 bp, Homo sapien
tagaccctgttgctagacagcaaca

SEQ ID NO: 206314 - DNA, 25 bp, Homo sapien
ggatagaaaaatagaccctgttgct

SEQ ID NO: 206315 - DNA, 25 bp, Homo sapien
ctacttttgctttgtgctgtggcag

SEQ ID NO: 206316 - DNA, 25 bp, Homo sapien
tcatagatttggtcacaggcttgcc

SEQ ID NO: 206317 - DNA, 25 bp, Homo sapien
tgtagggcttaatgactcgcagtct

SEQ ID NO: 206318 - DNA, 25 bp, Homo sapien
taaacactgagtatgatgacgttca

SEQ ID NO: 206319 - DNA, 25 bp, Homo sapien
aacgtgcaccttgggcactcaaaga

SEQ ID NO: 206320 - DNA, 25 bp, Homo sapien
gagaactaatccctgatcgtcagat

SEQ ID NO: 206321 - DNA, 25 bp, Homo sapien
tgggcttcaagaaacgtgcaccttg

SEQ ID NO: 206322 - DNA, 25 bp, Homo sapien
ctataccgaatccatgtgaggctgt

SEQ ID NO: 206323 - DNA, 25 bp, Homo sapien
tatggcctgttataaccttaatata

SEQ ID NO: 206324 - DNA, 25 bp, Homo sapien
tgttaaagatataagcctcagctca

SEQ ID NO: 206325 - DNA, 25 bp, Homo sapien
tacaacgaagcattgatgaagaaat

SEQ ID NO: 206326 - DNA, 25 bp, Homo sapien
aagcctaaatccttttatgtgcaaa

SEQ ID NO: 206327 - DNA, 25 bp, Homo sapien
ctggccagaaagaatgtgcatggct

SEQ ID NO: 206328 - DNA, 25 bp, Homo sapien
tggaatttatcaaaccctgccttgt

SEQ ID NO: 206329 - DNA, 25 bp, Homo sapien
taataatctgtaactgaagagctga

SEQ ID NO: 206330 - DNA, 25 bp, Homo sapien
gcattctggttcacccaaatattga

SEQ ID NO: 206331 - DNA, 25 bp, Homo sapien
tgtaatggaaagaccgttattattg

SEQ ID NO: 206332 - DNA, 25 bp, Homo sapien
atggaaagaccgttattattggtat

SEQ ID NO: 206333 - DNA, 25 bp, Homo sapien
ctgtaatggaaagaccgttattatt

SEQ ID NO: 206334 - DNA, 25 bp, Homo sapien
cacagaaacgtccaaatgttggcag

SEQ ID NO: 206335 - DNA, 25 bp, Homo sapien
caacaccgcacaacagcctgttatg

SEQ ID NO: 206336 - DNA, 25 bp, Homo sapien
ctgcatagtacacaggaccctgggc

SEQ ID NO: 206337 - DNA, 25 bp, Homo sapien
gggctagtattgctgctcatctgtt

SEQ ID NO: 206338 - DNA, 25 bp, Homo sapien
ctttgttctttatcacgtgagacat

SEQ ID NO: 206339 - DNA, 25 bp, Homo sapien
ctgggaagccctgtgctagcacaag

SEQ ID NO: 206340 - DNA, 25 bp, Homo sapien
tcactgggaagccctgtgctagcac

SEQ ID NO: 206341 - DNA, 25 bp, Homo sapien
cactgggaagccctgtgctagcaca

SEQ ID NO: 206342 - DNA, 25 bp, Homo sapien
tctgtttcatctgcgcgtgcacttt

SEQ ID NO: 206343 - DNA, 25 bp, Homo sapien
tgtagacctctatgccatcgagtca

SEQ ID NO: 206344 - DNA, 25 bp, Homo sapien
caagcttagggttgagatttcattc

SEQ ID NO: 206345 - DNA, 25 bp, Homo sapien
gatttgggctcttatccactctgct

SEQ ID NO: 206346 - DNA, 25 bp, Homo sapien
ttgtctggcaaccttctacttccaa

SEQ ID NO: 206347 - DNA, 25 bp, Homo sapien
gagcagcagggcaggttgcgagatc

SEQ ID NO: 206348 - DNA, 25 bp, Homo sapien
atccttgtctggcaaccttctactt

SEQ ID NO: 206349 - DNA, 25 bp, Homo sapien
ggcaggttgcgagatctgcctcttc

SEQ ID NO: 206350 - DNA, 25 bp, Homo sapien
caaggaacacgactgcggcagctgt

SEQ ID NO: 206351 - DNA, 25 bp, Homo sapien
aggaacacgactgcggcagctgtga

SEQ ID NO: 206352 - DNA, 25 bp, Homo sapien
tccaaggaacacgactgcggcagct

SEQ ID NO: 206353 - DNA, 25 bp, Homo sapien
actccaaggaacacgactgcggcag

SEQ ID NO: 206354 - DNA, 25 bp, Homo sapien
gctaatctgagccacccagtgatgg

SEQ ID NO: 206355 - DNA, 25 bp, Homo sapien
tgcaattgcaacagaggcacaaact

SEQ ID NO: 206356 - DNA, 25 bp, Homo sapien
gactcaaacgtctcagggaccaggc

SEQ ID NO: 206357 - DNA, 25 bp, Homo sapien
tacgttctgactgatcgagagaggc

SEQ ID NO: 206358 - DNA, 25 bp, Homo sapien
gagcagggtagtcgtccctgtgtcc

SEQ ID NO: 206359 - DNA, 25 bp, Homo sapien
gatagtgactggtcaatccactcca

SEQ ID NO: 206360 - DNA, 25 bp, Homo sapien
tagtgactggtcaatccactccagg

SEQ ID NO: 206361 - DNA, 25 bp, Homo sapien
cagggtagtcgtccctgtgtccagg

SEQ ID NO: 206362 - DNA, 25 bp, Homo sapien
gacccgaggcatcttcgatccagtc

SEQ ID NO: 206363 - DNA, 25 bp, Homo sapien
cagtgggacatgagacccgaggcat

SEQ ID NO: 206364 - DNA, 25 bp, Homo sapien
cgatccagtctttgttctccagaat

SEQ ID NO: 206365 - DNA, 25 bp, Homo sapien
gacatgagacccgaggcatcttcga

SEQ ID NO: 206366 - DNA, 25 bp, Homo sapien
ggggttggtgataacaacgtcatcc

SEQ ID NO: 206367 - DNA, 25 bp, Homo sapien
ggttggtgataacaacgtcatccag

SEQ ID NO: 206368 - DNA, 25 bp, Homo sapien
gggttggtgataacaacgtcatcca

SEQ ID NO: 206369 - DNA, 25 bp, Homo sapien
ttggtgataacaacgtcatccagtt

SEQ ID NO: 206370 - DNA, 25 bp, Homo sapien
agtagcgctgcctgcaaaccagcac

SEQ ID NO: 206371 - DNA, 25 bp, Homo sapien
tgcaaacgaagccagaaagatggtg

SEQ ID NO: 206372 - DNA, 25 bp, Homo sapien
gccagaaagatggtggccagcacac

SEQ ID NO: 206373 - DNA, 25 bp, Homo sapien
gaagccagaaagatggtggccagca

SEQ ID NO: 206374 - DNA, 25 bp, Homo sapien
ctgcaaacgaagccagaaagatggt

SEQ ID NO: 206375 - DNA, 25 bp, Homo sapien
ggagctcctgactcagtcccgttca

SEQ ID NO: 206376 - DNA, 25 bp, Homo sapien
gcttccggggagctcctgactcagt

SEQ ID NO: 206377 - DNA, 25 bp, Homo sapien
gtcccgttcacatcgtcctcatggg

SEQ ID NO: 206378 - DNA, 25 bp, Homo sapien
acatcgtcctcatgggctaaggctg

SEQ ID NO: 206379 - DNA, 25 bp, Homo sapien
gatggcaggagctaggttcctccac

SEQ ID NO: 206380 - DNA, 25 bp, Homo sapien
caggagctaggttcctccacgacac

SEQ ID NO: 206381 - DNA, 25 bp, Homo sapien
aggatggcaggagctaggttcctcc

SEQ ID NO: 206382 - DNA, 25 bp, Homo sapien
tggcaggagctaggttcctccacga

SEQ ID NO: 206383 - DNA, 25 bp, Homo sapien
ggcacatcccgctgcgctcccacga

SEQ ID NO: 206384 - DNA, 25 bp, Homo sapien
ccccgcggatggcaaagtcagcggt

SEQ ID NO: 206385 - DNA, 25 bp, Homo sapien
gcggatggcaaagtcagcggtatta

SEQ ID NO: 206386 - DNA, 25 bp, Homo sapien
gcaaagtcagcggtattattttctt

SEQ ID NO: 206387 - DNA, 25 bp, Homo sapien
tgacaaatgtgccagcgtgttgtag

SEQ ID NO: 206388 - DNA, 25 bp, Homo sapien
ataattggagagttagcttccatgc

SEQ ID NO: 206389 - DNA, 25 bp, Homo sapien
gaaggtagtggtcctctaagaagaa

SEQ ID NO: 206390 - DNA, 25 bp, Homo sapien
caaggtcacacgtgaaaaggctaac

SEQ ID NO: 206391 - DNA, 25 bp, Homo sapien
tcatcatctgacacatacttctgca

SEQ ID NO: 206392 - DNA, 25 bp, Homo sapien
tcagttgtcagctttattcagtctc

SEQ ID NO: 206393 - DNA, 25 bp, Homo sapien
agtctctcctgtttagacttcccat

SEQ ID NO: 206394 - DNA, 25 bp, Homo sapien
cagtctctcctgtttagacttccca

SEQ ID NO: 206395 - DNA, 25 bp, Homo sapien
tgaatgagacatgacacagatgtct

SEQ ID NO: 206396 - DNA, 25 bp, Homo sapien
ttcttccatgattccctgatacttg

SEQ ID NO: 206397 - DNA, 25 bp, Homo sapien
aagctgtctttgaatgagacatgac

SEQ ID NO: 206398 - DNA, 25 bp, Homo sapien
tgattccctgatacttgtgcaaagc

SEQ ID NO: 206399 - DNA, 25 bp, Homo sapien
gagtgtgacagggtggtgtctaccc

SEQ ID NO: 206400 - DNA, 25 bp, Homo sapien
tgtgacagggtggtgtctacccggt

SEQ ID NO: 206401 - DNA, 25 bp, Homo sapien
tgacagggtggtgtctacccggtcc

SEQ ID NO: 206402 - DNA, 25 bp, Homo sapien
gtgtctacccggtcccacatccaca

SEQ ID NO: 206403 - DNA, 25 bp, Homo sapien
ggctagatgtaagggtggttctctc

SEQ ID NO: 206404 - DNA, 25 bp, Homo sapien
gagtttgtgaagatgatcatccgaa

SEQ ID NO: 206405 - DNA, 25 bp, Homo sapien
taaaggctggccctttgccagtgct

SEQ ID NO: 206406 - DNA, 25 bp, Homo sapien
agatgtaagggtggttctctcacta

SEQ ID NO: 206407 - DNA, 25 bp, Homo sapien
gcttgtgtgataggataaggagata

SEQ ID NO: 206408 - DNA, 25 bp, Homo sapien
taaggagataattgctgtgtgggcc

SEQ ID NO: 206409 - DNA, 25 bp, Homo sapien
gataaggagataattgctgtgtggg

SEQ ID NO: 206410 - DNA, 25 bp, Homo sapien
tgctgtgtgggccgtcaccctttca

SEQ ID NO: 206411 - DNA, 25 bp, Homo sapien
gctgaaaggcagattcttgtggtaa

SEQ ID NO: 206412 - DNA, 25 bp, Homo sapien
tctgccaacagctgaaaggcagatt

SEQ ID NO: 206413 - DNA, 25 bp, Homo sapien
caacagctgaaaggcagattcttgt

SEQ ID NO: 206414 - DNA, 25 bp, Homo sapien
atctgccaacagctgaaaggcagat

SEQ ID NO: 206415 - DNA, 25 bp, Homo sapien
gtgtgatctaggaatgaaaatgcta

SEQ ID NO: 206416 - DNA, 25 bp, Homo sapien
tgtgatctaggaatgaaaatgctac

SEQ ID NO: 206417 - DNA, 25 bp, Homo sapien
gaaaagtggaacacagaaatatcaa

SEQ ID NO: 206418 - DNA, 25 bp, Homo sapien
cactgaaacactgctgcaggagagc

SEQ ID NO: 206419 - DNA, 25 bp, Homo sapien
gcctctccatgaaaagtggaacaca

SEQ ID NO: 206420 - DNA, 25 bp, Homo sapien
cttttgacacctagaaagatatcga

SEQ ID NO: 206421 - DNA, 25 bp, Homo sapien
ggacgattatgcagatgcaggtata

SEQ ID NO: 206422 - DNA, 25 bp, Homo sapien
gaaggacgattatgcagatgcaggt

SEQ ID NO: 206423 - DNA, 25 bp, Homo sapien
catcagaaggaaggacgattatgca

SEQ ID NO: 206424 - DNA, 25 bp, Homo sapien
gaaggaaggacgattatgcagatgc

SEQ ID NO: 206425 - DNA, 25 bp, Homo sapien
taacgtaagtttgacgctgtgctcc

SEQ ID NO: 206426 - DNA, 25 bp, Homo sapien
cctggaggatcatcggccatactcc

SEQ ID NO: 206427 - DNA, 25 bp, Homo sapien
tactccagcagaagggtggatttga

SEQ ID NO: 206428 - DNA, 25 bp, Homo sapien
ctaggtcgacgtttatttctttctg

SEQ ID NO: 206429 - DNA, 25 bp, Homo sapien
ggcttatttgcttcctggtctttcc

SEQ ID NO: 206430 - DNA, 25 bp, Homo sapien
tactgtcagaatccaggcagctgct

SEQ ID NO: 206431 - DNA, 25 bp, Homo sapien
cttcctggtctttcctactgtcaga

SEQ ID NO: 206432 - DNA, 25 bp, Homo sapien
ttgcttcctggtctttcctactgtc

SEQ ID NO: 206433 - DNA, 25 bp, Homo sapien
gatgataactaaggtgaggcgagcc

SEQ ID NO: 206434 - DNA, 25 bp, Homo sapien
tgaggcgagcctgcttaagttccag

SEQ ID NO: 206435 - DNA, 25 bp, Homo sapien
gcagagctggtttccgctgccgtct

SEQ ID NO: 206436 - DNA, 25 bp, Homo sapien
tctgcacgaatgagggttgctaaca

SEQ ID NO: 206437 - DNA, 25 bp, Homo sapien
gccagcaagtaatgaagtccccaga

SEQ ID NO: 206438 - DNA, 25 bp, Homo sapien
aagtaatgaagtccccagacaagtg

SEQ ID NO: 206439 - DNA, 25 bp, Homo sapien
cagcaagtaatgaagtccccagaca

SEQ ID NO: 206440 - DNA, 25 bp, Homo sapien
gcaagtaatgaagtccccagacaag

SEQ ID NO: 206441 - DNA, 25 bp, Homo sapien
aatcatacatccctttcatggccca

SEQ ID NO: 206442 - DNA, 25 bp, Homo sapien
ctcttgtgaggtagcaatgcagatg

SEQ ID NO: 206443 - DNA, 25 bp, Homo sapien
ggtaggagtacaaatcatacatccc

SEQ ID NO: 206444 - DNA, 25 bp, Homo sapien
tttttctcttgtgaggtagcaatgc

SEQ ID NO: 206445 - DNA, 25 bp, Homo sapien
cagtatcttctgtggtggtgtccat

SEQ ID NO: 206446 - DNA, 25 bp, Homo sapien
ctggtaagaacctccttggaccatc

SEQ ID NO: 206447 - DNA, 25 bp, Homo sapien
tgtccgcttccctgggagtaccagt

SEQ ID NO: 206448 - DNA, 25 bp, Homo sapien
tggacatggatgtccgcttccctgg

SEQ ID NO: 206449 - DNA, 25 bp, Homo sapien
tggtaagaacctccttggaccatct

SEQ ID NO: 206450 - DNA, 25 bp, Homo sapien
gaaactcctgacctcaaatgatcca

SEQ ID NO: 206451 - DNA, 25 bp, Homo sapien
tgaaactcctgacctcaaatgatcc

SEQ ID NO: 206452 - DNA, 25 bp, Homo sapien
tccacctgccaggctcaagctattc

SEQ ID NO: 206453 - DNA, 25 bp, Homo sapien
ctccacctgccaggctcaagctatt

SEQ ID NO: 206454 - DNA, 25 bp, Homo sapien
gtctagctcagcaattccacggagg

SEQ ID NO: 206455 - DNA, 25 bp, Homo sapien
cacaggtgggtggtccaaatgatct

SEQ ID NO: 206456 - DNA, 25 bp, Homo sapien
tcctgggcgccatttggagagatag

SEQ ID NO: 206457 - DNA, 25 bp, Homo sapien
tctgcagacagttgaactcctcggg

SEQ ID NO: 206458 - DNA, 25 bp, Homo sapien
cagtttgtcaatatagcattgacag

SEQ ID NO: 206459 - DNA, 25 bp, Homo sapien
ttgtcaatatagcattgacagccat

SEQ ID NO: 206460 - DNA, 25 bp, Homo sapien
gtttgtcaatatagcattgacagcc

SEQ ID NO: 206461 - DNA, 25 bp, Homo sapien
tttgtcaatatagcattgacagcca

SEQ ID NO: 206462 - DNA, 25 bp, Homo sapien
tgagtaccattagaagcattagcct

SEQ ID NO: 206463 - DNA, 25 bp, Homo sapien
taatttggtttgtaatggcctggaa

SEQ ID NO: 206464 - DNA, 25 bp, Homo sapien
gcattagccttcacctgtcttagct

SEQ ID NO: 206465 - DNA, 25 bp, Homo sapien
ggcctggaatgctcttatgtttacc

SEQ ID NO: 206466 - DNA, 25 bp, Homo sapien
agaggttaagttagagcccaggtct

SEQ ID NO: 206467 - DNA, 25 bp, Homo sapien
taatgtcttgccttgatatacaacc

SEQ ID NO: 206468 - DNA, 25 bp, Homo sapien
tggaagaggttaagttagagcccag

SEQ ID NO: 206469 - DNA, 25 bp, Homo sapien
gcccaggtcttgtcctgttagtgat

SEQ ID NO: 206470 - DNA, 25 bp, Homo sapien
tctcccacatggtcagtgcgtgcag

SEQ ID NO: 206471 - DNA, 25 bp, Homo sapien
cgtgggaactgatcagaggcctcca

SEQ ID NO: 206472 - DNA, 25 bp, Homo sapien
tgctgaggctcatagtcactgctgt

SEQ ID NO: 206473 - DNA, 25 bp, Homo sapien
catggtcagtgcgtgcaggactcct

SEQ ID NO: 206474 - DNA, 25 bp, Homo sapien
tgactcctcggcagacctgtaggca

SEQ ID NO: 206475 - DNA, 25 bp, Homo sapien
caagatctggtttagggacccttgc

SEQ ID NO: 206476 - DNA, 25 bp, Homo sapien
ggcgctgtctccctaaatacaaagg

SEQ ID NO: 206477 - DNA, 25 bp, Homo sapien
tgggacatgaggatagttctgcacc

SEQ ID NO: 206478 - DNA, 25 bp, Homo sapien
tgtgagaaacattgtgagtcagtcc

SEQ ID NO: 206479 - DNA, 25 bp, Homo sapien
ctggtgtgagaaacattgtgagtca

SEQ ID NO: 206480 - DNA, 25 bp, Homo sapien
gaaacattgtgagtcagtccctttc

SEQ ID NO: 206481 - DNA, 25 bp, Homo sapien
cattgtgagtcagtccctttcagca

SEQ ID NO: 206482 - DNA, 25 bp, Homo sapien
tggaaggcattctatctcccttctg

SEQ ID NO: 206483 - DNA, 25 bp, Homo sapien
aaggagctgccgtgaatcctgggcc

SEQ ID NO: 206484 - DNA, 25 bp, Homo sapien
gctgccgtgaatcctgggcctgcat

SEQ ID NO: 206485 - DNA, 25 bp, Homo sapien
gccctggaaggcattctatctccct

SEQ ID NO: 206486 - DNA, 25 bp, Homo sapien
cctggacgtgcatgcagaactggaa

SEQ ID NO: 206487 - DNA, 25 bp, Homo sapien
cgccaaacagctgggaagtgtcctg

SEQ ID NO: 206488 - DNA, 25 bp, Homo sapien
tggagggccacttagacatggcagt

SEQ ID NO: 206489 - DNA, 25 bp, Homo sapien
gaggcttgggtcaattgagtagaac

SEQ ID NO: 206490 - DNA, 25 bp, Homo sapien
tctggaagacatgtggcaaatgtac

SEQ ID NO: 206491 - DNA, 25 bp, Homo sapien
tcaaagctctggaagacatgtggca

SEQ ID NO: 206492 - DNA, 25 bp, Homo sapien
caaagctctggaagacatgtggcaa

SEQ ID NO: 206493 - DNA, 25 bp, Homo sapien
agctctggaagacatgtggcaaatg

SEQ ID NO: 206494 - DNA, 25 bp, Homo sapien
cctgatagccatagacttgtcccat

SEQ ID NO: 206495 - DNA, 25 bp, Homo sapien
aatgctgcacaatagttcctgtgtg

SEQ ID NO: 206496 - DNA, 25 bp, Homo sapien
aaaatgctgcacaatagttcctgtg

SEQ ID NO: 206497 - DNA, 25 bp, Homo sapien
tagccatagacttgtcccatagcca

SEQ ID NO: 206498 - DNA, 25 bp, Homo sapien
tagtatcttgctactccagtgacca

SEQ ID NO: 206499 - DNA, 25 bp, Homo sapien
tcatgaaccatttgaatgtagtatc

SEQ ID NO: 206500 - DNA, 25 bp, Homo sapien
catgaaccatttgaatgtagtatct

SEQ ID NO: 206501 - DNA, 25 bp, Homo sapien
tgtagtatcttgctactccagtgac

SEQ ID NO: 206502 - DNA, 25 bp, Homo sapien
tgacctgcagttgggggacccattg

SEQ ID NO: 206503 - DNA, 25 bp, Homo sapien
tgagagtctgatgtgtgacctgcag

SEQ ID NO: 206504 - DNA, 25 bp, Homo sapien
cattgtactcgtggctggctcatac

SEQ ID NO: 206505 - DNA, 25 bp, Homo sapien
tgggaggtgagctatatttgaaact

SEQ ID NO: 206506 - DNA, 25 bp, Homo sapien
gaatgtccacaaggaaagagctact

SEQ ID NO: 206507 - DNA, 25 bp, Homo sapien
tctttaatctcttgaatgagaaggg

SEQ ID NO: 206508 - DNA, 25 bp, Homo sapien
tccactgcatgattgagaaaggtgc

SEQ ID NO: 206509 - DNA, 25 bp, Homo sapien
ctatctggacaactggaactctctc

SEQ ID NO: 206510 - DNA, 25 bp, Homo sapien
aaagaaggggcagaaaaacatcagc

SEQ ID NO: 206511 - DNA, 25 bp, Homo sapien
taaagaaggggcagaaaaacatcag

SEQ ID NO: 206512 - DNA, 25 bp, Homo sapien
ataaagaaggggcagaaaaacatca

SEQ ID NO: 206513 - DNA, 25 bp, Homo sapien
tgagcaagggtccttcatggccaac

SEQ ID NO: 206514 - DNA, 25 bp, Homo sapien
aacagattttgcctcacagctgatg

SEQ ID NO: 206515 - DNA, 25 bp, Homo sapien
cagctgatgcaaggaaactgtctac

SEQ ID NO: 206516 - DNA, 25 bp, Homo sapien
tactgcaagtgtagaaccttgaccc

SEQ ID NO: 206517 - DNA, 25 bp, Homo sapien
tatgccatcccataatcgatcacca

SEQ ID NO: 206518 - DNA, 25 bp, Homo sapien
ggatatgccatcccataatcgatca

SEQ ID NO: 206519 - DNA, 25 bp, Homo sapien
atgccatcccataatcgatcaccat

SEQ ID NO: 206520 - DNA, 25 bp, Homo sapien
gatatgccatcccataatcgatcac

SEQ ID NO: 206521 - DNA, 25 bp, Homo sapien
gggtcccactggctgagtccaaaaa

SEQ ID NO: 206522 - DNA, 25 bp, Homo sapien
tgagtccaaaaaggtaggaggaaca

SEQ ID NO: 206523 - DNA, 25 bp, Homo sapien
ctctgggtcccactggctgagtcca

SEQ ID NO: 206524 - DNA, 25 bp, Homo sapien
aaaaggtaggaggaacaatcgtcat

SEQ ID NO: 206525 - DNA, 25 bp, Homo sapien
ccagaaccgtgtatctgtctgccag

SEQ ID NO: 206526 - DNA, 25 bp, Homo sapien
cagaataactgatgcaaaatttcca

SEQ ID NO: 206527 - DNA, 25 bp, Homo sapien
ttaggatcacatttgcagaataact

SEQ ID NO: 206528 - DNA, 25 bp, Homo sapien
ttctccagaaccgtgtatctgtctg

SEQ ID NO: 206529 - DNA, 25 bp, Homo sapien
tgggtgtctgataataattctgctc

SEQ ID NO: 206530 - DNA, 25 bp, Homo sapien
ttctgggtgtctgataataattctg

SEQ ID NO: 206531 - DNA, 25 bp, Homo sapien
ctgggtgtctgataataattctgct

SEQ ID NO: 206532 - DNA, 25 bp, Homo sapien
tctgggtgtctgataataattctgc

SEQ ID NO: 206533 - DNA, 25 bp, Homo sapien
ttgtgacaaatcgaacttcaacacc

SEQ ID NO: 206534 - DNA, 25 bp, Homo sapien
ttagtctcttgggagtttccatgtc

SEQ ID NO: 206535 - DNA, 25 bp, Homo sapien
gaacttcaacaccaccgattttctc

SEQ ID NO: 206536 - DNA, 25 bp, Homo sapien
tcaagaacgtgacgatttgccgatt

SEQ ID NO: 206537 - DNA, 25 bp, Homo sapien
aaatccatatatcagtggttctttt

SEQ ID NO: 206538 - DNA, 25 bp, Homo sapien
tttgtttctcacttacttgcagcct

SEQ ID NO: 206539 - DNA, 25 bp, Homo sapien
catttgtttctcacttacttgcagc

SEQ ID NO: 206540 - DNA, 25 bp, Homo sapien
tctcacttacttgcagcctgttttt

SEQ ID NO: 206541 - DNA, 25 bp, Homo sapien
cttccatttgtttctcacttacttg

SEQ ID NO: 206542 - DNA, 25 bp, Homo sapien
tggaatctgtcagacagaatgtcaa

SEQ ID NO: 206543 - DNA, 25 bp, Homo sapien
gatactgatccagcaatgtggtaca

SEQ ID NO: 206544 - DNA, 25 bp, Homo sapien
ccagcaatgtggtacattgtaatat

SEQ ID NO: 206545 - DNA, 25 bp, Homo sapien
gtcaagggatactgatccagcaatg

SEQ ID NO: 206546 - DNA, 25 bp, Homo sapien
cattgggcagttcatgaacttgaat

SEQ ID NO: 206547 - DNA, 25 bp, Homo sapien
catataactttggtgctgtatatca

SEQ ID NO: 206548 - DNA, 25 bp, Homo sapien
tcagcacatccattcatcgcaaggc

SEQ ID NO: 206549 - DNA, 25 bp, Homo sapien
ttgttggcaatgttggtaactctgc

SEQ ID NO: 206550 - DNA, 25 bp, Homo sapien
taagtcaatcctgagtcaagcttgg

SEQ ID NO: 206551 - DNA, 25 bp, Homo sapien
tgtcctgcttccagcgcctgatttg

SEQ ID NO: 206552 - DNA, 25 bp, Homo sapien
cagcgcctgatttgagatctgaagc

SEQ ID NO: 206553 - DNA, 25 bp, Homo sapien
caccaaggctgattgtgaaaggttc

SEQ ID NO: 206554 - DNA, 25 bp, Homo sapien
tttccgccagagggtagaactttgc

SEQ ID NO: 206555 - DNA, 25 bp, Homo sapien
ttccgccagagggtagaactttgct

SEQ ID NO: 206556 - DNA, 25 bp, Homo sapien
tgaagggtttccgccagagggtaga

SEQ ID NO: 206557 - DNA, 25 bp, Homo sapien
tttgtctgtgggcagtagttttgcg

SEQ ID NO: 206558 - DNA, 25 bp, Homo sapien
gtttaggaaccagctgatatacagt

SEQ ID NO: 206559 - DNA, 25 bp, Homo sapien
tatcttgaaaggctacatatggatc

SEQ ID NO: 206560 - DNA, 25 bp, Homo sapien
catatggatctgcaagggctttgaa

SEQ ID NO: 206561 - DNA, 25 bp, Homo sapien
cgtgtcggcttcctatttgaatcag

SEQ ID NO: 206562 - DNA, 25 bp, Homo sapien
gcttcctatttgaatcagtccagaa

SEQ ID NO: 206563 - DNA, 25 bp, Homo sapien
tttttggttgacatcgtgtcggctt

SEQ ID NO: 206564 - DNA, 25 bp, Homo sapien
ggttgacatcgtgtcggcttcctat

SEQ ID NO: 206565 - DNA, 25 bp, Homo sapien
tgatgtggtctctgtaagagggttc

SEQ ID NO: 206566 - DNA, 25 bp, Homo sapien
gatgtggtctctgtaagagggttcc

SEQ ID NO: 206567 - DNA, 25 bp, Homo sapien
tgtggtctctgtaagagggttccac

SEQ ID NO: 206568 - DNA, 25 bp, Homo sapien
tggtctctgtaagagggttccacat

SEQ ID NO: 206569 - DNA, 25 bp, Homo sapien
aagggtatgcacactacactttccc

SEQ ID NO: 206570 - DNA, 25 bp, Homo sapien
aagttacaagcagtcaaaacgtgac

SEQ ID NO: 206571 - DNA, 25 bp, Homo sapien
gaggaaactggaatagacttctact

SEQ ID NO: 206572 - DNA, 25 bp, Homo sapien
tttttaggcaaggagaagtcttgct

SEQ ID NO: 206573 - DNA, 25 bp, Homo sapien
ggcacagaccctccagttcttgttg

SEQ ID NO: 206574 - DNA, 25 bp, Homo sapien
aaggcacagaccctccagttcttgt

SEQ ID NO: 206575 - DNA, 25 bp, Homo sapien
acagaccctccagttcttgttgtag

SEQ ID NO: 206576 - DNA, 25 bp, Homo sapien
caaggcacagaccctccagttcttg

SEQ ID NO: 206577 - DNA, 25 bp, Homo sapien
atggtaatatcctggctgcttggtt

SEQ ID NO: 206578 - DNA, 25 bp, Homo sapien
cctggctgcttggttcaaagtctgt

SEQ ID NO: 206579 - DNA, 25 bp, Homo sapien
gatggtaatatcctggctgcttggt

SEQ ID NO: 206580 - DNA, 25 bp, Homo sapien
ggctgcttggttcaaagtctgtgac

SEQ ID NO: 206581 - DNA, 25 bp, Homo sapien
ccaaacctggatcgcctggctatga

SEQ ID NO: 206582 - DNA, 25 bp, Homo sapien
ggaaccggatccaaacctggatcgc

SEQ ID NO: 206583 - DNA, 25 bp, Homo sapien
acctggatcgcctggctatgatcac

SEQ ID NO: 206584 - DNA, 25 bp, Homo sapien
ggatccaaacctggatcgcctggct

SEQ ID NO: 206585 - DNA, 25 bp, Homo sapien
ctggctatgattgccttgatcttgg

SEQ ID NO: 206586 - DNA, 25 bp, Homo sapien
gctatgattgccttgatcttgggat

SEQ ID NO: 206587 - DNA, 25 bp, Homo sapien
tatgattgccttgatcttgggatcc

SEQ ID NO: 206588 - DNA, 25 bp, Homo sapien
tgattgccttgatcttgggatcctc

SEQ ID NO: 206589 - DNA, 25 bp, Homo sapien
taatgcctttagagtggcagtactg

SEQ ID NO: 206590 - DNA, 25 bp, Homo sapien
cacaggtggcactccatttggttaa

SEQ ID NO: 206591 - DNA, 25 bp, Homo sapien
tgctggcttatactttaacccaggt

SEQ ID NO: 206592 - DNA, 25 bp, Homo sapien
catttggttaactgctggcttatac

SEQ ID NO: 206593 - DNA, 25 bp, Homo sapien
ctcttcatggccacccgtgtgtcca

SEQ ID NO: 206594 - DNA, 25 bp, Homo sapien
gctcttcatggccacccgtgtgtcc

SEQ ID NO: 206595 - DNA, 25 bp, Homo sapien
tcttcatggccacccgtgtgtccac

SEQ ID NO: 206596 - DNA, 25 bp, Homo sapien
agctcttcatggccacccgtgtgtc

SEQ ID NO: 206597 - DNA, 25 bp, Homo sapien
gattccttcccacgcttaaagctgg

SEQ ID NO: 206598 - DNA, 25 bp, Homo sapien
gccctgcttaaggtcactgagcatc

SEQ ID NO: 206599 - DNA, 25 bp, Homo sapien
tggtatgtgcaccagagtttgctga

SEQ ID NO: 206600 - DNA, 25 bp, Homo sapien
aaggtagtagtccaggtagccctgc

SEQ ID NO: 206601 - DNA, 25 bp, Homo sapien
ctcattctcattctcgtacctgggc

SEQ ID NO: 206602 - DNA, 25 bp, Homo sapien
ggtggctggccatggatgcagtgct

SEQ ID NO: 206603 - DNA, 25 bp, Homo sapien
tggctggccatggatgcagtgcttc

SEQ ID NO: 206604 - DNA, 25 bp, Homo sapien
gtggctggccatggatgcagtgctt

SEQ ID NO: 206605 - DNA, 25 bp, Homo sapien
ggctggccatggatgcagtgcttcc

SEQ ID NO: 206606 - DNA, 25 bp, Homo sapien
cacgtggcttagcaggtattagcac

SEQ ID NO: 206607 - DNA, 25 bp, Homo sapien
tacggggagaaatttgaggatgaga

SEQ ID NO: 206608 - DNA, 25 bp, Homo sapien
ctacggggagaaatttgaggatgag

SEQ ID NO: 206609 - DNA, 25 bp, Homo sapien
atgagaacttcatcctgacacatac

SEQ ID NO: 206610 - DNA, 25 bp, Homo sapien
gaggatgagaacttcatcctgacac

SEQ ID NO: 206611 - DNA, 25 bp, Homo sapien
catctgtttgcaatgtccattatct

SEQ ID NO: 206612 - DNA, 25 bp, Homo sapien
gtagctcaagagagtatccctccat

SEQ ID NO: 206613 - DNA, 25 bp, Homo sapien
cagttccagtctatcatctgcacag

SEQ ID NO: 206614 - DNA, 25 bp, Homo sapien
cagaaggaatatcttggaaggcaca

SEQ ID NO: 206615 - DNA, 25 bp, Homo sapien
agattcctccgccttgggaccggcg

SEQ ID NO: 206616 - DNA, 25 bp, Homo sapien
ctggtcaccttgtctccgttaaacg

SEQ ID NO: 206617 - DNA, 25 bp, Homo sapien
cgactaagtggttccccgcgttctg

SEQ ID NO: 206618 - DNA, 25 bp, Homo sapien
aacccagaaaacagtaagccctctg

SEQ ID NO: 206619 - DNA, 25 bp, Homo sapien
ccgctaacactgcaaggctgtaagg

SEQ ID NO: 206620 - DNA, 25 bp, Homo sapien
tcccactctcccgtgcggtccgcag

SEQ ID NO: 206621 - DNA, 25 bp, Homo sapien
ttcggaacgaccaccgctaacactg

SEQ ID NO: 206622 - DNA, 25 bp, Homo sapien
cggtccgcagctcggcttcggaacg

SEQ ID NO: 206623 - DNA, 25 bp, Homo sapien
ggatcagttgtttcaggctggttga

SEQ ID NO: 206624 - DNA, 25 bp, Homo sapien
tgtgaaagaacatttgcccaatatt

SEQ ID NO: 206625 - DNA, 25 bp, Homo sapien
tgaggcagagccgttccgtaaacag

SEQ ID NO: 206626 - DNA, 25 bp, Homo sapien
tgtaacatgttaccatccagtagtc

SEQ ID NO: 206627 - DNA, 25 bp, Homo sapien
tagagaccagcgttgaagtgtggat

SEQ ID NO: 206628 - DNA, 25 bp, Homo sapien
ctgaggctgctgatagagaccagcg

SEQ ID NO: 206629 - DNA, 25 bp, Homo sapien
tgtggatctgaagttcacccccttt

SEQ ID NO: 206630 - DNA, 25 bp, Homo sapien
gctgctgatagagaccagcgttgaa

SEQ ID NO: 206631 - DNA, 25 bp, Homo sapien
gcgttagaggtactttgttcagcac

SEQ ID NO: 206632 - DNA, 25 bp, Homo sapien
tgttcagcactgttggtaatgtgaa

SEQ ID NO: 206633 - DNA, 25 bp, Homo sapien
atcctgtttgtgtggcagtcatttc

SEQ ID NO: 206634 - DNA, 25 bp, Homo sapien
gcagtcatttctgcgttagaggtac

SEQ ID NO: 206635 - DNA, 25 bp, Homo sapien
tttctttctatactccctgcattgc

SEQ ID NO: 206636 - DNA, 25 bp, Homo sapien
tctatactccctgcattgcagtttg

SEQ ID NO: 206637 - DNA, 25 bp, Homo sapien
tctttctatactccctgcattgcag

SEQ ID NO: 206638 - DNA, 25 bp, Homo sapien
tttctatactccctgcattgcagtt

SEQ ID NO: 206639 - DNA, 25 bp, Homo sapien
gttccatatcttgggagccccatca

SEQ ID NO: 206640 - DNA, 25 bp, Homo sapien
tctgccaagttccatatcttgggag

SEQ ID NO: 206641 - DNA, 25 bp, Homo sapien
tctccagtctgccaagttccatatc

SEQ ID NO: 206642 - DNA, 25 bp, Homo sapien
caagttccatatcttgggagcccca

SEQ ID NO: 206643 - DNA, 25 bp, Homo sapien
gtgtactcatcaaagtaatatccat

SEQ ID NO: 206644 - DNA, 25 bp, Homo sapien
tgtactcatcaaagtaatatccatt

SEQ ID NO: 206645 - DNA, 25 bp, Homo sapien
gtactcatcaaagtaatatccattg

SEQ ID NO: 206646 - DNA, 25 bp, Homo sapien
tgtcttttccacagctagacatgga

SEQ ID NO: 206647 - DNA, 25 bp, Homo sapien
gatatgacattaccaggagttttac

SEQ ID NO: 206648 - DNA, 25 bp, Homo sapien
tggtgtatgcccagaatagttcctt

SEQ ID NO: 206649 - DNA, 25 bp, Homo sapien
caaacaaatataaaggacccctgag

SEQ ID NO: 206650 - DNA, 25 bp, Homo sapien
tttgcatttgccctgtcggagctca

SEQ ID NO: 206651 - DNA, 25 bp, Homo sapien
taatccaccacagtagtaagcaggc

SEQ ID NO: 206652 - DNA, 25 bp, Homo sapien
tggaaatgtcccagtacaccagcca

SEQ ID NO: 206653 - DNA, 25 bp, Homo sapien
taagcaggcaagtccggtggctctg

SEQ ID NO: 206654 - DNA, 25 bp, Homo sapien
ctgtgtgacagccgcggggagtagg

SEQ ID NO: 206655 - DNA, 25 bp, Homo sapien
tagccaggacttgtgcataaacctc

SEQ ID NO: 206656 - DNA, 25 bp, Homo sapien
caggacttgtgcataaacctctggg

SEQ ID NO: 206657 - DNA, 25 bp, Homo sapien
ctatgatgattagccaggacttgtg

SEQ ID NO: 206658 - DNA, 25 bp, Homo sapien
gatgattagccaggacttgtgcata

SEQ ID NO: 206659 - DNA, 25 bp, Homo sapien
ccacacaccgaaacagttgaggcag

SEQ ID NO: 206660 - DNA, 25 bp, Homo sapien
ccctagtcattgctaccagtttgta

SEQ ID NO: 206661 - DNA, 25 bp, Homo sapien
cattgctaccagtttgtatctctgc

SEQ ID NO: 206662 - DNA, 25 bp, Homo sapien
gtttgtatctctgccacacaccgaa

SEQ ID NO: 206663 - DNA, 25 bp, Homo sapien
gtgagtcccatatattcctttgaag

SEQ ID NO: 206664 - DNA, 25 bp, Homo sapien
ttcctgttagccgaaaaaactgcta

SEQ ID NO: 206665 - DNA, 25 bp, Homo sapien
tgctagtccctggatcttctcccta

SEQ ID NO: 206666 - DNA, 25 bp, Homo sapien
gtaggtcagtgggaacagtctctgg

SEQ ID NO: 206667 - DNA, 25 bp, Homo sapien
gaagatgtgtagcaatacctcctag

SEQ ID NO: 206668 - DNA, 25 bp, Homo sapien
gcgactgtcctctctactgccttat

SEQ ID NO: 206669 - DNA, 25 bp, Homo sapien
ttaatgcctttaatcatcagagaag

SEQ ID NO: 206670 - DNA, 25 bp, Homo sapien
catcttgcatacagttgaagcgttc

SEQ ID NO: 206671 - DNA, 25 bp, Homo sapien
gatcaagtgctatgggagtgctgct

SEQ ID NO: 206672 - DNA, 25 bp, Homo sapien
cctatccgaagagtcctaagcgtga

SEQ ID NO: 206673 - DNA, 25 bp, Homo sapien
taagcgtgacaactctataaatcgt

SEQ ID NO: 206674 - DNA, 25 bp, Homo sapien
tagcaatagacgatttcccttggaa

SEQ ID NO: 206675 - DNA, 25 bp, Homo sapien
gctgatatctgctgtacttctgaat

SEQ ID NO: 206676 - DNA, 25 bp, Homo sapien
taaaacagtagggttggcagtagac

SEQ ID NO: 206677 - DNA, 25 bp, Homo sapien
tataggctgatattgacataagtgg

SEQ ID NO: 206678 - DNA, 25 bp, Homo sapien
gacttgatcagttattttggccctg

SEQ ID NO: 206679 - DNA, 25 bp, Homo sapien
cagagaatgtaatttcttgaaggac

SEQ ID NO: 206680 - DNA, 25 bp, Homo sapien
gcccattctcagaatagagccccat

SEQ ID NO: 206681 - DNA, 25 bp, Homo sapien
gagaatgtaatttcttgaaggacag

SEQ ID NO: 206682 - DNA, 25 bp, Homo sapien
ggttgcccattctcagaatagagcc

SEQ ID NO: 206683 - DNA, 25 bp, Homo sapien
ttcaaatcaggcttatcaccagcaa

SEQ ID NO: 206684 - DNA, 25 bp, Homo sapien
tttccttggaacatctctcgcctag

SEQ ID NO: 206685 - DNA, 25 bp, Homo sapien
ttatcaccagcaagccaagccacat

SEQ ID NO: 206686 - DNA, 25 bp, Homo sapien
tctcgcctagccttttcaaatcagg

SEQ ID NO: 206687 - DNA, 25 bp, Homo sapien
tgcaggctgagagcaagaagtgtca

SEQ ID NO: 206688 - DNA, 25 bp, Homo sapien
tctctttcctagtgaagggctcccc

SEQ ID NO: 206689 - DNA, 25 bp, Homo sapien
gaattttttactagccactgaccag

SEQ ID NO: 206690 - DNA, 25 bp, Homo sapien
gttaaaacagtagtcagtgcaggct

SEQ ID NO: 206691 - DNA, 25 bp, Homo sapien
caatgtcaggctttattcttctacc

SEQ ID NO: 206692 - DNA, 25 bp, Homo sapien
ggctgcgcctggaactaatgtgagt

SEQ ID NO: 206693 - DNA, 25 bp, Homo sapien
gacagtttaggaatcggtgcctgaa

SEQ ID NO: 206694 - DNA, 25 bp, Homo sapien
tcaggttggcacagatctcccatcc

SEQ ID NO: 206695 - DNA, 25 bp, Homo sapien
tccatcctaaacattcaatgctggg

SEQ ID NO: 206696 - DNA, 25 bp, Homo sapien
tccatggctgctgtaagtagacttt

SEQ ID NO: 206697 - DNA, 25 bp, Homo sapien
aacaagggagctacaagttggcctg

SEQ ID NO: 206698 - DNA, 25 bp, Homo sapien
taaattcgattgagtatgacctacc

SEQ ID NO: 206699 - DNA, 25 bp, Homo sapien
ttttatttgtactagtgacccgcag

SEQ ID NO: 206700 - DNA, 25 bp, Homo sapien
tgcataagagtccaaacgagttcag

SEQ ID NO: 206701 - DNA, 25 bp, Homo sapien
gacagctgtctgtgagcatcaccag

SEQ ID NO: 206702 - DNA, 25 bp, Homo sapien
tgagacccatggatatgagtcaagc

SEQ ID NO: 206703 - DNA, 25 bp, Homo sapien
aatgtagaaaaattgggaccctcat

SEQ ID NO: 206704 - DNA, 25 bp, Homo sapien
aaggtatgtaggcagccactaggat

SEQ ID NO: 206705 - DNA, 25 bp, Homo sapien
tgtgaaaaggtatgtaggcagccac

SEQ ID NO: 206706 - DNA, 25 bp, Homo sapien
tgtagaaaaattgggaccctcattc

SEQ ID NO: 206707 - DNA, 25 bp, Homo sapien
ctctcaatatgttctgcactctcag

SEQ ID NO: 206708 - DNA, 25 bp, Homo sapien
tcagatgttaatcgatatccaagcc

SEQ ID NO: 206709 - DNA, 25 bp, Homo sapien
tgtgtagttatatgacagagatcta

SEQ ID NO: 206710 - DNA, 25 bp, Homo sapien
tagactatcctaactgtatcagcat

SEQ ID NO: 206711 - DNA, 25 bp, Homo sapien
taagcacagttagtagagagccctg

SEQ ID NO: 206712 - DNA, 25 bp, Homo sapien
tgcagcggcttgtgagaattcctcc

SEQ ID NO: 206713 - DNA, 25 bp, Homo sapien
gtctgactgaaggacatggagcccg

SEQ ID NO: 206714 - DNA, 25 bp, Homo sapien
gacctgatgactaaggacagcctgg

SEQ ID NO: 206715 - DNA, 25 bp, Homo sapien
tgctgaaatcactctatcccttggg

SEQ ID NO: 206716 - DNA, 25 bp, Homo sapien
tcagtgccagctccataattgatga

SEQ ID NO: 206717 - DNA, 25 bp, Homo sapien
caagctaaagtactggaatcatggc

SEQ ID NO: 206718 - DNA, 25 bp, Homo sapien
cccttggaggtgacgtagtattgta

SEQ ID NO: 206719 - DNA, 25 bp, Homo sapien
agtagccagcatcgcgcttctctga

SEQ ID NO: 206720 - DNA, 25 bp, Homo sapien
ttcaaaagtaggctgttcacatgca

SEQ ID NO: 206721 - DNA, 25 bp, Homo sapien
tatcccacagtggaaatcagtcaac

SEQ ID NO: 206722 - DNA, 25 bp, Homo sapien
cctgttctgatatcccacctgagca

SEQ ID NO: 206723 - DNA, 25 bp, Homo sapien
tgtatgtgctccaaaacctttcgtg

SEQ ID NO: 206724 - DNA, 25 bp, Homo sapien
gagacattccctagattcaaaggca

SEQ ID NO: 206725 - DNA, 25 bp, Homo sapien
gaagcacaatactatctcctgaaag

SEQ ID NO: 206726 - DNA, 25 bp, Homo sapien
aacgccatgactgttcagaagcaca

SEQ ID NO: 206727 - DNA, 25 bp, Homo sapien
tagatgcttaccattaacctaccaa

SEQ ID NO: 206728 - DNA, 25 bp, Homo sapien
ctaccaactcttaatatccttaaat

SEQ ID NO: 206729 - DNA, 25 bp, Homo sapien
atgcttaccattaacctaccaactc

SEQ ID NO: 206730 - DNA, 25 bp, Homo sapien
gatgcttaccattaacctaccaact

SEQ ID NO: 206731 - DNA, 25 bp, Homo sapien
tgcttagcacagatggcgagttatc

SEQ ID NO: 206732 - DNA, 25 bp, Homo sapien
tatgtaccaggcatagtagggctac

SEQ ID NO: 206733 - DNA, 25 bp, Homo sapien
gaatagaataccaatgtgtgcactg

SEQ ID NO: 206734 - DNA, 25 bp, Homo sapien
caatggtaagcaagacagagtccct

SEQ ID NO: 206735 - DNA, 25 bp, Homo sapien
taaacttgtacttactggacctaga

SEQ ID NO: 206736 - DNA, 25 bp, Homo sapien
tcactgaatcggaaatatatacctg

SEQ ID NO: 206737 - DNA, 25 bp, Homo sapien
actgctttgcagtttccaccattga

SEQ ID NO: 206738 - DNA, 25 bp, Homo sapien
gaaccacttagtctttaggtgcaag

SEQ ID NO: 206739 - DNA, 25 bp, Homo sapien
ttccttggacttccatgcagactgc

SEQ ID NO: 206740 - DNA, 25 bp, Homo sapien
tatctcgataaaacagctctatggg

SEQ ID NO: 206741 - DNA, 25 bp, Homo sapien
tatacatagccaagaaaccttccca

SEQ ID NO: 206742 - DNA, 25 bp, Homo sapien
gctgcctcaggtaaactccctctgg

SEQ ID NO: 206743 - DNA, 25 bp, Homo sapien
cgagaattaaacaaactgttctcat

SEQ ID NO: 206744 - DNA, 25 bp, Homo sapien
gccaagaactcgggcttcttgccct

SEQ ID NO: 206745 - DNA, 25 bp, Homo sapien
acgagaattaaacaaactgttctca

SEQ ID NO: 206746 - DNA, 25 bp, Homo sapien
tcacactgtttatcagttacagcca

SEQ ID NO: 206747 - DNA, 25 bp, Homo sapien
ttttgtaggtgtgtacctcagagcc

SEQ ID NO: 206748 - DNA, 25 bp, Homo sapien
tgcactgcatctccctcggactaga

SEQ ID NO: 206749 - DNA, 25 bp, Homo sapien
caatcccaatctcacgtatgcagct

SEQ ID NO: 206750 - DNA, 25 bp, Homo sapien
tatgcagctctattttgccatagga

SEQ ID NO: 206751 - DNA, 25 bp, Homo sapien
cagtgatgaagccaatttgatcgtg

SEQ ID NO: 206752 - DNA, 25 bp, Homo sapien
gtgatgaagccaatttgatcgtggt

SEQ ID NO: 206753 - DNA, 25 bp, Homo sapien
cccagtgatgaagccaatttgatcg

SEQ ID NO: 206754 - DNA, 25 bp, Homo sapien
aatcatgtggtttttattgttggtt

SEQ ID NO: 206755 - DNA, 25 bp, Homo sapien
ttttagagcatttgcatcaactcca

SEQ ID NO: 206756 - DNA, 25 bp, Homo sapien
ctccaaaaagaatacccattagcag

SEQ ID NO: 206757 - DNA, 25 bp, Homo sapien
gtacattcacaaaactgtgccacca

SEQ ID NO: 206758 - DNA, 25 bp, Homo sapien
caactccaaaaagaatacccattag

SEQ ID NO: 206759 - DNA, 25 bp, Homo sapien
ttaggaaaaagagcgaatgctttgc

SEQ ID NO: 206760 - DNA, 25 bp, Homo sapien
tttaggaaaaagagcgaatgctttg

SEQ ID NO: 206761 - DNA, 25 bp, Homo sapien
ctttaggaaaaagagcgaatgcttt

SEQ ID NO: 206762 - DNA, 25 bp, Homo sapien
tatcctctgactggtgttaaagcgc

SEQ ID NO: 206763 - DNA, 25 bp, Homo sapien
gggaaagatgaaattggccagcacc

SEQ ID NO: 206764 - DNA, 25 bp, Homo sapien
ttaaagcgcatttagtgggaatgtc

SEQ ID NO: 206765 - DNA, 25 bp, Homo sapien
gaaattggccagcaccctgtttctc

SEQ ID NO: 206766 - DNA, 25 bp, Homo sapien
gaacccaaggtccaatgggaacatg

SEQ ID NO: 206767 - DNA, 25 bp, Homo sapien
ccaatgaagcgtgaggtcaggcagc

SEQ ID NO: 206768 - DNA, 25 bp, Homo sapien
taccttgaggcaaacactccttcta

SEQ ID NO: 206769 - DNA, 25 bp, Homo sapien
ctagagagggaaatccaatgaagcg

SEQ ID NO: 206770 - DNA, 25 bp, Homo sapien
taaaattagagtcagcttgtagtta

SEQ ID NO: 206771 - DNA, 25 bp, Homo sapien
attagagtcagcttgtagttattca

SEQ ID NO: 206772 - DNA, 25 bp, Homo sapien
aattagagtcagcttgtagttattc

SEQ ID NO: 206773 - DNA, 25 bp, Homo sapien
tttaaaattagagtcagcttgtagt

SEQ ID NO: 206774 - DNA, 25 bp, Homo sapien
cccttatttatagtagacgtgtgag

SEQ ID NO: 206775 - DNA, 25 bp, Homo sapien
gattttcaaaaaggcgaattccaga

SEQ ID NO: 206776 - DNA, 25 bp, Homo sapien
cagtggtttgggagcatttagaaaa

SEQ ID NO: 206777 - DNA, 25 bp, Homo sapien
tagaaaagacgtatggcccggagtg

SEQ ID NO: 206778 - DNA, 25 bp, Homo sapien
tcactcacgatggtgaagacagcac

SEQ ID NO: 206779 - DNA, 25 bp, Homo sapien
tcaactggaagcatagtggcatctg

SEQ ID NO: 206780 - DNA, 25 bp, Homo sapien
taaggctatgtcagaccgttcttgc

SEQ ID NO: 206781 - DNA, 25 bp, Homo sapien
tataatgtattgctcagaccaggac

SEQ ID NO: 206782 - DNA, 25 bp, Homo sapien
tgaggcagggtctcatctcactcta

SEQ ID NO: 206783 - DNA, 25 bp, Homo sapien
gcagtctcaccctccctgggctcaa

SEQ ID NO: 206784 - DNA, 25 bp, Homo sapien
tcactgcagtctcaccctccctggg

SEQ ID NO: 206785 - DNA, 25 bp, Homo sapien
ctgcagtctcaccctccctgggctc

SEQ ID NO: 206786 - DNA, 25 bp, Homo sapien
cccatcccacagtttctaagagaat

SEQ ID NO: 206787 - DNA, 25 bp, Homo sapien
taagagaatctgacctttttcagtt

SEQ ID NO: 206788 - DNA, 25 bp, Homo sapien
cagtttccagagacagtctttgtga

SEQ ID NO: 206789 - DNA, 25 bp, Homo sapien
gtctttgtgattaatgatctatctg

SEQ ID NO: 206790 - DNA, 25 bp, Homo sapien
tcaattaggcaatgagctaccagtc

SEQ ID NO: 206791 - DNA, 25 bp, Homo sapien
taagatgttacacgatccaatagga

SEQ ID NO: 206792 - DNA, 25 bp, Homo sapien
tagaaagccaaagttgaacctgtgt

SEQ ID NO: 206793 - DNA, 25 bp, Homo sapien
tagtataatcaccaatcgtcctccc

SEQ ID NO: 206794 - DNA, 25 bp, Homo sapien
gctggcaaggctatgctgaacctcc

SEQ ID NO: 206795 - DNA, 25 bp, Homo sapien
tccttaggcactctctaattagatg

SEQ ID NO: 206796 - DNA, 25 bp, Homo sapien
cacttgagctcctgtatggacgctc

SEQ ID NO: 206797 - DNA, 25 bp, Homo sapien
cttgagctcctgtatggacgctcct

SEQ ID NO: 206798 - DNA, 25 bp, Homo sapien
tggaggctctccataaatctttggt

SEQ ID NO: 206799 - DNA, 25 bp, Homo sapien
cacatgtgtagaacaaatcgccacg

SEQ ID NO: 206800 - DNA, 25 bp, Homo sapien
atttttcagactttgaccctgggag

SEQ ID NO: 206801 - DNA, 25 bp, Homo sapien
gaaaatggtggtcttcccaagctag

SEQ ID NO: 206802 - DNA, 25 bp, Homo sapien
cagataaataagctatggtacatcc

SEQ ID NO: 206803 - DNA, 25 bp, Homo sapien
tacaacacgaagagtgaatgaaccc

SEQ ID NO: 206804 - DNA, 25 bp, Homo sapien
gcaaaaccatggagaccgtaacagt

SEQ ID NO: 206805 - DNA, 25 bp, Homo sapien
aacagtagcagtggtttcaagagac

SEQ ID NO: 206806 - DNA, 25 bp, Homo sapien
agagctacttggattaacaatggtg

SEQ ID NO: 206807 - DNA, 25 bp, Homo sapien
cttggattaacaatggtgcctggca

SEQ ID NO: 206808 - DNA, 25 bp, Homo sapien
gctacttggattaacaatggtgcct

SEQ ID NO: 206809 - DNA, 25 bp, Homo sapien
tggattaacaatggtgcctggcaga

SEQ ID NO: 206810 - DNA, 25 bp, Homo sapien
tgatcagagtggttagcggaaaacc

SEQ ID NO: 206811 - DNA, 25 bp, Homo sapien
cagggagaacccagaactacgtcat

SEQ ID NO: 206812 - DNA, 25 bp, Homo sapien
catgtggaagaccaactgggaactc

SEQ ID NO: 206813 - DNA, 25 bp, Homo sapien
tgaaattagtgataagaggctggcc

SEQ ID NO: 206814 - DNA, 25 bp, Homo sapien
tgtgaagcaatgagtgtaggagcca

SEQ ID NO: 206815 - DNA, 25 bp, Homo sapien
tttggcaaggtcaagtaagatggct

SEQ ID NO: 206816 - DNA, 25 bp, Homo sapien
agcttagaaaatcaaggagaggccg

SEQ ID NO: 206817 - DNA, 25 bp, Homo sapien
tacacgtggtttatgtttggcaagg

SEQ ID NO: 206818 - DNA, 25 bp, Homo sapien
ttttacactgagacctagcacacac

SEQ ID NO: 206819 - DNA, 25 bp, Homo sapien
agctgggtagttctgatacaggtct

SEQ ID NO: 206820 - DNA, 25 bp, Homo sapien
gaaatgtttcgtgaacccattctta

SEQ ID NO: 206821 - DNA, 25 bp, Homo sapien
aacaattatcctctcaaagcttctg

SEQ ID NO: 206822 - DNA, 25 bp, Homo sapien
tcaccatgtgggctcctccataggg

SEQ ID NO: 206823 - DNA, 25 bp, Homo sapien
atgtgggctcctccatagggctgct

SEQ ID NO: 206824 - DNA, 25 bp, Homo sapien
caacatggcagttgggtttccccag

SEQ ID NO: 206825 - DNA, 25 bp, Homo sapien
ctcacaacatggcagttgggtttcc

SEQ ID NO: 206826 - DNA, 25 bp, Homo sapien
cttgagaaagagcaatgagaaagcc

SEQ ID NO: 206827 - DNA, 25 bp, Homo sapien
tcataacactatttaggggaaggaa

SEQ ID NO: 206828 - DNA, 25 bp, Homo sapien
agagcaatgagaaagccacagtcaa

SEQ ID NO: 206829 - DNA, 25 bp, Homo sapien
tgtcctaatatttaagacatcttca

SEQ ID NO: 206830 - DNA, 25 bp, Homo sapien
gtaacccacgatgtaaatagtctaa

SEQ ID NO: 206831 - DNA, 25 bp, Homo sapien
tgatggtggaagtgaaaaatcgtac

SEQ ID NO: 206832 - DNA, 25 bp, Homo sapien
cattggttgtaacccacgatgtaaa

SEQ ID NO: 206833 - DNA, 25 bp, Homo sapien
caatcacactcataacttgatggtg

SEQ ID NO: 206834 - DNA, 25 bp, Homo sapien
gatagtcctgggatctcggagaaga

SEQ ID NO: 206835 - DNA, 25 bp, Homo sapien
aaaataagatagtcctgggatctcg

SEQ ID NO: 206836 - DNA, 25 bp, Homo sapien
aacctttgcaacatgtagcctgaga

SEQ ID NO: 206837 - DNA, 25 bp, Homo sapien
gcctgagagatgtgaagttcttgta

SEQ ID NO: 206838 - DNA, 25 bp, Homo sapien
ctcaagtgagagattacggcatgct

SEQ ID NO: 206839 - DNA, 25 bp, Homo sapien
ggagataattactcagcaagccatg

SEQ ID NO: 206840 - DNA, 25 bp, Homo sapien
gcaagccatggatataaggccagag

SEQ ID NO: 206841 - DNA, 25 bp, Homo sapien
taaagtggtcatttgagctgggtcc

SEQ ID NO: 206842 - DNA, 25 bp, Homo sapien
gacagaggcagtacagaatagcagt

SEQ ID NO: 206843 - DNA, 25 bp, Homo sapien
tgtgtgatcacataacacctctgtg

SEQ ID NO: 206844 - DNA, 25 bp, Homo sapien
tagcagttaagagacgacttctggc

SEQ ID NO: 206845 - DNA, 25 bp, Homo sapien
aatctgccaggtgcaaatctcatgt

SEQ ID NO: 206846 - DNA, 25 bp, Homo sapien
tttacactgggtcaaatgggtggct

SEQ ID NO: 206847 - DNA, 25 bp, Homo sapien
ttctttctcgttttcccatgaagtc

SEQ ID NO: 206848 - DNA, 25 bp, Homo sapien
tgcatactcatagtaagcacaacga

SEQ ID NO: 206849 - DNA, 25 bp, Homo sapien
caacgaaaggtcgaagtcttagatt

SEQ ID NO: 206850 - DNA, 25 bp, Homo sapien
gtagccttagctcccaggaagttgc

SEQ ID NO: 206851 - DNA, 25 bp, Homo sapien
acttgttatggctgattgttgttac

SEQ ID NO: 206852 - DNA, 25 bp, Homo sapien
ccctctgcagatgagtactgtggct

SEQ ID NO: 206853 - DNA, 25 bp, Homo sapien
cacaaggtccttgctgaggctgtaa

SEQ ID NO: 206854 - DNA, 25 bp, Homo sapien
aaaatggtagatgatgatcacgatg

SEQ ID NO: 206855 - DNA, 25 bp, Homo sapien
tgatgacagtaccataattgatcat

SEQ ID NO: 206856 - DNA, 25 bp, Homo sapien
cagtaccataattgatcatgattga

SEQ ID NO: 206857 - DNA, 25 bp, Homo sapien
aatggtagatgatgatcacgatgat

SEQ ID NO: 206858 - DNA, 25 bp, Homo sapien
gagttctgaggccaaacagactgca

SEQ ID NO: 206859 - DNA, 25 bp, Homo sapien
tgaggccaaacagactgcagttcaa

SEQ ID NO: 206860 - DNA, 25 bp, Homo sapien
ctgtagacttctgtggggatagaga

SEQ ID NO: 206861 - DNA, 25 bp, Homo sapien
tctgaggccaaacagactgcagttc

SEQ ID NO: 206862 - DNA, 25 bp, Homo sapien
acaatttagagcattgtaaattgtt

SEQ ID NO: 206863 - DNA, 25 bp, Homo sapien
ttgtaaattgttcagtaatttatga

SEQ ID NO: 206864 - DNA, 25 bp, Homo sapien
aatttagagcattgtaaattgttca

SEQ ID NO: 206865 - DNA, 25 bp, Homo sapien
caatttagagcattgtaaattgttc

SEQ ID NO: 206866 - DNA, 25 bp, Homo sapien
aaagtctacgctaattccaagaggc

SEQ ID NO: 206867 - DNA, 25 bp, Homo sapien
tttgtgatgataccctgagaagcag

SEQ ID NO: 206868 - DNA, 25 bp, Homo sapien
caaagcatgtcagaggtgcaagctc

SEQ ID NO: 206869 - DNA, 25 bp, Homo sapien
ttcagttagctaaaagccacgtagg

SEQ ID NO: 206870 - DNA, 25 bp, Homo sapien
tcataagctggccattccaaccgtc

SEQ ID NO: 206871 - DNA, 25 bp, Homo sapien
agtggtaagcctcccccgtctctag

SEQ ID NO: 206872 - DNA, 25 bp, Homo sapien
taaataatgcgagtggaaatttgcc

SEQ ID NO: 206873 - DNA, 25 bp, Homo sapien
ttatgaaatccacaactctccccca

SEQ ID NO: 206874 - DNA, 25 bp, Homo sapien
ttagaggctggtatccccagcttcg

SEQ ID NO: 206875 - DNA, 25 bp, Homo sapien
agaggctggtatccccagcttcgga

SEQ ID NO: 206876 - DNA, 25 bp, Homo sapien
ccagcttcggatttaggctgtttgg

SEQ ID NO: 206877 - DNA, 25 bp, Homo sapien
tccccagcttcggatttaggctgtt

SEQ ID NO: 206878 - DNA, 25 bp, Homo sapien
catagcggtttcgaaggcgactgcg

SEQ ID NO: 206879 - DNA, 25 bp, Homo sapien
tacaactggatttttgcgggcccac

SEQ ID NO: 206880 - DNA, 25 bp, Homo sapien
ggtggtccctctcggcagaaaagta

SEQ ID NO: 206881 - DNA, 25 bp, Homo sapien
aaagcgtccacattcctagtccggt

SEQ ID NO: 206882 - DNA, 25 bp, Homo sapien
cgagggggcctgcatggtctgggcc

SEQ ID NO: 206883 - DNA, 25 bp, Homo sapien
caggaagcagtagggcccccagcag

SEQ ID NO: 206884 - DNA, 25 bp, Homo sapien
agcaccaggaagcagtagggccccc

SEQ ID NO: 206885 - DNA, 25 bp, Homo sapien
ccccagcagcagatgacgaagacga

SEQ ID NO: 206886 - DNA, 25 bp, Homo sapien
gatgaggacggtggtggccgtgcgc

SEQ ID NO: 206887 - DNA, 25 bp, Homo sapien
tgaggacggtggtggccgtgcgcac

SEQ ID NO: 206888 - DNA, 25 bp, Homo sapien
tcatgatgaggacggtggtggccgt

SEQ ID NO: 206889 - DNA, 25 bp, Homo sapien
atgatgaggacggtggtggccgtgc

SEQ ID NO: 206890 - DNA, 25 bp, Homo sapien
cgcgtaggtgttcaccggccgcacg

SEQ ID NO: 206891 - DNA, 25 bp, Homo sapien
caggcgcaccgtcttgcagatgtgg

SEQ ID NO: 206892 - DNA, 25 bp, Homo sapien
cgtggacacgatgccgaagcacgag

SEQ ID NO: 206893 - DNA, 25 bp, Homo sapien
gtaacggtccaacgagatgagcgcc

SEQ ID NO: 206894 - DNA, 25 bp, Homo sapien
cgcgccagggccccgcggcggcggc

SEQ ID NO: 206895 - DNA, 25 bp, Homo sapien
cccgcggcggcggcaggcgccgaac

SEQ ID NO: 206896 - DNA, 25 bp, Homo sapien
ctggcggcgcagaagccgcgccagg

SEQ ID NO: 206897 - DNA, 25 bp, Homo sapien
tggcggcgcagaagccgcgccaggg

SEQ ID NO: 206898 - DNA, 25 bp, Homo sapien
agcagcgccgtgagcagatccgata

SEQ ID NO: 206899 - DNA, 25 bp, Homo sapien
gatccgatagggacagcgacaggat

SEQ ID NO: 206900 - DNA, 25 bp, Homo sapien
cggagctgccggtgcttcacaatca

SEQ ID NO: 206901 - DNA, 25 bp, Homo sapien
cgacaggatgaaggcgttggtgacg

SEQ ID NO: 206902 - DNA, 25 bp, Homo sapien
ggaagatgagcaggaggacgagcgc

SEQ ID NO: 206903 - DNA, 25 bp, Homo sapien
gacagcaggaagatgagcaggagga

SEQ ID NO: 206904 - DNA, 25 bp, Homo sapien
ctagacagcaggaagatgagcagga

SEQ ID NO: 206905 - DNA, 25 bp, Homo sapien
gcaggaagatgagcaggaggacgag

SEQ ID NO: 206906 - DNA, 25 bp, Homo sapien
gcctccgggcctagcggccgcctca

SEQ ID NO: 206907 - DNA, 25 bp, Homo sapien
accgggagcggcagctgtgccgcct

SEQ ID NO: 206908 - DNA, 25 bp, Homo sapien
actgcagctccgtgcgacagcagcg

SEQ ID NO: 206909 - DNA, 25 bp, Homo sapien
ttgcgtcgctcaggttccccagcgc

SEQ ID NO: 206910 - DNA, 25 bp, Homo sapien
aaggagagcacggccgccgtggccg

SEQ ID NO: 206911 - DNA, 25 bp, Homo sapien
gagtgctggctgcccagtaaggcca

SEQ ID NO: 206912 - DNA, 25 bp, Homo sapien
gggcgccggagtgctggctgcccag

SEQ ID NO: 206913 - DNA, 25 bp, Homo sapien
gtggccgcggaggaagtcccgccag

SEQ ID NO: 206914 - DNA, 25 bp, Homo sapien
gctcgctggtgggcggggcggctgc

SEQ ID NO: 206915 - DNA, 25 bp, Homo sapien
ggcggggcggctgcggctcctccat

SEQ ID NO: 206916 - DNA, 25 bp, Homo sapien
gtgggcggggcggctgcggctcctc

SEQ ID NO: 206917 - DNA, 25 bp, Homo sapien
ctcgctggtgggcggggcggctgcg

SEQ ID NO: 206918 - DNA, 25 bp, Homo sapien
cgctaggtcggagtggtggctcggg

SEQ ID NO: 206919 - DNA, 25 bp, Homo sapien
gcggatctcctcatcccgcaccggg

SEQ ID NO: 206920 - DNA, 25 bp, Homo sapien
ggcggcggccgctaggtcggagtgg

SEQ ID NO: 206921 - DNA, 25 bp, Homo sapien
cagtggcggccgcggatctcctcat

SEQ ID NO: 206922 - DNA, 25 bp, Homo sapien
aatttgtatctctaacgggttcgcg

SEQ ID NO: 206923 - DNA, 25 bp, Homo sapien
tacaagtgacgaggtctgaacccca

SEQ ID NO: 206924 - DNA, 25 bp, Homo sapien
gacagaattactaaggatgggccca

SEQ ID NO: 206925 - DNA, 25 bp, Homo sapien
caatgtccggccagataaagtgccg

SEQ ID NO: 206926 - DNA, 25 bp, Homo sapien
tagcatccccatcttcgcgttaagg

SEQ ID NO: 206927 - DNA, 25 bp, Homo sapien
caaggcactgcatgatttgaccctg

SEQ ID NO: 206928 - DNA, 25 bp, Homo sapien
cattgtagcacataaccatggtcta

SEQ ID NO: 206929 - DNA, 25 bp, Homo sapien
tgtaggcagctaggcataatgctct

SEQ ID NO: 206930 - DNA, 25 bp, Homo sapien
cagggagcaagcagcgggggccacc

SEQ ID NO: 206931 - DNA, 25 bp, Homo sapien
tgcagggagcaagcagcgggggcca

SEQ ID NO: 206932 - DNA, 25 bp, Homo sapien
ctgcagggagcaagcagcgggggcc

SEQ ID NO: 206933 - DNA, 25 bp, Homo sapien
gggagcaagcagcgggggccaccat

SEQ ID NO: 206934 - DNA, 25 bp, Homo sapien
gatacttcagtacctgtggatgtag

SEQ ID NO: 206935 - DNA, 25 bp, Homo sapien
tgattactagttggtcttctcagca

SEQ ID NO: 206936 - DNA, 25 bp, Homo sapien
tttaaatctacctagcatgcagctg

SEQ ID NO: 206937 - DNA, 25 bp, Homo sapien
gactcattccattgtaaggattcac

SEQ ID NO: 206938 - DNA, 25 bp, Homo sapien
gcttgtaaagttcagttaaattcca

SEQ ID NO: 206939 - DNA, 25 bp, Homo sapien
ctgttgtgctaagtgttgagtactt

SEQ ID NO: 206940 - DNA, 25 bp, Homo sapien
taatccatctcctttacatgctgct

SEQ ID NO: 206941 - DNA, 25 bp, Homo sapien
gctgcttatagagagggcattattc

SEQ ID NO: 206942 - DNA, 25 bp, Homo sapien
tattcgaagagcctttaatacaaaa

SEQ ID NO: 206943 - DNA, 25 bp, Homo sapien
attattcgaagagcctttaatacaa

SEQ ID NO: 206944 - DNA, 25 bp, Homo sapien
ttattcgaagagcctttaatacaaa

SEQ ID NO: 206945 - DNA, 25 bp, Homo sapien
tattattcgaagagcctttaataca

SEQ ID NO: 206946 - DNA, 25 bp, Homo sapien
gcaaatacgaggtataatgacttta

SEQ ID NO: 206947 - DNA, 25 bp, Homo sapien
ctggcattttgtatgctagacataa

SEQ ID NO: 206948 - DNA, 25 bp, Homo sapien
cctgatacgttaatcactagaaaaa

SEQ ID NO: 206949 - DNA, 25 bp, Homo sapien
gactttatatttagccacagggtag

SEQ ID NO: 206950 - DNA, 25 bp, Homo sapien
agaaaacagtccttaaggataatga

SEQ ID NO: 206951 - DNA, 25 bp, Homo sapien
gagaaaacagtccttaaggataatg

SEQ ID NO: 206952 - DNA, 25 bp, Homo sapien
gtcctgatacttccactataacagc

SEQ ID NO: 206953 - DNA, 25 bp, Homo sapien
gggtcgtcatcttctattataaagc

SEQ ID NO: 206954 - DNA, 25 bp, Homo sapien
taaagcttgctgtacccgtgtaatg

SEQ ID NO: 206955 - DNA, 25 bp, Homo sapien
ccgtgtaatgggcttgtcctgatac

SEQ ID NO: 206956 - DNA, 25 bp, Homo sapien
tttaaggagaatgacatggtcagac

SEQ ID NO: 206957 - DNA, 25 bp, Homo sapien
gcactcgtattatatctggcttgaa

SEQ ID NO: 206958 - DNA, 25 bp, Homo sapien
gtatactatcaaaatattgcactcg

SEQ ID NO: 206959 - DNA, 25 bp, Homo sapien
cttgtgttttagataactgtagctg

SEQ ID NO: 206960 - DNA, 25 bp, Homo sapien
gagtttgagacacctctgggacagt

SEQ ID NO: 206961 - DNA, 25 bp, Homo sapien
gagaatatctgggaacataccaagg

SEQ ID NO: 206962 - DNA, 25 bp, Homo sapien
gcaagtgaagacattctggcaagca

SEQ ID NO: 206963 - DNA, 25 bp, Homo sapien
taggaagtggatgaaattgcccagc

SEQ ID NO: 206964 - DNA, 25 bp, Homo sapien
tttggggggacattgcaatcccaga

SEQ ID NO: 206965 - DNA, 25 bp, Homo sapien
tctctcggctccctctctatttggg

SEQ ID NO: 206966 - DNA, 25 bp, Homo sapien
gggacattgcaatcccagattcttc

SEQ ID NO: 206967 - DNA, 25 bp, Homo sapien
tggggggacattgcaatcccagatt

SEQ ID NO: 206968 - DNA, 25 bp, Homo sapien
cttaacagcatgtggtctgttcaga

SEQ ID NO: 206969 - DNA, 25 bp, Homo sapien
aacgataataacagcacagtactga

SEQ ID NO: 206970 - DNA, 25 bp, Homo sapien
gacctggatctgctactcactaact

SEQ ID NO: 206971 - DNA, 25 bp, Homo sapien
acttctccaattctccgttttatca

SEQ ID NO: 206972 - DNA, 25 bp, Homo sapien
acatcgtagcctctgaagaacccca

SEQ ID NO: 206973 - DNA, 25 bp, Homo sapien
ggttgggttatcacatatcacatcg

SEQ ID NO: 206974 - DNA, 25 bp, Homo sapien
tgaacacagttttgaccctctgaac

SEQ ID NO: 206975 - DNA, 25 bp, Homo sapien
tataccttaagatttgaggacccca

SEQ ID NO: 206976 - DNA, 25 bp, Homo sapien
gccctttgtgatactgtaaggcaat

SEQ ID NO: 206977 - DNA, 25 bp, Homo sapien
tgaatactgagccagttgcactgct

SEQ ID NO: 206978 - DNA, 25 bp, Homo sapien
ctgagccagtgggacttctgtcaac

SEQ ID NO: 206979 - DNA, 25 bp, Homo sapien
aggcaattcgggctgtcactcctga

SEQ ID NO: 206980 - DNA, 25 bp, Homo sapien
tagtgtgttccatattacctggctt

SEQ ID NO: 206981 - DNA, 25 bp, Homo sapien
tcatagtgtgttccatattacctgg

SEQ ID NO: 206982 - DNA, 25 bp, Homo sapien
tgttcatagtgtgttccatattacc

SEQ ID NO: 206983 - DNA, 25 bp, Homo sapien
gttccatattacctggcttttgtcc

SEQ ID NO: 206984 - DNA, 25 bp, Homo sapien
ggtcttcactatcaggatgattaat

SEQ ID NO: 206985 - DNA, 25 bp, Homo sapien
gcaaggtcttcactatcaggatgat

SEQ ID NO: 206986 - DNA, 25 bp, Homo sapien
ccatctgttaatatagttccatata

SEQ ID NO: 206987 - DNA, 25 bp, Homo sapien
tgcaaaaacacaaatgttggtggtt

SEQ ID NO: 206988 - DNA, 25 bp, Homo sapien
actgcactcgctgcatccacaaggt

SEQ ID NO: 206989 - DNA, 25 bp, Homo sapien
tgcagaacaaatgtctagtcctaac

SEQ ID NO: 206990 - DNA, 25 bp, Homo sapien
actgcctctgtcactgcactcgctg

SEQ ID NO: 206991 - DNA, 25 bp, Homo sapien
aatgcaccgccatatgcaatgtcca

SEQ ID NO: 206992 - DNA, 25 bp, Homo sapien
cgctgagtcagggtaacacgcaatt

SEQ ID NO: 206993 - DNA, 25 bp, Homo sapien
tacacgcaccaaatacgcaaggctg

SEQ ID NO: 206994 - DNA, 25 bp, Homo sapien
tcagggaaaatcgaaattacacgca

SEQ ID NO: 206995 - DNA, 25 bp, Homo sapien
accggtgaaatctctaggaatgcct

SEQ ID NO: 206996 - DNA, 25 bp, Homo sapien
gtcccggttgcagctctgccctggg

SEQ ID NO: 206997 - DNA, 25 bp, Homo sapien
gagtaggttagttgccagagttcca

SEQ ID NO: 206998 - DNA, 25 bp, Homo sapien
cagcccagaaaaaccgttaatgtag

SEQ ID NO: 206999 - DNA, 25 bp, Homo sapien
taattgcaaggtttcgcggagtagg

SEQ ID NO: 207000 - DNA, 25 bp, Homo sapien
aagcccgaagtccaaagcgaagcgg

SEQ ID NO: 207001 - DNA, 25 bp, Homo sapien
ggctcgaacatgagccgtcgccgca

SEQ ID NO: 207002 - DNA, 25 bp, Homo sapien
cgtcgccgcacgtggtcaaggtgct

SEQ ID NO: 207003 - DNA, 25 bp, Homo sapien
cagtggatattgacgcgggcctcgc

SEQ ID NO: 207004 - DNA, 25 bp, Homo sapien
agtacggtcccgcagctatggcttc

SEQ ID NO: 207005 - DNA, 25 bp, Homo sapien
agacgagtacggtcccgcagctatg

SEQ ID NO: 207006 - DNA, 25 bp, Homo sapien
gggagacgagtacggtcccgcagct

SEQ ID NO: 207007 - DNA, 25 bp, Homo sapien
ggtcccgcagctatggcttcaagcc

SEQ ID NO: 207008 - DNA, 25 bp, Homo sapien
cgtagatttatagcgcccgtcacaa

SEQ ID NO: 207009 - DNA, 25 bp, Homo sapien
cgcgggtgatagtgcagaaaaaaca

SEQ ID NO: 207010 - DNA, 25 bp, Homo sapien
taatgtcgagggaacacttgcttga

SEQ ID NO: 207011 - DNA, 25 bp, Homo sapien
cttcggaattgaaaacgcgggtgat

SEQ ID NO: 207012 - DNA, 25 bp, Homo sapien
gaaattcacacctgcatgcatcata

SEQ ID NO: 207013 - DNA, 25 bp, Homo sapien
gataactggcttcaggttttacaaa

SEQ ID NO: 207014 - DNA, 25 bp, Homo sapien
taatgagaaaccgattcacagatcc

SEQ ID NO: 207015 - DNA, 25 bp, Homo sapien
ggcacacctgttaacagccttggtt

SEQ ID NO: 207016 - DNA, 25 bp, Homo sapien
gaaacgtaatcacttccagaaacta

SEQ ID NO: 207017 - DNA, 25 bp, Homo sapien
taaactatccccacatgtaggcagc

SEQ ID NO: 207018 - DNA, 25 bp, Homo sapien
cagaaacctttggaacactagtgca

SEQ ID NO: 207019 - DNA, 25 bp, Homo sapien
gcagttattactcttatagcaggaa

SEQ ID NO: 207020 - DNA, 25 bp, Homo sapien
gctacactggaaggccgctaggaag

SEQ ID NO: 207021 - DNA, 25 bp, Homo sapien
aagctttaacacgtgtaatctgcag

SEQ ID NO: 207022 - DNA, 25 bp, Homo sapien
taatctgcagtccttaacagtggcg

SEQ ID NO: 207023 - DNA, 25 bp, Homo sapien
tcagctgttctttagggcaaaatca

SEQ ID NO: 207024 - DNA, 25 bp, Homo sapien
tgttgtgtttcagtttgtttttcac

SEQ ID NO: 207025 - DNA, 25 bp, Homo sapien
ctgttgtgtttcagtttgtttttca

SEQ ID NO: 207026 - DNA, 25 bp, Homo sapien
ggggtctgatagcaaacatagaaat

SEQ ID NO: 207027 - DNA, 25 bp, Homo sapien
caggttttctgtttatagattggtt

SEQ ID NO: 207028 - DNA, 25 bp, Homo sapien
tggttcaagatttgtttggattatt

SEQ ID NO: 207029 - DNA, 25 bp, Homo sapien
gattggttcaagatttgtttggatt

SEQ ID NO: 207030 - DNA, 25 bp, Homo sapien
tagattggttcaagatttgtttgga

SEQ ID NO: 207031 - DNA, 25 bp, Homo sapien
atacttggtggaggttgtgtgaatt

SEQ ID NO: 207032 - DNA, 25 bp, Homo sapien
aagacttctattaacagctgcaaaa

SEQ ID NO: 207033 - DNA, 25 bp, Homo sapien
tactgatacttggtggaggttgtgt

SEQ ID NO: 207034 - DNA, 25 bp, Homo sapien
taagacttctattaacagctgcaaa

SEQ ID NO: 207035 - DNA, 25 bp, Homo sapien
ttttcctgtagtagtctgtcttttg

SEQ ID NO: 207036 - DNA, 25 bp, Homo sapien
tttcctgtagtagtctgtcttttga

SEQ ID NO: 207037 - DNA, 25 bp, Homo sapien
tcctgtagtagtctgtcttttgaat

SEQ ID NO: 207038 - DNA, 25 bp, Homo sapien
ttcctgtagtagtctgtcttttgaa

SEQ ID NO: 207039 - DNA, 25 bp, Homo sapien
ggaaatgaacccttgtacgaatgtg

SEQ ID NO: 207040 - DNA, 25 bp, Homo sapien
cagtacatttaaccactgggaaatg

SEQ ID NO: 207041 - DNA, 25 bp, Homo sapien
ttttctcagtacatttaaccactgg

SEQ ID NO: 207042 - DNA, 25 bp, Homo sapien
acccttgtacgaatgtgtttcttct

SEQ ID NO: 207043 - DNA, 25 bp, Homo sapien
taatgaagctagtgcagtgatcctg

SEQ ID NO: 207044 - DNA, 25 bp, Homo sapien
cagtgactatcatggccagaagagg

SEQ ID NO: 207045 - DNA, 25 bp, Homo sapien
caggctccaaagtgcccaatgttaa

SEQ ID NO: 207046 - DNA, 25 bp, Homo sapien
tatgcactttaaggttcagggcctg

SEQ ID NO: 207047 - DNA, 25 bp, Homo sapien
tagtaaaatagcaggaagtcccatg

SEQ ID NO: 207048 - DNA, 25 bp, Homo sapien
tatagtaaaatagcaggaagtccca

SEQ ID NO: 207049 - DNA, 25 bp, Homo sapien
cagctatatagtaaaatagcaggaa

SEQ ID NO: 207050 - DNA, 25 bp, Homo sapien
ctatatagtaaaatagcaggaagtc

SEQ ID NO: 207051 - DNA, 25 bp, Homo sapien
tctttcacgcagcttgtctgttaga

SEQ ID NO: 207052 - DNA, 25 bp, Homo sapien
tgttccacaagcaaacgcagccctt

SEQ ID NO: 207053 - DNA, 25 bp, Homo sapien
tccctcgtagccatgtactgacatg

SEQ ID NO: 207054 - DNA, 25 bp, Homo sapien
taagaaggtccattggtgattcctg

SEQ ID NO: 207055 - DNA, 25 bp, Homo sapien
tcagcccacaaatccttatattgtg

SEQ ID NO: 207056 - DNA, 25 bp, Homo sapien
tcacataccagggcctgttgtcggt

SEQ ID NO: 207057 - DNA, 25 bp, Homo sapien
cacataccagggcctgttgtcggtg

SEQ ID NO: 207058 - DNA, 25 bp, Homo sapien
acataccagggcctgttgtcggtgg

SEQ ID NO: 207059 - DNA, 25 bp, Homo sapien
cttgaggtgtgcatgagggcttctt

SEQ ID NO: 207060 - DNA, 25 bp, Homo sapien
tagttgccgagacaagtcgcttgag

SEQ ID NO: 207061 - DNA, 25 bp, Homo sapien
gacaagtcgcttgaggtgtgcatga

SEQ ID NO: 207062 - DNA, 25 bp, Homo sapien
cctcctgagctattagttgccgaga

SEQ ID NO: 207063 - DNA, 25 bp, Homo sapien
agttctttagagtttcaaaatgatc

SEQ ID NO: 207064 - DNA, 25 bp, Homo sapien
cttgatctcgtaattgttgtaattc

SEQ ID NO: 207065 - DNA, 25 bp, Homo sapien
ctttcttgatctcgtaattgttgta

SEQ ID NO: 207066 - DNA, 25 bp, Homo sapien
ggtcatttatatagaatccattttc

SEQ ID NO: 207067 - DNA, 25 bp, Homo sapien
ctgctcaaacagaaaaccccaaatt

SEQ ID NO: 207068 - DNA, 25 bp, Homo sapien
tgctcaaacagaaaaccccaaatta

SEQ ID NO: 207069 - DNA, 25 bp, Homo sapien
ctaatgtatcttgaaaagtcccttg

SEQ ID NO: 207070 - DNA, 25 bp, Homo sapien
catgttgctaatgtatcttgaaaag

SEQ ID NO: 207071 - DNA, 25 bp, Homo sapien
tgttgctaatgtatcttgaaaagtc

SEQ ID NO: 207072 - DNA, 25 bp, Homo sapien
tgctaatgtatcttgaaaagtccct

SEQ ID NO: 207073 - DNA, 25 bp, Homo sapien
ataatattactgagctcttctaact

SEQ ID NO: 207074 - DNA, 25 bp, Homo sapien
tattactgagctcttctaactttct

SEQ ID NO: 207075 - DNA, 25 bp, Homo sapien
tctctttatactcttgttctgccac

SEQ ID NO: 207076 - DNA, 25 bp, Homo sapien
gttgtggaagatactcaactagttc

SEQ ID NO: 207077 - DNA, 25 bp, Homo sapien
gccacaaatccactgatctcctgtt

SEQ ID NO: 207078 - DNA, 25 bp, Homo sapien
ctgttgtaagtttttcaatctgtgc

SEQ ID NO: 207079 - DNA, 25 bp, Homo sapien
aatccactgatctcctgttgtctga

SEQ ID NO: 207080 - DNA, 25 bp, Homo sapien
gtttttcaatctgtgccacaaatcc

SEQ ID NO: 207081 - DNA, 25 bp, Homo sapien
aattcgtctaacttctgcattctga

SEQ ID NO: 207082 - DNA, 25 bp, Homo sapien
ctcgttaagtaattcaattcgtcta

SEQ ID NO: 207083 - DNA, 25 bp, Homo sapien
tatcttggctgtccaacgtgcatgc

SEQ ID NO: 207084 - DNA, 25 bp, Homo sapien
tttctgtaatagcttgtatttcagc

SEQ ID NO: 207085 - DNA, 25 bp, Homo sapien
caggattttgatttgttgctgatac

SEQ ID NO: 207086 - DNA, 25 bp, Homo sapien
gttgctgatacactgtttttgttgc

SEQ ID NO: 207087 - DNA, 25 bp, Homo sapien
tgactttctctttccaggttagcac

SEQ ID NO: 207088 - DNA, 25 bp, Homo sapien
tttccaggttagcactcaggatttt

SEQ ID NO: 207089 - DNA, 25 bp, Homo sapien
ctgctatgacttaagttaggcttgc

SEQ ID NO: 207090 - DNA, 25 bp, Homo sapien
taagttaggcttgctgtatacagag

SEQ ID NO: 207091 - DNA, 25 bp, Homo sapien
gcttgctgtatacagaggacatgaa

SEQ ID NO: 207092 - DNA, 25 bp, Homo sapien
caaggaaagggtgtcatcatttgca

SEQ ID NO: 207093 - DNA, 25 bp, Homo sapien
gtgtgatgagtccttcttccatatt

SEQ ID NO: 207094 - DNA, 25 bp, Homo sapien
ctggagtgtgatgagtccttcttcc

SEQ ID NO: 207095 - DNA, 25 bp, Homo sapien
tctcttttgtgacagaaagtattct

SEQ ID NO: 207096 - DNA, 25 bp, Homo sapien
ctactctcttttgtgacagaaagta

SEQ ID NO: 207097 - DNA, 25 bp, Homo sapien
ttgtctggcaagagttttcattttc

SEQ ID NO: 207098 - DNA, 25 bp, Homo sapien
tctttgtattccatacgagcagcat

SEQ ID NO: 207099 - DNA, 25 bp, Homo sapien
tattccatacgagcagcatgcagtg

SEQ ID NO: 207100 - DNA, 25 bp, Homo sapien
cattttctctcgtaggtctttgtat

SEQ ID NO: 207101 - DNA, 25 bp, Homo sapien
catcattagatatatcatctagttt

SEQ ID NO: 207102 - DNA, 25 bp, Homo sapien
ctttctttagctcactgacctcttg

SEQ ID NO: 207103 - DNA, 25 bp, Homo sapien
cctccagaattgcaaggtctttctt

SEQ ID NO: 207104 - DNA, 25 bp, Homo sapien
ccttattgattcgtgtagtcgtgct

SEQ ID NO: 207105 - DNA, 25 bp, Homo sapien
tagtcgtgctatctctaaattgtga

SEQ ID NO: 207106 - DNA, 25 bp, Homo sapien
cgctgcggaaacagtaactgtttct

SEQ ID NO: 207107 - DNA, 25 bp, Homo sapien
tccattctctttacttcacgggtat

SEQ ID NO: 207108 - DNA, 25 bp, Homo sapien
gctgcggaaacagtaactgtttctt

SEQ ID NO: 207109 - DNA, 25 bp, Homo sapien
tacttcacgggtattttcaaattca

SEQ ID NO: 207110 - DNA, 25 bp, Homo sapien
tctccatagtttggttgagtgacag

SEQ ID NO: 207111 - DNA, 25 bp, Homo sapien
tttctccatagtttggttgagtgac

SEQ ID NO: 207112 - DNA, 25 bp, Homo sapien
ttttgcaatgctatgtcttctctct

SEQ ID NO: 207113 - DNA, 25 bp, Homo sapien
cttattagatattctgccctttctt

SEQ ID NO: 207114 - DNA, 25 bp, Homo sapien
tgggaggaaagaattgctcacagag

SEQ ID NO: 207115 - DNA, 25 bp, Homo sapien
agaattgctcacagagtgagaagca

SEQ ID NO: 207116 - DNA, 25 bp, Homo sapien
aaagaattgctcacagagtgagaag

SEQ ID NO: 207117 - DNA, 25 bp, Homo sapien
aattgctcacagagtgagaagcaca

SEQ ID NO: 207118 - DNA, 25 bp, Homo sapien
cacacatccattgcgggcggtgtcc

SEQ ID NO: 207119 - DNA, 25 bp, Homo sapien
cattaacctcacacatccattgcgg

SEQ ID NO: 207120 - DNA, 25 bp, Homo sapien
aactctgagctcaataggagtcatt

SEQ ID NO: 207121 - DNA, 25 bp, Homo sapien
gctcaataggagtcattaacctcac

SEQ ID NO: 207122 - DNA, 25 bp, Homo sapien
ttcattctctgtccttgtaattctc

SEQ ID NO: 207123 - DNA, 25 bp, Homo sapien
cattatattttgtcaggtcagttat

SEQ ID NO: 207124 - DNA, 25 bp, Homo sapien
cccagagcttcattatattttgtca

SEQ ID NO: 207125 - DNA, 25 bp, Homo sapien
tcttcagaagctctatttcattctc

SEQ ID NO: 207126 - DNA, 25 bp, Homo sapien
aagatttaatctgcgagcgtctcgg

SEQ ID NO: 207127 - DNA, 25 bp, Homo sapien
gatttaatctgcgagcgtctcggac

SEQ ID NO: 207128 - DNA, 25 bp, Homo sapien
aaaaagatttaatctgcgagcgtct

SEQ ID NO: 207129 - DNA, 25 bp, Homo sapien
taatctgcgagcgtctcggacacat

SEQ ID NO: 207130 - DNA, 25 bp, Homo sapien
caattccctcttaatgctattggga

SEQ ID NO: 207131 - DNA, 25 bp, Homo sapien
gagtttccaatagatagtatagttt

SEQ ID NO: 207132 - DNA, 25 bp, Homo sapien
gagttccatgctttcaatctccaaa

SEQ ID NO: 207133 - DNA, 25 bp, Homo sapien
caaaagatcgattgtggcttttctc

SEQ ID NO: 207134 - DNA, 25 bp, Homo sapien
ccttaagaaagatcttagcttcttc

SEQ ID NO: 207135 - DNA, 25 bp, Homo sapien
tgtccttaagaaagatcttagcttc

SEQ ID NO: 207136 - DNA, 25 bp, Homo sapien
tccttaagaaagatcttagcttctt

SEQ ID NO: 207137 - DNA, 25 bp, Homo sapien
gtccttaagaaagatcttagcttct

SEQ ID NO: 207138 - DNA, 25 bp, Homo sapien
acagaagcctcttaaacactccctt

SEQ ID NO: 207139 - DNA, 25 bp, Homo sapien
cagaagcctcttaaacactcccttt

SEQ ID NO: 207140 - DNA, 25 bp, Homo sapien
agtttgccacggcaaaatgtcggag

SEQ ID NO: 207141 - DNA, 25 bp, Homo sapien
cacggcaaaatgtcggaggaagtta

SEQ ID NO: 207142 - DNA, 25 bp, Homo sapien
tttgccacggcaaaatgtcggagga

SEQ ID NO: 207143 - DNA, 25 bp, Homo sapien
gccacggcaaaatgtcggaggaagt

SEQ ID NO: 207144 - DNA, 25 bp, Homo sapien
ttgtaaaggaacggcaagaagagaa

SEQ ID NO: 207145 - DNA, 25 bp, Homo sapien
cttgtaaaggaacggcaagaagaga

SEQ ID NO: 207146 - DNA, 25 bp, Homo sapien
gtggagacggcagccgcctgcacca

SEQ ID NO: 207147 - DNA, 25 bp, Homo sapien
tccagcgcctcgaccgcgaccgagg

SEQ ID NO: 207148 - DNA, 25 bp, Homo sapien
gggccagtggagacggcagccgcct

SEQ ID NO: 207149 - DNA, 25 bp, Homo sapien
gtggagggtaaggtgcataactcca

SEQ ID NO: 207150 - DNA, 25 bp, Homo sapien
agagccaaggattgccggttgccac

SEQ ID NO: 207151 - DNA, 25 bp, Homo sapien
ccagagccaaggattgccggttgcc

SEQ ID NO: 207152 - DNA, 25 bp, Homo sapien
agccagagccaaggattgccggttg

SEQ ID NO: 207153 - DNA, 25 bp, Homo sapien
ctaagccagagccaaggattgccgg

SEQ ID NO: 207154 - DNA, 25 bp, Homo sapien
aatctgaatttctagcctccctggg

SEQ ID NO: 207155 - DNA, 25 bp, Homo sapien
cccttgtgatgctgggtgacttacc

SEQ ID NO: 207156 - DNA, 25 bp, Homo sapien
gaaccctgacatcagtcccttgtga

SEQ ID NO: 207157 - DNA, 25 bp, Homo sapien
acctagctggctgggtgaatccttc

SEQ ID NO: 207158 - DNA, 25 bp, Homo sapien
gatgagcgattcaataaccttgagg

SEQ ID NO: 207159 - DNA, 25 bp, Homo sapien
gaaggacttccgactccaggttgga

SEQ ID NO: 207160 - DNA, 25 bp, Homo sapien
aggttggagcactgcctgctctgcc

SEQ ID NO: 207161 - DNA, 25 bp, Homo sapien
ttgaggttaacaccccaatcgtaga

SEQ ID NO: 207162 - DNA, 25 bp, Homo sapien
gcattccaggaacatgtcttaggga

SEQ ID NO: 207163 - DNA, 25 bp, Homo sapien
gttgcatgtgcctcttgaaccacag

SEQ ID NO: 207164 - DNA, 25 bp, Homo sapien
tctgtgtaccccatttcgtatgttc

SEQ ID NO: 207165 - DNA, 25 bp, Homo sapien
gagcttgaagcgcagtgggcttcca

SEQ ID NO: 207166 - DNA, 25 bp, Homo sapien
cataagcatttcctccattgagctt

SEQ ID NO: 207167 - DNA, 25 bp, Homo sapien
cttcaccttgattcataagccaaac

SEQ ID NO: 207168 - DNA, 25 bp, Homo sapien
tttcctccattgagcttattaagta

SEQ ID NO: 207169 - DNA, 25 bp, Homo sapien
cttgattcataagccaaacataagc

SEQ ID NO: 207170 - DNA, 25 bp, Homo sapien
tgaatatcacctgggctgatgctcc

SEQ ID NO: 207171 - DNA, 25 bp, Homo sapien
tcatcttgaatatcacctgggctga

SEQ ID NO: 207172 - DNA, 25 bp, Homo sapien
tcttgaatatcacctgggctgatgc

SEQ ID NO: 207173 - DNA, 25 bp, Homo sapien
ccatcatcttgaatatcacctgggc

SEQ ID NO: 207174 - DNA, 25 bp, Homo sapien
ttctttctttatctcgggctggacc

SEQ ID NO: 207175 - DNA, 25 bp, Homo sapien
cttggcactttagctcatgttcttt

SEQ ID NO: 207176 - DNA, 25 bp, Homo sapien
tcgggctggaccttcttcatgtggc

SEQ ID NO: 207177 - DNA, 25 bp, Homo sapien
caggacccagccgtgaagttcacct

SEQ ID NO: 207178 - DNA, 25 bp, Homo sapien
gagtccgtaattgaatccattagga

SEQ ID NO: 207179 - DNA, 25 bp, Homo sapien
tatccagagtccgtaattgaatcca

SEQ ID NO: 207180 - DNA, 25 bp, Homo sapien
aagtgcaaatatccagagtccgtaa

SEQ ID NO: 207181 - DNA, 25 bp, Homo sapien
gcaaatatccagagtccgtaattga

SEQ ID NO: 207182 - DNA, 25 bp, Homo sapien
acatgctggtactttttagtaacca

SEQ ID NO: 207183 - DNA, 25 bp, Homo sapien
ttagtaaccatacatgtaaatcagc

SEQ ID NO: 207184 - DNA, 25 bp, Homo sapien
tgtaaatcagcccaccaatcccata

SEQ ID NO: 207185 - DNA, 25 bp, Homo sapien
aagttaacatgctggtactttttag

SEQ ID NO: 207186 - DNA, 25 bp, Homo sapien
gttatacaaaactgattaccataag

SEQ ID NO: 207187 - DNA, 25 bp, Homo sapien
aagttatacaaaactgattaccata

SEQ ID NO: 207188 - DNA, 25 bp, Homo sapien
ttaagttatacaaaactgattacca

SEQ ID NO: 207189 - DNA, 25 bp, Homo sapien
taagttatacaaaactgattaccat

SEQ ID NO: 207190 - DNA, 25 bp, Homo sapien
gaagagaagaagaacaccgaagagg

SEQ ID NO: 207191 - DNA, 25 bp, Homo sapien
caacccaaggacatataagcgattt

SEQ ID NO: 207192 - DNA, 25 bp, Homo sapien
ctttagtggttgacacaagtgactc

SEQ ID NO: 207193 - DNA, 25 bp, Homo sapien
tattgcatcagagcactcggcagga

SEQ ID NO: 207194 - DNA, 25 bp, Homo sapien
tccagacattcctgtttgtgtccag

SEQ ID NO: 207195 - DNA, 25 bp, Homo sapien
ctccagacattcctgtttgtgtcca

SEQ ID NO: 207196 - DNA, 25 bp, Homo sapien
agcatgcctcttagcgcctgggatt

SEQ ID NO: 207197 - DNA, 25 bp, Homo sapien
tgcctcttagcgcctgggattttag

SEQ ID NO: 207198 - DNA, 25 bp, Homo sapien
gcctcttagcgcctgggattttagc

SEQ ID NO: 207199 - DNA, 25 bp, Homo sapien
catgcctcttagcgcctgggatttt

SEQ ID NO: 207200 - DNA, 25 bp, Homo sapien
tttgccacaacagcatttatgtgag

SEQ ID NO: 207201 - DNA, 25 bp, Homo sapien
tgccacaacagcatttatgtgagtc

SEQ ID NO: 207202 - DNA, 25 bp, Homo sapien
ttatgtgagtcctcacaagtcccag

SEQ ID NO: 207203 - DNA, 25 bp, Homo sapien
atttatgtgagtcctcacaagtccc

SEQ ID NO: 207204 - DNA, 25 bp, Homo sapien
ggtgcttaacatacactacaggtag

SEQ ID NO: 207205 - DNA, 25 bp, Homo sapien
aacatacactacaggtagagtaaac

SEQ ID NO: 207206 - DNA, 25 bp, Homo sapien
gcttaacatacactacaggtagagt

SEQ ID NO: 207207 - DNA, 25 bp, Homo sapien
catacactacaggtagagtaaacat

SEQ ID NO: 207208 - DNA, 25 bp, Homo sapien
cgtatacagtcttatctgctcttac

SEQ ID NO: 207209 - DNA, 25 bp, Homo sapien
gaaggaagacgtatacagtcttatc

SEQ ID NO: 207210 - DNA, 25 bp, Homo sapien
ggaagacgtatacagtcttatctgc

SEQ ID NO: 207211 - DNA, 25 bp, Homo sapien
gggtgaaggaagacgtatacagtct

SEQ ID NO: 207212 - DNA, 25 bp, Homo sapien
aagagagcgccaacgtaggtcagga

SEQ ID NO: 207213 - DNA, 25 bp, Homo sapien
ggtcaggccattgaagagagcgcca

SEQ ID NO: 207214 - DNA, 25 bp, Homo sapien
gccattgaagagagcgccaacgtag

SEQ ID NO: 207215 - DNA, 25 bp, Homo sapien
gccaacgtaggtcaggagccacatc

SEQ ID NO: 207216 - DNA, 25 bp, Homo sapien
cagaagtcttatgggcacacagtca

SEQ ID NO: 207217 - DNA, 25 bp, Homo sapien
tgattccacgtgtaagtcaccagga

SEQ ID NO: 207218 - DNA, 25 bp, Homo sapien
taataatctacgaagctgtggccct

SEQ ID NO: 207219 - DNA, 25 bp, Homo sapien
tcatggtgccatacaactggaggtc

SEQ ID NO: 207220 - DNA, 25 bp, Homo sapien
tggacaaggaagagcctcctcagtt

SEQ ID NO: 207221 - DNA, 25 bp, Homo sapien
ggtgatctcaagctccaagtaggcc

SEQ ID NO: 207222 - DNA, 25 bp, Homo sapien
ggcagtccgtgtacttctgaatctg

SEQ ID NO: 207223 - DNA, 25 bp, Homo sapien
ccttaagtgtgctgttcacgtagaa

SEQ ID NO: 207224 - DNA, 25 bp, Homo sapien
gggaatcatgagacaggctgccgaa

SEQ ID NO: 207225 - DNA, 25 bp, Homo sapien
gttatgccagccagtgagggccaca

SEQ ID NO: 207226 - DNA, 25 bp, Homo sapien
tggctacctaagacacagcatgggt

SEQ ID NO: 207227 - DNA, 25 bp, Homo sapien
gaattctccacacatgacttcatgg

SEQ ID NO: 207228 - DNA, 25 bp, Homo sapien
tcaccacgctgaactgggtcaggga

SEQ ID NO: 207229 - DNA, 25 bp, Homo sapien
cgatgcccgtctgcttgatgtcccg

SEQ ID NO: 207230 - DNA, 25 bp, Homo sapien
aaacagacttgtagatgcggaaact

SEQ ID NO: 207231 - DNA, 25 bp, Homo sapien
gatgtcccgccaatacaacaggtca

SEQ ID NO: 207232 - DNA, 25 bp, Homo sapien
ccaccaagctgtggttgctgtgggt

SEQ ID NO: 207233 - DNA, 25 bp, Homo sapien
tcactccaccaagctgtggttgctg

SEQ ID NO: 207234 - DNA, 25 bp, Homo sapien
ggctcactccaccaagctgtggttg

SEQ ID NO: 207235 - DNA, 25 bp, Homo sapien
actccaccaagctgtggttgctgtg

SEQ ID NO: 207236 - DNA, 25 bp, Homo sapien
ggtttacagaattagactccagtca

SEQ ID NO: 207237 - DNA, 25 bp, Homo sapien
tggctacagacttacctcaggctgg

SEQ ID NO: 207238 - DNA, 25 bp, Homo sapien
tccagtcatttgctcataggaagac

SEQ ID NO: 207239 - DNA, 25 bp, Homo sapien
cctccaactgggtatgtgacaaatg

SEQ ID NO: 207240 - DNA, 25 bp, Homo sapien
gaagcctcctaaatctccaaccagg

SEQ ID NO: 207241 - DNA, 25 bp, Homo sapien
ggaagcctcctaaatctccaaccag

SEQ ID NO: 207242 - DNA, 25 bp, Homo sapien
ctcaagaagtctgtgaatggcaggc

SEQ ID NO: 207243 - DNA, 25 bp, Homo sapien
aagtctgtgaatggcaggcacttca

SEQ ID NO: 207244 - DNA, 25 bp, Homo sapien
tatactacactgttgttagctgttc

SEQ ID NO: 207245 - DNA, 25 bp, Homo sapien
ctaaattctttgagggttagaagca

SEQ ID NO: 207246 - DNA, 25 bp, Homo sapien
aattgtactcctaatcctagccctc

SEQ ID NO: 207247 - DNA, 25 bp, Homo sapien
ttgagggttagaagcaaatctttgc

SEQ ID NO: 207248 - DNA, 25 bp, Homo sapien
ttggagggatcttcacaggataacc

SEQ ID NO: 207249 - DNA, 25 bp, Homo sapien
caggataaccgggatcaaaggaaga

SEQ ID NO: 207250 - DNA, 25 bp, Homo sapien
gatactcaagaatggttgtcttcat

SEQ ID NO: 207251 - DNA, 25 bp, Homo sapien
ctttggaaatgtgatagttgaggca

SEQ ID NO: 207252 - DNA, 25 bp, Homo sapien
gaagggcctggtaactataatggac

SEQ ID NO: 207253 - DNA, 25 bp, Homo sapien
tgcacacaacttaggaggatgagaa

SEQ ID NO: 207254 - DNA, 25 bp, Homo sapien
tattctgaaagctaaccactgaagg

SEQ ID NO: 207255 - DNA, 25 bp, Homo sapien
gaaggcccaactcataatagatctg

SEQ ID NO: 207256 - DNA, 25 bp, Homo sapien
taaatctgttataccaagggccacg

SEQ ID NO: 207257 - DNA, 25 bp, Homo sapien
gaaatgatgcacaatggacgagtcc

SEQ ID NO: 207258 - DNA, 25 bp, Homo sapien
tgtgtgaccacaaataacaaccctg

SEQ ID NO: 207259 - DNA, 25 bp, Homo sapien
tgaaaagcaatccaagcgaggctgg

SEQ ID NO: 207260 - DNA, 25 bp, Homo sapien
tggtggaatcggcagtggcctgcat

SEQ ID NO: 207261 - DNA, 25 bp, Homo sapien
ttggtggaatcggcagtggcctgca

SEQ ID NO: 207262 - DNA, 25 bp, Homo sapien
cttggtggaatcggcagtggcctgc

SEQ ID NO: 207263 - DNA, 25 bp, Homo sapien
cgggctttgggggctcgccgtggct

SEQ ID NO: 207264 - DNA, 25 bp, Homo sapien
ggctttgggggctcgccgtggctct

SEQ ID NO: 207265 - DNA, 25 bp, Homo sapien
gctttgggggctcgccgtggctctc

SEQ ID NO: 207266 - DNA, 25 bp, Homo sapien
gggctttgggggctcgccgtggctc

SEQ ID NO: 207267 - DNA, 25 bp, Homo sapien
tgggctgcccaagggtgctaccctg

SEQ ID NO: 207268 - DNA, 25 bp, Homo sapien
tgcgcggccggcagcgaatcagcgc

SEQ ID NO: 207269 - DNA, 25 bp, Homo sapien
gcactcaagcgttggtgcccggctg

SEQ ID NO: 207270 - DNA, 25 bp, Homo sapien
ctccacgcgacagcgttggctgggc

SEQ ID NO: 207271 - DNA, 25 bp, Homo sapien
tgaacagagtgagccggagtcaagc

SEQ ID NO: 207272 - DNA, 25 bp, Homo sapien
tggaataagattcctcctccaggtg

SEQ ID NO: 207273 - DNA, 25 bp, Homo sapien
tgctgcatctcaacacaaggcttgg

SEQ ID NO: 207274 - DNA, 25 bp, Homo sapien
gaattggcagctttacatggtcact

SEQ ID NO: 207275 - DNA, 25 bp, Homo sapien
tagctcgggccatgattcctctctg

SEQ ID NO: 207276 - DNA, 25 bp, Homo sapien
tgctggtctgcccaagtacataact

SEQ ID NO: 207277 - DNA, 25 bp, Homo sapien
gatcacagtacaactccttagctcg

SEQ ID NO: 207278 - DNA, 25 bp, Homo sapien
tctggaactccctggcaacctgaat

SEQ ID NO: 207279 - DNA, 25 bp, Homo sapien
ttccagggatgctggtaccccactg

SEQ ID NO: 207280 - DNA, 25 bp, Homo sapien
tttccagggatgctggtaccccact

SEQ ID NO: 207281 - DNA, 25 bp, Homo sapien
tcattgtaggatattcaagacatct

SEQ ID NO: 207282 - DNA, 25 bp, Homo sapien
attgtaggatattcaagacatcttt

SEQ ID NO: 207283 - DNA, 25 bp, Homo sapien
ggtgccacagaccatagacgtatca

SEQ ID NO: 207284 - DNA, 25 bp, Homo sapien
ggacttgtgctgcagctgattcccg

SEQ ID NO: 207285 - DNA, 25 bp, Homo sapien
gaaacaatcaaattgccagtcactg

SEQ ID NO: 207286 - DNA, 25 bp, Homo sapien
tgattcccggacactgtgatcagga

SEQ ID NO: 207287 - DNA, 25 bp, Homo sapien
cattccaagcttgacataaattcag

SEQ ID NO: 207288 - DNA, 25 bp, Homo sapien
gccagggctgaaacttctttgcatg

SEQ ID NO: 207289 - DNA, 25 bp, Homo sapien
tgcagcattccaagcttgacataaa

SEQ ID NO: 207290 - DNA, 25 bp, Homo sapien
tgtgaatcgatcctgctaacctggc

SEQ ID NO: 207291 - DNA, 25 bp, Homo sapien
ttctttgcgttttcagaagtagaat

SEQ ID NO: 207292 - DNA, 25 bp, Homo sapien
ttcagaagtagaatcaaactgagct

SEQ ID NO: 207293 - DNA, 25 bp, Homo sapien
tacttgattttctttgcgttttcag

SEQ ID NO: 207294 - DNA, 25 bp, Homo sapien
tcagaagtagaatcaaactgagctc

SEQ ID NO: 207295 - DNA, 25 bp, Homo sapien
gatatgtctaagtcatgctcaccaa

SEQ ID NO: 207296 - DNA, 25 bp, Homo sapien
tttgagaagacctccacctggtagc

SEQ ID NO: 207297 - DNA, 25 bp, Homo sapien
tagctgctatacacagaggaggcca

SEQ ID NO: 207298 - DNA, 25 bp, Homo sapien
gacaggtacctctctaacagaaaga

SEQ ID NO: 207299 - DNA, 25 bp, Homo sapien
tatttacagtcaggtcggcaccgag

SEQ ID NO: 207300 - DNA, 25 bp, Homo sapien
gagtacctttaactttgtctcaggc

SEQ ID NO: 207301 - DNA, 25 bp, Homo sapien
tagtaagaacactctggatcacctg

SEQ ID NO: 207302 - DNA, 25 bp, Homo sapien
tacttggatccagacttagttcttc

SEQ ID NO: 207303 - DNA, 25 bp, Homo sapien
cctgctcaggacctccagttcttgg

SEQ ID NO: 207304 - DNA, 25 bp, Homo sapien
gctgggcagcgctgatcctttctca

SEQ ID NO: 207305 - DNA, 25 bp, Homo sapien
gagcaagtgagaccaaaaagaacct

SEQ ID NO: 207306 - DNA, 25 bp, Homo sapien
tcttcatagatagtgcagtggagca

SEQ ID NO: 207307 - DNA, 25 bp, Homo sapien
ccaagcatccctgcttgggatcctt

SEQ ID NO: 207308 - DNA, 25 bp, Homo sapien
ctaaccaagcatccctgcttgggat

SEQ ID NO: 207309 - DNA, 25 bp, Homo sapien
aaccaagcatccctgcttgggatcc

SEQ ID NO: 207310 - DNA, 25 bp, Homo sapien
caagcatccctgcttgggatccttt

SEQ ID NO: 207311 - DNA, 25 bp, Homo sapien
gagtcttcttcaggcttccgtggca

SEQ ID NO: 207312 - DNA, 25 bp, Homo sapien
tggccaaagctcacatagcctgagg

SEQ ID NO: 207313 - DNA, 25 bp, Homo sapien
tcgatgatgagctcgctgtccagct

SEQ ID NO: 207314 - DNA, 25 bp, Homo sapien
ttccgtggcaacatgggcgtctcag

SEQ ID NO: 207315 - DNA, 25 bp, Homo sapien
ggtttcatacgataatccctttgct

SEQ ID NO: 207316 - DNA, 25 bp, Homo sapien
gccgtgggttctcggcggtttcata

SEQ ID NO: 207317 - DNA, 25 bp, Homo sapien
ttggcggtccggacctggccttgac

SEQ ID NO: 207318 - DNA, 25 bp, Homo sapien
cggacaccagctcgatctctgagtc

SEQ ID NO: 207319 - DNA, 25 bp, Homo sapien
gagccacggaggcacacacacggac

SEQ ID NO: 207320 - DNA, 25 bp, Homo sapien
ctgtcgtcccacagagcgaaggaga

SEQ ID NO: 207321 - DNA, 25 bp, Homo sapien
ttttgtcgttgcttgagaaacacat

SEQ ID NO: 207322 - DNA, 25 bp, Homo sapien
tccattaggcgagatgttttgtcgt

SEQ ID NO: 207323 - DNA, 25 bp, Homo sapien
tttccagggctatgctggaaagaca

SEQ ID NO: 207324 - DNA, 25 bp, Homo sapien
tgtttccagggctatgctggaaaga

SEQ ID NO: 207325 - DNA, 25 bp, Homo sapien
ttccagggctatgctggaaagacag

SEQ ID NO: 207326 - DNA, 25 bp, Homo sapien
tctgtttccagggctatgctggaaa

SEQ ID NO: 207327 - DNA, 25 bp, Homo sapien
agaagcctctgtctaaccacccaaa

SEQ ID NO: 207328 - DNA, 25 bp, Homo sapien
tcttcccttctgaggcacacatcct

SEQ ID NO: 207329 - DNA, 25 bp, Homo sapien
caaactgctaggactgaggaaactc

SEQ ID NO: 207330 - DNA, 25 bp, Homo sapien
catccttccggtttcacatgcagaa

SEQ ID NO: 207331 - DNA, 25 bp, Homo sapien
tggcctgatgctgcgttgttctgga

SEQ ID NO: 207332 - DNA, 25 bp, Homo sapien
ctggcctgatgctgcgttgttctgg

SEQ ID NO: 207333 - DNA, 25 bp, Homo sapien
ggcctgatgctgcgttgttctggag

SEQ ID NO: 207334 - DNA, 25 bp, Homo sapien
gctggcctgatgctgcgttgttctg

SEQ ID NO: 207335 - DNA, 25 bp, Homo sapien
cctcctgaggtggatagcagatgtc

SEQ ID NO: 207336 - DNA, 25 bp, Homo sapien
tcaggttcacggactccttcaggtt

SEQ ID NO: 207337 - DNA, 25 bp, Homo sapien
gttcacttccgtggactctgcagga

SEQ ID NO: 207338 - DNA, 25 bp, Homo sapien
gggctgtcgtcttcaggctccgaga

SEQ ID NO: 207339 - DNA, 25 bp, Homo sapien
ttaaatttaaatccatgggtgcaca

SEQ ID NO: 207340 - DNA, 25 bp, Homo sapien
tataggtagacctcattggaggcag

SEQ ID NO: 207341 - DNA, 25 bp, Homo sapien
gaggcagggaaatcaacccgagata

SEQ ID NO: 207342 - DNA, 25 bp, Homo sapien
ggatcctaggattctctaccagtta

SEQ ID NO: 207343 - DNA, 25 bp, Homo sapien
gcagaactgagcctgaaggcccagg

SEQ ID NO: 207344 - DNA, 25 bp, Homo sapien
caggaaagccaattaattcttgtca

SEQ ID NO: 207345 - DNA, 25 bp, Homo sapien
gtggggattgttggaactgagaagc

SEQ ID NO: 207346 - DNA, 25 bp, Homo sapien
taattcttgtcagcacttcctgcag

SEQ ID NO: 207347 - DNA, 25 bp, Homo sapien
cctctcatggtagagtgggccagaa

SEQ ID NO: 207348 - DNA, 25 bp, Homo sapien
ctaatgacatcctctcatggtagag

SEQ ID NO: 207349 - DNA, 25 bp, Homo sapien
tgacatcctctcatggtagagtggg

SEQ ID NO: 207350 - DNA, 25 bp, Homo sapien
ggagtttcatgtatccagcccacac

SEQ ID NO: 207351 - DNA, 25 bp, Homo sapien
caaataagctgtggaatggagtaac

SEQ ID NO: 207352 - DNA, 25 bp, Homo sapien
tttcaccgaggctgtatccaccata

SEQ ID NO: 207353 - DNA, 25 bp, Homo sapien
ggtgaaatcctcacagaagtgcttc

SEQ ID NO: 207354 - DNA, 25 bp, Homo sapien
taactcctcccatatggtgaaatcc

SEQ ID NO: 207355 - DNA, 25 bp, Homo sapien
tttctttcaacttctgcagtctcag

SEQ ID NO: 207356 - DNA, 25 bp, Homo sapien
tgtgttgcctgctgttctagctgtg

SEQ ID NO: 207357 - DNA, 25 bp, Homo sapien
tataatttggctctgaagggttggt

SEQ ID NO: 207358 - DNA, 25 bp, Homo sapien
gctgtgtcaacacgggcaaaattga

SEQ ID NO: 207359 - DNA, 25 bp, Homo sapien
tgtttggtgaggagatttttagccc

SEQ ID NO: 207360 - DNA, 25 bp, Homo sapien
tcatttgttctcaaccagaagaggt

SEQ ID NO: 207361 - DNA, 25 bp, Homo sapien
gtttagccttcctccgctgtgtggg

SEQ ID NO: 207362 - DNA, 25 bp, Homo sapien
tttgttcatcttgaaagtgtttggt

SEQ ID NO: 207363 - DNA, 25 bp, Homo sapien
tggaaatctcagtaataaaattctg

SEQ ID NO: 207364 - DNA, 25 bp, Homo sapien
tgagcaaatgttgtccttcaggcat

SEQ ID NO: 207365 - DNA, 25 bp, Homo sapien
ctgaacatgtcagcatgagcaaatg

SEQ ID NO: 207366 - DNA, 25 bp, Homo sapien
tcaggcatggaaatctcagtaataa

SEQ ID NO: 207367 - DNA, 25 bp, Homo sapien
tgctgtctttggtccgataccgtgt

SEQ ID NO: 207368 - DNA, 25 bp, Homo sapien
ctttggtccgataccgtgttattgg

SEQ ID NO: 207369 - DNA, 25 bp, Homo sapien
cgataccgtgttattggagaagagc

SEQ ID NO: 207370 - DNA, 25 bp, Homo sapien
cttgtgctgtctttggtccgatacc

SEQ ID NO: 207371 - DNA, 25 bp, Homo sapien
tgtccacattctaggctggcagaag

SEQ ID NO: 207372 - DNA, 25 bp, Homo sapien
agaccatcgctggaattgatgagga

SEQ ID NO: 207373 - DNA, 25 bp, Homo sapien
caaaatggttgctgtaccctcagat

SEQ ID NO: 207374 - DNA, 25 bp, Homo sapien
gatgcctaggagtaggcagtcccag

SEQ ID NO: 207375 - DNA, 25 bp, Homo sapien
gtctgctctacatccgaaagcacag

SEQ ID NO: 207376 - DNA, 25 bp, Homo sapien
tcagggccgttgtatagtggagtct

SEQ ID NO: 207377 - DNA, 25 bp, Homo sapien
gtggagtctgctctacatccgaaag

SEQ ID NO: 207378 - DNA, 25 bp, Homo sapien
tcctagactggagtcagggccgttg

SEQ ID NO: 207379 - DNA, 25 bp, Homo sapien
ccatctccactagcactttgtccat

SEQ ID NO: 207380 - DNA, 25 bp, Homo sapien
agaaagctgaccacatggtaagaag

SEQ ID NO: 207381 - DNA, 25 bp, Homo sapien
aagctgaccacatggtaagaaggca

SEQ ID NO: 207382 - DNA, 25 bp, Homo sapien
gaaagctgaccacatggtaagaagg

SEQ ID NO: 207383 - DNA, 25 bp, Homo sapien
aaagctgaccacatggtaagaaggc

SEQ ID NO: 207384 - DNA, 25 bp, Homo sapien
tgcaacctcagcgacatctgctatt

SEQ ID NO: 207385 - DNA, 25 bp, Homo sapien
gatgaacatatgagtccgtgtgtct

SEQ ID NO: 207386 - DNA, 25 bp, Homo sapien
catgtctttgtcatcgcgaatagta

SEQ ID NO: 207387 - DNA, 25 bp, Homo sapien
ccctggctcaaaagtgatgctgcac

SEQ ID NO: 207388 - DNA, 25 bp, Homo sapien
tcaagtgtcgtgtttaggtcccaaa

SEQ ID NO: 207389 - DNA, 25 bp, Homo sapien
tgctttacggccaagggtgtggtcc

SEQ ID NO: 207390 - DNA, 25 bp, Homo sapien
tctgcatagatctctaagaacctgt

SEQ ID NO: 207391 - DNA, 25 bp, Homo sapien
gagttgaagactcccaccattattg

SEQ ID NO: 207392 - DNA, 25 bp, Homo sapien
cagccccaaaaccagatgtcagtgg

SEQ ID NO: 207393 - DNA, 25 bp, Homo sapien
tacagaggtccttacaaaagtgtcc

SEQ ID NO: 207394 - DNA, 25 bp, Homo sapien
tcagggaatagcccactacagaggt

SEQ ID NO: 207395 - DNA, 25 bp, Homo sapien
ccagatgtcagtggtccaactgttt

SEQ ID NO: 207396 - DNA, 25 bp, Homo sapien
gaccctcctagtcaaggcagcttga

SEQ ID NO: 207397 - DNA, 25 bp, Homo sapien
cacagaagacgaccctcctagtcaa

SEQ ID NO: 207398 - DNA, 25 bp, Homo sapien
cctcctagtcaaggcagcttgaggc

SEQ ID NO: 207399 - DNA, 25 bp, Homo sapien
gaagacgaccctcctagtcaaggca

SEQ ID NO: 207400 - DNA, 25 bp, Homo sapien
tgacacatcgcaggggtgcttagac

SEQ ID NO: 207401 - DNA, 25 bp, Homo sapien
gggagaaattacagaacctatgtta

SEQ ID NO: 207402 - DNA, 25 bp, Homo sapien
gaataaggggtaagtatggccatat

SEQ ID NO: 207403 - DNA, 25 bp, Homo sapien
tgagagcttatcatgcccctgaaat

SEQ ID NO: 207404 - DNA, 25 bp, Homo sapien
aatacacctgcaaacaataagcata

SEQ ID NO: 207405 - DNA, 25 bp, Homo sapien
agcagactctagaagactgttgata

SEQ ID NO: 207406 - DNA, 25 bp, Homo sapien
gataagagacatgctttataaatat

SEQ ID NO: 207407 - DNA, 25 bp, Homo sapien
aaaaatacacctgcaaacaataagc

SEQ ID NO: 207408 - DNA, 25 bp, Homo sapien
cctccaaggtatactcctaggtaca

SEQ ID NO: 207409 - DNA, 25 bp, Homo sapien
tacatcttggaacacctcattggtg

SEQ ID NO: 207410 - DNA, 25 bp, Homo sapien
gtttccacaggttcacaaaatatgt

SEQ ID NO: 207411 - DNA, 25 bp, Homo sapien
gatcagttctggtgaggatggaaaa

SEQ ID NO: 207412 - DNA, 25 bp, Homo sapien
taaacatacagttgatgaaggctct

SEQ ID NO: 207413 - DNA, 25 bp, Homo sapien
cactatagtagattaggaacagcag

SEQ ID NO: 207414 - DNA, 25 bp, Homo sapien
aaacctgagcttggaacaattgcag

SEQ ID NO: 207415 - DNA, 25 bp, Homo sapien
ttccagcatcatacatatccgcact

SEQ ID NO: 207416 - DNA, 25 bp, Homo sapien
actatgtgtgcttttactccttgat

SEQ ID NO: 207417 - DNA, 25 bp, Homo sapien
gcttttactccttgatgcatacatt

SEQ ID NO: 207418 - DNA, 25 bp, Homo sapien
ataaaacagtgttttgaatggctta

SEQ ID NO: 207419 - DNA, 25 bp, Homo sapien
ctacacccatgacacagggagttta

SEQ ID NO: 207420 - DNA, 25 bp, Homo sapien
aaaatggactttgtgtagtctggct

SEQ ID NO: 207421 - DNA, 25 bp, Homo sapien
tggactttgtgtagtctggctccaa

SEQ ID NO: 207422 - DNA, 25 bp, Homo sapien
tccaagtgccccttggttcgtagcc

SEQ ID NO: 207423 - DNA, 25 bp, Homo sapien
ggttcgtagccaggtgtccgcatac

SEQ ID NO: 207424 - DNA, 25 bp, Homo sapien
actctgacagccatatgcactctca

SEQ ID NO: 207425 - DNA, 25 bp, Homo sapien
acagtctgtccaactctgacagcca

SEQ ID NO: 207426 - DNA, 25 bp, Homo sapien
gccatatgcactctcagagaagcag

SEQ ID NO: 207427 - DNA, 25 bp, Homo sapien
tttgagatgcacagtctgtccaact

SEQ ID NO: 207428 - DNA, 25 bp, Homo sapien
ttgagaaccaggaataatctggagg

SEQ ID NO: 207429 - DNA, 25 bp, Homo sapien
cttgagaaccaggaataatctggag

SEQ ID NO: 207430 - DNA, 25 bp, Homo sapien
cccaaacctgcttctaagccccact

SEQ ID NO: 207431 - DNA, 25 bp, Homo sapien
ccaaacctgcttctaagccccactt

SEQ ID NO: 207432 - DNA, 25 bp, Homo sapien
agcctctcctttcaccgccacctct

SEQ ID NO: 207433 - DNA, 25 bp, Homo sapien
aggggccaagcctctcctttcaccg

SEQ ID NO: 207434 - DNA, 25 bp, Homo sapien
ggccaagcctctcctttcaccgcca

SEQ ID NO: 207435 - DNA, 25 bp, Homo sapien
caagcctctcctttcaccgccacct

SEQ ID NO: 207436 - DNA, 25 bp, Homo sapien
gaagtttcaatgctccctgcaaggt

SEQ ID NO: 207437 - DNA, 25 bp, Homo sapien
tggaaacagcgttaaccaggccggc

SEQ ID NO: 207438 - DNA, 25 bp, Homo sapien
gacactggcgcgctcagactttgaa

SEQ ID NO: 207439 - DNA, 25 bp, Homo sapien
cgggcagcggcgaaatacaggtttt

SEQ ID NO: 207440 - DNA, 25 bp, Homo sapien
gtccccgacgccatttgaggggcag

SEQ ID NO: 207441 - DNA, 25 bp, Homo sapien
ccctggtccccgacgccatttgagg

SEQ ID NO: 207442 - DNA, 25 bp, Homo sapien
gacgccatttgaggggcagcggcgc

SEQ ID NO: 207443 - DNA, 25 bp, Homo sapien
ccccgacgccatttgaggggcagcg

SEQ ID NO: 207444 - DNA, 25 bp, Homo sapien
agcagctcgtcctgcggatcccccg

SEQ ID NO: 207445 - DNA, 25 bp, Homo sapien
cctttcggcgtcaccgcttcgttct

SEQ ID NO: 207446 - DNA, 25 bp, Homo sapien
ggcccgagccggcttcccgcgacgc

SEQ ID NO: 207447 - DNA, 25 bp, Homo sapien
ttccatggcaacgggcgactgccgg

SEQ ID NO: 207448 - DNA, 25 bp, Homo sapien
gaagctgcggtgtctcagcgtcgcc

SEQ ID NO: 207449 - DNA, 25 bp, Homo sapien
gctgcttcgctattcccaatcctgt

SEQ ID NO: 207450 - DNA, 25 bp, Homo sapien
tgcttggtccgggtcctcctgggca

SEQ ID NO: 207451 - DNA, 25 bp, Homo sapien
ctgttattacgcaggtgaaaatggc

SEQ ID NO: 207452 - DNA, 25 bp, Homo sapien
gagtctgtgggtagcggctcaccct

SEQ ID NO: 207453 - DNA, 25 bp, Homo sapien
cactcaaaagcctgtccgagatcga

SEQ ID NO: 207454 - DNA, 25 bp, Homo sapien
catttcaagcgatcatgggccctgc

SEQ ID NO: 207455 - DNA, 25 bp, Homo sapien
gatccagagaacgacacgagacctg

SEQ ID NO: 207456 - DNA, 25 bp, Homo sapien
tcacgttccgcgaactggcgaaggt

SEQ ID NO: 207457 - DNA, 25 bp, Homo sapien
taagtgaaaagataagcgcaggtac

SEQ ID NO: 207458 - DNA, 25 bp, Homo sapien
cataacgcgttgctttcagtcacgt

SEQ ID NO: 207459 - DNA, 25 bp, Homo sapien
ccaggacccgagagctaaagataat

SEQ ID NO: 207460 - DNA, 25 bp, Homo sapien
cagggattgggaaatcggagtggac

SEQ ID NO: 207461 - DNA, 25 bp, Homo sapien
tggactcggacttgaatcggattgc

SEQ ID NO: 207462 - DNA, 25 bp, Homo sapien
ttgaatcggattgccccggaatcca

SEQ ID NO: 207463 - DNA, 25 bp, Homo sapien
tgggaaatcggagtggactcggact

SEQ ID NO: 207464 - DNA, 25 bp, Homo sapien
tggccttcgggcgtacatcaccggg

SEQ ID NO: 207465 - DNA, 25 bp, Homo sapien
gtacatcaccgggagtctttgatcc

SEQ ID NO: 207466 - DNA, 25 bp, Homo sapien
gcaaagttgaggtcaagggaactcc

SEQ ID NO: 207467 - DNA, 25 bp, Homo sapien
gaagacgccagtgaagcaaagttga

SEQ ID NO: 207468 - DNA, 25 bp, Homo sapien
tgatgaattcagtaacttcatctgg

SEQ ID NO: 207469 - DNA, 25 bp, Homo sapien
agtaacttcatctggaacccttgag

SEQ ID NO: 207470 - DNA, 25 bp, Homo sapien
tcagtaacttcatctggaacccttg

SEQ ID NO: 207471 - DNA, 25 bp, Homo sapien
aattcagtaacttcatctggaaccc

SEQ ID NO: 207472 - DNA, 25 bp, Homo sapien
gggatttctgtgtaggacttcagag

SEQ ID NO: 207473 - DNA, 25 bp, Homo sapien
gattttgtgcctttgtaaactccag

SEQ ID NO: 207474 - DNA, 25 bp, Homo sapien
gattgaatcaattctgtgcccacct

SEQ ID NO: 207475 - DNA, 25 bp, Homo sapien
gaacgtgattcacaggaagttttac

SEQ ID NO: 207476 - DNA, 25 bp, Homo sapien
gaaacatttgacactattggttgcc

SEQ ID NO: 207477 - DNA, 25 bp, Homo sapien
tattgttatcctcctatttttctga

SEQ ID NO: 207478 - DNA, 25 bp, Homo sapien
gcatccatgatattacactattgtt

SEQ ID NO: 207479 - DNA, 25 bp, Homo sapien
catgggaataccacaggttaaagtc

SEQ ID NO: 207480 - DNA, 25 bp, Homo sapien
atcagtatctctgggggattgattc

SEQ ID NO: 207481 - DNA, 25 bp, Homo sapien
ttgattccaggactcatgcagatac

SEQ ID NO: 207482 - DNA, 25 bp, Homo sapien
gggattgattccaggactcatgcag

SEQ ID NO: 207483 - DNA, 25 bp, Homo sapien
ccatcagtatctctgggggattgat

SEQ ID NO: 207484 - DNA, 25 bp, Homo sapien
gtaagctatctcttcacttcgttga

SEQ ID NO: 207485 - DNA, 25 bp, Homo sapien
gggcaagaggaggtactaaagctaa

SEQ ID NO: 207486 - DNA, 25 bp, Homo sapien
ctaaagctaaagtcattgggaaatg

SEQ ID NO: 207487 - DNA, 25 bp, Homo sapien
tctagcaatagtactggaccacaag

SEQ ID NO: 207488 - DNA, 25 bp, Homo sapien
tttttacttagccatcatgtccaat

SEQ ID NO: 207489 - DNA, 25 bp, Homo sapien
tgtccaataatgtagatttagctaa

SEQ ID NO: 207490 - DNA, 25 bp, Homo sapien
gattctggtgtgatgttttttactt

SEQ ID NO: 207491 - DNA, 25 bp, Homo sapien
agctaattgttgtctatcgtcttgc

SEQ ID NO: 207492 - DNA, 25 bp, Homo sapien
gagttgccattaagcactagattct

SEQ ID NO: 207493 - DNA, 25 bp, Homo sapien
gaaagggcgagttgccattaagcac

SEQ ID NO: 207494 - DNA, 25 bp, Homo sapien
gggcgagttgccattaagcactaga

SEQ ID NO: 207495 - DNA, 25 bp, Homo sapien
ccctttggaaagggcgagttgccat

SEQ ID NO: 207496 - DNA, 25 bp, Homo sapien
tcaaatcgaatgtaactgcctaaag

SEQ ID NO: 207497 - DNA, 25 bp, Homo sapien
gaattaccttaagttagctgatcca

SEQ ID NO: 207498 - DNA, 25 bp, Homo sapien
ttgtacaaaaactagcggacagtgg

SEQ ID NO: 207499 - DNA, 25 bp, Homo sapien
gaaattgcgcacatctaaaatacag

SEQ ID NO: 207500 - DNA, 25 bp, Homo sapien
ctggtctagtaaatggagatcttgc

SEQ ID NO: 207501 - DNA, 25 bp, Homo sapien
gagatcttgcaaagaggacaacata

SEQ ID NO: 207502 - DNA, 25 bp, Homo sapien
taatcagttgttgagttcatgcttt

SEQ ID NO: 207503 - DNA, 25 bp, Homo sapien
catgctttgacgaggaatgaggaaa

SEQ ID NO: 207504 - DNA, 25 bp, Homo sapien
gaccaatcattgttaacgctctccg

SEQ ID NO: 207505 - DNA, 25 bp, Homo sapien
ccaatcattgttaacgctctccggg

SEQ ID NO: 207506 - DNA, 25 bp, Homo sapien
tcagctgagaccaatcattgttaac

SEQ ID NO: 207507 - DNA, 25 bp, Homo sapien
tgagaccaatcattgttaacgctct

SEQ ID NO: 207508 - DNA, 25 bp, Homo sapien
ccgacctctggtaaattaatgcgca

SEQ ID NO: 207509 - DNA, 25 bp, Homo sapien
aatggcggttgcacgtctgtttccc

SEQ ID NO: 207510 - DNA, 25 bp, Homo sapien
cattaatggaaatcacgggaccccg

SEQ ID NO: 207511 - DNA, 25 bp, Homo sapien
accccgagcggttggagatctgcca

SEQ ID NO: 207512 - DNA, 25 bp, Homo sapien
gccggagtagacgttagccatggaa

SEQ ID NO: 207513 - DNA, 25 bp, Homo sapien
agacgttagccatggaaaccgagag

SEQ ID NO: 207514 - DNA, 25 bp, Homo sapien
cggccgccggagtagacgttagcca

SEQ ID NO: 207515 - DNA, 25 bp, Homo sapien
acgcgctccgttcagctccgggtgg

SEQ ID NO: 207516 - DNA, 25 bp, Homo sapien
gccgcggtgagctcgttattcggcc

SEQ ID NO: 207517 - DNA, 25 bp, Homo sapien
tattcggccgccgcagcttttctgc

SEQ ID NO: 207518 - DNA, 25 bp, Homo sapien
agcttttctgcctccgcattcgggc

SEQ ID NO: 207519 - DNA, 25 bp, Homo sapien
ttctgcctccgcattcgggcactaa

SEQ ID NO: 207520 - DNA, 25 bp, Homo sapien
tgcaaaaatgcggtccctgggatgc

SEQ ID NO: 207521 - DNA, 25 bp, Homo sapien
gacttcttcggcatcttaatgtcca

SEQ ID NO: 207522 - DNA, 25 bp, Homo sapien
cctgggatgccttcgcgtcttctct

SEQ ID NO: 207523 - DNA, 25 bp, Homo sapien
tcgttgtccgacgtccacctcggga

SEQ ID NO: 207524 - DNA, 25 bp, Homo sapien
gaaagactactttagcctgttgaat

SEQ ID NO: 207525 - DNA, 25 bp, Homo sapien
ttattgcgcttaatgaactcagtca

SEQ ID NO: 207526 - DNA, 25 bp, Homo sapien
tttcgttgcaaaacctttaagtgca

SEQ ID NO: 207527 - DNA, 25 bp, Homo sapien
gactcgtacgaaatggaatatggca

SEQ ID NO: 207528 - DNA, 25 bp, Homo sapien
tgtccgaattgttcaactcatggcc

SEQ ID NO: 207529 - DNA, 25 bp, Homo sapien
ccggagctgtgtccgttaggtagaa

SEQ ID NO: 207530 - DNA, 25 bp, Homo sapien
gaactgtactctcgcaatatctcca

SEQ ID NO: 207531 - DNA, 25 bp, Homo sapien
ccagaatttactccagtgaatcgga

SEQ ID NO: 207532 - DNA, 25 bp, Homo sapien
ggacatttcacatagacgggaaaat

SEQ ID NO: 207533 - DNA, 25 bp, Homo sapien
cccataaatttgcttattttggaca

SEQ ID NO: 207534 - DNA, 25 bp, Homo sapien
cctcattatggtttcagtttgtgtt

SEQ ID NO: 207535 - DNA, 25 bp, Homo sapien
tattttagccagtcaaggaggtttg

SEQ ID NO: 207536 - DNA, 25 bp, Homo sapien
cctcagtgcagaagtactccttaat

SEQ ID NO: 207537 - DNA, 25 bp, Homo sapien
cacagatctattagtctcctgaaag

SEQ ID NO: 207538 - DNA, 25 bp, Homo sapien
cagataaactcatcctattgtcaac

SEQ ID NO: 207539 - DNA, 25 bp, Homo sapien
tagttgagacaagtgcctcagtgca

SEQ ID NO: 207540 - DNA, 25 bp, Homo sapien
taacctgtagtatgtagaacaagca

SEQ ID NO: 207541 - DNA, 25 bp, Homo sapien
catgagctcagtggtacccagcaag

SEQ ID NO: 207542 - DNA, 25 bp, Homo sapien
gaggagaggacatcatcctaggcaa

SEQ ID NO: 207543 - DNA, 25 bp, Homo sapien
gagaagagatactcagctagaccaa

SEQ ID NO: 207544 - DNA, 25 bp, Homo sapien
taccagttaggcatcctgaaagact

SEQ ID NO: 207545 - DNA, 25 bp, Homo sapien
gactattatacagcagcactttcag

SEQ ID NO: 207546 - DNA, 25 bp, Homo sapien
gatgagtccagatgtgcctctactg

SEQ ID NO: 207547 - DNA, 25 bp, Homo sapien
ttggaggccctcgattcaaattagg

SEQ ID NO: 207548 - DNA, 25 bp, Homo sapien
ctgtaaaacatactaaagcaatagt

SEQ ID NO: 207549 - DNA, 25 bp, Homo sapien
tgtgtaaggagatggaactttcctg

SEQ ID NO: 207550 - DNA, 25 bp, Homo sapien
tcactttaaataaggagctttgagt

SEQ ID NO: 207551 - DNA, 25 bp, Homo sapien
aatcatcaaaccattgggtgacagg

SEQ ID NO: 207552 - DNA, 25 bp, Homo sapien
tctcttctttaagtcacctagtcta

SEQ ID NO: 207553 - DNA, 25 bp, Homo sapien
gccatgaaaccaccccgatcttgga

SEQ ID NO: 207554 - DNA, 25 bp, Homo sapien
tagtctatggtatttagttatacca

SEQ ID NO: 207555 - DNA, 25 bp, Homo sapien
aataagaagatggctatccatgagc

SEQ ID NO: 207556 - DNA, 25 bp, Homo sapien
tttacactgggagagtgcttagcct

SEQ ID NO: 207557 - DNA, 25 bp, Homo sapien
tcttacggtacaagcagcagaacct

SEQ ID NO: 207558 - DNA, 25 bp, Homo sapien
aagctgttagaggtcagtgggccaa

SEQ ID NO: 207559 - DNA, 25 bp, Homo sapien
gatgcctgagaacagctaagctccg

SEQ ID NO: 207560 - DNA, 25 bp, Homo sapien
tgaaacagaatacccaacaactgca

SEQ ID NO: 207561 - DNA, 25 bp, Homo sapien
gaccatattccaagtcataggaatg

SEQ ID NO: 207562 - DNA, 25 bp, Homo sapien
tggccatgtatcattcacttagaaa

SEQ ID NO: 207563 - DNA, 25 bp, Homo sapien
ctcatggatcagacaataaattaca

SEQ ID NO: 207564 - DNA, 25 bp, Homo sapien
aaccccatgtgtctccaagagctgt

SEQ ID NO: 207565 - DNA, 25 bp, Homo sapien
taactttcggcttatacacatgaca

SEQ ID NO: 207566 - DNA, 25 bp, Homo sapien
caaatactgcataggcaagggacag

SEQ ID NO: 207567 - DNA, 25 bp, Homo sapien
ttactcagggtaaacaagtgcacct

SEQ ID NO: 207568 - DNA, 25 bp, Homo sapien
ttgactgtctttggcgaaccttgac

SEQ ID NO: 207569 - DNA, 25 bp, Homo sapien
gactgtctttggcgaaccttgacat

SEQ ID NO: 207570 - DNA, 25 bp, Homo sapien
ctgtctttggcgaaccttgacataa

SEQ ID NO: 207571 - DNA, 25 bp, Homo sapien
gtctttggcgaaccttgacataaag

SEQ ID NO: 207572 - DNA, 25 bp, Homo sapien
tcattggctggagtagttgaacaga

SEQ ID NO: 207573 - DNA, 25 bp, Homo sapien
ttcattggctggagtagttgaacag

SEQ ID NO: 207574 - DNA, 25 bp, Homo sapien
attcattggctggagtagttgaaca

SEQ ID NO: 207575 - DNA, 25 bp, Homo sapien
gctggtgcattggtcttggaattcc

SEQ ID NO: 207576 - DNA, 25 bp, Homo sapien
ggtgcaatgaatcctacctgctgct

SEQ ID NO: 207577 - DNA, 25 bp, Homo sapien
tacagtagaagacatacaacaggtg

SEQ ID NO: 207578 - DNA, 25 bp, Homo sapien
tataagcatcttggaggtaaggtca

SEQ ID NO: 207579 - DNA, 25 bp, Homo sapien
aagcataagaagattgctgttttca

SEQ ID NO: 207580 - DNA, 25 bp, Homo sapien
tggcttgaaaagtacaggtgctctt

SEQ ID NO: 207581 - DNA, 25 bp, Homo sapien
aattagtctttgattattcagaagc

SEQ ID NO: 207582 - DNA, 25 bp, Homo sapien
tggaagcaaagtcatatctattaaa

SEQ ID NO: 207583 - DNA, 25 bp, Homo sapien
ttttaaaataagaagagtctgcatc

SEQ ID NO: 207584 - DNA, 25 bp, Homo sapien
cagtcatgttttgtcttaaagattt

SEQ ID NO: 207585 - DNA, 25 bp, Homo sapien
aagattttaaaataagaagagtctg

SEQ ID NO: 207586 - DNA, 25 bp, Homo sapien
tcagtcatgttttgtcttaaagatt

SEQ ID NO: 207587 - DNA, 25 bp, Homo sapien
ttccccatcttgttggttatccacc

SEQ ID NO: 207588 - DNA, 25 bp, Homo sapien
cacaccactcttaaagttctcaatc

SEQ ID NO: 207589 - DNA, 25 bp, Homo sapien
ccactcttaaagttctcaatccttt

SEQ ID NO: 207590 - DNA, 25 bp, Homo sapien
ccatcttgttggttatccaccaggc

SEQ ID NO: 207591 - DNA, 25 bp, Homo sapien
caggttggcatgtattgccacaaat

SEQ ID NO: 207592 - DNA, 25 bp, Homo sapien
ccaggttggcatgtattgccacaaa

SEQ ID NO: 207593 - DNA, 25 bp, Homo sapien
tctgagatccaaacttctttcaaat

SEQ ID NO: 207594 - DNA, 25 bp, Homo sapien
tgattaacatcagccgcacacaacg

SEQ ID NO: 207595 - DNA, 25 bp, Homo sapien
gccgcacacaacgactggttgtcat

SEQ ID NO: 207596 - DNA, 25 bp, Homo sapien
tcattggccatgctgattaacatca

SEQ ID NO: 207597 - DNA, 25 bp, Homo sapien
gactggtctccattattgcctatag

SEQ ID NO: 207598 - DNA, 25 bp, Homo sapien
tgtgggactggtctccattattgcc

SEQ ID NO: 207599 - DNA, 25 bp, Homo sapien
gggactggtctccattattgcctat

SEQ ID NO: 207600 - DNA, 25 bp, Homo sapien
cttgtgggactggtctccattattg

SEQ ID NO: 207601 - DNA, 25 bp, Homo sapien
caggtcctgggcaaatgttagaaac

SEQ ID NO: 207602 - DNA, 25 bp, Homo sapien
gacttctccagctagggaattctcc

SEQ ID NO: 207603 - DNA, 25 bp, Homo sapien
tgttagaaactattatacctgggta

SEQ ID NO: 207604 - DNA, 25 bp, Homo sapien
tatacctgggtatgtggcaagttct

SEQ ID NO: 207605 - DNA, 25 bp, Homo sapien
catctactgggggtgtcctctacca

SEQ ID NO: 207606 - DNA, 25 bp, Homo sapien
gaggcatgtgtggatcaagtctttt

SEQ ID NO: 207607 - DNA, 25 bp, Homo sapien
tgtggatcaagtcttttttagcatc

SEQ ID NO: 207608 - DNA, 25 bp, Homo sapien
acaagttagaggcatgtgtggatca

SEQ ID NO: 207609 - DNA, 25 bp, Homo sapien
catatcccccatatacacatttaag

SEQ ID NO: 207610 - DNA, 25 bp, Homo sapien
tttaagtcagttctatcagagttga

SEQ ID NO: 207611 - DNA, 25 bp, Homo sapien
cagttctatcagagttgagtttgag

SEQ ID NO: 207612 - DNA, 25 bp, Homo sapien
taagtcagttctatcagagttgagt

SEQ ID NO: 207613 - DNA, 25 bp, Homo sapien
ctctcgatcatgtgaggcagaacac

SEQ ID NO: 207614 - DNA, 25 bp, Homo sapien
cccaggatgctattcacagtaacaa

SEQ ID NO: 207615 - DNA, 25 bp, Homo sapien
gcttgctagcacagtatccaatgga

SEQ ID NO: 207616 - DNA, 25 bp, Homo sapien
tagacatccaagctggtatccatgc

SEQ ID NO: 207617 - DNA, 25 bp, Homo sapien
ggtcaaggggcaaaacaagtatatc

SEQ ID NO: 207618 - DNA, 25 bp, Homo sapien
tgggaaccagtgtcggtcaggtcaa

SEQ ID NO: 207619 - DNA, 25 bp, Homo sapien
tagccgcttcatgggaaccagtgtc

SEQ ID NO: 207620 - DNA, 25 bp, Homo sapien
gaacagctttggtagccgcttcatg

SEQ ID NO: 207621 - DNA, 25 bp, Homo sapien
accaattccactcgaggctccagtc

SEQ ID NO: 207622 - DNA, 25 bp, Homo sapien
tagtttagacaactggtaagccagc

SEQ ID NO: 207623 - DNA, 25 bp, Homo sapien
cacaagagaaactcctagtttagac

SEQ ID NO: 207624 - DNA, 25 bp, Homo sapien
ttcttttcaccctttccagctcatg

SEQ ID NO: 207625 - DNA, 25 bp, Homo sapien
tggaacaatcgatcaagagaaagcc

SEQ ID NO: 207626 - DNA, 25 bp, Homo sapien
cacaaacaacgtctgcaaggcagcc

SEQ ID NO: 207627 - DNA, 25 bp, Homo sapien
aagcccttggttaatgaagttgtgc

SEQ ID NO: 207628 - DNA, 25 bp, Homo sapien
gaagttgtgcagtatttgggattcc

SEQ ID NO: 207629 - DNA, 25 bp, Homo sapien
tcaggtagtagaacgaccgggcttc

SEQ ID NO: 207630 - DNA, 25 bp, Homo sapien
gagaggtttcctagcctgaatggca

SEQ ID NO: 207631 - DNA, 25 bp, Homo sapien
taatgatctcgctccagcaaactgc

SEQ ID NO: 207632 - DNA, 25 bp, Homo sapien
cccttgagtcctgcgtaagatgtca

SEQ ID NO: 207633 - DNA, 25 bp, Homo sapien
gagacccggacacgcctcggcagct

SEQ ID NO: 207634 - DNA, 25 bp, Homo sapien
tgcagaacccccggagacccggaca

SEQ ID NO: 207635 - DNA, 25 bp, Homo sapien
ccggagacccggacacgcctcggca

SEQ ID NO: 207636 - DNA, 25 bp, Homo sapien
gacccggacacgcctcggcagctcc

SEQ ID NO: 207637 - DNA, 25 bp, Homo sapien
tcggcccatagtagcgtcaggtcgc

SEQ ID NO: 207638 - DNA, 25 bp, Homo sapien
atagtagcgtcaggtcgccgtcagc

SEQ ID NO: 207639 - DNA, 25 bp, Homo sapien
tgggcgtcgtccctgccactcggcc

SEQ ID NO: 207640 - DNA, 25 bp, Homo sapien
tgccactcggcccatagtagcgtca

SEQ ID NO: 207641 - DNA, 25 bp, Homo sapien
aggaagcgcagcagctgcaccaaga

SEQ ID NO: 207642 - DNA, 25 bp, Homo sapien
aagcgcagcagctgcaccaagagca

SEQ ID NO: 207643 - DNA, 25 bp, Homo sapien
gaagcgcagcagctgcaccaagagc

SEQ ID NO: 207644 - DNA, 25 bp, Homo sapien
tcaggaagcgcagcagctgcaccaa

SEQ ID NO: 207645 - DNA, 25 bp, Homo sapien
cacgcccagctcggggggaagaaga

SEQ ID NO: 207646 - DNA, 25 bp, Homo sapien
ctcgggcgcgccgggctcagcactc

SEQ ID NO: 207647 - DNA, 25 bp, Homo sapien
actgccccggctccgcccagggagc

SEQ ID NO: 207648 - DNA, 25 bp, Homo sapien
cactcgcggtccttgggcggcccgc

SEQ ID NO: 207649 - DNA, 25 bp, Homo sapien
gctgccctgcgggatcgcagcgcca

SEQ ID NO: 207650 - DNA, 25 bp, Homo sapien
ttgaattcaagtgtccgagaccagc

SEQ ID NO: 207651 - DNA, 25 bp, Homo sapien
gattgcttgaattcaagtgtccgag

SEQ ID NO: 207652 - DNA, 25 bp, Homo sapien
cggcagattgcttgaattcaagtgt

SEQ ID NO: 207653 - DNA, 25 bp, Homo sapien
tgcttgaattcaagtgtccgagacc

SEQ ID NO: 207654 - DNA, 25 bp, Homo sapien
caggagacagatagaatcattcttg

SEQ ID NO: 207655 - DNA, 25 bp, Homo sapien
attatactacgttatttcctctctg

SEQ ID NO: 207656 - DNA, 25 bp, Homo sapien
tcctattcagaaagaacatcccctt

SEQ ID NO: 207657 - DNA, 25 bp, Homo sapien
tgtacagggacactatcaacggcca

SEQ ID NO: 207658 - DNA, 25 bp, Homo sapien
cagatcaactttagccttagcaggg

SEQ ID NO: 207659 - DNA, 25 bp, Homo sapien
tcaggtccctgtctaatgtctattc

SEQ ID NO: 207660 - DNA, 25 bp, Homo sapien
ttgccttgcccttacttttgttcag

SEQ ID NO: 207661 - DNA, 25 bp, Homo sapien
tgtaattccgaaccctaagcagtct

SEQ ID NO: 207662 - DNA, 25 bp, Homo sapien
agactggcaattttctctcaaggag

SEQ ID NO: 207663 - DNA, 25 bp, Homo sapien
cataaccagactggcaattttctct

SEQ ID NO: 207664 - DNA, 25 bp, Homo sapien
accagactggcaattttctctcaag

SEQ ID NO: 207665 - DNA, 25 bp, Homo sapien
taaccagactggcaattttctctca

SEQ ID NO: 207666 - DNA, 25 bp, Homo sapien
atttcatgtcttctttccaggttcc

SEQ ID NO: 207667 - DNA, 25 bp, Homo sapien
tcatgtcttctttccaggttcctac

SEQ ID NO: 207668 - DNA, 25 bp, Homo sapien
ttcatgtcttctttccaggttccta

SEQ ID NO: 207669 - DNA, 25 bp, Homo sapien
ctatttcatgtcttctttccaggtt

SEQ ID NO: 207670 - DNA, 25 bp, Homo sapien
gcagagaacaactggtgatgcttaa

SEQ ID NO: 207671 - DNA, 25 bp, Homo sapien
aaagcccgcagaacttaaagaagtg

SEQ ID NO: 207672 - DNA, 25 bp, Homo sapien
tccttcgcagaggtgcctttgaatt

SEQ ID NO: 207673 - DNA, 25 bp, Homo sapien
gcttaaggtgccagtctaagcttcc

SEQ ID NO: 207674 - DNA, 25 bp, Homo sapien
gcagcataagtgaggagttgtattt

SEQ ID NO: 207675 - DNA, 25 bp, Homo sapien
ctgcagcataagtgaggagttgtat

SEQ ID NO: 207676 - DNA, 25 bp, Homo sapien
tgcagcataagtgaggagttgtatt

SEQ ID NO: 207677 - DNA, 25 bp, Homo sapien
aaagcatcttgccagcgtaaaccta

SEQ ID NO: 207678 - DNA, 25 bp, Homo sapien
ctgacactgctggatctgaaccagt

SEQ ID NO: 207679 - DNA, 25 bp, Homo sapien
ccgccggtgctgtgaacagctcatt

SEQ ID NO: 207680 - DNA, 25 bp, Homo sapien
taactggattttaccgccggtgctg

SEQ ID NO: 207681 - DNA, 25 bp, Homo sapien
aagtccagtaatgcattttatgtgc

SEQ ID NO: 207682 - DNA, 25 bp, Homo sapien
tgactacgtgttctgtaagtccagt

SEQ ID NO: 207683 - DNA, 25 bp, Homo sapien
ctccccccctgaaatgtcggaatgg

SEQ ID NO: 207684 - DNA, 25 bp, Homo sapien
tgagttaatctgactacgtgttctg

SEQ ID NO: 207685 - DNA, 25 bp, Homo sapien
gaagctggtgctaactggatgaaca

SEQ ID NO: 207686 - DNA, 25 bp, Homo sapien
ctggaagctggtgctaactggatga

SEQ ID NO: 207687 - DNA, 25 bp, Homo sapien
gctggtgctaactggatgaacagag

SEQ ID NO: 207688 - DNA, 25 bp, Homo sapien
ggaagctggtgctaactggatgaac

SEQ ID NO: 207689 - DNA, 25 bp, Homo sapien
ggtgtagcagggaaatgacaaatgc

SEQ ID NO: 207690 - DNA, 25 bp, Homo sapien
gccattctgagtaccaagtgtggac

SEQ ID NO: 207691 - DNA, 25 bp, Homo sapien
gcaagtgtaatgtttcgtgtcagaa

SEQ ID NO: 207692 - DNA, 25 bp, Homo sapien
gaaagtatagcagtggaccaaaagg

SEQ ID NO: 207693 - DNA, 25 bp, Homo sapien
cagactcctgagaagttccgggacc

SEQ ID NO: 207694 - DNA, 25 bp, Homo sapien
cagaccccagactcctgagaagttc

SEQ ID NO: 207695 - DNA, 25 bp, Homo sapien
tatcccaggagcacaagcctgtggc

SEQ ID NO: 207696 - DNA, 25 bp, Homo sapien
tgtggtagtggattttagatatccc

SEQ ID NO: 207697 - DNA, 25 bp, Homo sapien
aaattcacagctgccaaagagtact

SEQ ID NO: 207698 - DNA, 25 bp, Homo sapien
gaaattcacagctgccaaagagtac

SEQ ID NO: 207699 - DNA, 25 bp, Homo sapien
attcacagctgccaaagagtacttg

SEQ ID NO: 207700 - DNA, 25 bp, Homo sapien
tcacagctgccaaagagtacttgag

SEQ ID NO: 207701 - DNA, 25 bp, Homo sapien
gcatttcagaaatcctggagtctct

SEQ ID NO: 207702 - DNA, 25 bp, Homo sapien
ctgcatttcagaaatcctggagtct

SEQ ID NO: 207703 - DNA, 25 bp, Homo sapien
tataacttgtgtctgcatttcagaa

SEQ ID NO: 207704 - DNA, 25 bp, Homo sapien
tttcagaaatcctggagtctcttac

SEQ ID NO: 207705 - DNA, 25 bp, Homo sapien
ctgataacggttcggggtcgctatg

SEQ ID NO: 207706 - DNA, 25 bp, Homo sapien
ttcggggtcgctatgtcccagtgaa

SEQ ID NO: 207707 - DNA, 25 bp, Homo sapien
acggttcggggtcgctatgtcccag

SEQ ID NO: 207708 - DNA, 25 bp, Homo sapien
atctgataacggttcggggtcgcta

SEQ ID NO: 207709 - DNA, 25 bp, Homo sapien
tctgcttaccaaggtaactttccac

SEQ ID NO: 207710 - DNA, 25 bp, Homo sapien
ctgcttaccaaggtaactttccact

SEQ ID NO: 207711 - DNA, 25 bp, Homo sapien
tgcttaccaaggtaactttccactc

SEQ ID NO: 207712 - DNA, 25 bp, Homo sapien
tctccctgcacctcacaggccccag

SEQ ID NO: 207713 - DNA, 25 bp, Homo sapien
agcacccattagctgttcttcttga

SEQ ID NO: 207714 - DNA, 25 bp, Homo sapien
cctgcacctcacaggccccagagtg

SEQ ID NO: 207715 - DNA, 25 bp, Homo sapien
tgatgctctccctgcacctcacagg

SEQ ID NO: 207716 - DNA, 25 bp, Homo sapien
cctgcgttagtgtgctgaggatgac

SEQ ID NO: 207717 - DNA, 25 bp, Homo sapien
gtgttctgctcgttcagctctcact

SEQ ID NO: 207718 - DNA, 25 bp, Homo sapien
ctgctcgttcagctctcacttataa

SEQ ID NO: 207719 - DNA, 25 bp, Homo sapien
gaggatgacagcttccagctccatt

SEQ ID NO: 207720 - DNA, 25 bp, Homo sapien
tcaggtcctaggcttgcaaaagagc

SEQ ID NO: 207721 - DNA, 25 bp, Homo sapien
tatgctctgctctaagctacaaggg

SEQ ID NO: 207722 - DNA, 25 bp, Homo sapien
cattattgggtcaggcaacgtggta

SEQ ID NO: 207723 - DNA, 25 bp, Homo sapien
cacaatgcactgaaagggcctcaag

SEQ ID NO: 207724 - DNA, 25 bp, Homo sapien
ctttccaaatgtagttccaacatgg

SEQ ID NO: 207725 - DNA, 25 bp, Homo sapien
cacctttccaaatgtagttccaaca

SEQ ID NO: 207726 - DNA, 25 bp, Homo sapien
ttgacacagcagatgcagatccagg

SEQ ID NO: 207727 - DNA, 25 bp, Homo sapien
gaaccagtgagtggttcaattgaca

SEQ ID NO: 207728 - DNA, 25 bp, Homo sapien
tagatcaaatgctgccttcttagag

SEQ ID NO: 207729 - DNA, 25 bp, Homo sapien
cacctgtttcaagtcgtctcccgga

SEQ ID NO: 207730 - DNA, 25 bp, Homo sapien
actccttctcatcctttagatcaaa

SEQ ID NO: 207731 - DNA, 25 bp, Homo sapien
tctcccctgattatgaagctgactc

SEQ ID NO: 207732 - DNA, 25 bp, Homo sapien
ccaggtttctctcaggtcgcaggat

SEQ ID NO: 207733 - DNA, 25 bp, Homo sapien
ggtgctcacagttgcccaggtttct

SEQ ID NO: 207734 - DNA, 25 bp, Homo sapien
cacagtggtagcataagactgctgg

SEQ ID NO: 207735 - DNA, 25 bp, Homo sapien
cctaaagactgtccaggacttggcc

SEQ ID NO: 207736 - DNA, 25 bp, Homo sapien
cctgggacagaaccacgtgattatc

SEQ ID NO: 207737 - DNA, 25 bp, Homo sapien
atgtggaatcccctgaactatagag

SEQ ID NO: 207738 - DNA, 25 bp, Homo sapien
tcattggaggtcgttggaggtcccc

SEQ ID NO: 207739 - DNA, 25 bp, Homo sapien
cgtgattatctaacatgtgcaaata

SEQ ID NO: 207740 - DNA, 25 bp, Homo sapien
agcatgtgccccgtgcgtgaatcag

SEQ ID NO: 207741 - DNA, 25 bp, Homo sapien
cagttgcactcgcacattggtgggc

SEQ ID NO: 207742 - DNA, 25 bp, Homo sapien
gcggtggtagcgtgcttgtgtctct

SEQ ID NO: 207743 - DNA, 25 bp, Homo sapien
tctctgccctttgggtcgcgaggtg

SEQ ID NO: 207744 - DNA, 25 bp, Homo sapien
tggggtaggggggtctggcagctgc

SEQ ID NO: 207745 - DNA, 25 bp, Homo sapien
ctggaggagtgggactctggggtag

SEQ ID NO: 207746 - DNA, 25 bp, Homo sapien
ggtaggggggtctggcagctgcctg

SEQ ID NO: 207747 - DNA, 25 bp, Homo sapien
tctggggtaggggggtctggcagct

SEQ ID NO: 207748 - DNA, 25 bp, Homo sapien
catgggttcgaagggcagcggccag

SEQ ID NO: 207749 - DNA, 25 bp, Homo sapien
tgtacaccatcttcgcagggagtgg

SEQ ID NO: 207750 - DNA, 25 bp, Homo sapien
ggacagcttcgggtctgtgctcggg

SEQ ID NO: 207751 - DNA, 25 bp, Homo sapien
cgcccaagaagggtggacagcttcg

SEQ ID NO: 207752 - DNA, 25 bp, Homo sapien
gtcctggctgctatccgggatccgg

SEQ ID NO: 207753 - DNA, 25 bp, Homo sapien
tgctccaggccgtaaggcaaaggcg

SEQ ID NO: 207754 - DNA, 25 bp, Homo sapien
tccctggcgccggaacgtgaaggcc

SEQ ID NO: 207755 - DNA, 25 bp, Homo sapien
tgtccagtccctggcgccggaacgt

SEQ ID NO: 207756 - DNA, 25 bp, Homo sapien
cgcgagggcgccgacagccgggggc

SEQ ID NO: 207757 - DNA, 25 bp, Homo sapien
cggatgatctgagccgcgagggcgc

SEQ ID NO: 207758 - DNA, 25 bp, Homo sapien
gcgagggcgccgacagccgggggcc

SEQ ID NO: 207759 - DNA, 25 bp, Homo sapien
gcccggatgatctgagccgcgaggg

SEQ ID NO: 207760 - DNA, 25 bp, Homo sapien
cgggtaaaacttcttgatgttagag

SEQ ID NO: 207761 - DNA, 25 bp, Homo sapien
gagagccttctaccaactgcagttt

SEQ ID NO: 207762 - DNA, 25 bp, Homo sapien
gcttggttgaggtatggttctgttc

SEQ ID NO: 207763 - DNA, 25 bp, Homo sapien
actgcagttttagatacgttttgaa

SEQ ID NO: 207764 - DNA, 25 bp, Homo sapien
cagttgtccaagccatgggatctgt

SEQ ID NO: 207765 - DNA, 25 bp, Homo sapien
tgggatctgtgtgctagccccacct

SEQ ID NO: 207766 - DNA, 25 bp, Homo sapien
acaccacatggtacaaatccacaaa

SEQ ID NO: 207767 - DNA, 25 bp, Homo sapien
ctgaaacaccacatggtacaaatcc

SEQ ID NO: 207768 - DNA, 25 bp, Homo sapien
gaaaaacatctttgcagtatgccat

SEQ ID NO: 207769 - DNA, 25 bp, Homo sapien
gttgataggtttcctcccatcagca

SEQ ID NO: 207770 - DNA, 25 bp, Homo sapien
tccttttagtaagaggctggcttgt

SEQ ID NO: 207771 - DNA, 25 bp, Homo sapien
tttcagctagatagggaattcttgg

SEQ ID NO: 207772 - DNA, 25 bp, Homo sapien
cattgtcttgtgaaacttggcaaac

SEQ ID NO: 207773 - DNA, 25 bp, Homo sapien
tgttttatccatagctcctctttga

SEQ ID NO: 207774 - DNA, 25 bp, Homo sapien
gagccttgcatattataactgtgac

SEQ ID NO: 207775 - DNA, 25 bp, Homo sapien
cacatttctatgatatgcttaagta

SEQ ID NO: 207776 - DNA, 25 bp, Homo sapien
tattttgccatacttgatattctaa

SEQ ID NO: 207777 - DNA, 25 bp, Homo sapien
cgtgcccagccgatggcatgtttat

SEQ ID NO: 207778 - DNA, 25 bp, Homo sapien
taattgagctgttggatctgcattg

SEQ ID NO: 207779 - DNA, 25 bp, Homo sapien
caaattatgcttcggtattggtcag

SEQ ID NO: 207780 - DNA, 25 bp, Homo sapien
ttacaggcgtgcgttattatgcccg

SEQ ID NO: 207781 - DNA, 25 bp, Homo sapien
taccccttgcagattgtttgctgta

SEQ ID NO: 207782 - DNA, 25 bp, Homo sapien
tttgctgtagtgtcttcattcctca

SEQ ID NO: 207783 - DNA, 25 bp, Homo sapien
gctgtagtgtcttcattcctcatta

SEQ ID NO: 207784 - DNA, 25 bp, Homo sapien
gtttgctgtagtgtcttcattcctc

SEQ ID NO: 207785 - DNA, 25 bp, Homo sapien
gatgccaggatccacgtgaagagac

SEQ ID NO: 207786 - DNA, 25 bp, Homo sapien
taaagacgctagtattctgcagtga

SEQ ID NO: 207787 - DNA, 25 bp, Homo sapien
aacccttgtggttggagtagagaat

SEQ ID NO: 207788 - DNA, 25 bp, Homo sapien
gacagtatgaagtgagatgcggcta

SEQ ID NO: 207789 - DNA, 25 bp, Homo sapien
ttaaagacctctaatcgcatgcaag

SEQ ID NO: 207790 - DNA, 25 bp, Homo sapien
attgctgtccgccacttgatagtca

SEQ ID NO: 207791 - DNA, 25 bp, Homo sapien
taatcagtctgatactagaatcatg

SEQ ID NO: 207792 - DNA, 25 bp, Homo sapien
cattcattggacgtactattcaacg

SEQ ID NO: 207793 - DNA, 25 bp, Homo sapien
gcattgttgataaagccagtccctt

SEQ ID NO: 207794 - DNA, 25 bp, Homo sapien
taattcgtgttgtaaatcagactcc

SEQ ID NO: 207795 - DNA, 25 bp, Homo sapien
tttgctatcatgattggctgggcct

SEQ ID NO: 207796 - DNA, 25 bp, Homo sapien
cagctacacgctcaaatgtgcagat

SEQ ID NO: 207797 - DNA, 25 bp, Homo sapien
gacaatctaacactctatggtaggg

SEQ ID NO: 207798 - DNA, 25 bp, Homo sapien
tctcttttaattggacaacactgtc

SEQ ID NO: 207799 - DNA, 25 bp, Homo sapien
tgtcactcaaggcatagatgaaact

SEQ ID NO: 207800 - DNA, 25 bp, Homo sapien
tcattaagatgtgtatcagcttgga

SEQ ID NO: 207801 - DNA, 25 bp, Homo sapien
tatgttaagatagtggcttctgctc

SEQ ID NO: 207802 - DNA, 25 bp, Homo sapien
tgttcacagattctttccctttcga

SEQ ID NO: 207803 - DNA, 25 bp, Homo sapien
gttgatataacaacaaagtggactt

SEQ ID NO: 207804 - DNA, 25 bp, Homo sapien
gaaatgatgagaggcattggttcca

SEQ ID NO: 207805 - DNA, 25 bp, Homo sapien
cctaattaggtacagtgaatgacac

SEQ ID NO: 207806 - DNA, 25 bp, Homo sapien
gttatatcctaattaggtacagtga

SEQ ID NO: 207807 - DNA, 25 bp, Homo sapien
cgggtagctgcggaacaaaattagt

SEQ ID NO: 207808 - DNA, 25 bp, Homo sapien
taagttagattgatgtaagagatcg

SEQ ID NO: 207809 - DNA, 25 bp, Homo sapien
tagtagtagacagaccacatgctcc

SEQ ID NO: 207810 - DNA, 25 bp, Homo sapien
cgtttggcactgcatagtagtagac

SEQ ID NO: 207811 - DNA, 25 bp, Homo sapien
catgctcctctccaagcaactagag

SEQ ID NO: 207812 - DNA, 25 bp, Homo sapien
tattggaacgtatctatcgtttggc

SEQ ID NO: 207813 - DNA, 25 bp, Homo sapien
taacagggcccgattcacatggcag

SEQ ID NO: 207814 - DNA, 25 bp, Homo sapien
cagctggcaccatactttaacaggg

SEQ ID NO: 207815 - DNA, 25 bp, Homo sapien
ttgggaagcgcaacgtgggactcct

SEQ ID NO: 207816 - DNA, 25 bp, Homo sapien
ggattcagatgaactcttgctggct

SEQ ID NO: 207817 - DNA, 25 bp, Homo sapien
tttcctgatctcaaagatctctttg

SEQ ID NO: 207818 - DNA, 25 bp, Homo sapien
gtgtttttcctgatctcaaagatct

SEQ ID NO: 207819 - DNA, 25 bp, Homo sapien
cctgatctcaaagatctctttgtcc

SEQ ID NO: 207820 - DNA, 25 bp, Homo sapien
tgatctcaaagatctctttgtccat

SEQ ID NO: 207821 - DNA, 25 bp, Homo sapien
ttccacgtggctcatcatgcacact

SEQ ID NO: 207822 - DNA, 25 bp, Homo sapien
agggagctgatcttcccctaggtca

SEQ ID NO: 207823 - DNA, 25 bp, Homo sapien
cctaggtcagcatggttgtgaccct

SEQ ID NO: 207824 - DNA, 25 bp, Homo sapien
tcatgcacacttgaaatggcccatt

SEQ ID NO: 207825 - DNA, 25 bp, Homo sapien
tatattgggtgccatcagcaatgtg

SEQ ID NO: 207826 - DNA, 25 bp, Homo sapien
gaatgccttgtgctgagccttatat

SEQ ID NO: 207827 - DNA, 25 bp, Homo sapien
taaaacattagaccatccaagcaag

SEQ ID NO: 207828 - DNA, 25 bp, Homo sapien
cagcaatgtggcaaatatagggata

SEQ ID NO: 207829 - DNA, 25 bp, Homo sapien
cagcgggcttcatcagagtgcacaa

SEQ ID NO: 207830 - DNA, 25 bp, Homo sapien
caaacaagggaatctgataaattct

SEQ ID NO: 207831 - DNA, 25 bp, Homo sapien
catatattagctgtaaaagatgcac

SEQ ID NO: 207832 - DNA, 25 bp, Homo sapien
gatttcctataggtttgtgactaca

SEQ ID NO: 207833 - DNA, 25 bp, Homo sapien
tattctggtattctctacatcttgc

SEQ ID NO: 207834 - DNA, 25 bp, Homo sapien
tgcatggcctagcatatagtatatg

SEQ ID NO: 207835 - DNA, 25 bp, Homo sapien
gccagagggatatttcttgcactta

SEQ ID NO: 207836 - DNA, 25 bp, Homo sapien
gcacttaatgtatcatgtagaaatc

SEQ ID NO: 207837 - DNA, 25 bp, Homo sapien
tagtgtctgagcggcacagacgaga

SEQ ID NO: 207838 - DNA, 25 bp, Homo sapien
tgagcggcacagacgagatctcgat

SEQ ID NO: 207839 - DNA, 25 bp, Homo sapien
gacgagatctcgatcgaaggcgaga

SEQ ID NO: 207840 - DNA, 25 bp, Homo sapien
atcgaaggcgagatggcggacgtgc

SEQ ID NO: 207841 - DNA, 25 bp, Homo sapien
tcacgaggctgggggcgaagatttc

SEQ ID NO: 207842 - DNA, 25 bp, Homo sapien
acgaggctgggggcgaagatttcgc

SEQ ID NO: 207843 - DNA, 25 bp, Homo sapien
aggctgggggcgaagatttcgccat

SEQ ID NO: 207844 - DNA, 25 bp, Homo sapien
gaggctgggggcgaagatttcgcca

SEQ ID NO: 207845 - DNA, 25 bp, Homo sapien
aggatggggacgagagcattcacaa

SEQ ID NO: 207846 - DNA, 25 bp, Homo sapien
ggatggggacgagagcattcacaaa

SEQ ID NO: 207847 - DNA, 25 bp, Homo sapien
gaggatggggacgagagcattcaca

SEQ ID NO: 207848 - DNA, 25 bp, Homo sapien
atgaggatggggacgagagcattca

SEQ ID NO: 207849 - DNA, 25 bp, Homo sapien
gaagacgcagcagaagtccagaccg

SEQ ID NO: 207850 - DNA, 25 bp, Homo sapien
gacgtcgctgacaggtcctctgttg

SEQ ID NO: 207851 - DNA, 25 bp, Homo sapien
cagaccggagacgtcgctgacaggt

SEQ ID NO: 207852 - DNA, 25 bp, Homo sapien
agcagaagtccagaccggagacgtc

SEQ ID NO: 207853 - DNA, 25 bp, Homo sapien
gatgtcacagttttttgtacttcca

SEQ ID NO: 207854 - DNA, 25 bp, Homo sapien
gaagagtctatactaagttcttggt

SEQ ID NO: 207855 - DNA, 25 bp, Homo sapien
tcagatagatgttatagaaatgcct

SEQ ID NO: 207856 - DNA, 25 bp, Homo sapien
tccagctgtctaaaggcatgaatct

SEQ ID NO: 207857 - DNA, 25 bp, Homo sapien
aaatcctgtgctagatgttttggag

SEQ ID NO: 207858 - DNA, 25 bp, Homo sapien
gaaaatgtagaacaggtattccagt

SEQ ID NO: 207859 - DNA, 25 bp, Homo sapien
gaaaaggattgccacgtagttacat

SEQ ID NO: 207860 - DNA, 25 bp, Homo sapien
tcctggaacttacagcctagtagca

SEQ ID NO: 207861 - DNA, 25 bp, Homo sapien
aatgtagttcaaaagatggtcttca

SEQ ID NO: 207862 - DNA, 25 bp, Homo sapien
tagtcttttatccattaccctctgc

SEQ ID NO: 207863 - DNA, 25 bp, Homo sapien
aagactgctcatttacaaaaattct

SEQ ID NO: 207864 - DNA, 25 bp, Homo sapien
ccaataattcatatgtttggttgct

SEQ ID NO: 207865 - DNA, 25 bp, Homo sapien
caggttttctagctcatgatgacct

SEQ ID NO: 207866 - DNA, 25 bp, Homo sapien
tagctcatgatgaccttttttcccc

SEQ ID NO: 207867 - DNA, 25 bp, Homo sapien
ctcttcggtgaatccttcccaggtt

SEQ ID NO: 207868 - DNA, 25 bp, Homo sapien
ttcaattttacctcttcggtgaatc

SEQ ID NO: 207869 - DNA, 25 bp, Homo sapien
aaaagaatattaacaggatcaccac

SEQ ID NO: 207870 - DNA, 25 bp, Homo sapien
tagtagctaaagtacgcttcagcac

SEQ ID NO: 207871 - DNA, 25 bp, Homo sapien
tagccattgaaagcattagcataac

SEQ ID NO: 207872 - DNA, 25 bp, Homo sapien
taaaagttctacctgaccacggctc

SEQ ID NO: 207873 - DNA, 25 bp, Homo sapien
tattgaattttgaccctgtccaaat

SEQ ID NO: 207874 - DNA, 25 bp, Homo sapien
tccagctccaaatgtatgagttgaa

SEQ ID NO: 207875 - DNA, 25 bp, Homo sapien
tgaccctgtccaaatgaaaatggaa

SEQ ID NO: 207876 - DNA, 25 bp, Homo sapien
attttgtgaggaagatgaaaaacct

SEQ ID NO: 207877 - DNA, 25 bp, Homo sapien
atctcttgctctgatgacagaggat

SEQ ID NO: 207878 - DNA, 25 bp, Homo sapien
tcttgctctgatgacagaggattta

SEQ ID NO: 207879 - DNA, 25 bp, Homo sapien
tctgatgacagaggatttagatttc

SEQ ID NO: 207880 - DNA, 25 bp, Homo sapien
cagaggatttagatttcttgcagaa

SEQ ID NO: 207881 - DNA, 25 bp, Homo sapien
gagatttctgtatcaaatacagaag

SEQ ID NO: 207882 - DNA, 25 bp, Homo sapien
gatgagatttctgtatcaaatacag

SEQ ID NO: 207883 - DNA, 25 bp, Homo sapien
ctagaagtataactcataagaaaag

SEQ ID NO: 207884 - DNA, 25 bp, Homo sapien
aggtgatctagaagtataactcata

SEQ ID NO: 207885 - DNA, 25 bp, Homo sapien
cagacgttcgtggaaaattctcagc

SEQ ID NO: 207886 - DNA, 25 bp, Homo sapien
cagctttgggagttcctaaaaatat

SEQ ID NO: 207887 - DNA, 25 bp, Homo sapien
aaaatataggaatttcagacgttcg

SEQ ID NO: 207888 - DNA, 25 bp, Homo sapien
tttcacagctttgggagttcctaaa

SEQ ID NO: 207889 - DNA, 25 bp, Homo sapien
cacaatatgctctttgggtgaacaa

SEQ ID NO: 207890 - DNA, 25 bp, Homo sapien
tgacagccagaacatattggaattg

SEQ ID NO: 207891 - DNA, 25 bp, Homo sapien
aatatgcttgttatgccaaatccca

SEQ ID NO: 207892 - DNA, 25 bp, Homo sapien
catctatcatcagtaaagtgttcca

SEQ ID NO: 207893 - DNA, 25 bp, Homo sapien
tcttacttgtcttactgtcccttta

SEQ ID NO: 207894 - DNA, 25 bp, Homo sapien
tttgattctcttacttgtcttactg

SEQ ID NO: 207895 - DNA, 25 bp, Homo sapien
gtgaagtacattttgattctcttac

SEQ ID NO: 207896 - DNA, 25 bp, Homo sapien
tgtccctttatctccatactcagca

SEQ ID NO: 207897 - DNA, 25 bp, Homo sapien
tattttaaagccaggcgtgcatggt

SEQ ID NO: 207898 - DNA, 25 bp, Homo sapien
cctgatataatttgttaccccgact

SEQ ID NO: 207899 - DNA, 25 bp, Homo sapien
catggtcagttaaccagagatgcaa

SEQ ID NO: 207900 - DNA, 25 bp, Homo sapien
gagatgcaaataatcgaaacaattt

SEQ ID NO: 207901 - DNA, 25 bp, Homo sapien
cctttttccgaccactgattggaat

SEQ ID NO: 207902 - DNA, 25 bp, Homo sapien
atcccctttttccgaccactgattg

SEQ ID NO: 207903 - DNA, 25 bp, Homo sapien
ccgaccactgattggaatttgattg

SEQ ID NO: 207904 - DNA, 25 bp, Homo sapien
cactgattggaatttgattgtttct

SEQ ID NO: 207905 - DNA, 25 bp, Homo sapien
tttctgagttgatatctataaatta

SEQ ID NO: 207906 - DNA, 25 bp, Homo sapien
aaattatttcagagattaaagcatt

SEQ ID NO: 207907 - DNA, 25 bp, Homo sapien
ttcagagattaaagcattttcttat

SEQ ID NO: 207908 - DNA, 25 bp, Homo sapien
tctgagttgatatctataaattatt

SEQ ID NO: 207909 - DNA, 25 bp, Homo sapien
tttgtgaacttgtgatagtcgtaat

SEQ ID NO: 207910 - DNA, 25 bp, Homo sapien
gtgaacttgtgatagtcgtaatatg

SEQ ID NO: 207911 - DNA, 25 bp, Homo sapien
gaacttgtgatagtcgtaatatgtg

SEQ ID NO: 207912 - DNA, 25 bp, Homo sapien
cttgtgatagtcgtaatatgtgaac

SEQ ID NO: 207913 - DNA, 25 bp, Homo sapien
gcaagctttgactgcttcgcagaac

SEQ ID NO: 207914 - DNA, 25 bp, Homo sapien
gctttgactgcttcgcagaactttc

SEQ ID NO: 207915 - DNA, 25 bp, Homo sapien
gactgcttcgcagaactttcttctt

SEQ ID NO: 207916 - DNA, 25 bp, Homo sapien
atattggcaagctttgactgcttcg

SEQ ID NO: 207917 - DNA, 25 bp, Homo sapien
tgcaactcttggttctgaagaatgc

SEQ ID NO: 207918 - DNA, 25 bp, Homo sapien
ctgcaactcttggttctgaagaatg

SEQ ID NO: 207919 - DNA, 25 bp, Homo sapien
gcaactcttggttctgaagaatgca

SEQ ID NO: 207920 - DNA, 25 bp, Homo sapien
caactcttggttctgaagaatgcat

SEQ ID NO: 207921 - DNA, 25 bp, Homo sapien
attcaatgtaagtacatgctcatct

SEQ ID NO: 207922 - DNA, 25 bp, Homo sapien
tattcaatgtaagtacatgctcatc

SEQ ID NO: 207923 - DNA, 25 bp, Homo sapien
ttcaatgtaagtacatgctcatctt

SEQ ID NO: 207924 - DNA, 25 bp, Homo sapien
ccttagtttcattatgcctagatat

SEQ ID NO: 207925 - DNA, 25 bp, Homo sapien
tttctgaaagagccttagtttcatt

SEQ ID NO: 207926 - DNA, 25 bp, Homo sapien
ttaagaatatcttgtgtttcacatc

SEQ ID NO: 207927 - DNA, 25 bp, Homo sapien
aagaatatcttgtgtttcacatctc

SEQ ID NO: 207928 - DNA, 25 bp, Homo sapien
cttctttcttcaattcggatgaact

SEQ ID NO: 207929 - DNA, 25 bp, Homo sapien
tcggatgaacttttggtaagattgc

SEQ ID NO: 207930 - DNA, 25 bp, Homo sapien
ctgagaagttaaagcgcaaatgggc

SEQ ID NO: 207931 - DNA, 25 bp, Homo sapien
tgtatcgtcttcagtattgcctggc

SEQ ID NO: 207932 - DNA, 25 bp, Homo sapien
aattccagagaagattaatcagggc

SEQ ID NO: 207933 - DNA, 25 bp, Homo sapien
tataccagcgtctactaactttggc

SEQ ID NO: 207934 - DNA, 25 bp, Homo sapien
ttctttggtaagacagaccaatata

SEQ ID NO: 207935 - DNA, 25 bp, Homo sapien
gacacgccacttaaacccaaataca

SEQ ID NO: 207936 - DNA, 25 bp, Homo sapien
tcacaaaggaaacacagtaacaatt

SEQ ID NO: 207937 - DNA, 25 bp, Homo sapien
ttgcttctgatcacatgaatataca

SEQ ID NO: 207938 - DNA, 25 bp, Homo sapien
tttagtaagtgatggaaagggagca

SEQ ID NO: 207939 - DNA, 25 bp, Homo sapien
ccatttagtaagtgatggaaaggga

SEQ ID NO: 207940 - DNA, 25 bp, Homo sapien
atttagtaagtgatggaaagggagc

SEQ ID NO: 207941 - DNA, 25 bp, Homo sapien
tagtaagtgatggaaagggagcagg

SEQ ID NO: 207942 - DNA, 25 bp, Homo sapien
gagtattttagttggtactgcttca

SEQ ID NO: 207943 - DNA, 25 bp, Homo sapien
tactgacatatataatcatgataca

SEQ ID NO: 207944 - DNA, 25 bp, Homo sapien
cataatattcacgtgaaaagggtgt

SEQ ID NO: 207945 - DNA, 25 bp, Homo sapien
ctttatactgacatatataatcatg

SEQ ID NO: 207946 - DNA, 25 bp, Homo sapien
cctctagatgatggcgtactccagc

SEQ ID NO: 207947 - DNA, 25 bp, Homo sapien
aagtaggtagatgttccactgcacc

SEQ ID NO: 207948 - DNA, 25 bp, Homo sapien
tattccccgagatgtttgcctaaac

SEQ ID NO: 207949 - DNA, 25 bp, Homo sapien
tagagagagctttacaacaagtagg

SEQ ID NO: 207950 - DNA, 25 bp, Homo sapien
tggtcctgcatataatcttcatgtt

SEQ ID NO: 207951 - DNA, 25 bp, Homo sapien
cagtaaattggtcctgcatataatc

SEQ ID NO: 207952 - DNA, 25 bp, Homo sapien
tcttcatgtttacgaaaaacatcac

SEQ ID NO: 207953 - DNA, 25 bp, Homo sapien
ttacgaaaaacatcacatgttggct

SEQ ID NO: 207954 - DNA, 25 bp, Homo sapien
acatgttcattgagaaggcattcac

SEQ ID NO: 207955 - DNA, 25 bp, Homo sapien
ctatatcacaatttcactggctgcc

SEQ ID NO: 207956 - DNA, 25 bp, Homo sapien
tatgctctcgctacctgggtgatgg

SEQ ID NO: 207957 - DNA, 25 bp, Homo sapien
taaacttgcacaagtgcccctgaat

SEQ ID NO: 207958 - DNA, 25 bp, Homo sapien
ctcttcaagatctaaaaggatgtga

SEQ ID NO: 207959 - DNA, 25 bp, Homo sapien
aggaaatacagctatatagacaggt

SEQ ID NO: 207960 - DNA, 25 bp, Homo sapien
taccagaaataccacggagctgtta

SEQ ID NO: 207961 - DNA, 25 bp, Homo sapien
ggatgtgagtcattacctatgcaga

SEQ ID NO: 207962 - DNA, 25 bp, Homo sapien
ttaatctcctcactatgtttacagt

SEQ ID NO: 207963 - DNA, 25 bp, Homo sapien
catttatagtttcgtgtatcctaca

SEQ ID NO: 207964 - DNA, 25 bp, Homo sapien
gtttacagtaatgatcaatttcctc

SEQ ID NO: 207965 - DNA, 25 bp, Homo sapien
tacagttgtctttaatctcctcact

SEQ ID NO: 207966 - DNA, 25 bp, Homo sapien
ggcatctatcgattttgatccctga

SEQ ID NO: 207967 - DNA, 25 bp, Homo sapien
ttatttgtcgctagagagaactgac

SEQ ID NO: 207968 - DNA, 25 bp, Homo sapien
acatcttttccactgcacctaaggg

SEQ ID NO: 207969 - DNA, 25 bp, Homo sapien
taagttgccctaaacagagcaattg

SEQ ID NO: 207970 - DNA, 25 bp, Homo sapien
tttagtacttatgtcttgctcatac

SEQ ID NO: 207971 - DNA, 25 bp, Homo sapien
ttctagcaaaagtctgtccaaactg

SEQ ID NO: 207972 - DNA, 25 bp, Homo sapien
cagcggatcctaactacaaacggtc

SEQ ID NO: 207973 - DNA, 25 bp, Homo sapien
acgccacagcggatcctaactacaa

SEQ ID NO: 207974 - DNA, 25 bp, Homo sapien
tggggtcccaaactccactcaggac

SEQ ID NO: 207975 - DNA, 25 bp, Homo sapien
actcaggacgccacagcggatccta

SEQ ID NO: 207976 - DNA, 25 bp, Homo sapien
catttggcttagttgaccacagtct

SEQ ID NO: 207977 - DNA, 25 bp, Homo sapien
ggctgcattcgtccctctacacagg

SEQ ID NO: 207978 - DNA, 25 bp, Homo sapien
cactggaagggtgtcaacactggcg

SEQ ID NO: 207979 - DNA, 25 bp, Homo sapien
tcacaatgaaaagagggacactgga

SEQ ID NO: 207980 - DNA, 25 bp, Homo sapien
catggcaaggccaccattgagcatg

SEQ ID NO: 207981 - DNA, 25 bp, Homo sapien
tttcattgttcttcatggcaaggcc

SEQ ID NO: 207982 - DNA, 25 bp, Homo sapien
ccacattcatcaaaggggccagaat

SEQ ID NO: 207983 - DNA, 25 bp, Homo sapien
tccacattcatcaaaggggccagaa

SEQ ID NO: 207984 - DNA, 25 bp, Homo sapien
tataaatattaacgggagactgctc

SEQ ID NO: 207985 - DNA, 25 bp, Homo sapien
tgggcagaacccacatctagggaag

SEQ ID NO: 207986 - DNA, 25 bp, Homo sapien
taccttgcgcatcatatagtggacc

SEQ ID NO: 207987 - DNA, 25 bp, Homo sapien
ccttcaaggagctactgggagcatc

SEQ ID NO: 207988 - DNA, 25 bp, Homo sapien
cttgagctcagtacccgaagggaga

SEQ ID NO: 207989 - DNA, 25 bp, Homo sapien
caggttgtgtgagtctacccttaca

SEQ ID NO: 207990 - DNA, 25 bp, Homo sapien
catggattccactccgttggaggcc

SEQ ID NO: 207991 - DNA, 25 bp, Homo sapien
gcaggtcatcaagcaacaggtcact

SEQ ID NO: 207992 - DNA, 25 bp, Homo sapien
agttggctgcctaaagagagactca

SEQ ID NO: 207993 - DNA, 25 bp, Homo sapien
ggctgcctaaagagagactcaattc

SEQ ID NO: 207994 - DNA, 25 bp, Homo sapien
ttggctgcctaaagagagactcaat

SEQ ID NO: 207995 - DNA, 25 bp, Homo sapien
gctgcctaaagagagactcaattca

SEQ ID NO: 207996 - DNA, 25 bp, Homo sapien
ggacaggtacagagagtacatggga

SEQ ID NO: 207997 - DNA, 25 bp, Homo sapien
caggtacagagagtacatgggaatg

SEQ ID NO: 207998 - DNA, 25 bp, Homo sapien
ggtacagagagtacatgggaatgcc

SEQ ID NO: 207999 - DNA, 25 bp, Homo sapien
tacatgggaatgccattgcctgctc

SEQ ID NO: 208000 - DNA, 25 bp, Homo sapien
ccacagacagaaaacatgaagggtt

SEQ ID NO: 208001 - DNA, 25 bp, Homo sapien
aagcacaccttggattacccttggt

SEQ ID NO: 208002 - DNA, 25 bp, Homo sapien
aaagtgggagcggagttgtatctac

SEQ ID NO: 208003 - DNA, 25 bp, Homo sapien
gttgtatctacaaggagctatcagt

SEQ ID NO: 208004 - DNA, 25 bp, Homo sapien
tttgacatccaccttgaggtgttcc

SEQ ID NO: 208005 - DNA, 25 bp, Homo sapien
gcttgtagacgatggttttgtcttt

SEQ ID NO: 208006 - DNA, 25 bp, Homo sapien
taaatttgtgcttgtagacgatggt

SEQ ID NO: 208007 - DNA, 25 bp, Homo sapien
gatacttaaatttgtgcttgtagac

SEQ ID NO: 208008 - DNA, 25 bp, Homo sapien
tacagtatagaatatagaaagaact

SEQ ID NO: 208009 - DNA, 25 bp, Homo sapien
ctacagtatagaatatagaaagaac

SEQ ID NO: 208010 - DNA, 25 bp, Homo sapien
actcagggggcaagacatgacattt

SEQ ID NO: 208011 - DNA, 25 bp, Homo sapien
catgacatttgggagcacatatgtc

SEQ ID NO: 208012 - DNA, 25 bp, Homo sapien
acatttgggagcacatatgtcccac

SEQ ID NO: 208013 - DNA, 25 bp, Homo sapien
tccagggtgtgaggtagcaaagtac

SEQ ID NO: 208014 - DNA, 25 bp, Homo sapien
gaagggtatcagtcccagggacaaa

SEQ ID NO: 208015 - DNA, 25 bp, Homo sapien
gacgaagggtatcagtcccagggac

SEQ ID NO: 208016 - DNA, 25 bp, Homo sapien
aaagagctagttgtgaaagggattt

SEQ ID NO: 208017 - DNA, 25 bp, Homo sapien
agctagttgtgaaagggattttggc

SEQ ID NO: 208018 - DNA, 25 bp, Homo sapien
cttggcttccagtgttctgactgag

SEQ ID NO: 208019 - DNA, 25 bp, Homo sapien
agtgttctgactgagcaaagccaca

SEQ ID NO: 208020 - DNA, 25 bp, Homo sapien
tccagtgttctgactgagcaaagcc

SEQ ID NO: 208021 - DNA, 25 bp, Homo sapien
ggcttccagtgttctgactgagcaa

SEQ ID NO: 208022 - DNA, 25 bp, Homo sapien
tgctggaacatgtggctgtccaagt

SEQ ID NO: 208023 - DNA, 25 bp, Homo sapien
ttctatagagtatcacactcctccc

SEQ ID NO: 208024 - DNA, 25 bp, Homo sapien
ggctgtccaagttctatagagtatc

SEQ ID NO: 208025 - DNA, 25 bp, Homo sapien
gctggaacatgtggctgtccaagtt

SEQ ID NO: 208026 - DNA, 25 bp, Homo sapien
tgatgtgagtacaggagattcacat

SEQ ID NO: 208027 - DNA, 25 bp, Homo sapien
ctgatgtgagtacaggagattcaca

SEQ ID NO: 208028 - DNA, 25 bp, Homo sapien
gatgtgagtacaggagattcacatg

SEQ ID NO: 208029 - DNA, 25 bp, Homo sapien
agccacagaagctgattcatcatac

SEQ ID NO: 208030 - DNA, 25 bp, Homo sapien
tggatactgttggtgccagccacag

SEQ ID NO: 208031 - DNA, 25 bp, Homo sapien
tgctcaaggacccactggatactgt

SEQ ID NO: 208032 - DNA, 25 bp, Homo sapien
gccagccacagaagctgattcatca

SEQ ID NO: 208033 - DNA, 25 bp, Homo sapien
gaagagtcacatttgtgttggccac

SEQ ID NO: 208034 - DNA, 25 bp, Homo sapien
tgaagagtcacatttgtgttggcca

SEQ ID NO: 208035 - DNA, 25 bp, Homo sapien
cagttgttagcctcttcccagtgaa

SEQ ID NO: 208036 - DNA, 25 bp, Homo sapien
cactggtgccactaggttgcatctg

SEQ ID NO: 208037 - DNA, 25 bp, Homo sapien
gtgggtcattggagaacctggctcc

SEQ ID NO: 208038 - DNA, 25 bp, Homo sapien
aatttatcaccatttcctaggtggg

SEQ ID NO: 208039 - DNA, 25 bp, Homo sapien
tggtttcacctgcttgttcaacaac

SEQ ID NO: 208040 - DNA, 25 bp, Homo sapien
tgtggtttcacctgcttgttcaaca

SEQ ID NO: 208041 - DNA, 25 bp, Homo sapien
ctgtggtttcacctgcttgttcaac

SEQ ID NO: 208042 - DNA, 25 bp, Homo sapien
gtttcacctgcttgttcaacaacat

SEQ ID NO: 208043 - DNA, 25 bp, Homo sapien
cacttgctcacaaagattaagggta

SEQ ID NO: 208044 - DNA, 25 bp, Homo sapien
gatggggcccctagactgtccactt

SEQ ID NO: 208045 - DNA, 25 bp, Homo sapien
catttcctggatggggcccctagac

SEQ ID NO: 208046 - DNA, 25 bp, Homo sapien
aatgtgccgcttccaaactgtccag

SEQ ID NO: 208047 - DNA, 25 bp, Homo sapien
cctggggcatggacaacctctccca

SEQ ID NO: 208048 - DNA, 25 bp, Homo sapien
ctggggcatggacaacctctcccac

SEQ ID NO: 208049 - DNA, 25 bp, Homo sapien
ctctcggctcggctcgcgggctgta

SEQ ID NO: 208050 - DNA, 25 bp, Homo sapien
tcggctcgcgggctgtaaggtctcc

SEQ ID NO: 208051 - DNA, 25 bp, Homo sapien
ctgggatcggggtcggctctcggct

SEQ ID NO: 208052 - DNA, 25 bp, Homo sapien
ggctgtaaggtctccgcggacccca

SEQ ID NO: 208053 - DNA, 25 bp, Homo sapien
gccaagcaatttcgcgagcaatagc

SEQ ID NO: 208054 - DNA, 25 bp, Homo sapien
aagggtgagcgccaagcaatttcgc

SEQ ID NO: 208055 - DNA, 25 bp, Homo sapien
agcaatagccggcaaagtaaccacc

SEQ ID NO: 208056 - DNA, 25 bp, Homo sapien
ttcgcgagcaatagccggcaaagta

SEQ ID NO: 208057 - DNA, 25 bp, Homo sapien
gaggcggttggcaatctcacagaaa

SEQ ID NO: 208058 - DNA, 25 bp, Homo sapien
tcaggcgtggcgtgatctgacccga

SEQ ID NO: 208059 - DNA, 25 bp, Homo sapien
tcagggttttccgtcagaacgagct

SEQ ID NO: 208060 - DNA, 25 bp, Homo sapien
tcggaagtcgctccaagggaaagaa

SEQ ID NO: 208061 - DNA, 25 bp, Homo sapien
tctacagatccctggtcctgttcct

SEQ ID NO: 208062 - DNA, 25 bp, Homo sapien
ctcttctacagatccctggtcctgt

SEQ ID NO: 208063 - DNA, 25 bp, Homo sapien
tgctccagatttgcttcccactcag

SEQ ID NO: 208064 - DNA, 25 bp, Homo sapien
tccagatttgcttcccactcagctg

SEQ ID NO: 208065 - DNA, 25 bp, Homo sapien
gcaaggtttgctgtttcgttacaac

SEQ ID NO: 208066 - DNA, 25 bp, Homo sapien
tggagacctctcgaccgagacaacg

SEQ ID NO: 208067 - DNA, 25 bp, Homo sapien
cagtttggcccagtcctctttgtcc

SEQ ID NO: 208068 - DNA, 25 bp, Homo sapien
tacaactaaacttgcgaattctcgg

SEQ ID NO: 208069 - DNA, 25 bp, Homo sapien
caacctatggtaggtctataaccac

SEQ ID NO: 208070 - DNA, 25 bp, Homo sapien
agcaaatggtctccggaaggtctta

SEQ ID NO: 208071 - DNA, 25 bp, Homo sapien
ccacgtcaaattacacgtatgtgca

SEQ ID NO: 208072 - DNA, 25 bp, Homo sapien
caggcatgcagggacccttgagcaa

SEQ ID NO: 208073 - DNA, 25 bp, Homo sapien
gcacaggtaattatggcttgtccac

SEQ ID NO: 208074 - DNA, 25 bp, Homo sapien
catgtgagcgtcctctctaaggcaa

SEQ ID NO: 208075 - DNA, 25 bp, Homo sapien
acccatgatcatgctagagtgagca

SEQ ID NO: 208076 - DNA, 25 bp, Homo sapien
catatactgcatttaggattgagct

SEQ ID NO: 208077 - DNA, 25 bp, Homo sapien
gaatggctaataggtttgcctgtga

SEQ ID NO: 208078 - DNA, 25 bp, Homo sapien
ggttttgtcggcctgaatggctaat

SEQ ID NO: 208079 - DNA, 25 bp, Homo sapien
ggcgctcggcgggacaatgcgcggg

SEQ ID NO: 208080 - DNA, 25 bp, Homo sapien
tgtcggcctgaatggctaataggtt

SEQ ID NO: 208081 - DNA, 25 bp, Homo sapien
ttttcccatcatacccaacaatact

SEQ ID NO: 208082 - DNA, 25 bp, Homo sapien
ctagtcatccaaaacagaaattaca

SEQ ID NO: 208083 - DNA, 25 bp, Homo sapien
tacatagtcatccttgatctcttcc

SEQ ID NO: 208084 - DNA, 25 bp, Homo sapien
tcttttcccatcatacccaacaata

SEQ ID NO: 208085 - DNA, 25 bp, Homo sapien
tggcttgttaagtgaagtgttgtga

SEQ ID NO: 208086 - DNA, 25 bp, Homo sapien
cagggcctggaaggaatgtttggat

SEQ ID NO: 208087 - DNA, 25 bp, Homo sapien
aggacttgctctttccagggcctgg

SEQ ID NO: 208088 - DNA, 25 bp, Homo sapien
ggatttagttttattgagaaagata

SEQ ID NO: 208089 - DNA, 25 bp, Homo sapien
tcagagattaggacttgctctttcc

SEQ ID NO: 208090 - DNA, 25 bp, Homo sapien
cagtgcatgctttcaaaaaaacctc

SEQ ID NO: 208091 - DNA, 25 bp, Homo sapien
atcatgttccccgtcactgacttca

SEQ ID NO: 208092 - DNA, 25 bp, Homo sapien
ccagacagaaatggatggccgcttg

SEQ ID NO: 208093 - DNA, 25 bp, Homo sapien
ttttgttcaatcacccagggcagga

SEQ ID NO: 208094 - DNA, 25 bp, Homo sapien
ctagaagcctacagtctctgcattc

SEQ ID NO: 208095 - DNA, 25 bp, Homo sapien
tagaagcctacagtctctgcattct

SEQ ID NO: 208096 - DNA, 25 bp, Homo sapien
aacatttattgagtgactaatcatt

SEQ ID NO: 208097 - DNA, 25 bp, Homo sapien
tattgagtgactaatcattgaaatt

SEQ ID NO: 208098 - DNA, 25 bp, Homo sapien
tttattgagtgactaatcattgaaa

SEQ ID NO: 208099 - DNA, 25 bp, Homo sapien
catttattgagtgactaatcattga

SEQ ID NO: 208100 - DNA, 25 bp, Homo sapien
ccttcatggaatcaatgcttgaatc

SEQ ID NO: 208101 - DNA, 25 bp, Homo sapien
tggaatcaatgcttgaatctgagat

SEQ ID NO: 208102 - DNA, 25 bp, Homo sapien
tgttccttcatggaatcaatgcttg

SEQ ID NO: 208103 - DNA, 25 bp, Homo sapien
gttgttccttcatggaatcaatgct

SEQ ID NO: 208104 - DNA, 25 bp, Homo sapien
cttcttgtgacgctttcccaacgac

SEQ ID NO: 208105 - DNA, 25 bp, Homo sapien
ttgtgacgctttcccaacgacattc

SEQ ID NO: 208106 - DNA, 25 bp, Homo sapien
ggtggcacaacatgcgcatcttctt

SEQ ID NO: 208107 - DNA, 25 bp, Homo sapien
tgcgcatcttcttgtgacgctttcc

SEQ ID NO: 208108 - DNA, 25 bp, Homo sapien
ggtgaacttccctcttcaaatggac

SEQ ID NO: 208109 - DNA, 25 bp, Homo sapien
caaaatgtggctaagagaggatctc

SEQ ID NO: 208110 - DNA, 25 bp, Homo sapien
tgtatgccccacgtatcaaaaggtg

SEQ ID NO: 208111 - DNA, 25 bp, Homo sapien
ggcttgccatagtgatagagtccaa

SEQ ID NO: 208112 - DNA, 25 bp, Homo sapien
cattgaggcatttttcctataagca

SEQ ID NO: 208113 - DNA, 25 bp, Homo sapien
tggataatgactctggagcacagcc

SEQ ID NO: 208114 - DNA, 25 bp, Homo sapien
ctaggtctttaggttgcacatcaaa

SEQ ID NO: 208115 - DNA, 25 bp, Homo sapien
tcagcacaataaaaccaaaccgacg

SEQ ID NO: 208116 - DNA, 25 bp, Homo sapien
agacaggagcatattattctgccat

SEQ ID NO: 208117 - DNA, 25 bp, Homo sapien
aagaaaatgtgtatactggaatatt

SEQ ID NO: 208118 - DNA, 25 bp, Homo sapien
gtgcacaattatggcagcatggaaa

SEQ ID NO: 208119 - DNA, 25 bp, Homo sapien
gacattcatgtgcacaattatggca

SEQ ID NO: 208120 - DNA, 25 bp, Homo sapien
catgtgcacaattatggcagcatgg

SEQ ID NO: 208121 - DNA, 25 bp, Homo sapien
aaatatcagagggagtcattgccag

SEQ ID NO: 208122 - DNA, 25 bp, Homo sapien
ttcaagagtatattggccccaaaga

SEQ ID NO: 208123 - DNA, 25 bp, Homo sapien
cccatcaatagaggcctcaggttag

SEQ ID NO: 208124 - DNA, 25 bp, Homo sapien
taaagaacatatggccttgtaccag

SEQ ID NO: 208125 - DNA, 25 bp, Homo sapien
tagtcctcaggccttagttttgtac

SEQ ID NO: 208126 - DNA, 25 bp, Homo sapien
cacgcaaaacttggtaggtctggag

SEQ ID NO: 208127 - DNA, 25 bp, Homo sapien
tgtactgggtcccaaaatgatttct

SEQ ID NO: 208128 - DNA, 25 bp, Homo sapien
ttccagtgctggtctggccaacagt

SEQ ID NO: 208129 - DNA, 25 bp, Homo sapien
ttttgtgtaccttaacagacctgta

SEQ ID NO: 208130 - DNA, 25 bp, Homo sapien
aaaaggttgactgaagctgcctgcc

SEQ ID NO: 208131 - DNA, 25 bp, Homo sapien
cagctggtgtactctttagcagatc

SEQ ID NO: 208132 - DNA, 25 bp, Homo sapien
gctgcctgcctaatctagatttaca

SEQ ID NO: 208133 - DNA, 25 bp, Homo sapien
ctacacctttgttataaaatatgtg

SEQ ID NO: 208134 - DNA, 25 bp, Homo sapien
acacctttgttataaaatatgtgat

SEQ ID NO: 208135 - DNA, 25 bp, Homo sapien
tttgttataaaatatgtgatgttac

SEQ ID NO: 208136 - DNA, 25 bp, Homo sapien
cctttgttataaaatatgtgatgtt

SEQ ID NO: 208137 - DNA, 25 bp, Homo sapien
agggacaatttgtctccaaggctac

SEQ ID NO: 208138 - DNA, 25 bp, Homo sapien
tctggaggccatggccaaatcctca

SEQ ID NO: 208139 - DNA, 25 bp, Homo sapien
tgttagcgctacacttgacccaaga

SEQ ID NO: 208140 - DNA, 25 bp, Homo sapien
caggcagggtgataaggctatccca

SEQ ID NO: 208141 - DNA, 25 bp, Homo sapien
caagcgggcaagtaggggccgcaaa

SEQ ID NO: 208142 - DNA, 25 bp, Homo sapien
agcgggcaagtaggggccgcaaagg

SEQ ID NO: 208143 - DNA, 25 bp, Homo sapien
ctggagcctccaagcgggcaagtag

SEQ ID NO: 208144 - DNA, 25 bp, Homo sapien
tcctggagcctccaagcgggcaagt

SEQ ID NO: 208145 - DNA, 25 bp, Homo sapien
aggggtcgacgcagggccggaggca

SEQ ID NO: 208146 - DNA, 25 bp, Homo sapien
ggccggaggcagcggcttttccttc

SEQ ID NO: 208147 - DNA, 25 bp, Homo sapien
cctgcaggggtcgacgcagggccgg

SEQ ID NO: 208148 - DNA, 25 bp, Homo sapien
gccggaggcagcggcttttccttcc

SEQ ID NO: 208149 - DNA, 25 bp, Homo sapien
ctaaagacacgatttaacgtggcgg

SEQ ID NO: 208150 - DNA, 25 bp, Homo sapien
gacacgatttaacgtggcggcggca

SEQ ID NO: 208151 - DNA, 25 bp, Homo sapien
aagacacgatttaacgtggcggcgg

SEQ ID NO: 208152 - DNA, 25 bp, Homo sapien
acgatttaacgtggcggcggcagct

SEQ ID NO: 208153 - DNA, 25 bp, Homo sapien
tccttctcgggctcagaaagccttc

SEQ ID NO: 208154 - DNA, 25 bp, Homo sapien
ggctcagaaagccttccagccgcgg

SEQ ID NO: 208155 - DNA, 25 bp, Homo sapien
ttcaatccgagaaggctcctttgag

SEQ ID NO: 208156 - DNA, 25 bp, Homo sapien
tccatcaactccaagccgaattcaa

SEQ ID NO: 208157 - DNA, 25 bp, Homo sapien
gaattaatcataggactgttctctg

SEQ ID NO: 208158 - DNA, 25 bp, Homo sapien
ctgctattcatgacccctggagcag

SEQ ID NO: 208159 - DNA, 25 bp, Homo sapien
gatcgctcatgggaaaaacaggtag

SEQ ID NO: 208160 - DNA, 25 bp, Homo sapien
caggtagaattaatcataggactgt

SEQ ID NO: 208161 - DNA, 25 bp, Homo sapien
cttagtttgtgggattctcatcttg

SEQ ID NO: 208162 - DNA, 25 bp, Homo sapien
agtttgtgggattctcatcttggta

SEQ ID NO: 208163 - DNA, 25 bp, Homo sapien
tgtgggattctcatcttggtaggat

SEQ ID NO: 208164 - DNA, 25 bp, Homo sapien
tttgtgggattctcatcttggtagg

SEQ ID NO: 208165 - DNA, 25 bp, Homo sapien
ggaaaacagtgagcactctcccgaa

SEQ ID NO: 208166 - DNA, 25 bp, Homo sapien
gaaaacagtgagcactctcccgaaa

SEQ ID NO: 208167 - DNA, 25 bp, Homo sapien
tggactctatctgctgagaactggg

SEQ ID NO: 208168 - DNA, 25 bp, Homo sapien
tatgcccttaagaggctcagaagtg

SEQ ID NO: 208169 - DNA, 25 bp, Homo sapien
tttctgggtagaccaatagccaaca

SEQ ID NO: 208170 - DNA, 25 bp, Homo sapien
tgaaaggaccacagcgtctaaaacc

SEQ ID NO: 208171 - DNA, 25 bp, Homo sapien
cagctgaaggaggtagtctccgaga

SEQ ID NO: 208172 - DNA, 25 bp, Homo sapien
cgtgcaggcgatgagactgagcctt

SEQ ID NO: 208173 - DNA, 25 bp, Homo sapien
gctaaggtcgcggaacacgcgtgca

SEQ ID NO: 208174 - DNA, 25 bp, Homo sapien
acactagtgcgctggcttcgggcag

SEQ ID NO: 208175 - DNA, 25 bp, Homo sapien
aaggtgagccgcgacagcctgaccc

SEQ ID NO: 208176 - DNA, 25 bp, Homo sapien
gtcaacgccaccctaacaaatcagg

SEQ ID NO: 208177 - DNA, 25 bp, Homo sapien
tgcagacctaggctggtgccttccc

SEQ ID NO: 208178 - DNA, 25 bp, Homo sapien
agcctgacccgaagcgcgctgcaga

SEQ ID NO: 208179 - DNA, 25 bp, Homo sapien
tctctgccgcgggaagttctagcga

SEQ ID NO: 208180 - DNA, 25 bp, Homo sapien
cctggccccaccaagaaagtggagc

SEQ ID NO: 208181 - DNA, 25 bp, Homo sapien
caccaagaaagtggagctcctccac

SEQ ID NO: 208182 - DNA, 25 bp, Homo sapien
gcccagaaagtgacgtcctctctac

SEQ ID NO: 208183 - DNA, 25 bp, Homo sapien
cagagcgcgcgggtgaagagtttgg

SEQ ID NO: 208184 - DNA, 25 bp, Homo sapien
tccgaaccaggatccaaggcctgcg

SEQ ID NO: 208185 - DNA, 25 bp, Homo sapien
caagaccccaggaagcgaagaagga

SEQ ID NO: 208186 - DNA, 25 bp, Homo sapien
agaagggcactggagaatcggcagc

SEQ ID NO: 208187 - DNA, 25 bp, Homo sapien
cagccgggtgtccagcgccgctcac

SEQ ID NO: 208188 - DNA, 25 bp, Homo sapien
gcaacgcgctgccagggcggcttta

SEQ ID NO: 208189 - DNA, 25 bp, Homo sapien
gcagggagcgctcacacctgcggtc

SEQ ID NO: 208190 - DNA, 25 bp, Homo sapien
cctgcggtcgggcaggaggcgcaac

SEQ ID NO: 208191 - DNA, 25 bp, Homo sapien
gagttgtaccacgaagctcaggccg

SEQ ID NO: 208192 - DNA, 25 bp, Homo sapien
gcttagctctcagactccgaagagg

SEQ ID NO: 208193 - DNA, 25 bp, Homo sapien
tcagactccgaagagggcgactgag

SEQ ID NO: 208194 - DNA, 25 bp, Homo sapien
ggtacccaaggcgacgacagctgag

SEQ ID NO: 208195 - DNA, 25 bp, Homo sapien
gatgcgcgcgattctctctgaaccg

SEQ ID NO: 208196 - DNA, 25 bp, Homo sapien
gagctgcgctatgatccgggtcttg

SEQ ID NO: 208197 - DNA, 25 bp, Homo sapien
tttgccaaagacttgcaggcggtgg

SEQ ID NO: 208198 - DNA, 25 bp, Homo sapien
gaagtgcgggatacaagcctctatt

SEQ ID NO: 208199 - DNA, 25 bp, Homo sapien
ttacccagactgagccgaggatggc

SEQ ID NO: 208200 - DNA, 25 bp, Homo sapien
taaactggaggtcccttaacagctg

SEQ ID NO: 208201 - DNA, 25 bp, Homo sapien
caagattcaccaactaagggagcag

SEQ ID NO: 208202 - DNA, 25 bp, Homo sapien
cacatctggaatatgcgcgctctgg

SEQ ID NO: 208203 - DNA, 25 bp, Homo sapien
ataaatagattctccctggggaaca

SEQ ID NO: 208204 - DNA, 25 bp, Homo sapien
aagctaaatacagaagatacatcat

SEQ ID NO: 208205 - DNA, 25 bp, Homo sapien
ttctagacaccatccggcagcactg

SEQ ID NO: 208206 - DNA, 25 bp, Homo sapien
gctaaatacagaagatacatcattt

SEQ ID NO: 208207 - DNA, 25 bp, Homo sapien
tactgggatttttctagacaccatc

SEQ ID NO: 208208 - DNA, 25 bp, Homo sapien
actactcttggttcagatgatggcc

SEQ ID NO: 208209 - DNA, 25 bp, Homo sapien
tgacagcaatacaccactcaccttt

SEQ ID NO: 208210 - DNA, 25 bp, Homo sapien
gatgatggccttcaaagtaccctgc

SEQ ID NO: 208211 - DNA, 25 bp, Homo sapien
gcaattcacagccaccattaagtaa

SEQ ID NO: 208212 - DNA, 25 bp, Homo sapien
aaccctttacaggagtaggctacag

SEQ ID NO: 208213 - DNA, 25 bp, Homo sapien
aaaggctgctgaaacaggcgtatca

SEQ ID NO: 208214 - DNA, 25 bp, Homo sapien
tacaagtgtccctagtcgctgcagt

SEQ ID NO: 208215 - DNA, 25 bp, Homo sapien
ggcgtatcagttgcccagaactcag

SEQ ID NO: 208216 - DNA, 25 bp, Homo sapien
ttaagcccgggagagaatagtttga

SEQ ID NO: 208217 - DNA, 25 bp, Homo sapien
gaaggaccgagttctggtctggact

SEQ ID NO: 208218 - DNA, 25 bp, Homo sapien
aatagtttgagctcctggcgtggcc

SEQ ID NO: 208219 - DNA, 25 bp, Homo sapien
tggcgtggcccatattgccctgcag

SEQ ID NO: 208220 - DNA, 25 bp, Homo sapien
taagaaatagaggacaacaccatat

SEQ ID NO: 208221 - DNA, 25 bp, Homo sapien
aagaaatagaggacaacaccatatg

SEQ ID NO: 208222 - DNA, 25 bp, Homo sapien
ctaagaaatagaggacaacaccata

SEQ ID NO: 208223 - DNA, 25 bp, Homo sapien
agaaatagaggacaacaccatatgg

SEQ ID NO: 208224 - DNA, 25 bp, Homo sapien
cctttcctcgtctgggcatgcggcg

SEQ ID NO: 208225 - DNA, 25 bp, Homo sapien
tctgaatctctgtccgaaacgctat

SEQ ID NO: 208226 - DNA, 25 bp, Homo sapien
caaactctttggcttcgcggagcgc

SEQ ID NO: 208227 - DNA, 25 bp, Homo sapien
ccttgtgagctccagtgcgagagag

SEQ ID NO: 208228 - DNA, 25 bp, Homo sapien
gagttcatgaactttcgctgcagcg

SEQ ID NO: 208229 - DNA, 25 bp, Homo sapien
aactttcgctgcagcgccgcggagg

SEQ ID NO: 208230 - DNA, 25 bp, Homo sapien
ctcagagttcatgaactttcgctgc

SEQ ID NO: 208231 - DNA, 25 bp, Homo sapien
ttcatgaactttcgctgcagcgccg

SEQ ID NO: 208232 - DNA, 25 bp, Homo sapien
tctcgttcttgtgcaggtggtcgca

SEQ ID NO: 208233 - DNA, 25 bp, Homo sapien
tgcgtaaagccaaacgacggcagca

SEQ ID NO: 208234 - DNA, 25 bp, Homo sapien
tcccgcttctcacgcggcgatgggt

SEQ ID NO: 208235 - DNA, 25 bp, Homo sapien
accgccttggccttgagtacgctct

SEQ ID NO: 208236 - DNA, 25 bp, Homo sapien
ttctggacacggaacggccggcgca

SEQ ID NO: 208237 - DNA, 25 bp, Homo sapien
tgcaaaggcgaaaaccggagtcgga

SEQ ID NO: 208238 - DNA, 25 bp, Homo sapien
ggccggcgcactcagtagcctttaa

SEQ ID NO: 208239 - DNA, 25 bp, Homo sapien
taacctcctccttaggctttgcaaa

SEQ ID NO: 208240 - DNA, 25 bp, Homo sapien
tagcctgcacaaataagggcaggta

SEQ ID NO: 208241 - DNA, 25 bp, Homo sapien
attagacacaaataggaccaccttt

SEQ ID NO: 208242 - DNA, 25 bp, Homo sapien
ataagggcaggtataaatttacaga

SEQ ID NO: 208243 - DNA, 25 bp, Homo sapien
aaagaggtgctcttcctcggaggcc

SEQ ID NO: 208244 - DNA, 25 bp, Homo sapien
gtcatctgggaagacgacgtgtaga

SEQ ID NO: 208245 - DNA, 25 bp, Homo sapien
tgattgcgggaacccgggcagaaaa

SEQ ID NO: 208246 - DNA, 25 bp, Homo sapien
aaggaaccaggacgtactacattgc

SEQ ID NO: 208247 - DNA, 25 bp, Homo sapien
catccagaacgacggtgaggattct

SEQ ID NO: 208248 - DNA, 25 bp, Homo sapien
gccgcgtgcgctttagtcgatgaaa

SEQ ID NO: 208249 - DNA, 25 bp, Homo sapien
caaatcgcacgaaaagcagagatgc

SEQ ID NO: 208250 - DNA, 25 bp, Homo sapien
tgctatttcgatccctcggttaggg

SEQ ID NO: 208251 - DNA, 25 bp, Homo sapien
caaatatttggaaagggagggcata

SEQ ID NO: 208252 - DNA, 25 bp, Homo sapien
aataaattcgtgtcatcgctctggg

SEQ ID NO: 208253 - DNA, 25 bp, Homo sapien
gagactccccaaatccggctgaagt

SEQ ID NO: 208254 - DNA, 25 bp, Homo sapien
tctgcttagtcggaaactccgggtg

SEQ ID NO: 208255 - DNA, 25 bp, Homo sapien
tccccgcgaggtctgaataggcctg

SEQ ID NO: 208256 - DNA, 25 bp, Homo sapien
gagatttgcggactcagagaagaga

SEQ ID NO: 208257 - DNA, 25 bp, Homo sapien
gcagagagatttgcggactcagaga

SEQ ID NO: 208258 - DNA, 25 bp, Homo sapien
gccgctccccgcgaggtctgaatag

SEQ ID NO: 208259 - DNA, 25 bp, Homo sapien
agatggtgtagcctgcacggagggc

SEQ ID NO: 208260 - DNA, 25 bp, Homo sapien
gggcgggcaaaggtgtattggccac

SEQ ID NO: 208261 - DNA, 25 bp, Homo sapien
gtggagggcgggcaatagatggtgt

SEQ ID NO: 208262 - DNA, 25 bp, Homo sapien
ttggcgagaacctttcacagggagt

SEQ ID NO: 208263 - DNA, 25 bp, Homo sapien
ccattgccccatatccctggaggga

SEQ ID NO: 208264 - DNA, 25 bp, Homo sapien
tctgcaggctctgaaaaaatgtcca

SEQ ID NO: 208265 - DNA, 25 bp, Homo sapien
taaggaggcccagtgacaaggaaag

SEQ ID NO: 208266 - DNA, 25 bp, Homo sapien
ggaaagcagacatttagcacccctc

SEQ ID NO: 208267 - DNA, 25 bp, Homo sapien
caattggagtccctgatgactgcgg

SEQ ID NO: 208268 - DNA, 25 bp, Homo sapien
taatcaatcctaatgcgatggcaat

SEQ ID NO: 208269 - DNA, 25 bp, Homo sapien
tgatgactgcggctcgggtttcttg

SEQ ID NO: 208270 - DNA, 25 bp, Homo sapien
tcttgtaatggctctaccacatttt

SEQ ID NO: 208271 - DNA, 25 bp, Homo sapien
tgccagggggacaagtctcttctcg

SEQ ID NO: 208272 - DNA, 25 bp, Homo sapien
tcggctgctgattacttcaagatgt

SEQ ID NO: 208273 - DNA, 25 bp, Homo sapien
gggctggtttgaactgaaggataaa

SEQ ID NO: 208274 - DNA, 25 bp, Homo sapien
taaagacacgcgcacagcgtggctg

SEQ ID NO: 208275 - DNA, 25 bp, Homo sapien
aaggtttccaacaccgctgcagtgc

SEQ ID NO: 208276 - DNA, 25 bp, Homo sapien
ttttcgcagacagaagctcgaccgc

SEQ ID NO: 208277 - DNA, 25 bp, Homo sapien
tattgctcgggttctaaaggatcca

SEQ ID NO: 208278 - DNA, 25 bp, Homo sapien
cgagcggcgtttgtctgaatcacca

SEQ ID NO: 208279 - DNA, 25 bp, Homo sapien
ggctgtgcgggagctcttgggcgcc

SEQ ID NO: 208280 - DNA, 25 bp, Homo sapien
agaggtcgcgctatctcgccgggct

SEQ ID NO: 208281 - DNA, 25 bp, Homo sapien
gggccgactccgcccaggcttgtag

SEQ ID NO: 208282 - DNA, 25 bp, Homo sapien
gggttgttccctcgggcggtgcatg

SEQ ID NO: 208283 - DNA, 25 bp, Homo sapien
cagcgccacgtagccccggacggca

SEQ ID NO: 208284 - DNA, 25 bp, Homo sapien
agccccggacggcactcgcgaggag

SEQ ID NO: 208285 - DNA, 25 bp, Homo sapien
cttggcttcgccagcgccacgtagc

SEQ ID NO: 208286 - DNA, 25 bp, Homo sapien
ttggcttcgccagcgccacgtagcc

SEQ ID NO: 208287 - DNA, 25 bp, Homo sapien
gaccccagccagtcattcgcgttga

SEQ ID NO: 208288 - DNA, 25 bp, Homo sapien
tttcgtggaatctgcggccggaagc

SEQ ID NO: 208289 - DNA, 25 bp, Homo sapien
ataaggacggcgacgcttcgctggc

SEQ ID NO: 208290 - DNA, 25 bp, Homo sapien
tgaagcgccgcagcaagtggcaatg

SEQ ID NO: 208291 - DNA, 25 bp, Homo sapien
tctgccttgaaaggtcgctctggat

SEQ ID NO: 208292 - DNA, 25 bp, Homo sapien
tgccttgaaaggtcgctctggattc

SEQ ID NO: 208293 - DNA, 25 bp, Homo sapien
gccttgaaaggtcgctctggattca

SEQ ID NO: 208294 - DNA, 25 bp, Homo sapien
ccttgaaaggtcgctctggattcat

SEQ ID NO: 208295 - DNA, 25 bp, Homo sapien
gctggctgttaggaatgcctgtaac

SEQ ID NO: 208296 - DNA, 25 bp, Homo sapien
aatggatgcctcaggagactttccc

SEQ ID NO: 208297 - DNA, 25 bp, Homo sapien
cttggcaaacggaaattgaccatgc

SEQ ID NO: 208298 - DNA, 25 bp, Homo sapien
gattgtacatcctgccatttggcta

SEQ ID NO: 208299 - DNA, 25 bp, Homo sapien
cattagtgatgccatcagtgctcag

SEQ ID NO: 208300 - DNA, 25 bp, Homo sapien
gctgaggtcatgttacatatggcac

SEQ ID NO: 208301 - DNA, 25 bp, Homo sapien
tggcacacagtctgctcagcacttg

SEQ ID NO: 208302 - DNA, 25 bp, Homo sapien
cgtcagctttgaaattttagagagg

SEQ ID NO: 208303 - DNA, 25 bp, Homo sapien
tcttacataagagccggaattccat

SEQ ID NO: 208304 - DNA, 25 bp, Homo sapien
gagcaattatattgagcttgatcaa

SEQ ID NO: 208305 - DNA, 25 bp, Homo sapien
ggaggtctgatagccctttccaggg

SEQ ID NO: 208306 - DNA, 25 bp, Homo sapien
tgacatcctaacctagtcagggagg

SEQ ID NO: 208307 - DNA, 25 bp, Homo sapien
tgggccctggggaaagtgtataaca

SEQ ID NO: 208308 - DNA, 25 bp, Homo sapien
tgtataacaggttcttttgtggctt

SEQ ID NO: 208309 - DNA, 25 bp, Homo sapien
tataacaggttcttttgtggcttga

SEQ ID NO: 208310 - DNA, 25 bp, Homo sapien
ataacaggttcttttgtggcttgac

SEQ ID NO: 208311 - DNA, 25 bp, Homo sapien
agcctttggtttgcaagcctggacc

SEQ ID NO: 208312 - DNA, 25 bp, Homo sapien
tagcctttggtttgcaagcctggac

SEQ ID NO: 208313 - DNA, 25 bp, Homo sapien
cagtagcctttggtttgcaagcctg

SEQ ID NO: 208314 - DNA, 25 bp, Homo sapien
gtagcctttggtttgcaagcctgga

SEQ ID NO: 208315 - DNA, 25 bp, Homo sapien
tggtcttggtatagcatgttggtga

SEQ ID NO: 208316 - DNA, 25 bp, Homo sapien
ggtgaggctagacgtccctcctctg

SEQ ID NO: 208317 - DNA, 25 bp, Homo sapien
agcagcacaaagagagtgtgagtgg

SEQ ID NO: 208318 - DNA, 25 bp, Homo sapien
gaggctagacgtccctcctctgaca

SEQ ID NO: 208319 - DNA, 25 bp, Homo sapien
caaatgattgagcacgtgagggtaa

SEQ ID NO: 208320 - DNA, 25 bp, Homo sapien
gtaaagcttgtaccccaagcctgca

SEQ ID NO: 208321 - DNA, 25 bp, Homo sapien
ctttagactcaaatgattgagcacg

SEQ ID NO: 208322 - DNA, 25 bp, Homo sapien
tgttgcctgagcatagtggacatgc

SEQ ID NO: 208323 - DNA, 25 bp, Homo sapien
tacagtacgacatacatacttcaga

SEQ ID NO: 208324 - DNA, 25 bp, Homo sapien
gccatcacctaacagtgcagtaaag

SEQ ID NO: 208325 - DNA, 25 bp, Homo sapien
gatctctttggttgggtaattaagc

SEQ ID NO: 208326 - DNA, 25 bp, Homo sapien
ggcataaacccccattacagtacga

SEQ ID NO: 208327 - DNA, 25 bp, Homo sapien
gagtctggcccttggtatggcaaaa

SEQ ID NO: 208328 - DNA, 25 bp, Homo sapien
gatataaagcagtacaacacaggtg

SEQ ID NO: 208329 - DNA, 25 bp, Homo sapien
gagtgggccctttgttctgatcata

SEQ ID NO: 208330 - DNA, 25 bp, Homo sapien
cacttgtctagcatgtagcagggca

SEQ ID NO: 208331 - DNA, 25 bp, Homo sapien
catgaaaagatttgccgctgatgcc

SEQ ID NO: 208332 - DNA, 25 bp, Homo sapien
gacaaatgtgtttgagacccaagac

SEQ ID NO: 208333 - DNA, 25 bp, Homo sapien
ttgataaaactatagccacggctta

SEQ ID NO: 208334 - DNA, 25 bp, Homo sapien
caatgcccatggagtaaaagtaaac

SEQ ID NO: 208335 - DNA, 25 bp, Homo sapien
tagctaccgattgcagaaccaaacg

SEQ ID NO: 208336 - DNA, 25 bp, Homo sapien
tatcggcaatgtcgcggtttagctc

SEQ ID NO: 208337 - DNA, 25 bp, Homo sapien
tcacagtagatttgcttgccaccgg

SEQ ID NO: 208338 - DNA, 25 bp, Homo sapien
gaaaacctttccttgctggactgtg

SEQ ID NO: 208339 - DNA, 25 bp, Homo sapien
aactggcaggacttgctatgaactg

SEQ ID NO: 208340 - DNA, 25 bp, Homo sapien
gcttcggcagctaataaggtacctg

SEQ ID NO: 208341 - DNA, 25 bp, Homo sapien
taaaagcccatcctcatgatgcaag

SEQ ID NO: 208342 - DNA, 25 bp, Homo sapien
ggtacctgaacagaaacatcaatct

SEQ ID NO: 208343 - DNA, 25 bp, Homo sapien
ggtgcattaaggtaccaaatgagat

SEQ ID NO: 208344 - DNA, 25 bp, Homo sapien
gctggtgcattaaggtaccaaatga

SEQ ID NO: 208345 - DNA, 25 bp, Homo sapien
acatttgctggtgcattaaggtacc

SEQ ID NO: 208346 - DNA, 25 bp, Homo sapien
ttaaggtaccaaatgagattgttac

SEQ ID NO: 208347 - DNA, 25 bp, Homo sapien
gataaatcctcatgtcccttgctgg

SEQ ID NO: 208348 - DNA, 25 bp, Homo sapien
ccattaaggaagacaggtgaagtac

SEQ ID NO: 208349 - DNA, 25 bp, Homo sapien
gggatctggacaatgccatactggt

SEQ ID NO: 208350 - DNA, 25 bp, Homo sapien
ttgggaagccactgtttgaatgcct

SEQ ID NO: 208351 - DNA, 25 bp, Homo sapien
gcaggaccctgttcctcagctctct

SEQ ID NO: 208352 - DNA, 25 bp, Homo sapien
gtgatggggtttcccatttggtctg

SEQ ID NO: 208353 - DNA, 25 bp, Homo sapien
gatggggtttcccatttggtctgag

SEQ ID NO: 208354 - DNA, 25 bp, Homo sapien
tagtgatggggtttcccatttggtc

SEQ ID NO: 208355 - DNA, 25 bp, Homo sapien
ctttgatttacaagctgaggctgag

SEQ ID NO: 208356 - DNA, 25 bp, Homo sapien
gtcgccgtctgcgagggtgactcac

SEQ ID NO: 208357 - DNA, 25 bp, Homo sapien
gccaggagcgcagaaagcgctttga

SEQ ID NO: 208358 - DNA, 25 bp, Homo sapien
ccgtcgccgtctgcgagggtgactc

SEQ ID NO: 208359 - DNA, 25 bp, Homo sapien
ggagtcccagggagcgtgcccggct

SEQ ID NO: 208360 - DNA, 25 bp, Homo sapien
tgcccggctcgcgagcggaggcggc

SEQ ID NO: 208361 - DNA, 25 bp, Homo sapien
gagaggggcctaaaccaggcaactg

SEQ ID NO: 208362 - DNA, 25 bp, Homo sapien
cgggtgggaggtagatccggagagg

SEQ ID NO: 208363 - DNA, 25 bp, Homo sapien
aggtggctcggcgtaaccaaagcgc

SEQ ID NO: 208364 - DNA, 25 bp, Homo sapien
tctggaatgcgctggtgatcacctt

SEQ ID NO: 208365 - DNA, 25 bp, Homo sapien
gctcccagtttgcttccccgagaag

SEQ ID NO: 208366 - DNA, 25 bp, Homo sapien
gaagaaccttcgagctgcttttgga

SEQ ID NO: 208367 - DNA, 25 bp, Homo sapien
ttcaaaacatgacagagccgagctg

SEQ ID NO: 208368 - DNA, 25 bp, Homo sapien
cttcagccctgctaccccggctgcg

SEQ ID NO: 208369 - DNA, 25 bp, Homo sapien
gaaacccgatcctaaggagttcaga

SEQ ID NO: 208370 - DNA, 25 bp, Homo sapien
aggagggagccaagcagcgttcggg

SEQ ID NO: 208371 - DNA, 25 bp, Homo sapien
ccagagcagccaccgcgacctccag

SEQ ID NO: 208372 - DNA, 25 bp, Homo sapien
ctcgacgttccgagaccccttctgc

SEQ ID NO: 208373 - DNA, 25 bp, Homo sapien
cttctgcgccgccagtcccacaaca

SEQ ID NO: 208374 - DNA, 25 bp, Homo sapien
ccgcgacctccagcgcaggcccggg

SEQ ID NO: 208375 - DNA, 25 bp, Homo sapien
gggagaggtgggcagccggaccagg

SEQ ID NO: 208376 - DNA, 25 bp, Homo sapien
ctgccggccggggagcgaggtaggg

SEQ ID NO: 208377 - DNA, 25 bp, Homo sapien
ctctgccggccggggagcgaggtag

SEQ ID NO: 208378 - DNA, 25 bp, Homo sapien
ggcggggagaggtgggcagccggac

SEQ ID NO: 208379 - DNA, 25 bp, Homo sapien
cgaagctgtggctctcgaggatgct

SEQ ID NO: 208380 - DNA, 25 bp, Homo sapien
ggtgtagcgcgccttgtaccagagc

SEQ ID NO: 208381 - DNA, 25 bp, Homo sapien
tcgttgccacgtagcaggtcgctct

SEQ ID NO: 208382 - DNA, 25 bp, Homo sapien
gcgcgttgcgcgacttctccttgaa

SEQ ID NO: 208383 - DNA, 25 bp, Homo sapien
gtgcctgcccagaagttccgagtgg

SEQ ID NO: 208384 - DNA, 25 bp, Homo sapien
ggagttgtacctgatccgccgccgc

SEQ ID NO: 208385 - DNA, 25 bp, Homo sapien
gttgtacctgatccgccgccgctcc

SEQ ID NO: 208386 - DNA, 25 bp, Homo sapien
tgcctgcccagaagttccgagtgga

SEQ ID NO: 208387 - DNA, 25 bp, Homo sapien
gcagcggtcgcggcgtcccccggct

SEQ ID NO: 208388 - DNA, 25 bp, Homo sapien
cggcagcggtcgcggcgtcccccgg

SEQ ID NO: 208389 - DNA, 25 bp, Homo sapien
gcggtcgcggcgtcccccggctcca

SEQ ID NO: 208390 - DNA, 25 bp, Homo sapien
cagcggtcgcggcgtcccccggctc

SEQ ID NO: 208391 - DNA, 25 bp, Homo sapien
gcgccccccgccacttctcggtgcg

SEQ ID NO: 208392 - DNA, 25 bp, Homo sapien
cccgccacttctcggtgcgcctcct

SEQ ID NO: 208393 - DNA, 25 bp, Homo sapien
cggtgcgcctcctgcccttccgagg

SEQ ID NO: 208394 - DNA, 25 bp, Homo sapien
ttctcggtgcgcctcctgcccttcc

SEQ ID NO: 208395 - DNA, 25 bp, Homo sapien
cttgcttgatgtccgccgcacttgc

SEQ ID NO: 208396 - DNA, 25 bp, Homo sapien
gcttgatgtccgccgcacttgcgat

SEQ ID NO: 208397 - DNA, 25 bp, Homo sapien
tctcttgcttgatgtccgccgcact

SEQ ID NO: 208398 - DNA, 25 bp, Homo sapien
tcttgcttgatgtccgccgcacttg

SEQ ID NO: 208399 - DNA, 25 bp, Homo sapien
tgcccggtgggggaggaagaggaca

SEQ ID NO: 208400 - DNA, 25 bp, Homo sapien
ccctcactccctcgcactcttttcc

SEQ ID NO: 208401 - DNA, 25 bp, Homo sapien
cctccctcactccctcgcactcttt

SEQ ID NO: 208402 - DNA, 25 bp, Homo sapien
tccctcactccctcgcactcttttc

SEQ ID NO: 208403 - DNA, 25 bp, Homo sapien
ctcactccctcgcactcttttcctc

SEQ ID NO: 208404 - DNA, 25 bp, Homo sapien
ctccctcctggtttcggctgtatct

SEQ ID NO: 208405 - DNA, 25 bp, Homo sapien
tccctcctggtttcggctgtatctg

SEQ ID NO: 208406 - DNA, 25 bp, Homo sapien
tgtatctggccgatcaggtttcccc

SEQ ID NO: 208407 - DNA, 25 bp, Homo sapien
ttcggctgtatctggccgatcaggt

SEQ ID NO: 208408 - DNA, 25 bp, Homo sapien
caaagtagtgtaaacggatagctgc

SEQ ID NO: 208409 - DNA, 25 bp, Homo sapien
ggatagctgctttctgccgttcccc

SEQ ID NO: 208410 - DNA, 25 bp, Homo sapien
aacgtgactcctccggttgctgcat

SEQ ID NO: 208411 - DNA, 25 bp, Homo sapien
cattaagatagctgttagagcaaag

SEQ ID NO: 208412 - DNA, 25 bp, Homo sapien
ggctatttcgcattcagagggagga

SEQ ID NO: 208413 - DNA, 25 bp, Homo sapien
cacctcattggctatttcgcattca

SEQ ID NO: 208414 - DNA, 25 bp, Homo sapien
cattggctatttcgcattcagaggg

SEQ ID NO: 208415 - DNA, 25 bp, Homo sapien
cggcctagccacctcattggctatt

SEQ ID NO: 208416 - DNA, 25 bp, Homo sapien
ctttgcttcagggtggccttgtatt

SEQ ID NO: 208417 - DNA, 25 bp, Homo sapien
cttgtattgtgtatgcttcccagct

SEQ ID NO: 208418 - DNA, 25 bp, Homo sapien
cttcagggtggccttgtattgtgta

SEQ ID NO: 208419 - DNA, 25 bp, Homo sapien
tgtattgtgtatgcttcccagctac

SEQ ID NO: 208420 - DNA, 25 bp, Homo sapien
cctttagccagttgacactcagagc

SEQ ID NO: 208421 - DNA, 25 bp, Homo sapien
cacaccaagatccaggttcctttag

SEQ ID NO: 208422 - DNA, 25 bp, Homo sapien
gtgaaatccacaccaagatccaggt

SEQ ID NO: 208423 - DNA, 25 bp, Homo sapien
ggttcctttagccagttgacactca

SEQ ID NO: 208424 - DNA, 25 bp, Homo sapien
catgattgaatttttgtgttgagac

SEQ ID NO: 208425 - DNA, 25 bp, Homo sapien
cttggatgaacacgttggaaggaac

SEQ ID NO: 208426 - DNA, 25 bp, Homo sapien
tgttgagacgaatgtgtttttaacc

SEQ ID NO: 208427 - DNA, 25 bp, Homo sapien
tggaaggaacttaagcatgattgaa

SEQ ID NO: 208428 - DNA, 25 bp, Homo sapien
ctagatgcaagaccgggggaactga

SEQ ID NO: 208429 - DNA, 25 bp, Homo sapien
tagatgcaagaccgggggaactgac

SEQ ID NO: 208430 - DNA, 25 bp, Homo sapien
caagcgcctgttggtaggaacctgc

SEQ ID NO: 208431 - DNA, 25 bp, Homo sapien
ttgccggtgctctttcgcgaaggga

SEQ ID NO: 208432 - DNA, 25 bp, Homo sapien
cagggttgccctcggtgtaagacca

SEQ ID NO: 208433 - DNA, 25 bp, Homo sapien
gaacgtttgtgttgcagcgcctcgc

SEQ ID NO: 208434 - DNA, 25 bp, Homo sapien
ctcgtcttgggagcaaagggcgttg

SEQ ID NO: 208435 - DNA, 25 bp, Homo sapien
ccgggagatgctaggcctcgtcttg

SEQ ID NO: 208436 - DNA, 25 bp, Homo sapien
gcaaagggcgttgttagtttcaaca

SEQ ID NO: 208437 - DNA, 25 bp, Homo sapien
gaggaccgggagatgctaggcctcg

SEQ ID NO: 208438 - DNA, 25 bp, Homo sapien
tctcttagctgctagcaattgaaga

SEQ ID NO: 208439 - DNA, 25 bp, Homo sapien
cttagctgctagcaattgaagaagc

SEQ ID NO: 208440 - DNA, 25 bp, Homo sapien
ctttgtctcttagctgctagcaatt

SEQ ID NO: 208441 - DNA, 25 bp, Homo sapien
tagctgctagcaattgaagaagcat

SEQ ID NO: 208442 - DNA, 25 bp, Homo sapien
taaagtattggcctattagccggta

SEQ ID NO: 208443 - DNA, 25 bp, Homo sapien
ttcagccaccccagaatttgggact

SEQ ID NO: 208444 - DNA, 25 bp, Homo sapien
taggtattacaagagtgagctgctg

SEQ ID NO: 208445 - DNA, 25 bp, Homo sapien
tctctgggagactctacttcactgg

SEQ ID NO: 208446 - DNA, 25 bp, Homo sapien
gcaggtattggtgacagtttgtaat

SEQ ID NO: 208447 - DNA, 25 bp, Homo sapien
tgtttaatgcaggtattggtgacag

SEQ ID NO: 208448 - DNA, 25 bp, Homo sapien
tattggtgacagtttgtaattcttg

SEQ ID NO: 208449 - DNA, 25 bp, Homo sapien
taatgcaggtattggtgacagtttg

SEQ ID NO: 208450 - DNA, 25 bp, Homo sapien
gcacaaagttggtgtatctgacaca

SEQ ID NO: 208451 - DNA, 25 bp, Homo sapien
tgcaatgggcagtgtgtaataggaa

SEQ ID NO: 208452 - DNA, 25 bp, Homo sapien
ttgaaagtcattcctctgaggctca

SEQ ID NO: 208453 - DNA, 25 bp, Homo sapien
gaggtaacttgtgggatatcaaaga

SEQ ID NO: 208454 - DNA, 25 bp, Homo sapien
tcagagaaccagtttccagtttttg

SEQ ID NO: 208455 - DNA, 25 bp, Homo sapien
gcccctcccacaagcagagtgggta

SEQ ID NO: 208456 - DNA, 25 bp, Homo sapien
cctgtcagttctgagtggaatcagc

SEQ ID NO: 208457 - DNA, 25 bp, Homo sapien
gggtgagtccctgatgaaatcctac

SEQ ID NO: 208458 - DNA, 25 bp, Homo sapien
gcagagtgggtaccctggacaacat

SEQ ID NO: 208459 - DNA, 25 bp, Homo sapien
taacattgtgttggtctaagggcac

SEQ ID NO: 208460 - DNA, 25 bp, Homo sapien
tggagaggctgtaagatcccaggac

SEQ ID NO: 208461 - DNA, 25 bp, Homo sapien
gaacaggttcaacttgtccgtgagg

SEQ ID NO: 208462 - DNA, 25 bp, Homo sapien
caaaatgagttagaggccttaggca

SEQ ID NO: 208463 - DNA, 25 bp, Homo sapien
ttcacagcctaggatgaaaagcatc

SEQ ID NO: 208464 - DNA, 25 bp, Homo sapien
gccacagagtaagcacaatgttttg

SEQ ID NO: 208465 - DNA, 25 bp, Homo sapien
tatggaaacgtgatcatcttgcagt

SEQ ID NO: 208466 - DNA, 25 bp, Homo sapien
aactactaagatgtctggaaaacac

SEQ ID NO: 208467 - DNA, 25 bp, Homo sapien
attcatttggttgtcggttagcaaa

SEQ ID NO: 208468 - DNA, 25 bp, Homo sapien
gcaaatagttatgaagtgcctactg

SEQ ID NO: 208469 - DNA, 25 bp, Homo sapien
aaatgtctactatcatgaagcttaa

SEQ ID NO: 208470 - DNA, 25 bp, Homo sapien
gagaaaacagtagtgagccaaacag

SEQ ID NO: 208471 - DNA, 25 bp, Homo sapien
ggcgcccgcaaccataccgggctaa

SEQ ID NO: 208472 - DNA, 25 bp, Homo sapien
aggcgcccgcaaccataccgggcta

SEQ ID NO: 208473 - DNA, 25 bp, Homo sapien
gccacagtgcccggccaattgttca

SEQ ID NO: 208474 - DNA, 25 bp, Homo sapien
acagtgcccggccaattgttcattt

SEQ ID NO: 208475 - DNA, 25 bp, Homo sapien
caggcagcattctgggacttggaca

SEQ ID NO: 208476 - DNA, 25 bp, Homo sapien
gcttctgtgtcagctgtcgcacgga

SEQ ID NO: 208477 - DNA, 25 bp, Homo sapien
tgaagctaatctggccactgcggta

SEQ ID NO: 208478 - DNA, 25 bp, Homo sapien
gaggctgaatgctacacaccgagag

SEQ ID NO: 208479 - DNA, 25 bp, Homo sapien
gacatccttatcattctcacattgg

SEQ ID NO: 208480 - DNA, 25 bp, Homo sapien
ccatcacccatgtgtaagttcagct

SEQ ID NO: 208481 - DNA, 25 bp, Homo sapien
ggagtcattgataacactgaaggca

SEQ ID NO: 208482 - DNA, 25 bp, Homo sapien
tcagctttgagcaaaagtagccaac

SEQ ID NO: 208483 - DNA, 25 bp, Homo sapien
ggttgactataatctcctggtagga

SEQ ID NO: 208484 - DNA, 25 bp, Homo sapien
taatcaccgccatttgtaggttggg

SEQ ID NO: 208485 - DNA, 25 bp, Homo sapien
gatgcccttgttcctgtcctcaata

SEQ ID NO: 208486 - DNA, 25 bp, Homo sapien
ggatgatgccatccaacgccatcat

SEQ ID NO: 208487 - DNA, 25 bp, Homo sapien
gatgacaaaggtatcctagtactgt

SEQ ID NO: 208488 - DNA, 25 bp, Homo sapien
caaaggtatcctagtactgtgagca

SEQ ID NO: 208489 - DNA, 25 bp, Homo sapien
ctgtgagcactggtcgggggcagct

SEQ ID NO: 208490 - DNA, 25 bp, Homo sapien
tgcagatgacaaaggtatcctagta

SEQ ID NO: 208491 - DNA, 25 bp, Homo sapien
gaaatcagggatctctacagggttt

SEQ ID NO: 208492 - DNA, 25 bp, Homo sapien
gatctctacagggtttgatgtttct

SEQ ID NO: 208493 - DNA, 25 bp, Homo sapien
gattgatcttggttcttactataag

SEQ ID NO: 208494 - DNA, 25 bp, Homo sapien
cttgaggtctctgtagattgatctt

SEQ ID NO: 208495 - DNA, 25 bp, Homo sapien
tgtgtggactgtccccgatttcact

SEQ ID NO: 208496 - DNA, 25 bp, Homo sapien
ttttgtgtggactgtccccgatttc

SEQ ID NO: 208497 - DNA, 25 bp, Homo sapien
tattgtagattttgtgtggactgtc

SEQ ID NO: 208498 - DNA, 25 bp, Homo sapien
gactgtccccgatttcacttctaac

SEQ ID NO: 208499 - DNA, 25 bp, Homo sapien
ttgagacatgttttcgaccaccttc

SEQ ID NO: 208500 - DNA, 25 bp, Homo sapien
gagacatgttttcgaccaccttctt

SEQ ID NO: 208501 - DNA, 25 bp, Homo sapien
cttgagacatgttttcgaccacctt

SEQ ID NO: 208502 - DNA, 25 bp, Homo sapien
gacatgttttcgaccaccttctttc

SEQ ID NO: 208503 - DNA, 25 bp, Homo sapien
ccagtagtgttagcacaggaaaact

SEQ ID NO: 208504 - DNA, 25 bp, Homo sapien
tccagtagtgttagcacaggaaaac

SEQ ID NO: 208505 - DNA, 25 bp, Homo sapien
tcagcaaatcttccaggctccagac

SEQ ID NO: 208506 - DNA, 25 bp, Homo sapien
tgtagccccatagaggccctcataa

SEQ ID NO: 208507 - DNA, 25 bp, Homo sapien
tcatgtaattggacagttaaggcct

SEQ ID NO: 208508 - DNA, 25 bp, Homo sapien
taaggcctgtagagctgtagcccca

SEQ ID NO: 208509 - DNA, 25 bp, Homo sapien
tcttgctgctatgtcatgtaattgg

SEQ ID NO: 208510 - DNA, 25 bp, Homo sapien
cctttcatctttcgacgaagcttca

SEQ ID NO: 208511 - DNA, 25 bp, Homo sapien
tttcgacgaagcttcataatttgtg

SEQ ID NO: 208512 - DNA, 25 bp, Homo sapien
cttcataatttgtggtgataattgt

SEQ ID NO: 208513 - DNA, 25 bp, Homo sapien
tcattcaaacccctttcatctttcg

SEQ ID NO: 208514 - DNA, 25 bp, Homo sapien
agtgaacaccgtggtatcctcaggg

SEQ ID NO: 208515 - DNA, 25 bp, Homo sapien
ttagggtcttctgcagagcaagctg

SEQ ID NO: 208516 - DNA, 25 bp, Homo sapien
tctcttgtggtagccacaagggctg

SEQ ID NO: 208517 - DNA, 25 bp, Homo sapien
aagctgccgtggtccacctcagtga

SEQ ID NO: 208518 - DNA, 25 bp, Homo sapien
tgggcagccaaagtggaccatttac

SEQ ID NO: 208519 - DNA, 25 bp, Homo sapien
caaatcaccattgcatcaagcctgg

SEQ ID NO: 208520 - DNA, 25 bp, Homo sapien
cttgcttttctctaatccattgggc

SEQ ID NO: 208521 - DNA, 25 bp, Homo sapien
tggactagagaaacatcctcctaag

SEQ ID NO: 208522 - DNA, 25 bp, Homo sapien
tcacagagcactacaggatgcattc

SEQ ID NO: 208523 - DNA, 25 bp, Homo sapien
acaggaccttgctggaggctatact

SEQ ID NO: 208524 - DNA, 25 bp, Homo sapien
ttggaccttggagctgaaccaggga

SEQ ID NO: 208525 - DNA, 25 bp, Homo sapien
tgtgcagctgcacaacacagtcctt

SEQ ID NO: 208526 - DNA, 25 bp, Homo sapien
atattctattagtgacacatacccc

SEQ ID NO: 208527 - DNA, 25 bp, Homo sapien
gatgttttccccgtatcaatccagc

SEQ ID NO: 208528 - DNA, 25 bp, Homo sapien
tattctattagtgacacatacccct

SEQ ID NO: 208529 - DNA, 25 bp, Homo sapien
gatattctattagtgacacataccc

SEQ ID NO: 208530 - DNA, 25 bp, Homo sapien
ttgggatctccagcaccttcccgct

SEQ ID NO: 208531 - DNA, 25 bp, Homo sapien
gcaccttcccgctccttgccagcat

SEQ ID NO: 208532 - DNA, 25 bp, Homo sapien
ccagcaccttcccgctccttgccag

SEQ ID NO: 208533 - DNA, 25 bp, Homo sapien
ctccagcaccttcccgctccttgcc

SEQ ID NO: 208534 - DNA, 25 bp, Homo sapien
acaacctcgcagatcttctctgtga

SEQ ID NO: 208535 - DNA, 25 bp, Homo sapien
ctgtgattcatccttcaccttggct

SEQ ID NO: 208536 - DNA, 25 bp, Homo sapien
cctcgcagatcttctctgtgattca

SEQ ID NO: 208537 - DNA, 25 bp, Homo sapien
caacctcgcagatcttctctgtgat

SEQ ID NO: 208538 - DNA, 25 bp, Homo sapien
gagacttactgttgttgcagcctca

SEQ ID NO: 208539 - DNA, 25 bp, Homo sapien
attatcttaaggacaccaccaaggg

SEQ ID NO: 208540 - DNA, 25 bp, Homo sapien
tgctaaaccattcacgagggccaca

SEQ ID NO: 208541 - DNA, 25 bp, Homo sapien
taagaacattattaggccacaggcc

SEQ ID NO: 208542 - DNA, 25 bp, Homo sapien
ttttttcgtctgaaaaggcttcagc

SEQ ID NO: 208543 - DNA, 25 bp, Homo sapien
ttttaagaggtggatcttcatgatt

SEQ ID NO: 208544 - DNA, 25 bp, Homo sapien
tgttttttcgtctgaaaaggcttca

SEQ ID NO: 208545 - DNA, 25 bp, Homo sapien
gttacaattgaatggcaaggtttac

SEQ ID NO: 208546 - DNA, 25 bp, Homo sapien
ttacaattgaatggcaaggtttaca

SEQ ID NO: 208547 - DNA, 25 bp, Homo sapien
tagttacaattgaatggcaaggttt

SEQ ID NO: 208548 - DNA, 25 bp, Homo sapien
aattagttacaattgaatggcaagg

SEQ ID NO: 208549 - DNA, 25 bp, Homo sapien
taacaatgcactatgggaaggaact

SEQ ID NO: 208550 - DNA, 25 bp, Homo sapien
gttcatgacaacgtgcacagagggt

SEQ ID NO: 208551 - DNA, 25 bp, Homo sapien
tttgccgaacatcctcagcagggtt

SEQ ID NO: 208552 - DNA, 25 bp, Homo sapien
tgaactgaactgcatgcctccagag

SEQ ID NO: 208553 - DNA, 25 bp, Homo sapien
ctgaaaaaaggtgttatgctttttg

SEQ ID NO: 208554 - DNA, 25 bp, Homo sapien
tcgacagctacttgaactttgcaaa

SEQ ID NO: 208555 - DNA, 25 bp, Homo sapien
gagccatggtagatgtgtcactcaa

SEQ ID NO: 208556 - DNA, 25 bp, Homo sapien
tgaagaatcaaaggccagaaagttc

SEQ ID NO: 208557 - DNA, 25 bp, Homo sapien
tagagccagtgtatagaatgaatca

SEQ ID NO: 208558 - DNA, 25 bp, Homo sapien
tctccagatagcacttccatttgga

SEQ ID NO: 208559 - DNA, 25 bp, Homo sapien
tccatttggaaatttcggtacatat

SEQ ID NO: 208560 - DNA, 25 bp, Homo sapien
tactgctgaggtgattcctggattt

SEQ ID NO: 208561 - DNA, 25 bp, Homo sapien
gaaatttcggtacatattgtcaata

SEQ ID NO: 208562 - DNA, 25 bp, Homo sapien
caatcacacgtcttatgcctgggcg

SEQ ID NO: 208563 - DNA, 25 bp, Homo sapien
gtcatgcctcggacatcagaaggtg

SEQ ID NO: 208564 - DNA, 25 bp, Homo sapien
tgtccaatcctgctaaaccctgaag

SEQ ID NO: 208565 - DNA, 25 bp, Homo sapien
tgtggactgacattaagctgctcta

SEQ ID NO: 208566 - DNA, 25 bp, Homo sapien
ccaataagaaaataccaggtgcttc

SEQ ID NO: 208567 - DNA, 25 bp, Homo sapien
cagttatgctatggctttccagttt

SEQ ID NO: 208568 - DNA, 25 bp, Homo sapien
ctggaatcaacgattttgattcagt

SEQ ID NO: 208569 - DNA, 25 bp, Homo sapien
ataccaggtgcttccaaaagcatct

SEQ ID NO: 208570 - DNA, 25 bp, Homo sapien
tgcagctggatccgcgagccgaccc

SEQ ID NO: 208571 - DNA, 25 bp, Homo sapien
tccaattccccacgtcgctctgcag

SEQ ID NO: 208572 - DNA, 25 bp, Homo sapien
caattccccacgtcgctctgcagct

SEQ ID NO: 208573 - DNA, 25 bp, Homo sapien
acgtcgctctgcagctggatccgcg

SEQ ID NO: 208574 - DNA, 25 bp, Homo sapien
tagaggctcgtagatggaactggta

SEQ ID NO: 208575 - DNA, 25 bp, Homo sapien
caggccctggtgaagtacggaatgc

SEQ ID NO: 208576 - DNA, 25 bp, Homo sapien
ggcgcgcgtcatcagatcaagtcga

SEQ ID NO: 208577 - DNA, 25 bp, Homo sapien
gacatcatcactgttcgccgcgaag

SEQ ID NO: 208578 - DNA, 25 bp, Homo sapien
ggattttcctcttccgacttagtca

SEQ ID NO: 208579 - DNA, 25 bp, Homo sapien
ctcgtgaggtctttgcaagagtcac

SEQ ID NO: 208580 - DNA, 25 bp, Homo sapien
cagtctcgtgaggtctttgcaagag

SEQ ID NO: 208581 - DNA, 25 bp, Homo sapien
gattttcctcttccgacttagtcat

SEQ ID NO: 208582 - DNA, 25 bp, Homo sapien
ctgctttcctccacaacacaaccta

SEQ ID NO: 208583 - DNA, 25 bp, Homo sapien
ctttcctccacaacacaacctaatt

SEQ ID NO: 208584 - DNA, 25 bp, Homo sapien
gctttcctccacaacacaacctaat

SEQ ID NO: 208585 - DNA, 25 bp, Homo sapien
tgctttcctccacaacacaacctaa

SEQ ID NO: 208586 - DNA, 25 bp, Homo sapien
tcattggtaagagaaagagctatca

SEQ ID NO: 208587 - DNA, 25 bp, Homo sapien
tcaagtccttggcaaatgagtgctc

SEQ ID NO: 208588 - DNA, 25 bp, Homo sapien
tacgtaactaactctctcccaacag

SEQ ID NO: 208589 - DNA, 25 bp, Homo sapien
tatcaggacttttcatgggagctga

SEQ ID NO: 208590 - DNA, 25 bp, Homo sapien
cttgtgtgtgccttccccatccttg

SEQ ID NO: 208591 - DNA, 25 bp, Homo sapien
cccatccttgaggtctaggacgact

SEQ ID NO: 208592 - DNA, 25 bp, Homo sapien
ggagtgcagacatcgcatccgtgtt

SEQ ID NO: 208593 - DNA, 25 bp, Homo sapien
ttccattattcttgtgtgtgccttc

SEQ ID NO: 208594 - DNA, 25 bp, Homo sapien
tgtatactgtcaagtgaaagaaacc

SEQ ID NO: 208595 - DNA, 25 bp, Homo sapien
tgttcagacttaaggagatcctgcc

SEQ ID NO: 208596 - DNA, 25 bp, Homo sapien
ttcaacaacatgcatagacatggag

SEQ ID NO: 208597 - DNA, 25 bp, Homo sapien
caacctaagtgtcagtaagtgagta

SEQ ID NO: 208598 - DNA, 25 bp, Homo sapien
cactgacacataccatttctcaata

SEQ ID NO: 208599 - DNA, 25 bp, Homo sapien
actgacacataccatttctcaataa

SEQ ID NO: 208600 - DNA, 25 bp, Homo sapien
tggtaatctatggactcgggtaacc

SEQ ID NO: 208601 - DNA, 25 bp, Homo sapien
aatctatggactcgggtaaccccat

SEQ ID NO: 208602 - DNA, 25 bp, Homo sapien
gtttggtaatctatggactcgggta

SEQ ID NO: 208603 - DNA, 25 bp, Homo sapien
taatctatggactcgggtaacccca

SEQ ID NO: 208604 - DNA, 25 bp, Homo sapien
tatgcatggctcttgtggatgaccc

SEQ ID NO: 208605 - DNA, 25 bp, Homo sapien
gcagctattaatttagagtagaaca

SEQ ID NO: 208606 - DNA, 25 bp, Homo sapien
tcttgtggatgacccagttgcagct

SEQ ID NO: 208607 - DNA, 25 bp, Homo sapien
gggccacttaactatatgcatggct

SEQ ID NO: 208608 - DNA, 25 bp, Homo sapien
catggtgctgtttctgcagctgctc

SEQ ID NO: 208609 - DNA, 25 bp, Homo sapien
tcatggtgctgtttctgcagctgct

SEQ ID NO: 208610 - DNA, 25 bp, Homo sapien
ttctgcagctgctccttctcttgtt

SEQ ID NO: 208611 - DNA, 25 bp, Homo sapien
tgtttctgcagctgctccttctctt

SEQ ID NO: 208612 - DNA, 25 bp, Homo sapien
gcaaggacttcctgttaatctttcc

SEQ ID NO: 208613 - DNA, 25 bp, Homo sapien
ggtctcgtttcactcccgttctgta

SEQ ID NO: 208614 - DNA, 25 bp, Homo sapien
ttcactcccgttctgtacttctgct

SEQ ID NO: 208615 - DNA, 25 bp, Homo sapien
ctctgttgttgggtctcgtttcact

SEQ ID NO: 208616 - DNA, 25 bp, Homo sapien
gttatcatccattagtgcaaaggaa

SEQ ID NO: 208617 - DNA, 25 bp, Homo sapien
tatttacagacaaagtggagtcaga

SEQ ID NO: 208618 - DNA, 25 bp, Homo sapien
tgactgtgaagttatgcatactatt

SEQ ID NO: 208619 - DNA, 25 bp, Homo sapien
ccttagtactttataatgtgatcct

SEQ ID NO: 208620 - DNA, 25 bp, Homo sapien
catggatgtcttgaatctctaatgc

SEQ ID NO: 208621 - DNA, 25 bp, Homo sapien
tcacataagcattctagttcaatct

SEQ ID NO: 208622 - DNA, 25 bp, Homo sapien
ttgggtataaatgcatctgcatgga

SEQ ID NO: 208623 - DNA, 25 bp, Homo sapien
tgcatctggttgctatacttgagaa

SEQ ID NO: 208624 - DNA, 25 bp, Homo sapien
gaaacaaactcgaaatgctcttaaa

SEQ ID NO: 208625 - DNA, 25 bp, Homo sapien
taactcttgcgttcatgtggtacat

SEQ ID NO: 208626 - DNA, 25 bp, Homo sapien
taatatacccctagttgcaagaatg

SEQ ID NO: 208627 - DNA, 25 bp, Homo sapien
gaatgaattattccggaagacaccc

SEQ ID NO: 208628 - DNA, 25 bp, Homo sapien
atacatagtcaatattgactgtgtt

SEQ ID NO: 208629 - DNA, 25 bp, Homo sapien
cagatacatagtcaatattgactgt

SEQ ID NO: 208630 - DNA, 25 bp, Homo sapien
gcagatacatagtcaatattgactg

SEQ ID NO: 208631 - DNA, 25 bp, Homo sapien
cagacagtattttggccggccttgt

SEQ ID NO: 208632 - DNA, 25 bp, Homo sapien
tgtgtcctcttgagtcatggttcat

SEQ ID NO: 208633 - DNA, 25 bp, Homo sapien
ttttggccggccttgtgtcctcttg

SEQ ID NO: 208634 - DNA, 25 bp, Homo sapien
tcagccagacagtattttggccggc

SEQ ID NO: 208635 - DNA, 25 bp, Homo sapien
gtagttgtcaactagactgagaaaa

SEQ ID NO: 208636 - DNA, 25 bp, Homo sapien
gatgtgttccagtagttgtcaacta

SEQ ID NO: 208637 - DNA, 25 bp, Homo sapien
gagaaaacttggatgtcttacgaaa

SEQ ID NO: 208638 - DNA, 25 bp, Homo sapien
gatgtcttacgaaacaatgtcagaa

SEQ ID NO: 208639 - DNA, 25 bp, Homo sapien
ccacctcagagacttcatggtacag

SEQ ID NO: 208640 - DNA, 25 bp, Homo sapien
tgatggtttaagagtgtgccctgaa

SEQ ID NO: 208641 - DNA, 25 bp, Homo sapien
catggtacagtgcagtatacttggt

SEQ ID NO: 208642 - DNA, 25 bp, Homo sapien
gaacaacgaaggatttctttgaggc

SEQ ID NO: 208643 - DNA, 25 bp, Homo sapien
tgcatgcaataggttttggttctta

SEQ ID NO: 208644 - DNA, 25 bp, Homo sapien
ctgcatgcaataggttttggttctt

SEQ ID NO: 208645 - DNA, 25 bp, Homo sapien
gcatgcaataggttttggttcttac

SEQ ID NO: 208646 - DNA, 25 bp, Homo sapien
ttcagtctgaacttgagttctaccc

SEQ ID NO: 208647 - DNA, 25 bp, Homo sapien
agcttcagtctgaacttgagttcta

SEQ ID NO: 208648 - DNA, 25 bp, Homo sapien
cagtctgaacttgagttctaccctc

SEQ ID NO: 208649 - DNA, 25 bp, Homo sapien
gtctgaacttgagttctaccctcat

SEQ ID NO: 208650 - DNA, 25 bp, Homo sapien
gcccaagctaaaacacaatcttcac

SEQ ID NO: 208651 - DNA, 25 bp, Homo sapien
tcaaccatgttattttcacctgccc

SEQ ID NO: 208652 - DNA, 25 bp, Homo sapien
ttctcaaccatgttattttcacctg

SEQ ID NO: 208653 - DNA, 25 bp, Homo sapien
acagtatgcagtaagatgagattct

SEQ ID NO: 208654 - DNA, 25 bp, Homo sapien
cagtttttaattccgtgtaatgctg

SEQ ID NO: 208655 - DNA, 25 bp, Homo sapien
tggatacaggcccatatgcgtagcc

SEQ ID NO: 208656 - DNA, 25 bp, Homo sapien
gttagtttatggcagctgtggttgc

SEQ ID NO: 208657 - DNA, 25 bp, Homo sapien
tcaaattgtgcagtttttaattccg

SEQ ID NO: 208658 - DNA, 25 bp, Homo sapien
taatagttggtccaaggccctctgg

SEQ ID NO: 208659 - DNA, 25 bp, Homo sapien
agacccctgggcctgttgatgaggg

SEQ ID NO: 208660 - DNA, 25 bp, Homo sapien
tgttgatgagggcagctgcgttccc

SEQ ID NO: 208661 - DNA, 25 bp, Homo sapien
ggcagctgcgttcccaagtaatagt

SEQ ID NO: 208662 - DNA, 25 bp, Homo sapien
tcagcaagctcgatgctagctgtgg

SEQ ID NO: 208663 - DNA, 25 bp, Homo sapien
gaccagggatcaaacacaagccctc

SEQ ID NO: 208664 - DNA, 25 bp, Homo sapien
ccctgaaatttggacagccagccct

SEQ ID NO: 208665 - DNA, 25 bp, Homo sapien
gctgatgctcacataagttagcggg

SEQ ID NO: 208666 - DNA, 25 bp, Homo sapien
aggatgaactgaagcgggaaagaaa

SEQ ID NO: 208667 - DNA, 25 bp, Homo sapien
aactgaagcgggaaagaaacgcagg

SEQ ID NO: 208668 - DNA, 25 bp, Homo sapien
tgccgcggctttccgggcttcgacg

SEQ ID NO: 208669 - DNA, 25 bp, Homo sapien
cgcagggcaggttcgtaaataaaca

SEQ ID NO: 208670 - DNA, 25 bp, Homo sapien
tctgagcaatcactctccgcaacag

SEQ ID NO: 208671 - DNA, 25 bp, Homo sapien
tccaagggctgatttcacagcacat

SEQ ID NO: 208672 - DNA, 25 bp, Homo sapien
gaacgccagatgattttccaagggc

SEQ ID NO: 208673 - DNA, 25 bp, Homo sapien
ctctccgcaacagttggatttccat

SEQ ID NO: 208674 - DNA, 25 bp, Homo sapien
ctttccgttggccttggttccatct

SEQ ID NO: 208675 - DNA, 25 bp, Homo sapien
cgtgtgcccggaatcaggactgtct

SEQ ID NO: 208676 - DNA, 25 bp, Homo sapien
tctgcctccttggggtcgaatcgtt

SEQ ID NO: 208677 - DNA, 25 bp, Homo sapien
tccgttggccttggttccatctagc

SEQ ID NO: 208678 - DNA, 25 bp, Homo sapien
tgatcttaggcatttgaggaagaat

SEQ ID NO: 208679 - DNA, 25 bp, Homo sapien
tgaggaagaatcttagttggtaaac

SEQ ID NO: 208680 - DNA, 25 bp, Homo sapien
tgcctcctactcactacctcaagat

SEQ ID NO: 208681 - DNA, 25 bp, Homo sapien
ggagatgatcttaggcatttgagga

SEQ ID NO: 208682 - DNA, 25 bp, Homo sapien
tcaggcactttggatttaaccttga

SEQ ID NO: 208683 - DNA, 25 bp, Homo sapien
ctcctgcaaaggtagcccagcacgt

SEQ ID NO: 208684 - DNA, 25 bp, Homo sapien
aacccacagctcatttctacagcaa

SEQ ID NO: 208685 - DNA, 25 bp, Homo sapien
tttggatttaaccttgaggcagagg

SEQ ID NO: 208686 - DNA, 25 bp, Homo sapien
aactgagctaattaaaaggaactgc

SEQ ID NO: 208687 - DNA, 25 bp, Homo sapien
gacgcgtgcatcctttgctttcaga

SEQ ID NO: 208688 - DNA, 25 bp, Homo sapien
tctttgacctttttggaatgtgcag

SEQ ID NO: 208689 - DNA, 25 bp, Homo sapien
tgttggaaatgatgcagacgcgtgc

SEQ ID NO: 208690 - DNA, 25 bp, Homo sapien
tatgccaggccaccgggccaagttc

SEQ ID NO: 208691 - DNA, 25 bp, Homo sapien
gagctggccaaggacattccggcta

SEQ ID NO: 208692 - DNA, 25 bp, Homo sapien
agggaagcacacaaagtaggcctgg

SEQ ID NO: 208693 - DNA, 25 bp, Homo sapien
aagcacacaaagtaggcctgggtcc

SEQ ID NO: 208694 - DNA, 25 bp, Homo sapien
gccattggcggagccctggtgattt

SEQ ID NO: 208695 - DNA, 25 bp, Homo sapien
gacaaataggtttcacatcgctgtg

SEQ ID NO: 208696 - DNA, 25 bp, Homo sapien
tggtgatttacgacaccccggctca

SEQ ID NO: 208697 - DNA, 25 bp, Homo sapien
ccagtgatttatggagccagagtga

SEQ ID NO: 208698 - DNA, 25 bp, Homo sapien
tgcaatgacaagacaaagaggttcc

SEQ ID NO: 208699 - DNA, 25 bp, Homo sapien
gacaaagaggttccacttgtccctc

SEQ ID NO: 208700 - DNA, 25 bp, Homo sapien
tgacaagacaaagaggttccacttg

SEQ ID NO: 208701 - DNA, 25 bp, Homo sapien
aagaggttccacttgtccctctgcc

SEQ ID NO: 208702 - DNA, 25 bp, Homo sapien
tttagctctttatgtggtgccggcc

SEQ ID NO: 208703 - DNA, 25 bp, Homo sapien
gatggttattggtcagcagccacat

SEQ ID NO: 208704 - DNA, 25 bp, Homo sapien
tctttatgtggtgccggccacagca

SEQ ID NO: 208705 - DNA, 25 bp, Homo sapien
ggatgatggttattggtcagcagcc

SEQ ID NO: 208706 - DNA, 25 bp, Homo sapien
gatttcttggcataagactccaggg

SEQ ID NO: 208707 - DNA, 25 bp, Homo sapien
gggctggggttgccttccatagcaa

SEQ ID NO: 208708 - DNA, 25 bp, Homo sapien
cttgatttcttggcataagactcca

SEQ ID NO: 208709 - DNA, 25 bp, Homo sapien
ggctggggttgccttccatagcaag

SEQ ID NO: 208710 - DNA, 25 bp, Homo sapien
ttttcaaagtcatgtcttagctcca

SEQ ID NO: 208711 - DNA, 25 bp, Homo sapien
tctgttattctcaggtgccttcgca

SEQ ID NO: 208712 - DNA, 25 bp, Homo sapien
tgtccatctctgttattctcaggtg

SEQ ID NO: 208713 - DNA, 25 bp, Homo sapien
tcatgtcttagctccaagaggtcaa

SEQ ID NO: 208714 - DNA, 25 bp, Homo sapien
ctgctgcatgtggcttcatctttct

SEQ ID NO: 208715 - DNA, 25 bp, Homo sapien
gctgctgcatgtggcttcatctttc

SEQ ID NO: 208716 - DNA, 25 bp, Homo sapien
ccagcacgagtgatgtagggtatta

SEQ ID NO: 208717 - DNA, 25 bp, Homo sapien
agtgctgccagcacgagtgatgtag

SEQ ID NO: 208718 - DNA, 25 bp, Homo sapien
cagggcttcagcaacagcgtgtgtg

SEQ ID NO: 208719 - DNA, 25 bp, Homo sapien
gatgtagggtattatcagggcttca

SEQ ID NO: 208720 - DNA, 25 bp, Homo sapien
ttgtgtgcctggagccggctaagcc

SEQ ID NO: 208721 - DNA, 25 bp, Homo sapien
gccaaggcagttgtggtcaactcca

SEQ ID NO: 208722 - DNA, 25 bp, Homo sapien
tttccgctccggacttaaatgccag

SEQ ID NO: 208723 - DNA, 25 bp, Homo sapien
tgtcagaaaaacgaacaagcttggg

SEQ ID NO: 208724 - DNA, 25 bp, Homo sapien
tcatcaggccatgcttggtgtgagg

SEQ ID NO: 208725 - DNA, 25 bp, Homo sapien
tgagtctccactcgcacttagagga

SEQ ID NO: 208726 - DNA, 25 bp, Homo sapien
taatgggaatgccaccagaaccttc

SEQ ID NO: 208727 - DNA, 25 bp, Homo sapien
tcctcctcactaactaatgggaatg

SEQ ID NO: 208728 - DNA, 25 bp, Homo sapien
agctctgtgtctgcttagtccggcc

SEQ ID NO: 208729 - DNA, 25 bp, Homo sapien
cctagcaggtgtacacccaagaggg

SEQ ID NO: 208730 - DNA, 25 bp, Homo sapien
ggaacttttttgatcacctcggcca

SEQ ID NO: 208731 - DNA, 25 bp, Homo sapien
gctcctgatcgccttcatccaagga

SEQ ID NO: 208732 - DNA, 25 bp, Homo sapien
gggagcacagtcttcctagcaggtg

SEQ ID NO: 208733 - DNA, 25 bp, Homo sapien
aacaaagggattgtctgctccaatt

SEQ ID NO: 208734 - DNA, 25 bp, Homo sapien
ccaatttctgcagggagtatccatt

SEQ ID NO: 208735 - DNA, 25 bp, Homo sapien
aaacaaagggattgtctgctccaat

SEQ ID NO: 208736 - DNA, 25 bp, Homo sapien
tatccatttacattgtcccaaagga

SEQ ID NO: 208737 - DNA, 25 bp, Homo sapien
tgttgtccaaatttcataccagagg

SEQ ID NO: 208738 - DNA, 25 bp, Homo sapien
gagaagctgtatgcaaactctgacc

SEQ ID NO: 208739 - DNA, 25 bp, Homo sapien
tctccaaagcaagcctagagtgcat

SEQ ID NO: 208740 - DNA, 25 bp, Homo sapien
ccatttgggagcaacttaggtcgtg

SEQ ID NO: 208741 - DNA, 25 bp, Homo sapien
tttgaatggcagaggtaactgccaa

SEQ ID NO: 208742 - DNA, 25 bp, Homo sapien
tgaatggcagaggtaactgccaaaa

SEQ ID NO: 208743 - DNA, 25 bp, Homo sapien
aatggcagaggtaactgccaaaaca

SEQ ID NO: 208744 - DNA, 25 bp, Homo sapien
ggcagaggtaactgccaaaacacac

SEQ ID NO: 208745 - DNA, 25 bp, Homo sapien
ggaataactcagaggtttagtggac

SEQ ID NO: 208746 - DNA, 25 bp, Homo sapien
ggtcctggaataactcagaggttta

SEQ ID NO: 208747 - DNA, 25 bp, Homo sapien
cacagtaacgggcatctggtagtca

SEQ ID NO: 208748 - DNA, 25 bp, Homo sapien
cgggcatctggtagtcaaccttttc

SEQ ID NO: 208749 - DNA, 25 bp, Homo sapien
gaaatactggcattggtaggctgac

SEQ ID NO: 208750 - DNA, 25 bp, Homo sapien
ctgaagacaacagtagagatcatct

SEQ ID NO: 208751 - DNA, 25 bp, Homo sapien
gacaacagtagagatcatctggaaa

SEQ ID NO: 208752 - DNA, 25 bp, Homo sapien
catctggaaatactggcattggtag

SEQ ID NO: 208753 - DNA, 25 bp, Homo sapien
tccatcaacttggagatgtaatcat

SEQ ID NO: 208754 - DNA, 25 bp, Homo sapien
tgtaagacttccttgtatggtctgg

SEQ ID NO: 208755 - DNA, 25 bp, Homo sapien
ttcacagtggtgcagctgtaagact

SEQ ID NO: 208756 - DNA, 25 bp, Homo sapien
ccttgtatggtctgggagtgtgttt

SEQ ID NO: 208757 - DNA, 25 bp, Homo sapien
gtggtgcagctgtaagacttccttg

SEQ ID NO: 208758 - DNA, 25 bp, Homo sapien
tggaaaacttgcatttcacatttgg

SEQ ID NO: 208759 - DNA, 25 bp, Homo sapien
tactggaaaacttgcatttcacatt

SEQ ID NO: 208760 - DNA, 25 bp, Homo sapien
ccacctagagttactggaaaacttg

SEQ ID NO: 208761 - DNA, 25 bp, Homo sapien
gttactggaaaacttgcatttcaca

SEQ ID NO: 208762 - DNA, 25 bp, Homo sapien
taccagcaccgtaactatcaatacc

SEQ ID NO: 208763 - DNA, 25 bp, Homo sapien
cagcttaccagcaccgtaactatca

SEQ ID NO: 208764 - DNA, 25 bp, Homo sapien
gcaccgtaactatcaataccatctg

SEQ ID NO: 208765 - DNA, 25 bp, Homo sapien
cgtaactatcaataccatctgaggg

SEQ ID NO: 208766 - DNA, 25 bp, Homo sapien
agtatggaaacccatgcctgcctcc

SEQ ID NO: 208767 - DNA, 25 bp, Homo sapien
tcctcgttggtctgtcctgtggctt

SEQ ID NO: 208768 - DNA, 25 bp, Homo sapien
gcagcatgattcctcgttggtctgt

SEQ ID NO: 208769 - DNA, 25 bp, Homo sapien
cagattgcttccctcagtatggaaa

SEQ ID NO: 208770 - DNA, 25 bp, Homo sapien
gcttcctccttcattcctccttcac

SEQ ID NO: 208771 - DNA, 25 bp, Homo sapien
cagtgcagcatggcttcctccttca

SEQ ID NO: 208772 - DNA, 25 bp, Homo sapien
tcagtgcagcatggcttcctccttc

SEQ ID NO: 208773 - DNA, 25 bp, Homo sapien
atggcttcctccttcattcctcctt

SEQ ID NO: 208774 - DNA, 25 bp, Homo sapien
acactctctcaaagggacccttcaa

SEQ ID NO: 208775 - DNA, 25 bp, Homo sapien
gacccttcaagattatggcagccct

SEQ ID NO: 208776 - DNA, 25 bp, Homo sapien
ggcggtgatgcagatccgtgaataa

SEQ ID NO: 208777 - DNA, 25 bp, Homo sapien
cgtgaataaccaagacaacatcccc

SEQ ID NO: 208778 - DNA, 25 bp, Homo sapien
attgtggatgaggcaatttttcctt

SEQ ID NO: 208779 - DNA, 25 bp, Homo sapien
aattgtggatgaggcaatttttcct

SEQ ID NO: 208780 - DNA, 25 bp, Homo sapien
caattgtggatgaggcaatttttcc

SEQ ID NO: 208781 - DNA, 25 bp, Homo sapien
cgtctatgcgaaattgtactggctt

SEQ ID NO: 208782 - DNA, 25 bp, Homo sapien
atagaaccgtcagtgaagcccaccg

SEQ ID NO: 208783 - DNA, 25 bp, Homo sapien
attccccggagttggtttctgagca

SEQ ID NO: 208784 - DNA, 25 bp, Homo sapien
tttttcctgaagacaatgctcgtct

SEQ ID NO: 208785 - DNA, 25 bp, Homo sapien
caatctccaaagtgggataaaccag

SEQ ID NO: 208786 - DNA, 25 bp, Homo sapien
ctccaaagtgggataaaccagattc

SEQ ID NO: 208787 - DNA, 25 bp, Homo sapien
ttggtctcatagctttggttgagct

SEQ ID NO: 208788 - DNA, 25 bp, Homo sapien
ctggttttggtctcatagctttggt

SEQ ID NO: 208789 - DNA, 25 bp, Homo sapien
tgaaacttccgtatcaaacaaatgg

SEQ ID NO: 208790 - DNA, 25 bp, Homo sapien
gaagcactgaaactactctcctaag

SEQ ID NO: 208791 - DNA, 25 bp, Homo sapien
cagtatcctggaagtgaacgaattt

SEQ ID NO: 208792 - DNA, 25 bp, Homo sapien
catttaggaacaaaggacagaacca

SEQ ID NO: 208793 - DNA, 25 bp, Homo sapien
ggagccttgatgtatgcctatctag

SEQ ID NO: 208794 - DNA, 25 bp, Homo sapien
ggttcaaggagacctcagggactga

SEQ ID NO: 208795 - DNA, 25 bp, Homo sapien
caattcagattgagagagtacagcg

SEQ ID NO: 208796 - DNA, 25 bp, Homo sapien
tctagcaaagcttcccggttcaagg

SEQ ID NO: 208797 - DNA, 25 bp, Homo sapien
aaattgtacgctgcgttccgtgtcg

SEQ ID NO: 208798 - DNA, 25 bp, Homo sapien
cgttccgtgtcgctgcagtcaggct

SEQ ID NO: 208799 - DNA, 25 bp, Homo sapien
gtacgctgcgttccgtgtcgctgca

SEQ ID NO: 208800 - DNA, 25 bp, Homo sapien
tcaacctgagaaattgtacgctgcg

SEQ ID NO: 208801 - DNA, 25 bp, Homo sapien
tgggcagtagtccacctaatgtcat

SEQ ID NO: 208802 - DNA, 25 bp, Homo sapien
gtgcactgggcagtagtccacctaa

SEQ ID NO: 208803 - DNA, 25 bp, Homo sapien
ggagtgcactgggcagtagtccacc

SEQ ID NO: 208804 - DNA, 25 bp, Homo sapien
ctgggcagtagtccacctaatgtca

SEQ ID NO: 208805 - DNA, 25 bp, Homo sapien
caaaatgttacagcacagggatcat

SEQ ID NO: 208806 - DNA, 25 bp, Homo sapien
cagggatcattgcaggaaaacgttt

SEQ ID NO: 208807 - DNA, 25 bp, Homo sapien
cctggaagcctgagacaccagacaa

SEQ ID NO: 208808 - DNA, 25 bp, Homo sapien
gaattcaggccaacaagaacctgga

SEQ ID NO: 208809 - DNA, 25 bp, Homo sapien
taagaaattagcaaagtggctggtg

SEQ ID NO: 208810 - DNA, 25 bp, Homo sapien
gatcatcgttcaaaagaattcagca

SEQ ID NO: 208811 - DNA, 25 bp, Homo sapien
ctgaatgttactataaaagatggtt

SEQ ID NO: 208812 - DNA, 25 bp, Homo sapien
cacgttgaggttgataaagttcaaa

SEQ ID NO: 208813 - DNA, 25 bp, Homo sapien
gattcaggagtcacttgcagctgcc

SEQ ID NO: 208814 - DNA, 25 bp, Homo sapien
tactgtagtggcgaaagccctggac

SEQ ID NO: 208815 - DNA, 25 bp, Homo sapien
caagagcttcctacgttcaaggcag

SEQ ID NO: 208816 - DNA, 25 bp, Homo sapien
gaacatcatggttgtcactgcccct

SEQ ID NO: 208817 - DNA, 25 bp, Homo sapien
agtttgcaaggatgtttcactctgc

SEQ ID NO: 208818 - DNA, 25 bp, Homo sapien
caggagggatccctggaaagccgga

SEQ ID NO: 208819 - DNA, 25 bp, Homo sapien
catggcaactcagtgtcgtgaagga

SEQ ID NO: 208820 - DNA, 25 bp, Homo sapien
gtaattcccttatctggtcccctca

SEQ ID NO: 208821 - DNA, 25 bp, Homo sapien
gatgcgcgcgtacagtttgcggaac

SEQ ID NO: 208822 - DNA, 25 bp, Homo sapien
cgaacgcgcgcaccgggtagttgta

SEQ ID NO: 208823 - DNA, 25 bp, Homo sapien
ggacacgccgtagcgccggttgttc

SEQ ID NO: 208824 - DNA, 25 bp, Homo sapien
gaacttgacgtggtagtcggtccac

SEQ ID NO: 208825 - DNA, 25 bp, Homo sapien
taccaggcgcacgagcaggggggcg

SEQ ID NO: 208826 - DNA, 25 bp, Homo sapien
ccaggcgcacgagcaggggggcggc

SEQ ID NO: 208827 - DNA, 25 bp, Homo sapien
gaagtaccaggcgcacgagcagggg

SEQ ID NO: 208828 - DNA, 25 bp, Homo sapien
agtaccaggcgcacgagcagggggg

SEQ ID NO: 208829 - DNA, 25 bp, Homo sapien
ccttgatgccgttggaggagtagta

SEQ ID NO: 208830 - DNA, 25 bp, Homo sapien
aggcccgcgcagaagaagagcggca

SEQ ID NO: 208831 - DNA, 25 bp, Homo sapien
cctgtatagtcgtactccagctcct

SEQ ID NO: 208832 - DNA, 25 bp, Homo sapien
cggtgcccgggtcgcctgtatagtc

SEQ ID NO: 208833 - DNA, 25 bp, Homo sapien
tgagtttagttccaggccctacgag

SEQ ID NO: 208834 - DNA, 25 bp, Homo sapien
tcccgaaatcaaaaggcgctccggc

SEQ ID NO: 208835 - DNA, 25 bp, Homo sapien
tccggcctccagcagaaatttttgc

SEQ ID NO: 208836 - DNA, 25 bp, Homo sapien
ttgctgagggcttgcaccgtggtcc

SEQ ID NO: 208837 - DNA, 25 bp, Homo sapien
aaggcttcttttttagatgtcagag

SEQ ID NO: 208838 - DNA, 25 bp, Homo sapien
ctagaagagcatgtatcctaaagga

SEQ ID NO: 208839 - DNA, 25 bp, Homo sapien
ggcttcttttttagatgtcagagaa

SEQ ID NO: 208840 - DNA, 25 bp, Homo sapien
aggcttcttttttagatgtcagaga

SEQ ID NO: 208841 - DNA, 25 bp, Homo sapien
ttagtagttaatctgaaaggcgaag

SEQ ID NO: 208842 - DNA, 25 bp, Homo sapien
gaaaccaaccctgtggatcaaaaga

SEQ ID NO: 208843 - DNA, 25 bp, Homo sapien
gaagatactggtagattggcagtcc

SEQ ID NO: 208844 - DNA, 25 bp, Homo sapien
atctgaaaggcgaagaaaatgaaac

SEQ ID NO: 208845 - DNA, 25 bp, Homo sapien
gaagggaaaggataagtcattgcat

SEQ ID NO: 208846 - DNA, 25 bp, Homo sapien
cctcaggtttcctagtggccagaga

SEQ ID NO: 208847 - DNA, 25 bp, Homo sapien
caggtttcctagtggccagagaagg

SEQ ID NO: 208848 - DNA, 25 bp, Homo sapien
tgtggccttgctggtggtagtctgc

SEQ ID NO: 208849 - DNA, 25 bp, Homo sapien
cacgcctggctcttgtacctatctt

SEQ ID NO: 208850 - DNA, 25 bp, Homo sapien
tctctaaagaacttccaggtctgaa

SEQ ID NO: 208851 - DNA, 25 bp, Homo sapien
tatatctcttagtggtcaggctacc

SEQ ID NO: 208852 - DNA, 25 bp, Homo sapien
tggtttcagattgccatgttgcaca

SEQ ID NO: 208853 - DNA, 25 bp, Homo sapien
catcccttctccatgtgtgctgtac

SEQ ID NO: 208854 - DNA, 25 bp, Homo sapien
tcccatcccttctccatgtgtgctg

SEQ ID NO: 208855 - DNA, 25 bp, Homo sapien
ccatcccttctccatgtgtgctgta

SEQ ID NO: 208856 - DNA, 25 bp, Homo sapien
tcctcccatcccttctccatgtgtg

SEQ ID NO: 208857 - DNA, 25 bp, Homo sapien
aaattcctttgaccccagaactgag

SEQ ID NO: 208858 - DNA, 25 bp, Homo sapien
aaatagaaccaatggatctcagctc

SEQ ID NO: 208859 - DNA, 25 bp, Homo sapien
gtggcagtgtgagcaatggaaaatt

SEQ ID NO: 208860 - DNA, 25 bp, Homo sapien
tctttctctaaagtccaagatacgt

SEQ ID NO: 208861 - DNA, 25 bp, Homo sapien
tgagtcaggatcaaccttctcttgc

SEQ ID NO: 208862 - DNA, 25 bp, Homo sapien
gggaatgccgccgtcatcagtgaca

SEQ ID NO: 208863 - DNA, 25 bp, Homo sapien
tccttgatggtgttaacgtttccca

SEQ ID NO: 208864 - DNA, 25 bp, Homo sapien
gacatgccccatgcagagatctgag

SEQ ID NO: 208865 - DNA, 25 bp, Homo sapien
ggaaccaggaagtgcagctccacat

SEQ ID NO: 208866 - DNA, 25 bp, Homo sapien
gcagctccacatcacgatccctaat

SEQ ID NO: 208867 - DNA, 25 bp, Homo sapien
ggaagtgcagctccacatcacgatc

SEQ ID NO: 208868 - DNA, 25 bp, Homo sapien
ccaggatttggaaccaggaagtgca

SEQ ID NO: 208869 - DNA, 25 bp, Homo sapien
atccaaagcctgtgagtgtatgtcc

SEQ ID NO: 208870 - DNA, 25 bp, Homo sapien
tgcaaagatcctttccccatatgta

SEQ ID NO: 208871 - DNA, 25 bp, Homo sapien
tctttctcttataatccaaagcctg

SEQ ID NO: 208872 - DNA, 25 bp, Homo sapien
cttttgggaagtaattccattgcaa

SEQ ID NO: 208873 - DNA, 25 bp, Homo sapien
gagcacctgctaagcctggcaatat

SEQ ID NO: 208874 - DNA, 25 bp, Homo sapien
taacatgtaacaggaagggaatcaa

SEQ ID NO: 208875 - DNA, 25 bp, Homo sapien
gaacagagggagaatttaaatcgtc

SEQ ID NO: 208876 - DNA, 25 bp, Homo sapien
ggcaatatgacaggcactgggaaaa

SEQ ID NO: 208877 - DNA, 25 bp, Homo sapien
tgcacatgggctacacaggaatgct

SEQ ID NO: 208878 - DNA, 25 bp, Homo sapien
tccatttaggctgggacagtattcc

SEQ ID NO: 208879 - DNA, 25 bp, Homo sapien
gacagaaagctgaagaggacgtgca

SEQ ID NO: 208880 - DNA, 25 bp, Homo sapien
cagtttgggcaacgtagctgagacc

SEQ ID NO: 208881 - DNA, 25 bp, Homo sapien
aagcatagcaagactctggtctcca

SEQ ID NO: 208882 - DNA, 25 bp, Homo sapien
cttgttcactggtacaagatttaac

SEQ ID NO: 208883 - DNA, 25 bp, Homo sapien
tcttaacaacaacagggccgggtgc

SEQ ID NO: 208884 - DNA, 25 bp, Homo sapien
cctggaaagcatagcaagactctgg

SEQ ID NO: 208885 - DNA, 25 bp, Homo sapien
gcaaatggcagggttgagccccctg

SEQ ID NO: 208886 - DNA, 25 bp, Homo sapien
cagtgtgaccacctttgcaagctca

SEQ ID NO: 208887 - DNA, 25 bp, Homo sapien
gaggcgtccagtggcccatagataa

SEQ ID NO: 208888 - DNA, 25 bp, Homo sapien
aatagctccctagtccacacagttg

SEQ ID NO: 208889 - DNA, 25 bp, Homo sapien
gcctgtccccagagaggtattttaa

SEQ ID NO: 208890 - DNA, 25 bp, Homo sapien
caagctttgcggcatagcagcgtag

SEQ ID NO: 208891 - DNA, 25 bp, Homo sapien
gcagcgtaggctaaaaggtcctccc

SEQ ID NO: 208892 - DNA, 25 bp, Homo sapien
agggagcaagctttgcggcatagca

SEQ ID NO: 208893 - DNA, 25 bp, Homo sapien
tgcggcatagcagcgtaggctaaaa

SEQ ID NO: 208894 - DNA, 25 bp, Homo sapien
gaaccgacctttcctgctctatgtg

SEQ ID NO: 208895 - DNA, 25 bp, Homo sapien
aaccgacctttcctgctctatgtgc

SEQ ID NO: 208896 - DNA, 25 bp, Homo sapien
agaaccgacctttcctgctctatgt

SEQ ID NO: 208897 - DNA, 25 bp, Homo sapien
gaggaaggaggcgaacaggatttcc

SEQ ID NO: 208898 - DNA, 25 bp, Homo sapien
cttccgaggaaggaggcgaacagga

SEQ ID NO: 208899 - DNA, 25 bp, Homo sapien
aggaaggaggcgaacaggatttcca

SEQ ID NO: 208900 - DNA, 25 bp, Homo sapien
ggaaggaggcgaacaggatttccat

SEQ ID NO: 208901 - DNA, 25 bp, Homo sapien
gagtcctgcgcgagtccccgggagg

SEQ ID NO: 208902 - DNA, 25 bp, Homo sapien
gcgcgcttggaagggacggtcgggc

SEQ ID NO: 208903 - DNA, 25 bp, Homo sapien
gagaaggggcgagtcctgcgcgagt

SEQ ID NO: 208904 - DNA, 25 bp, Homo sapien
cggacgggtaggtccggctctccag

SEQ ID NO: 208905 - DNA, 25 bp, Homo sapien
tcgagttggccgtcttccacgagac

SEQ ID NO: 208906 - DNA, 25 bp, Homo sapien
gagttttgcgctaacgtcaccgacg

SEQ ID NO: 208907 - DNA, 25 bp, Homo sapien
tgctggacccctatctgacggtgag

SEQ ID NO: 208908 - DNA, 25 bp, Homo sapien
caacaaacccacgtacaacgaggag

SEQ ID NO: 208909 - DNA, 25 bp, Homo sapien
gcctggacacgatcccctttcagga

SEQ ID NO: 208910 - DNA, 25 bp, Homo sapien
gtcccgctttcccatcgctttgtgg

SEQ ID NO: 208911 - DNA, 25 bp, Homo sapien
ggctgagggaattccctccagactt

SEQ ID NO: 208912 - DNA, 25 bp, Homo sapien
tttggtcttcgtccacgtggccgcg

SEQ ID NO: 208913 - DNA, 25 bp, Homo sapien
tttcagcacgagagtgataggtagg

SEQ ID NO: 208914 - DNA, 25 bp, Homo sapien
agctccaactttcagcacgagagtg

SEQ ID NO: 208915 - DNA, 25 bp, Homo sapien
cagcacgagagtgataggtaggaaa

SEQ ID NO: 208916 - DNA, 25 bp, Homo sapien
caactttcagcacgagagtgatagg

SEQ ID NO: 208917 - DNA, 25 bp, Homo sapien
cactgtactttaatgggtgtcagga

SEQ ID NO: 208918 - DNA, 25 bp, Homo sapien
taagtgacttgtatagcatcgctag

SEQ ID NO: 208919 - DNA, 25 bp, Homo sapien
cccatttccccgttatattgtgagg

SEQ ID NO: 208920 - DNA, 25 bp, Homo sapien
taggcaagcgtctgcttatctgggt

SEQ ID NO: 208921 - DNA, 25 bp, Homo sapien
acactctttccttacaatggacttt

SEQ ID NO: 208922 - DNA, 25 bp, Homo sapien
tggtttttgcgtctgtgatgttgga

SEQ ID NO: 208923 - DNA, 25 bp, Homo sapien
cctctcgtgtcgcaagcccttaaat

SEQ ID NO: 208924 - DNA, 25 bp, Homo sapien
tattcgtaagtcacatctgtccctt

SEQ ID NO: 208925 - DNA, 25 bp, Homo sapien
aatggttccgttggacaatggaaat

SEQ ID NO: 208926 - DNA, 25 bp, Homo sapien
tggacaatggaaattctgctccctt

SEQ ID NO: 208927 - DNA, 25 bp, Homo sapien
ggtaatggttccgttggacaatgga

SEQ ID NO: 208928 - DNA, 25 bp, Homo sapien
ctggtaatggttccgttggacaatg

SEQ ID NO: 208929 - DNA, 25 bp, Homo sapien
ttgttagctctttggttgtgccaag

SEQ ID NO: 208930 - DNA, 25 bp, Homo sapien
ggcctcctcgccttcttgtcatgca

SEQ ID NO: 208931 - DNA, 25 bp, Homo sapien
cgtagccttggttttggttgttcag

SEQ ID NO: 208932 - DNA, 25 bp, Homo sapien
tttttgagtctccttgccgggcctc

SEQ ID NO: 208933 - DNA, 25 bp, Homo sapien
ttgctggggcgctgctgttgcaaat

SEQ ID NO: 208934 - DNA, 25 bp, Homo sapien
gctggggcgctgctgttgcaaatgt

SEQ ID NO: 208935 - DNA, 25 bp, Homo sapien
atttgctggggcgctgctgttgcaa

SEQ ID NO: 208936 - DNA, 25 bp, Homo sapien
tgatttgctggggcgctgctgttgc

SEQ ID NO: 208937 - DNA, 25 bp, Homo sapien
ctgctttcagccctgaagtactgcc

SEQ ID NO: 208938 - DNA, 25 bp, Homo sapien
agaatgtgtttgtgggtgtctgccc

SEQ ID NO: 208939 - DNA, 25 bp, Homo sapien
ctcaccttggccactgatctgcttt

SEQ ID NO: 208940 - DNA, 25 bp, Homo sapien
ttgtgggtgtctgccctcaccttgg

SEQ ID NO: 208941 - DNA, 25 bp, Homo sapien
attctctgtcttgagtctgagtcat

SEQ ID NO: 208942 - DNA, 25 bp, Homo sapien
cattctctgtcttgagtctgagtca

SEQ ID NO: 208943 - DNA, 25 bp, Homo sapien
gccaaggaagtgtcatctctggaga

SEQ ID NO: 208944 - DNA, 25 bp, Homo sapien
cgcctcattctcaagatagccaagg

SEQ ID NO: 208945 - DNA, 25 bp, Homo sapien
ctgctgttagggtttgagaactgtg

SEQ ID NO: 208946 - DNA, 25 bp, Homo sapien
cagtttctccatggatccgatattg

SEQ ID NO: 208947 - DNA, 25 bp, Homo sapien
gctgtgggacgatcaatccagcagc

SEQ ID NO: 208948 - DNA, 25 bp, Homo sapien
agccagctgtgggacgatcaatcca

SEQ ID NO: 208949 - DNA, 25 bp, Homo sapien
caggtacgcctcgggtgacacttgg

SEQ ID NO: 208950 - DNA, 25 bp, Homo sapien
tgaccagacctgttcttttaaggcc

SEQ ID NO: 208951 - DNA, 25 bp, Homo sapien
tgtaatctgttcaccggtgattcag

SEQ ID NO: 208952 - DNA, 25 bp, Homo sapien
cccttgctttgtaatctgttcaccg

SEQ ID NO: 208953 - DNA, 25 bp, Homo sapien
tctgttcaccggtgattcagttgtt

SEQ ID NO: 208954 - DNA, 25 bp, Homo sapien
tgtctgctgccccttgctttgtaat

SEQ ID NO: 208955 - DNA, 25 bp, Homo sapien
aatgtacaaactccagacagatgag

SEQ ID NO: 208956 - DNA, 25 bp, Homo sapien
tcagcaccggtctctttgtacaact

SEQ ID NO: 208957 - DNA, 25 bp, Homo sapien
tgtacaacttcccaaatgtacaaac

SEQ ID NO: 208958 - DNA, 25 bp, Homo sapien
gatgagtacagttggtgttttccgg

SEQ ID NO: 208959 - DNA, 25 bp, Homo sapien
ccggaatttcaggatttggatgcat

SEQ ID NO: 208960 - DNA, 25 bp, Homo sapien
ctcccctctccggaatttcaggatt

SEQ ID NO: 208961 - DNA, 25 bp, Homo sapien
cctctccggaatttcaggatttgga

SEQ ID NO: 208962 - DNA, 25 bp, Homo sapien
tctcctcccctctccggaatttcag

SEQ ID NO: 208963 - DNA, 25 bp, Homo sapien
ctttctgttttgctggttctgcttt

SEQ ID NO: 208964 - DNA, 25 bp, Homo sapien
agggtagccagcgtgcctttcccaa

SEQ ID NO: 208965 - DNA, 25 bp, Homo sapien
tgtgaaggtctgctcagggtagcca

SEQ ID NO: 208966 - DNA, 25 bp, Homo sapien
cattctctaaacatggctttggtcc

SEQ ID NO: 208967 - DNA, 25 bp, Homo sapien
cccactccttttggtccattaggag

SEQ ID NO: 208968 - DNA, 25 bp, Homo sapien
ttggtccattaggagcaccagaagc

SEQ ID NO: 208969 - DNA, 25 bp, Homo sapien
gctttggacctgatgggctgggctt

SEQ ID NO: 208970 - DNA, 25 bp, Homo sapien
ttaggagcaccagaagctttggacc

SEQ ID NO: 208971 - DNA, 25 bp, Homo sapien
gaaaccagtcagatttgatactact

SEQ ID NO: 208972 - DNA, 25 bp, Homo sapien
tggaccagtaaaggctttaatcagt

SEQ ID NO: 208973 - DNA, 25 bp, Homo sapien
ttccttcatttgaaaccagtcagat

SEQ ID NO: 208974 - DNA, 25 bp, Homo sapien
taggatccggattgagcagggtaaa

SEQ ID NO: 208975 - DNA, 25 bp, Homo sapien
acatgcagaggacgtgatggctgcc

SEQ ID NO: 208976 - DNA, 25 bp, Homo sapien
cagcttgagcttgcacgttgctgct

SEQ ID NO: 208977 - DNA, 25 bp, Homo sapien
taaaacaccgctcccttgtcacatg

SEQ ID NO: 208978 - DNA, 25 bp, Homo sapien
tctgtgtctctgtgcgtgcattgct

SEQ ID NO: 208979 - DNA, 25 bp, Homo sapien
taattgatgccaccgcattgcctct

SEQ ID NO: 208980 - DNA, 25 bp, Homo sapien
cactgcttgagggtccagctaattg

SEQ ID NO: 208981 - DNA, 25 bp, Homo sapien
gctgtgggcgtagacagccctgttc

SEQ ID NO: 208982 - DNA, 25 bp, Homo sapien
cctctcctggtgaggaccgactgtg

SEQ ID NO: 208983 - DNA, 25 bp, Homo sapien
tgattggatgttgctggctggaccc

SEQ ID NO: 208984 - DNA, 25 bp, Homo sapien
cctgcagtgctaactcagtgatgcc

SEQ ID NO: 208985 - DNA, 25 bp, Homo sapien
tacttagcaaaaacggaagcattct

SEQ ID NO: 208986 - DNA, 25 bp, Homo sapien
ttttggcattaagcagatacttagc

SEQ ID NO: 208987 - DNA, 25 bp, Homo sapien
gtgctgtctttcaaactcctctggc

SEQ ID NO: 208988 - DNA, 25 bp, Homo sapien
tctgtcattgccttcttctgaacac

SEQ ID NO: 208989 - DNA, 25 bp, Homo sapien
tgaacactgaagcttgaacacacac

SEQ ID NO: 208990 - DNA, 25 bp, Homo sapien
gctcagaccccagttgtcattttcc

SEQ ID NO: 208991 - DNA, 25 bp, Homo sapien
tttgcttgaacagattttgttcccc

SEQ ID NO: 208992 - DNA, 25 bp, Homo sapien
ggaatcaaactcagaatagcatgtg

SEQ ID NO: 208993 - DNA, 25 bp, Homo sapien
gtcatggctacagtggaggaatcaa

SEQ ID NO: 208994 - DNA, 25 bp, Homo sapien
cacacagaaacttcggcccgtgcat

SEQ ID NO: 208995 - DNA, 25 bp, Homo sapien
tctatacccttgtcccacactgagg

SEQ ID NO: 208996 - DNA, 25 bp, Homo sapien
gaaacatccctgtgtcccaacagct

SEQ ID NO: 208997 - DNA, 25 bp, Homo sapien
agctgggctaggactccttccacct

SEQ ID NO: 208998 - DNA, 25 bp, Homo sapien
aaggccattaccatatagcatcggg

SEQ ID NO: 208999 - DNA, 25 bp, Homo sapien
gcgtttacccatgcggccaggctgg

SEQ ID NO: 209000 - DNA, 25 bp, Homo sapien
caggtgcagcttgatctaactggct

SEQ ID NO: 209001 - DNA, 25 bp, Homo sapien
gcaggtgcagcttgatctaactggc

SEQ ID NO: 209002 - DNA, 25 bp, Homo sapien
tgcacagatgctgagcgtttaccca

SEQ ID NO: 209003 - DNA, 25 bp, Homo sapien
cacaattgaatttgtgaagcatgat

SEQ ID NO: 209004 - DNA, 25 bp, Homo sapien
ttgtgaagcatgatttggtgtttgt

SEQ ID NO: 209005 - DNA, 25 bp, Homo sapien
tgtttgttgagtcatcagtgatact

SEQ ID NO: 209006 - DNA, 25 bp, Homo sapien
taaatgcaggatttccaaaaaatgc

SEQ ID NO: 209007 - DNA, 25 bp, Homo sapien
ttaacacactgtggcgatgtgctgt

SEQ ID NO: 209008 - DNA, 25 bp, Homo sapien
actgtggcgatgtgctgtgtctgca

SEQ ID NO: 209009 - DNA, 25 bp, Homo sapien
cataacaccttctgtacctctccac

SEQ ID NO: 209010 - DNA, 25 bp, Homo sapien
gccctgctcggtgtccccataacac

SEQ ID NO: 209011 - DNA, 25 bp, Homo sapien
gccctggcgtaccacgtgtgtgttt

SEQ ID NO: 209012 - DNA, 25 bp, Homo sapien
cctggcgtaccacgtgtgtgtttag

SEQ ID NO: 209013 - DNA, 25 bp, Homo sapien
ccctggcgtaccacgtgtgtgttta

SEQ ID NO: 209014 - DNA, 25 bp, Homo sapien
ctctgcaagctgtagtagatgtcgt

SEQ ID NO: 209015 - DNA, 25 bp, Homo sapien
accaagaagatctctgcaagctgta

SEQ ID NO: 209016 - DNA, 25 bp, Homo sapien
agtagatgtcgtaaagcctgcgcac

SEQ ID NO: 209017 - DNA, 25 bp, Homo sapien
ctgtagtagatgtcgtaaagcctgc

SEQ ID NO: 209018 - DNA, 25 bp, Homo sapien
tgtggatgccattccaacaagcctg

SEQ ID NO: 209019 - DNA, 25 bp, Homo sapien
gaaccagagccagccgattttcact

SEQ ID NO: 209020 - DNA, 25 bp, Homo sapien
gatgccattccaacaagcctggtta

SEQ ID NO: 209021 - DNA, 25 bp, Homo sapien
agagccagccgattttcactgtgga

SEQ ID NO: 209022 - DNA, 25 bp, Homo sapien
taagtcgtcgtcgtgtctcagctgg

SEQ ID NO: 209023 - DNA, 25 bp, Homo sapien
tctttgataggatggaccagtactc

SEQ ID NO: 209024 - DNA, 25 bp, Homo sapien
gaattacactctgtgttccaggtgg

SEQ ID NO: 209025 - DNA, 25 bp, Homo sapien
caagagttgctcataacctgagggc

SEQ ID NO: 209026 - DNA, 25 bp, Homo sapien
ctccttgcccagagatgattcaggg

SEQ ID NO: 209027 - DNA, 25 bp, Homo sapien
tccttgcccagagatgattcagggt

SEQ ID NO: 209028 - DNA, 25 bp, Homo sapien
ccttgcccagagatgattcagggtg

SEQ ID NO: 209029 - DNA, 25 bp, Homo sapien
ggtatttcgccatcccattttgcag

SEQ ID NO: 209030 - DNA, 25 bp, Homo sapien
tgccaactctgacatgccgcctttt

SEQ ID NO: 209031 - DNA, 25 bp, Homo sapien
aagctccaaatgcttcccgtggtat

SEQ ID NO: 209032 - DNA, 25 bp, Homo sapien
caactctgacatgccgccttttact

SEQ ID NO: 209033 - DNA, 25 bp, Homo sapien
tggttctggtcttgagagccaatgc

SEQ ID NO: 209034 - DNA, 25 bp, Homo sapien
gagccaatgcctggcaggtgactgt

SEQ ID NO: 209035 - DNA, 25 bp, Homo sapien
tcggatgtagaattattaaacctgt

SEQ ID NO: 209036 - DNA, 25 bp, Homo sapien
taactgtctccatttggttcggatg

SEQ ID NO: 209037 - DNA, 25 bp, Homo sapien
tcggatggatcccaccggctgcccc

SEQ ID NO: 209038 - DNA, 25 bp, Homo sapien
ctcggatggatcccaccggctgccc

SEQ ID NO: 209039 - DNA, 25 bp, Homo sapien
gctgcccccgcagttcctcagccat

SEQ ID NO: 209040 - DNA, 25 bp, Homo sapien
cagaatcgtaagtgtcccaggctgt

SEQ ID NO: 209041 - DNA, 25 bp, Homo sapien
gcccagctgaaccatcgccaaatag

SEQ ID NO: 209042 - DNA, 25 bp, Homo sapien
tttaaggaaatcgactgggcccagc

SEQ ID NO: 209043 - DNA, 25 bp, Homo sapien
agtccgtagaagagctggatggccc

SEQ ID NO: 209044 - DNA, 25 bp, Homo sapien
tgtatcgccgtgtgctcatcactga

SEQ ID NO: 209045 - DNA, 25 bp, Homo sapien
gccgtgtgctcatcactgaagaatt

SEQ ID NO: 209046 - DNA, 25 bp, Homo sapien
tctgatcttgtctgtatcgccgtgt

SEQ ID NO: 209047 - DNA, 25 bp, Homo sapien
tcttgtctgtatcgccgtgtgctca

SEQ ID NO: 209048 - DNA, 25 bp, Homo sapien
tcttaatggaaaaggcctcagcact

SEQ ID NO: 209049 - DNA, 25 bp, Homo sapien
tcaagatgttcagtagggtctggca

SEQ ID NO: 209050 - DNA, 25 bp, Homo sapien
tgcctgtgcgccagttcagagaaga

SEQ ID NO: 209051 - DNA, 25 bp, Homo sapien
caagagtctccatagtcctgtgtat

SEQ ID NO: 209052 - DNA, 25 bp, Homo sapien
ccttcaggctcacatagatcacttg

SEQ ID NO: 209053 - DNA, 25 bp, Homo sapien
tgaacttcagcgacatacatgacaa

SEQ ID NO: 209054 - DNA, 25 bp, Homo sapien
taaaaatgaatcgtagcccaaagta

SEQ ID NO: 209055 - DNA, 25 bp, Homo sapien
tccttatggccaagctggattcaag

SEQ ID NO: 209056 - DNA, 25 bp, Homo sapien
gtctagtcaacagagcgaaacctca

SEQ ID NO: 209057 - DNA, 25 bp, Homo sapien
cagggagaaaatcacgttaggccaa

SEQ ID NO: 209058 - DNA, 25 bp, Homo sapien
tccattccaagtgaaagccactgca

SEQ ID NO: 209059 - DNA, 25 bp, Homo sapien
ccagtgccacccgtaaagatgtcca

SEQ ID NO: 209060 - DNA, 25 bp, Homo sapien
ggaatcttgtgcttgactgctcagg

SEQ ID NO: 209061 - DNA, 25 bp, Homo sapien
cagggacaaagctagctcagggctc

SEQ ID NO: 209062 - DNA, 25 bp, Homo sapien
ttgtaacagccctagatcaccttgg

SEQ ID NO: 209063 - DNA, 25 bp, Homo sapien
tatgtgagggagagaaccaaacacc

SEQ ID NO: 209064 - DNA, 25 bp, Homo sapien
cagccttagtaggtcagctggaaga

SEQ ID NO: 209065 - DNA, 25 bp, Homo sapien
tcacaggaggttgtcggttggctct

SEQ ID NO: 209066 - DNA, 25 bp, Homo sapien
ctctggtcaagcggctgtttgggca

SEQ ID NO: 209067 - DNA, 25 bp, Homo sapien
tgagtgccatttgtactcaaggtca

SEQ ID NO: 209068 - DNA, 25 bp, Homo sapien
cagctttgggctagtggacacagca

SEQ ID NO: 209069 - DNA, 25 bp, Homo sapien
cttgagcctttaggacaggtgcccc

SEQ ID NO: 209070 - DNA, 25 bp, Homo sapien
tgtcaggcaagtatcagggcaccta

SEQ ID NO: 209071 - DNA, 25 bp, Homo sapien
tatgtgatgactacgaccagccaga

SEQ ID NO: 209072 - DNA, 25 bp, Homo sapien
tcctgcattttaagttatgggtatc

SEQ ID NO: 209073 - DNA, 25 bp, Homo sapien
gaaatcgcttttcatccaaatgtct

SEQ ID NO: 209074 - DNA, 25 bp, Homo sapien
taggctcaaatctcttggttcctgc

SEQ ID NO: 209075 - DNA, 25 bp, Homo sapien
tcatccaaatgtctaggctcaaatc

SEQ ID NO: 209076 - DNA, 25 bp, Homo sapien
cctttttctgaggatgaccatgtgt

SEQ ID NO: 209077 - DNA, 25 bp, Homo sapien
ctttttctgaggatgaccatgtgtt

SEQ ID NO: 209078 - DNA, 25 bp, Homo sapien
ttttctgaggatgaccatgtgttaa

SEQ ID NO: 209079 - DNA, 25 bp, Homo sapien
tttttctgaggatgaccatgtgtta

SEQ ID NO: 209080 - DNA, 25 bp, Homo sapien
tgcaatgctcattccctgcccccat

SEQ ID NO: 209081 - DNA, 25 bp, Homo sapien
ttcctgcagatcctaccgcctgcgg

SEQ ID NO: 209082 - DNA, 25 bp, Homo sapien
gatcctaccgcctgcggtgttcttt

SEQ ID NO: 209083 - DNA, 25 bp, Homo sapien
ctgcagatcctaccgcctgcggtgt

SEQ ID NO: 209084 - DNA, 25 bp, Homo sapien
caggagggaaattgtcctataaata

SEQ ID NO: 209085 - DNA, 25 bp, Homo sapien
ggagggaaattgtcctataaatatc

SEQ ID NO: 209086 - DNA, 25 bp, Homo sapien
tcaggagggaaattgtcctataaat

SEQ ID NO: 209087 - DNA, 25 bp, Homo sapien
agggaaattgtcctataaatatctg

SEQ ID NO: 209088 - DNA, 25 bp, Homo sapien
ctgctggactcagttccaagatcta

SEQ ID NO: 209089 - DNA, 25 bp, Homo sapien
tgctggactcagttccaagatctaa

SEQ ID NO: 209090 - DNA, 25 bp, Homo sapien
aaacagaggtcttctatttggagat

SEQ ID NO: 209091 - DNA, 25 bp, Homo sapien
aacagaggtcttctatttggagata

SEQ ID NO: 209092 - DNA, 25 bp, Homo sapien
cctgaatgatcccaattcataggga

SEQ ID NO: 209093 - DNA, 25 bp, Homo sapien
cactgttctggagtagtctaccata

SEQ ID NO: 209094 - DNA, 25 bp, Homo sapien
taatgcaggggaaattcactgttct

SEQ ID NO: 209095 - DNA, 25 bp, Homo sapien
tagggatctcatccttaatgcaggg

SEQ ID NO: 209096 - DNA, 25 bp, Homo sapien
tcgtagcggtgagcatcctttgagg

SEQ ID NO: 209097 - DNA, 25 bp, Homo sapien
ttgtgggctgctccaccttgctatt

SEQ ID NO: 209098 - DNA, 25 bp, Homo sapien
ggctgctccaccttgctatttcctg

SEQ ID NO: 209099 - DNA, 25 bp, Homo sapien
tagccaagttgcttctttcgtagcg

SEQ ID NO: 209100 - DNA, 25 bp, Homo sapien
gcaattccgtgatacctgttaccat

SEQ ID NO: 209101 - DNA, 25 bp, Homo sapien
tctgtatttggatataaatgttcta

SEQ ID NO: 209102 - DNA, 25 bp, Homo sapien
cacacgtcagaagcaattccgtgat

SEQ ID NO: 209103 - DNA, 25 bp, Homo sapien
cagttctgaagaacacacacgtcag

SEQ ID NO: 209104 - DNA, 25 bp, Homo sapien
ttagaaggaacatcgacctttccga

SEQ ID NO: 209105 - DNA, 25 bp, Homo sapien
atcagctccagctcataggcatgag

SEQ ID NO: 209106 - DNA, 25 bp, Homo sapien
ctccagctcataggcatgagtcagg

SEQ ID NO: 209107 - DNA, 25 bp, Homo sapien
ggaacatcgacctttccgagcaatg

SEQ ID NO: 209108 - DNA, 25 bp, Homo sapien
cctctaagttccgtgatgtcatcag

SEQ ID NO: 209109 - DNA, 25 bp, Homo sapien
ttaactactgattcccagatctctc

SEQ ID NO: 209110 - DNA, 25 bp, Homo sapien
ttactggcctctaagttccgtgatg

SEQ ID NO: 209111 - DNA, 25 bp, Homo sapien
ggctggcggccagatccttaactac

SEQ ID NO: 209112 - DNA, 25 bp, Homo sapien
ttaatataaatctgtttggatgtaa

SEQ ID NO: 209113 - DNA, 25 bp, Homo sapien
gctctctaaagagtcatcatgttta

SEQ ID NO: 209114 - DNA, 25 bp, Homo sapien
cctgccagcggcaggcattgatcac

SEQ ID NO: 209115 - DNA, 25 bp, Homo sapien
tcctgccagcggcaggcattgatca

SEQ ID NO: 209116 - DNA, 25 bp, Homo sapien
gagacagtctcttcttgactggcct

SEQ ID NO: 209117 - DNA, 25 bp, Homo sapien
ttctcatagggcactgagcctctgg

SEQ ID NO: 209118 - DNA, 25 bp, Homo sapien
aagcaggtatcattccccagtcctg

SEQ ID NO: 209119 - DNA, 25 bp, Homo sapien
tcattccccagtcctgtaggagaca

SEQ ID NO: 209120 - DNA, 25 bp, Homo sapien
aaagactggctccaagatgggatgc

SEQ ID NO: 209121 - DNA, 25 bp, Homo sapien
gagcacattggactgctgcaagaca

SEQ ID NO: 209122 - DNA, 25 bp, Homo sapien
caaagaccagaatgggaatcactga

SEQ ID NO: 209123 - DNA, 25 bp, Homo sapien
tggctccaagatgggatgcaaagac

SEQ ID NO: 209124 - DNA, 25 bp, Homo sapien
accctggttggctctgttaaggtca

SEQ ID NO: 209125 - DNA, 25 bp, Homo sapien
tgttaaggtcatttaggtcagacat

SEQ ID NO: 209126 - DNA, 25 bp, Homo sapien
ccctggttggctctgttaaggtcat

SEQ ID NO: 209127 - DNA, 25 bp, Homo sapien
gctctgttaaggtcatttaggtcag

SEQ ID NO: 209128 - DNA, 25 bp, Homo sapien
tttgagggaaagtgatagctgctga

SEQ ID NO: 209129 - DNA, 25 bp, Homo sapien
gtgatagctgctgaggcaaggaaca

SEQ ID NO: 209130 - DNA, 25 bp, Homo sapien
ctatttgagggaaagtgatagctgc

SEQ ID NO: 209131 - DNA, 25 bp, Homo sapien
aagtgatagctgctgaggcaaggaa

SEQ ID NO: 209132 - DNA, 25 bp, Homo sapien
tcccaacaccaacaatagatcagag

SEQ ID NO: 209133 - DNA, 25 bp, Homo sapien
gaacaagcaatcctgttcccaacac

SEQ ID NO: 209134 - DNA, 25 bp, Homo sapien
gatcagagtagttatgccatgttgt

SEQ ID NO: 209135 - DNA, 25 bp, Homo sapien
tgccatgaacaagcaatcctgttcc

SEQ ID NO: 209136 - DNA, 25 bp, Homo sapien
ccaggcagttgcagatcaagggaat

SEQ ID NO: 209137 - DNA, 25 bp, Homo sapien
tttttgtgagccaatcttagtgggc

SEQ ID NO: 209138 - DNA, 25 bp, Homo sapien
gccaatcttagtgggcctggcctga

SEQ ID NO: 209139 - DNA, 25 bp, Homo sapien
tgagccaatcttagtgggcctggcc

SEQ ID NO: 209140 - DNA, 25 bp, Homo sapien
tgtgagccaatcttagtgggcctgg

SEQ ID NO: 209141 - DNA, 25 bp, Homo sapien
ttcttcatgaggatgctgctgtgcg

SEQ ID NO: 209142 - DNA, 25 bp, Homo sapien
tgtgcgtagtgccaccaggggtcct

SEQ ID NO: 209143 - DNA, 25 bp, Homo sapien
ccaggggtcctaagcttgatgtgac

SEQ ID NO: 209144 - DNA, 25 bp, Homo sapien
catccagactcacagtgggcttctc

SEQ ID NO: 209145 - DNA, 25 bp, Homo sapien
ctgcttctgcaaagctgcttctacc

SEQ ID NO: 209146 - DNA, 25 bp, Homo sapien
agcttaggaaaggcagcttcatcat

SEQ ID NO: 209147 - DNA, 25 bp, Homo sapien
atcatcagtcccaccaaacatctcc

SEQ ID NO: 209148 - DNA, 25 bp, Homo sapien
gcttctgcaaagctgcttctaccat

SEQ ID NO: 209149 - DNA, 25 bp, Homo sapien
taggcattatgtcagctgtgaaggg

SEQ ID NO: 209150 - DNA, 25 bp, Homo sapien
ctttggtttaggcattatgtcagct

SEQ ID NO: 209151 - DNA, 25 bp, Homo sapien
gcactcccatttatctttggtttag

SEQ ID NO: 209152 - DNA, 25 bp, Homo sapien
ttatgtcagctgtgaagggtctttc

SEQ ID NO: 209153 - DNA, 25 bp, Homo sapien
tagatagttcccccgtaggatcttg

SEQ ID NO: 209154 - DNA, 25 bp, Homo sapien
ttctccatccatcgtgaaagagtta

SEQ ID NO: 209155 - DNA, 25 bp, Homo sapien
ctccatccatcgtgaaagagttaga

SEQ ID NO: 209156 - DNA, 25 bp, Homo sapien
agttcccccgtaggatcttgtgcat

SEQ ID NO: 209157 - DNA, 25 bp, Homo sapien
aggagctggtgaatacagtttttct

SEQ ID NO: 209158 - DNA, 25 bp, Homo sapien
aaaattttcatcagtgggggacagg

SEQ ID NO: 209159 - DNA, 25 bp, Homo sapien
tcttcctcgcctaacactgattgtc

SEQ ID NO: 209160 - DNA, 25 bp, Homo sapien
gaggcccactcgctccccaacacat

SEQ ID NO: 209161 - DNA, 25 bp, Homo sapien
tgtttttgaacggattcattttatg

SEQ ID NO: 209162 - DNA, 25 bp, Homo sapien
gaaggcttccgagctgcttcctcag

SEQ ID NO: 209163 - DNA, 25 bp, Homo sapien
ggaaggcttccgagctgcttcctca

SEQ ID NO: 209164 - DNA, 25 bp, Homo sapien
cttgctcacgggatcttcccactct

SEQ ID NO: 209165 - DNA, 25 bp, Homo sapien
cgtgcctgcttgctcacgggatctt

SEQ ID NO: 209166 - DNA, 25 bp, Homo sapien
aagaggatccgcagtggtctccact

SEQ ID NO: 209167 - DNA, 25 bp, Homo sapien
tagacacaaggtaacatggtagagc

SEQ ID NO: 209168 - DNA, 25 bp, Homo sapien
tatgtaacgggactggcttgtgcag

SEQ ID NO: 209169 - DNA, 25 bp, Homo sapien
tgtgattggacaagctcatttgccc

SEQ ID NO: 209170 - DNA, 25 bp, Homo sapien
gaaagcccattaaactcaagacagt

SEQ ID NO: 209171 - DNA, 25 bp, Homo sapien
tgcagaaatccttacaaaacctggt

SEQ ID NO: 209172 - DNA, 25 bp, Homo sapien
tgaaagaactgccattgagcaagaa

SEQ ID NO: 209173 - DNA, 25 bp, Homo sapien
gcctagactgcaatttcaatagtga

SEQ ID NO: 209174 - DNA, 25 bp, Homo sapien
taaacatggaacagcccttgctagg

SEQ ID NO: 209175 - DNA, 25 bp, Homo sapien
ggaacatttcttctccctagtggac

SEQ ID NO: 209176 - DNA, 25 bp, Homo sapien
taagaatatgtctatggatgcccac

SEQ ID NO: 209177 - DNA, 25 bp, Homo sapien
tctcccaagcttataggacacacag

SEQ ID NO: 209178 - DNA, 25 bp, Homo sapien
aatgttggaatcacagatactttgt

SEQ ID NO: 209179 - DNA, 25 bp, Homo sapien
caaaatgttggaatcacagatactt

SEQ ID NO: 209180 - DNA, 25 bp, Homo sapien
ccaaaatgttggaatcacagatact

SEQ ID NO: 209181 - DNA, 25 bp, Homo sapien
aaatgttggaatcacagatactttg

SEQ ID NO: 209182 - DNA, 25 bp, Homo sapien
ttatcttgtacgcactttccttcca

SEQ ID NO: 209183 - DNA, 25 bp, Homo sapien
ttttgctgccattgttctcgttatg

SEQ ID NO: 209184 - DNA, 25 bp, Homo sapien
ccttccaaacaatacccttttgctg

SEQ ID NO: 209185 - DNA, 25 bp, Homo sapien
gctgccattgttctcgttatgaata

SEQ ID NO: 209186 - DNA, 25 bp, Homo sapien
tcctgattggctgagagcggcgtgg

SEQ ID NO: 209187 - DNA, 25 bp, Homo sapien
gcgtcgcagcccgtcccagctgtgc

SEQ ID NO: 209188 - DNA, 25 bp, Homo sapien
cagctgtgcctcagctgaccgcctc

SEQ ID NO: 209189 - DNA, 25 bp, Homo sapien
agctgaccgcctcctgattggctga

SEQ ID NO: 209190 - DNA, 25 bp, Homo sapien
tccttctcttctccgcgtgtggagg

SEQ ID NO: 209191 - DNA, 25 bp, Homo sapien
tctagtctcacgaggggtttcccgc

SEQ ID NO: 209192 - DNA, 25 bp, Homo sapien
caagccacctgaggagaggctcgga

SEQ ID NO: 209193 - DNA, 25 bp, Homo sapien
cctcttcgtcgcttcggccagtgtg

SEQ ID NO: 209194 - DNA, 25 bp, Homo sapien
ccgcccgccgtgaagacatcgcggg

SEQ ID NO: 209195 - DNA, 25 bp, Homo sapien
ccgtgaagacatcgcggggaccgat

SEQ ID NO: 209196 - DNA, 25 bp, Homo sapien
gggccgcccgccgtgaagacatcgc

SEQ ID NO: 209197 - DNA, 25 bp, Homo sapien
gacatcgcggggaccgattcaccat

SEQ ID NO: 209198 - DNA, 25 bp, Homo sapien
gtgggagacgcctcgaaagtgcttt

SEQ ID NO: 209199 - DNA, 25 bp, Homo sapien
ctcgcgccgcccacctacccgcctc

SEQ ID NO: 209200 - DNA, 25 bp, Homo sapien
ggggtgggagacgcctcgaaagtgc

SEQ ID NO: 209201 - DNA, 25 bp, Homo sapien
gtcgccatcttgtcgtggggggtgg

SEQ ID NO: 209202 - DNA, 25 bp, Homo sapien
ggatacgtttctgttcttaagagtc

SEQ ID NO: 209203 - DNA, 25 bp, Homo sapien
tcttgtaaattcagatgctaagcaa

SEQ ID NO: 209204 - DNA, 25 bp, Homo sapien
aaaactggatatgtttcagtggacc

SEQ ID NO: 209205 - DNA, 25 bp, Homo sapien
taaaggcgaaagttgaagtctttga

SEQ ID NO: 209206 - DNA, 25 bp, Homo sapien
gctttttcactatgtagagaccatt

SEQ ID NO: 209207 - DNA, 25 bp, Homo sapien
aactgtaggattagggactgagtac

SEQ ID NO: 209208 - DNA, 25 bp, Homo sapien
taccatttaaataggagttccctga

SEQ ID NO: 209209 - DNA, 25 bp, Homo sapien
catctaaatagtgaggaagagtatc

SEQ ID NO: 209210 - DNA, 25 bp, Homo sapien
taacaacagatcctattaataatac

SEQ ID NO: 209211 - DNA, 25 bp, Homo sapien
aaaatgtaacaacagatcctattaa

SEQ ID NO: 209212 - DNA, 25 bp, Homo sapien
tgtaacaacagatcctattaataat

SEQ ID NO: 209213 - DNA, 25 bp, Homo sapien
ttaataatacttccaataatacata

SEQ ID NO: 209214 - DNA, 25 bp, Homo sapien
gtgtagatgaaagcgataagggaac

SEQ ID NO: 209215 - DNA, 25 bp, Homo sapien
tacactcggctagtaatttgattgg

SEQ ID NO: 209216 - DNA, 25 bp, Homo sapien
tcttcattgttatactggtgggtga

SEQ ID NO: 209217 - DNA, 25 bp, Homo sapien
cctgaccacatttgcttaggacaaa

SEQ ID NO: 209218 - DNA, 25 bp, Homo sapien
tgaatgtgtgacagtttcctgcccc

SEQ ID NO: 209219 - DNA, 25 bp, Homo sapien
agagtgatcagttctaccagagagg

SEQ ID NO: 209220 - DNA, 25 bp, Homo sapien
catattgggaatggtaccccaggca

SEQ ID NO: 209221 - DNA, 25 bp, Homo sapien
caaacttacgcacatcactactgag

SEQ ID NO: 209222 - DNA, 25 bp, Homo sapien
cgagaccgtgtagttagattataaa

SEQ ID NO: 209223 - DNA, 25 bp, Homo sapien
aaagtattacattgtggatgcccac

SEQ ID NO: 209224 - DNA, 25 bp, Homo sapien
tgccagtttgagtctaaggcccaat

SEQ ID NO: 209225 - DNA, 25 bp, Homo sapien
cagtcattaaagttgaggtgccagt

SEQ ID NO: 209226 - DNA, 25 bp, Homo sapien
tattagaaattgagctaacacattc

SEQ ID NO: 209227 - DNA, 25 bp, Homo sapien
gatagcacagttaaagagcaaactc

SEQ ID NO: 209228 - DNA, 25 bp, Homo sapien
gcttattagaaattgagctaacaca

SEQ ID NO: 209229 - DNA, 25 bp, Homo sapien
ttctttagggattcttgtgtaccga

SEQ ID NO: 209230 - DNA, 25 bp, Homo sapien
tggtgctgatttgtgaacccattcc

SEQ ID NO: 209231 - DNA, 25 bp, Homo sapien
tcctcagtcgacacagcctggatat

SEQ ID NO: 209232 - DNA, 25 bp, Homo sapien
ccatagcaaagattcagcgctggcc

SEQ ID NO: 209233 - DNA, 25 bp, Homo sapien
tagatagcaagactttcctcagtcg

SEQ ID NO: 209234 - DNA, 25 bp, Homo sapien
gaacttcttgcatctataacccctg

SEQ ID NO: 209235 - DNA, 25 bp, Homo sapien
ggtaacagtaaagacagccagctca

SEQ ID NO: 209236 - DNA, 25 bp, Homo sapien
cccctgagaaccaagctatggaaaa

SEQ ID NO: 209237 - DNA, 25 bp, Homo sapien
gacattcccctctagttatagcaga

SEQ ID NO: 209238 - DNA, 25 bp, Homo sapien
tatataaggtttgcttgcacctcgg

SEQ ID NO: 209239 - DNA, 25 bp, Homo sapien
tgcacctcggtaggaaagtcctctg

SEQ ID NO: 209240 - DNA, 25 bp, Homo sapien
ttcagcatggtactaagaagacagc

SEQ ID NO: 209241 - DNA, 25 bp, Homo sapien
tctctgccagcgagctagatagggt

SEQ ID NO: 209242 - DNA, 25 bp, Homo sapien
cttatctgtttattaataccctgcc

SEQ ID NO: 209243 - DNA, 25 bp, Homo sapien
tgtaataagaataggtaacaagtag

SEQ ID NO: 209244 - DNA, 25 bp, Homo sapien
cttttaccatgtagtttagtagtat

SEQ ID NO: 209245 - DNA, 25 bp, Homo sapien
agtatgtataatgagatgtaataag

SEQ ID NO: 209246 - DNA, 25 bp, Homo sapien
tgagtgatcatgcatctcaagaaat

SEQ ID NO: 209247 - DNA, 25 bp, Homo sapien
aaccctaaatgtgacacagtacgca

SEQ ID NO: 209248 - DNA, 25 bp, Homo sapien
ttatgtccacaagtaacccagtgtt

SEQ ID NO: 209249 - DNA, 25 bp, Homo sapien
gtccacaagtaacccagtgtttagc

SEQ ID NO: 209250 - DNA, 25 bp, Homo sapien
tagattttggcagcaacggtgagta

SEQ ID NO: 209251 - DNA, 25 bp, Homo sapien
cagaatgtgtccttaaaccggttga

SEQ ID NO: 209252 - DNA, 25 bp, Homo sapien
gatgctttaactttgctggccccag

SEQ ID NO: 209253 - DNA, 25 bp, Homo sapien
tgtgtctgttgctacaagccccatt

SEQ ID NO: 209254 - DNA, 25 bp, Homo sapien
tgccagcagtacgtggtagccacaa

SEQ ID NO: 209255 - DNA, 25 bp, Homo sapien
tgaagttaatgctcctatacaaggc

SEQ ID NO: 209256 - DNA, 25 bp, Homo sapien
cctactgcagggtgaagaattactc

SEQ ID NO: 209257 - DNA, 25 bp, Homo sapien
cactggtggctcattacctaaagca

SEQ ID NO: 209258 - DNA, 25 bp, Homo sapien
aattgcctagtatgttaatttgctc

SEQ ID NO: 209259 - DNA, 25 bp, Homo sapien
ggttggatctaacactaactgtatt

SEQ ID NO: 209260 - DNA, 25 bp, Homo sapien
ttttaggaatatatagttgtcacag

SEQ ID NO: 209261 - DNA, 25 bp, Homo sapien
gcactttgtcgctattaacatcctt

SEQ ID NO: 209262 - DNA, 25 bp, Homo sapien
ttccaggagacggacagtgtacgct

SEQ ID NO: 209263 - DNA, 25 bp, Homo sapien
aagagcggcagtcaccgaaggttgc

SEQ ID NO: 209264 - DNA, 25 bp, Homo sapien
tcccggcgatattgcacttgtgaag

SEQ ID NO: 209265 - DNA, 25 bp, Homo sapien
tgtacgcttcgaggacttcacggag

SEQ ID NO: 209266 - DNA, 25 bp, Homo sapien
gaagtcgtgttgacatgcgcccaag

SEQ ID NO: 209267 - DNA, 25 bp, Homo sapien
tttcgcctcggcttcgcaaggacag

SEQ ID NO: 209268 - DNA, 25 bp, Homo sapien
ctggacaattaggagtgcgggttac

SEQ ID NO: 209269 - DNA, 25 bp, Homo sapien
tttccttagtgatcttgggtgccca

SEQ ID NO: 209270 - DNA, 25 bp, Homo sapien
cagtgtggtcgggatacagtttgct

SEQ ID NO: 209271 - DNA, 25 bp, Homo sapien
gtctaatgtctactgagaccccaga

SEQ ID NO: 209272 - DNA, 25 bp, Homo sapien
cacaagtttccaaaactgatggagg

SEQ ID NO: 209273 - DNA, 25 bp, Homo sapien
tgcctgtgatacaacctcaggaagt

SEQ ID NO: 209274 - DNA, 25 bp, Homo sapien
gccatgttgtttgaattgctgccaa

SEQ ID NO: 209275 - DNA, 25 bp, Homo sapien
tacccagccttaacctgtttcacag

SEQ ID NO: 209276 - DNA, 25 bp, Homo sapien
ccagcatggtattattaagggattt

SEQ ID NO: 209277 - DNA, 25 bp, Homo sapien
tatccctatcatgttgttggctcaa

SEQ ID NO: 209278 - DNA, 25 bp, Homo sapien
ccacatcgggtacgggatagtcacg

SEQ ID NO: 209279 - DNA, 25 bp, Homo sapien
tgaacgccgtgaagccaaggaagaa

SEQ ID NO: 209280 - DNA, 25 bp, Homo sapien
tagtcacgtcgatccacataagctg

SEQ ID NO: 209281 - DNA, 25 bp, Homo sapien
tctcccagatgataatgaacgccgt

SEQ ID NO: 209282 - DNA, 25 bp, Homo sapien
gaacagccacgccttggatgctatg

SEQ ID NO: 209283 - DNA, 25 bp, Homo sapien
ttattctgtattgcctgtctcctgg

SEQ ID NO: 209284 - DNA, 25 bp, Homo sapien
ggatgctatgcttctggcgtgcaga

SEQ ID NO: 209285 - DNA, 25 bp, Homo sapien
tggaaaagtcctctagatacaggct

SEQ ID NO: 209286 - DNA, 25 bp, Homo sapien
agagttgagagcttgccctgtggcc

SEQ ID NO: 209287 - DNA, 25 bp, Homo sapien
aacgcttaagcatggagttcctggg

SEQ ID NO: 209288 - DNA, 25 bp, Homo sapien
taggcgttaactagacaatgggaaa

SEQ ID NO: 209289 - DNA, 25 bp, Homo sapien
tacccagaaggagaatcgagacttg

SEQ ID NO: 209290 - DNA, 25 bp, Homo sapien
tcccgcctcttgcctccctgagagc

SEQ ID NO: 209291 - DNA, 25 bp, Homo sapien
tgctatattgcccaggcaggtctcg

SEQ ID NO: 209292 - DNA, 25 bp, Homo sapien
ttttatggagaacggggtcttgcta

SEQ ID NO: 209293 - DNA, 25 bp, Homo sapien
tcaagctatcctcccgcctcttgcc

SEQ ID NO: 209294 - DNA, 25 bp, Homo sapien
ataatgagcctgaatagctgccgct

SEQ ID NO: 209295 - DNA, 25 bp, Homo sapien
tgagcctgaatagctgccgctgcag

SEQ ID NO: 209296 - DNA, 25 bp, Homo sapien
gtgggatcaagataatgagcctgaa

SEQ ID NO: 209297 - DNA, 25 bp, Homo sapien
gatcaagataatgagcctgaatagc

SEQ ID NO: 209298 - DNA, 25 bp, Homo sapien
ctctgccccttctccttcgccctgc

SEQ ID NO: 209299 - DNA, 25 bp, Homo sapien
ctgccccttctccttcgccctgcat

SEQ ID NO: 209300 - DNA, 25 bp, Homo sapien
tctgccccttctccttcgccctgca

SEQ ID NO: 209301 - DNA, 25 bp, Homo sapien
tgcacattggaactgtagagcatcc

SEQ ID NO: 209302 - DNA, 25 bp, Homo sapien
cactccgggagctatttgagaagcc

SEQ ID NO: 209303 - DNA, 25 bp, Homo sapien
gaaagatatgacagggacggtctct

SEQ ID NO: 209304 - DNA, 25 bp, Homo sapien
tgagataagttgtgtccccgtccag

SEQ ID NO: 209305 - DNA, 25 bp, Homo sapien
gatttctaggaactacctgcactga

SEQ ID NO: 209306 - DNA, 25 bp, Homo sapien
cctgatttctaggaactacctgcac

SEQ ID NO: 209307 - DNA, 25 bp, Homo sapien
tttctaggaactacctgcactgact

SEQ ID NO: 209308 - DNA, 25 bp, Homo sapien
tctaggaactacctgcactgactta

SEQ ID NO: 209309 - DNA, 25 bp, Homo sapien
gtttagctgcttggtgaactcacaa

SEQ ID NO: 209310 - DNA, 25 bp, Homo sapien
cagtttttccaccagcgtgtgaact

SEQ ID NO: 209311 - DNA, 25 bp, Homo sapien
gatttaggtgtaccaggtttagctg

SEQ ID NO: 209312 - DNA, 25 bp, Homo sapien
ccagcgtgtgaactgcaaagttgat

SEQ ID NO: 209313 - DNA, 25 bp, Homo sapien
tctaagttgtctctgtgccattctc

SEQ ID NO: 209314 - DNA, 25 bp, Homo sapien
ctaagttgtctctgtgccattctct

SEQ ID NO: 209315 - DNA, 25 bp, Homo sapien
cttctaagttgtctctgtgccattc

SEQ ID NO: 209316 - DNA, 25 bp, Homo sapien
ttctaagttgtctctgtgccattct

SEQ ID NO: 209317 - DNA, 25 bp, Homo sapien
tatgggcggaaatatggcattctgg

SEQ ID NO: 209318 - DNA, 25 bp, Homo sapien
ggctgacctaaagccaacaggtggt

SEQ ID NO: 209319 - DNA, 25 bp, Homo sapien
cataaactgtagcatggctgaccta

SEQ ID NO: 209320 - DNA, 25 bp, Homo sapien
tccatggggctaggagccataaact

SEQ ID NO: 209321 - DNA, 25 bp, Homo sapien
agtcactttccatatctgaccacca

SEQ ID NO: 209322 - DNA, 25 bp, Homo sapien
ggctgcaagtcactttccatatctg

SEQ ID NO: 209323 - DNA, 25 bp, Homo sapien
catgtgttcccggtctctgtgaggg

SEQ ID NO: 209324 - DNA, 25 bp, Homo sapien
agctaggctgcaagtcactttccat

SEQ ID NO: 209325 - DNA, 25 bp, Homo sapien
tccagaggactggtaccattgctcc

SEQ ID NO: 209326 - DNA, 25 bp, Homo sapien
aaaagtctcagggttggcctcgcct

SEQ ID NO: 209327 - DNA, 25 bp, Homo sapien
tcgcctttctgactacaccaaatgc

SEQ ID NO: 209328 - DNA, 25 bp, Homo sapien
tgctggaaaccaagggtggacccat

SEQ ID NO: 209329 - DNA, 25 bp, Homo sapien
cctgccataattgtcccgagattcc

SEQ ID NO: 209330 - DNA, 25 bp, Homo sapien
tgctgcacctcctctatcacttttt

SEQ ID NO: 209331 - DNA, 25 bp, Homo sapien
cgttctatgtctgcctctatagcca

SEQ ID NO: 209332 - DNA, 25 bp, Homo sapien
tgtcccgagattccatagagaattt

SEQ ID NO: 209333 - DNA, 25 bp, Homo sapien
cattggcttcttgtctgctgttggg

SEQ ID NO: 209334 - DNA, 25 bp, Homo sapien
cttcatcaacaagaagctgtgtttt

SEQ ID NO: 209335 - DNA, 25 bp, Homo sapien
cagtcactcctgaagccattggctt

SEQ ID NO: 209336 - DNA, 25 bp, Homo sapien
tattgttcttctggccgtcctcttc

SEQ ID NO: 209337 - DNA, 25 bp, Homo sapien
tggagcatcgagggaaaagaaagca

SEQ ID NO: 209338 - DNA, 25 bp, Homo sapien
ctggagcatcgagggaaaagaaagc

SEQ ID NO: 209339 - DNA, 25 bp, Homo sapien
ggagagtaccctccaggtatcctac

SEQ ID NO: 209340 - DNA, 25 bp, Homo sapien
aggtcttgaggagagtaccctccag

SEQ ID NO: 209341 - DNA, 25 bp, Homo sapien
tcttgaggagagtaccctccaggta

SEQ ID NO: 209342 - DNA, 25 bp, Homo sapien
ttgaggagagtaccctccaggtatc

SEQ ID NO: 209343 - DNA, 25 bp, Homo sapien
gatttgggttactgatatggcagct

SEQ ID NO: 209344 - DNA, 25 bp, Homo sapien
agcttttgtagccatggatagttca

SEQ ID NO: 209345 - DNA, 25 bp, Homo sapien
aggagaggatttgggttactgatat

SEQ ID NO: 209346 - DNA, 25 bp, Homo sapien
gccatggatagttcagcttttttgc

SEQ ID NO: 209347 - DNA, 25 bp, Homo sapien
tggtggtgccggagggagagagaac

SEQ ID NO: 209348 - DNA, 25 bp, Homo sapien
cctccagtgagcaggagaacacttg

SEQ ID NO: 209349 - DNA, 25 bp, Homo sapien
acttgagaagacgccgctgctacag

SEQ ID NO: 209350 - DNA, 25 bp, Homo sapien
gaagacgccgctgctacagttcctc

SEQ ID NO: 209351 - DNA, 25 bp, Homo sapien
gcaggtgtggccagattctttttgc

SEQ ID NO: 209352 - DNA, 25 bp, Homo sapien
gtgtggccagattctttttgcttgg

SEQ ID NO: 209353 - DNA, 25 bp, Homo sapien
ctgccccagcaggtgtggccagatt

SEQ ID NO: 209354 - DNA, 25 bp, Homo sapien
gccagattctttttgcttgggccat

SEQ ID NO: 209355 - DNA, 25 bp, Homo sapien
gcacgtttacagttggaatatgagc

SEQ ID NO: 209356 - DNA, 25 bp, Homo sapien
ctgtgcacgtttacagttggaatat

SEQ ID NO: 209357 - DNA, 25 bp, Homo sapien
gttggaatatgagcagccctgcttt

SEQ ID NO: 209358 - DNA, 25 bp, Homo sapien
tggaatatgagcagccctgctttct

SEQ ID NO: 209359 - DNA, 25 bp, Homo sapien
gcacagatgcccttttggaaaaggt

SEQ ID NO: 209360 - DNA, 25 bp, Homo sapien
tagtgattgctttagattggatgac

SEQ ID NO: 209361 - DNA, 25 bp, Homo sapien
gccagtagatgtgcgcccatggccc

SEQ ID NO: 209362 - DNA, 25 bp, Homo sapien
agatttcagaatctcctctactggg

SEQ ID NO: 209363 - DNA, 25 bp, Homo sapien
gaaatcagggacacataattagctt

SEQ ID NO: 209364 - DNA, 25 bp, Homo sapien
gtcatctccagactctatcctgtgt

SEQ ID NO: 209365 - DNA, 25 bp, Homo sapien
tgtggttcgggatgtctcttctaga

SEQ ID NO: 209366 - DNA, 25 bp, Homo sapien
gtttacacgtctttattaactatca

SEQ ID NO: 209367 - DNA, 25 bp, Homo sapien
cactctgccagctctaaataggatg

SEQ ID NO: 209368 - DNA, 25 bp, Homo sapien
tcaggcaagagtaccataaccaatt

SEQ ID NO: 209369 - DNA, 25 bp, Homo sapien
tccaggcttggttatagctccactc

SEQ ID NO: 209370 - DNA, 25 bp, Homo sapien
cacacatggccggtagtttcgcttg

SEQ ID NO: 209371 - DNA, 25 bp, Homo sapien
caatttgagatttccgtgtcccggt

SEQ ID NO: 209372 - DNA, 25 bp, Homo sapien
cggtcccagagtttccgttcagtga

SEQ ID NO: 209373 - DNA, 25 bp, Homo sapien
tccacatcttctgacagtgacgagg

SEQ ID NO: 209374 - DNA, 25 bp, Homo sapien
tctgtattcgagcatataggccaca

SEQ ID NO: 209375 - DNA, 25 bp, Homo sapien
gattagtggtattaacagtacccaa

SEQ ID NO: 209376 - DNA, 25 bp, Homo sapien
ccaagtgaggagctccttcagttgc

SEQ ID NO: 209377 - DNA, 25 bp, Homo sapien
tacccaagtgaggagctccttcagt

SEQ ID NO: 209378 - DNA, 25 bp, Homo sapien
gaaggtcagatggattagtggtatt

SEQ ID NO: 209379 - DNA, 25 bp, Homo sapien
tggagcccagagatgtggctgcctg

SEQ ID NO: 209380 - DNA, 25 bp, Homo sapien
gtacatcttgaatatacagcaacat

SEQ ID NO: 209381 - DNA, 25 bp, Homo sapien
atatacagcaacattcaccctcagc

SEQ ID NO: 209382 - DNA, 25 bp, Homo sapien
tcttgaatatacagcaacattcacc

SEQ ID NO: 209383 - DNA, 25 bp, Homo sapien
gaatatacagcaacattcaccctca

SEQ ID NO: 209384 - DNA, 25 bp, Homo sapien
tagggagatttgacattgaagcagc

SEQ ID NO: 209385 - DNA, 25 bp, Homo sapien
gagtaggtctttcagcgattttgcc

SEQ ID NO: 209386 - DNA, 25 bp, Homo sapien
tcgttaagagtaaatgatgcgctgg

SEQ ID NO: 209387 - DNA, 25 bp, Homo sapien
atgcgctgggtttatggaaatctgc

SEQ ID NO: 209388 - DNA, 25 bp, Homo sapien
gtaatgtctttggatgtggcattcc

SEQ ID NO: 209389 - DNA, 25 bp, Homo sapien
ttcactggctcccagtgtgatgcac

SEQ ID NO: 209390 - DNA, 25 bp, Homo sapien
aatgtctttggatgtggcattccac

SEQ ID NO: 209391 - DNA, 25 bp, Homo sapien
tgatgcacagttgttttggactctg

SEQ ID NO: 209392 - DNA, 25 bp, Homo sapien
catgaaatcaggaaaagaatcatca

SEQ ID NO: 209393 - DNA, 25 bp, Homo sapien
tgaaatcaggaaaagaatcatcacc

SEQ ID NO: 209394 - DNA, 25 bp, Homo sapien
aaatcaggaaaagaatcatcaccat

SEQ ID NO: 209395 - DNA, 25 bp, Homo sapien
ctgcatgaaatcaggaaaagaatca

SEQ ID NO: 209396 - DNA, 25 bp, Homo sapien
gagccgggcatgtagttagcattcc

SEQ ID NO: 209397 - DNA, 25 bp, Homo sapien
cacagatgtaatgtgcctagcatag

SEQ ID NO: 209398 - DNA, 25 bp, Homo sapien
gcattccgtagttcctccttacagt

SEQ ID NO: 209399 - DNA, 25 bp, Homo sapien
tgcctagcatagagccgggcatgta

SEQ ID NO: 209400 - DNA, 25 bp, Homo sapien
gaacaacctaactttgagtacaggc

SEQ ID NO: 209401 - DNA, 25 bp, Homo sapien
cactgatcatgtaacaaactgcaaa

SEQ ID NO: 209402 - DNA, 25 bp, Homo sapien
cccctacaaagtggatttgaataca

SEQ ID NO: 209403 - DNA, 25 bp, Homo sapien
tgttttcagcaggttcgccaacctt

SEQ ID NO: 209404 - DNA, 25 bp, Homo sapien
cttgacctttctttcgtgtcttcca

SEQ ID NO: 209405 - DNA, 25 bp, Homo sapien
atcttgaggtagtcccagaggagga

SEQ ID NO: 209406 - DNA, 25 bp, Homo sapien
cgtgtcttccaacatctgttatatc

SEQ ID NO: 209407 - DNA, 25 bp, Homo sapien
tttctttcgtgtcttccaacatctg

SEQ ID NO: 209408 - DNA, 25 bp, Homo sapien
actctgccggccccaacttaggcga

SEQ ID NO: 209409 - DNA, 25 bp, Homo sapien
cactctgccggccccaacttaggcg

SEQ ID NO: 209410 - DNA, 25 bp, Homo sapien
tatatactttggcattgagaagaga

SEQ ID NO: 209411 - DNA, 25 bp, Homo sapien
gaaccagtgacagatataaaagcct

SEQ ID NO: 209412 - DNA, 25 bp, Homo sapien
taggaccgtgtctgtaagtaaaaga

SEQ ID NO: 209413 - DNA, 25 bp, Homo sapien
tgccacatatcgaaattgattgagg

SEQ ID NO: 209414 - DNA, 25 bp, Homo sapien
aaacctgagctgaaaatggcacctg

SEQ ID NO: 209415 - DNA, 25 bp, Homo sapien
gtgggaatgcactcaaatatcaagc

SEQ ID NO: 209416 - DNA, 25 bp, Homo sapien
ccagaggcatcgttttaaagtcaaa

SEQ ID NO: 209417 - DNA, 25 bp, Homo sapien
tatcaagcagatggtgttctacaac

SEQ ID NO: 209418 - DNA, 25 bp, Homo sapien
ttatgtccactttcccggatccctg

SEQ ID NO: 209419 - DNA, 25 bp, Homo sapien
tgtattatgtccactttcccggatc

SEQ ID NO: 209420 - DNA, 25 bp, Homo sapien
tattatgtccactttcccggatccc

SEQ ID NO: 209421 - DNA, 25 bp, Homo sapien
ttgtattatgtccactttcccggat

SEQ ID NO: 209422 - DNA, 25 bp, Homo sapien
tggaaagctctttcgaaaagatggt

SEQ ID NO: 209423 - DNA, 25 bp, Homo sapien
atgatggaaagctctttcgaaaaga

SEQ ID NO: 209424 - DNA, 25 bp, Homo sapien
atggttttctgcacttttgcttttc

SEQ ID NO: 209425 - DNA, 25 bp, Homo sapien
gatggaaagctctttcgaaaagatg

SEQ ID NO: 209426 - DNA, 25 bp, Homo sapien
tagattcaaggaaccagttgactgt

SEQ ID NO: 209427 - DNA, 25 bp, Homo sapien
atttgtagattcaaggaaccagttg

SEQ ID NO: 209428 - DNA, 25 bp, Homo sapien
ttgactgttgcctgggatactgaga

SEQ ID NO: 209429 - DNA, 25 bp, Homo sapien
aaggaaccagttgactgttgcctgg

SEQ ID NO: 209430 - DNA, 25 bp, Homo sapien
tgccaaagacttgtaatggagtgag

SEQ ID NO: 209431 - DNA, 25 bp, Homo sapien
gtgccaaagacttgtaatggagtga

SEQ ID NO: 209432 - DNA, 25 bp, Homo sapien
gctgctgccacaattgtgaacaaac

SEQ ID NO: 209433 - DNA, 25 bp, Homo sapien
cattgccaggacattctcactgttt

SEQ ID NO: 209434 - DNA, 25 bp, Homo sapien
aaagcattgccaggacattctcact

SEQ ID NO: 209435 - DNA, 25 bp, Homo sapien
cggggggcataaaggaaagcattgc

SEQ ID NO: 209436 - DNA, 25 bp, Homo sapien
gcattgccaggacattctcactgtt

SEQ ID NO: 209437 - DNA, 25 bp, Homo sapien
tctgaatctacagtgggagtctggt

SEQ ID NO: 209438 - DNA, 25 bp, Homo sapien
ctggtgtacccaacttttaagtgtg

SEQ ID NO: 209439 - DNA, 25 bp, Homo sapien
tacagtgggagtctggtgtacccaa

SEQ ID NO: 209440 - DNA, 25 bp, Homo sapien
gctatttattctgaatctacagtgg

SEQ ID NO: 209441 - DNA, 25 bp, Homo sapien
gactgggttgttcaggggattggca

SEQ ID NO: 209442 - DNA, 25 bp, Homo sapien
ggttgttcaggggattggcaacatt

SEQ ID NO: 209443 - DNA, 25 bp, Homo sapien
ttcatattgtccctctcattaagaa

SEQ ID NO: 209444 - DNA, 25 bp, Homo sapien
tattgtccctctcattaagaatgac

SEQ ID NO: 209445 - DNA, 25 bp, Homo sapien
tactggatctgagattaagtctccc

SEQ ID NO: 209446 - DNA, 25 bp, Homo sapien
tcttcacctctagcaagcgcactgt

SEQ ID NO: 209447 - DNA, 25 bp, Homo sapien
taccgaagggcagcttctgagggat

SEQ ID NO: 209448 - DNA, 25 bp, Homo sapien
cagctctgatatgcaggtaccgaag

SEQ ID NO: 209449 - DNA, 25 bp, Homo sapien
tttccatgctgcagaggtggacagg

SEQ ID NO: 209450 - DNA, 25 bp, Homo sapien
aaaatttccatgctgcagaggtgga

SEQ ID NO: 209451 - DNA, 25 bp, Homo sapien
gctgcagaggtggacaggctttata

SEQ ID NO: 209452 - DNA, 25 bp, Homo sapien
ggtggacaggctttataagtctcca

SEQ ID NO: 209453 - DNA, 25 bp, Homo sapien
cgaacaatatcctcagcacctcttt

SEQ ID NO: 209454 - DNA, 25 bp, Homo sapien
tgccttttggatctagtttgctgag

SEQ ID NO: 209455 - DNA, 25 bp, Homo sapien
gagaaatgcagctccacgaacaata

SEQ ID NO: 209456 - DNA, 25 bp, Homo sapien
ttggtgccttttggatctagtttgc

SEQ ID NO: 209457 - DNA, 25 bp, Homo sapien
ctgcagttgtgccctttgcctcagc

SEQ ID NO: 209458 - DNA, 25 bp, Homo sapien
ctgccttgccagctgttgcccttgc

SEQ ID NO: 209459 - DNA, 25 bp, Homo sapien
tgtgtgccagtaacggcagccacct

SEQ ID NO: 209460 - DNA, 25 bp, Homo sapien
ttgcagactctgtgtgccagtaacg

SEQ ID NO: 209461 - DNA, 25 bp, Homo sapien
taaggtatattccacattgtgatcc

SEQ ID NO: 209462 - DNA, 25 bp, Homo sapien
cactgcttacagaaggtcttggatt

SEQ ID NO: 209463 - DNA, 25 bp, Homo sapien
gaatctggtaccatgctaccatctc

SEQ ID NO: 209464 - DNA, 25 bp, Homo sapien
cagaatggcatccatcctccaaagg

SEQ ID NO: 209465 - DNA, 25 bp, Homo sapien
ttctcttaagagcaaggtttgtgta

SEQ ID NO: 209466 - DNA, 25 bp, Homo sapien
caaaagtaggatttgttctcttaag

SEQ ID NO: 209467 - DNA, 25 bp, Homo sapien
aaactggccactcttgaacagggta

SEQ ID NO: 209468 - DNA, 25 bp, Homo sapien
gtgtatttcctactgagaagtttgc

SEQ ID NO: 209469 - DNA, 25 bp, Homo sapien
cctgagaaacttcgtcatgaatcat

SEQ ID NO: 209470 - DNA, 25 bp, Homo sapien
tctgggcctgagaaacttcgtcatg

SEQ ID NO: 209471 - DNA, 25 bp, Homo sapien
ttctgggcctgagaaacttcgtcat

SEQ ID NO: 209472 - DNA, 25 bp, Homo sapien
gggcctgagaaacttcgtcatgaat

SEQ ID NO: 209473 - DNA, 25 bp, Homo sapien
tgttgcaggtaggtatccaagtgct

SEQ ID NO: 209474 - DNA, 25 bp, Homo sapien
acagatcagaactcccttacattgg

SEQ ID NO: 209475 - DNA, 25 bp, Homo sapien
attggtgatgcacatgccagctgag

SEQ ID NO: 209476 - DNA, 25 bp, Homo sapien
tccaagtgctggttctttgagacac

SEQ ID NO: 209477 - DNA, 25 bp, Homo sapien
agaatgttctgtggaagaggttcct

SEQ ID NO: 209478 - DNA, 25 bp, Homo sapien
tggtaccaaagttgaaggcagagtg

SEQ ID NO: 209479 - DNA, 25 bp, Homo sapien
ggcagagtggaagaatgagataaaa

SEQ ID NO: 209480 - DNA, 25 bp, Homo sapien
caccctccactgataagggcagatt

SEQ ID NO: 209481 - DNA, 25 bp, Homo sapien
aattcaggacttcctgtcgtggctc

SEQ ID NO: 209482 - DNA, 25 bp, Homo sapien
tcctgtcgtggctccttgatgaagt

SEQ ID NO: 209483 - DNA, 25 bp, Homo sapien
gaatatttagcgttgcctccctgga

SEQ ID NO: 209484 - DNA, 25 bp, Homo sapien
tgaagtcttccgtcccatacatagt

SEQ ID NO: 209485 - DNA, 25 bp, Homo sapien
tcatagatcaaccacacgttcttca

SEQ ID NO: 209486 - DNA, 25 bp, Homo sapien
tagatcaaccacacgttcttcaatg

SEQ ID NO: 209487 - DNA, 25 bp, Homo sapien
gatcaaccacacgttcttcaatgcc

SEQ ID NO: 209488 - DNA, 25 bp, Homo sapien
catagatcaaccacacgttcttcaa

SEQ ID NO: 209489 - DNA, 25 bp, Homo sapien
gggttggccagctgtacatattgct

SEQ ID NO: 209490 - DNA, 25 bp, Homo sapien
caacctccgactaaaatcctgtaag

SEQ ID NO: 209491 - DNA, 25 bp, Homo sapien
cttctcattttcaacgtgaagtaat

SEQ ID NO: 209492 - DNA, 25 bp, Homo sapien
gtaattccactaccatctccgtatg

SEQ ID NO: 209493 - DNA, 25 bp, Homo sapien
atctcaggaatcctgtgttagggga

SEQ ID NO: 209494 - DNA, 25 bp, Homo sapien
ttcatcattggggtcacaacagtat

SEQ ID NO: 209495 - DNA, 25 bp, Homo sapien
accctctgaagtgcgattgggggat

SEQ ID NO: 209496 - DNA, 25 bp, Homo sapien
tggggtcacaacagtattttgaaag

SEQ ID NO: 209497 - DNA, 25 bp, Homo sapien
tactctcctttgtggtcatgaccag

SEQ ID NO: 209498 - DNA, 25 bp, Homo sapien
accttccgtctgcttttactctgag

SEQ ID NO: 209499 - DNA, 25 bp, Homo sapien
catgaccagccagtgttcaagctct

SEQ ID NO: 209500 - DNA, 25 bp, Homo sapien
ccctgggcactagtggttccctgag

SEQ ID NO: 209501 - DNA, 25 bp, Homo sapien
catgggcagcagcatcacaccacat

SEQ ID NO: 209502 - DNA, 25 bp, Homo sapien
catcatgtgggtgttcatgggcagc

SEQ ID NO: 209503 - DNA, 25 bp, Homo sapien
gtggcatcatgtgggtgttcatggg

SEQ ID NO: 209504 - DNA, 25 bp, Homo sapien
ctgtggcatcatgtgggtgttcatg

SEQ ID NO: 209505 - DNA, 25 bp, Homo sapien
gagcaccagggcttcgaaaacagcc

SEQ ID NO: 209506 - DNA, 25 bp, Homo sapien
ggctggtgtgtacatatagtccaaa

SEQ ID NO: 209507 - DNA, 25 bp, Homo sapien
gtttgcatgctattctccaggaaag

SEQ ID NO: 209508 - DNA, 25 bp, Homo sapien
ccatgactcctgctctatttgatag

SEQ ID NO: 209509 - DNA, 25 bp, Homo sapien
ctttggtcaaggaatctggatctcc

SEQ ID NO: 209510 - DNA, 25 bp, Homo sapien
gccatctttgtcacaccgtttgaat

SEQ ID NO: 209511 - DNA, 25 bp, Homo sapien
gggccatctttgtcacaccgtttga

SEQ ID NO: 209512 - DNA, 25 bp, Homo sapien
tgtcacaccgtttgaattatatgct

SEQ ID NO: 209513 - DNA, 25 bp, Homo sapien
tttgtcacaccgtttgaattatatg

SEQ ID NO: 209514 - DNA, 25 bp, Homo sapien
ttctgacaatatcctccacacggca

SEQ ID NO: 209515 - DNA, 25 bp, Homo sapien
actgttttgtcgcatgctgtgtttc

SEQ ID NO: 209516 - DNA, 25 bp, Homo sapien
tagccaccagactcactgttttgtc

SEQ ID NO: 209517 - DNA, 25 bp, Homo sapien
tctgacaatatcctccacacggcag

SEQ ID NO: 209518 - DNA, 25 bp, Homo sapien
aatgattaattccaaatagtcgggt

SEQ ID NO: 209519 - DNA, 25 bp, Homo sapien
atgtttgttgaatgattaattccaa

SEQ ID NO: 209520 - DNA, 25 bp, Homo sapien
tgaatgattaattccaaatagtcgg

SEQ ID NO: 209521 - DNA, 25 bp, Homo sapien
tgattaattccaaatagtcgggtat

SEQ ID NO: 209522 - DNA, 25 bp, Homo sapien
tctcggtgactgttttctgattcaa

SEQ ID NO: 209523 - DNA, 25 bp, Homo sapien
taactctacatgagtggcctccagt

SEQ ID NO: 209524 - DNA, 25 bp, Homo sapien
ggcctccagtattcgtacaaagata

SEQ ID NO: 209525 - DNA, 25 bp, Homo sapien
caagggccacatggaattgcttcat

SEQ ID NO: 209526 - DNA, 25 bp, Homo sapien
ctaggacaagtagtttgtgtggcat

SEQ ID NO: 209527 - DNA, 25 bp, Homo sapien
tactcaaacctgtgaaccttctgat

SEQ ID NO: 209528 - DNA, 25 bp, Homo sapien
ttacacgtactcaaacctgtgaacc

SEQ ID NO: 209529 - DNA, 25 bp, Homo sapien
cgtactcaaacctgtgaaccttctg

SEQ ID NO: 209530 - DNA, 25 bp, Homo sapien
cacgtactcaaacctgtgaaccttc

SEQ ID NO: 209531 - DNA, 25 bp, Homo sapien
ggcatggcttggcttcacccagaat

SEQ ID NO: 209532 - DNA, 25 bp, Homo sapien
cccactttggcatggcttggcttca

SEQ ID NO: 209533 - DNA, 25 bp, Homo sapien
tttccccactttggcatggcttggc

SEQ ID NO: 209534 - DNA, 25 bp, Homo sapien
tccttcactgctactttccccactt

SEQ ID NO: 209535 - DNA, 25 bp, Homo sapien
gcccctgcaagattgccacatcaag

SEQ ID NO: 209536 - DNA, 25 bp, Homo sapien
cagaatttgcccctgcaagattgcc

SEQ ID NO: 209537 - DNA, 25 bp, Homo sapien
acaaaggcagaatttgcccctgcaa

SEQ ID NO: 209538 - DNA, 25 bp, Homo sapien
tgcaagattgccacatcaaggagca

SEQ ID NO: 209539 - DNA, 25 bp, Homo sapien
aaaaccctgtgtttcaaacacactg

SEQ ID NO: 209540 - DNA, 25 bp, Homo sapien
gcagtgctaggagcaccttcatttc

SEQ ID NO: 209541 - DNA, 25 bp, Homo sapien
ctccttccccgatacttcctctcag

SEQ ID NO: 209542 - DNA, 25 bp, Homo sapien
ttggaatgcgcttcctgtctccttc

SEQ ID NO: 209543 - DNA, 25 bp, Homo sapien
caggcaagctacaataatctgctgc

SEQ ID NO: 209544 - DNA, 25 bp, Homo sapien
actgcatccggtacaaaggctctgg

SEQ ID NO: 209545 - DNA, 25 bp, Homo sapien
tgagttctgccctttttggcaaaca

SEQ ID NO: 209546 - DNA, 25 bp, Homo sapien
catgggacagggaagtaactgtcac

SEQ ID NO: 209547 - DNA, 25 bp, Homo sapien
cgtgttcagaatagaggccacaaag

SEQ ID NO: 209548 - DNA, 25 bp, Homo sapien
ttggttcgtgttcagaatagaggcc

SEQ ID NO: 209549 - DNA, 25 bp, Homo sapien
tacggttggttcgtgttcagaatag

SEQ ID NO: 209550 - DNA, 25 bp, Homo sapien
atgcttacggttggttcgtgttcag

SEQ ID NO: 209551 - DNA, 25 bp, Homo sapien
atcccgttctgcaccactcgctgac

SEQ ID NO: 209552 - DNA, 25 bp, Homo sapien
ttgctgtgcatcccgttctgcacca

SEQ ID NO: 209553 - DNA, 25 bp, Homo sapien
ctgctctttcttgcccatagtggtt

SEQ ID NO: 209554 - DNA, 25 bp, Homo sapien
gactccttggctgtcggcttctgct

SEQ ID NO: 209555 - DNA, 25 bp, Homo sapien
agagcatgactcatgagcaaattta

SEQ ID NO: 209556 - DNA, 25 bp, Homo sapien
gcagagcatgactcatgagcaaatt

SEQ ID NO: 209557 - DNA, 25 bp, Homo sapien
catgagcaaatttaagggccttttc

SEQ ID NO: 209558 - DNA, 25 bp, Homo sapien
ctgcagagcatgactcatgagcaaa

SEQ ID NO: 209559 - DNA, 25 bp, Homo sapien
cagtatctgaaccaattttccctga

SEQ ID NO: 209560 - DNA, 25 bp, Homo sapien
tcttttgtgagggaatgcagagtca

SEQ ID NO: 209561 - DNA, 25 bp, Homo sapien
tttgtatccaaaccacgttgagtga

SEQ ID NO: 209562 - DNA, 25 bp, Homo sapien
cacgttgagtgaacatacagtatct

SEQ ID NO: 209563 - DNA, 25 bp, Homo sapien
tggaaattcggatgctcacagtcat

SEQ ID NO: 209564 - DNA, 25 bp, Homo sapien
actggaaattcggatgctcacagtc

SEQ ID NO: 209565 - DNA, 25 bp, Homo sapien
agactggaaattcggatgctcacag

SEQ ID NO: 209566 - DNA, 25 bp, Homo sapien
gcagactggaaattcggatgctcac

SEQ ID NO: 209567 - DNA, 25 bp, Homo sapien
cccaaagtttagtaatcacatatct

SEQ ID NO: 209568 - DNA, 25 bp, Homo sapien
caaagtttagtaatcacatatcttg

SEQ ID NO: 209569 - DNA, 25 bp, Homo sapien
ttcccaaagtttagtaatcacatat

SEQ ID NO: 209570 - DNA, 25 bp, Homo sapien
agtttagtaatcacatatcttgaaa

SEQ ID NO: 209571 - DNA, 25 bp, Homo sapien
ccctgcagagagcattatcattttg

SEQ ID NO: 209572 - DNA, 25 bp, Homo sapien
tccctgcagagagcattatcatttt

SEQ ID NO: 209573 - DNA, 25 bp, Homo sapien
gaagaaagtacagtagagggagtta

SEQ ID NO: 209574 - DNA, 25 bp, Homo sapien
tagcagttgaaggatcaggattctc

SEQ ID NO: 209575 - DNA, 25 bp, Homo sapien
accacaatagatggatgtgttagca

SEQ ID NO: 209576 - DNA, 25 bp, Homo sapien
tggaagggcacaagtcatagccttg

SEQ ID NO: 209577 - DNA, 25 bp, Homo sapien
tcttgtcccgtttttgacctgcttc

SEQ ID NO: 209578 - DNA, 25 bp, Homo sapien
cggacaatacacacattgcactcag

SEQ ID NO: 209579 - DNA, 25 bp, Homo sapien
cttgtcccgtttttgacctgcttca

SEQ ID NO: 209580 - DNA, 25 bp, Homo sapien
ttttcccggacaatacacacattgc

SEQ ID NO: 209581 - DNA, 25 bp, Homo sapien
ttttagtaatagggttggctgacag

SEQ ID NO: 209582 - DNA, 25 bp, Homo sapien
tttagtaatagggttggctgacagc

SEQ ID NO: 209583 - DNA, 25 bp, Homo sapien
agttggcgataaaaagcactgtgct

SEQ ID NO: 209584 - DNA, 25 bp, Homo sapien
ggagtccactcctatcaattcctct

SEQ ID NO: 209585 - DNA, 25 bp, Homo sapien
ccaactgtaacactgatgagggact

SEQ ID NO: 209586 - DNA, 25 bp, Homo sapien
tggtcacctctgagaaggacaagga

SEQ ID NO: 209587 - DNA, 25 bp, Homo sapien
tttgaaaagtgtgaaatccttattg

SEQ ID NO: 209588 - DNA, 25 bp, Homo sapien
aacaaggatgacaagtctaatttta

SEQ ID NO: 209589 - DNA, 25 bp, Homo sapien
tatgctacacatttacttctcagtt

SEQ ID NO: 209590 - DNA, 25 bp, Homo sapien
ctaaacaaggatgacaagtctaatt

SEQ ID NO: 209591 - DNA, 25 bp, Homo sapien
caaggatgacaagtctaattttatt

SEQ ID NO: 209592 - DNA, 25 bp, Homo sapien
gacaatatgatcaagtcctttggct

SEQ ID NO: 209593 - DNA, 25 bp, Homo sapien
taaggacaatatgatcaagtccttt

SEQ ID NO: 209594 - DNA, 25 bp, Homo sapien
aggacaatatgatcaagtcctttgg

SEQ ID NO: 209595 - DNA, 25 bp, Homo sapien
ctgtaaggacaatatgatcaagtcc

SEQ ID NO: 209596 - DNA, 25 bp, Homo sapien
cctgtgctttttgtgtcgtatccag

SEQ ID NO: 209597 - DNA, 25 bp, Homo sapien
caagaagctttactatctgaaacta

SEQ ID NO: 209598 - DNA, 25 bp, Homo sapien
tcccattgagttacaggagtttctt

SEQ ID NO: 209599 - DNA, 25 bp, Homo sapien
tacatagtcacacttgcctgttttg

SEQ ID NO: 209600 - DNA, 25 bp, Homo sapien
tagcatcatgcaccccagtattatt

SEQ ID NO: 209601 - DNA, 25 bp, Homo sapien
gaatagccagttagatcttgtctca

SEQ ID NO: 209602 - DNA, 25 bp, Homo sapien
gaagcttcattggacttactcatca

SEQ ID NO: 209603 - DNA, 25 bp, Homo sapien
caagttctgtttctaacgtcatagc

SEQ ID NO: 209604 - DNA, 25 bp, Homo sapien
actcccaggagagaatgtcagtcct

SEQ ID NO: 209605 - DNA, 25 bp, Homo sapien
caactcccaggagagaatgtcagtc

SEQ ID NO: 209606 - DNA, 25 bp, Homo sapien
tcccaggagagaatgtcagtcctca

SEQ ID NO: 209607 - DNA, 25 bp, Homo sapien
cccaggagagaatgtcagtcctcat

SEQ ID NO: 209608 - DNA, 25 bp, Homo sapien
gttatcccttccttcccattgtgct

SEQ ID NO: 209609 - DNA, 25 bp, Homo sapien
tcccttccttcccattgtgctccat

SEQ ID NO: 209610 - DNA, 25 bp, Homo sapien
cttgcctcatatgttatcccttcct

SEQ ID NO: 209611 - DNA, 25 bp, Homo sapien
tatcccttccttcccattgtgctcc

SEQ ID NO: 209612 - DNA, 25 bp, Homo sapien
cttatatttcagtttcggcattgca

SEQ ID NO: 209613 - DNA, 25 bp, Homo sapien
tttcagtttcggcattgcatctgac

SEQ ID NO: 209614 - DNA, 25 bp, Homo sapien
tatatttcagtttcggcattgcatc

SEQ ID NO: 209615 - DNA, 25 bp, Homo sapien
tcagtttcggcattgcatctgacat

SEQ ID NO: 209616 - DNA, 25 bp, Homo sapien
gaataccaggcttgtatcagcaact

SEQ ID NO: 209617 - DNA, 25 bp, Homo sapien
ccggtgaagcagtcaaggagctact

SEQ ID NO: 209618 - DNA, 25 bp, Homo sapien
gataggcctcacaacagggagtcgg

SEQ ID NO: 209619 - DNA, 25 bp, Homo sapien
tgatagcaatcaccagcctgtttgg

SEQ ID NO: 209620 - DNA, 25 bp, Homo sapien
taccaactggaatgtctacagtggc

SEQ ID NO: 209621 - DNA, 25 bp, Homo sapien
tcacaatatctcctccttcagtttg

SEQ ID NO: 209622 - DNA, 25 bp, Homo sapien
ttcacaatatctcctccttcagttt

SEQ ID NO: 209623 - DNA, 25 bp, Homo sapien
cttcacaatatctcctccttcagtt

SEQ ID NO: 209624 - DNA, 25 bp, Homo sapien
ttgaacattcgtcagtccatgtact

SEQ ID NO: 209625 - DNA, 25 bp, Homo sapien
agagacataacctttaagcctgaag

SEQ ID NO: 209626 - DNA, 25 bp, Homo sapien
ccaagttcagagacataacctttaa

SEQ ID NO: 209627 - DNA, 25 bp, Homo sapien
cattcgtcagtccatgtacttgggc

SEQ ID NO: 209628 - DNA, 25 bp, Homo sapien
gccattcatgaagaagagtgttaga

SEQ ID NO: 209629 - DNA, 25 bp, Homo sapien
ctccaccgtgccattcatgaagaag

SEQ ID NO: 209630 - DNA, 25 bp, Homo sapien
tcatgaagaagagtgttagagccat

SEQ ID NO: 209631 - DNA, 25 bp, Homo sapien
cattcatgaagaagagtgttagagc

SEQ ID NO: 209632 - DNA, 25 bp, Homo sapien
tggagaccagaccagctcaccaagg

SEQ ID NO: 209633 - DNA, 25 bp, Homo sapien
agaccagaccagctcaccaaggaag

SEQ ID NO: 209634 - DNA, 25 bp, Homo sapien
gagaccagaccagctcaccaaggaa

SEQ ID NO: 209635 - DNA, 25 bp, Homo sapien
gaccagaccagctcaccaaggaagg

SEQ ID NO: 209636 - DNA, 25 bp, Homo sapien
atgacattttgagaagcgttgagaa

SEQ ID NO: 209637 - DNA, 25 bp, Homo sapien
gacattttgagaagcgttgagaact

SEQ ID NO: 209638 - DNA, 25 bp, Homo sapien
gagaagcgttgagaacttgaaagtg

SEQ ID NO: 209639 - DNA, 25 bp, Homo sapien
ttttgagaagcgttgagaacttgaa

SEQ ID NO: 209640 - DNA, 25 bp, Homo sapien
ggttctctcaactggtgtatggttt

SEQ ID NO: 209641 - DNA, 25 bp, Homo sapien
ttacatcatgttctcagggtacttg

SEQ ID NO: 209642 - DNA, 25 bp, Homo sapien
catgttctcagggtacttggttctc

SEQ ID NO: 209643 - DNA, 25 bp, Homo sapien
tcagggtacttggttctctcaactg

SEQ ID NO: 209644 - DNA, 25 bp, Homo sapien
ttagcatcctccacttgtaaatctt

SEQ ID NO: 209645 - DNA, 25 bp, Homo sapien
agcatcctccacttgtaaatcttcc

SEQ ID NO: 209646 - DNA, 25 bp, Homo sapien
tagcatcctccacttgtaaatcttc

SEQ ID NO: 209647 - DNA, 25 bp, Homo sapien
ccttgtatgggccaacaactctgcc

SEQ ID NO: 209648 - DNA, 25 bp, Homo sapien
gcctgcagagactttgcctctggag

SEQ ID NO: 209649 - DNA, 25 bp, Homo sapien
caactgcaatatgaccttgtatggg

SEQ ID NO: 209650 - DNA, 25 bp, Homo sapien
gccaaagaggccagatatcctgtca

SEQ ID NO: 209651 - DNA, 25 bp, Homo sapien
tttcagcttcctgtggaccatagat

SEQ ID NO: 209652 - DNA, 25 bp, Homo sapien
cttttcagcttcctgtggaccatag

SEQ ID NO: 209653 - DNA, 25 bp, Homo sapien
ttttcagcttcctgtggaccataga

SEQ ID NO: 209654 - DNA, 25 bp, Homo sapien
ttcagcttcctgtggaccatagatg

SEQ ID NO: 209655 - DNA, 25 bp, Homo sapien
ccagaacctggtcacgacatactgt

SEQ ID NO: 209656 - DNA, 25 bp, Homo sapien
tattctgacgtacacccagaacctg

SEQ ID NO: 209657 - DNA, 25 bp, Homo sapien
tttgtagctggtgtttagcacctga

SEQ ID NO: 209658 - DNA, 25 bp, Homo sapien
gtttagcacctgatgttatattctg

SEQ ID NO: 209659 - DNA, 25 bp, Homo sapien
gtattgaaacaacagccattaaggc

SEQ ID NO: 209660 - DNA, 25 bp, Homo sapien
gaacaccttcattagccgcctacta

SEQ ID NO: 209661 - DNA, 25 bp, Homo sapien
caacatctggttatgattgcagaca

SEQ ID NO: 209662 - DNA, 25 bp, Homo sapien
ttcttgaggcagcaaataataccgt

SEQ ID NO: 209663 - DNA, 25 bp, Homo sapien
cttttccacataggtcatcatgcaa

SEQ ID NO: 209664 - DNA, 25 bp, Homo sapien
tggatgccatgaattgtaatactcc

SEQ ID NO: 209665 - DNA, 25 bp, Homo sapien
aagtggatgccatgaattgtaatac

SEQ ID NO: 209666 - DNA, 25 bp, Homo sapien
gcaaaggagaaactaagtggatgcc

SEQ ID NO: 209667 - DNA, 25 bp, Homo sapien
gggctaaaagcttccacctgccaat

SEQ ID NO: 209668 - DNA, 25 bp, Homo sapien
catcctgtcagcagtcaggtgatag

SEQ ID NO: 209669 - DNA, 25 bp, Homo sapien
gcaaagttagtcctccctgatgaaa

SEQ ID NO: 209670 - DNA, 25 bp, Homo sapien
caggtgataggtcaacagtacatac

SEQ ID NO: 209671 - DNA, 25 bp, Homo sapien
cctctctgataaagggtcataagaa

SEQ ID NO: 209672 - DNA, 25 bp, Homo sapien
acaggttctaaggtggaaggcgact

SEQ ID NO: 209673 - DNA, 25 bp, Homo sapien
tggtgcagtcaaccctaaggagatg

SEQ ID NO: 209674 - DNA, 25 bp, Homo sapien
taagttgacagttcatggctgtgac

SEQ ID NO: 209675 - DNA, 25 bp, Homo sapien
tctctaactcaatggagagtctgac

SEQ ID NO: 209676 - DNA, 25 bp, Homo sapien
caaagtccaatttctctaactcaat

SEQ ID NO: 209677 - DNA, 25 bp, Homo sapien
ctaggaacaacaataatctttatgt

SEQ ID NO: 209678 - DNA, 25 bp, Homo sapien
ctaactcaatggagagtctgaccaa

SEQ ID NO: 209679 - DNA, 25 bp, Homo sapien
gaaatatgatttagcagagaatggg

SEQ ID NO: 209680 - DNA, 25 bp, Homo sapien
tagttattatggatactcaatctgg

SEQ ID NO: 209681 - DNA, 25 bp, Homo sapien
cagtgattccgcatgaatgagagag

SEQ ID NO: 209682 - DNA, 25 bp, Homo sapien
actgctttggtcattcaacagtcag

SEQ ID NO: 209683 - DNA, 25 bp, Homo sapien
gtttactttggccgatgtctttcaa

SEQ ID NO: 209684 - DNA, 25 bp, Homo sapien
tgacagtttactttggccgatgtct

SEQ ID NO: 209685 - DNA, 25 bp, Homo sapien
acagtttactttggccgatgtcttt

SEQ ID NO: 209686 - DNA, 25 bp, Homo sapien
ttgacagtttactttggccgatgtc

SEQ ID NO: 209687 - DNA, 25 bp, Homo sapien
cccctttccattaagatgagaagag

SEQ ID NO: 209688 - DNA, 25 bp, Homo sapien
tggtaccatttggtacactaggaaa

SEQ ID NO: 209689 - DNA, 25 bp, Homo sapien
tgtggtaaagctaaattcagaacac

SEQ ID NO: 209690 - DNA, 25 bp, Homo sapien
cacaagacaaagctcagatactaag

SEQ ID NO: 209691 - DNA, 25 bp, Homo sapien
ttcaaggctgattctttactccata

SEQ ID NO: 209692 - DNA, 25 bp, Homo sapien
tcaataaatgtcagaggtcacgaaa

SEQ ID NO: 209693 - DNA, 25 bp, Homo sapien
catggagacgtgttcccctgaaaac

SEQ ID NO: 209694 - DNA, 25 bp, Homo sapien
gaaaaagatatcatcctcaccatga

SEQ ID NO: 209695 - DNA, 25 bp, Homo sapien
gtgtgcatgcagtcaactgcataat

SEQ ID NO: 209696 - DNA, 25 bp, Homo sapien
cagaatccagctggacatgcaatat

SEQ ID NO: 209697 - DNA, 25 bp, Homo sapien
catgcagtcaactgcataatataca

SEQ ID NO: 209698 - DNA, 25 bp, Homo sapien
tatacaagcaatatctatgttttta

SEQ ID NO: 209699 - DNA, 25 bp, Homo sapien
aaaatatcctgacatggtatctggg

SEQ ID NO: 209700 - DNA, 25 bp, Homo sapien
tcaggccttgagacactaaaaatat

SEQ ID NO: 209701 - DNA, 25 bp, Homo sapien
ggtgattcaggccttgagacactaa

SEQ ID NO: 209702 - DNA, 25 bp, Homo sapien
ggtacttggagtggcatttgggatt

SEQ ID NO: 209703 - DNA, 25 bp, Homo sapien
gagacatttttggtcagcaccgccg

SEQ ID NO: 209704 - DNA, 25 bp, Homo sapien
tattattcttgagtcgcagccaccc

SEQ ID NO: 209705 - DNA, 25 bp, Homo sapien
taaggagcggctctctacctggagt

SEQ ID NO: 209706 - DNA, 25 bp, Homo sapien
gactgtgctctagcggacttcgggc

SEQ ID NO: 209707 - DNA, 25 bp, Homo sapien
ctgtggaacgggagagatagtcaca

SEQ ID NO: 209708 - DNA, 25 bp, Homo sapien
tgtggaacgggagagatagtcacag

SEQ ID NO: 209709 - DNA, 25 bp, Homo sapien
gtggaacgggagagatagtcacagc

SEQ ID NO: 209710 - DNA, 25 bp, Homo sapien
ataacagacactcagcatacgttgg

SEQ ID NO: 209711 - DNA, 25 bp, Homo sapien
cacatgtgaagcacgtgttctctaa

SEQ ID NO: 209712 - DNA, 25 bp, Homo sapien
ggttgttggttagagtagaaacaca

SEQ ID NO: 209713 - DNA, 25 bp, Homo sapien
cataaaatactcctatctgaaacca

SEQ ID NO: 209714 - DNA, 25 bp, Homo sapien
ctggagtaacatataatcattgatt

SEQ ID NO: 209715 - DNA, 25 bp, Homo sapien
ccaatactactgatggtcaccgtta

SEQ ID NO: 209716 - DNA, 25 bp, Homo sapien
agaaagataggaattccccttccag

SEQ ID NO: 209717 - DNA, 25 bp, Homo sapien
ttacaccaaaaaccaatactactga

SEQ ID NO: 209718 - DNA, 25 bp, Homo sapien
tgagaacattttacgagctaggacc

SEQ ID NO: 209719 - DNA, 25 bp, Homo sapien
cacaactgtgtgtccaggatgcaaa

SEQ ID NO: 209720 - DNA, 25 bp, Homo sapien
tattctctactgtaggacacaggtc

SEQ ID NO: 209721 - DNA, 25 bp, Homo sapien
gtttcccttaggtcacacaactgtg

SEQ ID NO: 209722 - DNA, 25 bp, Homo sapien
ggaagtcgtgcagcagtttcacacc

SEQ ID NO: 209723 - DNA, 25 bp, Homo sapien
gtgaaaactcggatagatgaatggg

SEQ ID NO: 209724 - DNA, 25 bp, Homo sapien
tcctggactccgtgaaaactcggat

SEQ ID NO: 209725 - DNA, 25 bp, Homo sapien
gaatgggtgaagtaggaagtcgtgc

SEQ ID NO: 209726 - DNA, 25 bp, Homo sapien
tcacagagcgtttgccatggagaac

SEQ ID NO: 209727 - DNA, 25 bp, Homo sapien
cagagcgtttgccatggagaaccat

SEQ ID NO: 209728 - DNA, 25 bp, Homo sapien
cacagagcgtttgccatggagaacc

SEQ ID NO: 209729 - DNA, 25 bp, Homo sapien
acagagcgtttgccatggagaacca

SEQ ID NO: 209730 - DNA, 25 bp, Homo sapien
ctgacatctgccagtgcatttgccc

SEQ ID NO: 209731 - DNA, 25 bp, Homo sapien
agtgactgacatctgccagtgcatt

SEQ ID NO: 209732 - DNA, 25 bp, Homo sapien
aagtgactgacatctgccagtgcat

SEQ ID NO: 209733 - DNA, 25 bp, Homo sapien
gacatctgccagtgcatttgcccac

SEQ ID NO: 209734 - DNA, 25 bp, Homo sapien
tacgaagtacaccttgagctgtcat

SEQ ID NO: 209735 - DNA, 25 bp, Homo sapien
ccggcagaggccctacgaagtacac

SEQ ID NO: 209736 - DNA, 25 bp, Homo sapien
gaggccctacgaagtacaccttgag

SEQ ID NO: 209737 - DNA, 25 bp, Homo sapien
aaacacacagcaaagccggcagagg

SEQ ID NO: 209738 - DNA, 25 bp, Homo sapien
tattaatatagtaggaattcatcaa

SEQ ID NO: 209739 - DNA, 25 bp, Homo sapien
gttattaatatagtaggaattcatc

SEQ ID NO: 209740 - DNA, 25 bp, Homo sapien
taatatagtaggaattcatcaaaag

SEQ ID NO: 209741 - DNA, 25 bp, Homo sapien
ttagttattaatatagtaggaattc

SEQ ID NO: 209742 - DNA, 25 bp, Homo sapien
ctcggcttttagctcctctctccca

SEQ ID NO: 209743 - DNA, 25 bp, Homo sapien
tcggcttttagctcctctctcccat

SEQ ID NO: 209744 - DNA, 25 bp, Homo sapien
cggcttttagctcctctctcccatc

SEQ ID NO: 209745 - DNA, 25 bp, Homo sapien
ctctatcctcagttttagcagctgg

SEQ ID NO: 209746 - DNA, 25 bp, Homo sapien
cctcagttttagcagctggaactct

SEQ ID NO: 209747 - DNA, 25 bp, Homo sapien
cagttttagcagctggaactctcat

SEQ ID NO: 209748 - DNA, 25 bp, Homo sapien
tctatcctcagttttagcagctgga

SEQ ID NO: 209749 - DNA, 25 bp, Homo sapien
tagagggagcacaaaatagtagcag

SEQ ID NO: 209750 - DNA, 25 bp, Homo sapien
ttatatcttgcaccttagagggagc

SEQ ID NO: 209751 - DNA, 25 bp, Homo sapien
cacagtacaggctaactggcttcca

SEQ ID NO: 209752 - DNA, 25 bp, Homo sapien
tactgatgcaccctaaatacctaga

SEQ ID NO: 209753 - DNA, 25 bp, Homo sapien
tccgttccagattgcgagtttccta

SEQ ID NO: 209754 - DNA, 25 bp, Homo sapien
ttgcagcttccgttccagattgcga

SEQ ID NO: 209755 - DNA, 25 bp, Homo sapien
gattgcgagtttcctaaaggactgt

SEQ ID NO: 209756 - DNA, 25 bp, Homo sapien
ccagattgcgagtttcctaaaggac

SEQ ID NO: 209757 - DNA, 25 bp, Homo sapien
taggtcacagtacgtcagtgcccgg

SEQ ID NO: 209758 - DNA, 25 bp, Homo sapien
tccaggactttgagcaaggcttccc

SEQ ID NO: 209759 - DNA, 25 bp, Homo sapien
cccgcttgatgatgtgtaggtcaca

SEQ ID NO: 209760 - DNA, 25 bp, Homo sapien
cacatgcatgggcaagggtggtttc

SEQ ID NO: 209761 - DNA, 25 bp, Homo sapien
tttgctactacattaggaaagttca

SEQ ID NO: 209762 - DNA, 25 bp, Homo sapien
gctactacattaggaaagttcacag

SEQ ID NO: 209763 - DNA, 25 bp, Homo sapien
ctacgcatttgctactacattagga

SEQ ID NO: 209764 - DNA, 25 bp, Homo sapien
cgcatttgctactacattaggaaag

SEQ ID NO: 209765 - DNA, 25 bp, Homo sapien
agcatggtaaatgaggtccccggga

SEQ ID NO: 209766 - DNA, 25 bp, Homo sapien
tccagcatggtaaatgaggtccccg

SEQ ID NO: 209767 - DNA, 25 bp, Homo sapien
tcatcctggatgacttccaaggatc

SEQ ID NO: 209768 - DNA, 25 bp, Homo sapien
ctggatgacttccaaggatcctgac

SEQ ID NO: 209769 - DNA, 25 bp, Homo sapien
aaccttccggtttagatgaacacag

SEQ ID NO: 209770 - DNA, 25 bp, Homo sapien
tgaacacagatatcagctctcatgt

SEQ ID NO: 209771 - DNA, 25 bp, Homo sapien
ggccaatcgaaaagcaggatgttca

SEQ ID NO: 209772 - DNA, 25 bp, Homo sapien
cccatcgctggccaatcgaaaagca

SEQ ID NO: 209773 - DNA, 25 bp, Homo sapien
tatttaatcagaacatcgtggagca

SEQ ID NO: 209774 - DNA, 25 bp, Homo sapien
catcgtggagcaagatgtgattgcg

SEQ ID NO: 209775 - DNA, 25 bp, Homo sapien
gatgtgattgcggaagttaatacca

SEQ ID NO: 209776 - DNA, 25 bp, Homo sapien
gattgcggaagttaataccacccat

SEQ ID NO: 209777 - DNA, 25 bp, Homo sapien
taccgtcctccaaccatgccttcca

SEQ ID NO: 209778 - DNA, 25 bp, Homo sapien
ctttctcaccacctaagcttgccat

SEQ ID NO: 209779 - DNA, 25 bp, Homo sapien
gtcctccaaccatgccttccaataa

SEQ ID NO: 209780 - DNA, 25 bp, Homo sapien
cctttctcaccacctaagcttgcca

SEQ ID NO: 209781 - DNA, 25 bp, Homo sapien
taaataataacaataataacccata

SEQ ID NO: 209782 - DNA, 25 bp, Homo sapien
ctaaataataacaataataacccat

SEQ ID NO: 209783 - DNA, 25 bp, Homo sapien
tccatgactcgctcactaaggcctt

SEQ ID NO: 209784 - DNA, 25 bp, Homo sapien
ggaagtcccgtacattattcagcat

SEQ ID NO: 209785 - DNA, 25 bp, Homo sapien
cctgatagagttttaggaagtcccg

SEQ ID NO: 209786 - DNA, 25 bp, Homo sapien
caatgccttttgacatggaccatgt

SEQ ID NO: 209787 - DNA, 25 bp, Homo sapien
ggcttcgctggatgctcttttgcag

SEQ ID NO: 209788 - DNA, 25 bp, Homo sapien
tccatctctctcataatggctcctg

SEQ ID NO: 209789 - DNA, 25 bp, Homo sapien
tccggttggccttagcacaaagtgg

SEQ ID NO: 209790 - DNA, 25 bp, Homo sapien
aacatttgaaatggctccggttggc

SEQ ID NO: 209791 - DNA, 25 bp, Homo sapien
ggcagagccccgtcatgtggcccca

SEQ ID NO: 209792 - DNA, 25 bp, Homo sapien
tggcagagccccgtcatgtggcccc

SEQ ID NO: 209793 - DNA, 25 bp, Homo sapien
gcagagccccgtcatgtggccccaa

SEQ ID NO: 209794 - DNA, 25 bp, Homo sapien
tgttatctacatgttatccctcccc

SEQ ID NO: 209795 - DNA, 25 bp, Homo sapien
caacctgttatctacatgttatccc

SEQ ID NO: 209796 - DNA, 25 bp, Homo sapien
cctgttatctacatgttatccctcc

SEQ ID NO: 209797 - DNA, 25 bp, Homo sapien
catcaacctgttatctacatgttat

SEQ ID NO: 209798 - DNA, 25 bp, Homo sapien
cagccagccgctgataaatggatca

SEQ ID NO: 209799 - DNA, 25 bp, Homo sapien
acaaaggtcccgcatagagtgccag

SEQ ID NO: 209800 - DNA, 25 bp, Homo sapien
ggttgaataatgagcaatcactgta

SEQ ID NO: 209801 - DNA, 25 bp, Homo sapien
aataagtcctggatgtttgttgcca

SEQ ID NO: 209802 - DNA, 25 bp, Homo sapien
gctctttgagaaattgttatactgc

SEQ ID NO: 209803 - DNA, 25 bp, Homo sapien
ctttgagaaattgttatactgcttt

SEQ ID NO: 209804 - DNA, 25 bp, Homo sapien
tgagaaattgttatactgctttcaa

SEQ ID NO: 209805 - DNA, 25 bp, Homo sapien
ttaagctctttgagaaattgttata

SEQ ID NO: 209806 - DNA, 25 bp, Homo sapien
aaatctcagggtgaaaatatgtcaa

SEQ ID NO: 209807 - DNA, 25 bp, Homo sapien
tgtactaccaaatctcagttcattc

SEQ ID NO: 209808 - DNA, 25 bp, Homo sapien
gtttctccaagaaagggtaggcaca

SEQ ID NO: 209809 - DNA, 25 bp, Homo sapien
caagacccaatacagcgactgtcca

SEQ ID NO: 209810 - DNA, 25 bp, Homo sapien
agactgaactggaatccgattactc

SEQ ID NO: 209811 - DNA, 25 bp, Homo sapien
tggaatccgattactccaagaagga

SEQ ID NO: 209812 - DNA, 25 bp, Homo sapien
catattaacagtcaagaattcagtt

SEQ ID NO: 209813 - DNA, 25 bp, Homo sapien
gatcatattaacagtcaagaattca

SEQ ID NO: 209814 - DNA, 25 bp, Homo sapien
acttttcaagaggagtgtggtaaca

SEQ ID NO: 209815 - DNA, 25 bp, Homo sapien
tcacttttcaagaggagtgtggtaa

SEQ ID NO: 209816 - DNA, 25 bp, Homo sapien
cttttcaagaggagtgtggtaacag

SEQ ID NO: 209817 - DNA, 25 bp, Homo sapien
cacttttcaagaggagtgtggtaac

SEQ ID NO: 209818 - DNA, 25 bp, Homo sapien
tgccaagcggcagcccatgctccag

SEQ ID NO: 209819 - DNA, 25 bp, Homo sapien
tattttctcttcattgagacactgt

SEQ ID NO: 209820 - DNA, 25 bp, Homo sapien
gacactgtgccagtttaaaactcag

SEQ ID NO: 209821 - DNA, 25 bp, Homo sapien
ccaatctggtacagagatgaggaac

SEQ ID NO: 209822 - DNA, 25 bp, Homo sapien
gaggacaaaatggcagcttcaaggg

SEQ ID NO: 209823 - DNA, 25 bp, Homo sapien
cagcaggatttctaatggtggacca

SEQ ID NO: 209824 - DNA, 25 bp, Homo sapien
aatatctgagagtcggctggctccc

SEQ ID NO: 209825 - DNA, 25 bp, Homo sapien
taatggtggaccattgagcaaaata

SEQ ID NO: 209826 - DNA, 25 bp, Homo sapien
agctgttcacaaggctgtctagttg

SEQ ID NO: 209827 - DNA, 25 bp, Homo sapien
cacaaggctgtctagttgactccag

SEQ ID NO: 209828 - DNA, 25 bp, Homo sapien
gctgtctagttgactccagccagtg

SEQ ID NO: 209829 - DNA, 25 bp, Homo sapien
tgtctagttgactccagccagtgct

SEQ ID NO: 209830 - DNA, 25 bp, Homo sapien
tccaacttagcattatggtagcaag

SEQ ID NO: 209831 - DNA, 25 bp, Homo sapien
catccaacttagcattatggtagca

SEQ ID NO: 209832 - DNA, 25 bp, Homo sapien
cccacatccaacttagcattatggt

SEQ ID NO: 209833 - DNA, 25 bp, Homo sapien
aacttagcattatggtagcaagagc

SEQ ID NO: 209834 - DNA, 25 bp, Homo sapien
gcattttgctggcacgtacttgatc

SEQ ID NO: 209835 - DNA, 25 bp, Homo sapien
ttttgctggcacgtacttgatcgta

SEQ ID NO: 209836 - DNA, 25 bp, Homo sapien
ggcacgtacttgatcgtagatctaa

SEQ ID NO: 209837 - DNA, 25 bp, Homo sapien
gctggcacgtacttgatcgtagatc

SEQ ID NO: 209838 - DNA, 25 bp, Homo sapien
gattcaaggacagaagatcttcatc

SEQ ID NO: 209839 - DNA, 25 bp, Homo sapien
aagatcttcatcacgaccatcaggg

SEQ ID NO: 209840 - DNA, 25 bp, Homo sapien
gatcttcatcacgaccatcagggac

SEQ ID NO: 209841 - DNA, 25 bp, Homo sapien
agaagatcttcatcacgaccatcag

SEQ ID NO: 209842 - DNA, 25 bp, Homo sapien
tctttatagcagcatataaagggga

SEQ ID NO: 209843 - DNA, 25 bp, Homo sapien
actaccatcagagaatactacaaac

SEQ ID NO: 209844 - DNA, 25 bp, Homo sapien
caccaccgatcccacagaaatacaa

SEQ ID NO: 209845 - DNA, 25 bp, Homo sapien
ttatagcagcatataaaggggatat

SEQ ID NO: 209846 - DNA, 25 bp, Homo sapien
tcacacattattatgtcctgaagag

SEQ ID NO: 209847 - DNA, 25 bp, Homo sapien
gatgctggtcctggttccttcaaga

SEQ ID NO: 209848 - DNA, 25 bp, Homo sapien
aaatctatggaatgtgcgaaacgcc

SEQ ID NO: 209849 - DNA, 25 bp, Homo sapien
tgctgggtacacacattaatatgtt

SEQ ID NO: 209850 - DNA, 25 bp, Homo sapien
gagattgtagccaggaaaattgcca

SEQ ID NO: 209851 - DNA, 25 bp, Homo sapien
tgagattgtagccaggaaaattgcc

SEQ ID NO: 209852 - DNA, 25 bp, Homo sapien
ggcttgtcatggtaaagtagagaga

SEQ ID NO: 209853 - DNA, 25 bp, Homo sapien
tccacatctgtggtaggagctatgt

SEQ ID NO: 209854 - DNA, 25 bp, Homo sapien
tcatcatagccaccgaaaacatctt

SEQ ID NO: 209855 - DNA, 25 bp, Homo sapien
tcctatggttgtaaggcttgtcatg

SEQ ID NO: 209856 - DNA, 25 bp, Homo sapien
tcaaagccagctggtagagccaact

SEQ ID NO: 209857 - DNA, 25 bp, Homo sapien
tatggagtcccaatgctcaaagcca

SEQ ID NO: 209858 - DNA, 25 bp, Homo sapien
ccagcactggtattgtagcgatatg

SEQ ID NO: 209859 - DNA, 25 bp, Homo sapien
tcaatgacctcgtagtctccgatgc

SEQ ID NO: 209860 - DNA, 25 bp, Homo sapien
acacggcccagtcgtaagagacgca

SEQ ID NO: 209861 - DNA, 25 bp, Homo sapien
gtaagagacgcaccacttttaaaga

SEQ ID NO: 209862 - DNA, 25 bp, Homo sapien
agccacacggcccagtcgtaagaga

SEQ ID NO: 209863 - DNA, 25 bp, Homo sapien
cccagtcgtaagagacgcaccactt

SEQ ID NO: 209864 - DNA, 25 bp, Homo sapien
attcctccagcactgataccataat

SEQ ID NO: 209865 - DNA, 25 bp, Homo sapien
ttaatagctgcttaattttcacagg

SEQ ID NO: 209866 - DNA, 25 bp, Homo sapien
tcacaggtagtaccatatcaggcaa

SEQ ID NO: 209867 - DNA, 25 bp, Homo sapien
gcactgataccataatcaataatta

SEQ ID NO: 209868 - DNA, 25 bp, Homo sapien
catccttatgagcttagggtcagaa

SEQ ID NO: 209869 - DNA, 25 bp, Homo sapien
gaaggatatctgatcccagctgaag

SEQ ID NO: 209870 - DNA, 25 bp, Homo sapien
ggtaaacaagacagcagatcgatca

SEQ ID NO: 209871 - DNA, 25 bp, Homo sapien
aataatgtgtggtggcgtctttggc

SEQ ID NO: 209872 - DNA, 25 bp, Homo sapien
tgtcaaagcccgtgtcaatcgggca

SEQ ID NO: 209873 - DNA, 25 bp, Homo sapien
tcagctagtcttgaatgtttatgga

SEQ ID NO: 209874 - DNA, 25 bp, Homo sapien
tgttttattcattggcgtgagctgc

SEQ ID NO: 209875 - DNA, 25 bp, Homo sapien
gctgctgcaaaacacttcggctatt

SEQ ID NO: 209876 - DNA, 25 bp, Homo sapien
caggaacaagaccaccttttcatgt

SEQ ID NO: 209877 - DNA, 25 bp, Homo sapien
gttcatttcttattggtgcaatttg

SEQ ID NO: 209878 - DNA, 25 bp, Homo sapien
ttggctgtttgaacaacgtaatatc

SEQ ID NO: 209879 - DNA, 25 bp, Homo sapien
ttgaacaacgtaatatccttgaaag

SEQ ID NO: 209880 - DNA, 25 bp, Homo sapien
cagaaagaagttggggaaaggacat

SEQ ID NO: 209881 - DNA, 25 bp, Homo sapien
acttcaaagcagtttgattcgtagt

SEQ ID NO: 209882 - DNA, 25 bp, Homo sapien
gattcgtagttgtcaaaagtttgcc

SEQ ID NO: 209883 - DNA, 25 bp, Homo sapien
tggtcttcttgtcagtcaattcccc

SEQ ID NO: 209884 - DNA, 25 bp, Homo sapien
gcctgactttctcaatggtcttctt

SEQ ID NO: 209885 - DNA, 25 bp, Homo sapien
tgtcactgtgtcttaaagggagatg

SEQ ID NO: 209886 - DNA, 25 bp, Homo sapien
gccacttttcttgtcacacaactga

SEQ ID NO: 209887 - DNA, 25 bp, Homo sapien
tgctttccaaaaggcagtgtgtcac

SEQ ID NO: 209888 - DNA, 25 bp, Homo sapien
tgaagcaaacgctcactcagaacct

SEQ ID NO: 209889 - DNA, 25 bp, Homo sapien
taggcatctggcagttatcgttcat

SEQ ID NO: 209890 - DNA, 25 bp, Homo sapien
gttccacaggataacgtctaccatg

SEQ ID NO: 209891 - DNA, 25 bp, Homo sapien
tgcctggaactctctatggacctgt

SEQ ID NO: 209892 - DNA, 25 bp, Homo sapien
cgtctaccatgaaactcagcttttt

SEQ ID NO: 209893 - DNA, 25 bp, Homo sapien
gaactctctatggacctgttccaca

SEQ ID NO: 209894 - DNA, 25 bp, Homo sapien
accgtcattactataaactacaggc

SEQ ID NO: 209895 - DNA, 25 bp, Homo sapien
tccagagagtttacaaaaaccgtca

SEQ ID NO: 209896 - DNA, 25 bp, Homo sapien
gacgtcagctcgatgatatccagag

SEQ ID NO: 209897 - DNA, 25 bp, Homo sapien
aaaccgtcattactataaactacag

SEQ ID NO: 209898 - DNA, 25 bp, Homo sapien
aaaccgtagttgagtaaagcagaca

SEQ ID NO: 209899 - DNA, 25 bp, Homo sapien
tataaaaccgtagttgagtaaagca

SEQ ID NO: 209900 - DNA, 25 bp, Homo sapien
aaccgtagttgagtaaagcagacat

SEQ ID NO: 209901 - DNA, 25 bp, Homo sapien
taaaaccgtagttgagtaaagcaga

SEQ ID NO: 209902 - DNA, 25 bp, Homo sapien
gctacagtggttcaaaatgcatgag

SEQ ID NO: 209903 - DNA, 25 bp, Homo sapien
cactgtaggagtttgaaatatgcaa

SEQ ID NO: 209904 - DNA, 25 bp, Homo sapien
tcattttttcatccagctacagtgg

SEQ ID NO: 209905 - DNA, 25 bp, Homo sapien
gacatacttcgtaccttccacaatg

SEQ ID NO: 209906 - DNA, 25 bp, Homo sapien
tggagcgcctgacgatgttctccaa

SEQ ID NO: 209907 - DNA, 25 bp, Homo sapien
agcgcctgacgatgttctccaaaaa

SEQ ID NO: 209908 - DNA, 25 bp, Homo sapien
gagcgcctgacgatgttctccaaaa

SEQ ID NO: 209909 - DNA, 25 bp, Homo sapien
cactggagcgcctgacgatgttctc

SEQ ID NO: 209910 - DNA, 25 bp, Homo sapien
agcccgacccggatgagcagctctg

SEQ ID NO: 209911 - DNA, 25 bp, Homo sapien
tgcccagactgtggcggtgccgcac

SEQ ID NO: 209912 - DNA, 25 bp, Homo sapien
agagaagattgagccgaaagaagag

SEQ ID NO: 209913 - DNA, 25 bp, Homo sapien
gcagttcatggtagtagcgctcccc

SEQ ID NO: 209914 - DNA, 25 bp, Homo sapien
tggggagcgcaagcgggaactcaag

SEQ ID NO: 209915 - DNA, 25 bp, Homo sapien
gagcgcaagcgggaactcaagcccc

SEQ ID NO: 209916 - DNA, 25 bp, Homo sapien
ctggggagcgcaagcgggaactcaa

SEQ ID NO: 209917 - DNA, 25 bp, Homo sapien
gggagcgcaagcgggaactcaagcc

SEQ ID NO: 209918 - DNA, 25 bp, Homo sapien
tccccggagatcgaggcaagcgatc

SEQ ID NO: 209919 - DNA, 25 bp, Homo sapien
ggctgaacagcgtagcccaacttct

SEQ ID NO: 209920 - DNA, 25 bp, Homo sapien
aagcgatcgctgtccaatcgggccg

SEQ ID NO: 209921 - DNA, 25 bp, Homo sapien
tggtggttgctcctctccccggaga

SEQ ID NO: 209922 - DNA, 25 bp, Homo sapien
gcaaagttgcgggaaaggttgcact

SEQ ID NO: 209923 - DNA, 25 bp, Homo sapien
gcgcgagccctgaagtccgagcgca

SEQ ID NO: 209924 - DNA, 25 bp, Homo sapien
tgaataattcacacccgagagaggg

SEQ ID NO: 209925 - DNA, 25 bp, Homo sapien
cagtgttagcgatggaaaaacggta

SEQ ID NO: 209926 - DNA, 25 bp, Homo sapien
cgattgtgcaaacagggtcaaagag

SEQ ID NO: 209927 - DNA, 25 bp, Homo sapien
cctgtcgagaaaggacgattgtgca

SEQ ID NO: 209928 - DNA, 25 bp, Homo sapien
tggatgggtgcgtccccttttgctg

SEQ ID NO: 209929 - DNA, 25 bp, Homo sapien
cgaagtcttcagtgttgaaggcgaa

SEQ ID NO: 209930 - DNA, 25 bp, Homo sapien
catccctccatcactgatctggatc

SEQ ID NO: 209931 - DNA, 25 bp, Homo sapien
tccctccatcactgatctggatcct

SEQ ID NO: 209932 - DNA, 25 bp, Homo sapien
ccatcactgatctggatcctattca

SEQ ID NO: 209933 - DNA, 25 bp, Homo sapien
cctccatcactgatctggatcctat

SEQ ID NO: 209934 - DNA, 25 bp, Homo sapien
tctttcttcctccaccaatgtcctg

SEQ ID NO: 209935 - DNA, 25 bp, Homo sapien
tgtctctttcttcctccaccaatgt

SEQ ID NO: 209936 - DNA, 25 bp, Homo sapien
tctctttcttcctccaccaatgtcc

SEQ ID NO: 209937 - DNA, 25 bp, Homo sapien
ttcttcctccaccaatgtcctgcat

SEQ ID NO: 209938 - DNA, 25 bp, Homo sapien
gttggattttgttggtgtctttcat

SEQ ID NO: 209939 - DNA, 25 bp, Homo sapien
tgttggattttgttggtgtctttca

SEQ ID NO: 209940 - DNA, 25 bp, Homo sapien
gtgttggattttgttggtgtctttc

SEQ ID NO: 209941 - DNA, 25 bp, Homo sapien
caaaaattcagtcttcggccgggcg

SEQ ID NO: 209942 - DNA, 25 bp, Homo sapien
tcagggaggcccaacaggcttaatc

SEQ ID NO: 209943 - DNA, 25 bp, Homo sapien
tatttcgctgacatggcctccaaga

SEQ ID NO: 209944 - DNA, 25 bp, Homo sapien
caagtcactcccgatggctctggta

SEQ ID NO: 209945 - DNA, 25 bp, Homo sapien
gagagattccatccgcatagactag

SEQ ID NO: 209946 - DNA, 25 bp, Homo sapien
ggtctggctcacccgctatgagaat

SEQ ID NO: 209947 - DNA, 25 bp, Homo sapien
ctcacccgctatgagaatgggtggc

SEQ ID NO: 209948 - DNA, 25 bp, Homo sapien
tgagctgtgctcctggattagcaga

SEQ ID NO: 209949 - DNA, 25 bp, Homo sapien
ctcctggattagcagatgtggtctg

SEQ ID NO: 209950 - DNA, 25 bp, Homo sapien
agtagtcatggcatcccccttcaga

SEQ ID NO: 209951 - DNA, 25 bp, Homo sapien
aggctctgagaagatttcggtgtga

SEQ ID NO: 209952 - DNA, 25 bp, Homo sapien
cataatgggcgcagcctggtgttgt

SEQ ID NO: 209953 - DNA, 25 bp, Homo sapien
agtggattcactacataatgggcgc

SEQ ID NO: 209954 - DNA, 25 bp, Homo sapien
gatgcaagtcgcatgtgaagatgct

SEQ ID NO: 209955 - DNA, 25 bp, Homo sapien
cagaattcatagatgcaagtcgcat

SEQ ID NO: 209956 - DNA, 25 bp, Homo sapien
aattcatagatgcaagtcgcatgtg

SEQ ID NO: 209957 - DNA, 25 bp, Homo sapien
catagatgcaagtcgcatgtgaaga

SEQ ID NO: 209958 - DNA, 25 bp, Homo sapien
tcgggactctaaattatcaaaaggc

SEQ ID NO: 209959 - DNA, 25 bp, Homo sapien
aaaggcatatcaaaactattactgg

SEQ ID NO: 209960 - DNA, 25 bp, Homo sapien
ggtccgggatgtgatacattccaca

SEQ ID NO: 209961 - DNA, 25 bp, Homo sapien
actaatatgccaaactaagttctcg

SEQ ID NO: 209962 - DNA, 25 bp, Homo sapien
ctgcttcaggggctaagacaatcat

SEQ ID NO: 209963 - DNA, 25 bp, Homo sapien
ctctgcttcaggggctaagacaatc

SEQ ID NO: 209964 - DNA, 25 bp, Homo sapien
tctgcttcaggggctaagacaatca

SEQ ID NO: 209965 - DNA, 25 bp, Homo sapien
gaaccgggatgaattcttctccgac

SEQ ID NO: 209966 - DNA, 25 bp, Homo sapien
gactccaggtgtgagtgagctcagc

SEQ ID NO: 209967 - DNA, 25 bp, Homo sapien
tccatcgaaaggcaaagcctgacat

SEQ ID NO: 209968 - DNA, 25 bp, Homo sapien
gaccctcatagcacttgacacatgg

SEQ ID NO: 209969 - DNA, 25 bp, Homo sapien
tgacatagaacagggactttggccc

SEQ ID NO: 209970 - DNA, 25 bp, Homo sapien
ggaatcacccaggtaggcacttaat

SEQ ID NO: 209971 - DNA, 25 bp, Homo sapien
tgtgggagccatatcagtggatacc

SEQ ID NO: 209972 - DNA, 25 bp, Homo sapien
taaggaatcctgtgcccaatgatgt

SEQ ID NO: 209973 - DNA, 25 bp, Homo sapien
ggtggccattgcagctttgctacct

SEQ ID NO: 209974 - DNA, 25 bp, Homo sapien
gtggccattgcagctttgctacctg

SEQ ID NO: 209975 - DNA, 25 bp, Homo sapien
tggccattgcagctttgctacctgt

SEQ ID NO: 209976 - DNA, 25 bp, Homo sapien
cttgtctcttacagctgcatgtcgc

SEQ ID NO: 209977 - DNA, 25 bp, Homo sapien
ctacgctgacaccagaagcccagtg

SEQ ID NO: 209978 - DNA, 25 bp, Homo sapien
tgcatgtcgccacctggtccctgtt

SEQ ID NO: 209979 - DNA, 25 bp, Homo sapien
ggtccctgttgtcctagatccctgt

SEQ ID NO: 209980 - DNA, 25 bp, Homo sapien
ccaactggcgagttctctggtctta

SEQ ID NO: 209981 - DNA, 25 bp, Homo sapien
aagaaatggccactaaaccctccag

SEQ ID NO: 209982 - DNA, 25 bp, Homo sapien
tggcgagttctctggtcttatgtaa

SEQ ID NO: 209983 - DNA, 25 bp, Homo sapien
aatggccactaaaccctccagatga

SEQ ID NO: 209984 - DNA, 25 bp, Homo sapien
tcctcagtactctgccaggacagtt

SEQ ID NO: 209985 - DNA, 25 bp, Homo sapien
tgttcctcagtactctgccaggaca

SEQ ID NO: 209986 - DNA, 25 bp, Homo sapien
tcagtactctgccaggacagttctg

SEQ ID NO: 209987 - DNA, 25 bp, Homo sapien
gttcctcagtactctgccaggacag

SEQ ID NO: 209988 - DNA, 25 bp, Homo sapien
taagactcttaagggagctagcgaa

SEQ ID NO: 209989 - DNA, 25 bp, Homo sapien
ccatgggtgtggtcgaaattaaaca

SEQ ID NO: 209990 - DNA, 25 bp, Homo sapien
gccagccatgcagttttacccctaa

SEQ ID NO: 209991 - DNA, 25 bp, Homo sapien
gaagcttgcagctggaattcctctg

SEQ ID NO: 209992 - DNA, 25 bp, Homo sapien
tcagatggtctcacactccgtggtg

SEQ ID NO: 209993 - DNA, 25 bp, Homo sapien
gataggtgtagaaggggtcgactcc

SEQ ID NO: 209994 - DNA, 25 bp, Homo sapien
ctcccggggcacagttgggcagctt

SEQ ID NO: 209995 - DNA, 25 bp, Homo sapien
ggatggccacgggataggtgtagaa

SEQ ID NO: 209996 - DNA, 25 bp, Homo sapien
ctcgatgatgggcttcaatataggg

SEQ ID NO: 209997 - DNA, 25 bp, Homo sapien
cctgtttggtctcgttgtaggtaca

SEQ ID NO: 209998 - DNA, 25 bp, Homo sapien
tcacctgtttggtctcgttgtaggt

SEQ ID NO: 209999 - DNA, 25 bp, Homo sapien
tgtaggtacagactcgatgatgggc

SEQ ID NO: 210000 - DNA, 25 bp, Homo sapien
aaaaggcccagaaagggagctggca

SEQ ID NO: 210001 - DNA, 25 bp, Homo sapien
aaggcccagaaagggagctggcact

SEQ ID NO: 210002 - DNA, 25 bp, Homo sapien
caaaaaaggcccagaaagggagctg

SEQ ID NO: 210003 - DNA, 25 bp, Homo sapien
ggcccagaaagggagctggcactgc

SEQ ID NO: 210004 - DNA, 25 bp, Homo sapien
ggatatgagggaaggaacaaaatga

SEQ ID NO: 210005 - DNA, 25 bp, Homo sapien
gatccataagggctatttgataaaa

SEQ ID NO: 210006 - DNA, 25 bp, Homo sapien
agataggcatcaggaataaatatga

SEQ ID NO: 210007 - DNA, 25 bp, Homo sapien
caaaatgagatccataagggctatt

SEQ ID NO: 210008 - DNA, 25 bp, Homo sapien
caaggccagagtaagaaaatgtgct

SEQ ID NO: 210009 - DNA, 25 bp, Homo sapien
aggcatccgtggtgatccgaagccc

SEQ ID NO: 210010 - DNA, 25 bp, Homo sapien
atccgtggtgatccgaagcccctgc

SEQ ID NO: 210011 - DNA, 25 bp, Homo sapien
gcaggcatccgtggtgatccgaagc

SEQ ID NO: 210012 - DNA, 25 bp, Homo sapien
cgtggtgatccgaagcccctgcagc

SEQ ID NO: 210013 - DNA, 25 bp, Homo sapien
cacagcccacaaaggtgcgcaggtt

SEQ ID NO: 210014 - DNA, 25 bp, Homo sapien
accgaggacacagccatagccagcc

SEQ ID NO: 210015 - DNA, 25 bp, Homo sapien
gcccacaaaggtgcgcaggttccca

SEQ ID NO: 210016 - DNA, 25 bp, Homo sapien
acagcccacaaaggtgcgcaggttc

SEQ ID NO: 210017 - DNA, 25 bp, Homo sapien
atgaatggtagaagtttgccctggg

SEQ ID NO: 210018 - DNA, 25 bp, Homo sapien
tagagctgaaacttgcactaagatt

SEQ ID NO: 210019 - DNA, 25 bp, Homo sapien
agagctgaaacttgcactaagattt

SEQ ID NO: 210020 - DNA, 25 bp, Homo sapien
tggactatcccacgcataggaggta

SEQ ID NO: 210021 - DNA, 25 bp, Homo sapien
tcagcgtcattctaaaccacagggt

SEQ ID NO: 210022 - DNA, 25 bp, Homo sapien
gcccaagatgaaggagcataaccct

SEQ ID NO: 210023 - DNA, 25 bp, Homo sapien
tcacatagttgttctaggcccacag

SEQ ID NO: 210024 - DNA, 25 bp, Homo sapien
gctgactcttacgtacacactgtga

SEQ ID NO: 210025 - DNA, 25 bp, Homo sapien
cagttgtttcgtctttggcagcctc

SEQ ID NO: 210026 - DNA, 25 bp, Homo sapien
caaagttaccgagatgacaatatcc

SEQ ID NO: 210027 - DNA, 25 bp, Homo sapien
gaacacagatcagctctataccatg

SEQ ID NO: 210028 - DNA, 25 bp, Homo sapien
ggttactggaaagatgttcacccca

SEQ ID NO: 210029 - DNA, 25 bp, Homo sapien
tacagtcaagttatccagaggagga

SEQ ID NO: 210030 - DNA, 25 bp, Homo sapien
gctagtgataaataaggaactcccg

SEQ ID NO: 210031 - DNA, 25 bp, Homo sapien
tatatgcaactaatactggtcaggt

SEQ ID NO: 210032 - DNA, 25 bp, Homo sapien
ctctttaactccagatcctccaatt

SEQ ID NO: 210033 - DNA, 25 bp, Homo sapien
tctttaactccagatcctccaattt

SEQ ID NO: 210034 - DNA, 25 bp, Homo sapien
ctttaactccagatcctccaatttt

SEQ ID NO: 210035 - DNA, 25 bp, Homo sapien
ttgtatgtggctgtcagctcgtcaa

SEQ ID NO: 210036 - DNA, 25 bp, Homo sapien
cttgtatgtggctgtcagctcgtca

SEQ ID NO: 210037 - DNA, 25 bp, Homo sapien
tccaataatagagtgctctttctgc

SEQ ID NO: 210038 - DNA, 25 bp, Homo sapien
ccaataatagagtgctctttctgcc

SEQ ID NO: 210039 - DNA, 25 bp, Homo sapien
gaaggatgacgttagagttttcttc

SEQ ID NO: 210040 - DNA, 25 bp, Homo sapien
atgggaaggatgacgttagagtttt

SEQ ID NO: 210041 - DNA, 25 bp, Homo sapien
gcaaatgacgtaactgacacagata

SEQ ID NO: 210042 - DNA, 25 bp, Homo sapien
taagctcggcttcgaaggatgaagg

SEQ ID NO: 210043 - DNA, 25 bp, Homo sapien
taggcaagtggcatttaagctcggc

SEQ ID NO: 210044 - DNA, 25 bp, Homo sapien
tctttactggcatcctcccgtggtc

SEQ ID NO: 210045 - DNA, 25 bp, Homo sapien
caatctctgccttccagtttcaagc

SEQ ID NO: 210046 - DNA, 25 bp, Homo sapien
aatctctgccttccagtttcaagcg

SEQ ID NO: 210047 - DNA, 25 bp, Homo sapien
aaacatcctgctgaaaactgaaaaa

SEQ ID NO: 210048 - DNA, 25 bp, Homo sapien
tgagcactaaaggccctgagtggta

SEQ ID NO: 210049 - DNA, 25 bp, Homo sapien
tgttccttgacctccataatgccaa

SEQ ID NO: 210050 - DNA, 25 bp, Homo sapien
acttgttccttgacctccataatgc

SEQ ID NO: 210051 - DNA, 25 bp, Homo sapien
ctgaaaatgggggctagatacacac

SEQ ID NO: 210052 - DNA, 25 bp, Homo sapien
cttccagttccccaaggaacatgac

SEQ ID NO: 210053 - DNA, 25 bp, Homo sapien
gtgaaggttcaatcacatccaatat

SEQ ID NO: 210054 - DNA, 25 bp, Homo sapien
aacaaattgtgaaggttcaatcaca

SEQ ID NO: 210055 - DNA, 25 bp, Homo sapien
gattttaacaaattgtgaaggttca

SEQ ID NO: 210056 - DNA, 25 bp, Homo sapien
ttttgactacatgttttaggccaaa

SEQ ID NO: 210057 - DNA, 25 bp, Homo sapien
ctttttgactacatgttttaggcca

SEQ ID NO: 210058 - DNA, 25 bp, Homo sapien
tctttttgactacatgttttaggcc

SEQ ID NO: 210059 - DNA, 25 bp, Homo sapien
tttttgactacatgttttaggccaa

SEQ ID NO: 210060 - DNA, 25 bp, Homo sapien
tggttctgtgagtgaaggatctttc

SEQ ID NO: 210061 - DNA, 25 bp, Homo sapien
ggttctgtgagtgaaggatctttct

SEQ ID NO: 210062 - DNA, 25 bp, Homo sapien
ttctccagaaactgtactatacaat

SEQ ID NO: 210063 - DNA, 25 bp, Homo sapien
cagaaactgtactatacaatatgcc

SEQ ID NO: 210064 - DNA, 25 bp, Homo sapien
agtgataagctcctgacagtgtgta

SEQ ID NO: 210065 - DNA, 25 bp, Homo sapien
tgccttaagaggtaaagcaaagcca

SEQ ID NO: 210066 - DNA, 25 bp, Homo sapien
gtgataagctcctgacagtgtgtaa

SEQ ID NO: 210067 - DNA, 25 bp, Homo sapien
ttccagcagttcagctacaccattg

SEQ ID NO: 210068 - DNA, 25 bp, Homo sapien
taatatttccagcagttcagctaca

SEQ ID NO: 210069 - DNA, 25 bp, Homo sapien
cagttcagctacaccattgaagtgt

SEQ ID NO: 210070 - DNA, 25 bp, Homo sapien
cctaatatttccagcagttcagcta

SEQ ID NO: 210071 - DNA, 25 bp, Homo sapien
tcttcgctgtcaaatagctccagaa

SEQ ID NO: 210072 - DNA, 25 bp, Homo sapien
aacttgccataaattctgtgtaaga

SEQ ID NO: 210073 - DNA, 25 bp, Homo sapien
ccgttcccgagggtcttcgctgtca

SEQ ID NO: 210074 - DNA, 25 bp, Homo sapien
tgccataaattctgtgtaagactgt

SEQ ID NO: 210075 - DNA, 25 bp, Homo sapien
ctgttgtaaatgaaagacattatag

SEQ ID NO: 210076 - DNA, 25 bp, Homo sapien
tccaggctgaccgatgaagaaatga

SEQ ID NO: 210077 - DNA, 25 bp, Homo sapien
catgaggttgacactgacagcagaa

SEQ ID NO: 210078 - DNA, 25 bp, Homo sapien
catcgtcatcaaaaaggctatccag

SEQ ID NO: 210079 - DNA, 25 bp, Homo sapien
ttaaaagccagccagtgggcgagct

SEQ ID NO: 210080 - DNA, 25 bp, Homo sapien
gatatggtccattaagtgttctgca

SEQ ID NO: 210081 - DNA, 25 bp, Homo sapien
ccagaagatccaatacataatagca

SEQ ID NO: 210082 - DNA, 25 bp, Homo sapien
gaacaaagatccacaccaaagcaca

SEQ ID NO: 210083 - DNA, 25 bp, Homo sapien
ggccttcttaatacccacactggaa

SEQ ID NO: 210084 - DNA, 25 bp, Homo sapien
caaaaatggaacaagctacctgtgt

SEQ ID NO: 210085 - DNA, 25 bp, Homo sapien
aagcactggcttcatagtaagacca

SEQ ID NO: 210086 - DNA, 25 bp, Homo sapien
gatgtgagggctacttctcccttga

SEQ ID NO: 210087 - DNA, 25 bp, Homo sapien
caagaaggcatcacggcatgatgga

SEQ ID NO: 210088 - DNA, 25 bp, Homo sapien
tccaaaccctctcatgttaaagtgt

SEQ ID NO: 210089 - DNA, 25 bp, Homo sapien
gtgaagtattgctcaaggatccgcc

SEQ ID NO: 210090 - DNA, 25 bp, Homo sapien
catgttaaagtgtgagccaggattc

SEQ ID NO: 210091 - DNA, 25 bp, Homo sapien
tcaccagtgtggtaccaaagtactc

SEQ ID NO: 210092 - DNA, 25 bp, Homo sapien
tgaaagcacccaagttccaggtaaa

SEQ ID NO: 210093 - DNA, 25 bp, Homo sapien
atgaaagcacccaagttccaggtaa

SEQ ID NO: 210094 - DNA, 25 bp, Homo sapien
catgaaagcacccaagttccaggta

SEQ ID NO: 210095 - DNA, 25 bp, Homo sapien
ttggcaatgctgggttggaattctt

SEQ ID NO: 210096 - DNA, 25 bp, Homo sapien
tggctttccaaaaatcgtatgaaaa

SEQ ID NO: 210097 - DNA, 25 bp, Homo sapien
caaaaatcgtatgaaaaattcatat

SEQ ID NO: 210098 - DNA, 25 bp, Homo sapien
tttggcaatgctgggttggaattct

SEQ ID NO: 210099 - DNA, 25 bp, Homo sapien
ctgcttctatatccaatctgttgtg

SEQ ID NO: 210100 - DNA, 25 bp, Homo sapien
tcttctttgatgctacactaaattc

SEQ ID NO: 210101 - DNA, 25 bp, Homo sapien
taatatgtggcttaatgtaagacag

SEQ ID NO: 210102 - DNA, 25 bp, Homo sapien
gctgacggagatccagggagatctc

SEQ ID NO: 210103 - DNA, 25 bp, Homo sapien
tgaaaaggtctaaaactatgctgtg

SEQ ID NO: 210104 - DNA, 25 bp, Homo sapien
acatgaatgacctatcatgaaaaga

SEQ ID NO: 210105 - DNA, 25 bp, Homo sapien
gttccagaaaaggaagcgtactgct

SEQ ID NO: 210106 - DNA, 25 bp, Homo sapien
gttaaacttcatgataggtgactat

SEQ ID NO: 210107 - DNA, 25 bp, Homo sapien
cagcattagtaggtcatatttcccc

SEQ ID NO: 210108 - DNA, 25 bp, Homo sapien
gcattagtaggtcatatttcccctt

SEQ ID NO: 210109 - DNA, 25 bp, Homo sapien
tccagcattagtaggtcatatttcc

SEQ ID NO: 210110 - DNA, 25 bp, Homo sapien
tgatccagcattagtaggtcatatt

SEQ ID NO: 210111 - DNA, 25 bp, Homo sapien
ggccacgatgcctcaagggtaggtt

SEQ ID NO: 210112 - DNA, 25 bp, Homo sapien
ttcattgctgtcactaggagggaga

SEQ ID NO: 210113 - DNA, 25 bp, Homo sapien
ggagggagagttctgaatatattgc

SEQ ID NO: 210114 - DNA, 25 bp, Homo sapien
atgcctcaagggtaggttcatcttc

SEQ ID NO: 210115 - DNA, 25 bp, Homo sapien
cctagaagctggattagaggtaccc

SEQ ID NO: 210116 - DNA, 25 bp, Homo sapien
aaaaagcatgtccttaacacctaat

SEQ ID NO: 210117 - DNA, 25 bp, Homo sapien
ttccttgagtcaaaacaatctcctc

SEQ ID NO: 210118 - DNA, 25 bp, Homo sapien
gacaatttcctagaataagccatcc

SEQ ID NO: 210119 - DNA, 25 bp, Homo sapien
tatcacaaatgtagatctcagttgc

SEQ ID NO: 210120 - DNA, 25 bp, Homo sapien
gcatggtttggaagactatgtcaac

SEQ ID NO: 210121 - DNA, 25 bp, Homo sapien
tagaagatcggagcactgccaactg

SEQ ID NO: 210122 - DNA, 25 bp, Homo sapien
taacatacggtgattgcttctacaa

SEQ ID NO: 210123 - DNA, 25 bp, Homo sapien
tagacacggagtctctagaagatcg

SEQ ID NO: 210124 - DNA, 25 bp, Homo sapien
tctgcttgccagattcttgcctcag

SEQ ID NO: 210125 - DNA, 25 bp, Homo sapien
tgcaccactgtggtgtaaccagctt

SEQ ID NO: 210126 - DNA, 25 bp, Homo sapien
gtgaattccacattgaggacactca

SEQ ID NO: 210127 - DNA, 25 bp, Homo sapien
aacaatcagccaataaatccctctc

SEQ ID NO: 210128 - DNA, 25 bp, Homo sapien
aggattccttggcagctcgcatagc

SEQ ID NO: 210129 - DNA, 25 bp, Homo sapien
aaggattccttggcagctcgcatag

SEQ ID NO: 210130 - DNA, 25 bp, Homo sapien
taaggattccttggcagctcgcata

SEQ ID NO: 210131 - DNA, 25 bp, Homo sapien
ccaatgttaccacataaggagcacc

SEQ ID NO: 210132 - DNA, 25 bp, Homo sapien
taaggtatcgccacgccaatgttac

SEQ ID NO: 210133 - DNA, 25 bp, Homo sapien
gggcccctctatgatgcacaggtaa

SEQ ID NO: 210134 - DNA, 25 bp, Homo sapien
gcagaggagcctgatttttggaact

SEQ ID NO: 210135 - DNA, 25 bp, Homo sapien
acacaaagggagtgtaaagctacta

SEQ ID NO: 210136 - DNA, 25 bp, Homo sapien
atttaaccccagagcatactatgtg

SEQ ID NO: 210137 - DNA, 25 bp, Homo sapien
gagaagcagcgttaacaattcaaga

SEQ ID NO: 210138 - DNA, 25 bp, Homo sapien
aagctactatatagggcagcagaag

SEQ ID NO: 210139 - DNA, 25 bp, Homo sapien
tatacaactgaagagagccaaggcc

SEQ ID NO: 210140 - DNA, 25 bp, Homo sapien
ctttggcataaggaacgttgtggct

SEQ ID NO: 210141 - DNA, 25 bp, Homo sapien
aactctctcagcctttatacaactg

SEQ ID NO: 210142 - DNA, 25 bp, Homo sapien
cattcacatgtttactggagtagta

SEQ ID NO: 210143 - DNA, 25 bp, Homo sapien
caccaagtgggacgtggttccagtt

SEQ ID NO: 210144 - DNA, 25 bp, Homo sapien
gagggactgggaaaactatggctac

SEQ ID NO: 210145 - DNA, 25 bp, Homo sapien
gcacaagcatgttacctaggtggaa

SEQ ID NO: 210146 - DNA, 25 bp, Homo sapien
gagtaccctgatatgcaaacaaaag

SEQ ID NO: 210147 - DNA, 25 bp, Homo sapien
gaatgagccctaacgtgaactctga

SEQ ID NO: 210148 - DNA, 25 bp, Homo sapien
gatgttccgcagtacacagagagtg

SEQ ID NO: 210149 - DNA, 25 bp, Homo sapien
taggctaaaaccagggactgtgctc

SEQ ID NO: 210150 - DNA, 25 bp, Homo sapien
gatgcttaaaagtgtccgcggagaa

SEQ ID NO: 210151 - DNA, 25 bp, Homo sapien
caccagttcattaagagtggagcgc

SEQ ID NO: 210152 - DNA, 25 bp, Homo sapien
taagatcagatagcgtgtccatgaa

SEQ ID NO: 210153 - DNA, 25 bp, Homo sapien
gcttattgtaatgtagtccaccagt

SEQ ID NO: 210154 - DNA, 25 bp, Homo sapien
ggtaagtctgctctgtcaaacagcc

SEQ ID NO: 210155 - DNA, 25 bp, Homo sapien
aaaaggaaatggtgtaagtctgtca

SEQ ID NO: 210156 - DNA, 25 bp, Homo sapien
aatctaaaaacttcagaagtcaaga

SEQ ID NO: 210157 - DNA, 25 bp, Homo sapien
ccaaaatccaagtcacctggaaatc

SEQ ID NO: 210158 - DNA, 25 bp, Homo sapien
ctccaaaatccaagtcacctggaaa

SEQ ID NO: 210159 - DNA, 25 bp, Homo sapien
gtcacctggaaatctaaaaacttca

SEQ ID NO: 210160 - DNA, 25 bp, Homo sapien
ataacaatgatgataatggtgatga

SEQ ID NO: 210161 - DNA, 25 bp, Homo sapien
aacaatgatgataatggtgatgatc

SEQ ID NO: 210162 - DNA, 25 bp, Homo sapien
caatgatgataatggtgatgatcat

SEQ ID NO: 210163 - DNA, 25 bp, Homo sapien
caataacaatgatgataatggtgat

SEQ ID NO: 210164 - DNA, 25 bp, Homo sapien
tctgcaattgtaaaggaagagcagc

SEQ ID NO: 210165 - DNA, 25 bp, Homo sapien
gcaattgtaaaggaagagcagccat

SEQ ID NO: 210166 - DNA, 25 bp, Homo sapien
tgcaattgtaaaggaagagcagcca

SEQ ID NO: 210167 - DNA, 25 bp, Homo sapien
gttctgcaattgtaaaggaagagca

SEQ ID NO: 210168 - DNA, 25 bp, Homo sapien
gactagtgtccactaacagctgaaa

SEQ ID NO: 210169 - DNA, 25 bp, Homo sapien
ctgactagtgtccactaacagctga

SEQ ID NO: 210170 - DNA, 25 bp, Homo sapien
actagtgtccactaacagctgaaaa

SEQ ID NO: 210171 - DNA, 25 bp, Homo sapien
tgactagtgtccactaacagctgaa

SEQ ID NO: 210172 - DNA, 25 bp, Homo sapien
tgtcaagctctactaaattggcctg

SEQ ID NO: 210173 - DNA, 25 bp, Homo sapien
taccaggagccttatcagaaccaga

SEQ ID NO: 210174 - DNA, 25 bp, Homo sapien
cagatagttgtatgatagagcaccc

SEQ ID NO: 210175 - DNA, 25 bp, Homo sapien
tctactaaaggtgagtgtggcacgc

SEQ ID NO: 210176 - DNA, 25 bp, Homo sapien
tccagcattcgtggcccaaaattag

SEQ ID NO: 210177 - DNA, 25 bp, Homo sapien
tgcctagttacaagcagaatggctc

SEQ ID NO: 210178 - DNA, 25 bp, Homo sapien
agtcacaaatccctatatacatctg

SEQ ID NO: 210179 - DNA, 25 bp, Homo sapien
ttagaaaccactggcagagactatg

SEQ ID NO: 210180 - DNA, 25 bp, Homo sapien
aacttaagtggcttgctccgggtca

SEQ ID NO: 210181 - DNA, 25 bp, Homo sapien
ccgggtcattcagctgactggtagc

SEQ ID NO: 210182 - DNA, 25 bp, Homo sapien
aacatatcacaggtcagagctgcct

SEQ ID NO: 210183 - DNA, 25 bp, Homo sapien
gaatttttgctctggataagcccca

SEQ ID NO: 210184 - DNA, 25 bp, Homo sapien
gaatgcaagtgccttacacgtctta

SEQ ID NO: 210185 - DNA, 25 bp, Homo sapien
aaagcaatggcctgtagaatgcaag

SEQ ID NO: 210186 - DNA, 25 bp, Homo sapien
ccccagggcatagcataaaatatgt

SEQ ID NO: 210187 - DNA, 25 bp, Homo sapien
aaacaaggcttacagtctaactggg

SEQ ID NO: 210188 - DNA, 25 bp, Homo sapien
taacgctcagcagaagtctggccca

SEQ ID NO: 210189 - DNA, 25 bp, Homo sapien
gaaggcatcaacaccactacctgag

SEQ ID NO: 210190 - DNA, 25 bp, Homo sapien
cactgggacctaagcaatttggtac

SEQ ID NO: 210191 - DNA, 25 bp, Homo sapien
gaaggacagcaactctatccctgag

SEQ ID NO: 210192 - DNA, 25 bp, Homo sapien
tgctgaggcttaggtggcatacacc

SEQ ID NO: 210193 - DNA, 25 bp, Homo sapien
cagctgagcatcaacgaataggaga

SEQ ID NO: 210194 - DNA, 25 bp, Homo sapien
ttaaatatcacaacaccggtccagc

SEQ ID NO: 210195 - DNA, 25 bp, Homo sapien
cttctagggaagagccaccactaag

SEQ ID NO: 210196 - DNA, 25 bp, Homo sapien
gaaaaggaaccttatgcccagagtc

SEQ ID NO: 210197 - DNA, 25 bp, Homo sapien
tgatactcatgggtctttcacagac

SEQ ID NO: 210198 - DNA, 25 bp, Homo sapien
cacctttcctgctaaccagagcaag

SEQ ID NO: 210199 - DNA, 25 bp, Homo sapien
cacagactatgctctgtccaaagca

SEQ ID NO: 210200 - DNA, 25 bp, Homo sapien
actgtacccagtcatagtcacttat

SEQ ID NO: 210201 - DNA, 25 bp, Homo sapien
tgtacccagtcatagtcacttattt

SEQ ID NO: 210202 - DNA, 25 bp, Homo sapien
ctgtacccagtcatagtcacttatt

SEQ ID NO: 210203 - DNA, 25 bp, Homo sapien
cactgtacccagtcatagtcactta

SEQ ID NO: 210204 - DNA, 25 bp, Homo sapien
gacgaccctcattatcttgagaaaa

SEQ ID NO: 210205 - DNA, 25 bp, Homo sapien
gtaataaccacaacttcccatgagg

SEQ ID NO: 210206 - DNA, 25 bp, Homo sapien
tagatgctcccactgaatgaaaggt

SEQ ID NO: 210207 - DNA, 25 bp, Homo sapien
aactgaagacatgtcaatgacgacc

SEQ ID NO: 210208 - DNA, 25 bp, Homo sapien
ttataggatccacttgaaacccaag

SEQ ID NO: 210209 - DNA, 25 bp, Homo sapien
tttcacaggcaagataccaagatca

SEQ ID NO: 210210 - DNA, 25 bp, Homo sapien
ggctaggctaatccttcggttcagt

SEQ ID NO: 210211 - DNA, 25 bp, Homo sapien
ggcagagaactggtcaactatcctt

SEQ ID NO: 210212 - DNA, 25 bp, Homo sapien
ttgggcttaagcgagcctcccaact

SEQ ID NO: 210213 - DNA, 25 bp, Homo sapien
ttaagcgagcctcccaactctgtct

SEQ ID NO: 210214 - DNA, 25 bp, Homo sapien
ctctactaggttttccctatcagtg

SEQ ID NO: 210215 - DNA, 25 bp, Homo sapien
tcagtgaatgagtaagaatctttta

SEQ ID NO: 210216 - DNA, 25 bp, Homo sapien
ttttagcagcggcagaggtgttaac

SEQ ID NO: 210217 - DNA, 25 bp, Homo sapien
tctggcttttctgacggacttccga

SEQ ID NO: 210218 - DNA, 25 bp, Homo sapien
ggaactttgcgacctcttctgtctg

SEQ ID NO: 210219 - DNA, 25 bp, Homo sapien
gagacctaaactgtgaggaactttg

SEQ ID NO: 210220 - DNA, 25 bp, Homo sapien
agaatccaaagatgatctgtggctt

SEQ ID NO: 210221 - DNA, 25 bp, Homo sapien
gtccgggcagctgcggggagcctgg

SEQ ID NO: 210222 - DNA, 25 bp, Homo sapien
ctgcggggagcctggggcgacggct

SEQ ID NO: 210223 - DNA, 25 bp, Homo sapien
ctccggttccgcggcggcggagcct

SEQ ID NO: 210224 - DNA, 25 bp, Homo sapien
ctggggcgacggctgtccggtacgg

SEQ ID NO: 210225 - DNA, 25 bp, Homo sapien
cggcggcggcctcacgatcctcccc

SEQ ID NO: 210226 - DNA, 25 bp, Homo sapien
ccgcgggcccgtcccatcaaatcgg

SEQ ID NO: 210227 - DNA, 25 bp, Homo sapien
gcccgtcccatcaaatcggcaccga

SEQ ID NO: 210228 - DNA, 25 bp, Homo sapien
aatcggcaccgaccccgttgcggct

SEQ ID NO: 210229 - DNA, 25 bp, Homo sapien
actggatctgcagcggcagcaagag

SEQ ID NO: 210230 - DNA, 25 bp, Homo sapien
ggaggaagactggatctgcagcggc

SEQ ID NO: 210231 - DNA, 25 bp, Homo sapien
gactggatctgcagcggcagcaaga

SEQ ID NO: 210232 - DNA, 25 bp, Homo sapien
gaagactggatctgcagcggcagca

SEQ ID NO: 210233 - DNA, 25 bp, Homo sapien
gaggagccgcaggagctggagccgc

SEQ ID NO: 210234 - DNA, 25 bp, Homo sapien
ggaggagccgcaggagctggagccg

SEQ ID NO: 210235 - DNA, 25 bp, Homo sapien
aggagccgcaggagctggagccgcc

SEQ ID NO: 210236 - DNA, 25 bp, Homo sapien
agtccatggcacacgcgcaaccgaa

SEQ ID NO: 210237 - DNA, 25 bp, Homo sapien
tcaatatcaccgggcggctgagtcc

SEQ ID NO: 210238 - DNA, 25 bp, Homo sapien
tacccgcggtgggtcccagtcaatg

SEQ ID NO: 210239 - DNA, 25 bp, Homo sapien
ccagagccacctttcgctacccgcg

SEQ ID NO: 210240 - DNA, 25 bp, Homo sapien
ttcggctgagacctgatcagggatt

SEQ ID NO: 210241 - DNA, 25 bp, Homo sapien
gattgggccgaagcttgaggaaccc

SEQ ID NO: 210242 - DNA, 25 bp, Homo sapien
taattccgggaggtgtgcgactagc

SEQ ID NO: 210243 - DNA, 25 bp, Homo sapien
gcctgagaggagctctttaattccg

SEQ ID NO: 210244 - DNA, 25 bp, Homo sapien
ggtcgtcttggaccggaggattcca

SEQ ID NO: 210245 - DNA, 25 bp, Homo sapien
tggctttccgtgctgtgcggagcct

SEQ ID NO: 210246 - DNA, 25 bp, Homo sapien
attccaagggctcgggtcgtctaag

SEQ ID NO: 210247 - DNA, 25 bp, Homo sapien
gggagccccggagacttgatcccgc

SEQ ID NO: 210248 - DNA, 25 bp, Homo sapien
cagctagtgtggcccctcagggttt

SEQ ID NO: 210249 - DNA, 25 bp, Homo sapien
ctgcagctagtgtggcccctcaggg

SEQ ID NO: 210250 - DNA, 25 bp, Homo sapien
ttggggagtcccactctggacggga

SEQ ID NO: 210251 - DNA, 25 bp, Homo sapien
ctagtgtggcccctcagggtttggg

SEQ ID NO: 210252 - DNA, 25 bp, Homo sapien
tgtacaagtgacaacgaaaaatgca

SEQ ID NO: 210253 - DNA, 25 bp, Homo sapien
tatgtacaagtgacaacgaaaaatg

SEQ ID NO: 210254 - DNA, 25 bp, Homo sapien
tacaagtgacaacgaaaaatgcatt

SEQ ID NO: 210255 - DNA, 25 bp, Homo sapien
aagtgacaacgaaaaatgcatttgc

SEQ ID NO: 210256 - DNA, 25 bp, Homo sapien
gattggccactgtatggctagtgcc

SEQ ID NO: 210257 - DNA, 25 bp, Homo sapien
tgtatggctagtgcccacttttgcc

SEQ ID NO: 210258 - DNA, 25 bp, Homo sapien
agtgcccacttttgccgtgataaag

SEQ ID NO: 210259 - DNA, 25 bp, Homo sapien
cagatgattggccactgtatggcta

SEQ ID NO: 210260 - DNA, 25 bp, Homo sapien
cataacttagctctttcagaaatct

SEQ ID NO: 210261 - DNA, 25 bp, Homo sapien
tgcctggctcataacttagctcttt

SEQ ID NO: 210262 - DNA, 25 bp, Homo sapien
gtggctagactaatttatattcagt

SEQ ID NO: 210263 - DNA, 25 bp, Homo sapien
ggctagactaatttatattcagtgt

SEQ ID NO: 210264 - DNA, 25 bp, Homo sapien
gtgccctgccaagataacgttatct

SEQ ID NO: 210265 - DNA, 25 bp, Homo sapien
taacgttatctacatcagagttacc

SEQ ID NO: 210266 - DNA, 25 bp, Homo sapien
aacgttatctacatcagagttacct

SEQ ID NO: 210267 - DNA, 25 bp, Homo sapien
gccctgccaagataacgttatctac

SEQ ID NO: 210268 - DNA, 25 bp, Homo sapien
ccttatggcagtaggtggaccttgg

SEQ ID NO: 210269 - DNA, 25 bp, Homo sapien
cttatggcagtaggtggaccttggc

SEQ ID NO: 210270 - DNA, 25 bp, Homo sapien
ttatggcagtaggtggaccttggct

SEQ ID NO: 210271 - DNA, 25 bp, Homo sapien
atgctgagatctgtatccggatctg

SEQ ID NO: 210272 - DNA, 25 bp, Homo sapien
aatgctgagatctgtatccggatct

SEQ ID NO: 210273 - DNA, 25 bp, Homo sapien
gaacccaataacaaagatgcctctc

SEQ ID NO: 210274 - DNA, 25 bp, Homo sapien
ctgaacccaataacaaagatgcctc

SEQ ID NO: 210275 - DNA, 25 bp, Homo sapien
ccaataacaaagatgcctctcttca

SEQ ID NO: 210276 - DNA, 25 bp, Homo sapien
aataacaaagatgcctctcttcagc

SEQ ID NO: 210277 - DNA, 25 bp, Homo sapien
ccgccatgcaaggtcagctgggcat

SEQ ID NO: 210278 - DNA, 25 bp, Homo sapien
tcatccgccatgcaaggtcagctgg

SEQ ID NO: 210279 - DNA, 25 bp, Homo sapien
ccatgcaaggtcagctgggcatcac

SEQ ID NO: 210280 - DNA, 25 bp, Homo sapien
gcaaggtcagctgggcatcacccag

SEQ ID NO: 210281 - DNA, 25 bp, Homo sapien
tggctcctgagacagtgaatccagc

SEQ ID NO: 210282 - DNA, 25 bp, Homo sapien
gactggacgatggtgttgctctcca

SEQ ID NO: 210283 - DNA, 25 bp, Homo sapien
gacgatggtgttgctctccatgagc

SEQ ID NO: 210284 - DNA, 25 bp, Homo sapien
atagactggacgatggtgttgctct

SEQ ID NO: 210285 - DNA, 25 bp, Homo sapien
ctggacgatggtgttgctctccatg

SEQ ID NO: 210286 - DNA, 25 bp, Homo sapien
gggccttagaggtgcagccaacaac

SEQ ID NO: 210287 - DNA, 25 bp, Homo sapien
agggccttagaggtgcagccaacaa

SEQ ID NO: 210288 - DNA, 25 bp, Homo sapien
tagggccttagaggtgcagccaaca

SEQ ID NO: 210289 - DNA, 25 bp, Homo sapien
ggcccaggccctgtcgtgtagcccc

SEQ ID NO: 210290 - DNA, 25 bp, Homo sapien
cagggtggagttgatgatggtgacc

SEQ ID NO: 210291 - DNA, 25 bp, Homo sapien
gtgacctggcccatcacacccagca

SEQ ID NO: 210292 - DNA, 25 bp, Homo sapien
tccccagggtggagttgatgatggt

SEQ ID NO: 210293 - DNA, 25 bp, Homo sapien
atggtgacctggcccatcacaccca

SEQ ID NO: 210294 - DNA, 25 bp, Homo sapien
tgtcctgtgagtcccaggaaaccag

SEQ ID NO: 210295 - DNA, 25 bp, Homo sapien
ctgtgccctgtcctgtgagtcccag

SEQ ID NO: 210296 - DNA, 25 bp, Homo sapien
ggaaaccagtggcatggcattcatc

SEQ ID NO: 210297 - DNA, 25 bp, Homo sapien
aaccagtggcatggcattcatccac

SEQ ID NO: 210298 - DNA, 25 bp, Homo sapien
caggaacagccgatgcttctgggcc

SEQ ID NO: 210299 - DNA, 25 bp, Homo sapien
gccttgcacaggcagatgccgtgga

SEQ ID NO: 210300 - DNA, 25 bp, Homo sapien
tatctagaggcgaggcggcagatct

SEQ ID NO: 210301 - DNA, 25 bp, Homo sapien
tggtttctaggtaggccacgtccag

SEQ ID NO: 210302 - DNA, 25 bp, Homo sapien
ggtggaagcgggctatttttgcttc

SEQ ID NO: 210303 - DNA, 25 bp, Homo sapien
tatttttgcttctagattcttgtgg

SEQ ID NO: 210304 - DNA, 25 bp, Homo sapien
cctcccgctggtggaagcgggctat

SEQ ID NO: 210305 - DNA, 25 bp, Homo sapien
ccgctggtggaagcgggctattttt

SEQ ID NO: 210306 - DNA, 25 bp, Homo sapien
ggttccacggatgaagcggaccgag

SEQ ID NO: 210307 - DNA, 25 bp, Homo sapien
ttgggttccacggatgaagcggacc

SEQ ID NO: 210308 - DNA, 25 bp, Homo sapien
ctttgggttccacggatgaagcgga

SEQ ID NO: 210309 - DNA, 25 bp, Homo sapien
tgggttccacggatgaagcggaccg

SEQ ID NO: 210310 - DNA, 25 bp, Homo sapien
tgcagacctgcctgaatcacctcag

SEQ ID NO: 210311 - DNA, 25 bp, Homo sapien
gacctgcctgaatcacctcagggtg

SEQ ID NO: 210312 - DNA, 25 bp, Homo sapien
ctgctcaggcccaggtagttgttgg

SEQ ID NO: 210313 - DNA, 25 bp, Homo sapien
tgcctgaatcacctcagggtggctg

SEQ ID NO: 210314 - DNA, 25 bp, Homo sapien
gttgaggattcctccggagacgccg

SEQ ID NO: 210315 - DNA, 25 bp, Homo sapien
agttgaggattcctccggagacgcc

SEQ ID NO: 210316 - DNA, 25 bp, Homo sapien
gttaagttgaggattcctccggaga

SEQ ID NO: 210317 - DNA, 25 bp, Homo sapien
taagttgaggattcctccggagacg

SEQ ID NO: 210318 - DNA, 25 bp, Homo sapien
cgcagctgggccagtactgactgcg

SEQ ID NO: 210319 - DNA, 25 bp, Homo sapien
gcagctgggccagtactgactgcgc

SEQ ID NO: 210320 - DNA, 25 bp, Homo sapien
gcgcagctgggccagtactgactgc

SEQ ID NO: 210321 - DNA, 25 bp, Homo sapien
cagctgggccagtactgactgcgcg

SEQ ID NO: 210322 - DNA, 25 bp, Homo sapien
ccgcacggcaccccggaaagcgcgg

SEQ ID NO: 210323 - DNA, 25 bp, Homo sapien
ctgcggccgcacggcaccccggaaa

SEQ ID NO: 210324 - DNA, 25 bp, Homo sapien
gcaccccggaaagcgcggcgcgcca

SEQ ID NO: 210325 - DNA, 25 bp, Homo sapien
cacggcaccccggaaagcgcggcgc

SEQ ID NO: 210326 - DNA, 25 bp, Homo sapien
gatgaacgcttggattctttccacc

SEQ ID NO: 210327 - DNA, 25 bp, Homo sapien
ttgccaggtcaaatggcaactgtac

SEQ ID NO: 210328 - DNA, 25 bp, Homo sapien
tgcgcaccgcccacattgtttatct

SEQ ID NO: 210329 - DNA, 25 bp, Homo sapien
ggcaactgtacaactccctgaggaa

SEQ ID NO: 210330 - DNA, 25 bp, Homo sapien
gtgtatccttcagcagcctttgaaa

SEQ ID NO: 210331 - DNA, 25 bp, Homo sapien
cagcagcctttgaaaaaaacggcat

SEQ ID NO: 210332 - DNA, 25 bp, Homo sapien
tatccttcagcagcctttgaaaaaa

SEQ ID NO: 210333 - DNA, 25 bp, Homo sapien
tggagtgtatccttcagcagccttt

SEQ ID NO: 210334 - DNA, 25 bp, Homo sapien
ttgacccctgtatttatcttctgtg

SEQ ID NO: 210335 - DNA, 25 bp, Homo sapien
tgttttatgaatgcgatttctccag

SEQ ID NO: 210336 - DNA, 25 bp, Homo sapien
actgttagtctggttttgacccctg

SEQ ID NO: 210337 - DNA, 25 bp, Homo sapien
cacagacaaaccataccagccattt

SEQ ID NO: 210338 - DNA, 25 bp, Homo sapien
ggcaaaaggatagctgacagacgtt

SEQ ID NO: 210339 - DNA, 25 bp, Homo sapien
ttagagatcgagctggtaatccaga

SEQ ID NO: 210340 - DNA, 25 bp, Homo sapien
taacgcttatgtagtccgccatcaa

SEQ ID NO: 210341 - DNA, 25 bp, Homo sapien
gcagcatgaggcaccatcacgtttt

SEQ ID NO: 210342 - DNA, 25 bp, Homo sapien
tggcacaggacttggtgaaaaactg

SEQ ID NO: 210343 - DNA, 25 bp, Homo sapien
gcacaggacttggtgaaaaactggt

SEQ ID NO: 210344 - DNA, 25 bp, Homo sapien
gtgaaatggcacaggacttggtgaa

SEQ ID NO: 210345 - DNA, 25 bp, Homo sapien
gaaatggcacaggacttggtgaaaa

SEQ ID NO: 210346 - DNA, 25 bp, Homo sapien
gatgctcctcagatgaagaatatag

SEQ ID NO: 210347 - DNA, 25 bp, Homo sapien
accaagataacttcctttcaatcag

SEQ ID NO: 210348 - DNA, 25 bp, Homo sapien
gaaaagcccaggttatcctcagatt

SEQ ID NO: 210349 - DNA, 25 bp, Homo sapien
gcaatttctccaagtcgagtcctat

SEQ ID NO: 210350 - DNA, 25 bp, Homo sapien
caggactgtttgctaactggcttgt

SEQ ID NO: 210351 - DNA, 25 bp, Homo sapien
tgtgaagaccggaattaaaccattc

SEQ ID NO: 210352 - DNA, 25 bp, Homo sapien
cctaccaaacaaagtgccaaatgca

SEQ ID NO: 210353 - DNA, 25 bp, Homo sapien
ttatcggagctatttctttaaagcc

SEQ ID NO: 210354 - DNA, 25 bp, Homo sapien
tcctggatgttcaaacgtgtaactg

SEQ ID NO: 210355 - DNA, 25 bp, Homo sapien
gaactcgtactcgttggtgcacaga

SEQ ID NO: 210356 - DNA, 25 bp, Homo sapien
aaagaacggactgtagcagcatgcc

SEQ ID NO: 210357 - DNA, 25 bp, Homo sapien
gatgaacctgagactaccatgttgg

SEQ ID NO: 210358 - DNA, 25 bp, Homo sapien
agcagcatccaagggtagtaaaact

SEQ ID NO: 210359 - DNA, 25 bp, Homo sapien
acagcagcatccaagggtagtaaaa

SEQ ID NO: 210360 - DNA, 25 bp, Homo sapien
gtcaacagcagcatccaagggtagt

SEQ ID NO: 210361 - DNA, 25 bp, Homo sapien
caacagcagcatccaagggtagtaa

SEQ ID NO: 210362 - DNA, 25 bp, Homo sapien
ggagtgctgttgaaactgtaaccaa

SEQ ID NO: 210363 - DNA, 25 bp, Homo sapien
agtcgctgttggatcgggttctaaa

SEQ ID NO: 210364 - DNA, 25 bp, Homo sapien
tcatggcaggacaagcgtttaagtt

SEQ ID NO: 210365 - DNA, 25 bp, Homo sapien
aaccagttcgtgtgaaagttggaga

SEQ ID NO: 210366 - DNA, 25 bp, Homo sapien
tagaaataggcttatggaataagga

SEQ ID NO: 210367 - DNA, 25 bp, Homo sapien
taggcttatggaataaggatatatg

SEQ ID NO: 210368 - DNA, 25 bp, Homo sapien
gcttatggaataaggatatatgaag

SEQ ID NO: 210369 - DNA, 25 bp, Homo sapien
ttaaagtagaaataggcttatggaa

SEQ ID NO: 210370 - DNA, 25 bp, Homo sapien
tgctggctcgatggagaagactcct

SEQ ID NO: 210371 - DNA, 25 bp, Homo sapien
gcatcagtcaatcagcggtgaacag

SEQ ID NO: 210372 - DNA, 25 bp, Homo sapien
tgtgtcagccccagtatgtcattag

SEQ ID NO: 210373 - DNA, 25 bp, Homo sapien
aaaatgaaaggagtcgcagcctacc

SEQ ID NO: 210374 - DNA, 25 bp, Homo sapien
agcagtagctgctaatgtgtaaagt

SEQ ID NO: 210375 - DNA, 25 bp, Homo sapien
gcccatgctattaattcctatacta

SEQ ID NO: 210376 - DNA, 25 bp, Homo sapien
actatactgtctctatataagcatg

SEQ ID NO: 210377 - DNA, 25 bp, Homo sapien
acctcatgacaatcccaaagtacta

SEQ ID NO: 210378 - DNA, 25 bp, Homo sapien
ctgtacacgtgttcatcactatttt

SEQ ID NO: 210379 - DNA, 25 bp, Homo sapien
tgtacacgtgttcatcactatttta

SEQ ID NO: 210380 - DNA, 25 bp, Homo sapien
atgacaacttatgtccgtacaaaca

SEQ ID NO: 210381 - DNA, 25 bp, Homo sapien
caacttatgtccgtacaaacacctg

SEQ ID NO: 210382 - DNA, 25 bp, Homo sapien
ttttactcatataagcctgagggac

SEQ ID NO: 210383 - DNA, 25 bp, Homo sapien
aaagtacgggattctgttatcagac

SEQ ID NO: 210384 - DNA, 25 bp, Homo sapien
tatacatcagtctacaactcagagg

SEQ ID NO: 210385 - DNA, 25 bp, Homo sapien
tatcagactataggaagtagcagca

SEQ ID NO: 210386 - DNA, 25 bp, Homo sapien
ctgaatgccacaatttgtcagagac

SEQ ID NO: 210387 - DNA, 25 bp, Homo sapien
cactgcttcgcgtgaaaatgagaac

SEQ ID NO: 210388 - DNA, 25 bp, Homo sapien
gccacaatttgtcagagacaagcta

SEQ ID NO: 210389 - DNA, 25 bp, Homo sapien
gaaaacacaagaatgagtaatgtct

SEQ ID NO: 210390 - DNA, 25 bp, Homo sapien
tagctttctagactcaaccacggcg

SEQ ID NO: 210391 - DNA, 25 bp, Homo sapien
catactacgggtcgtctcttcccaa

SEQ ID NO: 210392 - DNA, 25 bp, Homo sapien
caggtttgacctggtggctccgacg

SEQ ID NO: 210393 - DNA, 25 bp, Homo sapien
ctgaaaatgagcaagggcgtttggc

SEQ ID NO: 210394 - DNA, 25 bp, Homo sapien
cggagaaaacgcaggctgcgcggcg

SEQ ID NO: 210395 - DNA, 25 bp, Homo sapien
gtagcctcaacctgtaccggagaaa

SEQ ID NO: 210396 - DNA, 25 bp, Homo sapien
tagcctcaacctgtaccggagaaaa

SEQ ID NO: 210397 - DNA, 25 bp, Homo sapien
aaaacgcaggctgcgcggcggctta

SEQ ID NO: 210398 - DNA, 25 bp, Homo sapien
ctgattgggtaatgcgcacaagaaa

SEQ ID NO: 210399 - DNA, 25 bp, Homo sapien
aaaatcaagaggattggtcggctgc

SEQ ID NO: 210400 - DNA, 25 bp, Homo sapien
cccgtaacgcgacgcgaaagaagtg

SEQ ID NO: 210401 - DNA, 25 bp, Homo sapien
gagaggcggcccgtaacgcgacgcg

SEQ ID NO: 210402 - DNA, 25 bp, Homo sapien
tcttcctcatggtttgcggtgccct

SEQ ID NO: 210403 - DNA, 25 bp, Homo sapien
tcctcatggtttgcggtgccctgca

SEQ ID NO: 210404 - DNA, 25 bp, Homo sapien
cttcctcatggtttgcggtgccctg

SEQ ID NO: 210405 - DNA, 25 bp, Homo sapien
cctcatggtttgcggtgccctgcat

SEQ ID NO: 210406 - DNA, 25 bp, Homo sapien
tcacccccaattagaacataggcca

SEQ ID NO: 210407 - DNA, 25 bp, Homo sapien
cacatcacccccaattagaacatag

SEQ ID NO: 210408 - DNA, 25 bp, Homo sapien
catcacccccaattagaacataggc

SEQ ID NO: 210409 - DNA, 25 bp, Homo sapien
cacccccaattagaacataggccaa

SEQ ID NO: 210410 - DNA, 25 bp, Homo sapien
tcagtccctttgattctcctgaatg

SEQ ID NO: 210411 - DNA, 25 bp, Homo sapien
gggatgtcttgggaaacaccacacc

SEQ ID NO: 210412 - DNA, 25 bp, Homo sapien
tatacttttagttgctggatcttgg

SEQ ID NO: 210413 - DNA, 25 bp, Homo sapien
gaatgtaagtgtcccaaagtccaca

SEQ ID NO: 210414 - DNA, 25 bp, Homo sapien
caggttatgtaggttaagatccatc

SEQ ID NO: 210415 - DNA, 25 bp, Homo sapien
cctaatgatggcttgggaggtaata

SEQ ID NO: 210416 - DNA, 25 bp, Homo sapien
ctctttcaagcaagaagaactgtgg

SEQ ID NO: 210417 - DNA, 25 bp, Homo sapien
tgccaacctctatcaacagaatttg

SEQ ID NO: 210418 - DNA, 25 bp, Homo sapien
gaacttgatcaaataacgagaaaat

SEQ ID NO: 210419 - DNA, 25 bp, Homo sapien
gaagaacttgatcaaataacgagaa

SEQ ID NO: 210420 - DNA, 25 bp, Homo sapien
tgatcaaataacgagaaaataccca

SEQ ID NO: 210421 - DNA, 25 bp, Homo sapien
atggaagaacttgatcaaataacga

SEQ ID NO: 210422 - DNA, 25 bp, Homo sapien
cattccttgttaacgagaacaaaat

SEQ ID NO: 210423 - DNA, 25 bp, Homo sapien
cttcacttgagtagcctttaaaaat

SEQ ID NO: 210424 - DNA, 25 bp, Homo sapien
cattttactggccggctgggattac

SEQ ID NO: 210425 - DNA, 25 bp, Homo sapien
taccaataagaaatctttgtcatat

SEQ ID NO: 210426 - DNA, 25 bp, Homo sapien
aatgtcttctattgccaaaacagca

SEQ ID NO: 210427 - DNA, 25 bp, Homo sapien
tctattgccaaaacagcactttgat

SEQ ID NO: 210428 - DNA, 25 bp, Homo sapien
cttcaatgtcttctattgccaaaac

SEQ ID NO: 210429 - DNA, 25 bp, Homo sapien
gtcttctattgccaaaacagcactt

SEQ ID NO: 210430 - DNA, 25 bp, Homo sapien
caattcaattaggaaatggctccca

SEQ ID NO: 210431 - DNA, 25 bp, Homo sapien
tcttaatttagcaacggaaaggcac

SEQ ID NO: 210432 - DNA, 25 bp, Homo sapien
tgagctcaaatagttatggtgccca

SEQ ID NO: 210433 - DNA, 25 bp, Homo sapien
aaaatcaacaggatagcataggccc

SEQ ID NO: 210434 - DNA, 25 bp, Homo sapien
aggaacaaaaaatgtgatggagaaa

SEQ ID NO: 210435 - DNA, 25 bp, Homo sapien
tcaagagataccaataaagaaaaat

SEQ ID NO: 210436 - DNA, 25 bp, Homo sapien
aatatgtaaggaacaaaaaatgtga

SEQ ID NO: 210437 - DNA, 25 bp, Homo sapien
caaaaaatgtgatggagaaaccaac

SEQ ID NO: 210438 - DNA, 25 bp, Homo sapien
gggcccagctaaaggtaatgtatct

SEQ ID NO: 210439 - DNA, 25 bp, Homo sapien
tgcttttcgaatatcatcacacggt

SEQ ID NO: 210440 - DNA, 25 bp, Homo sapien
tagtacaaataccatccctatgagg

SEQ ID NO: 210441 - DNA, 25 bp, Homo sapien
gaggatccgcaatatggcttttcca

SEQ ID NO: 210442 - DNA, 25 bp, Homo sapien
tcctccataaactttcttctcctac

SEQ ID NO: 210443 - DNA, 25 bp, Homo sapien
cataaactttcttctcctaccctgt

SEQ ID NO: 210444 - DNA, 25 bp, Homo sapien
cttctcctaccctgtaataagaaat

SEQ ID NO: 210445 - DNA, 25 bp, Homo sapien
ttcttctcctaccctgtaataagaa

SEQ ID NO: 210446 - DNA, 25 bp, Homo sapien
tcagttactcaaagattccacaagt

SEQ ID NO: 210447 - DNA, 25 bp, Homo sapien
gatgtgactgtcaaacctctattct

SEQ ID NO: 210448 - DNA, 25 bp, Homo sapien
caagtgactcaaactctgaccatgc

SEQ ID NO: 210449 - DNA, 25 bp, Homo sapien
gagagaggatctcactgtatggcca

SEQ ID NO: 210450 - DNA, 25 bp, Homo sapien
taaatacccataggattttggctac

SEQ ID NO: 210451 - DNA, 25 bp, Homo sapien
tggtaaatacccataggattttggc

SEQ ID NO: 210452 - DNA, 25 bp, Homo sapien
taattaaaggcacaagtcttggtaa

SEQ ID NO: 210453 - DNA, 25 bp, Homo sapien
aagtcttggtaaatacccataggat

SEQ ID NO: 210454 - DNA, 25 bp, Homo sapien
tcccatgtaaattctacttaggcaa

SEQ ID NO: 210455 - DNA, 25 bp, Homo sapien
agggaataagaatcagtccatatat

SEQ ID NO: 210456 - DNA, 25 bp, Homo sapien
taagaatcagtccatatataagagg

SEQ ID NO: 210457 - DNA, 25 bp, Homo sapien
cagaatagagtgcattcccatgtaa

SEQ ID NO: 210458 - DNA, 25 bp, Homo sapien
tctaaataccctcgatagtcatagc

SEQ ID NO: 210459 - DNA, 25 bp, Homo sapien
agtagttactgacagtcttaccttt

SEQ ID NO: 210460 - DNA, 25 bp, Homo sapien
tttcccacacaagagcgtatcttcc

SEQ ID NO: 210461 - DNA, 25 bp, Homo sapien
ggattctgtccttagtagttactga

SEQ ID NO: 210462 - DNA, 25 bp, Homo sapien
gatgcatcacgagacgggcaagctt

SEQ ID NO: 210463 - DNA, 25 bp, Homo sapien
catcagcctaggtccttgagggtca

SEQ ID NO: 210464 - DNA, 25 bp, Homo sapien
tgaccctgggaaactacatgttgag

SEQ ID NO: 210465 - DNA, 25 bp, Homo sapien
tctttcctatagatgtgaccctggg

SEQ ID NO: 210466 - DNA, 25 bp, Homo sapien
tccagttctgactacatgatgactt

SEQ ID NO: 210467 - DNA, 25 bp, Homo sapien
tactccccattgaataacagaattc

SEQ ID NO: 210468 - DNA, 25 bp, Homo sapien
gcagacaaaaaagactacagatctt

SEQ ID NO: 210469 - DNA, 25 bp, Homo sapien
gaatttcatcagtaagcagacaaaa

SEQ ID NO: 210470 - DNA, 25 bp, Homo sapien
cagtgaaatagaatcgtgggcccca

SEQ ID NO: 210471 - DNA, 25 bp, Homo sapien
taacaaatagtgctaggacgtctga

SEQ ID NO: 210472 - DNA, 25 bp, Homo sapien
ggacgtctgaatacctacatgcaaa

SEQ ID NO: 210473 - DNA, 25 bp, Homo sapien
tggagtgcaatctagcagtggttca

SEQ ID NO: 210474 - DNA, 25 bp, Homo sapien
tgaacacttggcactagggaagcaa

SEQ ID NO: 210475 - DNA, 25 bp, Homo sapien
gaggcagacatgtgcgtatgaaaac

SEQ ID NO: 210476 - DNA, 25 bp, Homo sapien
cagtgtggccctggagacatgctca

SEQ ID NO: 210477 - DNA, 25 bp, Homo sapien
cacagctacttggatcaggaatgaa

SEQ ID NO: 210478 - DNA, 25 bp, Homo sapien
acagctccagatgacttatagacac

SEQ ID NO: 210479 - DNA, 25 bp, Homo sapien
gacacttcaaactcgaaatacctaa

SEQ ID NO: 210480 - DNA, 25 bp, Homo sapien
ggtcctgatcttcatgtatagaacc

SEQ ID NO: 210481 - DNA, 25 bp, Homo sapien
tgatgacaagaaactggtcctgatc

SEQ ID NO: 210482 - DNA, 25 bp, Homo sapien
gctcataactgttgtacctgtgcaa

SEQ ID NO: 210483 - DNA, 25 bp, Homo sapien
tgtcattagtatacctgagtatgct

SEQ ID NO: 210484 - DNA, 25 bp, Homo sapien
aactcagatccatgagaaaagggaa

SEQ ID NO: 210485 - DNA, 25 bp, Homo sapien
ccagccaatgaccttatgaatacag

SEQ ID NO: 210486 - DNA, 25 bp, Homo sapien
aaaactgagtccagcagtttccctg

SEQ ID NO: 210487 - DNA, 25 bp, Homo sapien
gggagaaagactagtatcctcagaa

SEQ ID NO: 210488 - DNA, 25 bp, Homo sapien
gaggaagaatcaaaactgagtccag

SEQ ID NO: 210489 - DNA, 25 bp, Homo sapien
cagatactctcatacatttccagga

SEQ ID NO: 210490 - DNA, 25 bp, Homo sapien
gataacatactgcaacactgaaagc

SEQ ID NO: 210491 - DNA, 25 bp, Homo sapien
tagtaatgtgttccagtaaacagtc

SEQ ID NO: 210492 - DNA, 25 bp, Homo sapien
cactgtgtcattacactagcaaaca

SEQ ID NO: 210493 - DNA, 25 bp, Homo sapien
cagaacaggcagtagagcggccagt

SEQ ID NO: 210494 - DNA, 25 bp, Homo sapien
tgtagaagagttcgttgcccagctc

SEQ ID NO: 210495 - DNA, 25 bp, Homo sapien
agaagacctccaacttgaccacggg

SEQ ID NO: 210496 - DNA, 25 bp, Homo sapien
tgatgtccttggtgcactggcccag

SEQ ID NO: 210497 - DNA, 25 bp, Homo sapien
ggcttggccgggcactgattgcggt

SEQ ID NO: 210498 - DNA, 25 bp, Homo sapien
cctcgcagtcgagggtctccggcga

SEQ ID NO: 210499 - DNA, 25 bp, Homo sapien
cgtcagcgagttgcggcgcagagcg

SEQ ID NO: 210500 - DNA, 25 bp, Homo sapien
cactgattgcggtcgctcccgggag

SEQ ID NO: 210501 - DNA, 25 bp, Homo sapien
tccctccggtctgctgagcggcgcg

SEQ ID NO: 210502 - DNA, 25 bp, Homo sapien
ctccggtctgctgagcggcgcggcg

SEQ ID NO: 210503 - DNA, 25 bp, Homo sapien
atcctccctccggtctgctgagcgg

SEQ ID NO: 210504 - DNA, 25 bp, Homo sapien
tccggtctgctgagcggcgcggcgg

SEQ ID NO: 210505 - DNA, 25 bp, Homo sapien
gccgctggaaacgggccactttctg

SEQ ID NO: 210506 - DNA, 25 bp, Homo sapien
agccgctggaaacgggccactttct

SEQ ID NO: 210507 - DNA, 25 bp, Homo sapien
cactttctgcgggtcctgcagacgg

SEQ ID NO: 210508 - DNA, 25 bp, Homo sapien
ccactttctgcgggtcctgcagacg

SEQ ID NO: 210509 - DNA, 25 bp, Homo sapien
cagctgggccaggcgctgcctcagc

SEQ ID NO: 210510 - DNA, 25 bp, Homo sapien
agctgggccaggcgctgcctcagcg

SEQ ID NO: 210511 - DNA, 25 bp, Homo sapien
gggccaggcgctgcctcagcgacat

SEQ ID NO: 210512 - DNA, 25 bp, Homo sapien
ctgggccaggcgctgcctcagcgac

SEQ ID NO: 210513 - DNA, 25 bp, Homo sapien
ggcacagcgctctaccctccggagt

SEQ ID NO: 210514 - DNA, 25 bp, Homo sapien
agcggaaccggcacagcgctctacc

SEQ ID NO: 210515 - DNA, 25 bp, Homo sapien
ccagcggcagcggaaccggcacagc

SEQ ID NO: 210516 - DNA, 25 bp, Homo sapien
ggcgcagccccgaactgtccccgcg

SEQ ID NO: 210517 - DNA, 25 bp, Homo sapien
aggaccgccgtgacgaccagagtag

SEQ ID NO: 210518 - DNA, 25 bp, Homo sapien
tgcaggaccgccgtgacgaccagag

SEQ ID NO: 210519 - DNA, 25 bp, Homo sapien
accgccgtgacgaccagagtagcga

SEQ ID NO: 210520 - DNA, 25 bp, Homo sapien
cgtgacgaccagagtagcgacccgc

SEQ ID NO: 210521 - DNA, 25 bp, Homo sapien
ctgcttctagggatgaattgcttga

SEQ ID NO: 210522 - DNA, 25 bp, Homo sapien
ttctagggatgaattgcttgaagga

SEQ ID NO: 210523 - DNA, 25 bp, Homo sapien
gcttctagggatgaattgcttgaag

SEQ ID NO: 210524 - DNA, 25 bp, Homo sapien
gatgaattgcttgaaggaattggca

SEQ ID NO: 210525 - DNA, 25 bp, Homo sapien
tgtagctggttgtgatcaattagtt

SEQ ID NO: 210526 - DNA, 25 bp, Homo sapien
ggagtgaagaaggaacaaagaaatc

SEQ ID NO: 210527 - DNA, 25 bp, Homo sapien
gtaaacaccactgcactcagaccag

SEQ ID NO: 210528 - DNA, 25 bp, Homo sapien
taaaggcttatcaagtgaagcagtg

SEQ ID NO: 210529 - DNA, 25 bp, Homo sapien
tatctcctattaccaccagggttga

SEQ ID NO: 210530 - DNA, 25 bp, Homo sapien
gccatccttgtttaggcactcagga

SEQ ID NO: 210531 - DNA, 25 bp, Homo sapien
gatggtctcaccttgcctcagatta

SEQ ID NO: 210532 - DNA, 25 bp, Homo sapien
gccaaatctagatggaaccccacaa

SEQ ID NO: 210533 - DNA, 25 bp, Homo sapien
tgggttctttgtgtcacctccgggc

SEQ ID NO: 210534 - DNA, 25 bp, Homo sapien
ccagcgggtggcgtttgtctctctg

SEQ ID NO: 210535 - DNA, 25 bp, Homo sapien
cggagggcgccgtaaacttgtcagc

SEQ ID NO: 210536 - DNA, 25 bp, Homo sapien
gagccgggccacaggaaactttgct

SEQ ID NO: 210537 - DNA, 25 bp, Homo sapien
ggcgctccgacggccgggattataa

SEQ ID NO: 210538 - DNA, 25 bp, Homo sapien
ttgcttggggtctttgttgtctgaa

SEQ ID NO: 210539 - DNA, 25 bp, Homo sapien
cgacggccgggattataattccatt

SEQ ID NO: 210540 - DNA, 25 bp, Homo sapien
atcgtgagcggtgcggtgctcgccc

SEQ ID NO: 210541 - DNA, 25 bp, Homo sapien
gagggttctttcaagccgctccaca

SEQ ID NO: 210542 - DNA, 25 bp, Homo sapien
tgtagcattcgcgtttgtggaagcc

SEQ ID NO: 210543 - DNA, 25 bp, Homo sapien
ttgtgtacaagcaccagcaagtcgg

SEQ ID NO: 210544 - DNA, 25 bp, Homo sapien
gacgccgcaggcacggttgtgtaca

SEQ ID NO: 210545 - DNA, 25 bp, Homo sapien
cgtgcctggccctaccccgttgtat

SEQ ID NO: 210546 - DNA, 25 bp, Homo sapien
taaagcaggacaatggttggcacca

SEQ ID NO: 210547 - DNA, 25 bp, Homo sapien
aaagcaggacaatggttggcaccat

SEQ ID NO: 210548 - DNA, 25 bp, Homo sapien
agaaaaccactggagtggaaatgag

SEQ ID NO: 210549 - DNA, 25 bp, Homo sapien
attctcatattttgccgtagtagag

SEQ ID NO: 210550 - DNA, 25 bp, Homo sapien
ttgccgtagtagagattaagaaaac

SEQ ID NO: 210551 - DNA, 25 bp, Homo sapien
tattttgccgtagtagagattaaga

SEQ ID NO: 210552 - DNA, 25 bp, Homo sapien
gattgaccagccagatagactattg

SEQ ID NO: 210553 - DNA, 25 bp, Homo sapien
ggagagataataaggcctacaaccc

SEQ ID NO: 210554 - DNA, 25 bp, Homo sapien
tcaacaccactcgaagaaacacaag

SEQ ID NO: 210555 - DNA, 25 bp, Homo sapien
tatggcattgcagaaaccgttagaa

SEQ ID NO: 210556 - DNA, 25 bp, Homo sapien
ctgaatgagtaacatgtggaggccg

SEQ ID NO: 210557 - DNA, 25 bp, Homo sapien
tagagatgagtatagtaattgatat

SEQ ID NO: 210558 - DNA, 25 bp, Homo sapien
gttactgaatgagtaacatgtggag

SEQ ID NO: 210559 - DNA, 25 bp, Homo sapien
taattagagatgagtatagtaattg

SEQ ID NO: 210560 - DNA, 25 bp, Homo sapien
gcacttggagcagtttcactggcat

SEQ ID NO: 210561 - DNA, 25 bp, Homo sapien
agcgctgctacagaagccttccggg

SEQ ID NO: 210562 - DNA, 25 bp, Homo sapien
aatttctagacttagcaggccagcg

SEQ ID NO: 210563 - DNA, 25 bp, Homo sapien
cactggcatgacctgagtgctgtag

SEQ ID NO: 210564 - DNA, 25 bp, Homo sapien
aaaggtggcagtgagttgaaattgt

SEQ ID NO: 210565 - DNA, 25 bp, Homo sapien
gagttgaaattgtgcactgtactcc

SEQ ID NO: 210566 - DNA, 25 bp, Homo sapien
tgagttgaaattgtgcactgtactc

SEQ ID NO: 210567 - DNA, 25 bp, Homo sapien
cagtgagttgaaattgtgcactgta

SEQ ID NO: 210568 - DNA, 25 bp, Homo sapien
tcttgtcgggtggagcagcattcac

SEQ ID NO: 210569 - DNA, 25 bp, Homo sapien
tcagatgccggatgaataatttact

SEQ ID NO: 210570 - DNA, 25 bp, Homo sapien
atttactgtcgttgaaggtctgtgc

SEQ ID NO: 210571 - DNA, 25 bp, Homo sapien
agaaagagtagccacgcgcttttgc

SEQ ID NO: 210572 - DNA, 25 bp, Homo sapien
gatttcatcagtggtgttgtgtttt

SEQ ID NO: 210573 - DNA, 25 bp, Homo sapien
atttcatcagtggtgttgtgttttc

SEQ ID NO: 210574 - DNA, 25 bp, Homo sapien
tttcatcagtggtgttgtgttttcc

SEQ ID NO: 210575 - DNA, 25 bp, Homo sapien
ttcatcagtggtgttgtgttttcca

SEQ ID NO: 210576 - DNA, 25 bp, Homo sapien
ttgcttcagcaagccgtctgagccc

SEQ ID NO: 210577 - DNA, 25 bp, Homo sapien
gtctgagcccctccaagtgtttctt

SEQ ID NO: 210578 - DNA, 25 bp, Homo sapien
tattcccgggcctgacttgcttcag

SEQ ID NO: 210579 - DNA, 25 bp, Homo sapien
gacattccacttattcccgggcctg

SEQ ID NO: 210580 - DNA, 25 bp, Homo sapien
agtgaaatcatgtgacgttctttct

SEQ ID NO: 210581 - DNA, 25 bp, Homo sapien
ccccaaacaggtgcgcgccatgaca

SEQ ID NO: 210582 - DNA, 25 bp, Homo sapien
aaatcatgtgacgttctttctgtgc

SEQ ID NO: 210583 - DNA, 25 bp, Homo sapien
gaaatcatgtgacgttctttctgtg

SEQ ID NO: 210584 - DNA, 25 bp, Homo sapien
cagaaatttgggtaacctggagatc

SEQ ID NO: 210585 - DNA, 25 bp, Homo sapien
ttctgtgagagccattatagcaaat

SEQ ID NO: 210586 - DNA, 25 bp, Homo sapien
ttattgaacctgaggaggggatccg

SEQ ID NO: 210587 - DNA, 25 bp, Homo sapien
gtaacctggagatcaactacctgtg

SEQ ID NO: 210588 - DNA, 25 bp, Homo sapien
tttccagatgggtcactagcgactg

SEQ ID NO: 210589 - DNA, 25 bp, Homo sapien
caggttttaagctctcagtgaaagc

SEQ ID NO: 210590 - DNA, 25 bp, Homo sapien
gatgctgagtgtctagagtaaccta

SEQ ID NO: 210591 - DNA, 25 bp, Homo sapien
cagtgaaagctccacgcagaaaggg

SEQ ID NO: 210592 - DNA, 25 bp, Homo sapien
tctgcactatgtgtctagaaagagg

SEQ ID NO: 210593 - DNA, 25 bp, Homo sapien
gatgtcttagataagccttccgtac

SEQ ID NO: 210594 - DNA, 25 bp, Homo sapien
gcttttggagatgctttactgcaca

SEQ ID NO: 210595 - DNA, 25 bp, Homo sapien
ccaagaccaacatgtcaggaatgca

SEQ ID NO: 210596 - DNA, 25 bp, Homo sapien
taaactcttagccactgcacagtct

SEQ ID NO: 210597 - DNA, 25 bp, Homo sapien
gcacagtcttgcagcaaggctgagt

SEQ ID NO: 210598 - DNA, 25 bp, Homo sapien
gatctaaactcttagccactgcaca

SEQ ID NO: 210599 - DNA, 25 bp, Homo sapien
tatagatctaaactcttagccactg

SEQ ID NO: 210600 - DNA, 25 bp, Homo sapien
gataatatttctggtctagggactc

SEQ ID NO: 210601 - DNA, 25 bp, Homo sapien
tagaccaacagggatggcagactcc

SEQ ID NO: 210602 - DNA, 25 bp, Homo sapien
gaaaccctgagctaccagagagaac

SEQ ID NO: 210603 - DNA, 25 bp, Homo sapien
tgccagttagcacttaagagggaag

SEQ ID NO: 210604 - DNA, 25 bp, Homo sapien
tgtgatggcagtttccaaaaattgc

SEQ ID NO: 210605 - DNA, 25 bp, Homo sapien
tagatctggacctttggttgacctt

SEQ ID NO: 210606 - DNA, 25 bp, Homo sapien
gaatccattgtcaagaatttcattt

SEQ ID NO: 210607 - DNA, 25 bp, Homo sapien
tagtaaatgtcattaatcttagaat

SEQ ID NO: 210608 - DNA, 25 bp, Homo sapien
tcagacggggcagttgccaggcgga

SEQ ID NO: 210609 - DNA, 25 bp, Homo sapien
ggcagttgccaggcggagggtctcc

SEQ ID NO: 210610 - DNA, 25 bp, Homo sapien
acggggcagttgccaggcggagggt

SEQ ID NO: 210611 - DNA, 25 bp, Homo sapien
catctcccagacggggtcccggccg

SEQ ID NO: 210612 - DNA, 25 bp, Homo sapien
caccattgagcaccgagtgaactag

SEQ ID NO: 210613 - DNA, 25 bp, Homo sapien
ggcggcccggcagagacactcctca

SEQ ID NO: 210614 - DNA, 25 bp, Homo sapien
ggcaccattgagcaccgagtgaact

SEQ ID NO: 210615 - DNA, 25 bp, Homo sapien
cggcccggcagagacactcctcact

SEQ ID NO: 210616 - DNA, 25 bp, Homo sapien
aaaacagtatgcttttgttcaacaa

SEQ ID NO: 210617 - DNA, 25 bp, Homo sapien
tttaaagacaatctactgaaagata

SEQ ID NO: 210618 - DNA, 25 bp, Homo sapien
aatgacaatgcatgtaactattaga

SEQ ID NO: 210619 - DNA, 25 bp, Homo sapien
aaagagagacaaattttgactagat

SEQ ID NO: 210620 - DNA, 25 bp, Homo sapien
gccatcaatataaggaacatctcca

SEQ ID NO: 210621 - DNA, 25 bp, Homo sapien
cagtatgtagtcttacgtggctcac

SEQ ID NO: 210622 - DNA, 25 bp, Homo sapien
caaggtgtcgacaaaggctgcaggc

SEQ ID NO: 210623 - DNA, 25 bp, Homo sapien
tagctaagtatctctggctcaaggt

SEQ ID NO: 210624 - DNA, 25 bp, Homo sapien
cttacagacacgtgggctcctccag

SEQ ID NO: 210625 - DNA, 25 bp, Homo sapien
caggagtctgcctcacaccatggca

SEQ ID NO: 210626 - DNA, 25 bp, Homo sapien
tgttgacaggcctcaaaagatctgc

SEQ ID NO: 210627 - DNA, 25 bp, Homo sapien
ctgcttctacttacagacacgtggg

SEQ ID NO: 210628 - DNA, 25 bp, Homo sapien
tcgtctgtgatggtaggcattcccc

SEQ ID NO: 210629 - DNA, 25 bp, Homo sapien
ctttctctttcgtctgtgatggtag

SEQ ID NO: 210630 - DNA, 25 bp, Homo sapien
ctggagtacaaattcaatacccttt

SEQ ID NO: 210631 - DNA, 25 bp, Homo sapien
tagtcctaatccttattgacctctc

SEQ ID NO: 210632 - DNA, 25 bp, Homo sapien
gatgactagaaattgatatctggaa

SEQ ID NO: 210633 - DNA, 25 bp, Homo sapien
aaactagaagggaattaatcagatg

SEQ ID NO: 210634 - DNA, 25 bp, Homo sapien
tctgaaaactagaagggaattaatc

SEQ ID NO: 210635 - DNA, 25 bp, Homo sapien
gaagggaattaatcagatgactaga

SEQ ID NO: 210636 - DNA, 25 bp, Homo sapien
cttaaagtgtgtgggctcagagtgc

SEQ ID NO: 210637 - DNA, 25 bp, Homo sapien
tctcccatgggtgtcttgtcctagg

SEQ ID NO: 210638 - DNA, 25 bp, Homo sapien
tggcatacagcgaaccgtcacttgg

SEQ ID NO: 210639 - DNA, 25 bp, Homo sapien
tatggcagatcaggtaagggcacag

SEQ ID NO: 210640 - DNA, 25 bp, Homo sapien
tctaattttagaagggcccatgaca

SEQ ID NO: 210641 - DNA, 25 bp, Homo sapien
tgaggtcatgggcatttttcagtta

SEQ ID NO: 210642 - DNA, 25 bp, Homo sapien
tctcggcttttcaactagaccttac

SEQ ID NO: 210643 - DNA, 25 bp, Homo sapien
gtccataaactagaacttctctcgg

SEQ ID NO: 210644 - DNA, 25 bp, Homo sapien
catgtttattcgtgaagaggttttc

SEQ ID NO: 210645 - DNA, 25 bp, Homo sapien
tgtttattcgtgaagaggttttcca

SEQ ID NO: 210646 - DNA, 25 bp, Homo sapien
tgccatgtttattcgtgaagaggtt

SEQ ID NO: 210647 - DNA, 25 bp, Homo sapien
aaatgccatgtttattcgtgaagag

SEQ ID NO: 210648 - DNA, 25 bp, Homo sapien
agttataaactgaaaggactgtcac

SEQ ID NO: 210649 - DNA, 25 bp, Homo sapien
attcagaagatgtgctgtgtaaacc

SEQ ID NO: 210650 - DNA, 25 bp, Homo sapien
ttaatttctgcgtctgttctcaggg

SEQ ID NO: 210651 - DNA, 25 bp, Homo sapien
ggcagagcatggttgaacccattct

SEQ ID NO: 210652 - DNA, 25 bp, Homo sapien
tgacaaccattgaccgatacgactg

SEQ ID NO: 210653 - DNA, 25 bp, Homo sapien
gaaagcatggcacttctgaggcgca

SEQ ID NO: 210654 - DNA, 25 bp, Homo sapien
gcttttaagtattcctcagggctgg

SEQ ID NO: 210655 - DNA, 25 bp, Homo sapien
gcaactttgatgtttccccagacga

SEQ ID NO: 210656 - DNA, 25 bp, Homo sapien
cttctgggacatactgacattttgc

SEQ ID NO: 210657 - DNA, 25 bp, Homo sapien
catactgtaacctgatgccatgtca

SEQ ID NO: 210658 - DNA, 25 bp, Homo sapien
gagaatagactgtcgcttgctgtct

SEQ ID NO: 210659 - DNA, 25 bp, Homo sapien
tgtcacccgtgacccgttcagtagg

SEQ ID NO: 210660 - DNA, 25 bp, Homo sapien
tcgtggcatgttcccgacagccctt

SEQ ID NO: 210661 - DNA, 25 bp, Homo sapien
tcggatggccactcgtggcatgttc

SEQ ID NO: 210662 - DNA, 25 bp, Homo sapien
ggccactcgtggcatgttcccgaca

SEQ ID NO: 210663 - DNA, 25 bp, Homo sapien
aaatccatttcggatggccactcgt

SEQ ID NO: 210664 - DNA, 25 bp, Homo sapien
catacttcattagaaccccggcaaa

SEQ ID NO: 210665 - DNA, 25 bp, Homo sapien
gacttagagataggttctggccaaa

SEQ ID NO: 210666 - DNA, 25 bp, Homo sapien
ctacaagcaaatggaaggtgacagg

SEQ ID NO: 210667 - DNA, 25 bp, Homo sapien
tcttaacttcactgggagtacagcc

SEQ ID NO: 210668 - DNA, 25 bp, Homo sapien
tcaaagtgctaacgcagtaaccgtc

SEQ ID NO: 210669 - DNA, 25 bp, Homo sapien
gagaggcccgagataacagcccaat

SEQ ID NO: 210670 - DNA, 25 bp, Homo sapien
cacttggtaacgaatgcccctggga

SEQ ID NO: 210671 - DNA, 25 bp, Homo sapien
tgatgccaaccacctctacagagtg

SEQ ID NO: 210672 - DNA, 25 bp, Homo sapien
aacgcattgctatgctggacgagca

SEQ ID NO: 210673 - DNA, 25 bp, Homo sapien
caggtgccttcgacagatgggagat

SEQ ID NO: 210674 - DNA, 25 bp, Homo sapien
tggacgagcagatcccatgtattcg

SEQ ID NO: 210675 - DNA, 25 bp, Homo sapien
tattcgtggcataggcgcagcttgc

SEQ ID NO: 210676 - DNA, 25 bp, Homo sapien
tttcagattgtgttcctccccagga

SEQ ID NO: 210677 - DNA, 25 bp, Homo sapien
tgacttagtgttggcaaggtcccgg

SEQ ID NO: 210678 - DNA, 25 bp, Homo sapien
tttacccagcagttcagagcagtga

SEQ ID NO: 210679 - DNA, 25 bp, Homo sapien
cacatagagggcatagctggccaca

SEQ ID NO: 210680 - DNA, 25 bp, Homo sapien
ggaaaccagtgaagctcatcagtag

SEQ ID NO: 210681 - DNA, 25 bp, Homo sapien
acattggtgcccctcatgggtgaga

SEQ ID NO: 210682 - DNA, 25 bp, Homo sapien
tttaggccaccgagttgattagagg

SEQ ID NO: 210683 - DNA, 25 bp, Homo sapien
taaggagaccatctgaagagaatcc

SEQ ID NO: 210684 - DNA, 25 bp, Homo sapien
tcactgctccatcgttgcttcaggc

SEQ ID NO: 210685 - DNA, 25 bp, Homo sapien
tgctccatcgttgcttcaggcaaaa

SEQ ID NO: 210686 - DNA, 25 bp, Homo sapien
tccatcgttgcttcaggcaaaagag

SEQ ID NO: 210687 - DNA, 25 bp, Homo sapien
catcgttgcttcaggcaaaagagtc

SEQ ID NO: 210688 - DNA, 25 bp, Homo sapien
gagtgtttgagaggccttttctgcc

SEQ ID NO: 210689 - DNA, 25 bp, Homo sapien
gtgagtgtttgagaggccttttctg

SEQ ID NO: 210690 - DNA, 25 bp, Homo sapien
tgagtgtttgagaggccttttctgc

SEQ ID NO: 210691 - DNA, 25 bp, Homo sapien
tagtctgggttttatatcgtctgca

SEQ ID NO: 210692 - DNA, 25 bp, Homo sapien
cactcaaagctcagtgtattcccaa

SEQ ID NO: 210693 - DNA, 25 bp, Homo sapien
gagatgcgggacaagtcaaagttgc

SEQ ID NO: 210694 - DNA, 25 bp, Homo sapien
ttttcacatgactcttggcactaag

SEQ ID NO: 210695 - DNA, 25 bp, Homo sapien
tagtatatcacactccacagggaag

SEQ ID NO: 210696 - DNA, 25 bp, Homo sapien
catcttaagagctgccactggagcc

SEQ ID NO: 210697 - DNA, 25 bp, Homo sapien
aatactggcccgctaggcaagcaga

SEQ ID NO: 210698 - DNA, 25 bp, Homo sapien
ggcatttagacacccaacagaggaa

SEQ ID NO: 210699 - DNA, 25 bp, Homo sapien
gggttagcccacttctgtaagcgtg

SEQ ID NO: 210700 - DNA, 25 bp, Homo sapien
tcaatcttacaatggagtggtccgg

SEQ ID NO: 210701 - DNA, 25 bp, Homo sapien
tatgatatgatcagtccccacaggc

SEQ ID NO: 210702 - DNA, 25 bp, Homo sapien
tgtgccacacaagaagggttagccc

SEQ ID NO: 210703 - DNA, 25 bp, Homo sapien
cacttcatgttgagcagatgttcca

SEQ ID NO: 210704 - DNA, 25 bp, Homo sapien
agcacgtgggcattcagcatctcca

SEQ ID NO: 210705 - DNA, 25 bp, Homo sapien
ggctgcactcggaccccgtgatgga

SEQ ID NO: 210706 - DNA, 25 bp, Homo sapien
gtgatggaggacttgcacccgcgaa

SEQ ID NO: 210707 - DNA, 25 bp, Homo sapien
tggagcacataatcccatcccaagc

SEQ ID NO: 210708 - DNA, 25 bp, Homo sapien
ttccttaacttgcagacacttttcc

SEQ ID NO: 210709 - DNA, 25 bp, Homo sapien
agcagagcagctccttagggcgcgt

SEQ ID NO: 210710 - DNA, 25 bp, Homo sapien
acttcaccctccgtggagcacataa

SEQ ID NO: 210711 - DNA, 25 bp, Homo sapien
caagtgagccagcttccggctgctg

SEQ ID NO: 210712 - DNA, 25 bp, Homo sapien
cagcatcctgggtcgctgtgaccag

SEQ ID NO: 210713 - DNA, 25 bp, Homo sapien
gcatcaggaggttagccaggcgcat

SEQ ID NO: 210714 - DNA, 25 bp, Homo sapien
aaagcatcggtcacggcgttcagca

SEQ ID NO: 210715 - DNA, 25 bp, Homo sapien
ttcacgaaccacagtcattgccaag

SEQ ID NO: 210716 - DNA, 25 bp, Homo sapien
cacgaaccacagtcattgccaaggc

SEQ ID NO: 210717 - DNA, 25 bp, Homo sapien
ccacttcacgaaccacagtcattgc

SEQ ID NO: 210718 - DNA, 25 bp, Homo sapien
cgaaccacagtcattgccaaggcca

SEQ ID NO: 210719 - DNA, 25 bp, Homo sapien
cagccacagcggtttggggaggtga

SEQ ID NO: 210720 - DNA, 25 bp, Homo sapien
agccacagcggtttggggaggtgag

SEQ ID NO: 210721 - DNA, 25 bp, Homo sapien
cagcccacctggtgacattctgagc

SEQ ID NO: 210722 - DNA, 25 bp, Homo sapien
agcccacctggtgacattctgagca

SEQ ID NO: 210723 - DNA, 25 bp, Homo sapien
gatttgccacgtctgatttgttcaa

SEQ ID NO: 210724 - DNA, 25 bp, Homo sapien
tctgatttgttcaaaggatgaaaac

SEQ ID NO: 210725 - DNA, 25 bp, Homo sapien
gggagccgtatgtggcgtttgcttg

SEQ ID NO: 210726 - DNA, 25 bp, Homo sapien
gagccgtatgtggcgtttgcttgtt

SEQ ID NO: 210727 - DNA, 25 bp, Homo sapien
ctttggggagccgtatgtggcgttt

SEQ ID NO: 210728 - DNA, 25 bp, Homo sapien
tggggagccgtatgtggcgtttgct

SEQ ID NO: 210729 - DNA, 25 bp, Homo sapien
taaaatgcctataaggagccttgcc

SEQ ID NO: 210730 - DNA, 25 bp, Homo sapien
caacacaatatgatgtctgggaggc

SEQ ID NO: 210731 - DNA, 25 bp, Homo sapien
agcaaacagtgctttccgagaagca

SEQ ID NO: 210732 - DNA, 25 bp, Homo sapien
cagatgctgcgtctagctttgacaa

SEQ ID NO: 210733 - DNA, 25 bp, Homo sapien
ctgcacagaaaagagatctaaatta

SEQ ID NO: 210734 - DNA, 25 bp, Homo sapien
gcacagaaaagagatctaaattatt

SEQ ID NO: 210735 - DNA, 25 bp, Homo sapien
cacagaaaagagatctaaattattt

SEQ ID NO: 210736 - DNA, 25 bp, Homo sapien
tgcacagaaaagagatctaaattat

SEQ ID NO: 210737 - DNA, 25 bp, Homo sapien
gaagccccatcatctggcatttgat

SEQ ID NO: 210738 - DNA, 25 bp, Homo sapien
gaaggtactcttcaagcagatcctc

SEQ ID NO: 210739 - DNA, 25 bp, Homo sapien
gagaagccccatcatctggcatttg

SEQ ID NO: 210740 - DNA, 25 bp, Homo sapien
tgccaagatgggaaggtactcttca

SEQ ID NO: 210741 - DNA, 25 bp, Homo sapien
gccaggagcatgtcaaagatttcca

SEQ ID NO: 210742 - DNA, 25 bp, Homo sapien
aaccttgaagtagttgccaggagca

SEQ ID NO: 210743 - DNA, 25 bp, Homo sapien
cacagagatattctttgtgttggag

SEQ ID NO: 210744 - DNA, 25 bp, Homo sapien
gagcaggatcatggccttgacacag

SEQ ID NO: 210745 - DNA, 25 bp, Homo sapien
ggggcatcactcttcatctgtgtaa

SEQ ID NO: 210746 - DNA, 25 bp, Homo sapien
ctgtgtaacacagggtcttctgatg

SEQ ID NO: 210747 - DNA, 25 bp, Homo sapien
cttggggcatcactcttcatctgtg

SEQ ID NO: 210748 - DNA, 25 bp, Homo sapien
atctgtgtaacacagggtcttctga

SEQ ID NO: 210749 - DNA, 25 bp, Homo sapien
ctccaagagccgcacttggtcgaac

SEQ ID NO: 210750 - DNA, 25 bp, Homo sapien
gggtggtcaattgagcgccacatca

SEQ ID NO: 210751 - DNA, 25 bp, Homo sapien
gtggtcaattgagcgccacatcagc

SEQ ID NO: 210752 - DNA, 25 bp, Homo sapien
acttggtcgaacaggctgagctcca

SEQ ID NO: 210753 - DNA, 25 bp, Homo sapien
gcagctgctcgtcggcacttctctg

SEQ ID NO: 210754 - DNA, 25 bp, Homo sapien
gtggccgccacttctcttggccttg

SEQ ID NO: 210755 - DNA, 25 bp, Homo sapien
ggccaacttggtcagggacatcatc

SEQ ID NO: 210756 - DNA, 25 bp, Homo sapien
tcatgtgtaccaactccttgtcggc

SEQ ID NO: 210757 - DNA, 25 bp, Homo sapien
caaagattactatggtcgtgaccgt

SEQ ID NO: 210758 - DNA, 25 bp, Homo sapien
gtgaccgtactagcaaaaccaacga

SEQ ID NO: 210759 - DNA, 25 bp, Homo sapien
caaaaccaacgacataacttttcag

SEQ ID NO: 210760 - DNA, 25 bp, Homo sapien
tactatggtcgtgaccgtactagca

SEQ ID NO: 210761 - DNA, 25 bp, Homo sapien
tgtacactgatttgtagctggacaa

SEQ ID NO: 210762 - DNA, 25 bp, Homo sapien
taacacttccgaagtcggcaggcct

SEQ ID NO: 210763 - DNA, 25 bp, Homo sapien
gcgccggtttttatcgattgtacac

SEQ ID NO: 210764 - DNA, 25 bp, Homo sapien
ctggcagctcttgcgccggttttta

SEQ ID NO: 210765 - DNA, 25 bp, Homo sapien
cttcacacgaccagactccatagtg

SEQ ID NO: 210766 - DNA, 25 bp, Homo sapien
gaccagactccatagtgatatcccg

SEQ ID NO: 210767 - DNA, 25 bp, Homo sapien
tagtgatatcccgatgcgtaatcgc

SEQ ID NO: 210768 - DNA, 25 bp, Homo sapien
gatgcgtaatcgctgcagacagcgc

SEQ ID NO: 210769 - DNA, 25 bp, Homo sapien
cactaaccttccttttcagtgtctc

SEQ ID NO: 210770 - DNA, 25 bp, Homo sapien
ctggcgcaacggttcccactaacct

SEQ ID NO: 210771 - DNA, 25 bp, Homo sapien
ccactaaccttccttttcagtgtct

SEQ ID NO: 210772 - DNA, 25 bp, Homo sapien
actaaccttccttttcagtgtctct

SEQ ID NO: 210773 - DNA, 25 bp, Homo sapien
ccacaggcaggatatgcattggtct

SEQ ID NO: 210774 - DNA, 25 bp, Homo sapien
tgggtgtgaaggcattcaaccactt

SEQ ID NO: 210775 - DNA, 25 bp, Homo sapien
gctaagcagcccttcagacatttga

SEQ ID NO: 210776 - DNA, 25 bp, Homo sapien
tactagagttcacgaatgctgcatg

SEQ ID NO: 210777 - DNA, 25 bp, Homo sapien
gataactggcgatggaccactaaag

SEQ ID NO: 210778 - DNA, 25 bp, Homo sapien
tcacagcagggctatagaatgtcat

SEQ ID NO: 210779 - DNA, 25 bp, Homo sapien
cacatttgggcttgtggtctgccga

SEQ ID NO: 210780 - DNA, 25 bp, Homo sapien
gactcttttgaggttccgcatacag

SEQ ID NO: 210781 - DNA, 25 bp, Homo sapien
aaggtatgtatatggagccgtgctc

SEQ ID NO: 210782 - DNA, 25 bp, Homo sapien
ggtatgtatatggagccgtgctcca

SEQ ID NO: 210783 - DNA, 25 bp, Homo sapien
ggagccgtgctccaggggtaagatg

SEQ ID NO: 210784 - DNA, 25 bp, Homo sapien
tatgtatatggagccgtgctccagg

SEQ ID NO: 210785 - DNA, 25 bp, Homo sapien
gagaattaaggctagatggtgagtt

SEQ ID NO: 210786 - DNA, 25 bp, Homo sapien
aaggctagatggtgagttttttata

SEQ ID NO: 210787 - DNA, 25 bp, Homo sapien
ctagatggtgagttttttatatcca

SEQ ID NO: 210788 - DNA, 25 bp, Homo sapien
ctgcagttgtaggaggaaggagaat

SEQ ID NO: 210789 - DNA, 25 bp, Homo sapien
cttgagataacagctgagaaaacac

SEQ ID NO: 210790 - DNA, 25 bp, Homo sapien
tcttgagataacagctgagaaaaca

SEQ ID NO: 210791 - DNA, 25 bp, Homo sapien
gtcttgagataacagctgagaaaac

SEQ ID NO: 210792 - DNA, 25 bp, Homo sapien
ataatgttctcaaagattcgtgggc

SEQ ID NO: 210793 - DNA, 25 bp, Homo sapien
tctcaaagattcgtgggcaagtata

SEQ ID NO: 210794 - DNA, 25 bp, Homo sapien
tcaaagattcgtgggcaagtataat

SEQ ID NO: 210795 - DNA, 25 bp, Homo sapien
tgttctcaaagattcgtgggcaagt

SEQ ID NO: 210796 - DNA, 25 bp, Homo sapien
tcaagcttgcagactaggaggataa

SEQ ID NO: 210797 - DNA, 25 bp, Homo sapien
aaaatgccacatattcctgatgcca

SEQ ID NO: 210798 - DNA, 25 bp, Homo sapien
catattctcaagcttgcagactagg

SEQ ID NO: 210799 - DNA, 25 bp, Homo sapien
tcctgatgccatattctcaagcttg

SEQ ID NO: 210800 - DNA, 25 bp, Homo sapien
tccaataagaataacacgcagggtg

SEQ ID NO: 210801 - DNA, 25 bp, Homo sapien
ggagaccagttagagcttagcttgg

SEQ ID NO: 210802 - DNA, 25 bp, Homo sapien
tgttagagggcagttgttggactcc

SEQ ID NO: 210803 - DNA, 25 bp, Homo sapien
tcttcagcaaataaaggagaccagt

SEQ ID NO: 210804 - DNA, 25 bp, Homo sapien
gacacgtgcttttcccgcattaggg

SEQ ID NO: 210805 - DNA, 25 bp, Homo sapien
ggccttgccttctctaaaatgcgga

SEQ ID NO: 210806 - DNA, 25 bp, Homo sapien
cttctctaaaatgcggacacgtgct

SEQ ID NO: 210807 - DNA, 25 bp, Homo sapien
aaaatgcggacacgtgcttttcccg

SEQ ID NO: 210808 - DNA, 25 bp, Homo sapien
gcccgtcgcagctcgggtggtccct

SEQ ID NO: 210809 - DNA, 25 bp, Homo sapien
cagcgctcgccgcctgctcttcgcc

SEQ ID NO: 210810 - DNA, 25 bp, Homo sapien
cgcagccccagagcccgtcgcagct

SEQ ID NO: 210811 - DNA, 25 bp, Homo sapien
gcagctcgggtggtccctccccggc

SEQ ID NO: 210812 - DNA, 25 bp, Homo sapien
aagaggcagttatttctcgcagcct

SEQ ID NO: 210813 - DNA, 25 bp, Homo sapien
ttatttctcgcagcctccgcgcttg

SEQ ID NO: 210814 - DNA, 25 bp, Homo sapien
cctccgcgcttgcaactgcctcctg

SEQ ID NO: 210815 - DNA, 25 bp, Homo sapien
ctgcaagtttcaagaggcagttatt

SEQ ID NO: 210816 - DNA, 25 bp, Homo sapien
tcacaagcgacttaacgataagccc

SEQ ID NO: 210817 - DNA, 25 bp, Homo sapien
ctgaaaagatcacaagcgacttaac

SEQ ID NO: 210818 - DNA, 25 bp, Homo sapien
agcgacttaacgataagccccttct

SEQ ID NO: 210819 - DNA, 25 bp, Homo sapien
gatcacaagcgacttaacgataagc

SEQ ID NO: 210820 - DNA, 25 bp, Homo sapien
gggaaggcctttcgcgttagatcaa

SEQ ID NO: 210821 - DNA, 25 bp, Homo sapien
tcaaagatcccaggtacttcctcga

SEQ ID NO: 210822 - DNA, 25 bp, Homo sapien
ttcgcgttagatcaaagatcccagg

SEQ ID NO: 210823 - DNA, 25 bp, Homo sapien
gatcccaggtacttcctcgaactca

SEQ ID NO: 210824 - DNA, 25 bp, Homo sapien
tcttctcgggcgaaggcccctcgcg

SEQ ID NO: 210825 - DNA, 25 bp, Homo sapien
cacggcgcccttctccgctggaggc

SEQ ID NO: 210826 - DNA, 25 bp, Homo sapien
tgaagtggcaccggggagacctgtg

SEQ ID NO: 210827 - DNA, 25 bp, Homo sapien
cgcccttctccgctggaggcacctg

SEQ ID NO: 210828 - DNA, 25 bp, Homo sapien
tgtcaacacaacctgcgctgcgatt

SEQ ID NO: 210829 - DNA, 25 bp, Homo sapien
tagcacaatccacgcgttcaacaaa

SEQ ID NO: 210830 - DNA, 25 bp, Homo sapien
gtttgctgaagcctttgacttggaa

SEQ ID NO: 210831 - DNA, 25 bp, Homo sapien
ctagcattctccatggtccataaca

SEQ ID NO: 210832 - DNA, 25 bp, Homo sapien
atgtctgtcctgtagagcccagata

SEQ ID NO: 210833 - DNA, 25 bp, Homo sapien
gaggcatgtctgtcctgtagagccc

SEQ ID NO: 210834 - DNA, 25 bp, Homo sapien
tgttgcataaatggaggcatgtctg

SEQ ID NO: 210835 - DNA, 25 bp, Homo sapien
tatttgttgcataaatggaggcatg

SEQ ID NO: 210836 - DNA, 25 bp, Homo sapien
gagtccctcgttcttccactttagc

SEQ ID NO: 210837 - DNA, 25 bp, Homo sapien
gtaggctacaaactacctccatctg

SEQ ID NO: 210838 - DNA, 25 bp, Homo sapien
cagggcacctgtaggctacaaacta

SEQ ID NO: 210839 - DNA, 25 bp, Homo sapien
cagggctaattagagggcgctgatc

SEQ ID NO: 210840 - DNA, 25 bp, Homo sapien
gctgggagaagagagcccaggattt

SEQ ID NO: 210841 - DNA, 25 bp, Homo sapien
tgtggctgggagaagagagcccagg

SEQ ID NO: 210842 - DNA, 25 bp, Homo sapien
cttgtggctgggagaagagagccca

SEQ ID NO: 210843 - DNA, 25 bp, Homo sapien
tggctgggagaagagagcccaggat

SEQ ID NO: 210844 - DNA, 25 bp, Homo sapien
ctaagagatggcaaggagcaggttt

SEQ ID NO: 210845 - DNA, 25 bp, Homo sapien
gcaaggagcaggttttcctctttgg

SEQ ID NO: 210846 - DNA, 25 bp, Homo sapien
agagatggcaaggagcaggttttcc

SEQ ID NO: 210847 - DNA, 25 bp, Homo sapien
atggcaaggagcaggttttcctctt

SEQ ID NO: 210848 - DNA, 25 bp, Homo sapien
ctgatagaagtgaacacttcttggc

SEQ ID NO: 210849 - DNA, 25 bp, Homo sapien
gctcaggtcggcttcttttttcaaa

SEQ ID NO: 210850 - DNA, 25 bp, Homo sapien
ggcactgatagaagtgaacacttct

SEQ ID NO: 210851 - DNA, 25 bp, Homo sapien
aagtgaacacttcttggctgttctc

SEQ ID NO: 210852 - DNA, 25 bp, Homo sapien
gctcaaattctaacaaggatcacct

SEQ ID NO: 210853 - DNA, 25 bp, Homo sapien
tcctggatagcgttaagggctcaaa

SEQ ID NO: 210854 - DNA, 25 bp, Homo sapien
ttcaacctccagtcctggatagcgt

SEQ ID NO: 210855 - DNA, 25 bp, Homo sapien
ctctatcgtcccttcaacctccagt

SEQ ID NO: 210856 - DNA, 25 bp, Homo sapien
tcaaggatcttttgttgttccctat

SEQ ID NO: 210857 - DNA, 25 bp, Homo sapien
ccaggtatttcaaggatcttttgtt

SEQ ID NO: 210858 - DNA, 25 bp, Homo sapien
caaggatcttttgttgttccctata

SEQ ID NO: 210859 - DNA, 25 bp, Homo sapien
tatttcaaggatcttttgttgttcc

SEQ ID NO: 210860 - DNA, 25 bp, Homo sapien
aaacagctgttcataaagatgatac

SEQ ID NO: 210861 - DNA, 25 bp, Homo sapien
acagctgttcataaagatgatacag

SEQ ID NO: 210862 - DNA, 25 bp, Homo sapien
caaacagctgttcataaagatgata

SEQ ID NO: 210863 - DNA, 25 bp, Homo sapien
aacagctgttcataaagatgataca

SEQ ID NO: 210864 - DNA, 25 bp, Homo sapien
ggatgagccccacccaaattatgaa

SEQ ID NO: 210865 - DNA, 25 bp, Homo sapien
gtcaagataaactacccggctaggc

SEQ ID NO: 210866 - DNA, 25 bp, Homo sapien
ccaaaatttgcagggtgggccaata

SEQ ID NO: 210867 - DNA, 25 bp, Homo sapien
gcgggcagatcacgtaatttcagga

SEQ ID NO: 210868 - DNA, 25 bp, Homo sapien
gagtttagtctcttagtttgagtaa

SEQ ID NO: 210869 - DNA, 25 bp, Homo sapien
tagtctcttagtttgagtaaatatt

SEQ ID NO: 210870 - DNA, 25 bp, Homo sapien
tctgtttcaggctcctatgttttcc

SEQ ID NO: 210871 - DNA, 25 bp, Homo sapien
tcttgttgctggctactgagtttag

SEQ ID NO: 210872 - DNA, 25 bp, Homo sapien
tttgaagattctttacctaaataga

SEQ ID NO: 210873 - DNA, 25 bp, Homo sapien
tcactacgacgagaacaacagggag

SEQ ID NO: 210874 - DNA, 25 bp, Homo sapien
gattctttacctaaatagaaggcat

SEQ ID NO: 210875 - DNA, 25 bp, Homo sapien
aaaccatatcatatgagaagtttgt

SEQ ID NO: 210876 - DNA, 25 bp, Homo sapien
cttctacaaaaaggagtaaacactg

SEQ ID NO: 210877 - DNA, 25 bp, Homo sapien
agccactgttcctggacaacacatt

SEQ ID NO: 210878 - DNA, 25 bp, Homo sapien
tatgtgtacaagctgtgataaacac

SEQ ID NO: 210879 - DNA, 25 bp, Homo sapien
taggataaacttccacaggtgaaat

SEQ ID NO: 210880 - DNA, 25 bp, Homo sapien
tcacctgtcttgtaaggcagcatgc

SEQ ID NO: 210881 - DNA, 25 bp, Homo sapien
tacaaacaggccattctcagtcttc

SEQ ID NO: 210882 - DNA, 25 bp, Homo sapien
taaacactgcagtgtcctaggcatc

SEQ ID NO: 210883 - DNA, 25 bp, Homo sapien
cctaggcatcggtatttggttgtct

SEQ ID NO: 210884 - DNA, 25 bp, Homo sapien
cctctaaaatatccgcttgtgcaaa

SEQ ID NO: 210885 - DNA, 25 bp, Homo sapien
aatttcacttgctcaggtataaaac

SEQ ID NO: 210886 - DNA, 25 bp, Homo sapien
aacaacttaagtggacattttcaga

SEQ ID NO: 210887 - DNA, 25 bp, Homo sapien
tttcagaagctcttatattacactg

SEQ ID NO: 210888 - DNA, 25 bp, Homo sapien
tgactgtaacctgagcgcggttcct

SEQ ID NO: 210889 - DNA, 25 bp, Homo sapien
ttcatcggactcagtaactcaaggg

SEQ ID NO: 210890 - DNA, 25 bp, Homo sapien
ctccagtgtggacgcctacgaggag

SEQ ID NO: 210891 - DNA, 25 bp, Homo sapien
tctcgacagttaactggcatctagc

SEQ ID NO: 210892 - DNA, 25 bp, Homo sapien
catctgctgtagagtccagcgcccg

SEQ ID NO: 210893 - DNA, 25 bp, Homo sapien
gaggagattctaaaagcgcggtgct

SEQ ID NO: 210894 - DNA, 25 bp, Homo sapien
tatgaagcccgcgtggattctccaa

SEQ ID NO: 210895 - DNA, 25 bp, Homo sapien
acccactgctgagcgtcagattcag

SEQ ID NO: 210896 - DNA, 25 bp, Homo sapien
agctgaggagcatccgggagactcg

SEQ ID NO: 210897 - DNA, 25 bp, Homo sapien
aggagcatccgggagactcgccgcc

SEQ ID NO: 210898 - DNA, 25 bp, Homo sapien
gcgccctcacacttctgcaccgcgt

SEQ ID NO: 210899 - DNA, 25 bp, Homo sapien
tggaagccgggcgccctcacacttc

SEQ ID NO: 210900 - DNA, 25 bp, Homo sapien
gctaacgttttgcactgccccatga

SEQ ID NO: 210901 - DNA, 25 bp, Homo sapien
gaactggaatctctggataggccta

SEQ ID NO: 210902 - DNA, 25 bp, Homo sapien
ttctaggaaacagtgttccaggtcc

SEQ ID NO: 210903 - DNA, 25 bp, Homo sapien
tccttgaaggatctcccctgtttgc

SEQ ID NO: 210904 - DNA, 25 bp, Homo sapien
ctcagaaagtggctctttcagaaac

SEQ ID NO: 210905 - DNA, 25 bp, Homo sapien
tatgctcagaaagtggctctttcag

SEQ ID NO: 210906 - DNA, 25 bp, Homo sapien
agtggctctttcagaaactggccca

SEQ ID NO: 210907 - DNA, 25 bp, Homo sapien
aaagtggctctttcagaaactggcc

SEQ ID NO: 210908 - DNA, 25 bp, Homo sapien
acaccttggccttcatggagagctt

SEQ ID NO: 210909 - DNA, 25 bp, Homo sapien
cttggctgtaggagctggtagggcc

SEQ ID NO: 210910 - DNA, 25 bp, Homo sapien
cctccatttcctgagagaagggtgt

SEQ ID NO: 210911 - DNA, 25 bp, Homo sapien
taggagctggtagggcctccatttc

SEQ ID NO: 210912 - DNA, 25 bp, Homo sapien
ggaacctagtgagtaagccctgcct

SEQ ID NO: 210913 - DNA, 25 bp, Homo sapien
accctcactcccaaaaaggcttgat

SEQ ID NO: 210914 - DNA, 25 bp, Homo sapien
aaactttagaaactgcactcactgt

SEQ ID NO: 210915 - DNA, 25 bp, Homo sapien
tgcctccagctaccctaaagtagaa

SEQ ID NO: 210916 - DNA, 25 bp, Homo sapien
aaagggcttgtaggttccaggtgct

SEQ ID NO: 210917 - DNA, 25 bp, Homo sapien
catagatgccaagaagtgaccatga

SEQ ID NO: 210918 - DNA, 25 bp, Homo sapien
ggataagcacttgacctaaactggg

SEQ ID NO: 210919 - DNA, 25 bp, Homo sapien
aagtgacacacatggtttcccctga

SEQ ID NO: 210920 - DNA, 25 bp, Homo sapien
gtgacagcatctaacatctgctggg

SEQ ID NO: 210921 - DNA, 25 bp, Homo sapien
cctgatacttcttcaggtgcgctct

SEQ ID NO: 210922 - DNA, 25 bp, Homo sapien
gcagagtctaatgtagttttcaagt

SEQ ID NO: 210923 - DNA, 25 bp, Homo sapien
tgccttttgctctgcagagtctaat

SEQ ID NO: 210924 - DNA, 25 bp, Homo sapien
ctaaagattgcctgagctcttcaat

SEQ ID NO: 210925 - DNA, 25 bp, Homo sapien
gcctgagctcttcaattgttttgtc

SEQ ID NO: 210926 - DNA, 25 bp, Homo sapien
attgcctgagctcttcaattgtttt

SEQ ID NO: 210927 - DNA, 25 bp, Homo sapien
agattgcctgagctcttcaattgtt

SEQ ID NO: 210928 - DNA, 25 bp, Homo sapien
tttaaggacatttactcttgtcagc

SEQ ID NO: 210929 - DNA, 25 bp, Homo sapien
tactcttgtcagctgagttttcata

SEQ ID NO: 210930 - DNA, 25 bp, Homo sapien
ttctcctccaatctttgcgtagtag

SEQ ID NO: 210931 - DNA, 25 bp, Homo sapien
cctccaatctttgcgtagtagcaat

SEQ ID NO: 210932 - DNA, 25 bp, Homo sapien
ttgttttgttgcatgttgtctttct

SEQ ID NO: 210933 - DNA, 25 bp, Homo sapien
tttctctagctttttgaacttcttg

SEQ ID NO: 210934 - DNA, 25 bp, Homo sapien
ttttgttgcatgttgtctttctcta

SEQ ID NO: 210935 - DNA, 25 bp, Homo sapien
ttgttgcatgttgtctttctctagc

SEQ ID NO: 210936 - DNA, 25 bp, Homo sapien
tactagttatcgcaaaatggtggga

SEQ ID NO: 210937 - DNA, 25 bp, Homo sapien
taatcagagggaaatatacctatat

SEQ ID NO: 210938 - DNA, 25 bp, Homo sapien
tctactttacaaatcttcactaata

SEQ ID NO: 210939 - DNA, 25 bp, Homo sapien
ttacaaatcttcactaatacacatg

SEQ ID NO: 210940 - DNA, 25 bp, Homo sapien
aaaagactcttggtatatttgattt

SEQ ID NO: 210941 - DNA, 25 bp, Homo sapien
ctgctccttttcaataaaagactct

SEQ ID NO: 210942 - DNA, 25 bp, Homo sapien
taaaagactcttggtatatttgatt

SEQ ID NO: 210943 - DNA, 25 bp, Homo sapien
cttcctgtccaagtctaatctctct

SEQ ID NO: 210944 - DNA, 25 bp, Homo sapien
gcagctgctctagtcacttagtgag

SEQ ID NO: 210945 - DNA, 25 bp, Homo sapien
ttcagcttgggatgattcttgagca

SEQ ID NO: 210946 - DNA, 25 bp, Homo sapien
gtccaagtctaatctctcttgaaaa

SEQ ID NO: 210947 - DNA, 25 bp, Homo sapien
ccaccatgccttgttgtgatgcaat

SEQ ID NO: 210948 - DNA, 25 bp, Homo sapien
gaatatactaaaatgatctggacat

SEQ ID NO: 210949 - DNA, 25 bp, Homo sapien
gagatatatccacttaaacatgctg

SEQ ID NO: 210950 - DNA, 25 bp, Homo sapien
gatatggaggactaactgtacctat

SEQ ID NO: 210951 - DNA, 25 bp, Homo sapien
gagacaatactgtcatgcagaagaa

SEQ ID NO: 210952 - DNA, 25 bp, Homo sapien
ctctgtggctggtaaggagacaata

SEQ ID NO: 210953 - DNA, 25 bp, Homo sapien
gaagaatgctgtcccgcaataacca

SEQ ID NO: 210954 - DNA, 25 bp, Homo sapien
tctcatttgcaccaatttcccaaat

SEQ ID NO: 210955 - DNA, 25 bp, Homo sapien
gacgtctgtctaactcgatgcttgc

SEQ ID NO: 210956 - DNA, 25 bp, Homo sapien
agttgaatgaatatggacgtctgtc

SEQ ID NO: 210957 - DNA, 25 bp, Homo sapien
tctttagggttcaaatcttgttgac

SEQ ID NO: 210958 - DNA, 25 bp, Homo sapien
tccttcagagtgaatagtattgtcc

SEQ ID NO: 210959 - DNA, 25 bp, Homo sapien
tcttgtcgtgtaaaaccaagacata

SEQ ID NO: 210960 - DNA, 25 bp, Homo sapien
cctcgggagctgagtaagcaagttc

SEQ ID NO: 210961 - DNA, 25 bp, Homo sapien
gccaccttcaacctcgggagctgag

SEQ ID NO: 210962 - DNA, 25 bp, Homo sapien
gtcgtgtaaaaccaagacatagaag

SEQ ID NO: 210963 - DNA, 25 bp, Homo sapien
gatgaatctgttagtgcctgagaac

SEQ ID NO: 210964 - DNA, 25 bp, Homo sapien
gaaatcttattgtccattcatatgc

SEQ ID NO: 210965 - DNA, 25 bp, Homo sapien
catatgcatataagggatgaatctg

SEQ ID NO: 210966 - DNA, 25 bp, Homo sapien
acaacaactccaaaaagtctgcttt

SEQ ID NO: 210967 - DNA, 25 bp, Homo sapien
tgttaagggtcgagctatagctaac

SEQ ID NO: 210968 - DNA, 25 bp, Homo sapien
tagctgttaagggtcgagctatagc

SEQ ID NO: 210969 - DNA, 25 bp, Homo sapien
agggtcgagctatagctaacttcat

SEQ ID NO: 210970 - DNA, 25 bp, Homo sapien
ctgattagctgttaagggtcgagct

SEQ ID NO: 210971 - DNA, 25 bp, Homo sapien
ctggcccgaggtatttaagttatat

SEQ ID NO: 210972 - DNA, 25 bp, Homo sapien
cacacctggcccgaggtatttaagt

SEQ ID NO: 210973 - DNA, 25 bp, Homo sapien
ttcagggacattatctggaacgact

SEQ ID NO: 210974 - DNA, 25 bp, Homo sapien
tatgaaaagtttgttctgaagattt

SEQ ID NO: 210975 - DNA, 25 bp, Homo sapien
tagctcaggcttcaactcttgcagt

SEQ ID NO: 210976 - DNA, 25 bp, Homo sapien
agcagtaagtttctgtaggtccttg

SEQ ID NO: 210977 - DNA, 25 bp, Homo sapien
gtgctatgatcctggctccccgcag

SEQ ID NO: 210978 - DNA, 25 bp, Homo sapien
agtgctatgatcctggctccccgca

SEQ ID NO: 210979 - DNA, 25 bp, Homo sapien
ggtgaccccaacaccgatgaggcca

SEQ ID NO: 210980 - DNA, 25 bp, Homo sapien
ccggggtgaccccaacaccgatgag

SEQ ID NO: 210981 - DNA, 25 bp, Homo sapien
gaagaccgcgtgagttctccaaccc

SEQ ID NO: 210982 - DNA, 25 bp, Homo sapien
aaaatccagactacgaccctccatg

SEQ ID NO: 210983 - DNA, 25 bp, Homo sapien
ggactcgggtccttccgaactgcgc

SEQ ID NO: 210984 - DNA, 25 bp, Homo sapien
gggcgcaggcgcagtagtgtgatcc

SEQ ID NO: 210985 - DNA, 25 bp, Homo sapien
ctggccagtccctaagcacgtgggt

SEQ ID NO: 210986 - DNA, 25 bp, Homo sapien
tgtcctgcttggctgcggagggagt

SEQ ID NO: 210987 - DNA, 25 bp, Homo sapien
ccatcgtgggcagcggactaataaa

SEQ ID NO: 210988 - DNA, 25 bp, Homo sapien
cagcagaaatcctgaacgggaagga

SEQ ID NO: 210989 - DNA, 25 bp, Homo sapien
cggactaataaaggccatggcgcca

SEQ ID NO: 210990 - DNA, 25 bp, Homo sapien
tccgcgtaagcacctgacattgttg

SEQ ID NO: 210991 - DNA, 25 bp, Homo sapien
gggaaaagtcctgtgccgactatgc

SEQ ID NO: 210992 - DNA, 25 bp, Homo sapien
agagaacccgggcacaacctgcgtt

SEQ ID NO: 210993 - DNA, 25 bp, Homo sapien
aacctgcgtttgcaagtggactgcc

SEQ ID NO: 210994 - DNA, 25 bp, Homo sapien
cctagtggctgtagccgctggctcc

SEQ ID NO: 210995 - DNA, 25 bp, Homo sapien
tcacggggaattctaagtttgcagc

SEQ ID NO: 210996 - DNA, 25 bp, Homo sapien
gatggatttagttgccaaattatct

SEQ ID NO: 210997 - DNA, 25 bp, Homo sapien
atgatggatttagttgccaaattat

SEQ ID NO: 210998 - DNA, 25 bp, Homo sapien
cctcacggggaattctaagtttgca

SEQ ID NO: 210999 - DNA, 25 bp, Homo sapien
cctgagtagaggaacctgaccctgc

SEQ ID NO: 211000 - DNA, 25 bp, Homo sapien
gctcctgagtagaggaacctgaccc

SEQ ID NO: 211001 - DNA, 25 bp, Homo sapien
ccctgtgagaagctgaccgagtgga

SEQ ID NO: 211002 - DNA, 25 bp, Homo sapien
tggaggctcctgagtagaggaacct

SEQ ID NO: 211003 - DNA, 25 bp, Homo sapien
agcctggacgggagacgtactgctt

SEQ ID NO: 211004 - DNA, 25 bp, Homo sapien
cccaggagataagggagcatttctg

SEQ ID NO: 211005 - DNA, 25 bp, Homo sapien
cacaagcctggacgggagacgtact

SEQ ID NO: 211006 - DNA, 25 bp, Homo sapien
tggtatctggtgcttgagaggtccc

SEQ ID NO: 211007 - DNA, 25 bp, Homo sapien
tctttctaccttcccctctgatgat

SEQ ID NO: 211008 - DNA, 25 bp, Homo sapien
tctgatgatccagagggctgcaagg

SEQ ID NO: 211009 - DNA, 25 bp, Homo sapien
ctgcaagggacctagagctgttcat

SEQ ID NO: 211010 - DNA, 25 bp, Homo sapien
tccagagggctgcaagggacctaga

SEQ ID NO: 211011 - DNA, 25 bp, Homo sapien
tatagttaagcaccgcttcttacag

SEQ ID NO: 211012 - DNA, 25 bp, Homo sapien
cctttgttgacatatagttaagcac

SEQ ID NO: 211013 - DNA, 25 bp, Homo sapien
agttaagcaccgcttcttacagatc

SEQ ID NO: 211014 - DNA, 25 bp, Homo sapien
tgacatatagttaagcaccgcttct

SEQ ID NO: 211015 - DNA, 25 bp, Homo sapien
gagaactactctaagcttatggcac

SEQ ID NO: 211016 - DNA, 25 bp, Homo sapien
catttgagaattatttgagaactac

SEQ ID NO: 211017 - DNA, 25 bp, Homo sapien
tgatcagttactaaaagtgttttcc

SEQ ID NO: 211018 - DNA, 25 bp, Homo sapien
ccatatagcttctgttgaaatgtcc

SEQ ID NO: 211019 - DNA, 25 bp, Homo sapien
tgcacaccatcatgactggctaata

SEQ ID NO: 211020 - DNA, 25 bp, Homo sapien
acaccatcatgactggctaatattt

SEQ ID NO: 211021 - DNA, 25 bp, Homo sapien
tatttgtatttttagtatagatggg

SEQ ID NO: 211022 - DNA, 25 bp, Homo sapien
tagatggggtttcaccatcttggcc

SEQ ID NO: 211023 - DNA, 25 bp, Homo sapien
gcagccagatcccatgtgtgtaaaa

SEQ ID NO: 211024 - DNA, 25 bp, Homo sapien
taatctgcctcgtggtggacaggga

SEQ ID NO: 211025 - DNA, 25 bp, Homo sapien
cagtagtctgctaatagctatggca

SEQ ID NO: 211026 - DNA, 25 bp, Homo sapien
cagggattagcagtacaggcactca

SEQ ID NO: 211027 - DNA, 25 bp, Homo sapien
tcagttacagaccagcaaatgggct

SEQ ID NO: 211028 - DNA, 25 bp, Homo sapien
caaatgggctgcaggacctaaagac

SEQ ID NO: 211029 - DNA, 25 bp, Homo sapien
cagctggatgttattgtgttcccca

SEQ ID NO: 211030 - DNA, 25 bp, Homo sapien
tgttccccaaaggatggcagaatca

SEQ ID NO: 211031 - DNA, 25 bp, Homo sapien
tcatttatgtaactgcagaaattgg

SEQ ID NO: 211032 - DNA, 25 bp, Homo sapien
aacattacatagacatagagtcggt

SEQ ID NO: 211033 - DNA, 25 bp, Homo sapien
tacatagacatagagtcggtgctgc

SEQ ID NO: 211034 - DNA, 25 bp, Homo sapien
acccagtgtggctgttgatcccagt

SEQ ID NO: 211035 - DNA, 25 bp, Homo sapien
aactatagtgctagggaacagatca

SEQ ID NO: 211036 - DNA, 25 bp, Homo sapien
gatgaagggagggtatgaccataaa

SEQ ID NO: 211037 - DNA, 25 bp, Homo sapien
tcctggtctaaagcgatggtcctgc

SEQ ID NO: 211038 - DNA, 25 bp, Homo sapien
tagagaccgtgtctcaccatattgt

SEQ ID NO: 211039 - DNA, 25 bp, Homo sapien
tgtattctatctggcaactttggcc

SEQ ID NO: 211040 - DNA, 25 bp, Homo sapien
tgtgggcatctctaaaagtgggtgt

SEQ ID NO: 211041 - DNA, 25 bp, Homo sapien
taactgagtactctgggaacgagca

SEQ ID NO: 211042 - DNA, 25 bp, Homo sapien
cagcagctgagcttgattaagatgc

SEQ ID NO: 211043 - DNA, 25 bp, Homo sapien
taattggcaacttcatagcatatcc

SEQ ID NO: 211044 - DNA, 25 bp, Homo sapien
tggtccaattcaggtgaaagtatca

SEQ ID NO: 211045 - DNA, 25 bp, Homo sapien
gctaacatgggtaagcctagaatgt

SEQ ID NO: 211046 - DNA, 25 bp, Homo sapien
aattggtccaagatggctaacatgg

SEQ ID NO: 211047 - DNA, 25 bp, Homo sapien
ggacgttactgaaataaaagagatg

SEQ ID NO: 211048 - DNA, 25 bp, Homo sapien
cataccgttgaatgtgtgatcccac

SEQ ID NO: 211049 - DNA, 25 bp, Homo sapien
tcacacctgtgactgggacgttact

SEQ ID NO: 211050 - DNA, 25 bp, Homo sapien
taacctgggtagtcaagaccttctc

SEQ ID NO: 211051 - DNA, 25 bp, Homo sapien
tttagggcctacatgaaaagacatg

SEQ ID NO: 211052 - DNA, 25 bp, Homo sapien
taaggactccctggcctacaggata

SEQ ID NO: 211053 - DNA, 25 bp, Homo sapien
cagggtttgtcctaatgtagcagtt

SEQ ID NO: 211054 - DNA, 25 bp, Homo sapien
tgtccaccaggagcttgtattataa

SEQ ID NO: 211055 - DNA, 25 bp, Homo sapien
gaaactggggatgctggctaaacat

SEQ ID NO: 211056 - DNA, 25 bp, Homo sapien
cagctcaaatgtcggagtgtgaggc

SEQ ID NO: 211057 - DNA, 25 bp, Homo sapien
ccctacaacattatccagctcaaat

SEQ ID NO: 211058 - DNA, 25 bp, Homo sapien
caacattatccagctcaaatgtcgg

SEQ ID NO: 211059 - DNA, 25 bp, Homo sapien
gtcataattcattggcccagtcccc

SEQ ID NO: 211060 - DNA, 25 bp, Homo sapien
tgggtctcactttcataacatctgc

SEQ ID NO: 211061 - DNA, 25 bp, Homo sapien
aacatctgcatgataaatatttatt

SEQ ID NO: 211062 - DNA, 25 bp, Homo sapien
tttccaatgctacaagcagggctgc

SEQ ID NO: 211063 - DNA, 25 bp, Homo sapien
tgacaggaaacataccagctctttt

SEQ ID NO: 211064 - DNA, 25 bp, Homo sapien
tatttcttgccctcgttcacggtcg

SEQ ID NO: 211065 - DNA, 25 bp, Homo sapien
tggcagtatttacggcagccatata

SEQ ID NO: 211066 - DNA, 25 bp, Homo sapien
gctctactctagtgtcataggctgg

SEQ ID NO: 211067 - DNA, 25 bp, Homo sapien
caggcattgcatacgtcactgcggg

SEQ ID NO: 211068 - DNA, 25 bp, Homo sapien
ccttgtcctgatagtgagtggctgc

SEQ ID NO: 211069 - DNA, 25 bp, Homo sapien
aatggcctcaccgtagtagaatggg

SEQ ID NO: 211070 - DNA, 25 bp, Homo sapien
tatagcctgtggttttagcctgcac

SEQ ID NO: 211071 - DNA, 25 bp, Homo sapien
tacagagtctgagctggacctcatc

SEQ ID NO: 211072 - DNA, 25 bp, Homo sapien
tcctttataggacggatacagagtc

SEQ ID NO: 211073 - DNA, 25 bp, Homo sapien
gcaagggtgccttagccctggctca

SEQ ID NO: 211074 - DNA, 25 bp, Homo sapien
tgaagtgcactcactgggcagaagg

SEQ ID NO: 211075 - DNA, 25 bp, Homo sapien
gattggtactcagaagtcagtcaga

SEQ ID NO: 211076 - DNA, 25 bp, Homo sapien
tactcatcactgtttagggaaccat

SEQ ID NO: 211077 - DNA, 25 bp, Homo sapien
tctgctgtgtctaaggacccatcct

SEQ ID NO: 211078 - DNA, 25 bp, Homo sapien
gcacatgcccgtctacaacaatggg

SEQ ID NO: 211079 - DNA, 25 bp, Homo sapien
gtagaatcttatacattcactgaaa

SEQ ID NO: 211080 - DNA, 25 bp, Homo sapien
gaatcttatacattcactgaaatag

SEQ ID NO: 211081 - DNA, 25 bp, Homo sapien
cctggtagaatcttatacattcact

SEQ ID NO: 211082 - DNA, 25 bp, Homo sapien
ttatatggaaaatatgcctggtaga

SEQ ID NO: 211083 - DNA, 25 bp, Homo sapien
ggaggcaggctgtattcacttagta

SEQ ID NO: 211084 - DNA, 25 bp, Homo sapien
tatgtcttgaccaggcagaacacca

SEQ ID NO: 211085 - DNA, 25 bp, Homo sapien
ttcaaacagcggaagagaatgtatc

SEQ ID NO: 211086 - DNA, 25 bp, Homo sapien
gaagcaactggtgattaggtacaaa

SEQ ID NO: 211087 - DNA, 25 bp, Homo sapien
tatttaagacatccaggtttgggac

SEQ ID NO: 211088 - DNA, 25 bp, Homo sapien
gtttgggactgtgcaatctcaccag

SEQ ID NO: 211089 - DNA, 25 bp, Homo sapien
gaactagtatcctccttactgaagg

SEQ ID NO: 211090 - DNA, 25 bp, Homo sapien
caaacacagaagtacagcagagaga

SEQ ID NO: 211091 - DNA, 25 bp, Homo sapien
tcttataaggcagactgtgctgagt

SEQ ID NO: 211092 - DNA, 25 bp, Homo sapien
gtattgcttacacccactttacgga

SEQ ID NO: 211093 - DNA, 25 bp, Homo sapien
tatctgcctgatacacacgaaagtg

SEQ ID NO: 211094 - DNA, 25 bp, Homo sapien
tgtgctgagttctgatgatacgcta

SEQ ID NO: 211095 - DNA, 25 bp, Homo sapien
tatcacggccaatcagctgctagca

SEQ ID NO: 211096 - DNA, 25 bp, Homo sapien
taaatgagtgttgtctatcacggcc

SEQ ID NO: 211097 - DNA, 25 bp, Homo sapien
caaagaataatgagtgggcctggca

SEQ ID NO: 211098 - DNA, 25 bp, Homo sapien
tgctgtcttatccaaccaaccatgt

SEQ ID NO: 211099 - DNA, 25 bp, Homo sapien
gaatgtgtcaggaaacgtcctcaga

SEQ ID NO: 211100 - DNA, 25 bp, Homo sapien
catcagtcttaaccataggagcctt

SEQ ID NO: 211101 - DNA, 25 bp, Homo sapien
gagctccctcctgattggacgctga

SEQ ID NO: 211102 - DNA, 25 bp, Homo sapien
ccaaaaatcctgacgctgagggtag

SEQ ID NO: 211103 - DNA, 25 bp, Homo sapien
tatttcgtttgtgaaaagttcacag

SEQ ID NO: 211104 - DNA, 25 bp, Homo sapien
gattctataactggaaaaacttaga

SEQ ID NO: 211105 - DNA, 25 bp, Homo sapien
aagatgttgtggagctagtagttaa

SEQ ID NO: 211106 - DNA, 25 bp, Homo sapien
aaagagaagccatgtaggtaagatg

SEQ ID NO: 211107 - DNA, 25 bp, Homo sapien
tgacaagcgagaacttttcagggag

SEQ ID NO: 211108 - DNA, 25 bp, Homo sapien
taaggcacaaggcaagtctaagtgt

SEQ ID NO: 211109 - DNA, 25 bp, Homo sapien
tcacagtatggctgaaatctctggg

SEQ ID NO: 211110 - DNA, 25 bp, Homo sapien
tctgggccaatgcattaccaaacct

SEQ ID NO: 211111 - DNA, 25 bp, Homo sapien
tgtatacatgtgttccaacaattgg

SEQ ID NO: 211112 - DNA, 25 bp, Homo sapien
ccaacaattggctctttcgagggaa

SEQ ID NO: 211113 - DNA, 25 bp, Homo sapien
cacagatggtacagctcatttttct

SEQ ID NO: 211114 - DNA, 25 bp, Homo sapien
cgagggaatttatgaccacagatgg

SEQ ID NO: 211115 - DNA, 25 bp, Homo sapien
tagtcggcgtgaagaaatcgaatcc

SEQ ID NO: 211116 - DNA, 25 bp, Homo sapien
gatacttgactgatctgcaaaggct

SEQ ID NO: 211117 - DNA, 25 bp, Homo sapien
tccactgttactggaaggagcttct

SEQ ID NO: 211118 - DNA, 25 bp, Homo sapien
caagggcctcgctgttttcattaag

SEQ ID NO: 211119 - DNA, 25 bp, Homo sapien
accaaattctcgctgcatgttcagc

SEQ ID NO: 211120 - DNA, 25 bp, Homo sapien
gaaaaccaaattctcgctgcatgtt

SEQ ID NO: 211121 - DNA, 25 bp, Homo sapien
ccaaattctcgctgcatgttcagct

SEQ ID NO: 211122 - DNA, 25 bp, Homo sapien
caaattctcgctgcatgttcagctg

SEQ ID NO: 211123 - DNA, 25 bp, Homo sapien
agaagaacaaggctatggctggcag

SEQ ID NO: 211124 - DNA, 25 bp, Homo sapien
gagaagaacaaggctatggctggca

SEQ ID NO: 211125 - DNA, 25 bp, Homo sapien
gaagaacaaggctatggctggcagt

SEQ ID NO: 211126 - DNA, 25 bp, Homo sapien
aagaacaaggctatggctggcagtg

SEQ ID NO: 211127 - DNA, 25 bp, Homo sapien
ctgagctagagatgtcactcctcct

SEQ ID NO: 211128 - DNA, 25 bp, Homo sapien
tcaccagctgggaccttatgccagt

SEQ ID NO: 211129 - DNA, 25 bp, Homo sapien
atcaccagctgggaccttatgccag

SEQ ID NO: 211130 - DNA, 25 bp, Homo sapien
atatcaccagctgggaccttatgcc

SEQ ID NO: 211131 - DNA, 25 bp, Homo sapien
tcatatcaccagctgggaccttatg

SEQ ID NO: 211132 - DNA, 25 bp, Homo sapien
caggatattttacggccaaggcacc

SEQ ID NO: 211133 - DNA, 25 bp, Homo sapien
tatcaagataagagcacctgcactg

SEQ ID NO: 211134 - DNA, 25 bp, Homo sapien
tactcagtaaacagcggccaacttg

SEQ ID NO: 211135 - DNA, 25 bp, Homo sapien
cactttgtaaggcatagagggcagc

SEQ ID NO: 211136 - DNA, 25 bp, Homo sapien
caaaaatacaccataggcggcctac

SEQ ID NO: 211137 - DNA, 25 bp, Homo sapien
gttccaaaaatacaccataggcggc

SEQ ID NO: 211138 - DNA, 25 bp, Homo sapien
ttagttccaaaaatacaccataggc

SEQ ID NO: 211139 - DNA, 25 bp, Homo sapien
tccaaaaatacaccataggcggcct

SEQ ID NO: 211140 - DNA, 25 bp, Homo sapien
tctccataacctgaatcaagccaag

SEQ ID NO: 211141 - DNA, 25 bp, Homo sapien
gcctgacttctccataacctgaatc

SEQ ID NO: 211142 - DNA, 25 bp, Homo sapien
tcacctagaaataccatcaaaccca

SEQ ID NO: 211143 - DNA, 25 bp, Homo sapien
gaatcaagccaagtatatataatga

SEQ ID NO: 211144 - DNA, 25 bp, Homo sapien
tctctacaggtgagtggggtaaact

SEQ ID NO: 211145 - DNA, 25 bp, Homo sapien
gtggagagtgcaatcaccaaggtgt

SEQ ID NO: 211146 - DNA, 25 bp, Homo sapien
ctccgccggatacattctctacagg

SEQ ID NO: 211147 - DNA, 25 bp, Homo sapien
gtaaactggcactgcggtcctggca

SEQ ID NO: 211148 - DNA, 25 bp, Homo sapien
ggtgtagctagctccagctacatca

SEQ ID NO: 211149 - DNA, 25 bp, Homo sapien
agctacatcacgctcttcaggcctg

SEQ ID NO: 211150 - DNA, 25 bp, Homo sapien
tacatcacgctcttcaggcctggtg

SEQ ID NO: 211151 - DNA, 25 bp, Homo sapien
tcaagaggtgtagctagctccagct

SEQ ID NO: 211152 - DNA, 25 bp, Homo sapien
aacgagagggatgaaacagattttc

SEQ ID NO: 211153 - DNA, 25 bp, Homo sapien
ggcacctctcggctctaaaatttaa

SEQ ID NO: 211154 - DNA, 25 bp, Homo sapien
tgtaaaacgagagggatgaaacaga

SEQ ID NO: 211155 - DNA, 25 bp, Homo sapien
aacagattttctataaggcacctct

SEQ ID NO: 211156 - DNA, 25 bp, Homo sapien
tgcctccgcaactggtaacaactga

SEQ ID NO: 211157 - DNA, 25 bp, Homo sapien
tcaggttccaggtactacgttgtgc

SEQ ID NO: 211158 - DNA, 25 bp, Homo sapien
gaatcttgtgagaggatcaacagct

SEQ ID NO: 211159 - DNA, 25 bp, Homo sapien
tgatgcgggcgctaactgttgaaac

SEQ ID NO: 211160 - DNA, 25 bp, Homo sapien
agtgccagagaagacggtgataaga

SEQ ID NO: 211161 - DNA, 25 bp, Homo sapien
ctgagtgccagagaagacggtgata

SEQ ID NO: 211162 - DNA, 25 bp, Homo sapien
agaagacggtgataagatgggtcaa

SEQ ID NO: 211163 - DNA, 25 bp, Homo sapien
tgccagagaagacggtgataagatg

SEQ ID NO: 211164 - DNA, 25 bp, Homo sapien
gtggaaacagtagccgcagcgtcct

SEQ ID NO: 211165 - DNA, 25 bp, Homo sapien
gaaaaaccggatatgcttagaacaa

SEQ ID NO: 211166 - DNA, 25 bp, Homo sapien
ttcttgccctagaaacgaggtaatc

SEQ ID NO: 211167 - DNA, 25 bp, Homo sapien
gtaatcacaagctgggagtggaaac

SEQ ID NO: 211168 - DNA, 25 bp, Homo sapien
acggctctgcaccttcgcggcaccc

SEQ ID NO: 211169 - DNA, 25 bp, Homo sapien
gcaccttcgcggcaccccgtgtgcc

SEQ ID NO: 211170 - DNA, 25 bp, Homo sapien
ctgcaccttcgcggcaccccgtgtg

SEQ ID NO: 211171 - DNA, 25 bp, Homo sapien
gctctgcaccttcgcggcaccccgt

SEQ ID NO: 211172 - DNA, 25 bp, Homo sapien
gcccagcgctcactcgcggatgtat

SEQ ID NO: 211173 - DNA, 25 bp, Homo sapien
tgacatctcaatcggaccaaaaaca

SEQ ID NO: 211174 - DNA, 25 bp, Homo sapien
tggttctgggtattgtcggcccagc

SEQ ID NO: 211175 - DNA, 25 bp, Homo sapien
ctacgagcagcaaagggtggttctg

SEQ ID NO: 211176 - DNA, 25 bp, Homo sapien
gccctgggtggctcgcggcaggagg

SEQ ID NO: 211177 - DNA, 25 bp, Homo sapien
tgtcccgcgactggtgcagctgcag

SEQ ID NO: 211178 - DNA, 25 bp, Homo sapien
ccctgggtggctcgcggcaggaggg

SEQ ID NO: 211179 - DNA, 25 bp, Homo sapien
atctgtcccgcgactggtgcagctg

SEQ ID NO: 211180 - DNA, 25 bp, Homo sapien
tcggccgcctctcgcgcggcttccc

SEQ ID NO: 211181 - DNA, 25 bp, Homo sapien
ccaagccgcgcactgcaagcagtgg

SEQ ID NO: 211182 - DNA, 25 bp, Homo sapien
gcgatggccccacgtgaccgcgtgt

SEQ ID NO: 211183 - DNA, 25 bp, Homo sapien
agtggcgccggctcacgcacccctc

SEQ ID NO: 211184 - DNA, 25 bp, Homo sapien
tggtagcaggggaaagaggggcgcc

SEQ ID NO: 211185 - DNA, 25 bp, Homo sapien
ctggtagcaggggaaagaggggcgc

SEQ ID NO: 211186 - DNA, 25 bp, Homo sapien
cagggcgaggttgccggagcactcg

SEQ ID NO: 211187 - DNA, 25 bp, Homo sapien
actcgaggcggaccgcgagtgacgg

SEQ ID NO: 211188 - DNA, 25 bp, Homo sapien
aaagcagcctcgcatcctgccctgg

SEQ ID NO: 211189 - DNA, 25 bp, Homo sapien
cagctgctgggcccaacgggcaggg

SEQ ID NO: 211190 - DNA, 25 bp, Homo sapien
gctatttgcgcaactttggcccagg

SEQ ID NO: 211191 - DNA, 25 bp, Homo sapien
gagctcgacgcagaaacttgttgca

SEQ ID NO: 211192 - DNA, 25 bp, Homo sapien
tgtgcggcagcggaagtcctttgtt

SEQ ID NO: 211193 - DNA, 25 bp, Homo sapien
ctctggttcctgttgcggccggtaa

SEQ ID NO: 211194 - DNA, 25 bp, Homo sapien
tggtccgaggctttttgaggcaacg

SEQ ID NO: 211195 - DNA, 25 bp, Homo sapien
tgaggcaacgtaggatcaatgtctc

SEQ ID NO: 211196 - DNA, 25 bp, Homo sapien
taagcaacgcgtgtacatgatctga

SEQ ID NO: 211197 - DNA, 25 bp, Homo sapien
tcgaatttcagtgtggcagtgcacg

SEQ ID NO: 211198 - DNA, 25 bp, Homo sapien
tactcaggttggtaagaattgccag

SEQ ID NO: 211199 - DNA, 25 bp, Homo sapien
catgttaatgttgttgcccagcctc

SEQ ID NO: 211200 - DNA, 25 bp, Homo sapien
gatggattgatttacagcagccaaa

SEQ ID NO: 211201 - DNA, 25 bp, Homo sapien
tacttactgtatcatggtgggctat

SEQ ID NO: 211202 - DNA, 25 bp, Homo sapien
ctgaagtattagaagaggcatgctc

SEQ ID NO: 211203 - DNA, 25 bp, Homo sapien
tgtctatatgagatgcatgcagtcg

SEQ ID NO: 211204 - DNA, 25 bp, Homo sapien
gagatgagttccatccccactttga

SEQ ID NO: 211205 - DNA, 25 bp, Homo sapien
gagtctcagcttctacttacaagat

SEQ ID NO: 211206 - DNA, 25 bp, Homo sapien
gaattgggactgtgatgctaggctc

SEQ ID NO: 211207 - DNA, 25 bp, Homo sapien
tccagaggtaattgtaagtcagaga

SEQ ID NO: 211208 - DNA, 25 bp, Homo sapien
tctgtaatcctcaaatccatatgca

SEQ ID NO: 211209 - DNA, 25 bp, Homo sapien
cactgaggctaagcgaatcatcttc

SEQ ID NO: 211210 - DNA, 25 bp, Homo sapien
tagttgtgctaaacttgtcctacca

SEQ ID NO: 211211 - DNA, 25 bp, Homo sapien
agcccttgacttctagttgtgctaa

SEQ ID NO: 211212 - DNA, 25 bp, Homo sapien
gacttctagttgtgctaaacttgtc

SEQ ID NO: 211213 - DNA, 25 bp, Homo sapien
ctaaacttgtcctaccagtgatgca

SEQ ID NO: 211214 - DNA, 25 bp, Homo sapien
tgaaacttgatctggcttccagaaa

SEQ ID NO: 211215 - DNA, 25 bp, Homo sapien
ttgaaacttgatctggcttccagaa

SEQ ID NO: 211216 - DNA, 25 bp, Homo sapien
cttccagaaaaggtgcagtggttgc

SEQ ID NO: 211217 - DNA, 25 bp, Homo sapien
tctggctatggaactttatgtctta

SEQ ID NO: 211218 - DNA, 25 bp, Homo sapien
gcaggatgggcatataggtagtaaa

SEQ ID NO: 211219 - DNA, 25 bp, Homo sapien
ttcaccagtcctgtatctctggcta

SEQ ID NO: 211220 - DNA, 25 bp, Homo sapien
taaaaggggcgtatgacccatatgt

SEQ ID NO: 211221 - DNA, 25 bp, Homo sapien
gcgcccgctatcacgactggctaac

SEQ ID NO: 211222 - DNA, 25 bp, Homo sapien
ttacaggcgcccgctatcacgactg

SEQ ID NO: 211223 - DNA, 25 bp, Homo sapien
ctgacctcagcctcacccttccaaa

SEQ ID NO: 211224 - DNA, 25 bp, Homo sapien
cccgctatcacgactggctaacttt

SEQ ID NO: 211225 - DNA, 25 bp, Homo sapien
tacaataaccgaggaggacctgtca

SEQ ID NO: 211226 - DNA, 25 bp, Homo sapien
taaaacctcgaatgtcagtaagtgc

SEQ ID NO: 211227 - DNA, 25 bp, Homo sapien
tgagctgtgtggacttacaataacc

SEQ ID NO: 211228 - DNA, 25 bp, Homo sapien
ggtggtttagagaatatgaggcccc

SEQ ID NO: 211229 - DNA, 25 bp, Homo sapien
gcttattaggcaagttaggtgcact

SEQ ID NO: 211230 - DNA, 25 bp, Homo sapien
ggtgcactgaatctaacctttaagg

SEQ ID NO: 211231 - DNA, 25 bp, Homo sapien
gacatgggctcaaacttggcctaaa

SEQ ID NO: 211232 - DNA, 25 bp, Homo sapien
tagactacaagtggttgttacccat

SEQ ID NO: 211233 - DNA, 25 bp, Homo sapien
gcatcccatatttggaaacccatga

SEQ ID NO: 211234 - DNA, 25 bp, Homo sapien
caacttctgggattgcagggtacca

SEQ ID NO: 211235 - DNA, 25 bp, Homo sapien
tcagtaataaatggccagtgctctc

SEQ ID NO: 211236 - DNA, 25 bp, Homo sapien
gataacctgaggtgcagtaaactgg

SEQ ID NO: 211237 - DNA, 25 bp, Homo sapien
tagtgggtacccaattaacatgctg

SEQ ID NO: 211238 - DNA, 25 bp, Homo sapien
catgtgataaagctcctatgagatt

SEQ ID NO: 211239 - DNA, 25 bp, Homo sapien
tcctgtactccacctatcaagaagt

SEQ ID NO: 211240 - DNA, 25 bp, Homo sapien
ttttcagcctagaaacacatgtgat

SEQ ID NO: 211241 - DNA, 25 bp, Homo sapien
gcagcttgtaaattaatgctaattc

SEQ ID NO: 211242 - DNA, 25 bp, Homo sapien
gcttgtaaattaatgctaattctgg

SEQ ID NO: 211243 - DNA, 25 bp, Homo sapien
tgtaaattaatgctaattctggctg

SEQ ID NO: 211244 - DNA, 25 bp, Homo sapien
caatagcagcttgtaaattaatgct

SEQ ID NO: 211245 - DNA, 25 bp, Homo sapien
tgtatatgccagtcacaatcttgat

SEQ ID NO: 211246 - DNA, 25 bp, Homo sapien
gccagtcacaatcttgatcatttat

SEQ ID NO: 211247 - DNA, 25 bp, Homo sapien
tatgccagtcacaatcttgatcatt

SEQ ID NO: 211248 - DNA, 25 bp, Homo sapien
tatatgccagtcacaatcttgatca

SEQ ID NO: 211249 - DNA, 25 bp, Homo sapien
ggctggcctgtcggcctctgatgca

SEQ ID NO: 211250 - DNA, 25 bp, Homo sapien
cctttcggcccttgcaaatactgga

SEQ ID NO: 211251 - DNA, 25 bp, Homo sapien
tactggagagcaggacagtaccgca

SEQ ID NO: 211252 - DNA, 25 bp, Homo sapien
tgatgcactcgaacttccagccctt

SEQ ID NO: 211253 - DNA, 25 bp, Homo sapien
tgctttaaaggacggtgctcccagc

SEQ ID NO: 211254 - DNA, 25 bp, Homo sapien
tcaagcttgatggaaggacttcccc

SEQ ID NO: 211255 - DNA, 25 bp, Homo sapien
ggcgaacttcagctcccggattagg

SEQ ID NO: 211256 - DNA, 25 bp, Homo sapien
gcaacgcacttttccatcagcctgg

SEQ ID NO: 211257 - DNA, 25 bp, Homo sapien
tgtcctcacattcctgttaaacagg

SEQ ID NO: 211258 - DNA, 25 bp, Homo sapien
gaggaagtgaatcgcgctccttttc

SEQ ID NO: 211259 - DNA, 25 bp, Homo sapien
tctaccttctcggagggtttatgcc

SEQ ID NO: 211260 - DNA, 25 bp, Homo sapien
taaagattattacctggtgccaggg

SEQ ID NO: 211261 - DNA, 25 bp, Homo sapien
ttccattccattgagcggagtcaga

SEQ ID NO: 211262 - DNA, 25 bp, Homo sapien
taggtcacgatcacaaccccgtgtg

SEQ ID NO: 211263 - DNA, 25 bp, Homo sapien
cccgtgtgtgccagggtgaccgaga

SEQ ID NO: 211264 - DNA, 25 bp, Homo sapien
gtttcaacgtgtgggttttgactga

SEQ ID NO: 211265 - DNA, 25 bp, Homo sapien
aatgcaggctcctcggaggacaagt

SEQ ID NO: 211266 - DNA, 25 bp, Homo sapien
tgaacaggaaggcgaaaccagagtt

SEQ ID NO: 211267 - DNA, 25 bp, Homo sapien
ggctcctcggaggacaagtcgccgc

SEQ ID NO: 211268 - DNA, 25 bp, Homo sapien
tttaaatgcaggctcctcggaggac

SEQ ID NO: 211269 - DNA, 25 bp, Homo sapien
tgaagcacccaccataaaatcccag

SEQ ID NO: 211270 - DNA, 25 bp, Homo sapien
tcttcggtgcaaccaactcagaatg

SEQ ID NO: 211271 - DNA, 25 bp, Homo sapien
tgagtcggcaccctagcagtgaact

SEQ ID NO: 211272 - DNA, 25 bp, Homo sapien
cccctgcgtgctcagtgagtcggca

SEQ ID NO: 211273 - DNA, 25 bp, Homo sapien
ggacggaaattcgaggatgccacag

SEQ ID NO: 211274 - DNA, 25 bp, Homo sapien
gcccaaagtgcaagtagagtacaag

SEQ ID NO: 211275 - DNA, 25 bp, Homo sapien
catcttcgacgccaagaggctgatt

SEQ ID NO: 211276 - DNA, 25 bp, Homo sapien
gatatgaaacactggccgttccggg

SEQ ID NO: 211277 - DNA, 25 bp, Homo sapien
gaatactggcctttggtaatgaccc

SEQ ID NO: 211278 - DNA, 25 bp, Homo sapien
tcttcaatttagtagtggacccatc

SEQ ID NO: 211279 - DNA, 25 bp, Homo sapien
tttagcaagcctcatttgggtaggg

SEQ ID NO: 211280 - DNA, 25 bp, Homo sapien
taagggtgtttcatggactacaggc

SEQ ID NO: 211281 - DNA, 25 bp, Homo sapien
cgcagaagattctgtccagtggctc

SEQ ID NO: 211282 - DNA, 25 bp, Homo sapien
tctttctcaggtttgccgcagaaga

SEQ ID NO: 211283 - DNA, 25 bp, Homo sapien
taacccgtcacttcaaagcagtaat

SEQ ID NO: 211284 - DNA, 25 bp, Homo sapien
agtatttctgagtaacccgtcactt

SEQ ID NO: 211285 - DNA, 25 bp, Homo sapien
catcaccctcagtgagtgtgagaca

SEQ ID NO: 211286 - DNA, 25 bp, Homo sapien
tgaaacatcaccctcagtgagtgtg

SEQ ID NO: 211287 - DNA, 25 bp, Homo sapien
caccctcagtgagtgtgagacagac

SEQ ID NO: 211288 - DNA, 25 bp, Homo sapien
ctcagtgagtgtgagacagacagtg

SEQ ID NO: 211289 - DNA, 25 bp, Homo sapien
cagagcggcctgatccagatatggg

SEQ ID NO: 211290 - DNA, 25 bp, Homo sapien
gatatgggacctggatttcctgaag

SEQ ID NO: 211291 - DNA, 25 bp, Homo sapien
gaaagttgcattcaccagagcggcc

SEQ ID NO: 211292 - DNA, 25 bp, Homo sapien
aggaaggtgatatctaagctacgac

SEQ ID NO: 211293 - DNA, 25 bp, Homo sapien
tgtacaacatgctaagaaactctga

SEQ ID NO: 211294 - DNA, 25 bp, Homo sapien
tacggcttagtagtgcttgtacaac

SEQ ID NO: 211295 - DNA, 25 bp, Homo sapien
gaggcctttagaagagtccacagca

SEQ ID NO: 211296 - DNA, 25 bp, Homo sapien
ctctgagttaagtaaaaggtcctga

SEQ ID NO: 211297 - DNA, 25 bp, Homo sapien
tctttgtgggaagatcatttttacc

SEQ ID NO: 211298 - DNA, 25 bp, Homo sapien
ggattctaagatggttctttgtggg

SEQ ID NO: 211299 - DNA, 25 bp, Homo sapien
ttaccttaggatgactatttttaca

SEQ ID NO: 211300 - DNA, 25 bp, Homo sapien
ctgaggtgtggattctaagatggtt

SEQ ID NO: 211301 - DNA, 25 bp, Homo sapien
tgttggttgtatcttggcgttgtcg

SEQ ID NO: 211302 - DNA, 25 bp, Homo sapien
tcttgcacccctgtttctatagtgg

SEQ ID NO: 211303 - DNA, 25 bp, Homo sapien
tatagtggtggatgtcctcgatcca

SEQ ID NO: 211304 - DNA, 25 bp, Homo sapien
ggcgttgtcggccatttctcttctc

SEQ ID NO: 211305 - DNA, 25 bp, Homo sapien
gaagtagggagactctttcgtacca

SEQ ID NO: 211306 - DNA, 25 bp, Homo sapien
gacgtcaacacttgacagagattga

SEQ ID NO: 211307 - DNA, 25 bp, Homo sapien
atatgttcaacattcctcgcaggag

SEQ ID NO: 211308 - DNA, 25 bp, Homo sapien
gcttggattgtcttccgacgtcaac

SEQ ID NO: 211309 - DNA, 25 bp, Homo sapien
tgcatctgtgtatgagaatgctcac

SEQ ID NO: 211310 - DNA, 25 bp, Homo sapien
ctgcatctgtgtatgagaatgctca

SEQ ID NO: 211311 - DNA, 25 bp, Homo sapien
tatccatctgattgctaagaagttt

SEQ ID NO: 211312 - DNA, 25 bp, Homo sapien
ccatctgattgctaagaagttttac

SEQ ID NO: 211313 - DNA, 25 bp, Homo sapien
aaacaatttatccatctgattgcta

SEQ ID NO: 211314 - DNA, 25 bp, Homo sapien
ccatactacgggacaaatcagtatc

SEQ ID NO: 211315 - DNA, 25 bp, Homo sapien
tgacagcatcctgtaacagtacaag

SEQ ID NO: 211316 - DNA, 25 bp, Homo sapien
tgacaccagggaagcatgtatggct

SEQ ID NO: 211317 - DNA, 25 bp, Homo sapien
caagaatcttatgacaacgttggcc

SEQ ID NO: 211318 - DNA, 25 bp, Homo sapien
cttaatgtcaatcaggcagggccgg

SEQ ID NO: 211319 - DNA, 25 bp, Homo sapien
gggataaagaagtaacactacctca

SEQ ID NO: 211320 - DNA, 25 bp, Homo sapien
ccatggtgtagatgataagctacca

SEQ ID NO: 211321 - DNA, 25 bp, Homo sapien
taacactacctcatgaatagaaact

SEQ ID NO: 211322 - DNA, 25 bp, Homo sapien
ctccatggtgtagatgataagctac

SEQ ID NO: 211323 - DNA, 25 bp, Homo sapien
tctataagttcttagaatgtcaaag

SEQ ID NO: 211324 - DNA, 25 bp, Homo sapien
tatctataagttcttagaatgtcaa

SEQ ID NO: 211325 - DNA, 25 bp, Homo sapien
gttatctataagttcttagaatgtc

SEQ ID NO: 211326 - DNA, 25 bp, Homo sapien
ttatctataagttcttagaatgtca

SEQ ID NO: 211327 - DNA, 25 bp, Homo sapien
aattttgtgcaactcgtctgcatcc

SEQ ID NO: 211328 - DNA, 25 bp, Homo sapien
ctggcatggtggcattcttctcgtc

SEQ ID NO: 211329 - DNA, 25 bp, Homo sapien
tttacccgaatcaacatggtgactg

SEQ ID NO: 211330 - DNA, 25 bp, Homo sapien
gcaactcgtctgcatcctcgctggt

SEQ ID NO: 211331 - DNA, 25 bp, Homo sapien
cagcaatatgttgcctaaattggtg

SEQ ID NO: 211332 - DNA, 25 bp, Homo sapien
atcagaacattcagcaatatgttgc

SEQ ID NO: 211333 - DNA, 25 bp, Homo sapien
acattcagcaatatgttgcctaaat

SEQ ID NO: 211334 - DNA, 25 bp, Homo sapien
gggtggaatcagaacattcagcaat

SEQ ID NO: 211335 - DNA, 25 bp, Homo sapien
gccgtaggttttaaatgcagagtac

SEQ ID NO: 211336 - DNA, 25 bp, Homo sapien
tttgccgtaggttttaaatgcagag

SEQ ID NO: 211337 - DNA, 25 bp, Homo sapien
ctgatttgccgtaggttttaaatgc

SEQ ID NO: 211338 - DNA, 25 bp, Homo sapien
atgtcttctgatttgccgtaggttt

SEQ ID NO: 211339 - DNA, 25 bp, Homo sapien
cattgtctttcttgtaaaatagttt

SEQ ID NO: 211340 - DNA, 25 bp, Homo sapien
gcctttctctttaaactcattgtct

SEQ ID NO: 211341 - DNA, 25 bp, Homo sapien
ctttctctttaaactcattgtcttt

SEQ ID NO: 211342 - DNA, 25 bp, Homo sapien
tatgcctttctctttaaactcattg

SEQ ID NO: 211343 - DNA, 25 bp, Homo sapien
aactactactttgggtggctcatca

SEQ ID NO: 211344 - DNA, 25 bp, Homo sapien
actactttgggtggctcatcattct

SEQ ID NO: 211345 - DNA, 25 bp, Homo sapien
tcttcttaatctccacctttgcatt

SEQ ID NO: 211346 - DNA, 25 bp, Homo sapien
ggtaactactactttgggtggctca

SEQ ID NO: 211347 - DNA, 25 bp, Homo sapien
acagagcttaatgagcccaaaacag

SEQ ID NO: 211348 - DNA, 25 bp, Homo sapien
ggacagagcttaatgagcccaaaac

SEQ ID NO: 211349 - DNA, 25 bp, Homo sapien
tggtgaagagactggtttactctgg

SEQ ID NO: 211350 - DNA, 25 bp, Homo sapien
ggggacagagcttaatgagcccaaa

SEQ ID NO: 211351 - DNA, 25 bp, Homo sapien
tttccattcgacagtccttccaaag

SEQ ID NO: 211352 - DNA, 25 bp, Homo sapien
ctttatggctctattcttcaagact

SEQ ID NO: 211353 - DNA, 25 bp, Homo sapien
taaagataggtgtcagatcacagag

SEQ ID NO: 211354 - DNA, 25 bp, Homo sapien
gccaactgcttgtgataggcatttc

SEQ ID NO: 211355 - DNA, 25 bp, Homo sapien
ccgccgctgcactcgctgggtcttg

SEQ ID NO: 211356 - DNA, 25 bp, Homo sapien
cgccgctgcactcgctgggtcttgg

SEQ ID NO: 211357 - DNA, 25 bp, Homo sapien
aaattgagcatttgctggaggactc

SEQ ID NO: 211358 - DNA, 25 bp, Homo sapien
gaatacagtcgcttcacctggaaat

SEQ ID NO: 211359 - DNA, 25 bp, Homo sapien
ggactccagagtcttgtatcattgc

SEQ ID NO: 211360 - DNA, 25 bp, Homo sapien
aataattatctcctctgctacactc

SEQ ID NO: 211361 - DNA, 25 bp, Homo sapien
tcgatttgcaataaaccaagaggca

SEQ ID NO: 211362 - DNA, 25 bp, Homo sapien
agtgttaggtatttctgggaaagct

SEQ ID NO: 211363 - DNA, 25 bp, Homo sapien
tctcaatgagcaggagtcagctgtc

SEQ ID NO: 211364 - DNA, 25 bp, Homo sapien
gttgcccacagtaaaatcgatttgc

SEQ ID NO: 211365 - DNA, 25 bp, Homo sapien
gccagaaccgggcttagacaacagg

SEQ ID NO: 211366 - DNA, 25 bp, Homo sapien
agacagccagaaccgggcttagaca

SEQ ID NO: 211367 - DNA, 25 bp, Homo sapien
tgagacagccagaaccgggcttaga

SEQ ID NO: 211368 - DNA, 25 bp, Homo sapien
cagaaccgggcttagacaacaggaa

SEQ ID NO: 211369 - DNA, 25 bp, Homo sapien
gaagtggggcagcaaactggcaggt

SEQ ID NO: 211370 - DNA, 25 bp, Homo sapien
ggtgggtgacgagggtggcaggaca

SEQ ID NO: 211371 - DNA, 25 bp, Homo sapien
gaaataatcctcctggaggtgtttc

SEQ ID NO: 211372 - DNA, 25 bp, Homo sapien
gacaggcggttgaagctggggattg

SEQ ID NO: 211373 - DNA, 25 bp, Homo sapien
ttcaccagagccgtctggtaaattt

SEQ ID NO: 211374 - DNA, 25 bp, Homo sapien
agcccttcaccagagccgtctggta

SEQ ID NO: 211375 - DNA, 25 bp, Homo sapien
tttttcctttgaactcccagatgct

SEQ ID NO: 211376 - DNA, 25 bp, Homo sapien
tgaactcccagatgctgaccatatt

SEQ ID NO: 211377 - DNA, 25 bp, Homo sapien
gacagcgttgtgtagttgaaactcc

SEQ ID NO: 211378 - DNA, 25 bp, Homo sapien
cccacggcaccggatcttcgaagaa

SEQ ID NO: 211379 - DNA, 25 bp, Homo sapien
acggcaccggatcttcgaagaacca

SEQ ID NO: 211380 - DNA, 25 bp, Homo sapien
tatgttgcttttgaggcgatgacag

SEQ ID NO: 211381 - DNA, 25 bp, Homo sapien
caaacaaggtgctgcacttgagcct

SEQ ID NO: 211382 - DNA, 25 bp, Homo sapien
cattctgtgggagcaacttttggag

SEQ ID NO: 211383 - DNA, 25 bp, Homo sapien
ggcagcgactgtatccttgaatggc

SEQ ID NO: 211384 - DNA, 25 bp, Homo sapien
tgtgcactggacgagtcaaacaagg

SEQ ID NO: 211385 - DNA, 25 bp, Homo sapien
agctccagctttggtccagtgagtt

SEQ ID NO: 211386 - DNA, 25 bp, Homo sapien
taccacttcaacatagagcagctcc

SEQ ID NO: 211387 - DNA, 25 bp, Homo sapien
cagctttggtccagtgagttctgca

SEQ ID NO: 211388 - DNA, 25 bp, Homo sapien
cagggtgaatagctggaaagtgggc

SEQ ID NO: 211389 - DNA, 25 bp, Homo sapien
gcttggcaggggcacgagttccagt

SEQ ID NO: 211390 - DNA, 25 bp, Homo sapien
agttccagtggcaacaccatctcct

SEQ ID NO: 211391 - DNA, 25 bp, Homo sapien
acgagttccagtggcaacaccatct

SEQ ID NO: 211392 - DNA, 25 bp, Homo sapien
gcacgagttccagtggcaacaccat

SEQ ID NO: 211393 - DNA, 25 bp, Homo sapien
gaaccaggtaggcaatcacaggcac

SEQ ID NO: 211394 - DNA, 25 bp, Homo sapien
tctgtggaccgggctttggccactg

SEQ ID NO: 211395 - DNA, 25 bp, Homo sapien
cgttactcctctgtggaccgggctt

SEQ ID NO: 211396 - DNA, 25 bp, Homo sapien
gacaacgttactcctctgtggaccg

SEQ ID NO: 211397 - DNA, 25 bp, Homo sapien
cttccagtgacaacgttactcctct

SEQ ID NO: 211398 - DNA, 25 bp, Homo sapien
ggttgacactatggtctcccctgtt

SEQ ID NO: 211399 - DNA, 25 bp, Homo sapien
caccgattgggatgttctgttctaa

SEQ ID NO: 211400 - DNA, 25 bp, Homo sapien
tttgaagtccttttccgaggcagtg

SEQ ID NO: 211401 - DNA, 25 bp, Homo sapien
agctggtgtctgtgtctaggaagaa

SEQ ID NO: 211402 - DNA, 25 bp, Homo sapien
ttgccatagaaacagcaggatcctc

SEQ ID NO: 211403 - DNA, 25 bp, Homo sapien
acagcaggatcctctctcaggaggg

SEQ ID NO: 211404 - DNA, 25 bp, Homo sapien
aggagggaacgttgccatagaaaca

SEQ ID NO: 211405 - DNA, 25 bp, Homo sapien
tctctcaggagggttggcacatagg

SEQ ID NO: 211406 - DNA, 25 bp, Homo sapien
tgttcttcaggatctttactgatga

SEQ ID NO: 211407 - DNA, 25 bp, Homo sapien
gatttatgctcttgctcaaaatgta

SEQ ID NO: 211408 - DNA, 25 bp, Homo sapien
attatgggtttttggatttatgctc

SEQ ID NO: 211409 - DNA, 25 bp, Homo sapien
tctttactgatgaattattatgggt

SEQ ID NO: 211410 - DNA, 25 bp, Homo sapien
cacgtgcgtcttggtatcctagagc

SEQ ID NO: 211411 - DNA, 25 bp, Homo sapien
taggattaggatccccagatcgatc

SEQ ID NO: 211412 - DNA, 25 bp, Homo sapien
cactgtaaagcgtcacagggaccga

SEQ ID NO: 211413 - DNA, 25 bp, Homo sapien
ctgacttggaaaagcggacacggcc

SEQ ID NO: 211414 - DNA, 25 bp, Homo sapien
gagggcaatgacagtccggagcggg

SEQ ID NO: 211415 - DNA, 25 bp, Homo sapien
ataataagcagggagggcaatgaca

SEQ ID NO: 211416 - DNA, 25 bp, Homo sapien
acatcggccacctcgccttcagcag

SEQ ID NO: 211417 - DNA, 25 bp, Homo sapien
cggccacctcgccttcagcagtgtg

SEQ ID NO: 211418 - DNA, 25 bp, Homo sapien
tgagtgattaaaccccagctgttcc

SEQ ID NO: 211419 - DNA, 25 bp, Homo sapien
gatgggatcctgagtgattaaaccc

SEQ ID NO: 211420 - DNA, 25 bp, Homo sapien
gatcctgagtgattaaaccccagct

SEQ ID NO: 211421 - DNA, 25 bp, Homo sapien
ctttgttggacaaggatgggatcct

SEQ ID NO: 211422 - DNA, 25 bp, Homo sapien
tatctctctgttatacatctctccc

SEQ ID NO: 211423 - DNA, 25 bp, Homo sapien
tggccccctggatgcaatggcctca

SEQ ID NO: 211424 - DNA, 25 bp, Homo sapien
tgttatacatctctcccctgtggtt

SEQ ID NO: 211425 - DNA, 25 bp, Homo sapien
ctctctgttatacatctctcccctg

SEQ ID NO: 211426 - DNA, 25 bp, Homo sapien
tcccttcctggaagataggacaacc

SEQ ID NO: 211427 - DNA, 25 bp, Homo sapien
ccactcccttcctggaagataggac

SEQ ID NO: 211428 - DNA, 25 bp, Homo sapien
ttctcctttcgacacctgctgtcct

SEQ ID NO: 211429 - DNA, 25 bp, Homo sapien
actcccttcctggaagataggacaa

SEQ ID NO: 211430 - DNA, 25 bp, Homo sapien
gcagctatcccacggtcactgttta

SEQ ID NO: 211431 - DNA, 25 bp, Homo sapien
tctgttgcagaggtatgccttgccc

SEQ ID NO: 211432 - DNA, 25 bp, Homo sapien
gaggtatgccttgcccgttctcttc

SEQ ID NO: 211433 - DNA, 25 bp, Homo sapien
ggtcactgtttacgctggaagaggc

SEQ ID NO: 211434 - DNA, 25 bp, Homo sapien
ctgtaagccaggggtgctgccacaa

SEQ ID NO: 211435 - DNA, 25 bp, Homo sapien
gccaggggtgctgccacaagcccag

SEQ ID NO: 211436 - DNA, 25 bp, Homo sapien
tgtaagccaggggtgctgccacaag

SEQ ID NO: 211437 - DNA, 25 bp, Homo sapien
taagccaggggtgctgccacaagcc

SEQ ID NO: 211438 - DNA, 25 bp, Homo sapien
ctggccagattcccacaccgtcttt

SEQ ID NO: 211439 - DNA, 25 bp, Homo sapien
tggccagattcccacaccgtctttt

SEQ ID NO: 211440 - DNA, 25 bp, Homo sapien
ggccagattcccacaccgtcttttc

SEQ ID NO: 211441 - DNA, 25 bp, Homo sapien
gctgtatcaccttcgaagaagaggc

SEQ ID NO: 211442 - DNA, 25 bp, Homo sapien
tgctgtatcaccttcgaagaagagg

SEQ ID NO: 211443 - DNA, 25 bp, Homo sapien
tgtatcaccttcgaagaagaggcga

SEQ ID NO: 211444 - DNA, 25 bp, Homo sapien
tatcaccttcgaagaagaggcgagg

SEQ ID NO: 211445 - DNA, 25 bp, Homo sapien
tgttccctcgatctctcgctcctcc

SEQ ID NO: 211446 - DNA, 25 bp, Homo sapien
atgttccctcgatctctcgctcctc

SEQ ID NO: 211447 - DNA, 25 bp, Homo sapien
ctagctaatgttccctcgatctctc

SEQ ID NO: 211448 - DNA, 25 bp, Homo sapien
gctaatgttccctcgatctctcgct

SEQ ID NO: 211449 - DNA, 25 bp, Homo sapien
gcttctgcattcttcttgaacactc

SEQ ID NO: 211450 - DNA, 25 bp, Homo sapien
tctgcattcttcttgaacactccct

SEQ ID NO: 211451 - DNA, 25 bp, Homo sapien
tgcattcttcttgaacactccctgg

SEQ ID NO: 211452 - DNA, 25 bp, Homo sapien
gcattcttcttgaacactccctggc

SEQ ID NO: 211453 - DNA, 25 bp, Homo sapien
tttagggcacattctgacacctcgt

SEQ ID NO: 211454 - DNA, 25 bp, Homo sapien
cacgtgtcttggtagttgttcttcc

SEQ ID NO: 211455 - DNA, 25 bp, Homo sapien
ctcatggagccccatttccacgtgt

SEQ ID NO: 211456 - DNA, 25 bp, Homo sapien
tcatggtttggacctttttagggca

SEQ ID NO: 211457 - DNA, 25 bp, Homo sapien
gctgtcctgtctagggtagggggtc

SEQ ID NO: 211458 - DNA, 25 bp, Homo sapien
agcagatgctcccagtatctggtgc

SEQ ID NO: 211459 - DNA, 25 bp, Homo sapien
ttgcgtttctctccggtccccagga

SEQ ID NO: 211460 - DNA, 25 bp, Homo sapien
gtatctggtgccttttgcgtttctc

SEQ ID NO: 211461 - DNA, 25 bp, Homo sapien
gctcaagagaggttgtcactagcct

SEQ ID NO: 211462 - DNA, 25 bp, Homo sapien
tcagcatcatatcttgagactggcc

SEQ ID NO: 211463 - DNA, 25 bp, Homo sapien
gtggaatgaccacagaagattcagg

SEQ ID NO: 211464 - DNA, 25 bp, Homo sapien
gatcttcccttgaagaacccgactg

SEQ ID NO: 211465 - DNA, 25 bp, Homo sapien
ccccaggcagtccttacacggccat

SEQ ID NO: 211466 - DNA, 25 bp, Homo sapien
ttccccaggcagtccttacacggcc

SEQ ID NO: 211467 - DNA, 25 bp, Homo sapien
cccttccccaggcagtccttacacg

SEQ ID NO: 211468 - DNA, 25 bp, Homo sapien
cttccccaggcagtccttacacggc

SEQ ID NO: 211469 - DNA, 25 bp, Homo sapien
ggtgcttgcagtcgtcccataaggc

SEQ ID NO: 211470 - DNA, 25 bp, Homo sapien
gccttcaagttgatcaaatgcatga

SEQ ID NO: 211471 - DNA, 25 bp, Homo sapien
cagggacaagctagagaatctggct

SEQ ID NO: 211472 - DNA, 25 bp, Homo sapien
aagcccaggaaccgggtgcttgcag

SEQ ID NO: 211473 - DNA, 25 bp, Homo sapien
cctcttaggctcagttcaaagggag

SEQ ID NO: 211474 - DNA, 25 bp, Homo sapien
ttaggctcagttcaaagggagagga

SEQ ID NO: 211475 - DNA, 25 bp, Homo sapien
ggtgccagccctcttaggctcagtt

SEQ ID NO: 211476 - DNA, 25 bp, Homo sapien
gccagccctcttaggctcagttcaa

SEQ ID NO: 211477 - DNA, 25 bp, Homo sapien
ggagcattattgatttattagaaaa

SEQ ID NO: 211478 - DNA, 25 bp, Homo sapien
gagcattattgatttattagaaaaa

SEQ ID NO: 211479 - DNA, 25 bp, Homo sapien
aacagggttgcattcctctgcagcc

SEQ ID NO: 211480 - DNA, 25 bp, Homo sapien
tcctctggttggtggaagcacggtt

SEQ ID NO: 211481 - DNA, 25 bp, Homo sapien
tgtccaagccaccaagccatgtggt

SEQ ID NO: 211482 - DNA, 25 bp, Homo sapien
tgcatggtctgtgcccaacagggtt

SEQ ID NO: 211483 - DNA, 25 bp, Homo sapien
tacacactaggttccctgtataggg

SEQ ID NO: 211484 - DNA, 25 bp, Homo sapien
gagctgtgtcaacctcgtttgggaa

SEQ ID NO: 211485 - DNA, 25 bp, Homo sapien
tggcaacagaatggtcacatgcagc

SEQ ID NO: 211486 - DNA, 25 bp, Homo sapien
gagagcttagccctggtgtggcaca

SEQ ID NO: 211487 - DNA, 25 bp, Homo sapien
gctccatcggatgacgtcttccttc

SEQ ID NO: 211488 - DNA, 25 bp, Homo sapien
ccacagggtggaactgatttctgcc

SEQ ID NO: 211489 - DNA, 25 bp, Homo sapien
catatagtgtcagggccacagggtg

SEQ ID NO: 211490 - DNA, 25 bp, Homo sapien
tgctgcagttggtgtcaccctgaca

SEQ ID NO: 211491 - DNA, 25 bp, Homo sapien
cagcactcagggttcctcagggggc

SEQ ID NO: 211492 - DNA, 25 bp, Homo sapien
gcccctgtggcttctacctgaacct

SEQ ID NO: 211493 - DNA, 25 bp, Homo sapien
tcagcactcagggttcctcaggggg

SEQ ID NO: 211494 - DNA, 25 bp, Homo sapien
agcactcagggttcctcagggggcc

SEQ ID NO: 211495 - DNA, 25 bp, Homo sapien
gccttaggcagtgttgtgacgcacc

SEQ ID NO: 211496 - DNA, 25 bp, Homo sapien
gatagaaacttgactgcaggccctg

SEQ ID NO: 211497 - DNA, 25 bp, Homo sapien
cagagctagggctttgtgggccacc

SEQ ID NO: 211498 - DNA, 25 bp, Homo sapien
gaggtgacccgaagcaagacttgct

SEQ ID NO: 211499 - DNA, 25 bp, Homo sapien
ggctctgcgccttgacgcggatgct

SEQ ID NO: 211500 - DNA, 25 bp, Homo sapien
gactcgttgatggcggtgctcacgc

SEQ ID NO: 211501 - DNA, 25 bp, Homo sapien
cttgtctttcttgccgaggctggcg

SEQ ID NO: 211502 - DNA, 25 bp, Homo sapien
cggatgctctgggactcgttgatgg

SEQ ID NO: 211503 - DNA, 25 bp, Homo sapien
catggaagagccactcgctgccatt

SEQ ID NO: 211504 - DNA, 25 bp, Homo sapien
atggaagagccactcgctgccatta

SEQ ID NO: 211505 - DNA, 25 bp, Homo sapien
caatctcacagatggcatgtctcag

SEQ ID NO: 211506 - DNA, 25 bp, Homo sapien
gcatccttgtagaaggttagctcac

SEQ ID NO: 211507 - DNA, 25 bp, Homo sapien
gggttcctccccatggtagggcatc

SEQ ID NO: 211508 - DNA, 25 bp, Homo sapien
cacacagtacaggttgttccaggac

SEQ ID NO: 211509 - DNA, 25 bp, Homo sapien
tctacagcaacagactctgtttcct

SEQ ID NO: 211510 - DNA, 25 bp, Homo sapien
gaagcatgttgctgcatttctacag

SEQ ID NO: 211511 - DNA, 25 bp, Homo sapien
atttctacagcaacagactctgttt

SEQ ID NO: 211512 - DNA, 25 bp, Homo sapien
acgtgggaagcatgttgctgcattt

SEQ ID NO: 211513 - DNA, 25 bp, Homo sapien
tcatcaccctcgctcagaggcgtat

SEQ ID NO: 211514 - DNA, 25 bp, Homo sapien
gaggcgtatctaggaccttaaagag

SEQ ID NO: 211515 - DNA, 25 bp, Homo sapien
gccggcagcgttgcgggctcatcac

SEQ ID NO: 211516 - DNA, 25 bp, Homo sapien
tggaagccttcttgttgggcccctc

SEQ ID NO: 211517 - DNA, 25 bp, Homo sapien
ctgaggccacgttccctcttcttcc

SEQ ID NO: 211518 - DNA, 25 bp, Homo sapien
tgaggccacgttccctcttcttccc

SEQ ID NO: 211519 - DNA, 25 bp, Homo sapien
taagggtaccaggtcctaagtctgc

SEQ ID NO: 211520 - DNA, 25 bp, Homo sapien
gccatcagcaggtctaacaggtcct

SEQ ID NO: 211521 - DNA, 25 bp, Homo sapien
tgtaacatagcaacggaaggttctc

SEQ ID NO: 211522 - DNA, 25 bp, Homo sapien
tgctgctaagacaagttcggcaacc

SEQ ID NO: 211523 - DNA, 25 bp, Homo sapien
taaacacctttcagcaagaggtagg

SEQ ID NO: 211524 - DNA, 25 bp, Homo sapien
ccggtcccaaagacctgactgctaa

SEQ ID NO: 211525 - DNA, 25 bp, Homo sapien
tggatgcctgaagcaccaaggacat

SEQ ID NO: 211526 - DNA, 25 bp, Homo sapien
ccaaggacatcttcagccaggaggt

SEQ ID NO: 211527 - DNA, 25 bp, Homo sapien
ctgaagacagaggtccagaagagtg

SEQ ID NO: 211528 - DNA, 25 bp, Homo sapien
gagggaaggagccaggagagagcag

SEQ ID NO: 211529 - DNA, 25 bp, Homo sapien
gggaaggagccaggagagagcagac

SEQ ID NO: 211530 - DNA, 25 bp, Homo sapien
ggaggagagggaaggagccaggaga

SEQ ID NO: 211531 - DNA, 25 bp, Homo sapien
gagagggaaggagccaggagagagc

SEQ ID NO: 211532 - DNA, 25 bp, Homo sapien
tggtctgaatcctttagactatggg

SEQ ID NO: 211533 - DNA, 25 bp, Homo sapien
gggcaaacccgaaacagaggatgga

SEQ ID NO: 211534 - DNA, 25 bp, Homo sapien
tagactatggggcaaacccgaaaca

SEQ ID NO: 211535 - DNA, 25 bp, Homo sapien
ctatggggcaaacccgaaacagagg

SEQ ID NO: 211536 - DNA, 25 bp, Homo sapien
ggattttgccaggactgactcccaa

SEQ ID NO: 211537 - DNA, 25 bp, Homo sapien
taacctgtgggaatgtagccagctg

SEQ ID NO: 211538 - DNA, 25 bp, Homo sapien
cattactacttggtctcttggccga

SEQ ID NO: 211539 - DNA, 25 bp, Homo sapien
taaacaggttacatggtagggatcc

SEQ ID NO: 211540 - DNA, 25 bp, Homo sapien
caggtcatcaggaagatgcagattc

SEQ ID NO: 211541 - DNA, 25 bp, Homo sapien
tcaggtcatcaggaagatgcagatt

SEQ ID NO: 211542 - DNA, 25 bp, Homo sapien
gtcatcaggaagatgcagattccac

SEQ ID NO: 211543 - DNA, 25 bp, Homo sapien
ggtcatcaggaagatgcagattcca

SEQ ID NO: 211544 - DNA, 25 bp, Homo sapien
ctgtaccactgagggctgccaccca

SEQ ID NO: 211545 - DNA, 25 bp, Homo sapien
tgtaccactgagggctgccacccac

SEQ ID NO: 211546 - DNA, 25 bp, Homo sapien
aagagagtcccgctgcttggaagaa

SEQ ID NO: 211547 - DNA, 25 bp, Homo sapien
gtcccgctgcttggaagaaattctg

SEQ ID NO: 211548 - DNA, 25 bp, Homo sapien
tctgggtgtccagttgcgggcagca

SEQ ID NO: 211549 - DNA, 25 bp, Homo sapien
aaggaagagagtcccgctgcttgga

SEQ ID NO: 211550 - DNA, 25 bp, Homo sapien
actacagcctggatctagccttggg

SEQ ID NO: 211551 - DNA, 25 bp, Homo sapien
tcctgacgagaaggctgataacgag

SEQ ID NO: 211552 - DNA, 25 bp, Homo sapien
ttcagccctagcgagatactcagtc

SEQ ID NO: 211553 - DNA, 25 bp, Homo sapien
gaagaatggcatctgtgagctgccc

SEQ ID NO: 211554 - DNA, 25 bp, Homo sapien
ttctgaggcacccagagcctgggag

SEQ ID NO: 211555 - DNA, 25 bp, Homo sapien
gagatgcttagtctggagcaggtct

SEQ ID NO: 211556 - DNA, 25 bp, Homo sapien
atctcccgtctcacaccagtgggta

SEQ ID NO: 211557 - DNA, 25 bp, Homo sapien
tccttaccgtagcagaggtgcagcc

SEQ ID NO: 211558 - DNA, 25 bp, Homo sapien
ctgtatgaacggattggcctttacc

SEQ ID NO: 211559 - DNA, 25 bp, Homo sapien
tatgaacggattggcctttaccaga

SEQ ID NO: 211560 - DNA, 25 bp, Homo sapien
atgaacggattggcctttaccagaa

SEQ ID NO: 211561 - DNA, 25 bp, Homo sapien
gtatgaacggattggcctttaccag

SEQ ID NO: 211562 - DNA, 25 bp, Homo sapien
ctaatgtaaaaaggcaagaggtgag

SEQ ID NO: 211563 - DNA, 25 bp, Homo sapien
tccccaaggggaggcgcagccattg

SEQ ID NO: 211564 - DNA, 25 bp, Homo sapien
agccattggccatcccttcctggga

SEQ ID NO: 211565 - DNA, 25 bp, Homo sapien
caggactatccccaaggggaggcgc

SEQ ID NO: 211566 - DNA, 25 bp, Homo sapien
tgggagaggcctgcggttctgtgaa

SEQ ID NO: 211567 - DNA, 25 bp, Homo sapien
agcaggaaatctgtgcgtgaggcct

SEQ ID NO: 211568 - DNA, 25 bp, Homo sapien
cactgggcttgcaaggagccttcta

SEQ ID NO: 211569 - DNA, 25 bp, Homo sapien
ttcccatctgctggagtggctggct

SEQ ID NO: 211570 - DNA, 25 bp, Homo sapien
gaaagggtctcaaatgtgggctcac

SEQ ID NO: 211571 - DNA, 25 bp, Homo sapien
cacagacagtggatggagtcgctct

SEQ ID NO: 211572 - DNA, 25 bp, Homo sapien
acacagggacgcatggcagaagcag

SEQ ID NO: 211573 - DNA, 25 bp, Homo sapien
ccccaacccagtgacattcaggtgt

SEQ ID NO: 211574 - DNA, 25 bp, Homo sapien
gagtcgctctggtgctcacagagga

SEQ ID NO: 211575 - DNA, 25 bp, Homo sapien
ggtgcagctaggaaagggaggcctc

SEQ ID NO: 211576 - DNA, 25 bp, Homo sapien
acgggagcttcggagggaacttctg

SEQ ID NO: 211577 - DNA, 25 bp, Homo sapien
cgggagcttcggagggaacttctgg

SEQ ID NO: 211578 - DNA, 25 bp, Homo sapien
tgggctggtgcagctaggaaaggga

SEQ ID NO: 211579 - DNA, 25 bp, Homo sapien
gaggcctcactatctgtatatgttt

SEQ ID NO: 211580 - DNA, 25 bp, Homo sapien
atgccagtcttcctaacctcacccc

SEQ ID NO: 211581 - DNA, 25 bp, Homo sapien
cagaaacttccatgtggaatgccag

SEQ ID NO: 211582 - DNA, 25 bp, Homo sapien
gcctcactatctgtatatgtttctg

SEQ ID NO: 211583 - DNA, 25 bp, Homo sapien
caagccgtgtgctgaattcttgctt

SEQ ID NO: 211584 - DNA, 25 bp, Homo sapien
agagcagctccctaagcctgggtga

SEQ ID NO: 211585 - DNA, 25 bp, Homo sapien
ggctgcaggaaggatctgtggctcc

SEQ ID NO: 211586 - DNA, 25 bp, Homo sapien
gaagccgtgcaagccgtgtgctgaa

SEQ ID NO: 211587 - DNA, 25 bp, Homo sapien
gtcctgaggcgcatgccctaggcct

SEQ ID NO: 211588 - DNA, 25 bp, Homo sapien
ccaggtaaggtcctgaggcgcatgc

SEQ ID NO: 211589 - DNA, 25 bp, Homo sapien
gtaaggtcctgaggcgcatgcccta

SEQ ID NO: 211590 - DNA, 25 bp, Homo sapien
accccatggagtcctaaggggcctg

SEQ ID NO: 211591 - DNA, 25 bp, Homo sapien
aatcgcctacaaggatgggcacccc

SEQ ID NO: 211592 - DNA, 25 bp, Homo sapien
gcctcaggccagatcggtggaaaga

SEQ ID NO: 211593 - DNA, 25 bp, Homo sapien
tctgcatagggggaaagaatcgcct

SEQ ID NO: 211594 - DNA, 25 bp, Homo sapien
ggaaagaatcgcctacaaggatggg

SEQ ID NO: 211595 - DNA, 25 bp, Homo sapien
cggtgtacagaaatgcactaatcat

SEQ ID NO: 211596 - DNA, 25 bp, Homo sapien
tgagtactgcctagaggaaggagtt

SEQ ID NO: 211597 - DNA, 25 bp, Homo sapien
catctctggctagtgtttcccctca

SEQ ID NO: 211598 - DNA, 25 bp, Homo sapien
gtgtttcccctcatgtaaatggtga

SEQ ID NO: 211599 - DNA, 25 bp, Homo sapien
tcatgaagaacacctcagtgaggac

SEQ ID NO: 211600 - DNA, 25 bp, Homo sapien
cacctcagtgaggacgtagcctgct

SEQ ID NO: 211601 - DNA, 25 bp, Homo sapien
gagtggaggaggctagtactctcat

SEQ ID NO: 211602 - DNA, 25 bp, Homo sapien
ataacgtcatgtcactgggctggcc

SEQ ID NO: 211603 - DNA, 25 bp, Homo sapien
actcccaggaactagacaaacgaga

SEQ ID NO: 211604 - DNA, 25 bp, Homo sapien
gactcccaggaactagacaaacgag

SEQ ID NO: 211605 - DNA, 25 bp, Homo sapien
cccaggaactagacaaacgagacca

SEQ ID NO: 211606 - DNA, 25 bp, Homo sapien
tcccaggaactagacaaacgagacc

SEQ ID NO: 211607 - DNA, 25 bp, Homo sapien
ccgcatggtgggaaactggagcctc

SEQ ID NO: 211608 - DNA, 25 bp, Homo sapien
tctcggtggccgcatggtgggaaac

SEQ ID NO: 211609 - DNA, 25 bp, Homo sapien
ggtggccgcatggtgggaaactgga

SEQ ID NO: 211610 - DNA, 25 bp, Homo sapien
tggccgcatggtgggaaactggagc

SEQ ID NO: 211611 - DNA, 25 bp, Homo sapien
ccagtctcctctgcgggtctctctg

SEQ ID NO: 211612 - DNA, 25 bp, Homo sapien
tctctgcaatctggcgttctttcag

SEQ ID NO: 211613 - DNA, 25 bp, Homo sapien
ggtctctctgcaatctggcgttctt

SEQ ID NO: 211614 - DNA, 25 bp, Homo sapien
gcgggtctctctgcaatctggcgtt

SEQ ID NO: 211615 - DNA, 25 bp, Homo sapien
agaggcatccctcgagaactggcac

SEQ ID NO: 211616 - DNA, 25 bp, Homo sapien
ccagctggccgtggacttctcaaaa

SEQ ID NO: 211617 - DNA, 25 bp, Homo sapien
gcctcatgcctcttgatgagcttct

SEQ ID NO: 211618 - DNA, 25 bp, Homo sapien
tcaaaagcctcatgcctcttgatga

SEQ ID NO: 211619 - DNA, 25 bp, Homo sapien
ggcccagggcctgttagcacccaat

SEQ ID NO: 211620 - DNA, 25 bp, Homo sapien
gttagcacccaatcgttcactcctg

SEQ ID NO: 211621 - DNA, 25 bp, Homo sapien
catggatacgcttgctgcctgcagc

SEQ ID NO: 211622 - DNA, 25 bp, Homo sapien
tggcctgaataggtgtccctaaacc

SEQ ID NO: 211623 - DNA, 25 bp, Homo sapien
ctgcgggggtactcctgcccctggg

SEQ ID NO: 211624 - DNA, 25 bp, Homo sapien
cctgcgggggtactcctgcccctgg

SEQ ID NO: 211625 - DNA, 25 bp, Homo sapien
tcctgcgggggtactcctgcccctg

SEQ ID NO: 211626 - DNA, 25 bp, Homo sapien
ctggacatcacctgctgcagtttct

SEQ ID NO: 211627 - DNA, 25 bp, Homo sapien
cggagccgctcccagcgggcttccc

SEQ ID NO: 211628 - DNA, 25 bp, Homo sapien
gctcccagcgggcttcccacttctc

SEQ ID NO: 211629 - DNA, 25 bp, Homo sapien
agcgggcttcccacttctcattcat

SEQ ID NO: 211630 - DNA, 25 bp, Homo sapien
gatacttcatgagcagttccacaga

SEQ ID NO: 211631 - DNA, 25 bp, Homo sapien
gcagggactcgccaagctccaggca

SEQ ID NO: 211632 - DNA, 25 bp, Homo sapien
caggcactgaagttcttgctccggg

SEQ ID NO: 211633 - DNA, 25 bp, Homo sapien
ccgggtttcaatctctgcattgatg

SEQ ID NO: 211634 - DNA, 25 bp, Homo sapien
tatccgccgtgtccactagctgggt

SEQ ID NO: 211635 - DNA, 25 bp, Homo sapien
catatgctgtctgcagacgggtggc

SEQ ID NO: 211636 - DNA, 25 bp, Homo sapien
cgatctgccggatgatgctctccat

SEQ ID NO: 211637 - DNA, 25 bp, Homo sapien
tgaagaagcggaatttatccgccgt

SEQ ID NO: 211638 - DNA, 25 bp, Homo sapien
ggaggtctgcccacatctcgttcag

SEQ ID NO: 211639 - DNA, 25 bp, Homo sapien
gagtcgctcgatgaaggcattcaca

SEQ ID NO: 211640 - DNA, 25 bp, Homo sapien
gcttctcgtcgatgaggcccaggat

SEQ ID NO: 211641 - DNA, 25 bp, Homo sapien
tctcggcacccgtgtagaagtagcg

SEQ ID NO: 211642 - DNA, 25 bp, Homo sapien
tggaacaggtggtacatgttctcca

SEQ ID NO: 211643 - DNA, 25 bp, Homo sapien
tccttcagccctgcgtagtgcttgt

SEQ ID NO: 211644 - DNA, 25 bp, Homo sapien
tcacgtggtcaaagtcttgccccat

SEQ ID NO: 211645 - DNA, 25 bp, Homo sapien
ccaggtcgtcggtctcccgcttgag

SEQ ID NO: 211646 - DNA, 25 bp, Homo sapien
cctcagagacggcagccacgaaccc

SEQ ID NO: 211647 - DNA, 25 bp, Homo sapien
ggagccaacatatgccaaccacagc

SEQ ID NO: 211648 - DNA, 25 bp, Homo sapien
ggcagccacgaacccagagccgtgg

SEQ ID NO: 211649 - DNA, 25 bp, Homo sapien
gggagccaacatatgccaaccacag

SEQ ID NO: 211650 - DNA, 25 bp, Homo sapien
ggcagggataggtagggagtgaagc

SEQ ID NO: 211651 - DNA, 25 bp, Homo sapien
gcagggataggtagggagtgaagct

SEQ ID NO: 211652 - DNA, 25 bp, Homo sapien
ctggcagggataggtagggagtgaa

SEQ ID NO: 211653 - DNA, 25 bp, Homo sapien
tggcagggataggtagggagtgaag

SEQ ID NO: 211654 - DNA, 25 bp, Homo sapien
cgtagtcctccaccgcacgctgctg

SEQ ID NO: 211655 - DNA, 25 bp, Homo sapien
ctgcttgatgttccggccgtagtcc

SEQ ID NO: 211656 - DNA, 25 bp, Homo sapien
ccagctgcttgatgttccggccgta

SEQ ID NO: 211657 - DNA, 25 bp, Homo sapien
acgctgctgccgcaaatgtcgcttc

SEQ ID NO: 211658 - DNA, 25 bp, Homo sapien
tcaaggtcctggcagtcgatctccg

SEQ ID NO: 211659 - DNA, 25 bp, Homo sapien
gttggcgtccctcagtcgctgcagc

SEQ ID NO: 211660 - DNA, 25 bp, Homo sapien
gcatccaggtagtactgctgtgcct

SEQ ID NO: 211661 - DNA, 25 bp, Homo sapien
tctcatcggagatgacgtagagctc

SEQ ID NO: 211662 - DNA, 25 bp, Homo sapien
tctgaggatacgaaacttgaccatg

SEQ ID NO: 211663 - DNA, 25 bp, Homo sapien
cctggcaagaggactgaacaagtgc

SEQ ID NO: 211664 - DNA, 25 bp, Homo sapien
ggcaggagccactttagctaaggga

SEQ ID NO: 211665 - DNA, 25 bp, Homo sapien
taaagcttacaacctggtagaggaa

SEQ ID NO: 211666 - DNA, 25 bp, Homo sapien
gctgactgggccagaggcagcctct

SEQ ID NO: 211667 - DNA, 25 bp, Homo sapien
cacagtttgcagattagtgccatag

SEQ ID NO: 211668 - DNA, 25 bp, Homo sapien
ccatagtcggctgactgggccagag

SEQ ID NO: 211669 - DNA, 25 bp, Homo sapien
tcttcttcatgaacagttgcacagt

SEQ ID NO: 211670 - DNA, 25 bp, Homo sapien
tcgatgctcaagtctgcatctcctc

SEQ ID NO: 211671 - DNA, 25 bp, Homo sapien
tcttttcgcacattcacttggtcct

SEQ ID NO: 211672 - DNA, 25 bp, Homo sapien
gaggtccaggaaccgcttctcgatg

SEQ ID NO: 211673 - DNA, 25 bp, Homo sapien
taagtcccggctgatctgcagcttg

SEQ ID NO: 211674 - DNA, 25 bp, Homo sapien
ccaatttgagctcaacttcctccaa

SEQ ID NO: 211675 - DNA, 25 bp, Homo sapien
atcctttaaggcccaatttgagctc

SEQ ID NO: 211676 - DNA, 25 bp, Homo sapien
aacttcctccaaggagtctccttgg

SEQ ID NO: 211677 - DNA, 25 bp, Homo sapien
agctcaacttcctccaaggagtctc

SEQ ID NO: 211678 - DNA, 25 bp, Homo sapien
taacactctgagtctacaacccact

SEQ ID NO: 211679 - DNA, 25 bp, Homo sapien
ctaacactctgagtctacaacccac

SEQ ID NO: 211680 - DNA, 25 bp, Homo sapien
aacactctgagtctacaacccactc

SEQ ID NO: 211681 - DNA, 25 bp, Homo sapien
acactctgagtctacaacccactca

SEQ ID NO: 211682 - DNA, 25 bp, Homo sapien
ccaacatccgattgacactggtcag

SEQ ID NO: 211683 - DNA, 25 bp, Homo sapien
agcttttgggacaccagggctgtaa

SEQ ID NO: 211684 - DNA, 25 bp, Homo sapien
tcagcatgggtctgcaagcgcaggt

SEQ ID NO: 211685 - DNA, 25 bp, Homo sapien
ccatggcgctgatccacttgttgag

SEQ ID NO: 211686 - DNA, 25 bp, Homo sapien
tccccagtggttctgtccatccaaa

SEQ ID NO: 211687 - DNA, 25 bp, Homo sapien
gggtcccttggttcgccatctataa

SEQ ID NO: 211688 - DNA, 25 bp, Homo sapien
catctataaggagtggaaacgacca

SEQ ID NO: 211689 - DNA, 25 bp, Homo sapien
gaggattaatggctcccctggacca

SEQ ID NO: 211690 - DNA, 25 bp, Homo sapien
agctctgccacaaacgcctggtgct

SEQ ID NO: 211691 - DNA, 25 bp, Homo sapien
cgcctggtgctttagccatttattg

SEQ ID NO: 211692 - DNA, 25 bp, Homo sapien
tctctagccacccttcatgggaagc

SEQ ID NO: 211693 - DNA, 25 bp, Homo sapien
gtttcgtgcttcatcataggagaca

SEQ ID NO: 211694 - DNA, 25 bp, Homo sapien
tctgcttctagaaaggaatctccag

SEQ ID NO: 211695 - DNA, 25 bp, Homo sapien
tgcttctagaaaggaatctccagga

SEQ ID NO: 211696 - DNA, 25 bp, Homo sapien
ctgcttctagaaaggaatctccagg

SEQ ID NO: 211697 - DNA, 25 bp, Homo sapien
gcttctagaaaggaatctccaggaa

SEQ ID NO: 211698 - DNA, 25 bp, Homo sapien
gggccttctcgttgttcttcctgtg

SEQ ID NO: 211699 - DNA, 25 bp, Homo sapien
caggttgtctctcagtaggacagag

SEQ ID NO: 211700 - DNA, 25 bp, Homo sapien
gaagttctgtagctccaggttgtct

SEQ ID NO: 211701 - DNA, 25 bp, Homo sapien
gttctggaggaagttctgtagctcc

SEQ ID NO: 211702 - DNA, 25 bp, Homo sapien
ggtcctcactacccccgtgtggctc

SEQ ID NO: 211703 - DNA, 25 bp, Homo sapien
gtcctcactacccccgtgtggctct

SEQ ID NO: 211704 - DNA, 25 bp, Homo sapien
tcctcactacccccgtgtggctctg

SEQ ID NO: 211705 - DNA, 25 bp, Homo sapien
gatcttgtctgagtataggtttccc

SEQ ID NO: 211706 - DNA, 25 bp, Homo sapien
caggactcaagaccttatcccggtt

SEQ ID NO: 211707 - DNA, 25 bp, Homo sapien
ggttgttctccatagaccccaagaa

SEQ ID NO: 211708 - DNA, 25 bp, Homo sapien
taggtttccctcagctaccagcttg

SEQ ID NO: 211709 - DNA, 25 bp, Homo sapien
ggtctcctcgcaatctacgcagtag

SEQ ID NO: 211710 - DNA, 25 bp, Homo sapien
gacaacttcctctggatggcgatga

SEQ ID NO: 211711 - DNA, 25 bp, Homo sapien
tctgctcagggtgcgagtccatcag

SEQ ID NO: 211712 - DNA, 25 bp, Homo sapien
tggaagtcatccagatcctgcagga

SEQ ID NO: 211713 - DNA, 25 bp, Homo sapien
cttcccataggagaccctgacccct

SEQ ID NO: 211714 - DNA, 25 bp, Homo sapien
ttcttcccataggagaccctgaccc

SEQ ID NO: 211715 - DNA, 25 bp, Homo sapien
cttcttcccataggagaccctgacc

SEQ ID NO: 211716 - DNA, 25 bp, Homo sapien
tcccataggagaccctgaccccttc

SEQ ID NO: 211717 - DNA, 25 bp, Homo sapien
gtgcattcccaaggtgtgacaacag

SEQ ID NO: 211718 - DNA, 25 bp, Homo sapien
cagcagccagtatgatttgaaaggt

SEQ ID NO: 211719 - DNA, 25 bp, Homo sapien
cagagagcgctgttgtgcattccca

SEQ ID NO: 211720 - DNA, 25 bp, Homo sapien
gaggctgagggactaggagatggac

SEQ ID NO: 211721 - DNA, 25 bp, Homo sapien
tgttggcagcgaggttcacaccatc

SEQ ID NO: 211722 - DNA, 25 bp, Homo sapien
tccctgctgcgtgggtggccactct

SEQ ID NO: 211723 - DNA, 25 bp, Homo sapien
agatggtcctggtactgcttcacct

SEQ ID NO: 211724 - DNA, 25 bp, Homo sapien
ccactctctaccaagctgttggcag

SEQ ID NO: 211725 - DNA, 25 bp, Homo sapien
ccgatccttctagggtaagagccca

SEQ ID NO: 211726 - DNA, 25 bp, Homo sapien
tctcctgactgcctgaattctgtgc

SEQ ID NO: 211727 - DNA, 25 bp, Homo sapien
aggactctccagcatcagtgcagca

SEQ ID NO: 211728 - DNA, 25 bp, Homo sapien
accaccttggcactgttccagagag

SEQ ID NO: 211729 - DNA, 25 bp, Homo sapien
aaaggccttgtgcttgcgctgtaag

SEQ ID NO: 211730 - DNA, 25 bp, Homo sapien
cgctgtaagatgagcacactggtca

SEQ ID NO: 211731 - DNA, 25 bp, Homo sapien
tgtgccgacacctcctttatgcggg

SEQ ID NO: 211732 - DNA, 25 bp, Homo sapien
tccgcatcgccctggaactggaaaa

SEQ ID NO: 211733 - DNA, 25 bp, Homo sapien
ggtcttcaacctccaacaagtgctt

SEQ ID NO: 211734 - DNA, 25 bp, Homo sapien
cctcggtgaacttcagggtggctgc

SEQ ID NO: 211735 - DNA, 25 bp, Homo sapien
cactttgtccccttggatggcgatg

SEQ ID NO: 211736 - DNA, 25 bp, Homo sapien
caaactcggcagacaagaggtgagc

SEQ ID NO: 211737 - DNA, 25 bp, Homo sapien
taccatggacctgggctggtatcac

SEQ ID NO: 211738 - DNA, 25 bp, Homo sapien
ccagggtaccatggacctgggctgg

SEQ ID NO: 211739 - DNA, 25 bp, Homo sapien
caagatttctcggtcaccagggtac

SEQ ID NO: 211740 - DNA, 25 bp, Homo sapien
tcggtcaccagggtaccatggacct

SEQ ID NO: 211741 - DNA, 25 bp, Homo sapien
gctgccaggtcatacccaaagttat

SEQ ID NO: 211742 - DNA, 25 bp, Homo sapien
tgtcggtctcgatggcctcatgctt

SEQ ID NO: 211743 - DNA, 25 bp, Homo sapien
gcaggtagctccataggcgcagtat

SEQ ID NO: 211744 - DNA, 25 bp, Homo sapien
tcctcgtaggcagccgtgtcggtct

SEQ ID NO: 211745 - DNA, 25 bp, Homo sapien
tttctggacagaatctaatttgatt

SEQ ID NO: 211746 - DNA, 25 bp, Homo sapien
cacatgctatctggggtgcgcatac

SEQ ID NO: 211747 - DNA, 25 bp, Homo sapien
cagtgctctcagaatacttgttgcc

SEQ ID NO: 211748 - DNA, 25 bp, Homo sapien
tgattccaagctttaagtgagaggg

SEQ ID NO: 211749 - DNA, 25 bp, Homo sapien
agttctagactccaaggctctttcc

SEQ ID NO: 211750 - DNA, 25 bp, Homo sapien
caagaaccacaatttaacatcaact

SEQ ID NO: 211751 - DNA, 25 bp, Homo sapien
cacataagacaacttcagcggccag

SEQ ID NO: 211752 - DNA, 25 bp, Homo sapien
gttgacactacaggcccacataaga

SEQ ID NO: 211753 - DNA, 25 bp, Homo sapien
cttccggtcaaagcgccgggccagt

SEQ ID NO: 211754 - DNA, 25 bp, Homo sapien
ccacgaggcgctggttttcactgag

SEQ ID NO: 211755 - DNA, 25 bp, Homo sapien
ttctcctgccgaatgagctcatttc

SEQ ID NO: 211756 - DNA, 25 bp, Homo sapien
gtctctctcattgcggccttccggt

SEQ ID NO: 211757 - DNA, 25 bp, Homo sapien
tcagacactagtttcccatcgtggg

SEQ ID NO: 211758 - DNA, 25 bp, Homo sapien
gggtgtgtacactttctgattgttg

SEQ ID NO: 211759 - DNA, 25 bp, Homo sapien
tctcatccgggactggatggtaaaa

SEQ ID NO: 211760 - DNA, 25 bp, Homo sapien
tgttgatgtcagacactagtttccc

SEQ ID NO: 211761 - DNA, 25 bp, Homo sapien
gatggtctgctcgatccaggtgagc

SEQ ID NO: 211762 - DNA, 25 bp, Homo sapien
aacttgcggctgttcaggacagtga

SEQ ID NO: 211763 - DNA, 25 bp, Homo sapien
gctagcccgctgtacttttcaatca

SEQ ID NO: 211764 - DNA, 25 bp, Homo sapien
cacggtgcggtaggtgctgaaggcc

SEQ ID NO: 211765 - DNA, 25 bp, Homo sapien
ctttggttggaaagagggccactct

SEQ ID NO: 211766 - DNA, 25 bp, Homo sapien
aaacaggggaagagtgacactttgg

SEQ ID NO: 211767 - DNA, 25 bp, Homo sapien
ctgacaaacaggggaagagtgacac

SEQ ID NO: 211768 - DNA, 25 bp, Homo sapien
cactttggttccaaaacagcttgta

SEQ ID NO: 211769 - DNA, 25 bp, Homo sapien
gacaaacaggggaagagtgacactt

SEQ ID NO: 211770 - DNA, 25 bp, Homo sapien
cttgccgacacgcttgccctccact

SEQ ID NO: 211771 - DNA, 25 bp, Homo sapien
gccgacacgcttgccctccactgcc

SEQ ID NO: 211772 - DNA, 25 bp, Homo sapien
tcatcagggttttccgtaaagacat

SEQ ID NO: 211773 - DNA, 25 bp, Homo sapien
ctcatcagggttttccgtaaagaca

SEQ ID NO: 211774 - DNA, 25 bp, Homo sapien
ggaaaagggtgtactctcaggacca

SEQ ID NO: 211775 - DNA, 25 bp, Homo sapien
tgttagggaaaagggtgtactctca

SEQ ID NO: 211776 - DNA, 25 bp, Homo sapien
tagggaaaagggtgtactctcagga

SEQ ID NO: 211777 - DNA, 25 bp, Homo sapien
gaaaagggtgtactctcaggaccaa

SEQ ID NO: 211778 - DNA, 25 bp, Homo sapien
ggaagtcgggaaagtcaggctcaga

SEQ ID NO: 211779 - DNA, 25 bp, Homo sapien
caggctcagagggtttattccccat

SEQ ID NO: 211780 - DNA, 25 bp, Homo sapien
gtcgggaaagtcaggctcagagggt

SEQ ID NO: 211781 - DNA, 25 bp, Homo sapien
gctcagagggtttattccccattcc

SEQ ID NO: 211782 - DNA, 25 bp, Homo sapien
agtcctggcggctgagctcctctag

SEQ ID NO: 211783 - DNA, 25 bp, Homo sapien
cctggcggctgagctcctctagcac

SEQ ID NO: 211784 - DNA, 25 bp, Homo sapien
tggcggctgagctcctctagcacag

SEQ ID NO: 211785 - DNA, 25 bp, Homo sapien
gtcctggcggctgagctcctctagc

SEQ ID NO: 211786 - DNA, 25 bp, Homo sapien
ggcgctcagccacattgaatgcgtg

SEQ ID NO: 211787 - DNA, 25 bp, Homo sapien
tgccgggcattggagtccttcagct

SEQ ID NO: 211788 - DNA, 25 bp, Homo sapien
cttatcaaagtcgatcaggtcgggc

SEQ ID NO: 211789 - DNA, 25 bp, Homo sapien
tcgaggagcgggatgatgcccagct

SEQ ID NO: 211790 - DNA, 25 bp, Homo sapien
cggtgcttgtgtatcagggcattaa

SEQ ID NO: 211791 - DNA, 25 bp, Homo sapien
ggtgcttgtgtatcagggcattaaa

SEQ ID NO: 211792 - DNA, 25 bp, Homo sapien
ggtaaagttggtgacattaacatga

SEQ ID NO: 211793 - DNA, 25 bp, Homo sapien
aaagttggtgacattaacatgaggg

SEQ ID NO: 211794 - DNA, 25 bp, Homo sapien
ggaggtaaagttggtgacattaaca

SEQ ID NO: 211795 - DNA, 25 bp, Homo sapien
gttggtgacattaacatgagggtag

SEQ ID NO: 211796 - DNA, 25 bp, Homo sapien
gctgagcgtgtttcacgaccttcct

SEQ ID NO: 211797 - DNA, 25 bp, Homo sapien
gagcgtgtttcacgaccttcctgag

SEQ ID NO: 211798 - DNA, 25 bp, Homo sapien
tgtttcacgaccttcctgagtttgg

SEQ ID NO: 211799 - DNA, 25 bp, Homo sapien
cttggctgagcgtgtttcacgacct

SEQ ID NO: 211800 - DNA, 25 bp, Homo sapien
caggaccaggcggtggttgccatct

SEQ ID NO: 211801 - DNA, 25 bp, Homo sapien
catctacaatgtcgtgggagcccat

SEQ ID NO: 211802 - DNA, 25 bp, Homo sapien
ctccaggcagtggatgcgcatcttc

SEQ ID NO: 211803 - DNA, 25 bp, Homo sapien
catgttctccaggtgtacacgctgc

SEQ ID NO: 211804 - DNA, 25 bp, Homo sapien
gctacagatgcccagagcccaaagt

SEQ ID NO: 211805 - DNA, 25 bp, Homo sapien
cttgcaagggtggtaaaacacacag

SEQ ID NO: 211806 - DNA, 25 bp, Homo sapien
caagagggatgcatcttagcccgat

SEQ ID NO: 211807 - DNA, 25 bp, Homo sapien
caaagtcaggagctctgcatggctt

SEQ ID NO: 211808 - DNA, 25 bp, Homo sapien
tgcttcccattctaagtattagagc

SEQ ID NO: 211809 - DNA, 25 bp, Homo sapien
cattctaagtattagagcctcccaa

SEQ ID NO: 211810 - DNA, 25 bp, Homo sapien
gggaggaattcagagagaccagtca

SEQ ID NO: 211811 - DNA, 25 bp, Homo sapien
ctgggaggaattcagagagaccagt

SEQ ID NO: 211812 - DNA, 25 bp, Homo sapien
tgaagaggggccgatggcagcagcc

SEQ ID NO: 211813 - DNA, 25 bp, Homo sapien
tttgctgaagaggggccgatggcag

SEQ ID NO: 211814 - DNA, 25 bp, Homo sapien
tgctgaagaggggccgatggcagca

SEQ ID NO: 211815 - DNA, 25 bp, Homo sapien
aagaggggccgatggcagcagcccc

SEQ ID NO: 211816 - DNA, 25 bp, Homo sapien
gagttcacccatttcgtgaaggtct

SEQ ID NO: 211817 - DNA, 25 bp, Homo sapien
tgatgcggcaggacactcgagccag

SEQ ID NO: 211818 - DNA, 25 bp, Homo sapien
cactcgagccaggtgcgagttcacc

SEQ ID NO: 211819 - DNA, 25 bp, Homo sapien
ccttgtagagatcggtgatgcggca

SEQ ID NO: 211820 - DNA, 25 bp, Homo sapien
ggagagaagaaccttggtgaggtgc

SEQ ID NO: 211821 - DNA, 25 bp, Homo sapien
ctaggtggagagaagaaccttggtg

SEQ ID NO: 211822 - DNA, 25 bp, Homo sapien
taggtggagagaagaaccttggtga

SEQ ID NO: 211823 - DNA, 25 bp, Homo sapien
ggtggagagaagaaccttggtgagg

SEQ ID NO: 211824 - DNA, 25 bp, Homo sapien
tctgtcttggtcacttctctgtctc

SEQ ID NO: 211825 - DNA, 25 bp, Homo sapien
tgagcccagggaaatctgtcttggt

SEQ ID NO: 211826 - DNA, 25 bp, Homo sapien
tccctgagcccagggaaatctgtct

SEQ ID NO: 211827 - DNA, 25 bp, Homo sapien
ttctctctcctagatgctccctgag

SEQ ID NO: 211828 - DNA, 25 bp, Homo sapien
ttcaaacctatatcctaatgctggg

SEQ ID NO: 211829 - DNA, 25 bp, Homo sapien
tgtaaggagcaaggaacgctctacc

SEQ ID NO: 211830 - DNA, 25 bp, Homo sapien
gggtcacggcgcagtctctttcttg

SEQ ID NO: 211831 - DNA, 25 bp, Homo sapien
taagcatctttaaccacctgagccc

SEQ ID NO: 211832 - DNA, 25 bp, Homo sapien
ttatagtccaggtacagaacagccc

SEQ ID NO: 211833 - DNA, 25 bp, Homo sapien
taaagcagcacctcccaaaagtgtg

SEQ ID NO: 211834 - DNA, 25 bp, Homo sapien
cagtgaatttatccagagcaaggca

SEQ ID NO: 211835 - DNA, 25 bp, Homo sapien
ggcatctcccatgaagcgcgaagga

SEQ ID NO: 211836 - DNA, 25 bp, Homo sapien
gactctcgtacttctcacttggccg

SEQ ID NO: 211837 - DNA, 25 bp, Homo sapien
aggaggccctgtgaacctgcgcccg

SEQ ID NO: 211838 - DNA, 25 bp, Homo sapien
gctttgcccagactctcgtacttct

SEQ ID NO: 211839 - DNA, 25 bp, Homo sapien
ctcacttggccgcaggtcactcagg

SEQ ID NO: 211840 - DNA, 25 bp, Homo sapien
tttcaaactctgtggccgatgtcat

SEQ ID NO: 211841 - DNA, 25 bp, Homo sapien
tgttgtcattatccagctcgtcgtc

SEQ ID NO: 211842 - DNA, 25 bp, Homo sapien
tatccgggacctctcaaagagcctg

SEQ ID NO: 211843 - DNA, 25 bp, Homo sapien
ggctggttgcccacattttcaaact

SEQ ID NO: 211844 - DNA, 25 bp, Homo sapien
caggctcttagcagctccgcctgcc

SEQ ID NO: 211845 - DNA, 25 bp, Homo sapien
agcaggctcttagcagctccgcctg

SEQ ID NO: 211846 - DNA, 25 bp, Homo sapien
gcaggctcttagcagctccgcctgc

SEQ ID NO: 211847 - DNA, 25 bp, Homo sapien
agtgctccttcagacctagcggcca

SEQ ID NO: 211848 - DNA, 25 bp, Homo sapien
taacctccaagttgaatgacccaag

SEQ ID NO: 211849 - DNA, 25 bp, Homo sapien
tagcggccatcctacttcgaaacaa

SEQ ID NO: 211850 - DNA, 25 bp, Homo sapien
gaaggatgccattctcaccctggag

SEQ ID NO: 211851 - DNA, 25 bp, Homo sapien
acttagagatcaagttcctttcttg

SEQ ID NO: 211852 - DNA, 25 bp, Homo sapien
gatggggaaagactgccaatggtcc

SEQ ID NO: 211853 - DNA, 25 bp, Homo sapien
gaaagactgccaatggtccatttcc

SEQ ID NO: 211854 - DNA, 25 bp, Homo sapien
tgctccatgatgtacccattcagag

SEQ ID NO: 211855 - DNA, 25 bp, Homo sapien
tctcctggccattgagaatactcca

SEQ ID NO: 211856 - DNA, 25 bp, Homo sapien
cacgaggctaacatccttatttgag

SEQ ID NO: 211857 - DNA, 25 bp, Homo sapien
ttagattcacgctttaaaggtctca

SEQ ID NO: 211858 - DNA, 25 bp, Homo sapien
ttatttgagcctttcctgcttatga

SEQ ID NO: 211859 - DNA, 25 bp, Homo sapien
gccgcaaatgcatggttaaatacgt

SEQ ID NO: 211860 - DNA, 25 bp, Homo sapien
taaatacgtaatccagaaatcatgt

SEQ ID NO: 211861 - DNA, 25 bp, Homo sapien
gatgcaacctcagaacttgtggagt

SEQ ID NO: 211862 - DNA, 25 bp, Homo sapien
gaaagttacaaggactgccgcaaat

SEQ ID NO: 211863 - DNA, 25 bp, Homo sapien
tgagctccttacttctggagtctgt

SEQ ID NO: 211864 - DNA, 25 bp, Homo sapien
ccttacttctggagtctgtcaatgt

SEQ ID NO: 211865 - DNA, 25 bp, Homo sapien
gtctgtcaatgtgatcaacactggg

SEQ ID NO: 211866 - DNA, 25 bp, Homo sapien
tctggagtctgtcaatgtgatcaac

SEQ ID NO: 211867 - DNA, 25 bp, Homo sapien
agggtttcttgcagaaggtgcccca

SEQ ID NO: 211868 - DNA, 25 bp, Homo sapien
gcagtttgataacgctctcctcata

SEQ ID NO: 211869 - DNA, 25 bp, Homo sapien
cgtatggaaccagaagagggtttct

SEQ ID NO: 211870 - DNA, 25 bp, Homo sapien
gccccaaggtgttgcagtttgataa

SEQ ID NO: 211871 - DNA, 25 bp, Homo sapien
gaacggcatgtcagtgccttaccaa

SEQ ID NO: 211872 - DNA, 25 bp, Homo sapien
taactgggctactcagaagttccac

SEQ ID NO: 211873 - DNA, 25 bp, Homo sapien
cagttctgagcacagtaactgggct

SEQ ID NO: 211874 - DNA, 25 bp, Homo sapien
gctgcttgcaaagtaactgccacca

SEQ ID NO: 211875 - DNA, 25 bp, Homo sapien
aaggcatgagtgtgacattttgtca

SEQ ID NO: 211876 - DNA, 25 bp, Homo sapien
ggctttagtcttgctctggcggctg

SEQ ID NO: 211877 - DNA, 25 bp, Homo sapien
cacaacccttagtctccggtagtag

SEQ ID NO: 211878 - DNA, 25 bp, Homo sapien
tgaataaaggccatcgctgtcaagc

SEQ ID NO: 211879 - DNA, 25 bp, Homo sapien
aatagtcaccgcctgctctaagcat

SEQ ID NO: 211880 - DNA, 25 bp, Homo sapien
ccaggcttggagcatagcaatagtc

SEQ ID NO: 211881 - DNA, 25 bp, Homo sapien
ggagcatagcaatagtcaccgcctg

SEQ ID NO: 211882 - DNA, 25 bp, Homo sapien
gctctaagcattagcccatgtgcct

SEQ ID NO: 211883 - DNA, 25 bp, Homo sapien
ctgtgctcaatgcagaatttaccca

SEQ ID NO: 211884 - DNA, 25 bp, Homo sapien
tgtgctcaatgcagaatttacccat

SEQ ID NO: 211885 - DNA, 25 bp, Homo sapien
tctgtgctcaatgcagaatttaccc

SEQ ID NO: 211886 - DNA, 25 bp, Homo sapien
tgctgctcacaaagaattacgactg

SEQ ID NO: 211887 - DNA, 25 bp, Homo sapien
cacaaagaattacgactgccaggag

SEQ ID NO: 211888 - DNA, 25 bp, Homo sapien
cgactgccaggagttttatagctcc

SEQ ID NO: 211889 - DNA, 25 bp, Homo sapien
ggagttttatagctcccaattcatt

SEQ ID NO: 211890 - DNA, 25 bp, Homo sapien
tattaaaattgcatggacgggttcc

SEQ ID NO: 211891 - DNA, 25 bp, Homo sapien
tgagactcagttccccattgcaaga

SEQ ID NO: 211892 - DNA, 25 bp, Homo sapien
ttcacccaagggcaaacagcaagag

SEQ ID NO: 211893 - DNA, 25 bp, Homo sapien
ccaggtcgcttaacttgagggctac

SEQ ID NO: 211894 - DNA, 25 bp, Homo sapien
agggacattcctgccgggggacatc

SEQ ID NO: 211895 - DNA, 25 bp, Homo sapien
tggtgctgccgagccgcggacccgc

SEQ ID NO: 211896 - DNA, 25 bp, Homo sapien
taaataacattatctgaggagggac

SEQ ID NO: 211897 - DNA, 25 bp, Homo sapien
cggacccgcccagagatataaataa

SEQ ID NO: 211898 - DNA, 25 bp, Homo sapien
agaaatggagtgaatcgagtaggtt

SEQ ID NO: 211899 - DNA, 25 bp, Homo sapien
ggagtgaatcgagtaggttttatgc

SEQ ID NO: 211900 - DNA, 25 bp, Homo sapien
gagtaggttttatgctcacagttac

SEQ ID NO: 211901 - DNA, 25 bp, Homo sapien
gggtgagaaatggagtgaatcgagt

SEQ ID NO: 211902 - DNA, 25 bp, Homo sapien
cactgagctcatctatggaggcagg

SEQ ID NO: 211903 - DNA, 25 bp, Homo sapien
tcagtcctcatccttgggcaatggc

SEQ ID NO: 211904 - DNA, 25 bp, Homo sapien
caacgtctttataacaagggatagc

SEQ ID NO: 211905 - DNA, 25 bp, Homo sapien
gagtacacaggattaagaacatagg

SEQ ID NO: 211906 - DNA, 25 bp, Homo sapien
tggccaggcagggggctgatccccc

SEQ ID NO: 211907 - DNA, 25 bp, Homo sapien
gctggccaggcagggggctgatccc

SEQ ID NO: 211908 - DNA, 25 bp, Homo sapien
ggctggccaggcagggggctgatcc

SEQ ID NO: 211909 - DNA, 25 bp, Homo sapien
cggctggccaggcagggggctgatc

SEQ ID NO: 211910 - DNA, 25 bp, Homo sapien
cacaaccagctaatacttatttcta

SEQ ID NO: 211911 - DNA, 25 bp, Homo sapien
gaatataatgtgaacagtgtcccct

SEQ ID NO: 211912 - DNA, 25 bp, Homo sapien
caaatatgacatacccttagagctg

SEQ ID NO: 211913 - DNA, 25 bp, Homo sapien
gcagtgactgtactttattcccatg

SEQ ID NO: 211914 - DNA, 25 bp, Homo sapien
gactggattgaggcctctggcacaa

SEQ ID NO: 211915 - DNA, 25 bp, Homo sapien
gttgctgaataatgtcattcgtctg

SEQ ID NO: 211916 - DNA, 25 bp, Homo sapien
aatgtcattcgtctgtatcttgacg

SEQ ID NO: 211917 - DNA, 25 bp, Homo sapien
atcttgacgcatcctctttgcattg

SEQ ID NO: 211918 - DNA, 25 bp, Homo sapien
aatttcaaaaccattgaaagcaaag

SEQ ID NO: 211919 - DNA, 25 bp, Homo sapien
caaatttcaaaaccattgaaagcaa

SEQ ID NO: 211920 - DNA, 25 bp, Homo sapien
tttcaaaaccattgaaagcaaagac

SEQ ID NO: 211921 - DNA, 25 bp, Homo sapien
tcaaatttcaaaaccattgaaagca

SEQ ID NO: 211922 - DNA, 25 bp, Homo sapien
tgtgccttgaggtaactttccaaat

SEQ ID NO: 211923 - DNA, 25 bp, Homo sapien
cttgaggtaactttccaaatccact

SEQ ID NO: 211924 - DNA, 25 bp, Homo sapien
actttccaaatccacttcctggagg

SEQ ID NO: 211925 - DNA, 25 bp, Homo sapien
tctctttgtgccttgaggtaacttt

SEQ ID NO: 211926 - DNA, 25 bp, Homo sapien
tcttgtcagcctaagctcaggaagg

SEQ ID NO: 211927 - DNA, 25 bp, Homo sapien
ccgtcacatctgttagcgcacaaga

SEQ ID NO: 211928 - DNA, 25 bp, Homo sapien
tttgcccacgcacggtgccaaggag

SEQ ID NO: 211929 - DNA, 25 bp, Homo sapien
tgagaacttcgctcagcccaagatc

SEQ ID NO: 211930 - DNA, 25 bp, Homo sapien
gaaggaatatcccaaccgggtgagc

SEQ ID NO: 211931 - DNA, 25 bp, Homo sapien
cgaggtgtctcatatccaaggctgg

SEQ ID NO: 211932 - DNA, 25 bp, Homo sapien
ccaggagtcgagtacttgggcgcat

SEQ ID NO: 211933 - DNA, 25 bp, Homo sapien
caaccgtatctcagttctcgcgagg

SEQ ID NO: 211934 - DNA, 25 bp, Homo sapien
tacctgcctggagaatggatctttc

SEQ ID NO: 211935 - DNA, 25 bp, Homo sapien
taagcgggattttatgctgatcaca

SEQ ID NO: 211936 - DNA, 25 bp, Homo sapien
actttacaggctgtgcagtgtgcag

SEQ ID NO: 211937 - DNA, 25 bp, Homo sapien
gaatggatctttcttactgaacttt

SEQ ID NO: 211938 - DNA, 25 bp, Homo sapien
gccagacatgagtatacattcagta

SEQ ID NO: 211939 - DNA, 25 bp, Homo sapien
catgtaatagccagacatgagtata

SEQ ID NO: 211940 - DNA, 25 bp, Homo sapien
tagccagacatgagtatacattcag

SEQ ID NO: 211941 - DNA, 25 bp, Homo sapien
taatagccagacatgagtatacatt

SEQ ID NO: 211942 - DNA, 25 bp, Homo sapien
tgtgtctgttatgcggcaaagccga

SEQ ID NO: 211943 - DNA, 25 bp, Homo sapien
cggcaaagccgaagatactatcagt

SEQ ID NO: 211944 - DNA, 25 bp, Homo sapien
aggagtataccatgctgtgtctgtt

SEQ ID NO: 211945 - DNA, 25 bp, Homo sapien
ctgatgacccccgacaaatgactct

SEQ ID NO: 211946 - DNA, 25 bp, Homo sapien
agttcaaagttcacatcagtgtagc

SEQ ID NO: 211947 - DNA, 25 bp, Homo sapien
gattctagaactgggatatgaactg

SEQ ID NO: 211948 - DNA, 25 bp, Homo sapien
tagaatgggagcacacctggtgccc

SEQ ID NO: 211949 - DNA, 25 bp, Homo sapien
gagctgagctcttctgctaaagttc

SEQ ID NO: 211950 - DNA, 25 bp, Homo sapien
tattgatagtttagccataaccaga

SEQ ID NO: 211951 - DNA, 25 bp, Homo sapien
tcattgtagatactagggaaaagct

SEQ ID NO: 211952 - DNA, 25 bp, Homo sapien
tcagtgtagcacttttagagccaaa

SEQ ID NO: 211953 - DNA, 25 bp, Homo sapien
tactagaaacaatgaggtggcttca

SEQ ID NO: 211954 - DNA, 25 bp, Homo sapien
cccatgagggtttaggaaggtgcca

SEQ ID NO: 211955 - DNA, 25 bp, Homo sapien
tgccatcattctgtgaaggcccaga

SEQ ID NO: 211956 - DNA, 25 bp, Homo sapien
gagcccaagttgaatcaccaaccag

SEQ ID NO: 211957 - DNA, 25 bp, Homo sapien
gactgatatcaagggaatgctgagg

SEQ ID NO: 211958 - DNA, 25 bp, Homo sapien
ctgtagcgtcggaagggctctccct

SEQ ID NO: 211959 - DNA, 25 bp, Homo sapien
tttaaggaggcgcttgatgtcaggc

SEQ ID NO: 211960 - DNA, 25 bp, Homo sapien
tccggccctatgaggaacttctcaa

SEQ ID NO: 211961 - DNA, 25 bp, Homo sapien
gcacagggctccaaatgatgagctt

SEQ ID NO: 211962 - DNA, 25 bp, Homo sapien
tgtccttcaggtaggcgaagacagg

SEQ ID NO: 211963 - DNA, 25 bp, Homo sapien
gaagacaggatgctcgttctgccca

SEQ ID NO: 211964 - DNA, 25 bp, Homo sapien
cacatttttggacaagggtgaaggt

SEQ ID NO: 211965 - DNA, 25 bp, Homo sapien
catacttgagactgttcaggatctc

SEQ ID NO: 211966 - DNA, 25 bp, Homo sapien
tgttgcccatgctttggctgctctt

SEQ ID NO: 211967 - DNA, 25 bp, Homo sapien
ctgctcttcaagatttagcacttct

SEQ ID NO: 211968 - DNA, 25 bp, Homo sapien
ccagaggaatgggatttacagcttc

SEQ ID NO: 211969 - DNA, 25 bp, Homo sapien
cagctccttgaactgagggtgaaat

SEQ ID NO: 211970 - DNA, 25 bp, Homo sapien
gaaaagaggcttaggttatactgct

SEQ ID NO: 211971 - DNA, 25 bp, Homo sapien
tttgcctcgcctgctttcaattgca

SEQ ID NO: 211972 - DNA, 25 bp, Homo sapien
agactccctccagcaacttgctagg

SEQ ID NO: 211973 - DNA, 25 bp, Homo sapien
tttcttgatacaaatggctggctgg

SEQ ID NO: 211974 - DNA, 25 bp, Homo sapien
agggacatctcgaaagagggtttgc

SEQ ID NO: 211975 - DNA, 25 bp, Homo sapien
ggctcctggtaggttatagactccc

SEQ ID NO: 211976 - DNA, 25 bp, Homo sapien
tggtgcattacaaggagggacccct

SEQ ID NO: 211977 - DNA, 25 bp, Homo sapien
tgtaatgcccagaggcacgtgcctt

SEQ ID NO: 211978 - DNA, 25 bp, Homo sapien
tatgagctaagtggtattatcccca

SEQ ID NO: 211979 - DNA, 25 bp, Homo sapien
gcaaaaccaagtccagctagagcta

SEQ ID NO: 211980 - DNA, 25 bp, Homo sapien
tgtccaaattggttgcaagggaagc

SEQ ID NO: 211981 - DNA, 25 bp, Homo sapien
tccaaattggttgcaagggaagcca

SEQ ID NO: 211982 - DNA, 25 bp, Homo sapien
caaattggttgcaagggaagccaag

SEQ ID NO: 211983 - DNA, 25 bp, Homo sapien
tgatgtccaaattggttgcaaggga

SEQ ID NO: 211984 - DNA, 25 bp, Homo sapien
ctgggaaagcggcattgcagctcgt

SEQ ID NO: 211985 - DNA, 25 bp, Homo sapien
tgggaaagcggcattgcagctcgtt

SEQ ID NO: 211986 - DNA, 25 bp, Homo sapien
ggaaagcggcattgcagctcgttga

SEQ ID NO: 211987 - DNA, 25 bp, Homo sapien
gaaagcggcattgcagctcgttgag

SEQ ID NO: 211988 - DNA, 25 bp, Homo sapien
cctgccccggaacgtattgaaatct

SEQ ID NO: 211989 - DNA, 25 bp, Homo sapien
tgccccggaacgtattgaaatctac

SEQ ID NO: 211990 - DNA, 25 bp, Homo sapien
ctgccccggaacgtattgaaatcta

SEQ ID NO: 211991 - DNA, 25 bp, Homo sapien
tgaggtcatagaaggacttggcaat

SEQ ID NO: 211992 - DNA, 25 bp, Homo sapien
gatggcactgaggtcatagaaggac

SEQ ID NO: 211993 - DNA, 25 bp, Homo sapien
ggcactgaggtcatagaaggacttg

SEQ ID NO: 211994 - DNA, 25 bp, Homo sapien
cactgaggtcatagaaggacttggc

SEQ ID NO: 211995 - DNA, 25 bp, Homo sapien
gcatccccaggatgacttagcaaaa

SEQ ID NO: 211996 - DNA, 25 bp, Homo sapien
aacaggtccccacctgtaagtgctg

SEQ ID NO: 211997 - DNA, 25 bp, Homo sapien
cagaaaggatctaacaatggagctt

SEQ ID NO: 211998 - DNA, 25 bp, Homo sapien
gagcccacttatgagcctattagag

SEQ ID NO: 211999 - DNA, 25 bp, Homo sapien
atcaaagggacccttaggaggagag

SEQ ID NO: 212000 - DNA, 25 bp, Homo sapien
aatatacatattcctgttcacgttc

SEQ ID NO: 212001 - DNA, 25 bp, Homo sapien
caactgaaatatacatattcctgtt

SEQ ID NO: 212002 - DNA, 25 bp, Homo sapien
gaaatatacatattcctgttcacgt

SEQ ID NO: 212003 - DNA, 25 bp, Homo sapien
cgtgcagtgcatcgcaggacatctg

SEQ ID NO: 212004 - DNA, 25 bp, Homo sapien
gctgctgtggttccagacgcaggca

SEQ ID NO: 212005 - DNA, 25 bp, Homo sapien
ggacatctgctaagggccatctcag

SEQ ID NO: 212006 - DNA, 25 bp, Homo sapien
gctttcaacaagaggcgtgcagtgc

SEQ ID NO: 212007 - DNA, 25 bp, Homo sapien
gagacacagtacacgaagttcaccc

SEQ ID NO: 212008 - DNA, 25 bp, Homo sapien
ttcatatatggacccgagacacagt

SEQ ID NO: 212009 - DNA, 25 bp, Homo sapien
aaagtttagggtgagcgtagctgca

SEQ ID NO: 212010 - DNA, 25 bp, Homo sapien
ggtgacgagtaaacaggccagcaga

SEQ ID NO: 212011 - DNA, 25 bp, Homo sapien
ggcctatcagtctatagaatcctga

SEQ ID NO: 212012 - DNA, 25 bp, Homo sapien
gtggatagggcctatcagtctatag

SEQ ID NO: 212013 - DNA, 25 bp, Homo sapien
cagtctatagaatcctgattccatg

SEQ ID NO: 212014 - DNA, 25 bp, Homo sapien
tatagaatcctgattccatgttttc

SEQ ID NO: 212015 - DNA, 25 bp, Homo sapien
gaaagacaatgaatggcaccctgcc

SEQ ID NO: 212016 - DNA, 25 bp, Homo sapien
tatccttcacatatgagtgccctgg

SEQ ID NO: 212017 - DNA, 25 bp, Homo sapien
tcaaggaagcaactccagcctagtc

SEQ ID NO: 212018 - DNA, 25 bp, Homo sapien
tataccctgtccctaagtcctgagc

SEQ ID NO: 212019 - DNA, 25 bp, Homo sapien
aagaaacttcctgaacatagcactc

SEQ ID NO: 212020 - DNA, 25 bp, Homo sapien
tctttaaagggcctcctacgagcta

SEQ ID NO: 212021 - DNA, 25 bp, Homo sapien
cagtgtggttggcaaaccctcaagc

SEQ ID NO: 212022 - DNA, 25 bp, Homo sapien
ccagtagaactggtaaattacttgt

SEQ ID NO: 212023 - DNA, 25 bp, Homo sapien
taacctgatacataggagctagtcc

SEQ ID NO: 212024 - DNA, 25 bp, Homo sapien
acagcaccaagcgtttctacccagg

SEQ ID NO: 212025 - DNA, 25 bp, Homo sapien
tgcatggttggcctgacagtgtcac

SEQ ID NO: 212026 - DNA, 25 bp, Homo sapien
caagcaagggcaaagctctggtcgg

SEQ ID NO: 212027 - DNA, 25 bp, Homo sapien
tttggcccacccacgaggcagggtg

SEQ ID NO: 212028 - DNA, 25 bp, Homo sapien
gatgctccactttcgcaggtcactg

SEQ ID NO: 212029 - DNA, 25 bp, Homo sapien
agggtggaacctccccacgagcctg

SEQ ID NO: 212030 - DNA, 25 bp, Homo sapien
aggcaggcccatggcacatgaggga

SEQ ID NO: 212031 - DNA, 25 bp, Homo sapien
aaggaaagagcgagctgcacacagc

SEQ ID NO: 212032 - DNA, 25 bp, Homo sapien
ctttgatacgaaacgcaccggaggg

SEQ ID NO: 212033 - DNA, 25 bp, Homo sapien
gaggagctttgatacgaaacgcacc

SEQ ID NO: 212034 - DNA, 25 bp, Homo sapien
gggtttgaggagctttgatacgaaa

SEQ ID NO: 212035 - DNA, 25 bp, Homo sapien
agacacgatgcacggagaaaggagc

SEQ ID NO: 212036 - DNA, 25 bp, Homo sapien
aagagacacgatgcacggagaaagg

SEQ ID NO: 212037 - DNA, 25 bp, Homo sapien
cacgatgcacggagaaaggagcagc

SEQ ID NO: 212038 - DNA, 25 bp, Homo sapien
tgcacggagaaaggagcagctgaaa

SEQ ID NO: 212039 - DNA, 25 bp, Homo sapien
gagacagtgcttgcggcacatcgtg

SEQ ID NO: 212040 - DNA, 25 bp, Homo sapien
tgaagaagaccactccagggtggac

SEQ ID NO: 212041 - DNA, 25 bp, Homo sapien
gctgcttgagatgacagcagagccg

SEQ ID NO: 212042 - DNA, 25 bp, Homo sapien
gggagtagtggctactgatactcaa

SEQ ID NO: 212043 - DNA, 25 bp, Homo sapien
ggaagaggggtgtcgtgtggggtgc

SEQ ID NO: 212044 - DNA, 25 bp, Homo sapien
agtgccaactcattgctggcacgca

SEQ ID NO: 212045 - DNA, 25 bp, Homo sapien
cagcaggttttcgaagagttcgctg

SEQ ID NO: 212046 - DNA, 25 bp, Homo sapien
tttcgaagagttcgctgggccctcg

SEQ ID NO: 212047 - DNA, 25 bp, Homo sapien
ttgctggcacgcatccggaggcctt

SEQ ID NO: 212048 - DNA, 25 bp, Homo sapien
tgtttcatagaagtccatgccatac

SEQ ID NO: 212049 - DNA, 25 bp, Homo sapien
agaagtccatgccatactccttcgc

SEQ ID NO: 212050 - DNA, 25 bp, Homo sapien
cacttgtttcatagaagtccatgcc

SEQ ID NO: 212051 - DNA, 25 bp, Homo sapien
gcaggcacttgtttcatagaagtcc

SEQ ID NO: 212052 - DNA, 25 bp, Homo sapien
gacaacaagccttccgaggatggcc

SEQ ID NO: 212053 - DNA, 25 bp, Homo sapien
tttctggatggaccccgaatctctg

SEQ ID NO: 212054 - DNA, 25 bp, Homo sapien
gagttgctgcctatgacgtctttgt

SEQ ID NO: 212055 - DNA, 25 bp, Homo sapien
tgaaacccagacaacaagccttccg

SEQ ID NO: 212056 - DNA, 25 bp, Homo sapien
gccttattcccaataaggatcttct

SEQ ID NO: 212057 - DNA, 25 bp, Homo sapien
aaggatcttctggacgccttctggt

SEQ ID NO: 212058 - DNA, 25 bp, Homo sapien
atcagccttattcccaataaggatc

SEQ ID NO: 212059 - DNA, 25 bp, Homo sapien
tcttctggacgccttctggtgcgta

SEQ ID NO: 212060 - DNA, 25 bp, Homo sapien
gcttccttgggttagaccactggta

SEQ ID NO: 212061 - DNA, 25 bp, Homo sapien
tcatttccgggaaagacacagccgt

SEQ ID NO: 212062 - DNA, 25 bp, Homo sapien
cattggatgtaagtccagccctcat

SEQ ID NO: 212063 - DNA, 25 bp, Homo sapien
cagccctcattctacaggaactggg

SEQ ID NO: 212064 - DNA, 25 bp, Homo sapien
accccggcagtgaggtggcatctcc

SEQ ID NO: 212065 - DNA, 25 bp, Homo sapien
tgccttccccggtgaggcaccctct

SEQ ID NO: 212066 - DNA, 25 bp, Homo sapien
aggcaaagcttcctggaagcatttg

SEQ ID NO: 212067 - DNA, 25 bp, Homo sapien
caaagcttcctggaagcatttgcct

SEQ ID NO: 212068 - DNA, 25 bp, Homo sapien
tgtgctggtaagagcgctcgctgct

SEQ ID NO: 212069 - DNA, 25 bp, Homo sapien
ggtaagagcgctcgctgctaatgtc

SEQ ID NO: 212070 - DNA, 25 bp, Homo sapien
gagcgctcgctgctaatgtcataga

SEQ ID NO: 212071 - DNA, 25 bp, Homo sapien
gctcgctgctaatgtcatagaccaa

SEQ ID NO: 212072 - DNA, 25 bp, Homo sapien
ctgctttgtgatggtctggtatctc

SEQ ID NO: 212073 - DNA, 25 bp, Homo sapien
gcccgccgatagtactgctttgtga

SEQ ID NO: 212074 - DNA, 25 bp, Homo sapien
ctgggcccgccgatagtactgcttt

SEQ ID NO: 212075 - DNA, 25 bp, Homo sapien
ccgatagtactgctttgtgatggtc

SEQ ID NO: 212076 - DNA, 25 bp, Homo sapien
gaagagcagagctgtccccttgtag

SEQ ID NO: 212077 - DNA, 25 bp, Homo sapien
cagaggagcagggaccatgggaaca

SEQ ID NO: 212078 - DNA, 25 bp, Homo sapien
agaaagccagtccctcagaggagca

SEQ ID NO: 212079 - DNA, 25 bp, Homo sapien
agctgtccccttgtaggaaaaactg

SEQ ID NO: 212080 - DNA, 25 bp, Homo sapien
agaagccacagccagaacaggcctt

SEQ ID NO: 212081 - DNA, 25 bp, Homo sapien
ggccttggcccctcctgccaactgc

SEQ ID NO: 212082 - DNA, 25 bp, Homo sapien
gccacagccagaacaggccttggac

SEQ ID NO: 212083 - DNA, 25 bp, Homo sapien
acagccagaacaggccttggacagc

SEQ ID NO: 212084 - DNA, 25 bp, Homo sapien
tgatgccgtctacctctatggtctt

SEQ ID NO: 212085 - DNA, 25 bp, Homo sapien
tatccgcactttgatgccgtctacc

SEQ ID NO: 212086 - DNA, 25 bp, Homo sapien
gatctgtatccgcactttgatgccg

SEQ ID NO: 212087 - DNA, 25 bp, Homo sapien
actttgatgccgtctacctctatgg

SEQ ID NO: 212088 - DNA, 25 bp, Homo sapien
cttaaggaagtatctgaagctttga

SEQ ID NO: 212089 - DNA, 25 bp, Homo sapien
cctccctgagctgaaagttgccaca

SEQ ID NO: 212090 - DNA, 25 bp, Homo sapien
gagctgaaagttgccacaagtaaag

SEQ ID NO: 212091 - DNA, 25 bp, Homo sapien
ggaagtatctgaagctttgaaaggg

SEQ ID NO: 212092 - DNA, 25 bp, Homo sapien
agaaaccgaagggatttggcaaatg

SEQ ID NO: 212093 - DNA, 25 bp, Homo sapien
gcaaatgcgtgcagggcagaaacat

SEQ ID NO: 212094 - DNA, 25 bp, Homo sapien
cacaagaaaccgaagggatttggca

SEQ ID NO: 212095 - DNA, 25 bp, Homo sapien
tgcgtgcagggcagaaacatattgg

SEQ ID NO: 212096 - DNA, 25 bp, Homo sapien
tggccccagtaacccgtgcccatcg

SEQ ID NO: 212097 - DNA, 25 bp, Homo sapien
cgtgcccatcgtggctccttccctc

SEQ ID NO: 212098 - DNA, 25 bp, Homo sapien
cctgcgtggctgttggttttttcca

SEQ ID NO: 212099 - DNA, 25 bp, Homo sapien
ctccctgcgtggctgttggtttttt

SEQ ID NO: 212100 - DNA, 25 bp, Homo sapien
tatgtgaagcactgacagcgtagtc

SEQ ID NO: 212101 - DNA, 25 bp, Homo sapien
gagaatactgcttccctcctaaggg

SEQ ID NO: 212102 - DNA, 25 bp, Homo sapien
ccgcaccaggccgattttcttaagt

SEQ ID NO: 212103 - DNA, 25 bp, Homo sapien
ggctgtgctgggataaattaaacga

SEQ ID NO: 212104 - DNA, 25 bp, Homo sapien
ctctgctgaataaaggcttcctggg

SEQ ID NO: 212105 - DNA, 25 bp, Homo sapien
cctctgctgaataaaggcttcctgg

SEQ ID NO: 212106 - DNA, 25 bp, Homo sapien
tggggagtcaggaaaaccagcccag

SEQ ID NO: 212107 - DNA, 25 bp, Homo sapien
ttccctctgctgaataaaggcttcc

SEQ ID NO: 212108 - DNA, 25 bp, Homo sapien
ggcatacccgatgccttttcccgca

SEQ ID NO: 212109 - DNA, 25 bp, Homo sapien
gcatacccgatgccttttcccgcac

SEQ ID NO: 212110 - DNA, 25 bp, Homo sapien
ctggcatacccgatgccttttcccg

SEQ ID NO: 212111 - DNA, 25 bp, Homo sapien
tggcatacccgatgccttttcccgc

SEQ ID NO: 212112 - DNA, 25 bp, Homo sapien
gtgtgaccatggtgtggccactcca

SEQ ID NO: 212113 - DNA, 25 bp, Homo sapien
gccccactggaggtgttctccacag

SEQ ID NO: 212114 - DNA, 25 bp, Homo sapien
tcttgaacttcagctggtgtgacca

SEQ ID NO: 212115 - DNA, 25 bp, Homo sapien
cagcaaagcaatctcctggcaaggg

SEQ ID NO: 212116 - DNA, 25 bp, Homo sapien
tagaaggataatggccaaatatcag

SEQ ID NO: 212117 - DNA, 25 bp, Homo sapien
cagaagaaggcactctgagaagagc

SEQ ID NO: 212118 - DNA, 25 bp, Homo sapien
tggcaatcagggtagaaggataatg

SEQ ID NO: 212119 - DNA, 25 bp, Homo sapien
tacagaagaaggcactctgagaaga

SEQ ID NO: 212120 - DNA, 25 bp, Homo sapien
ttcagaagttgccaggttgattggc

SEQ ID NO: 212121 - DNA, 25 bp, Homo sapien
gaaagtagaacaactgactgtgtgg

SEQ ID NO: 212122 - DNA, 25 bp, Homo sapien
gttgccaggttgattggcttgaacc

SEQ ID NO: 212123 - DNA, 25 bp, Homo sapien
ctggtcatggcacaggtcccataag

SEQ ID NO: 212124 - DNA, 25 bp, Homo sapien
tccctggcgggttcttctctagaag

SEQ ID NO: 212125 - DNA, 25 bp, Homo sapien
gcaggccgttaaagtggagtacaca

SEQ ID NO: 212126 - DNA, 25 bp, Homo sapien
tactggcctaggtgatatccacatg

SEQ ID NO: 212127 - DNA, 25 bp, Homo sapien
cagtgtctcagtctaccagggaggc

SEQ ID NO: 212128 - DNA, 25 bp, Homo sapien
ctcgatccctgtggcccctccgtac

SEQ ID NO: 212129 - DNA, 25 bp, Homo sapien
actcgatccctgtggcccctccgta

SEQ ID NO: 212130 - DNA, 25 bp, Homo sapien
tggaaactcgatccctgtggcccct

SEQ ID NO: 212131 - DNA, 25 bp, Homo sapien
ccctggaaactcgatccctgtggcc

SEQ ID NO: 212132 - DNA, 25 bp, Homo sapien
tgggacggaaggcttcccggcaaga

SEQ ID NO: 212133 - DNA, 25 bp, Homo sapien
ttctcggtttgatgggacggaaggc

SEQ ID NO: 212134 - DNA, 25 bp, Homo sapien
gcttcccggcaagaggcgggagacc

SEQ ID NO: 212135 - DNA, 25 bp, Homo sapien
cacccctggtccggacggcaggcag

SEQ ID NO: 212136 - DNA, 25 bp, Homo sapien
cgagatttatcccggactccggcct

SEQ ID NO: 212137 - DNA, 25 bp, Homo sapien
gaggggctggcaattcctccccagc

SEQ ID NO: 212138 - DNA, 25 bp, Homo sapien
cggaggggctggcaattcctcccca

SEQ ID NO: 212139 - DNA, 25 bp, Homo sapien
ggaggggctggcaattcctccccag

SEQ ID NO: 212140 - DNA, 25 bp, Homo sapien
tggtggagatgtgcgaggagtggaa

SEQ ID NO: 212141 - DNA, 25 bp, Homo sapien
atggtggagatgtgcgaggagtgga

SEQ ID NO: 212142 - DNA, 25 bp, Homo sapien
ggtggagatgtgcgaggagtggaac

SEQ ID NO: 212143 - DNA, 25 bp, Homo sapien
cgatggtggagatgtgcgaggagtg

SEQ ID NO: 212144 - DNA, 25 bp, Homo sapien
cgatcagcagcagccggaacagcac

SEQ ID NO: 212145 - DNA, 25 bp, Homo sapien
tcgttgtcggtgaagcggcacagca

SEQ ID NO: 212146 - DNA, 25 bp, Homo sapien
gccggaacagcacatcgtactgctt

SEQ ID NO: 212147 - DNA, 25 bp, Homo sapien
aacagcacatcgtactgcttcgcca

SEQ ID NO: 212148 - DNA, 25 bp, Homo sapien
ggcgggcagcgggctcagccctgct

SEQ ID NO: 212149 - DNA, 25 bp, Homo sapien
ccactcgctcgctgggtgccgggaa

SEQ ID NO: 212150 - DNA, 25 bp, Homo sapien
gcccactcgctcgctgggtgccggg

SEQ ID NO: 212151 - DNA, 25 bp, Homo sapien
cccactcgctcgctgggtgccggga

SEQ ID NO: 212152 - DNA, 25 bp, Homo sapien
tctggattcgaacacccgtctccat

SEQ ID NO: 212153 - DNA, 25 bp, Homo sapien
gagcaggatctggattcgaacaccc

SEQ ID NO: 212154 - DNA, 25 bp, Homo sapien
aggatctggattcgaacacccgtct

SEQ ID NO: 212155 - DNA, 25 bp, Homo sapien
gcaggatctggattcgaacacccgt

SEQ ID NO: 212156 - DNA, 25 bp, Homo sapien
gctggttgtcaaatgtcactctggt

SEQ ID NO: 212157 - DNA, 25 bp, Homo sapien
tccctggatcctagacatgtgacat

SEQ ID NO: 212158 - DNA, 25 bp, Homo sapien
tgtgcagccttatccatgggtccta

SEQ ID NO: 212159 - DNA, 25 bp, Homo sapien
acctgaggtctttaggccagcccag

SEQ ID NO: 212160 - DNA, 25 bp, Homo sapien
ccataaatatctgcggactgactgt

SEQ ID NO: 212161 - DNA, 25 bp, Homo sapien
cactgagtgatactgagacggcgtc

SEQ ID NO: 212162 - DNA, 25 bp, Homo sapien
gaggctgtcaagtaccccaaggtgc

SEQ ID NO: 212163 - DNA, 25 bp, Homo sapien
gacggcgtccttgcacgtttgagca

SEQ ID NO: 212164 - DNA, 25 bp, Homo sapien
gatgtagacacccttgcgcttcagg

SEQ ID NO: 212165 - DNA, 25 bp, Homo sapien
taactcactcgaaagacgggtaggc

SEQ ID NO: 212166 - DNA, 25 bp, Homo sapien
gaaacagtcacgtccatagaacagg

SEQ ID NO: 212167 - DNA, 25 bp, Homo sapien
taacgaagcagagtcctacacactg

SEQ ID NO: 212168 - DNA, 25 bp, Homo sapien
gcacacattagcctggacctagaca

SEQ ID NO: 212169 - DNA, 25 bp, Homo sapien
aacgcacacattagcctggacctag

SEQ ID NO: 212170 - DNA, 25 bp, Homo sapien
cacacattagcctggacctagacag

SEQ ID NO: 212171 - DNA, 25 bp, Homo sapien
cacaaacgcacacattagcctggac

SEQ ID NO: 212172 - DNA, 25 bp, Homo sapien
gagagtggtgagttaatgaacatcc

SEQ ID NO: 212173 - DNA, 25 bp, Homo sapien
gaaagaggtgatctagaactccagc

SEQ ID NO: 212174 - DNA, 25 bp, Homo sapien
ctaaaaacagagaagattgtgggcg

SEQ ID NO: 212175 - DNA, 25 bp, Homo sapien
tctgggttggaaccactataacaaa

SEQ ID NO: 212176 - DNA, 25 bp, Homo sapien
agacaggtgggagggttaacttcat

SEQ ID NO: 212177 - DNA, 25 bp, Homo sapien
ttagccatggcagaaaacagttgga

SEQ ID NO: 212178 - DNA, 25 bp, Homo sapien
aaggcaagtgttcataaggaaagac

SEQ ID NO: 212179 - DNA, 25 bp, Homo sapien
gaaaaggcaagtgttcataaggaaa

SEQ ID NO: 212180 - DNA, 25 bp, Homo sapien
ggaagggtgaggcaaaagaatctct

SEQ ID NO: 212181 - DNA, 25 bp, Homo sapien
tgggagacggatgctgcaatgagct

SEQ ID NO: 212182 - DNA, 25 bp, Homo sapien
aacctgggagacggatgctgcaatg

SEQ ID NO: 212183 - DNA, 25 bp, Homo sapien
ttggaagggtgaggcaaaagaatct

SEQ ID NO: 212184 - DNA, 25 bp, Homo sapien
tcctgagggcaaaccagagagaaaa

SEQ ID NO: 212185 - DNA, 25 bp, Homo sapien
gccctgggctatggctgccatcctg

SEQ ID NO: 212186 - DNA, 25 bp, Homo sapien
ggctgccatcctgagggcaaaccag

SEQ ID NO: 212187 - DNA, 25 bp, Homo sapien
caaaccagagagaaaaagttgtggg

SEQ ID NO: 212188 - DNA, 25 bp, Homo sapien
ttcctctgtctttcaattctctctt

SEQ ID NO: 212189 - DNA, 25 bp, Homo sapien
gggttgactggttaggcacagacta

SEQ ID NO: 212190 - DNA, 25 bp, Homo sapien
gcacagactagatacggaactcaga

SEQ ID NO: 212191 - DNA, 25 bp, Homo sapien
tagatacggaactcagacagcctgg

SEQ ID NO: 212192 - DNA, 25 bp, Homo sapien
aacttacctattcagttgcgaacca

SEQ ID NO: 212193 - DNA, 25 bp, Homo sapien
ggatctcagaagattaggccaaaca

SEQ ID NO: 212194 - DNA, 25 bp, Homo sapien
gatgcagcatatgatgtagacaagg

SEQ ID NO: 212195 - DNA, 25 bp, Homo sapien
taaaattggctattggatctcagaa

SEQ ID NO: 212196 - DNA, 25 bp, Homo sapien
cctgtctctactaaaaatgcaaaaa

SEQ ID NO: 212197 - DNA, 25 bp, Homo sapien
cgagactggcttgatcaacatagtg

SEQ ID NO: 212198 - DNA, 25 bp, Homo sapien
actggcttgatcaacatagtgaaac

SEQ ID NO: 212199 - DNA, 25 bp, Homo sapien
ttcgagactggcttgatcaacatag

SEQ ID NO: 212200 - DNA, 25 bp, Homo sapien
gaagacgagaagcttttgtccctgg

SEQ ID NO: 212201 - DNA, 25 bp, Homo sapien
caagtgtatcaaagcatgtggcctg

SEQ ID NO: 212202 - DNA, 25 bp, Homo sapien
cctgagatgggagattggatgcttc

SEQ ID NO: 212203 - DNA, 25 bp, Homo sapien
taatggcaaggaactggaaacaacc

SEQ ID NO: 212204 - DNA, 25 bp, Homo sapien
tctctttatagactgtatcataaac

SEQ ID NO: 212205 - DNA, 25 bp, Homo sapien
caatctctttatagactgtatcata

SEQ ID NO: 212206 - DNA, 25 bp, Homo sapien
tctttatagactgtatcataaactt

SEQ ID NO: 212207 - DNA, 25 bp, Homo sapien
gcttcaatctctttatagactgtat

SEQ ID NO: 212208 - DNA, 25 bp, Homo sapien
ggaagccaacccatgcaaacagagg

SEQ ID NO: 212209 - DNA, 25 bp, Homo sapien
tataacagcctacccttgcaggaac

SEQ ID NO: 212210 - DNA, 25 bp, Homo sapien
gagagctcacgcactactgcaagaa

SEQ ID NO: 212211 - DNA, 25 bp, Homo sapien
cattccctcaaggactaatccagac

SEQ ID NO: 212212 - DNA, 25 bp, Homo sapien
gtctgaaaacaggtaggcaagtcct

SEQ ID NO: 212213 - DNA, 25 bp, Homo sapien
taccattttttgagggaagcagaca

SEQ ID NO: 212214 - DNA, 25 bp, Homo sapien
gatgcgtgctatgaagggaatgaac

SEQ ID NO: 212215 - DNA, 25 bp, Homo sapien
tgaagtctacaacctttcctgctga

SEQ ID NO: 212216 - DNA, 25 bp, Homo sapien
tcagtttgccagtatgtttgcctag

SEQ ID NO: 212217 - DNA, 25 bp, Homo sapien
gataagcccttcttggtcatagtag

SEQ ID NO: 212218 - DNA, 25 bp, Homo sapien
gagggcattcgtctcttgctcctga

SEQ ID NO: 212219 - DNA, 25 bp, Homo sapien
aaattaaatgggtagcttcctgcac

SEQ ID NO: 212220 - DNA, 25 bp, Homo sapien
tactgacctggccttcatgtaagca

SEQ ID NO: 212221 - DNA, 25 bp, Homo sapien
cactagcctctgtagctggtggtgg

SEQ ID NO: 212222 - DNA, 25 bp, Homo sapien
cactggctgctactaaggcactagc

SEQ ID NO: 212223 - DNA, 25 bp, Homo sapien
cagtggagtatcaagttgggccatc

SEQ ID NO: 212224 - DNA, 25 bp, Homo sapien
tcagtgaggccgtgatgagtccgtc

SEQ ID NO: 212225 - DNA, 25 bp, Homo sapien
tccgtcttcccaggagctgacctga

SEQ ID NO: 212226 - DNA, 25 bp, Homo sapien
cagtgtgatgccgtgtggctcagtg

SEQ ID NO: 212227 - DNA, 25 bp, Homo sapien
ggcccaggcacatctaacaggttcc

SEQ ID NO: 212228 - DNA, 25 bp, Homo sapien
tgtcaggttcctccataaggttact

SEQ ID NO: 212229 - DNA, 25 bp, Homo sapien
tgcccagaccatgcgtaacagtttt

SEQ ID NO: 212230 - DNA, 25 bp, Homo sapien
gaaggtagctactatatgcagtcca

SEQ ID NO: 212231 - DNA, 25 bp, Homo sapien
tgttacccttcatcgcctggctgag

SEQ ID NO: 212232 - DNA, 25 bp, Homo sapien
agtaggtattcgctgtggacatgac

SEQ ID NO: 212233 - DNA, 25 bp, Homo sapien
gccttgctgcagtaggtattcgctg

SEQ ID NO: 212234 - DNA, 25 bp, Homo sapien
acatgacattcctcctcttagctgg

SEQ ID NO: 212235 - DNA, 25 bp, Homo sapien
ttcctctccaaagtctcctacagcc

SEQ ID NO: 212236 - DNA, 25 bp, Homo sapien
gggtgcatgcccattgggttatttt

SEQ ID NO: 212237 - DNA, 25 bp, Homo sapien
ttttttgaatcagactttgcatggc

SEQ ID NO: 212238 - DNA, 25 bp, Homo sapien
aagcactgtgcatgggagccatggg

SEQ ID NO: 212239 - DNA, 25 bp, Homo sapien
tgccagccggattccggatgagtga

SEQ ID NO: 212240 - DNA, 25 bp, Homo sapien
tgataagggtttgccaggagagcct

SEQ ID NO: 212241 - DNA, 25 bp, Homo sapien
cagcagggtgataagggtttgccag

SEQ ID NO: 212242 - DNA, 25 bp, Homo sapien
tgccaggagagcctccaaaacccat

SEQ ID NO: 212243 - DNA, 25 bp, Homo sapien
ggtgataagggtttgccaggagagc

SEQ ID NO: 212244 - DNA, 25 bp, Homo sapien
gtttcctcttcaggctagagaaaca

SEQ ID NO: 212245 - DNA, 25 bp, Homo sapien
tgggtttcctcttcaggctagagaa

SEQ ID NO: 212246 - DNA, 25 bp, Homo sapien
gaagaaaggaatgctctagtttcat

SEQ ID NO: 212247 - DNA, 25 bp, Homo sapien
cctcttcaggctagagaaacagttt

SEQ ID NO: 212248 - DNA, 25 bp, Homo sapien
ctctatcttgaaaagaagtgccttt

SEQ ID NO: 212249 - DNA, 25 bp, Homo sapien
tttccttaatgtaatcatggccttt

SEQ ID NO: 212250 - DNA, 25 bp, Homo sapien
tgtaatcatggcctttggaggcttg

SEQ ID NO: 212251 - DNA, 25 bp, Homo sapien
tcatggcctttggaggcttgatcat

SEQ ID NO: 212252 - DNA, 25 bp, Homo sapien
gggaagccttaacttgcaagacaat

SEQ ID NO: 212253 - DNA, 25 bp, Homo sapien
gggggaagccttaacttgcaagaca

SEQ ID NO: 212254 - DNA, 25 bp, Homo sapien
ggggaagccttaacttgcaagacaa

SEQ ID NO: 212255 - DNA, 25 bp, Homo sapien
ggaagccttaacttgcaagacaatt

SEQ ID NO: 212256 - DNA, 25 bp, Homo sapien
cagggctggatcacacaatggagac

SEQ ID NO: 212257 - DNA, 25 bp, Homo sapien
tctgagggctctaccaacgaactga

SEQ ID NO: 212258 - DNA, 25 bp, Homo sapien
tacataccacgagagtgtcacacgg

SEQ ID NO: 212259 - DNA, 25 bp, Homo sapien
tgaaacatgccagcgactctgtgct

SEQ ID NO: 212260 - DNA, 25 bp, Homo sapien
gctcttcaggctcagactccgagct

SEQ ID NO: 212261 - DNA, 25 bp, Homo sapien
cgagcccccatcgaaggcagagatg

SEQ ID NO: 212262 - DNA, 25 bp, Homo sapien
tagttggtctgcagttgggcacttg

SEQ ID NO: 212263 - DNA, 25 bp, Homo sapien
agttgggcacttgacctcgccttct

SEQ ID NO: 212264 - DNA, 25 bp, Homo sapien
gagcatgaggctccacaaggtgtga

SEQ ID NO: 212265 - DNA, 25 bp, Homo sapien
caaccaagggagtgtgttactgcct

SEQ ID NO: 212266 - DNA, 25 bp, Homo sapien
gtgatgtcaccgtcctgccgtggaa

SEQ ID NO: 212267 - DNA, 25 bp, Homo sapien
tcaagatgctcagaagtagctccct

SEQ ID NO: 212268 - DNA, 25 bp, Homo sapien
ttgcatcttccatgagggaggaaga

SEQ ID NO: 212269 - DNA, 25 bp, Homo sapien
ggctcactgtccctgaacacctgga

SEQ ID NO: 212270 - DNA, 25 bp, Homo sapien
tccctgaacacctggagtctctggt

SEQ ID NO: 212271 - DNA, 25 bp, Homo sapien
tgccctgattggactaccattgaca

SEQ ID NO: 212272 - DNA, 25 bp, Homo sapien
tgattggactaccattgacaatggg

SEQ ID NO: 212273 - DNA, 25 bp, Homo sapien
cagcacattccactccaaggacctc

SEQ ID NO: 212274 - DNA, 25 bp, Homo sapien
caggtgtgatccctactgcaggcag

SEQ ID NO: 212275 - DNA, 25 bp, Homo sapien
ccaggtgtgatccctactgcaggca

SEQ ID NO: 212276 - DNA, 25 bp, Homo sapien
aggtgtgatccctactgcaggcaga

SEQ ID NO: 212277 - DNA, 25 bp, Homo sapien
tgtctcctcactggcgcctcaggtc

SEQ ID NO: 212278 - DNA, 25 bp, Homo sapien
ctcagttactcaggccccaagaagc

SEQ ID NO: 212279 - DNA, 25 bp, Homo sapien
gtcaggccagaaaagatacaagtct

SEQ ID NO: 212280 - DNA, 25 bp, Homo sapien
tcaggacggctctaacactcagtta

SEQ ID NO: 212281 - DNA, 25 bp, Homo sapien
tactgagcacatactccatgactgg

SEQ ID NO: 212282 - DNA, 25 bp, Homo sapien
actgagcacatactccatgactggc

SEQ ID NO: 212283 - DNA, 25 bp, Homo sapien
ctactgagcacatactccatgactg

SEQ ID NO: 212284 - DNA, 25 bp, Homo sapien
cagctgccccacgagctcgggtgct

SEQ ID NO: 212285 - DNA, 25 bp, Homo sapien
gccagctgccccacgagctcgggtg

SEQ ID NO: 212286 - DNA, 25 bp, Homo sapien
ctgccccacgagctcgggtgctcac

SEQ ID NO: 212287 - DNA, 25 bp, Homo sapien
agctgccccacgagctcgggtgctc

SEQ ID NO: 212288 - DNA, 25 bp, Homo sapien
tcaatatcttgctggtgtgtgtggt

SEQ ID NO: 212289 - DNA, 25 bp, Homo sapien
gtggtttttccttcgcatatactgg

SEQ ID NO: 212290 - DNA, 25 bp, Homo sapien
tggctttgtctaggatttgggcccg

SEQ ID NO: 212291 - DNA, 25 bp, Homo sapien
gcattctgccgcttgaggtcgtcaa

SEQ ID NO: 212292 - DNA, 25 bp, Homo sapien
atccaggcagtgagggaacctggcc

SEQ ID NO: 212293 - DNA, 25 bp, Homo sapien
gtggcaatatgagaaaaagcacagg

SEQ ID NO: 212294 - DNA, 25 bp, Homo sapien
cagtgagggaacctggcctgcagca

SEQ ID NO: 212295 - DNA, 25 bp, Homo sapien
taaaaacccaatccaggcagtgagg

SEQ ID NO: 212296 - DNA, 25 bp, Homo sapien
gtagctctactaagaacccaaggat

SEQ ID NO: 212297 - DNA, 25 bp, Homo sapien
tgtgtcactacttcagccttcctgg

SEQ ID NO: 212298 - DNA, 25 bp, Homo sapien
gagattgggccatttcaggaaacaa

SEQ ID NO: 212299 - DNA, 25 bp, Homo sapien
tcactaattctgctagggcctggct

SEQ ID NO: 212300 - DNA, 25 bp, Homo sapien
tatacatggaaatatcacagggcag

SEQ ID NO: 212301 - DNA, 25 bp, Homo sapien
tcagaaaggtttgtaaggcccgtgc

SEQ ID NO: 212302 - DNA, 25 bp, Homo sapien
cagaacacaacagcgggagaaagac

SEQ ID NO: 212303 - DNA, 25 bp, Homo sapien
tacaccgtggctagcaaaaccagat

SEQ ID NO: 212304 - DNA, 25 bp, Homo sapien
taagcaaacgcaaagggctcagcag

SEQ ID NO: 212305 - DNA, 25 bp, Homo sapien
tacaaggacgtcaaatggaagaccc

SEQ ID NO: 212306 - DNA, 25 bp, Homo sapien
agtgacagccgaagcccaatggtaa

SEQ ID NO: 212307 - DNA, 25 bp, Homo sapien
taaattgtctctgcaccggtaacag

SEQ ID NO: 212308 - DNA, 25 bp, Homo sapien
catctgttttattttgtactagtta

SEQ ID NO: 212309 - DNA, 25 bp, Homo sapien
acaactgacatctgttttattttgt

SEQ ID NO: 212310 - DNA, 25 bp, Homo sapien
tgacatctgttttattttgtactag

SEQ ID NO: 212311 - DNA, 25 bp, Homo sapien
aacaactgacatctgttttattttg

SEQ ID NO: 212312 - DNA, 25 bp, Homo sapien
caagcagcttaattaaagccaggag

SEQ ID NO: 212313 - DNA, 25 bp, Homo sapien
ggcagagctatcagccctcaagcag

SEQ ID NO: 212314 - DNA, 25 bp, Homo sapien
catatgaaggtaaagggagggccca

SEQ ID NO: 212315 - DNA, 25 bp, Homo sapien
tggaaccccatcaatgccagcaaag

SEQ ID NO: 212316 - DNA, 25 bp, Homo sapien
catcaaactttgacgatgaaggaca

SEQ ID NO: 212317 - DNA, 25 bp, Homo sapien
ggcatttctgcatcaaactttgacg

SEQ ID NO: 212318 - DNA, 25 bp, Homo sapien
ctttgacgatgaaggacaggagtac

SEQ ID NO: 212319 - DNA, 25 bp, Homo sapien
gaaatgaaggtgtggcatttctgca

SEQ ID NO: 212320 - DNA, 25 bp, Homo sapien
caaaaggcttaggacgcatatgaca

SEQ ID NO: 212321 - DNA, 25 bp, Homo sapien
tgagaactgataagtctaagggacc

SEQ ID NO: 212322 - DNA, 25 bp, Homo sapien
tcacggcacctatgaaacagcgctg

SEQ ID NO: 212323 - DNA, 25 bp, Homo sapien
aatattctgttcgactcacggcacc

SEQ ID NO: 212324 - DNA, 25 bp, Homo sapien
taaactggagtacgtaaggtgtgca

SEQ ID NO: 212325 - DNA, 25 bp, Homo sapien
gactacatttccttcccaataggtg

SEQ ID NO: 212326 - DNA, 25 bp, Homo sapien
aaataaggcaaccatgctacctgaa

SEQ ID NO: 212327 - DNA, 25 bp, Homo sapien
gagtgctctgctaagctctgcaaca

SEQ ID NO: 212328 - DNA, 25 bp, Homo sapien
cagtgcattatgatgagcccgtttg

SEQ ID NO: 212329 - DNA, 25 bp, Homo sapien
tgatgggactgagtcccgcaaactg

SEQ ID NO: 212330 - DNA, 25 bp, Homo sapien
gcattatgatgagcccgtttgtcag

SEQ ID NO: 212331 - DNA, 25 bp, Homo sapien
tgaaagctgtctttgatgtggtccc

SEQ ID NO: 212332 - DNA, 25 bp, Homo sapien
tggcgagtggactgggaaggatttc

SEQ ID NO: 212333 - DNA, 25 bp, Homo sapien
aaggatttctcgaggtgggcagtta

SEQ ID NO: 212334 - DNA, 25 bp, Homo sapien
cagttaggagtctccagaattaggc

SEQ ID NO: 212335 - DNA, 25 bp, Homo sapien
gtgggcagttaggagtctccagaat

SEQ ID NO: 212336 - DNA, 25 bp, Homo sapien
gacaggcagttcttagagggcacaa

SEQ ID NO: 212337 - DNA, 25 bp, Homo sapien
gatccaaggtgctatcctgccaagg

SEQ ID NO: 212338 - DNA, 25 bp, Homo sapien
tttggaacaccacataacctgaggg

SEQ ID NO: 212339 - DNA, 25 bp, Homo sapien
gataagagcacttcagcaggtcccc

SEQ ID NO: 212340 - DNA, 25 bp, Homo sapien
tatttctacccaactttccacactg

SEQ ID NO: 212341 - DNA, 25 bp, Homo sapien
tcagttatatttctacccaactttc

SEQ ID NO: 212342 - DNA, 25 bp, Homo sapien
ttcacctacaatttgtccatctttg

SEQ ID NO: 212343 - DNA, 25 bp, Homo sapien
actttccacactggtagacagaata

SEQ ID NO: 212344 - DNA, 25 bp, Homo sapien
atagaactgaacggaaataaaaatg

SEQ ID NO: 212345 - DNA, 25 bp, Homo sapien
tagaactgaacggaaataaaaatga

SEQ ID NO: 212346 - DNA, 25 bp, Homo sapien
atgaaatggagagtaggagacgtac

SEQ ID NO: 212347 - DNA, 25 bp, Homo sapien
aaaatgaaatggagagtaggagacg

SEQ ID NO: 212348 - DNA, 25 bp, Homo sapien
gcagattgaaacctcggttgctctt

SEQ ID NO: 212349 - DNA, 25 bp, Homo sapien
cagattgaaacctcggttgctcttc

SEQ ID NO: 212350 - DNA, 25 bp, Homo sapien
cgcagattgaaacctcggttgctct

SEQ ID NO: 212351 - DNA, 25 bp, Homo sapien
cctcggcgggatccggtagcagggt

SEQ ID NO: 212352 - DNA, 25 bp, Homo sapien
agaggggtcccgagcactgtctcct

SEQ ID NO: 212353 - DNA, 25 bp, Homo sapien
gagcgccgcccctccttccgggatc

SEQ ID NO: 212354 - DNA, 25 bp, Homo sapien
ttccgggatccgacctgggccagag

SEQ ID NO: 212355 - DNA, 25 bp, Homo sapien
gcgaaccgggaacgcgacggaggca

SEQ ID NO: 212356 - DNA, 25 bp, Homo sapien
ctccagtcccaggaggccgctccgg

SEQ ID NO: 212357 - DNA, 25 bp, Homo sapien
ggccgctccggccaggagccggagg

SEQ ID NO: 212358 - DNA, 25 bp, Homo sapien
caggagccggaggggagcgaaccgg

SEQ ID NO: 212359 - DNA, 25 bp, Homo sapien
tccacctcgatgtcatcgttatcgc

SEQ ID NO: 212360 - DNA, 25 bp, Homo sapien
cctcgatgtcatcgttatcgctcat

SEQ ID NO: 212361 - DNA, 25 bp, Homo sapien
cacctcgatgtcatcgttatcgctc

SEQ ID NO: 212362 - DNA, 25 bp, Homo sapien
ctccacctcgatgtcatcgttatcg

SEQ ID NO: 212363 - DNA, 25 bp, Homo sapien
ttcctacggcccagggagcggccac

SEQ ID NO: 212364 - DNA, 25 bp, Homo sapien
agtcaccgacaacaacaagccgagt

SEQ ID NO: 212365 - DNA, 25 bp, Homo sapien
gagggggaagtcaccgacaacaaca

SEQ ID NO: 212366 - DNA, 25 bp, Homo sapien
acacacacaacacgggcaagaacca

SEQ ID NO: 212367 - DNA, 25 bp, Homo sapien
ctggctggtttggtaagaggtccaa

SEQ ID NO: 212368 - DNA, 25 bp, Homo sapien
caaggaacacagtgtcctttggacg

SEQ ID NO: 212369 - DNA, 25 bp, Homo sapien
gtgtcctttggacgctgacagctgc

SEQ ID NO: 212370 - DNA, 25 bp, Homo sapien
agtcggtcaggccgaccctctctgg

SEQ ID NO: 212371 - DNA, 25 bp, Homo sapien
tgggtgcactgttcctggaagtact

SEQ ID NO: 212372 - DNA, 25 bp, Homo sapien
tatcaggtcaatgtgtggagtggat

SEQ ID NO: 212373 - DNA, 25 bp, Homo sapien
aagtactgcaatatcaggtcaatgt

SEQ ID NO: 212374 - DNA, 25 bp, Homo sapien
tgtggagtggatgtagcaagctcct

SEQ ID NO: 212375 - DNA, 25 bp, Homo sapien
tcagtcgtgtctgcctgatgagaat

SEQ ID NO: 212376 - DNA, 25 bp, Homo sapien
cagtcgtgtctgcctgatgagaatc

SEQ ID NO: 212377 - DNA, 25 bp, Homo sapien
tgttcattacactcagattacattc

SEQ ID NO: 212378 - DNA, 25 bp, Homo sapien
ctggtagtttctgggtccaggacca

SEQ ID NO: 212379 - DNA, 25 bp, Homo sapien
tcttggaggtaagcactggtagttt

SEQ ID NO: 212380 - DNA, 25 bp, Homo sapien
acagacatcttcatgcctgtgttca

SEQ ID NO: 212381 - DNA, 25 bp, Homo sapien
atcctgagggtgccagccaacctca

SEQ ID NO: 212382 - DNA, 25 bp, Homo sapien
tgtcaataacctcaccgaatgcttt

SEQ ID NO: 212383 - DNA, 25 bp, Homo sapien
aatgtcaataacctcaccgaatgct

SEQ ID NO: 212384 - DNA, 25 bp, Homo sapien
aaatgtcaataacctcaccgaatgc

SEQ ID NO: 212385 - DNA, 25 bp, Homo sapien
tcctccaggacactcagcaggttct

SEQ ID NO: 212386 - DNA, 25 bp, Homo sapien
ccatttcctccaggacactcagcag

SEQ ID NO: 212387 - DNA, 25 bp, Homo sapien
tttcctccaggacactcagcaggtt

SEQ ID NO: 212388 - DNA, 25 bp, Homo sapien
ctcccatttcctccaggacactcag

SEQ ID NO: 212389 - DNA, 25 bp, Homo sapien
aaggaaaatgctttgagctcccaac

SEQ ID NO: 212390 - DNA, 25 bp, Homo sapien
aaccaacaggtgctttccacaagca

SEQ ID NO: 212391 - DNA, 25 bp, Homo sapien
tgagctcccaaccaacaggtgcttt

SEQ ID NO: 212392 - DNA, 25 bp, Homo sapien
gctttgagctcccaaccaacaggtg

SEQ ID NO: 212393 - DNA, 25 bp, Homo sapien
gggagcccaagcaaaacatctgcga

SEQ ID NO: 212394 - DNA, 25 bp, Homo sapien
ggagtattgttagtcatgtctgggc

SEQ ID NO: 212395 - DNA, 25 bp, Homo sapien
catccagttttcactctctggagag

SEQ ID NO: 212396 - DNA, 25 bp, Homo sapien
tgggcctgccagactaattttcatc

SEQ ID NO: 212397 - DNA, 25 bp, Homo sapien
cccttcccactctttgggatgggat

SEQ ID NO: 212398 - DNA, 25 bp, Homo sapien
ttcccactctttgggatgggattgg

SEQ ID NO: 212399 - DNA, 25 bp, Homo sapien
ctgggctaggcctagctcccttccc

SEQ ID NO: 212400 - DNA, 25 bp, Homo sapien
tcccactctttgggatgggattggg

SEQ ID NO: 212401 - DNA, 25 bp, Homo sapien
ggttgaggagacatctctcatttaa

SEQ ID NO: 212402 - DNA, 25 bp, Homo sapien
cgtttcctccacaaggtggttgagg

SEQ ID NO: 212403 - DNA, 25 bp, Homo sapien
cgccttcgtttcctccacaaggtgg

SEQ ID NO: 212404 - DNA, 25 bp, Homo sapien
ctttgagactttattaactgagtgt

SEQ ID NO: 212405 - DNA, 25 bp, Homo sapien
tctcccccaaacccgtgcaggccca

SEQ ID NO: 212406 - DNA, 25 bp, Homo sapien
gcaggcccacgtgaatcggaatcct

SEQ ID NO: 212407 - DNA, 25 bp, Homo sapien
ggcgagtcccgcaaagcgctggcct

SEQ ID NO: 212408 - DNA, 25 bp, Homo sapien
agccctggcgatgcccactgcgttt

SEQ ID NO: 212409 - DNA, 25 bp, Homo sapien
gcgatgcccactgcgtttctcagct

SEQ ID NO: 212410 - DNA, 25 bp, Homo sapien
tcagctggctaaggcgagtcccgca

SEQ ID NO: 212411 - DNA, 25 bp, Homo sapien
ccctcccagcaaaagccgtggccac

SEQ ID NO: 212412 - DNA, 25 bp, Homo sapien
ctgaggccccctcccagcaaaagcc

SEQ ID NO: 212413 - DNA, 25 bp, Homo sapien
aggccccctcccagcaaaagccgtg

SEQ ID NO: 212414 - DNA, 25 bp, Homo sapien
gggcagaagaggctgcctgaggccc

SEQ ID NO: 212415 - DNA, 25 bp, Homo sapien
agctctgagctgcaagcattggctg

SEQ ID NO: 212416 - DNA, 25 bp, Homo sapien
tgcaatgactgggttgcagctctga

SEQ ID NO: 212417 - DNA, 25 bp, Homo sapien
ttggctgtggcctggagaccagcca

SEQ ID NO: 212418 - DNA, 25 bp, Homo sapien
gcaatgactgggttgcagctctgag

SEQ ID NO: 212419 - DNA, 25 bp, Homo sapien
gtgaacccgtgaggaatgtgacagc

SEQ ID NO: 212420 - DNA, 25 bp, Homo sapien
gccctggcaagacgtgaacccgtga

SEQ ID NO: 212421 - DNA, 25 bp, Homo sapien
tttgcaataactgctgtgctggccc

SEQ ID NO: 212422 - DNA, 25 bp, Homo sapien
ccagagggctctggcactcccaggg

SEQ ID NO: 212423 - DNA, 25 bp, Homo sapien
gagacaattgggaactgctccctta

SEQ ID NO: 212424 - DNA, 25 bp, Homo sapien
caattgggaactgctcccttaggcc

SEQ ID NO: 212425 - DNA, 25 bp, Homo sapien
ggagacaattgggaactgctccctt

SEQ ID NO: 212426 - DNA, 25 bp, Homo sapien
gacaattgggaactgctcccttagg

SEQ ID NO: 212427 - DNA, 25 bp, Homo sapien
tcagaagatcttggagttcctccag

SEQ ID NO: 212428 - DNA, 25 bp, Homo sapien
tcttccttgtgagttacacaaagtg

SEQ ID NO: 212429 - DNA, 25 bp, Homo sapien
ccaggagcccggaggtgtctccttc

SEQ ID NO: 212430 - DNA, 25 bp, Homo sapien
agatgaggcaggcttgtgaaccaaa

SEQ ID NO: 212431 - DNA, 25 bp, Homo sapien
ccgtagatgtgcaccaacttggaga

SEQ ID NO: 212432 - DNA, 25 bp, Homo sapien
ccaacttggagaattccagaatcca

SEQ ID NO: 212433 - DNA, 25 bp, Homo sapien
aagctgatctgtccctgcccgtaga

SEQ ID NO: 212434 - DNA, 25 bp, Homo sapien
gaattccagaatccagttgattggg

SEQ ID NO: 212435 - DNA, 25 bp, Homo sapien
ttccccggagctcggttctgccgga

SEQ ID NO: 212436 - DNA, 25 bp, Homo sapien
tgagttccagcgaggagggcaatgc

SEQ ID NO: 212437 - DNA, 25 bp, Homo sapien
aagacagagatgatttatcacaggc

SEQ ID NO: 212438 - DNA, 25 bp, Homo sapien
gagctcggttctgccggaagcacct

SEQ ID NO: 212439 - DNA, 25 bp, Homo sapien
tgccgacacgatgtgaatgccagcg

SEQ ID NO: 212440 - DNA, 25 bp, Homo sapien
ggcagcagtgcgctgacttccagga

SEQ ID NO: 212441 - DNA, 25 bp, Homo sapien
cgatgtgaatgccagcggcagcagt

SEQ ID NO: 212442 - DNA, 25 bp, Homo sapien
cggcgtcctgccgacacgatgtgaa

SEQ ID NO: 212443 - DNA, 25 bp, Homo sapien
ttctctaacagccattcgctttaat

SEQ ID NO: 212444 - DNA, 25 bp, Homo sapien
cctaatgcctgcacaatggtcatgg

SEQ ID NO: 212445 - DNA, 25 bp, Homo sapien
ctaatgcctgcacaatggtcatggc

SEQ ID NO: 212446 - DNA, 25 bp, Homo sapien
ttcgctttaattcactcatctcact

SEQ ID NO: 212447 - DNA, 25 bp, Homo sapien
taatgtcttgattccttcccagtgg

SEQ ID NO: 212448 - DNA, 25 bp, Homo sapien
cagaaagtggttctgctatttttaa

SEQ ID NO: 212449 - DNA, 25 bp, Homo sapien
ctgcagcgaagcagaaagtggttct

SEQ ID NO: 212450 - DNA, 25 bp, Homo sapien
ctatttttaaatgatcccaatggaa

SEQ ID NO: 212451 - DNA, 25 bp, Homo sapien
ctgactcttagctttttagagcact

SEQ ID NO: 212452 - DNA, 25 bp, Homo sapien
tgactcttagctttttagagcactg

SEQ ID NO: 212453 - DNA, 25 bp, Homo sapien
tggtgtccggagttccccatttgct

SEQ ID NO: 212454 - DNA, 25 bp, Homo sapien
taatgacagctgaagtctgggctcg

SEQ ID NO: 212455 - DNA, 25 bp, Homo sapien
ggaatctgtgacaggcagcctgcca

SEQ ID NO: 212456 - DNA, 25 bp, Homo sapien
tgccctcctgtgcacggaatctgtg

SEQ ID NO: 212457 - DNA, 25 bp, Homo sapien
ggctctgaagattctccaagagggc

SEQ ID NO: 212458 - DNA, 25 bp, Homo sapien
gggctctgaagattctccaagaggg

SEQ ID NO: 212459 - DNA, 25 bp, Homo sapien
gctctgaagattctccaagagggct

SEQ ID NO: 212460 - DNA, 25 bp, Homo sapien
ggcagagtggcaggcctgctttaag

SEQ ID NO: 212461 - DNA, 25 bp, Homo sapien
gcagagtggcaggcctgctttaaga

SEQ ID NO: 212462 - DNA, 25 bp, Homo sapien
agagcctggcgtgggggaccagcat

SEQ ID NO: 212463 - DNA, 25 bp, Homo sapien
ggtctgctttctcgagtcagatgtg

SEQ ID NO: 212464 - DNA, 25 bp, Homo sapien
tataggaaaagccagaccagctaga

SEQ ID NO: 212465 - DNA, 25 bp, Homo sapien
agtcagatgtgggacaaatgttgag

SEQ ID NO: 212466 - DNA, 25 bp, Homo sapien
taggaaaagccagaccagctagatc

SEQ ID NO: 212467 - DNA, 25 bp, Homo sapien
tgagagctgcaatggattcagaccc

SEQ ID NO: 212468 - DNA, 25 bp, Homo sapien
gggactgagagctgcaatggattca

SEQ ID NO: 212469 - DNA, 25 bp, Homo sapien
gacaggtcctggagcgaaggggact

SEQ ID NO: 212470 - DNA, 25 bp, Homo sapien
gagctgcaatggattcagacccaaa

SEQ ID NO: 212471 - DNA, 25 bp, Homo sapien
catgttccatttccacgtgttcctc

SEQ ID NO: 212472 - DNA, 25 bp, Homo sapien
ctctctttccaagcattgggccatg

SEQ ID NO: 212473 - DNA, 25 bp, Homo sapien
tttccaagcattgggccatgttcca

SEQ ID NO: 212474 - DNA, 25 bp, Homo sapien
gtcataatccctgcaaggtgttagc

SEQ ID NO: 212475 - DNA, 25 bp, Homo sapien
tgaagttatgacatcatggagaatg

SEQ ID NO: 212476 - DNA, 25 bp, Homo sapien
tgttagtgagttacataataggtat

SEQ ID NO: 212477 - DNA, 25 bp, Homo sapien
ctcaacgcccattacccttcctagc

SEQ ID NO: 212478 - DNA, 25 bp, Homo sapien
ggcacgcaatgtgaagttatgacat

SEQ ID NO: 212479 - DNA, 25 bp, Homo sapien
tctctgatgatcaatcatgtgcctg

SEQ ID NO: 212480 - DNA, 25 bp, Homo sapien
tctgatgatcaatcatgtgcctgtc

SEQ ID NO: 212481 - DNA, 25 bp, Homo sapien
catcagcatttattgttgcctgtct

SEQ ID NO: 212482 - DNA, 25 bp, Homo sapien
gatgatcaatcatgtgcctgtctgc

SEQ ID NO: 212483 - DNA, 25 bp, Homo sapien
ccagggcatctggaacttagtgagg

SEQ ID NO: 212484 - DNA, 25 bp, Homo sapien
aagcaagggctggtttaagaatagc

SEQ ID NO: 212485 - DNA, 25 bp, Homo sapien
ggctggttgccaaattccctgccct

SEQ ID NO: 212486 - DNA, 25 bp, Homo sapien
ctggtctgtctgtgcatatggctgg

SEQ ID NO: 212487 - DNA, 25 bp, Homo sapien
gagagatactgctaagaactgccaa

SEQ ID NO: 212488 - DNA, 25 bp, Homo sapien
tcttcgaagtggatctcaattttct

SEQ ID NO: 212489 - DNA, 25 bp, Homo sapien
agagatactgctaagaactgccaaa

SEQ ID NO: 212490 - DNA, 25 bp, Homo sapien
gccaaagatagcatttatcttcgaa

SEQ ID NO: 212491 - DNA, 25 bp, Homo sapien
tgctttggatacacttatggctcat

SEQ ID NO: 212492 - DNA, 25 bp, Homo sapien
ttagcgccttaattatacgtatggg

SEQ ID NO: 212493 - DNA, 25 bp, Homo sapien
ctgttttgtcttagcgccttaatta

SEQ ID NO: 212494 - DNA, 25 bp, Homo sapien
gggcttgtcttacattcttggtctg

SEQ ID NO: 212495 - DNA, 25 bp, Homo sapien
tattttgccgagaataaggacatgc

SEQ ID NO: 212496 - DNA, 25 bp, Homo sapien
tcccagggcaattgattaaaagagt

SEQ ID NO: 212497 - DNA, 25 bp, Homo sapien
ccatagaagggactatctgagttaa

SEQ ID NO: 212498 - DNA, 25 bp, Homo sapien
cctggatcagggaaaagatgtggaa

SEQ ID NO: 212499 - DNA, 25 bp, Homo sapien
tccagaggacatactgcaggcctgc

SEQ ID NO: 212500 - DNA, 25 bp, Homo sapien
gaaggggtgtatgcaaagggcagac

SEQ ID NO: 212501 - DNA, 25 bp, Homo sapien
tgaggatattgacagagagcaagga

SEQ ID NO: 212502 - DNA, 25 bp, Homo sapien
gaggaaggggtgtatgcaaagggca

SEQ ID NO: 212503 - DNA, 25 bp, Homo sapien
ctcgcgagctcttattcctcagact

SEQ ID NO: 212504 - DNA, 25 bp, Homo sapien
ggttctcgcgagctcttattcctca

SEQ ID NO: 212505 - DNA, 25 bp, Homo sapien
caccaggttctcgcgagctcttatt

SEQ ID NO: 212506 - DNA, 25 bp, Homo sapien
ccaggttctcgcgagctcttattcc

SEQ ID NO: 212507 - DNA, 25 bp, Homo sapien
aggaggtgaacaagggtgttccact

SEQ ID NO: 212508 - DNA, 25 bp, Homo sapien
actgcgcagccagttagtttagaac

SEQ ID NO: 212509 - DNA, 25 bp, Homo sapien
gggtgttccactgcgcagccagtta

SEQ ID NO: 212510 - DNA, 25 bp, Homo sapien
gaacaagggtgttccactgcgcagc

SEQ ID NO: 212511 - DNA, 25 bp, Homo sapien
tctgcaggttggttgggattagcca

SEQ ID NO: 212512 - DNA, 25 bp, Homo sapien
tcagaggtcaagaaatacacggatc

SEQ ID NO: 212513 - DNA, 25 bp, Homo sapien
cagggttaataagcactcagaatgg

SEQ ID NO: 212514 - DNA, 25 bp, Homo sapien
gattagccatggtatctcagaggtc

SEQ ID NO: 212515 - DNA, 25 bp, Homo sapien
tatttataagggaccacacgcagtt

SEQ ID NO: 212516 - DNA, 25 bp, Homo sapien
ttatttataagggaccacacgcagt

SEQ ID NO: 212517 - DNA, 25 bp, Homo sapien
agtctctgagtgacaatgcaagtgg

SEQ ID NO: 212518 - DNA, 25 bp, Homo sapien
caagtgcagttgaccacgaaccatc

SEQ ID NO: 212519 - DNA, 25 bp, Homo sapien
cacggtagcctgcttcgtactcaca

SEQ ID NO: 212520 - DNA, 25 bp, Homo sapien
tgcaagtgggaccatcacggtagcc

SEQ ID NO: 212521 - DNA, 25 bp, Homo sapien
gcatcaggataacctcattgcctta

SEQ ID NO: 212522 - DNA, 25 bp, Homo sapien
aatttgccatagattcctcagcatc

SEQ ID NO: 212523 - DNA, 25 bp, Homo sapien
tctctgccttctaatatgaaaaggt

SEQ ID NO: 212524 - DNA, 25 bp, Homo sapien
ttgacaggatagtttgagggagaaa

SEQ ID NO: 212525 - DNA, 25 bp, Homo sapien
aaaagagtcagtgtgatgtaagtta

SEQ ID NO: 212526 - DNA, 25 bp, Homo sapien
ttaaaagagtcagtgtgatgtaagt

SEQ ID NO: 212527 - DNA, 25 bp, Homo sapien
agttaggatgatgtaggtgtgtagt

SEQ ID NO: 212528 - DNA, 25 bp, Homo sapien
tccttaaaagagtcagtgtgatgta

SEQ ID NO: 212529 - DNA, 25 bp, Homo sapien
aatggtgccctgtgattgtttggct

SEQ ID NO: 212530 - DNA, 25 bp, Homo sapien
gcaagaaacagggtgtttgatttaa

SEQ ID NO: 212531 - DNA, 25 bp, Homo sapien
caaaagttcattccacagagataat

SEQ ID NO: 212532 - DNA, 25 bp, Homo sapien
atctgcaagaaacagggtgtttgat

SEQ ID NO: 212533 - DNA, 25 bp, Homo sapien
tggactaatccctgctcagtagtgg

SEQ ID NO: 212534 - DNA, 25 bp, Homo sapien
cttctggactaatccctgctcagta

SEQ ID NO: 212535 - DNA, 25 bp, Homo sapien
cctgtctccaatgcctccaaggcgc

SEQ ID NO: 212536 - DNA, 25 bp, Homo sapien
gactaatccctgctcagtagtggaa

SEQ ID NO: 212537 - DNA, 25 bp, Homo sapien
gaggtcaacgagacattagaactca

SEQ ID NO: 212538 - DNA, 25 bp, Homo sapien
caaggcatactgagagatgcacact

SEQ ID NO: 212539 - DNA, 25 bp, Homo sapien
aaggaggaccacttcactggcaagg

SEQ ID NO: 212540 - DNA, 25 bp, Homo sapien
gtatcagcaccaagggtaagactaa

SEQ ID NO: 212541 - DNA, 25 bp, Homo sapien
tggtgagttggactcctaggagcaa

SEQ ID NO: 212542 - DNA, 25 bp, Homo sapien
agcaaggggtgctcagctttccaag

SEQ ID NO: 212543 - DNA, 25 bp, Homo sapien
tccaagtgttagagggcagtacccc

SEQ ID NO: 212544 - DNA, 25 bp, Homo sapien
tgggttcggactgacctctctgcag

SEQ ID NO: 212545 - DNA, 25 bp, Homo sapien
gaacatttatgactccgagaggaag

SEQ ID NO: 212546 - DNA, 25 bp, Homo sapien
ccgatgtactacttctcttggaggg

SEQ ID NO: 212547 - DNA, 25 bp, Homo sapien
gaagccgatgtactacttctcttgg

SEQ ID NO: 212548 - DNA, 25 bp, Homo sapien
tgactccgagaggaagccgatgtac

SEQ ID NO: 212549 - DNA, 25 bp, Homo sapien
atttacccaattctcttttgatggg

SEQ ID NO: 212550 - DNA, 25 bp, Homo sapien
cagtggtacacagtttatttaccca

SEQ ID NO: 212551 - DNA, 25 bp, Homo sapien
tactgaacggtatatcatggacatc

SEQ ID NO: 212552 - DNA, 25 bp, Homo sapien
tataaatctttctagtctgcacagt

SEQ ID NO: 212553 - DNA, 25 bp, Homo sapien
gggtgtttctatctggtgtcctcca

SEQ ID NO: 212554 - DNA, 25 bp, Homo sapien
cttgaggccaccaagcaatgatggg

SEQ ID NO: 212555 - DNA, 25 bp, Homo sapien
cagactttccttgaggccaccaagc

SEQ ID NO: 212556 - DNA, 25 bp, Homo sapien
tgaatttccaggtttgcaggtgaga

SEQ ID NO: 212557 - DNA, 25 bp, Homo sapien
gatttcctcacttgaagatagtcag

SEQ ID NO: 212558 - DNA, 25 bp, Homo sapien
tccggcctttaatagatggaatgag

SEQ ID NO: 212559 - DNA, 25 bp, Homo sapien
ggctgtaattccacctaacctgata

SEQ ID NO: 212560 - DNA, 25 bp, Homo sapien
gacataaaatactagccatcacaag

SEQ ID NO: 212561 - DNA, 25 bp, Homo sapien
gccttggtaagtgcagtccatgttg

SEQ ID NO: 212562 - DNA, 25 bp, Homo sapien
gaggctgcagtaaacctaaaccaaa

SEQ ID NO: 212563 - DNA, 25 bp, Homo sapien
ggctgactggtgtccatagaattag

SEQ ID NO: 212564 - DNA, 25 bp, Homo sapien
tgttgagcctatgcataaccttcat

SEQ ID NO: 212565 - DNA, 25 bp, Homo sapien
cctgcaaggattcgtaaggcaagaa

SEQ ID NO: 212566 - DNA, 25 bp, Homo sapien
ctgtcctgcaaggattcgtaaggca

SEQ ID NO: 212567 - DNA, 25 bp, Homo sapien
gcaaggattcgtaaggcaagaaaaa

SEQ ID NO: 212568 - DNA, 25 bp, Homo sapien
caaggcatgaagatctgttatcttc

SEQ ID NO: 212569 - DNA, 25 bp, Homo sapien
gtggagggctacgatacctcctcat

SEQ ID NO: 212570 - DNA, 25 bp, Homo sapien
tggtcacacgtggagggctacgata

SEQ ID NO: 212571 - DNA, 25 bp, Homo sapien
gtcacacgtggagggctacgatacc

SEQ ID NO: 212572 - DNA, 25 bp, Homo sapien
acacgtggagggctacgatacctcc

SEQ ID NO: 212573 - DNA, 25 bp, Homo sapien
cacaggtatcagcacagttggtgct

SEQ ID NO: 212574 - DNA, 25 bp, Homo sapien
tgctggcacctttttgccacaggta

SEQ ID NO: 212575 - DNA, 25 bp, Homo sapien
gttggtgctccctggcccactggaa

SEQ ID NO: 212576 - DNA, 25 bp, Homo sapien
ttggtgctccctggcccactggaag

SEQ ID NO: 212577 - DNA, 25 bp, Homo sapien
tgatatgtagtcctcatcggagctg

SEQ ID NO: 212578 - DNA, 25 bp, Homo sapien
actgtgcctttttgccctgtagaca

SEQ ID NO: 212579 - DNA, 25 bp, Homo sapien
gctcctacctgatatgtagtcctca

SEQ ID NO: 212580 - DNA, 25 bp, Homo sapien
tccactgtgcctttttgccctgtag

SEQ ID NO: 212581 - DNA, 25 bp, Homo sapien
tgccatgataacactcgcggagcat

SEQ ID NO: 212582 - DNA, 25 bp, Homo sapien
taaagggcctagagaacatatatcg

SEQ ID NO: 212583 - DNA, 25 bp, Homo sapien
actttcttatagattcgcatacatg

SEQ ID NO: 212584 - DNA, 25 bp, Homo sapien
caactttcttatagattcgcataca

SEQ ID NO: 212585 - DNA, 25 bp, Homo sapien
tatagattcgcatacatgtggccaa

SEQ ID NO: 212586 - DNA, 25 bp, Homo sapien
gaattactggaagatggcggttctg

SEQ ID NO: 212587 - DNA, 25 bp, Homo sapien
tttggcgaattactggaagatggcg

SEQ ID NO: 212588 - DNA, 25 bp, Homo sapien
attactggaagatggcggttctggc

SEQ ID NO: 212589 - DNA, 25 bp, Homo sapien
gcgaattactggaagatggcggttc

SEQ ID NO: 212590 - DNA, 25 bp, Homo sapien
gaagatcccgttcaataagaaggag

SEQ ID NO: 212591 - DNA, 25 bp, Homo sapien
gacgtgcagcgcgtgaagatcccgt

SEQ ID NO: 212592 - DNA, 25 bp, Homo sapien
taagaaggagaacgctctggttcag

SEQ ID NO: 212593 - DNA, 25 bp, Homo sapien
ttcagatggcggacggcaaccaggc

SEQ ID NO: 212594 - DNA, 25 bp, Homo sapien
tccagaacatattcccgccctcggc

SEQ ID NO: 212595 - DNA, 25 bp, Homo sapien
tatggcaactcgcccctgcaccgct

SEQ ID NO: 212596 - DNA, 25 bp, Homo sapien
cccgccctcagtatccgaggaagat

SEQ ID NO: 212597 - DNA, 25 bp, Homo sapien
tcggccaccgtgcacctctccaaca

SEQ ID NO: 212598 - DNA, 25 bp, Homo sapien
tgcttcactccaggccgtgctcggg

SEQ ID NO: 212599 - DNA, 25 bp, Homo sapien
actgagcagcccacgctttcaccag

SEQ ID NO: 212600 - DNA, 25 bp, Homo sapien
ccgtgctcgggacagccgggccttt

SEQ ID NO: 212601 - DNA, 25 bp, Homo sapien
aggctcacacctgcgcccgtgttct

SEQ ID NO: 212602 - DNA, 25 bp, Homo sapien
tcaggggccgcagagggaggctgac

SEQ ID NO: 212603 - DNA, 25 bp, Homo sapien
ggcagacattttcccgacaaggaag

SEQ ID NO: 212604 - DNA, 25 bp, Homo sapien
tcttgcaccgactagaccagaaggg

SEQ ID NO: 212605 - DNA, 25 bp, Homo sapien
taagcccggttatttttatgcagac

SEQ ID NO: 212606 - DNA, 25 bp, Homo sapien
cacaacgactgttttcgaaggtggg

SEQ ID NO: 212607 - DNA, 25 bp, Homo sapien
gctcctttttatacagccttattga

SEQ ID NO: 212608 - DNA, 25 bp, Homo sapien
tttttatacagccttattgatccag

SEQ ID NO: 212609 - DNA, 25 bp, Homo sapien
gccttattgatccagcctaactcaa

SEQ ID NO: 212610 - DNA, 25 bp, Homo sapien
tatacagccttattgatccagccta

SEQ ID NO: 212611 - DNA, 25 bp, Homo sapien
cactattatgttattcccagggtac

SEQ ID NO: 212612 - DNA, 25 bp, Homo sapien
tccaagatggctgaaagggctccag

SEQ ID NO: 212613 - DNA, 25 bp, Homo sapien
cagggtacagctatcctcctcatgg

SEQ ID NO: 212614 - DNA, 25 bp, Homo sapien
gaatttagtcatgcagccacatcca

SEQ ID NO: 212615 - DNA, 25 bp, Homo sapien
gattggattgaatcaaattactctc

SEQ ID NO: 212616 - DNA, 25 bp, Homo sapien
gcttgataaaccttgtaatgtctta

SEQ ID NO: 212617 - DNA, 25 bp, Homo sapien
gaaggcaagagtatgatctattaca

SEQ ID NO: 212618 - DNA, 25 bp, Homo sapien
gattgaatcaaattactctctctcc

SEQ ID NO: 212619 - DNA, 25 bp, Homo sapien
tatacagtgtaaactatcatgatta

SEQ ID NO: 212620 - DNA, 25 bp, Homo sapien
aaagctttgtacttgggtatctcaa

SEQ ID NO: 212621 - DNA, 25 bp, Homo sapien
catgattattaaccaactagaagta

SEQ ID NO: 212622 - DNA, 25 bp, Homo sapien
gtatctcaaagtattatacagtgta

SEQ ID NO: 212623 - DNA, 25 bp, Homo sapien
tgatgacacccaaactgagctagaa

SEQ ID NO: 212624 - DNA, 25 bp, Homo sapien
taggcagattgcaaccttgacaggc

SEQ ID NO: 212625 - DNA, 25 bp, Homo sapien
tatttaacatctaaaaggccgccgc

SEQ ID NO: 212626 - DNA, 25 bp, Homo sapien
gctactgacaggcacgatgtggcac

SEQ ID NO: 212627 - DNA, 25 bp, Homo sapien
ctaaataaacttccgcctcagaggg

SEQ ID NO: 212628 - DNA, 25 bp, Homo sapien
ttcaaaacctctagtgcgggtgccc

SEQ ID NO: 212629 - DNA, 25 bp, Homo sapien
ccattgtaggatcgcgctggaagca

SEQ ID NO: 212630 - DNA, 25 bp, Homo sapien
tcttcgagtgaatgtggaaacagct

SEQ ID NO: 212631 - DNA, 25 bp, Homo sapien
cgccgactgagctggcacgggccgg

SEQ ID NO: 212632 - DNA, 25 bp, Homo sapien
ctagggccgccgactgagctggcac

SEQ ID NO: 212633 - DNA, 25 bp, Homo sapien
actgagctggcacgggccggtccat

SEQ ID NO: 212634 - DNA, 25 bp, Homo sapien
cgactgagctggcacgggccggtcc

SEQ ID NO: 212635 - DNA, 25 bp, Homo sapien
gcggctctgctaggcggtggatgct

SEQ ID NO: 212636 - DNA, 25 bp, Homo sapien
tagagggcggcctacgcctgtgtgc

SEQ ID NO: 212637 - DNA, 25 bp, Homo sapien
ttctctggaggcgagtctcctcccg

SEQ ID NO: 212638 - DNA, 25 bp, Homo sapien
agcctccggccttcaggcggtagag

SEQ ID NO: 212639 - DNA, 25 bp, Homo sapien
aggcttccccgcctgcgctcgttgt

SEQ ID NO: 212640 - DNA, 25 bp, Homo sapien
tccggccgacccgagcagccggttc

SEQ ID NO: 212641 - DNA, 25 bp, Homo sapien
gcgtgcgcgcgttatctccggccga

SEQ ID NO: 212642 - DNA, 25 bp, Homo sapien
ttgtcagagccgctccggcgcgtgc

SEQ ID NO: 212643 - DNA, 25 bp, Homo sapien
actgctcagggtcgcgcgccctgga

SEQ ID NO: 212644 - DNA, 25 bp, Homo sapien
ctggacccagctcgctctcggtctc

SEQ ID NO: 212645 - DNA, 25 bp, Homo sapien
tcggtctcgcgctgtcagcgactgc

SEQ ID NO: 212646 - DNA, 25 bp, Homo sapien
gcctcagtcagtggcgccgaaggct

SEQ ID NO: 212647 - DNA, 25 bp, Homo sapien
tcctctccgttcggtcgggagtagc

SEQ ID NO: 212648 - DNA, 25 bp, Homo sapien
ctctccgttcggtcgggagtagcat

SEQ ID NO: 212649 - DNA, 25 bp, Homo sapien
cctctccgttcggtcgggagtagca

SEQ ID NO: 212650 - DNA, 25 bp, Homo sapien
gagcggcggagaccgcctctgctcc

SEQ ID NO: 212651 - DNA, 25 bp, Homo sapien
ctttggcagctgcgacggggagcgg

SEQ ID NO: 212652 - DNA, 25 bp, Homo sapien
ttcccactcccccatcgtggggcag

SEQ ID NO: 212653 - DNA, 25 bp, Homo sapien
tggcagctgcgacggggagcggcgg

SEQ ID NO: 212654 - DNA, 25 bp, Homo sapien
ggctgcgcgcgggatctgaggaggc

SEQ ID NO: 212655 - DNA, 25 bp, Homo sapien
aggaggctccgcggctgtccctgct

SEQ ID NO: 212656 - DNA, 25 bp, Homo sapien
cgcgcgggatctgaggaggctccgc

SEQ ID NO: 212657 - DNA, 25 bp, Homo sapien
ggctgggctgcgcgcgggatctgag

SEQ ID NO: 212658 - DNA, 25 bp, Homo sapien
gccggttaaccagcggctctcggaa

SEQ ID NO: 212659 - DNA, 25 bp, Homo sapien
acgctctggcggatgccttggcgca

SEQ ID NO: 212660 - DNA, 25 bp, Homo sapien
tgccctcggcgtcgcgcatccttgc

SEQ ID NO: 212661 - DNA, 25 bp, Homo sapien
caactgctgccggttaaccagcggc

SEQ ID NO: 212662 - DNA, 25 bp, Homo sapien
gaagatgcccgtgcgttatgggctc

SEQ ID NO: 212663 - DNA, 25 bp, Homo sapien
ctcggtccctggagtcgcggtttgt

SEQ ID NO: 212664 - DNA, 25 bp, Homo sapien
tgggctctttctgagtgctgctcgg

SEQ ID NO: 212665 - DNA, 25 bp, Homo sapien
cttcccttcgtcagcagctcggtcc

SEQ ID NO: 212666 - DNA, 25 bp, Homo sapien
tctttcttcacagtggggattgcaa

SEQ ID NO: 212667 - DNA, 25 bp, Homo sapien
gacgcagtgtatttcttaagtggca

SEQ ID NO: 212668 - DNA, 25 bp, Homo sapien
tcttcagagacgcagtgtatttctt

SEQ ID NO: 212669 - DNA, 25 bp, Homo sapien
ggggattgcaatcttcagagacgca

SEQ ID NO: 212670 - DNA, 25 bp, Homo sapien
tcatcagaatctaaggcatgtattc

SEQ ID NO: 212671 - DNA, 25 bp, Homo sapien
taaggcatgtattcttgacccattg

SEQ ID NO: 212672 - DNA, 25 bp, Homo sapien
gaatctaaggcatgtattcttgacc

SEQ ID NO: 212673 - DNA, 25 bp, Homo sapien
gcatgtattcttgacccattgtaca

SEQ ID NO: 212674 - DNA, 25 bp, Homo sapien
tccatctaaggcatcttcccttctg

SEQ ID NO: 212675 - DNA, 25 bp, Homo sapien
tcctgttctgtggttgaactcttgg

SEQ ID NO: 212676 - DNA, 25 bp, Homo sapien
catctaaggcatcttcccttctgct

SEQ ID NO: 212677 - DNA, 25 bp, Homo sapien
gtggttgaactcttggtgctgtttc

SEQ ID NO: 212678 - DNA, 25 bp, Homo sapien
gcaattaatatgcttaatgaagctc

SEQ ID NO: 212679 - DNA, 25 bp, Homo sapien
taatgaagctcaaattgttgttaca

SEQ ID NO: 212680 - DNA, 25 bp, Homo sapien
gttacatctttgaccagtgggagcc

SEQ ID NO: 212681 - DNA, 25 bp, Homo sapien
cacccgactctgctattgtttcttt

SEQ ID NO: 212682 - DNA, 25 bp, Homo sapien
gaatatactctacttggtcgtggtg

SEQ ID NO: 212683 - DNA, 25 bp, Homo sapien
tcctttcttgtaaggctgttgcctg

SEQ ID NO: 212684 - DNA, 25 bp, Homo sapien
gcatagaaccagctttgagtcttgt

SEQ ID NO: 212685 - DNA, 25 bp, Homo sapien
gttgaacctaccttgcatacttgga

SEQ ID NO: 212686 - DNA, 25 bp, Homo sapien
caggctggtgcttcagtagaacccg

SEQ ID NO: 212687 - DNA, 25 bp, Homo sapien
gctggtgcttcagtagaacccgggt

SEQ ID NO: 212688 - DNA, 25 bp, Homo sapien
cgatcattttcctttacgtgtttca

SEQ ID NO: 212689 - DNA, 25 bp, Homo sapien
tggtgcttcagtagaacccgggtac

SEQ ID NO: 212690 - DNA, 25 bp, Homo sapien
tgttgacaagttgtttacaatacca

SEQ ID NO: 212691 - DNA, 25 bp, Homo sapien
tttgttgacaagttgtttacaatac

SEQ ID NO: 212692 - DNA, 25 bp, Homo sapien
ttgtttgttgacaagttgtttacaa

SEQ ID NO: 212693 - DNA, 25 bp, Homo sapien
cttaacttgtttgttgacaagttgt

SEQ ID NO: 212694 - DNA, 25 bp, Homo sapien
ctgagtaacgtgtttgtttacaact

SEQ ID NO: 212695 - DNA, 25 bp, Homo sapien
ccaacagcatgttgggtaacactgc

SEQ ID NO: 212696 - DNA, 25 bp, Homo sapien
cttacagtgccaacagcatgttggg

SEQ ID NO: 212697 - DNA, 25 bp, Homo sapien
cagcatgttgggtaacactgcagac

SEQ ID NO: 212698 - DNA, 25 bp, Homo sapien
caacagcatgttgggtaacactgca

SEQ ID NO: 212699 - DNA, 25 bp, Homo sapien
gataacactcgcggagcattccttt

SEQ ID NO: 212700 - DNA, 25 bp, Homo sapien
ataacactcgcggagcattcctttt

SEQ ID NO: 212701 - DNA, 25 bp, Homo sapien
catgataacactcgcggagcattcc

SEQ ID NO: 212702 - DNA, 25 bp, Homo sapien
tgccatgataacactcgcggagcat

SEQ ID NO: 212703 - DNA, 25 bp, Homo sapien
ttcttatagattcgcatacatgtgg

SEQ ID NO: 212704 - DNA, 25 bp, Homo sapien
cttatagattcgcatacatgtggcc

SEQ ID NO: 212705 - DNA, 25 bp, Homo sapien
ctttcttatagattcgcatacatgt

SEQ ID NO: 212706 - DNA, 25 bp, Homo sapien
tatagattcgcatacatgtggccaa

SEQ ID NO: 212707 - DNA, 25 bp, Homo sapien
gcgaattactggaagatggtggttc

SEQ ID NO: 212708 - DNA, 25 bp, Homo sapien
tgtgttcgtccttttggcgaattac

SEQ ID NO: 212709 - DNA, 25 bp, Homo sapien
attactggaagatggtggttccggc

SEQ ID NO: 212710 - DNA, 25 bp, Homo sapien
gaattactggaagatggtggttccg

SEQ ID NO: 212711 - DNA, 25 bp, Homo sapien
catagaaatagatctgatagtggaa

SEQ ID NO: 212712 - DNA, 25 bp, Homo sapien
cattatatgggactaagctcttcta

SEQ ID NO: 212713 - DNA, 25 bp, Homo sapien
gaagtctctgcccagtaatactgag

SEQ ID NO: 212714 - DNA, 25 bp, Homo sapien
aattctttatgcataaacttcagca

SEQ ID NO: 212715 - DNA, 25 bp, Homo sapien
gaggcttgtttaccacaagtggcaa

SEQ ID NO: 212716 - DNA, 25 bp, Homo sapien
ctgaatctgctctaagtccatgagg

SEQ ID NO: 212717 - DNA, 25 bp, Homo sapien
ccacaagtggcaaagtaggaatttt

SEQ ID NO: 212718 - DNA, 25 bp, Homo sapien
aagtccatgaggcttgtttaccaca

SEQ ID NO: 212719 - DNA, 25 bp, Homo sapien
tatgtccagtaaccggttgctatta

SEQ ID NO: 212720 - DNA, 25 bp, Homo sapien
tcatttccaacggtaatatatgtcc

SEQ ID NO: 212721 - DNA, 25 bp, Homo sapien
tttccaacggtaatatatgtccagt

SEQ ID NO: 212722 - DNA, 25 bp, Homo sapien
gtaatatatgtccagtaaccggttg

SEQ ID NO: 212723 - DNA, 25 bp, Homo sapien
tcttcctcaactgtgcttcttgtat

SEQ ID NO: 212724 - DNA, 25 bp, Homo sapien
ttcctcaactgtgcttcttgtatcc

SEQ ID NO: 212725 - DNA, 25 bp, Homo sapien
cctcaactgtgcttcttgtatccat

SEQ ID NO: 212726 - DNA, 25 bp, Homo sapien
aactgtgcttcttgtatccatttcc

SEQ ID NO: 212727 - DNA, 25 bp, Homo sapien
ggaagaccgttttccaaagcgatca

SEQ ID NO: 212728 - DNA, 25 bp, Homo sapien
aagaccgttttccaaagcgatcaag

SEQ ID NO: 212729 - DNA, 25 bp, Homo sapien
gaccgttttccaaagcgatcaagat

SEQ ID NO: 212730 - DNA, 25 bp, Homo sapien
ccgttttccaaagcgatcaagatca

SEQ ID NO: 212731 - DNA, 25 bp, Homo sapien
tcatggacaatgcagtatccctccc

SEQ ID NO: 212732 - DNA, 25 bp, Homo sapien
taattccatggtgatagcagatgtt

SEQ ID NO: 212733 - DNA, 25 bp, Homo sapien
aattgggtagtaaggacaaccagtg

SEQ ID NO: 212734 - DNA, 25 bp, Homo sapien
aaattattgattgcggcagcacccc

SEQ ID NO: 212735 - DNA, 25 bp, Homo sapien
ctggttgatggtccgttgtcctgta

SEQ ID NO: 212736 - DNA, 25 bp, Homo sapien
gatggtccgttgtcctgtaaatgta

SEQ ID NO: 212737 - DNA, 25 bp, Homo sapien
ggttgatggtccgttgtcctgtaaa

SEQ ID NO: 212738 - DNA, 25 bp, Homo sapien
ttactggttgatggtccgttgtcct

SEQ ID NO: 212739 - DNA, 25 bp, Homo sapien
caagcccacagggattattgccagg

SEQ ID NO: 212740 - DNA, 25 bp, Homo sapien
caggagtgccatacaagagccaagg

SEQ ID NO: 212741 - DNA, 25 bp, Homo sapien
tattgccaggctacggttcatgttc

SEQ ID NO: 212742 - DNA, 25 bp, Homo sapien
ttttggagctgtgaactgcactgcc

SEQ ID NO: 212743 - DNA, 25 bp, Homo sapien
ttgatggtggtattgtgaccactga

SEQ ID NO: 212744 - DNA, 25 bp, Homo sapien
gaagttgattcttatttgatggtgg

SEQ ID NO: 212745 - DNA, 25 bp, Homo sapien
ctgaggaagttgattcttatttgat

SEQ ID NO: 212746 - DNA, 25 bp, Homo sapien
tgaattcactccagtcaacagattc

SEQ ID NO: 212747 - DNA, 25 bp, Homo sapien
aataattgcatcagttcattgacct

SEQ ID NO: 212748 - DNA, 25 bp, Homo sapien
taaaacaatgccatgaacaaattct

SEQ ID NO: 212749 - DNA, 25 bp, Homo sapien
ttctttagtactcaatgtttctgga

SEQ ID NO: 212750 - DNA, 25 bp, Homo sapien
taattgcatcagttcattgacctca

SEQ ID NO: 212751 - DNA, 25 bp, Homo sapien
tgaatttcactccaggcttctgcag

SEQ ID NO: 212752 - DNA, 25 bp, Homo sapien
gcccacttgcatctgaatttcactc

SEQ ID NO: 212753 - DNA, 25 bp, Homo sapien
ttatggcttgtctaattccaagccc

SEQ ID NO: 212754 - DNA, 25 bp, Homo sapien
ccaggcttctgcagggtagagaatg

SEQ ID NO: 212755 - DNA, 25 bp, Homo sapien
agaccaaggctgagctcaaacccat

SEQ ID NO: 212756 - DNA, 25 bp, Homo sapien
tgaggggctccaagagaccaaggct

SEQ ID NO: 212757 - DNA, 25 bp, Homo sapien
accaaggctgagctcaaacccatac

SEQ ID NO: 212758 - DNA, 25 bp, Homo sapien
aggggctccaagagaccaaggctga

SEQ ID NO: 212759 - DNA, 25 bp, Homo sapien
gatatccttgtgaaagctctaagag

SEQ ID NO: 212760 - DNA, 25 bp, Homo sapien
taatgatgttccctctgtgaggctc

SEQ ID NO: 212761 - DNA, 25 bp, Homo sapien
tctaagagctgataagccgtgtgcc

SEQ ID NO: 212762 - DNA, 25 bp, Homo sapien
tctgccatggttccaaagatatcct

SEQ ID NO: 212763 - DNA, 25 bp, Homo sapien
ggaccacgttgttgtcctctaatct

SEQ ID NO: 212764 - DNA, 25 bp, Homo sapien
accacgttgttgtcctctaatctca

SEQ ID NO: 212765 - DNA, 25 bp, Homo sapien
aggaccacgttgttgtcctctaatc

SEQ ID NO: 212766 - DNA, 25 bp, Homo sapien
ccacgttgttgtcctctaatctcac

SEQ ID NO: 212767 - DNA, 25 bp, Homo sapien
ttgatgctaaacttcactgtccctc

SEQ ID NO: 212768 - DNA, 25 bp, Homo sapien
gctcctgtgtcccataaactccaat

SEQ ID NO: 212769 - DNA, 25 bp, Homo sapien
tctgacagctggtgaccgttctggg

SEQ ID NO: 212770 - DNA, 25 bp, Homo sapien
gtccactcaggccagacgaacatct

SEQ ID NO: 212771 - DNA, 25 bp, Homo sapien
cagacgaacatctctccagggagtc

SEQ ID NO: 212772 - DNA, 25 bp, Homo sapien
aaatggcatcacctggtaagtgctg

SEQ ID NO: 212773 - DNA, 25 bp, Homo sapien
taagccggtgagatttccaaaaatg

SEQ ID NO: 212774 - DNA, 25 bp, Homo sapien
aaatcagaccgcgagaaaatgggac

SEQ ID NO: 212775 - DNA, 25 bp, Homo sapien
cctccttgccaagtccaatttagtg

SEQ ID NO: 212776 - DNA, 25 bp, Homo sapien
aagtccttgcatagcagttcccggg

SEQ ID NO: 212777 - DNA, 25 bp, Homo sapien
tcttcagtcccaaggtagcaagtct

SEQ ID NO: 212778 - DNA, 25 bp, Homo sapien
tctagaggcaacacaaagtgaagtc

SEQ ID NO: 212779 - DNA, 25 bp, Homo sapien
gatcccctatgaaggatcatcctgg

SEQ ID NO: 212780 - DNA, 25 bp, Homo sapien
ggtccacaaccttgggtctgagaca

SEQ ID NO: 212781 - DNA, 25 bp, Homo sapien
gccagttcactttagtcagcacaaa

SEQ ID NO: 212782 - DNA, 25 bp, Homo sapien
caaacagctcggtttttagaccctg

SEQ ID NO: 212783 - DNA, 25 bp, Homo sapien
gggcattgttctccttgccagttca

SEQ ID NO: 212784 - DNA, 25 bp, Homo sapien
gatcgacatatagaccatcaacctc

SEQ ID NO: 212785 - DNA, 25 bp, Homo sapien
tcagcttgatcgacatatagaccat

SEQ ID NO: 212786 - DNA, 25 bp, Homo sapien
cttgacttcagcttgatcgacatat

SEQ ID NO: 212787 - DNA, 25 bp, Homo sapien
tatctcttggaccagttttttggtc

SEQ ID NO: 212788 - DNA, 25 bp, Homo sapien
tggaagcgaagcatagctgatgatc

SEQ ID NO: 212789 - DNA, 25 bp, Homo sapien
tttccaatggtggaagcgaagcata

SEQ ID NO: 212790 - DNA, 25 bp, Homo sapien
tcccttttccaatggtggaagcgaa

SEQ ID NO: 212791 - DNA, 25 bp, Homo sapien
ccaatggtggaagcgaagcatagct

SEQ ID NO: 212792 - DNA, 25 bp, Homo sapien
tgatagaccagaagcgctgttcggg

SEQ ID NO: 212793 - DNA, 25 bp, Homo sapien
gccagttttgcacgggaagcagcat

SEQ ID NO: 212794 - DNA, 25 bp, Homo sapien
gtaagttctgaagcgtgagagctgc

SEQ ID NO: 212795 - DNA, 25 bp, Homo sapien
gggtctgtgttggatgcaccaccac

SEQ ID NO: 212796 - DNA, 25 bp, Homo sapien
tgaattcccagcaagatctaagttc

SEQ ID NO: 212797 - DNA, 25 bp, Homo sapien
tcgtcttgccttccccataacaagg

SEQ ID NO: 212798 - DNA, 25 bp, Homo sapien
cccagcaagatctaagttccttgaa

SEQ ID NO: 212799 - DNA, 25 bp, Homo sapien
tgaaacctgggtcttcaattcgtct

SEQ ID NO: 212800 - DNA, 25 bp, Homo sapien
tcctcttagccacatacgagttttc

SEQ ID NO: 212801 - DNA, 25 bp, Homo sapien
tatctctagaagtgggatttctggg

SEQ ID NO: 212802 - DNA, 25 bp, Homo sapien
tgcacagcactgttagaattttaca

SEQ ID NO: 212803 - DNA, 25 bp, Homo sapien
tctgaattgcatgccaaaatgccca

SEQ ID NO: 212804 - DNA, 25 bp, Homo sapien
aaatgtgctgccgtgcttgtccccg

SEQ ID NO: 212805 - DNA, 25 bp, Homo sapien
aaatgacagcccgtgacagagctgg

SEQ ID NO: 212806 - DNA, 25 bp, Homo sapien
caggagtagagccactcagtcgata

SEQ ID NO: 212807 - DNA, 25 bp, Homo sapien
catgtcttccaaagttccgttctgg

SEQ ID NO: 212808 - DNA, 25 bp, Homo sapien
tgctgctcctgggccacggtgagaa

SEQ ID NO: 212809 - DNA, 25 bp, Homo sapien
ctgctcctgggccacggtgagaaac

SEQ ID NO: 212810 - DNA, 25 bp, Homo sapien
tcagctaagcctgctgctcctgggc

SEQ ID NO: 212811 - DNA, 25 bp, Homo sapien
cctgctgctcctgggccacggtgag

SEQ ID NO: 212812 - DNA, 25 bp, Homo sapien
cagctacgggctggtagtgacgccc

SEQ ID NO: 212813 - DNA, 25 bp, Homo sapien
gacgccctggatatgaaatccgtga

SEQ ID NO: 212814 - DNA, 25 bp, Homo sapien
ggtagtgacgccctggatatgaaat

SEQ ID NO: 212815 - DNA, 25 bp, Homo sapien
aaatccgtgagtgtgtgcgggaact

SEQ ID NO: 212816 - DNA, 25 bp, Homo sapien
ccgggaaaagtcagctgcgggtaca

SEQ ID NO: 212817 - DNA, 25 bp, Homo sapien
aagggccacggcaatggaggatggt

SEQ ID NO: 212818 - DNA, 25 bp, Homo sapien
gaaaagtcagctgcgggtacacctg

SEQ ID NO: 212819 - DNA, 25 bp, Homo sapien
ggaaaagtcagctgcgggtacacct

SEQ ID NO: 212820 - DNA, 25 bp, Homo sapien
aagccctgacctgagagtccgtgaa

SEQ ID NO: 212821 - DNA, 25 bp, Homo sapien
tcctagttctcctagagtgtggctc

SEQ ID NO: 212822 - DNA, 25 bp, Homo sapien
tgggactccgggtgcacattcctag

SEQ ID NO: 212823 - DNA, 25 bp, Homo sapien
tgttagtacgggctttctgggcctc

SEQ ID NO: 212824 - DNA, 25 bp, Homo sapien
tcactacttgggacttcccttgtgt

SEQ ID NO: 212825 - DNA, 25 bp, Homo sapien
tacttgggacttcccttgtgtttgc

SEQ ID NO: 212826 - DNA, 25 bp, Homo sapien
gaggggctgtttcactacttgggac

SEQ ID NO: 212827 - DNA, 25 bp, Homo sapien
cccggaggggctgtttcactacttg

SEQ ID NO: 212828 - DNA, 25 bp, Homo sapien
ctttagttattgcatgtgtgccccg

SEQ ID NO: 212829 - DNA, 25 bp, Homo sapien
gttattgcatgtgtgccccgcagaa

SEQ ID NO: 212830 - DNA, 25 bp, Homo sapien
gaaaggctgcatgcagactactatc

SEQ ID NO: 212831 - DNA, 25 bp, Homo sapien
gctgcatgcagactactatccacca

SEQ ID NO: 212832 - DNA, 25 bp, Homo sapien
tcagacggcttgaatttcatagctg

SEQ ID NO: 212833 - DNA, 25 bp, Homo sapien
ctggatgaatttagttctggaatac

SEQ ID NO: 212834 - DNA, 25 bp, Homo sapien
gatgaatttagttctggaatactga

SEQ ID NO: 212835 - DNA, 25 bp, Homo sapien
gagatatgatggtgctccagcagag

SEQ ID NO: 212836 - DNA, 25 bp, Homo sapien
gatgctaaatcaatgttttccaacc

SEQ ID NO: 212837 - DNA, 25 bp, Homo sapien
taaaccagcgttttgatgctaaatc

SEQ ID NO: 212838 - DNA, 25 bp, Homo sapien
ctaggagccttcattaaaccagcgt

SEQ ID NO: 212839 - DNA, 25 bp, Homo sapien
taggagccttcattaaaccagcgtt

SEQ ID NO: 212840 - DNA, 25 bp, Homo sapien
agaagcgagggcttttgaacaggca

SEQ ID NO: 212841 - DNA, 25 bp, Homo sapien
ccagtaggcaatgagaagcgagggc

SEQ ID NO: 212842 - DNA, 25 bp, Homo sapien
gatgaatagggctgcccagtaggca

SEQ ID NO: 212843 - DNA, 25 bp, Homo sapien
tcatgctggatgaatagggctgccc

SEQ ID NO: 212844 - DNA, 25 bp, Homo sapien
tctttttgtaaccctgctgcatccc

SEQ ID NO: 212845 - DNA, 25 bp, Homo sapien
tcccttctcagtagagtcatggggc

SEQ ID NO: 212846 - DNA, 25 bp, Homo sapien
ctttttgtaaccctgctgcatccct

SEQ ID NO: 212847 - DNA, 25 bp, Homo sapien
tttctgcctctcataagctgcaacc

SEQ ID NO: 212848 - DNA, 25 bp, Homo sapien
tttctattttctgcctctcataagc

SEQ ID NO: 212849 - DNA, 25 bp, Homo sapien
ctattttctgcctctcataagctgc

SEQ ID NO: 212850 - DNA, 25 bp, Homo sapien
ttttctgcctctcataagctgcaac

SEQ ID NO: 212851 - DNA, 25 bp, Homo sapien
tcagagccaatccagcatgataggg

SEQ ID NO: 212852 - DNA, 25 bp, Homo sapien
cagacagccaggtatatgatgagag

SEQ ID NO: 212853 - DNA, 25 bp, Homo sapien
taagtattcatcacacaagggcagt

SEQ ID NO: 212854 - DNA, 25 bp, Homo sapien
tttaatgagagactggaaagagccc

SEQ ID NO: 212855 - DNA, 25 bp, Homo sapien
ccttcaatcagccttgatggccagg

SEQ ID NO: 212856 - DNA, 25 bp, Homo sapien
cttgtttcccttcaatcagccttga

SEQ ID NO: 212857 - DNA, 25 bp, Homo sapien
ctccaggtctactcttctgagtcat

SEQ ID NO: 212858 - DNA, 25 bp, Homo sapien
cttgatggccaggttggaagggttt

SEQ ID NO: 212859 - DNA, 25 bp, Homo sapien
tgagtcttaaaaccatgacatccgt

SEQ ID NO: 212860 - DNA, 25 bp, Homo sapien
tcttgggcttactcagcgatgttgg

SEQ ID NO: 212861 - DNA, 25 bp, Homo sapien
tctttcctctagttgccaaagggac

SEQ ID NO: 212862 - DNA, 25 bp, Homo sapien
ttgccaaagggaccatgctgaaggg

SEQ ID NO: 212863 - DNA, 25 bp, Homo sapien
cacaatttcagctcctgttatcggt

SEQ ID NO: 212864 - DNA, 25 bp, Homo sapien
aatttcagctcctgttatcggtcta

SEQ ID NO: 212865 - DNA, 25 bp, Homo sapien
tgccacaatttcagctcctgttatc

SEQ ID NO: 212866 - DNA, 25 bp, Homo sapien
gccacaatttcagctcctgttatcg

SEQ ID NO: 212867 - DNA, 25 bp, Homo sapien
tacaaagttaatggcactgagccat

SEQ ID NO: 212868 - DNA, 25 bp, Homo sapien
aagttaatggcactgagccatctgt

SEQ ID NO: 212869 - DNA, 25 bp, Homo sapien
tatcaggaatccaccggaaggatga

SEQ ID NO: 212870 - DNA, 25 bp, Homo sapien
gatatcaggaatccaccggaaggat

SEQ ID NO: 212871 - DNA, 25 bp, Homo sapien
tttgaaaggccagaactaccctgaa

SEQ ID NO: 212872 - DNA, 25 bp, Homo sapien
tccttttttgtatggcggccagatg

SEQ ID NO: 212873 - DNA, 25 bp, Homo sapien
gaaaaagatgggtccaccaaggtgc

SEQ ID NO: 212874 - DNA, 25 bp, Homo sapien
cctagttaaaagcaccagatgtgtc

SEQ ID NO: 212875 - DNA, 25 bp, Homo sapien
acctttagtgcctgtgttctcttac

SEQ ID NO: 212876 - DNA, 25 bp, Homo sapien
ctggacaggccaatcccagtaacca

SEQ ID NO: 212877 - DNA, 25 bp, Homo sapien
gatgcttctggacaggccaatccca

SEQ ID NO: 212878 - DNA, 25 bp, Homo sapien
ttctggacaggccaatcccagtaac

SEQ ID NO: 212879 - DNA, 25 bp, Homo sapien
tgcttctggacaggccaatcccagt

SEQ ID NO: 212880 - DNA, 25 bp, Homo sapien
tgcgggagttggtcttgacaagcca

SEQ ID NO: 212881 - DNA, 25 bp, Homo sapien
cattgtaggactagcacaagtgctt

SEQ ID NO: 212882 - DNA, 25 bp, Homo sapien
cattcaggcagttcagattgccagg

SEQ ID NO: 212883 - DNA, 25 bp, Homo sapien
gttcctagggagtcaccaaccaatc

SEQ ID NO: 212884 - DNA, 25 bp, Homo sapien
tcttgaggagccagttttctaagcc

SEQ ID NO: 212885 - DNA, 25 bp, Homo sapien
cttgaggagccagttttctaagccc

SEQ ID NO: 212886 - DNA, 25 bp, Homo sapien
ttgaggagccagttttctaagccct

SEQ ID NO: 212887 - DNA, 25 bp, Homo sapien
gcttttgggtgagtcagtccagaca

SEQ ID NO: 212888 - DNA, 25 bp, Homo sapien
tttgggtgagtcagtccagacaatc

SEQ ID NO: 212889 - DNA, 25 bp, Homo sapien
ttgggtgagtcagtccagacaatca

SEQ ID NO: 212890 - DNA, 25 bp, Homo sapien
cttttgggtgagtcagtccagacaa

SEQ ID NO: 212891 - DNA, 25 bp, Homo sapien
gaacagttgtgatgctggattctgc

SEQ ID NO: 212892 - DNA, 25 bp, Homo sapien
tggattctgctcttgcattgggata

SEQ ID NO: 212893 - DNA, 25 bp, Homo sapien
gctgagaggaacagttgtgatgctg

SEQ ID NO: 212894 - DNA, 25 bp, Homo sapien
cttttcttcaggaaaggcccaatat

SEQ ID NO: 212895 - DNA, 25 bp, Homo sapien
ccaggagccaagaatttacatactg

SEQ ID NO: 212896 - DNA, 25 bp, Homo sapien
ccagggaagtcacccatggttatgg

SEQ ID NO: 212897 - DNA, 25 bp, Homo sapien
tagctctcattattgctctgtccca

SEQ ID NO: 212898 - DNA, 25 bp, Homo sapien
agctctcattattgctctgtcccag

SEQ ID NO: 212899 - DNA, 25 bp, Homo sapien
atgaagtcaacacagtggtggtcat

SEQ ID NO: 212900 - DNA, 25 bp, Homo sapien
tgaagtcaacacagtggtggtcatt

SEQ ID NO: 212901 - DNA, 25 bp, Homo sapien
gaagtcaacacagtggtggtcattt

SEQ ID NO: 212902 - DNA, 25 bp, Homo sapien
ttttatcaagtgtaatacaccctcc

SEQ ID NO: 212903 - DNA, 25 bp, Homo sapien
ttatcaagtgtaatacaccctccat

SEQ ID NO: 212904 - DNA, 25 bp, Homo sapien
tttatcaagtgtaatacaccctcca

SEQ ID NO: 212905 - DNA, 25 bp, Homo sapien
gagctggcagttgatggcagcctct

SEQ ID NO: 212906 - DNA, 25 bp, Homo sapien
ggtgtagcgtgagctccaggttgag

SEQ ID NO: 212907 - DNA, 25 bp, Homo sapien
taagatatggacaggaagagttagg

SEQ ID NO: 212908 - DNA, 25 bp, Homo sapien
cagcatcttcagtgtctcggcatgt

SEQ ID NO: 212909 - DNA, 25 bp, Homo sapien
tctgagtcatccctgagaagggatg

SEQ ID NO: 212910 - DNA, 25 bp, Homo sapien
ttacagaatagttgcttctgagtca

SEQ ID NO: 212911 - DNA, 25 bp, Homo sapien
tacagaatagttgcttctgagtcat

SEQ ID NO: 212912 - DNA, 25 bp, Homo sapien
gcttctgagtcatccctgagaaggg

SEQ ID NO: 212913 - DNA, 25 bp, Homo sapien
cattgttctcaccaattttgcaaag

SEQ ID NO: 212914 - DNA, 25 bp, Homo sapien
ccatcatcgaagattctgttaagtc

SEQ ID NO: 212915 - DNA, 25 bp, Homo sapien
ttctgttaagtctttcccattgttc

SEQ ID NO: 212916 - DNA, 25 bp, Homo sapien
ttttgcaaagagtgtcctggctcat

SEQ ID NO: 212917 - DNA, 25 bp, Homo sapien
tctgcctgggtacatcaagaaatta

SEQ ID NO: 212918 - DNA, 25 bp, Homo sapien
gaaattactatagatccgtccgcag

SEQ ID NO: 212919 - DNA, 25 bp, Homo sapien
ttgagggtgagtccgtataaatgcc

SEQ ID NO: 212920 - DNA, 25 bp, Homo sapien
tctggaatgattcgcgacagccaat

SEQ ID NO: 212921 - DNA, 25 bp, Homo sapien
catgatgattctcaagggatggtca

SEQ ID NO: 212922 - DNA, 25 bp, Homo sapien
ctccaggtatggaaagtgcccactc

SEQ ID NO: 212923 - DNA, 25 bp, Homo sapien
cacagagcattgagcgtgtctccag

SEQ ID NO: 212924 - DNA, 25 bp, Homo sapien
gtctctgattattctcccagggtgg

SEQ ID NO: 212925 - DNA, 25 bp, Homo sapien
catattggaaggagtttcatggact

SEQ ID NO: 212926 - DNA, 25 bp, Homo sapien
tcacgggatcttctgatactaactc

SEQ ID NO: 212927 - DNA, 25 bp, Homo sapien
gatactaactccttagtgccttggc

SEQ ID NO: 212928 - DNA, 25 bp, Homo sapien
tggactaggctcatcacgggatctt

SEQ ID NO: 212929 - DNA, 25 bp, Homo sapien
accagccaggactgtccaaggctct

SEQ ID NO: 212930 - DNA, 25 bp, Homo sapien
tgtaagaggctttagtatgggctgc

SEQ ID NO: 212931 - DNA, 25 bp, Homo sapien
tgtgggagcatctggactttcatat

SEQ ID NO: 212932 - DNA, 25 bp, Homo sapien
tgtaaggacagatagaaccccaaga

SEQ ID NO: 212933 - DNA, 25 bp, Homo sapien
tgggcaccagtgtcaaacagcagct

SEQ ID NO: 212934 - DNA, 25 bp, Homo sapien
gtgtccttccccaccaccaccagat

SEQ ID NO: 212935 - DNA, 25 bp, Homo sapien
gtccttccccaccaccaccagattc

SEQ ID NO: 212936 - DNA, 25 bp, Homo sapien
tgtgtccttccccaccaccaccaga

SEQ ID NO: 212937 - DNA, 25 bp, Homo sapien
ccttccccaccaccaccagattcat

SEQ ID NO: 212938 - DNA, 25 bp, Homo sapien
tttacaagaccatgtgaatacgggt

SEQ ID NO: 212939 - DNA, 25 bp, Homo sapien
tgcccaggccgtcaagccattttct

SEQ ID NO: 212940 - DNA, 25 bp, Homo sapien
caaaaggcttatgtataggagattc

SEQ ID NO: 212941 - DNA, 25 bp, Homo sapien
gagattctacggctgtgtagttcca

SEQ ID NO: 212942 - DNA, 25 bp, Homo sapien
tcatgtaactgtggttaacatctca

SEQ ID NO: 212943 - DNA, 25 bp, Homo sapien
catgtaactgtggttaacatctcac

SEQ ID NO: 212944 - DNA, 25 bp, Homo sapien
ggttcgttggtctgcacactgtgca

SEQ ID NO: 212945 - DNA, 25 bp, Homo sapien
gagggagaggactgtacttttacat

SEQ ID NO: 212946 - DNA, 25 bp, Homo sapien
tctatttcctgaatgcgtgtaggcc

SEQ ID NO: 212947 - DNA, 25 bp, Homo sapien
gagtaagtgattgaacagtgctgct

SEQ ID NO: 212948 - DNA, 25 bp, Homo sapien
actctctgttactgggttttggcta

SEQ ID NO: 212949 - DNA, 25 bp, Homo sapien
ctctctgttactgggttttggctac

SEQ ID NO: 212950 - DNA, 25 bp, Homo sapien
agaggccatatgagtcagggagcag

SEQ ID NO: 212951 - DNA, 25 bp, Homo sapien
ccacgtggcttgcaggtactggtag

SEQ ID NO: 212952 - DNA, 25 bp, Homo sapien
cagccacgtggcttgcaggtactgg

SEQ ID NO: 212953 - DNA, 25 bp, Homo sapien
ggccatatgagtcagggagcagcca

SEQ ID NO: 212954 - DNA, 25 bp, Homo sapien
gcagcccaggtttgcttatagtttg

SEQ ID NO: 212955 - DNA, 25 bp, Homo sapien
atctcctcaccgtcagtcttgttgc

SEQ ID NO: 212956 - DNA, 25 bp, Homo sapien
cccaggtttgcttatagtttggact

SEQ ID NO: 212957 - DNA, 25 bp, Homo sapien
tcttgttgcttgcaatccattctcc

SEQ ID NO: 212958 - DNA, 25 bp, Homo sapien
tacagtccaaactcactcacatgct

SEQ ID NO: 212959 - DNA, 25 bp, Homo sapien
agtacagtccaaactcactcacatg

SEQ ID NO: 212960 - DNA, 25 bp, Homo sapien
aaactcactcacatgctctgtgaag

SEQ ID NO: 212961 - DNA, 25 bp, Homo sapien
caagtacagtccaaactcactcaca

SEQ ID NO: 212962 - DNA, 25 bp, Homo sapien
ctggtccggtggttttccaactgct

SEQ ID NO: 212963 - DNA, 25 bp, Homo sapien
tggtccggtggttttccaactgctc

SEQ ID NO: 212964 - DNA, 25 bp, Homo sapien
ggtccggtggttttccaactgctca

SEQ ID NO: 212965 - DNA, 25 bp, Homo sapien
gaagcctcgttttcaagacatacgt

SEQ ID NO: 212966 - DNA, 25 bp, Homo sapien
gcagctctaaaccaaccagctgttg

SEQ ID NO: 212967 - DNA, 25 bp, Homo sapien
gctggcaacaataagtggcatcatt

SEQ ID NO: 212968 - DNA, 25 bp, Homo sapien
aaaggaggaaacgatgaagcctcgt

SEQ ID NO: 212969 - DNA, 25 bp, Homo sapien
ctgaggttggctgaattcatagata

SEQ ID NO: 212970 - DNA, 25 bp, Homo sapien
tcaacaactgaagtgtccatcttct

SEQ ID NO: 212971 - DNA, 25 bp, Homo sapien
ctcttccctcgatggtatttgcata

SEQ ID NO: 212972 - DNA, 25 bp, Homo sapien
caagctgtatacatcctcccatata

SEQ ID NO: 212973 - DNA, 25 bp, Homo sapien
gcaccgaagtcgtctaagtttagga

SEQ ID NO: 212974 - DNA, 25 bp, Homo sapien
tctaagtttaggagcttgcgaactc

SEQ ID NO: 212975 - DNA, 25 bp, Homo sapien
gtttaggagcttgcgaactctgtct

SEQ ID NO: 212976 - DNA, 25 bp, Homo sapien
tgctccccttaaaacagcaccgaag

SEQ ID NO: 212977 - DNA, 25 bp, Homo sapien
gtgtctgagctagggagttcaccat

SEQ ID NO: 212978 - DNA, 25 bp, Homo sapien
gccagtgtctgagctagggagttca

SEQ ID NO: 212979 - DNA, 25 bp, Homo sapien
caagccagtgtctgagctagggagt

SEQ ID NO: 212980 - DNA, 25 bp, Homo sapien
ccaaacaagccagtgtctgagctag

SEQ ID NO: 212981 - DNA, 25 bp, Homo sapien
caccaactgtggttttattctgtcc

SEQ ID NO: 212982 - DNA, 25 bp, Homo sapien
ggctctgtgccggtcccatttggtt

SEQ ID NO: 212983 - DNA, 25 bp, Homo sapien
ttagacgagaaccacatccactggc

SEQ ID NO: 212984 - DNA, 25 bp, Homo sapien
gactctgtttctgccaagtcctatc

SEQ ID NO: 212985 - DNA, 25 bp, Homo sapien
tgattagctgctggaaacagccact

SEQ ID NO: 212986 - DNA, 25 bp, Homo sapien
tccttgtgggatgcagaactataat

SEQ ID NO: 212987 - DNA, 25 bp, Homo sapien
tataaacaccggcaaagaagcctct

SEQ ID NO: 212988 - DNA, 25 bp, Homo sapien
gaaacagccacttaagaataccctc

SEQ ID NO: 212989 - DNA, 25 bp, Homo sapien
cctgttcaaacacggtgccttccag

SEQ ID NO: 212990 - DNA, 25 bp, Homo sapien
ctgcatcacagtcccgctgagacag

SEQ ID NO: 212991 - DNA, 25 bp, Homo sapien
gctgcatcacagtcccgctgagaca

SEQ ID NO: 212992 - DNA, 25 bp, Homo sapien
tcatccctgttcaaacacggtgcct

SEQ ID NO: 212993 - DNA, 25 bp, Homo sapien
tatctgtgtactccatcccgccagg

SEQ ID NO: 212994 - DNA, 25 bp, Homo sapien
tccatcccgccaggcttcatcttct

SEQ ID NO: 212995 - DNA, 25 bp, Homo sapien
actccatcccgccaggcttcatctt

SEQ ID NO: 212996 - DNA, 25 bp, Homo sapien
tggtatctgtgtactccatcccgcc

SEQ ID NO: 212997 - DNA, 25 bp, Homo sapien
gccatgaagaatgatagatagaatt

SEQ ID NO: 212998 - DNA, 25 bp, Homo sapien
tggtgttcaagggagccatgaagaa

SEQ ID NO: 212999 - DNA, 25 bp, Homo sapien
tcaagggagccatgaagaatgatag

SEQ ID NO: 213000 - DNA, 25 bp, Homo sapien
ggaagagccgtggtggtgttcaagg

SEQ ID NO: 213001 - DNA, 25 bp, Homo sapien
tataacaaggacctagtacagatgg

SEQ ID NO: 213002 - DNA, 25 bp, Homo sapien
taagggcccaccatactcaagtatg

SEQ ID NO: 213003 - DNA, 25 bp, Homo sapien
gactggtaaggtttgcaagaacgcc

SEQ ID NO: 213004 - DNA, 25 bp, Homo sapien
aacatttctttttggagcacacgac

SEQ ID NO: 213005 - DNA, 25 bp, Homo sapien
tagtgtgagaacaccagactctggt

SEQ ID NO: 213006 - DNA, 25 bp, Homo sapien
cagactactggctgtttatgcaggt

SEQ ID NO: 213007 - DNA, 25 bp, Homo sapien
gttgaaattatgacccactccagac

SEQ ID NO: 213008 - DNA, 25 bp, Homo sapien
cagctatgtgccaactagtgtgaga

SEQ ID NO: 213009 - DNA, 25 bp, Homo sapien
tcagaattgccaagagcactcatat

SEQ ID NO: 213010 - DNA, 25 bp, Homo sapien
catagtccaccacttgactggacca

SEQ ID NO: 213011 - DNA, 25 bp, Homo sapien
tgccaagagcactcatattttccca

SEQ ID NO: 213012 - DNA, 25 bp, Homo sapien
tagtccaccacttgactggaccatc

SEQ ID NO: 213013 - DNA, 25 bp, Homo sapien
taaaaagacctgatctggctggcac

SEQ ID NO: 213014 - DNA, 25 bp, Homo sapien
atgacctggagcacctcgcttttct

SEQ ID NO: 213015 - DNA, 25 bp, Homo sapien
tgacctggagcacctcgcttttctt

SEQ ID NO: 213016 - DNA, 25 bp, Homo sapien
tatctggcaccctcatggcagaggc

SEQ ID NO: 213017 - DNA, 25 bp, Homo sapien
atccaacatctttgccagtacctgg

SEQ ID NO: 213018 - DNA, 25 bp, Homo sapien
ccagtacctggataattctgctgcc

SEQ ID NO: 213019 - DNA, 25 bp, Homo sapien
tcccatggctattctatctggcacc

SEQ ID NO: 213020 - DNA, 25 bp, Homo sapien
gcagtgcagctgccgactgctccat

SEQ ID NO: 213021 - DNA, 25 bp, Homo sapien
cagtgcagctgccgactgctccatc

SEQ ID NO: 213022 - DNA, 25 bp, Homo sapien
agtgcagctgccgactgctccatct

SEQ ID NO: 213023 - DNA, 25 bp, Homo sapien
aagggagaaccatagcaggagagat

SEQ ID NO: 213024 - DNA, 25 bp, Homo sapien
gagctcttggcatctcattaccatt

SEQ ID NO: 213025 - DNA, 25 bp, Homo sapien
actgagaccctcattctgctagcag

SEQ ID NO: 213026 - DNA, 25 bp, Homo sapien
ggtgagtcagttaccactgagaccc

SEQ ID NO: 213027 - DNA, 25 bp, Homo sapien
tctctgcggtatggttttgcttccc

SEQ ID NO: 213028 - DNA, 25 bp, Homo sapien
gatgctcctgacagcgtttccattg

SEQ ID NO: 213029 - DNA, 25 bp, Homo sapien
gacatgctgcctctgctaacaactg

SEQ ID NO: 213030 - DNA, 25 bp, Homo sapien
tggagccggctttggccagcaattg

SEQ ID NO: 213031 - DNA, 25 bp, Homo sapien
cctgaggcctccctagaagcctagc

SEQ ID NO: 213032 - DNA, 25 bp, Homo sapien
ctgaggcctccctagaagcctagca

SEQ ID NO: 213033 - DNA, 25 bp, Homo sapien
tgcaagcatttaaggtcttcagctc

SEQ ID NO: 213034 - DNA, 25 bp, Homo sapien
tgactaaaccggatgatggtagaga

SEQ ID NO: 213035 - DNA, 25 bp, Homo sapien
tcaacgggcaaaatgcaagcattta

SEQ ID NO: 213036 - DNA, 25 bp, Homo sapien
gatctatttatctggtcaacgggca

SEQ ID NO: 213037 - DNA, 25 bp, Homo sapien
tcaagccccgccctgctcagcctcg

SEQ ID NO: 213038 - DNA, 25 bp, Homo sapien
caagccccgccctgctcagcctcgg

SEQ ID NO: 213039 - DNA, 25 bp, Homo sapien
gccctgctcagcctcgggagcggac

SEQ ID NO: 213040 - DNA, 25 bp, Homo sapien
cccgccctgctcagcctcgggagcg

SEQ ID NO: 213041 - DNA, 25 bp, Homo sapien
catggcagtgtggtgtacaaataca

SEQ ID NO: 213042 - DNA, 25 bp, Homo sapien
ctttggagaggagggcctctgcgga

SEQ ID NO: 213043 - DNA, 25 bp, Homo sapien
cgtcggcgtcggtaattgaagttgc

SEQ ID NO: 213044 - DNA, 25 bp, Homo sapien
tattcttcttcatggcagtgtggtg

SEQ ID NO: 213045 - DNA, 25 bp, Homo sapien
ggatgaaaccatatccgttccttac

SEQ ID NO: 213046 - DNA, 25 bp, Homo sapien
ctgtggatgaaaccatatccgttcc

SEQ ID NO: 213047 - DNA, 25 bp, Homo sapien
gaaaccatatccgttccttacattg

SEQ ID NO: 213048 - DNA, 25 bp, Homo sapien
aaccatatccgttccttacattgaa

SEQ ID NO: 213049 - DNA, 25 bp, Homo sapien
ttgcgatgacctttttgtgcccgcc

SEQ ID NO: 213050 - DNA, 25 bp, Homo sapien
gcgatgacctttttgtgcccgccgg

SEQ ID NO: 213051 - DNA, 25 bp, Homo sapien
cttcgttgcgatgacctttttgtgc

SEQ ID NO: 213052 - DNA, 25 bp, Homo sapien
cgttgcgatgacctttttgtgcccg

SEQ ID NO: 213053 - DNA, 25 bp, Homo sapien
gtgtgacggtaactaggccggcggc

SEQ ID NO: 213054 - DNA, 25 bp, Homo sapien
ctccgctcccgctaccgatcgaact

SEQ ID NO: 213055 - DNA, 25 bp, Homo sapien
tcatggttgcggtgatggtgactgc

SEQ ID NO: 213056 - DNA, 25 bp, Homo sapien
gtctcggcctcgctgctcatggttg

SEQ ID NO: 213057 - DNA, 25 bp, Homo sapien
actgaaggtttataattcgcagtgc

SEQ ID NO: 213058 - DNA, 25 bp, Homo sapien
cgcagtgccgtgctttggtgtttca

SEQ ID NO: 213059 - DNA, 25 bp, Homo sapien
tataattcgcagtgccgtgctttgg

SEQ ID NO: 213060 - DNA, 25 bp, Homo sapien
aggtttataattcgcagtgccgtgc

SEQ ID NO: 213061 - DNA, 25 bp, Homo sapien
ctggcttcattgttccacaagctca

SEQ ID NO: 213062 - DNA, 25 bp, Homo sapien
tggcttcattgttccacaagctcat

SEQ ID NO: 213063 - DNA, 25 bp, Homo sapien
cctggcttcattgttccacaagctc

SEQ ID NO: 213064 - DNA, 25 bp, Homo sapien
tccttgaacctcgttcactgtgtcc

SEQ ID NO: 213065 - DNA, 25 bp, Homo sapien
ctgtcaggatgaaatgcactctctg

SEQ ID NO: 213066 - DNA, 25 bp, Homo sapien
tgtcaggatgaaatgcactctctga

SEQ ID NO: 213067 - DNA, 25 bp, Homo sapien
cattcagccaggcggcttccttgaa

SEQ ID NO: 213068 - DNA, 25 bp, Homo sapien
gaggtacaggatctgtctgcgtaac

SEQ ID NO: 213069 - DNA, 25 bp, Homo sapien
ggatctgtctgcgtaaccctgccag

SEQ ID NO: 213070 - DNA, 25 bp, Homo sapien
ctgcgtaaccctgccagaccttttg

SEQ ID NO: 213071 - DNA, 25 bp, Homo sapien
tccgccctgaggtacaggatctgtc

SEQ ID NO: 213072 - DNA, 25 bp, Homo sapien
ctgagctctcggctggtcctcagtg

SEQ ID NO: 213073 - DNA, 25 bp, Homo sapien
cagtgtcccatcctgagcaggtgtg

SEQ ID NO: 213074 - DNA, 25 bp, Homo sapien
agcgtgcccagtttgttgagcgttt

SEQ ID NO: 213075 - DNA, 25 bp, Homo sapien
ctgaagtgaatctgcccaggatgaa

SEQ ID NO: 213076 - DNA, 25 bp, Homo sapien
ccccatggtgtcacatgtgggtttt

SEQ ID NO: 213077 - DNA, 25 bp, Homo sapien
aagaatgttcttccttctggctcat

SEQ ID NO: 213078 - DNA, 25 bp, Homo sapien
catcctctctgatggctaaagaatg

SEQ ID NO: 213079 - DNA, 25 bp, Homo sapien
gaagagccatctggtttctcatcct

SEQ ID NO: 213080 - DNA, 25 bp, Homo sapien
ttctcatcctctctgatggctaaag

SEQ ID NO: 213081 - DNA, 25 bp, Homo sapien
gaaattgatctttgttaataccagg

SEQ ID NO: 213082 - DNA, 25 bp, Homo sapien
taataccaggcataatgtgttctct

SEQ ID NO: 213083 - DNA, 25 bp, Homo sapien
taaaggaaaccgatggactcttgcc

SEQ ID NO: 213084 - DNA, 25 bp, Homo sapien
ttgatgcaccctgaagccttaatga

SEQ ID NO: 213085 - DNA, 25 bp, Homo sapien
gaggcattggtagtctgagagtcat

SEQ ID NO: 213086 - DNA, 25 bp, Homo sapien
tctaagctaatgtacacagaggcag

SEQ ID NO: 213087 - DNA, 25 bp, Homo sapien
aaataactgaatgcctgtatctccc

SEQ ID NO: 213088 - DNA, 25 bp, Homo sapien
tgtgcaagtgtagggaaagccaata

SEQ ID NO: 213089 - DNA, 25 bp, Homo sapien
ctcagagctgtaactttgattgtca

SEQ ID NO: 213090 - DNA, 25 bp, Homo sapien
tagttgattgtcagcccactcagag

SEQ ID NO: 213091 - DNA, 25 bp, Homo sapien
tacatggatcattacttggcaaaga

SEQ ID NO: 213092 - DNA, 25 bp, Homo sapien
cagttctgagcttccaatgttttga

SEQ ID NO: 213093 - DNA, 25 bp, Homo sapien
cattaccgagttggtcatacaaggt

SEQ ID NO: 213094 - DNA, 25 bp, Homo sapien
tactcccggtagtgagacacgttcc

SEQ ID NO: 213095 - DNA, 25 bp, Homo sapien
cctccagggtagctcttccactgta

SEQ ID NO: 213096 - DNA, 25 bp, Homo sapien
tccagttgtctgacttggcagcatg

SEQ ID NO: 213097 - DNA, 25 bp, Homo sapien
acaacctcagtgaaactactcccgg

SEQ ID NO: 213098 - DNA, 25 bp, Homo sapien
gagatgttaaatagcctgtccaaag

SEQ ID NO: 213099 - DNA, 25 bp, Homo sapien
gctatgagtaaaacgctgccttagg

SEQ ID NO: 213100 - DNA, 25 bp, Homo sapien
cctgctaagtagagggcaatgtggt

SEQ ID NO: 213101 - DNA, 25 bp, Homo sapien
caatgtggttgtcctggagacagct

SEQ ID NO: 213102 - DNA, 25 bp, Homo sapien
ctgtaagaaagttctccacggcttt

SEQ ID NO: 213103 - DNA, 25 bp, Homo sapien
tctccacggctttttcagcaagcag

SEQ ID NO: 213104 - DNA, 25 bp, Homo sapien
gaaagttctccacggctttttcagc

SEQ ID NO: 213105 - DNA, 25 bp, Homo sapien
cacggctttttcagcaagcagcttg

SEQ ID NO: 213106 - DNA, 25 bp, Homo sapien
agaagcagactcagagcttttcaga

SEQ ID NO: 213107 - DNA, 25 bp, Homo sapien
caccatgtatccaagaagcagactc

SEQ ID NO: 213108 - DNA, 25 bp, Homo sapien
ccatgtatccaagaagcagactcag

SEQ ID NO: 213109 - DNA, 25 bp, Homo sapien
gcagactcagagcttttcagagagg

SEQ ID NO: 213110 - DNA, 25 bp, Homo sapien
agcaagggccccgatcttcttctcc

SEQ ID NO: 213111 - DNA, 25 bp, Homo sapien
gggccccgatcttcttctccaagca

SEQ ID NO: 213112 - DNA, 25 bp, Homo sapien
ggccccgatcttcttctccaagcaa

SEQ ID NO: 213113 - DNA, 25 bp, Homo sapien
ttagcaagggccccgatcttcttct

SEQ ID NO: 213114 - DNA, 25 bp, Homo sapien
ggaggagcctgtccggatgatctac

SEQ ID NO: 213115 - DNA, 25 bp, Homo sapien
ggttctggacaaagagagggaacat

SEQ ID NO: 213116 - DNA, 25 bp, Homo sapien
tgtccggatgatctacagagctcct

SEQ ID NO: 213117 - DNA, 25 bp, Homo sapien
tggttctggacaaagagagggaaca

SEQ ID NO: 213118 - DNA, 25 bp, Homo sapien
cacaataggttgtcagcaagctaag

SEQ ID NO: 213119 - DNA, 25 bp, Homo sapien
gactgcttttatactggcctcactg

SEQ ID NO: 213120 - DNA, 25 bp, Homo sapien
cactggcagccctgattaagtgtgc

SEQ ID NO: 213121 - DNA, 25 bp, Homo sapien
ttaagtgtgcgtggcctttcccagc

SEQ ID NO: 213122 - DNA, 25 bp, Homo sapien
gtggtccagattcccttgttgaaaa

SEQ ID NO: 213123 - DNA, 25 bp, Homo sapien
tggtccagattcccttgttgaaaaa

SEQ ID NO: 213124 - DNA, 25 bp, Homo sapien
tacgggtatccactccaggttaggc

SEQ ID NO: 213125 - DNA, 25 bp, Homo sapien
tctgcagagtcaggcatccatacgg

SEQ ID NO: 213126 - DNA, 25 bp, Homo sapien
aagatgcgttcccaaagcttcctcc

SEQ ID NO: 213127 - DNA, 25 bp, Homo sapien
ggcagctggctaagatgcgttccca

SEQ ID NO: 213128 - DNA, 25 bp, Homo sapien
agcttggtaagacaaaagatggctt

SEQ ID NO: 213129 - DNA, 25 bp, Homo sapien
cttggtaagacaaaagatggctttc

SEQ ID NO: 213130 - DNA, 25 bp, Homo sapien
gcttggtaagacaaaagatggcttt

SEQ ID NO: 213131 - DNA, 25 bp, Homo sapien
ccttgcaggatagaacataggagtc

SEQ ID NO: 213132 - DNA, 25 bp, Homo sapien
tcttctttgtcttccgactcagtgc

SEQ ID NO: 213133 - DNA, 25 bp, Homo sapien
tgtcttccgactcagtgcctttagg

SEQ ID NO: 213134 - DNA, 25 bp, Homo sapien
agtgcctttagggtatggacgttgc

SEQ ID NO: 213135 - DNA, 25 bp, Homo sapien
gactcagtgcctttagggtatggac

SEQ ID NO: 213136 - DNA, 25 bp, Homo sapien
agggaaagagacactagcactgagt

SEQ ID NO: 213137 - DNA, 25 bp, Homo sapien
aagagacactagcactgagtttctg

SEQ ID NO: 213138 - DNA, 25 bp, Homo sapien
gaagatttcaatgcccaactgtggt

SEQ ID NO: 213139 - DNA, 25 bp, Homo sapien
aggggatggctgcaagtcacactca

SEQ ID NO: 213140 - DNA, 25 bp, Homo sapien
ctgccttgtacaagacatgttccca

SEQ ID NO: 213141 - DNA, 25 bp, Homo sapien
tgccttgtacaagacatgttcccag

SEQ ID NO: 213142 - DNA, 25 bp, Homo sapien
tcacagaggcccagacagtgctgct

SEQ ID NO: 213143 - DNA, 25 bp, Homo sapien
agacagtgctgctgtggccttgctg

SEQ ID NO: 213144 - DNA, 25 bp, Homo sapien
cagacagtgctgctgtggccttgct

SEQ ID NO: 213145 - DNA, 25 bp, Homo sapien
gaggcccagacagtgctgctgtggc

SEQ ID NO: 213146 - DNA, 25 bp, Homo sapien
tgtgctcagtggtgcatctggaaat

SEQ ID NO: 213147 - DNA, 25 bp, Homo sapien
gcatctggaaattggccctctttgg

SEQ ID NO: 213148 - DNA, 25 bp, Homo sapien
tcaaatggaccagcagaataagtgc

SEQ ID NO: 213149 - DNA, 25 bp, Homo sapien
gcagaataagtgcatttgtgctcag

SEQ ID NO: 213150 - DNA, 25 bp, Homo sapien
gattcaagaggttttgggagttagc

SEQ ID NO: 213151 - DNA, 25 bp, Homo sapien
ggagttagcatttacaagctaggac

SEQ ID NO: 213152 - DNA, 25 bp, Homo sapien
tacaagctaggactgtaaatgaact

SEQ ID NO: 213153 - DNA, 25 bp, Homo sapien
acctgggtagaagtaggtggattca

SEQ ID NO: 213154 - DNA, 25 bp, Homo sapien
tatgaagttggctgatggagaatcc

SEQ ID NO: 213155 - DNA, 25 bp, Homo sapien
tgaagcagcccgtaataactcctgg

SEQ ID NO: 213156 - DNA, 25 bp, Homo sapien
ttaagtgaaacaaactcacagctgg

SEQ ID NO: 213157 - DNA, 25 bp, Homo sapien
ggcctttgaacatctcgtgaagcag

SEQ ID NO: 213158 - DNA, 25 bp, Homo sapien
tgagcatgtactcaggcgccaggct

SEQ ID NO: 213159 - DNA, 25 bp, Homo sapien
ggtaggtgaagctgtgcccaagctc

SEQ ID NO: 213160 - DNA, 25 bp, Homo sapien
taatagtgaataactcctgagcatg

SEQ ID NO: 213161 - DNA, 25 bp, Homo sapien
gaatagagactcagcaagattaact

SEQ ID NO: 213162 - DNA, 25 bp, Homo sapien
ggaatcctgggctactggaccccat

SEQ ID NO: 213163 - DNA, 25 bp, Homo sapien
gaggaatcctgggctactggacccc

SEQ ID NO: 213164 - DNA, 25 bp, Homo sapien
aggaatcctgggctactggacccca

SEQ ID NO: 213165 - DNA, 25 bp, Homo sapien
gtgtttccctaacaggacatgagaa

SEQ ID NO: 213166 - DNA, 25 bp, Homo sapien
tttaggtgggcctggattgtgtttc

SEQ ID NO: 213167 - DNA, 25 bp, Homo sapien
ttccgctttaggtgggcctggattg

SEQ ID NO: 213168 - DNA, 25 bp, Homo sapien
gctttaggtgggcctggattgtgtt

SEQ ID NO: 213169 - DNA, 25 bp, Homo sapien
ctgtaatggactgagcaatcaattg

SEQ ID NO: 213170 - DNA, 25 bp, Homo sapien
tgatctgtaatggactgagcaatca

SEQ ID NO: 213171 - DNA, 25 bp, Homo sapien
gtttgatctgtaatggactgagcaa

SEQ ID NO: 213172 - DNA, 25 bp, Homo sapien
gagtttgatctgtaatggactgagc

SEQ ID NO: 213173 - DNA, 25 bp, Homo sapien
ctgttgtcatccaaccagttgccaa

SEQ ID NO: 213174 - DNA, 25 bp, Homo sapien
agctttcctaattctgctgcatctg

SEQ ID NO: 213175 - DNA, 25 bp, Homo sapien
tgctgctgttgtcatccaaccagtt

SEQ ID NO: 213176 - DNA, 25 bp, Homo sapien
ctgctgttgtcatccaaccagttgc

SEQ ID NO: 213177 - DNA, 25 bp, Homo sapien
cagtttaaagccatatttttatctc

SEQ ID NO: 213178 - DNA, 25 bp, Homo sapien
cttttatactggtactgacatttcc

SEQ ID NO: 213179 - DNA, 25 bp, Homo sapien
tcccagacagccagtcattctccag

SEQ ID NO: 213180 - DNA, 25 bp, Homo sapien
cagacagccagtcattctccagctc

SEQ ID NO: 213181 - DNA, 25 bp, Homo sapien
taccccttttatactggtactgaca

SEQ ID NO: 213182 - DNA, 25 bp, Homo sapien
gggcatagacaaaatcatgggaagc

SEQ ID NO: 213183 - DNA, 25 bp, Homo sapien
ctcgtccaaagttcataggttaggg

SEQ ID NO: 213184 - DNA, 25 bp, Homo sapien
gatggagttaattctcaaatcattc

SEQ ID NO: 213185 - DNA, 25 bp, Homo sapien
ggctatgcttgctattgattggttg

SEQ ID NO: 213186 - DNA, 25 bp, Homo sapien
gacttgtggaactggttgtagacac

SEQ ID NO: 213187 - DNA, 25 bp, Homo sapien
gatggattggtacaagacttgtgga

SEQ ID NO: 213188 - DNA, 25 bp, Homo sapien
aggagggatggattggtacaagact

SEQ ID NO: 213189 - DNA, 25 bp, Homo sapien
ggtacaagacttgtggaactggttg

SEQ ID NO: 213190 - DNA, 25 bp, Homo sapien
agttaggagataggagacaactgag

SEQ ID NO: 213191 - DNA, 25 bp, Homo sapien
ctgtttcaaagttaggagataggag

SEQ ID NO: 213192 - DNA, 25 bp, Homo sapien
gataggagacaactgagggtctgga

SEQ ID NO: 213193 - DNA, 25 bp, Homo sapien
aaagttaggagataggagacaactg

SEQ ID NO: 213194 - DNA, 25 bp, Homo sapien
tgggtccagcacatagataaaccat

SEQ ID NO: 213195 - DNA, 25 bp, Homo sapien
actcacagtaatgtccttggtctgg

SEQ ID NO: 213196 - DNA, 25 bp, Homo sapien
tcagaccaagagtcagccaactttt

SEQ ID NO: 213197 - DNA, 25 bp, Homo sapien
cctgcagtatattgagggcaatgct

SEQ ID NO: 213198 - DNA, 25 bp, Homo sapien
cagcaaggttcccatcgaaggaggc

SEQ ID NO: 213199 - DNA, 25 bp, Homo sapien
gaaagctccacatgtttacagaggc

SEQ ID NO: 213200 - DNA, 25 bp, Homo sapien
gccacacacagatggaccctgtgct

SEQ ID NO: 213201 - DNA, 25 bp, Homo sapien
tgagcacatgttagctctggacctc

SEQ ID NO: 213202 - DNA, 25 bp, Homo sapien
taagtgtgagcagctcaccttgtaa

SEQ ID NO: 213203 - DNA, 25 bp, Homo sapien
ctcaattaagtgtgagcagctcacc

SEQ ID NO: 213204 - DNA, 25 bp, Homo sapien
tgtgagcagctcaccttgtaagact

SEQ ID NO: 213205 - DNA, 25 bp, Homo sapien
cagctcaccttgtaagactccccag

SEQ ID NO: 213206 - DNA, 25 bp, Homo sapien
gtaactgctttgaaggaccctgttc

SEQ ID NO: 213207 - DNA, 25 bp, Homo sapien
tctcacacgcattcaagtcccaggt

SEQ ID NO: 213208 - DNA, 25 bp, Homo sapien
taggagacctcttcccatatggttg

SEQ ID NO: 213209 - DNA, 25 bp, Homo sapien
gattatcacgatcacatctcacacg

SEQ ID NO: 213210 - DNA, 25 bp, Homo sapien
ttaggccattaaggctccactttcc

SEQ ID NO: 213211 - DNA, 25 bp, Homo sapien
cgatggagagggattaggccattaa

SEQ ID NO: 213212 - DNA, 25 bp, Homo sapien
cactttcctgactggattaatgttg

SEQ ID NO: 213213 - DNA, 25 bp, Homo sapien
ggatgtagcaaaaaggccctggcca

SEQ ID NO: 213214 - DNA, 25 bp, Homo sapien
tccccactgtgagtcggaatctgtg

SEQ ID NO: 213215 - DNA, 25 bp, Homo sapien
ctgtgagtcggaatctgtgatctgg

SEQ ID NO: 213216 - DNA, 25 bp, Homo sapien
taacaagctgtgtgctttcactgtc

SEQ ID NO: 213217 - DNA, 25 bp, Homo sapien
tgtctccatactcagagctccccac

SEQ ID NO: 213218 - DNA, 25 bp, Homo sapien
tcaaaagcctgctgcaatcggagca

SEQ ID NO: 213219 - DNA, 25 bp, Homo sapien
gcctgctgcaatcggagcagatgct

SEQ ID NO: 213220 - DNA, 25 bp, Homo sapien
ggagcagatgctcttgaaacctgaa

SEQ ID NO: 213221 - DNA, 25 bp, Homo sapien
caatcggagcagatgctcttgaaac

SEQ ID NO: 213222 - DNA, 25 bp, Homo sapien
aagagaggagagtgtgccaaacaaa

SEQ ID NO: 213223 - DNA, 25 bp, Homo sapien
tgaagagaggagagtgtgccaaaca

SEQ ID NO: 213224 - DNA, 25 bp, Homo sapien
ctgaagagaggagagtgtgccaaac

SEQ ID NO: 213225 - DNA, 25 bp, Homo sapien
gagaggagagtgtgccaaacaaatg

SEQ ID NO: 213226 - DNA, 25 bp, Homo sapien
catggtagagactgttgccactcac

SEQ ID NO: 213227 - DNA, 25 bp, Homo sapien
cactccaggcagtatactaggtgct

SEQ ID NO: 213228 - DNA, 25 bp, Homo sapien
taatgagtcctgaccacactccagg

SEQ ID NO: 213229 - DNA, 25 bp, Homo sapien
cactcttattacagtctgaggcaga

SEQ ID NO: 213230 - DNA, 25 bp, Homo sapien
cagccacatgagttacaaaggtgca

SEQ ID NO: 213231 - DNA, 25 bp, Homo sapien
gcaaatgggattcagttctggctgc

SEQ ID NO: 213232 - DNA, 25 bp, Homo sapien
gaacatctctcactaattaagccca

SEQ ID NO: 213233 - DNA, 25 bp, Homo sapien
ttgtactgcaaatgggattcagttc

SEQ ID NO: 213234 - DNA, 25 bp, Homo sapien
taggtactgaagtattttattacca

SEQ ID NO: 213235 - DNA, 25 bp, Homo sapien
tagttctttagattctttcaccacc

SEQ ID NO: 213236 - DNA, 25 bp, Homo sapien
gttctttagattctttcaccaccat

SEQ ID NO: 213237 - DNA, 25 bp, Homo sapien
ctagttctttagattctttcaccac

SEQ ID NO: 213238 - DNA, 25 bp, Homo sapien
agttctttagattctttcaccacca

SEQ ID NO: 213239 - DNA, 25 bp, Homo sapien
aggttaaggacaagcatgtacacag

SEQ ID NO: 213240 - DNA, 25 bp, Homo sapien
aagaccaggagtcaatgaaaaggaa

SEQ ID NO: 213241 - DNA, 25 bp, Homo sapien
tcttattggtgattggttgaaagac

SEQ ID NO: 213242 - DNA, 25 bp, Homo sapien
catgtatcaaaggtagttgggttac

SEQ ID NO: 213243 - DNA, 25 bp, Homo sapien
ggaggacattctctacagtatgtag

SEQ ID NO: 213244 - DNA, 25 bp, Homo sapien
cccttggcaagacggggtccactca

SEQ ID NO: 213245 - DNA, 25 bp, Homo sapien
gactctttatctctctaggatcagg

SEQ ID NO: 213246 - DNA, 25 bp, Homo sapien
cctgctatctgtcatttagtgatgt

SEQ ID NO: 213247 - DNA, 25 bp, Homo sapien
ttgcggagcatccaccctctttggg

SEQ ID NO: 213248 - DNA, 25 bp, Homo sapien
tgtcaagcttatcacatctggtttc

SEQ ID NO: 213249 - DNA, 25 bp, Homo sapien
aaggtgtcaaggtgttagatggaat

SEQ ID NO: 213250 - DNA, 25 bp, Homo sapien
gatggaattgcaggctctgtcaagc

SEQ ID NO: 213251 - DNA, 25 bp, Homo sapien
gaatgtaccctcagcttttctccaa

SEQ ID NO: 213252 - DNA, 25 bp, Homo sapien
tctatgctacccaaggtgacaccta

SEQ ID NO: 213253 - DNA, 25 bp, Homo sapien
cagtcatgattggagcagcacacac

SEQ ID NO: 213254 - DNA, 25 bp, Homo sapien
caagttcagcatcttgaatgtaccc

SEQ ID NO: 213255 - DNA, 25 bp, Homo sapien
tcctccccatgaaaacatccaggct

SEQ ID NO: 213256 - DNA, 25 bp, Homo sapien
ctcctccccatgaaaacatccaggc

SEQ ID NO: 213257 - DNA, 25 bp, Homo sapien
tcacctagtatcctcagagctcccc

SEQ ID NO: 213258 - DNA, 25 bp, Homo sapien
ttatcccctcacctagtatcctcag

SEQ ID NO: 213259 - DNA, 25 bp, Homo sapien
gattgctgcaatggacccagggctt

SEQ ID NO: 213260 - DNA, 25 bp, Homo sapien
gcagttggcatctggcagtcttact

SEQ ID NO: 213261 - DNA, 25 bp, Homo sapien
gactgccaaaaagtaccagatctcc

SEQ ID NO: 213262 - DNA, 25 bp, Homo sapien
tccttgtataggagatgggattgct

SEQ ID NO: 213263 - DNA, 25 bp, Homo sapien
atctgggtcatgctgatgcaagagg

SEQ ID NO: 213264 - DNA, 25 bp, Homo sapien
cacatctgggtcatgctgatgcaag

SEQ ID NO: 213265 - DNA, 25 bp, Homo sapien
catctgggtcatgctgatgcaagag

SEQ ID NO: 213266 - DNA, 25 bp, Homo sapien
acatctgggtcatgctgatgcaaga

SEQ ID NO: 213267 - DNA, 25 bp, Homo sapien
atgtgtgggtgctctgaccctgcat

SEQ ID NO: 213268 - DNA, 25 bp, Homo sapien
tctccatgagcgccccaagccctgt

SEQ ID NO: 213269 - DNA, 25 bp, Homo sapien
cccagaagggaatatgtgtgggtgc

SEQ ID NO: 213270 - DNA, 25 bp, Homo sapien
aggttctccatgagcgccccaagcc

SEQ ID NO: 213271 - DNA, 25 bp, Homo sapien
tggcctgaagcccaattatattcct

SEQ ID NO: 213272 - DNA, 25 bp, Homo sapien
tatattcctctagcttgtgccacag

SEQ ID NO: 213273 - DNA, 25 bp, Homo sapien
agctccgattgccttcagaacttgg

SEQ ID NO: 213274 - DNA, 25 bp, Homo sapien
tgcccaattgacataagcagctccg

SEQ ID NO: 213275 - DNA, 25 bp, Homo sapien
ctgaatccacctggccgtgaggcat

SEQ ID NO: 213276 - DNA, 25 bp, Homo sapien
atacagtggtactgcccggcagcct

SEQ ID NO: 213277 - DNA, 25 bp, Homo sapien
gatggcactccattcccgaatacag

SEQ ID NO: 213278 - DNA, 25 bp, Homo sapien
atgggagtggtgcaacaggccacct

SEQ ID NO: 213279 - DNA, 25 bp, Homo sapien
tgttgttgtgataccacacagagcc

SEQ ID NO: 213280 - DNA, 25 bp, Homo sapien
tagtcctgggagtctatgagtgctg

SEQ ID NO: 213281 - DNA, 25 bp, Homo sapien
tctgggctggtaaaatgactaatca

SEQ ID NO: 213282 - DNA, 25 bp, Homo sapien
tgactttgcaccttaagcccttggc

SEQ ID NO: 213283 - DNA, 25 bp, Homo sapien
ttctggtgaagtgtcgagttggagt

SEQ ID NO: 213284 - DNA, 25 bp, Homo sapien
attctggtgaagtgtcgagttggag

SEQ ID NO: 213285 - DNA, 25 bp, Homo sapien
tctggtgaagtgtcgagttggagtt

SEQ ID NO: 213286 - DNA, 25 bp, Homo sapien
caatataactagaggaaggtgaccc

SEQ ID NO: 213287 - DNA, 25 bp, Homo sapien
cccaatataactagaggaaggtgac

SEQ ID NO: 213288 - DNA, 25 bp, Homo sapien
tcacccaatataactagaggaaggt

SEQ ID NO: 213289 - DNA, 25 bp, Homo sapien
cacccaatataactagaggaaggtg

SEQ ID NO: 213290 - DNA, 25 bp, Homo sapien
gaggaggaattacgtgggcagaagc

SEQ ID NO: 213291 - DNA, 25 bp, Homo sapien
gaaagagcaggctgagagtgtacct

SEQ ID NO: 213292 - DNA, 25 bp, Homo sapien
tctcataagactaggaatgtgctca

SEQ ID NO: 213293 - DNA, 25 bp, Homo sapien
caaaggaggtgtgtgtaggattctc

SEQ ID NO: 213294 - DNA, 25 bp, Homo sapien
caggagctgacatgagacttgcagt

SEQ ID NO: 213295 - DNA, 25 bp, Homo sapien
gacttgcagttgattcatggatact

SEQ ID NO: 213296 - DNA, 25 bp, Homo sapien
gatactgcaggccaccttgacgaga

SEQ ID NO: 213297 - DNA, 25 bp, Homo sapien
ccttgacgagactgtgcagagccca

SEQ ID NO: 213298 - DNA, 25 bp, Homo sapien
tcccagttgtatcccgtgaccctcc

SEQ ID NO: 213299 - DNA, 25 bp, Homo sapien
gtgtccctcccagttgtatcccgtg

SEQ ID NO: 213300 - DNA, 25 bp, Homo sapien
ttctgtgatttggctggtaactcga

SEQ ID NO: 213301 - DNA, 25 bp, Homo sapien
cctcccagttgtatcccgtgaccct

SEQ ID NO: 213302 - DNA, 25 bp, Homo sapien
tccatgagtatttgtacagatagcc

SEQ ID NO: 213303 - DNA, 25 bp, Homo sapien
tgtacagatagcctaagttgtccca

SEQ ID NO: 213304 - DNA, 25 bp, Homo sapien
taagttgtcccataagtggcctgcg

SEQ ID NO: 213305 - DNA, 25 bp, Homo sapien
aagtggcctgcgaagagtgctttca

SEQ ID NO: 213306 - DNA, 25 bp, Homo sapien
taacattaatgcgaaattggaaggt

SEQ ID NO: 213307 - DNA, 25 bp, Homo sapien
gctttagcggtcatcattaacatta

SEQ ID NO: 213308 - DNA, 25 bp, Homo sapien
tcagggaacagatctatgtctttgc

SEQ ID NO: 213309 - DNA, 25 bp, Homo sapien
tatgtctttgcatgctgatctgatt

SEQ ID NO: 213310 - DNA, 25 bp, Homo sapien
tctacattcagggtcatcaggtctt

SEQ ID NO: 213311 - DNA, 25 bp, Homo sapien
catcaggtcttcctcagtaaggtcc

SEQ ID NO: 213312 - DNA, 25 bp, Homo sapien
ggcctctacattcagggtcatcagg

SEQ ID NO: 213313 - DNA, 25 bp, Homo sapien
tcaggtcttcctcagtaaggtccat

SEQ ID NO: 213314 - DNA, 25 bp, Homo sapien
agaaccaagacttcatccaccagct

SEQ ID NO: 213315 - DNA, 25 bp, Homo sapien
tctatctgaatgccatctagtggac

SEQ ID NO: 213316 - DNA, 25 bp, Homo sapien
cagaaccaagacttcatccaccagc

SEQ ID NO: 213317 - DNA, 25 bp, Homo sapien
agctctatctgaatgccatctagtg

SEQ ID NO: 213318 - DNA, 25 bp, Homo sapien
cagggttggatttagcaacttggca

SEQ ID NO: 213319 - DNA, 25 bp, Homo sapien
cttggtaggaccacccctgttggca

SEQ ID NO: 213320 - DNA, 25 bp, Homo sapien
caaagctgttgctatcagggttgga

SEQ ID NO: 213321 - DNA, 25 bp, Homo sapien
tagaaagatgagagacaacgctgcg

SEQ ID NO: 213322 - DNA, 25 bp, Homo sapien
gctccaggcagctcttgataagcag

SEQ ID NO: 213323 - DNA, 25 bp, Homo sapien
cattgcttgcagaaaaaacctctgt

SEQ ID NO: 213324 - DNA, 25 bp, Homo sapien
tcttgataagcagcattgcttgcag

SEQ ID NO: 213325 - DNA, 25 bp, Homo sapien
cctagcaacagccagagactgctgg

SEQ ID NO: 213326 - DNA, 25 bp, Homo sapien
ttgcagcaggcaagactttgtggaa

SEQ ID NO: 213327 - DNA, 25 bp, Homo sapien
aaaggctgcaaagccaaaaactctt

SEQ ID NO: 213328 - DNA, 25 bp, Homo sapien
taagtagaagtctactgaggatttc

SEQ ID NO: 213329 - DNA, 25 bp, Homo sapien
ttgtggaacaatgagacctaagtag

SEQ ID NO: 213330 - DNA, 25 bp, Homo sapien
tagagcttcaacagccattgtgagc

SEQ ID NO: 213331 - DNA, 25 bp, Homo sapien
cttgatggctagagcttcaacagcc

SEQ ID NO: 213332 - DNA, 25 bp, Homo sapien
cactgcacttgatggctagagcttc

SEQ ID NO: 213333 - DNA, 25 bp, Homo sapien
ttctttctgtttggacactgcactt

SEQ ID NO: 213334 - DNA, 25 bp, Homo sapien
gaaagtgcttatgtgtttaaaccac

SEQ ID NO: 213335 - DNA, 25 bp, Homo sapien
gaaaagaaagtgcttatgtgtttaa

SEQ ID NO: 213336 - DNA, 25 bp, Homo sapien
tatgtgtttaaaccactagtaggat

SEQ ID NO: 213337 - DNA, 25 bp, Homo sapien
cactgaaccaatgccaacaacctcc

SEQ ID NO: 213338 - DNA, 25 bp, Homo sapien
gcagttattgtcaaaggttactctg

SEQ ID NO: 213339 - DNA, 25 bp, Homo sapien
agcagttattgtcaaaggttactct

SEQ ID NO: 213340 - DNA, 25 bp, Homo sapien
tagcagttattgtcaaaggttactc

SEQ ID NO: 213341 - DNA, 25 bp, Homo sapien
ctgccctcttttggacataactcaa

SEQ ID NO: 213342 - DNA, 25 bp, Homo sapien
tctcatcaaatcaaatgtgggtgct

SEQ ID NO: 213343 - DNA, 25 bp, Homo sapien
tagacctcaatttactacatgcagg

SEQ ID NO: 213344 - DNA, 25 bp, Homo sapien
taactcaaataggagcacacatctc

SEQ ID NO: 213345 - DNA, 25 bp, Homo sapien
cattctgtggaatcctcttcaagaa

SEQ ID NO: 213346 - DNA, 25 bp, Homo sapien
ggttgggtcctgtgtaatcacataa

SEQ ID NO: 213347 - DNA, 25 bp, Homo sapien
gtaagaactgccatcctgaatcaat

SEQ ID NO: 213348 - DNA, 25 bp, Homo sapien
aatatgcttgttatggactctatca

SEQ ID NO: 213349 - DNA, 25 bp, Homo sapien
gagaacagttgtataaatcacccag

SEQ ID NO: 213350 - DNA, 25 bp, Homo sapien
gaaaagagctacttctgggctgagt

SEQ ID NO: 213351 - DNA, 25 bp, Homo sapien
gctacccagaagtcatttacatagg

SEQ ID NO: 213352 - DNA, 25 bp, Homo sapien
tattaagtccatcacatcagcacgc

SEQ ID NO: 213353 - DNA, 25 bp, Homo sapien
tactggctttgatacagccaaccat

SEQ ID NO: 213354 - DNA, 25 bp, Homo sapien
attactggctttgatacagccaacc

SEQ ID NO: 213355 - DNA, 25 bp, Homo sapien
ttactggctttgatacagccaacca

SEQ ID NO: 213356 - DNA, 25 bp, Homo sapien
cattactggctttgatacagccaac

SEQ ID NO: 213357 - DNA, 25 bp, Homo sapien
aactagcacattaaatgaccctggg

SEQ ID NO: 213358 - DNA, 25 bp, Homo sapien
aaggaactagcacattaaatgaccc

SEQ ID NO: 213359 - DNA, 25 bp, Homo sapien
gggtcatgatttctgatgaccatga

SEQ ID NO: 213360 - DNA, 25 bp, Homo sapien
gcacattaaatgaccctgggtcatg

SEQ ID NO: 213361 - DNA, 25 bp, Homo sapien
taggtcctcagtgccgaaagtatag

SEQ ID NO: 213362 - DNA, 25 bp, Homo sapien
aagtatagtcagaatcaagtaccat

SEQ ID NO: 213363 - DNA, 25 bp, Homo sapien
tcctcagtgccgaaagtatagtcag

SEQ ID NO: 213364 - DNA, 25 bp, Homo sapien
ttgcaaagactaattaggtcctcag

SEQ ID NO: 213365 - DNA, 25 bp, Homo sapien
ctggctcagaatggtgctgcctaac

SEQ ID NO: 213366 - DNA, 25 bp, Homo sapien
ggctcagaatggtgctgcctaacat

SEQ ID NO: 213367 - DNA, 25 bp, Homo sapien
tggctcagaatggtgctgcctaaca

SEQ ID NO: 213368 - DNA, 25 bp, Homo sapien
tttctaccagagcatctttatcatc

SEQ ID NO: 213369 - DNA, 25 bp, Homo sapien
atttctaccagagcatctttatcat

SEQ ID NO: 213370 - DNA, 25 bp, Homo sapien
ttcacaccagagttaatcctaaaga

SEQ ID NO: 213371 - DNA, 25 bp, Homo sapien
gaaatgaatgttagatcccttccct

SEQ ID NO: 213372 - DNA, 25 bp, Homo sapien
tgtgtccagtacaaagtgtgggcac

SEQ ID NO: 213373 - DNA, 25 bp, Homo sapien
ggtgataacttattccacagttgct

SEQ ID NO: 213374 - DNA, 25 bp, Homo sapien
tcatgcctgtttgccaatgtttgga

SEQ ID NO: 213375 - DNA, 25 bp, Homo sapien
tacctgtctaggaacaaatcatcct

SEQ ID NO: 213376 - DNA, 25 bp, Homo sapien
cctaataacttggtgcttacctgtc

SEQ ID NO: 213377 - DNA, 25 bp, Homo sapien
ccctgagaacttaagctagacaata

SEQ ID NO: 213378 - DNA, 25 bp, Homo sapien
tgtaaaagggatgtgtaaaagcctc

SEQ ID NO: 213379 - DNA, 25 bp, Homo sapien
ccttcaattttgttaacagcacaga

SEQ ID NO: 213380 - DNA, 25 bp, Homo sapien
ggaaatcacctaacctgcaaacgaa

SEQ ID NO: 213381 - DNA, 25 bp, Homo sapien
gcctctagggcattaaactacccca

SEQ ID NO: 213382 - DNA, 25 bp, Homo sapien
cagtattttctaagcctaggagccc

SEQ ID NO: 213383 - DNA, 25 bp, Homo sapien
taatagcattagtttaccacggtca

SEQ ID NO: 213384 - DNA, 25 bp, Homo sapien
aaaggtttggacattcagctgtagc

SEQ ID NO: 213385 - DNA, 25 bp, Homo sapien
aggctgcccacccaagaaatagtga

SEQ ID NO: 213386 - DNA, 25 bp, Homo sapien
aaatacataagcctgagatctattt

SEQ ID NO: 213387 - DNA, 25 bp, Homo sapien
ttaggaagtgagattagaaagacat

SEQ ID NO: 213388 - DNA, 25 bp, Homo sapien
aagcctgagatctattttatctcca

SEQ ID NO: 213389 - DNA, 25 bp, Homo sapien
cataagcctgagatctattttatct

SEQ ID NO: 213390 - DNA, 25 bp, Homo sapien
taaatcagggtacaggcttttctgt

SEQ ID NO: 213391 - DNA, 25 bp, Homo sapien
tcctcccactgtccgatgtgctggt

SEQ ID NO: 213392 - DNA, 25 bp, Homo sapien
actgtccgatgtgctggttggctga

SEQ ID NO: 213393 - DNA, 25 bp, Homo sapien
tcccactgtccgatgtgctggttgg

SEQ ID NO: 213394 - DNA, 25 bp, Homo sapien
cactgtccgatgtgctggttggctg

SEQ ID NO: 213395 - DNA, 25 bp, Homo sapien
ccttaggtactatgggcattacaac

SEQ ID NO: 213396 - DNA, 25 bp, Homo sapien
taagggcttgaatagatagtgggta

SEQ ID NO: 213397 - DNA, 25 bp, Homo sapien
aactatggacagagtgactactggc

SEQ ID NO: 213398 - DNA, 25 bp, Homo sapien
catgtggtgagaactactttcttta

SEQ ID NO: 213399 - DNA, 25 bp, Homo sapien
gcattccagcctggctgacacagca

SEQ ID NO: 213400 - DNA, 25 bp, Homo sapien
actgcattccagcctggctgacaca

SEQ ID NO: 213401 - DNA, 25 bp, Homo sapien
gagatggtgccactgcattccagcc

SEQ ID NO: 213402 - DNA, 25 bp, Homo sapien
caggagacagaagttgcagtgaact

SEQ ID NO: 213403 - DNA, 25 bp, Homo sapien
ttggcataatattgattccaggatg

SEQ ID NO: 213404 - DNA, 25 bp, Homo sapien
ctttggcataatattgattccagga

SEQ ID NO: 213405 - DNA, 25 bp, Homo sapien
ggcataatattgattccaggatgaa

SEQ ID NO: 213406 - DNA, 25 bp, Homo sapien
ttctttggcataatattgattccag

SEQ ID NO: 213407 - DNA, 25 bp, Homo sapien
ccaggatctaaggtgacaatgatag

SEQ ID NO: 213408 - DNA, 25 bp, Homo sapien
taacaacccgttggccaccaggatc

SEQ ID NO: 213409 - DNA, 25 bp, Homo sapien
gaatgagttcatgacctggcttaaa

SEQ ID NO: 213410 - DNA, 25 bp, Homo sapien
cacgtgaatcttcagaggatgggta

SEQ ID NO: 213411 - DNA, 25 bp, Homo sapien
gaacacgttctcgttcgctaaggag

SEQ ID NO: 213412 - DNA, 25 bp, Homo sapien
taaagcataggtgaagcggaaatcc

SEQ ID NO: 213413 - DNA, 25 bp, Homo sapien
cacgtgaggatcgtcttgcaggcac

SEQ ID NO: 213414 - DNA, 25 bp, Homo sapien
actgaaatgaaaatcgccgcggcaa

SEQ ID NO: 213415 - DNA, 25 bp, Homo sapien
aagccagcggctagcacgaggcagg

SEQ ID NO: 213416 - DNA, 25 bp, Homo sapien
gccagcggctagcacgaggcaggac

SEQ ID NO: 213417 - DNA, 25 bp, Homo sapien
ggaagccagcggctagcacgaggca

SEQ ID NO: 213418 - DNA, 25 bp, Homo sapien
aggaagccagcggctagcacgaggc

SEQ ID NO: 213419 - DNA, 25 bp, Homo sapien
ccattcccgagggttgcaagaggag

SEQ ID NO: 213420 - DNA, 25 bp, Homo sapien
cacggcggcctctctgtcatagtag

SEQ ID NO: 213421 - DNA, 25 bp, Homo sapien
ctcggttccccagcgctttcagtgg

SEQ ID NO: 213422 - DNA, 25 bp, Homo sapien
tgcagctttctaagacacctctcgg

SEQ ID NO: 213423 - DNA, 25 bp, Homo sapien
aaccaacgaggtgtcaggctcggca

SEQ ID NO: 213424 - DNA, 25 bp, Homo sapien
aggttgcgttcgtgcctcgcgcgca

SEQ ID NO: 213425 - DNA, 25 bp, Homo sapien
gctcggcaggggattgcttctgtct

SEQ ID NO: 213426 - DNA, 25 bp, Homo sapien
ctaaggcgcggacaaccaacgaggt

SEQ ID NO: 213427 - DNA, 25 bp, Homo sapien
tccgcgttcactcagccaatccggt

SEQ ID NO: 213428 - DNA, 25 bp, Homo sapien
cgttcactcagccaatccggtgcta

SEQ ID NO: 213429 - DNA, 25 bp, Homo sapien
gcgttcactcagccaatccggtgct

SEQ ID NO: 213430 - DNA, 25 bp, Homo sapien
acgctccgcgttcactcagccaatc

SEQ ID NO: 213431 - DNA, 25 bp, Homo sapien
agcgtgtgctatcctttcctctcag

SEQ ID NO: 213432 - DNA, 25 bp, Homo sapien
gcgctccgcagagcgttccgacact

SEQ ID NO: 213433 - DNA, 25 bp, Homo sapien
tctccacgagttccacgcctagggg

SEQ ID NO: 213434 - DNA, 25 bp, Homo sapien
cgatccgcggtcctactcaggctgg

SEQ ID NO: 213435 - DNA, 25 bp, Homo sapien
tctgggacctatgaggctgctgtcc

SEQ ID NO: 213436 - DNA, 25 bp, Homo sapien
gcgccttcggaagcaaagtcctggg

SEQ ID NO: 213437 - DNA, 25 bp, Homo sapien
tccgtgtcggagtccttacaggtaa

SEQ ID NO: 213438 - DNA, 25 bp, Homo sapien
attttacaaccgctgagaaccgccg

SEQ ID NO: 213439 - DNA, 25 bp, Homo sapien
ctgcggggctccgcgctgtcggtgc

SEQ ID NO: 213440 - DNA, 25 bp, Homo sapien
gggctccgcgctgtcggtgcaggcg

SEQ ID NO: 213441 - DNA, 25 bp, Homo sapien
cggggctccgcgctgtcggtgcagg

SEQ ID NO: 213442 - DNA, 25 bp, Homo sapien
tccgcgctgtcggtgcaggcggcgg

SEQ ID NO: 213443 - DNA, 25 bp, Homo sapien
ccgctctcggctggcctgggcgcat

SEQ ID NO: 213444 - DNA, 25 bp, Homo sapien
agcatgccgctctcggctggcctgg

SEQ ID NO: 213445 - DNA, 25 bp, Homo sapien
atgccgctctcggctggcctgggcg

SEQ ID NO: 213446 - DNA, 25 bp, Homo sapien
aagcatgccgctctcggctggcctg

SEQ ID NO: 213447 - DNA, 25 bp, Homo sapien
ggacgagactcaggtgttaatcaga

SEQ ID NO: 213448 - DNA, 25 bp, Homo sapien
aaaaggccctctgtctgcctcgtcg

SEQ ID NO: 213449 - DNA, 25 bp, Homo sapien
gccttctgcctttccgcgcaaaagg

SEQ ID NO: 213450 - DNA, 25 bp, Homo sapien
tccggacctcggaaagtgtctgcct

SEQ ID NO: 213451 - DNA, 25 bp, Homo sapien
tgcgctgaatttggttaatatccgt

SEQ ID NO: 213452 - DNA, 25 bp, Homo sapien
taatatccgtcacttcggcgatcgg

SEQ ID NO: 213453 - DNA, 25 bp, Homo sapien
ctccctcgcgaaagccgtgtgtgtt

SEQ ID NO: 213454 - DNA, 25 bp, Homo sapien
gtgttctgcatgtctgattccgttg

SEQ ID NO: 213455 - DNA, 25 bp, Homo sapien
gttttattccagtgttcttggtgga

SEQ ID NO: 213456 - DNA, 25 bp, Homo sapien
gtggctgaatccagcttttccctca

SEQ ID NO: 213457 - DNA, 25 bp, Homo sapien
gatgataattttagcacttactgaa

SEQ ID NO: 213458 - DNA, 25 bp, Homo sapien
tcaagagtgatgataattttagcac

SEQ ID NO: 213459 - DNA, 25 bp, Homo sapien
cttcatcaagagtgatgataatttt

SEQ ID NO: 213460 - DNA, 25 bp, Homo sapien
gtgatgataattttagcacttactg

SEQ ID NO: 213461 - DNA, 25 bp, Homo sapien
ccaatttgtgtccttatagacgaaa

SEQ ID NO: 213462 - DNA, 25 bp, Homo sapien
tgtgtccttatagacgaaatgaatc

SEQ ID NO: 213463 - DNA, 25 bp, Homo sapien
tctcttgtgacttaaagtctacttt

SEQ ID NO: 213464 - DNA, 25 bp, Homo sapien
ttttgctatcctttcacattcaacc

SEQ ID NO: 213465 - DNA, 25 bp, Homo sapien
ctcaataatcagtgggtcaaagaag

SEQ ID NO: 213466 - DNA, 25 bp, Homo sapien
taccttgacactaatgaaagtggac

SEQ ID NO: 213467 - DNA, 25 bp, Homo sapien
gaaagtggacactcaacatatcaat

SEQ ID NO: 213468 - DNA, 25 bp, Homo sapien
taagcccatagttagttgaatgaat

SEQ ID NO: 213469 - DNA, 25 bp, Homo sapien
cacagtactgaaagtactaaccaga

SEQ ID NO: 213470 - DNA, 25 bp, Homo sapien
aagtactaaccagaacagttaggca

SEQ ID NO: 213471 - DNA, 25 bp, Homo sapien
taaccagaacagttaggcaagtcaa

SEQ ID NO: 213472 - DNA, 25 bp, Homo sapien
ccagaacagttaggcaagtcaaaga

SEQ ID NO: 213473 - DNA, 25 bp, Homo sapien
atctttggaggttgtgtgttcccat

SEQ ID NO: 213474 - DNA, 25 bp, Homo sapien
gtaggattggtgccagttcttattt

SEQ ID NO: 213475 - DNA, 25 bp, Homo sapien
tgtgttcccataaatttatttcctc

SEQ ID NO: 213476 - DNA, 25 bp, Homo sapien
gaggttgtgtgttcccataaattta

SEQ ID NO: 213477 - DNA, 25 bp, Homo sapien
ccctccatggagacataagctatga

SEQ ID NO: 213478 - DNA, 25 bp, Homo sapien
cagtgccgtggtacgagatggtcac

SEQ ID NO: 213479 - DNA, 25 bp, Homo sapien
taatagtagattacagagacacccc

SEQ ID NO: 213480 - DNA, 25 bp, Homo sapien
tctgaatggaatcaagctgctggtc

SEQ ID NO: 213481 - DNA, 25 bp, Homo sapien
gcttccttaagcagtccccgatcta

SEQ ID NO: 213482 - DNA, 25 bp, Homo sapien
cccatggatgttctgtggctaagag

SEQ ID NO: 213483 - DNA, 25 bp, Homo sapien
gctgctctaatacaacatggccgac

SEQ ID NO: 213484 - DNA, 25 bp, Homo sapien
tttggagagcccaagctaactaggg

SEQ ID NO: 213485 - DNA, 25 bp, Homo sapien
agcaaccaggtctgtacccctctgg

SEQ ID NO: 213486 - DNA, 25 bp, Homo sapien
ccacctggttgtttgggccagcaac

SEQ ID NO: 213487 - DNA, 25 bp, Homo sapien
agccaccacctaccacctggttgtt

SEQ ID NO: 213488 - DNA, 25 bp, Homo sapien
tttgggccagcaaccaggtctgtac

SEQ ID NO: 213489 - DNA, 25 bp, Homo sapien
tttcggcatatcttcttacatcctt

SEQ ID NO: 213490 - DNA, 25 bp, Homo sapien
ttaagtccctttcggcatatcttct

SEQ ID NO: 213491 - DNA, 25 bp, Homo sapien
caaactgttaagtccctttcggcat

SEQ ID NO: 213492 - DNA, 25 bp, Homo sapien
gtccctttcggcatatcttcttaca

SEQ ID NO: 213493 - DNA, 25 bp, Homo sapien
gctgaatcaaccctacatagacatt

SEQ ID NO: 213494 - DNA, 25 bp, Homo sapien
cactgaacacgaaaagctacaagga

SEQ ID NO: 213495 - DNA, 25 bp, Homo sapien
gaatcatcagaaacactaagcagct

SEQ ID NO: 213496 - DNA, 25 bp, Homo sapien
caaggaaatgaagtactatgaataa

SEQ ID NO: 213497 - DNA, 25 bp, Homo sapien
gccagaaagctgctaataagtatta

SEQ ID NO: 213498 - DNA, 25 bp, Homo sapien
aagtggtacttagtgatgtattcta

SEQ ID NO: 213499 - DNA, 25 bp, Homo sapien
ctttgtaggctctttgtatttccca

SEQ ID NO: 213500 - DNA, 25 bp, Homo sapien
tagagcttacttctgaatactaggg

SEQ ID NO: 213501 - DNA, 25 bp, Homo sapien
tctaataggctccaagctttctcct

SEQ ID NO: 213502 - DNA, 25 bp, Homo sapien
tttcttctaataggctccaagcttt

SEQ ID NO: 213503 - DNA, 25 bp, Homo sapien
tcttctaataggctccaagctttct

SEQ ID NO: 213504 - DNA, 25 bp, Homo sapien
acctgttatttacactactacttct

SEQ ID NO: 213505 - DNA, 25 bp, Homo sapien
gacttacgaagctatgttgtttgct

SEQ ID NO: 213506 - DNA, 25 bp, Homo sapien
ttatgacatattaggagggggattt

SEQ ID NO: 213507 - DNA, 25 bp, Homo sapien
cttatttggttgttgcttgtggagg

SEQ ID NO: 213508 - DNA, 25 bp, Homo sapien
ttttgagacttacgaagctatgttg

SEQ ID NO: 213509 - DNA, 25 bp, Homo sapien
aataaagtggatctaacaggtgcag

SEQ ID NO: 213510 - DNA, 25 bp, Homo sapien
tctaattccgtgacaccactggtgc

SEQ ID NO: 213511 - DNA, 25 bp, Homo sapien
tggtgccagttctcagatcatactt

SEQ ID NO: 213512 - DNA, 25 bp, Homo sapien
cacttttgcaacagatgcagaggga

SEQ ID NO: 213513 - DNA, 25 bp, Homo sapien
gccgtggtgtaaacatatgagtgaa

SEQ ID NO: 213514 - DNA, 25 bp, Homo sapien
actgggagtcagaaatcccttttct

SEQ ID NO: 213515 - DNA, 25 bp, Homo sapien
tacctccttgctggaaactgtttgc

SEQ ID NO: 213516 - DNA, 25 bp, Homo sapien
accagtttgtacagccctaaatttg

SEQ ID NO: 213517 - DNA, 25 bp, Homo sapien
taaggatacctactctgtaccatag

SEQ ID NO: 213518 - DNA, 25 bp, Homo sapien
caggaaaatgtaactggctggcatt

SEQ ID NO: 213519 - DNA, 25 bp, Homo sapien
tctgttctgatgaaggattctcaca

SEQ ID NO: 213520 - DNA, 25 bp, Homo sapien
gaatacttataggagcagcctcaga

SEQ ID NO: 213521 - DNA, 25 bp, Homo sapien
ttttcacagagtcactatgcatgta

SEQ ID NO: 213522 - DNA, 25 bp, Homo sapien
tgatttttcacagagtcactatgca

SEQ ID NO: 213523 - DNA, 25 bp, Homo sapien
cagagtcactatgcatgtaaagtat

SEQ ID NO: 213524 - DNA, 25 bp, Homo sapien
tcacagagtcactatgcatgtaaag

SEQ ID NO: 213525 - DNA, 25 bp, Homo sapien
ctacgtggcatttgccagtgctctt

SEQ ID NO: 213526 - DNA, 25 bp, Homo sapien
tgttctctaactgatatgtgcagaa

SEQ ID NO: 213527 - DNA, 25 bp, Homo sapien
ttctgttctctaactgatatgtgca

SEQ ID NO: 213528 - DNA, 25 bp, Homo sapien
tctactactctttgcaggtagtttc

SEQ ID NO: 213529 - DNA, 25 bp, Homo sapien
taaaaagaccaagacctaatgatag

SEQ ID NO: 213530 - DNA, 25 bp, Homo sapien
ccaagacctaatgataggactatag

SEQ ID NO: 213531 - DNA, 25 bp, Homo sapien
cctaatgataggactatagaatact

SEQ ID NO: 213532 - DNA, 25 bp, Homo sapien
atgataggactatagaatacttccc

SEQ ID NO: 213533 - DNA, 25 bp, Homo sapien
aaaacttatagacttcctgagaagc

SEQ ID NO: 213534 - DNA, 25 bp, Homo sapien
tgagataatgttaccagatcagagt

SEQ ID NO: 213535 - DNA, 25 bp, Homo sapien
gagtaacacaaccagtcaatgacag

SEQ ID NO: 213536 - DNA, 25 bp, Homo sapien
tctattaatgaatgagctctccaac

SEQ ID NO: 213537 - DNA, 25 bp, Homo sapien
ctcagggcagctaccgcttggctgc

SEQ ID NO: 213538 - DNA, 25 bp, Homo sapien
caagggctttttagtcaccactggt

SEQ ID NO: 213539 - DNA, 25 bp, Homo sapien
gggctttttagtcaccactggtgag

SEQ ID NO: 213540 - DNA, 25 bp, Homo sapien
gccattatcactctaggctcagggc

SEQ ID NO: 213541 - DNA, 25 bp, Homo sapien
attaggtttgggctgattcgttaca

SEQ ID NO: 213542 - DNA, 25 bp, Homo sapien
gggctgattcgttacataactggag

SEQ ID NO: 213543 - DNA, 25 bp, Homo sapien
ggtttgggctgattcgttacataac

SEQ ID NO: 213544 - DNA, 25 bp, Homo sapien
tctcattaggtttgggctgattcgt

SEQ ID NO: 213545 - DNA, 25 bp, Homo sapien
tagacaatatctagactcaagttct

SEQ ID NO: 213546 - DNA, 25 bp, Homo sapien
ctgagtaaaatagtgcctaagtcaa

SEQ ID NO: 213547 - DNA, 25 bp, Homo sapien
taatgaaatctgactgaaatgagga

SEQ ID NO: 213548 - DNA, 25 bp, Homo sapien
cgtatatagggaaaagtcatttctc

SEQ ID NO: 213549 - DNA, 25 bp, Homo sapien
ggtgtgagaattgcttgaagctggg

SEQ ID NO: 213550 - DNA, 25 bp, Homo sapien
ggttgcagtgaaatgagatcaagcc

SEQ ID NO: 213551 - DNA, 25 bp, Homo sapien
tgaggtgtgagaattgcttgaagct

SEQ ID NO: 213552 - DNA, 25 bp, Homo sapien
gcagtgaaatgagatcaagccactg

SEQ ID NO: 213553 - DNA, 25 bp, Homo sapien
caaatgtcaacgtagccaaaaaggc

SEQ ID NO: 213554 - DNA, 25 bp, Homo sapien
caggaccctcatgggtttgtggatc

SEQ ID NO: 213555 - DNA, 25 bp, Homo sapien
catactacttggatctactgcctta

SEQ ID NO: 213556 - DNA, 25 bp, Homo sapien
tgtcaagccctgaaagggtctccag

SEQ ID NO: 213557 - DNA, 25 bp, Homo sapien
gctcacgccactgccgtctagactg

SEQ ID NO: 213558 - DNA, 25 bp, Homo sapien
agctcacgccactgccgtctagact

SEQ ID NO: 213559 - DNA, 25 bp, Homo sapien
taaacttctgctgactggtaactcc

SEQ ID NO: 213560 - DNA, 25 bp, Homo sapien
caaatctgattggtttgtcctctca

SEQ ID NO: 213561 - DNA, 25 bp, Homo sapien
tgctgactggtaactccaaatctga

SEQ ID NO: 213562 - DNA, 25 bp, Homo sapien
ctttcttttctagctgcggcttcat

SEQ ID NO: 213563 - DNA, 25 bp, Homo sapien
accctaaagccacactgactaacat

SEQ ID NO: 213564 - DNA, 25 bp, Homo sapien
cacactgactaacattgctgttgac

SEQ ID NO: 213565 - DNA, 25 bp, Homo sapien
taaattagcagggtagaggacccta

SEQ ID NO: 213566 - DNA, 25 bp, Homo sapien
tagcagggtagaggaccctaaagcc

SEQ ID NO: 213567 - DNA, 25 bp, Homo sapien
tctttcactcaatgccacatctctg

SEQ ID NO: 213568 - DNA, 25 bp, Homo sapien
tggtctccataggtgctgtttatgt

SEQ ID NO: 213569 - DNA, 25 bp, Homo sapien
catctctgtggtctccataggtgct

SEQ ID NO: 213570 - DNA, 25 bp, Homo sapien
ttcactcaatgccacatctctgtgg

SEQ ID NO: 213571 - DNA, 25 bp, Homo sapien
tcatttaccttcactattgtagaaa

SEQ ID NO: 213572 - DNA, 25 bp, Homo sapien
cctaatgtagcacattggtttacca

SEQ ID NO: 213573 - DNA, 25 bp, Homo sapien
ggtttaccaattgcatatcactatc

SEQ ID NO: 213574 - DNA, 25 bp, Homo sapien
taagtctccaatccctaatgtagca

SEQ ID NO: 213575 - DNA, 25 bp, Homo sapien
cccagtgatattcttaaagttagac

SEQ ID NO: 213576 - DNA, 25 bp, Homo sapien
ccgggatccttaactcccagtctgg

SEQ ID NO: 213577 - DNA, 25 bp, Homo sapien
ccagtctggtgttcatttcactata

SEQ ID NO: 213578 - DNA, 25 bp, Homo sapien
ccatcttggaacagagtcccagtga

SEQ ID NO: 213579 - DNA, 25 bp, Homo sapien
taaatcagtcgtaacaaagccattg

SEQ ID NO: 213580 - DNA, 25 bp, Homo sapien
tgttccatgctgtaggtccatactg

SEQ ID NO: 213581 - DNA, 25 bp, Homo sapien
gatggcccaggagatcgtttcatca

SEQ ID NO: 213582 - DNA, 25 bp, Homo sapien
gccattgtcaagtctaggagatcag

SEQ ID NO: 213583 - DNA, 25 bp, Homo sapien
tacctgggacctctataaacgatag

SEQ ID NO: 213584 - DNA, 25 bp, Homo sapien
tatatgggacatacccaagggaaaa

SEQ ID NO: 213585 - DNA, 25 bp, Homo sapien
tctacccttgtgagttcttacctgg

SEQ ID NO: 213586 - DNA, 25 bp, Homo sapien
gcaaaaaggcagaagagacctcact

SEQ ID NO: 213587 - DNA, 25 bp, Homo sapien
aaaagtaattggctgggcacgttgg

SEQ ID NO: 213588 - DNA, 25 bp, Homo sapien
tgggcatagtgacacatgcctataa

SEQ ID NO: 213589 - DNA, 25 bp, Homo sapien
tatttaaaagtaattggctgggcac

SEQ ID NO: 213590 - DNA, 25 bp, Homo sapien
tagaatatttaaaagtaattggctg

SEQ ID NO: 213591 - DNA, 25 bp, Homo sapien
cacgtcatcatacctggcttttggg

SEQ ID NO: 213592 - DNA, 25 bp, Homo sapien
gctagcattataggtacacgtcatc

SEQ ID NO: 213593 - DNA, 25 bp, Homo sapien
tataagaacttactatctctctcag

SEQ ID NO: 213594 - DNA, 25 bp, Homo sapien
ccagttagaacagggcatctttaag

SEQ ID NO: 213595 - DNA, 25 bp, Homo sapien
tagcgatagcttttagtagacagcg

SEQ ID NO: 213596 - DNA, 25 bp, Homo sapien
tatactagcgtaggcaacacttgga

SEQ ID NO: 213597 - DNA, 25 bp, Homo sapien
tgtaatatgcaacggcacagctagt

SEQ ID NO: 213598 - DNA, 25 bp, Homo sapien
tatgctcttaaatcaaggctgtctg

SEQ ID NO: 213599 - DNA, 25 bp, Homo sapien
atccaggtagttggtttcactatag

SEQ ID NO: 213600 - DNA, 25 bp, Homo sapien
ccaggtagttggtttcactatagaa

SEQ ID NO: 213601 - DNA, 25 bp, Homo sapien
tccaggtagttggtttcactataga

SEQ ID NO: 213602 - DNA, 25 bp, Homo sapien
cttcactatgctccattctgagaat

SEQ ID NO: 213603 - DNA, 25 bp, Homo sapien
cagctagactttttgatgcatttcc

SEQ ID NO: 213604 - DNA, 25 bp, Homo sapien
tctgagaatcctatactgaagaaac

SEQ ID NO: 213605 - DNA, 25 bp, Homo sapien
ctctttctcaaagccgatcctcagg

SEQ ID NO: 213606 - DNA, 25 bp, Homo sapien
gcaaactacagcaatcataggacct

SEQ ID NO: 213607 - DNA, 25 bp, Homo sapien
tgcaaactacagcaatcataggacc

SEQ ID NO: 213608 - DNA, 25 bp, Homo sapien
ggcagaatgcaaactacagcaatca

SEQ ID NO: 213609 - DNA, 25 bp, Homo sapien
gaatgcaaactacagcaatcatagg

SEQ ID NO: 213610 - DNA, 25 bp, Homo sapien
tgtattctaagtttgttcgaaacac

SEQ ID NO: 213611 - DNA, 25 bp, Homo sapien
gtttgttcgaaacaccagctctgca

SEQ ID NO: 213612 - DNA, 25 bp, Homo sapien
gctctgcagtgcgttgctgaaaaat

SEQ ID NO: 213613 - DNA, 25 bp, Homo sapien
ctgcagtgcgttgctgaaaaatgaa

SEQ ID NO: 213614 - DNA, 25 bp, Homo sapien
tttctttgagtctagcacacttatg

SEQ ID NO: 213615 - DNA, 25 bp, Homo sapien
tttgagtctagcacacttatgttca

SEQ ID NO: 213616 - DNA, 25 bp, Homo sapien
cttcactagatagtaaagctcctcc

SEQ ID NO: 213617 - DNA, 25 bp, Homo sapien
gtaaagctcctcctggtataagacc

SEQ ID NO: 213618 - DNA, 25 bp, Homo sapien
cggcgacggaggaggcaggcggtgg

SEQ ID NO: 213619 - DNA, 25 bp, Homo sapien
ggcggcgacggaggaggcaggcggt

SEQ ID NO: 213620 - DNA, 25 bp, Homo sapien
gcggcgacggaggaggcaggcggtg

SEQ ID NO: 213621 - DNA, 25 bp, Homo sapien
cggaggaggcaggcggtggggcggg

SEQ ID NO: 213622 - DNA, 25 bp, Homo sapien
aagggccgccggagggctgtcgctt

SEQ ID NO: 213623 - DNA, 25 bp, Homo sapien
tgtcgcttctgcagtgcgtaggagc

SEQ ID NO: 213624 - DNA, 25 bp, Homo sapien
agggctgtcgcttctgcagtgcgta

SEQ ID NO: 213625 - DNA, 25 bp, Homo sapien
gcgggaggctccgcggagccgaggc

SEQ ID NO: 213626 - DNA, 25 bp, Homo sapien
tgaggtcagctttctaatctctgaa

SEQ ID NO: 213627 - DNA, 25 bp, Homo sapien
cttggttgttatagtctgaggtaat

SEQ ID NO: 213628 - DNA, 25 bp, Homo sapien
ctttcaatgttagataagagatagg

SEQ ID NO: 213629 - DNA, 25 bp, Homo sapien
tagtgagattaagttctgttcagct

SEQ ID NO: 213630 - DNA, 25 bp, Homo sapien
catacatagatagcagtgtgcaggg

SEQ ID NO: 213631 - DNA, 25 bp, Homo sapien
ccactaccagtagatgggaagtcta

SEQ ID NO: 213632 - DNA, 25 bp, Homo sapien
gcaggaggattgcaactgttgtcca

SEQ ID NO: 213633 - DNA, 25 bp, Homo sapien
taatgcagcacgtattgagtttcta

SEQ ID NO: 213634 - DNA, 25 bp, Homo sapien
aaaaggcttttccagtttgcataat

SEQ ID NO: 213635 - DNA, 25 bp, Homo sapien
gaataagaaagccttgagttttgtg

SEQ ID NO: 213636 - DNA, 25 bp, Homo sapien
aggacagtagaaaaggcttttccag

SEQ ID NO: 213637 - DNA, 25 bp, Homo sapien
cggagaagagaaactaaaaggacag

SEQ ID NO: 213638 - DNA, 25 bp, Homo sapien
taaagcttccaagtgaatctgaggg

SEQ ID NO: 213639 - DNA, 25 bp, Homo sapien
gatacaaccgttttctctaaatgaa

SEQ ID NO: 213640 - DNA, 25 bp, Homo sapien
tgtaattcttgtagagttaacccca

SEQ ID NO: 213641 - DNA, 25 bp, Homo sapien
taactcatgtgaaactcagaactgt

SEQ ID NO: 213642 - DNA, 25 bp, Homo sapien
gaagcaccgagagatggctgttgac

SEQ ID NO: 213643 - DNA, 25 bp, Homo sapien
agtgcacagttggagcgtattcggc

SEQ ID NO: 213644 - DNA, 25 bp, Homo sapien
tcaccagaggaacatcagaagcacc

SEQ ID NO: 213645 - DNA, 25 bp, Homo sapien
ggatgatgccaatacgtcgaagtgc

SEQ ID NO: 213646 - DNA, 25 bp, Homo sapien
tacccatatgacaggagacaacttc

SEQ ID NO: 213647 - DNA, 25 bp, Homo sapien
gaagtactccctgaacattgtgtgt

SEQ ID NO: 213648 - DNA, 25 bp, Homo sapien
tgtgtgtctcctggctagtatttga

SEQ ID NO: 213649 - DNA, 25 bp, Homo sapien
tattgtcagtcatagcctcaggttt

SEQ ID NO: 213650 - DNA, 25 bp, Homo sapien
agagagatcatctaactctgtagtc

SEQ ID NO: 213651 - DNA, 25 bp, Homo sapien
tggttcacgcccgtattagtagcac

SEQ ID NO: 213652 - DNA, 25 bp, Homo sapien
ctctgtagtccataaaatttgtgga

SEQ ID NO: 213653 - DNA, 25 bp, Homo sapien
ccgtattagtagcacctttggaggc

SEQ ID NO: 213654 - DNA, 25 bp, Homo sapien
ccacaggtagatgtactggaaactg

SEQ ID NO: 213655 - DNA, 25 bp, Homo sapien
taaatgatgccaatccagatggaga

SEQ ID NO: 213656 - DNA, 25 bp, Homo sapien
ttaatgctgggtataggtccctaga

SEQ ID NO: 213657 - DNA, 25 bp, Homo sapien
agtaatattaagttccccatctgag

SEQ ID NO: 213658 - DNA, 25 bp, Homo sapien
ccatgattgacaataatatatgcag

SEQ ID NO: 213659 - DNA, 25 bp, Homo sapien
aacctatgaaatgaccatgattgac

SEQ ID NO: 213660 - DNA, 25 bp, Homo sapien
tactggttcaaagaaatgttctctg

SEQ ID NO: 213661 - DNA, 25 bp, Homo sapien
tttctaggtgatgggattattggtg

SEQ ID NO: 213662 - DNA, 25 bp, Homo sapien
catactttggtagattctcagagcc

SEQ ID NO: 213663 - DNA, 25 bp, Homo sapien
ttatctccaacgcacaagatcttgc

SEQ ID NO: 213664 - DNA, 25 bp, Homo sapien
acaaggtaattagtagtggcaggaa

SEQ ID NO: 213665 - DNA, 25 bp, Homo sapien
cagtacacatgaacaaggccagtcc

SEQ ID NO: 213666 - DNA, 25 bp, Homo sapien
gaagtattctttgtttacatggctt

SEQ ID NO: 213667 - DNA, 25 bp, Homo sapien
tatcagttaaacattaggtatcata

SEQ ID NO: 213668 - DNA, 25 bp, Homo sapien
gattaaatctttgatgatctagcat

SEQ ID NO: 213669 - DNA, 25 bp, Homo sapien
aatatcagcaatcaccaatccaact

SEQ ID NO: 213670 - DNA, 25 bp, Homo sapien
ataaggaaggacaagaactaactgc

SEQ ID NO: 213671 - DNA, 25 bp, Homo sapien
ctttgctgaatactccacatattca

SEQ ID NO: 213672 - DNA, 25 bp, Homo sapien
gaagccagttcatcataaggaagga

SEQ ID NO: 213673 - DNA, 25 bp, Homo sapien
gacaagaactaactgctttgctgaa

SEQ ID NO: 213674 - DNA, 25 bp, Homo sapien
gcagctagagcccattacagatgag

SEQ ID NO: 213675 - DNA, 25 bp, Homo sapien
tactggcccacgataaggttgctga

SEQ ID NO: 213676 - DNA, 25 bp, Homo sapien
tatgaaagtattggccagtatggag

SEQ ID NO: 213677 - DNA, 25 bp, Homo sapien
tatagaaaaggctcgtgatattccg

SEQ ID NO: 213678 - DNA, 25 bp, Homo sapien
gatgtcaatgaggtttttgacttgt

SEQ ID NO: 213679 - DNA, 25 bp, Homo sapien
aatggactctgtcatcattagccgg

SEQ ID NO: 213680 - DNA, 25 bp, Homo sapien
tacagttcgtaatgaaatggactct

SEQ ID NO: 213681 - DNA, 25 bp, Homo sapien
gatgaagttctagagattaatggca

SEQ ID NO: 213682 - DNA, 25 bp, Homo sapien
tctgatatgcatggtactttgactt

SEQ ID NO: 213683 - DNA, 25 bp, Homo sapien
agtcaacagatcaagccgcctcctg

SEQ ID NO: 213684 - DNA, 25 bp, Homo sapien
tactttgacttttgtcctgattccc

SEQ ID NO: 213685 - DNA, 25 bp, Homo sapien
gccgcctcctgccaaggaaacagta

SEQ ID NO: 213686 - DNA, 25 bp, Homo sapien
tttttggaaggtggaagatggaatc

SEQ ID NO: 213687 - DNA, 25 bp, Homo sapien
ggaaggtggaagatggaatctccat

SEQ ID NO: 213688 - DNA, 25 bp, Homo sapien
tgttttaaattagtaaactctgcac

SEQ ID NO: 213689 - DNA, 25 bp, Homo sapien
ggtggaagatggaatctccatctgt

SEQ ID NO: 213690 - DNA, 25 bp, Homo sapien
gccttcacatccagccaactctgca

SEQ ID NO: 213691 - DNA, 25 bp, Homo sapien
agccttcacatccagccaactctgc

SEQ ID NO: 213692 - DNA, 25 bp, Homo sapien
caagttttgtcagacctaactggct

SEQ ID NO: 213693 - DNA, 25 bp, Homo sapien
ttcagtagcagagggcaagagtctt

SEQ ID NO: 213694 - DNA, 25 bp, Homo sapien
aataagctgtgtcagaagtgctctc

SEQ ID NO: 213695 - DNA, 25 bp, Homo sapien
caggtcagcatctgttgatagcagc

SEQ ID NO: 213696 - DNA, 25 bp, Homo sapien
tctagaatgaggttctttagggcac

SEQ ID NO: 213697 - DNA, 25 bp, Homo sapien
gcctctgaggtgttggtgatatgat

SEQ ID NO: 213698 - DNA, 25 bp, Homo sapien
gatttggatgctagttatacaggtc

SEQ ID NO: 213699 - DNA, 25 bp, Homo sapien
tcagtttgtatattaggactcagct

SEQ ID NO: 213700 - DNA, 25 bp, Homo sapien
caggtcaggattctattctatttct

SEQ ID NO: 213701 - DNA, 25 bp, Homo sapien
cagtgttgtggatatccttgtacat

SEQ ID NO: 213702 - DNA, 25 bp, Homo sapien
cagcttgtagctgcgaacagtgttg

SEQ ID NO: 213703 - DNA, 25 bp, Homo sapien
tcaagcttttgaggcaccttgtacc

SEQ ID NO: 213704 - DNA, 25 bp, Homo sapien
tgactatgacccctcagatgaccct

SEQ ID NO: 213705 - DNA, 25 bp, Homo sapien
gataatcaacctctagccgggcttg

SEQ ID NO: 213706 - DNA, 25 bp, Homo sapien
tgacccttatgttccatgtcgagag

SEQ ID NO: 213707 - DNA, 25 bp, Homo sapien
tcatgtgatcagtcaagaagatcca

SEQ ID NO: 213708 - DNA, 25 bp, Homo sapien
tagaaccgtgaagaagtactcaggg

SEQ ID NO: 213709 - DNA, 25 bp, Homo sapien
cagggaaagagtgatacaagaggca

SEQ ID NO: 213710 - DNA, 25 bp, Homo sapien
tggaggcttacacatcatagctgac

SEQ ID NO: 213711 - DNA, 25 bp, Homo sapien
gacattactcctgtgttggcaaaag

SEQ ID NO: 213712 - DNA, 25 bp, Homo sapien
tcttgaggatagacccaagtctgaa

SEQ ID NO: 213713 - DNA, 25 bp, Homo sapien
gatttgctatctgaaatcacacagg

SEQ ID NO: 213714 - DNA, 25 bp, Homo sapien
catgaggccagggtaacgttttcca

SEQ ID NO: 213715 - DNA, 25 bp, Homo sapien
caagaacagcgcgacctaattaagt

SEQ ID NO: 213716 - DNA, 25 bp, Homo sapien
gcatgtgccacaggtcctagcttat

SEQ ID NO: 213717 - DNA, 25 bp, Homo sapien
cctcccgtctcagtataggcatgtg

SEQ ID NO: 213718 - DNA, 25 bp, Homo sapien
agttgatcagtaccaaaatgtttta

SEQ ID NO: 213719 - DNA, 25 bp, Homo sapien
gaggagattctatatgtcacccaga

SEQ ID NO: 213720 - DNA, 25 bp, Homo sapien
agtctatcattgatttgggttggtt

SEQ ID NO: 213721 - DNA, 25 bp, Homo sapien
cagtctatcattgatttgggttggt

SEQ ID NO: 213722 - DNA, 25 bp, Homo sapien
gtctatcattgatttgggttggttc

SEQ ID NO: 213723 - DNA, 25 bp, Homo sapien
tctatcattgatttgggttggttcc

SEQ ID NO: 213724 - DNA, 25 bp, Homo sapien
caaccagttatgtaattgtactctg

SEQ ID NO: 213725 - DNA, 25 bp, Homo sapien
actgaagaggccgagttcgtgctac

SEQ ID NO: 213726 - DNA, 25 bp, Homo sapien
tattttgagatacggcggacgcatc

SEQ ID NO: 213727 - DNA, 25 bp, Homo sapien
ggtgttactcactggatgcaaaatg

SEQ ID NO: 213728 - DNA, 25 bp, Homo sapien
tttttctctttaacacatgagttat

SEQ ID NO: 213729 - DNA, 25 bp, Homo sapien
ctctttaacacatgagttatttaga

SEQ ID NO: 213730 - DNA, 25 bp, Homo sapien
cacctatttggagatgtgaaaaaga

SEQ ID NO: 213731 - DNA, 25 bp, Homo sapien
ctgatttataattccaggtggtcag

SEQ ID NO: 213732 - DNA, 25 bp, Homo sapien
taagttttgcacatagccttgctgc

SEQ ID NO: 213733 - DNA, 25 bp, Homo sapien
caaaggtaaccattgtggccgtgac

SEQ ID NO: 213734 - DNA, 25 bp, Homo sapien
tatgagtcgtgaagatgccaaagca

SEQ ID NO: 213735 - DNA, 25 bp, Homo sapien
gaacccatgtgcctgataattagag

SEQ ID NO: 213736 - DNA, 25 bp, Homo sapien
gaattctgttgatgaatatagctgc

SEQ ID NO: 213737 - DNA, 25 bp, Homo sapien
tacatgggaggatagcacatttgac

SEQ ID NO: 213738 - DNA, 25 bp, Homo sapien
tgtatgagcacagtatcctatgact

SEQ ID NO: 213739 - DNA, 25 bp, Homo sapien
tatgactgtgctacgtatatatagg

SEQ ID NO: 213740 - DNA, 25 bp, Homo sapien
aaaactgagttgttgctgacctcca

SEQ ID NO: 213741 - DNA, 25 bp, Homo sapien
cacctagttgtacagccactctggc

SEQ ID NO: 213742 - DNA, 25 bp, Homo sapien
caaggtcagtgaagtctatcaatca

SEQ ID NO: 213743 - DNA, 25 bp, Homo sapien
tcagcaatggtagatagaaatgtcc

SEQ ID NO: 213744 - DNA, 25 bp, Homo sapien
aatggaccttatgtgcagcctggga

SEQ ID NO: 213745 - DNA, 25 bp, Homo sapien
taaagatggacaacgcaaggctgtg

SEQ ID NO: 213746 - DNA, 25 bp, Homo sapien
tgttggcacaggtataggtaggtcc

SEQ ID NO: 213747 - DNA, 25 bp, Homo sapien
tgttctttacagagggatagtgccc

SEQ ID NO: 213748 - DNA, 25 bp, Homo sapien
tggaaaaccactaatctggatccct

SEQ ID NO: 213749 - DNA, 25 bp, Homo sapien
ttaacaaggccaatacattccaggt

SEQ ID NO: 213750 - DNA, 25 bp, Homo sapien
taatttttgcctcctagaaaggcag

SEQ ID NO: 213751 - DNA, 25 bp, Homo sapien
ccaggtatttaagaagccacaggag

SEQ ID NO: 213752 - DNA, 25 bp, Homo sapien
ctttgacttgtcaaagtctcaattt

SEQ ID NO: 213753 - DNA, 25 bp, Homo sapien
tggcacataactaagacctgctatc

SEQ ID NO: 213754 - DNA, 25 bp, Homo sapien
aaaatacttaataccagtgcctggc

SEQ ID NO: 213755 - DNA, 25 bp, Homo sapien
aattctgaaggtagactgcttagac

SEQ ID NO: 213756 - DNA, 25 bp, Homo sapien
gtgagcagcaaccagatttcctaaa

SEQ ID NO: 213757 - DNA, 25 bp, Homo sapien
gctaatcatgtcaaaaatgcctgga

SEQ ID NO: 213758 - DNA, 25 bp, Homo sapien
tggctcatgccaaatcaaacagtac

SEQ ID NO: 213759 - DNA, 25 bp, Homo sapien
ctgtgatgtcacttgattaaaatac

SEQ ID NO: 213760 - DNA, 25 bp, Homo sapien
gaaaaactacctggactgtgatgtc

SEQ ID NO: 213761 - DNA, 25 bp, Homo sapien
tctcagacaacagcgccaaggtttg

SEQ ID NO: 213762 - DNA, 25 bp, Homo sapien
tgggtaggaatgaaagctgctccac

SEQ ID NO: 213763 - DNA, 25 bp, Homo sapien
tccacagtaattggcctgagaccgc

SEQ ID NO: 213764 - DNA, 25 bp, Homo sapien
tgagaccgctaatgcttcctaagag

SEQ ID NO: 213765 - DNA, 25 bp, Homo sapien
gtaatcccataaatagacatctagg

SEQ ID NO: 213766 - DNA, 25 bp, Homo sapien
taaatagccacacaaatcaaaccta

SEQ ID NO: 213767 - DNA, 25 bp, Homo sapien
aatggttgctaaattatgattctgc

SEQ ID NO: 213768 - DNA, 25 bp, Homo sapien
tctaggtaaattttacaaccagtga

SEQ ID NO: 213769 - DNA, 25 bp, Homo sapien
gccagtgttagggtttctcaaagaa

SEQ ID NO: 213770 - DNA, 25 bp, Homo sapien
agccagtgttagggtttctcaaaga

SEQ ID NO: 213771 - DNA, 25 bp, Homo sapien
tcaaatagaagatcctcgtccttct

SEQ ID NO: 213772 - DNA, 25 bp, Homo sapien
tattcaaatagaagatcctcgtcct

SEQ ID NO: 213773 - DNA, 25 bp, Homo sapien
agaagattagcaggctccaacacct

SEQ ID NO: 213774 - DNA, 25 bp, Homo sapien
agaagatcctcgtccttctcttcag

SEQ ID NO: 213775 - DNA, 25 bp, Homo sapien
tcaataactgccaatttcaacaaac

SEQ ID NO: 213776 - DNA, 25 bp, Homo sapien
tataagcaagagtacgttcaatccg

SEQ ID NO: 213777 - DNA, 25 bp, Homo sapien
gatataagcaagagtacgttcaatc

SEQ ID NO: 213778 - DNA, 25 bp, Homo sapien
tgatgatataagcaagagtacgttc

SEQ ID NO: 213779 - DNA, 25 bp, Homo sapien
taagcaagagtacgttcaatccggg

SEQ ID NO: 213780 - DNA, 25 bp, Homo sapien
tcacgacaagtggagggtatggaca

SEQ ID NO: 213781 - DNA, 25 bp, Homo sapien
catctttcagtcttcagtacagtcc

SEQ ID NO: 213782 - DNA, 25 bp, Homo sapien
ggtatggacaagtgacaaagcacct

SEQ ID NO: 213783 - DNA, 25 bp, Homo sapien
aattctagcagtttcacgacaagtg

SEQ ID NO: 213784 - DNA, 25 bp, Homo sapien
taatagcttcatccaaagtaacaaa

SEQ ID NO: 213785 - DNA, 25 bp, Homo sapien
gcatttacacgcctgttggttatct

SEQ ID NO: 213786 - DNA, 25 bp, Homo sapien
ggttatcttaatagcttcatccaaa

SEQ ID NO: 213787 - DNA, 25 bp, Homo sapien
catgttcaatggcatttacacgcct

SEQ ID NO: 213788 - DNA, 25 bp, Homo sapien
caaagtcttcctaatcattccctga

SEQ ID NO: 213789 - DNA, 25 bp, Homo sapien
gactccactaagactgcacttgtag

SEQ ID NO: 213790 - DNA, 25 bp, Homo sapien
cctaatcattccctgatcacttgac

SEQ ID NO: 213791 - DNA, 25 bp, Homo sapien
ttaataatgtaagcacaaagtcttc

SEQ ID NO: 213792 - DNA, 25 bp, Homo sapien
tagttccaccagtagttccactgct

SEQ ID NO: 213793 - DNA, 25 bp, Homo sapien
ctgcagagaagctagttccaccagt

SEQ ID NO: 213794 - DNA, 25 bp, Homo sapien
gaagctagttccaccagtagttcca

SEQ ID NO: 213795 - DNA, 25 bp, Homo sapien
tccaccagtagttccactgctttgg

SEQ ID NO: 213796 - DNA, 25 bp, Homo sapien
cctctggctaaaccagtcagttcat

SEQ ID NO: 213797 - DNA, 25 bp, Homo sapien
tctggctaaaccagtcagttcataa

SEQ ID NO: 213798 - DNA, 25 bp, Homo sapien
ccacctctggctaaaccagtcagtt

SEQ ID NO: 213799 - DNA, 25 bp, Homo sapien
ctggctaaaccagtcagttcataac

SEQ ID NO: 213800 - DNA, 25 bp, Homo sapien
catggtaatgttcaaatactggcaa

SEQ ID NO: 213801 - DNA, 25 bp, Homo sapien
cttcatggtaatgttcaaatactgg

SEQ ID NO: 213802 - DNA, 25 bp, Homo sapien
atgttcaaatactggcaaagtaaca

SEQ ID NO: 213803 - DNA, 25 bp, Homo sapien
tgttcaaatactggcaaagtaacac

SEQ ID NO: 213804 - DNA, 25 bp, Homo sapien
ccagtggaacctgacttctttattt

SEQ ID NO: 213805 - DNA, 25 bp, Homo sapien
cagtggaacctgacttctttatttt

SEQ ID NO: 213806 - DNA, 25 bp, Homo sapien
gctacattatctttcttcgctcgaa

SEQ ID NO: 213807 - DNA, 25 bp, Homo sapien
ttcgctcgaatcttcacttgcgctt

SEQ ID NO: 213808 - DNA, 25 bp, Homo sapien
cacttgcgctttattgacattttgg

SEQ ID NO: 213809 - DNA, 25 bp, Homo sapien
tatctttcttcgctcgaatcttcac

SEQ ID NO: 213810 - DNA, 25 bp, Homo sapien
tcacttcgcccatcaacattttagt

SEQ ID NO: 213811 - DNA, 25 bp, Homo sapien
gtgaacttggcttcagctagtgaaa

SEQ ID NO: 213812 - DNA, 25 bp, Homo sapien
tgtgaacttggcttcagctagtgaa

SEQ ID NO: 213813 - DNA, 25 bp, Homo sapien
agcttctctcatcacttcgcccatc

SEQ ID NO: 213814 - DNA, 25 bp, Homo sapien
ttgatatttgacacttgttaaactt

SEQ ID NO: 213815 - DNA, 25 bp, Homo sapien
caagggccatgctggatttttctaa

SEQ ID NO: 213816 - DNA, 25 bp, Homo sapien
tttgatatttgacacttgttaaact

SEQ ID NO: 213817 - DNA, 25 bp, Homo sapien
ccaagggccatgctggatttttcta

SEQ ID NO: 213818 - DNA, 25 bp, Homo sapien
tcttcaggaggtttcgacctgtctg

SEQ ID NO: 213819 - DNA, 25 bp, Homo sapien
tcaggaggtttcgacctgtctgtgc

SEQ ID NO: 213820 - DNA, 25 bp, Homo sapien
tctttaggatctgtcgaaatcgaag

SEQ ID NO: 213821 - DNA, 25 bp, Homo sapien
tcgaagagttaaggcatcagatttt

SEQ ID NO: 213822 - DNA, 25 bp, Homo sapien
catgcccggcccgactccttatttt

SEQ ID NO: 213823 - DNA, 25 bp, Homo sapien
ttcgcgagggaaagatttcaattcg

SEQ ID NO: 213824 - DNA, 25 bp, Homo sapien
attcgcgagggaaagatttcaattc

SEQ ID NO: 213825 - DNA, 25 bp, Homo sapien
gcttccggttgtcacaggcgacgaa

SEQ ID NO: 213826 - DNA, 25 bp, Homo sapien
gcaaccgaggctgcaatagctccag

SEQ ID NO: 213827 - DNA, 25 bp, Homo sapien
tacgggagtcagctggttgtgtcac

SEQ ID NO: 213828 - DNA, 25 bp, Homo sapien
ccaaagactaggagcgaagcgtgca

SEQ ID NO: 213829 - DNA, 25 bp, Homo sapien
aatctcgtgaaggaaagtgggccga

SEQ ID NO: 213830 - DNA, 25 bp, Homo sapien
ccagaggcatcgttgttcgagcaga

SEQ ID NO: 213831 - DNA, 25 bp, Homo sapien
gccggctccgtgtaggtcatcctgt

SEQ ID NO: 213832 - DNA, 25 bp, Homo sapien
ggccgagtggattgtacagcctcta

SEQ ID NO: 213833 - DNA, 25 bp, Homo sapien
tcctctacatcctcagttctgtgtg

SEQ ID NO: 213834 - DNA, 25 bp, Homo sapien
tcccggaatgtttgagattacaggc

SEQ ID NO: 213835 - DNA, 25 bp, Homo sapien
ccctccactagcgtgttaggattat

SEQ ID NO: 213836 - DNA, 25 bp, Homo sapien
tctcaggtcctgtttaagttatcct

SEQ ID NO: 213837 - DNA, 25 bp, Homo sapien
gaaaaatactggtggcgtcgatggt

SEQ ID NO: 213838 - DNA, 25 bp, Homo sapien
gagagagtgccatgattgctagcca

SEQ ID NO: 213839 - DNA, 25 bp, Homo sapien
ggacaaggtatacacccagttctga

SEQ ID NO: 213840 - DNA, 25 bp, Homo sapien
gaccctagccagagaatagatcagt

SEQ ID NO: 213841 - DNA, 25 bp, Homo sapien
tgatagctcccatacaaagtgaggt

SEQ ID NO: 213842 - DNA, 25 bp, Homo sapien
tactttgcaacctatggagatcctg

SEQ ID NO: 213843 - DNA, 25 bp, Homo sapien
taattccagggacattagaccttgg

SEQ ID NO: 213844 - DNA, 25 bp, Homo sapien
tacaaatgccagtaccttgccgaga

SEQ ID NO: 213845 - DNA, 25 bp, Homo sapien
gatacttgaaacgttgctcgaaaac

SEQ ID NO: 213846 - DNA, 25 bp, Homo sapien
gatgaactatgtcttaatgacagag

SEQ ID NO: 213847 - DNA, 25 bp, Homo sapien
taatagctagaaacaaattgtcagc

SEQ ID NO: 213848 - DNA, 25 bp, Homo sapien
tgtacaaagtttggccaccatcccc

SEQ ID NO: 213849 - DNA, 25 bp, Homo sapien
tcaagatgctgacgcctaatggctg

SEQ ID NO: 213850 - DNA, 25 bp, Homo sapien
gcctttccaggtttgtaacatgaag

SEQ ID NO: 213851 - DNA, 25 bp, Homo sapien
catggccagtgtaattgttccaaca

SEQ ID NO: 213852 - DNA, 25 bp, Homo sapien
tgtaatctgaggaactcttggcagc

SEQ ID NO: 213853 - DNA, 25 bp, Homo sapien
gctggcctgaatgtaatagtgtgtg

SEQ ID NO: 213854 - DNA, 25 bp, Homo sapien
tagtaatcactttgaagaggtttcc

SEQ ID NO: 213855 - DNA, 25 bp, Homo sapien
gtgtgtgtcatccttagtaatcact

SEQ ID NO: 213856 - DNA, 25 bp, Homo sapien
gatagcttcaatccactcggctcgc

SEQ ID NO: 213857 - DNA, 25 bp, Homo sapien
cagaaagtcaactgagacatggaca

SEQ ID NO: 213858 - DNA, 25 bp, Homo sapien
gcagaaagtcaactgagacatggac

SEQ ID NO: 213859 - DNA, 25 bp, Homo sapien
ctttcatcttgaaccagcagaaagt

SEQ ID NO: 213860 - DNA, 25 bp, Homo sapien
ctgctttcatcttgaaccagcagaa

SEQ ID NO: 213861 - DNA, 25 bp, Homo sapien
gagaatcctatcagatgaggtcccc

SEQ ID NO: 213862 - DNA, 25 bp, Homo sapien
tgcctgctccctatgctcaagatgg

SEQ ID NO: 213863 - DNA, 25 bp, Homo sapien
tatgtctggatattcctggaagccc

SEQ ID NO: 213864 - DNA, 25 bp, Homo sapien
tatttttaggcggaagcttatgggc

SEQ ID NO: 213865 - DNA, 25 bp, Homo sapien
tgtcatttcattagtgggacattac

SEQ ID NO: 213866 - DNA, 25 bp, Homo sapien
cattagtgggacattactgaggtgc

SEQ ID NO: 213867 - DNA, 25 bp, Homo sapien
ttagtgggacattactgaggtgcag

SEQ ID NO: 213868 - DNA, 25 bp, Homo sapien
tttcattagtgggacattactgagg

SEQ ID NO: 213869 - DNA, 25 bp, Homo sapien
cagtgggaacgccattatcttccag

SEQ ID NO: 213870 - DNA, 25 bp, Homo sapien
tcttccagagcagacacgagtgaac

SEQ ID NO: 213871 - DNA, 25 bp, Homo sapien
gaacgccattatcttccagagcaga

SEQ ID NO: 213872 - DNA, 25 bp, Homo sapien
gacacgagtgaaccacgaagagaaa

SEQ ID NO: 213873 - DNA, 25 bp, Homo sapien
tggacatcacatggccaaagctgca

SEQ ID NO: 213874 - DNA, 25 bp, Homo sapien
tgctacccggaaaaacattcactgg

SEQ ID NO: 213875 - DNA, 25 bp, Homo sapien
tgcatcagtaaggaagcttgggcct

SEQ ID NO: 213876 - DNA, 25 bp, Homo sapien
gcagtagtgcccatcaatgttgcag

SEQ ID NO: 213877 - DNA, 25 bp, Homo sapien
catacattgcccaagacaaggctga

SEQ ID NO: 213878 - DNA, 25 bp, Homo sapien
ccacttagcatgtggtaatacctag

SEQ ID NO: 213879 - DNA, 25 bp, Homo sapien
ggctgaacagctaactaaagggccc

SEQ ID NO: 213880 - DNA, 25 bp, Homo sapien
ggttcctgactgaagctcagtgagg

SEQ ID NO: 213881 - DNA, 25 bp, Homo sapien
agggtcatagtaatgcaggaaagct

SEQ ID NO: 213882 - DNA, 25 bp, Homo sapien
tggaagggtcatagtaatgcaggaa

SEQ ID NO: 213883 - DNA, 25 bp, Homo sapien
gaaagctggatccttccttagaaca

SEQ ID NO: 213884 - DNA, 25 bp, Homo sapien
caaagcgacgcaccttccagttttt

SEQ ID NO: 213885 - DNA, 25 bp, Homo sapien
ccctcgggaaggactcctatcaggc

SEQ ID NO: 213886 - DNA, 25 bp, Homo sapien
ctagtcaggaacaccctcagagtcc

SEQ ID NO: 213887 - DNA, 25 bp, Homo sapien
ggactcctatcaggcccagcagaag

SEQ ID NO: 213888 - DNA, 25 bp, Homo sapien
cagggccttggtgtagacaggcagc

SEQ ID NO: 213889 - DNA, 25 bp, Homo sapien
tagggagccttacagtggagaatct

SEQ ID NO: 213890 - DNA, 25 bp, Homo sapien
gatcttcaacctaccgacatggtgg

SEQ ID NO: 213891 - DNA, 25 bp, Homo sapien
cagaaagtgtatcaaggaggcgtgc

SEQ ID NO: 213892 - DNA, 25 bp, Homo sapien
cgtgcagaatctcacaagggaaggc

SEQ ID NO: 213893 - DNA, 25 bp, Homo sapien
tcaggctaatttcttccttggggct

SEQ ID NO: 213894 - DNA, 25 bp, Homo sapien
gcttggccaggtagccttgtttcac

SEQ ID NO: 213895 - DNA, 25 bp, Homo sapien
caggtagccttgtttcaccaccgtg

SEQ ID NO: 213896 - DNA, 25 bp, Homo sapien
tgtttcaccaccgtgccacttaact

SEQ ID NO: 213897 - DNA, 25 bp, Homo sapien
cctccagacggctggccgtgaagct

SEQ ID NO: 213898 - DNA, 25 bp, Homo sapien
gatccccagagcgaatggctcccat

SEQ ID NO: 213899 - DNA, 25 bp, Homo sapien
atccaggaactgctcggccagatcc

SEQ ID NO: 213900 - DNA, 25 bp, Homo sapien
ttggagatgagccagtccaccaggg

SEQ ID NO: 213901 - DNA, 25 bp, Homo sapien
tctttttataggtgcttccctgctc

SEQ ID NO: 213902 - DNA, 25 bp, Homo sapien
cggattccggtgttgctatcgtgca

SEQ ID NO: 213903 - DNA, 25 bp, Homo sapien
catgttggggcttgaacggattccg

SEQ ID NO: 213904 - DNA, 25 bp, Homo sapien
tccctgctccatgttggggcttgaa

SEQ ID NO: 213905 - DNA, 25 bp, Homo sapien
aatagccccggtgatctcaaaggcc

SEQ ID NO: 213906 - DNA, 25 bp, Homo sapien
ctctcgagaacaggcctccaggaag

SEQ ID NO: 213907 - DNA, 25 bp, Homo sapien
tccgtggatgtttgagtcttcagct

SEQ ID NO: 213908 - DNA, 25 bp, Homo sapien
ggctgccctgcatgaatagccccgg

SEQ ID NO: 213909 - DNA, 25 bp, Homo sapien
ccctcaagcttgtagtacaccagcg

SEQ ID NO: 213910 - DNA, 25 bp, Homo sapien
tctgccgaaggatgaaccatcgcgc

SEQ ID NO: 213911 - DNA, 25 bp, Homo sapien
caccagcgtgttctgccgaaggatg

SEQ ID NO: 213912 - DNA, 25 bp, Homo sapien
caagcttgtagtacaccagcgtgtt

SEQ ID NO: 213913 - DNA, 25 bp, Homo sapien
gaatcaaagtccgttgccccaactc

SEQ ID NO: 213914 - DNA, 25 bp, Homo sapien
aatcaaagtccgttgccccaactca

SEQ ID NO: 213915 - DNA, 25 bp, Homo sapien
tcaaagtccgttgccccaactcact

SEQ ID NO: 213916 - DNA, 25 bp, Homo sapien
ctgaatcaaagtccgttgccccaac

SEQ ID NO: 213917 - DNA, 25 bp, Homo sapien
gatttttagagctggcgaataagtg

SEQ ID NO: 213918 - DNA, 25 bp, Homo sapien
ttagagctggcgaataagtgagaac

SEQ ID NO: 213919 - DNA, 25 bp, Homo sapien
ttttagagctggcgaataagtgaga

SEQ ID NO: 213920 - DNA, 25 bp, Homo sapien
tacatggggtacatgagctattttg

SEQ ID NO: 213921 - DNA, 25 bp, Homo sapien
acaggcggcccggtcccaccatggg

SEQ ID NO: 213922 - DNA, 25 bp, Homo sapien
tgggaaccagagcatgcccgttccg

SEQ ID NO: 213923 - DNA, 25 bp, Homo sapien
gcgtcccctcggacatgcagctctg

SEQ ID NO: 213924 - DNA, 25 bp, Homo sapien
gacatgcagctctgcccatcagggc

SEQ ID NO: 213925 - DNA, 25 bp, Homo sapien
cctccttgagcacgccgtcctccat

SEQ ID NO: 213926 - DNA, 25 bp, Homo sapien
aggaagccctccttgagcacgccgt

SEQ ID NO: 213927 - DNA, 25 bp, Homo sapien
gccctccttgagcacgccgtcctcc

SEQ ID NO: 213928 - DNA, 25 bp, Homo sapien
aagccctccttgagcacgccgtcct

SEQ ID NO: 213929 - DNA, 25 bp, Homo sapien
gtcgccgcccgcacgccagggccac

SEQ ID NO: 213930 - DNA, 25 bp, Homo sapien
tcgccgcccgcacgccagggccacc

SEQ ID NO: 213931 - DNA, 25 bp, Homo sapien
cgcagcccgcgcagtccgcgcccac

SEQ ID NO: 213932 - DNA, 25 bp, Homo sapien
gcagcccgcgcagtccgcgcccacg

SEQ ID NO: 213933 - DNA, 25 bp, Homo sapien
agcccgcgcagtccgcgcccacggc

SEQ ID NO: 213934 - DNA, 25 bp, Homo sapien
cccgcgcagtccgcgcccacggcgc

SEQ ID NO: 213935 - DNA, 25 bp, Homo sapien
tgctggaaaactgctagagaactgg

SEQ ID NO: 213936 - DNA, 25 bp, Homo sapien
ctagagggacgtcccctggaagaga

SEQ ID NO: 213937 - DNA, 25 bp, Homo sapien
aactgggcggtgaagtcccagagta

SEQ ID NO: 213938 - DNA, 25 bp, Homo sapien
cagagtagcgcatcatttgtaggaa

SEQ ID NO: 213939 - DNA, 25 bp, Homo sapien
cagacccattgcttccccaccagtg

SEQ ID NO: 213940 - DNA, 25 bp, Homo sapien
cagggcgctctgcaaggctttgctg

SEQ ID NO: 213941 - DNA, 25 bp, Homo sapien
aagctggaacgccttgagaggtcag

SEQ ID NO: 213942 - DNA, 25 bp, Homo sapien
gagaggtcagtcactctccccaggg

SEQ ID NO: 213943 - DNA, 25 bp, Homo sapien
aggcaggaccagttttagcttggct

SEQ ID NO: 213944 - DNA, 25 bp, Homo sapien
cagctctcatgggaggcagatcctc

SEQ ID NO: 213945 - DNA, 25 bp, Homo sapien
gagggtctggaatatacaaactctc

SEQ ID NO: 213946 - DNA, 25 bp, Homo sapien
cactcggcgcctttgggcaaattgc

SEQ ID NO: 213947 - DNA, 25 bp, Homo sapien
gaaagatgatatgtcctagcctgcc

SEQ ID NO: 213948 - DNA, 25 bp, Homo sapien
gaccggcttctgtgagtggcaaaaa

SEQ ID NO: 213949 - DNA, 25 bp, Homo sapien
cacttctcgcttggtacagaccggc

SEQ ID NO: 213950 - DNA, 25 bp, Homo sapien
caagattgaggtatcggcaggttca

SEQ ID NO: 213951 - DNA, 25 bp, Homo sapien
tgaacaaatcctccttgaaactgtc

SEQ ID NO: 213952 - DNA, 25 bp, Homo sapien
ccttcccagcatctgatgaacaaat

SEQ ID NO: 213953 - DNA, 25 bp, Homo sapien
tctgatgaacaaatcctccttgaaa

SEQ ID NO: 213954 - DNA, 25 bp, Homo sapien
ttccttcccagcatctgatgaacaa

SEQ ID NO: 213955 - DNA, 25 bp, Homo sapien
tcctgagtctgtagaactccgaaca

SEQ ID NO: 213956 - DNA, 25 bp, Homo sapien
tgtgacgctaactgcatggcatccc

SEQ ID NO: 213957 - DNA, 25 bp, Homo sapien
catcccatgtactctgatctccagg

SEQ ID NO: 213958 - DNA, 25 bp, Homo sapien
cacaaatgggcatctctcatgtccc

SEQ ID NO: 213959 - DNA, 25 bp, Homo sapien
ctttggaaagcagccggttgtcacg

SEQ ID NO: 213960 - DNA, 25 bp, Homo sapien
caagtgtccttcttagctggtcaga

SEQ ID NO: 213961 - DNA, 25 bp, Homo sapien
ccattagagtgcgtacagggtgaca

SEQ ID NO: 213962 - DNA, 25 bp, Homo sapien
gaaatgactcccctgctataggctg

SEQ ID NO: 213963 - DNA, 25 bp, Homo sapien
aggttacataacatgcccacttgag

SEQ ID NO: 213964 - DNA, 25 bp, Homo sapien
tttgttgggcaatcaggaagttccc

SEQ ID NO: 213965 - DNA, 25 bp, Homo sapien
ggaggtctagactattattggccac

SEQ ID NO: 213966 - DNA, 25 bp, Homo sapien
ggtgctaagcactctacagtcattg

SEQ ID NO: 213967 - DNA, 25 bp, Homo sapien
catgcagaaagttctcactgctgta

SEQ ID NO: 213968 - DNA, 25 bp, Homo sapien
gtggcagggatctggattgtcccca

SEQ ID NO: 213969 - DNA, 25 bp, Homo sapien
tgagagatactagctcagagcatga

SEQ ID NO: 213970 - DNA, 25 bp, Homo sapien
gaaagggactggttgcaactaactg

SEQ ID NO: 213971 - DNA, 25 bp, Homo sapien
cccagggtaggagtgcttatgtagt

SEQ ID NO: 213972 - DNA, 25 bp, Homo sapien
taggagtgcttatgtagtaggtaca

SEQ ID NO: 213973 - DNA, 25 bp, Homo sapien
agatccatatttccagtcccgctga

SEQ ID NO: 213974 - DNA, 25 bp, Homo sapien
tcccgctgaccgcaatccatgacct

SEQ ID NO: 213975 - DNA, 25 bp, Homo sapien
ctgggaccccaggctctccctgcag

SEQ ID NO: 213976 - DNA, 25 bp, Homo sapien
tgggaccccaggctctccctgcagc

SEQ ID NO: 213977 - DNA, 25 bp, Homo sapien
tgcagcctcccctggcctgtgcccc

SEQ ID NO: 213978 - DNA, 25 bp, Homo sapien
tccctgcagcctcccctggcctgtg

SEQ ID NO: 213979 - DNA, 25 bp, Homo sapien
agccagggtcctctgttagagcttc

SEQ ID NO: 213980 - DNA, 25 bp, Homo sapien
agggtcctctgttagagcttctttt

SEQ ID NO: 213981 - DNA, 25 bp, Homo sapien
accccgtagacagccagggtcctct

SEQ ID NO: 213982 - DNA, 25 bp, Homo sapien
caaccccgtagacagccagggtcct

SEQ ID NO: 213983 - DNA, 25 bp, Homo sapien
catcacaggaactagcctggtcctt

SEQ ID NO: 213984 - DNA, 25 bp, Homo sapien
ctggaggattggtcaacgttgtaat

SEQ ID NO: 213985 - DNA, 25 bp, Homo sapien
taatgttatgggcttcccttcaaca

SEQ ID NO: 213986 - DNA, 25 bp, Homo sapien
tcagcatcacaggaactagcctggt

SEQ ID NO: 213987 - DNA, 25 bp, Homo sapien
cctatctgggttttcagaaggcacc

SEQ ID NO: 213988 - DNA, 25 bp, Homo sapien
ccagcagaaggttcttatcttgtta

SEQ ID NO: 213989 - DNA, 25 bp, Homo sapien
tcctatctgggttttcagaaggcac

SEQ ID NO: 213990 - DNA, 25 bp, Homo sapien
aggttcttatcttgttaggagaaag

SEQ ID NO: 213991 - DNA, 25 bp, Homo sapien
gaacaaaagagtgttctgcagagaa

SEQ ID NO: 213992 - DNA, 25 bp, Homo sapien
aatgtggtaaatctgggtggccgac

SEQ ID NO: 213993 - DNA, 25 bp, Homo sapien
ggtctctgcttatattgaacaaaag

SEQ ID NO: 213994 - DNA, 25 bp, Homo sapien
gggtggccgactctttgccaacaga

SEQ ID NO: 213995 - DNA, 25 bp, Homo sapien
ttttatgtgcacaaatgtgaaaagg

SEQ ID NO: 213996 - DNA, 25 bp, Homo sapien
agagcaggcaatgggcgcacaaacc

SEQ ID NO: 213997 - DNA, 25 bp, Homo sapien
acagagggaccaacggagacacaga

SEQ ID NO: 213998 - DNA, 25 bp, Homo sapien
acacaaacaccagtatattttatgt

SEQ ID NO: 213999 - DNA, 25 bp, Homo sapien
cctcagggtggaaggcactctccct

SEQ ID NO: 214000 - DNA, 25 bp, Homo sapien
gggtggaaggcactctccctgccat

SEQ ID NO: 214001 - DNA, 25 bp, Homo sapien
tcaaaggccctttagcagagctggg

SEQ ID NO: 214002 - DNA, 25 bp, Homo sapien
tcctccaggtctgggtggcctcagg

SEQ ID NO: 214003 - DNA, 25 bp, Homo sapien
taaggagtgagctcaaagggtcagc

SEQ ID NO: 214004 - DNA, 25 bp, Homo sapien
gaccgacgtggataaagagccgcta

SEQ ID NO: 214005 - DNA, 25 bp, Homo sapien
catgggatgcctagcagatgtccga

SEQ ID NO: 214006 - DNA, 25 bp, Homo sapien
cacaaggcaacttctggagcagcaa

SEQ ID NO: 214007 - DNA, 25 bp, Homo sapien
aactacatagtccatcgctgctcag

SEQ ID NO: 214008 - DNA, 25 bp, Homo sapien
gagttccatgagagatccccaggcc

SEQ ID NO: 214009 - DNA, 25 bp, Homo sapien
tgcctaatggaaccagccaaagctc

SEQ ID NO: 214010 - DNA, 25 bp, Homo sapien
gctcaactaaatccagatcggaggg

SEQ ID NO: 214011 - DNA, 25 bp, Homo sapien
gtgaactcccacaggtaggtccaga

SEQ ID NO: 214012 - DNA, 25 bp, Homo sapien
aggtacatgcgctccacgatgagga

SEQ ID NO: 214013 - DNA, 25 bp, Homo sapien
tgtgaacatcacctcgcagaagtag

SEQ ID NO: 214014 - DNA, 25 bp, Homo sapien
tcagcgtccttgtcgaagcggaggc

SEQ ID NO: 214015 - DNA, 25 bp, Homo sapien
cctgggatcagagccctgggaaagc

SEQ ID NO: 214016 - DNA, 25 bp, Homo sapien
tctcctggtgacaaacaaaactgtc

SEQ ID NO: 214017 - DNA, 25 bp, Homo sapien
agctccttgctcagccctgggatca

SEQ ID NO: 214018 - DNA, 25 bp, Homo sapien
tgctgcagggagaaccggcagctca

SEQ ID NO: 214019 - DNA, 25 bp, Homo sapien
ggccagcagttgagaggggtaaaga

SEQ ID NO: 214020 - DNA, 25 bp, Homo sapien
cagttgagaggggtaaagaggctgc

SEQ ID NO: 214021 - DNA, 25 bp, Homo sapien
gttgagaggggtaaagaggctgcca

SEQ ID NO: 214022 - DNA, 25 bp, Homo sapien
cagcagttgagaggggtaaagaggc

SEQ ID NO: 214023 - DNA, 25 bp, Homo sapien
tcaggatcactgtccaggagtgtcc

SEQ ID NO: 214024 - DNA, 25 bp, Homo sapien
taggcaagcatcagccctagggctc

SEQ ID NO: 214025 - DNA, 25 bp, Homo sapien
tgagtgtgcagctcacaacagacat

SEQ ID NO: 214026 - DNA, 25 bp, Homo sapien
cagtgccattctcagcaacgtaggc

SEQ ID NO: 214027 - DNA, 25 bp, Homo sapien
aatccacatgtccagggttaggact

SEQ ID NO: 214028 - DNA, 25 bp, Homo sapien
ggcttcttgcctaaatgtgtgaaca

SEQ ID NO: 214029 - DNA, 25 bp, Homo sapien
tgggatggtcctggacaatccacat

SEQ ID NO: 214030 - DNA, 25 bp, Homo sapien
cagggttaggacttagggcttcttg

SEQ ID NO: 214031 - DNA, 25 bp, Homo sapien
caacaccatctgcatatgcccaagg

SEQ ID NO: 214032 - DNA, 25 bp, Homo sapien
gatacaacaccatctgcatatgccc

SEQ ID NO: 214033 - DNA, 25 bp, Homo sapien
caccatctgcatatgcccaaggaca

SEQ ID NO: 214034 - DNA, 25 bp, Homo sapien
ccctggatacaacaccatctgcata

SEQ ID NO: 214035 - DNA, 25 bp, Homo sapien
tagaggccgcttgggcccttgctca

SEQ ID NO: 214036 - DNA, 25 bp, Homo sapien
tctctgagtagaggccgcttgggcc

SEQ ID NO: 214037 - DNA, 25 bp, Homo sapien
cgcttgggcccttgctcaagctgac

SEQ ID NO: 214038 - DNA, 25 bp, Homo sapien
tggtctgtgctgatgcccatgtcca

SEQ ID NO: 214039 - DNA, 25 bp, Homo sapien
ttcttccagcctgccggatggcgga

SEQ ID NO: 214040 - DNA, 25 bp, Homo sapien
tggcggacaggggtcaccttgacac

SEQ ID NO: 214041 - DNA, 25 bp, Homo sapien
gcttcttccagcctgccggatggcg

SEQ ID NO: 214042 - DNA, 25 bp, Homo sapien
ggtcaccttgacacgtacctatcac

SEQ ID NO: 214043 - DNA, 25 bp, Homo sapien
gcaccacaaggaccatgtgcctggg

SEQ ID NO: 214044 - DNA, 25 bp, Homo sapien
tttaacggagcatgtccgaaccctc

SEQ ID NO: 214045 - DNA, 25 bp, Homo sapien
aacggagcatgtccgaaccctctgg

SEQ ID NO: 214046 - DNA, 25 bp, Homo sapien
gagcatgtccgaaccctctgggact

SEQ ID NO: 214047 - DNA, 25 bp, Homo sapien
agccacatccacggcacaagtcaga

SEQ ID NO: 214048 - DNA, 25 bp, Homo sapien
ctcagccacatccacggcacaagtc

SEQ ID NO: 214049 - DNA, 25 bp, Homo sapien
tcagccacatccacggcacaagtca

SEQ ID NO: 214050 - DNA, 25 bp, Homo sapien
gccacatccacggcacaagtcagaa

SEQ ID NO: 214051 - DNA, 25 bp, Homo sapien
cgtattggggggtcacccaccagca

SEQ ID NO: 214052 - DNA, 25 bp, Homo sapien
tgcagagatggatagggtgacgtat

SEQ ID NO: 214053 - DNA, 25 bp, Homo sapien
attggggggtcacccaccagcaccg

SEQ ID NO: 214054 - DNA, 25 bp, Homo sapien
gcagatgagcaaccagatgcagaga

SEQ ID NO: 214055 - DNA, 25 bp, Homo sapien
agaagtgatggggaccctgcccctt

SEQ ID NO: 214056 - DNA, 25 bp, Homo sapien
tgatggggaccctgcccctttgttg

SEQ ID NO: 214057 - DNA, 25 bp, Homo sapien
ggaccctgcccctttgttgcctcac

SEQ ID NO: 214058 - DNA, 25 bp, Homo sapien
ttcagaagtgatggggaccctgccc

SEQ ID NO: 214059 - DNA, 25 bp, Homo sapien
tggtgtgacaacaggactccgcttt

SEQ ID NO: 214060 - DNA, 25 bp, Homo sapien
cagaagacaagcctggaccgctctt

SEQ ID NO: 214061 - DNA, 25 bp, Homo sapien
gactccgcttttcacagcctgtaca

SEQ ID NO: 214062 - DNA, 25 bp, Homo sapien
gaccgctcttatggtgtgacaacag

SEQ ID NO: 214063 - DNA, 25 bp, Homo sapien
ggtaggggatgcctagaccagctct

SEQ ID NO: 214064 - DNA, 25 bp, Homo sapien
catgcttatactctggacacgggtt

SEQ ID NO: 214065 - DNA, 25 bp, Homo sapien
tatactctggacacgggttgagagg

SEQ ID NO: 214066 - DNA, 25 bp, Homo sapien
ggatgcctagaccagctcttgtcag

SEQ ID NO: 214067 - DNA, 25 bp, Homo sapien
ccacctaattccaaagcaaagccct

SEQ ID NO: 214068 - DNA, 25 bp, Homo sapien
cctaattccaaagcaaagccctcag

SEQ ID NO: 214069 - DNA, 25 bp, Homo sapien
caggttcactgtcacagctgtgtgt

SEQ ID NO: 214070 - DNA, 25 bp, Homo sapien
agccacctaattccaaagcaaagcc

SEQ ID NO: 214071 - DNA, 25 bp, Homo sapien
ttaatcgcaaattgactcaaatgag

SEQ ID NO: 214072 - DNA, 25 bp, Homo sapien
gcagctataagaattaatcgcaaat

SEQ ID NO: 214073 - DNA, 25 bp, Homo sapien
tgactcaaatgagtagctgcatcat

SEQ ID NO: 214074 - DNA, 25 bp, Homo sapien
catccagtcaaagcagctataagaa

SEQ ID NO: 214075 - DNA, 25 bp, Homo sapien
ccctgcatgccaccttcatgactcg

SEQ ID NO: 214076 - DNA, 25 bp, Homo sapien
ccatccctgcatgccaccttcatga

SEQ ID NO: 214077 - DNA, 25 bp, Homo sapien
ctgcatgccaccttcatgactcggc

SEQ ID NO: 214078 - DNA, 25 bp, Homo sapien
atccctgcatgccaccttcatgact

SEQ ID NO: 214079 - DNA, 25 bp, Homo sapien
gagcatgaagtatagcctcacaggg

SEQ ID NO: 214080 - DNA, 25 bp, Homo sapien
gagggtggaaagtcgcctttcagaa

SEQ ID NO: 214081 - DNA, 25 bp, Homo sapien
gccacactgggtataaatgcagcct

SEQ ID NO: 214082 - DNA, 25 bp, Homo sapien
tggaaatgtgatggttgacttagcc

SEQ ID NO: 214083 - DNA, 25 bp, Homo sapien
ggtgcggctaggagcgccgtctcca

SEQ ID NO: 214084 - DNA, 25 bp, Homo sapien
ccccgcgccgagttgcgggccgtgc

SEQ ID NO: 214085 - DNA, 25 bp, Homo sapien
agttgcgggccgtgcctcccccacg

SEQ ID NO: 214086 - DNA, 25 bp, Homo sapien
gccaggcgcaggtgcggctaggagc

SEQ ID NO: 214087 - DNA, 25 bp, Homo sapien
tcccgcattgtgtgtcggcgtccgc

SEQ ID NO: 214088 - DNA, 25 bp, Homo sapien
ctagtcccgcattgtgtgtcggcgt

SEQ ID NO: 214089 - DNA, 25 bp, Homo sapien
agtcccgcattgtgtgtcggcgtcc

SEQ ID NO: 214090 - DNA, 25 bp, Homo sapien
cgcattgtgtgtcggcgtccgccgc

SEQ ID NO: 214091 - DNA, 25 bp, Homo sapien
tagtacggatgcgctgcaaactgca

SEQ ID NO: 214092 - DNA, 25 bp, Homo sapien
catagtacggatgcgctgcaaactg

SEQ ID NO: 214093 - DNA, 25 bp, Homo sapien
ccatagtacggatgcgctgcaaact

SEQ ID NO: 214094 - DNA, 25 bp, Homo sapien
gtacggatgcgctgcaaactgcaca

SEQ ID NO: 214095 - DNA, 25 bp, Homo sapien
ttgccacgaaggcatagtacgccta

SEQ ID NO: 214096 - DNA, 25 bp, Homo sapien
tagtctagcagcaaggcctacctga

SEQ ID NO: 214097 - DNA, 25 bp, Homo sapien
gatgaaaagggccatcccctgtgcc

SEQ ID NO: 214098 - DNA, 25 bp, Homo sapien
tagtacactgtcagagacgcaggag

SEQ ID NO: 214099 - DNA, 25 bp, Homo sapien
ggttgggagggtgaccctgggtgca

SEQ ID NO: 214100 - DNA, 25 bp, Homo sapien
atacagaattgtgggaaggggttgg

SEQ ID NO: 214101 - DNA, 25 bp, Homo sapien
ttgggagggtgaccctgggtgcagg

SEQ ID NO: 214102 - DNA, 25 bp, Homo sapien
tgggtgcaggaggcacagtaatcat

SEQ ID NO: 214103 - DNA, 25 bp, Homo sapien
cttccctttgccaggatacaagaag

SEQ ID NO: 214104 - DNA, 25 bp, Homo sapien
tttgccaggatacaagaagcttagt

SEQ ID NO: 214105 - DNA, 25 bp, Homo sapien
cctttgccaggatacaagaagctta

SEQ ID NO: 214106 - DNA, 25 bp, Homo sapien
gccaggatacaagaagcttagtcgt

SEQ ID NO: 214107 - DNA, 25 bp, Homo sapien
tgactgttttgtgccagcttgccaa

SEQ ID NO: 214108 - DNA, 25 bp, Homo sapien
aaagaagacgaatggcctcctctca

SEQ ID NO: 214109 - DNA, 25 bp, Homo sapien
cccattttcttgaagcaggctgtgt

SEQ ID NO: 214110 - DNA, 25 bp, Homo sapien
gaaggactaaattggctcagaccag

SEQ ID NO: 214111 - DNA, 25 bp, Homo sapien
tctggaatgttgaagtggatagcct

SEQ ID NO: 214112 - DNA, 25 bp, Homo sapien
caaggaccatttggagaaacaggcg

SEQ ID NO: 214113 - DNA, 25 bp, Homo sapien
aacttctacgtgagaatggcctggg

SEQ ID NO: 214114 - DNA, 25 bp, Homo sapien
cctgggatgagtcttccaaggacca

SEQ ID NO: 214115 - DNA, 25 bp, Homo sapien
tgcccgttccagttggtcctagtct

SEQ ID NO: 214116 - DNA, 25 bp, Homo sapien
caagaagcgagcttactcggtccat

SEQ ID NO: 214117 - DNA, 25 bp, Homo sapien
gctcagagaaggtcatgttttgttt

SEQ ID NO: 214118 - DNA, 25 bp, Homo sapien
agagcagcgctgaagtcatgtgttc

SEQ ID NO: 214119 - DNA, 25 bp, Homo sapien
tctttgattcatgggcagacatccc

SEQ ID NO: 214120 - DNA, 25 bp, Homo sapien
ccactgctcgggagacctgtatttc

SEQ ID NO: 214121 - DNA, 25 bp, Homo sapien
gagccaggctttaaatgtagttcca

SEQ ID NO: 214122 - DNA, 25 bp, Homo sapien
gacagctaagcgttggctcctggca

SEQ ID NO: 214123 - DNA, 25 bp, Homo sapien
tgtaggctgtactttcgcagtcaag

SEQ ID NO: 214124 - DNA, 25 bp, Homo sapien
ggtcgggttgccagcttagaatgaa

SEQ ID NO: 214125 - DNA, 25 bp, Homo sapien
tcttgagatggctgccctgatggcc

SEQ ID NO: 214126 - DNA, 25 bp, Homo sapien
ccaggtaaggttctgttcaggaagc

SEQ ID NO: 214127 - DNA, 25 bp, Homo sapien
ttacttagccaacagttaatttcac

SEQ ID NO: 214128 - DNA, 25 bp, Homo sapien
acaaatacatctccactggtttgac

SEQ ID NO: 214129 - DNA, 25 bp, Homo sapien
aaacaaatacatctccactggtttg

SEQ ID NO: 214130 - DNA, 25 bp, Homo sapien
tgacatggcatacaggggaatcaaa

SEQ ID NO: 214131 - DNA, 25 bp, Homo sapien
tcagaagcacttcggcttggagact

SEQ ID NO: 214132 - DNA, 25 bp, Homo sapien
taaaggcatataacagggacccact

SEQ ID NO: 214133 - DNA, 25 bp, Homo sapien
tagtcctggcagtgaaaattagtca

SEQ ID NO: 214134 - DNA, 25 bp, Homo sapien
cacttggtctgggagcttaggaaaa

SEQ ID NO: 214135 - DNA, 25 bp, Homo sapien
cttcttgtaaaagaccaagcaaatg

SEQ ID NO: 214136 - DNA, 25 bp, Homo sapien
tatgctccttgagacttctggcaaa

SEQ ID NO: 214137 - DNA, 25 bp, Homo sapien
gactatttcaggcatgtgggcctgg

SEQ ID NO: 214138 - DNA, 25 bp, Homo sapien
tcactgtagtgggccatcatttgtt

SEQ ID NO: 214139 - DNA, 25 bp, Homo sapien
tctagacaggttgtagacacaccct

SEQ ID NO: 214140 - DNA, 25 bp, Homo sapien
ggagactagacagtctcctctagac

SEQ ID NO: 214141 - DNA, 25 bp, Homo sapien
ttcagaccttctgattgagtgcaga

SEQ ID NO: 214142 - DNA, 25 bp, Homo sapien
tgagtgcagaggagactagacagtc

SEQ ID NO: 214143 - DNA, 25 bp, Homo sapien
tcgaacaagtcacatgtaccacagg

SEQ ID NO: 214144 - DNA, 25 bp, Homo sapien
tttgcacagcaaaaactgcgaggcc

SEQ ID NO: 214145 - DNA, 25 bp, Homo sapien
gggatctagctgagacatttctacc

SEQ ID NO: 214146 - DNA, 25 bp, Homo sapien
tttagcagtagcacccaaaaccaag

SEQ ID NO: 214147 - DNA, 25 bp, Homo sapien
tccttcttggcaaaagtagcttttg

SEQ ID NO: 214148 - DNA, 25 bp, Homo sapien
taatgtgcttgacaccatgactgaa

SEQ ID NO: 214149 - DNA, 25 bp, Homo sapien
tctttgttaacatgagagtcccatg

SEQ ID NO: 214150 - DNA, 25 bp, Homo sapien
ataaaaagcagctatctgtgaacca

SEQ ID NO: 214151 - DNA, 25 bp, Homo sapien
gctaaccagtactgaagggcttgtt

SEQ ID NO: 214152 - DNA, 25 bp, Homo sapien
ctaaccagtactgaagggcttgttt

SEQ ID NO: 214153 - DNA, 25 bp, Homo sapien
tgcttagcaatttccgaaagtgttc

SEQ ID NO: 214154 - DNA, 25 bp, Homo sapien
gcttagcaatttccgaaagtgttct

SEQ ID NO: 214155 - DNA, 25 bp, Homo sapien
atgggcttgttgatgtggctttctg

SEQ ID NO: 214156 - DNA, 25 bp, Homo sapien
atgtggctttctggtgtgccaggat

SEQ ID NO: 214157 - DNA, 25 bp, Homo sapien
tcatgggcttgttgatgtggctttc

SEQ ID NO: 214158 - DNA, 25 bp, Homo sapien
tgtggctttctggtgtgccaggatc

SEQ ID NO: 214159 - DNA, 25 bp, Homo sapien
cagtgaggcagggttaactgtatac

SEQ ID NO: 214160 - DNA, 25 bp, Homo sapien
gtcagtgaggcagggttaactgtat

SEQ ID NO: 214161 - DNA, 25 bp, Homo sapien
tcagtgaggcagggttaactgtata

SEQ ID NO: 214162 - DNA, 25 bp, Homo sapien
ggcaagagtggctaaataaactgat

SEQ ID NO: 214163 - DNA, 25 bp, Homo sapien
gtacagtagtagactgacagagtca

SEQ ID NO: 214164 - DNA, 25 bp, Homo sapien
taagatcaattacctctatctaaaa

SEQ ID NO: 214165 - DNA, 25 bp, Homo sapien
taatggcctttgtaggatacataca

SEQ ID NO: 214166 - DNA, 25 bp, Homo sapien
gcaatgagtggtgattgtcactgca

SEQ ID NO: 214167 - DNA, 25 bp, Homo sapien
gctgcaatgagtggtgattgtcact

SEQ ID NO: 214168 - DNA, 25 bp, Homo sapien
ctgcaatgagtggtgattgtcactg

SEQ ID NO: 214169 - DNA, 25 bp, Homo sapien
tgcaatgagtggtgattgtcactgc

SEQ ID NO: 214170 - DNA, 25 bp, Homo sapien
tggagaatggtaaaagtattctatg

SEQ ID NO: 214171 - DNA, 25 bp, Homo sapien
gagtaattggagaatggtaaaagta

SEQ ID NO: 214172 - DNA, 25 bp, Homo sapien
aatggtaaaagtattctatgctcac

SEQ ID NO: 214173 - DNA, 25 bp, Homo sapien
gaaaaggttgaggagtaattggaga

SEQ ID NO: 214174 - DNA, 25 bp, Homo sapien
gacgggtactacttgggatatccca

SEQ ID NO: 214175 - DNA, 25 bp, Homo sapien
tacttgggatatcccatgtggttcc

SEQ ID NO: 214176 - DNA, 25 bp, Homo sapien
aagatgcagaggtagtaaatcacct

SEQ ID NO: 214177 - DNA, 25 bp, Homo sapien
ctggaagacgggtactacttgggat

SEQ ID NO: 214178 - DNA, 25 bp, Homo sapien
taaatcaaatagcaaagtctaagtg

SEQ ID NO: 214179 - DNA, 25 bp, Homo sapien
aatcaaatagcaaagtctaagtgaa

SEQ ID NO: 214180 - DNA, 25 bp, Homo sapien
aaaataaatcaaatagcaaagtcta

SEQ ID NO: 214181 - DNA, 25 bp, Homo sapien
aataaatcaaatagcaaagtctaag

SEQ ID NO: 214182 - DNA, 25 bp, Homo sapien
gatgacaatatccttgaccttgccc

SEQ ID NO: 214183 - DNA, 25 bp, Homo sapien
cttgcccatttctatgaaggtagtg

SEQ ID NO: 214184 - DNA, 25 bp, Homo sapien
atctgaatgccaagggaatcaatga

SEQ ID NO: 214185 - DNA, 25 bp, Homo sapien
gagataaccaagcagacctaagagg

SEQ ID NO: 214186 - DNA, 25 bp, Homo sapien
tctggaggatactctgatactgact

SEQ ID NO: 214187 - DNA, 25 bp, Homo sapien
ggaatatcccatcacatccaaggaa

SEQ ID NO: 214188 - DNA, 25 bp, Homo sapien
tccaataaaagcaatccgtgcccta

SEQ ID NO: 214189 - DNA, 25 bp, Homo sapien
ggatttgatccatgtcagctttcca

SEQ ID NO: 214190 - DNA, 25 bp, Homo sapien
gagctgtccagcagcggaatatcgt

SEQ ID NO: 214191 - DNA, 25 bp, Homo sapien
cagcagcggaatatcgtccccagaa

SEQ ID NO: 214192 - DNA, 25 bp, Homo sapien
cagaggtccgggctcgaccaaagac

SEQ ID NO: 214193 - DNA, 25 bp, Homo sapien
tatcgtccccagaacccgtgagttc

SEQ ID NO: 214194 - DNA, 25 bp, Homo sapien
caggtgacagcggtgagcgaacgca

SEQ ID NO: 214195 - DNA, 25 bp, Homo sapien
gccagccacaccgtgcaggtgacag

SEQ ID NO: 214196 - DNA, 25 bp, Homo sapien
tcgcagagggtgaagagtccgtagg

SEQ ID NO: 214197 - DNA, 25 bp, Homo sapien
ccgcagatatccgaaaagctccgct

SEQ ID NO: 214198 - DNA, 25 bp, Homo sapien
actgcgctcgccggccctggccgtc

SEQ ID NO: 214199 - DNA, 25 bp, Homo sapien
cgtctcgcccgctccagacccgctt

SEQ ID NO: 214200 - DNA, 25 bp, Homo sapien
gctcgccggccctggccgtctcgcc

SEQ ID NO: 214201 - DNA, 25 bp, Homo sapien
ccgcttccggcagccgcgtcaccac

SEQ ID NO: 214202 - DNA, 25 bp, Homo sapien
tgaccaatctattaaggtaactcac

SEQ ID NO: 214203 - DNA, 25 bp, Homo sapien
gtgaccaatctattaaggtaactca

SEQ ID NO: 214204 - DNA, 25 bp, Homo sapien
tgtgaccaatctattaaggtaactc

SEQ ID NO: 214205 - DNA, 25 bp, Homo sapien
cccagccttgcagagcggtgggcgg

SEQ ID NO: 214206 - DNA, 25 bp, Homo sapien
ttactggccagacccggatattggc

SEQ ID NO: 214207 - DNA, 25 bp, Homo sapien
tcatcgaaggcacgtcccagccttg

SEQ ID NO: 214208 - DNA, 25 bp, Homo sapien
tattggccttctggcgtcagcggca

SEQ ID NO: 214209 - DNA, 25 bp, Homo sapien
gcctctcccgtcttggcttgggcag

SEQ ID NO: 214210 - DNA, 25 bp, Homo sapien
gatgtgattccaacaatggagttgg

SEQ ID NO: 214211 - DNA, 25 bp, Homo sapien
gctgggaactaaatgtaccaaatgg

SEQ ID NO: 214212 - DNA, 25 bp, Homo sapien
gaagggctgatgctgtcacaggttt

SEQ ID NO: 214213 - DNA, 25 bp, Homo sapien
caagaacattggcaaaaatgatcag

SEQ ID NO: 214214 - DNA, 25 bp, Homo sapien
agcaagcacgtcttatatggcagga

SEQ ID NO: 214215 - DNA, 25 bp, Homo sapien
gaaattaaccaaaggcttgcagcaa

SEQ ID NO: 214216 - DNA, 25 bp, Homo sapien
acagcgaagagggaggtgatacaca

SEQ ID NO: 214217 - DNA, 25 bp, Homo sapien
gtgtcctcaagcaaatccattccta

SEQ ID NO: 214218 - DNA, 25 bp, Homo sapien
cctatgtatatacctaacagaattc

SEQ ID NO: 214219 - DNA, 25 bp, Homo sapien
gattcgacctgtcatacactactgg

SEQ ID NO: 214220 - DNA, 25 bp, Homo sapien
tattggtgagggtgtaaaaagattc

SEQ ID NO: 214221 - DNA, 25 bp, Homo sapien
gctgtatgatccaccaaaccttctg

SEQ ID NO: 214222 - DNA, 25 bp, Homo sapien
ttttgaacagtgtcatatctttggg

SEQ ID NO: 214223 - DNA, 25 bp, Homo sapien
ttggttgctaggttgactcaacagc

SEQ ID NO: 214224 - DNA, 25 bp, Homo sapien
tgtttctgaagagactgtaaggctg

SEQ ID NO: 214225 - DNA, 25 bp, Homo sapien
caagcagagggccttcaagattata

SEQ ID NO: 214226 - DNA, 25 bp, Homo sapien
tacaggataaggtcagtgggccaaa

SEQ ID NO: 214227 - DNA, 25 bp, Homo sapien
cacactgcagggtagcaagtcacca

SEQ ID NO: 214228 - DNA, 25 bp, Homo sapien
agtcaccagcttcgaatctctaggg

SEQ ID NO: 214229 - DNA, 25 bp, Homo sapien
taaattgtctctagatgagagccca

SEQ ID NO: 214230 - DNA, 25 bp, Homo sapien
ttagcttcagcctttggacactggg

SEQ ID NO: 214231 - DNA, 25 bp, Homo sapien
tataactgatgtcagggcaaacccc

SEQ ID NO: 214232 - DNA, 25 bp, Homo sapien
ggttctaatacccagtgtaaggcag

SEQ ID NO: 214233 - DNA, 25 bp, Homo sapien
tatagagaacccttgactagctggg

SEQ ID NO: 214234 - DNA, 25 bp, Homo sapien
caggtatgtagcaaccaggtctgca

SEQ ID NO: 214235 - DNA, 25 bp, Homo sapien
caaactttgatgaccacttctggga

SEQ ID NO: 214236 - DNA, 25 bp, Homo sapien
caatcttagatgttgccagtggtcc

SEQ ID NO: 214237 - DNA, 25 bp, Homo sapien
tgttgaagtcaatcctcagttggcc

SEQ ID NO: 214238 - DNA, 25 bp, Homo sapien
ggcgaagactacagctaacctggca

SEQ ID NO: 214239 - DNA, 25 bp, Homo sapien
caagcacgtgtgagaatttaggaga

SEQ ID NO: 214240 - DNA, 25 bp, Homo sapien
ggttgtctgggtcaatactgcctta

SEQ ID NO: 214241 - DNA, 25 bp, Homo sapien
cagcctggctatacagtgcatcctt

SEQ ID NO: 214242 - DNA, 25 bp, Homo sapien
cctggctatacagtgcatccttgaa

SEQ ID NO: 214243 - DNA, 25 bp, Homo sapien
ctgttgttccttcacatttaagtgg

SEQ ID NO: 214244 - DNA, 25 bp, Homo sapien
gcctggctatacagtgcatccttga

SEQ ID NO: 214245 - DNA, 25 bp, Homo sapien
tcaatggctgcgaaagaatttgtag

SEQ ID NO: 214246 - DNA, 25 bp, Homo sapien
tggctgcgaaagaatttgtagtaaa

SEQ ID NO: 214247 - DNA, 25 bp, Homo sapien
ttgtagtaaaccaggcctcccagga

SEQ ID NO: 214248 - DNA, 25 bp, Homo sapien
gctgcgaaagaatttgtagtaaacc

SEQ ID NO: 214249 - DNA, 25 bp, Homo sapien
gtaagatgataatggaaagcagcag

SEQ ID NO: 214250 - DNA, 25 bp, Homo sapien
taagatgataatggaaagcagcagc

SEQ ID NO: 214251 - DNA, 25 bp, Homo sapien
tgataatggaaagcagcagcttgtt

SEQ ID NO: 214252 - DNA, 25 bp, Homo sapien
agatgataatggaaagcagcagctt

SEQ ID NO: 214253 - DNA, 25 bp, Homo sapien
gttagacctgggaccacggctggat

SEQ ID NO: 214254 - DNA, 25 bp, Homo sapien
ggagtagtcagaagtttggataacc

SEQ ID NO: 214255 - DNA, 25 bp, Homo sapien
tgggaccacggctggatactctgag

SEQ ID NO: 214256 - DNA, 25 bp, Homo sapien
actctgaggctgtatgtttgatcac

SEQ ID NO: 214257 - DNA, 25 bp, Homo sapien
tatacaggaggtcatcagctctacc

SEQ ID NO: 214258 - DNA, 25 bp, Homo sapien
gtttcactaactgagaaccatggtg

SEQ ID NO: 214259 - DNA, 25 bp, Homo sapien
tttattctctatggactaggagtcc

SEQ ID NO: 214260 - DNA, 25 bp, Homo sapien
tctaccaccctttagatgcactgga

SEQ ID NO: 214261 - DNA, 25 bp, Homo sapien
attttcaaaatgcctgcatgaagca

SEQ ID NO: 214262 - DNA, 25 bp, Homo sapien
gcaatgctcatggtcctctgggcaa

SEQ ID NO: 214263 - DNA, 25 bp, Homo sapien
gaagcaatgctcatggtcctctggg

SEQ ID NO: 214264 - DNA, 25 bp, Homo sapien
aatgctcatggtcctctgggcaacc

SEQ ID NO: 214265 - DNA, 25 bp, Homo sapien
caccgcacggggctgagattatata

SEQ ID NO: 214266 - DNA, 25 bp, Homo sapien
ttccttagcgtctttattctggtct

SEQ ID NO: 214267 - DNA, 25 bp, Homo sapien
ttatgaggacctttgtaagtcacta

SEQ ID NO: 214268 - DNA, 25 bp, Homo sapien
ggtactgagtatacagggactatgc

SEQ ID NO: 214269 - DNA, 25 bp, Homo sapien
ttatccaagaccatattccttagcg

SEQ ID NO: 214270 - DNA, 25 bp, Homo sapien
ttctggacattgaacggagaatctt

SEQ ID NO: 214271 - DNA, 25 bp, Homo sapien
tttctggacattgaacggagaatct

SEQ ID NO: 214272 - DNA, 25 bp, Homo sapien
tttcagtgccctgcagaagcattgc

SEQ ID NO: 214273 - DNA, 25 bp, Homo sapien
ctttcagtgccctgcagaagcattg

SEQ ID NO: 214274 - DNA, 25 bp, Homo sapien
ggcaggttcagagtggtattgccta

SEQ ID NO: 214275 - DNA, 25 bp, Homo sapien
tctgagatcaggcaggttcagagtg

SEQ ID NO: 214276 - DNA, 25 bp, Homo sapien
cctggcctgactcacttggcttctg

SEQ ID NO: 214277 - DNA, 25 bp, Homo sapien
aagtactaacctggcctgactcact

SEQ ID NO: 214278 - DNA, 25 bp, Homo sapien
gtgcttctcacctcccgatggagtt

SEQ ID NO: 214279 - DNA, 25 bp, Homo sapien
ggggtgcataacgtagctcctcctc

SEQ ID NO: 214280 - DNA, 25 bp, Homo sapien
agacaggggtgcataacgtagctcc

SEQ ID NO: 214281 - DNA, 25 bp, Homo sapien
caggggtgcataacgtagctcctcc

SEQ ID NO: 214282 - DNA, 25 bp, Homo sapien
gacaggggtgcataacgtagctcct

SEQ ID NO: 214283 - DNA, 25 bp, Homo sapien
tcatcaaaatccctgatcaatttct

SEQ ID NO: 214284 - DNA, 25 bp, Homo sapien
caaaatccctgatcaatttcttctt

SEQ ID NO: 214285 - DNA, 25 bp, Homo sapien
cgtttcatttgcttcctgttgcttt

SEQ ID NO: 214286 - DNA, 25 bp, Homo sapien
tttcatcaaaatccctgatcaattt

SEQ ID NO: 214287 - DNA, 25 bp, Homo sapien
tctgtccctttggttgagtgtatct

SEQ ID NO: 214288 - DNA, 25 bp, Homo sapien
gatgagaacgttattcattcccctt

SEQ ID NO: 214289 - DNA, 25 bp, Homo sapien
ggcaatgacttgaacgatgagaacg

SEQ ID NO: 214290 - DNA, 25 bp, Homo sapien
gtctggtgtggtgcttgtttttctc

SEQ ID NO: 214291 - DNA, 25 bp, Homo sapien
caaacatctaactaaaacagtattg

SEQ ID NO: 214292 - DNA, 25 bp, Homo sapien
tgatagtttatactacaggttttcc

SEQ ID NO: 214293 - DNA, 25 bp, Homo sapien
aacatctaactaaaacagtattgtc

SEQ ID NO: 214294 - DNA, 25 bp, Homo sapien
tccatctaaaatatgatagcaagtt

SEQ ID NO: 214295 - DNA, 25 bp, Homo sapien
caagcaccttttctggttagtcagc

SEQ ID NO: 214296 - DNA, 25 bp, Homo sapien
taataatgatacttgcggatggcaa

SEQ ID NO: 214297 - DNA, 25 bp, Homo sapien
ttctggtgccaggttcgggcctgcc

SEQ ID NO: 214298 - DNA, 25 bp, Homo sapien
gaaggtggtaccagaatgctgtcac

SEQ ID NO: 214299 - DNA, 25 bp, Homo sapien
gtcatgatctctgttctacaggtac

SEQ ID NO: 214300 - DNA, 25 bp, Homo sapien
acaagtgagcagcaccacactactc

SEQ ID NO: 214301 - DNA, 25 bp, Homo sapien
tgtaaggctatattatgtcatgatc

SEQ ID NO: 214302 - DNA, 25 bp, Homo sapien
aagtgagcagcaccacactactcag

SEQ ID NO: 214303 - DNA, 25 bp, Homo sapien
ttctcatccacaacccaaactctgc

SEQ ID NO: 214304 - DNA, 25 bp, Homo sapien
tcttatgtttcttacttaagttcat

SEQ ID NO: 214305 - DNA, 25 bp, Homo sapien
ctcttatgtttcttacttaagttca

SEQ ID NO: 214306 - DNA, 25 bp, Homo sapien
gatattctcatccacaacccaaact

SEQ ID NO: 214307 - DNA, 25 bp, Homo sapien
attcacccagttgaccaagtgaaaa

SEQ ID NO: 214308 - DNA, 25 bp, Homo sapien
tccattgaggctggttaatttctgc

SEQ ID NO: 214309 - DNA, 25 bp, Homo sapien
atccattgaggctggttaatttctg

SEQ ID NO: 214310 - DNA, 25 bp, Homo sapien
ccagttgaccaagtgaaaaaatgca

SEQ ID NO: 214311 - DNA, 25 bp, Homo sapien
gctcgggcaccccttgtaggtcttc

SEQ ID NO: 214312 - DNA, 25 bp, Homo sapien
accttctccagccagtgattgctgg

SEQ ID NO: 214313 - DNA, 25 bp, Homo sapien
cggcagggtcctctcgagccggaac

SEQ ID NO: 214314 - DNA, 25 bp, Homo sapien
aaagcctgacgagaagtcgggagac

SEQ ID NO: 214315 - DNA, 25 bp, Homo sapien
ccaggacgaggctcttccggagccg

SEQ ID NO: 214316 - DNA, 25 bp, Homo sapien
tgatgtatgtttgcgtctagacgtc

SEQ ID NO: 214317 - DNA, 25 bp, Homo sapien
tgactgttagctttcggccctggaa

SEQ ID NO: 214318 - DNA, 25 bp, Homo sapien
ctgggcacaatagcgagagctctac

SEQ ID NO: 214319 - DNA, 25 bp, Homo sapien
tagtttggctcggacgagagcgtct

SEQ ID NO: 214320 - DNA, 25 bp, Homo sapien
tcttagtttttattctggtaaatga

SEQ ID NO: 214321 - DNA, 25 bp, Homo sapien
ctgtaatcaaacttttaattcttag

SEQ ID NO: 214322 - DNA, 25 bp, Homo sapien
taaagactggatggcactggtttgc

SEQ ID NO: 214323 - DNA, 25 bp, Homo sapien
caagaagtactgtgtagtctgctgc

SEQ ID NO: 214324 - DNA, 25 bp, Homo sapien
tgcagtgtggccctcttgaagtgaa

SEQ ID NO: 214325 - DNA, 25 bp, Homo sapien
tagtaactctggcagtaacagaagc

SEQ ID NO: 214326 - DNA, 25 bp, Homo sapien
gcagagacccatgccacatgacagt

SEQ ID NO: 214327 - DNA, 25 bp, Homo sapien
tcattacgagcttgggcagagaccc

SEQ ID NO: 214328 - DNA, 25 bp, Homo sapien
cacagccgccttgctatagtctcat

SEQ ID NO: 214329 - DNA, 25 bp, Homo sapien
agcaggtcacaactgacgtcccaca

SEQ ID NO: 214330 - DNA, 25 bp, Homo sapien
attctctggatctggtatacatctg

SEQ ID NO: 214331 - DNA, 25 bp, Homo sapien
tctggatctggtatacatctggtaa

SEQ ID NO: 214332 - DNA, 25 bp, Homo sapien
tctctggatctggtatacatctggt

SEQ ID NO: 214333 - DNA, 25 bp, Homo sapien
ctctggatctggtatacatctggta

SEQ ID NO: 214334 - DNA, 25 bp, Homo sapien
catcagcatggtcacagtattgaca

SEQ ID NO: 214335 - DNA, 25 bp, Homo sapien
caacaaatggtgctaaggcactgga

SEQ ID NO: 214336 - DNA, 25 bp, Homo sapien
gacatacaaatgaacggaacagaaa

SEQ ID NO: 214337 - DNA, 25 bp, Homo sapien
gggattctgctatggcagccttaac

SEQ ID NO: 214338 - DNA, 25 bp, Homo sapien
tttcttagatatgactgcacaagtg

SEQ ID NO: 214339 - DNA, 25 bp, Homo sapien
tcacagacctatgtaatgctacaac

SEQ ID NO: 214340 - DNA, 25 bp, Homo sapien
aagctttgccctcatacctggatta

SEQ ID NO: 214341 - DNA, 25 bp, Homo sapien
tgttggaaacttagtccctctgcct

SEQ ID NO: 214342 - DNA, 25 bp, Homo sapien
gaaattccacttccatgtacccaag

SEQ ID NO: 214343 - DNA, 25 bp, Homo sapien
aaattccacttccatgtacccaaga

SEQ ID NO: 214344 - DNA, 25 bp, Homo sapien
gatgacccttgataacattaagctg

SEQ ID NO: 214345 - DNA, 25 bp, Homo sapien
cccttgataacattaagctgagtaa

SEQ ID NO: 214346 - DNA, 25 bp, Homo sapien
tccagtaaaggcaaattcttagaga

SEQ ID NO: 214347 - DNA, 25 bp, Homo sapien
tcttgatggtggtctacacggctgc

SEQ ID NO: 214348 - DNA, 25 bp, Homo sapien
tgaattaagaatccatagcacagga

SEQ ID NO: 214349 - DNA, 25 bp, Homo sapien
agcagactagtggttgcaggcagaa

SEQ ID NO: 214350 - DNA, 25 bp, Homo sapien
gatagctggcattcgctcactctag

SEQ ID NO: 214351 - DNA, 25 bp, Homo sapien
ggacaactgttactctttggctgaa

SEQ ID NO: 214352 - DNA, 25 bp, Homo sapien
catgcaacatgtacagagccaggtt

SEQ ID NO: 214353 - DNA, 25 bp, Homo sapien
tgaaattcaggttagcaaagcctcc

SEQ ID NO: 214354 - DNA, 25 bp, Homo sapien
cctttgagcaataaatctcatctgc

SEQ ID NO: 214355 - DNA, 25 bp, Homo sapien
caatagaattaggaatccaaaaaag

SEQ ID NO: 214356 - DNA, 25 bp, Homo sapien
aaatgtagcagttattacaaaagag

SEQ ID NO: 214357 - DNA, 25 bp, Homo sapien
caaaagctatatgagacaatgtact

SEQ ID NO: 214358 - DNA, 25 bp, Homo sapien
tcatgaaagatgagtgccgaaccag

SEQ ID NO: 214359 - DNA, 25 bp, Homo sapien
aaggagaaaagccaccacatccatc

SEQ ID NO: 214360 - DNA, 25 bp, Homo sapien
gaccttctgttaaggcacagtgcag

SEQ ID NO: 214361 - DNA, 25 bp, Homo sapien
gattcccacttagaatctcaagacc

SEQ ID NO: 214362 - DNA, 25 bp, Homo sapien
gccagggtgtacagaatacgtcgta

SEQ ID NO: 214363 - DNA, 25 bp, Homo sapien
ctgtgccagggtgtacagaatacgt

SEQ ID NO: 214364 - DNA, 25 bp, Homo sapien
gggtgtacagaatacgtcgtaacgc

SEQ ID NO: 214365 - DNA, 25 bp, Homo sapien
tacagaatacgtcgtaacgccagag

SEQ ID NO: 214366 - DNA, 25 bp, Homo sapien
cttatttgagctttttacaatgaga

SEQ ID NO: 214367 - DNA, 25 bp, Homo sapien
ttatttgagctttttacaatgagaa

SEQ ID NO: 214368 - DNA, 25 bp, Homo sapien
tatctagtgccagttcaggtccttc

SEQ ID NO: 214369 - DNA, 25 bp, Homo sapien
aaaatcttgacttgcttatgaagcc

SEQ ID NO: 214370 - DNA, 25 bp, Homo sapien
attccaactatagggcacctgtgcc

SEQ ID NO: 214371 - DNA, 25 bp, Homo sapien
aattcctagcacagttcaccctcga

SEQ ID NO: 214372 - DNA, 25 bp, Homo sapien
tgggctctggaaacagtttccattc

SEQ ID NO: 214373 - DNA, 25 bp, Homo sapien
gccacggaagcaggtcctctccagg

SEQ ID NO: 214374 - DNA, 25 bp, Homo sapien
ggtcctctccaggtgatgggctctg

SEQ ID NO: 214375 - DNA, 25 bp, Homo sapien
cagtttccattcctgtggcttttac

SEQ ID NO: 214376 - DNA, 25 bp, Homo sapien
tctgactcatgtctccacattcatt

SEQ ID NO: 214377 - DNA, 25 bp, Homo sapien
ctctctctgactcatgtctccacat

SEQ ID NO: 214378 - DNA, 25 bp, Homo sapien
gactcatgtctccacattcatttcc

SEQ ID NO: 214379 - DNA, 25 bp, Homo sapien
tctctgactcatgtctccacattca

SEQ ID NO: 214380 - DNA, 25 bp, Homo sapien
cctgcaggttatggaagtggatcct

SEQ ID NO: 214381 - DNA, 25 bp, Homo sapien
tagtctccgggccagttcctgggtg

SEQ ID NO: 214382 - DNA, 25 bp, Homo sapien
tgtagaatttctcgccctgcaggtt

SEQ ID NO: 214383 - DNA, 25 bp, Homo sapien
gctagcttgctgtgacagtaggcca

SEQ ID NO: 214384 - DNA, 25 bp, Homo sapien
agcagatgggttaggaggaagtgac

SEQ ID NO: 214385 - DNA, 25 bp, Homo sapien
agcagcagatgggttaggaggaagt

SEQ ID NO: 214386 - DNA, 25 bp, Homo sapien
cagcagatgggttaggaggaagtga

SEQ ID NO: 214387 - DNA, 25 bp, Homo sapien
ctagcagcagatgggttaggaggaa

SEQ ID NO: 214388 - DNA, 25 bp, Homo sapien
tagtctgttaaaaaatgcgccaagg

SEQ ID NO: 214389 - DNA, 25 bp, Homo sapien
ttaaaaagcgggcagaacctggagc

SEQ ID NO: 214390 - DNA, 25 bp, Homo sapien
tattcctcagctatcaggtaggacc

SEQ ID NO: 214391 - DNA, 25 bp, Homo sapien
gatgacctatacctgatgctggcca

SEQ ID NO: 214392 - DNA, 25 bp, Homo sapien
caagtggttgactcctatgtgcatc

SEQ ID NO: 214393 - DNA, 25 bp, Homo sapien
tcctatgtgcatctcaaagccatct

SEQ ID NO: 214394 - DNA, 25 bp, Homo sapien
tcttcgagtacggacacatcatcac

SEQ ID NO: 214395 - DNA, 25 bp, Homo sapien
ttgttgatcaaaacgtggaggtgct

SEQ ID NO: 214396 - DNA, 25 bp, Homo sapien
tgtagttcaggagctacttactcac

SEQ ID NO: 214397 - DNA, 25 bp, Homo sapien
taccaaatgaccttccagatccttg

SEQ ID NO: 214398 - DNA, 25 bp, Homo sapien
taagactttagttgaatcccaccta

SEQ ID NO: 214399 - DNA, 25 bp, Homo sapien
tagaaagctgcctcacgctcaggct

SEQ ID NO: 214400 - DNA, 25 bp, Homo sapien
tatcagacaggtccagtttccgcac

SEQ ID NO: 214401 - DNA, 25 bp, Homo sapien
aagctcgaatagacttagtatcaga

SEQ ID NO: 214402 - DNA, 25 bp, Homo sapien
agacaggtccagtttccgcaccaac

SEQ ID NO: 214403 - DNA, 25 bp, Homo sapien
gaagcccttagcaaaagctcgaata

SEQ ID NO: 214404 - DNA, 25 bp, Homo sapien
cggcaagctaaatatactcgagctc

SEQ ID NO: 214405 - DNA, 25 bp, Homo sapien
ctggttccctgtcgtggtctggatc

SEQ ID NO: 214406 - DNA, 25 bp, Homo sapien
ccttttccacatcccggcaagctaa

SEQ ID NO: 214407 - DNA, 25 bp, Homo sapien
tggttccctgtcgtggtctggatct

SEQ ID NO: 214408 - DNA, 25 bp, Homo sapien
acatatgaaagagaaatggtcagct

SEQ ID NO: 214409 - DNA, 25 bp, Homo sapien
cattaagggtccattatatgtagag

SEQ ID NO: 214410 - DNA, 25 bp, Homo sapien
gcaaatcagtggaatccttaggtgt

SEQ ID NO: 214411 - DNA, 25 bp, Homo sapien
tatgtagagcatagtactagtttca

SEQ ID NO: 214412 - DNA, 25 bp, Homo sapien
catagtactagtttcagatcagcaa

SEQ ID NO: 214413 - DNA, 25 bp, Homo sapien
aataggagggaattgaaaggaggtg

SEQ ID NO: 214414 - DNA, 25 bp, Homo sapien
agtaataggagggaattgaaaggag

SEQ ID NO: 214415 - DNA, 25 bp, Homo sapien
caggaagctgaacagttgatgtaca

SEQ ID NO: 214416 - DNA, 25 bp, Homo sapien
tcccaggaagctgaacagttgatgt

SEQ ID NO: 214417 - DNA, 25 bp, Homo sapien
ctgtgaccacaactactttcccagg

SEQ ID NO: 214418 - DNA, 25 bp, Homo sapien
ttcccaggaagctgaacagttgatg

SEQ ID NO: 214419 - DNA, 25 bp, Homo sapien
gaatcgctcctttgtacctcgaagg

SEQ ID NO: 214420 - DNA, 25 bp, Homo sapien
gattgctatcagtttcagagggcga

SEQ ID NO: 214421 - DNA, 25 bp, Homo sapien
ttagaaccaataagcaggctgccgg

SEQ ID NO: 214422 - DNA, 25 bp, Homo sapien
ggcagattaactcatggtccccaca

SEQ ID NO: 214423 - DNA, 25 bp, Homo sapien
cctcgggattccctggagccagaat

SEQ ID NO: 214424 - DNA, 25 bp, Homo sapien
ttccctggagccagaatcagggggt

SEQ ID NO: 214425 - DNA, 25 bp, Homo sapien
ggattccctggagccagaatcaggg

SEQ ID NO: 214426 - DNA, 25 bp, Homo sapien
tcgggattccctggagccagaatca

SEQ ID NO: 214427 - DNA, 25 bp, Homo sapien
gaaaagcagtgtgccccggactgcc

SEQ ID NO: 214428 - DNA, 25 bp, Homo sapien
gggaaaagcagtgtgccccggactg

SEQ ID NO: 214429 - DNA, 25 bp, Homo sapien
agtgtgccccggactgccgcccttt

SEQ ID NO: 214430 - DNA, 25 bp, Homo sapien
tgtgccccggactgccgccctttct

SEQ ID NO: 214431 - DNA, 25 bp, Homo sapien
cgcctggggtctcgggtgtcctcct

SEQ ID NO: 214432 - DNA, 25 bp, Homo sapien
ggacagctggacctcgcctccaacc

SEQ ID NO: 214433 - DNA, 25 bp, Homo sapien
gggtctcgggtgtcctcctggcacc

SEQ ID NO: 214434 - DNA, 25 bp, Homo sapien
acagctggacctcgcctccaaccca

SEQ ID NO: 214435 - DNA, 25 bp, Homo sapien
gaactctgggctccgccatcttgga

SEQ ID NO: 214436 - DNA, 25 bp, Homo sapien
gctttggtggggattctatgtttcc

SEQ ID NO: 214437 - DNA, 25 bp, Homo sapien
gccccgcaacaagaattctcaagag

SEQ ID NO: 214438 - DNA, 25 bp, Homo sapien
agaaagctttggtggggattctatg

SEQ ID NO: 214439 - DNA, 25 bp, Homo sapien
tttggggcgcagccatatacagaag

SEQ ID NO: 214440 - DNA, 25 bp, Homo sapien
gatttggggcgcagccatatacaga

SEQ ID NO: 214441 - DNA, 25 bp, Homo sapien
ctgatttggggcgcagccatataca

SEQ ID NO: 214442 - DNA, 25 bp, Homo sapien
gagcaacagcgggaacatgagctca

SEQ ID NO: 214443 - DNA, 25 bp, Homo sapien
ctctgccggctgcagcggcaccaga

SEQ ID NO: 214444 - DNA, 25 bp, Homo sapien
cagcggcaccagagcgggatgctcc

SEQ ID NO: 214445 - DNA, 25 bp, Homo sapien
tctgccggctgcagcggcaccagag

SEQ ID NO: 214446 - DNA, 25 bp, Homo sapien
cggcaccagagcgggatgctccagc

SEQ ID NO: 214447 - DNA, 25 bp, Homo sapien
tcgccgactatggcttctctttcta

SEQ ID NO: 214448 - DNA, 25 bp, Homo sapien
tgctcgccgactatggcttctcttt

SEQ ID NO: 214449 - DNA, 25 bp, Homo sapien
gttgctcgccgactatggcttctct

SEQ ID NO: 214450 - DNA, 25 bp, Homo sapien
gctcgccgactatggcttctctttc

SEQ ID NO: 214451 - DNA, 25 bp, Homo sapien
gatgacagcgtacaggctaaaatgt

SEQ ID NO: 214452 - DNA, 25 bp, Homo sapien
gagtgcctcacgataagattcttta

SEQ ID NO: 214453 - DNA, 25 bp, Homo sapien
ccagtaagatacaccaacaaagttg

SEQ ID NO: 214454 - DNA, 25 bp, Homo sapien
gttttatgcacaagacaatcagtaa

SEQ ID NO: 214455 - DNA, 25 bp, Homo sapien
gatggtacgtgatgctcttgtttcc

SEQ ID NO: 214456 - DNA, 25 bp, Homo sapien
tcgctagccgaggtaagtgtttccc

SEQ ID NO: 214457 - DNA, 25 bp, Homo sapien
tagtggtgatcactggcgccaacac

SEQ ID NO: 214458 - DNA, 25 bp, Homo sapien
caacacgggcattggcaaggagacg

SEQ ID NO: 214459 - DNA, 25 bp, Homo sapien
tacaagcacgcaatatcacgcctgg

SEQ ID NO: 214460 - DNA, 25 bp, Homo sapien
gtccacatggtgatctgagctacag

SEQ ID NO: 214461 - DNA, 25 bp, Homo sapien
tggatgtggatgtgcccctttaacc

SEQ ID NO: 214462 - DNA, 25 bp, Homo sapien
tgaggtccaaggaaatggccagcta

SEQ ID NO: 214463 - DNA, 25 bp, Homo sapien
aatagaaggacctcgaaccaggcac

SEQ ID NO: 214464 - DNA, 25 bp, Homo sapien
tgtgtccctgatctaattgtgccct

SEQ ID NO: 214465 - DNA, 25 bp, Homo sapien
gccaggagtggtacctgctgaatcc

SEQ ID NO: 214466 - DNA, 25 bp, Homo sapien
cctgttcaaattccgcctggccagg

SEQ ID NO: 214467 - DNA, 25 bp, Homo sapien
gaaggcaatgcggttctctccacca

SEQ ID NO: 214468 - DNA, 25 bp, Homo sapien
aagactgtcgctgttggttatgcca

SEQ ID NO: 214469 - DNA, 25 bp, Homo sapien
ccctttgtcaagacggcacgggagg

SEQ ID NO: 214470 - DNA, 25 bp, Homo sapien
gaacgtcctctctcttcggtgtgaa

SEQ ID NO: 214471 - DNA, 25 bp, Homo sapien
cttctctagtaacgaactatagaaa

SEQ ID NO: 214472 - DNA, 25 bp, Homo sapien
gtccatactctacacattcagagaa

SEQ ID NO: 214473 - DNA, 25 bp, Homo sapien
tccatactctacacattcagagaaa

SEQ ID NO: 214474 - DNA, 25 bp, Homo sapien
gaaatgatccctcaaagtatagttt

SEQ ID NO: 214475 - DNA, 25 bp, Homo sapien
ttgagttctgcttgccccaaagacc

SEQ ID NO: 214476 - DNA, 25 bp, Homo sapien
catatgcctgaagtgggtggcaaga

SEQ ID NO: 214477 - DNA, 25 bp, Homo sapien
gatgccactgtccatggctcaagta

SEQ ID NO: 214478 - DNA, 25 bp, Homo sapien
cacctggtttcaaagattgacaatt

SEQ ID NO: 214479 - DNA, 25 bp, Homo sapien
aatgcttgggcgtaaacatcagcgc

SEQ ID NO: 214480 - DNA, 25 bp, Homo sapien
tgaaaggtcctatccttgcccggga

SEQ ID NO: 214481 - DNA, 25 bp, Homo sapien
tatacaaacaggacaacccgggtca

SEQ ID NO: 214482 - DNA, 25 bp, Homo sapien
gctactaaagcacgtccacagaggg

SEQ ID NO: 214483 - DNA, 25 bp, Homo sapien
tcacagcaatcaagtaggcagaacg

SEQ ID NO: 214484 - DNA, 25 bp, Homo sapien
tgcaacatatcaggtaggcccgaac

SEQ ID NO: 214485 - DNA, 25 bp, Homo sapien
ggcacagatgtcttgcactactgca

SEQ ID NO: 214486 - DNA, 25 bp, Homo sapien
gctgcacctgctggacaagggctgt

SEQ ID NO: 214487 - DNA, 25 bp, Homo sapien
acagcggaaaggcatccatcaccga

SEQ ID NO: 214488 - DNA, 25 bp, Homo sapien
tcagttataagagacagcggaaagg

SEQ ID NO: 214489 - DNA, 25 bp, Homo sapien
gcatccatcaccgacaaatcaagta

SEQ ID NO: 214490 - DNA, 25 bp, Homo sapien
gtcagttataagagacagcggaaag

SEQ ID NO: 214491 - DNA, 25 bp, Homo sapien
gaaagctcgggcagacagacaccat

SEQ ID NO: 214492 - DNA, 25 bp, Homo sapien
agaaagctcgggcagacagacacca

SEQ ID NO: 214493 - DNA, 25 bp, Homo sapien
ctgcagcagaaagctcgggcagaca

SEQ ID NO: 214494 - DNA, 25 bp, Homo sapien
cagcagaaagctcgggcagacagac

SEQ ID NO: 214495 - DNA, 25 bp, Homo sapien
tatgcgtatgtgtctatgtcccagg

SEQ ID NO: 214496 - DNA, 25 bp, Homo sapien
cagcttggtggagacaaaagtccct

SEQ ID NO: 214497 - DNA, 25 bp, Homo sapien
tatctcatgaatccccagcttggtg

SEQ ID NO: 214498 - DNA, 25 bp, Homo sapien
gacctgatttgactctgcctgcttg

SEQ ID NO: 214499 - DNA, 25 bp, Homo sapien
tctggagaccgagacattgttggac

SEQ ID NO: 214500 - DNA, 25 bp, Homo sapien
ggacgagttctttggcccctgagga

SEQ ID NO: 214501 - DNA, 25 bp, Homo sapien
taaagacttgggaaggcaaagacgc

SEQ ID NO: 214502 - DNA, 25 bp, Homo sapien
agggatttcctagggctctctgaga

SEQ ID NO: 214503 - DNA, 25 bp, Homo sapien
ccagcgtttggagacaattccgctc

SEQ ID NO: 214504 - DNA, 25 bp, Homo sapien
caccagcgtttggagacaattccgc

SEQ ID NO: 214505 - DNA, 25 bp, Homo sapien
agcgtttggagacaattccgctcac

SEQ ID NO: 214506 - DNA, 25 bp, Homo sapien
tcaccagcgtttggagacaattccg

SEQ ID NO: 214507 - DNA, 25 bp, Homo sapien
attgtgtattgcctggatcaggccc

SEQ ID NO: 214508 - DNA, 25 bp, Homo sapien
atcattgtgtattgcctggatcagg

SEQ ID NO: 214509 - DNA, 25 bp, Homo sapien
tgtgtattgcctggatcaggccctc

SEQ ID NO: 214510 - DNA, 25 bp, Homo sapien
gtattgcctggatcaggccctccag

SEQ ID NO: 214511 - DNA, 25 bp, Homo sapien
gatcccactattgatagcaaaggaa

SEQ ID NO: 214512 - DNA, 25 bp, Homo sapien
cacactaagtatgtatcagcgtaat

SEQ ID NO: 214513 - DNA, 25 bp, Homo sapien
ggatcatgaacttagtgcaagcact

SEQ ID NO: 214514 - DNA, 25 bp, Homo sapien
gcaagcactaagttctcacactaag

SEQ ID NO: 214515 - DNA, 25 bp, Homo sapien
tgaacgcttccaggcagttgaggag

SEQ ID NO: 214516 - DNA, 25 bp, Homo sapien
ctgacacatttgagcagttgctgga

SEQ ID NO: 214517 - DNA, 25 bp, Homo sapien
gatggtgtccccgtcacttttggct

SEQ ID NO: 214518 - DNA, 25 bp, Homo sapien
ggcagctctgcagtaggtcatggca

SEQ ID NO: 214519 - DNA, 25 bp, Homo sapien
ctgcagaacacggaaagcaattcca

SEQ ID NO: 214520 - DNA, 25 bp, Homo sapien
tgcagaacacggaaagcaattccaa

SEQ ID NO: 214521 - DNA, 25 bp, Homo sapien
ccatctgcagctgaagtgtgttcat

SEQ ID NO: 214522 - DNA, 25 bp, Homo sapien
cttgcaggcaacatccattttcatg

SEQ ID NO: 214523 - DNA, 25 bp, Homo sapien
cagcactttcgcaccgatgcaagaa

SEQ ID NO: 214524 - DNA, 25 bp, Homo sapien
gcaaagtggtgatttgagaggtccc

SEQ ID NO: 214525 - DNA, 25 bp, Homo sapien
tccttccagagctgcgggatgtttc

SEQ ID NO: 214526 - DNA, 25 bp, Homo sapien
ggtccttggccttaagtagccatga

SEQ ID NO: 214527 - DNA, 25 bp, Homo sapien
tgtgactgaagaaccgaatacaggt

SEQ ID NO: 214528 - DNA, 25 bp, Homo sapien
aatacaggtcatggcggcccgaact

SEQ ID NO: 214529 - DNA, 25 bp, Homo sapien
tctccaaggttggatcaatggattc

SEQ ID NO: 214530 - DNA, 25 bp, Homo sapien
caaagtgtgtagcttcccactttta

SEQ ID NO: 214531 - DNA, 25 bp, Homo sapien
caatggattctagcaagttctccaa

SEQ ID NO: 214532 - DNA, 25 bp, Homo sapien
tgctgcagctcatacagaatgtggt

SEQ ID NO: 214533 - DNA, 25 bp, Homo sapien
tatgtgtcacagatacctttgagaa

SEQ ID NO: 214534 - DNA, 25 bp, Homo sapien
gaatctcattctagcgactgcttca

SEQ ID NO: 214535 - DNA, 25 bp, Homo sapien
cactgtctgggatccactctgaatt

SEQ ID NO: 214536 - DNA, 25 bp, Homo sapien
ttttacagagaagcccctagacagg

SEQ ID NO: 214537 - DNA, 25 bp, Homo sapien
gaataacagttgtgcagagtcccct

SEQ ID NO: 214538 - DNA, 25 bp, Homo sapien
tattgtcccgcttaaggctgagtgg

SEQ ID NO: 214539 - DNA, 25 bp, Homo sapien
gatggccccatagctcaacacaggg

SEQ ID NO: 214540 - DNA, 25 bp, Homo sapien
tactgctaaactcatctggaaactg

SEQ ID NO: 214541 - DNA, 25 bp, Homo sapien
aaaggctctgcgtccgaagggtagc

SEQ ID NO: 214542 - DNA, 25 bp, Homo sapien
ggtagcttccagttccctcagggtg

SEQ ID NO: 214543 - DNA, 25 bp, Homo sapien
ggcagctgtgcctcacgtagaagct

SEQ ID NO: 214544 - DNA, 25 bp, Homo sapien
ccaggttggtgctatagttgtgcag

SEQ ID NO: 214545 - DNA, 25 bp, Homo sapien
gacactgttagctgaatttccactg

SEQ ID NO: 214546 - DNA, 25 bp, Homo sapien
cactaatcagtctgtgtatgggatt

SEQ ID NO: 214547 - DNA, 25 bp, Homo sapien
tcaccagaattttaacactaatcag

SEQ ID NO: 214548 - DNA, 25 bp, Homo sapien
ggtcattgctattcctgggtctccc

SEQ ID NO: 214549 - DNA, 25 bp, Homo sapien
tatcaagcccagtctttgtggagac

SEQ ID NO: 214550 - DNA, 25 bp, Homo sapien
tctcccgtgcagcagtgaggttccc

SEQ ID NO: 214551 - DNA, 25 bp, Homo sapien
agacagcgactgaacttctcccgtg

SEQ ID NO: 214552 - DNA, 25 bp, Homo sapien
tgagccatgattcagctgattgagg

SEQ ID NO: 214553 - DNA, 25 bp, Homo sapien
ctggttccttagcctggttactgca

SEQ ID NO: 214554 - DNA, 25 bp, Homo sapien
tactcggcttccaaaagctggttcc

SEQ ID NO: 214555 - DNA, 25 bp, Homo sapien
caaagatggcacgtggcgataggca

SEQ ID NO: 214556 - DNA, 25 bp, Homo sapien
tcaacgcccagttggtagtactcgg

SEQ ID NO: 214557 - DNA, 25 bp, Homo sapien
gggtatttgaggcaaggcctttaca

SEQ ID NO: 214558 - DNA, 25 bp, Homo sapien
cataacctaggtgggtagaaggcta

SEQ ID NO: 214559 - DNA, 25 bp, Homo sapien
aaggcctttacactgtatgttaggg

SEQ ID NO: 214560 - DNA, 25 bp, Homo sapien
gaacatattactgtcgttaagcaat

SEQ ID NO: 214561 - DNA, 25 bp, Homo sapien
gctgccctgagcctaaaaatggata

SEQ ID NO: 214562 - DNA, 25 bp, Homo sapien
taagtgatttgcatggcgacacatg

SEQ ID NO: 214563 - DNA, 25 bp, Homo sapien
tcaaagacgcgcaagacaccttggg

SEQ ID NO: 214564 - DNA, 25 bp, Homo sapien
cattgctgtaaactgtcaaagacgc

SEQ ID NO: 214565 - DNA, 25 bp, Homo sapien
gctggctagaaactgctcctgtgta

SEQ ID NO: 214566 - DNA, 25 bp, Homo sapien
tgtaaaagaatagagacccactgcc

SEQ ID NO: 214567 - DNA, 25 bp, Homo sapien
tagagtaaactctgctttgagggtc

SEQ ID NO: 214568 - DNA, 25 bp, Homo sapien
tgagatctggcaacaccgtttcatc

SEQ ID NO: 214569 - DNA, 25 bp, Homo sapien
ggctctggccggctttgacgaacat

SEQ ID NO: 214570 - DNA, 25 bp, Homo sapien
atgtccgtgagcagcccggcatcca

SEQ ID NO: 214571 - DNA, 25 bp, Homo sapien
tcccggtgcagattcaggatggcaa

SEQ ID NO: 214572 - DNA, 25 bp, Homo sapien
gcagtgctcaatcagctggtgacca

SEQ ID NO: 214573 - DNA, 25 bp, Homo sapien
tatccttcccctttcaaaaggctga

SEQ ID NO: 214574 - DNA, 25 bp, Homo sapien
cctttcaaaaggctgaaagaccctg

SEQ ID NO: 214575 - DNA, 25 bp, Homo sapien
tttcaaaaggctgaaagaccctgga

SEQ ID NO: 214576 - DNA, 25 bp, Homo sapien
ttcaaaaggctgaaagaccctggaa

SEQ ID NO: 214577 - DNA, 25 bp, Homo sapien
atttcttgtcatactgctacacatc

SEQ ID NO: 214578 - DNA, 25 bp, Homo sapien
aagaaacttaagtgaccattgcatt

SEQ ID NO: 214579 - DNA, 25 bp, Homo sapien
tcatactgctacacatcataaagaa

SEQ ID NO: 214580 - DNA, 25 bp, Homo sapien
gaaacttaagtgaccattgcatttt

SEQ ID NO: 214581 - DNA, 25 bp, Homo sapien
cacaaacgagtatggagggctttca

SEQ ID NO: 214582 - DNA, 25 bp, Homo sapien
gggactctcaccacaaacgagtatg

SEQ ID NO: 214583 - DNA, 25 bp, Homo sapien
agtaaaattcactccgcaccagctc

SEQ ID NO: 214584 - DNA, 25 bp, Homo sapien
ccaaaatccattccacctcatctgc

SEQ ID NO: 214585 - DNA, 25 bp, Homo sapien
ggtttttctgaaggctcctctggta

SEQ ID NO: 214586 - DNA, 25 bp, Homo sapien
cttctggtttttctgaaggctcctc

SEQ ID NO: 214587 - DNA, 25 bp, Homo sapien
tttttctgaaggctcctctggtaca

SEQ ID NO: 214588 - DNA, 25 bp, Homo sapien
ctggtttttctgaaggctcctctgg

SEQ ID NO: 214589 - DNA, 25 bp, Homo sapien
cggaagggtgcagcggtcaataata

SEQ ID NO: 214590 - DNA, 25 bp, Homo sapien
ctgcggaagggtgcagcggtcaata

SEQ ID NO: 214591 - DNA, 25 bp, Homo sapien
aagggtgcagcggtcaataatagca

SEQ ID NO: 214592 - DNA, 25 bp, Homo sapien
gggtgcagcggtcaataatagcaac

SEQ ID NO: 214593 - DNA, 25 bp, Homo sapien
agcactgatcacacacacgagcagg

SEQ ID NO: 214594 - DNA, 25 bp, Homo sapien
tagcactgatcacacacacgagcag

SEQ ID NO: 214595 - DNA, 25 bp, Homo sapien
atagcactgatcacacacacgagca

SEQ ID NO: 214596 - DNA, 25 bp, Homo sapien
ttgcagtaactatagcactgatcac

SEQ ID NO: 214597 - DNA, 25 bp, Homo sapien
ggcgacaatgatgacgcctgttaaa

SEQ ID NO: 214598 - DNA, 25 bp, Homo sapien
ggccacagcggcgacaatgatgacg

SEQ ID NO: 214599 - DNA, 25 bp, Homo sapien
cacagcggcgacaatgatgacgcct

SEQ ID NO: 214600 - DNA, 25 bp, Homo sapien
cagcggcgacaatgatgacgcctgt

SEQ ID NO: 214601 - DNA, 25 bp, Homo sapien
tacatggtattaactaccagtggct

SEQ ID NO: 214602 - DNA, 25 bp, Homo sapien
tatactttctaagaacaccaactgc

SEQ ID NO: 214603 - DNA, 25 bp, Homo sapien
agagaaggggagattgccatcaatc

SEQ ID NO: 214604 - DNA, 25 bp, Homo sapien
aactgcttgggtctctattggaaaa

SEQ ID NO: 214605 - DNA, 25 bp, Homo sapien
tccttgccctcaaaaattgaatgtt

SEQ ID NO: 214606 - DNA, 25 bp, Homo sapien
ccttgccctcaaaaattgaatgttt

SEQ ID NO: 214607 - DNA, 25 bp, Homo sapien
gtccttgccctcaaaaattgaatgt

SEQ ID NO: 214608 - DNA, 25 bp, Homo sapien
cccaaggttattttagcaggtgcca

SEQ ID NO: 214609 - DNA, 25 bp, Homo sapien
tttgcgatagctcctgacaagttct

SEQ ID NO: 214610 - DNA, 25 bp, Homo sapien
gttctacttgtgtatggaggcaaca

SEQ ID NO: 214611 - DNA, 25 bp, Homo sapien
gcaaaggtgcgaagtcatggagctt

SEQ ID NO: 214612 - DNA, 25 bp, Homo sapien
agtacactccgtgtctgttgttccc

SEQ ID NO: 214613 - DNA, 25 bp, Homo sapien
gactcaggggtttagtgtacagatt

SEQ ID NO: 214614 - DNA, 25 bp, Homo sapien
cagtggatgggcatcaaagtgactt

SEQ ID NO: 214615 - DNA, 25 bp, Homo sapien
gcatggtacctagcagtttttcttc

SEQ ID NO: 214616 - DNA, 25 bp, Homo sapien
tacaagtaggcacatgagaccaaaa

SEQ ID NO: 214617 - DNA, 25 bp, Homo sapien
tgagggtgtctactacctgtctgaa

SEQ ID NO: 214618 - DNA, 25 bp, Homo sapien
tgtcaaagacatgggagccagaaac

SEQ ID NO: 214619 - DNA, 25 bp, Homo sapien
agtgcatataaccactgctgggtca

SEQ ID NO: 214620 - DNA, 25 bp, Homo sapien
tgacagtggagaccgatgctgctta

SEQ ID NO: 214621 - DNA, 25 bp, Homo sapien
gtgacagtggagaccgatgctgctt

SEQ ID NO: 214622 - DNA, 25 bp, Homo sapien
gacagtggagaccgatgctgcttac

SEQ ID NO: 214623 - DNA, 25 bp, Homo sapien
gcagcagaccatgcagatactctca

SEQ ID NO: 214624 - DNA, 25 bp, Homo sapien
tcatccggtacccactggtgcctgg

SEQ ID NO: 214625 - DNA, 25 bp, Homo sapien
gcacaaattcctgtgagggctgggt

SEQ ID NO: 214626 - DNA, 25 bp, Homo sapien
tactctcagtctcatccggtaccca

SEQ ID NO: 214627 - DNA, 25 bp, Homo sapien
ctaggggaatgtatactggagatac

SEQ ID NO: 214628 - DNA, 25 bp, Homo sapien
actctgctgatggtgatctagggag

SEQ ID NO: 214629 - DNA, 25 bp, Homo sapien
gatggtgatctagggagggtctcgg

SEQ ID NO: 214630 - DNA, 25 bp, Homo sapien
tctgctgatggtgatctagggaggg

SEQ ID NO: 214631 - DNA, 25 bp, Homo sapien
gctgatggtgatctagggagggtct

SEQ ID NO: 214632 - DNA, 25 bp, Homo sapien
ctgcagcctggtggacaatttcttg

SEQ ID NO: 214633 - DNA, 25 bp, Homo sapien
tgcagcctggtggacaatttcttgg

SEQ ID NO: 214634 - DNA, 25 bp, Homo sapien
gcagcctggtggacaatttcttgga

SEQ ID NO: 214635 - DNA, 25 bp, Homo sapien
tccctctgagggtatggaaagtcca

SEQ ID NO: 214636 - DNA, 25 bp, Homo sapien
ctcgtccatagtgaagccaatctcc

SEQ ID NO: 214637 - DNA, 25 bp, Homo sapien
aatccaccttcatgttcataagcag

SEQ ID NO: 214638 - DNA, 25 bp, Homo sapien
ggaaagcagtgagtccacctcgtcc

SEQ ID NO: 214639 - DNA, 25 bp, Homo sapien
gcctggatttcacggtgtatcctta

SEQ ID NO: 214640 - DNA, 25 bp, Homo sapien
tacagcgcctggatttcacggtgta

SEQ ID NO: 214641 - DNA, 25 bp, Homo sapien
cagcgcctggatttcacggtgtatc

SEQ ID NO: 214642 - DNA, 25 bp, Homo sapien
gcgcctggatttcacggtgtatcct

SEQ ID NO: 214643 - DNA, 25 bp, Homo sapien
tacagcgcctggatttcacggtgtc

SEQ ID NO: 214644 - DNA, 25 bp, Homo sapien
cgagggattgctctgtcacttcaag

SEQ ID NO: 214645 - DNA, 25 bp, Homo sapien
cagtcagttgtccatagaagtgggt

SEQ ID NO: 214646 - DNA, 25 bp, Homo sapien
tgctggtcgagggattgctctgtca

SEQ ID NO: 214647 - DNA, 25 bp, Homo sapien
ggctgattaaatgttctcttggaat

SEQ ID NO: 214648 - DNA, 25 bp, Homo sapien
gaatggggtacaggcagccccactc

SEQ ID NO: 214649 - DNA, 25 bp, Homo sapien
tcttggaatggggtacaggcagccc

SEQ ID NO: 214650 - DNA, 25 bp, Homo sapien
agatgcttttgatgaaggctgatta

SEQ ID NO: 214651 - DNA, 25 bp, Homo sapien
acatgccttcaacccctttacatga

SEQ ID NO: 214652 - DNA, 25 bp, Homo sapien
acccctttacatgactgcctgattc

SEQ ID NO: 214653 - DNA, 25 bp, Homo sapien
tgccttcaacccctttacatgactg

SEQ ID NO: 214654 - DNA, 25 bp, Homo sapien
ttcaacccctttacatgactgcctg

SEQ ID NO: 214655 - DNA, 25 bp, Homo sapien
gaatcatgttcatgacagttgatgg

SEQ ID NO: 214656 - DNA, 25 bp, Homo sapien
tgatgggtcctcaacacaacagctc

SEQ ID NO: 214657 - DNA, 25 bp, Homo sapien
tcacaccacactgggggagactgca

SEQ ID NO: 214658 - DNA, 25 bp, Homo sapien
aaggtctgccagtcacaccacactg

SEQ ID NO: 214659 - DNA, 25 bp, Homo sapien
ggccagccgacttctcagagatgca

SEQ ID NO: 214660 - DNA, 25 bp, Homo sapien
tgtccacaaactgtagggccagccg

SEQ ID NO: 214661 - DNA, 25 bp, Homo sapien
cagccgtgtctgaaatgcagtaggc

SEQ ID NO: 214662 - DNA, 25 bp, Homo sapien
cactttagtccttcttggacagccg

SEQ ID NO: 214663 - DNA, 25 bp, Homo sapien
tgtgataatatacccagtgaatacc

SEQ ID NO: 214664 - DNA, 25 bp, Homo sapien
tctctagagttaccgtgaggattaa

SEQ ID NO: 214665 - DNA, 25 bp, Homo sapien
tggacttgggttctaagctctactc

SEQ ID NO: 214666 - DNA, 25 bp, Homo sapien
aaagggaggcatagcattctgctca

SEQ ID NO: 214667 - DNA, 25 bp, Homo sapien
tttgagcgtgacttaagaaaggcca

SEQ ID NO: 214668 - DNA, 25 bp, Homo sapien
tcactcagtacatctagggcaatgg

SEQ ID NO: 214669 - DNA, 25 bp, Homo sapien
ggaattgttccagaaggcgctcaca

SEQ ID NO: 214670 - DNA, 25 bp, Homo sapien
gcaggccaccgtagctaggagcttt

SEQ ID NO: 214671 - DNA, 25 bp, Homo sapien
aattcagtcaggaagaaatccccac

SEQ ID NO: 214672 - DNA, 25 bp, Homo sapien
ttatgtcccacttgcattctctgag

SEQ ID NO: 214673 - DNA, 25 bp, Homo sapien
tgacaaactgccttccgacagaggc

SEQ ID NO: 214674 - DNA, 25 bp, Homo sapien
tatacatgctaaaggtatcgagaga

SEQ ID NO: 214675 - DNA, 25 bp, Homo sapien
agttgggaagagctctgttgcagca

SEQ ID NO: 214676 - DNA, 25 bp, Homo sapien
gacaccagttgggaagagctctgtt

SEQ ID NO: 214677 - DNA, 25 bp, Homo sapien
accagttgggaagagctctgttgca

SEQ ID NO: 214678 - DNA, 25 bp, Homo sapien
agatgtgacaccagttgggaagagc

SEQ ID NO: 214679 - DNA, 25 bp, Homo sapien
cagagctcaaactttgaaggagaac

SEQ ID NO: 214680 - DNA, 25 bp, Homo sapien
gcccaagtagtccatctgcctgctg

SEQ ID NO: 214681 - DNA, 25 bp, Homo sapien
ctgcagcaagggtgctgcagtaact

SEQ ID NO: 214682 - DNA, 25 bp, Homo sapien
aactgaagaaggtgcccaagtagtc

SEQ ID NO: 214683 - DNA, 25 bp, Homo sapien
cagttcagtgatgctgcaccgtgga

SEQ ID NO: 214684 - DNA, 25 bp, Homo sapien
ggccagcacatctgaagcagttcag

SEQ ID NO: 214685 - DNA, 25 bp, Homo sapien
cagtgactgaaggacctgatctagc

SEQ ID NO: 214686 - DNA, 25 bp, Homo sapien
acagtcctcgcttaggctgggccag

SEQ ID NO: 214687 - DNA, 25 bp, Homo sapien
cataagcagataattgagactctta

SEQ ID NO: 214688 - DNA, 25 bp, Homo sapien
gatttggtttgactggctgacataa

SEQ ID NO: 214689 - DNA, 25 bp, Homo sapien
tttggtttgactggctgacataagc

SEQ ID NO: 214690 - DNA, 25 bp, Homo sapien
gtttgactggctgacataagcagat

SEQ ID NO: 214691 - DNA, 25 bp, Homo sapien
aggagtacgtggtctatccgtcgac

SEQ ID NO: 214692 - DNA, 25 bp, Homo sapien
tcagcatttaggagtacgtggtcta

SEQ ID NO: 214693 - DNA, 25 bp, Homo sapien
ctggaaaacctcgaatgccatcagc

SEQ ID NO: 214694 - DNA, 25 bp, Homo sapien
cctcgaatgccatcagcatttagga

SEQ ID NO: 214695 - DNA, 25 bp, Homo sapien
cacgtcagagatagagtaaaacacc

SEQ ID NO: 214696 - DNA, 25 bp, Homo sapien
gagcaagctaggtcaaatgcagcca

SEQ ID NO: 214697 - DNA, 25 bp, Homo sapien
tagagccgtgcttatccaaaagtcc

SEQ ID NO: 214698 - DNA, 25 bp, Homo sapien
ttgagcagcttgtcagtcacgtcag

SEQ ID NO: 214699 - DNA, 25 bp, Homo sapien
ggccactgccagttctccgaatggt

SEQ ID NO: 214700 - DNA, 25 bp, Homo sapien
ggtagcgctccatgaacatcagttc

SEQ ID NO: 214701 - DNA, 25 bp, Homo sapien
tctacttgggccagttcttggatca

SEQ ID NO: 214702 - DNA, 25 bp, Homo sapien
ccaatggcctgtagagttgagcggc

SEQ ID NO: 214703 - DNA, 25 bp, Homo sapien
tccggccagacatggcactcagact

SEQ ID NO: 214704 - DNA, 25 bp, Homo sapien
tgatgggcttctgcgaagttcccgc

SEQ ID NO: 214705 - DNA, 25 bp, Homo sapien
atctactgtgcagctcattccggcc

SEQ ID NO: 214706 - DNA, 25 bp, Homo sapien
aaggatgcaggatgccagcagtgac

SEQ ID NO: 214707 - DNA, 25 bp, Homo sapien
gggtttgaacctctgtctcggccat

SEQ ID NO: 214708 - DNA, 25 bp, Homo sapien
cttgtgctcagctcactacttgtac

SEQ ID NO: 214709 - DNA, 25 bp, Homo sapien
gctcagctcactacttgtactttcc

SEQ ID NO: 214710 - DNA, 25 bp, Homo sapien
tgtactttccagggatgggtttgaa

SEQ ID NO: 214711 - DNA, 25 bp, Homo sapien
cacttgcctagtgcatgggaatgag

SEQ ID NO: 214712 - DNA, 25 bp, Homo sapien
tagagcagcatctggcatacaatga

SEQ ID NO: 214713 - DNA, 25 bp, Homo sapien
tgatacccatatagatctgacctag

SEQ ID NO: 214714 - DNA, 25 bp, Homo sapien
cgtgccaggccgaagaaaggatttt

SEQ ID NO: 214715 - DNA, 25 bp, Homo sapien
tgtggcaggctggtatcttcgggaa

SEQ ID NO: 214716 - DNA, 25 bp, Homo sapien
gagactggggtgacgtgtggcaggc

SEQ ID NO: 214717 - DNA, 25 bp, Homo sapien
tcttgtccgacgaccccggcggaga

SEQ ID NO: 214718 - DNA, 25 bp, Homo sapien
ccggcggagactggggtgacgtgtg

SEQ ID NO: 214719 - DNA, 25 bp, Homo sapien
tgccatggtgacgatatgccctgag

SEQ ID NO: 214720 - DNA, 25 bp, Homo sapien
gggtgactcctatgtactcctagct

SEQ ID NO: 214721 - DNA, 25 bp, Homo sapien
tctgagacatggagcataccccagt

SEQ ID NO: 214722 - DNA, 25 bp, Homo sapien
gagcaaacccaatgggacagaaagg

SEQ ID NO: 214723 - DNA, 25 bp, Homo sapien
cttggaaagtcgatgcaggcggctc

SEQ ID NO: 214724 - DNA, 25 bp, Homo sapien
gaggaaggcccctattgcaaattca

SEQ ID NO: 214725 - DNA, 25 bp, Homo sapien
gggctgcggctactgatctcatcca

SEQ ID NO: 214726 - DNA, 25 bp, Homo sapien
ttaagtccaaaaagctgtgcctatg

SEQ ID NO: 214727 - DNA, 25 bp, Homo sapien
taagttgagaagagatttgcagcac

SEQ ID NO: 214728 - DNA, 25 bp, Homo sapien
tatctcacggatggagggaagtgct

SEQ ID NO: 214729 - DNA, 25 bp, Homo sapien
cagcttatctcacggatggagggaa

SEQ ID NO: 214730 - DNA, 25 bp, Homo sapien
gcttatctcacggatggagggaagt

SEQ ID NO: 214731 - DNA, 25 bp, Homo sapien
tcagcttatctcacggatggaggga

SEQ ID NO: 214732 - DNA, 25 bp, Homo sapien
tacacagagggcatagatggcatac

SEQ ID NO: 214733 - DNA, 25 bp, Homo sapien
gaagccctggtagagtgtcaggttc

SEQ ID NO: 214734 - DNA, 25 bp, Homo sapien
ctggtgtgagtttacacagagggca

SEQ ID NO: 214735 - DNA, 25 bp, Homo sapien
gagagtcattcgctggctctgtagc

SEQ ID NO: 214736 - DNA, 25 bp, Homo sapien
cttggctggcactttctgtaagagc

SEQ ID NO: 214737 - DNA, 25 bp, Homo sapien
gtaagagcttgagaacatcttcctc

SEQ ID NO: 214738 - DNA, 25 bp, Homo sapien
aagagcttgagaacatcttcctccc

SEQ ID NO: 214739 - DNA, 25 bp, Homo sapien
ccttggctggcactttctgtaagag

SEQ ID NO: 214740 - DNA, 25 bp, Homo sapien
tgatggagagtgtagagcactgagt

SEQ ID NO: 214741 - DNA, 25 bp, Homo sapien
ctccaccgtgtaaatgatacaacag

SEQ ID NO: 214742 - DNA, 25 bp, Homo sapien
tctccaccgtgtaaatgatacaaca

SEQ ID NO: 214743 - DNA, 25 bp, Homo sapien
tggaaggtttgtaaggtgatggaga

SEQ ID NO: 214744 - DNA, 25 bp, Homo sapien
gaagaaagatcaatctccattccct

SEQ ID NO: 214745 - DNA, 25 bp, Homo sapien
ggcagtttatattattgctcgaaga

SEQ ID NO: 214746 - DNA, 25 bp, Homo sapien
tctggaccataatgccacaggcttc

SEQ ID NO: 214747 - DNA, 25 bp, Homo sapien
tctctggaccataatgccacaggct

SEQ ID NO: 214748 - DNA, 25 bp, Homo sapien
tctgctgtatgcaccactccaggac

SEQ ID NO: 214749 - DNA, 25 bp, Homo sapien
tgctctgctgtatgcaccactccag

SEQ ID NO: 214750 - DNA, 25 bp, Homo sapien
tgctgtatgcaccactccaggacct

SEQ ID NO: 214751 - DNA, 25 bp, Homo sapien
gctctgctgtatgcaccactccagg

SEQ ID NO: 214752 - DNA, 25 bp, Homo sapien
tgaggagctcatcacagcctgggcc

SEQ ID NO: 214753 - DNA, 25 bp, Homo sapien
ctgaggagctcatcacagcctgggc

SEQ ID NO: 214754 - DNA, 25 bp, Homo sapien
gctgactctaggctctggcagtgtg

SEQ ID NO: 214755 - DNA, 25 bp, Homo sapien
gcccaggagtacaagcaggcaactg

SEQ ID NO: 214756 - DNA, 25 bp, Homo sapien
tggagcagcctcttggctgactcta

SEQ ID NO: 214757 - DNA, 25 bp, Homo sapien
caggagtacaagcaggcaactgagg

SEQ ID NO: 214758 - DNA, 25 bp, Homo sapien
agtaggcagccaagatttgggaagt

SEQ ID NO: 214759 - DNA, 25 bp, Homo sapien
caagtaggcagccaagatttgggaa

SEQ ID NO: 214760 - DNA, 25 bp, Homo sapien
atcaagtaggcagccaagatttggg

SEQ ID NO: 214761 - DNA, 25 bp, Homo sapien
ctatcaagtaggcagccaagatttg

SEQ ID NO: 214762 - DNA, 25 bp, Homo sapien
ctttcaacaatgttagtgctgttac

SEQ ID NO: 214763 - DNA, 25 bp, Homo sapien
aaataggccactttccaagcctcgg

SEQ ID NO: 214764 - DNA, 25 bp, Homo sapien
gattggagaacagggctagcattgc

SEQ ID NO: 214765 - DNA, 25 bp, Homo sapien
tctgctcgaggaagtgtttgttgtt

SEQ ID NO: 214766 - DNA, 25 bp, Homo sapien
caggcagtagaaataggccactttc

SEQ ID NO: 214767 - DNA, 25 bp, Homo sapien
ctcaggatctagatgatccggtgag

SEQ ID NO: 214768 - DNA, 25 bp, Homo sapien
tcaggatctagatgatccggtgaga

SEQ ID NO: 214769 - DNA, 25 bp, Homo sapien
agtccgcagggctccatagatggca

SEQ ID NO: 214770 - DNA, 25 bp, Homo sapien
tcccagagcacagagacagcttcgg

SEQ ID NO: 214771 - DNA, 25 bp, Homo sapien
gagatgcaactcaaccccaagtggt

SEQ ID NO: 214772 - DNA, 25 bp, Homo sapien
atagatggcatcgactaccccaggg

SEQ ID NO: 214773 - DNA, 25 bp, Homo sapien
cctccttggatttccgtcaggcacg

SEQ ID NO: 214774 - DNA, 25 bp, Homo sapien
cctgtgttaaggtctcatacagctc

SEQ ID NO: 214775 - DNA, 25 bp, Homo sapien
gcctactgcaccctgtgttaaggtc

SEQ ID NO: 214776 - DNA, 25 bp, Homo sapien
tccgtcaggcacgtggcctactgca

SEQ ID NO: 214777 - DNA, 25 bp, Homo sapien
caccttggaggtcttctgacaataa

SEQ ID NO: 214778 - DNA, 25 bp, Homo sapien
accttggaggtcttctgacaataaa

SEQ ID NO: 214779 - DNA, 25 bp, Homo sapien
ctcaagctttctccggaaaacaact

SEQ ID NO: 214780 - DNA, 25 bp, Homo sapien
gaagtagcatagacgtgaacatttc

SEQ ID NO: 214781 - DNA, 25 bp, Homo sapien
tatgttagtgaaaactcatttgcca

SEQ ID NO: 214782 - DNA, 25 bp, Homo sapien
tcattcagaccatttgctatgcaca

SEQ ID NO: 214783 - DNA, 25 bp, Homo sapien
ttatgaaaactgtggtctaaggcca

SEQ ID NO: 214784 - DNA, 25 bp, Homo sapien
gacccaggctactctttgagggttg

SEQ ID NO: 214785 - DNA, 25 bp, Homo sapien
cccaggctactctttgagggttgat

SEQ ID NO: 214786 - DNA, 25 bp, Homo sapien
ccaggctactctttgagggttgatg

SEQ ID NO: 214787 - DNA, 25 bp, Homo sapien
aggctactctttgagggttgatgtc

SEQ ID NO: 214788 - DNA, 25 bp, Homo sapien
ctgggaccgtctggtaggaaaagag

SEQ ID NO: 214789 - DNA, 25 bp, Homo sapien
ccgtctggtaggaaaagagatccct

SEQ ID NO: 214790 - DNA, 25 bp, Homo sapien
tctggtaggaaaagagatcccttac

SEQ ID NO: 214791 - DNA, 25 bp, Homo sapien
ggaccgtctggtaggaaaagagatc

SEQ ID NO: 214792 - DNA, 25 bp, Homo sapien
caccaccaatgcctgaagtatgtct

SEQ ID NO: 214793 - DNA, 25 bp, Homo sapien
cctccgcaggcattcgcagaaaaat

SEQ ID NO: 214794 - DNA, 25 bp, Homo sapien
tgaggtacacatgcctgtgccagct

SEQ ID NO: 214795 - DNA, 25 bp, Homo sapien
ctaccctctttgggatatccccttg

SEQ ID NO: 214796 - DNA, 25 bp, Homo sapien
aatgttctcattcgcggagtacctc

SEQ ID NO: 214797 - DNA, 25 bp, Homo sapien
cacagagtgcagggagatacaaaga

SEQ ID NO: 214798 - DNA, 25 bp, Homo sapien
aagaaatgagttatgccgaacacat

SEQ ID NO: 214799 - DNA, 25 bp, Homo sapien
gagttatgccgaacacattctcaat

SEQ ID NO: 214800 - DNA, 25 bp, Homo sapien
gctcccggcgcccaaagcaatagag

SEQ ID NO: 214801 - DNA, 25 bp, Homo sapien
ccggcgcccaaagcaatagagctct

SEQ ID NO: 214802 - DNA, 25 bp, Homo sapien
atagagctctcagcgcagccatgtt

SEQ ID NO: 214803 - DNA, 25 bp, Homo sapien
caaagcaatagagctctcagcgcag

SEQ ID NO: 214804 - DNA, 25 bp, Homo sapien
cagacccggtactggaaagtttcat

SEQ ID NO: 214805 - DNA, 25 bp, Homo sapien
ggatacagtagccagaatgacgact

SEQ ID NO: 214806 - DNA, 25 bp, Homo sapien
ctctgccggcctctgattggataca

SEQ ID NO: 214807 - DNA, 25 bp, Homo sapien
tgaaagttggatgctgcagacccgg

SEQ ID NO: 214808 - DNA, 25 bp, Homo sapien
ttgtggggaagtggggttcgctcat

SEQ ID NO: 214809 - DNA, 25 bp, Homo sapien
gttgtggggaagtggggttcgctca

SEQ ID NO: 214810 - DNA, 25 bp, Homo sapien
ggacttgagccacaggtactggttt

SEQ ID NO: 214811 - DNA, 25 bp, Homo sapien
ggccctgggaatactctgcctagta

SEQ ID NO: 214812 - DNA, 25 bp, Homo sapien
caagggttaattcagctagcatggg

SEQ ID NO: 214813 - DNA, 25 bp, Homo sapien
gcattgcatgcctagtgactgaccc

SEQ ID NO: 214814 - DNA, 25 bp, Homo sapien
atccacaagtaggagggaagtattt

SEQ ID NO: 214815 - DNA, 25 bp, Homo sapien
tcttggaatccacaagtaggaggga

SEQ ID NO: 214816 - DNA, 25 bp, Homo sapien
tcatggtccttctgtaacttgggaa

SEQ ID NO: 214817 - DNA, 25 bp, Homo sapien
gcattttatacatctggacattgtt

SEQ ID NO: 214818 - DNA, 25 bp, Homo sapien
ttgaagtttggcctgtccaaaaaca

SEQ ID NO: 214819 - DNA, 25 bp, Homo sapien
tgaagtttggcctgtccaaaaacat

SEQ ID NO: 214820 - DNA, 25 bp, Homo sapien
ggtaggtaagattctttgtgcttaa

SEQ ID NO: 214821 - DNA, 25 bp, Homo sapien
taattccgcactcaggacagacttg

SEQ ID NO: 214822 - DNA, 25 bp, Homo sapien
tcctgtatcttattagtgagggaaa

SEQ ID NO: 214823 - DNA, 25 bp, Homo sapien
tttgtgcttaattccgcactcagga

SEQ ID NO: 214824 - DNA, 25 bp, Homo sapien
taaaacaccttccttgatcactctg

SEQ ID NO: 214825 - DNA, 25 bp, Homo sapien
ggagcccctcagagttcactgtaaa

SEQ ID NO: 214826 - DNA, 25 bp, Homo sapien
gaagtctgagtgtagcccttaaaag

SEQ ID NO: 214827 - DNA, 25 bp, Homo sapien
gacttattgactaacttttgccaca

SEQ ID NO: 214828 - DNA, 25 bp, Homo sapien
gttatttcccaatttctgtatattc

SEQ ID NO: 214829 - DNA, 25 bp, Homo sapien
tctttttatgatcatggttgacaaa

SEQ ID NO: 214830 - DNA, 25 bp, Homo sapien
tcatctctggatttggtcacctttg

SEQ ID NO: 214831 - DNA, 25 bp, Homo sapien
agtatagcgctgaacataagacatg

SEQ ID NO: 214832 - DNA, 25 bp, Homo sapien
gctgttgttgctcgtaattgtaagt

SEQ ID NO: 214833 - DNA, 25 bp, Homo sapien
tgctcgtaattgtaagtttaatata

SEQ ID NO: 214834 - DNA, 25 bp, Homo sapien
gttgctcgtaattgtaagtttaata

SEQ ID NO: 214835 - DNA, 25 bp, Homo sapien
tttgctgttgttgctcgtaattgta

SEQ ID NO: 214836 - DNA, 25 bp, Homo sapien
atcttctggaaacagtcaaagtgct

SEQ ID NO: 214837 - DNA, 25 bp, Homo sapien
ttctggaaacagtcaaagtgctggg

SEQ ID NO: 214838 - DNA, 25 bp, Homo sapien
gaaagcaatcttctggaaacagtca

SEQ ID NO: 214839 - DNA, 25 bp, Homo sapien
aagtgctgggaatttgatggttgga

SEQ ID NO: 214840 - DNA, 25 bp, Homo sapien
gagtaagggtcatataacagcaaca

SEQ ID NO: 214841 - DNA, 25 bp, Homo sapien
taagggtcatataacagcaacaggg

SEQ ID NO: 214842 - DNA, 25 bp, Homo sapien
atctgtagccaaaggagtaagggtc

SEQ ID NO: 214843 - DNA, 25 bp, Homo sapien
ggtcatataacagcaacagggttaa

SEQ ID NO: 214844 - DNA, 25 bp, Homo sapien
ctggtagttatcagatagttcacaa

SEQ ID NO: 214845 - DNA, 25 bp, Homo sapien
tagttatcagatagttcacaaattt

SEQ ID NO: 214846 - DNA, 25 bp, Homo sapien
agttatcagatagttcacaaatttc

SEQ ID NO: 214847 - DNA, 25 bp, Homo sapien
ggtagttatcagatagttcacaaat

SEQ ID NO: 214848 - DNA, 25 bp, Homo sapien
gttgagcagttatgaaccaatgcca

SEQ ID NO: 214849 - DNA, 25 bp, Homo sapien
ggaatattgtcacagcaagcaatgg

SEQ ID NO: 214850 - DNA, 25 bp, Homo sapien
gcgctcgttgtatcataactgctgg

SEQ ID NO: 214851 - DNA, 25 bp, Homo sapien
aatgggaaccacctaagatcttaga

SEQ ID NO: 214852 - DNA, 25 bp, Homo sapien
gatattgcctggagcacaaaaaagg

SEQ ID NO: 214853 - DNA, 25 bp, Homo sapien
ctgttctccgtttaaaagtctgtgg

SEQ ID NO: 214854 - DNA, 25 bp, Homo sapien
cgtttaaaagtctgtggagggatca

SEQ ID NO: 214855 - DNA, 25 bp, Homo sapien
tgttctccgtttaaaagtctgtgga

SEQ ID NO: 214856 - DNA, 25 bp, Homo sapien
tctgttctccgtttaaaagtctgtg

SEQ ID NO: 214857 - DNA, 25 bp, Homo sapien
actctcattagtcactccaactttg

SEQ ID NO: 214858 - DNA, 25 bp, Homo sapien
aatggagacagttcaagtatctaac

SEQ ID NO: 214859 - DNA, 25 bp, Homo sapien
ccaattctctggagtattaatggag

SEQ ID NO: 214860 - DNA, 25 bp, Homo sapien
caactttgaagcacccaattctctg

SEQ ID NO: 214861 - DNA, 25 bp, Homo sapien
caaaagtgttaaattgctgctggcc

SEQ ID NO: 214862 - DNA, 25 bp, Homo sapien
tactgggtatggaccctgttctctc

SEQ ID NO: 214863 - DNA, 25 bp, Homo sapien
caggtagtacttgacaccccttatt

SEQ ID NO: 214864 - DNA, 25 bp, Homo sapien
acattctagatatatggagccttag

SEQ ID NO: 214865 - DNA, 25 bp, Homo sapien
tgccctcatacttcaaaacataatc

SEQ ID NO: 214866 - DNA, 25 bp, Homo sapien
cacatggggataaggggaactgtaa

SEQ ID NO: 214867 - DNA, 25 bp, Homo sapien
ctcatgccctcatacttcaaaacat

SEQ ID NO: 214868 - DNA, 25 bp, Homo sapien
gtggggcacggccaaaactttatca

SEQ ID NO: 214869 - DNA, 25 bp, Homo sapien
gaatcttctgatgagtaggcaactc

SEQ ID NO: 214870 - DNA, 25 bp, Homo sapien
caaaagacttctcacagatgccgca

SEQ ID NO: 214871 - DNA, 25 bp, Homo sapien
cattcagtacaaacaaagagtttct

SEQ ID NO: 214872 - DNA, 25 bp, Homo sapien
tgatttctgtctgaaggcccaccaa

SEQ ID NO: 214873 - DNA, 25 bp, Homo sapien
gctttatggtgcactcatgccagca

SEQ ID NO: 214874 - DNA, 25 bp, Homo sapien
tgagctccatatgagacacacagca

SEQ ID NO: 214875 - DNA, 25 bp, Homo sapien
caattactgaatcaagcaagtggaa

SEQ ID NO: 214876 - DNA, 25 bp, Homo sapien
catagggctgtagcattcatttaca

SEQ ID NO: 214877 - DNA, 25 bp, Homo sapien
ttcctctgcagctttagaactgaag

SEQ ID NO: 214878 - DNA, 25 bp, Homo sapien
catagtcctcttccaagatcattcc

SEQ ID NO: 214879 - DNA, 25 bp, Homo sapien
cattccttttattggcagatttcat

SEQ ID NO: 214880 - DNA, 25 bp, Homo sapien
tttcttggtatcagccagggactgc

SEQ ID NO: 214881 - DNA, 25 bp, Homo sapien
tgaaacgttgaaagccaggtgaccc

SEQ ID NO: 214882 - DNA, 25 bp, Homo sapien
tgaagcagccacacagtaatgtctc

SEQ ID NO: 214883 - DNA, 25 bp, Homo sapien
tgccatcttgagagaacacatctgg

SEQ ID NO: 214884 - DNA, 25 bp, Homo sapien
ggacaggctctagaatgaggtctgc

SEQ ID NO: 214885 - DNA, 25 bp, Homo sapien
tgcaactcagctggtgtgcaggtgt

SEQ ID NO: 214886 - DNA, 25 bp, Homo sapien
cagcttggcagaagatttgaacgtt

SEQ ID NO: 214887 - DNA, 25 bp, Homo sapien
tcattactgaaagtcactgacacac

SEQ ID NO: 214888 - DNA, 25 bp, Homo sapien
taaggagcccagacaaaaatcccac

SEQ ID NO: 214889 - DNA, 25 bp, Homo sapien
ggacctgtctatgggaacttctata

SEQ ID NO: 214890 - DNA, 25 bp, Homo sapien
taaggacctgtctatgggaacttct

SEQ ID NO: 214891 - DNA, 25 bp, Homo sapien
aattctgacacattaacctggccat

SEQ ID NO: 214892 - DNA, 25 bp, Homo sapien
ctgtaaggacctgtctatgggaact

SEQ ID NO: 214893 - DNA, 25 bp, Homo sapien
aaactttctggcaagagctcttcat

SEQ ID NO: 214894 - DNA, 25 bp, Homo sapien
caaaaactttctggcaagagctctt

SEQ ID NO: 214895 - DNA, 25 bp, Homo sapien
ttccaaaaactttctggcaagagct

SEQ ID NO: 214896 - DNA, 25 bp, Homo sapien
tccaaaaactttctggcaagagctc

SEQ ID NO: 214897 - DNA, 25 bp, Homo sapien
ccagttccaatctaggccagtttat

SEQ ID NO: 214898 - DNA, 25 bp, Homo sapien
ctccagttccaatctaggccagttt

SEQ ID NO: 214899 - DNA, 25 bp, Homo sapien
tccagttccaatctaggccagttta

SEQ ID NO: 214900 - DNA, 25 bp, Homo sapien
gaatccaggatgcaatatacaaagg

SEQ ID NO: 214901 - DNA, 25 bp, Homo sapien
gatgaggccctcagagcagaaagag

SEQ ID NO: 214902 - DNA, 25 bp, Homo sapien
tagattgcgatagggtagttactgc

SEQ ID NO: 214903 - DNA, 25 bp, Homo sapien
gaaaagcctcttcttatggttccta

SEQ ID NO: 214904 - DNA, 25 bp, Homo sapien
tgtataaacagggaaactaatgctc

SEQ ID NO: 214905 - DNA, 25 bp, Homo sapien
aatgagtagccctttatgagaatag

SEQ ID NO: 214906 - DNA, 25 bp, Homo sapien
aaaatgctattgaggctggtcacgg

SEQ ID NO: 214907 - DNA, 25 bp, Homo sapien
tattaaagctggtaatgggtgtgtc

SEQ ID NO: 214908 - DNA, 25 bp, Homo sapien
cccacctagcatattttagtaaggc

SEQ ID NO: 214909 - DNA, 25 bp, Homo sapien
tcttactcgttagaatgcaagttcc

SEQ ID NO: 214910 - DNA, 25 bp, Homo sapien
tgtgtgtacagacaggtcacctatt

SEQ ID NO: 214911 - DNA, 25 bp, Homo sapien
gatcttcaaatcacccaagttctta

SEQ ID NO: 214912 - DNA, 25 bp, Homo sapien
taactctctgtgtagatgttgctga

SEQ ID NO: 214913 - DNA, 25 bp, Homo sapien
cacataactctctgtgtagatgttg

SEQ ID NO: 214914 - DNA, 25 bp, Homo sapien
tcacacataactctctgtgtagatg

SEQ ID NO: 214915 - DNA, 25 bp, Homo sapien
cataactctctgtgtagatgttgct

SEQ ID NO: 214916 - DNA, 25 bp, Homo sapien
aacagattgattccattgatgatct

SEQ ID NO: 214917 - DNA, 25 bp, Homo sapien
tccccatggcttttgcatttctatc

SEQ ID NO: 214918 - DNA, 25 bp, Homo sapien
taatactgacgtaccacattcttcc

SEQ ID NO: 214919 - DNA, 25 bp, Homo sapien
ccatctgagacttacaacttcaaac

SEQ ID NO: 214920 - DNA, 25 bp, Homo sapien
ccatgaaggcaatctcagcgtctgg

SEQ ID NO: 214921 - DNA, 25 bp, Homo sapien
catgaaggcaatctcagcgtctggc

SEQ ID NO: 214922 - DNA, 25 bp, Homo sapien
tgaaggcaatctcagcgtctggcat

SEQ ID NO: 214923 - DNA, 25 bp, Homo sapien
atgaaggcaatctcagcgtctggca

SEQ ID NO: 214924 - DNA, 25 bp, Homo sapien
ggtagttggatataagtctgacagc

SEQ ID NO: 214925 - DNA, 25 bp, Homo sapien
gagcagaatggttcggtaaagtacc

SEQ ID NO: 214926 - DNA, 25 bp, Homo sapien
aatttctgcagcctgatggtctggg

SEQ ID NO: 214927 - DNA, 25 bp, Homo sapien
gtaaagtaccaagtctggtgacagg

SEQ ID NO: 214928 - DNA, 25 bp, Homo sapien
ttgccaatggcccattagctgtgta

SEQ ID NO: 214929 - DNA, 25 bp, Homo sapien
ggcccattagctgtgtaagtgatgt

SEQ ID NO: 214930 - DNA, 25 bp, Homo sapien
tgtaagtgatgtagctcttcctttt

SEQ ID NO: 214931 - DNA, 25 bp, Homo sapien
aatggcccattagctgtgtaagtga

SEQ ID NO: 214932 - DNA, 25 bp, Homo sapien
gcaggtgcatttccgctactgatca

SEQ ID NO: 214933 - DNA, 25 bp, Homo sapien
agtgtagtggccatttgcaggtgca

SEQ ID NO: 214934 - DNA, 25 bp, Homo sapien
caaatttagtgaggatacctgatca

SEQ ID NO: 214935 - DNA, 25 bp, Homo sapien
gatcagcattgtgtcctatagccca

SEQ ID NO: 214936 - DNA, 25 bp, Homo sapien
cctgacatggaggtcacaactgctt

SEQ ID NO: 214937 - DNA, 25 bp, Homo sapien
tgcctgacatggaggtcacaactgc

SEQ ID NO: 214938 - DNA, 25 bp, Homo sapien
catggaggtcacaactgctttctca

SEQ ID NO: 214939 - DNA, 25 bp, Homo sapien
gacatggaggtcacaactgctttct

SEQ ID NO: 214940 - DNA, 25 bp, Homo sapien
tctgctggacagttggaggcttttt

SEQ ID NO: 214941 - DNA, 25 bp, Homo sapien
tggtcacactgcattccaagccacg

SEQ ID NO: 214942 - DNA, 25 bp, Homo sapien
tggcatcagtattggtaacaaggcc

SEQ ID NO: 214943 - DNA, 25 bp, Homo sapien
ctctggaaatgcctttggtcacact

SEQ ID NO: 214944 - DNA, 25 bp, Homo sapien
cttgggaggcggctggactggtttt

SEQ ID NO: 214945 - DNA, 25 bp, Homo sapien
taatacagggcgcttttgtcttggg

SEQ ID NO: 214946 - DNA, 25 bp, Homo sapien
cagcacttaatacagggcgcttttg

SEQ ID NO: 214947 - DNA, 25 bp, Homo sapien
gaggcggctggactggtttttcctc

SEQ ID NO: 214948 - DNA, 25 bp, Homo sapien
ccaggaaacatgctagagcctttga

SEQ ID NO: 214949 - DNA, 25 bp, Homo sapien
cctttgattggaggttctcgaggaa

SEQ ID NO: 214950 - DNA, 25 bp, Homo sapien
tttatagccagtctgaagccaggaa

SEQ ID NO: 214951 - DNA, 25 bp, Homo sapien
catattcacgattgaggctcaccct

SEQ ID NO: 214952 - DNA, 25 bp, Homo sapien
tatcttagtaccttggcactcagga

SEQ ID NO: 214953 - DNA, 25 bp, Homo sapien
aatccttcacctctagcttgcagtt

SEQ ID NO: 214954 - DNA, 25 bp, Homo sapien
atgtcatcctatcatagagatgcaa

SEQ ID NO: 214955 - DNA, 25 bp, Homo sapien
gggcattttgggcacccctcttatc

SEQ ID NO: 214956 - DNA, 25 bp, Homo sapien
cccagttcagtggcaaagttcttta

SEQ ID NO: 214957 - DNA, 25 bp, Homo sapien
gagcttgataatgtgagctacagac

SEQ ID NO: 214958 - DNA, 25 bp, Homo sapien
ccagttcagtggcaaagttctttaa

SEQ ID NO: 214959 - DNA, 25 bp, Homo sapien
tttcgagcttgataatgtgagctac

SEQ ID NO: 214960 - DNA, 25 bp, Homo sapien
ccctttttacaacatggggcaggca

SEQ ID NO: 214961 - DNA, 25 bp, Homo sapien
cctttgctggtagctttcttcttgg

SEQ ID NO: 214962 - DNA, 25 bp, Homo sapien
gatcgacatcgtgtgcagtcatcac

SEQ ID NO: 214963 - DNA, 25 bp, Homo sapien
tccgagttaacctttgtgaagacaa

SEQ ID NO: 214964 - DNA, 25 bp, Homo sapien
ctgtttggtggtccagggcctgggt

SEQ ID NO: 214965 - DNA, 25 bp, Homo sapien
gtttggtggtccagggcctgggtga

SEQ ID NO: 214966 - DNA, 25 bp, Homo sapien
tgtttggtggtccagggcctgggtg

SEQ ID NO: 214967 - DNA, 25 bp, Homo sapien
tttggtggtccagggcctgggtgaa

SEQ ID NO: 214968 - DNA, 25 bp, Homo sapien
tggggctggatatcctgtccaatgc

SEQ ID NO: 214969 - DNA, 25 bp, Homo sapien
tcacaaagcgggtgaggtctctttg

SEQ ID NO: 214970 - DNA, 25 bp, Homo sapien
cacaaagcgggtgaggtctctttgg

SEQ ID NO: 214971 - DNA, 25 bp, Homo sapien
tctttggggctggatatcctgtcca

SEQ ID NO: 214972 - DNA, 25 bp, Homo sapien
ttatgacagcaggagctggagccat

SEQ ID NO: 214973 - DNA, 25 bp, Homo sapien
ctttatgacagcaggagctggagcc

SEQ ID NO: 214974 - DNA, 25 bp, Homo sapien
tttatgacagcaggagctggagcca

SEQ ID NO: 214975 - DNA, 25 bp, Homo sapien
tctccttggctttctttcctttcag

SEQ ID NO: 214976 - DNA, 25 bp, Homo sapien
tccttggctttctttcctttcagca

SEQ ID NO: 214977 - DNA, 25 bp, Homo sapien
ccttggctttctttcctttcagcat

SEQ ID NO: 214978 - DNA, 25 bp, Homo sapien
ttctccttggctttctttcctttca

SEQ ID NO: 214979 - DNA, 25 bp, Homo sapien
ttaaagtatatgtagcccttggtct

SEQ ID NO: 214980 - DNA, 25 bp, Homo sapien
taaagtatatgtagcccttggtctc

SEQ ID NO: 214981 - DNA, 25 bp, Homo sapien
aaagtatatgtagcccttggtctcc

SEQ ID NO: 214982 - DNA, 25 bp, Homo sapien
aagtatatgtagcccttggtctcca

SEQ ID NO: 214983 - DNA, 25 bp, Homo sapien
tctctctgtgcacatatagagtttg

SEQ ID NO: 214984 - DNA, 25 bp, Homo sapien
tagcttccaccacatgtttacattg

SEQ ID NO: 214985 - DNA, 25 bp, Homo sapien
cctgccattggcatatccaggcttg

SEQ ID NO: 214986 - DNA, 25 bp, Homo sapien
cattggcatatccaggcttgaaact

SEQ ID NO: 214987 - DNA, 25 bp, Homo sapien
aatccagaagtaattgagacactaa

SEQ ID NO: 214988 - DNA, 25 bp, Homo sapien
aattgagacactaaactgcatctgc

SEQ ID NO: 214989 - DNA, 25 bp, Homo sapien
gactcttgaatggaccaaatccaga

SEQ ID NO: 214990 - DNA, 25 bp, Homo sapien
tggtatagcagcgatgatatgactc

SEQ ID NO: 214991 - DNA, 25 bp, Homo sapien
ctttactggagagatgtcctgccac

SEQ ID NO: 214992 - DNA, 25 bp, Homo sapien
agcctttactggagagatgtcctgc

SEQ ID NO: 214993 - DNA, 25 bp, Homo sapien
ttacaagcctttactggagagatgt

SEQ ID NO: 214994 - DNA, 25 bp, Homo sapien
caagcctttactggagagatgtcct

SEQ ID NO: 214995 - DNA, 25 bp, Homo sapien
cttggaagactcagactggcacttt

SEQ ID NO: 214996 - DNA, 25 bp, Homo sapien
gggtccacagcagagaggataaaaa

SEQ ID NO: 214997 - DNA, 25 bp, Homo sapien
gtcataatagcacagagccgggcgt

SEQ ID NO: 214998 - DNA, 25 bp, Homo sapien
gaggcagaggtgcatccgagtcata

SEQ ID NO: 214999 - DNA, 25 bp, Homo sapien
gctctgaaaaagagtaagcaccaga

SEQ ID NO: 215000 - DNA, 25 bp, Homo sapien
tgctctgaaaaagagtaagcaccag

SEQ ID NO: 215001 - DNA, 25 bp, Homo sapien
ctctgaaaaagagtaagcaccagac

SEQ ID NO: 215002 - DNA, 25 bp, Homo sapien
cacgtagttccagtgtgaagtactc

SEQ ID NO: 215003 - DNA, 25 bp, Homo sapien
tcagaaaatcctcttgcacgtagtt

SEQ ID NO: 215004 - DNA, 25 bp, Homo sapien
ctcacagggcgctgtggcaacaagg

SEQ ID NO: 215005 - DNA, 25 bp, Homo sapien
tctctcacaggaatgatgggaggcc

SEQ ID NO: 215006 - DNA, 25 bp, Homo sapien
cttttcccgctcaagctccctggac

SEQ ID NO: 215007 - DNA, 25 bp, Homo sapien
ttcaatagttttagggcaggaattg

SEQ ID NO: 215008 - DNA, 25 bp, Homo sapien
ggacctccgcattctttcaatagtt

SEQ ID NO: 215009 - DNA, 25 bp, Homo sapien
caggaattggcaggtgttaggggca

SEQ ID NO: 215010 - DNA, 25 bp, Homo sapien
agatcatcagctttaacgccagagc

SEQ ID NO: 215011 - DNA, 25 bp, Homo sapien
tttatgggccacctcggaatagatc

SEQ ID NO: 215012 - DNA, 25 bp, Homo sapien
catcagctttaacgccagagcttca

SEQ ID NO: 215013 - DNA, 25 bp, Homo sapien
tgggccacctcggaatagatcatca

SEQ ID NO: 215014 - DNA, 25 bp, Homo sapien
gtgtgatctacaagttctttctcca

SEQ ID NO: 215015 - DNA, 25 bp, Homo sapien
cagtgtgatctacaagttctttctc

SEQ ID NO: 215016 - DNA, 25 bp, Homo sapien
tgatctacaagttctttctccatgt

SEQ ID NO: 215017 - DNA, 25 bp, Homo sapien
gtgatctacaagttctttctccatg

SEQ ID NO: 215018 - DNA, 25 bp, Homo sapien
agggttagtggcacagctgctgttt

SEQ ID NO: 215019 - DNA, 25 bp, Homo sapien
aatgtccagggttagtggcacagct

SEQ ID NO: 215020 - DNA, 25 bp, Homo sapien
cagggttagtggcacagctgctgtt

SEQ ID NO: 215021 - DNA, 25 bp, Homo sapien
gacaatgtccagggttagtggcaca

SEQ ID NO: 215022 - DNA, 25 bp, Homo sapien
cgaaagtgaggtcatgtttctcctg

SEQ ID NO: 215023 - DNA, 25 bp, Homo sapien
tatgcccgtatctgatgagcctcgg

SEQ ID NO: 215024 - DNA, 25 bp, Homo sapien
gcatctgaatgcacagtcccatgtc

SEQ ID NO: 215025 - DNA, 25 bp, Homo sapien
tctcctggattatgcccgtatctga

SEQ ID NO: 215026 - DNA, 25 bp, Homo sapien
cagggccctattaagatgtggcctg

SEQ ID NO: 215027 - DNA, 25 bp, Homo sapien
agatgtggcctggctttccatccat

SEQ ID NO: 215028 - DNA, 25 bp, Homo sapien
taagatgtggcctggctttccatcc

SEQ ID NO: 215029 - DNA, 25 bp, Homo sapien
gggccctattaagatgtggcctggc

SEQ ID NO: 215030 - DNA, 25 bp, Homo sapien
aaacatagagtgtgtactcacatac

SEQ ID NO: 215031 - DNA, 25 bp, Homo sapien
cctcttccgctgttggcggctgctg

SEQ ID NO: 215032 - DNA, 25 bp, Homo sapien
gctagttattgtcatacgattgcat

SEQ ID NO: 215033 - DNA, 25 bp, Homo sapien
ggcggctgctgtggtatctataaac

SEQ ID NO: 215034 - DNA, 25 bp, Homo sapien
cctctctgacagaggccgttggtca

SEQ ID NO: 215035 - DNA, 25 bp, Homo sapien
tcctctctgacagaggccgttggtc

SEQ ID NO: 215036 - DNA, 25 bp, Homo sapien
ctctctgacagaggccgttggtcat

SEQ ID NO: 215037 - DNA, 25 bp, Homo sapien
aaggcacccactgaatatcttacac

SEQ ID NO: 215038 - DNA, 25 bp, Homo sapien
ctctggatagcaggagttacagcaa

SEQ ID NO: 215039 - DNA, 25 bp, Homo sapien
actgaatatcttacacctctctgga

SEQ ID NO: 215040 - DNA, 25 bp, Homo sapien
tatgccctcccacatttagcacatg

SEQ ID NO: 215041 - DNA, 25 bp, Homo sapien
agtaacaatcctccggtgtggcaca

SEQ ID NO: 215042 - DNA, 25 bp, Homo sapien
agaggttcctgtattagtgctgccc

SEQ ID NO: 215043 - DNA, 25 bp, Homo sapien
agtgctgccctgtactgacttgtga

SEQ ID NO: 215044 - DNA, 25 bp, Homo sapien
cctccaggaaggacgggctcgccag

SEQ ID NO: 215045 - DNA, 25 bp, Homo sapien
tgcgacaaaggcgtagaaaccatcc

SEQ ID NO: 215046 - DNA, 25 bp, Homo sapien
agtggaagacaagtgttgagacaag

SEQ ID NO: 215047 - DNA, 25 bp, Homo sapien
gacttgcagttcttgtggttaaaag

SEQ ID NO: 215048 - DNA, 25 bp, Homo sapien
tccttttcaaagtggagccatgcca

SEQ ID NO: 215049 - DNA, 25 bp, Homo sapien
cctgctgtgtgaccagattcaatct

SEQ ID NO: 215050 - DNA, 25 bp, Homo sapien
ctcaactttatcctgctgtgtgacc

SEQ ID NO: 215051 - DNA, 25 bp, Homo sapien
gctgtgtgaccagattcaatctagt

SEQ ID NO: 215052 - DNA, 25 bp, Homo sapien
tcctgctgtgtgaccagattcaatc

SEQ ID NO: 215053 - DNA, 25 bp, Homo sapien
ctacaccagggctcttgaatgtgag

SEQ ID NO: 215054 - DNA, 25 bp, Homo sapien
tctatgacattgagctctacaccag

SEQ ID NO: 215055 - DNA, 25 bp, Homo sapien
cgtttctatgacattgagctctaca

SEQ ID NO: 215056 - DNA, 25 bp, Homo sapien
tgaggcttagtttcagatcacaggc

SEQ ID NO: 215057 - DNA, 25 bp, Homo sapien
aacacagacacccaagtggtcatct

SEQ ID NO: 215058 - DNA, 25 bp, Homo sapien
gacacccaagtggtcatctcccatt

SEQ ID NO: 215059 - DNA, 25 bp, Homo sapien
cagacacccaagtggtcatctccca

SEQ ID NO: 215060 - DNA, 25 bp, Homo sapien
gggactgagaaagggcaacacagac

SEQ ID NO: 215061 - DNA, 25 bp, Homo sapien
catgcctccacaatattcgtgcctt

SEQ ID NO: 215062 - DNA, 25 bp, Homo sapien
ctccatgcctccacaatattcgtgc

SEQ ID NO: 215063 - DNA, 25 bp, Homo sapien
tccatgcctccacaatattcgtgcc

SEQ ID NO: 215064 - DNA, 25 bp, Homo sapien
atgcctccacaatattcgtgccttc

SEQ ID NO: 215065 - DNA, 25 bp, Homo sapien
ctgggaaccatttgtgttgggtcca

SEQ ID NO: 215066 - DNA, 25 bp, Homo sapien
cagatgaaaaactgggaaccatttg

SEQ ID NO: 215067 - DNA, 25 bp, Homo sapien
gcttgccatccaaccactcagtctt

SEQ ID NO: 215068 - DNA, 25 bp, Homo sapien
tttgccaaagagcacgtgcttgcca

SEQ ID NO: 215069 - DNA, 25 bp, Homo sapien
gttctcattttcaaatttctccgtg

SEQ ID NO: 215070 - DNA, 25 bp, Homo sapien
tcattttcaaatttctccgtgtaga

SEQ ID NO: 215071 - DNA, 25 bp, Homo sapien
cattttcaaatttctccgtgtagat

SEQ ID NO: 215072 - DNA, 25 bp, Homo sapien
tctcattttcaaatttctccgtgta

SEQ ID NO: 215073 - DNA, 25 bp, Homo sapien
ccagtgccattatggtgacttcaca

SEQ ID NO: 215074 - DNA, 25 bp, Homo sapien
ccaccagtgccattatggtgacttc

SEQ ID NO: 215075 - DNA, 25 bp, Homo sapien
agtgccattatggtgacttcacagt

SEQ ID NO: 215076 - DNA, 25 bp, Homo sapien
accagtgccattatggtgacttcac

SEQ ID NO: 215077 - DNA, 25 bp, Homo sapien
ggaataattctgtgaaagcaggaaa

SEQ ID NO: 215078 - DNA, 25 bp, Homo sapien
gaataattctgtgaaagcaggaaac

SEQ ID NO: 215079 - DNA, 25 bp, Homo sapien
gctcgctgtcgacggcaaattcaaa

SEQ ID NO: 215080 - DNA, 25 bp, Homo sapien
aagggctcgctgtcgacggcaaatt

SEQ ID NO: 215081 - DNA, 25 bp, Homo sapien
caagggctcgctgtcgacggcaaat

SEQ ID NO: 215082 - DNA, 25 bp, Homo sapien
gggctcgctgtcgacggcaaattca

SEQ ID NO: 215083 - DNA, 25 bp, Homo sapien
ggctaatagtacacggttttcctca

SEQ ID NO: 215084 - DNA, 25 bp, Homo sapien
ttttcctcagcggtggcgtccgcag

SEQ ID NO: 215085 - DNA, 25 bp, Homo sapien
agtacacggttttcctcagcggtgg

SEQ ID NO: 215086 - DNA, 25 bp, Homo sapien
tttcctcagcggtggcgtccgcaga

SEQ ID NO: 215087 - DNA, 25 bp, Homo sapien
tccagcaagcctgcgacatcagatt

SEQ ID NO: 215088 - DNA, 25 bp, Homo sapien
gcgacatcagatttgtaccttccaa

SEQ ID NO: 215089 - DNA, 25 bp, Homo sapien
caagtctccctttggcaagagtttt

SEQ ID NO: 215090 - DNA, 25 bp, Homo sapien
tccatacagatttggagggatttga

SEQ ID NO: 215091 - DNA, 25 bp, Homo sapien
cattcttccatccaggcctcaatga

SEQ ID NO: 215092 - DNA, 25 bp, Homo sapien
tggacagtgtatggctgcttccatt

SEQ ID NO: 215093 - DNA, 25 bp, Homo sapien
gtggacagtgtatggctgcttccat

SEQ ID NO: 215094 - DNA, 25 bp, Homo sapien
tcttccatccaggcctcaatgactg

SEQ ID NO: 215095 - DNA, 25 bp, Homo sapien
tggcccacaggcatatccgtgcatt

SEQ ID NO: 215096 - DNA, 25 bp, Homo sapien
ctaaatgaactggtggaactttgtg

SEQ ID NO: 215097 - DNA, 25 bp, Homo sapien
ctttgtggctttggctcttggccca

SEQ ID NO: 215098 - DNA, 25 bp, Homo sapien
caggcatatccgtgcattagagcca

SEQ ID NO: 215099 - DNA, 25 bp, Homo sapien
tttgcttcatcattaaccttctcta

SEQ ID NO: 215100 - DNA, 25 bp, Homo sapien
ctaactccgtgcatgaatattgtag

SEQ ID NO: 215101 - DNA, 25 bp, Homo sapien
catgaatattgtagccgtgctttgc

SEQ ID NO: 215102 - DNA, 25 bp, Homo sapien
tattgtagccgtgctttgcttcatc

SEQ ID NO: 215103 - DNA, 25 bp, Homo sapien
tattggtgtgctgtgcatcggaagg

SEQ ID NO: 215104 - DNA, 25 bp, Homo sapien
tgtgctgtgcatcggaaggcaagaa

SEQ ID NO: 215105 - DNA, 25 bp, Homo sapien
cagggaaggtattggtgtgctgtgc

SEQ ID NO: 215106 - DNA, 25 bp, Homo sapien
ggaagagcatcttattcagctggag

SEQ ID NO: 215107 - DNA, 25 bp, Homo sapien
cattatccccatcttggaagggccc

SEQ ID NO: 215108 - DNA, 25 bp, Homo sapien
tacagctcgtgatcagagccaggat

SEQ ID NO: 215109 - DNA, 25 bp, Homo sapien
gaatgtacattagcatccctccgag

SEQ ID NO: 215110 - DNA, 25 bp, Homo sapien
ggtccaagggcctacacaatagctt

SEQ ID NO: 215111 - DNA, 25 bp, Homo sapien
tatgagccacccaggtgaaccaatt

SEQ ID NO: 215112 - DNA, 25 bp, Homo sapien
agccacccaggtgaaccaatttctt

SEQ ID NO: 215113 - DNA, 25 bp, Homo sapien
tgagccacccaggtgaaccaatttc

SEQ ID NO: 215114 - DNA, 25 bp, Homo sapien
aggtatgagccacccaggtgaacca

SEQ ID NO: 215115 - DNA, 25 bp, Homo sapien
taaagtatgcgaaggaaacccagcc

SEQ ID NO: 215116 - DNA, 25 bp, Homo sapien
ttgactgtccggcttaatagaagac

SEQ ID NO: 215117 - DNA, 25 bp, Homo sapien
cagcctcacgtagttattttgttgg

SEQ ID NO: 215118 - DNA, 25 bp, Homo sapien
cagttatctggcttgtactctgaat

SEQ ID NO: 215119 - DNA, 25 bp, Homo sapien
gccccggtctgcaggcgggaaacaa

SEQ ID NO: 215120 - DNA, 25 bp, Homo sapien
tttggcaagtgattgcgtagctgtt

SEQ ID NO: 215121 - DNA, 25 bp, Homo sapien
tgcaggcgggaaacaacaggcagtt

SEQ ID NO: 215122 - DNA, 25 bp, Homo sapien
tagctgttctgcctgtgactgcagg

SEQ ID NO: 215123 - DNA, 25 bp, Homo sapien
caaagccctggttgctgattacaga

SEQ ID NO: 215124 - DNA, 25 bp, Homo sapien
aggtcaaagccctggttgctgatta

SEQ ID NO: 215125 - DNA, 25 bp, Homo sapien
ggttgctgattacagacaagatggg

SEQ ID NO: 215126 - DNA, 25 bp, Homo sapien
ggaggacagtgcaggtcaaagccct

SEQ ID NO: 215127 - DNA, 25 bp, Homo sapien
gggagggagatttttgataactgac

SEQ ID NO: 215128 - DNA, 25 bp, Homo sapien
gatttttgataactgacaaagagct

SEQ ID NO: 215129 - DNA, 25 bp, Homo sapien
gagggagatttttgataactgacaa

SEQ ID NO: 215130 - DNA, 25 bp, Homo sapien
tgcaacaggatggatcagccagccc

SEQ ID NO: 215131 - DNA, 25 bp, Homo sapien
tgaatgtgaatctctctagccaacc

SEQ ID NO: 215132 - DNA, 25 bp, Homo sapien
gctgtgcaagtatataatgacaccc

SEQ ID NO: 215133 - DNA, 25 bp, Homo sapien
agaaatgacagcttgtgaggactcc

SEQ ID NO: 215134 - DNA, 25 bp, Homo sapien
tccatgtagggaagaaggttgagtt

SEQ ID NO: 215135 - DNA, 25 bp, Homo sapien
cgtaagatgtctgattcccttagag

SEQ ID NO: 215136 - DNA, 25 bp, Homo sapien
tctctgccaactactcaattttatc

SEQ ID NO: 215137 - DNA, 25 bp, Homo sapien
aggccagtcgtaaatatttcaagct

SEQ ID NO: 215138 - DNA, 25 bp, Homo sapien
tctcccattctctaacccaagttaa

SEQ ID NO: 215139 - DNA, 25 bp, Homo sapien
caggctacccagaggacaagtgagg

SEQ ID NO: 215140 - DNA, 25 bp, Homo sapien
taccatggagatcacattaggcctg

SEQ ID NO: 215141 - DNA, 25 bp, Homo sapien
tttgaatgcaagaccaagtggaggc

SEQ ID NO: 215142 - DNA, 25 bp, Homo sapien
tgaaacctgaggagcaaatgtccca

SEQ ID NO: 215143 - DNA, 25 bp, Homo sapien
tatgtacatgggttagctgttgcac

SEQ ID NO: 215144 - DNA, 25 bp, Homo sapien
tgaataagcttcctcacacctcatt

SEQ ID NO: 215145 - DNA, 25 bp, Homo sapien
caccctgagtttctcagtgttccct

SEQ ID NO: 215146 - DNA, 25 bp, Homo sapien
ggctcctttctacactttcaggaga

SEQ ID NO: 215147 - DNA, 25 bp, Homo sapien
catggagcccctaaatcattgctga

SEQ ID NO: 215148 - DNA, 25 bp, Homo sapien
tcgcctaccgtacacatgctcagag

SEQ ID NO: 215149 - DNA, 25 bp, Homo sapien
cattgctgactgagtagatttccca

SEQ ID NO: 215150 - DNA, 25 bp, Homo sapien
gaaacaaactccagtggcctcgaaa

SEQ ID NO: 215151 - DNA, 25 bp, Homo sapien
tctgtgtgtaagtatatgcctgtga

SEQ ID NO: 215152 - DNA, 25 bp, Homo sapien
gccttatagggaatccttgggtgac

SEQ ID NO: 215153 - DNA, 25 bp, Homo sapien
cttcagtgtatcttttgagggtgac

SEQ ID NO: 215154 - DNA, 25 bp, Homo sapien
ccttgggtgactccgtatctgtgtg

SEQ ID NO: 215155 - DNA, 25 bp, Homo sapien
agccatttcttgtgtgccttcaagc

SEQ ID NO: 215156 - DNA, 25 bp, Homo sapien
caaggggtgagatttggcttgaaaa

SEQ ID NO: 215157 - DNA, 25 bp, Homo sapien
ggcttgaaaaatgggccatcggtca

SEQ ID NO: 215158 - DNA, 25 bp, Homo sapien
atttttttctccagattagaaccag

SEQ ID NO: 215159 - DNA, 25 bp, Homo sapien
tggtgattcagctcctagcactcag

SEQ ID NO: 215160 - DNA, 25 bp, Homo sapien
ccggacacaaaaggaagctagaggc

SEQ ID NO: 215161 - DNA, 25 bp, Homo sapien
ggcacccaggaactagcaatagtgg

SEQ ID NO: 215162 - DNA, 25 bp, Homo sapien
caatagtgggaagatgataccagcc

SEQ ID NO: 215163 - DNA, 25 bp, Homo sapien
tagggatggacccaggccttggtac

SEQ ID NO: 215164 - DNA, 25 bp, Homo sapien
cagaggtgaacctagcttgggtgct

SEQ ID NO: 215165 - DNA, 25 bp, Homo sapien
taacaatcagatcagtggtaccctt

SEQ ID NO: 215166 - DNA, 25 bp, Homo sapien
aagaaatggtttggactcacgcagg

SEQ ID NO: 215167 - DNA, 25 bp, Homo sapien
tttgcttctctctaacgctcatgct

SEQ ID NO: 215168 - DNA, 25 bp, Homo sapien
gaagcaggagctattacaatcgagc

SEQ ID NO: 215169 - DNA, 25 bp, Homo sapien
ttccttcgacctcttatagccaggg

SEQ ID NO: 215170 - DNA, 25 bp, Homo sapien
attcattaatcttaaggaagcagga

SEQ ID NO: 215171 - DNA, 25 bp, Homo sapien
cagagctgggcgttacactcaaatt

SEQ ID NO: 215172 - DNA, 25 bp, Homo sapien
agagctgggcgttacactcaaatta

SEQ ID NO: 215173 - DNA, 25 bp, Homo sapien
gagctgggcgttacactcaaattac

SEQ ID NO: 215174 - DNA, 25 bp, Homo sapien
ctgtttctggtagagattttataaa

SEQ ID NO: 215175 - DNA, 25 bp, Homo sapien
tccggaaagacgtgggcagacgcct

SEQ ID NO: 215176 - DNA, 25 bp, Homo sapien
aatattcggggagtttgatctgagg

SEQ ID NO: 215177 - DNA, 25 bp, Homo sapien
agctccggaaagacgtgggcagacg

SEQ ID NO: 215178 - DNA, 25 bp, Homo sapien
aatgcaagctcatgtgtttctctgg

SEQ ID NO: 215179 - DNA, 25 bp, Homo sapien
ccagatgcccatggaaatgcaagct

SEQ ID NO: 215180 - DNA, 25 bp, Homo sapien
gatcggttccagatgcccatggaaa

SEQ ID NO: 215181 - DNA, 25 bp, Homo sapien
ggcccttgtgccgatcggttccaga

SEQ ID NO: 215182 - DNA, 25 bp, Homo sapien
cagacatattcacacacgaacacac

SEQ ID NO: 215183 - DNA, 25 bp, Homo sapien
acagacatattcacacacgaacaca

SEQ ID NO: 215184 - DNA, 25 bp, Homo sapien
ctctcgccagccgatgatcattggg

SEQ ID NO: 215185 - DNA, 25 bp, Homo sapien
gccagccgatgatcattgggccctt

SEQ ID NO: 215186 - DNA, 25 bp, Homo sapien
tcaagctctcgccagccgatgatca

SEQ ID NO: 215187 - DNA, 25 bp, Homo sapien
tcgccagccgatgatcattgggccc

SEQ ID NO: 215188 - DNA, 25 bp, Homo sapien
tcctttgctgttacaataagcttgc

SEQ ID NO: 215189 - DNA, 25 bp, Homo sapien
ggcatttcgcttcctttgctgttac

SEQ ID NO: 215190 - DNA, 25 bp, Homo sapien
ttgctgttacaataagcttgcctgc

SEQ ID NO: 215191 - DNA, 25 bp, Homo sapien
tcgcttcctttgctgttacaataag

SEQ ID NO: 215192 - DNA, 25 bp, Homo sapien
ttttctcggccagcttgtccttaga

SEQ ID NO: 215193 - DNA, 25 bp, Homo sapien
gttcacggtgagatggcggcttttc

SEQ ID NO: 215194 - DNA, 25 bp, Homo sapien
gtgagatggcggcttttctcggcca

SEQ ID NO: 215195 - DNA, 25 bp, Homo sapien
taattctggttcacggtgagatggc

SEQ ID NO: 215196 - DNA, 25 bp, Homo sapien
gatgaaattccaaacaagccagagc

SEQ ID NO: 215197 - DNA, 25 bp, Homo sapien
tagctgaacagttccacggtgccgg

SEQ ID NO: 215198 - DNA, 25 bp, Homo sapien
acggtgccgggctccagtgtgttct

SEQ ID NO: 215199 - DNA, 25 bp, Homo sapien
tctggaaggttctcgtgggctgtgc

SEQ ID NO: 215200 - DNA, 25 bp, Homo sapien
tccagaagacggaggcggggaggag

SEQ ID NO: 215201 - DNA, 25 bp, Homo sapien
tttgccgctgctttatggcccactg

SEQ ID NO: 215202 - DNA, 25 bp, Homo sapien
tctcctgcgccgtatctgagctggc

SEQ ID NO: 215203 - DNA, 25 bp, Homo sapien
cactgcggtgctgaccgtcggacat

SEQ ID NO: 215204 - DNA, 25 bp, Homo sapien
tcggacatcggccagtaccctattc

SEQ ID NO: 215205 - DNA, 25 bp, Homo sapien
tcagaggaagacaagaaagtttttc

SEQ ID NO: 215206 - DNA, 25 bp, Homo sapien
gaagacaagaaagtttttcttctca

SEQ ID NO: 215207 - DNA, 25 bp, Homo sapien
cagaggaagacaagaaagtttttct

SEQ ID NO: 215208 - DNA, 25 bp, Homo sapien
aaacttgtacccgtgtccttcatca

SEQ ID NO: 215209 - DNA, 25 bp, Homo sapien
atcagatccgccccatctacattaa

SEQ ID NO: 215210 - DNA, 25 bp, Homo sapien
gtccttcatcaatcagctcagtgga

SEQ ID NO: 215211 - DNA, 25 bp, Homo sapien
cagctcagtggaaatgttattctca

SEQ ID NO: 215212 - DNA, 25 bp, Homo sapien
cggtctggaccatgagtgacatgct

SEQ ID NO: 215213 - DNA, 25 bp, Homo sapien
caggaaatcggtctggaccatgagt

SEQ ID NO: 215214 - DNA, 25 bp, Homo sapien
cagatcaggaaatcggtctggacca

SEQ ID NO: 215215 - DNA, 25 bp, Homo sapien
ccttggccacccagatcaggaaatc

SEQ ID NO: 215216 - DNA, 25 bp, Homo sapien
aactataagaagctggaatgttccc

SEQ ID NO: 215217 - DNA, 25 bp, Homo sapien
gaagctggaatgttcccctccaagg

SEQ ID NO: 215218 - DNA, 25 bp, Homo sapien
tataagaagctggaatgttcccctc

SEQ ID NO: 215219 - DNA, 25 bp, Homo sapien
agaagctggaatgttcccctccaag

SEQ ID NO: 215220 - DNA, 25 bp, Homo sapien
ctttgtatttcttagcccgccagga

SEQ ID NO: 215221 - DNA, 25 bp, Homo sapien
gaagcgttcactctagcccaaatga

SEQ ID NO: 215222 - DNA, 25 bp, Homo sapien
caaagagcctgagaagcgcagacgt

SEQ ID NO: 215223 - DNA, 25 bp, Homo sapien
ggaaagggtcctacacaaattgcta

SEQ ID NO: 215224 - DNA, 25 bp, Homo sapien
tcaccaggaatatgagcagctcact

SEQ ID NO: 215225 - DNA, 25 bp, Homo sapien
tagtgaggctcgaatacccattagg

SEQ ID NO: 215226 - DNA, 25 bp, Homo sapien
ccaagccaggcttcttagggtgggt

SEQ ID NO: 215227 - DNA, 25 bp, Homo sapien
cagaaccggaaacagatggcagcaa

SEQ ID NO: 215228 - DNA, 25 bp, Homo sapien
gtctctctcctccgcgtccacatct

SEQ ID NO: 215229 - DNA, 25 bp, Homo sapien
cagcacatcgcttctgtctctctcc

SEQ ID NO: 215230 - DNA, 25 bp, Homo sapien
tctcctccgcgtccacatcttcagc

SEQ ID NO: 215231 - DNA, 25 bp, Homo sapien
ctctcccagcacatcgcttctgtct

SEQ ID NO: 215232 - DNA, 25 bp, Homo sapien
cagacacaatgccttgtagttgatg

SEQ ID NO: 215233 - DNA, 25 bp, Homo sapien
tggcagctcgggagtttctgtaaag

SEQ ID NO: 215234 - DNA, 25 bp, Homo sapien
tacaattggtctgggatgggatttg

SEQ ID NO: 215235 - DNA, 25 bp, Homo sapien
tgtccacagcctgaatacaattggt

SEQ ID NO: 215236 - DNA, 25 bp, Homo sapien
gagggttcctcttcatgtctttact

SEQ ID NO: 215237 - DNA, 25 bp, Homo sapien
ggcccacagagggttcctcttcatg

SEQ ID NO: 215238 - DNA, 25 bp, Homo sapien
tcactcatgcctctggttgggggtg

SEQ ID NO: 215239 - DNA, 25 bp, Homo sapien
cagatgggtcagcacaggcccacag

SEQ ID NO: 215240 - DNA, 25 bp, Homo sapien
tctcataagagggtgaagggttctt

SEQ ID NO: 215241 - DNA, 25 bp, Homo sapien
ctttttctcataagagggtgaaggg

SEQ ID NO: 215242 - DNA, 25 bp, Homo sapien
gaaattcccctaaagcattcaaatg

SEQ ID NO: 215243 - DNA, 25 bp, Homo sapien
cattcaaatgagcaaatccagggct

SEQ ID NO: 215244 - DNA, 25 bp, Homo sapien
tgagccttttggtcaggaagggggc

SEQ ID NO: 215245 - DNA, 25 bp, Homo sapien
cttgagccttttggtcaggaagggg

SEQ ID NO: 215246 - DNA, 25 bp, Homo sapien
ctgaaagacgaggggaagtcggcat

SEQ ID NO: 215247 - DNA, 25 bp, Homo sapien
tcttgcagttggaacggctagggct

SEQ ID NO: 215248 - DNA, 25 bp, Homo sapien
ggttctactgagctggacatccaag

SEQ ID NO: 215249 - DNA, 25 bp, Homo sapien
gaaggttctaagagatccaggcaga

SEQ ID NO: 215250 - DNA, 25 bp, Homo sapien
tagagcaagtgtcccatattgaagg

SEQ ID NO: 215251 - DNA, 25 bp, Homo sapien
cagtgtggcctttaagggacacaat

SEQ ID NO: 215252 - DNA, 25 bp, Homo sapien
gtgccaatgatgtcccagcagcagt

SEQ ID NO: 215253 - DNA, 25 bp, Homo sapien
ttcttgtgaccaccaggttattcag

SEQ ID NO: 215254 - DNA, 25 bp, Homo sapien
taagggacacaatctggtgccaatg

SEQ ID NO: 215255 - DNA, 25 bp, Homo sapien
gagcgcacaggtcgccgcgcgcatg

SEQ ID NO: 215256 - DNA, 25 bp, Homo sapien
gtaaaagccggcacagaacccgagc

SEQ ID NO: 215257 - DNA, 25 bp, Homo sapien
cgcgcgcatgcgcactctcctggcc

SEQ ID NO: 215258 - DNA, 25 bp, Homo sapien
gcacagaacccgagcgcacaggtcg

SEQ ID NO: 215259 - DNA, 25 bp, Homo sapien
gggcccccagcagtgtacagcccgt

SEQ ID NO: 215260 - DNA, 25 bp, Homo sapien
ggctgagtcgcgggcgtggaggcag

SEQ ID NO: 215261 - DNA, 25 bp, Homo sapien
cagcagtgtacagcccgtttccaaa

SEQ ID NO: 215262 - DNA, 25 bp, Homo sapien
ctgagtcgcgggcgtggaggcagag

SEQ ID NO: 215263 - DNA, 25 bp, Homo sapien
agcgtggcgttccagcgcaaaccaa

SEQ ID NO: 215264 - DNA, 25 bp, Homo sapien
tcactcagacactttgaaaagcgtg

SEQ ID NO: 215265 - DNA, 25 bp, Homo sapien
acactttgaaaagcgtggcgttcca

SEQ ID NO: 215266 - DNA, 25 bp, Homo sapien
tcttcccgcaagttcggggctcgag

SEQ ID NO: 215267 - DNA, 25 bp, Homo sapien
aaagtcacaatgtccctcgggagag

SEQ ID NO: 215268 - DNA, 25 bp, Homo sapien
gaggtaagaggcctcaaagtcacaa

SEQ ID NO: 215269 - DNA, 25 bp, Homo sapien
ttttctcctggctagtttgcagagg

SEQ ID NO: 215270 - DNA, 25 bp, Homo sapien
tgggaacattgccctgtgaagggca

SEQ ID NO: 215271 - DNA, 25 bp, Homo sapien
aactataacaggggaaatccttgct

SEQ ID NO: 215272 - DNA, 25 bp, Homo sapien
ttcttgatccactcaatagaatcat

SEQ ID NO: 215273 - DNA, 25 bp, Homo sapien
gatccactcaatagaatcatatcta

SEQ ID NO: 215274 - DNA, 25 bp, Homo sapien
aagctttgcatttctcaccattaag

SEQ ID NO: 215275 - DNA, 25 bp, Homo sapien
caaaccttaagctagctggaaagct

SEQ ID NO: 215276 - DNA, 25 bp, Homo sapien
aaaccttaagctagctggaaagctc

SEQ ID NO: 215277 - DNA, 25 bp, Homo sapien
cagcaaggaccctgaatcatcccgg

SEQ ID NO: 215278 - DNA, 25 bp, Homo sapien
cccggaaccgtcttggtgctgtggt

SEQ ID NO: 215279 - DNA, 25 bp, Homo sapien
tggtagacaggccacctggcacgcc

SEQ ID NO: 215280 - DNA, 25 bp, Homo sapien
ccagcgccccacattcttggtggga

SEQ ID NO: 215281 - DNA, 25 bp, Homo sapien
ctttgtccagaagttgtttatcctc

SEQ ID NO: 215282 - DNA, 25 bp, Homo sapien
ccagaagttgtttatcctccttcct

SEQ ID NO: 215283 - DNA, 25 bp, Homo sapien
gttgtttatcctccttcctcctcat

SEQ ID NO: 215284 - DNA, 25 bp, Homo sapien
gctttgtccagaagttgtttatcct

SEQ ID NO: 215285 - DNA, 25 bp, Homo sapien
caaagagtgactggccactccttcc

SEQ ID NO: 215286 - DNA, 25 bp, Homo sapien
tgtttcttcttggatcctggacgcc

SEQ ID NO: 215287 - DNA, 25 bp, Homo sapien
ttccattcaatcacctcctgtgtta

SEQ ID NO: 215288 - DNA, 25 bp, Homo sapien
gatcctggacgccaaagagtgactg

SEQ ID NO: 215289 - DNA, 25 bp, Homo sapien
caatctggggcagggttctcttgag

SEQ ID NO: 215290 - DNA, 25 bp, Homo sapien
tctgctgccatctagctggacaatc

SEQ ID NO: 215291 - DNA, 25 bp, Homo sapien
gcagggttctcttgagcctggtcat

SEQ ID NO: 215292 - DNA, 25 bp, Homo sapien
ctgccatctagctggacaatctggg

SEQ ID NO: 215293 - DNA, 25 bp, Homo sapien
gaggctaaagtcttcatctgtcccc

SEQ ID NO: 215294 - DNA, 25 bp, Homo sapien
aaggctggcgggatggtctctcctc

SEQ ID NO: 215295 - DNA, 25 bp, Homo sapien
cagctccctggagtaagagagaggc

SEQ ID NO: 215296 - DNA, 25 bp, Homo sapien
tgttccacaggaaaaacaatctccc

SEQ ID NO: 215297 - DNA, 25 bp, Homo sapien
tccaggatacttcctcgaagcagcc

SEQ ID NO: 215298 - DNA, 25 bp, Homo sapien
ctccaggatacttcctcgaagcagc

SEQ ID NO: 215299 - DNA, 25 bp, Homo sapien
ccaggatacttcctcgaagcagcca

SEQ ID NO: 215300 - DNA, 25 bp, Homo sapien
caggatacttcctcgaagcagccac

SEQ ID NO: 215301 - DNA, 25 bp, Homo sapien
tcccttgtaaggcatgccatgctat

SEQ ID NO: 215302 - DNA, 25 bp, Homo sapien
catgctatggtttcccagccacaga

SEQ ID NO: 215303 - DNA, 25 bp, Homo sapien
catatgttccataagtagaccaggg

SEQ ID NO: 215304 - DNA, 25 bp, Homo sapien
gggtatcaccaatgagcgtcttaaa

SEQ ID NO: 215305 - DNA, 25 bp, Homo sapien
ttgcccaagggaagacaccatccgt

SEQ ID NO: 215306 - DNA, 25 bp, Homo sapien
tgctgtaggcctctttgcagggccc

SEQ ID NO: 215307 - DNA, 25 bp, Homo sapien
cttctggatctagctagggccatga

SEQ ID NO: 215308 - DNA, 25 bp, Homo sapien
tccgtgtagtaaggcattggcgtca

SEQ ID NO: 215309 - DNA, 25 bp, Homo sapien
aaaatgggcccaatgctgatagcta

SEQ ID NO: 215310 - DNA, 25 bp, Homo sapien
cacaagtctgtggtagttctgttcc

SEQ ID NO: 215311 - DNA, 25 bp, Homo sapien
tctggtgatcacatgaactggtgtc

SEQ ID NO: 215312 - DNA, 25 bp, Homo sapien
tttaaccaaagtatgtctgacccac

SEQ ID NO: 215313 - DNA, 25 bp, Homo sapien
gaagaagattcgcatgtcgtgaatc

SEQ ID NO: 215314 - DNA, 25 bp, Homo sapien
gattcgcatgtcgtgaatcttgagc

SEQ ID NO: 215315 - DNA, 25 bp, Homo sapien
gggtggaagaagattcgcatgtcgt

SEQ ID NO: 215316 - DNA, 25 bp, Homo sapien
attcgcatgtcgtgaatcttgagca

SEQ ID NO: 215317 - DNA, 25 bp, Homo sapien
agactcttcaccacgacagagcctg

SEQ ID NO: 215318 - DNA, 25 bp, Homo sapien
aaagccttcagactcttcaccacga

SEQ ID NO: 215319 - DNA, 25 bp, Homo sapien
aagaaaaagccttcagactcttcac

SEQ ID NO: 215320 - DNA, 25 bp, Homo sapien
tgccaggcttgaagaaagctacagc

SEQ ID NO: 215321 - DNA, 25 bp, Homo sapien
ggcattgctcatagggaacccgcag

SEQ ID NO: 215322 - DNA, 25 bp, Homo sapien
ccatgagtattgcatgagcccagca

SEQ ID NO: 215323 - DNA, 25 bp, Homo sapien
tgtttgggccacagactggacaaca

SEQ ID NO: 215324 - DNA, 25 bp, Homo sapien
caatggccgagcctgcttcgtaagc

SEQ ID NO: 215325 - DNA, 25 bp, Homo sapien
ggctcaatgccttcttgcggccagg

SEQ ID NO: 215326 - DNA, 25 bp, Homo sapien
acagccctttgactaatgttccggg

SEQ ID NO: 215327 - DNA, 25 bp, Homo sapien
gtcaacacagccctttgactaatgt

SEQ ID NO: 215328 - DNA, 25 bp, Homo sapien
tccttcgtataattcaagagttgaa

SEQ ID NO: 215329 - DNA, 25 bp, Homo sapien
ctggcacgtgaacacatgagtgatg

SEQ ID NO: 215330 - DNA, 25 bp, Homo sapien
ccaaatcacaggtgagtgaggtctc

SEQ ID NO: 215331 - DNA, 25 bp, Homo sapien
cccaaatcacaggtgagtgaggtct

SEQ ID NO: 215332 - DNA, 25 bp, Homo sapien
acacatgagtgatgctattatcccc

SEQ ID NO: 215333 - DNA, 25 bp, Homo sapien
ctcccttgcagtcgggaatggagct

SEQ ID NO: 215334 - DNA, 25 bp, Homo sapien
ccttgcagtcgggaatggagctcag

SEQ ID NO: 215335 - DNA, 25 bp, Homo sapien
tgctttagcttgatgacgtgctcca

SEQ ID NO: 215336 - DNA, 25 bp, Homo sapien
tttagcttgatgacgtgctccagca

SEQ ID NO: 215337 - DNA, 25 bp, Homo sapien
tgcctccccattcctctgcaaataa

SEQ ID NO: 215338 - DNA, 25 bp, Homo sapien
ttcctctgcaaataaaagacagagc

SEQ ID NO: 215339 - DNA, 25 bp, Homo sapien
tctgcaaataaaagacagagcaggg

SEQ ID NO: 215340 - DNA, 25 bp, Homo sapien
ggtggacaggcagcagcccaaccat

SEQ ID NO: 215341 - DNA, 25 bp, Homo sapien
ttgggcccctcttcttctagcctgg

SEQ ID NO: 215342 - DNA, 25 bp, Homo sapien
ggcccctcttcttctagcctgggca

SEQ ID NO: 215343 - DNA, 25 bp, Homo sapien
tccttgggcccctcttcttctagcc

SEQ ID NO: 215344 - DNA, 25 bp, Homo sapien
ccctcttcttctagcctgggcagag

SEQ ID NO: 215345 - DNA, 25 bp, Homo sapien
gaaaccctggttcagcccttgagtg

SEQ ID NO: 215346 - DNA, 25 bp, Homo sapien
cagcgtgagaataaatggccagttc

SEQ ID NO: 215347 - DNA, 25 bp, Homo sapien
tggccagttcacgtaatgtctccct

SEQ ID NO: 215348 - DNA, 25 bp, Homo sapien
tccccatcaatgaagttcaggtcac

SEQ ID NO: 215349 - DNA, 25 bp, Homo sapien
tcacttggtagcagtcgcttggccc

SEQ ID NO: 215350 - DNA, 25 bp, Homo sapien
tgcaggaaacctaagcccaagtatg

SEQ ID NO: 215351 - DNA, 25 bp, Homo sapien
caagtatgccttggccttggtcagt

SEQ ID NO: 215352 - DNA, 25 bp, Homo sapien
cttgatgcaaggtcagcgtgtgccg

SEQ ID NO: 215353 - DNA, 25 bp, Homo sapien
tatcttttgcaaacagccttcaaca

SEQ ID NO: 215354 - DNA, 25 bp, Homo sapien
tgagaacgcagtagaataaggacca

SEQ ID NO: 215355 - DNA, 25 bp, Homo sapien
taggaatctacagtggttccctaca

SEQ ID NO: 215356 - DNA, 25 bp, Homo sapien
tccactatgtggcaaaggcattgtc

SEQ ID NO: 215357 - DNA, 25 bp, Homo sapien
ccgcagccaccactggagaagtagg

SEQ ID NO: 215358 - DNA, 25 bp, Homo sapien
gcagccaccactggagaagtaggca

SEQ ID NO: 215359 - DNA, 25 bp, Homo sapien
cagccaccactggagaagtaggcac

SEQ ID NO: 215360 - DNA, 25 bp, Homo sapien
agccaccactggagaagtaggcacc

SEQ ID NO: 215361 - DNA, 25 bp, Homo sapien
gggcctgataaatgccgggtactct

SEQ ID NO: 215362 - DNA, 25 bp, Homo sapien
aatgccgggtactctgtcaattggc

SEQ ID NO: 215363 - DNA, 25 bp, Homo sapien
ggtactctgtcaattggctgacatc

SEQ ID NO: 215364 - DNA, 25 bp, Homo sapien
gataaatgccgggtactctgtcaat

SEQ ID NO: 215365 - DNA, 25 bp, Homo sapien
agagtaaagcaatgggattgagcga

SEQ ID NO: 215366 - DNA, 25 bp, Homo sapien
taaagcaatgggattgagcgagttc

SEQ ID NO: 215367 - DNA, 25 bp, Homo sapien
agtaaagcaatgggattgagcgagt

SEQ ID NO: 215368 - DNA, 25 bp, Homo sapien
aagcaatgggattgagcgagttcat

SEQ ID NO: 215369 - DNA, 25 bp, Homo sapien
agtacatgcactgccaaagcgagca

SEQ ID NO: 215370 - DNA, 25 bp, Homo sapien
ttttagtacatgcactgccaaagcg

SEQ ID NO: 215371 - DNA, 25 bp, Homo sapien
ttagtacatgcactgccaaagcgag

SEQ ID NO: 215372 - DNA, 25 bp, Homo sapien
aattttagtacatgcactgccaaag

SEQ ID NO: 215373 - DNA, 25 bp, Homo sapien
ccacaaggtctcctcgttcagaccc

SEQ ID NO: 215374 - DNA, 25 bp, Homo sapien
cacaaggtctcctcgttcagaccca

SEQ ID NO: 215375 - DNA, 25 bp, Homo sapien
acaaggtctcctcgttcagacccat

SEQ ID NO: 215376 - DNA, 25 bp, Homo sapien
catggagattaatgcccaagtcaga

SEQ ID NO: 215377 - DNA, 25 bp, Homo sapien
ttaatgcccaagtcagaaaagaagc

SEQ ID NO: 215378 - DNA, 25 bp, Homo sapien
gcccaagtcagaaaagaagccgatg

SEQ ID NO: 215379 - DNA, 25 bp, Homo sapien
agcttctctgcatggagattaatgc

SEQ ID NO: 215380 - DNA, 25 bp, Homo sapien
acagcagcagatcctggtacaagtt

SEQ ID NO: 215381 - DNA, 25 bp, Homo sapien
cagcagcagatcctggtacaagttc

SEQ ID NO: 215382 - DNA, 25 bp, Homo sapien
gggagaaccttactggcaaagtcaa

SEQ ID NO: 215383 - DNA, 25 bp, Homo sapien
cttatagggatgagagatgccgcca

SEQ ID NO: 215384 - DNA, 25 bp, Homo sapien
ccacacaagtgtcggcaaggctggg

SEQ ID NO: 215385 - DNA, 25 bp, Homo sapien
ccagcatcaaggaagggagctatag

SEQ ID NO: 215386 - DNA, 25 bp, Homo sapien
caaatctgtgagtggaatgtcttga

SEQ ID NO: 215387 - DNA, 25 bp, Homo sapien
gaaatagaaagcgacggtagtgacc

SEQ ID NO: 215388 - DNA, 25 bp, Homo sapien
cagtcctagttgtgaaaggcctaaa

SEQ ID NO: 215389 - DNA, 25 bp, Homo sapien
tccccttttagaagctatacataaa

SEQ ID NO: 215390 - DNA, 25 bp, Homo sapien
tacaaaaaatgtcgttgaagaataa

SEQ ID NO: 215391 - DNA, 25 bp, Homo sapien
tattgatgtgcagtgacaagcaaaa

SEQ ID NO: 215392 - DNA, 25 bp, Homo sapien
taaaacccagggaagaaagcatggc

SEQ ID NO: 215393 - DNA, 25 bp, Homo sapien
tttgtcatcccgataaatatgaaca

SEQ ID NO: 215394 - DNA, 25 bp, Homo sapien
caaaatcttcgtccgctttttcagc

SEQ ID NO: 215395 - DNA, 25 bp, Homo sapien
ttaaagctacttctacaggaaatcg

SEQ ID NO: 215396 - DNA, 25 bp, Homo sapien
taaatcacaaagtcccacttaagtc

SEQ ID NO: 215397 - DNA, 25 bp, Homo sapien
gaataccattaactgctcacccctt

SEQ ID NO: 215398 - DNA, 25 bp, Homo sapien
ggcatctactgacaaaatatgggac

SEQ ID NO: 215399 - DNA, 25 bp, Homo sapien
taaccttgttaatgtagggcctgtg

SEQ ID NO: 215400 - DNA, 25 bp, Homo sapien
tgatttggcacttaaggcttaagcc

SEQ ID NO: 215401 - DNA, 25 bp, Homo sapien
taagtgggctataaaatccagggag

SEQ ID NO: 215402 - DNA, 25 bp, Homo sapien
catctgagatggaaagtctgctgaa

SEQ ID NO: 215403 - DNA, 25 bp, Homo sapien
tcctggtccgagagagaatcctgag

SEQ ID NO: 215404 - DNA, 25 bp, Homo sapien
tgggcaggcgtcttgagttgtccaa

SEQ ID NO: 215405 - DNA, 25 bp, Homo sapien
tctgctgaagatgggcaggcgtctt

SEQ ID NO: 215406 - DNA, 25 bp, Homo sapien
ggactcggacatgggccggaagagg

SEQ ID NO: 215407 - DNA, 25 bp, Homo sapien
gtcaaacatgtgaggggactcggac

SEQ ID NO: 215408 - DNA, 25 bp, Homo sapien
catgctaggggcaaagaggcttgcc

SEQ ID NO: 215409 - DNA, 25 bp, Homo sapien
ctggggggagagtcaaacatgtgag

SEQ ID NO: 215410 - DNA, 25 bp, Homo sapien
aaggcaaaagggttattggtgccat

SEQ ID NO: 215411 - DNA, 25 bp, Homo sapien
caggaggtcatcggcgctcagaata

SEQ ID NO: 215412 - DNA, 25 bp, Homo sapien
aaagggttattggtgccatcgggca

SEQ ID NO: 215413 - DNA, 25 bp, Homo sapien
caaaagggttattggtgccatcggg

SEQ ID NO: 215414 - DNA, 25 bp, Homo sapien
gcggcggtggcagcggcactgggaa

SEQ ID NO: 215415 - DNA, 25 bp, Homo sapien
ctgtccagcagcccggtggcagcgg

SEQ ID NO: 215416 - DNA, 25 bp, Homo sapien
ggcggtggcagcggcactgggaaac

SEQ ID NO: 215417 - DNA, 25 bp, Homo sapien
cagcagcccggtggcagcggcggtg

SEQ ID NO: 215418 - DNA, 25 bp, Homo sapien
caaagctaaagctatgctggaggcg

SEQ ID NO: 215419 - DNA, 25 bp, Homo sapien
agcaaagctaaagctatgctggagg

SEQ ID NO: 215420 - DNA, 25 bp, Homo sapien
aagctaaagctatgctggaggcggg

SEQ ID NO: 215421 - DNA, 25 bp, Homo sapien
ccagcaaagctaaagctatgctgga

SEQ ID NO: 215422 - DNA, 25 bp, Homo sapien
agggcacggcgctcttcagcgttgt

SEQ ID NO: 215423 - DNA, 25 bp, Homo sapien
caggctgcggagctcgtggatgccg

SEQ ID NO: 215424 - DNA, 25 bp, Homo sapien
tgtgcgaactggcacttgtccccgt

SEQ ID NO: 215425 - DNA, 25 bp, Homo sapien
ggcaaaagccgatggtgtggaaggt

SEQ ID NO: 215426 - DNA, 25 bp, Homo sapien
tcttgtagcggctggagttgacctg

SEQ ID NO: 215427 - DNA, 25 bp, Homo sapien
aagcggctgtctcgcgagctcagag

SEQ ID NO: 215428 - DNA, 25 bp, Homo sapien
ccccttccgagaaggagcggtctcg

SEQ ID NO: 215429 - DNA, 25 bp, Homo sapien
gcactgggagcactatagttgagca

SEQ ID NO: 215430 - DNA, 25 bp, Homo sapien
gagcaagcttggataagagctccag

SEQ ID NO: 215431 - DNA, 25 bp, Homo sapien
ttttggccccatgcgtaagaaacca

SEQ ID NO: 215432 - DNA, 25 bp, Homo sapien
tatcataggctacgttaggtcccct

SEQ ID NO: 215433 - DNA, 25 bp, Homo sapien
tcaagacctggcctaagactctcaa

SEQ ID NO: 215434 - DNA, 25 bp, Homo sapien
caccccaccgagaggattacaggaa

SEQ ID NO: 215435 - DNA, 25 bp, Homo sapien
taggagttagttcccagcccatgtg

SEQ ID NO: 215436 - DNA, 25 bp, Homo sapien
ttacaggaacccagtcgagagctgg

SEQ ID NO: 215437 - DNA, 25 bp, Homo sapien
cgagagctggttcccaacaatgagg

SEQ ID NO: 215438 - DNA, 25 bp, Homo sapien
taagcgggtcaacctgaatgcctct

SEQ ID NO: 215439 - DNA, 25 bp, Homo sapien
taaatccttactcgcgggactctcg

SEQ ID NO: 215440 - DNA, 25 bp, Homo sapien
taatgccgctggacagacctagggc

SEQ ID NO: 215441 - DNA, 25 bp, Homo sapien
aatgcctcggcaacacaggtaagcg

SEQ ID NO: 215442 - DNA, 25 bp, Homo sapien
gctcaagtcgaagatggtggcagac

SEQ ID NO: 215443 - DNA, 25 bp, Homo sapien
tggcagacacgagggtggtggtcat

SEQ ID NO: 215444 - DNA, 25 bp, Homo sapien
cttgcataaaacttcgctcaagtcg

SEQ ID NO: 215445 - DNA, 25 bp, Homo sapien
aaaacttcgctcaagtcgaagatgg

SEQ ID NO: 215446 - DNA, 25 bp, Homo sapien
gggcgaggatctggtgtgtcgcgaa

SEQ ID NO: 215447 - DNA, 25 bp, Homo sapien
tgcgttcgcgcgagccaggggcgag

SEQ ID NO: 215448 - DNA, 25 bp, Homo sapien
tggagtcccacacgccagttcccgg

SEQ ID NO: 215449 - DNA, 25 bp, Homo sapien
tgtgtcgcgaaggtcccggtgcggg

SEQ ID NO: 215450 - DNA, 25 bp, Homo sapien
cactgtgagccgcgcacaacttttt

SEQ ID NO: 215451 - DNA, 25 bp, Homo sapien
ttgacactggagttgaatcagccat

SEQ ID NO: 215452 - DNA, 25 bp, Homo sapien
tttcaagtcggctgacttccctacc

SEQ ID NO: 215453 - DNA, 25 bp, Homo sapien
ctggggcgcgcaaagcccaatttat

SEQ ID NO: 215454 - DNA, 25 bp, Homo sapien
cgggccgcggtttccatcttgagct

SEQ ID NO: 215455 - DNA, 25 bp, Homo sapien
tgtctgcacaacttaccttttcccg

SEQ ID NO: 215456 - DNA, 25 bp, Homo sapien
aggcgggctcgactttctctttttg

SEQ ID NO: 215457 - DNA, 25 bp, Homo sapien
tctctttttgccagcgggagctgaa

SEQ ID NO: 215458 - DNA, 25 bp, Homo sapien
gaacatatggcttgtcacgctgcgc

SEQ ID NO: 215459 - DNA, 25 bp, Homo sapien
tatactgttaggtttggatgccgcc

SEQ ID NO: 215460 - DNA, 25 bp, Homo sapien
gaggccgccgagtctgttatgaaac

SEQ ID NO: 215461 - DNA, 25 bp, Homo sapien
cattgcgatgtaattaggtcacccc

SEQ ID NO: 215462 - DNA, 25 bp, Homo sapien
tcacaattgtttgagaaaccggctg

SEQ ID NO: 215463 - DNA, 25 bp, Homo sapien
tattcgtaaacatctgggcaaaccc

SEQ ID NO: 215464 - DNA, 25 bp, Homo sapien
agcagagtgcgcgttgaaaccacaa

SEQ ID NO: 215465 - DNA, 25 bp, Homo sapien
ttttgctgcagccacgaacctacgt

SEQ ID NO: 215466 - DNA, 25 bp, Homo sapien
gccgaccaagggtttgttccagctc

SEQ ID NO: 215467 - DNA, 25 bp, Homo sapien
tcaggcgccccagaatggctacaaa

SEQ ID NO: 215468 - DNA, 25 bp, Homo sapien
taactcccgagggttcgcgaagctc

SEQ ID NO: 215469 - DNA, 25 bp, Homo sapien
aagctgattcctcgaatttcctcgg

SEQ ID NO: 215470 - DNA, 25 bp, Homo sapien
ccgaggcgaggcgtgcgtggccgtc

SEQ ID NO: 215471 - DNA, 25 bp, Homo sapien
gagcgagtcccttaacccttcgctg

SEQ ID NO: 215472 - DNA, 25 bp, Homo sapien
ggccctacggtgcaggaaggccgag

SEQ ID NO: 215473 - DNA, 25 bp, Homo sapien
ccagacgtggtcgacaggtgcccag

SEQ ID NO: 215474 - DNA, 25 bp, Homo sapien
ccgcgcagtccccaggctggccgcc

SEQ ID NO: 215475 - DNA, 25 bp, Homo sapien
cgcagtccccaggctggccgccgcc

SEQ ID NO: 215476 - DNA, 25 bp, Homo sapien
gtccccaggctggccgccgcctcac

SEQ ID NO: 215477 - DNA, 25 bp, Homo sapien
gcagtccccaggctggccgccgcct

SEQ ID NO: 215478 - DNA, 25 bp, Homo sapien
tctgtcccaggcccgacttccgggc

SEQ ID NO: 215479 - DNA, 25 bp, Homo sapien
ctgcactgccgcttccgaccgggag

SEQ ID NO: 215480 - DNA, 25 bp, Homo sapien
tgccgcttccgaccgggaggcggtg

SEQ ID NO: 215481 - DNA, 25 bp, Homo sapien
actgccgcttccgaccgggaggcgg

SEQ ID NO: 215482 - DNA, 25 bp, Homo sapien
aggcgctgcgggtgtacgtattcat

SEQ ID NO: 215483 - DNA, 25 bp, Homo sapien
tgggatgttcggttttgtgcaaggg

SEQ ID NO: 215484 - DNA, 25 bp, Homo sapien
gaaagtgaaagtcttcggagtgaag

SEQ ID NO: 215485 - DNA, 25 bp, Homo sapien
ggcggcccaggtattttagcttgga

SEQ ID NO: 215486 - DNA, 25 bp, Homo sapien
tgtgcagcactgggccgcaggaccc

SEQ ID NO: 215487 - DNA, 25 bp, Homo sapien
gtcacaggcgtcagcagggtacccc

SEQ ID NO: 215488 - DNA, 25 bp, Homo sapien
gaaggttaggcctagtcacaggcgt

SEQ ID NO: 215489 - DNA, 25 bp, Homo sapien
cgcaggaccccagaaggttaggcct

SEQ ID NO: 215490 - DNA, 25 bp, Homo sapien
ccagtgggtgtctacctggagctct

SEQ ID NO: 215491 - DNA, 25 bp, Homo sapien
gaaaagataaggcagtccagtgggt

SEQ ID NO: 215492 - DNA, 25 bp, Homo sapien
tgcctcatcagtaccagggctgacc

SEQ ID NO: 215493 - DNA, 25 bp, Homo sapien
gatggactccagtcgatttgccttg

SEQ ID NO: 215494 - DNA, 25 bp, Homo sapien
gaggagaatcttcaggcgcccaaga

SEQ ID NO: 215495 - DNA, 25 bp, Homo sapien
gcagacaacatcaaccctaacaggg

SEQ ID NO: 215496 - DNA, 25 bp, Homo sapien
cagcaccgagttttgtaaggaatac

SEQ ID NO: 215497 - DNA, 25 bp, Homo sapien
agggtggattccattgcctccccga

SEQ ID NO: 215498 - DNA, 25 bp, Homo sapien
caggctctggaaagaacagggcagt

SEQ ID NO: 215499 - DNA, 25 bp, Homo sapien
cagggcagttgggatagagccacca

SEQ ID NO: 215500 - DNA, 25 bp, Homo sapien
gagatcagtgtgtcgagtgcctagc

SEQ ID NO: 215501 - DNA, 25 bp, Homo sapien
cagaaagccatcatagcagggtagg

SEQ ID NO: 215502 - DNA, 25 bp, Homo sapien
tttaagctgaaccttgaaggactgg

SEQ ID NO: 215503 - DNA, 25 bp, Homo sapien
acaggagagtctacagctgaagcta

SEQ ID NO: 215504 - DNA, 25 bp, Homo sapien
caagagagtctagggtctcacatca

SEQ ID NO: 215505 - DNA, 25 bp, Homo sapien
taagatgaacggatgttctggaacc

SEQ ID NO: 215506 - DNA, 25 bp, Homo sapien
gaggttctcgctacggcttcgttcc

SEQ ID NO: 215507 - DNA, 25 bp, Homo sapien
cggaagccctcggaggcagcacgat

SEQ ID NO: 215508 - DNA, 25 bp, Homo sapien
agcacgatggacgtggccacactgc

SEQ ID NO: 215509 - DNA, 25 bp, Homo sapien
aggccatccagacgtgcacaccagg

SEQ ID NO: 215510 - DNA, 25 bp, Homo sapien
gacgagtggacggaacaactttctc

SEQ ID NO: 215511 - DNA, 25 bp, Homo sapien
ttagagaaccactggctcggctcac

SEQ ID NO: 215512 - DNA, 25 bp, Homo sapien
gcatttctaacaaatcctcaggcga

SEQ ID NO: 215513 - DNA, 25 bp, Homo sapien
agaatatgtcctgctagccccggag

SEQ ID NO: 215514 - DNA, 25 bp, Homo sapien
tctgctgagtaatgatgaacagaca

SEQ ID NO: 215515 - DNA, 25 bp, Homo sapien
aagggcagtcacatctgatggaacc

SEQ ID NO: 215516 - DNA, 25 bp, Homo sapien
cagtcacatctgatggaaccaggtc

SEQ ID NO: 215517 - DNA, 25 bp, Homo sapien
tcacatctgatggaaccaggtctgc

SEQ ID NO: 215518 - DNA, 25 bp, Homo sapien
aaaaccacaaatttactctctgtct

SEQ ID NO: 215519 - DNA, 25 bp, Homo sapien
taggttattgcaaactattgtcacc

SEQ ID NO: 215520 - DNA, 25 bp, Homo sapien
cataataggttattgcaaactattg

SEQ ID NO: 215521 - DNA, 25 bp, Homo sapien
tctatagaacaatagatcttacttt

SEQ ID NO: 215522 - DNA, 25 bp, Homo sapien
cttaatttattcattgtcccattca

SEQ ID NO: 215523 - DNA, 25 bp, Homo sapien
cttccttcttagtattgcctttgat

SEQ ID NO: 215524 - DNA, 25 bp, Homo sapien
cctttgatgtatcccccagattatg

SEQ ID NO: 215525 - DNA, 25 bp, Homo sapien
ttagtattgcctttgatgtatcccc

SEQ ID NO: 215526 - DNA, 25 bp, Homo sapien
ccctgtgagggcacaatgagaaaac

SEQ ID NO: 215527 - DNA, 25 bp, Homo sapien
gagaaaacagccatctatggactag

SEQ ID NO: 215528 - DNA, 25 bp, Homo sapien
agagagagagctaagagaactctct

SEQ ID NO: 215529 - DNA, 25 bp, Homo sapien
ttcatcacactgcatctgccagtgc

SEQ ID NO: 215530 - DNA, 25 bp, Homo sapien
tgtcctgtctctcgaccggcatctg

SEQ ID NO: 215531 - DNA, 25 bp, Homo sapien
tattgtcccaacagcgcttctcctg

SEQ ID NO: 215532 - DNA, 25 bp, Homo sapien
gaagcccacgccctatatgagtttt

SEQ ID NO: 215533 - DNA, 25 bp, Homo sapien
taaggagccctgacatactggccag

SEQ ID NO: 215534 - DNA, 25 bp, Homo sapien
taataagcaagtacctgtagcatgc

SEQ ID NO: 215535 - DNA, 25 bp, Homo sapien
taaagggcagtaagttctccctggc

SEQ ID NO: 215536 - DNA, 25 bp, Homo sapien
tgcagctatagagcaaaaacaacct

SEQ ID NO: 215537 - DNA, 25 bp, Homo sapien
tctagcctagggatgaaatcatcca

SEQ ID NO: 215538 - DNA, 25 bp, Homo sapien
agttaatgccaacgtttcgcagaag

SEQ ID NO: 215539 - DNA, 25 bp, Homo sapien
tttgatagttaatgccaacgtttcg

SEQ ID NO: 215540 - DNA, 25 bp, Homo sapien
cattaggggagtaaagttgccctct

SEQ ID NO: 215541 - DNA, 25 bp, Homo sapien
tgtacattaggggagtaaagttgcc

SEQ ID NO: 215542 - DNA, 25 bp, Homo sapien
tcacgtttttgacgtcatcccagta

SEQ ID NO: 215543 - DNA, 25 bp, Homo sapien
cacgtttttgacgtcatcccagtac

SEQ ID NO: 215544 - DNA, 25 bp, Homo sapien
cgtttttgacgtcatcccagtactg

SEQ ID NO: 215545 - DNA, 25 bp, Homo sapien
atcacgtttttgacgtcatcccagt

SEQ ID NO: 215546 - DNA, 25 bp, Homo sapien
tatgatggcttctggattggacccc

SEQ ID NO: 215547 - DNA, 25 bp, Homo sapien
tctgtaaactccctctgactaagga

SEQ ID NO: 215548 - DNA, 25 bp, Homo sapien
gatttacctccttctgtatacagag

SEQ ID NO: 215549 - DNA, 25 bp, Homo sapien
tacagagctggtttcaaagaccttc

SEQ ID NO: 215550 - DNA, 25 bp, Homo sapien
tttcacacaccgttgcctgctgtgc

SEQ ID NO: 215551 - DNA, 25 bp, Homo sapien
ctgctgtgccatcaatagaactgaa

SEQ ID NO: 215552 - DNA, 25 bp, Homo sapien
ctgtttttcacacaccgttgcctgc

SEQ ID NO: 215553 - DNA, 25 bp, Homo sapien
ccggcccagagtctttaagtgcctg

SEQ ID NO: 215554 - DNA, 25 bp, Homo sapien
taagctatagagaaggcaggacctc

SEQ ID NO: 215555 - DNA, 25 bp, Homo sapien
agatcaagtccagcagctaaggcag

SEQ ID NO: 215556 - DNA, 25 bp, Homo sapien
tctgtggctggtgcctacctggagc

SEQ ID NO: 215557 - DNA, 25 bp, Homo sapien
ggtcatgcctataccacgggtcact

SEQ ID NO: 215558 - DNA, 25 bp, Homo sapien
tacacacagtattcgacattcaggg

SEQ ID NO: 215559 - DNA, 25 bp, Homo sapien
cattaggagtagatacaggtgcccc

SEQ ID NO: 215560 - DNA, 25 bp, Homo sapien
taaagcaagctggaaccggttacaa

SEQ ID NO: 215561 - DNA, 25 bp, Homo sapien
catctgtgggtcatctcgaatagca

SEQ ID NO: 215562 - DNA, 25 bp, Homo sapien
gcaatatcaaagttgtccatactct

SEQ ID NO: 215563 - DNA, 25 bp, Homo sapien
ttttaataccatctgtgccaagcaa

SEQ ID NO: 215564 - DNA, 25 bp, Homo sapien
ttaataccatctgtgccaagcaata

SEQ ID NO: 215565 - DNA, 25 bp, Homo sapien
ttttttaataccatctgtgccaagc

SEQ ID NO: 215566 - DNA, 25 bp, Homo sapien
tgctgataaagagactagtcacacc

SEQ ID NO: 215567 - DNA, 25 bp, Homo sapien
acacctctgaggggatttaaaaatg

SEQ ID NO: 215568 - DNA, 25 bp, Homo sapien
agtgtgtgctgataaagagactagt

SEQ ID NO: 215569 - DNA, 25 bp, Homo sapien
ctgataaagagactagtcacacctc

SEQ ID NO: 215570 - DNA, 25 bp, Homo sapien
cataaaatattttcatggacaagtg

SEQ ID NO: 215571 - DNA, 25 bp, Homo sapien
aaaatattttcatggacaagtgagc

SEQ ID NO: 215572 - DNA, 25 bp, Homo sapien
taaaatattttcatggacaagtgag

SEQ ID NO: 215573 - DNA, 25 bp, Homo sapien
atcataaaatattttcatggacaag

SEQ ID NO: 215574 - DNA, 25 bp, Homo sapien
aaacaagacatttcggtgcaaatag

SEQ ID NO: 215575 - DNA, 25 bp, Homo sapien
gacatttcggtgcaaatagttaatc

SEQ ID NO: 215576 - DNA, 25 bp, Homo sapien
tcctatgtcgcaacaaaacaagaca

SEQ ID NO: 215577 - DNA, 25 bp, Homo sapien
ggtgcaaatagttaatctttcctct

SEQ ID NO: 215578 - DNA, 25 bp, Homo sapien
gcgggcagggaggatcgatgccacg

SEQ ID NO: 215579 - DNA, 25 bp, Homo sapien
gggcagggaggatcgatgccacgtg

SEQ ID NO: 215580 - DNA, 25 bp, Homo sapien
tcacttcgcgggcagggaggatcga

SEQ ID NO: 215581 - DNA, 25 bp, Homo sapien
ttcgcgggcagggaggatcgatgcc

SEQ ID NO: 215582 - DNA, 25 bp, Homo sapien
tgggagctgaaaccgaacccaggca

SEQ ID NO: 215583 - DNA, 25 bp, Homo sapien
gaggctgggagctgaaaccgaaccc

SEQ ID NO: 215584 - DNA, 25 bp, Homo sapien
aggcaggagatgggcgacggcggag

SEQ ID NO: 215585 - DNA, 25 bp, Homo sapien
gggcacggcgcacaagacgagggcg

SEQ ID NO: 215586 - DNA, 25 bp, Homo sapien
ttagaggtcactctcgccgtacagc

SEQ ID NO: 215587 - DNA, 25 bp, Homo sapien
ggccatccgcgcgatgcagtactca

SEQ ID NO: 215588 - DNA, 25 bp, Homo sapien
gaaggacatgtagtccagagcacct

SEQ ID NO: 215589 - DNA, 25 bp, Homo sapien
tacagcgccgtggagaaggacatgt

SEQ ID NO: 215590 - DNA, 25 bp, Homo sapien
agccgtaaagcggcgcggcccgaca

SEQ ID NO: 215591 - DNA, 25 bp, Homo sapien
aagcctggcggcgtgaaggcagcat

SEQ ID NO: 215592 - DNA, 25 bp, Homo sapien
gcagcatgtgccgtttgcattttgc

SEQ ID NO: 215593 - DNA, 25 bp, Homo sapien
cggcccgacacagccgcaaagcctg

SEQ ID NO: 215594 - DNA, 25 bp, Homo sapien
caggatgtacggacgtaaatatcca

SEQ ID NO: 215595 - DNA, 25 bp, Homo sapien
tccacttcagtacctactttgtaag

SEQ ID NO: 215596 - DNA, 25 bp, Homo sapien
tgtacataccgcatacacaacatgt

SEQ ID NO: 215597 - DNA, 25 bp, Homo sapien
cagtacctactttgtaagccacttt

SEQ ID NO: 215598 - DNA, 25 bp, Homo sapien
tgctgtatctgtgtcggctgtctcg

SEQ ID NO: 215599 - DNA, 25 bp, Homo sapien
gcgggacatgaagtcaatgaaggcc

SEQ ID NO: 215600 - DNA, 25 bp, Homo sapien
gtccccagccaggatcttgaaggaa

SEQ ID NO: 215601 - DNA, 25 bp, Homo sapien
tgaaggaagccatgacttggtctgc

SEQ ID NO: 215602 - DNA, 25 bp, Homo sapien
tccatgctccatgtgaggtgacgca

SEQ ID NO: 215603 - DNA, 25 bp, Homo sapien
taacacactaatgacggcagggctg

SEQ ID NO: 215604 - DNA, 25 bp, Homo sapien
tgggctctgcacttggcaccatggc

SEQ ID NO: 215605 - DNA, 25 bp, Homo sapien
taatccttgtaacagtcctgtaggg

SEQ ID NO: 215606 - DNA, 25 bp, Homo sapien
aacccatggagatcaggcaggcgcg

SEQ ID NO: 215607 - DNA, 25 bp, Homo sapien
catgttgtaacccatggagatcagg

SEQ ID NO: 215608 - DNA, 25 bp, Homo sapien
gcgcggaaatcatccgtgtccatca

SEQ ID NO: 215609 - DNA, 25 bp, Homo sapien
gcaggcgcggaaatcatccgtgtcc

SEQ ID NO: 215610 - DNA, 25 bp, Homo sapien
aacgcattatttcttgccccagacg

SEQ ID NO: 215611 - DNA, 25 bp, Homo sapien
gatgcaaaaatccacccatgggatg

SEQ ID NO: 215612 - DNA, 25 bp, Homo sapien
cataggagaagatgcgaacacacat

SEQ ID NO: 215613 - DNA, 25 bp, Homo sapien
ccagtaggttgccatgaaagacagc

SEQ ID NO: 215614 - DNA, 25 bp, Homo sapien
cgtgctccatgcaggaggcgagtac

SEQ ID NO: 215615 - DNA, 25 bp, Homo sapien
cccctgagcgtgctccatgcaggag

SEQ ID NO: 215616 - DNA, 25 bp, Homo sapien
ccctgagcgtgctccatgcaggagg

SEQ ID NO: 215617 - DNA, 25 bp, Homo sapien
ccacccctgagcgtgctccatgcag

SEQ ID NO: 215618 - DNA, 25 bp, Homo sapien
tcctcgggacccagtgtgccggagt

SEQ ID NO: 215619 - DNA, 25 bp, Homo sapien
ggtcgttgccaatatcataacccaa

SEQ ID NO: 215620 - DNA, 25 bp, Homo sapien
acccaagctgatgaggcaggctttg

SEQ ID NO: 215621 - DNA, 25 bp, Homo sapien
gctttgaactcctcgggacccagtg

SEQ ID NO: 215622 - DNA, 25 bp, Homo sapien
caaggctggttttgcagggtgcatt

SEQ ID NO: 215623 - DNA, 25 bp, Homo sapien
cactaagaaagcacaggatggggct

SEQ ID NO: 215624 - DNA, 25 bp, Homo sapien
cacgtcccggggaagtgccctccag

SEQ ID NO: 215625 - DNA, 25 bp, Homo sapien
gcaggctgacggcagtttccccttt

SEQ ID NO: 215626 - DNA, 25 bp, Homo sapien
gatggtcctggcgatggtggtgagc

SEQ ID NO: 215627 - DNA, 25 bp, Homo sapien
gctgatgcccttggcatcccgggtc

SEQ ID NO: 215628 - DNA, 25 bp, Homo sapien
tgcccttggcatcccgggtcaggat

SEQ ID NO: 215629 - DNA, 25 bp, Homo sapien
ctggttctctacctcattgatggtc

SEQ ID NO: 215630 - DNA, 25 bp, Homo sapien
ccacgggctcccgaagaggaacaag

SEQ ID NO: 215631 - DNA, 25 bp, Homo sapien
cacgggctcccgaagaggaacaagg

SEQ ID NO: 215632 - DNA, 25 bp, Homo sapien
gcatctcaatggagatcctcccgat

SEQ ID NO: 215633 - DNA, 25 bp, Homo sapien
tctttggcttgtagttgacgatgct

SEQ ID NO: 215634 - DNA, 25 bp, Homo sapien
ggtggtcgccctccagctgatcaat

SEQ ID NO: 215635 - DNA, 25 bp, Homo sapien
tgacgatgctcttctcatactgccg

SEQ ID NO: 215636 - DNA, 25 bp, Homo sapien
agagcttggtccctccgaggcacca

SEQ ID NO: 215637 - DNA, 25 bp, Homo sapien
ggcatgctcctccgtcagagcttgg

SEQ ID NO: 215638 - DNA, 25 bp, Homo sapien
ctgggctccaaactgcttgcgtagc

SEQ ID NO: 215639 - DNA, 25 bp, Homo sapien
tagcctctcattgtgctgctgtcgg

SEQ ID NO: 215640 - DNA, 25 bp, Homo sapien
tctcctgaggcgtgatggttgtgta

SEQ ID NO: 215641 - DNA, 25 bp, Homo sapien
tccttgtcggcatcagggagggtgg

SEQ ID NO: 215642 - DNA, 25 bp, Homo sapien
ggtctggacaatcttggacacctca

SEQ ID NO: 215643 - DNA, 25 bp, Homo sapien
catattgacgtggtaggtctggaca

SEQ ID NO: 215644 - DNA, 25 bp, Homo sapien
tgtgggcaagaggaacaaagggagc

SEQ ID NO: 215645 - DNA, 25 bp, Homo sapien
gagatgggaatatgtgggcaagagg

SEQ ID NO: 215646 - DNA, 25 bp, Homo sapien
acagagatgggaatatgtgggcaag

SEQ ID NO: 215647 - DNA, 25 bp, Homo sapien
ctggacagagatgggaatatgtggg

SEQ ID NO: 215648 - DNA, 25 bp, Homo sapien
ctggtgtgttcaccacctcacaggt

SEQ ID NO: 215649 - DNA, 25 bp, Homo sapien
ggtgtgttcaccacctcacaggtca

SEQ ID NO: 215650 - DNA, 25 bp, Homo sapien
aggtgacctcccacaacatgagctt

SEQ ID NO: 215651 - DNA, 25 bp, Homo sapien
ggtgacctcccacaacatgagcttc

SEQ ID NO: 215652 - DNA, 25 bp, Homo sapien
aaagtgacccacagagcatgggcca

SEQ ID NO: 215653 - DNA, 25 bp, Homo sapien
aatcaaggttcagaatatggtatat

SEQ ID NO: 215654 - DNA, 25 bp, Homo sapien
caaaataagtcaaatgcaaaggttc

SEQ ID NO: 215655 - DNA, 25 bp, Homo sapien
gactgtagtcaaattcttacctttg

SEQ ID NO: 215656 - DNA, 25 bp, Homo sapien
ctcctcaatggtgtgcacaatgaag

SEQ ID NO: 215657 - DNA, 25 bp, Homo sapien
tgtgcacaatgaaggtgtcctgcag

SEQ ID NO: 215658 - DNA, 25 bp, Homo sapien
ccaagtacagctggtcaatggtctc

SEQ ID NO: 215659 - DNA, 25 bp, Homo sapien
agttgttgaagggtgcagcccgctt

SEQ ID NO: 215660 - DNA, 25 bp, Homo sapien
ggcgttgacactgggtgagtcataa

SEQ ID NO: 215661 - DNA, 25 bp, Homo sapien
cagatcttttggcaacgggcgttga

SEQ ID NO: 215662 - DNA, 25 bp, Homo sapien
ttagggcccccagattgtcccactg

SEQ ID NO: 215663 - DNA, 25 bp, Homo sapien
agagcttcccttcgcttctgagtta

SEQ ID NO: 215664 - DNA, 25 bp, Homo sapien
ttgagctcctgtgcgatggcggcaa

SEQ ID NO: 215665 - DNA, 25 bp, Homo sapien
gtctcatagtccttctgtcgcagca

SEQ ID NO: 215666 - DNA, 25 bp, Homo sapien
ggtggcggtctcatagtccttctgt

SEQ ID NO: 215667 - DNA, 25 bp, Homo sapien
gatggcggcaatctgctccacacgg

SEQ ID NO: 215668 - DNA, 25 bp, Homo sapien
cagggccattgttagacgacgctca

SEQ ID NO: 215669 - DNA, 25 bp, Homo sapien
tactgtgagttgctgggccctcagc

SEQ ID NO: 215670 - DNA, 25 bp, Homo sapien
catgaaagtgtctacgcaggaaggc

SEQ ID NO: 215671 - DNA, 25 bp, Homo sapien
gcatgacgctatacacacagcggga

SEQ ID NO: 215672 - DNA, 25 bp, Homo sapien
cctttgcgaaactgtgctgcctggc

SEQ ID NO: 215673 - DNA, 25 bp, Homo sapien
gcccaggatagattctttagacagt

SEQ ID NO: 215674 - DNA, 25 bp, Homo sapien
catgctgacagcctttgcgaaactg

SEQ ID NO: 215675 - DNA, 25 bp, Homo sapien
tttccttggcggctccttcagcaga

SEQ ID NO: 215676 - DNA, 25 bp, Homo sapien
tgatctgaagtagaacagtcatcct

SEQ ID NO: 215677 - DNA, 25 bp, Homo sapien
ggattctcacaggagctcaaatcct

SEQ ID NO: 215678 - DNA, 25 bp, Homo sapien
tgtcaggggcggcactggattctca

SEQ ID NO: 215679 - DNA, 25 bp, Homo sapien
gaagtagaacagtcatcctgaaagc

SEQ ID NO: 215680 - DNA, 25 bp, Homo sapien
tccagtcgctccagcctccggatct

SEQ ID NO: 215681 - DNA, 25 bp, Homo sapien
ggtccagtcgctccagcctccggat

SEQ ID NO: 215682 - DNA, 25 bp, Homo sapien
caggtggtccagtcgctccagcctc

SEQ ID NO: 215683 - DNA, 25 bp, Homo sapien
gtccagtcgctccagcctccggatc

SEQ ID NO: 215684 - DNA, 25 bp, Homo sapien
ggcagccccaggcattgttgatgtc

SEQ ID NO: 215685 - DNA, 25 bp, Homo sapien
caggcagccccaggcattgttgatg

SEQ ID NO: 215686 - DNA, 25 bp, Homo sapien
ctccaggcagccccaggcattgttg

SEQ ID NO: 215687 - DNA, 25 bp, Homo sapien
tccaggcagccccaggcattgttga

SEQ ID NO: 215688 - DNA, 25 bp, Homo sapien
ccataaagctgaatttgaccacaac

SEQ ID NO: 215689 - DNA, 25 bp, Homo sapien
taaagctgaatttgaccacaactag

SEQ ID NO: 215690 - DNA, 25 bp, Homo sapien
gctgaatttgaccacaactaggagc

SEQ ID NO: 215691 - DNA, 25 bp, Homo sapien
ccccataaagctgaatttgaccaca

SEQ ID NO: 215692 - DNA, 25 bp, Homo sapien
gcatggtgttctcgggcacccggtt

SEQ ID NO: 215693 - DNA, 25 bp, Homo sapien
ccacgggattgtgcggcggatccac

SEQ ID NO: 215694 - DNA, 25 bp, Homo sapien
acccggttctccagccacgggattg

SEQ ID NO: 215695 - DNA, 25 bp, Homo sapien
ctgttgcatggcatgcatggtgttc

SEQ ID NO: 215696 - DNA, 25 bp, Homo sapien
tctcgtagtcttccataagctgctc

SEQ ID NO: 215697 - DNA, 25 bp, Homo sapien
ggttgacggccaacaccttgcagat

SEQ ID NO: 215698 - DNA, 25 bp, Homo sapien
agctgctcgttctcctggttgacgg

SEQ ID NO: 215699 - DNA, 25 bp, Homo sapien
gcagatgcgattggctgctgtctcc

SEQ ID NO: 215700 - DNA, 25 bp, Homo sapien
tgtgctgacaaagcccctcccatcc

SEQ ID NO: 215701 - DNA, 25 bp, Homo sapien
acaaagcccctcccatccctgcagc

SEQ ID NO: 215702 - DNA, 25 bp, Homo sapien
ctgtgctgacaaagcccctcccatc

SEQ ID NO: 215703 - DNA, 25 bp, Homo sapien
aagcccctcccatccctgcagctcc

SEQ ID NO: 215704 - DNA, 25 bp, Homo sapien
aggccaggcttaggcccacgggaca

SEQ ID NO: 215705 - DNA, 25 bp, Homo sapien
ggcttaggcccacgggacacgatcc

SEQ ID NO: 215706 - DNA, 25 bp, Homo sapien
cagcctcagcctgagaagtaagatg

SEQ ID NO: 215707 - DNA, 25 bp, Homo sapien
ccaggcttaggcccacgggacacga

SEQ ID NO: 215708 - DNA, 25 bp, Homo sapien
caggtgcatgcgccactatgtctgg

SEQ ID NO: 215709 - DNA, 25 bp, Homo sapien
tgcgcccaacctgaattttcatgtt

SEQ ID NO: 215710 - DNA, 25 bp, Homo sapien
aggtgcatgcgccactatgtctggc

SEQ ID NO: 215711 - DNA, 25 bp, Homo sapien
gagcctctgcgcccaacctgaattt

SEQ ID NO: 215712 - DNA, 25 bp, Homo sapien
actacacccacacgcatctcacatt

SEQ ID NO: 215713 - DNA, 25 bp, Homo sapien
agcaccaatgggcatgaagcccggg

SEQ ID NO: 215714 - DNA, 25 bp, Homo sapien
accaatgggcatgaagcccgggaca

SEQ ID NO: 215715 - DNA, 25 bp, Homo sapien
acttcatacccactacacccacacg

SEQ ID NO: 215716 - DNA, 25 bp, Homo sapien
ggcctcatcatgcattttaaaacgg

SEQ ID NO: 215717 - DNA, 25 bp, Homo sapien
aggagggtgctatcacacccggcta

SEQ ID NO: 215718 - DNA, 25 bp, Homo sapien
gggattacaggagggtgctatcaca

SEQ ID NO: 215719 - DNA, 25 bp, Homo sapien
cagcccggcctcatcatgcatttta

SEQ ID NO: 215720 - DNA, 25 bp, Homo sapien
ggagatctgcatgagacgtgaagat

SEQ ID NO: 215721 - DNA, 25 bp, Homo sapien
gcaggagatctgcatgagacgtgaa

SEQ ID NO: 215722 - DNA, 25 bp, Homo sapien
gatctgcatgagacgtgaagattct

SEQ ID NO: 215723 - DNA, 25 bp, Homo sapien
tctgcatgagacgtgaagattctgt

SEQ ID NO: 215724 - DNA, 25 bp, Homo sapien
gggggaggggtgtatgctgcctaag

SEQ ID NO: 215725 - DNA, 25 bp, Homo sapien
gaggggtgtatgctgcctaagcctg

SEQ ID NO: 215726 - DNA, 25 bp, Homo sapien
ggaggggtgtatgctgcctaagcct

SEQ ID NO: 215727 - DNA, 25 bp, Homo sapien
gggaggggtgtatgctgcctaagcc

SEQ ID NO: 215728 - DNA, 25 bp, Homo sapien
gcaggaggacatggtttggggtcca

SEQ ID NO: 215729 - DNA, 25 bp, Homo sapien
gaaggcgtggtagaagctagacacg

SEQ ID NO: 215730 - DNA, 25 bp, Homo sapien
agaaggcgtggtagaagctagacac

SEQ ID NO: 215731 - DNA, 25 bp, Homo sapien
aaggcgtggtagaagctagacacgt

SEQ ID NO: 215732 - DNA, 25 bp, Homo sapien
catccggtcgggcagttccaacgat

SEQ ID NO: 215733 - DNA, 25 bp, Homo sapien
ttctcatccggtcgggcagttccaa

SEQ ID NO: 215734 - DNA, 25 bp, Homo sapien
tccggtcgggcagttccaacgatgt

SEQ ID NO: 215735 - DNA, 25 bp, Homo sapien
ctttctcatccggtcgggcagttcc

SEQ ID NO: 215736 - DNA, 25 bp, Homo sapien
ctgtcaagaaaaatctggagttaaa

SEQ ID NO: 215737 - DNA, 25 bp, Homo sapien
tcaagaaaaatctggagttaaagcc

SEQ ID NO: 215738 - DNA, 25 bp, Homo sapien
aagaaaaatctggagttaaagccag

SEQ ID NO: 215739 - DNA, 25 bp, Homo sapien
gtcaagaaaaatctggagttaaagc

SEQ ID NO: 215740 - DNA, 25 bp, Homo sapien
ccgtattcagatttgtgagtggatc

SEQ ID NO: 215741 - DNA, 25 bp, Homo sapien
caaaagccgtattcagatttgtgag

SEQ ID NO: 215742 - DNA, 25 bp, Homo sapien
tgccacgtcaaaagccgtattcaga

SEQ ID NO: 215743 - DNA, 25 bp, Homo sapien
tctctgccacgtcaaaagccgtatt

SEQ ID NO: 215744 - DNA, 25 bp, Homo sapien
gttctccagcatcaaggtgaagtag

SEQ ID NO: 215745 - DNA, 25 bp, Homo sapien
ggtctttccttggatggccatgcca

SEQ ID NO: 215746 - DNA, 25 bp, Homo sapien
tctgagcacagataggcgacattcc

SEQ ID NO: 215747 - DNA, 25 bp, Homo sapien
tggccactgagaagcaagacgccct

SEQ ID NO: 215748 - DNA, 25 bp, Homo sapien
agtcaatcagctcgggccggtgtcg

SEQ ID NO: 215749 - DNA, 25 bp, Homo sapien
ccggtgtcggtggatcaaagcacag

SEQ ID NO: 215750 - DNA, 25 bp, Homo sapien
cgcagcttcccgtagtcaatcagct

SEQ ID NO: 215751 - DNA, 25 bp, Homo sapien
gtggatcaaagcacagaagccgagg

SEQ ID NO: 215752 - DNA, 25 bp, Homo sapien
gggaggcagcctggttctgtgagag

SEQ ID NO: 215753 - DNA, 25 bp, Homo sapien
agctcccgggggaggcagcctggtt

SEQ ID NO: 215754 - DNA, 25 bp, Homo sapien
ggttctgtgagagcccctcagaccc

SEQ ID NO: 215755 - DNA, 25 bp, Homo sapien
tgagactgacccagccaagggggtc

SEQ ID NO: 215756 - DNA, 25 bp, Homo sapien
tgacatttttgtaaggggctgtctt

SEQ ID NO: 215757 - DNA, 25 bp, Homo sapien
gagcagcccttccttggctgaagtc

SEQ ID NO: 215758 - DNA, 25 bp, Homo sapien
accacaggagcagcccttccttggc

SEQ ID NO: 215759 - DNA, 25 bp, Homo sapien
cttatgtggaagttctggatgttga

SEQ ID NO: 215760 - DNA, 25 bp, Homo sapien
aaataagtcggcaacctctatcagg

SEQ ID NO: 215761 - DNA, 25 bp, Homo sapien
ggagccctggccatcaagtctattc

SEQ ID NO: 215762 - DNA, 25 bp, Homo sapien
gaagaaagcattaggactcctagac

SEQ ID NO: 215763 - DNA, 25 bp, Homo sapien
tgttcagagctagtcgtgttacacg

SEQ ID NO: 215764 - DNA, 25 bp, Homo sapien
tggaatcaagcgtagagatcacctc

SEQ ID NO: 215765 - DNA, 25 bp, Homo sapien
caaaaactgcccgagtgtggaatca

SEQ ID NO: 215766 - DNA, 25 bp, Homo sapien
tgacattcaagggttcctacaaaga

SEQ ID NO: 215767 - DNA, 25 bp, Homo sapien
tgctgcatcacagagtgtcacacct

SEQ ID NO: 215768 - DNA, 25 bp, Homo sapien
tggcaaagcgcaggatgatggtcca

SEQ ID NO: 215769 - DNA, 25 bp, Homo sapien
cttccacggagatgtcctggatggc

SEQ ID NO: 215770 - DNA, 25 bp, Homo sapien
atcttcacattcccatccacgattt

SEQ ID NO: 215771 - DNA, 25 bp, Homo sapien
agggtcatcttcacattcccatcca

SEQ ID NO: 215772 - DNA, 25 bp, Homo sapien
agggtgtaatcaatcctagttggag

SEQ ID NO: 215773 - DNA, 25 bp, Homo sapien
gcaataaactgtgacaggtgctgga

SEQ ID NO: 215774 - DNA, 25 bp, Homo sapien
taaagttaatgcaataaactgtgac

SEQ ID NO: 215775 - DNA, 25 bp, Homo sapien
agacagtgggtacatcagggaaggc

SEQ ID NO: 215776 - DNA, 25 bp, Homo sapien
catcttgcctcgctctggcttggcc

SEQ ID NO: 215777 - DNA, 25 bp, Homo sapien
tcatcttgcctcgctctggcttggc

SEQ ID NO: 215778 - DNA, 25 bp, Homo sapien
ggccttgttgacgttggagatcttg

SEQ ID NO: 215779 - DNA, 25 bp, Homo sapien
cttgttgacgttggagatcttgtgc

SEQ ID NO: 215780 - DNA, 25 bp, Homo sapien
cagatgccaaggtgtcaggcagcac

SEQ ID NO: 215781 - DNA, 25 bp, Homo sapien
tcagacccacgctcctaggatgaat

SEQ ID NO: 215782 - DNA, 25 bp, Homo sapien
gaccaaaaccagctgcgctcatagg

SEQ ID NO: 215783 - DNA, 25 bp, Homo sapien
cgctcataggcagagcagatgccaa

SEQ ID NO: 215784 - DNA, 25 bp, Homo sapien
agcatgagcttcaggccatcccgga

SEQ ID NO: 215785 - DNA, 25 bp, Homo sapien
tgggagttacaccatgccgtgaatg

SEQ ID NO: 215786 - DNA, 25 bp, Homo sapien
gaagtcctcttcgatgttctcgatc

SEQ ID NO: 215787 - DNA, 25 bp, Homo sapien
ctgtgtccccgccttccggaggtgg

SEQ ID NO: 215788 - DNA, 25 bp, Homo sapien
ggtgatgggacaaacagtgctctta

SEQ ID NO: 215789 - DNA, 25 bp, Homo sapien
agcgtatgtaccaagcatccttcct

SEQ ID NO: 215790 - DNA, 25 bp, Homo sapien
ggacagggaagcgtatgtaccaagc

SEQ ID NO: 215791 - DNA, 25 bp, Homo sapien
ttagggaccccctggacacagaaga

SEQ ID NO: 215792 - DNA, 25 bp, Homo sapien
gcaactcgaagggatgctttcaggt

SEQ ID NO: 215793 - DNA, 25 bp, Homo sapien
actcgaagggatgctttcaggtcca

SEQ ID NO: 215794 - DNA, 25 bp, Homo sapien
ccccagcaactcgaagggatgcttt

SEQ ID NO: 215795 - DNA, 25 bp, Homo sapien
tccttgaggggaactgtgtcagccc

SEQ ID NO: 215796 - DNA, 25 bp, Homo sapien
ctggtgtgttcgtgggagagggctg

SEQ ID NO: 215797 - DNA, 25 bp, Homo sapien
gctcttttttgcaccggtgctggtg

SEQ ID NO: 215798 - DNA, 25 bp, Homo sapien
agatgacaacatgcgagctcttttt

SEQ ID NO: 215799 - DNA, 25 bp, Homo sapien
tccaagatgacaacatgcgagctct

SEQ ID NO: 215800 - DNA, 25 bp, Homo sapien
tgggagaggggtggaactgtggtga

SEQ ID NO: 215801 - DNA, 25 bp, Homo sapien
ctgggagaggggtggaactgtggtg

SEQ ID NO: 215802 - DNA, 25 bp, Homo sapien
agaggggtggaactgtggtgagttc

SEQ ID NO: 215803 - DNA, 25 bp, Homo sapien
ggagaggggtggaactgtggtgagt

SEQ ID NO: 215804 - DNA, 25 bp, Homo sapien
tctaaaaggatgtctgaataatcac

SEQ ID NO: 215805 - DNA, 25 bp, Homo sapien
ttttagattctaaaaggatgtctga

SEQ ID NO: 215806 - DNA, 25 bp, Homo sapien
taaaaggatgtctgaataatcacac

SEQ ID NO: 215807 - DNA, 25 bp, Homo sapien
ttagattctaaaaggatgtctgaat

SEQ ID NO: 215808 - DNA, 25 bp, Homo sapien
cagttgtctgtaaatgtggttggtt

SEQ ID NO: 215809 - DNA, 25 bp, Homo sapien
ccagtaactgaactgattaggattt

SEQ ID NO: 215810 - DNA, 25 bp, Homo sapien
aaaatgctaacagggcttgcactcc

SEQ ID NO: 215811 - DNA, 25 bp, Homo sapien
ctgtaaatgtggttggttgtgggct

SEQ ID NO: 215812 - DNA, 25 bp, Homo sapien
gagaagcctccattgacaaaggtgc

SEQ ID NO: 215813 - DNA, 25 bp, Homo sapien
agaagcctccattgacaaaggtgct

SEQ ID NO: 215814 - DNA, 25 bp, Homo sapien
gaagcctccattgacaaaggtgctt

SEQ ID NO: 215815 - DNA, 25 bp, Homo sapien
agagaagcctccattgacaaaggtg

SEQ ID NO: 215816 - DNA, 25 bp, Homo sapien
gcatccactgatgttgaagacgtta

SEQ ID NO: 215817 - DNA, 25 bp, Homo sapien
ggccagcacctgtgctcagcgttga

SEQ ID NO: 215818 - DNA, 25 bp, Homo sapien
gctcagcgttgagtcctctgcagca

SEQ ID NO: 215819 - DNA, 25 bp, Homo sapien
tgtgtgaaccagcagggtccttgga

SEQ ID NO: 215820 - DNA, 25 bp, Homo sapien
ctccttgggcatagtgactgggaac

SEQ ID NO: 215821 - DNA, 25 bp, Homo sapien
cttgggcatagtgactgggaactct

SEQ ID NO: 215822 - DNA, 25 bp, Homo sapien
gggcatagtgactgggaactctgac

SEQ ID NO: 215823 - DNA, 25 bp, Homo sapien
ccttgggcatagtgactgggaactc

SEQ ID NO: 215824 - DNA, 25 bp, Homo sapien
catggtggttccggtcaccaggctg

SEQ ID NO: 215825 - DNA, 25 bp, Homo sapien
ccatggtggttccggtcaccaggct

SEQ ID NO: 215826 - DNA, 25 bp, Homo sapien
atggtggttccggtcaccaggctgt

SEQ ID NO: 215827 - DNA, 25 bp, Homo sapien
tggaggccccagaggacgaattact

SEQ ID NO: 215828 - DNA, 25 bp, Homo sapien
cagaggacgaattactgcacctctt

SEQ ID NO: 215829 - DNA, 25 bp, Homo sapien
gaggccccagaggacgaattactgc

SEQ ID NO: 215830 - DNA, 25 bp, Homo sapien
gccccagaggacgaattactgcacc

SEQ ID NO: 215831 - DNA, 25 bp, Homo sapien
aaaggaattctcaaagctccaggaa

SEQ ID NO: 215832 - DNA, 25 bp, Homo sapien
ctgagggacaaccacccggcagcag

SEQ ID NO: 215833 - DNA, 25 bp, Homo sapien
tgccagagataccaggggatgaggc

SEQ ID NO: 215834 - DNA, 25 bp, Homo sapien
acccaagcccgcaggatgccagaga

SEQ ID NO: 215835 - DNA, 25 bp, Homo sapien
aggcccaggacaatgtgacccagtg

SEQ ID NO: 215836 - DNA, 25 bp, Homo sapien
ccaggacaatgtgacccagtgccat

SEQ ID NO: 215837 - DNA, 25 bp, Homo sapien
ccaggcccaggacaatgtgacccag

SEQ ID NO: 215838 - DNA, 25 bp, Homo sapien
gcccaggacaatgtgacccagtgcc

SEQ ID NO: 215839 - DNA, 25 bp, Homo sapien
aggaggaacaggcagagaggccaca

SEQ ID NO: 215840 - DNA, 25 bp, Homo sapien
agagaggccacagctttgcacccat

SEQ ID NO: 215841 - DNA, 25 bp, Homo sapien
ggcagagaggccacagctttgcacc

SEQ ID NO: 215842 - DNA, 25 bp, Homo sapien
gaaggaggaacaggcagagaggcca

SEQ ID NO: 215843 - DNA, 25 bp, Homo sapien
ccgggaccctgcgggctgcagacag

SEQ ID NO: 215844 - DNA, 25 bp, Homo sapien
gggaccctgcgggctgcagacaggt

SEQ ID NO: 215845 - DNA, 25 bp, Homo sapien
ggctgcagacaggtcgaagtgacag

SEQ ID NO: 215846 - DNA, 25 bp, Homo sapien
ctgcagacaggtcgaagtgacaggc

SEQ ID NO: 215847 - DNA, 25 bp, Homo sapien
cctgaaagcaaacatctggctttaa

SEQ ID NO: 215848 - DNA, 25 bp, Homo sapien
ctgctggaggctgcctgaaagcaaa

SEQ ID NO: 215849 - DNA, 25 bp, Homo sapien
tggaggctgcctgaaagcaaacatc

SEQ ID NO: 215850 - DNA, 25 bp, Homo sapien
tcagcctggcaaagtccagctgctg

SEQ ID NO: 215851 - DNA, 25 bp, Homo sapien
tgatgcaagcagacctgtaacagct

SEQ ID NO: 215852 - DNA, 25 bp, Homo sapien
cagagggtttcttgacctagagcct

SEQ ID NO: 215853 - DNA, 25 bp, Homo sapien
tcaacctagtccactctgatgcaag

SEQ ID NO: 215854 - DNA, 25 bp, Homo sapien
tcctggtccccatatacactgtggc

SEQ ID NO: 215855 - DNA, 25 bp, Homo sapien
gactagaggatcagaggtcactccg

SEQ ID NO: 215856 - DNA, 25 bp, Homo sapien
ggtgggccacctgcctgatatggat

SEQ ID NO: 215857 - DNA, 25 bp, Homo sapien
gacacagatgtttgcgctcggtggc

SEQ ID NO: 215858 - DNA, 25 bp, Homo sapien
agttaaaaagccctctctccgcagg

SEQ ID NO: 215859 - DNA, 25 bp, Homo sapien
ttttacgacaagagcccacatccag

SEQ ID NO: 215860 - DNA, 25 bp, Homo sapien
cgagtcaggatccccactgatgcca

SEQ ID NO: 215861 - DNA, 25 bp, Homo sapien
tattgccctgcatcttttacgacaa

SEQ ID NO: 215862 - DNA, 25 bp, Homo sapien
agctgcctttattgccctgcatctt

SEQ ID NO: 215863 - DNA, 25 bp, Homo sapien
cagctcgcaggtggagtgagctcat

SEQ ID NO: 215864 - DNA, 25 bp, Homo sapien
agctcgcaggtggagtgagctcatt

SEQ ID NO: 215865 - DNA, 25 bp, Homo sapien
ccacctggccagttatccagagcag

SEQ ID NO: 215866 - DNA, 25 bp, Homo sapien
gcagttagttcaaaccctccggtga

SEQ ID NO: 215867 - DNA, 25 bp, Homo sapien
ccagttatccagagcagttagttca

SEQ ID NO: 215868 - DNA, 25 bp, Homo sapien
tagttcaaaccctccggtgagcacc

SEQ ID NO: 215869 - DNA, 25 bp, Homo sapien
cacagcacggggacttcagtctcca

SEQ ID NO: 215870 - DNA, 25 bp, Homo sapien
acacagcacggggacttcagtctcc

SEQ ID NO: 215871 - DNA, 25 bp, Homo sapien
cttcagtctccacgaccagagaggg

SEQ ID NO: 215872 - DNA, 25 bp, Homo sapien
tccacgaccagagaggggccacttc

SEQ ID NO: 215873 - DNA, 25 bp, Homo sapien
atgagctcatcagggagctcctgaa

SEQ ID NO: 215874 - DNA, 25 bp, Homo sapien
catcagggagctcctgaaagtccat

SEQ ID NO: 215875 - DNA, 25 bp, Homo sapien
gctcatcagggagctcctgaaagtc

SEQ ID NO: 215876 - DNA, 25 bp, Homo sapien
gagctcatcagggagctcctgaaag

SEQ ID NO: 215877 - DNA, 25 bp, Homo sapien
gagcttgcttccgaaccagtggctt

SEQ ID NO: 215878 - DNA, 25 bp, Homo sapien
gacgcagggatgctcagctccatat

SEQ ID NO: 215879 - DNA, 25 bp, Homo sapien
caatgtgggcctatgctgagcttgc

SEQ ID NO: 215880 - DNA, 25 bp, Homo sapien
tccatattcccagaacagtcccagg

SEQ ID NO: 215881 - DNA, 25 bp, Homo sapien
tgcccagataaccagacttgcccgc

SEQ ID NO: 215882 - DNA, 25 bp, Homo sapien
agataaccagacttgcccgccagat

SEQ ID NO: 215883 - DNA, 25 bp, Homo sapien
ataaccagacttgcccgccagataa

SEQ ID NO: 215884 - DNA, 25 bp, Homo sapien
ccagataaccagacttgcccgccag

SEQ ID NO: 215885 - DNA, 25 bp, Homo sapien
ggccgtctctcgcagaaaggtgaga

SEQ ID NO: 215886 - DNA, 25 bp, Homo sapien
gaagcaggctcagcgggtttcctct

SEQ ID NO: 215887 - DNA, 25 bp, Homo sapien
actgtccatggcgagtaactcagcc

SEQ ID NO: 215888 - DNA, 25 bp, Homo sapien
tctagcagagacatgggcctaccaa

SEQ ID NO: 215889 - DNA, 25 bp, Homo sapien
accctactgagaactaggcaggcca

SEQ ID NO: 215890 - DNA, 25 bp, Homo sapien
cagactgaggcccacgaaagataat

SEQ ID NO: 215891 - DNA, 25 bp, Homo sapien
gtaataccacctccttaatatcacc

SEQ ID NO: 215892 - DNA, 25 bp, Homo sapien
tccttaatatcaccctactgagaac

SEQ ID NO: 215893 - DNA, 25 bp, Homo sapien
cacccatggtcccaggaaataagcc

SEQ ID NO: 215894 - DNA, 25 bp, Homo sapien
caggaaataagccaagtgagtgggg

SEQ ID NO: 215895 - DNA, 25 bp, Homo sapien
acccatggtcccaggaaataagcca

SEQ ID NO: 215896 - DNA, 25 bp, Homo sapien
agcccctcaactcgaaccgagctgc

SEQ ID NO: 215897 - DNA, 25 bp, Homo sapien
cctcaactcgaaccgagctgcccac

SEQ ID NO: 215898 - DNA, 25 bp, Homo sapien
cctcgttctgcagcccctcaactcg

SEQ ID NO: 215899 - DNA, 25 bp, Homo sapien
gttctgcagcccctcaactcgaacc

SEQ ID NO: 215900 - DNA, 25 bp, Homo sapien
cccatgtcggggttacagcttccaa

SEQ ID NO: 215901 - DNA, 25 bp, Homo sapien
tgtcggggttacagcttccaaccca

SEQ ID NO: 215902 - DNA, 25 bp, Homo sapien
gtcggaggggcaggacgtagcgcaa

SEQ ID NO: 215903 - DNA, 25 bp, Homo sapien
aggacgtagcgcaagcccatgtcgg

SEQ ID NO: 215904 - DNA, 25 bp, Homo sapien
agcaataaaacggtctgctgtcctg

SEQ ID NO: 215905 - DNA, 25 bp, Homo sapien
tgagttaagcaataaaacggtctgc

SEQ ID NO: 215906 - DNA, 25 bp, Homo sapien
agttaagcaataaaacggtctgctg

SEQ ID NO: 215907 - DNA, 25 bp, Homo sapien
taagcaataaaacggtctgctgtcc

SEQ ID NO: 215908 - DNA, 25 bp, Homo sapien
gatccggaggcggccgccgatctct

SEQ ID NO: 215909 - DNA, 25 bp, Homo sapien
ggccgccgatctctccggcgctctc

SEQ ID NO: 215910 - DNA, 25 bp, Homo sapien
aggcagatccggaggcggccgccga

SEQ ID NO: 215911 - DNA, 25 bp, Homo sapien
ggcggccgccgatctctccggcgct

SEQ ID NO: 215912 - DNA, 25 bp, Homo sapien
ggaggcccgccgctcaggttgaacc

SEQ ID NO: 215913 - DNA, 25 bp, Homo sapien
gctcaggttgaacccagggcggccc

SEQ ID NO: 215914 - DNA, 25 bp, Homo sapien
aaaatcgatccggagcaagcagccc

SEQ ID NO: 215915 - DNA, 25 bp, Homo sapien
cgcacgccatatggagaggtggcca

SEQ ID NO: 215916 - DNA, 25 bp, Homo sapien
gcggggatggttgcaacagccgcag

SEQ ID NO: 215917 - DNA, 25 bp, Homo sapien
gcggcgccacctccccgcgctccgg

SEQ ID NO: 215918 - DNA, 25 bp, Homo sapien
ggagacctgcccgccagcggcgcca

SEQ ID NO: 215919 - DNA, 25 bp, Homo sapien
cggggatggttgcaacagccgcagg

SEQ ID NO: 215920 - DNA, 25 bp, Homo sapien
gcatgtaatcgttggtttgctgaga

SEQ ID NO: 215921 - DNA, 25 bp, Homo sapien
ctcttctggctgcatgtaatcgttg

SEQ ID NO: 215922 - DNA, 25 bp, Homo sapien
ggtttgctgagaatcataatggtcc

SEQ ID NO: 215923 - DNA, 25 bp, Homo sapien
tttgctgagaatcataatggtccat

SEQ ID NO: 215924 - DNA, 25 bp, Homo sapien
tagggtctggatttcttcctccacc

SEQ ID NO: 215925 - DNA, 25 bp, Homo sapien
agggtctggatttcttcctccacct

SEQ ID NO: 215926 - DNA, 25 bp, Homo sapien
ctagggtctggatttcttcctccac

SEQ ID NO: 215927 - DNA, 25 bp, Homo sapien
tctgggcgggcgcttggacctaatc

SEQ ID NO: 215928 - DNA, 25 bp, Homo sapien
ggacctaatctccacgcacactgaa

SEQ ID NO: 215929 - DNA, 25 bp, Homo sapien
acacactagcgctgcgggagccgag

SEQ ID NO: 215930 - DNA, 25 bp, Homo sapien
tgaactaggcggacacactagcgct

SEQ ID NO: 215931 - DNA, 25 bp, Homo sapien
tggatgcaaaagtcaccctcatatt

SEQ ID NO: 215932 - DNA, 25 bp, Homo sapien
tctgagaatgctgggacagcaggaa

SEQ ID NO: 215933 - DNA, 25 bp, Homo sapien
tggtacatcctttttctggatgcaa

SEQ ID NO: 215934 - DNA, 25 bp, Homo sapien
cagaggtccatgagcccttcagcat

SEQ ID NO: 215935 - DNA, 25 bp, Homo sapien
gggaataagcattgacctgaatgaa

SEQ ID NO: 215936 - DNA, 25 bp, Homo sapien
agggaataagcattgacctgaatga

SEQ ID NO: 215937 - DNA, 25 bp, Homo sapien
ggccactgacagagccttctctcct

SEQ ID NO: 215938 - DNA, 25 bp, Homo sapien
accaggctgccgggccgtaaccagg

SEQ ID NO: 215939 - DNA, 25 bp, Homo sapien
tggttaccaggctgccgggccgtaa

SEQ ID NO: 215940 - DNA, 25 bp, Homo sapien
gctgccgggccgtaaccaggtactc

SEQ ID NO: 215941 - DNA, 25 bp, Homo sapien
cagtttgagccaacacaagagtgag

SEQ ID NO: 215942 - DNA, 25 bp, Homo sapien
tccagtttgagccaacacaagagtg

SEQ ID NO: 215943 - DNA, 25 bp, Homo sapien
ctggcagcacacattgaggctgtat

SEQ ID NO: 215944 - DNA, 25 bp, Homo sapien
gcagcacacattgaggctgtatttc

SEQ ID NO: 215945 - DNA, 25 bp, Homo sapien
ccaattttcgaggctggccccagta

SEQ ID NO: 215946 - DNA, 25 bp, Homo sapien
caattttcgaggctggccccagtag

SEQ ID NO: 215947 - DNA, 25 bp, Homo sapien
tttcgaggctggccccagtagagct

SEQ ID NO: 215948 - DNA, 25 bp, Homo sapien
attttcgaggctggccccagtagag

SEQ ID NO: 215949 - DNA, 25 bp, Homo sapien
tgcactttcaggagtgcaacgaggc

SEQ ID NO: 215950 - DNA, 25 bp, Homo sapien
actttcaggagtgcaacgaggcaaa

SEQ ID NO: 215951 - DNA, 25 bp, Homo sapien
cttgaggtgcactttcaggagtgca

SEQ ID NO: 215952 - DNA, 25 bp, Homo sapien
gaggtgcactttcaggagtgcaacg

SEQ ID NO: 215953 - DNA, 25 bp, Homo sapien
tcattttcaaggtctggtaattttc

SEQ ID NO: 215954 - DNA, 25 bp, Homo sapien
aatccggatggagggttttggcatt

SEQ ID NO: 215955 - DNA, 25 bp, Homo sapien
caccatttgggctgagatgttctca

SEQ ID NO: 215956 - DNA, 25 bp, Homo sapien
taattgttgtcagtccatggaatcc

SEQ ID NO: 215957 - DNA, 25 bp, Homo sapien
gtctcatgcagcaactccacgggag

SEQ ID NO: 215958 - DNA, 25 bp, Homo sapien
ccacgggagaacatgtacaggatcc

SEQ ID NO: 215959 - DNA, 25 bp, Homo sapien
tttacagaggtaaagcttgaggctc

SEQ ID NO: 215960 - DNA, 25 bp, Homo sapien
ggatccgcttctcttgctagttcaa

SEQ ID NO: 215961 - DNA, 25 bp, Homo sapien
tatgcattctagcaaagaggtctga

SEQ ID NO: 215962 - DNA, 25 bp, Homo sapien
taaccagtctaggaataggcaagca

SEQ ID NO: 215963 - DNA, 25 bp, Homo sapien
gcaagcatgtagatgtatgttaccc

SEQ ID NO: 215964 - DNA, 25 bp, Homo sapien
gttaccctatgaaagcctatgccag

SEQ ID NO: 215965 - DNA, 25 bp, Homo sapien
taagcaaccaagtcttccctggaag

SEQ ID NO: 215966 - DNA, 25 bp, Homo sapien
ccaactaggcaagaattaaaacaga

SEQ ID NO: 215967 - DNA, 25 bp, Homo sapien
gagtctcgctatcttaagtcccttt

SEQ ID NO: 215968 - DNA, 25 bp, Homo sapien
gtcccaatacctaaaagtgacaatg

SEQ ID NO: 215969 - DNA, 25 bp, Homo sapien
tatcacccggtaagctgagcctagg

SEQ ID NO: 215970 - DNA, 25 bp, Homo sapien
gatcatgggagccaaggaagcacct

SEQ ID NO: 215971 - DNA, 25 bp, Homo sapien
tgaggccacactagtcagcgttcgg

SEQ ID NO: 215972 - DNA, 25 bp, Homo sapien
tatgagacaataagcgcacacgtgc

SEQ ID NO: 215973 - DNA, 25 bp, Homo sapien
tggtttcatgtgcctttaatacttg

SEQ ID NO: 215974 - DNA, 25 bp, Homo sapien
gaatctctagcgtggaagtgctccg

SEQ ID NO: 215975 - DNA, 25 bp, Homo sapien
tacagagccgctattgccagtgtcc

SEQ ID NO: 215976 - DNA, 25 bp, Homo sapien
cagacccgctgttgagagtggagcc

SEQ ID NO: 215977 - DNA, 25 bp, Homo sapien
gaatcggactcattggaaagggcca

SEQ ID NO: 215978 - DNA, 25 bp, Homo sapien
tggcgtagtcatgcgacaggccact

SEQ ID NO: 215979 - DNA, 25 bp, Homo sapien
gcagcgggaatcgtcctcaatccga

SEQ ID NO: 215980 - DNA, 25 bp, Homo sapien
caaggctgatgtactcttcatgggt

SEQ ID NO: 215981 - DNA, 25 bp, Homo sapien
tcttcctggaccgactggttggcgt

SEQ ID NO: 215982 - DNA, 25 bp, Homo sapien
gctgtcactgcaaacgagaacgatt

SEQ ID NO: 215983 - DNA, 25 bp, Homo sapien
tggcatccaacccagaaaacagtgg

SEQ ID NO: 215984 - DNA, 25 bp, Homo sapien
tataggagtaggtaggacacatgcc

SEQ ID NO: 215985 - DNA, 25 bp, Homo sapien
ggagctgctggcttaatccccaaca

SEQ ID NO: 215986 - DNA, 25 bp, Homo sapien
tagttagtgggtgatgcgcagctcc

SEQ ID NO: 215987 - DNA, 25 bp, Homo sapien
taagttccagtgtattactacccag

SEQ ID NO: 215988 - DNA, 25 bp, Homo sapien
taaatgagaatgataccaaagccca

SEQ ID NO: 215989 - DNA, 25 bp, Homo sapien
gatgggtctcatccaatcctaagat

SEQ ID NO: 215990 - DNA, 25 bp, Homo sapien
atgtttaaatatgaggtcctacata

SEQ ID NO: 215991 - DNA, 25 bp, Homo sapien
agtatgtttaaatatgaggtcctac

SEQ ID NO: 215992 - DNA, 25 bp, Homo sapien
tctaattataaattgtgagaatttc

SEQ ID NO: 215993 - DNA, 25 bp, Homo sapien
cttctaattataaattgtgagaatt

SEQ ID NO: 215994 - DNA, 25 bp, Homo sapien
ccagaagagcagatcatgtaggtgt

SEQ ID NO: 215995 - DNA, 25 bp, Homo sapien
taaatcggacttggttaacaataga

SEQ ID NO: 215996 - DNA, 25 bp, Homo sapien
caatagatcgatgccctttcagcac

SEQ ID NO: 215997 - DNA, 25 bp, Homo sapien
gcaccatgaaggctccgttgaccac

SEQ ID NO: 215998 - DNA, 25 bp, Homo sapien
tttcttctagataaggttcattatg

SEQ ID NO: 215999 - DNA, 25 bp, Homo sapien
tcttctagataaggttcattatgac

SEQ ID NO: 216000 - DNA, 25 bp, Homo sapien
ctatttcttctagataaggttcatt

SEQ ID NO: 216001 - DNA, 25 bp, Homo sapien
tctagataaggttcattatgacaag

SEQ ID NO: 216002 - DNA, 25 bp, Homo sapien
taacagtcgttgagtagctactaag

SEQ ID NO: 216003 - DNA, 25 bp, Homo sapien
taaagccattcctaacaactctatc

SEQ ID NO: 216004 - DNA, 25 bp, Homo sapien
gaaggctttcttagtgaggaataac

SEQ ID NO: 216005 - DNA, 25 bp, Homo sapien
tctggaaaagcaactcaacctgtga

SEQ ID NO: 216006 - DNA, 25 bp, Homo sapien
tacatcgatcttactatacatagca

SEQ ID NO: 216007 - DNA, 25 bp, Homo sapien
gcaataacaatgtcttgtatttgaa

SEQ ID NO: 216008 - DNA, 25 bp, Homo sapien
ttggaaatgatggatctacatcgat

SEQ ID NO: 216009 - DNA, 25 bp, Homo sapien
cttactatacatagcaataacaatg

SEQ ID NO: 216010 - DNA, 25 bp, Homo sapien
gctaaagatctgtcccctcagggca

SEQ ID NO: 216011 - DNA, 25 bp, Homo sapien
ggtcaacagagccagcaatagcagt

SEQ ID NO: 216012 - DNA, 25 bp, Homo sapien
gttagaaatgttgtcctctactgct

SEQ ID NO: 216013 - DNA, 25 bp, Homo sapien
ggcacagcatgccaaaggtcaacag

SEQ ID NO: 216014 - DNA, 25 bp, Homo sapien
gaattctccacatgtacaggttgaa

SEQ ID NO: 216015 - DNA, 25 bp, Homo sapien
tctccacatgtacaggttgaagtca

SEQ ID NO: 216016 - DNA, 25 bp, Homo sapien
cacatgtacaggttgaagtcatcag

SEQ ID NO: 216017 - DNA, 25 bp, Homo sapien
tgtacaggttgaagtcatcagagcc

SEQ ID NO: 216018 - DNA, 25 bp, Homo sapien
agctgacctggagcaaaatgcttct

SEQ ID NO: 216019 - DNA, 25 bp, Homo sapien
tccatagtaattgattaatgattct

SEQ ID NO: 216020 - DNA, 25 bp, Homo sapien
catagtaattgattaatgattctcc

SEQ ID NO: 216021 - DNA, 25 bp, Homo sapien
tagtaattgattaatgattctccag

SEQ ID NO: 216022 - DNA, 25 bp, Homo sapien
taattgattaatgattctccagtaa

SEQ ID NO: 216023 - DNA, 25 bp, Homo sapien
gaagtcttgtctgtcagagagaata

SEQ ID NO: 216024 - DNA, 25 bp, Homo sapien
aggatttggagacaagacaatgatg

SEQ ID NO: 216025 - DNA, 25 bp, Homo sapien
tttcttagtccctaaggagtcaaca

SEQ ID NO: 216026 - DNA, 25 bp, Homo sapien
actctgttaactgacccaaagttag

SEQ ID NO: 216027 - DNA, 25 bp, Homo sapien
taatccggatcacaggttctcaacc

SEQ ID NO: 216028 - DNA, 25 bp, Homo sapien
caaaaagcgaggtcttgccagtttc

SEQ ID NO: 216029 - DNA, 25 bp, Homo sapien
ggatctcagctaagtaggccctaag

SEQ ID NO: 216030 - DNA, 25 bp, Homo sapien
tcctcggcttggtgacccagattag

SEQ ID NO: 216031 - DNA, 25 bp, Homo sapien
gcatctccattcctggtgagactca

SEQ ID NO: 216032 - DNA, 25 bp, Homo sapien
ctccattcctggtgagactcagaaa

SEQ ID NO: 216033 - DNA, 25 bp, Homo sapien
catctccattcctggtgagactcag

SEQ ID NO: 216034 - DNA, 25 bp, Homo sapien
tctccattcctggtgagactcagaa

SEQ ID NO: 216035 - DNA, 25 bp, Homo sapien
taattgtttctacctgacataatgg

SEQ ID NO: 216036 - DNA, 25 bp, Homo sapien
tcagaaccatatcgtggccagcctt

SEQ ID NO: 216037 - DNA, 25 bp, Homo sapien
tatggtgtgtgccttgtatttaccc

SEQ ID NO: 216038 - DNA, 25 bp, Homo sapien
tatttacccattgacagccttgata

SEQ ID NO: 216039 - DNA, 25 bp, Homo sapien
catggtgcatgagttgaagtaaccc

SEQ ID NO: 216040 - DNA, 25 bp, Homo sapien
gctgttgaatcgtacactcatggca

SEQ ID NO: 216041 - DNA, 25 bp, Homo sapien
gaagtaaccctgattgtcaaactga

SEQ ID NO: 216042 - DNA, 25 bp, Homo sapien
gacaggtttccaccatagcgcagga

SEQ ID NO: 216043 - DNA, 25 bp, Homo sapien
ggtgatccaaggtgatccaaaagac

SEQ ID NO: 216044 - DNA, 25 bp, Homo sapien
gtaggaggtgatccaaggtgatcca

SEQ ID NO: 216045 - DNA, 25 bp, Homo sapien
tcatccaaggatttgctataaaaca

SEQ ID NO: 216046 - DNA, 25 bp, Homo sapien
cagggtaggaggtgatccaaggtga

SEQ ID NO: 216047 - DNA, 25 bp, Homo sapien
caaacagagagataactaggcattt

SEQ ID NO: 216048 - DNA, 25 bp, Homo sapien
tacagtagaagaatgcaatcagcat

SEQ ID NO: 216049 - DNA, 25 bp, Homo sapien
caattcatgggaaaaacctgagtca

SEQ ID NO: 216050 - DNA, 25 bp, Homo sapien
cacatctttaccagcatggcttgta

SEQ ID NO: 216051 - DNA, 25 bp, Homo sapien
gaggttttcgaatgtcccagagtcc

SEQ ID NO: 216052 - DNA, 25 bp, Homo sapien
ctgggctccacagggttaaacatga

SEQ ID NO: 216053 - DNA, 25 bp, Homo sapien
gacactatgaaaggctgatggatag

SEQ ID NO: 216054 - DNA, 25 bp, Homo sapien
ctctgaggttttcgaatgtcccaga

SEQ ID NO: 216055 - DNA, 25 bp, Homo sapien
tgagaacccggccatcatctgagga

SEQ ID NO: 216056 - DNA, 25 bp, Homo sapien
gcatcttcatgagcaaacacgtcca

SEQ ID NO: 216057 - DNA, 25 bp, Homo sapien
gacaagccatatactgcatcttcat

SEQ ID NO: 216058 - DNA, 25 bp, Homo sapien
tccatggggggattcccgaatgtcc

SEQ ID NO: 216059 - DNA, 25 bp, Homo sapien
gcagccaagtctgatgcctacagga

SEQ ID NO: 216060 - DNA, 25 bp, Homo sapien
cactttggtaccgagggtgccatct

SEQ ID NO: 216061 - DNA, 25 bp, Homo sapien
ggtctcctagcaatctggcatggtg

SEQ ID NO: 216062 - DNA, 25 bp, Homo sapien
tacacacaagcatagtgcagagtcc

SEQ ID NO: 216063 - DNA, 25 bp, Homo sapien
acatcatggaggataacttgctcat

SEQ ID NO: 216064 - DNA, 25 bp, Homo sapien
gaatggtgctctcctttcagctgta

SEQ ID NO: 216065 - DNA, 25 bp, Homo sapien
gaccctggagtggatggcttgttcc

SEQ ID NO: 216066 - DNA, 25 bp, Homo sapien
tagtgttcccactgttgaaagccag

SEQ ID NO: 216067 - DNA, 25 bp, Homo sapien
cagagaacactttagtgttcccact

SEQ ID NO: 216068 - DNA, 25 bp, Homo sapien
gtgccatagcagaacccggcggtca

SEQ ID NO: 216069 - DNA, 25 bp, Homo sapien
tagcagaacccggcggtcatctcct

SEQ ID NO: 216070 - DNA, 25 bp, Homo sapien
gccatagcagaacccggcggtcatc

SEQ ID NO: 216071 - DNA, 25 bp, Homo sapien
atagcagaacccggcggtcatctcc

SEQ ID NO: 216072 - DNA, 25 bp, Homo sapien
ccttatcaattagaggtgcatactg

SEQ ID NO: 216073 - DNA, 25 bp, Homo sapien
caaatccgattggtatctctctact

SEQ ID NO: 216074 - DNA, 25 bp, Homo sapien
tgcatactgaagtgggtgaaatgga

SEQ ID NO: 216075 - DNA, 25 bp, Homo sapien
gacaattgctatagatgcatacact

SEQ ID NO: 216076 - DNA, 25 bp, Homo sapien
gaaactgcagcgcattacagaggca

SEQ ID NO: 216077 - DNA, 25 bp, Homo sapien
tggcctggagcctaaaactaagttg

SEQ ID NO: 216078 - DNA, 25 bp, Homo sapien
tgtactgtgtaagaccaaacctcct

SEQ ID NO: 216079 - DNA, 25 bp, Homo sapien
tatccattctaccaacatgcagagg

SEQ ID NO: 216080 - DNA, 25 bp, Homo sapien
aagacccaaagtttaagacagatca

SEQ ID NO: 216081 - DNA, 25 bp, Homo sapien
gaagaatatacagttatctaagaca

SEQ ID NO: 216082 - DNA, 25 bp, Homo sapien
taacaggctacgagaaattattcga

SEQ ID NO: 216083 - DNA, 25 bp, Homo sapien
ttttccaaatgatcgatgtatgatg

SEQ ID NO: 216084 - DNA, 25 bp, Homo sapien
tctaggaatgcacactacacccagc

SEQ ID NO: 216085 - DNA, 25 bp, Homo sapien
ggctagctgccaaacactcaaactt

SEQ ID NO: 216086 - DNA, 25 bp, Homo sapien
taccattagtcaaccagggtccgaa

SEQ ID NO: 216087 - DNA, 25 bp, Homo sapien
cttgccagtacagtaagcccctttg

SEQ ID NO: 216088 - DNA, 25 bp, Homo sapien
tctaataaaaggcaagtgactaact

SEQ ID NO: 216089 - DNA, 25 bp, Homo sapien
ttagcctctggacctggcatgttca

SEQ ID NO: 216090 - DNA, 25 bp, Homo sapien
tcagcctctatctggtaccttaaaa

SEQ ID NO: 216091 - DNA, 25 bp, Homo sapien
gcatgttcataacggtttcagcctt

SEQ ID NO: 216092 - DNA, 25 bp, Homo sapien
tttggttttacttgcataccagaca

SEQ ID NO: 216093 - DNA, 25 bp, Homo sapien
tagaggcatcccatagtgaatgtga

SEQ ID NO: 216094 - DNA, 25 bp, Homo sapien
agacagtgcaataattataagcagg

SEQ ID NO: 216095 - DNA, 25 bp, Homo sapien
gaatggatgcttaaaggcttttcta

SEQ ID NO: 216096 - DNA, 25 bp, Homo sapien
tgacgtagagttacctaatgaacct

SEQ ID NO: 216097 - DNA, 25 bp, Homo sapien
gattggcttggttacaaaggatccc

SEQ ID NO: 216098 - DNA, 25 bp, Homo sapien
caacaatcaacaaggcaggcaggtg

SEQ ID NO: 216099 - DNA, 25 bp, Homo sapien
tcatcttatcaactggcagaagccc

SEQ ID NO: 216100 - DNA, 25 bp, Homo sapien
tgaaaagcagttattggaaccaaat

SEQ ID NO: 216101 - DNA, 25 bp, Homo sapien
ttttctataaagtaacggatcatgg

SEQ ID NO: 216102 - DNA, 25 bp, Homo sapien
gaacattgggcgaggcattccttaa

SEQ ID NO: 216103 - DNA, 25 bp, Homo sapien
cttatattataatggcagtggcgac

SEQ ID NO: 216104 - DNA, 25 bp, Homo sapien
tgaagcaataggagtggaaaaggaa

SEQ ID NO: 216105 - DNA, 25 bp, Homo sapien
tgtaagcaccactgcattcagaccc

SEQ ID NO: 216106 - DNA, 25 bp, Homo sapien
aagcaccactgcattcagacccgcc

SEQ ID NO: 216107 - DNA, 25 bp, Homo sapien
agtgaagcaataggagtggaaaagg

SEQ ID NO: 216108 - DNA, 25 bp, Homo sapien
atatttcacttcattttaaccacaa

SEQ ID NO: 216109 - DNA, 25 bp, Homo sapien
aaaaacctgctctaccactggccat

SEQ ID NO: 216110 - DNA, 25 bp, Homo sapien
tatttctcctgataagtaactaccg

SEQ ID NO: 216111 - DNA, 25 bp, Homo sapien
tgtccctgttctcatagctcctgtt

SEQ ID NO: 216112 - DNA, 25 bp, Homo sapien
tggctaaagccaaacgacttacctg

SEQ ID NO: 216113 - DNA, 25 bp, Homo sapien
tgtcaaaagcaacccaggtaccaag

SEQ ID NO: 216114 - DNA, 25 bp, Homo sapien
gaaataggctaaatagttatcccca

SEQ ID NO: 216115 - DNA, 25 bp, Homo sapien
ggttggtgttcaccccaggcagtct

SEQ ID NO: 216116 - DNA, 25 bp, Homo sapien
tccttattacatgggtgaggaaaca

SEQ ID NO: 216117 - DNA, 25 bp, Homo sapien
tacccagccacaggaatcatgcaaa

SEQ ID NO: 216118 - DNA, 25 bp, Homo sapien
tgtgagcctgcccaaacaattatga

SEQ ID NO: 216119 - DNA, 25 bp, Homo sapien
taagggctttccaaaccagacaaga

SEQ ID NO: 216120 - DNA, 25 bp, Homo sapien
tactcaatatctgctggcctcactg

SEQ ID NO: 216121 - DNA, 25 bp, Homo sapien
gagctgctcacggacacaaattaga

SEQ ID NO: 216122 - DNA, 25 bp, Homo sapien
tactcgcgaagacggatgctttgcc

SEQ ID NO: 216123 - DNA, 25 bp, Homo sapien
gctttgccaagatcccagaagtttc

SEQ ID NO: 216124 - DNA, 25 bp, Homo sapien
attagaaagacattcagggaccgac

SEQ ID NO: 216125 - DNA, 25 bp, Homo sapien
cactttgcacttgggataaagcgaa

SEQ ID NO: 216126 - DNA, 25 bp, Homo sapien
taaagtacgcggaggaagagtttgc

SEQ ID NO: 216127 - DNA, 25 bp, Homo sapien
caaactttgtagagcggtaacctcg

SEQ ID NO: 216128 - DNA, 25 bp, Homo sapien
gataaagcgaattaaggagctgtca

SEQ ID NO: 216129 - DNA, 25 bp, Homo sapien
cccgcaggcgtctcctctgaaagtc

SEQ ID NO: 216130 - DNA, 25 bp, Homo sapien
tggcattgacacagccgaagtggcc

SEQ ID NO: 216131 - DNA, 25 bp, Homo sapien
cttcttgtagaggtttctgcagccc

SEQ ID NO: 216132 - DNA, 25 bp, Homo sapien
aagtggccgaggaggtccttcttgt

SEQ ID NO: 216133 - DNA, 25 bp, Homo sapien
cccccaggccagctctcctcttcat

SEQ ID NO: 216134 - DNA, 25 bp, Homo sapien
tgccccccaggccagctctcctctt

SEQ ID NO: 216135 - DNA, 25 bp, Homo sapien
gctgccccccaggccagctctcctc

SEQ ID NO: 216136 - DNA, 25 bp, Homo sapien
ccccccaggccagctctcctcttca

SEQ ID NO: 216137 - DNA, 25 bp, Homo sapien
gcccctccctcggcctcacgcgcgg

SEQ ID NO: 216138 - DNA, 25 bp, Homo sapien
cgcccctccctcggcctcacgcgcg

SEQ ID NO: 216139 - DNA, 25 bp, Homo sapien
ctccctcggcctcacgcgcggccgc

SEQ ID NO: 216140 - DNA, 25 bp, Homo sapien
ccctccctcggcctcacgcgcggcc

SEQ ID NO: 216141 - DNA, 25 bp, Homo sapien
gatccggatggttctttaaccagcc

SEQ ID NO: 216142 - DNA, 25 bp, Homo sapien
gctttcccagttgagccgcttcccg

SEQ ID NO: 216143 - DNA, 25 bp, Homo sapien
tgtgcagacactcggcggcgttcgc

SEQ ID NO: 216144 - DNA, 25 bp, Homo sapien
ggcgttcgcggcttcctgacggtcc

SEQ ID NO: 216145 - DNA, 25 bp, Homo sapien
gttttgccctttcaagttagcagga

SEQ ID NO: 216146 - DNA, 25 bp, Homo sapien
acttcagtaggatgggagtcaccgc

SEQ ID NO: 216147 - DNA, 25 bp, Homo sapien
tctaccagatacagttaaaagtccc

SEQ ID NO: 216148 - DNA, 25 bp, Homo sapien
gagtcaccgcgttgaccctagtggg

SEQ ID NO: 216149 - DNA, 25 bp, Homo sapien
tccagtcagagcataccgaagcctt

SEQ ID NO: 216150 - DNA, 25 bp, Homo sapien
tcccctttgatagatggcaagtctg

SEQ ID NO: 216151 - DNA, 25 bp, Homo sapien
tataaacagacagtagccagaccat

SEQ ID NO: 216152 - DNA, 25 bp, Homo sapien
tcttttgcaccaggcagtcatttgg

SEQ ID NO: 216153 - DNA, 25 bp, Homo sapien
agttccacacgttttgacaaatgcc

SEQ ID NO: 216154 - DNA, 25 bp, Homo sapien
gcacgggtattgtacatttgctaca

SEQ ID NO: 216155 - DNA, 25 bp, Homo sapien
ccctcaccacatgcagttgcagttt

SEQ ID NO: 216156 - DNA, 25 bp, Homo sapien
ctattattgacatcttgcacgggta

SEQ ID NO: 216157 - DNA, 25 bp, Homo sapien
aagccttgcaccaggattgtgcgcg

SEQ ID NO: 216158 - DNA, 25 bp, Homo sapien
tctttaacgtgagcccgctgcaggt

SEQ ID NO: 216159 - DNA, 25 bp, Homo sapien
cagtccgagacagcaggtaagtgag

SEQ ID NO: 216160 - DNA, 25 bp, Homo sapien
cggccgcacaggttccaggtcttta

SEQ ID NO: 216161 - DNA, 25 bp, Homo sapien
tgcacattggattcgctcagcgtaa

SEQ ID NO: 216162 - DNA, 25 bp, Homo sapien
tcgctcagcgtaagcctgtttcttc

SEQ ID NO: 216163 - DNA, 25 bp, Homo sapien
gtctgtctgcacattggattcgctc

SEQ ID NO: 216164 - DNA, 25 bp, Homo sapien
tgcctccgtcttcaaatggtcacct

SEQ ID NO: 216165 - DNA, 25 bp, Homo sapien
gggcccattgataataaacttcatc

SEQ ID NO: 216166 - DNA, 25 bp, Homo sapien
ttagggcccattgataataaacttc

SEQ ID NO: 216167 - DNA, 25 bp, Homo sapien
tagggcccattgataataaacttca

SEQ ID NO: 216168 - DNA, 25 bp, Homo sapien
agggcccattgataataaacttcat

SEQ ID NO: 216169 - DNA, 25 bp, Homo sapien
taactcatgtggttgggatccatcc

SEQ ID NO: 216170 - DNA, 25 bp, Homo sapien
gggctgtccagtatatcggtcctgt

SEQ ID NO: 216171 - DNA, 25 bp, Homo sapien
taacctagactaatcccaggatgct

SEQ ID NO: 216172 - DNA, 25 bp, Homo sapien
tttgtggacaagagaggccttcgcc

SEQ ID NO: 216173 - DNA, 25 bp, Homo sapien
tcagaatcagtatcagttcccctgt

SEQ ID NO: 216174 - DNA, 25 bp, Homo sapien
cattagatgttcaaaagaggagcgt

SEQ ID NO: 216175 - DNA, 25 bp, Homo sapien
tctggtcaggttgcaatatgaggac

SEQ ID NO: 216176 - DNA, 25 bp, Homo sapien
tgggacactgagcttacttaataca

SEQ ID NO: 216177 - DNA, 25 bp, Homo sapien
atcagtagcagcccatgaacccacg

SEQ ID NO: 216178 - DNA, 25 bp, Homo sapien
cattcactgtagtgggttattatgg

SEQ ID NO: 216179 - DNA, 25 bp, Homo sapien
ttctgacccttcattcccacttgtc

SEQ ID NO: 216180 - DNA, 25 bp, Homo sapien
tcctggctgtgttatgcggagccca

SEQ ID NO: 216181 - DNA, 25 bp, Homo sapien
aggccaccagggtatctattaagtc

SEQ ID NO: 216182 - DNA, 25 bp, Homo sapien
tcaggccaccagggtatctattaag

SEQ ID NO: 216183 - DNA, 25 bp, Homo sapien
caggccaccagggtatctattaagt

SEQ ID NO: 216184 - DNA, 25 bp, Homo sapien
catagagttgcgtttcagccatgga

SEQ ID NO: 216185 - DNA, 25 bp, Homo sapien
caacccaacaaacctctaagtggtg

SEQ ID NO: 216186 - DNA, 25 bp, Homo sapien
gcatatatccatataaccaccaggg

SEQ ID NO: 216187 - DNA, 25 bp, Homo sapien
cagccatggaatgcttaaccaaaag

SEQ ID NO: 216188 - DNA, 25 bp, Homo sapien
gctccagactaggaagcagacctca

SEQ ID NO: 216189 - DNA, 25 bp, Homo sapien
gatggctattcttggcagtgtggca

SEQ ID NO: 216190 - DNA, 25 bp, Homo sapien
tggcagtgccataagtcggtgaaac

SEQ ID NO: 216191 - DNA, 25 bp, Homo sapien
tatgtgaatggacggtagaggctcc

SEQ ID NO: 216192 - DNA, 25 bp, Homo sapien
tccatgagcactgatagacagcccc

SEQ ID NO: 216193 - DNA, 25 bp, Homo sapien
gatctgatgttatatgcctcctgca

SEQ ID NO: 216194 - DNA, 25 bp, Homo sapien
tggctgccggcaaagtctattgtct

SEQ ID NO: 216195 - DNA, 25 bp, Homo sapien
tgccaaaaaacttgcagccctctgg

SEQ ID NO: 216196 - DNA, 25 bp, Homo sapien
tctccctgagctccatatctggatt

SEQ ID NO: 216197 - DNA, 25 bp, Homo sapien
catatctggatttatagatgccttc

SEQ ID NO: 216198 - DNA, 25 bp, Homo sapien
ctgactggcgacgtccactctccct

SEQ ID NO: 216199 - DNA, 25 bp, Homo sapien
tggcgacgtccactctccctgagct

SEQ ID NO: 216200 - DNA, 25 bp, Homo sapien
tcttgggccatgtagtctgatctga

SEQ ID NO: 216201 - DNA, 25 bp, Homo sapien
gcatcttgggccatgtagtctgatc

SEQ ID NO: 216202 - DNA, 25 bp, Homo sapien
tgtagtctgatctgaggaccttggc

SEQ ID NO: 216203 - DNA, 25 bp, Homo sapien
gccatgtagtctgatctgaggacct

SEQ ID NO: 216204 - DNA, 25 bp, Homo sapien
atgtggaactttgcccagcttaccc

SEQ ID NO: 216205 - DNA, 25 bp, Homo sapien
catgtggaactttgcccagcttacc

SEQ ID NO: 216206 - DNA, 25 bp, Homo sapien
cccaggggcatgtggaactttgccc

SEQ ID NO: 216207 - DNA, 25 bp, Homo sapien
gtggaactttgcccagcttaccctg

SEQ ID NO: 216208 - DNA, 25 bp, Homo sapien
cgcttcacttctgtgcagtctttct

SEQ ID NO: 216209 - DNA, 25 bp, Homo sapien
tctagagaggctacgcttcacttct

SEQ ID NO: 216210 - DNA, 25 bp, Homo sapien
tggtgaagtcatctagagaggctac

SEQ ID NO: 216211 - DNA, 25 bp, Homo sapien
ctaaggaacaactgtggtgaagtca

SEQ ID NO: 216212 - DNA, 25 bp, Homo sapien
gatatatagcatcctcaccactgag

SEQ ID NO: 216213 - DNA, 25 bp, Homo sapien
ggtgagatgtgagaaaccctgccac

SEQ ID NO: 216214 - DNA, 25 bp, Homo sapien
ctgagccctgggcagtaagtggtga

SEQ ID NO: 216215 - DNA, 25 bp, Homo sapien
gggcagatatatagcatcctcacca

SEQ ID NO: 216216 - DNA, 25 bp, Homo sapien
aggtgataggtgatgtgatgtcttc

SEQ ID NO: 216217 - DNA, 25 bp, Homo sapien
gcttcatccccgtgccgaggggtga

SEQ ID NO: 216218 - DNA, 25 bp, Homo sapien
tgagtttggagccttttaccaggag

SEQ ID NO: 216219 - DNA, 25 bp, Homo sapien
tcttcgaatcccacatccaaaggca

SEQ ID NO: 216220 - DNA, 25 bp, Homo sapien
ctgagagatgtgtgaaaatgggggc

SEQ ID NO: 216221 - DNA, 25 bp, Homo sapien
aaatggcaccgctggatctgcccca

SEQ ID NO: 216222 - DNA, 25 bp, Homo sapien
ccacaaatggcaccgctggatctgc

SEQ ID NO: 216223 - DNA, 25 bp, Homo sapien
gcaccgctggatctgccccatgatt

SEQ ID NO: 216224 - DNA, 25 bp, Homo sapien
ggcctcccacaaatggcaccgctgg

SEQ ID NO: 216225 - DNA, 25 bp, Homo sapien
tatgtgcggttcagtctcgagtgct

SEQ ID NO: 216226 - DNA, 25 bp, Homo sapien
cctatgtgggtcttcggagtagcca

SEQ ID NO: 216227 - DNA, 25 bp, Homo sapien
gcattcaaggacctcctgagttcag

SEQ ID NO: 216228 - DNA, 25 bp, Homo sapien
catttagaggctggaccctatgtgg

SEQ ID NO: 216229 - DNA, 25 bp, Homo sapien
ccagcgaaaaatgtggaagggccgt

SEQ ID NO: 216230 - DNA, 25 bp, Homo sapien
gaagcatcgtgaaatctgggagccc

SEQ ID NO: 216231 - DNA, 25 bp, Homo sapien
gctcttcgaatgtcaagtgcaccag

SEQ ID NO: 216232 - DNA, 25 bp, Homo sapien
cctctagggctggagcggaatctta

SEQ ID NO: 216233 - DNA, 25 bp, Homo sapien
agtcggtgactcaaggccgctcggt

SEQ ID NO: 216234 - DNA, 25 bp, Homo sapien
gagcgcagcccggaactgcagctcg

SEQ ID NO: 216235 - DNA, 25 bp, Homo sapien
tgggtcggcaggaccgaccagggcc

SEQ ID NO: 216236 - DNA, 25 bp, Homo sapien
ggtcgcgcgtctccagtcggtgact

SEQ ID NO: 216237 - DNA, 25 bp, Homo sapien
gccgcttcccactcggcgcgcttct

SEQ ID NO: 216238 - DNA, 25 bp, Homo sapien
ggtgggtcagccggcggcggctgga

SEQ ID NO: 216239 - DNA, 25 bp, Homo sapien
tggctttggccagtcgccattccgc

SEQ ID NO: 216240 - DNA, 25 bp, Homo sapien
cgcgggcgtctgtctcgccgggttc

SEQ ID NO: 216241 - DNA, 25 bp, Homo sapien
aggaagatccgcgccaatgccatcg

SEQ ID NO: 216242 - DNA, 25 bp, Homo sapien
cctgaccgtagcctggatcctgggc

SEQ ID NO: 216243 - DNA, 25 bp, Homo sapien
gggcgcccgtctgcccaccatgagg

SEQ ID NO: 216244 - DNA, 25 bp, Homo sapien
aatgccatcgccatcctgaccgtag

SEQ ID NO: 216245 - DNA, 25 bp, Homo sapien
cggtgggaaccactcgcagccgagc

SEQ ID NO: 216246 - DNA, 25 bp, Homo sapien
tcgtgtgccccggaaggctgccggg

SEQ ID NO: 216247 - DNA, 25 bp, Homo sapien
ccactcgcagccgagcgcgtaggtg

SEQ ID NO: 216248 - DNA, 25 bp, Homo sapien
agcgcgcggcgagcgggcggtggga

SEQ ID NO: 216249 - DNA, 25 bp, Homo sapien
tggcgatacccttgcatgaagtcag

SEQ ID NO: 216250 - DNA, 25 bp, Homo sapien
cccgaacttggcgatacccttgcat

SEQ ID NO: 216251 - DNA, 25 bp, Homo sapien
ccgccaccacgggtaggtgggcagt

SEQ ID NO: 216252 - DNA, 25 bp, Homo sapien
tgggcagtgtcagcgcccgaacttg

SEQ ID NO: 216253 - DNA, 25 bp, Homo sapien
tgtggagccgaatccgagaaacgca

SEQ ID NO: 216254 - DNA, 25 bp, Homo sapien
gagaaacgcatccagacgcggatct

SEQ ID NO: 216255 - DNA, 25 bp, Homo sapien
gaagttcattggagagtgtcccctc

SEQ ID NO: 216256 - DNA, 25 bp, Homo sapien
gatctgaaccccaggaatatcggga

SEQ ID NO: 216257 - DNA, 25 bp, Homo sapien
tgtacccgatgcagcgaggcagtag

SEQ ID NO: 216258 - DNA, 25 bp, Homo sapien
tgctgtacccgatgcagcgaggcag

SEQ ID NO: 216259 - DNA, 25 bp, Homo sapien
ttccatgctgtacccgatgcagcga

SEQ ID NO: 216260 - DNA, 25 bp, Homo sapien
acccgatgcagcgaggcagtagatt

SEQ ID NO: 216261 - DNA, 25 bp, Homo sapien
ccagggccaggctgagttgcccacg

SEQ ID NO: 216262 - DNA, 25 bp, Homo sapien
gaaatgccatttaaggtagaggtag

SEQ ID NO: 216263 - DNA, 25 bp, Homo sapien
ccaggctgagttgcccacgggactg

SEQ ID NO: 216264 - DNA, 25 bp, Homo sapien
gaggacactggtagaccagggccag

SEQ ID NO: 216265 - DNA, 25 bp, Homo sapien
tctggtacagttgggactctggaaa

SEQ ID NO: 216266 - DNA, 25 bp, Homo sapien
tctggttcgtggtgttctcttctgg

SEQ ID NO: 216267 - DNA, 25 bp, Homo sapien
ttgtctggttcgtggtgttctcttc

SEQ ID NO: 216268 - DNA, 25 bp, Homo sapien
cagttgggactctggaaattgtttt

SEQ ID NO: 216269 - DNA, 25 bp, Homo sapien
agaaagaacacgtgatcgcctagtg

SEQ ID NO: 216270 - DNA, 25 bp, Homo sapien
gcttggggcattatcccagggatga

SEQ ID NO: 216271 - DNA, 25 bp, Homo sapien
ggcgaagcagttaggactgagcaca

SEQ ID NO: 216272 - DNA, 25 bp, Homo sapien
tctggtggtttgaaggggcgaagca

SEQ ID NO: 216273 - DNA, 25 bp, Homo sapien
acttcaggattagatctttccagtc

SEQ ID NO: 216274 - DNA, 25 bp, Homo sapien
cctaattcaccattatccgtgagca

SEQ ID NO: 216275 - DNA, 25 bp, Homo sapien
tcaggattagatctttccagtccag

SEQ ID NO: 216276 - DNA, 25 bp, Homo sapien
gctgctgctgagctattggttccta

SEQ ID NO: 216277 - DNA, 25 bp, Homo sapien
acctcccagcatgggctctagtcct

SEQ ID NO: 216278 - DNA, 25 bp, Homo sapien
gggatacctcccagcatgggctcta

SEQ ID NO: 216279 - DNA, 25 bp, Homo sapien
ggatacctcccagcatgggctctag

SEQ ID NO: 216280 - DNA, 25 bp, Homo sapien
atacctcccagcatgggctctagtc

SEQ ID NO: 216281 - DNA, 25 bp, Homo sapien
tctggcgggagtcatctcatagctc

SEQ ID NO: 216282 - DNA, 25 bp, Homo sapien
taatactaccgacttactgagagct

SEQ ID NO: 216283 - DNA, 25 bp, Homo sapien
caattatgtgttcagcctctaggtc

SEQ ID NO: 216284 - DNA, 25 bp, Homo sapien
gactggttaaagaaagcagcccctc

SEQ ID NO: 216285 - DNA, 25 bp, Homo sapien
cattgatccctgtacatgcatctaa

SEQ ID NO: 216286 - DNA, 25 bp, Homo sapien
gcctttatggcatcccagaagtaat

SEQ ID NO: 216287 - DNA, 25 bp, Homo sapien
caacacagctgttatttgatcagag

SEQ ID NO: 216288 - DNA, 25 bp, Homo sapien
tatggttcagtgtactgtgcaaaac

SEQ ID NO: 216289 - DNA, 25 bp, Homo sapien
ctgtatcggtcgcttgggctcctga

SEQ ID NO: 216290 - DNA, 25 bp, Homo sapien
tatgcgtgaggacctgctctaagga

SEQ ID NO: 216291 - DNA, 25 bp, Homo sapien
tctagaggcagacggtcttgggtcc

SEQ ID NO: 216292 - DNA, 25 bp, Homo sapien
gctggaggaatcttcgtgatcgaca

SEQ ID NO: 216293 - DNA, 25 bp, Homo sapien
gaatatgtgtgcgttctcacaggac

SEQ ID NO: 216294 - DNA, 25 bp, Homo sapien
cactcgagctgtagttacctgggaa

SEQ ID NO: 216295 - DNA, 25 bp, Homo sapien
tcacaggacagtgggcaataagcta

SEQ ID NO: 216296 - DNA, 25 bp, Homo sapien
caataagctacgatggccttttcag

SEQ ID NO: 216297 - DNA, 25 bp, Homo sapien
aagtgcacccctctggacttgccag

SEQ ID NO: 216298 - DNA, 25 bp, Homo sapien
acttgccagcgcaggccccttcgct

SEQ ID NO: 216299 - DNA, 25 bp, Homo sapien
ctctccagcagtttcgcctcctgac

SEQ ID NO: 216300 - DNA, 25 bp, Homo sapien
ggcagcactcccgtgcccaagtgca

SEQ ID NO: 216301 - DNA, 25 bp, Homo sapien
tctcttgggtgtgcggtgtggcctt

SEQ ID NO: 216302 - DNA, 25 bp, Homo sapien
gcttgggactgacttctccttctga

SEQ ID NO: 216303 - DNA, 25 bp, Homo sapien
gtgcggtgtggccttggttctgcag

SEQ ID NO: 216304 - DNA, 25 bp, Homo sapien
cagtgcttagagctccggggggttc

SEQ ID NO: 216305 - DNA, 25 bp, Homo sapien
atttcttggctggttttctgtgttg

SEQ ID NO: 216306 - DNA, 25 bp, Homo sapien
tcagttatttcttggctggttttct

SEQ ID NO: 216307 - DNA, 25 bp, Homo sapien
agttatttcttggctggttttctgt

SEQ ID NO: 216308 - DNA, 25 bp, Homo sapien
ttcttggctggttttctgtgttgga

SEQ ID NO: 216309 - DNA, 25 bp, Homo sapien
aagactttgcagctcagacatggtg

SEQ ID NO: 216310 - DNA, 25 bp, Homo sapien
aattttccagctggtcaggactgtc

SEQ ID NO: 216311 - DNA, 25 bp, Homo sapien
cagccaccagggcaagactttgcag

SEQ ID NO: 216312 - DNA, 25 bp, Homo sapien
tttccagctggtcaggactgtctcc

SEQ ID NO: 216313 - DNA, 25 bp, Homo sapien
gctgcggagacagtcctcggccagt

SEQ ID NO: 216314 - DNA, 25 bp, Homo sapien
ggccgtagagcacgcatggccttgc

SEQ ID NO: 216315 - DNA, 25 bp, Homo sapien
tgtctgacatgacttaggttccctg

SEQ ID NO: 216316 - DNA, 25 bp, Homo sapien
aagatgcaggctgcggagacagtcc

SEQ ID NO: 216317 - DNA, 25 bp, Homo sapien
gaatacaatgacttgtaaatgcggc

SEQ ID NO: 216318 - DNA, 25 bp, Homo sapien
aatacaatgacttgtaaatgcggca

SEQ ID NO: 216319 - DNA, 25 bp, Homo sapien
tgaatacaatgacttgtaaatgcgg

SEQ ID NO: 216320 - DNA, 25 bp, Homo sapien
atacaatgacttgtaaatgcggcat

SEQ ID NO: 216321 - DNA, 25 bp, Homo sapien
tgcagggacctagaaactatgtcca

SEQ ID NO: 216322 - DNA, 25 bp, Homo sapien
cttgcagggacctagaaactatgtc

SEQ ID NO: 216323 - DNA, 25 bp, Homo sapien
gcagggacctagaaactatgtccat

SEQ ID NO: 216324 - DNA, 25 bp, Homo sapien
ttgcagggacctagaaactatgtcc

SEQ ID NO: 216325 - DNA, 25 bp, Homo sapien
agtttagccatgtcctcaagataaa

SEQ ID NO: 216326 - DNA, 25 bp, Homo sapien
cagtttagccatgtcctcaagataa

SEQ ID NO: 216327 - DNA, 25 bp, Homo sapien
tttatcttgaggacatggctaaact

SEQ ID NO: 216328 - DNA, 25 bp, Homo sapien
ttatcttgaggacatggctaaactg

SEQ ID NO: 216329 - DNA, 25 bp, Homo sapien
aatgtgaggatcttgttcaatcgga

SEQ ID NO: 216330 - DNA, 25 bp, Homo sapien
ccttcaactgttcatatctacttta

SEQ ID NO: 216331 - DNA, 25 bp, Homo sapien
gaggatcttgttcaatcggaaaccc

SEQ ID NO: 216332 - DNA, 25 bp, Homo sapien
tagatgaaatgtgaggatcttgttc

SEQ ID NO: 216333 - DNA, 25 bp, Homo sapien
ccagtccttcaactgttcatatcta

SEQ ID NO: 216334 - DNA, 25 bp, Homo sapien
gtgaggatcttgttcaatcggaaac

SEQ ID NO: 216335 - DNA, 25 bp, Homo sapien
taaagtagatatgaacagttgaagg

SEQ ID NO: 216336 - DNA, 25 bp, Homo sapien
gggtttccgattgaacaagatcctc

SEQ ID NO: 216337 - DNA, 25 bp, Homo sapien
gtttccgattgaacaagatcctcac

SEQ ID NO: 216338 - DNA, 25 bp, Homo sapien
tagatatgaacagttgaaggactgg

SEQ ID NO: 216339 - DNA, 25 bp, Homo sapien
gaacaagatcctcacatttcatcta

SEQ ID NO: 216340 - DNA, 25 bp, Homo sapien
tccgattgaacaagatcctcacatt

SEQ ID NO: 216341 - DNA, 25 bp, Homo sapien
gaacacaggtgtgtacagcgtgctg

SEQ ID NO: 216342 - DNA, 25 bp, Homo sapien
tacagcgtgctgtagtggaagtttt

SEQ ID NO: 216343 - DNA, 25 bp, Homo sapien
tggaacacaggtgtgtacagcgtgc

SEQ ID NO: 216344 - DNA, 25 bp, Homo sapien
aacacaggtgtgtacagcgtgctgt

SEQ ID NO: 216345 - DNA, 25 bp, Homo sapien
cacaggtgtgtacagcgtgctgtag

SEQ ID NO: 216346 - DNA, 25 bp, Homo sapien
cagcgtgctgtagtggaagttttgt

SEQ ID NO: 216347 - DNA, 25 bp, Homo sapien
gaagttttgtatcatagtaatcctg

SEQ ID NO: 216348 - DNA, 25 bp, Homo sapien
gtatcatagtaatcctgtttccact

SEQ ID NO: 216349 - DNA, 25 bp, Homo sapien
ttgtatcatagtaatcctgtttcca

SEQ ID NO: 216350 - DNA, 25 bp, Homo sapien
tttgtatcatagtaatcctgtttcc

SEQ ID NO: 216351 - DNA, 25 bp, Homo sapien
tgtatcatagtaatcctgtttccac

SEQ ID NO: 216352 - DNA, 25 bp, Homo sapien
aagttttgtatcatagtaatcctgt

SEQ ID NO: 216353 - DNA, 25 bp, Homo sapien
aacaggattactatgatacaaaact

SEQ ID NO: 216354 - DNA, 25 bp, Homo sapien
ggaaacaggattactatgatacaaa

SEQ ID NO: 216355 - DNA, 25 bp, Homo sapien
tggaaacaggattactatgatacaa

SEQ ID NO: 216356 - DNA, 25 bp, Homo sapien
gtggaaacaggattactatgataca

SEQ ID NO: 216357 - DNA, 25 bp, Homo sapien
caggattactatgatacaaaacttc

SEQ ID NO: 216358 - DNA, 25 bp, Homo sapien
agtggaaacaggattactatgatac

SEQ ID NO: 216359 - DNA, 25 bp, Homo sapien
acaaaacttccactacagcacgctg

SEQ ID NO: 216360 - DNA, 25 bp, Homo sapien
gcacgctgtacacacctgtgttcca

SEQ ID NO: 216361 - DNA, 25 bp, Homo sapien
caaaacttccactacagcacgctgt

SEQ ID NO: 216362 - DNA, 25 bp, Homo sapien
tacagcacgctgtacacacctgtgt

SEQ ID NO: 216363 - DNA, 25 bp, Homo sapien
cagcacgctgtacacacctgtgttc

SEQ ID NO: 216364 - DNA, 25 bp, Homo sapien
actacagcacgctgtacacacctgt

SEQ ID NO: 216365 - DNA, 25 bp, Homo sapien
gaagatctacgtgctccttcgtcgg

SEQ ID NO: 216366 - DNA, 25 bp, Homo sapien
aagatctacgtgctccttcgtcggc

SEQ ID NO: 216367 - DNA, 25 bp, Homo sapien
ccttcgtcggcaggcccaacaggct

SEQ ID NO: 216368 - DNA, 25 bp, Homo sapien
tctacgtgctccttcgtcggcaggc

SEQ ID NO: 216369 - DNA, 25 bp, Homo sapien
gagaagatctacgtgctccttcgtc

SEQ ID NO: 216370 - DNA, 25 bp, Homo sapien
gatctacgtgctccttcgtcggcag

SEQ ID NO: 216371 - DNA, 25 bp, Homo sapien
taccgagctgatacccagacatacc

SEQ ID NO: 216372 - DNA, 25 bp, Homo sapien
ttaccgagctgatacccagacatac

SEQ ID NO: 216373 - DNA, 25 bp, Homo sapien
ccgagctgatacccagacataccag

SEQ ID NO: 216374 - DNA, 25 bp, Homo sapien
accgagctgatacccagacatacca

SEQ ID NO: 216375 - DNA, 25 bp, Homo sapien
gtatgtctgggtatcagctcggtaa

SEQ ID NO: 216376 - DNA, 25 bp, Homo sapien
ctggtatgtctgggtatcagctcgg

SEQ ID NO: 216377 - DNA, 25 bp, Homo sapien
tggtatgtctgggtatcagctcggt

SEQ ID NO: 216378 - DNA, 25 bp, Homo sapien
ggtatgtctgggtatcagctcggta

SEQ ID NO: 216379 - DNA, 25 bp, Homo sapien
gacgaaggagcacgtagatcttctc

SEQ ID NO: 216380 - DNA, 25 bp, Homo sapien
gccgacgaaggagcacgtagatctt

SEQ ID NO: 216381 - DNA, 25 bp, Homo sapien
gcctgccgacgaaggagcacgtaga

SEQ ID NO: 216382 - DNA, 25 bp, Homo sapien
tgccgacgaaggagcacgtagatct

SEQ ID NO: 216383 - DNA, 25 bp, Homo sapien
cctgccgacgaaggagcacgtagat

SEQ ID NO: 216384 - DNA, 25 bp, Homo sapien
agcctgttgggcctgccgacgaagg

SEQ ID NO: 216385 - DNA, 25 bp, Homo sapien
ttcataagactccttgtgaggatca

SEQ ID NO: 216386 - DNA, 25 bp, Homo sapien
cattattagatatgcagcaactccc

SEQ ID NO: 216387 - DNA, 25 bp, Homo sapien
tgggtctaccatttgctagctccct

SEQ ID NO: 216388 - DNA, 25 bp, Homo sapien
gctagctccctttgacaaggcagct

SEQ ID NO: 216389 - DNA, 25 bp, Homo sapien
caaggcagctttgtattgctaaact

SEQ ID NO: 216390 - DNA, 25 bp, Homo sapien
tgcttgctgagcacagcattattag

SEQ ID NO: 216391 - DNA, 25 bp, Homo sapien
gggagctagcaaatggtagacccag

SEQ ID NO: 216392 - DNA, 25 bp, Homo sapien
taataatgctgtgctcagcaagcac

SEQ ID NO: 216393 - DNA, 25 bp, Homo sapien
taaagtttagcaatacaaagctgcc

SEQ ID NO: 216394 - DNA, 25 bp, Homo sapien
tgatcctcacaaggagtcttatgaa

SEQ ID NO: 216395 - DNA, 25 bp, Homo sapien
gctgccttgtcaaagggagctagca

SEQ ID NO: 216396 - DNA, 25 bp, Homo sapien
gggagttgctgcatatctaataatg

SEQ ID NO: 216397 - DNA, 25 bp, Homo sapien
tgatttcatcgatgatctggcagac

SEQ ID NO: 216398 - DNA, 25 bp, Homo sapien
tgatctggcagacctcagctgcctg

SEQ ID NO: 216399 - DNA, 25 bp, Homo sapien
tcgatgatctggcagacctcagctg

SEQ ID NO: 216400 - DNA, 25 bp, Homo sapien
cagttgtttgatttcatcgatgatc

SEQ ID NO: 216401 - DNA, 25 bp, Homo sapien
tttcatcgatgatctggcagacctc

SEQ ID NO: 216402 - DNA, 25 bp, Homo sapien
tcagtcagttgtttgatttcatcga

SEQ ID NO: 216403 - DNA, 25 bp, Homo sapien
gcagctgaggtctgccagatcatcg

SEQ ID NO: 216404 - DNA, 25 bp, Homo sapien
catcgatgaaatcaaacaactgact

SEQ ID NO: 216405 - DNA, 25 bp, Homo sapien
gaaatcaaacaactgactgatgtca

SEQ ID NO: 216406 - DNA, 25 bp, Homo sapien
tctgccagatcatcgatgaaatcaa

SEQ ID NO: 216407 - DNA, 25 bp, Homo sapien
gatcatcgatgaaatcaaacaactg

SEQ ID NO: 216408 - DNA, 25 bp, Homo sapien
gaggtctgccagatcatcgatgaaa

SEQ ID NO: 216409 - DNA, 25 bp, Homo sapien
ttgtaaaatgtatgaagaacatctg

SEQ ID NO: 216410 - DNA, 25 bp, Homo sapien
ctgaaaagaatgaatcccaacagtc

SEQ ID NO: 216411 - DNA, 25 bp, Homo sapien
tgtatgaagaacatctgaaaagaat

SEQ ID NO: 216412 - DNA, 25 bp, Homo sapien
aaatgtatgaagaacatctgaaaag

SEQ ID NO: 216413 - DNA, 25 bp, Homo sapien
taaaatgtatgaagaacatctgaaa

SEQ ID NO: 216414 - DNA, 25 bp, Homo sapien
agaatgaatcccaacagtccctcta

SEQ ID NO: 216415 - DNA, 25 bp, Homo sapien
tagagggactgttgggattcattct

SEQ ID NO: 216416 - DNA, 25 bp, Homo sapien
gatgttcttcatacattttacaaac

SEQ ID NO: 216417 - DNA, 25 bp, Homo sapien
gactgttgggattcattcttttcag

SEQ ID NO: 216418 - DNA, 25 bp, Homo sapien
attcttttcagatgttcttcataca

SEQ ID NO: 216419 - DNA, 25 bp, Homo sapien
tcagatgttcttcatacattttaca

SEQ ID NO: 216420 - DNA, 25 bp, Homo sapien
cagatgttcttcatacattttacaa

SEQ ID NO: 216421 - DNA, 25 bp, Homo sapien
gaacttatgctgactacgaatctgt

SEQ ID NO: 216422 - DNA, 25 bp, Homo sapien
cttatgctgactacgaatctgtgaa

SEQ ID NO: 216423 - DNA, 25 bp, Homo sapien
tgctgactacgaatctgtgaatgaa

SEQ ID NO: 216424 - DNA, 25 bp, Homo sapien
ggcagaacttatgctgactacgaat

SEQ ID NO: 216425 - DNA, 25 bp, Homo sapien
gaaggcagaacttatgctgactacg

SEQ ID NO: 216426 - DNA, 25 bp, Homo sapien
ccagaaggcagaacttatgctgact

SEQ ID NO: 216427 - DNA, 25 bp, Homo sapien
agtcagcataagttctgccttctgg

SEQ ID NO: 216428 - DNA, 25 bp, Homo sapien
gattcgtagtcagcataagttctgc

SEQ ID NO: 216429 - DNA, 25 bp, Homo sapien
ttcacagattcgtagtcagcataag

SEQ ID NO: 216430 - DNA, 25 bp, Homo sapien
ttcattcacagattcgtagtcagca

SEQ ID NO: 216431 - DNA, 25 bp, Homo sapien
cacagattcgtagtcagcataagtt

SEQ ID NO: 216432 - DNA, 25 bp, Homo sapien
tcgtagtcagcataagttctgcctt

SEQ ID NO: 216433 - DNA, 25 bp, Homo sapien
aagacaagtctgtctgctatgggca

SEQ ID NO: 216434 - DNA, 25 bp, Homo sapien
gacaagtctgtctgctatgggcatt

SEQ ID NO: 216435 - DNA, 25 bp, Homo sapien
acaagtctgtctgctatgggcatta

SEQ ID NO: 216436 - DNA, 25 bp, Homo sapien
ggaagacaagtctgtctgctatggg

SEQ ID NO: 216437 - DNA, 25 bp, Homo sapien
tttcccagtgagcacgaagtggaag

SEQ ID NO: 216438 - DNA, 25 bp, Homo sapien
tgtttcccagtgagcacgaagtgga

SEQ ID NO: 216439 - DNA, 25 bp, Homo sapien
cttccacttcgtgctcactgggaaa

SEQ ID NO: 216440 - DNA, 25 bp, Homo sapien
taatgcccatagcagacagacttgt

SEQ ID NO: 216441 - DNA, 25 bp, Homo sapien
tccacttcgtgctcactgggaaaca

SEQ ID NO: 216442 - DNA, 25 bp, Homo sapien
cccatagcagacagacttgtcttcc

SEQ ID NO: 216443 - DNA, 25 bp, Homo sapien
tgcccatagcagacagacttgtctt

SEQ ID NO: 216444 - DNA, 25 bp, Homo sapien
ccacttcgtgctcactgggaaacat

SEQ ID NO: 216445 - DNA, 25 bp, Homo sapien
gccagggttgtctaactattctcga

SEQ ID NO: 216446 - DNA, 25 bp, Homo sapien
cagggttgtctaactattctcgaag

SEQ ID NO: 216447 - DNA, 25 bp, Homo sapien
tgacagatccagctatacccagcat

SEQ ID NO: 216448 - DNA, 25 bp, Homo sapien
ggttgtctaactattctcgaagctg

SEQ ID NO: 216449 - DNA, 25 bp, Homo sapien
tctaactattctcgaagctgacaga

SEQ ID NO: 216450 - DNA, 25 bp, Homo sapien
aactattctcgaagctgacagatcc

SEQ ID NO: 216451 - DNA, 25 bp, Homo sapien
gcttcgagaatagttagacaaccct

SEQ ID NO: 216452 - DNA, 25 bp, Homo sapien
tcgagaatagttagacaaccctggc

SEQ ID NO: 216453 - DNA, 25 bp, Homo sapien
tgctgggtatagctggatctgtcag

SEQ ID NO: 216454 - DNA, 25 bp, Homo sapien
tctgtcagcttcgagaatagttaga

SEQ ID NO: 216455 - DNA, 25 bp, Homo sapien
cagcttcgagaatagttagacaacc

SEQ ID NO: 216456 - DNA, 25 bp, Homo sapien
ggatctgtcagcttcgagaatagtt

SEQ ID NO: 216457 - DNA, 25 bp, Homo sapien
tacgttgccgccatttttgagtagg

SEQ ID NO: 216458 - DNA, 25 bp, Homo sapien
tgcctttatcgaagatggctgaaac

SEQ ID NO: 216459 - DNA, 25 bp, Homo sapien
ttgcactttcgacgacttccggcgg

SEQ ID NO: 216460 - DNA, 25 bp, Homo sapien
taataacgaaagtacggaagacagc

SEQ ID NO: 216461 - DNA, 25 bp, Homo sapien
tgtctgatgtcactgtctataccgg

SEQ ID NO: 216462 - DNA, 25 bp, Homo sapien
tgccggaagtgactgtgcctctatg

SEQ ID NO: 216463 - DNA, 25 bp, Homo sapien
tagttaagctcgtgtaacggcggcg

SEQ ID NO: 216464 - DNA, 25 bp, Homo sapien
gctgttagcggcgttgtagttaagc

SEQ ID NO: 216465 - DNA, 25 bp, Homo sapien
gcagctgctgtagcgaagagagttt

SEQ ID NO: 216466 - DNA, 25 bp, Homo sapien
taacggcggcggtgtcggcagctgc

SEQ ID NO: 216467 - DNA, 25 bp, Homo sapien
gctgtagcgaagagagtttggcgcg

SEQ ID NO: 216468 - DNA, 25 bp, Homo sapien
ggctcctctcgcgaggattggctgt

SEQ ID NO: 216469 - DNA, 25 bp, Homo sapien
aacagccaatcctcgcgagaggagc

SEQ ID NO: 216470 - DNA, 25 bp, Homo sapien
gccgttacacgagcttaactacaac

SEQ ID NO: 216471 - DNA, 25 bp, Homo sapien
cgccgccgttacacgagcttaacta

SEQ ID NO: 216472 - DNA, 25 bp, Homo sapien
aaactctcttcgctacagcagctgc

SEQ ID NO: 216473 - DNA, 25 bp, Homo sapien
gcgccaaactctcttcgctacagca

SEQ ID NO: 216474 - DNA, 25 bp, Homo sapien
gcttaactacaacgccgctaacagc

SEQ ID NO: 216475 - DNA, 25 bp, Homo sapien
cattagccctactcaaaaatggcgg

SEQ ID NO: 216476 - DNA, 25 bp, Homo sapien
ccgccggaagtcgtcgaaagtgcaa

SEQ ID NO: 216477 - DNA, 25 bp, Homo sapien
ccggtatagacagtgacatcagaca

SEQ ID NO: 216478 - DNA, 25 bp, Homo sapien
tcgaaagtgcaacgcaaaagagcct

SEQ ID NO: 216479 - DNA, 25 bp, Homo sapien
gtttcagccatcttcgataaaggca

SEQ ID NO: 216480 - DNA, 25 bp, Homo sapien
ttaaacatacggctcaagtgatcac

SEQ ID NO: 216481 - DNA, 25 bp, Homo sapien
cccggtcgagtgcagtaccatgggc

SEQ ID NO: 216482 - DNA, 25 bp, Homo sapien
gacagctttgtgtcaactttgctgc

SEQ ID NO: 216483 - DNA, 25 bp, Homo sapien
tggcggccatggcagctgtagtatc

SEQ ID NO: 216484 - DNA, 25 bp, Homo sapien
agtatcggcgactccgggtcaaggc

SEQ ID NO: 216485 - DNA, 25 bp, Homo sapien
ctttgactactaaaatgggcatggc

SEQ ID NO: 216486 - DNA, 25 bp, Homo sapien
tcagctgtaaggacttgaagaacca

SEQ ID NO: 216487 - DNA, 25 bp, Homo sapien
taataatactagtagcagtagcccc

SEQ ID NO: 216488 - DNA, 25 bp, Homo sapien
cccttcttacagaggaggccatgaa

SEQ ID NO: 216489 - DNA, 25 bp, Homo sapien
tctgggatgtgattccactatagaa

SEQ ID NO: 216490 - DNA, 25 bp, Homo sapien
tcatattctagtgggtcatcttgaa

SEQ ID NO: 216491 - DNA, 25 bp, Homo sapien
tatggtcacacatcctacagaggga

SEQ ID NO: 216492 - DNA, 25 bp, Homo sapien
tgcactattgcactgatttaatgtg

SEQ ID NO: 216493 - DNA, 25 bp, Homo sapien
ggcggaatagggcacagccacaagc

SEQ ID NO: 216494 - DNA, 25 bp, Homo sapien
ttatgttgccacagtacatgtcctc

SEQ ID NO: 216495 - DNA, 25 bp, Homo sapien
tgaacgccacgggagtggccatgct

SEQ ID NO: 216496 - DNA, 25 bp, Homo sapien
tgtcctccctgaggtgggcggaata

SEQ ID NO: 216497 - DNA, 25 bp, Homo sapien
ccacctgtagcaagatggatcataa

SEQ ID NO: 216498 - DNA, 25 bp, Homo sapien
tgtcttctcacataaccacctgtag

SEQ ID NO: 216499 - DNA, 25 bp, Homo sapien
aatactaggtcagctttggcgacac

SEQ ID NO: 216500 - DNA, 25 bp, Homo sapien
ttagcagatcagcaatccctctagg

SEQ ID NO: 216501 - DNA, 25 bp, Homo sapien
aaccaagcagcgtggcacaggcctt

SEQ ID NO: 216502 - DNA, 25 bp, Homo sapien
ctcatagggctcaaatgcatcttca

SEQ ID NO: 216503 - DNA, 25 bp, Homo sapien
cagcagacagaaatagccatactaa

SEQ ID NO: 216504 - DNA, 25 bp, Homo sapien
gccatactaatctcatagggctcaa

SEQ ID NO: 216505 - DNA, 25 bp, Homo sapien
gacatctagattcacctcaggaggc

SEQ ID NO: 216506 - DNA, 25 bp, Homo sapien
acaggaaccgtatgacagcagcaca

SEQ ID NO: 216507 - DNA, 25 bp, Homo sapien
cacatggtagctagggactgaacac

SEQ ID NO: 216508 - DNA, 25 bp, Homo sapien
gccccttgggagactgagaatcatg

SEQ ID NO: 216509 - DNA, 25 bp, Homo sapien
aacacatagaagtgaaatggccatt

SEQ ID NO: 216510 - DNA, 25 bp, Homo sapien
tcattttccggatttctctttggca

SEQ ID NO: 216511 - DNA, 25 bp, Homo sapien
cattttccggatttctctttggcag

SEQ ID NO: 216512 - DNA, 25 bp, Homo sapien
tcaaaacacatagaagtgaaatggc

SEQ ID NO: 216513 - DNA, 25 bp, Homo sapien
tcattcaggactgggcatcgcaggg

SEQ ID NO: 216514 - DNA, 25 bp, Homo sapien
cttgaatagggatggttttctcatt

SEQ ID NO: 216515 - DNA, 25 bp, Homo sapien
ggacctcggagtcccagtcattcag

SEQ ID NO: 216516 - DNA, 25 bp, Homo sapien
agcatccaggacctcggagtcccag

SEQ ID NO: 216517 - DNA, 25 bp, Homo sapien
tgaagccagagtcgcagcattcctg

SEQ ID NO: 216518 - DNA, 25 bp, Homo sapien
tcagggatacttgggctgggcccag

SEQ ID NO: 216519 - DNA, 25 bp, Homo sapien
tgggcccagctgacagacagatgcc

SEQ ID NO: 216520 - DNA, 25 bp, Homo sapien
gaaacaagtagacacgacgtggcct

SEQ ID NO: 216521 - DNA, 25 bp, Homo sapien
gaagagaaatccgatccgatgcgcg

SEQ ID NO: 216522 - DNA, 25 bp, Homo sapien
gccaggcgcgcagataaatcacgga

SEQ ID NO: 216523 - DNA, 25 bp, Homo sapien
gcgttgagtgccaaatgccgacaca

SEQ ID NO: 216524 - DNA, 25 bp, Homo sapien
tgcacggatagctccagactggcgt

SEQ ID NO: 216525 - DNA, 25 bp, Homo sapien
gcatctggcacatgacatctctatg

SEQ ID NO: 216526 - DNA, 25 bp, Homo sapien
taccttcttaactaggctgtccctg

SEQ ID NO: 216527 - DNA, 25 bp, Homo sapien
caagtagtgtaagctctaaggagac

SEQ ID NO: 216528 - DNA, 25 bp, Homo sapien
ggaatctttataacagccctaagag

SEQ ID NO: 216529 - DNA, 25 bp, Homo sapien
ctgccaggacgaactgttgcatcac

SEQ ID NO: 216530 - DNA, 25 bp, Homo sapien
aggaacagcggcagtagcaggacca

SEQ ID NO: 216531 - DNA, 25 bp, Homo sapien
tcaagcctgggtcagcaatggttgt

SEQ ID NO: 216532 - DNA, 25 bp, Homo sapien
cacagggtgagtcatgttgaggaac

SEQ ID NO: 216533 - DNA, 25 bp, Homo sapien
gaagacatttcttgagcgcattgcc

SEQ ID NO: 216534 - DNA, 25 bp, Homo sapien
cccttggcagcagttagatgctgct

SEQ ID NO: 216535 - DNA, 25 bp, Homo sapien
tacaaggaccaaggtcttgcagcca

SEQ ID NO: 216536 - DNA, 25 bp, Homo sapien
aggtcttgcagccaactctgaaagc

SEQ ID NO: 216537 - DNA, 25 bp, Homo sapien
tgtttggtattctgtgcaggcagca

SEQ ID NO: 216538 - DNA, 25 bp, Homo sapien
cattgctctgcgttgtcatggagaa

SEQ ID NO: 216539 - DNA, 25 bp, Homo sapien
tggttgccttggttcctgcaggact

SEQ ID NO: 216540 - DNA, 25 bp, Homo sapien
tttctgccacctggtaacaagtggg

SEQ ID NO: 216541 - DNA, 25 bp, Homo sapien
atcttttgcttaggggacgcccttg

SEQ ID NO: 216542 - DNA, 25 bp, Homo sapien
aacttagcatttttccaccaactcg

SEQ ID NO: 216543 - DNA, 25 bp, Homo sapien
caacttagcatttttccaccaactc

SEQ ID NO: 216544 - DNA, 25 bp, Homo sapien
cttgtggatctttttcgatgcttgc

SEQ ID NO: 216545 - DNA, 25 bp, Homo sapien
gagatgcatcactaatggccccctg

SEQ ID NO: 216546 - DNA, 25 bp, Homo sapien
tgcatcactaatggccccctggaat

SEQ ID NO: 216547 - DNA, 25 bp, Homo sapien
caagagatgcatcactaatggcccc

SEQ ID NO: 216548 - DNA, 25 bp, Homo sapien
tcgttgagcctctttaacttcaaat

SEQ ID NO: 216549 - DNA, 25 bp, Homo sapien
ggtccctcttggaaaggaaagctga

SEQ ID NO: 216550 - DNA, 25 bp, Homo sapien
cggtccctcttggaaaggaaagctg

SEQ ID NO: 216551 - DNA, 25 bp, Homo sapien
gtccctcttggaaaggaaagctgac

SEQ ID NO: 216552 - DNA, 25 bp, Homo sapien
cctgtccgtcctggtgtagcgcctt

SEQ ID NO: 216553 - DNA, 25 bp, Homo sapien
tacccgcttaaactgtacaacttga

SEQ ID NO: 216554 - DNA, 25 bp, Homo sapien
ccgcttaaactgtacaacttgacct

SEQ ID NO: 216555 - DNA, 25 bp, Homo sapien
tgtagcgccttccatgtctagggta

SEQ ID NO: 216556 - DNA, 25 bp, Homo sapien
accaggacagaagcacaccctcttt

SEQ ID NO: 216557 - DNA, 25 bp, Homo sapien
gctatcatagaatttgggcatcacc

SEQ ID NO: 216558 - DNA, 25 bp, Homo sapien
ggacagaagcacaccctcttttgcc

SEQ ID NO: 216559 - DNA, 25 bp, Homo sapien
gtcctgctgaagatgctatcataga

SEQ ID NO: 216560 - DNA, 25 bp, Homo sapien
caaaagggctaccattcaagtctgg

SEQ ID NO: 216561 - DNA, 25 bp, Homo sapien
aatgatttaacagctccctaccaga

SEQ ID NO: 216562 - DNA, 25 bp, Homo sapien
ggaccacctggcttaagctcgatct

SEQ ID NO: 216563 - DNA, 25 bp, Homo sapien
tggaagattgccacgcaacaaggac

SEQ ID NO: 216564 - DNA, 25 bp, Homo sapien
cacttcaaaatgacagctaatttaa

SEQ ID NO: 216565 - DNA, 25 bp, Homo sapien
aattgtactagtggagaggaagaaa

SEQ ID NO: 216566 - DNA, 25 bp, Homo sapien
acaaaaaattgtactagtggagagg

SEQ ID NO: 216567 - DNA, 25 bp, Homo sapien
gaggaagaaaggcaagaacacttca

SEQ ID NO: 216568 - DNA, 25 bp, Homo sapien
ctgggcaggcacgtaaggtagctct

SEQ ID NO: 216569 - DNA, 25 bp, Homo sapien
tattgcaagtatttcaccccagagg

SEQ ID NO: 216570 - DNA, 25 bp, Homo sapien
tactgacatggtgctttggatccag

SEQ ID NO: 216571 - DNA, 25 bp, Homo sapien
taaatgaccatctgtccacgaggca

SEQ ID NO: 216572 - DNA, 25 bp, Homo sapien
gatcatttgggcgtggcttgacacc

SEQ ID NO: 216573 - DNA, 25 bp, Homo sapien
ctcaggtggccgattaaaaggtcta

SEQ ID NO: 216574 - DNA, 25 bp, Homo sapien
tcctgtgccacttggtagaatgagg

SEQ ID NO: 216575 - DNA, 25 bp, Homo sapien
ggaggcctccgcgatttgtgcagct

SEQ ID NO: 216576 - DNA, 25 bp, Homo sapien
ggaggtgagccagggtgatgttccc

SEQ ID NO: 216577 - DNA, 25 bp, Homo sapien
caccaatgtcgaacaggtgcctggg

SEQ ID NO: 216578 - DNA, 25 bp, Homo sapien
gtctcagacaccaatgtcgaacagg

SEQ ID NO: 216579 - DNA, 25 bp, Homo sapien
cagtagcaacactgtctcagacacc

SEQ ID NO: 216580 - DNA, 25 bp, Homo sapien
ggtccaggctggcgtgtagctgggc

SEQ ID NO: 216581 - DNA, 25 bp, Homo sapien
ccaggctggcgtgtagctgggcctc

SEQ ID NO: 216582 - DNA, 25 bp, Homo sapien
gcggtccaggctggcgtgtagctgg

SEQ ID NO: 216583 - DNA, 25 bp, Homo sapien
atttgcggtccaggctggcgtgtag

SEQ ID NO: 216584 - DNA, 25 bp, Homo sapien
agcttgcgcccgatggcctggagta

SEQ ID NO: 216585 - DNA, 25 bp, Homo sapien
aaggatcgcgtgttggtctcctcgc

SEQ ID NO: 216586 - DNA, 25 bp, Homo sapien
tagaccttcctcacgttgcttcagg

SEQ ID NO: 216587 - DNA, 25 bp, Homo sapien
aatgctcgtagttctcctgcgcacg

SEQ ID NO: 216588 - DNA, 25 bp, Homo sapien
cactgtaggatgacgacgatgcgcc

SEQ ID NO: 216589 - DNA, 25 bp, Homo sapien
gagtccagcgaatggctcttcctgc

SEQ ID NO: 216590 - DNA, 25 bp, Homo sapien
ggcccggagcgttggtggtggagga

SEQ ID NO: 216591 - DNA, 25 bp, Homo sapien
aagctgcggccggtgatcggaacca

SEQ ID NO: 216592 - DNA, 25 bp, Homo sapien
gccgcacgcggcgcgggcgaggccg

SEQ ID NO: 216593 - DNA, 25 bp, Homo sapien
cgggccgcacgcggcgcgggcgagg

SEQ ID NO: 216594 - DNA, 25 bp, Homo sapien
cacgcggcgcgggcgaggccgggag

SEQ ID NO: 216595 - DNA, 25 bp, Homo sapien
acgcggcgcgggcgaggccgggagg

SEQ ID NO: 216596 - DNA, 25 bp, Homo sapien
cttctcctcgcgcatgatgcgctcg

SEQ ID NO: 216597 - DNA, 25 bp, Homo sapien
gctcgcgctcggcccggcattgctg

SEQ ID NO: 216598 - DNA, 25 bp, Homo sapien
gccgcttctcctcgcgcatgatgcg

SEQ ID NO: 216599 - DNA, 25 bp, Homo sapien
tctcctcgcgcatgatgcgctcgcg

SEQ ID NO: 216600 - DNA, 25 bp, Homo sapien
ccacccgcatggagcggcccggagc

SEQ ID NO: 216601 - DNA, 25 bp, Homo sapien
ggccggtggccacccgcatggagcg

SEQ ID NO: 216602 - DNA, 25 bp, Homo sapien
gtggccacccgcatggagcggcccg

SEQ ID NO: 216603 - DNA, 25 bp, Homo sapien
aggccggtggccacccgcatggagc

SEQ ID NO: 216604 - DNA, 25 bp, Homo sapien
tgcacatgggacttctgccttgcgg

SEQ ID NO: 216605 - DNA, 25 bp, Homo sapien
agtcgccgggttccgctcctgcctt

SEQ ID NO: 216606 - DNA, 25 bp, Homo sapien
cacagcgggcgcaggcctctagcga

SEQ ID NO: 216607 - DNA, 25 bp, Homo sapien
gcctctgggcagtcgaagttgaaga

SEQ ID NO: 216608 - DNA, 25 bp, Homo sapien
ggctgagccccgtcctttgttggaa

SEQ ID NO: 216609 - DNA, 25 bp, Homo sapien
ctgagccccgtcctttgttggaatc

SEQ ID NO: 216610 - DNA, 25 bp, Homo sapien
gctgagccccgtcctttgttggaat

SEQ ID NO: 216611 - DNA, 25 bp, Homo sapien
tgagccccgtcctttgttggaatct

SEQ ID NO: 216612 - DNA, 25 bp, Homo sapien
ccgcgccaagggcttttgttcgcag

SEQ ID NO: 216613 - DNA, 25 bp, Homo sapien
ttttgttcgcagctcgccgctgtcc

SEQ ID NO: 216614 - DNA, 25 bp, Homo sapien
ggctgcaaccgtgaaaggagcccca

SEQ ID NO: 216615 - DNA, 25 bp, Homo sapien
ggtcgggttactgccggctgcaacc

SEQ ID NO: 216616 - DNA, 25 bp, Homo sapien
catctgggaaggtcatgcaaggaga

SEQ ID NO: 216617 - DNA, 25 bp, Homo sapien
tgacttggtagtcaatgcggtgcca

SEQ ID NO: 216618 - DNA, 25 bp, Homo sapien
gggccttgaaataggacaccaacat

SEQ ID NO: 216619 - DNA, 25 bp, Homo sapien
gaattgtcaggtatctcccacttct

SEQ ID NO: 216620 - DNA, 25 bp, Homo sapien
tctgtgtccaactaggccagcgaaa

SEQ ID NO: 216621 - DNA, 25 bp, Homo sapien
tgtgtccaactaggccagcgaaaaa

SEQ ID NO: 216622 - DNA, 25 bp, Homo sapien
agtcctctgtgtccaactaggccag

SEQ ID NO: 216623 - DNA, 25 bp, Homo sapien
tcctctgtgtccaactaggccagcg

SEQ ID NO: 216624 - DNA, 25 bp, Homo sapien
ttttcttgagtaggctgcagagcca

SEQ ID NO: 216625 - DNA, 25 bp, Homo sapien
gaggacacatatgcccgattagagc

SEQ ID NO: 216626 - DNA, 25 bp, Homo sapien
cagtgctggcaacaagaggcaagcc

SEQ ID NO: 216627 - DNA, 25 bp, Homo sapien
tggaaaaccgtctgagggtctcacc

SEQ ID NO: 216628 - DNA, 25 bp, Homo sapien
gaatatgctactccttccacccaga

SEQ ID NO: 216629 - DNA, 25 bp, Homo sapien
ccaagtgtctccatgaatgagggaa

SEQ ID NO: 216630 - DNA, 25 bp, Homo sapien
tgggcatgccactgctcttgtagca

SEQ ID NO: 216631 - DNA, 25 bp, Homo sapien
tatctgccttgcactgagtctttgg

SEQ ID NO: 216632 - DNA, 25 bp, Homo sapien
tactactggtatcatttgtaggctg

SEQ ID NO: 216633 - DNA, 25 bp, Homo sapien
cttagctcttctgacaaccaagtta

SEQ ID NO: 216634 - DNA, 25 bp, Homo sapien
ttctgacaaccaagttactactggt

SEQ ID NO: 216635 - DNA, 25 bp, Homo sapien
ctttcaagtttattgctactaagca

SEQ ID NO: 216636 - DNA, 25 bp, Homo sapien
aacacggttctcctctccggtgaga

SEQ ID NO: 216637 - DNA, 25 bp, Homo sapien
aggttcaccctgctagaacacggtt

SEQ ID NO: 216638 - DNA, 25 bp, Homo sapien
tgctagaacacggttctcctctccg

SEQ ID NO: 216639 - DNA, 25 bp, Homo sapien
ttcaccctgctagaacacggttctc

SEQ ID NO: 216640 - DNA, 25 bp, Homo sapien
ttggaggtgaaaggcgacctgatag

SEQ ID NO: 216641 - DNA, 25 bp, Homo sapien
attggaggtgaaaggcgacctgata

SEQ ID NO: 216642 - DNA, 25 bp, Homo sapien
gaggtgaaaggcgacctgatagtac

SEQ ID NO: 216643 - DNA, 25 bp, Homo sapien
tggaggtgaaaggcgacctgatagt

SEQ ID NO: 216644 - DNA, 25 bp, Homo sapien
tggaggctggggaccatccagtttt

SEQ ID NO: 216645 - DNA, 25 bp, Homo sapien
tttgggagtgcagttcccagtagga

SEQ ID NO: 216646 - DNA, 25 bp, Homo sapien
gggaccatccagttttaggactctg

SEQ ID NO: 216647 - DNA, 25 bp, Homo sapien
catccagttttaggactctggtgac

SEQ ID NO: 216648 - DNA, 25 bp, Homo sapien
agcttcagggaatgaactcttagga

SEQ ID NO: 216649 - DNA, 25 bp, Homo sapien
gaactcttaggagcaatggtaagca

SEQ ID NO: 216650 - DNA, 25 bp, Homo sapien
ccagaaggagggtgtgaaaggtgcc

SEQ ID NO: 216651 - DNA, 25 bp, Homo sapien
tgatggtgaggccagatgcctctgt

SEQ ID NO: 216652 - DNA, 25 bp, Homo sapien
cacagttaaggtagtgtgaccagcc

SEQ ID NO: 216653 - DNA, 25 bp, Homo sapien
cttctcacagttaaggtagtgtgac

SEQ ID NO: 216654 - DNA, 25 bp, Homo sapien
tgcttctcacagttaaggtagtgtg

SEQ ID NO: 216655 - DNA, 25 bp, Homo sapien
agttaaggtagtgtgaccagccagg

SEQ ID NO: 216656 - DNA, 25 bp, Homo sapien
ccccaggacactcttgcaagaattg

SEQ ID NO: 216657 - DNA, 25 bp, Homo sapien
accagggatgggcattgactttgac

SEQ ID NO: 216658 - DNA, 25 bp, Homo sapien
gcttccaccagggatgggcattgac

SEQ ID NO: 216659 - DNA, 25 bp, Homo sapien
tgcaagaattgcttccaccagggat

SEQ ID NO: 216660 - DNA, 25 bp, Homo sapien
gcacgtgcagattgctgtcctctga

SEQ ID NO: 216661 - DNA, 25 bp, Homo sapien
catctgctgcttgtgacagcgggtg

SEQ ID NO: 216662 - DNA, 25 bp, Homo sapien
ccatctgctgcttgtgacagcgggt

SEQ ID NO: 216663 - DNA, 25 bp, Homo sapien
gcttgtgcttcaaaccttgcctctt

SEQ ID NO: 216664 - DNA, 25 bp, Homo sapien
tttagcttgtgcttcaaaccttgcc

SEQ ID NO: 216665 - DNA, 25 bp, Homo sapien
tgtgcttcaaaccttgcctctttct

SEQ ID NO: 216666 - DNA, 25 bp, Homo sapien
gtaatttagcttgtgcttcaaacct

SEQ ID NO: 216667 - DNA, 25 bp, Homo sapien
gaagattctgtgcatcctgacatgc

SEQ ID NO: 216668 - DNA, 25 bp, Homo sapien
agaagattctgtgcatcctgacatg

SEQ ID NO: 216669 - DNA, 25 bp, Homo sapien
acaaatacactttgagtcttcttcc

SEQ ID NO: 216670 - DNA, 25 bp, Homo sapien
gtatttctaacataaaggctgagga

SEQ ID NO: 216671 - DNA, 25 bp, Homo sapien
gatgtgtatttaaccgttttgccaa

SEQ ID NO: 216672 - DNA, 25 bp, Homo sapien
aaggctgaggatgtgtatttaaccg

SEQ ID NO: 216673 - DNA, 25 bp, Homo sapien
ctaattgtatgctagtatttctaac

SEQ ID NO: 216674 - DNA, 25 bp, Homo sapien
tattagcaggctcttgggttaactt

SEQ ID NO: 216675 - DNA, 25 bp, Homo sapien
ggctcttgggttaacttggaagcat

SEQ ID NO: 216676 - DNA, 25 bp, Homo sapien
taaacttattagcaggctcttgggt

SEQ ID NO: 216677 - DNA, 25 bp, Homo sapien
gcacctttaaacttattagcaggct

SEQ ID NO: 216678 - DNA, 25 bp, Homo sapien
caagtaaaccatgtgaactttgggc

SEQ ID NO: 216679 - DNA, 25 bp, Homo sapien
tggcaacaacaagcaagtaaaccat

SEQ ID NO: 216680 - DNA, 25 bp, Homo sapien
tgtgaactttgggcttgtgttgcag

SEQ ID NO: 216681 - DNA, 25 bp, Homo sapien
caacaagcaagtaaaccatgtgaac

SEQ ID NO: 216682 - DNA, 25 bp, Homo sapien
tattctaggtttacagaggtgggag

SEQ ID NO: 216683 - DNA, 25 bp, Homo sapien
gtccacgacatcacattcagtaggg

SEQ ID NO: 216684 - DNA, 25 bp, Homo sapien
gggctgacggtcgagctgaggcctc

SEQ ID NO: 216685 - DNA, 25 bp, Homo sapien
ttcagtagggcagtcacccagctgt

SEQ ID NO: 216686 - DNA, 25 bp, Homo sapien
ctgtgcccggcagttaccaatttct

SEQ ID NO: 216687 - DNA, 25 bp, Homo sapien
tttcttatgctttattccaggtgag

SEQ ID NO: 216688 - DNA, 25 bp, Homo sapien
tacatgcatatacccaggttatttt

SEQ ID NO: 216689 - DNA, 25 bp, Homo sapien
actgtgcccggcagttaccaatttc

SEQ ID NO: 216690 - DNA, 25 bp, Homo sapien
taaacctctgtacggtattccatta

SEQ ID NO: 216691 - DNA, 25 bp, Homo sapien
ctgataagtcagagtatatgtgcat

SEQ ID NO: 216692 - DNA, 25 bp, Homo sapien
tcttagggcacattctagaactgat

SEQ ID NO: 216693 - DNA, 25 bp, Homo sapien
taacaagttgctctccgaaggattc

SEQ ID NO: 216694 - DNA, 25 bp, Homo sapien
gatccactggttattgccttgaggg

SEQ ID NO: 216695 - DNA, 25 bp, Homo sapien
ggtagggttacctggtgtgactgca

SEQ ID NO: 216696 - DNA, 25 bp, Homo sapien
tgtggcacatgcaggtgtcattctt

SEQ ID NO: 216697 - DNA, 25 bp, Homo sapien
gatgacaactgcccggtagggttac

SEQ ID NO: 216698 - DNA, 25 bp, Homo sapien
aatactggtgttcctactggacttt

SEQ ID NO: 216699 - DNA, 25 bp, Homo sapien
caatactggtgttcctactggactt

SEQ ID NO: 216700 - DNA, 25 bp, Homo sapien
tactggtgttcctactggactttgt

SEQ ID NO: 216701 - DNA, 25 bp, Homo sapien
atactggtgttcctactggactttg

SEQ ID NO: 216702 - DNA, 25 bp, Homo sapien
tagaccctggctatatgcgtgtgta

SEQ ID NO: 216703 - DNA, 25 bp, Homo sapien
tatacagccttgctatccagtgggc

SEQ ID NO: 216704 - DNA, 25 bp, Homo sapien
tagacataggtaactgggcatcctc

SEQ ID NO: 216705 - DNA, 25 bp, Homo sapien
aatttgtctgcatcgtctctggtcg

SEQ ID NO: 216706 - DNA, 25 bp, Homo sapien
gaaggaccctcgagtcagagagaat

SEQ ID NO: 216707 - DNA, 25 bp, Homo sapien
cgactttctgcaaaagagaggcaca

SEQ ID NO: 216708 - DNA, 25 bp, Homo sapien
ttctgcaaaagagaggcacaggatg

SEQ ID NO: 216709 - DNA, 25 bp, Homo sapien
actttctgcaaaagagaggcacagg

SEQ ID NO: 216710 - DNA, 25 bp, Homo sapien
ccgactttctgcaaaagagaggcac

SEQ ID NO: 216711 - DNA, 25 bp, Homo sapien
ctcatagtattctgtccccagcctt

SEQ ID NO: 216712 - DNA, 25 bp, Homo sapien
tcctcatagtattctgtccccagcc

SEQ ID NO: 216713 - DNA, 25 bp, Homo sapien
ctgagtgatggttcctcatagtatt

SEQ ID NO: 216714 - DNA, 25 bp, Homo sapien
cccactgagtgatggttcctcatag

SEQ ID NO: 216715 - DNA, 25 bp, Homo sapien
gcttcttctgtggaacatcacccat

SEQ ID NO: 216716 - DNA, 25 bp, Homo sapien
ctttatccttcaaagtccaacttag

SEQ ID NO: 216717 - DNA, 25 bp, Homo sapien
acttagcttcttctgtggaacatca

SEQ ID NO: 216718 - DNA, 25 bp, Homo sapien
tccttcaaagtccaacttagcttct

SEQ ID NO: 216719 - DNA, 25 bp, Homo sapien
cagcaggtgcttggtgtattcttca

SEQ ID NO: 216720 - DNA, 25 bp, Homo sapien
ttgagatgccaggttctgcatcaca

SEQ ID NO: 216721 - DNA, 25 bp, Homo sapien
gcatcacagtgctaactgcctggca

SEQ ID NO: 216722 - DNA, 25 bp, Homo sapien
tctcccctctgatgtgtaccaggaa

SEQ ID NO: 216723 - DNA, 25 bp, Homo sapien
gactggctcgccaaaagtgaaacta

SEQ ID NO: 216724 - DNA, 25 bp, Homo sapien
tctggcagagctagcatgtacgtcg

SEQ ID NO: 216725 - DNA, 25 bp, Homo sapien
tgttgatcagaatcccatccagaga

SEQ ID NO: 216726 - DNA, 25 bp, Homo sapien
taagcggttgtatccagctacctct

SEQ ID NO: 216727 - DNA, 25 bp, Homo sapien
ttgtttgtgcctttatgtcccccac

SEQ ID NO: 216728 - DNA, 25 bp, Homo sapien
tgtgcctttatgtcccccaccatgt

SEQ ID NO: 216729 - DNA, 25 bp, Homo sapien
ttcccactctcctttatccccgtca

SEQ ID NO: 216730 - DNA, 25 bp, Homo sapien
gtttgtgcctttatgtcccccacca

SEQ ID NO: 216731 - DNA, 25 bp, Homo sapien
taagccagactcctaagtcagttat

SEQ ID NO: 216732 - DNA, 25 bp, Homo sapien
gccagactcctaagtcagttatcac

SEQ ID NO: 216733 - DNA, 25 bp, Homo sapien
ctctaagccagactcctaagtcagt

SEQ ID NO: 216734 - DNA, 25 bp, Homo sapien
tctaagccagactcctaagtcagtt

SEQ ID NO: 216735 - DNA, 25 bp, Homo sapien
tcctgagaggaccagtcatctcctc

SEQ ID NO: 216736 - DNA, 25 bp, Homo sapien
gataaaggagaatggtcctctggcc

SEQ ID NO: 216737 - DNA, 25 bp, Homo sapien
agcaggataaaggagaatggtcctc

SEQ ID NO: 216738 - DNA, 25 bp, Homo sapien
tgtagcagtggtaacagtgggaggg

SEQ ID NO: 216739 - DNA, 25 bp, Homo sapien
ggagcagcaggataaaggagaatgg

SEQ ID NO: 216740 - DNA, 25 bp, Homo sapien
agggcttaggttgagcctctcttag

SEQ ID NO: 216741 - DNA, 25 bp, Homo sapien
ctgtcagttgctgatcttccgagga

SEQ ID NO: 216742 - DNA, 25 bp, Homo sapien
atcttccgaggagggcttaggttga

SEQ ID NO: 216743 - DNA, 25 bp, Homo sapien
tgctgatcttccgaggagggcttag

SEQ ID NO: 216744 - DNA, 25 bp, Homo sapien
ttaatggtcatatccctatttggca

SEQ ID NO: 216745 - DNA, 25 bp, Homo sapien
tattatgagtgctaggtgaccgcca

SEQ ID NO: 216746 - DNA, 25 bp, Homo sapien
acctgaggtgcttatatttttgtcc

SEQ ID NO: 216747 - DNA, 25 bp, Homo sapien
ctatttggcaagaaggacctgaggt

SEQ ID NO: 216748 - DNA, 25 bp, Homo sapien
aggagacttgctgagatgccatgga

SEQ ID NO: 216749 - DNA, 25 bp, Homo sapien
ccatggtcacgtgccttagtaactg

SEQ ID NO: 216750 - DNA, 25 bp, Homo sapien
tgggttttatcccagatagctctgg

SEQ ID NO: 216751 - DNA, 25 bp, Homo sapien
tataatgggaagttgcatgctgcct

SEQ ID NO: 216752 - DNA, 25 bp, Homo sapien
gctagaactagaaggcagatgagac

SEQ ID NO: 216753 - DNA, 25 bp, Homo sapien
ggagggctgtccctaatggccccag

SEQ ID NO: 216754 - DNA, 25 bp, Homo sapien
tttcaaaacccgcattctattctag

SEQ ID NO: 216755 - DNA, 25 bp, Homo sapien
tcctctcagggtaagggcagtgcct

SEQ ID NO: 216756 - DNA, 25 bp, Homo sapien
gacagtccttactggtgccccaagg

SEQ ID NO: 216757 - DNA, 25 bp, Homo sapien
gcttaatgccaaggacagcgagtga

SEQ ID NO: 216758 - DNA, 25 bp, Homo sapien
tcagctctcggaatagggacagtcc

SEQ ID NO: 216759 - DNA, 25 bp, Homo sapien
tgaaatcgactgaatcctggccact

SEQ ID NO: 216760 - DNA, 25 bp, Homo sapien
tgcgctagagtcaccgtggctccct

SEQ ID NO: 216761 - DNA, 25 bp, Homo sapien
gcgctagagtcaccgtggctccctt

SEQ ID NO: 216762 - DNA, 25 bp, Homo sapien
cgctagagtcaccgtggctcccttg

SEQ ID NO: 216763 - DNA, 25 bp, Homo sapien
tgggtgacaggcggcctctttcccc

SEQ ID NO: 216764 - DNA, 25 bp, Homo sapien
tctttcccctgcattggaagtggca

SEQ ID NO: 216765 - DNA, 25 bp, Homo sapien
gctcagaggcaagggtagtgagact

SEQ ID NO: 216766 - DNA, 25 bp, Homo sapien
tcagaggcaagggtagtgagactct

SEQ ID NO: 216767 - DNA, 25 bp, Homo sapien
tatcctgcccaagaatccctctcag

SEQ ID NO: 216768 - DNA, 25 bp, Homo sapien
tgcccaagaatccctctcagcaatg

SEQ ID NO: 216769 - DNA, 25 bp, Homo sapien
tcctgcccaagaatccctctcagca

SEQ ID NO: 216770 - DNA, 25 bp, Homo sapien
atttagcaaaatgcagtcccagatg

SEQ ID NO: 216771 - DNA, 25 bp, Homo sapien
aagctgcctggtgatgaaggagcat

SEQ ID NO: 216772 - DNA, 25 bp, Homo sapien
gggtgagacatgacacattcccaag

SEQ ID NO: 216773 - DNA, 25 bp, Homo sapien
ctgcctggtgatgaaggagcattac

SEQ ID NO: 216774 - DNA, 25 bp, Homo sapien
tgagcctaggttcatcctccaagct

SEQ ID NO: 216775 - DNA, 25 bp, Homo sapien
ggcttggggaccatccaatcccaca

SEQ ID NO: 216776 - DNA, 25 bp, Homo sapien
gcaaacagctgctcggcatttcctg

SEQ ID NO: 216777 - DNA, 25 bp, Homo sapien
catttcctgtgacgctccagtgccc

SEQ ID NO: 216778 - DNA, 25 bp, Homo sapien
caatcccacacccaagaggcaaaca

SEQ ID NO: 216779 - DNA, 25 bp, Homo sapien
gtagcctctctctgggacggccatt

SEQ ID NO: 216780 - DNA, 25 bp, Homo sapien
cagagacttttagggacttttggtg

SEQ ID NO: 216781 - DNA, 25 bp, Homo sapien
ggacttttggtgctgtagcctctct

SEQ ID NO: 216782 - DNA, 25 bp, Homo sapien
gctggggtccagagacttttaggga

SEQ ID NO: 216783 - DNA, 25 bp, Homo sapien
aggcagtaatttaaaaccctctcat

SEQ ID NO: 216784 - DNA, 25 bp, Homo sapien
ttctggttttacgaacatgtgagaa

SEQ ID NO: 216785 - DNA, 25 bp, Homo sapien
ccaaggatggtaggaagttcctcct

SEQ ID NO: 216786 - DNA, 25 bp, Homo sapien
aggatggtaggaagttcctcctgga

SEQ ID NO: 216787 - DNA, 25 bp, Homo sapien
ctggttttacgaacatgtgagaaga

SEQ ID NO: 216788 - DNA, 25 bp, Homo sapien
tgtgggtgtataaccaacggtcctg

SEQ ID NO: 216789 - DNA, 25 bp, Homo sapien
ttctgtgggtgtataaccaacggtc

SEQ ID NO: 216790 - DNA, 25 bp, Homo sapien
taaccaacggtcctgagctcagatt

SEQ ID NO: 216791 - DNA, 25 bp, Homo sapien
ggtgtataaccaacggtcctgagct

SEQ ID NO: 216792 - DNA, 25 bp, Homo sapien
ggggtcagccccctagagactctca

SEQ ID NO: 216793 - DNA, 25 bp, Homo sapien
tcagccccctagagactctcacaag

SEQ ID NO: 216794 - DNA, 25 bp, Homo sapien
ggtcagccccctagagactctcaca

SEQ ID NO: 216795 - DNA, 25 bp, Homo sapien
gccccctagagactctcacaaggcc

SEQ ID NO: 216796 - DNA, 25 bp, Homo sapien
gcaaacacattcttaatctgtgcac

SEQ ID NO: 216797 - DNA, 25 bp, Homo sapien
tcatggcccttttcacgctggtcat

SEQ ID NO: 216798 - DNA, 25 bp, Homo sapien
tagaaggctccttccaaggcaaaca

SEQ ID NO: 216799 - DNA, 25 bp, Homo sapien
tgtgcacagaatactccctccacat

SEQ ID NO: 216800 - DNA, 25 bp, Homo sapien
tgttcatcaggccaacaactaggta

SEQ ID NO: 216801 - DNA, 25 bp, Homo sapien
tataggtaactaacttcactgaggc

SEQ ID NO: 216802 - DNA, 25 bp, Homo sapien
gggtcagttgctctccttccggaac

SEQ ID NO: 216803 - DNA, 25 bp, Homo sapien
caactggtttgggacaatttgtgca

SEQ ID NO: 216804 - DNA, 25 bp, Homo sapien
ccggaagtgacgtaggacgcgccct

SEQ ID NO: 216805 - DNA, 25 bp, Homo sapien
tggcgtagacgagttaagtcctggt

SEQ ID NO: 216806 - DNA, 25 bp, Homo sapien
taggacgcgccctccattttgtgga

SEQ ID NO: 216807 - DNA, 25 bp, Homo sapien
agagctgctaagtgcgtcagttgtg

SEQ ID NO: 216808 - DNA, 25 bp, Homo sapien
ctgcgtggaggtcgacgactccgtc

SEQ ID NO: 216809 - DNA, 25 bp, Homo sapien
cgacgactccgtcgcagactacgga

SEQ ID NO: 216810 - DNA, 25 bp, Homo sapien
gaggtcgacgactccgtcgcagact

SEQ ID NO: 216811 - DNA, 25 bp, Homo sapien
cgtggaggtcgacgactccgtcgca

SEQ ID NO: 216812 - DNA, 25 bp, Homo sapien
cactttgagggcaagccttctcgga

SEQ ID NO: 216813 - DNA, 25 bp, Homo sapien
tgagtggctcactttgagggcaagc

SEQ ID NO: 216814 - DNA, 25 bp, Homo sapien
gtctgggtctcagccgccaaagacc

SEQ ID NO: 216815 - DNA, 25 bp, Homo sapien
gccttctcggatcgaggcttcttca

SEQ ID NO: 216816 - DNA, 25 bp, Homo sapien
tttacacagcggttgtgcgcccgtc

SEQ ID NO: 216817 - DNA, 25 bp, Homo sapien
tcctggacacgtagaatagtgggcc

SEQ ID NO: 216818 - DNA, 25 bp, Homo sapien
gagggaatttggcacgcgcagctct

SEQ ID NO: 216819 - DNA, 25 bp, Homo sapien
gggatctccctgactttgctggcga

SEQ ID NO: 216820 - DNA, 25 bp, Homo sapien
cattagaggctctgttggcaatctc

SEQ ID NO: 216821 - DNA, 25 bp, Homo sapien
catcatgagtggctgtcgggtattc

SEQ ID NO: 216822 - DNA, 25 bp, Homo sapien
tcatcgggagactaaatccagcggc

SEQ ID NO: 216823 - DNA, 25 bp, Homo sapien
tctaataggaagtactagccggaca

SEQ ID NO: 216824 - DNA, 25 bp, Homo sapien
gaatttatcctcaagagtcagctgg

SEQ ID NO: 216825 - DNA, 25 bp, Homo sapien
cagctggcaggtttgttgaaataca

SEQ ID NO: 216826 - DNA, 25 bp, Homo sapien
cattagcagtgatgattttgggtcc

SEQ ID NO: 216827 - DNA, 25 bp, Homo sapien
tctattcccacgttagccagttgtt

SEQ ID NO: 216828 - DNA, 25 bp, Homo sapien
tcctgatcgcagtaaagtggtcctt

SEQ ID NO: 216829 - DNA, 25 bp, Homo sapien
gacgttatcggtgcacttccttgaa

SEQ ID NO: 216830 - DNA, 25 bp, Homo sapien
tgtaacgcttccgaataagaggtcc

SEQ ID NO: 216831 - DNA, 25 bp, Homo sapien
gagtagaacatgtctgcatccgcca

SEQ ID NO: 216832 - DNA, 25 bp, Homo sapien
gatatctttgtagatgtggaccacc

SEQ ID NO: 216833 - DNA, 25 bp, Homo sapien
tgttagtaggtctcccgtgcctgag

SEQ ID NO: 216834 - DNA, 25 bp, Homo sapien
tctgtggatcgccagaggtcccggt

SEQ ID NO: 216835 - DNA, 25 bp, Homo sapien
aagggtgtcctccactctttaacag

SEQ ID NO: 216836 - DNA, 25 bp, Homo sapien
caaatttgacttttcgggagcatca

SEQ ID NO: 216837 - DNA, 25 bp, Homo sapien
gacttttcgggagcatcatcccaat

SEQ ID NO: 216838 - DNA, 25 bp, Homo sapien
tgcatacttgatgtcaaatttgact

SEQ ID NO: 216839 - DNA, 25 bp, Homo sapien
tgtcaaatttgacttttcgggagca

SEQ ID NO: 216840 - DNA, 25 bp, Homo sapien
tggagaaagactcaggcaagactgg

SEQ ID NO: 216841 - DNA, 25 bp, Homo sapien
tctgatagatgtactggaaatgctg

SEQ ID NO: 216842 - DNA, 25 bp, Homo sapien
cggccaagacttgatgattctgata

SEQ ID NO: 216843 - DNA, 25 bp, Homo sapien
acttttagagatcccagcaagaggc

SEQ ID NO: 216844 - DNA, 25 bp, Homo sapien
ttcttcagttgtggcagctgtgtag

SEQ ID NO: 216845 - DNA, 25 bp, Homo sapien
agtcctcccctttgtaggtgccatt

SEQ ID NO: 216846 - DNA, 25 bp, Homo sapien
gcagtcctcccctttgtaggtgcca

SEQ ID NO: 216847 - DNA, 25 bp, Homo sapien
taggctgtgcaaggggagcagtcct

SEQ ID NO: 216848 - DNA, 25 bp, Homo sapien
tagcaccaaaatatggcaatgagga

SEQ ID NO: 216849 - DNA, 25 bp, Homo sapien
gaaaagtggtccaatgacttcaggt

SEQ ID NO: 216850 - DNA, 25 bp, Homo sapien
tccaagctggaaaatcatgtagagg

SEQ ID NO: 216851 - DNA, 25 bp, Homo sapien
gtggaacagagttggacattttggc

SEQ ID NO: 216852 - DNA, 25 bp, Homo sapien
aagagagcagagagaacataaccca

SEQ ID NO: 216853 - DNA, 25 bp, Homo sapien
gggaggaggtggcaatcaagagtgg

SEQ ID NO: 216854 - DNA, 25 bp, Homo sapien
agagcagagagaacataacccagca

SEQ ID NO: 216855 - DNA, 25 bp, Homo sapien
gagcagagagaacataacccagcag

SEQ ID NO: 216856 - DNA, 25 bp, Homo sapien
gcacaagagaatgatgatcatccct

SEQ ID NO: 216857 - DNA, 25 bp, Homo sapien
acaagagaatgatgatcatccctcc

SEQ ID NO: 216858 - DNA, 25 bp, Homo sapien
actgcacaagagaatgatgatcatc

SEQ ID NO: 216859 - DNA, 25 bp, Homo sapien
tgcacaagagaatgatgatcatccc

SEQ ID NO: 216860 - DNA, 25 bp, Homo sapien
tatcacgatgcctttatagggcacc

SEQ ID NO: 216861 - DNA, 25 bp, Homo sapien
gatttgaggacgatccctatggtgc

SEQ ID NO: 216862 - DNA, 25 bp, Homo sapien
ccctatggtgcaaggaatgagaacc

SEQ ID NO: 216863 - DNA, 25 bp, Homo sapien
tgacatagcgcatgtattgtggccg

SEQ ID NO: 216864 - DNA, 25 bp, Homo sapien
aaggtggagcaggtggtcatcacaa

SEQ ID NO: 216865 - DNA, 25 bp, Homo sapien
tgccaagggcacagaaggtggagca

SEQ ID NO: 216866 - DNA, 25 bp, Homo sapien
ggtggagcaggtggtcatcacaatg

SEQ ID NO: 216867 - DNA, 25 bp, Homo sapien
ccaagggcacagaaggtggagcagg

SEQ ID NO: 216868 - DNA, 25 bp, Homo sapien
tggacttggtgtgccttgtcagctt

SEQ ID NO: 216869 - DNA, 25 bp, Homo sapien
ttttggagtttggacttggtgtgcc

SEQ ID NO: 216870 - DNA, 25 bp, Homo sapien
tccctgatccccaggtacttcctcc

SEQ ID NO: 216871 - DNA, 25 bp, Homo sapien
ccttgtcagcttgggtatgcaggag

SEQ ID NO: 216872 - DNA, 25 bp, Homo sapien
ctggggtcaggtcagggacatccat

SEQ ID NO: 216873 - DNA, 25 bp, Homo sapien
ggatggtcaaaagaggccagttcct

SEQ ID NO: 216874 - DNA, 25 bp, Homo sapien
gggttgtgtccaagcccattgtccc

SEQ ID NO: 216875 - DNA, 25 bp, Homo sapien
ctctgctgtgagtccgatggtggca

SEQ ID NO: 216876 - DNA, 25 bp, Homo sapien
aactgtgagggcgttttctcttgcc

SEQ ID NO: 216877 - DNA, 25 bp, Homo sapien
ctgcattgaggggtctgcttggtgg

SEQ ID NO: 216878 - DNA, 25 bp, Homo sapien
tggctgcattgaggggtctgcttgg

SEQ ID NO: 216879 - DNA, 25 bp, Homo sapien
gctgccgtccctggctgcattgagg

SEQ ID NO: 216880 - DNA, 25 bp, Homo sapien
ccctggctgcattgaggggtctgct

SEQ ID NO: 216881 - DNA, 25 bp, Homo sapien
caggctgtccccagactgactccac

SEQ ID NO: 216882 - DNA, 25 bp, Homo sapien
tgggatggcaggctgtccccagact

SEQ ID NO: 216883 - DNA, 25 bp, Homo sapien
atggcaggctgtccccagactgact

SEQ ID NO: 216884 - DNA, 25 bp, Homo sapien
ggatggcaggctgtccccagactga

SEQ ID NO: 216885 - DNA, 25 bp, Homo sapien
ctaccttttaaatctctgggctcaa

SEQ ID NO: 216886 - DNA, 25 bp, Homo sapien
gaatttgaggtgctcatttggttcc

SEQ ID NO: 216887 - DNA, 25 bp, Homo sapien
tgtttggaacgaatcacactacctt

SEQ ID NO: 216888 - DNA, 25 bp, Homo sapien
aattcttgcccgctttgcaggaatt

SEQ ID NO: 216889 - DNA, 25 bp, Homo sapien
gcagcccagcgagagcatgatgaag

SEQ ID NO: 216890 - DNA, 25 bp, Homo sapien
atgatgccatactgtgccaccaggg

SEQ ID NO: 216891 - DNA, 25 bp, Homo sapien
catgaacaccaggatgacgctcagt

SEQ ID NO: 216892 - DNA, 25 bp, Homo sapien
tgcctcaatgttcttcagccggaag

SEQ ID NO: 216893 - DNA, 25 bp, Homo sapien
gggcgcttgccaaagttgggtggca

SEQ ID NO: 216894 - DNA, 25 bp, Homo sapien
ggggcagacgcgttgtgggcctcca

SEQ ID NO: 216895 - DNA, 25 bp, Homo sapien
ctgtggggcgcttgccaaagttggg

SEQ ID NO: 216896 - DNA, 25 bp, Homo sapien
aatggggcagacgcgttgtgggcct

SEQ ID NO: 216897 - DNA, 25 bp, Homo sapien
tgaggcagtggaagaccactccttg

SEQ ID NO: 216898 - DNA, 25 bp, Homo sapien
tcttgtgcagttcttgctggatgcc

SEQ ID NO: 216899 - DNA, 25 bp, Homo sapien
cttgttctccggctgactccgtttc

SEQ ID NO: 216900 - DNA, 25 bp, Homo sapien
tgctggatgccttctttaatcacct

SEQ ID NO: 216901 - DNA, 25 bp, Homo sapien
tctctgtgccatcaagcacatttgt

SEQ ID NO: 216902 - DNA, 25 bp, Homo sapien
ttcctatggctgaagcagcaatatc

SEQ ID NO: 216903 - DNA, 25 bp, Homo sapien
cactcagtgagtacttctgaactct

SEQ ID NO: 216904 - DNA, 25 bp, Homo sapien
gccacagcaggtttaggcggtcagt

SEQ ID NO: 216905 - DNA, 25 bp, Homo sapien
tggtaaacatctggaaaccctcagg

SEQ ID NO: 216906 - DNA, 25 bp, Homo sapien
acaccttccataggcccttctgttc

SEQ ID NO: 216907 - DNA, 25 bp, Homo sapien
gctccatgaaggtgcttggtaaaca

SEQ ID NO: 216908 - DNA, 25 bp, Homo sapien
catctggaaaccctcaggacacctt

SEQ ID NO: 216909 - DNA, 25 bp, Homo sapien
cagttgctgctctcttagaatgagg

SEQ ID NO: 216910 - DNA, 25 bp, Homo sapien
ttccagttgctgctctcttagaatg

SEQ ID NO: 216911 - DNA, 25 bp, Homo sapien
ggcgctggccttccaagtgtcccgc

SEQ ID NO: 216912 - DNA, 25 bp, Homo sapien
tggccttccaagtgtcccgctccag

SEQ ID NO: 216913 - DNA, 25 bp, Homo sapien
ccacagtacctacctgctgcacttc

SEQ ID NO: 216914 - DNA, 25 bp, Homo sapien
tacctacctgctgcacttccacttt

SEQ ID NO: 216915 - DNA, 25 bp, Homo sapien
acagtacctacctgctgcacttcca

SEQ ID NO: 216916 - DNA, 25 bp, Homo sapien
agtacctacctgctgcacttccact

SEQ ID NO: 216917 - DNA, 25 bp, Homo sapien
cagcagattccaataacatgcaagt

SEQ ID NO: 216918 - DNA, 25 bp, Homo sapien
cagattccaataacatgcaagtctc

SEQ ID NO: 216919 - DNA, 25 bp, Homo sapien
acagcagattccaataacatgcaag

SEQ ID NO: 216920 - DNA, 25 bp, Homo sapien
gcagattccaataacatgcaagtct

SEQ ID NO: 216921 - DNA, 25 bp, Homo sapien
gagctgcagctcctccactgctgac

SEQ ID NO: 216922 - DNA, 25 bp, Homo sapien
tcacacgagctgcagctcctccact

SEQ ID NO: 216923 - DNA, 25 bp, Homo sapien
acacgagctgcagctcctccactgc

SEQ ID NO: 216924 - DNA, 25 bp, Homo sapien
acgagctgcagctcctccactgctg

SEQ ID NO: 216925 - DNA, 25 bp, Homo sapien
catagagcaagtggccgagagcaga

SEQ ID NO: 216926 - DNA, 25 bp, Homo sapien
gctccccagaacaggattagtggaa

SEQ ID NO: 216927 - DNA, 25 bp, Homo sapien
gaacaggattagtggaaacagttgg

SEQ ID NO: 216928 - DNA, 25 bp, Homo sapien
agcttggcatagagcaagtggccga

SEQ ID NO: 216929 - DNA, 25 bp, Homo sapien
gcaatgccaagctcatcctgaacac

SEQ ID NO: 216930 - DNA, 25 bp, Homo sapien
tgccaagctcatcctgaacacccat

SEQ ID NO: 216931 - DNA, 25 bp, Homo sapien
ctggcaatgccaagctcatcctgaa

SEQ ID NO: 216932 - DNA, 25 bp, Homo sapien
atgccaagctcatcctgaacaccca

SEQ ID NO: 216933 - DNA, 25 bp, Homo sapien
gaccattaatcagctggcatgcaat

SEQ ID NO: 216934 - DNA, 25 bp, Homo sapien
tcaggctggccatgaagccgcgtgt

SEQ ID NO: 216935 - DNA, 25 bp, Homo sapien
tgtgtttgtccagctcggacgtgtg

SEQ ID NO: 216936 - DNA, 25 bp, Homo sapien
gcatgcaatcatggcgttttgaagg

SEQ ID NO: 216937 - DNA, 25 bp, Homo sapien
tttatgtacagaaaactcaacagtg

SEQ ID NO: 216938 - DNA, 25 bp, Homo sapien
tatgtacagaaaactcaacagtgta

SEQ ID NO: 216939 - DNA, 25 bp, Homo sapien
tatttttatgtacagaaaactcaac

SEQ ID NO: 216940 - DNA, 25 bp, Homo sapien
tttttatgtacagaaaactcaacag

SEQ ID NO: 216941 - DNA, 25 bp, Homo sapien
ttgcctttttgcgcttggcgatacg

SEQ ID NO: 216942 - DNA, 25 bp, Homo sapien
ctttgcctttttgcgcttggcgata

SEQ ID NO: 216943 - DNA, 25 bp, Homo sapien
gcgatacgagccacagacttaggac

SEQ ID NO: 216944 - DNA, 25 bp, Homo sapien
gcctttttgcgcttggcgatacgag

SEQ ID NO: 216945 - DNA, 25 bp, Homo sapien
tcgatgggatccatgtcgtgtgaaa

SEQ ID NO: 216946 - DNA, 25 bp, Homo sapien
tgggatccatgtcgtgtgaaatcac

SEQ ID NO: 216947 - DNA, 25 bp, Homo sapien
ctcgatgggatccatgtcgtgtgaa

SEQ ID NO: 216948 - DNA, 25 bp, Homo sapien
gatgggatccatgtcgtgtgaaatc

SEQ ID NO: 216949 - DNA, 25 bp, Homo sapien
caccaaggtggtgacagtgttaact

SEQ ID NO: 216950 - DNA, 25 bp, Homo sapien
tccaccaaggtggtgacagtgttaa

SEQ ID NO: 216951 - DNA, 25 bp, Homo sapien
tctccaccaaggtggtgacagtgtt

SEQ ID NO: 216952 - DNA, 25 bp, Homo sapien
ttctccaccaaggtggtgacagtgt

SEQ ID NO: 216953 - DNA, 25 bp, Homo sapien
cgaaggacaggtggtctcttcttcg

SEQ ID NO: 216954 - DNA, 25 bp, Homo sapien
ggacaggtggtctcttcttcgggac

SEQ ID NO: 216955 - DNA, 25 bp, Homo sapien
aaggacaggtggtctcttcttcggg

SEQ ID NO: 216956 - DNA, 25 bp, Homo sapien
ctcgaaggacaggtggtctcttctt

SEQ ID NO: 216957 - DNA, 25 bp, Homo sapien
tcttcacgacagctggggccggagc

SEQ ID NO: 216958 - DNA, 25 bp, Homo sapien
ttctcggcccgggccaacagtctct

SEQ ID NO: 216959 - DNA, 25 bp, Homo sapien
agcagctttcttctcggcccgggcc

SEQ ID NO: 216960 - DNA, 25 bp, Homo sapien
cttcttcacgacagctggggccgga

SEQ ID NO: 216961 - DNA, 25 bp, Homo sapien
gaatcacttccaactgtccccatga

SEQ ID NO: 216962 - DNA, 25 bp, Homo sapien
catccaacatcattcggaattcagt

SEQ ID NO: 216963 - DNA, 25 bp, Homo sapien
gagaggttcagagattggattgcca

SEQ ID NO: 216964 - DNA, 25 bp, Homo sapien
cataggtgactatagggttttcttt

SEQ ID NO: 216965 - DNA, 25 bp, Homo sapien
catctaagcttgttaggtatggagc

SEQ ID NO: 216966 - DNA, 25 bp, Homo sapien
ctttggccacatctaagcttgttag

SEQ ID NO: 216967 - DNA, 25 bp, Homo sapien
tcctggacgtcaccttggttgattt

SEQ ID NO: 216968 - DNA, 25 bp, Homo sapien
ggtatggagctctgcatacttcctg

SEQ ID NO: 216969 - DNA, 25 bp, Homo sapien
gaaggtcgacatgatagtttcctag

SEQ ID NO: 216970 - DNA, 25 bp, Homo sapien
gagcatgtttgatctgaaggtcgac

SEQ ID NO: 216971 - DNA, 25 bp, Homo sapien
caatacccatcttgagagtagaagt

SEQ ID NO: 216972 - DNA, 25 bp, Homo sapien
tgatagaacaagtagccagcgattc

SEQ ID NO: 216973 - DNA, 25 bp, Homo sapien
gtaacttttcctggtggtatggcat

SEQ ID NO: 216974 - DNA, 25 bp, Homo sapien
ctgaaatgaacagagatcaggatgc

SEQ ID NO: 216975 - DNA, 25 bp, Homo sapien
tggctttgaggaccatgtaactttt

SEQ ID NO: 216976 - DNA, 25 bp, Homo sapien
tcaggatgcatcattccatacttct

SEQ ID NO: 216977 - DNA, 25 bp, Homo sapien
ttctttccccccatcaaggtagagc

SEQ ID NO: 216978 - DNA, 25 bp, Homo sapien
tggaaagccaataaaggcagagcct

SEQ ID NO: 216979 - DNA, 25 bp, Homo sapien
gagcctgttgtgtaaccacacacca

SEQ ID NO: 216980 - DNA, 25 bp, Homo sapien
acaccatcccgccaggtctctttca

SEQ ID NO: 216981 - DNA, 25 bp, Homo sapien
aataactccttgctgttagcatgac

SEQ ID NO: 216982 - DNA, 25 bp, Homo sapien
gaaagaacacagtagacccctggga

SEQ ID NO: 216983 - DNA, 25 bp, Homo sapien
ggtagtgggaacacggacagactct

SEQ ID NO: 216984 - DNA, 25 bp, Homo sapien
tgggtggccctttcctgatgtttca

SEQ ID NO: 216985 - DNA, 25 bp, Homo sapien
gacagcctgtgtttagacgaagaat

SEQ ID NO: 216986 - DNA, 25 bp, Homo sapien
tgtgttattaccagggagtttccaa

SEQ ID NO: 216987 - DNA, 25 bp, Homo sapien
attgaactgtatccagactccatgt

SEQ ID NO: 216988 - DNA, 25 bp, Homo sapien
ccaaggacggagactgttataagct

SEQ ID NO: 216989 - DNA, 25 bp, Homo sapien
gctatagatttaagactgacacatt

SEQ ID NO: 216990 - DNA, 25 bp, Homo sapien
gtcatcatggaacttgttgctaatg

SEQ ID NO: 216991 - DNA, 25 bp, Homo sapien
cctgggcagatcctcaagtcctggg

SEQ ID NO: 216992 - DNA, 25 bp, Homo sapien
caaaggccagtagcagggagtcatc

SEQ ID NO: 216993 - DNA, 25 bp, Homo sapien
ttgttgctaatgtttatgcagtggc

SEQ ID NO: 216994 - DNA, 25 bp, Homo sapien
gcatcgcctcggctgtgactcacag

SEQ ID NO: 216995 - DNA, 25 bp, Homo sapien
agatgcctcctgagcatcgcctcgg

SEQ ID NO: 216996 - DNA, 25 bp, Homo sapien
tagttggtcgcccaaagcccatggt

SEQ ID NO: 216997 - DNA, 25 bp, Homo sapien
ggccgcgaaccttctctcgcacaga

SEQ ID NO: 216998 - DNA, 25 bp, Homo sapien
tcaggcgtaaaggtcttgtgcatta

SEQ ID NO: 216999 - DNA, 25 bp, Homo sapien
cttcaggcgtaaaggtcttgtgcat

SEQ ID NO: 217000 - DNA, 25 bp, Homo sapien
tgcttcaggcgtaaaggtcttgtgc

SEQ ID NO: 217001 - DNA, 25 bp, Homo sapien
tcatgcttcaggcgtaaaggtcttg

SEQ ID NO: 217002 - DNA, 25 bp, Homo sapien
tgctgtccggtgtaatgtgtcctct

SEQ ID NO: 217003 - DNA, 25 bp, Homo sapien
cttgaagtgttggagtgtggcccaa

SEQ ID NO: 217004 - DNA, 25 bp, Homo sapien
gaaagtcgtggatcaggttgacctt

SEQ ID NO: 217005 - DNA, 25 bp, Homo sapien
caaggctagctgaactctttctgct

SEQ ID NO: 217006 - DNA, 25 bp, Homo sapien
gggccaatcaatcagctgccaccag

SEQ ID NO: 217007 - DNA, 25 bp, Homo sapien
ctgccagtcccgtaaactttcagag

SEQ ID NO: 217008 - DNA, 25 bp, Homo sapien
ggaccagggaggagtaagcctctct

SEQ ID NO: 217009 - DNA, 25 bp, Homo sapien
tctgggttcaagctttgggttaggc

SEQ ID NO: 217010 - DNA, 25 bp, Homo sapien
ccatcagggatgaagcttgctggct

SEQ ID NO: 217011 - DNA, 25 bp, Homo sapien
gccccatcagggatgaagcttgctg

SEQ ID NO: 217012 - DNA, 25 bp, Homo sapien
cccatcagggatgaagcttgctggc

SEQ ID NO: 217013 - DNA, 25 bp, Homo sapien
gggccccatcagggatgaagcttgc

SEQ ID NO: 217014 - DNA, 25 bp, Homo sapien
cctttgtgtcctgtaacttgaagct

SEQ ID NO: 217015 - DNA, 25 bp, Homo sapien
ggactgagcattccgcagggacttt

SEQ ID NO: 217016 - DNA, 25 bp, Homo sapien
taatggatccgagttcctttgtgtc

SEQ ID NO: 217017 - DNA, 25 bp, Homo sapien
ttctgaaccaagtacttggcaggac

SEQ ID NO: 217018 - DNA, 25 bp, Homo sapien
tggagtgaaactctctggagggtcc

SEQ ID NO: 217019 - DNA, 25 bp, Homo sapien
gtctccccggggttgcaagcttgca

SEQ ID NO: 217020 - DNA, 25 bp, Homo sapien
accatctggaagtctctgtacactg

SEQ ID NO: 217021 - DNA, 25 bp, Homo sapien
tctgtacactggagtgaaactctct

SEQ ID NO: 217022 - DNA, 25 bp, Homo sapien
tctgggccaagctaggatcagtctc

SEQ ID NO: 217023 - DNA, 25 bp, Homo sapien
tggtgtctgggccaagctaggatca

SEQ ID NO: 217024 - DNA, 25 bp, Homo sapien
gtacaggacttgagagttcggcccc

SEQ ID NO: 217025 - DNA, 25 bp, Homo sapien
ttctggagatgcaagtagggtctgg

SEQ ID NO: 217026 - DNA, 25 bp, Homo sapien
gacaggcgggcagtgtatagctctt

SEQ ID NO: 217027 - DNA, 25 bp, Homo sapien
cagatcatgttctttgggagctgac

SEQ ID NO: 217028 - DNA, 25 bp, Homo sapien
ccagagcattggcttttggaggaag

SEQ ID NO: 217029 - DNA, 25 bp, Homo sapien
tctggacaattccatgacaggcggg

SEQ ID NO: 217030 - DNA, 25 bp, Homo sapien
tgctgtagaatgcacgactatgtta

SEQ ID NO: 217031 - DNA, 25 bp, Homo sapien
ttcgcaaaacacgagtccaccagcg

SEQ ID NO: 217032 - DNA, 25 bp, Homo sapien
gaatgcacgactatgttacaggtga

SEQ ID NO: 217033 - DNA, 25 bp, Homo sapien
caccagcggggtgctttgttttgcc

SEQ ID NO: 217034 - DNA, 25 bp, Homo sapien
tttggggacgctggcagcagttctt

SEQ ID NO: 217035 - DNA, 25 bp, Homo sapien
cagggctggaagtattttggggacg

SEQ ID NO: 217036 - DNA, 25 bp, Homo sapien
caccttctgtaagccgatgagacat

SEQ ID NO: 217037 - DNA, 25 bp, Homo sapien
tcaccttctgtaagccgatgagaca

SEQ ID NO: 217038 - DNA, 25 bp, Homo sapien
gaaatagaatggcattgattctgaa

SEQ ID NO: 217039 - DNA, 25 bp, Homo sapien
ccccacatcagaaatagaatggcat

SEQ ID NO: 217040 - DNA, 25 bp, Homo sapien
gagttagtctggcatccatctccat

SEQ ID NO: 217041 - DNA, 25 bp, Homo sapien
gaggcatacatgaggacagcccctt

SEQ ID NO: 217042 - DNA, 25 bp, Homo sapien
tagtggcgtcgtgagggctaacggc

SEQ ID NO: 217043 - DNA, 25 bp, Homo sapien
gcacaatatgcgagtggataaatat

SEQ ID NO: 217044 - DNA, 25 bp, Homo sapien
caacaccaagaatcccgtgtagtgg

SEQ ID NO: 217045 - DNA, 25 bp, Homo sapien
gggaacagtcggtggtaaaagcaca

SEQ ID NO: 217046 - DNA, 25 bp, Homo sapien
cccatttggctcattgaaggaggga

SEQ ID NO: 217047 - DNA, 25 bp, Homo sapien
ttggctcattgaaggagggacaagc

SEQ ID NO: 217048 - DNA, 25 bp, Homo sapien
tttggctcattgaaggagggacaag

SEQ ID NO: 217049 - DNA, 25 bp, Homo sapien
catttggctcattgaaggagggaca

SEQ ID NO: 217050 - DNA, 25 bp, Homo sapien
cactgggtgcaaagagctaccagtg

SEQ ID NO: 217051 - DNA, 25 bp, Homo sapien
tgcaaagagctaccagtgatgatga

SEQ ID NO: 217052 - DNA, 25 bp, Homo sapien
gcacaggagtatccagcgctcactg

SEQ ID NO: 217053 - DNA, 25 bp, Homo sapien
ccggtggcacaggagtatccagcgc

SEQ ID NO: 217054 - DNA, 25 bp, Homo sapien
tgccaaagatttccaaagctcggat

SEQ ID NO: 217055 - DNA, 25 bp, Homo sapien
tacttccttcattggctttcagttt

SEQ ID NO: 217056 - DNA, 25 bp, Homo sapien
taggatcctctatgatctctcccca

SEQ ID NO: 217057 - DNA, 25 bp, Homo sapien
ggccctaggggctgatttcttctat

SEQ ID NO: 217058 - DNA, 25 bp, Homo sapien
tgtagcccttagtgattctgtccct

SEQ ID NO: 217059 - DNA, 25 bp, Homo sapien
cactgtgagtcctcttcagattggc

SEQ ID NO: 217060 - DNA, 25 bp, Homo sapien
agcatgcaaggtttgggtgctccca

SEQ ID NO: 217061 - DNA, 25 bp, Homo sapien
gctgttttctagctgaatggccact

SEQ ID NO: 217062 - DNA, 25 bp, Homo sapien
tctgggcggtatctgcagctgctct

SEQ ID NO: 217063 - DNA, 25 bp, Homo sapien
ggagtgagctctgggcggtatctgc

SEQ ID NO: 217064 - DNA, 25 bp, Homo sapien
attgtggaaatgaaaggagtgagct

SEQ ID NO: 217065 - DNA, 25 bp, Homo sapien
tgtggaaatgaaaggagtgagctct

SEQ ID NO: 217066 - DNA, 25 bp, Homo sapien
agggaaagatggaagcctcctgctc

SEQ ID NO: 217067 - DNA, 25 bp, Homo sapien
gagggaaagatggaagcctcctgct

SEQ ID NO: 217068 - DNA, 25 bp, Homo sapien
ggagggagggaaagatggaagcctc

SEQ ID NO: 217069 - DNA, 25 bp, Homo sapien
gggagggaaagatggaagcctcctg

SEQ ID NO: 217070 - DNA, 25 bp, Homo sapien
gaactgcacagggagatatttgaaa

SEQ ID NO: 217071 - DNA, 25 bp, Homo sapien
gagattaagtctaaaagttgaccaa

SEQ ID NO: 217072 - DNA, 25 bp, Homo sapien
agccaattgcctcatggatcctctt

SEQ ID NO: 217073 - DNA, 25 bp, Homo sapien
ttttgggccagaacaaccatgagtt

SEQ ID NO: 217074 - DNA, 25 bp, Homo sapien
ggatctgagaccttgctcgggtctt

SEQ ID NO: 217075 - DNA, 25 bp, Homo sapien
ggaatcatgggctgattcactcggg

SEQ ID NO: 217076 - DNA, 25 bp, Homo sapien
tctcattgtggaatcatgggctgat

SEQ ID NO: 217077 - DNA, 25 bp, Homo sapien
tcagctaagagcttgtgctcggcca

SEQ ID NO: 217078 - DNA, 25 bp, Homo sapien
ggccctgggagtgagtcagcgtggc

SEQ ID NO: 217079 - DNA, 25 bp, Homo sapien
ccctgggagtgagtcagcgtggcca

SEQ ID NO: 217080 - DNA, 25 bp, Homo sapien
gccatgggagtcaagggccctggga

SEQ ID NO: 217081 - DNA, 25 bp, Homo sapien
ctgggagtgagtcagcgtggccatt

SEQ ID NO: 217082 - DNA, 25 bp, Homo sapien
aggttgccatgggactccgtgaagc

SEQ ID NO: 217083 - DNA, 25 bp, Homo sapien
tctcagctgtctctcagaggcaaaa

SEQ ID NO: 217084 - DNA, 25 bp, Homo sapien
gaggcaaaaaggctatcccagtttc

SEQ ID NO: 217085 - DNA, 25 bp, Homo sapien
cactcagaccctgtgacgccaggtt

SEQ ID NO: 217086 - DNA, 25 bp, Homo sapien
ttgcatctccagtgcaccaggaatt

SEQ ID NO: 217087 - DNA, 25 bp, Homo sapien
agtaattggcaggttcagcattgac

SEQ ID NO: 217088 - DNA, 25 bp, Homo sapien
cagtgtcgccttttgagtaattggc

SEQ ID NO: 217089 - DNA, 25 bp, Homo sapien
ttctcttcagttctcgcctccattg

SEQ ID NO: 217090 - DNA, 25 bp, Homo sapien
aagctgttcacagtatcagagtgct

SEQ ID NO: 217091 - DNA, 25 bp, Homo sapien
tttggccacgtcttggattgcttct

SEQ ID NO: 217092 - DNA, 25 bp, Homo sapien
tgttcacagtatcagagtgctgctc

SEQ ID NO: 217093 - DNA, 25 bp, Homo sapien
cttcaggccatttggccacgtcttg

SEQ ID NO: 217094 - DNA, 25 bp, Homo sapien
agctttcctggtcgccttgctcctt

SEQ ID NO: 217095 - DNA, 25 bp, Homo sapien
aaaattagctttcctggtcgccttg

SEQ ID NO: 217096 - DNA, 25 bp, Homo sapien
ttagctttcctggtcgccttgctcc

SEQ ID NO: 217097 - DNA, 25 bp, Homo sapien
aattagctttcctggtcgccttgct

SEQ ID NO: 217098 - DNA, 25 bp, Homo sapien
ctgagcacaatttcggtggctgact

SEQ ID NO: 217099 - DNA, 25 bp, Homo sapien
tccttgccctggtagagcctttcct

SEQ ID NO: 217100 - DNA, 25 bp, Homo sapien
tttgccagcgatgtttgctttttcc

SEQ ID NO: 217101 - DNA, 25 bp, Homo sapien
ctgactttgttctgtttgccagcga

SEQ ID NO: 217102 - DNA, 25 bp, Homo sapien
cataaatcatggagtgcagcaaccc

SEQ ID NO: 217103 - DNA, 25 bp, Homo sapien
ggcaccacatctagtccctgtgcta

SEQ ID NO: 217104 - DNA, 25 bp, Homo sapien
caagggcctgctcagtgatgtccca

SEQ ID NO: 217105 - DNA, 25 bp, Homo sapien
gcttgaaaccataggtgctaaaacc

SEQ ID NO: 217106 - DNA, 25 bp, Homo sapien
tggttaccaaacgagcctccactgg

SEQ ID NO: 217107 - DNA, 25 bp, Homo sapien
ctgtagtgtaaggaactccctgtct

SEQ ID NO: 217108 - DNA, 25 bp, Homo sapien
ggaagactgcatcattcatcaaggc

SEQ ID NO: 217109 - DNA, 25 bp, Homo sapien
tctggatggccagagtaggcacctt

SEQ ID NO: 217110 - DNA, 25 bp, Homo sapien
gctgctggattccttctacctctga

SEQ ID NO: 217111 - DNA, 25 bp, Homo sapien
aggtacatcagcaccagagcccttc

SEQ ID NO: 217112 - DNA, 25 bp, Homo sapien
ccacaatggctcagcaccctgtggg

SEQ ID NO: 217113 - DNA, 25 bp, Homo sapien
tgggactttgtgtaagtcgcccctc

SEQ ID NO: 217114 - DNA, 25 bp, Homo sapien
atggccctgccacatcccgtgtaac

SEQ ID NO: 217115 - DNA, 25 bp, Homo sapien
cctgccacatcccgtgtaacataag

SEQ ID NO: 217116 - DNA, 25 bp, Homo sapien
ctgccacatcccgtgtaacataagt

SEQ ID NO: 217117 - DNA, 25 bp, Homo sapien
gccctgccacatcccgtgtaacata

SEQ ID NO: 217118 - DNA, 25 bp, Homo sapien
ggaggactatattgccccatgccat

SEQ ID NO: 217119 - DNA, 25 bp, Homo sapien
aaggatttgcattacgtcactcgaa

SEQ ID NO: 217120 - DNA, 25 bp, Homo sapien
cagtatcttagtgaccctcggagca

SEQ ID NO: 217121 - DNA, 25 bp, Homo sapien
gagtccagatcccatgaatagccca

SEQ ID NO: 217122 - DNA, 25 bp, Homo sapien
gcagattgggtgtgacctctccact

SEQ ID NO: 217123 - DNA, 25 bp, Homo sapien
tgtcctagtggctatcacaggcctg

SEQ ID NO: 217124 - DNA, 25 bp, Homo sapien
tgcaaacctaccagtgaggctccca

SEQ ID NO: 217125 - DNA, 25 bp, Homo sapien
tcttatgggcttccaggctttaagc

SEQ ID NO: 217126 - DNA, 25 bp, Homo sapien
tggagaactcccagacgaggattgg

SEQ ID NO: 217127 - DNA, 25 bp, Homo sapien
gaacagaagataattccccttgtaa

SEQ ID NO: 217128 - DNA, 25 bp, Homo sapien
gaaccttctccagattccttgtgcc

SEQ ID NO: 217129 - DNA, 25 bp, Homo sapien
taggttttctccagcgtgaccggcc

SEQ ID NO: 217130 - DNA, 25 bp, Homo sapien
aagatagatctatcccatttcttcc

SEQ ID NO: 217131 - DNA, 25 bp, Homo sapien
ggagattcctgagctatgctcagcc

SEQ ID NO: 217132 - DNA, 25 bp, Homo sapien
ttcaccaaggacagtaggaccaaga

SEQ ID NO: 217133 - DNA, 25 bp, Homo sapien
gaaaagtgcaagatagatctatccc

SEQ ID NO: 217134 - DNA, 25 bp, Homo sapien
ccttctcagttcctgaaacctctcc

SEQ ID NO: 217135 - DNA, 25 bp, Homo sapien
tctctctccttctcagttcctgaaa

SEQ ID NO: 217136 - DNA, 25 bp, Homo sapien
tcagttcctgaaacctctcctctcc

SEQ ID NO: 217137 - DNA, 25 bp, Homo sapien
ctccttctcagttcctgaaacctct

SEQ ID NO: 217138 - DNA, 25 bp, Homo sapien
tgccttctacaaaggattctgcctt

SEQ ID NO: 217139 - DNA, 25 bp, Homo sapien
gactgccttctacaaaggattctgc

SEQ ID NO: 217140 - DNA, 25 bp, Homo sapien
ttctacaaaggattctgccttctca

SEQ ID NO: 217141 - DNA, 25 bp, Homo sapien
ctgtgactgccttctacaaaggatt

SEQ ID NO: 217142 - DNA, 25 bp, Homo sapien
caaagtccaggttttgacaagtggc

SEQ ID NO: 217143 - DNA, 25 bp, Homo sapien
acacattggcacctgagtgtgagag

SEQ ID NO: 217144 - DNA, 25 bp, Homo sapien
cttagaatatactgggtctgacaca

SEQ ID NO: 217145 - DNA, 25 bp, Homo sapien
tgagtcacgtctcctcacaagaagc

SEQ ID NO: 217146 - DNA, 25 bp, Homo sapien
tagaaggaggcgaaaggctctgacc

SEQ ID NO: 217147 - DNA, 25 bp, Homo sapien
tgcagaaagcctaaagatccgtggg

SEQ ID NO: 217148 - DNA, 25 bp, Homo sapien
gagcaagaactaccccataggctgg

SEQ ID NO: 217149 - DNA, 25 bp, Homo sapien
taagatctttagtaccctgcgtggg

SEQ ID NO: 217150 - DNA, 25 bp, Homo sapien
ttagaaccccttgatgtagcaatag

SEQ ID NO: 217151 - DNA, 25 bp, Homo sapien
ccttgatgtagcaataggcctctag

SEQ ID NO: 217152 - DNA, 25 bp, Homo sapien
cctctagtgtggcaaagagtatgta

SEQ ID NO: 217153 - DNA, 25 bp, Homo sapien
gtatgtagaggagccacaggctcac

SEQ ID NO: 217154 - DNA, 25 bp, Homo sapien
gctgcccgtcacgttgccaatggag

SEQ ID NO: 217155 - DNA, 25 bp, Homo sapien
gaggcgtctgcatatacatcctgga

SEQ ID NO: 217156 - DNA, 25 bp, Homo sapien
gccttcggtacaagagcacgctgat

SEQ ID NO: 217157 - DNA, 25 bp, Homo sapien
tgcccaggaagacattgacggcgtt

SEQ ID NO: 217158 - DNA, 25 bp, Homo sapien
tggaaaaggacaaagacacatggga

SEQ ID NO: 217159 - DNA, 25 bp, Homo sapien
ggaaaaggacaaagacacatgggaa

SEQ ID NO: 217160 - DNA, 25 bp, Homo sapien
ctggaaaaggacaaagacacatggg

SEQ ID NO: 217161 - DNA, 25 bp, Homo sapien
catgtagcttaacctctgtgggcct

SEQ ID NO: 217162 - DNA, 25 bp, Homo sapien
tgaactgtggactcaaggaagacgg

SEQ ID NO: 217163 - DNA, 25 bp, Homo sapien
gttctgccgcaagcaagccgtgtgg

SEQ ID NO: 217164 - DNA, 25 bp, Homo sapien
ggacaaataataccgctggcctgcg

SEQ ID NO: 217165 - DNA, 25 bp, Homo sapien
catgacgtagtcaaagcaggagggc

SEQ ID NO: 217166 - DNA, 25 bp, Homo sapien
agctgtgactgaatctttgagacca

SEQ ID NO: 217167 - DNA, 25 bp, Homo sapien
caaatgccacgaaaacaacagctgt

SEQ ID NO: 217168 - DNA, 25 bp, Homo sapien
caatgatggcggtgagcatgccaat

SEQ ID NO: 217169 - DNA, 25 bp, Homo sapien
ctgcactgacggtgatggcctccat

SEQ ID NO: 217170 - DNA, 25 bp, Homo sapien
gcactgacggtgatggcctccatga

SEQ ID NO: 217171 - DNA, 25 bp, Homo sapien
aatgggtccccacaaccaaggccag

SEQ ID NO: 217172 - DNA, 25 bp, Homo sapien
caggaatgggtccccacaaccaagg

SEQ ID NO: 217173 - DNA, 25 bp, Homo sapien
aactcataggactcttcaatgatga

SEQ ID NO: 217174 - DNA, 25 bp, Homo sapien
ctcataggactcttcaatgatgact

SEQ ID NO: 217175 - DNA, 25 bp, Homo sapien
actcataggactcttcaatgatgac

SEQ ID NO: 217176 - DNA, 25 bp, Homo sapien
gaactcataggactcttcaatgatg

SEQ ID NO: 217177 - DNA, 25 bp, Homo sapien
ctctgctatcctcttggcctcctct

SEQ ID NO: 217178 - DNA, 25 bp, Homo sapien
tcctcttggcctcctcttcttccat

SEQ ID NO: 217179 - DNA, 25 bp, Homo sapien
tatcctcttggcctcctcttcttcc

SEQ ID NO: 217180 - DNA, 25 bp, Homo sapien
ctgctatcctcttggcctcctcttc

SEQ ID NO: 217181 - DNA, 25 bp, Homo sapien
aagaagcctttggagcatgcacaga

SEQ ID NO: 217182 - DNA, 25 bp, Homo sapien
gttgctggcagcataaggaaagcag

SEQ ID NO: 217183 - DNA, 25 bp, Homo sapien
atttgctcctatgctttcccggcta

SEQ ID NO: 217184 - DNA, 25 bp, Homo sapien
gcagccatacgcaaaaagaagcctt

SEQ ID NO: 217185 - DNA, 25 bp, Homo sapien
taaaataggcagctggaaaattgac

SEQ ID NO: 217186 - DNA, 25 bp, Homo sapien
aacatagacaataaaataggcagct

SEQ ID NO: 217187 - DNA, 25 bp, Homo sapien
gaaaacatagacaataaaataggca

SEQ ID NO: 217188 - DNA, 25 bp, Homo sapien
ctagaaaacatagacaataaaatag

SEQ ID NO: 217189 - DNA, 25 bp, Homo sapien
gcacaccacacagatagcttgctga

SEQ ID NO: 217190 - DNA, 25 bp, Homo sapien
gaaatccttgtcttctcacctactc

SEQ ID NO: 217191 - DNA, 25 bp, Homo sapien
ccacgagggcattgctgacatttcc

SEQ ID NO: 217192 - DNA, 25 bp, Homo sapien
catcttggcatctcggtcactgggg

SEQ ID NO: 217193 - DNA, 25 bp, Homo sapien
gcctatgggccactccacaagtgaa

SEQ ID NO: 217194 - DNA, 25 bp, Homo sapien
gcagaggggcctatgggccactcca

SEQ ID NO: 217195 - DNA, 25 bp, Homo sapien
gggcctatgggccactccacaagtg

SEQ ID NO: 217196 - DNA, 25 bp, Homo sapien
atgggccactccacaagtgaataac

SEQ ID NO: 217197 - DNA, 25 bp, Homo sapien
attctcttgcctttcgtattcctcc

SEQ ID NO: 217198 - DNA, 25 bp, Homo sapien
tcatctactattttaacccttatgg

SEQ ID NO: 217199 - DNA, 25 bp, Homo sapien
ttcggttcaccaagggcaatgaaga

SEQ ID NO: 217200 - DNA, 25 bp, Homo sapien
attccacgttccatccatttcggtt

SEQ ID NO: 217201 - DNA, 25 bp, Homo sapien
gacaacaagagagagagtgtgtcga

SEQ ID NO: 217202 - DNA, 25 bp, Homo sapien
tagggacaacaagagagagagtgtg

SEQ ID NO: 217203 - DNA, 25 bp, Homo sapien
ctgtagggacaacaagagagagagt

SEQ ID NO: 217204 - DNA, 25 bp, Homo sapien
gggacaacaagagagagagtgtgtc

SEQ ID NO: 217205 - DNA, 25 bp, Homo sapien
gaccccagggctgtctacaaggtgt

SEQ ID NO: 217206 - DNA, 25 bp, Homo sapien
gttggccctagatatgggaccccag

SEQ ID NO: 217207 - DNA, 25 bp, Homo sapien
tataccttgctcagcggacaaaaga

SEQ ID NO: 217208 - DNA, 25 bp, Homo sapien
gaaagctcattgattgtcaagaggc

SEQ ID NO: 217209 - DNA, 25 bp, Homo sapien
aacaggcatgtactggagggcatga

SEQ ID NO: 217210 - DNA, 25 bp, Homo sapien
tgtgacaacaggcatgtactggagg

SEQ ID NO: 217211 - DNA, 25 bp, Homo sapien
gacaacaggcatgtactggagggca

SEQ ID NO: 217212 - DNA, 25 bp, Homo sapien
gcatgtactggagggcatgagggac

SEQ ID NO: 217213 - DNA, 25 bp, Homo sapien
cccatcatctcaatgaagtaattct

SEQ ID NO: 217214 - DNA, 25 bp, Homo sapien
catgcgggggcccatcatctcaatg

SEQ ID NO: 217215 - DNA, 25 bp, Homo sapien
ttgtttttctcatatgcctcatcat

SEQ ID NO: 217216 - DNA, 25 bp, Homo sapien
tctcatatgcctcatcatcaattac

SEQ ID NO: 217217 - DNA, 25 bp, Homo sapien
tccaattcaaggactaaccagaccc

SEQ ID NO: 217218 - DNA, 25 bp, Homo sapien
aaagcttgcagcatccagtatctcc

SEQ ID NO: 217219 - DNA, 25 bp, Homo sapien
ctccaattcaaggactaaccagacc

SEQ ID NO: 217220 - DNA, 25 bp, Homo sapien
aaaagcttgcagcatccagtatctc

SEQ ID NO: 217221 - DNA, 25 bp, Homo sapien
ggtttctggctctttgaacgtggac

SEQ ID NO: 217222 - DNA, 25 bp, Homo sapien
tttccatgggagctttcagaagcct

SEQ ID NO: 217223 - DNA, 25 bp, Homo sapien
gcctcacatctcttagctgggttct

SEQ ID NO: 217224 - DNA, 25 bp, Homo sapien
ccggttgggtgtcactgccccatct

SEQ ID NO: 217225 - DNA, 25 bp, Homo sapien
acaacccaacactgatatttccctg

SEQ ID NO: 217226 - DNA, 25 bp, Homo sapien
caacccaacactgatatttccctga

SEQ ID NO: 217227 - DNA, 25 bp, Homo sapien
acccaacactgatatttccctgacc

SEQ ID NO: 217228 - DNA, 25 bp, Homo sapien
aacccaacactgatatttccctgac

SEQ ID NO: 217229 - DNA, 25 bp, Homo sapien
ctatctgccctttgcaagagctcag

SEQ ID NO: 217230 - DNA, 25 bp, Homo sapien
gttctcagcctttcgggctctctgt

SEQ ID NO: 217231 - DNA, 25 bp, Homo sapien
tctcaccagaggaactatctgccct

SEQ ID NO: 217232 - DNA, 25 bp, Homo sapien
ggaagccagacaacgttctcagcct

SEQ ID NO: 217233 - DNA, 25 bp, Homo sapien
tgcccaaggtttgccataggccgcg

SEQ ID NO: 217234 - DNA, 25 bp, Homo sapien
aaggtttgccataggccgcgtatcc

SEQ ID NO: 217235 - DNA, 25 bp, Homo sapien
ctgcccaaggtttgccataggccgc

SEQ ID NO: 217236 - DNA, 25 bp, Homo sapien
cccaaggtttgccataggccgcgta

SEQ ID NO: 217237 - DNA, 25 bp, Homo sapien
aacatgcatgaaaatagtcatcttg

SEQ ID NO: 217238 - DNA, 25 bp, Homo sapien
tggttatgactttggttaagcatat

SEQ ID NO: 217239 - DNA, 25 bp, Homo sapien
tatttggttatgactttggttaagc

SEQ ID NO: 217240 - DNA, 25 bp, Homo sapien
gactttggttaagcatattctccat

SEQ ID NO: 217241 - DNA, 25 bp, Homo sapien
cattccctgttaatccaacactgct

SEQ ID NO: 217242 - DNA, 25 bp, Homo sapien
acactgctctttggtctctcacagg

SEQ ID NO: 217243 - DNA, 25 bp, Homo sapien
ggcagttcatttccatgtttcaatc

SEQ ID NO: 217244 - DNA, 25 bp, Homo sapien
ttggtctctcacagggtggattgtg

SEQ ID NO: 217245 - DNA, 25 bp, Homo sapien
tatcgtctggatgcctctagctgtc

SEQ ID NO: 217246 - DNA, 25 bp, Homo sapien
ggctcagcaagtgatggttcccttt

SEQ ID NO: 217247 - DNA, 25 bp, Homo sapien
taggttttcggctccatgctggaag

SEQ ID NO: 217248 - DNA, 25 bp, Homo sapien
cattcacattgggttgtcgtgcggg

SEQ ID NO: 217249 - DNA, 25 bp, Homo sapien
tgatccctgggctctaggctatgtg

SEQ ID NO: 217250 - DNA, 25 bp, Homo sapien
tgattcctcgagctcatttttagca

SEQ ID NO: 217251 - DNA, 25 bp, Homo sapien
ctatgtgggtcatcaaggtccaggt

SEQ ID NO: 217252 - DNA, 25 bp, Homo sapien
tctttttcctatctgattcctcgag

SEQ ID NO: 217253 - DNA, 25 bp, Homo sapien
tctgatgagatttatcatctccgga

SEQ ID NO: 217254 - DNA, 25 bp, Homo sapien
acatacgtagagtgattgtttttcc

SEQ ID NO: 217255 - DNA, 25 bp, Homo sapien
cagcatctcctttagattctgacca

SEQ ID NO: 217256 - DNA, 25 bp, Homo sapien
gagagctctttacagtggacaaaat

SEQ ID NO: 217257 - DNA, 25 bp, Homo sapien
gcaaaaaagcagtatatgaagatgg

SEQ ID NO: 217258 - DNA, 25 bp, Homo sapien
aggcaaaaaagcagtatatgaagat

SEQ ID NO: 217259 - DNA, 25 bp, Homo sapien
aaaagcagtatatgaagatggtcca

SEQ ID NO: 217260 - DNA, 25 bp, Homo sapien
aaagcagtatatgaagatggtccat

SEQ ID NO: 217261 - DNA, 25 bp, Homo sapien
gaggggcaggtcaacaaagagataa

SEQ ID NO: 217262 - DNA, 25 bp, Homo sapien
aggggcaggtcaacaaagagataaa

SEQ ID NO: 217263 - DNA, 25 bp, Homo sapien
gaagaggggcaggtcaacaaagaga

SEQ ID NO: 217264 - DNA, 25 bp, Homo sapien
aagaggggcaggtcaacaaagagat

SEQ ID NO: 217265 - DNA, 25 bp, Homo sapien
cacgttactaatctaggactgcaga

SEQ ID NO: 217266 - DNA, 25 bp, Homo sapien
tcaaatccggttgtctgggtacaaa

SEQ ID NO: 217267 - DNA, 25 bp, Homo sapien
tgtgacaggccaacaacacgttact

SEQ ID NO: 217268 - DNA, 25 bp, Homo sapien
ccatgggctcaagggagatgcagca

SEQ ID NO: 217269 - DNA, 25 bp, Homo sapien
ctcagaagccaagggtgcacttggc

SEQ ID NO: 217270 - DNA, 25 bp, Homo sapien
gagctctttaaagtacaggggcagg

SEQ ID NO: 217271 - DNA, 25 bp, Homo sapien
caggtgagggcatagtctggctgaa

SEQ ID NO: 217272 - DNA, 25 bp, Homo sapien
ccactccagcctaaagagctcttta

SEQ ID NO: 217273 - DNA, 25 bp, Homo sapien
ctagcataagtgtcaccctggctgg

SEQ ID NO: 217274 - DNA, 25 bp, Homo sapien
tgggaagagctaaccagagaacacc

SEQ ID NO: 217275 - DNA, 25 bp, Homo sapien
tggctgggccaactaagctcatgga

SEQ ID NO: 217276 - DNA, 25 bp, Homo sapien
tatctcattacgcaactgcatgggc

SEQ ID NO: 217277 - DNA, 25 bp, Homo sapien
caaactgagcaagatgcagatttaa

SEQ ID NO: 217278 - DNA, 25 bp, Homo sapien
aacccaaactgagcaagatgcagat

SEQ ID NO: 217279 - DNA, 25 bp, Homo sapien
caaacccaaactgagcaagatgcag

SEQ ID NO: 217280 - DNA, 25 bp, Homo sapien
atcaaacccaaactgagcaagatgc

SEQ ID NO: 217281 - DNA, 25 bp, Homo sapien
cctgcccgagctttggattcagtca

SEQ ID NO: 217282 - DNA, 25 bp, Homo sapien
tgaggccccacgagaggagagaatt

SEQ ID NO: 217283 - DNA, 25 bp, Homo sapien
ttttgcaaagatgattccggagagc

SEQ ID NO: 217284 - DNA, 25 bp, Homo sapien
cattactggctacttgtgcaaaaca

SEQ ID NO: 217285 - DNA, 25 bp, Homo sapien
gatagtagaggactcaccctgcacg

SEQ ID NO: 217286 - DNA, 25 bp, Homo sapien
tacccctggtgccagacagtagagg

SEQ ID NO: 217287 - DNA, 25 bp, Homo sapien
tgcacgtgcacctttcatatacaga

SEQ ID NO: 217288 - DNA, 25 bp, Homo sapien
tagaggcagtctctacaccctacag

SEQ ID NO: 217289 - DNA, 25 bp, Homo sapien
catttaagtgcaagtagttttttga

SEQ ID NO: 217290 - DNA, 25 bp, Homo sapien
gggaattcatacacctcgagcccct

SEQ ID NO: 217291 - DNA, 25 bp, Homo sapien
agagcatggcagtgcaaggacccca

SEQ ID NO: 217292 - DNA, 25 bp, Homo sapien
ctgctcagtaaagtcctacagcttt

SEQ ID NO: 217293 - DNA, 25 bp, Homo sapien
ttacggtaaccaggttaatctcatc

SEQ ID NO: 217294 - DNA, 25 bp, Homo sapien
taatctcatctatagtcttttgtgc

SEQ ID NO: 217295 - DNA, 25 bp, Homo sapien
ctgcaatcactttgtcctttacggt

SEQ ID NO: 217296 - DNA, 25 bp, Homo sapien
gcaatcactttgtcctttacggtaa

SEQ ID NO: 217297 - DNA, 25 bp, Homo sapien
tgcctactgcaccattcatcggaat

SEQ ID NO: 217298 - DNA, 25 bp, Homo sapien
cagaaaggaccacagtctcagtgct

SEQ ID NO: 217299 - DNA, 25 bp, Homo sapien
cgagtgtgtctaggcttggctttcc

SEQ ID NO: 217300 - DNA, 25 bp, Homo sapien
taaagcagcttcgatgtgacagatg

SEQ ID NO: 217301 - DNA, 25 bp, Homo sapien
catttggctgactgattatacaggg

SEQ ID NO: 217302 - DNA, 25 bp, Homo sapien
caacggtgccaactgggtttggttg

SEQ ID NO: 217303 - DNA, 25 bp, Homo sapien
gggaagaatccctcacctacttcca

SEQ ID NO: 217304 - DNA, 25 bp, Homo sapien
cagtggcaactaagtgtaatctcta

SEQ ID NO: 217305 - DNA, 25 bp, Homo sapien
aaggcaggagttataatgctgttgc

SEQ ID NO: 217306 - DNA, 25 bp, Homo sapien
tactgctgaatcctaagtgcaagaa

SEQ ID NO: 217307 - DNA, 25 bp, Homo sapien
tagataagctttgtgaaggcaggag

SEQ ID NO: 217308 - DNA, 25 bp, Homo sapien
aatggcccttaagcatactgctgaa

SEQ ID NO: 217309 - DNA, 25 bp, Homo sapien
gagtactgtcattctatccctggca

SEQ ID NO: 217310 - DNA, 25 bp, Homo sapien
caatagtaagctttctcagaggcct

SEQ ID NO: 217311 - DNA, 25 bp, Homo sapien
caaatagtgtacctgaaaacgacgg

SEQ ID NO: 217312 - DNA, 25 bp, Homo sapien
gcaaaaagagcaccaccatgagtgg

SEQ ID NO: 217313 - DNA, 25 bp, Homo sapien
taccagattggcaggatgacaccct

SEQ ID NO: 217314 - DNA, 25 bp, Homo sapien
caaggaacatgtatatcagggccac

SEQ ID NO: 217315 - DNA, 25 bp, Homo sapien
gaaggctgcactccctacaatggta

SEQ ID NO: 217316 - DNA, 25 bp, Homo sapien
gaaggtcccagatcaccagcaatga

SEQ ID NO: 217317 - DNA, 25 bp, Homo sapien
acacgagacttagccactggcttct

SEQ ID NO: 217318 - DNA, 25 bp, Homo sapien
gcttctattgcagcaccagttgtcc

SEQ ID NO: 217319 - DNA, 25 bp, Homo sapien
cagcaccagttgtcctcctgatagg

SEQ ID NO: 217320 - DNA, 25 bp, Homo sapien
gacttagccactggcttctattgca

SEQ ID NO: 217321 - DNA, 25 bp, Homo sapien
tagaggctatgtgggacctctttaa

SEQ ID NO: 217322 - DNA, 25 bp, Homo sapien
caaaacatcagggtgcatattgtcc

SEQ ID NO: 217323 - DNA, 25 bp, Homo sapien
ttatctgaattgtagccatttgctt

SEQ ID NO: 217324 - DNA, 25 bp, Homo sapien
tttcatagacaaaaccagactggat

SEQ ID NO: 217325 - DNA, 25 bp, Homo sapien
gctgggacctgttgtgcctttgacc

SEQ ID NO: 217326 - DNA, 25 bp, Homo sapien
acattctccattagtccaggtgctg

SEQ ID NO: 217327 - DNA, 25 bp, Homo sapien
gggcatcacaacaggtgctgggacc

SEQ ID NO: 217328 - DNA, 25 bp, Homo sapien
tggtttaatccctagagtggcagcc

SEQ ID NO: 217329 - DNA, 25 bp, Homo sapien
ctcaccggtcgcagcggctcatcgc

SEQ ID NO: 217330 - DNA, 25 bp, Homo sapien
gggtgaggaaggtacgcgatgcccc

SEQ ID NO: 217331 - DNA, 25 bp, Homo sapien
gctcgcagctgtcagggagctgcgg

SEQ ID NO: 217332 - DNA, 25 bp, Homo sapien
cctcccgagcggagtgggcaaggga

SEQ ID NO: 217333 - DNA, 25 bp, Homo sapien
accccgacccagagcggtgactgga

SEQ ID NO: 217334 - DNA, 25 bp, Homo sapien
gggtccttccgcacggatttcagaa

SEQ ID NO: 217335 - DNA, 25 bp, Homo sapien
ccttccgcacggatttcagaaagag

SEQ ID NO: 217336 - DNA, 25 bp, Homo sapien
tgactggaatctacgcccgggagag

SEQ ID NO: 217337 - DNA, 25 bp, Homo sapien
taagctgccggaagaagccaaatca

SEQ ID NO: 217338 - DNA, 25 bp, Homo sapien
aacggaacgtcaccctatcagctgg

SEQ ID NO: 217339 - DNA, 25 bp, Homo sapien
gtcaccgcgggagacgtctcggcct

SEQ ID NO: 217340 - DNA, 25 bp, Homo sapien
cttgcggtcgcgtcgcctgggcttt

SEQ ID NO: 217341 - DNA, 25 bp, Homo sapien
tggggctggtagtggatggtgcaac

SEQ ID NO: 217342 - DNA, 25 bp, Homo sapien
agaaatggggctggtagtggatggt

SEQ ID NO: 217343 - DNA, 25 bp, Homo sapien
caggggacagacttgccagaaatgg

SEQ ID NO: 217344 - DNA, 25 bp, Homo sapien
aggggacagacttgccagaaatggg

SEQ ID NO: 217345 - DNA, 25 bp, Homo sapien
cagggttcccggtgatgtgctgtga

SEQ ID NO: 217346 - DNA, 25 bp, Homo sapien
gcattggaatggacagcaggcggcc

SEQ ID NO: 217347 - DNA, 25 bp, Homo sapien
tcgttctggccgctgtacgaggcag

SEQ ID NO: 217348 - DNA, 25 bp, Homo sapien
tgaagacgtcttcctctcggaccct

SEQ ID NO: 217349 - DNA, 25 bp, Homo sapien
tatttgtacaggtctactgaagcaa

SEQ ID NO: 217350 - DNA, 25 bp, Homo sapien
tgaagcaacaatttccaatcctggg

SEQ ID NO: 217351 - DNA, 25 bp, Homo sapien
tttgacatattttagagctgcaggc

SEQ ID NO: 217352 - DNA, 25 bp, Homo sapien
gacaggtcagatagtcacttctgga

SEQ ID NO: 217353 - DNA, 25 bp, Homo sapien
cttagttcacgtggccagggtttgg

SEQ ID NO: 217354 - DNA, 25 bp, Homo sapien
tgcatcagcaggaacgaaaataagt

SEQ ID NO: 217355 - DNA, 25 bp, Homo sapien
tggagcaaagggatgtcagttctgt

SEQ ID NO: 217356 - DNA, 25 bp, Homo sapien
tgatatacccagcaatcagatggct

SEQ ID NO: 217357 - DNA, 25 bp, Homo sapien
gatgtactaacatttctgctgcaaa

SEQ ID NO: 217358 - DNA, 25 bp, Homo sapien
cacgctgatgcagaaacatctcatg

SEQ ID NO: 217359 - DNA, 25 bp, Homo sapien
gaggacataatggtgagcaaaacag

SEQ ID NO: 217360 - DNA, 25 bp, Homo sapien
tctaagcatgagaaacaacaaggac

SEQ ID NO: 217361 - DNA, 25 bp, Homo sapien
atggacaacaggcatcttgttcaca

SEQ ID NO: 217362 - DNA, 25 bp, Homo sapien
tgtttccgttgagagaaatcattta

SEQ ID NO: 217363 - DNA, 25 bp, Homo sapien
tcatttaggatctgttctatgcttg

SEQ ID NO: 217364 - DNA, 25 bp, Homo sapien
tttcatgagtgaggccgtttatttt

SEQ ID NO: 217365 - DNA, 25 bp, Homo sapien
ccatgatagtaacagtcatctggga

SEQ ID NO: 217366 - DNA, 25 bp, Homo sapien
cctccacgtaaccatgatagtaaca

SEQ ID NO: 217367 - DNA, 25 bp, Homo sapien
catctgggatgaagagctgatcctc

SEQ ID NO: 217368 - DNA, 25 bp, Homo sapien
taacagtcatctgggatgaagagct

SEQ ID NO: 217369 - DNA, 25 bp, Homo sapien
tgtacactagggtcccatccactgc

SEQ ID NO: 217370 - DNA, 25 bp, Homo sapien
ctgacagtagccagaaatagacaaa

SEQ ID NO: 217371 - DNA, 25 bp, Homo sapien
gagtgaccctgatgtacactagggt

SEQ ID NO: 217372 - DNA, 25 bp, Homo sapien
gcagaagagtgaccctgatgtacac

SEQ ID NO: 217373 - DNA, 25 bp, Homo sapien
tatgaagctgtcgttatggagccat

SEQ ID NO: 217374 - DNA, 25 bp, Homo sapien
tacttacaactttattagactgcaa

SEQ ID NO: 217375 - DNA, 25 bp, Homo sapien
gggtggctctatatctcaatttgtc

SEQ ID NO: 217376 - DNA, 25 bp, Homo sapien
tagactgcaagattcttgacggcat

SEQ ID NO: 217377 - DNA, 25 bp, Homo sapien
caagattcttgacggcatggtttat

SEQ ID NO: 217378 - DNA, 25 bp, Homo sapien
tcctctaacgtcagtggactgtcaa

SEQ ID NO: 217379 - DNA, 25 bp, Homo sapien
gtggactgtcaagtgagccaacagt

SEQ ID NO: 217380 - DNA, 25 bp, Homo sapien
caccgtaaatctatgtcctctaacg

SEQ ID NO: 217381 - DNA, 25 bp, Homo sapien
tgtcaagtgagccaacagtcctctt

SEQ ID NO: 217382 - DNA, 25 bp, Homo sapien
tccatggccctttccgtctagatgg

SEQ ID NO: 217383 - DNA, 25 bp, Homo sapien
ctttccgtctagatggtttgtacca

SEQ ID NO: 217384 - DNA, 25 bp, Homo sapien
cgtctagatggtttgtaccaccctt

SEQ ID NO: 217385 - DNA, 25 bp, Homo sapien
tggccctttccgtctagatggtttg

SEQ ID NO: 217386 - DNA, 25 bp, Homo sapien
gaacactaaggcttgatccaaaaat

SEQ ID NO: 217387 - DNA, 25 bp, Homo sapien
taatccgctctgtcaaacacacgag

SEQ ID NO: 217388 - DNA, 25 bp, Homo sapien
ggagcctatttccaaggcagttcag

SEQ ID NO: 217389 - DNA, 25 bp, Homo sapien
tttactgacatgaccatataagggt

SEQ ID NO: 217390 - DNA, 25 bp, Homo sapien
tcagaaagggttgcactggaaactg

SEQ ID NO: 217391 - DNA, 25 bp, Homo sapien
tgccgttttaatatgatggatccca

SEQ ID NO: 217392 - DNA, 25 bp, Homo sapien
ctgctcagtctttccattgtcctcc

SEQ ID NO: 217393 - DNA, 25 bp, Homo sapien
ccatgatagtaaaagtgactctggg

SEQ ID NO: 217394 - DNA, 25 bp, Homo sapien
ttccacaaacttttcacaagggcag

SEQ ID NO: 217395 - DNA, 25 bp, Homo sapien
tgaatgggtctgacctagatgtttc

SEQ ID NO: 217396 - DNA, 25 bp, Homo sapien
tgggtctgacctagatgtttccaca

SEQ ID NO: 217397 - DNA, 25 bp, Homo sapien
ttcctgttgggaggactctgaatgg

SEQ ID NO: 217398 - DNA, 25 bp, Homo sapien
gcttcctatcgtccccatgtggtag

SEQ ID NO: 217399 - DNA, 25 bp, Homo sapien
ggaatactgtctgggctaccgttgg

SEQ ID NO: 217400 - DNA, 25 bp, Homo sapien
tagaaaggcatattgtaactacccc

SEQ ID NO: 217401 - DNA, 25 bp, Homo sapien
caatcccaaggaggagcgtctatgt

SEQ ID NO: 217402 - DNA, 25 bp, Homo sapien
gttcacttaatctctcctttgtgct

SEQ ID NO: 217403 - DNA, 25 bp, Homo sapien
tggttcacttaatctctcctttgtg

SEQ ID NO: 217404 - DNA, 25 bp, Homo sapien
cacttaatctctcctttgtgctcat

SEQ ID NO: 217405 - DNA, 25 bp, Homo sapien
tcacttaatctctcctttgtgctca

SEQ ID NO: 217406 - DNA, 25 bp, Homo sapien
tctttcactgtctgccgtagatgtc

SEQ ID NO: 217407 - DNA, 25 bp, Homo sapien
cagctggggctacttggcactgctt

SEQ ID NO: 217408 - DNA, 25 bp, Homo sapien
tgttcagtccctttctcacagggct

SEQ ID NO: 217409 - DNA, 25 bp, Homo sapien
ccttggttacatatgatgctccttg

SEQ ID NO: 217410 - DNA, 25 bp, Homo sapien
tccaaggcacatagccactcgataa

SEQ ID NO: 217411 - DNA, 25 bp, Homo sapien
catccaactgatacggaaaccggta

SEQ ID NO: 217412 - DNA, 25 bp, Homo sapien
gaatcacgttcgctgtcaccatcca

SEQ ID NO: 217413 - DNA, 25 bp, Homo sapien
catcttctcagaacactccaaggca

SEQ ID NO: 217414 - DNA, 25 bp, Homo sapien
tctttccacctattagagtggaccc

SEQ ID NO: 217415 - DNA, 25 bp, Homo sapien
tattagagtggacccccattgagtc

SEQ ID NO: 217416 - DNA, 25 bp, Homo sapien
cattgagtctccagaggagaaactc

SEQ ID NO: 217417 - DNA, 25 bp, Homo sapien
tctgttttaatcccttgtctttcca

SEQ ID NO: 217418 - DNA, 25 bp, Homo sapien
tagaactcagcatgaaaccagaagg

SEQ ID NO: 217419 - DNA, 25 bp, Homo sapien
aacaactaactttcggccaggcgtg

SEQ ID NO: 217420 - DNA, 25 bp, Homo sapien
tcaatggagactttaggcaactaga

SEQ ID NO: 217421 - DNA, 25 bp, Homo sapien
tgagaatttggatccagacctactg

SEQ ID NO: 217422 - DNA, 25 bp, Homo sapien
tgtcatcaaattacccatatccaag

SEQ ID NO: 217423 - DNA, 25 bp, Homo sapien
aacctgtacatgacctttagtgaag

SEQ ID NO: 217424 - DNA, 25 bp, Homo sapien
tacgtggccaacattgttactttca

SEQ ID NO: 217425 - DNA, 25 bp, Homo sapien
ttcgaggtgtaaaatatacgtggcc

SEQ ID NO: 217426 - DNA, 25 bp, Homo sapien
aggcctgggtcctcgaatattcttc

SEQ ID NO: 217427 - DNA, 25 bp, Homo sapien
ccaaggcctgggtcctcgaatattc

SEQ ID NO: 217428 - DNA, 25 bp, Homo sapien
tattcttccagtcatcaaacttgga

SEQ ID NO: 217429 - DNA, 25 bp, Homo sapien
catcaaacttggagtctttgatttt

SEQ ID NO: 217430 - DNA, 25 bp, Homo sapien
ggccaaggaaagatagctagccctt

SEQ ID NO: 217431 - DNA, 25 bp, Homo sapien
taaagccaagccttgacaagattct

SEQ ID NO: 217432 - DNA, 25 bp, Homo sapien
ctggagattgagtcccaacaaggga

SEQ ID NO: 217433 - DNA, 25 bp, Homo sapien
tagctagcccttcaacagatacttc

SEQ ID NO: 217434 - DNA, 25 bp, Homo sapien
taaataggcttttttgactcaagac

SEQ ID NO: 217435 - DNA, 25 bp, Homo sapien
aaattctccatttatattctcctag

SEQ ID NO: 217436 - DNA, 25 bp, Homo sapien
ctactaatacttttaaggcagataa

SEQ ID NO: 217437 - DNA, 25 bp, Homo sapien
taactgattgttataagacagagac

SEQ ID NO: 217438 - DNA, 25 bp, Homo sapien
atattccgactctaaagatatttta

SEQ ID NO: 217439 - DNA, 25 bp, Homo sapien
catattccgactctaaagatatttt

SEQ ID NO: 217440 - DNA, 25 bp, Homo sapien
ctgatcacataatgataactaatgt

SEQ ID NO: 217441 - DNA, 25 bp, Homo sapien
gataactaatgtactactgccagca

SEQ ID NO: 217442 - DNA, 25 bp, Homo sapien
tctaagtctgtttgttagactcaat

SEQ ID NO: 217443 - DNA, 25 bp, Homo sapien
ggctgaaatactatagccaaataca

SEQ ID NO: 217444 - DNA, 25 bp, Homo sapien
tgacaaaggcacaatagacaacctg

SEQ ID NO: 217445 - DNA, 25 bp, Homo sapien
caaactaatgcgacagaacagagaa

SEQ ID NO: 217446 - DNA, 25 bp, Homo sapien
gaacagagaatcctgaagcagactt

SEQ ID NO: 217447 - DNA, 25 bp, Homo sapien
aattaggcacagaagagcagtcacg

SEQ ID NO: 217448 - DNA, 25 bp, Homo sapien
tgttcacccataggatattttagta

SEQ ID NO: 217449 - DNA, 25 bp, Homo sapien
cagtcccccttttgttcacccatag

SEQ ID NO: 217450 - DNA, 25 bp, Homo sapien
cttttgttcacccataggatatttt

SEQ ID NO: 217451 - DNA, 25 bp, Homo sapien
ccccttttgttcacccataggatat

SEQ ID NO: 217452 - DNA, 25 bp, Homo sapien
gaccaaaagaacctccaacaatcag

SEQ ID NO: 217453 - DNA, 25 bp, Homo sapien
ctcacgaagaccaaaagaacctcca

SEQ ID NO: 217454 - DNA, 25 bp, Homo sapien
cacagcatcatatcggatttgagaa

SEQ ID NO: 217455 - DNA, 25 bp, Homo sapien
catcatatcggatttgagaaaactc

SEQ ID NO: 217456 - DNA, 25 bp, Homo sapien
aagcagcaaatgaggccatgcctct

SEQ ID NO: 217457 - DNA, 25 bp, Homo sapien
gacagggtctttcatttgtgaagca

SEQ ID NO: 217458 - DNA, 25 bp, Homo sapien
atggtggacaccagcccgtctctca

SEQ ID NO: 217459 - DNA, 25 bp, Homo sapien
gatgctcctgatacaacgacatggt

SEQ ID NO: 217460 - DNA, 25 bp, Homo sapien
tggctacaatgtggcaggcaccgta

SEQ ID NO: 217461 - DNA, 25 bp, Homo sapien
tgaaaccatataaacacggaagctg

SEQ ID NO: 217462 - DNA, 25 bp, Homo sapien
gacatccttagggaactcagtgtgg

SEQ ID NO: 217463 - DNA, 25 bp, Homo sapien
taactggcccgtaatcaaaaagcaa

SEQ ID NO: 217464 - DNA, 25 bp, Homo sapien
acgccacgctcacaagcagacagat

SEQ ID NO: 217465 - DNA, 25 bp, Homo sapien
caatgaccgcgttcgacgatgggaa

SEQ ID NO: 217466 - DNA, 25 bp, Homo sapien
ttcgacgatgggaaagacgccacgc

SEQ ID NO: 217467 - DNA, 25 bp, Homo sapien
tgtgaatcaagggtagtaacaatga

SEQ ID NO: 217468 - DNA, 25 bp, Homo sapien
tccatagccgagagtcttgttcttg

SEQ ID NO: 217469 - DNA, 25 bp, Homo sapien
aagcacgcatcaccgcgggtgcaaa

SEQ ID NO: 217470 - DNA, 25 bp, Homo sapien
tgttcttgcgaaaagcacgcatcac

SEQ ID NO: 217471 - DNA, 25 bp, Homo sapien
cgagagtcttgttcttgcgaaaagc

SEQ ID NO: 217472 - DNA, 25 bp, Homo sapien
ggctcagaactccaagcgggcctag

SEQ ID NO: 217473 - DNA, 25 bp, Homo sapien
acgctctcaccaagacgagtacgtc

SEQ ID NO: 217474 - DNA, 25 bp, Homo sapien
gagtgaactcttccatcggctcaga

SEQ ID NO: 217475 - DNA, 25 bp, Homo sapien
gcgggcctagcgcagactcccaaat

SEQ ID NO: 217476 - DNA, 25 bp, Homo sapien
cgctaggcaaaagcaatcgagccat

SEQ ID NO: 217477 - DNA, 25 bp, Homo sapien
tggtttccgctaggcaaaagcaatc

SEQ ID NO: 217478 - DNA, 25 bp, Homo sapien
tccttggttatttggtgctcggtcc

SEQ ID NO: 217479 - DNA, 25 bp, Homo sapien
ggtccttagtgaatggtttccgcta

SEQ ID NO: 217480 - DNA, 25 bp, Homo sapien
tgaacgattttctaacacctcaagg

SEQ ID NO: 217481 - DNA, 25 bp, Homo sapien
gctaagagttggtctagttcagtcc

SEQ ID NO: 217482 - DNA, 25 bp, Homo sapien
tctggtacacttccaggagcctgaa

SEQ ID NO: 217483 - DNA, 25 bp, Homo sapien
tcaaggtcaacatgccaccaaggtt

SEQ ID NO: 217484 - DNA, 25 bp, Homo sapien
ggtaactattccatacaaaagtgct

SEQ ID NO: 217485 - DNA, 25 bp, Homo sapien
ggtctcttctatacagacagacaaa

SEQ ID NO: 217486 - DNA, 25 bp, Homo sapien
tacaaaagtgctagaggtctcttct

SEQ ID NO: 217487 - DNA, 25 bp, Homo sapien
tctgctttgtaacactttggagaga

SEQ ID NO: 217488 - DNA, 25 bp, Homo sapien
cttccaagttgctacagggctctat

SEQ ID NO: 217489 - DNA, 25 bp, Homo sapien
tactggctaggcacaattagacaca

SEQ ID NO: 217490 - DNA, 25 bp, Homo sapien
tatatccggtaataagaagcccaga

SEQ ID NO: 217491 - DNA, 25 bp, Homo sapien
tctaagaactaacatggcctggagg

SEQ ID NO: 217492 - DNA, 25 bp, Homo sapien
taactcaatcttctactaccaggtg

SEQ ID NO: 217493 - DNA, 25 bp, Homo sapien
taaaatctgtatgggctccacatga

SEQ ID NO: 217494 - DNA, 25 bp, Homo sapien
tgagcaatttcagcttagagtgact

SEQ ID NO: 217495 - DNA, 25 bp, Homo sapien
tatcttcggcacctagcacatagta

SEQ ID NO: 217496 - DNA, 25 bp, Homo sapien
aatcagagtttggtacagtccctgg

SEQ ID NO: 217497 - DNA, 25 bp, Homo sapien
tgatgctggcatctgaagtcctgag

SEQ ID NO: 217498 - DNA, 25 bp, Homo sapien
taacattttcaactgcggctgcaca

SEQ ID NO: 217499 - DNA, 25 bp, Homo sapien
gaatgttccacttacttcgtgcaga

SEQ ID NO: 217500 - DNA, 25 bp, Homo sapien
tataccagtagtgacccagaggcaa

SEQ ID NO: 217501 - DNA, 25 bp, Homo sapien
aatcctgggaggtaagcaagcttgc

SEQ ID NO: 217502 - DNA, 25 bp, Homo sapien
tctttgtcgatataggcacccaggt

SEQ ID NO: 217503 - DNA, 25 bp, Homo sapien
gatttgatgcccatcctgccaggga

SEQ ID NO: 217504 - DNA, 25 bp, Homo sapien
cggtatctcatgaaagcccaggctg

SEQ ID NO: 217505 - DNA, 25 bp, Homo sapien
cataaatatgggaataccacttggg

SEQ ID NO: 217506 - DNA, 25 bp, Homo sapien
ccaggctgctaccatggtgagggca

SEQ ID NO: 217507 - DNA, 25 bp, Homo sapien
gatgtcctataggtccattctgcac

SEQ ID NO: 217508 - DNA, 25 bp, Homo sapien
ggttgtcaagctttatctttaaggc

SEQ ID NO: 217509 - DNA, 25 bp, Homo sapien
ggttataagccatactgttgtgaat

SEQ ID NO: 217510 - DNA, 25 bp, Homo sapien
tatcttgaagcaaggaccttggtta

SEQ ID NO: 217511 - DNA, 25 bp, Homo sapien
taatttggttgtcaagctttatctt

SEQ ID NO: 217512 - DNA, 25 bp, Homo sapien
agcagaagtaccaatggacccctcc

SEQ ID NO: 217513 - DNA, 25 bp, Homo sapien
acactgaagattacacacattgggc

SEQ ID NO: 217514 - DNA, 25 bp, Homo sapien
ataagcagaagtaccaatggacccc

SEQ ID NO: 217515 - DNA, 25 bp, Homo sapien
gaagattacacacattgggcttatt

SEQ ID NO: 217516 - DNA, 25 bp, Homo sapien
aaagaggtctacagcatcctggtgc

SEQ ID NO: 217517 - DNA, 25 bp, Homo sapien
ctctcagagacacagcatagcctgc

SEQ ID NO: 217518 - DNA, 25 bp, Homo sapien
gcagcaggttctttaggtcttggcc

SEQ ID NO: 217519 - DNA, 25 bp, Homo sapien
catagcctgcattacgaaagaggtc

SEQ ID NO: 217520 - DNA, 25 bp, Homo sapien
tatacaatagattgccaaactccac

SEQ ID NO: 217521 - DNA, 25 bp, Homo sapien
cagtctaacactatgacatctctca

SEQ ID NO: 217522 - DNA, 25 bp, Homo sapien
ggaccccaatccaccatgtcaagag

SEQ ID NO: 217523 - DNA, 25 bp, Homo sapien
tatgtaaagtcccaacttactaagc

SEQ ID NO: 217524 - DNA, 25 bp, Homo sapien
aatgattcagtgtgtaatcctgccc

SEQ ID NO: 217525 - DNA, 25 bp, Homo sapien
tgccaatgattcagtgtgtaatcct

SEQ ID NO: 217526 - DNA, 25 bp, Homo sapien
ttcagtgtgtaatcctgcccctcca

SEQ ID NO: 217527 - DNA, 25 bp, Homo sapien
tgattcagtgtgtaatcctgcccct

SEQ ID NO: 217528 - DNA, 25 bp, Homo sapien
gccactgtcgttggagacatactgc

SEQ ID NO: 217529 - DNA, 25 bp, Homo sapien
tctgtcccaccgacgatgttgaagc

SEQ ID NO: 217530 - DNA, 25 bp, Homo sapien
ccattttctttgatgcggctgacgt

SEQ ID NO: 217531 - DNA, 25 bp, Homo sapien
gaaaggatcttatcaccctcctgga

SEQ ID NO: 217532 - DNA, 25 bp, Homo sapien
catcaaatgctacagttgcctctgg

SEQ ID NO: 217533 - DNA, 25 bp, Homo sapien
ctggaacaaactatgtagaaaaatc

SEQ ID NO: 217534 - DNA, 25 bp, Homo sapien
tctcccaagctggaacaaactatgt

SEQ ID NO: 217535 - DNA, 25 bp, Homo sapien
caacaccctcatcaaatgctacagt

SEQ ID NO: 217536 - DNA, 25 bp, Homo sapien
atttacagaactgggtgtatctata

SEQ ID NO: 217537 - DNA, 25 bp, Homo sapien
cagaactgggtgtatctataagcca

SEQ ID NO: 217538 - DNA, 25 bp, Homo sapien
aactgggtgtatctataagccaaag

SEQ ID NO: 217539 - DNA, 25 bp, Homo sapien
tacagaactgggtgtatctataagc

SEQ ID NO: 217540 - DNA, 25 bp, Homo sapien
tgacaccactataggattaagagag

SEQ ID NO: 217541 - DNA, 25 bp, Homo sapien
gagctctggttataatgtgccaaca

SEQ ID NO: 217542 - DNA, 25 bp, Homo sapien
gaccctaagcctgtttaaaagagca

SEQ ID NO: 217543 - DNA, 25 bp, Homo sapien
gaactcctgactataggtctggacc

SEQ ID NO: 217544 - DNA, 25 bp, Homo sapien
cattaacaccaaggattatagccac

SEQ ID NO: 217545 - DNA, 25 bp, Homo sapien
tagccacttgttgagttatgaagac

SEQ ID NO: 217546 - DNA, 25 bp, Homo sapien
gatcaatccgactaattttctccca

SEQ ID NO: 217547 - DNA, 25 bp, Homo sapien
gaccagtgttaacctgttattctag

SEQ ID NO: 217548 - DNA, 25 bp, Homo sapien
tgtttgataccttgagtcttctgtt

SEQ ID NO: 217549 - DNA, 25 bp, Homo sapien
tatgtttgataccttgagtcttctg

SEQ ID NO: 217550 - DNA, 25 bp, Homo sapien
tttaaatatgtttgataccttgagt

SEQ ID NO: 217551 - DNA, 25 bp, Homo sapien
aatatgtttgataccttgagtcttc

SEQ ID NO: 217552 - DNA, 25 bp, Homo sapien
ggtatccacgataagcaggctaaaa

SEQ ID NO: 217553 - DNA, 25 bp, Homo sapien
aggtgaatccggctcagcagcagag

SEQ ID NO: 217554 - DNA, 25 bp, Homo sapien
tttctctaagcaccccgaagcgttg

SEQ ID NO: 217555 - DNA, 25 bp, Homo sapien
aaacctctaggttgtggcctgcccg

SEQ ID NO: 217556 - DNA, 25 bp, Homo sapien
ttcctcagtgaccaaataatccact

SEQ ID NO: 217557 - DNA, 25 bp, Homo sapien
ctgagggccctctggtaagattgat

SEQ ID NO: 217558 - DNA, 25 bp, Homo sapien
ctctggtaagattgatctcttcctc

SEQ ID NO: 217559 - DNA, 25 bp, Homo sapien
gccctctggtaagattgatctcttc

SEQ ID NO: 217560 - DNA, 25 bp, Homo sapien
cagcacagcggtttcggtttcagca

SEQ ID NO: 217561 - DNA, 25 bp, Homo sapien
tgtaagcatcgaaccagaccggaat

SEQ ID NO: 217562 - DNA, 25 bp, Homo sapien
aaggtgaatcaatctcggcgctgcg

SEQ ID NO: 217563 - DNA, 25 bp, Homo sapien
gaatcgtggttcctaccgccaatgg

SEQ ID NO: 217564 - DNA, 25 bp, Homo sapien
gagaaaatgagatcctactcagagg

SEQ ID NO: 217565 - DNA, 25 bp, Homo sapien
aggtgtgattgaagcactgcactct

SEQ ID NO: 217566 - DNA, 25 bp, Homo sapien
tactctatggacttgccccaaattc

SEQ ID NO: 217567 - DNA, 25 bp, Homo sapien
caaggttgaagaaccctctgttggg

SEQ ID NO: 217568 - DNA, 25 bp, Homo sapien
gaccaggccagtctctcgtttcaca

SEQ ID NO: 217569 - DNA, 25 bp, Homo sapien
ttcatatccaaaggctgagcaccaa

SEQ ID NO: 217570 - DNA, 25 bp, Homo sapien
tagtattatcaaggccccactaggg

SEQ ID NO: 217571 - DNA, 25 bp, Homo sapien
gaatctctggagctcattcctttgg

SEQ ID NO: 217572 - DNA, 25 bp, Homo sapien
ggtcacagatatcgaaccagaaaga

SEQ ID NO: 217573 - DNA, 25 bp, Homo sapien
ttatgaaaggtaacttcccaggtgc

SEQ ID NO: 217574 - DNA, 25 bp, Homo sapien
tgccaagcagccaatatttctagct

SEQ ID NO: 217575 - DNA, 25 bp, Homo sapien
ttattatgcaactttagccatgcca

SEQ ID NO: 217576 - DNA, 25 bp, Homo sapien
aatctggcagttagaatttcatccc

SEQ ID NO: 217577 - DNA, 25 bp, Homo sapien
tggcaaggataatgttcagcttgaa

SEQ ID NO: 217578 - DNA, 25 bp, Homo sapien
tgtagcttatcagtcctttccacaa

SEQ ID NO: 217579 - DNA, 25 bp, Homo sapien
taaggtgcctaacttgcagcagtga

SEQ ID NO: 217580 - DNA, 25 bp, Homo sapien
cccgacaatctctgtcacatttagg

SEQ ID NO: 217581 - DNA, 25 bp, Homo sapien
gagtcaaagattttggcatacagtg

SEQ ID NO: 217582 - DNA, 25 bp, Homo sapien
tgttgacaaggtatacattatgact

SEQ ID NO: 217583 - DNA, 25 bp, Homo sapien
agcagagctgaatggattggaagac

SEQ ID NO: 217584 - DNA, 25 bp, Homo sapien
tgttgatcacagtcagaggtgaaat

SEQ ID NO: 217585 - DNA, 25 bp, Homo sapien
tgaaattaagtttttgggcctgatg

SEQ ID NO: 217586 - DNA, 25 bp, Homo sapien
atatgttgatcacagtcagaggtga

SEQ ID NO: 217587 - DNA, 25 bp, Homo sapien
tttttgggcctgatgcacgtacaag

SEQ ID NO: 217588 - DNA, 25 bp, Homo sapien
ggttgaaaacaccataaacatcaca

SEQ ID NO: 217589 - DNA, 25 bp, Homo sapien
tgcctttccctagtatgtttaataa

SEQ ID NO: 217590 - DNA, 25 bp, Homo sapien
tgttataatttctacggcaagaact

SEQ ID NO: 217591 - DNA, 25 bp, Homo sapien
aaggcatttgcctttccctagtatg

SEQ ID NO: 217592 - DNA, 25 bp, Homo sapien
tagatattgcaagggcaacaggcat

SEQ ID NO: 217593 - DNA, 25 bp, Homo sapien
cataagactgatgcaacttgacaca

SEQ ID NO: 217594 - DNA, 25 bp, Homo sapien
gaaaatcataaaccctgcagtcaag

SEQ ID NO: 217595 - DNA, 25 bp, Homo sapien
gatgtctccagttttgatagtcaaa

SEQ ID NO: 217596 - DNA, 25 bp, Homo sapien
cttttgtgggagagttcaatgtgag

SEQ ID NO: 217597 - DNA, 25 bp, Homo sapien
tcttttgtgggagagttcaatgtga

SEQ ID NO: 217598 - DNA, 25 bp, Homo sapien
gcaactttcctaaggtgggacaaga

SEQ ID NO: 217599 - DNA, 25 bp, Homo sapien
acctggccagatctgtgtagacata

SEQ ID NO: 217600 - DNA, 25 bp, Homo sapien
catatggtctggtgcaatgttgata

SEQ ID NO: 217601 - DNA, 25 bp, Homo sapien
tgactttctttcagagcatggtggt

SEQ ID NO: 217602 - DNA, 25 bp, Homo sapien
catcctgcaatttatagataggctg

SEQ ID NO: 217603 - DNA, 25 bp, Homo sapien
gataggctgggcttaggcaattcct

SEQ ID NO: 217604 - DNA, 25 bp, Homo sapien
gaaattacatatgggattccccagg

SEQ ID NO: 217605 - DNA, 25 bp, Homo sapien
tccccaggcttaacacaatgtagaa

SEQ ID NO: 217606 - DNA, 25 bp, Homo sapien
ttgctaaaagatgatgtaattgtca

SEQ ID NO: 217607 - DNA, 25 bp, Homo sapien
attgctaaaagatgatgtaattgtc

SEQ ID NO: 217608 - DNA, 25 bp, Homo sapien
cccagtaagtgtcaatgtaatttac

SEQ ID NO: 217609 - DNA, 25 bp, Homo sapien
taagtgtcaatgtaatttactccat

SEQ ID NO: 217610 - DNA, 25 bp, Homo sapien
tatgtcgtgtactaatatattacaa

SEQ ID NO: 217611 - DNA, 25 bp, Homo sapien
gaagcgaaaccacaaaaaggatgta

SEQ ID NO: 217612 - DNA, 25 bp, Homo sapien
ggatgtaacgaatacatattaaaac

SEQ ID NO: 217613 - DNA, 25 bp, Homo sapien
actagtgctcggtttgtatttacaa

SEQ ID NO: 217614 - DNA, 25 bp, Homo sapien
aacaaggatcccattgattaaactt

SEQ ID NO: 217615 - DNA, 25 bp, Homo sapien
tatggaacatttggagcactcaaac

SEQ ID NO: 217616 - DNA, 25 bp, Homo sapien
catttggagcactcaaacaaggatc

SEQ ID NO: 217617 - DNA, 25 bp, Homo sapien
aattagtgtatggaacatttggagc

SEQ ID NO: 217618 - DNA, 25 bp, Homo sapien
tgcccccctaaataggtgatacctc

SEQ ID NO: 217619 - DNA, 25 bp, Homo sapien
tgagacagttggttcgtcgaaaaca

SEQ ID NO: 217620 - DNA, 25 bp, Homo sapien
gacctagtgcatgtgctgtaacaca

SEQ ID NO: 217621 - DNA, 25 bp, Homo sapien
tctcaagcccatgttatgacctagt

SEQ ID NO: 217622 - DNA, 25 bp, Homo sapien
gcatgaataatccacgagtaaccgt

SEQ ID NO: 217623 - DNA, 25 bp, Homo sapien
gcctggcctgctagcagaaaatagt

SEQ ID NO: 217624 - DNA, 25 bp, Homo sapien
cagttctacagcaacgtggcctggc

SEQ ID NO: 217625 - DNA, 25 bp, Homo sapien
atgtgacacattagggttccgcatg

SEQ ID NO: 217626 - DNA, 25 bp, Homo sapien
tcttgatctatctcttccccttcag

SEQ ID NO: 217627 - DNA, 25 bp, Homo sapien
tctactagcctctcctggtctttct

SEQ ID NO: 217628 - DNA, 25 bp, Homo sapien
tcttacatctactagcctctcctgg

SEQ ID NO: 217629 - DNA, 25 bp, Homo sapien
tccccttcagtcttacatctactag

SEQ ID NO: 217630 - DNA, 25 bp, Homo sapien
ccaggtgtttgatttcgtaagtcaa

SEQ ID NO: 217631 - DNA, 25 bp, Homo sapien
caggtgtttgatttcgtaagtcaag

SEQ ID NO: 217632 - DNA, 25 bp, Homo sapien
tgtttgatttcgtaagtcaagtcat

SEQ ID NO: 217633 - DNA, 25 bp, Homo sapien
ggtgtttgatttcgtaagtcaagtc

SEQ ID NO: 217634 - DNA, 25 bp, Homo sapien
ttgagcttcatgtgaatcacgtgtc

SEQ ID NO: 217635 - DNA, 25 bp, Homo sapien
tgagcttcatgtgaatcacgtgtct

SEQ ID NO: 217636 - DNA, 25 bp, Homo sapien
gagcttcatgtgaatcacgtgtctt

SEQ ID NO: 217637 - DNA, 25 bp, Homo sapien
caatttctgaggaagtgaagcgcca

SEQ ID NO: 217638 - DNA, 25 bp, Homo sapien
gagctggtctggcatctcaactcca

SEQ ID NO: 217639 - DNA, 25 bp, Homo sapien
gaagcgccatcctggtgggtcatga

SEQ ID NO: 217640 - DNA, 25 bp, Homo sapien
caatagacctgggacaagagtgccc

SEQ ID NO: 217641 - DNA, 25 bp, Homo sapien
gaaatgtcgcttgtcctctaaggga

SEQ ID NO: 217642 - DNA, 25 bp, Homo sapien
gatgcaagtttacgacacttaagga

SEQ ID NO: 217643 - DNA, 25 bp, Homo sapien
cataacaatggtgtgctcatcaggg

SEQ ID NO: 217644 - DNA, 25 bp, Homo sapien
gtgtataactgagctgaaatgtcgc

SEQ ID NO: 217645 - DNA, 25 bp, Homo sapien
ccacaagcctttatctagactaaga

SEQ ID NO: 217646 - DNA, 25 bp, Homo sapien
aaactcaaaattggcaaaattggca

SEQ ID NO: 217647 - DNA, 25 bp, Homo sapien
caatattctgttcacaagctcttaa

SEQ ID NO: 217648 - DNA, 25 bp, Homo sapien
tctttaagacttaggcgagagataa

SEQ ID NO: 217649 - DNA, 25 bp, Homo sapien
tcttagtaaggtgttagcaatccaa

SEQ ID NO: 217650 - DNA, 25 bp, Homo sapien
aaactccttgatgaatgtacatgca

SEQ ID NO: 217651 - DNA, 25 bp, Homo sapien
cgaattaggtatagagttatgcacc

SEQ ID NO: 217652 - DNA, 25 bp, Homo sapien
caccacgttacaagaaagagtgaca

SEQ ID NO: 217653 - DNA, 25 bp, Homo sapien
acccaagcaggaaggtccaacgctg

SEQ ID NO: 217654 - DNA, 25 bp, Homo sapien
aagtgagtggtttccctattctgtc

SEQ ID NO: 217655 - DNA, 25 bp, Homo sapien
tagccacctatacccatgtccaaag

SEQ ID NO: 217656 - DNA, 25 bp, Homo sapien
gtagctccagccgtaacccaagcag

SEQ ID NO: 217657 - DNA, 25 bp, Homo sapien
tgactagggatatgtgccactgagg

SEQ ID NO: 217658 - DNA, 25 bp, Homo sapien
cagcccctggcacaaggtgggcatt

SEQ ID NO: 217659 - DNA, 25 bp, Homo sapien
caagaactggtaacaaggactctat

SEQ ID NO: 217660 - DNA, 25 bp, Homo sapien
aattcacggtttgacacagctgcag

SEQ ID NO: 217661 - DNA, 25 bp, Homo sapien
gctgcattctcatcaaaggctggac

SEQ ID NO: 217662 - DNA, 25 bp, Homo sapien
tcactcaggttgttgcgggtttcat

SEQ ID NO: 217663 - DNA, 25 bp, Homo sapien
ggtcccacaaggctacaatcaaggc

SEQ ID NO: 217664 - DNA, 25 bp, Homo sapien
agttgtagaactcatggccgctggc

SEQ ID NO: 217665 - DNA, 25 bp, Homo sapien
cactgtagagtaagtaagaataggc

SEQ ID NO: 217666 - DNA, 25 bp, Homo sapien
tttatttaaacagtgagacatggct

SEQ ID NO: 217667 - DNA, 25 bp, Homo sapien
taagaataggctaggaatcctttgc

SEQ ID NO: 217668 - DNA, 25 bp, Homo sapien
gatagctaatgcttgcaatcctgac

SEQ ID NO: 217669 - DNA, 25 bp, Homo sapien
aaagcacatgtaagcaaaataataa

SEQ ID NO: 217670 - DNA, 25 bp, Homo sapien
gacaggtaacgcaactttcccatca

SEQ ID NO: 217671 - DNA, 25 bp, Homo sapien
agaaggcacaatagtgacaggtaac

SEQ ID NO: 217672 - DNA, 25 bp, Homo sapien
cacaatagtgacaggtaacgcaact

SEQ ID NO: 217673 - DNA, 25 bp, Homo sapien
ccttccatgttgttcttaggaggtg

SEQ ID NO: 217674 - DNA, 25 bp, Homo sapien
tgttgttcttaggaggtgggccact

SEQ ID NO: 217675 - DNA, 25 bp, Homo sapien
taggaggtgggccactatcagcact

SEQ ID NO: 217676 - DNA, 25 bp, Homo sapien
tgttcttaggaggtgggccactatc

SEQ ID NO: 217677 - DNA, 25 bp, Homo sapien
tgacagatgaaccatactggcacac

SEQ ID NO: 217678 - DNA, 25 bp, Homo sapien
tgcagattcccctcatgttgcaggt

SEQ ID NO: 217679 - DNA, 25 bp, Homo sapien
tcttaggctgacaggcttgtgacag

SEQ ID NO: 217680 - DNA, 25 bp, Homo sapien
ttgtccttgcagtatgggggtgccc

SEQ ID NO: 217681 - DNA, 25 bp, Homo sapien
acatactgtgccatctttcacctca

SEQ ID NO: 217682 - DNA, 25 bp, Homo sapien
ggaccacatactgtgccatctttca

SEQ ID NO: 217683 - DNA, 25 bp, Homo sapien
ctggaccacatactgtgccatcttt

SEQ ID NO: 217684 - DNA, 25 bp, Homo sapien
accacatactgtgccatctttcacc

SEQ ID NO: 217685 - DNA, 25 bp, Homo sapien
tttacatatgttgtgcctacaatac

SEQ ID NO: 217686 - DNA, 25 bp, Homo sapien
tgaaactgctgcactgtagaatgct

SEQ ID NO: 217687 - DNA, 25 bp, Homo sapien
tcagtgccccagcaagtggtgtcat

SEQ ID NO: 217688 - DNA, 25 bp, Homo sapien
tatcagattgggaattactcccaca

SEQ ID NO: 217689 - DNA, 25 bp, Homo sapien
tcttggtagcaactctgagatgcac

SEQ ID NO: 217690 - DNA, 25 bp, Homo sapien
cattgatgggatgtcccattgcacc

SEQ ID NO: 217691 - DNA, 25 bp, Homo sapien
ggcattcacattacaggagatcccg

SEQ ID NO: 217692 - DNA, 25 bp, Homo sapien
tacacgtcttttcatagcagaaggc

SEQ ID NO: 217693 - DNA, 25 bp, Homo sapien
tatgaccaagctcgtggcccaaagt

SEQ ID NO: 217694 - DNA, 25 bp, Homo sapien
caagcagccccaggatgtagagtac

SEQ ID NO: 217695 - DNA, 25 bp, Homo sapien
tatattccctggatatggaggcggt

SEQ ID NO: 217696 - DNA, 25 bp, Homo sapien
cattatctaggtctccactggtagg

SEQ ID NO: 217697 - DNA, 25 bp, Homo sapien
gaacacaggaaggtgtgcagcaaac

SEQ ID NO: 217698 - DNA, 25 bp, Homo sapien
taagggcaaccaaggactcagggac

SEQ ID NO: 217699 - DNA, 25 bp, Homo sapien
catggtagtagcagtcatcctggat

SEQ ID NO: 217700 - DNA, 25 bp, Homo sapien
aacagcttatttaccctcatgtgga

SEQ ID NO: 217701 - DNA, 25 bp, Homo sapien
gaagtgaaatactgggagggcctgg

SEQ ID NO: 217702 - DNA, 25 bp, Homo sapien
tggcctgagagtggccagaaataga

SEQ ID NO: 217703 - DNA, 25 bp, Homo sapien
agaagagtgaccctgatgtgcacca

SEQ ID NO: 217704 - DNA, 25 bp, Homo sapien
caaaaacatcccaaaccagagcagc

SEQ ID NO: 217705 - DNA, 25 bp, Homo sapien
tgaagctgtcattatggagccatct

SEQ ID NO: 217706 - DNA, 25 bp, Homo sapien
gaagctgtcattatggagccatctg

SEQ ID NO: 217707 - DNA, 25 bp, Homo sapien
aagctgtcattatggagccatctgt

SEQ ID NO: 217708 - DNA, 25 bp, Homo sapien
tatgaagctgtcattatggagccat

SEQ ID NO: 217709 - DNA, 25 bp, Homo sapien
gctcctccctctgagctgttcaggg

SEQ ID NO: 217710 - DNA, 25 bp, Homo sapien
ctagagcagaagagaacaaggtgtg

SEQ ID NO: 217711 - DNA, 25 bp, Homo sapien
tcctccctctgagctgttcagggtg

SEQ ID NO: 217712 - DNA, 25 bp, Homo sapien
tggctcctccctctgagctgttcag

SEQ ID NO: 217713 - DNA, 25 bp, Homo sapien
ctttagggatctggggatctgtgtc

SEQ ID NO: 217714 - DNA, 25 bp, Homo sapien
atctgtgtcctggtggagctggacc

SEQ ID NO: 217715 - DNA, 25 bp, Homo sapien
ggatctgtgtcctggtggagctgga

SEQ ID NO: 217716 - DNA, 25 bp, Homo sapien
ctgtgtcctggtggagctggaccat

SEQ ID NO: 217717 - DNA, 25 bp, Homo sapien
cagcaaactgaacaattatgcccat

SEQ ID NO: 217718 - DNA, 25 bp, Homo sapien
tcagttacagatcacaccatgtggc

SEQ ID NO: 217719 - DNA, 25 bp, Homo sapien
catcttatgagctccacacacagca

SEQ ID NO: 217720 - DNA, 25 bp, Homo sapien
catgtggctcttaaagtcaattgac

SEQ ID NO: 217721 - DNA, 25 bp, Homo sapien
aggaactttgttcatgccctaccct

SEQ ID NO: 217722 - DNA, 25 bp, Homo sapien
tctgagattgatgtgggcatgaccc

SEQ ID NO: 217723 - DNA, 25 bp, Homo sapien
gatattgacagacacaagacttggt

SEQ ID NO: 217724 - DNA, 25 bp, Homo sapien
tcttaaacacactgctgaactccca

SEQ ID NO: 217725 - DNA, 25 bp, Homo sapien
aagacttggtactaggagtgatacc

SEQ ID NO: 217726 - DNA, 25 bp, Homo sapien
cccggatgcggtggcggccaacaaa

SEQ ID NO: 217727 - DNA, 25 bp, Homo sapien
ctcctccgaagagcattttccgact

SEQ ID NO: 217728 - DNA, 25 bp, Homo sapien
tgcaacagttccttttaacggacca

SEQ ID NO: 217729 - DNA, 25 bp, Homo sapien
aggacgagaaaccactccccggatg

SEQ ID NO: 217730 - DNA, 25 bp, Homo sapien
tgaaacatgtgcagccggaaggctg

SEQ ID NO: 217731 - DNA, 25 bp, Homo sapien
cgcccaagtggtgattccccagaat

SEQ ID NO: 217732 - DNA, 25 bp, Homo sapien
gggccttcaacaagtctgagggctg

SEQ ID NO: 217733 - DNA, 25 bp, Homo sapien
ccccagaattttcccaggcgaagtg

SEQ ID NO: 217734 - DNA, 25 bp, Homo sapien
tatgcaacagtcacaataaacgatg

SEQ ID NO: 217735 - DNA, 25 bp, Homo sapien
caaaaagaaagtgcgaggtggtgcc

SEQ ID NO: 217736 - DNA, 25 bp, Homo sapien
tgtatcagataggacactttgtggt

SEQ ID NO: 217737 - DNA, 25 bp, Homo sapien
tgcagggccaactacaggacttaag

SEQ ID NO: 217738 - DNA, 25 bp, Homo sapien
caaaaaccacttagcaaatgtaatg

SEQ ID NO: 217739 - DNA, 25 bp, Homo sapien
tagggagggagatcttattcacaat

SEQ ID NO: 217740 - DNA, 25 bp, Homo sapien
taaaacacctatgagcaaacctgaa

SEQ ID NO: 217741 - DNA, 25 bp, Homo sapien
gaaatgtgacagactcatagaaaaa

SEQ ID NO: 217742 - DNA, 25 bp, Homo sapien
gaatttgaaaactcgaggatgggca

SEQ ID NO: 217743 - DNA, 25 bp, Homo sapien
tatacattatggaaggcccagagga

SEQ ID NO: 217744 - DNA, 25 bp, Homo sapien
aaaatcgcaagagaggttcaacagc

SEQ ID NO: 217745 - DNA, 25 bp, Homo sapien
tcattacaggcaaaggagctccata

SEQ ID NO: 217746 - DNA, 25 bp, Homo sapien
ctatcggtggtgacttgggaatttc

SEQ ID NO: 217747 - DNA, 25 bp, Homo sapien
atgacctagggcaaagctatcggtg

SEQ ID NO: 217748 - DNA, 25 bp, Homo sapien
acccctctgacaatctgctgaccac

SEQ ID NO: 217749 - DNA, 25 bp, Homo sapien
tagggcaaagctatcggtggtgact

SEQ ID NO: 217750 - DNA, 25 bp, Homo sapien
catgggctaccaacaagggagtgca

SEQ ID NO: 217751 - DNA, 25 bp, Homo sapien
ttgcagacacagcagaggttcttcc

SEQ ID NO: 217752 - DNA, 25 bp, Homo sapien
tgcagcctaccaaagtccccttagg

SEQ ID NO: 217753 - DNA, 25 bp, Homo sapien
tggagatctaaccaccagcatgggc

SEQ ID NO: 217754 - DNA, 25 bp, Homo sapien
aactgagagtacacctgagagatac

SEQ ID NO: 217755 - DNA, 25 bp, Homo sapien
gaagagactgaagcctatttttgcc

SEQ ID NO: 217756 - DNA, 25 bp, Homo sapien
gattgcaccaactctctagtaatgg

SEQ ID NO: 217757 - DNA, 25 bp, Homo sapien
tcttgctagagaggtcaagaaccag

SEQ ID NO: 217758 - DNA, 25 bp, Homo sapien
tttataagcagcatcagaattgact

SEQ ID NO: 217759 - DNA, 25 bp, Homo sapien
ccatgcctatacaacatagtactga

SEQ ID NO: 217760 - DNA, 25 bp, Homo sapien
ttctccccatgcctatacaacatag

SEQ ID NO: 217761 - DNA, 25 bp, Homo sapien
aattgactaatacatccattctccc

SEQ ID NO: 217762 - DNA, 25 bp, Homo sapien
cagtggatactaacaagcagatggc

SEQ ID NO: 217763 - DNA, 25 bp, Homo sapien
acaagcagatggcaatatccgacat

SEQ ID NO: 217764 - DNA, 25 bp, Homo sapien
gaaactcaagatcaacagtggatac

SEQ ID NO: 217765 - DNA, 25 bp, Homo sapien
gatcaacagtggatactaacaagca

SEQ ID NO: 217766 - DNA, 25 bp, Homo sapien
gggatatgggctatgctttctctga

SEQ ID NO: 217767 - DNA, 25 bp, Homo sapien
ggtgactggccggaaatctttggca

SEQ ID NO: 217768 - DNA, 25 bp, Homo sapien
ttctggtgactggccggaaatcttt

SEQ ID NO: 217769 - DNA, 25 bp, Homo sapien
aaagtgtcagcagggatatgggcta

SEQ ID NO: 217770 - DNA, 25 bp, Homo sapien
tattcacacgattagaatattcctg

SEQ ID NO: 217771 - DNA, 25 bp, Homo sapien
tcatatcagataagaggcccactct

SEQ ID NO: 217772 - DNA, 25 bp, Homo sapien
tcagcccataatatacaccaaaaag

SEQ ID NO: 217773 - DNA, 25 bp, Homo sapien
ttgaagaagatgacacaattcagcc

SEQ ID NO: 217774 - DNA, 25 bp, Homo sapien
tatttagggatgcatggttacagac

SEQ ID NO: 217775 - DNA, 25 bp, Homo sapien
gaccctgtcagttgaaaaggcctag

SEQ ID NO: 217776 - DNA, 25 bp, Homo sapien
aagaaatagaagtgcctggctccag

SEQ ID NO: 217777 - DNA, 25 bp, Homo sapien
caagacttatcaatggaggctagcc

SEQ ID NO: 217778 - DNA, 25 bp, Homo sapien
tggcttcaactacaaatatcaaggt

SEQ ID NO: 217779 - DNA, 25 bp, Homo sapien
ccagaaacggagcaaactgacagca

SEQ ID NO: 217780 - DNA, 25 bp, Homo sapien
gagaatatatcaaacagacccaaat

SEQ ID NO: 217781 - DNA, 25 bp, Homo sapien
gacagcatgtgcctccgtaagcatc

SEQ ID NO: 217782 - DNA, 25 bp, Homo sapien
tcaccagatggagccaatcaatgct

SEQ ID NO: 217783 - DNA, 25 bp, Homo sapien
gaaattcggacactaaaacagtcta

SEQ ID NO: 217784 - DNA, 25 bp, Homo sapien
tgcagacttcctaccagcaagaagg

SEQ ID NO: 217785 - DNA, 25 bp, Homo sapien
tgccatgagataccctgtgctgcct

SEQ ID NO: 217786 - DNA, 25 bp, Homo sapien
agcatgataatcagctcagggcaac

SEQ ID NO: 217787 - DNA, 25 bp, Homo sapien
gtacttcaaagctcaagagccacag

SEQ ID NO: 217788 - DNA, 25 bp, Homo sapien
gataactagcatgaggagtcttcca

SEQ ID NO: 217789 - DNA, 25 bp, Homo sapien
gagccacagtactgaggtatgataa

SEQ ID NO: 217790 - DNA, 25 bp, Homo sapien
actgtctgttgtacattctttgtgg

SEQ ID NO: 217791 - DNA, 25 bp, Homo sapien
tctggtataggttctgcctctttct

SEQ ID NO: 217792 - DNA, 25 bp, Homo sapien
ggcctttagcactcactgtctgttg

SEQ ID NO: 217793 - DNA, 25 bp, Homo sapien
tttacagtttctggtataggttctg

SEQ ID NO: 217794 - DNA, 25 bp, Homo sapien
ctggaacaggcttttctccaggctt

SEQ ID NO: 217795 - DNA, 25 bp, Homo sapien
ggaacaggcttttctccaggcttta

SEQ ID NO: 217796 - DNA, 25 bp, Homo sapien
tggaacaggcttttctccaggcttt

SEQ ID NO: 217797 - DNA, 25 bp, Homo sapien
gaacaggcttttctccaggctttag

SEQ ID NO: 217798 - DNA, 25 bp, Homo sapien
taaagcatccacacgttgtctctga

SEQ ID NO: 217799 - DNA, 25 bp, Homo sapien
ctaaaagtaaagcatccacacgttg

SEQ ID NO: 217800 - DNA, 25 bp, Homo sapien
atttgggtggaaatttttgtctgag

SEQ ID NO: 217801 - DNA, 25 bp, Homo sapien
ctgcacaaatttgggtggaaatttt

SEQ ID NO: 217802 - DNA, 25 bp, Homo sapien
tgcctacttagtttggtgtctcata

SEQ ID NO: 217803 - DNA, 25 bp, Homo sapien
tacagaagtgttgttaactctccct

SEQ ID NO: 217804 - DNA, 25 bp, Homo sapien
cagttttggtatataagcacgcaca

SEQ ID NO: 217805 - DNA, 25 bp, Homo sapien
caaaacctactagcaacaaatggaa

SEQ ID NO: 217806 - DNA, 25 bp, Homo sapien
tcctatgtgaaagctattattacca

SEQ ID NO: 217807 - DNA, 25 bp, Homo sapien
gtgaaacacacttagaaaagatcaa

SEQ ID NO: 217808 - DNA, 25 bp, Homo sapien
cagaggatcaaaaagtgttttagga

SEQ ID NO: 217809 - DNA, 25 bp, Homo sapien
cagagtgaacttgcatctgttccta

SEQ ID NO: 217810 - DNA, 25 bp, Homo sapien
ctcttcatgatctttgaagtgccac

SEQ ID NO: 217811 - DNA, 25 bp, Homo sapien
ttggaaggatgatatcgacagtatg

SEQ ID NO: 217812 - DNA, 25 bp, Homo sapien
tcttcatgatctttgaagtgccacc

SEQ ID NO: 217813 - DNA, 25 bp, Homo sapien
gaaggatgatatcgacagtatgaca

SEQ ID NO: 217814 - DNA, 25 bp, Homo sapien
actgaataccatgcactgcagtaag

SEQ ID NO: 217815 - DNA, 25 bp, Homo sapien
gactgaataccatgcactgcagtaa

SEQ ID NO: 217816 - DNA, 25 bp, Homo sapien
tgattactggaagcaaggtagctaa

SEQ ID NO: 217817 - DNA, 25 bp, Homo sapien
tggctcacagtaaccaaagttcaag

SEQ ID NO: 217818 - DNA, 25 bp, Homo sapien
caacttacacaaggcagaggagctc

SEQ ID NO: 217819 - DNA, 25 bp, Homo sapien
aatatactttgagcaccgacttggc

SEQ ID NO: 217820 - DNA, 25 bp, Homo sapien
gatatagtaatcagctagtgggata

SEQ ID NO: 217821 - DNA, 25 bp, Homo sapien
tctagagtttataactgatcccaag

SEQ ID NO: 217822 - DNA, 25 bp, Homo sapien
gtctggtgcctgatagatcactcca

SEQ ID NO: 217823 - DNA, 25 bp, Homo sapien
cactccagcaatgatatagtaatca

SEQ ID NO: 217824 - DNA, 25 bp, Homo sapien
ctgctggaagacagccaggacttca

SEQ ID NO: 217825 - DNA, 25 bp, Homo sapien
tggaagacagccaggacttcaatct

SEQ ID NO: 217826 - DNA, 25 bp, Homo sapien
gctggaagacagccaggacttcaat

SEQ ID NO: 217827 - DNA, 25 bp, Homo sapien
gaagacagccaggacttcaatcttg

SEQ ID NO: 217828 - DNA, 25 bp, Homo sapien
catgcaaaaggatgtactcgattcc

SEQ ID NO: 217829 - DNA, 25 bp, Homo sapien
gaatgggctcttgagcatgcaaaag

SEQ ID NO: 217830 - DNA, 25 bp, Homo sapien
gggactgccgctgttgcttccgaat

SEQ ID NO: 217831 - DNA, 25 bp, Homo sapien
tgttgcttccgaatgatgaaaagaa

SEQ ID NO: 217832 - DNA, 25 bp, Homo sapien
ttcaagtgttctaatgttagcctct

SEQ ID NO: 217833 - DNA, 25 bp, Homo sapien
caagtgttctaatgttagcctctgc

SEQ ID NO: 217834 - DNA, 25 bp, Homo sapien
aagtgttctaatgttagcctctgca

SEQ ID NO: 217835 - DNA, 25 bp, Homo sapien
agtgttctaatgttagcctctgcat

SEQ ID NO: 217836 - DNA, 25 bp, Homo sapien
caaaatagggatccaagagctgtca

SEQ ID NO: 217837 - DNA, 25 bp, Homo sapien
gacactaccactgttcaaaataggg

SEQ ID NO: 217838 - DNA, 25 bp, Homo sapien
ctgttcaaaatagggatccaagagc

SEQ ID NO: 217839 - DNA, 25 bp, Homo sapien
aaagtaatccaggacactaccactg

SEQ ID NO: 217840 - DNA, 25 bp, Homo sapien
ctatgggaaagaaaacaaaatgata

SEQ ID NO: 217841 - DNA, 25 bp, Homo sapien
tatgggaaagaaaacaaaatgataa

SEQ ID NO: 217842 - DNA, 25 bp, Homo sapien
ggtgacaggcagttttgagccaagt

SEQ ID NO: 217843 - DNA, 25 bp, Homo sapien
tcagacctaattcaaggtgacaggc

SEQ ID NO: 217844 - DNA, 25 bp, Homo sapien
tgactgtactgaacaccactaggtg

SEQ ID NO: 217845 - DNA, 25 bp, Homo sapien
cagccacacggtttcatatttagcg

SEQ ID NO: 217846 - DNA, 25 bp, Homo sapien
aattccgagagcgtttacaggttct

SEQ ID NO: 217847 - DNA, 25 bp, Homo sapien
attccgagagcgtttacaggttctc

SEQ ID NO: 217848 - DNA, 25 bp, Homo sapien
ttccgagagcgtttacaggttctct

SEQ ID NO: 217849 - DNA, 25 bp, Homo sapien
tcttctcaagatataagccctgggt

SEQ ID NO: 217850 - DNA, 25 bp, Homo sapien
acttacaagggtcacggccacatgg

SEQ ID NO: 217851 - DNA, 25 bp, Homo sapien
tccaagaggagcaaatacacggtgc

SEQ ID NO: 217852 - DNA, 25 bp, Homo sapien
tatgcattcagctctcagttgtggg

SEQ ID NO: 217853 - DNA, 25 bp, Homo sapien
gggtgactttgactggaacacctaa

SEQ ID NO: 217854 - DNA, 25 bp, Homo sapien
tatggaagtcagtgggacttcatag

SEQ ID NO: 217855 - DNA, 25 bp, Homo sapien
tgacatttgtgccaggtcttttggc

SEQ ID NO: 217856 - DNA, 25 bp, Homo sapien
ttgtatatggaagtcagtgggactt

SEQ ID NO: 217857 - DNA, 25 bp, Homo sapien
tgtatcttcgcctgtagactgggag

SEQ ID NO: 217858 - DNA, 25 bp, Homo sapien
tggtccagcgactctaccggtgggt

SEQ ID NO: 217859 - DNA, 25 bp, Homo sapien
tagccttagcagatccccagtagac

SEQ ID NO: 217860 - DNA, 25 bp, Homo sapien
tgtaaatggaaactagaccggacgc

SEQ ID NO: 217861 - DNA, 25 bp, Homo sapien
actaatggtggagatgtttactccc

SEQ ID NO: 217862 - DNA, 25 bp, Homo sapien
cttgggaagacccacatcagaacat

SEQ ID NO: 217863 - DNA, 25 bp, Homo sapien
ttactcccttcagggaaggtctcac

SEQ ID NO: 217864 - DNA, 25 bp, Homo sapien
tctgctcatgatgactaatggtgga

SEQ ID NO: 217865 - DNA, 25 bp, Homo sapien
tccaaaatgacaataaagatctccc

SEQ ID NO: 217866 - DNA, 25 bp, Homo sapien
gaaacacttctcgacaatcaggaaa

SEQ ID NO: 217867 - DNA, 25 bp, Homo sapien
gaacggctctaccttgcaaatgtgg

SEQ ID NO: 217868 - DNA, 25 bp, Homo sapien
atattgcagaaattccctgctgctg

SEQ ID NO: 217869 - DNA, 25 bp, Homo sapien
tgaagtcccagatcttctacgtgga

SEQ ID NO: 217870 - DNA, 25 bp, Homo sapien
ttctacgtggaccagaagggtctct

SEQ ID NO: 217871 - DNA, 25 bp, Homo sapien
tgtttttcctgcttatccgcctcca

SEQ ID NO: 217872 - DNA, 25 bp, Homo sapien
tccactcttgcctcacaatgaagtc

SEQ ID NO: 217873 - DNA, 25 bp, Homo sapien
gcaattggccgtttgtccagtggca

SEQ ID NO: 217874 - DNA, 25 bp, Homo sapien
tggcaagtgtaccatcccacaggca

SEQ ID NO: 217875 - DNA, 25 bp, Homo sapien
gaaatccagggacgagacaaacaga

SEQ ID NO: 217876 - DNA, 25 bp, Homo sapien
tcaatcagagctacttacagccagg

SEQ ID NO: 217877 - DNA, 25 bp, Homo sapien
tatagcgactacaaatatcactgcc

SEQ ID NO: 217878 - DNA, 25 bp, Homo sapien
tcctccaaggaatgtgcttagcttt

SEQ ID NO: 217879 - DNA, 25 bp, Homo sapien
tattgattaggttcccaagcctgtc

SEQ ID NO: 217880 - DNA, 25 bp, Homo sapien
cagcgccatctggtggtgtttcaaa

SEQ ID NO: 217881 - DNA, 25 bp, Homo sapien
aatattgcttcctcgagttatacag

SEQ ID NO: 217882 - DNA, 25 bp, Homo sapien
cagaccagcttagcaagatcccgtc

SEQ ID NO: 217883 - DNA, 25 bp, Homo sapien
ccttttaagatcattgtgggtattc

SEQ ID NO: 217884 - DNA, 25 bp, Homo sapien
tcacattgactgatactgttaccaa

SEQ ID NO: 217885 - DNA, 25 bp, Homo sapien
gcagtcttcttaagacacctaggta

SEQ ID NO: 217886 - DNA, 25 bp, Homo sapien
tcttcttaagacacctaggtagata

SEQ ID NO: 217887 - DNA, 25 bp, Homo sapien
acctaggtagatagccagaaagtca

SEQ ID NO: 217888 - DNA, 25 bp, Homo sapien
taagacacctaggtagatagccaga

SEQ ID NO: 217889 - DNA, 25 bp, Homo sapien
gggcaatctcaaaacctcggtggac

SEQ ID NO: 217890 - DNA, 25 bp, Homo sapien
tatatgaatcactaggacagcaccg

SEQ ID NO: 217891 - DNA, 25 bp, Homo sapien
tatttaaatgcgagcaccgccagag

SEQ ID NO: 217892 - DNA, 25 bp, Homo sapien
cgagggttcaagtccagtcacaggc

SEQ ID NO: 217893 - DNA, 25 bp, Homo sapien
tgaaggatctcaggaacaggcagca

SEQ ID NO: 217894 - DNA, 25 bp, Homo sapien
gcttgtgactactctgacctctggg

SEQ ID NO: 217895 - DNA, 25 bp, Homo sapien
gtgagcgcagggcaaggaacaccac

SEQ ID NO: 217896 - DNA, 25 bp, Homo sapien
caggctttgtctgggttggtgtcca

SEQ ID NO: 217897 - DNA, 25 bp, Homo sapien
taagaatcaggaaggaccagtccca

SEQ ID NO: 217898 - DNA, 25 bp, Homo sapien
gaaagtagatagcatcgtccccagt

SEQ ID NO: 217899 - DNA, 25 bp, Homo sapien
ggctaaccataagtcccgggctgag

SEQ ID NO: 217900 - DNA, 25 bp, Homo sapien
tacgctgatccgacagaagagatgc

SEQ ID NO: 217901 - DNA, 25 bp, Homo sapien
ttattgtacatcagcggctccctgg

SEQ ID NO: 217902 - DNA, 25 bp, Homo sapien
gcagtgccaggtctatcaagcccta

SEQ ID NO: 217903 - DNA, 25 bp, Homo sapien
caagtagctagatgggtaccctcaa

SEQ ID NO: 217904 - DNA, 25 bp, Homo sapien
gaacctgagcgaatagaaagccact

SEQ ID NO: 217905 - DNA, 25 bp, Homo sapien
tccaaggtagagtcctgctgagtgt

SEQ ID NO: 217906 - DNA, 25 bp, Homo sapien
tgtgtgtgttcagttccgctctgca

SEQ ID NO: 217907 - DNA, 25 bp, Homo sapien
cggccgaggcagaaactccagagtc

SEQ ID NO: 217908 - DNA, 25 bp, Homo sapien
gaactcctgctggatctcataaggg

SEQ ID NO: 217909 - DNA, 25 bp, Homo sapien
tctctggcttaagggccccatcaga

SEQ ID NO: 217910 - DNA, 25 bp, Homo sapien
ccatcagaaggagtccgccggtgac

SEQ ID NO: 217911 - DNA, 25 bp, Homo sapien
tcaacccattgctggaggggctcct

SEQ ID NO: 217912 - DNA, 25 bp, Homo sapien
gactggggctcaacccattgctgga

SEQ ID NO: 217913 - DNA, 25 bp, Homo sapien
aagtcaaaccctaggcctgtggctg

SEQ ID NO: 217914 - DNA, 25 bp, Homo sapien
gggtctcctagcaacagcatgggct

SEQ ID NO: 217915 - DNA, 25 bp, Homo sapien
gaagcgctctactcggacattgacc

SEQ ID NO: 217916 - DNA, 25 bp, Homo sapien
caatttcatcgctgtcggagcgcag

SEQ ID NO: 217917 - DNA, 25 bp, Homo sapien
aatgctgtaggcgactctctccact

SEQ ID NO: 217918 - DNA, 25 bp, Homo sapien
ctggctgggtgaatgctgtaggcga

SEQ ID NO: 217919 - DNA, 25 bp, Homo sapien
ctccacgagggaatgggatacagag

SEQ ID NO: 217920 - DNA, 25 bp, Homo sapien
tgggatacagaggtaggactggctg

SEQ ID NO: 217921 - DNA, 25 bp, Homo sapien
tcaatgtcgatgggcaccacccaac

SEQ ID NO: 217922 - DNA, 25 bp, Homo sapien
atgtcgatgggcaccacccaactgg

SEQ ID NO: 217923 - DNA, 25 bp, Homo sapien
aatgtcgatgggcaccacccaactg

SEQ ID NO: 217924 - DNA, 25 bp, Homo sapien
cttcaatgtcgatgggcaccaccca

SEQ ID NO: 217925 - DNA, 25 bp, Homo sapien
gggcactggacgaccactgcttata

SEQ ID NO: 217926 - DNA, 25 bp, Homo sapien
gcagggccgggctactccttgggcc

SEQ ID NO: 217927 - DNA, 25 bp, Homo sapien
ccatctccataaggctggtgaaccc

SEQ ID NO: 217928 - DNA, 25 bp, Homo sapien
ctgcttatatccatctaccagggac

SEQ ID NO: 217929 - DNA, 25 bp, Homo sapien
caagtggaaatgtggagattctgat

SEQ ID NO: 217930 - DNA, 25 bp, Homo sapien
tgatggggtacttaaaccattagct

SEQ ID NO: 217931 - DNA, 25 bp, Homo sapien
gattctgatggggtacttaaaccat

SEQ ID NO: 217932 - DNA, 25 bp, Homo sapien
ggtacttaaaccattagctttctca

SEQ ID NO: 217933 - DNA, 25 bp, Homo sapien
aaagagaatcagtagcaggcaatgg

SEQ ID NO: 217934 - DNA, 25 bp, Homo sapien
tggattcacaccacatcgccagctg

SEQ ID NO: 217935 - DNA, 25 bp, Homo sapien
gtagcaggcaatggagggcacatcc

SEQ ID NO: 217936 - DNA, 25 bp, Homo sapien
catgaaagaatcttaacaagatggt

SEQ ID NO: 217937 - DNA, 25 bp, Homo sapien
gacaggtatgcatgttttggacaaa

SEQ ID NO: 217938 - DNA, 25 bp, Homo sapien
gactgtgaatccatagatacccaag

SEQ ID NO: 217939 - DNA, 25 bp, Homo sapien
tgtttaagccaagacaggcccagga

SEQ ID NO: 217940 - DNA, 25 bp, Homo sapien
gatacccaagcagtctatagacagg

SEQ ID NO: 217941 - DNA, 25 bp, Homo sapien
taccttcggctcagatctgacatgg

SEQ ID NO: 217942 - DNA, 25 bp, Homo sapien
tatttttaccttcggctcagatctg

SEQ ID NO: 217943 - DNA, 25 bp, Homo sapien
ttcggctcagatctgacatgggaaa

SEQ ID NO: 217944 - DNA, 25 bp, Homo sapien
tgacatgggaaaatcatagattttg

SEQ ID NO: 217945 - DNA, 25 bp, Homo sapien
taagcctaatattcaacctgagaag

SEQ ID NO: 217946 - DNA, 25 bp, Homo sapien
tttacatacgctcactatgggccag

SEQ ID NO: 217947 - DNA, 25 bp, Homo sapien
catgagaagcaggaagtgtcatcac

SEQ ID NO: 217948 - DNA, 25 bp, Homo sapien
tatgaagtataaacggttccgtcca

SEQ ID NO: 217949 - DNA, 25 bp, Homo sapien
tgacagggccataggaatcacaagg

SEQ ID NO: 217950 - DNA, 25 bp, Homo sapien
tgtgttccaacagtggcgctcaaga

SEQ ID NO: 217951 - DNA, 25 bp, Homo sapien
gaaaatagttctagcggccctggag

SEQ ID NO: 217952 - DNA, 25 bp, Homo sapien
tatacaactgtactaccagggctgg

SEQ ID NO: 217953 - DNA, 25 bp, Homo sapien
ccttcatctcccgaggcaagctcct

SEQ ID NO: 217954 - DNA, 25 bp, Homo sapien
gggacgactgagctcctgccccagg

SEQ ID NO: 217955 - DNA, 25 bp, Homo sapien
tcctttgggacgactgagctcctgc

SEQ ID NO: 217956 - DNA, 25 bp, Homo sapien
ttcctcctttgggacgactgagctc

SEQ ID NO: 217957 - DNA, 25 bp, Homo sapien
cagctaatttgggaaacagtctcac

SEQ ID NO: 217958 - DNA, 25 bp, Homo sapien
atacacattgtcgaggagaggtggc

SEQ ID NO: 217959 - DNA, 25 bp, Homo sapien
aagttatggatggagcaagcctgga

SEQ ID NO: 217960 - DNA, 25 bp, Homo sapien
agcaagcctggaccagtcggtggct

SEQ ID NO: 217961 - DNA, 25 bp, Homo sapien
actggatggctcgaaggcgaggaat

SEQ ID NO: 217962 - DNA, 25 bp, Homo sapien
gcggctgttgataagactcttcctt

SEQ ID NO: 217963 - DNA, 25 bp, Homo sapien
tttatccatggtaggggaggcctgc

SEQ ID NO: 217964 - DNA, 25 bp, Homo sapien
ttgcaggaggactggagcggctgtt

SEQ ID NO: 217965 - DNA, 25 bp, Homo sapien
aggatgtcaatctcccgctcggcca

SEQ ID NO: 217966 - DNA, 25 bp, Homo sapien
gatgatgatgttgagctcccgttcc

SEQ ID NO: 217967 - DNA, 25 bp, Homo sapien
tgccatccttgagcttcagccggct

SEQ ID NO: 217968 - DNA, 25 bp, Homo sapien
gctcttcctgaacttgcccttgcgt

SEQ ID NO: 217969 - DNA, 25 bp, Homo sapien
atgagttcacaagtgagcccagcac

SEQ ID NO: 217970 - DNA, 25 bp, Homo sapien
ctcccctttatccttacgcatgagt

SEQ ID NO: 217971 - DNA, 25 bp, Homo sapien
ttatccttacgcatgagttcacaag

SEQ ID NO: 217972 - DNA, 25 bp, Homo sapien
tgagttcacaagtgagcccagcact

SEQ ID NO: 217973 - DNA, 25 bp, Homo sapien
gggtggaacctggagagagccatgt

SEQ ID NO: 217974 - DNA, 25 bp, Homo sapien
ggggtggaacctggagagagccatg

SEQ ID NO: 217975 - DNA, 25 bp, Homo sapien
ctgggccttggattaaagtggggtg

SEQ ID NO: 217976 - DNA, 25 bp, Homo sapien
cacttctgtggtcgaaacctaactt

SEQ ID NO: 217977 - DNA, 25 bp, Homo sapien
gctacacttctgtggtcgaaaccta

SEQ ID NO: 217978 - DNA, 25 bp, Homo sapien
tgaaatactcactataagtaaccat

SEQ ID NO: 217979 - DNA, 25 bp, Homo sapien
acctaacttcttaatgaaatactca

SEQ ID NO: 217980 - DNA, 25 bp, Homo sapien
tcaaattaattgttgtgcgccctcc

SEQ ID NO: 217981 - DNA, 25 bp, Homo sapien
ttcctgagagttgaacttgaactac

SEQ ID NO: 217982 - DNA, 25 bp, Homo sapien
tatgggaacatagatttatcacaag

SEQ ID NO: 217983 - DNA, 25 bp, Homo sapien
aattaattgttgtgcgccctccaaa

SEQ ID NO: 217984 - DNA, 25 bp, Homo sapien
gacatgttgaatctcctacttttgc

SEQ ID NO: 217985 - DNA, 25 bp, Homo sapien
ctggaggacccttagacatgttgaa

SEQ ID NO: 217986 - DNA, 25 bp, Homo sapien
gacccttagacatgttgaatctcct

SEQ ID NO: 217987 - DNA, 25 bp, Homo sapien
gttgaatctcctacttttgcaacac

SEQ ID NO: 217988 - DNA, 25 bp, Homo sapien
tactgatggcaggagccataggact

SEQ ID NO: 217989 - DNA, 25 bp, Homo sapien
catactgatggcaggagccatagga

SEQ ID NO: 217990 - DNA, 25 bp, Homo sapien
actgatggcaggagccataggactc

SEQ ID NO: 217991 - DNA, 25 bp, Homo sapien
ctacatactgatggcaggagccata

SEQ ID NO: 217992 - DNA, 25 bp, Homo sapien
ttttctttggccctgagttggtcaa

SEQ ID NO: 217993 - DNA, 25 bp, Homo sapien
ttctttggccctgagttggtcaaac

SEQ ID NO: 217994 - DNA, 25 bp, Homo sapien
tttctttggccctgagttggtcaaa

SEQ ID NO: 217995 - DNA, 25 bp, Homo sapien
cttttctttggccctgagttggtca

SEQ ID NO: 217996 - DNA, 25 bp, Homo sapien
tagctggtccaggatattcgtgaaa

SEQ ID NO: 217997 - DNA, 25 bp, Homo sapien
aaccagactcctctatggtggttag

SEQ ID NO: 217998 - DNA, 25 bp, Homo sapien
tattcgtgaaagatggtcgtgagtg

SEQ ID NO: 217999 - DNA, 25 bp, Homo sapien
cctctatggtggttagctggtccag

SEQ ID NO: 218000 - DNA, 25 bp, Homo sapien
tgtccaccattacaaccataaagag

SEQ ID NO: 218001 - DNA, 25 bp, Homo sapien
taacctcaaataaggctcaggaagt

SEQ ID NO: 218002 - DNA, 25 bp, Homo sapien
tcagaaagcatgaatggacagaagc

SEQ ID NO: 218003 - DNA, 25 bp, Homo sapien
gacttaggctattacatggcctcac

SEQ ID NO: 218004 - DNA, 25 bp, Homo sapien
ggccactccataagcgactgctaag

SEQ ID NO: 218005 - DNA, 25 bp, Homo sapien
caccagtcagcaactcccaaagtag

SEQ ID NO: 218006 - DNA, 25 bp, Homo sapien
cttccatgagtttggcaaaaggttc

SEQ ID NO: 218007 - DNA, 25 bp, Homo sapien
taagccatcaatgcctcgaaagggc

SEQ ID NO: 218008 - DNA, 25 bp, Homo sapien
tcatcaagaattgcactattacact

SEQ ID NO: 218009 - DNA, 25 bp, Homo sapien
gctgccctgggtcctctagaggaaa

SEQ ID NO: 218010 - DNA, 25 bp, Homo sapien
gagtgagcgcatggtcagacagtcc

SEQ ID NO: 218011 - DNA, 25 bp, Homo sapien
aacccaaacatcatcaagaattgca

SEQ ID NO: 218012 - DNA, 25 bp, Homo sapien
catgtgacttatccaggtagtggtc

SEQ ID NO: 218013 - DNA, 25 bp, Homo sapien
tagtggtcatgctggggagcttcta

SEQ ID NO: 218014 - DNA, 25 bp, Homo sapien
taccaagtgacctccaggaactctc

SEQ ID NO: 218015 - DNA, 25 bp, Homo sapien
gcattgccaaccagattcctaggtc

SEQ ID NO: 218016 - DNA, 25 bp, Homo sapien
tcttggaataaatgcccacctccat

SEQ ID NO: 218017 - DNA, 25 bp, Homo sapien
cttggaataaatgcccacctccatc

SEQ ID NO: 218018 - DNA, 25 bp, Homo sapien
ttgctcttggaataaatgcccacct

SEQ ID NO: 218019 - DNA, 25 bp, Homo sapien
tgcttgctcttggaataaatgccca

SEQ ID NO: 218020 - DNA, 25 bp, Homo sapien
cacactaagctctcagtgtcctgtg

SEQ ID NO: 218021 - DNA, 25 bp, Homo sapien
gaaggtgtctcagaccgcctggaag

SEQ ID NO: 218022 - DNA, 25 bp, Homo sapien
tacctggaaagatcatagagtgttt

SEQ ID NO: 218023 - DNA, 25 bp, Homo sapien
gtatctgggccctaactacctggaa

SEQ ID NO: 218024 - DNA, 25 bp, Homo sapien
tggcttgtttctttgtttgtctgca

SEQ ID NO: 218025 - DNA, 25 bp, Homo sapien
ggcttgtttctttgtttgtctgcat

SEQ ID NO: 218026 - DNA, 25 bp, Homo sapien
ctggcttgtttctttgtttgtctgc

SEQ ID NO: 218027 - DNA, 25 bp, Homo sapien
cttccttcaagcctgcttttaggat

SEQ ID NO: 218028 - DNA, 25 bp, Homo sapien
gctcttccttcaagcctgcttttag

SEQ ID NO: 218029 - DNA, 25 bp, Homo sapien
ccttcaagcctgcttttaggatcat

SEQ ID NO: 218030 - DNA, 25 bp, Homo sapien
gaggctcttccttcaagcctgcttt

SEQ ID NO: 218031 - DNA, 25 bp, Homo sapien
tggaaaacatggaggcccggatgac

SEQ ID NO: 218032 - DNA, 25 bp, Homo sapien
ggttcggtgccattcccgagccagg

SEQ ID NO: 218033 - DNA, 25 bp, Homo sapien
gatgacttcgggtgccatccaagca

SEQ ID NO: 218034 - DNA, 25 bp, Homo sapien
tccctgccgcactcatcttggtggt

SEQ ID NO: 218035 - DNA, 25 bp, Homo sapien
gaaggcatatacgtactcctgcttg

SEQ ID NO: 218036 - DNA, 25 bp, Homo sapien
caaaatccatcctgggagggtgtaa

SEQ ID NO: 218037 - DNA, 25 bp, Homo sapien
aggcttccggctttccatcacttgg

SEQ ID NO: 218038 - DNA, 25 bp, Homo sapien
gtctctgagctacaccaaggcagaa

SEQ ID NO: 218039 - DNA, 25 bp, Homo sapien
gttactagaaaaggtcgacagtcac

SEQ ID NO: 218040 - DNA, 25 bp, Homo sapien
ccaaccactgtggttactagaaaag

SEQ ID NO: 218041 - DNA, 25 bp, Homo sapien
ccactgtggttactagaaaaggtcg

SEQ ID NO: 218042 - DNA, 25 bp, Homo sapien
ctgtggttactagaaaaggtcgaca

SEQ ID NO: 218043 - DNA, 25 bp, Homo sapien
tgttagaagcccaggacagtactgt

SEQ ID NO: 218044 - DNA, 25 bp, Homo sapien
ccaaaggtttcatatgatccacagc

SEQ ID NO: 218045 - DNA, 25 bp, Homo sapien
ctgtgtccaaacaacggtaaggtgg

SEQ ID NO: 218046 - DNA, 25 bp, Homo sapien
gaagacggcatcctaaagtaaattc

SEQ ID NO: 218047 - DNA, 25 bp, Homo sapien
aaccaactttgtgcaggagatggcc

SEQ ID NO: 218048 - DNA, 25 bp, Homo sapien
tctctgtattcataggaaacgctac

SEQ ID NO: 218049 - DNA, 25 bp, Homo sapien
gcaagtcagatctccggcctcaatg

SEQ ID NO: 218050 - DNA, 25 bp, Homo sapien
tgctgagtcctgttcacccggctgg

SEQ ID NO: 218051 - DNA, 25 bp, Homo sapien
aaagtaatgagaataccttcacttt

SEQ ID NO: 218052 - DNA, 25 bp, Homo sapien
gaaggaaagagttatttaatatgaa

SEQ ID NO: 218053 - DNA, 25 bp, Homo sapien
agaaggaaagagttatttaatatga

SEQ ID NO: 218054 - DNA, 25 bp, Homo sapien
aggaaagagttatttaatatgaata

SEQ ID NO: 218055 - DNA, 25 bp, Homo sapien
cctcttcgccctcaagcctcagctt

SEQ ID NO: 218056 - DNA, 25 bp, Homo sapien
caatagacacttactacttacataa

SEQ ID NO: 218057 - DNA, 25 bp, Homo sapien
acaatagacacttactacttacata

SEQ ID NO: 218058 - DNA, 25 bp, Homo sapien
aagcaatcctcttcgccctcaagcc

SEQ ID NO: 218059 - DNA, 25 bp, Homo sapien
gacaggatgctccaagtgattttaa

SEQ ID NO: 218060 - DNA, 25 bp, Homo sapien
gatgcaaagagagtgaagtccctgg

SEQ ID NO: 218061 - DNA, 25 bp, Homo sapien
tgaaggatttccaggctcaaagctg

SEQ ID NO: 218062 - DNA, 25 bp, Homo sapien
acagattcaccatagtatcaacaga

SEQ ID NO: 218063 - DNA, 25 bp, Homo sapien
aggttccattagaagtccactccta

SEQ ID NO: 218064 - DNA, 25 bp, Homo sapien
ggttccattagaagtccactcctac

SEQ ID NO: 218065 - DNA, 25 bp, Homo sapien
taaggttccattagaagtccactcc

SEQ ID NO: 218066 - DNA, 25 bp, Homo sapien
ctaaggttccattagaagtccactc

SEQ ID NO: 218067 - DNA, 25 bp, Homo sapien
gacgtcgtgggatacaactgcaact

SEQ ID NO: 218068 - DNA, 25 bp, Homo sapien
tgacgtcgtgggatacaactgcaac

SEQ ID NO: 218069 - DNA, 25 bp, Homo sapien
tcatcagggtcgtggcgagctgctt

SEQ ID NO: 218070 - DNA, 25 bp, Homo sapien
tgtaagtagttcatccctctggcaa

SEQ ID NO: 218071 - DNA, 25 bp, Homo sapien
gaaagcacgatagaccttcccaaag

SEQ ID NO: 218072 - DNA, 25 bp, Homo sapien
tattcaaaggtcctccacgagcaaa

SEQ ID NO: 218073 - DNA, 25 bp, Homo sapien
ccaactcagtgccaaggcagacacc

SEQ ID NO: 218074 - DNA, 25 bp, Homo sapien
gacacccaacaaccaaaccatagga

SEQ ID NO: 218075 - DNA, 25 bp, Homo sapien
tcagctttactgtgtactcagtggt

SEQ ID NO: 218076 - DNA, 25 bp, Homo sapien
tgtactcagtggtgagaagcaccca

SEQ ID NO: 218077 - DNA, 25 bp, Homo sapien
agttaagcaaatattatgacctgac

SEQ ID NO: 218078 - DNA, 25 bp, Homo sapien
caggttcttgctatttagttaagca

SEQ ID NO: 218079 - DNA, 25 bp, Homo sapien
gacctgactccaagaaaagtataga

SEQ ID NO: 218080 - DNA, 25 bp, Homo sapien
taggaacgaaggaactagaccttca

SEQ ID NO: 218081 - DNA, 25 bp, Homo sapien
gcaacgtcacaacacatgctcagag

SEQ ID NO: 218082 - DNA, 25 bp, Homo sapien
aaagggtaactctggcgatgaagtg

SEQ ID NO: 218083 - DNA, 25 bp, Homo sapien
ctaaagctgaacagtattgcttgac

SEQ ID NO: 218084 - DNA, 25 bp, Homo sapien
taatgtcttctattcatggtccaga

SEQ ID NO: 218085 - DNA, 25 bp, Homo sapien
tcttctgctttgacattagctgtcc

SEQ ID NO: 218086 - DNA, 25 bp, Homo sapien
ctagctcttctgctttgacattagc

SEQ ID NO: 218087 - DNA, 25 bp, Homo sapien
gctcttctgctttgacattagctgt

SEQ ID NO: 218088 - DNA, 25 bp, Homo sapien
agctcttctgctttgacattagctg

SEQ ID NO: 218089 - DNA, 25 bp, Homo sapien
tagcaactggggtcctcgccgccgg

SEQ ID NO: 218090 - DNA, 25 bp, Homo sapien
tggagaaggcgctgcgcggggtcac

SEQ ID NO: 218091 - DNA, 25 bp, Homo sapien
tgcgcggggtcacgtagttgctggg

SEQ ID NO: 218092 - DNA, 25 bp, Homo sapien
actgaatgggcgggtagcaactggg

SEQ ID NO: 218093 - DNA, 25 bp, Homo sapien
agctgcccggtccaccagccctcgt

SEQ ID NO: 218094 - DNA, 25 bp, Homo sapien
gctgcccggtccaccagccctcgtc

SEQ ID NO: 218095 - DNA, 25 bp, Homo sapien
agctcgtcctcgcccgccgcctcgt

SEQ ID NO: 218096 - DNA, 25 bp, Homo sapien
tcgcccagccgcagggtcagctcgt

SEQ ID NO: 218097 - DNA, 25 bp, Homo sapien
cttggacagcacctccaccacgtcg

SEQ ID NO: 218098 - DNA, 25 bp, Homo sapien
accacgtcgcccagccgcagggtca

SEQ ID NO: 218099 - DNA, 25 bp, Homo sapien
tccagtagggcagcggcgcgtcgca

SEQ ID NO: 218100 - DNA, 25 bp, Homo sapien
ctcgaacacggccgtccagtagggc

SEQ ID NO: 218101 - DNA, 25 bp, Homo sapien
tcgaacacggccgtccagtagggca

SEQ ID NO: 218102 - DNA, 25 bp, Homo sapien
aacacggccgtccagtagggcagcg

SEQ ID NO: 218103 - DNA, 25 bp, Homo sapien
agggctccatggagcggccgatcca

SEQ ID NO: 218104 - DNA, 25 bp, Homo sapien
gagcggccgatccatagggtgcggg

SEQ ID NO: 218105 - DNA, 25 bp, Homo sapien
ggcggcgctcgctaggcagccgaga

SEQ ID NO: 218106 - DNA, 25 bp, Homo sapien
ctaggcagccgagaagcgctctgga

SEQ ID NO: 218107 - DNA, 25 bp, Homo sapien
ctattgttcatgcgcctccgcagag

SEQ ID NO: 218108 - DNA, 25 bp, Homo sapien
tattgttcatgcgcctccgcagagc

SEQ ID NO: 218109 - DNA, 25 bp, Homo sapien
gcagagctgggaggaccccccccca

SEQ ID NO: 218110 - DNA, 25 bp, Homo sapien
ttgttcatgcgcctccgcagagctg

SEQ ID NO: 218111 - DNA, 25 bp, Homo sapien
ctctccgcgccgtgccgtgccccgc

SEQ ID NO: 218112 - DNA, 25 bp, Homo sapien
tgctcgcgcagccggtgcccgccgc

SEQ ID NO: 218113 - DNA, 25 bp, Homo sapien
ccgcaccgccagctcgccgggacca

SEQ ID NO: 218114 - DNA, 25 bp, Homo sapien
gggaccacctgacgcgggcctggct

SEQ ID NO: 218115 - DNA, 25 bp, Homo sapien
tcgacccactcttcccgcccactgg

SEQ ID NO: 218116 - DNA, 25 bp, Homo sapien
ttctcaaacccaggtcgacccactc

SEQ ID NO: 218117 - DNA, 25 bp, Homo sapien
tcaaacccaggtcgacccactcttc

SEQ ID NO: 218118 - DNA, 25 bp, Homo sapien
cattctcaaacccaggtcgacccac

SEQ ID NO: 218119 - DNA, 25 bp, Homo sapien
ggaattacaccttggatcgtggcga

SEQ ID NO: 218120 - DNA, 25 bp, Homo sapien
ccgatgctgagttcacgagtgagga

SEQ ID NO: 218121 - DNA, 25 bp, Homo sapien
gaataaacgtagaacccgatgctga

SEQ ID NO: 218122 - DNA, 25 bp, Homo sapien
gaagggagccaccttttcgacaatc

SEQ ID NO: 218123 - DNA, 25 bp, Homo sapien
tttccccttcagtggtaggaataga

SEQ ID NO: 218124 - DNA, 25 bp, Homo sapien
ccccttcagtggtaggaatagacat

SEQ ID NO: 218125 - DNA, 25 bp, Homo sapien
tccccttcagtggtaggaatagaca

SEQ ID NO: 218126 - DNA, 25 bp, Homo sapien
ttccccttcagtggtaggaatagac

SEQ ID NO: 218127 - DNA, 25 bp, Homo sapien
gctgatggaacagacctgtggagtc

SEQ ID NO: 218128 - DNA, 25 bp, Homo sapien
ggttagatgaagtaagaggtcctcc

SEQ ID NO: 218129 - DNA, 25 bp, Homo sapien
tgtagcttgaaccaccaaaaaggta

SEQ ID NO: 218130 - DNA, 25 bp, Homo sapien
tggagtcagacccagacaagtcttg

SEQ ID NO: 218131 - DNA, 25 bp, Homo sapien
gttttgttgatacccaggtcaggtg

SEQ ID NO: 218132 - DNA, 25 bp, Homo sapien
cccaggtcaggtgcaattgcttgca

SEQ ID NO: 218133 - DNA, 25 bp, Homo sapien
tgatacccaggtcaggtgcaattgc

SEQ ID NO: 218134 - DNA, 25 bp, Homo sapien
tcaggtgcaattgcttgcagcttca

SEQ ID NO: 218135 - DNA, 25 bp, Homo sapien
ccaggaagggttaggtccgcagcca

SEQ ID NO: 218136 - DNA, 25 bp, Homo sapien
tccgcgcctctgcaaggcggtgagt

SEQ ID NO: 218137 - DNA, 25 bp, Homo sapien
ggtgagtcgtttcttcccggcacag

SEQ ID NO: 218138 - DNA, 25 bp, Homo sapien
tcggagctgcggtcactcgcggctt

SEQ ID NO: 218139 - DNA, 25 bp, Homo sapien
cagcgggaggggcaatagcgctggc

SEQ ID NO: 218140 - DNA, 25 bp, Homo sapien
gcagcgggaggggcaatagcgctgg

SEQ ID NO: 218141 - DNA, 25 bp, Homo sapien
tggcagcgggaggggcaatagcgct

SEQ ID NO: 218142 - DNA, 25 bp, Homo sapien
gcgggaggggcaatagcgctggcgg

SEQ ID NO: 218143 - DNA, 25 bp, Homo sapien
tctagtgcatattaataactctccc

SEQ ID NO: 218144 - DNA, 25 bp, Homo sapien
gaatgtgctgcccttaatttaagcc

SEQ ID NO: 218145 - DNA, 25 bp, Homo sapien
gccactccagttgctccaacaggga

SEQ ID NO: 218146 - DNA, 25 bp, Homo sapien
tcagggagcgcgctttgcacgcttc

SEQ ID NO: 218147 - DNA, 25 bp, Homo sapien
caaagcctctagtccggatgggggt

SEQ ID NO: 218148 - DNA, 25 bp, Homo sapien
ctaacagtcgaggaagcttatcttc

SEQ ID NO: 218149 - DNA, 25 bp, Homo sapien
ggttctcagtagtcccaaagcctct

SEQ ID NO: 218150 - DNA, 25 bp, Homo sapien
gccgcagatgcggaatccactaaca

SEQ ID NO: 218151 - DNA, 25 bp, Homo sapien
ggtaacagccgctaaaccccactca

SEQ ID NO: 218152 - DNA, 25 bp, Homo sapien
tttctgagaagttctagagccttgg

SEQ ID NO: 218153 - DNA, 25 bp, Homo sapien
cctcctctggtaacagccgctaaac

SEQ ID NO: 218154 - DNA, 25 bp, Homo sapien
gagaagttctagagccttggacacc

SEQ ID NO: 218155 - DNA, 25 bp, Homo sapien
agggcagccttatctgtgccaccac

SEQ ID NO: 218156 - DNA, 25 bp, Homo sapien
tgcttcagttcccactcgatcatgt

SEQ ID NO: 218157 - DNA, 25 bp, Homo sapien
cactcgatcatgtgtgttggtctca

SEQ ID NO: 218158 - DNA, 25 bp, Homo sapien
tctcagaaccacttagggcagcctt

SEQ ID NO: 218159 - DNA, 25 bp, Homo sapien
gtcacaggtgctatctctggaactt

SEQ ID NO: 218160 - DNA, 25 bp, Homo sapien
tcacaggtgctatctctggaacttc

SEQ ID NO: 218161 - DNA, 25 bp, Homo sapien
tcagagactcgagcaacaaatggct

SEQ ID NO: 218162 - DNA, 25 bp, Homo sapien
caaaaactagccgtgcaagtgacag

SEQ ID NO: 218163 - DNA, 25 bp, Homo sapien
tactggactagactcagggctgccc

SEQ ID NO: 218164 - DNA, 25 bp, Homo sapien
aacagggccgctccattcaaatgca

SEQ ID NO: 218165 - DNA, 25 bp, Homo sapien
gctgagagactctgcttgattcact

SEQ ID NO: 218166 - DNA, 25 bp, Homo sapien
attcactgctactgcctgttccaaa

SEQ ID NO: 218167 - DNA, 25 bp, Homo sapien
ctttgttttagttgtgggctgagag

SEQ ID NO: 218168 - DNA, 25 bp, Homo sapien
actgctactgcctgttccaaactgc

SEQ ID NO: 218169 - DNA, 25 bp, Homo sapien
tacccaacactgagggagtttttca

SEQ ID NO: 218170 - DNA, 25 bp, Homo sapien
taaagatcaatccttattagttcat

SEQ ID NO: 218171 - DNA, 25 bp, Homo sapien
tgtataaagcaccataacttagatt

SEQ ID NO: 218172 - DNA, 25 bp, Homo sapien
tctattggctgcttggaattctatc

SEQ ID NO: 218173 - DNA, 25 bp, Homo sapien
ggttggcctccgattccacggatgt

SEQ ID NO: 218174 - DNA, 25 bp, Homo sapien
cagatactgcattctggctgaacgt

SEQ ID NO: 218175 - DNA, 25 bp, Homo sapien
tgaacgtttatcacgccagctgggt

SEQ ID NO: 218176 - DNA, 25 bp, Homo sapien
cacggatgtatctggttctagtttc

SEQ ID NO: 218177 - DNA, 25 bp, Homo sapien
taaattctcccagtctggacgtggc

SEQ ID NO: 218178 - DNA, 25 bp, Homo sapien
tattcagtgagatcagacacgcctt

SEQ ID NO: 218179 - DNA, 25 bp, Homo sapien
attttttctcacacacgggccaaca

SEQ ID NO: 218180 - DNA, 25 bp, Homo sapien
tcttccaggccttcagtatctcagg

SEQ ID NO: 218181 - DNA, 25 bp, Homo sapien
tcgccgtgaacgcagcacatttagg

SEQ ID NO: 218182 - DNA, 25 bp, Homo sapien
acatttaggcgccaggcagtacggc

SEQ ID NO: 218183 - DNA, 25 bp, Homo sapien
ggaggcagtgtcatttcgccgtgaa

SEQ ID NO: 218184 - DNA, 25 bp, Homo sapien
taagttcactttacccatgagggtg

SEQ ID NO: 218185 - DNA, 25 bp, Homo sapien
tcatcaggatctggtaaatgacaga

SEQ ID NO: 218186 - DNA, 25 bp, Homo sapien
tcaagctctgtattgtggtaaacaa

SEQ ID NO: 218187 - DNA, 25 bp, Homo sapien
ttatattgcctaaaacttggtgcct

SEQ ID NO: 218188 - DNA, 25 bp, Homo sapien
tccagtagtcctaagtaagaaagca

SEQ ID NO: 218189 - DNA, 25 bp, Homo sapien
tactcccctgagatttaagacttgc

SEQ ID NO: 218190 - DNA, 25 bp, Homo sapien
tgccccaaaaatggatatacatact

SEQ ID NO: 218191 - DNA, 25 bp, Homo sapien
taactgctgttaagtgcatggtagg

SEQ ID NO: 218192 - DNA, 25 bp, Homo sapien
catggtaggttggaacagataaacc

SEQ ID NO: 218193 - DNA, 25 bp, Homo sapien
gagatgttctgtaaactcttagtca

SEQ ID NO: 218194 - DNA, 25 bp, Homo sapien
taaaaagcccttattgcacactctg

SEQ ID NO: 218195 - DNA, 25 bp, Homo sapien
cattgtaggcatgggaaaatctgac

SEQ ID NO: 218196 - DNA, 25 bp, Homo sapien
tcatattagtacattatggagtcct

SEQ ID NO: 218197 - DNA, 25 bp, Homo sapien
ttagagctacagtgtctaaagtatc

SEQ ID NO: 218198 - DNA, 25 bp, Homo sapien
tgttagcaattagatctacactttt

SEQ ID NO: 218199 - DNA, 25 bp, Homo sapien
cagatttacttctgggggtaacaca

SEQ ID NO: 218200 - DNA, 25 bp, Homo sapien
tctgttattagatctaaagtatcta

SEQ ID NO: 218201 - DNA, 25 bp, Homo sapien
gacatctaaggtcattcctctaagg

SEQ ID NO: 218202 - DNA, 25 bp, Homo sapien
gacccatggacttgtaaagaaaatg

SEQ ID NO: 218203 - DNA, 25 bp, Homo sapien
tttgggtacatgaggaaagatgaca

SEQ ID NO: 218204 - DNA, 25 bp, Homo sapien
aaatgaagacccatggacttgtaaa

SEQ ID NO: 218205 - DNA, 25 bp, Homo sapien
gcaccaacagcataatgcacctgaa

SEQ ID NO: 218206 - DNA, 25 bp, Homo sapien
aagaatgccccaacttcaacaacct

SEQ ID NO: 218207 - DNA, 25 bp, Homo sapien
cacaggacagcacacaagaatgccc

SEQ ID NO: 218208 - DNA, 25 bp, Homo sapien
agcaaggtgcccagtgcaccaacag

SEQ ID NO: 218209 - DNA, 25 bp, Homo sapien
gacacactgtttcagcactttcaca

SEQ ID NO: 218210 - DNA, 25 bp, Homo sapien
cacaggcggaactccccaaaggcaa

SEQ ID NO: 218211 - DNA, 25 bp, Homo sapien
gcttcaggtagacacactgtttcag

SEQ ID NO: 218212 - DNA, 25 bp, Homo sapien
cactttcacagcacgagcagatttt

SEQ ID NO: 218213 - DNA, 25 bp, Homo sapien
tggccattattcctctaaacgttct

SEQ ID NO: 218214 - DNA, 25 bp, Homo sapien
gaataagtccttatttcgctattgg

SEQ ID NO: 218215 - DNA, 25 bp, Homo sapien
ctgtcctaggacatttcttgtagtg

SEQ ID NO: 218216 - DNA, 25 bp, Homo sapien
tcttgtagtgaaaatctgcaacttt

SEQ ID NO: 218217 - DNA, 25 bp, Homo sapien
tgtcttgttcatgttagggtatcat

SEQ ID NO: 218218 - DNA, 25 bp, Homo sapien
gggtatcatttattatgttacgacc

SEQ ID NO: 218219 - DNA, 25 bp, Homo sapien
cattgagtaatctgagttaattgaa

SEQ ID NO: 218220 - DNA, 25 bp, Homo sapien
ttattatgttacgacctcgtctaag

SEQ ID NO: 218221 - DNA, 25 bp, Homo sapien
tcatcgaggcaggaataaaggtggt

SEQ ID NO: 218222 - DNA, 25 bp, Homo sapien
agtcttctcagtcataaggcccaga

SEQ ID NO: 218223 - DNA, 25 bp, Homo sapien
taagcaaacattcaggatcgacaga

SEQ ID NO: 218224 - DNA, 25 bp, Homo sapien
agaaccatgagaggcacgccattcg

SEQ ID NO: 218225 - DNA, 25 bp, Homo sapien
agtcttatttatcagtgctttgcca

SEQ ID NO: 218226 - DNA, 25 bp, Homo sapien
gagctgtgtagatacttattattta

SEQ ID NO: 218227 - DNA, 25 bp, Homo sapien
taaattcacattaatcgacccacaa

SEQ ID NO: 218228 - DNA, 25 bp, Homo sapien
cataaacattctttcaaccgtaaat

SEQ ID NO: 218229 - DNA, 25 bp, Homo sapien
ctttgttactggaggatgataatct

SEQ ID NO: 218230 - DNA, 25 bp, Homo sapien
tataccttggtgtgaactctctttt

SEQ ID NO: 218231 - DNA, 25 bp, Homo sapien
aattagtgaacaaacttaaccagtg

SEQ ID NO: 218232 - DNA, 25 bp, Homo sapien
cagcaagtttagcttatagccttga

SEQ ID NO: 218233 - DNA, 25 bp, Homo sapien
tacatggaacttgctaatggaggtt

SEQ ID NO: 218234 - DNA, 25 bp, Homo sapien
tggagataataacgtcagtcaaggc

SEQ ID NO: 218235 - DNA, 25 bp, Homo sapien
ggaggttggacattctgtttcagtc

SEQ ID NO: 218236 - DNA, 25 bp, Homo sapien
tataaagttactttggacagagacc

SEQ ID NO: 218237 - DNA, 25 bp, Homo sapien
catcccctttagttcttgcactgct

SEQ ID NO: 218238 - DNA, 25 bp, Homo sapien
gggcagaacaccacaacatcccctt

SEQ ID NO: 218239 - DNA, 25 bp, Homo sapien
cacaacatcccctttagttcttgca

SEQ ID NO: 218240 - DNA, 25 bp, Homo sapien
tctgggcagaacaccacaacatccc

SEQ ID NO: 218241 - DNA, 25 bp, Homo sapien
tgttgcagtacacgtccagattctc

SEQ ID NO: 218242 - DNA, 25 bp, Homo sapien
acaaatttgacagctctaagtacct

SEQ ID NO: 218243 - DNA, 25 bp, Homo sapien
ttgtccttggactcagcatgatgtc

SEQ ID NO: 218244 - DNA, 25 bp, Homo sapien
ttgaacgcctgacctgcaccattct

SEQ ID NO: 218245 - DNA, 25 bp, Homo sapien
tacacattacatcttccggagcagg

SEQ ID NO: 218246 - DNA, 25 bp, Homo sapien
gagtttttgcgtcaaggtccaccac

SEQ ID NO: 218247 - DNA, 25 bp, Homo sapien
ctgaagcttgctatgacctctgtct

SEQ ID NO: 218248 - DNA, 25 bp, Homo sapien
gaaaggcccctatgaaatcttgcta

SEQ ID NO: 218249 - DNA, 25 bp, Homo sapien
tggtcatctgtgtcactatcatgac

SEQ ID NO: 218250 - DNA, 25 bp, Homo sapien
gtcactatcatgacctgagccttct

SEQ ID NO: 218251 - DNA, 25 bp, Homo sapien
tgctcctggggggtccttccctgat

SEQ ID NO: 218252 - DNA, 25 bp, Homo sapien
agaatagatggcttggtcatctgtg

SEQ ID NO: 218253 - DNA, 25 bp, Homo sapien
tccttctggagaggaacttggagaa

SEQ ID NO: 218254 - DNA, 25 bp, Homo sapien
caggtcctgattgcaatttccttct

SEQ ID NO: 218255 - DNA, 25 bp, Homo sapien
cctgattgcaatttccttctggaga

SEQ ID NO: 218256 - DNA, 25 bp, Homo sapien
tggagaggaacttggagaatctcac

SEQ ID NO: 218257 - DNA, 25 bp, Homo sapien
ctgtcacttgagtcgcactggaact

SEQ ID NO: 218258 - DNA, 25 bp, Homo sapien
cctctcttgccttgttgaccggtgg

SEQ ID NO: 218259 - DNA, 25 bp, Homo sapien
tctgggctactcctgcactgtcctc

SEQ ID NO: 218260 - DNA, 25 bp, Homo sapien
tggagagctagctaggcacctcact

SEQ ID NO: 218261 - DNA, 25 bp, Homo sapien
acaatgaggatgggggcggggtggc

SEQ ID NO: 218262 - DNA, 25 bp, Homo sapien
atgaggatgggggcggggtggccat

SEQ ID NO: 218263 - DNA, 25 bp, Homo sapien
tggacaatgaggatgggggcggggt

SEQ ID NO: 218264 - DNA, 25 bp, Homo sapien
ctggacaatgaggatgggggcgggg

SEQ ID NO: 218265 - DNA, 25 bp, Homo sapien
actagtcccacgcagaccagtgtga

SEQ ID NO: 218266 - DNA, 25 bp, Homo sapien
gctgtaatgatgctcaacctggtcc

SEQ ID NO: 218267 - DNA, 25 bp, Homo sapien
ggtgccttgatgaaaactagtccca

SEQ ID NO: 218268 - DNA, 25 bp, Homo sapien
gtcattgctgctaatggtgccttga

SEQ ID NO: 218269 - DNA, 25 bp, Homo sapien
gcccagggataccgaacagatcctt

SEQ ID NO: 218270 - DNA, 25 bp, Homo sapien
ttcagtgtcaggcaggtggggagaa

SEQ ID NO: 218271 - DNA, 25 bp, Homo sapien
gcagcttgtcaagggcacagcccag

SEQ ID NO: 218272 - DNA, 25 bp, Homo sapien
ggataccgaacagatccttcagtgt

SEQ ID NO: 218273 - DNA, 25 bp, Homo sapien
agagcccagtgggtcgcatgagctt

SEQ ID NO: 218274 - DNA, 25 bp, Homo sapien
gcaggatctggagccgggacctgat

SEQ ID NO: 218275 - DNA, 25 bp, Homo sapien
ccagtgggtcgcatgagcttctgct

SEQ ID NO: 218276 - DNA, 25 bp, Homo sapien
ggacctgatgtcgaggcctagagtc

SEQ ID NO: 218277 - DNA, 25 bp, Homo sapien
tcataggtctttcatggccgcagcc

SEQ ID NO: 218278 - DNA, 25 bp, Homo sapien
ggaaactctgaccaatctgataagc

SEQ ID NO: 218279 - DNA, 25 bp, Homo sapien
ggtgtggcagtagaaatcggcttca

SEQ ID NO: 218280 - DNA, 25 bp, Homo sapien
gatgaatgtctggaaactctgacca

SEQ ID NO: 218281 - DNA, 25 bp, Homo sapien
ccagaagttctgatacaagtgaggc

SEQ ID NO: 218282 - DNA, 25 bp, Homo sapien
gatgttgctttagggaacaccatgc

SEQ ID NO: 218283 - DNA, 25 bp, Homo sapien
tccaggtaggagacagcaagtggtt

SEQ ID NO: 218284 - DNA, 25 bp, Homo sapien
gctcggagtgaccaaaagaagtccc

SEQ ID NO: 218285 - DNA, 25 bp, Homo sapien
gaaatgtctccagctaaagtcaggc

SEQ ID NO: 218286 - DNA, 25 bp, Homo sapien
tagagacggaataaccccacgagtg

SEQ ID NO: 218287 - DNA, 25 bp, Homo sapien
gaatcatcagctattttgggcccaa

SEQ ID NO: 218288 - DNA, 25 bp, Homo sapien
tccaacaggacacgagtagagacgg

SEQ ID NO: 218289 - DNA, 25 bp, Homo sapien
cactgagtgacattaccatggtggc

SEQ ID NO: 218290 - DNA, 25 bp, Homo sapien
ccttgcgtcatgaagtccgatggtg

SEQ ID NO: 218291 - DNA, 25 bp, Homo sapien
ccaggcaatactcctttgagaggca

SEQ ID NO: 218292 - DNA, 25 bp, Homo sapien
aaagggaggaacaagccctgtgcca

SEQ ID NO: 218293 - DNA, 25 bp, Homo sapien
tgatcacctaggagctcagagcagt

SEQ ID NO: 218294 - DNA, 25 bp, Homo sapien
gctgcgttctctgcgtagggtctca

SEQ ID NO: 218295 - DNA, 25 bp, Homo sapien
tgagctaagatgatactggaggccc

SEQ ID NO: 218296 - DNA, 25 bp, Homo sapien
gaaatgcctgttgtctgaaccaccg

SEQ ID NO: 218297 - DNA, 25 bp, Homo sapien
gatgttcctagcaagcaaatgtact

SEQ ID NO: 218298 - DNA, 25 bp, Homo sapien
cttgttcgtcttctggcaccttcct

SEQ ID NO: 218299 - DNA, 25 bp, Homo sapien
ttcatccttgttcgtcttctggcac

SEQ ID NO: 218300 - DNA, 25 bp, Homo sapien
gccctgagacgagcctttgttttgt

SEQ ID NO: 218301 - DNA, 25 bp, Homo sapien
ctggtaaacaataaagattttactg

SEQ ID NO: 218302 - DNA, 25 bp, Homo sapien
tggtaaacaataaagattttactga

SEQ ID NO: 218303 - DNA, 25 bp, Homo sapien
agttcccaggatccaaccacctcct

SEQ ID NO: 218304 - DNA, 25 bp, Homo sapien
aaccacctcctcagggtcaggccct

SEQ ID NO: 218305 - DNA, 25 bp, Homo sapien
gatccaaccacctcctcagggtcag

SEQ ID NO: 218306 - DNA, 25 bp, Homo sapien
tcttgttttccaagttcccaggatc

SEQ ID NO: 218307 - DNA, 25 bp, Homo sapien
aatagctggaaattccctgcctggg

SEQ ID NO: 218308 - DNA, 25 bp, Homo sapien
tgggaacacaaagccctggctgcct

SEQ ID NO: 218309 - DNA, 25 bp, Homo sapien
gggcctgattcacaaatagctggaa

SEQ ID NO: 218310 - DNA, 25 bp, Homo sapien
ccaggtgggcctgattcacaaatag

SEQ ID NO: 218311 - DNA, 25 bp, Homo sapien
tgcatatcagctctggccctcctca

SEQ ID NO: 218312 - DNA, 25 bp, Homo sapien
tctgcatatcagctctggccctcct

SEQ ID NO: 218313 - DNA, 25 bp, Homo sapien
tcttctgcatatcagctctggccct

SEQ ID NO: 218314 - DNA, 25 bp, Homo sapien
ggcctcttctgcatatcagctctgg

SEQ ID NO: 218315 - DNA, 25 bp, Homo sapien
tgtaagtcatatcctttaacctcca

SEQ ID NO: 218316 - DNA, 25 bp, Homo sapien
ggtctgtaagtcatatcctttaacc

SEQ ID NO: 218317 - DNA, 25 bp, Homo sapien
catatcctttaacctccacctgggt

SEQ ID NO: 218318 - DNA, 25 bp, Homo sapien
tccttggtctgtaagtcatatcctt

SEQ ID NO: 218319 - DNA, 25 bp, Homo sapien
ctagagggtaatagttgacgcaaac

SEQ ID NO: 218320 - DNA, 25 bp, Homo sapien
tcattagctagagggtaatagttga

SEQ ID NO: 218321 - DNA, 25 bp, Homo sapien
tggttgggatgacagattgtgctgg

SEQ ID NO: 218322 - DNA, 25 bp, Homo sapien
acagattgtgctggtaggcccatga

SEQ ID NO: 218323 - DNA, 25 bp, Homo sapien
tgtaaaatctgcccgtgctttgcca

SEQ ID NO: 218324 - DNA, 25 bp, Homo sapien
ctgtaaaatctgcccgtgctttgcc

SEQ ID NO: 218325 - DNA, 25 bp, Homo sapien
aaatctgcccgtgctttgccacgcg

SEQ ID NO: 218326 - DNA, 25 bp, Homo sapien
taaaatctgcccgtgctttgccacg

SEQ ID NO: 218327 - DNA, 25 bp, Homo sapien
caaagcgtcggcattcacaccattg

SEQ ID NO: 218328 - DNA, 25 bp, Homo sapien
ggtgtgagttctgagccaagctgca

SEQ ID NO: 218329 - DNA, 25 bp, Homo sapien
tggtgacactgctgtggtccccaag

SEQ ID NO: 218330 - DNA, 25 bp, Homo sapien
atagtcagtgcagggcaaagcgtcg

SEQ ID NO: 218331 - DNA, 25 bp, Homo sapien
gaccgcaggacagagtttacgagtt

SEQ ID NO: 218332 - DNA, 25 bp, Homo sapien
cagagtttacgagtttcaccttcca

SEQ ID NO: 218333 - DNA, 25 bp, Homo sapien
ccccaaagaccgcaggacagagttt

SEQ ID NO: 218334 - DNA, 25 bp, Homo sapien
caggacagagtttacgagtttcacc

SEQ ID NO: 218335 - DNA, 25 bp, Homo sapien
caagtgcagagattgcttgtttcaa

SEQ ID NO: 218336 - DNA, 25 bp, Homo sapien
tgcactgctgagcaagtgcagagat

SEQ ID NO: 218337 - DNA, 25 bp, Homo sapien
actgctgagcaagtgcagagattgc

SEQ ID NO: 218338 - DNA, 25 bp, Homo sapien
tgcttgtttcaaggtagattgttga

SEQ ID NO: 218339 - DNA, 25 bp, Homo sapien
tttggcaagctcaggatctcttttt

SEQ ID NO: 218340 - DNA, 25 bp, Homo sapien
caagctcaggatctcttttttcctt

SEQ ID NO: 218341 - DNA, 25 bp, Homo sapien
ggcaagctcaggatctcttttttcc

SEQ ID NO: 218342 - DNA, 25 bp, Homo sapien
tggcaagctcaggatctcttttttc

SEQ ID NO: 218343 - DNA, 25 bp, Homo sapien
caaaaagtgccttgagattggatcc

SEQ ID NO: 218344 - DNA, 25 bp, Homo sapien
caacatttcatattgagcacaggac

SEQ ID NO: 218345 - DNA, 25 bp, Homo sapien
cattttcattggtgcttcagaaaca

SEQ ID NO: 218346 - DNA, 25 bp, Homo sapien
tcaggacttcattttcattggtgct

SEQ ID NO: 218347 - DNA, 25 bp, Homo sapien
tagatgtcccacacctacttcctgg

SEQ ID NO: 218348 - DNA, 25 bp, Homo sapien
ggaaatcactcaattggactgtaaa

SEQ ID NO: 218349 - DNA, 25 bp, Homo sapien
tatgcaatacggagatagatgtccc

SEQ ID NO: 218350 - DNA, 25 bp, Homo sapien
gcccatatggagtctacaactagaa

SEQ ID NO: 218351 - DNA, 25 bp, Homo sapien
agtttggcctttgctgagtgtatac

SEQ ID NO: 218352 - DNA, 25 bp, Homo sapien
tccacagtttggcctttgctgagtg

SEQ ID NO: 218353 - DNA, 25 bp, Homo sapien
tttccacagtttggcctttgctgag

SEQ ID NO: 218354 - DNA, 25 bp, Homo sapien
ccacagtttggcctttgctgagtgt

SEQ ID NO: 218355 - DNA, 25 bp, Homo sapien
ggacttcagtttgatctcactggca

SEQ ID NO: 218356 - DNA, 25 bp, Homo sapien
taattggacttcagtttgatctcac

SEQ ID NO: 218357 - DNA, 25 bp, Homo sapien
tctcactggcaagactacaggtgat

SEQ ID NO: 218358 - DNA, 25 bp, Homo sapien
ctggatccagaggttaattggactt

SEQ ID NO: 218359 - DNA, 25 bp, Homo sapien
caaacctggaccgttggtgctggct

SEQ ID NO: 218360 - DNA, 25 bp, Homo sapien
ttacatggacggttctgaagtcatc

SEQ ID NO: 218361 - DNA, 25 bp, Homo sapien
caaggtggtacactccaaacctgga

SEQ ID NO: 218362 - DNA, 25 bp, Homo sapien
aggaatccaagagtggcttacatgg

SEQ ID NO: 218363 - DNA, 25 bp, Homo sapien
caaagaatttctttggcttctggta

SEQ ID NO: 218364 - DNA, 25 bp, Homo sapien
cttctggtatgagaatttctgatta

SEQ ID NO: 218365 - DNA, 25 bp, Homo sapien
ttctggtatgagaatttctgattac

SEQ ID NO: 218366 - DNA, 25 bp, Homo sapien
ttacaaagaatttctttggcttctg

SEQ ID NO: 218367 - DNA, 25 bp, Homo sapien
gacagagaaatcctcggtcagtgca

SEQ ID NO: 218368 - DNA, 25 bp, Homo sapien
tgggcaaggtaacgctcttttggca

SEQ ID NO: 218369 - DNA, 25 bp, Homo sapien
aagcaggctgcggtggaaaccactg

SEQ ID NO: 218370 - DNA, 25 bp, Homo sapien
tttggttcggtgtgccaagcaggct

SEQ ID NO: 218371 - DNA, 25 bp, Homo sapien
tctgggcaatactcttcccactcaa

SEQ ID NO: 218372 - DNA, 25 bp, Homo sapien
tgaagaacaagaaggataaggataa

SEQ ID NO: 218373 - DNA, 25 bp, Homo sapien
tttggctcttagtctctcctctggg

SEQ ID NO: 218374 - DNA, 25 bp, Homo sapien
gataaaatagcaaatgggcttctag

SEQ ID NO: 218375 - DNA, 25 bp, Homo sapien
cgggcttgttaccagcaagtgcctg

SEQ ID NO: 218376 - DNA, 25 bp, Homo sapien
tcttcatggaaattatgtgggttgg

SEQ ID NO: 218377 - DNA, 25 bp, Homo sapien
gacaccactccgctttcttcatgga

SEQ ID NO: 218378 - DNA, 25 bp, Homo sapien
ccttgggtggagtactaagagactt

SEQ ID NO: 218379 - DNA, 25 bp, Homo sapien
tcaacacctagcaattgattggact

SEQ ID NO: 218380 - DNA, 25 bp, Homo sapien
ggctggagaattcacttgaaaccgg

SEQ ID NO: 218381 - DNA, 25 bp, Homo sapien
ctacttgtgaagttgaggctggaga

SEQ ID NO: 218382 - DNA, 25 bp, Homo sapien
aagttgaggctggagaattcacttg

SEQ ID NO: 218383 - DNA, 25 bp, Homo sapien
cttgtgaagttgaggctggagaatt

SEQ ID NO: 218384 - DNA, 25 bp, Homo sapien
agccagatggtcttgggaggcctca

SEQ ID NO: 218385 - DNA, 25 bp, Homo sapien
cctgggttcgtgtgaatgtcgcctc

SEQ ID NO: 218386 - DNA, 25 bp, Homo sapien
cactctggctggcaatggaacaagc

SEQ ID NO: 218387 - DNA, 25 bp, Homo sapien
cacaaggcagctgtagctcacgcgc

SEQ ID NO: 218388 - DNA, 25 bp, Homo sapien
ctgcctgacatctgctattttgaaa

SEQ ID NO: 218389 - DNA, 25 bp, Homo sapien
caaactctccattccgcatttccct

SEQ ID NO: 218390 - DNA, 25 bp, Homo sapien
tgcctgacatctgctattttgaaac

SEQ ID NO: 218391 - DNA, 25 bp, Homo sapien
tctccattccgcatttccctcttct

SEQ ID NO: 218392 - DNA, 25 bp, Homo sapien
agtacgtataaaggcgtctgcggat

SEQ ID NO: 218393 - DNA, 25 bp, Homo sapien
cattttggagtacgtataaaggcgt

SEQ ID NO: 218394 - DNA, 25 bp, Homo sapien
atcttcatccttactagcattttgg

SEQ ID NO: 218395 - DNA, 25 bp, Homo sapien
acacgggctgaggagagttcatctt

SEQ ID NO: 218396 - DNA, 25 bp, Homo sapien
tgagcctcggggacggcgcgagcgg

SEQ ID NO: 218397 - DNA, 25 bp, Homo sapien
ccgcacttgcttcccgtactggccg

SEQ ID NO: 218398 - DNA, 25 bp, Homo sapien
cagttctttctgctggcgggcggga

SEQ ID NO: 218399 - DNA, 25 bp, Homo sapien
gatgggggcgctgagcctcggggac

SEQ ID NO: 218400 - DNA, 25 bp, Homo sapien
gagcgagtaaaccgcgaaagggctg

SEQ ID NO: 218401 - DNA, 25 bp, Homo sapien
tccttcgccccatctgttaccagct

SEQ ID NO: 218402 - DNA, 25 bp, Homo sapien
ggctgggaaggcgtgagggtgccgc

SEQ ID NO: 218403 - DNA, 25 bp, Homo sapien
cgtgagggtgccgcaaaaagaactt

SEQ ID NO: 218404 - DNA, 25 bp, Homo sapien
ggagtaatctgagccagcagagaag

SEQ ID NO: 218405 - DNA, 25 bp, Homo sapien
tccttcttccgggagagataagcat

SEQ ID NO: 218406 - DNA, 25 bp, Homo sapien
ctggttgggtgaatgcccttgaggt

SEQ ID NO: 218407 - DNA, 25 bp, Homo sapien
ttccagtggagtaatctgagccagc

SEQ ID NO: 218408 - DNA, 25 bp, Homo sapien
taaataggaaccatcttaatggatg

SEQ ID NO: 218409 - DNA, 25 bp, Homo sapien
taatggatgcaaggtagtatctcat

SEQ ID NO: 218410 - DNA, 25 bp, Homo sapien
gcatatatgtctgttcaagccttct

SEQ ID NO: 218411 - DNA, 25 bp, Homo sapien
gtattttcatattctcgttggccat

SEQ ID NO: 218412 - DNA, 25 bp, Homo sapien
tatgacaggtggaaaggactagtac

SEQ ID NO: 218413 - DNA, 25 bp, Homo sapien
ccaaatgaagctcgcctagaaaact

SEQ ID NO: 218414 - DNA, 25 bp, Homo sapien
tcatcatccttctccaaatgaagct

SEQ ID NO: 218415 - DNA, 25 bp, Homo sapien
atacagtttgggtaatgaagttggt

SEQ ID NO: 218416 - DNA, 25 bp, Homo sapien
tctttttggcgatgaaaattgtagg

SEQ ID NO: 218417 - DNA, 25 bp, Homo sapien
ctgtgctcaatatcttggaaatcca

SEQ ID NO: 218418 - DNA, 25 bp, Homo sapien
gctgtgctcaatatcttggaaatcc

SEQ ID NO: 218419 - DNA, 25 bp, Homo sapien
tgtgctcaatatcttggaaatccac

SEQ ID NO: 218420 - DNA, 25 bp, Homo sapien
tgctgtgctcaatatcttggaaatc

SEQ ID NO: 218421 - DNA, 25 bp, Homo sapien
cattcacagctagaacttggtcccc

SEQ ID NO: 218422 - DNA, 25 bp, Homo sapien
ttcacagctagaacttggtcccctt

SEQ ID NO: 218423 - DNA, 25 bp, Homo sapien
tcacagctagaacttggtccccttc

SEQ ID NO: 218424 - DNA, 25 bp, Homo sapien
tcattcacagctagaacttggtccc

SEQ ID NO: 218425 - DNA, 25 bp, Homo sapien
ctatgtgcatcagagtcaggaatca

SEQ ID NO: 218426 - DNA, 25 bp, Homo sapien
tatgtgcatcagagtcaggaatcac

SEQ ID NO: 218427 - DNA, 25 bp, Homo sapien
ggagatgaagatgcctagctgggag

SEQ ID NO: 218428 - DNA, 25 bp, Homo sapien
cttggagatgaagatgcctagctgg

SEQ ID NO: 218429 - DNA, 25 bp, Homo sapien
atgaagatgcctagctgggaggcct

SEQ ID NO: 218430 - DNA, 25 bp, Homo sapien
agatgcctagctgggaggcctttcc

SEQ ID NO: 218431 - DNA, 25 bp, Homo sapien
aaactgggtcaactcattgttgtag

SEQ ID NO: 218432 - DNA, 25 bp, Homo sapien
actgggtcaactcattgttgtagtc

SEQ ID NO: 218433 - DNA, 25 bp, Homo sapien
gaaactgggtcaactcattgttgta

SEQ ID NO: 218434 - DNA, 25 bp, Homo sapien
aactgggtcaactcattgttgtagt

SEQ ID NO: 218435 - DNA, 25 bp, Homo sapien
gaaaaccaccgggtagtcatcataa

SEQ ID NO: 218436 - DNA, 25 bp, Homo sapien
caccgggtagtcatcataaggaatc

SEQ ID NO: 218437 - DNA, 25 bp, Homo sapien
aaaccaccgggtagtcatcataagg

SEQ ID NO: 218438 - DNA, 25 bp, Homo sapien
accaccgggtagtcatcataaggaa

SEQ ID NO: 218439 - DNA, 25 bp, Homo sapien
gatagggtctaataggtcagatgat

SEQ ID NO: 218440 - DNA, 25 bp, Homo sapien
aatggctcttatctttctcaaattc

SEQ ID NO: 218441 - DNA, 25 bp, Homo sapien
ttaggctttttccataacttgaatc

SEQ ID NO: 218442 - DNA, 25 bp, Homo sapien
tcagatgattttgggagaccgctct

SEQ ID NO: 218443 - DNA, 25 bp, Homo sapien
agttgattgttcctttaagaatgtc

SEQ ID NO: 218444 - DNA, 25 bp, Homo sapien
ttttataatctatactttcctacca

SEQ ID NO: 218445 - DNA, 25 bp, Homo sapien
ttgttcctttaagaatgtcttggct

SEQ ID NO: 218446 - DNA, 25 bp, Homo sapien
tgattgttcctttaagaatgtcttg

SEQ ID NO: 218447 - DNA, 25 bp, Homo sapien
ttgacccctgtatctaagcggctgt

SEQ ID NO: 218448 - DNA, 25 bp, Homo sapien
tttctgacccgtttgactcccgctg

SEQ ID NO: 218449 - DNA, 25 bp, Homo sapien
ctaggcttaggcctcctttctgacc

SEQ ID NO: 218450 - DNA, 25 bp, Homo sapien
aagcggctgtatctaggcttaggcc

SEQ ID NO: 218451 - DNA, 25 bp, Homo sapien
ttaccataacacaccctgatttctc

SEQ ID NO: 218452 - DNA, 25 bp, Homo sapien
taccataacacaccctgatttctcc

SEQ ID NO: 218453 - DNA, 25 bp, Homo sapien
gttaccataacacaccctgatttct

SEQ ID NO: 218454 - DNA, 25 bp, Homo sapien
agcaacttccacagtgggctgacac

SEQ ID NO: 218455 - DNA, 25 bp, Homo sapien
tgagatgtggggagcaacttccaca

SEQ ID NO: 218456 - DNA, 25 bp, Homo sapien
gggagcaacttccacagtgggctga

SEQ ID NO: 218457 - DNA, 25 bp, Homo sapien
agatgtggggagcaacttccacagt

SEQ ID NO: 218458 - DNA, 25 bp, Homo sapien
gatgcacaggacatgattttactct

SEQ ID NO: 218459 - DNA, 25 bp, Homo sapien
aatagtgttgtgaggaacgtgtgag

SEQ ID NO: 218460 - DNA, 25 bp, Homo sapien
gttgatgcacaggacatgattttac

SEQ ID NO: 218461 - DNA, 25 bp, Homo sapien
tgtgaatagtgttgtgaggaacgtg

SEQ ID NO: 218462 - DNA, 25 bp, Homo sapien
tttcgtggccaaagaaggccacgat

SEQ ID NO: 218463 - DNA, 25 bp, Homo sapien
gtggccaaagaaggccacgatgtgc

SEQ ID NO: 218464 - DNA, 25 bp, Homo sapien
actttcgtggccaaagaaggccacg

SEQ ID NO: 218465 - DNA, 25 bp, Homo sapien
gccaaagaaggccacgatgtgcctt

SEQ ID NO: 218466 - DNA, 25 bp, Homo sapien
gttctccgtgcatactcatgctctt

SEQ ID NO: 218467 - DNA, 25 bp, Homo sapien
gagcagaggttaagagggcactgtg

SEQ ID NO: 218468 - DNA, 25 bp, Homo sapien
tactatggccatgtgtgactgggat

SEQ ID NO: 218469 - DNA, 25 bp, Homo sapien
gcactgtgtgggagacgggtactat

SEQ ID NO: 218470 - DNA, 25 bp, Homo sapien
acacagctctcttctattttagtcc

SEQ ID NO: 218471 - DNA, 25 bp, Homo sapien
ccattacgtgtatagtcggtacaag

SEQ ID NO: 218472 - DNA, 25 bp, Homo sapien
caccaagcatacctaattgaagttg

SEQ ID NO: 218473 - DNA, 25 bp, Homo sapien
tgtttcaaatgaatagtgggacatt

SEQ ID NO: 218474 - DNA, 25 bp, Homo sapien
caggtaactcccctgcatcggcctc

SEQ ID NO: 218475 - DNA, 25 bp, Homo sapien
tcaggtaactcccctgcatcggcct

SEQ ID NO: 218476 - DNA, 25 bp, Homo sapien
aggtaactcccctgcatcggcctcc

SEQ ID NO: 218477 - DNA, 25 bp, Homo sapien
ctcaggtaactcccctgcatcggcc

SEQ ID NO: 218478 - DNA, 25 bp, Homo sapien
accagtattggacgggtgtggtagc

SEQ ID NO: 218479 - DNA, 25 bp, Homo sapien
aagttaccagtattggacgggtgtg

SEQ ID NO: 218480 - DNA, 25 bp, Homo sapien
cagtattggacgggtgtggtagctc

SEQ ID NO: 218481 - DNA, 25 bp, Homo sapien
ttaccagtattggacgggtgtggta

SEQ ID NO: 218482 - DNA, 25 bp, Homo sapien
tgttactgaagaagttatatcctgg

SEQ ID NO: 218483 - DNA, 25 bp, Homo sapien
ggtattttgcgatgcattccaaaga

SEQ ID NO: 218484 - DNA, 25 bp, Homo sapien
ttgctccatgttcagtctggtattt

SEQ ID NO: 218485 - DNA, 25 bp, Homo sapien
ctgaagaagttatatcctgggatgt

SEQ ID NO: 218486 - DNA, 25 bp, Homo sapien
tagccagtagcagtccgaaggtgac

SEQ ID NO: 218487 - DNA, 25 bp, Homo sapien
gagagagattcgtttagccagtagc

SEQ ID NO: 218488 - DNA, 25 bp, Homo sapien
gcagttgtcggtctctttaagaaca

SEQ ID NO: 218489 - DNA, 25 bp, Homo sapien
tccattttggcagttgtcggtctct

SEQ ID NO: 218490 - DNA, 25 bp, Homo sapien
gatcagataagtccaacggaatgaa

SEQ ID NO: 218491 - DNA, 25 bp, Homo sapien
tccaacggaatgaaagggaaggtga

SEQ ID NO: 218492 - DNA, 25 bp, Homo sapien
agataagtccaacggaatgaaaggg

SEQ ID NO: 218493 - DNA, 25 bp, Homo sapien
tcagataagtccaacggaatgaaag

SEQ ID NO: 218494 - DNA, 25 bp, Homo sapien
ccaggatccaaacttgagtactttc

SEQ ID NO: 218495 - DNA, 25 bp, Homo sapien
caagttgatctactgaggctgtgta

SEQ ID NO: 218496 - DNA, 25 bp, Homo sapien
gctgtgtaaggtttaaccaggatcc

SEQ ID NO: 218497 - DNA, 25 bp, Homo sapien
taccttcagtaccattgatttagac

SEQ ID NO: 218498 - DNA, 25 bp, Homo sapien
tagagactcatcgtcaggagcccac

SEQ ID NO: 218499 - DNA, 25 bp, Homo sapien
tagtagagactcatcgtcaggagcc

SEQ ID NO: 218500 - DNA, 25 bp, Homo sapien
gtagagactcatcgtcaggagccca

SEQ ID NO: 218501 - DNA, 25 bp, Homo sapien
ttagtagagactcatcgtcaggagc

SEQ ID NO: 218502 - DNA, 25 bp, Homo sapien
gtgcattcgctggtactagtttctg

SEQ ID NO: 218503 - DNA, 25 bp, Homo sapien
cctttcctcggtctgacatgcagac

SEQ ID NO: 218504 - DNA, 25 bp, Homo sapien
agttaatatccagcggacaagtgca

SEQ ID NO: 218505 - DNA, 25 bp, Homo sapien
gacatgcagactgtcagtgtggtgc

SEQ ID NO: 218506 - DNA, 25 bp, Homo sapien
tttgtcacatgttgtcaagatttcc

SEQ ID NO: 218507 - DNA, 25 bp, Homo sapien
ttgtcacatgttgtcaagatttcca

SEQ ID NO: 218508 - DNA, 25 bp, Homo sapien
cctttgtcacatgttgtcaagattt

SEQ ID NO: 218509 - DNA, 25 bp, Homo sapien
tgtcacatgttgtcaagatttccat

SEQ ID NO: 218510 - DNA, 25 bp, Homo sapien
tgttttgtcactaaccaaatgtttc

SEQ ID NO: 218511 - DNA, 25 bp, Homo sapien
tttgtcactaaccaaatgtttctta

SEQ ID NO: 218512 - DNA, 25 bp, Homo sapien
caccatgcccggatgtattaatggt

SEQ ID NO: 218513 - DNA, 25 bp, Homo sapien
gagcaggcaccttaagttctgtata

SEQ ID NO: 218514 - DNA, 25 bp, Homo sapien
tgtatactaccgtgaggccaggcac

SEQ ID NO: 218515 - DNA, 25 bp, Homo sapien
ctgtgtcatacagctaccccttgta

SEQ ID NO: 218516 - DNA, 25 bp, Homo sapien
ggaatgtagaagatggttgtgtaaa

SEQ ID NO: 218517 - DNA, 25 bp, Homo sapien
ttgtgtaaaagacagcctgcctgat

SEQ ID NO: 218518 - DNA, 25 bp, Homo sapien
tggttgtgtaaaagacagcctgcct

SEQ ID NO: 218519 - DNA, 25 bp, Homo sapien
gaagatggttgtgtaaaagacagcc

SEQ ID NO: 218520 - DNA, 25 bp, Homo sapien
gattttctggagatttaccgcaaga

SEQ ID NO: 218521 - DNA, 25 bp, Homo sapien
ttctggagatttaccgcaagaaggg

SEQ ID NO: 218522 - DNA, 25 bp, Homo sapien
gccgtgattttctggagatttaccg

SEQ ID NO: 218523 - DNA, 25 bp, Homo sapien
ccaggccgtgattttctggagattt

SEQ ID NO: 218524 - DNA, 25 bp, Homo sapien
tcctctaatagttcaggcaccacct

SEQ ID NO: 218525 - DNA, 25 bp, Homo sapien
tcatttcttgcaagacgggtctaat

SEQ ID NO: 218526 - DNA, 25 bp, Homo sapien
catttcgcacccacttttgaaggac

SEQ ID NO: 218527 - DNA, 25 bp, Homo sapien
tctaatggtagtcaactttctcagc

SEQ ID NO: 218528 - DNA, 25 bp, Homo sapien
ccccgattgcacgtccttgatgagt

SEQ ID NO: 218529 - DNA, 25 bp, Homo sapien
gaccagcccacataatgaatcctgt

SEQ ID NO: 218530 - DNA, 25 bp, Homo sapien
tgaaaatcaccataatgagccttgg

SEQ ID NO: 218531 - DNA, 25 bp, Homo sapien
aagcaaagatcatctccacccacat

SEQ ID NO: 218532 - DNA, 25 bp, Homo sapien
ggtctgtggagtacattccttggca

SEQ ID NO: 218533 - DNA, 25 bp, Homo sapien
acaggtctgtggagtacattccttg

SEQ ID NO: 218534 - DNA, 25 bp, Homo sapien
actgtcatcctcttgctgcaaataa

SEQ ID NO: 218535 - DNA, 25 bp, Homo sapien
gcaaataacttgcataggaatcccc

SEQ ID NO: 218536 - DNA, 25 bp, Homo sapien
ttaaaattacccaggcatagtggtg

SEQ ID NO: 218537 - DNA, 25 bp, Homo sapien
aggaggactacttgagccctggggt

SEQ ID NO: 218538 - DNA, 25 bp, Homo sapien
aggactacttgagccctggggttca

SEQ ID NO: 218539 - DNA, 25 bp, Homo sapien
gactacttgagccctggggttcaaa

SEQ ID NO: 218540 - DNA, 25 bp, Homo sapien
ttccaggttgctcacagtgggccac

SEQ ID NO: 218541 - DNA, 25 bp, Homo sapien
tgtgcttcccaccatgagatctgac

SEQ ID NO: 218542 - DNA, 25 bp, Homo sapien
caacattaaaagcagagtcccggcc

SEQ ID NO: 218543 - DNA, 25 bp, Homo sapien
tagctagattggttagaaggcaccc

SEQ ID NO: 218544 - DNA, 25 bp, Homo sapien
tgttactggactgccatccactaga

SEQ ID NO: 218545 - DNA, 25 bp, Homo sapien
atgtccaagtcagtgtactttaggg

SEQ ID NO: 218546 - DNA, 25 bp, Homo sapien
gcaaacgaacacagtgaggactact

SEQ ID NO: 218547 - DNA, 25 bp, Homo sapien
gctaatgctaccaccaaagagagct

SEQ ID NO: 218548 - DNA, 25 bp, Homo sapien
gataggagtgctagagaccaggcct

SEQ ID NO: 218549 - DNA, 25 bp, Homo sapien
tatcgtaccttcatacacgtaaggg

SEQ ID NO: 218550 - DNA, 25 bp, Homo sapien
tcctgcgaagtgcatggatgcccac

SEQ ID NO: 218551 - DNA, 25 bp, Homo sapien
gaggcacatcctcgaacaagacagg

SEQ ID NO: 218552 - DNA, 25 bp, Homo sapien
ggcagttttcagtaccatatttatg

SEQ ID NO: 218553 - DNA, 25 bp, Homo sapien
tagcgttcttgctgttaaacagtca

SEQ ID NO: 218554 - DNA, 25 bp, Homo sapien
tgtgcctccgaataacaaatctgtc

SEQ ID NO: 218555 - DNA, 25 bp, Homo sapien
tgtggctgaacagttaactttggaa

SEQ ID NO: 218556 - DNA, 25 bp, Homo sapien
ggacacaggctcctggctttcagcc

SEQ ID NO: 218557 - DNA, 25 bp, Homo sapien
tatacagggttcgattttctgtggg

SEQ ID NO: 218558 - DNA, 25 bp, Homo sapien
tacagggttcgattttctgtgggga

SEQ ID NO: 218559 - DNA, 25 bp, Homo sapien
atacagggttcgattttctgtgggg

SEQ ID NO: 218560 - DNA, 25 bp, Homo sapien
tgtggaagacgcctgctgctaagag

SEQ ID NO: 218561 - DNA, 25 bp, Homo sapien
gaactttgtttggaccattccacaa

SEQ ID NO: 218562 - DNA, 25 bp, Homo sapien
caggatggctccttgttcacagctg

SEQ ID NO: 218563 - DNA, 25 bp, Homo sapien
taaactgcttaggagtccagccaga

SEQ ID NO: 218564 - DNA, 25 bp, Homo sapien
cagcataaagggtcagcttgatgcc

SEQ ID NO: 218565 - DNA, 25 bp, Homo sapien
tcaatatagccgtgtttttttccaa

SEQ ID NO: 218566 - DNA, 25 bp, Homo sapien
tccaacagcataaagggtcagcttg

SEQ ID NO: 218567 - DNA, 25 bp, Homo sapien
ttaatcttcaatatagccgtgtttt

SEQ ID NO: 218568 - DNA, 25 bp, Homo sapien
tgcagcggactcacaaacttaagtg

SEQ ID NO: 218569 - DNA, 25 bp, Homo sapien
agccagaggtctgtgttttcagctc

SEQ ID NO: 218570 - DNA, 25 bp, Homo sapien
ctctcttgactccatcattctgcag

SEQ ID NO: 218571 - DNA, 25 bp, Homo sapien
tgactccatcattctgcagcggact

SEQ ID NO: 218572 - DNA, 25 bp, Homo sapien
caaacaatggcaatgagtaaaagca

SEQ ID NO: 218573 - DNA, 25 bp, Homo sapien
aacaatggcaatgagtaaaagcagg

SEQ ID NO: 218574 - DNA, 25 bp, Homo sapien
aaacaatggcaatgagtaaaagcag

SEQ ID NO: 218575 - DNA, 25 bp, Homo sapien
atgtagactgttattacagaagcca

SEQ ID NO: 218576 - DNA, 25 bp, Homo sapien
ctggtagtgcatgtagactgttatt

SEQ ID NO: 218577 - DNA, 25 bp, Homo sapien
gtgagtgtaccctgttgagtagtgt

SEQ ID NO: 218578 - DNA, 25 bp, Homo sapien
tgagttttaattccctggctcacca

SEQ ID NO: 218579 - DNA, 25 bp, Homo sapien
cctgttgagtagtgtagattttccc

SEQ ID NO: 218580 - DNA, 25 bp, Homo sapien
gattttcccataagatgtgtgagtt

SEQ ID NO: 218581 - DNA, 25 bp, Homo sapien
caggaacttgctttgtgagggcaca

SEQ ID NO: 218582 - DNA, 25 bp, Homo sapien
catcacactgtagatgtgaagggag

SEQ ID NO: 218583 - DNA, 25 bp, Homo sapien
ttagttgcaatgcagacatcacact

SEQ ID NO: 218584 - DNA, 25 bp, Homo sapien
ttgtgagggcacaaggcttgcattc

SEQ ID NO: 218585 - DNA, 25 bp, Homo sapien
tggcacaagaatatagtaagtacta

SEQ ID NO: 218586 - DNA, 25 bp, Homo sapien
cttattggtgtggacgttgtctaaa

SEQ ID NO: 218587 - DNA, 25 bp, Homo sapien
taaatttcggtagccatggcacaag

SEQ ID NO: 218588 - DNA, 25 bp, Homo sapien
tacttcctatgacctacctgcttta

SEQ ID NO: 218589 - DNA, 25 bp, Homo sapien
agagatggtcctgtaatccttttct

SEQ ID NO: 218590 - DNA, 25 bp, Homo sapien
cagagatggtcctgtaatccttttc

SEQ ID NO: 218591 - DNA, 25 bp, Homo sapien
agatggtcctgtaatccttttctac

SEQ ID NO: 218592 - DNA, 25 bp, Homo sapien
gagatggtcctgtaatccttttcta

SEQ ID NO: 218593 - DNA, 25 bp, Homo sapien
ttctcatggttaggacagagctgcc

SEQ ID NO: 218594 - DNA, 25 bp, Homo sapien
tctcatggttaggacagagctgcct

SEQ ID NO: 218595 - DNA, 25 bp, Homo sapien
ggtgtgaggtctggtgtagctgcag

SEQ ID NO: 218596 - DNA, 25 bp, Homo sapien
ggatgttgttgtgcgctggtgtgag

SEQ ID NO: 218597 - DNA, 25 bp, Homo sapien
gttgttgtgcgctggtgtgaggtct

SEQ ID NO: 218598 - DNA, 25 bp, Homo sapien
ctggtgtgaggtctggtgtagctgc

SEQ ID NO: 218599 - DNA, 25 bp, Homo sapien
cttactttgacctaagggactgtct

SEQ ID NO: 218600 - DNA, 25 bp, Homo sapien
gtcattccatacatcagtctgtggg

SEQ ID NO: 218601 - DNA, 25 bp, Homo sapien
caaccttaggactctggcatttggg

SEQ ID NO: 218602 - DNA, 25 bp, Homo sapien
ggactaccgagtgccttggagcctt

SEQ ID NO: 218603 - DNA, 25 bp, Homo sapien
agttctgccccactgtgaaaccgaa

SEQ ID NO: 218604 - DNA, 25 bp, Homo sapien
gttctcagcattcttgagtaacact

SEQ ID NO: 218605 - DNA, 25 bp, Homo sapien
ggtgaccttctgtataaagagagct

SEQ ID NO: 218606 - DNA, 25 bp, Homo sapien
cactgtgaaaccgaagatgttctca

SEQ ID NO: 218607 - DNA, 25 bp, Homo sapien
gattccttgagccactgataccacg

SEQ ID NO: 218608 - DNA, 25 bp, Homo sapien
gagtccacatagagacattcttcag

SEQ ID NO: 218609 - DNA, 25 bp, Homo sapien
cactttagtaaagctctccagggtg

SEQ ID NO: 218610 - DNA, 25 bp, Homo sapien
tcttccccagtatgcgattccttga

SEQ ID NO: 218611 - DNA, 25 bp, Homo sapien
tgctctgcgtaggtaccctcatctg

SEQ ID NO: 218612 - DNA, 25 bp, Homo sapien
gaaaaggacagaatatacgtaggaa

SEQ ID NO: 218613 - DNA, 25 bp, Homo sapien
agaatatacgtaggaaagtagatgc

SEQ ID NO: 218614 - DNA, 25 bp, Homo sapien
gggaactaatgatggcaacctgtgc

SEQ ID NO: 218615 - DNA, 25 bp, Homo sapien
gtctccctgctacacctggagcttt

SEQ ID NO: 218616 - DNA, 25 bp, Homo sapien
tggagctttccttgaaggagggact

SEQ ID NO: 218617 - DNA, 25 bp, Homo sapien
ctgtgtctccctgctacacctggag

SEQ ID NO: 218618 - DNA, 25 bp, Homo sapien
agggactggtggatgtatggtccat

SEQ ID NO: 218619 - DNA, 25 bp, Homo sapien
cattgcttgttaaatgatcagtaac

SEQ ID NO: 218620 - DNA, 25 bp, Homo sapien
aactcattgcttgttaaatgatcag

SEQ ID NO: 218621 - DNA, 25 bp, Homo sapien
gaaaactcattgcttgttaaatgat

SEQ ID NO: 218622 - DNA, 25 bp, Homo sapien
gcttgttaaatgatcagtaacacct

SEQ ID NO: 218623 - DNA, 25 bp, Homo sapien
taaagtgaccggactctgaaggctc

SEQ ID NO: 218624 - DNA, 25 bp, Homo sapien
tctggcatccatgtcaggattagag

SEQ ID NO: 218625 - DNA, 25 bp, Homo sapien
tttttagatgatactgcaacagtgg

SEQ ID NO: 218626 - DNA, 25 bp, Homo sapien
ccttgcaggaaacagcgtactctgg

SEQ ID NO: 218627 - DNA, 25 bp, Homo sapien
tcaagtgcccatagtgatgagaagt

SEQ ID NO: 218628 - DNA, 25 bp, Homo sapien
tagcaatactctctccagcaatgcg

SEQ ID NO: 218629 - DNA, 25 bp, Homo sapien
gggaccgcacagaatccgaactcaa

SEQ ID NO: 218630 - DNA, 25 bp, Homo sapien
tctgctgacagtggcattgacacca

SEQ ID NO: 218631 - DNA, 25 bp, Homo sapien
caagggagaacagcaccttcagtat

SEQ ID NO: 218632 - DNA, 25 bp, Homo sapien
ccctctgacaagggagaacagcacc

SEQ ID NO: 218633 - DNA, 25 bp, Homo sapien
gacaagggagaacagcaccttcagt

SEQ ID NO: 218634 - DNA, 25 bp, Homo sapien
gggagaacagcaccttcagtataaa

SEQ ID NO: 218635 - DNA, 25 bp, Homo sapien
tcagtgtgttggttaatctccttca

SEQ ID NO: 218636 - DNA, 25 bp, Homo sapien
ccatggaatggtcagcagtgaatcc

SEQ ID NO: 218637 - DNA, 25 bp, Homo sapien
cacagaatctgtacgtcgggcaacc

SEQ ID NO: 218638 - DNA, 25 bp, Homo sapien
ccaggaatcttgtggtggaaaacat

SEQ ID NO: 218639 - DNA, 25 bp, Homo sapien
tgttgactttgatagatagggccag

SEQ ID NO: 218640 - DNA, 25 bp, Homo sapien
gatgaaaaccatcgccccttgagtg

SEQ ID NO: 218641 - DNA, 25 bp, Homo sapien
actggaaatactagacatgactgcc

SEQ ID NO: 218642 - DNA, 25 bp, Homo sapien
caacagtgatcagctggaggaccag

SEQ ID NO: 218643 - DNA, 25 bp, Homo sapien
gacttgtatgaaggagattgtacat

SEQ ID NO: 218644 - DNA, 25 bp, Homo sapien
tgtacattgcctgatatctctttgt

SEQ ID NO: 218645 - DNA, 25 bp, Homo sapien
ttcggagtgctttgtgaagatttca

SEQ ID NO: 218646 - DNA, 25 bp, Homo sapien
gagaaatattgctaacatccaagca

SEQ ID NO: 218647 - DNA, 25 bp, Homo sapien
tgctgttgggcctgcattgatggaa

SEQ ID NO: 218648 - DNA, 25 bp, Homo sapien
ttcatccatgagctgactgggaagg

SEQ ID NO: 218649 - DNA, 25 bp, Homo sapien
agttgcttgcgctccagatctggtg

SEQ ID NO: 218650 - DNA, 25 bp, Homo sapien
gctccagatctggtgccggtgataa

SEQ ID NO: 218651 - DNA, 25 bp, Homo sapien
ctctctgtggatccccctcctctcc

SEQ ID NO: 218652 - DNA, 25 bp, Homo sapien
ctggccccttctattgctcctctct

SEQ ID NO: 218653 - DNA, 25 bp, Homo sapien
cccttctattgctcctctctgtgga

SEQ ID NO: 218654 - DNA, 25 bp, Homo sapien
cctctctgtggatccccctcctctc

SEQ ID NO: 218655 - DNA, 25 bp, Homo sapien
tatttgaggaccttgtgatgcacaa

SEQ ID NO: 218656 - DNA, 25 bp, Homo sapien
caacgtacttgtaaccactgaggca

SEQ ID NO: 218657 - DNA, 25 bp, Homo sapien
gaaggcttccgtgatttgttcccca

SEQ ID NO: 218658 - DNA, 25 bp, Homo sapien
tgctacaggtgtgggaaccagcctt

SEQ ID NO: 218659 - DNA, 25 bp, Homo sapien
cttccttgccagaacgtgtgttggt

SEQ ID NO: 218660 - DNA, 25 bp, Homo sapien
gatggatggttaagcccttccctct

SEQ ID NO: 218661 - DNA, 25 bp, Homo sapien
cttagatggatggttaagcccttcc

SEQ ID NO: 218662 - DNA, 25 bp, Homo sapien
gaacgtgtgttggtcttagatggat

SEQ ID NO: 218663 - DNA, 25 bp, Homo sapien
cccgacaaaggaaggtccaaatcat

SEQ ID NO: 218664 - DNA, 25 bp, Homo sapien
gcccgacaaaggaaggtccaaatca

SEQ ID NO: 218665 - DNA, 25 bp, Homo sapien
gaagctgtttgcaggagattcttct

SEQ ID NO: 218666 - DNA, 25 bp, Homo sapien
atctgggtgattctttgtgtcatcc

SEQ ID NO: 218667 - DNA, 25 bp, Homo sapien
tgatacgcatttttgtggaagctgt

SEQ ID NO: 218668 - DNA, 25 bp, Homo sapien
gaatgatacgcatttttgtggaagc

SEQ ID NO: 218669 - DNA, 25 bp, Homo sapien
tgtttttaaggtgtgcccacgtctg

SEQ ID NO: 218670 - DNA, 25 bp, Homo sapien
cacggtgagagtgagatcggccctt

SEQ ID NO: 218671 - DNA, 25 bp, Homo sapien
acagccaatagtagtgtaactgagc

SEQ ID NO: 218672 - DNA, 25 bp, Homo sapien
taaccccagggaactattgaacaca

SEQ ID NO: 218673 - DNA, 25 bp, Homo sapien
gcaggtcccacactagcaccaacac

SEQ ID NO: 218674 - DNA, 25 bp, Homo sapien
accaaatcccagtactccttgcagc

SEQ ID NO: 218675 - DNA, 25 bp, Homo sapien
ccatcatctcacatccaatagagga

SEQ ID NO: 218676 - DNA, 25 bp, Homo sapien
gaggcaacactttcagcaggtccca

SEQ ID NO: 218677 - DNA, 25 bp, Homo sapien
ggacctacgaccacttgggctgctc

SEQ ID NO: 218678 - DNA, 25 bp, Homo sapien
tgtccttgggacctacgaccacttg

SEQ ID NO: 218679 - DNA, 25 bp, Homo sapien
ctgtccttgggacctacgaccactt

SEQ ID NO: 218680 - DNA, 25 bp, Homo sapien
cttgggacctacgaccacttgggct

SEQ ID NO: 218681 - DNA, 25 bp, Homo sapien
tttctcaaggactccagtcaacttc

SEQ ID NO: 218682 - DNA, 25 bp, Homo sapien
agtcaacttcagaagagcacaattc

SEQ ID NO: 218683 - DNA, 25 bp, Homo sapien
acaattccataaccccttggcctct

SEQ ID NO: 218684 - DNA, 25 bp, Homo sapien
caacttcagaagagcacaattccat

SEQ ID NO: 218685 - DNA, 25 bp, Homo sapien
tctgcattataccaacaagtgatca

SEQ ID NO: 218686 - DNA, 25 bp, Homo sapien
taaccttgtgagtgttagcactgaa

SEQ ID NO: 218687 - DNA, 25 bp, Homo sapien
gcactgaagatgctagcagctagag

SEQ ID NO: 218688 - DNA, 25 bp, Homo sapien
gctagagatgagcaagtaggtttct

SEQ ID NO: 218689 - DNA, 25 bp, Homo sapien
tcccttagcatatccctcagctggg

SEQ ID NO: 218690 - DNA, 25 bp, Homo sapien
gagaaggccttcacccacgcttcct

SEQ ID NO: 218691 - DNA, 25 bp, Homo sapien
gcagctttctgtccaatactattgc

SEQ ID NO: 218692 - DNA, 25 bp, Homo sapien
ctttaccctcttgaaccctgtccat

SEQ ID NO: 218693 - DNA, 25 bp, Homo sapien
aatcacatcaaagagccccaggagg

SEQ ID NO: 218694 - DNA, 25 bp, Homo sapien
ttagagaagaccctgtcctttggcc

SEQ ID NO: 218695 - DNA, 25 bp, Homo sapien
tggaacacaggaaagttggaaggct

SEQ ID NO: 218696 - DNA, 25 bp, Homo sapien
taaagattgaggctgttggagagtc

SEQ ID NO: 218697 - DNA, 25 bp, Homo sapien
tttccccatttgatgggagccccac

SEQ ID NO: 218698 - DNA, 25 bp, Homo sapien
cgaggctgcaatagcaattctggcc

SEQ ID NO: 218699 - DNA, 25 bp, Homo sapien
cctgtgtagcagacgaattttgtgt

SEQ ID NO: 218700 - DNA, 25 bp, Homo sapien
agttccctgggtggatttcgaggct

SEQ ID NO: 218701 - DNA, 25 bp, Homo sapien
tgttgtatgactacccagcatccca

SEQ ID NO: 218702 - DNA, 25 bp, Homo sapien
gttgtatgactacccagcatcccat

SEQ ID NO: 218703 - DNA, 25 bp, Homo sapien
tatgactacccagcatcccattcat

SEQ ID NO: 218704 - DNA, 25 bp, Homo sapien
tgtatgactacccagcatcccattc

SEQ ID NO: 218705 - DNA, 25 bp, Homo sapien
agcaaatcacggtctgcgccttccg

SEQ ID NO: 218706 - DNA, 25 bp, Homo sapien
aacaggtgagccgtgcggcggcgcc

SEQ ID NO: 218707 - DNA, 25 bp, Homo sapien
gagctgaacggcttcgcgagttggg

SEQ ID NO: 218708 - DNA, 25 bp, Homo sapien
ggttttctcctcctcgagcaaatca

SEQ ID NO: 218709 - DNA, 25 bp, Homo sapien
tggatgtctctttgtctacagggac

SEQ ID NO: 218710 - DNA, 25 bp, Homo sapien
taattggtattgctctgaacctagg

SEQ ID NO: 218711 - DNA, 25 bp, Homo sapien
tgaactcctaagactttgccaggaa

SEQ ID NO: 218712 - DNA, 25 bp, Homo sapien
tgctgtcagagatctcaataccggg

SEQ ID NO: 218713 - DNA, 25 bp, Homo sapien
gctccatagttctcacattgggatt

SEQ ID NO: 218714 - DNA, 25 bp, Homo sapien
caagcatttgatggactcccaagtc

SEQ ID NO: 218715 - DNA, 25 bp, Homo sapien
tagaaagcaagtggcccacacatct

SEQ ID NO: 218716 - DNA, 25 bp, Homo sapien
agaaggcagcgtgggcaagatctct

SEQ ID NO: 218717 - DNA, 25 bp, Homo sapien
gtacttcctttttctcttggatcat

SEQ ID NO: 218718 - DNA, 25 bp, Homo sapien
tgtacttcctttttctcttggatca

SEQ ID NO: 218719 - DNA, 25 bp, Homo sapien
ctctgtacttcctttttctcttgga

SEQ ID NO: 218720 - DNA, 25 bp, Homo sapien
tctgtacttcctttttctcttggat

SEQ ID NO: 218721 - DNA, 25 bp, Homo sapien
ccggaactggttagcttggacatag

SEQ ID NO: 218722 - DNA, 25 bp, Homo sapien
tataggcggcaagtagagggtcaaa

SEQ ID NO: 218723 - DNA, 25 bp, Homo sapien
gagagacactaatccagcctgtgaa

SEQ ID NO: 218724 - DNA, 25 bp, Homo sapien
tgatgagatgtttcagcaagggcac

SEQ ID NO: 218725 - DNA, 25 bp, Homo sapien
tgggaatagagctgcgtcactcaca

SEQ ID NO: 218726 - DNA, 25 bp, Homo sapien
tccaaatgaggaagggcaaaattca

SEQ ID NO: 218727 - DNA, 25 bp, Homo sapien
aaccaaaagcagatccccattcgtg

SEQ ID NO: 218728 - DNA, 25 bp, Homo sapien
tgacctccagagacgaatttcacgt

SEQ ID NO: 218729 - DNA, 25 bp, Homo sapien
tatccagctaccaaaaagacatctc

SEQ ID NO: 218730 - DNA, 25 bp, Homo sapien
tctacatgctgcattgaggatcccc

SEQ ID NO: 218731 - DNA, 25 bp, Homo sapien
tagtggagaggatcattcctgggca

SEQ ID NO: 218732 - DNA, 25 bp, Homo sapien
tcagtgcttggtgtagcatcctcca

SEQ ID NO: 218733 - DNA, 25 bp, Homo sapien
cctgttgattaagcgttcctgagac

SEQ ID NO: 218734 - DNA, 25 bp, Homo sapien
gtaactctgaggttcaaacattggg

SEQ ID NO: 218735 - DNA, 25 bp, Homo sapien
ccctgtattgggtggattgtgtaac

SEQ ID NO: 218736 - DNA, 25 bp, Homo sapien
gaactattgagtttggcggctgtcc

SEQ ID NO: 218737 - DNA, 25 bp, Homo sapien
caaaccaatatttctctcaccaatg

SEQ ID NO: 218738 - DNA, 25 bp, Homo sapien
ccttggtgctatccccgcaatagag

SEQ ID NO: 218739 - DNA, 25 bp, Homo sapien
cagaccatggtaaatgctcccggga

SEQ ID NO: 218740 - DNA, 25 bp, Homo sapien
gataagactggatcagggagaacct

SEQ ID NO: 218741 - DNA, 25 bp, Homo sapien
taaaaccggagagcgtcagtcgaag

SEQ ID NO: 218742 - DNA, 25 bp, Homo sapien
gatcacacagcttattagaggcaga

SEQ ID NO: 218743 - DNA, 25 bp, Homo sapien
gagtgacttactaactagccccaga

SEQ ID NO: 218744 - DNA, 25 bp, Homo sapien
tgagagataggcaccccaagtagga

SEQ ID NO: 218745 - DNA, 25 bp, Homo sapien
ttcagggctaaaggtcagattttcc

SEQ ID NO: 218746 - DNA, 25 bp, Homo sapien
ccaagcaggtaggacatgcaaaaag

SEQ ID NO: 218747 - DNA, 25 bp, Homo sapien
gaggctataaaatttaccaagcagg

SEQ ID NO: 218748 - DNA, 25 bp, Homo sapien
gcatttccaagcctagcatccatca

SEQ ID NO: 218749 - DNA, 25 bp, Homo sapien
cctataggcaggagctcttcaatgt

SEQ ID NO: 218750 - DNA, 25 bp, Homo sapien
ctgtggcctagaagaatcaatcgca

SEQ ID NO: 218751 - DNA, 25 bp, Homo sapien
ttaacgttgtcaggttctgccatct

SEQ ID NO: 218752 - DNA, 25 bp, Homo sapien
gcagcagcctgccttaacgttgtca

SEQ ID NO: 218753 - DNA, 25 bp, Homo sapien
agaatcaatcgcagtggcagcagcc

SEQ ID NO: 218754 - DNA, 25 bp, Homo sapien
ctgatgctacctgagatgtaggtgg

SEQ ID NO: 218755 - DNA, 25 bp, Homo sapien
ctacctgagatgtaggtggttgggc

SEQ ID NO: 218756 - DNA, 25 bp, Homo sapien
tacctgagatgtaggtggttgggca

SEQ ID NO: 218757 - DNA, 25 bp, Homo sapien
atgctacctgagatgtaggtggttg

SEQ ID NO: 218758 - DNA, 25 bp, Homo sapien
gagatacctcttacctttggaccag

SEQ ID NO: 218759 - DNA, 25 bp, Homo sapien
ggagatacctcttacctttggacca

SEQ ID NO: 218760 - DNA, 25 bp, Homo sapien
agtgatgtcaaaagcgtgattctgg

SEQ ID NO: 218761 - DNA, 25 bp, Homo sapien
cagtgatgtcaaaagcgtgattctg

SEQ ID NO: 218762 - DNA, 25 bp, Homo sapien
cactttgttgcaaagctgctgtatc

SEQ ID NO: 218763 - DNA, 25 bp, Homo sapien
aagctgctgtatcatttcaggtaca

SEQ ID NO: 218764 - DNA, 25 bp, Homo sapien
caaaaggtctgattagtcaaagaat

SEQ ID NO: 218765 - DNA, 25 bp, Homo sapien
aaaatacagtttccgatactgaata

SEQ ID NO: 218766 - DNA, 25 bp, Homo sapien
actgaataattattacactactgaa

SEQ ID NO: 218767 - DNA, 25 bp, Homo sapien
ataagaccccaagggagtagtgact

SEQ ID NO: 218768 - DNA, 25 bp, Homo sapien
gcttttgcattgttctgacttacag

SEQ ID NO: 218769 - DNA, 25 bp, Homo sapien
tataggccacatcaactgcttttgc

SEQ ID NO: 218770 - DNA, 25 bp, Homo sapien
tagcaatctctgtgttataggccac

SEQ ID NO: 218771 - DNA, 25 bp, Homo sapien
tacaggaattgcagatttattgttc

SEQ ID NO: 218772 - DNA, 25 bp, Homo sapien
tattcgtctgaccaaagtccgtggg

SEQ ID NO: 218773 - DNA, 25 bp, Homo sapien
gctggtgatatcctggagctcttct

SEQ ID NO: 218774 - DNA, 25 bp, Homo sapien
tcttctgacacaaggctctggctag

SEQ ID NO: 218775 - DNA, 25 bp, Homo sapien
acctccggacggcagtgtcagtgtt

SEQ ID NO: 218776 - DNA, 25 bp, Homo sapien
gtcgacgacgatagagggagacggg

SEQ ID NO: 218777 - DNA, 25 bp, Homo sapien
cccgtctccctctatcgtcgtcgac

SEQ ID NO: 218778 - DNA, 25 bp, Homo sapien
aagtcagcatgggattggcgcaggc

SEQ ID NO: 218779 - DNA, 25 bp, Homo sapien
ctcctgttggggcactcggtgaagg

SEQ ID NO: 218780 - DNA, 25 bp, Homo sapien
cagcatgggattggcgcaggctcct

SEQ ID NO: 218781 - DNA, 25 bp, Homo sapien
gggcactcggtgaaggtcctccctc

SEQ ID NO: 218782 - DNA, 25 bp, Homo sapien
cttttggccatctgggactgaagtc

SEQ ID NO: 218783 - DNA, 25 bp, Homo sapien
ttcttttggccatctgggactgaag

SEQ ID NO: 218784 - DNA, 25 bp, Homo sapien
tctgttgccctatcacctttagtga

SEQ ID NO: 218785 - DNA, 25 bp, Homo sapien
gctcctggtgggctatctctgttgc

SEQ ID NO: 218786 - DNA, 25 bp, Homo sapien
tacattggttacaatgaacaaacca

SEQ ID NO: 218787 - DNA, 25 bp, Homo sapien
caccttaaaatagaatagtacattg

SEQ ID NO: 218788 - DNA, 25 bp, Homo sapien
tgataaagtatgtcaactgaagtcc

SEQ ID NO: 218789 - DNA, 25 bp, Homo sapien
tacagagcagttgcaaagatagttc

SEQ ID NO: 218790 - DNA, 25 bp, Homo sapien
gaaaattggttgagactgttgtgta

SEQ ID NO: 218791 - DNA, 25 bp, Homo sapien
tttcatggatttggttccgaaagcc

SEQ ID NO: 218792 - DNA, 25 bp, Homo sapien
agcagagagcgggtcaccagcacag

SEQ ID NO: 218793 - DNA, 25 bp, Homo sapien
gatttggttccgaaagccaagcaga

SEQ ID NO: 218794 - DNA, 25 bp, Homo sapien
gttgacaaaccttacaatactcagg

SEQ ID NO: 218795 - DNA, 25 bp, Homo sapien
tccagccgaggaacagcaagtctgt

SEQ ID NO: 218796 - DNA, 25 bp, Homo sapien
tgaagacaagagcagccgagaagga

SEQ ID NO: 218797 - DNA, 25 bp, Homo sapien
cacctgcatcattggagttggcttc

SEQ ID NO: 218798 - DNA, 25 bp, Homo sapien
actgtgtcactgctaccactgccat

SEQ ID NO: 218799 - DNA, 25 bp, Homo sapien
ctttcgacatgtagggattctagga

SEQ ID NO: 218800 - DNA, 25 bp, Homo sapien
gaggataccttgtctcccagttttg

SEQ ID NO: 218801 - DNA, 25 bp, Homo sapien
gattctaggagttccaaaaactgtg

SEQ ID NO: 218802 - DNA, 25 bp, Homo sapien
tagctttcaaactgtggtgggttga

SEQ ID NO: 218803 - DNA, 25 bp, Homo sapien
ccatcataataagtgagggccaggg

SEQ ID NO: 218804 - DNA, 25 bp, Homo sapien
atttgacgggtatagagggttctgc

SEQ ID NO: 218805 - DNA, 25 bp, Homo sapien
taattgagatggagcagattcagac

SEQ ID NO: 218806 - DNA, 25 bp, Homo sapien
aatcagttgaaagatgcccggaaac

SEQ ID NO: 218807 - DNA, 25 bp, Homo sapien
tattgacggacggtaggaaatcagt

SEQ ID NO: 218808 - DNA, 25 bp, Homo sapien
taggaagtagaaaacgcctgcctgg

SEQ ID NO: 218809 - DNA, 25 bp, Homo sapien
ggagtccttcagatcccacaacgta

SEQ ID NO: 218810 - DNA, 25 bp, Homo sapien
tctttgaggccagagacttggcttc

SEQ ID NO: 218811 - DNA, 25 bp, Homo sapien
tagggaagattcagtaaaaggacat

SEQ ID NO: 218812 - DNA, 25 bp, Homo sapien
tggcaatgttttgttcgtagggaag

SEQ ID NO: 218813 - DNA, 25 bp, Homo sapien
tggcctgcaccataagcttctgaaa

SEQ ID NO: 218814 - DNA, 25 bp, Homo sapien
gaacattaagaggagcacactgaga

SEQ ID NO: 218815 - DNA, 25 bp, Homo sapien
taagttccctttgcgatacacagga

SEQ ID NO: 218816 - DNA, 25 bp, Homo sapien
tgagacttcagagtttcccactaag

SEQ ID NO: 218817 - DNA, 25 bp, Homo sapien
cctttgcgatacacaggaaagggaa

SEQ ID NO: 218818 - DNA, 25 bp, Homo sapien
aagcaggaaaatcggtaaacgctga

SEQ ID NO: 218819 - DNA, 25 bp, Homo sapien
taagcaggaaaatcggtaaacgctg

SEQ ID NO: 218820 - DNA, 25 bp, Homo sapien
agcaggaaaatcggtaaacgctgac

SEQ ID NO: 218821 - DNA, 25 bp, Homo sapien
gcaggaaaatcggtaaacgctgacc

SEQ ID NO: 218822 - DNA, 25 bp, Homo sapien
tgctatgatgctccccaggaaatgt

SEQ ID NO: 218823 - DNA, 25 bp, Homo sapien
cagctcatctccatgctatgatgct

SEQ ID NO: 218824 - DNA, 25 bp, Homo sapien
tatatttagctgaccacctggcaag

SEQ ID NO: 218825 - DNA, 25 bp, Homo sapien
tttttgtagaaggtggcgagaagct

SEQ ID NO: 218826 - DNA, 25 bp, Homo sapien
tggtgcactctttaatagcccatca

SEQ ID NO: 218827 - DNA, 25 bp, Homo sapien
tccccaaagatgcctttgcctggtg

SEQ ID NO: 218828 - DNA, 25 bp, Homo sapien
gatttcttgtcctccccaaagatgc

SEQ ID NO: 218829 - DNA, 25 bp, Homo sapien
gcactctttaatagcccatcacttc

SEQ ID NO: 218830 - DNA, 25 bp, Homo sapien
cacttcacgtgaagactagcatggg

SEQ ID NO: 218831 - DNA, 25 bp, Homo sapien
cactcttacagttgacgggatggca

SEQ ID NO: 218832 - DNA, 25 bp, Homo sapien
ttttaattgccttcgagagatgcac

SEQ ID NO: 218833 - DNA, 25 bp, Homo sapien
agactgaaatcagggcactgtgtaa

SEQ ID NO: 218834 - DNA, 25 bp, Homo sapien
ggtcaggccatacttggcatacaca

SEQ ID NO: 218835 - DNA, 25 bp, Homo sapien
tggagtgtgccggtcaggccatact

SEQ ID NO: 218836 - DNA, 25 bp, Homo sapien
gccatacttggcatacacattgtag

SEQ ID NO: 218837 - DNA, 25 bp, Homo sapien
ggagagtgggtctgttctggagtgt

SEQ ID NO: 218838 - DNA, 25 bp, Homo sapien
aagagattgaggagattacatatcc

SEQ ID NO: 218839 - DNA, 25 bp, Homo sapien
gagattacatatcccatgaggcagc

SEQ ID NO: 218840 - DNA, 25 bp, Homo sapien
ggtaaaaagagattgaggagattac

SEQ ID NO: 218841 - DNA, 25 bp, Homo sapien
gattgaggagattacatatcccatg

SEQ ID NO: 218842 - DNA, 25 bp, Homo sapien
cattgtctgaacagtagggcatcct

SEQ ID NO: 218843 - DNA, 25 bp, Homo sapien
ccaaactgtgacattgtctgaacag

SEQ ID NO: 218844 - DNA, 25 bp, Homo sapien
gcagccatgccaaatccaaactgtg

SEQ ID NO: 218845 - DNA, 25 bp, Homo sapien
cagtagggcatcctgttccctggtt

SEQ ID NO: 218846 - DNA, 25 bp, Homo sapien
aagtggactcctaggaacaagaagc

SEQ ID NO: 218847 - DNA, 25 bp, Homo sapien
gatgtagttcaggttttctagcccc

SEQ ID NO: 218848 - DNA, 25 bp, Homo sapien
gggatgtagttcaggttttctagcc

SEQ ID NO: 218849 - DNA, 25 bp, Homo sapien
ctcaaagtggactcctaggaacaag

SEQ ID NO: 218850 - DNA, 25 bp, Homo sapien
gaaaacctgttgcatgtcccttgac

SEQ ID NO: 218851 - DNA, 25 bp, Homo sapien
cagtagcagcagaggtgctatgtgt

SEQ ID NO: 218852 - DNA, 25 bp, Homo sapien
cctttttctgagagatgatttccca

SEQ ID NO: 218853 - DNA, 25 bp, Homo sapien
ctgttactcgcttgaaactagggaa

SEQ ID NO: 218854 - DNA, 25 bp, Homo sapien
gcgtgtactgctgtgataagatgtt

SEQ ID NO: 218855 - DNA, 25 bp, Homo sapien
tgtactgctgtgataagatgtttgt

SEQ ID NO: 218856 - DNA, 25 bp, Homo sapien
ctgctgtgataagatgtttgttctc

SEQ ID NO: 218857 - DNA, 25 bp, Homo sapien
ctgtgataagatgtttgttctctgg

SEQ ID NO: 218858 - DNA, 25 bp, Homo sapien
gagtgtgaaaagagtggaccctgac

SEQ ID NO: 218859 - DNA, 25 bp, Homo sapien
tgaaaccagaggaatttcatgagtt

SEQ ID NO: 218860 - DNA, 25 bp, Homo sapien
ggattttcacaacaaagataaggct

SEQ ID NO: 218861 - DNA, 25 bp, Homo sapien
aaaccactctgcaaaatgaaaccag

SEQ ID NO: 218862 - DNA, 25 bp, Homo sapien
cagtgattatgagatgcccatgcag

SEQ ID NO: 218863 - DNA, 25 bp, Homo sapien
agggatgcaaggaagaatctccgga

SEQ ID NO: 218864 - DNA, 25 bp, Homo sapien
cggagaacatctacccaacaggtgg

SEQ ID NO: 218865 - DNA, 25 bp, Homo sapien
cacgtctagaacatgagtcaggcac

SEQ ID NO: 218866 - DNA, 25 bp, Homo sapien
tgaggactggtagctgaactaattt

SEQ ID NO: 218867 - DNA, 25 bp, Homo sapien
ttgaggactggtagctgaactaatt

SEQ ID NO: 218868 - DNA, 25 bp, Homo sapien
agtgatttgagaggatctcagtcca

SEQ ID NO: 218869 - DNA, 25 bp, Homo sapien
gagtgatttgagaggatctcagtcc

SEQ ID NO: 218870 - DNA, 25 bp, Homo sapien
cagagtgatttgagaggatctcagt

SEQ ID NO: 218871 - DNA, 25 bp, Homo sapien
agagtgatttgagaggatctcagtc

SEQ ID NO: 218872 - DNA, 25 bp, Homo sapien
ttaacgcagatggaatacagccgag

SEQ ID NO: 218873 - DNA, 25 bp, Homo sapien
caagaacttcggtctaattggccaa

SEQ ID NO: 218874 - DNA, 25 bp, Homo sapien
taaaaacattccagatgactgacgc

SEQ ID NO: 218875 - DNA, 25 bp, Homo sapien
taacaggagcctgcaaattgccgtt

SEQ ID NO: 218876 - DNA, 25 bp, Homo sapien
gggctggatttatgagtgtcgtcac

SEQ ID NO: 218877 - DNA, 25 bp, Homo sapien
gagtgtcgtcactccctttgtattt

SEQ ID NO: 218878 - DNA, 25 bp, Homo sapien
gtcttattggtctttctaggcagaa

SEQ ID NO: 218879 - DNA, 25 bp, Homo sapien
aaagagaatcccctcattcgctgac

SEQ ID NO: 218880 - DNA, 25 bp, Homo sapien
taacggctacatgggatatagggcc

SEQ ID NO: 218881 - DNA, 25 bp, Homo sapien
ggttgagacacgcataagattcagg

SEQ ID NO: 218882 - DNA, 25 bp, Homo sapien
tatagggcctcgttcataaaaacgc

SEQ ID NO: 218883 - DNA, 25 bp, Homo sapien
caggtccatcaggtcttgagcatct

SEQ ID NO: 218884 - DNA, 25 bp, Homo sapien
tcctctgcctcattacactctgcag

SEQ ID NO: 218885 - DNA, 25 bp, Homo sapien
catccagtcatgcttatttcttgaa

SEQ ID NO: 218886 - DNA, 25 bp, Homo sapien
gtttttccaccatttgggtctatga

SEQ ID NO: 218887 - DNA, 25 bp, Homo sapien
gtgggcagttctgttcacaccctgg

SEQ ID NO: 218888 - DNA, 25 bp, Homo sapien
catcagtgaaggctctgatatctca

SEQ ID NO: 218889 - DNA, 25 bp, Homo sapien
atcctgcctctcagtaacatcagtg

SEQ ID NO: 218890 - DNA, 25 bp, Homo sapien
cccactgtgtataggaagctttgcc

SEQ ID NO: 218891 - DNA, 25 bp, Homo sapien
tcacttcatttgtccacttcttgct

SEQ ID NO: 218892 - DNA, 25 bp, Homo sapien
gggcagcacaggacggggagtggta

SEQ ID NO: 218893 - DNA, 25 bp, Homo sapien
tgaaaggtttgaccaactcagagga

SEQ ID NO: 218894 - DNA, 25 bp, Homo sapien
ctgaaaggtttgaccaactcagagg

SEQ ID NO: 218895 - DNA, 25 bp, Homo sapien
gatgagggggcagcacaggacgggg

SEQ ID NO: 218896 - DNA, 25 bp, Homo sapien
ctctacaaggactggagatgcaaac

SEQ ID NO: 218897 - DNA, 25 bp, Homo sapien
tctctacaaggactggagatgcaaa

SEQ ID NO: 218898 - DNA, 25 bp, Homo sapien
ttctctacaaggactggagatgcaa

SEQ ID NO: 218899 - DNA, 25 bp, Homo sapien
ccttccggtttcagctccaatgact

SEQ ID NO: 218900 - DNA, 25 bp, Homo sapien
ttctcagagcatcttccacttcttc

SEQ ID NO: 218901 - DNA, 25 bp, Homo sapien
gccttccggtttcagctccaatgac

SEQ ID NO: 218902 - DNA, 25 bp, Homo sapien
tgccttccggtttcagctccaatga

SEQ ID NO: 218903 - DNA, 25 bp, Homo sapien
ttgtttttgccacccaataggcact

SEQ ID NO: 218904 - DNA, 25 bp, Homo sapien
cacccaataggcactctcccttttc

SEQ ID NO: 218905 - DNA, 25 bp, Homo sapien
ccacccaataggcactctccctttt

SEQ ID NO: 218906 - DNA, 25 bp, Homo sapien
tttttgccacccaataggcactctc

SEQ ID NO: 218907 - DNA, 25 bp, Homo sapien
ggtagcacttcccattgcatctaat

SEQ ID NO: 218908 - DNA, 25 bp, Homo sapien
tgcggggatgggaggtagcacttcc

SEQ ID NO: 218909 - DNA, 25 bp, Homo sapien
gtcctgaagaacagattcactcttg

SEQ ID NO: 218910 - DNA, 25 bp, Homo sapien
ctgtctcagtgagaatgtttgcggg

SEQ ID NO: 218911 - DNA, 25 bp, Homo sapien
tccactctgctttgtcctgaattcc

SEQ ID NO: 218912 - DNA, 25 bp, Homo sapien
tgctttgtcctgaattcccagaaat

SEQ ID NO: 218913 - DNA, 25 bp, Homo sapien
tttctccactctgctttgtcctgaa

SEQ ID NO: 218914 - DNA, 25 bp, Homo sapien
tttgtcctgaattcccagaaatgcc

SEQ ID NO: 218915 - DNA, 25 bp, Homo sapien
ttggcttaggccagtagggccctcc

SEQ ID NO: 218916 - DNA, 25 bp, Homo sapien
acttgtttgcagctccatgggaaga

SEQ ID NO: 218917 - DNA, 25 bp, Homo sapien
tcgctgtgtgctagttggcttaggc

SEQ ID NO: 218918 - DNA, 25 bp, Homo sapien
aattagtttggccagagagtcgctg

SEQ ID NO: 218919 - DNA, 25 bp, Homo sapien
cccttgaaactgttgtagatgtcat

SEQ ID NO: 218920 - DNA, 25 bp, Homo sapien
gaacccttgaaactgttgtagatgt

SEQ ID NO: 218921 - DNA, 25 bp, Homo sapien
aacccttgaaactgttgtagatgtc

SEQ ID NO: 218922 - DNA, 25 bp, Homo sapien
tgaacccttgaaactgttgtagatg

SEQ ID NO: 218923 - DNA, 25 bp, Homo sapien
ttctcgtgggcaagatggtgctgtt

SEQ ID NO: 218924 - DNA, 25 bp, Homo sapien
tttatatactttagaggctttcagg

SEQ ID NO: 218925 - DNA, 25 bp, Homo sapien
tacaagaatcatggatatgctcaac

SEQ ID NO: 218926 - DNA, 25 bp, Homo sapien
tgtgtggtcttattgagttatttgt

SEQ ID NO: 218927 - DNA, 25 bp, Homo sapien
taataccaccaccaaagatacctaa

SEQ ID NO: 218928 - DNA, 25 bp, Homo sapien
taatatagcatgtattcctctagca

SEQ ID NO: 218929 - DNA, 25 bp, Homo sapien
tatatttagtgtaatcaaatctggc

SEQ ID NO: 218930 - DNA, 25 bp, Homo sapien
gatacctaacgttaataatatagca

SEQ ID NO: 218931 - DNA, 25 bp, Homo sapien
ttattcctggatctagcgtcttctc

SEQ ID NO: 218932 - DNA, 25 bp, Homo sapien
gttattcctggatctagcgtcttct

SEQ ID NO: 218933 - DNA, 25 bp, Homo sapien
ttagttattcctggatctagcgtct

SEQ ID NO: 218934 - DNA, 25 bp, Homo sapien
tagttattcctggatctagcgtctt

SEQ ID NO: 218935 - DNA, 25 bp, Homo sapien
catgccacgggtatgcattgctgaa

SEQ ID NO: 218936 - DNA, 25 bp, Homo sapien
gcatgaccaggaccatgccacgggt

SEQ ID NO: 218937 - DNA, 25 bp, Homo sapien
caggaccatgccacgggtatgcatt

SEQ ID NO: 218938 - DNA, 25 bp, Homo sapien
ctaggtatgagcatgaccaggacca

SEQ ID NO: 218939 - DNA, 25 bp, Homo sapien
tggcttgtagacctgaatgtatacc

SEQ ID NO: 218940 - DNA, 25 bp, Homo sapien
tcctgaagaagctgtagcctggaat

SEQ ID NO: 218941 - DNA, 25 bp, Homo sapien
tgtagacctgaatgtataccaggtg

SEQ ID NO: 218942 - DNA, 25 bp, Homo sapien
tgtagcctggaatggcttgtagacc

SEQ ID NO: 218943 - DNA, 25 bp, Homo sapien
gaatagttagagttcgtactgagtg

SEQ ID NO: 218944 - DNA, 25 bp, Homo sapien
ccagaccggacgctagaggctgtat

SEQ ID NO: 218945 - DNA, 25 bp, Homo sapien
cagatgggctgtttcgagagcaagc

SEQ ID NO: 218946 - DNA, 25 bp, Homo sapien
gtgaaggaccgaatagttagagttc

SEQ ID NO: 218947 - DNA, 25 bp, Homo sapien
cgataagcactttgcgtacactgcc

SEQ ID NO: 218948 - DNA, 25 bp, Homo sapien
tacactgcctttaattttccgaatc

SEQ ID NO: 218949 - DNA, 25 bp, Homo sapien
gtgttctaagtccgataagcacttt

SEQ ID NO: 218950 - DNA, 25 bp, Homo sapien
tgcgtacactgcctttaattttccg

SEQ ID NO: 218951 - DNA, 25 bp, Homo sapien
actgtgttagggtcaaaattctgat

SEQ ID NO: 218952 - DNA, 25 bp, Homo sapien
ttctgagagctgggtcccaactgtg

SEQ ID NO: 218953 - DNA, 25 bp, Homo sapien
tcagaggggtaaccattttctgaga

SEQ ID NO: 218954 - DNA, 25 bp, Homo sapien
atgaagacctgggaaactgacacat

SEQ ID NO: 218955 - DNA, 25 bp, Homo sapien
ggcagcccggttgttaccagtggaa

SEQ ID NO: 218956 - DNA, 25 bp, Homo sapien
taacaaggagattcatataccatgc

SEQ ID NO: 218957 - DNA, 25 bp, Homo sapien
gaaggtgtccgagttactggcagca

SEQ ID NO: 218958 - DNA, 25 bp, Homo sapien
aaacactcatacaacctgttctgta

SEQ ID NO: 218959 - DNA, 25 bp, Homo sapien
tcacattgaagcctcatctgctgct

SEQ ID NO: 218960 - DNA, 25 bp, Homo sapien
ttgacagtgcatgcctgagagttgc

SEQ ID NO: 218961 - DNA, 25 bp, Homo sapien
tgacagtgcatgcctgagagttgct

SEQ ID NO: 218962 - DNA, 25 bp, Homo sapien
ttggaatagagggtccatgtgggcc

SEQ ID NO: 218963 - DNA, 25 bp, Homo sapien
ggaatagagggtccatgtgggcctc

SEQ ID NO: 218964 - DNA, 25 bp, Homo sapien
gaatagagggtccatgtgggcctct

SEQ ID NO: 218965 - DNA, 25 bp, Homo sapien
tggaatagagggtccatgtgggcct

SEQ ID NO: 218966 - DNA, 25 bp, Homo sapien
gcacagctgactttggtagccaaga

SEQ ID NO: 218967 - DNA, 25 bp, Homo sapien
tcaccactgatgtcacttccctgtg

SEQ ID NO: 218968 - DNA, 25 bp, Homo sapien
taagaagatgttccgtttcctcacc

SEQ ID NO: 218969 - DNA, 25 bp, Homo sapien
cagcacgacctgatgtaagaagatg

SEQ ID NO: 218970 - DNA, 25 bp, Homo sapien
aacctctcggtaccacgttctggtg

SEQ ID NO: 218971 - DNA, 25 bp, Homo sapien
catgctttcaggaacctctcggtac

SEQ ID NO: 218972 - DNA, 25 bp, Homo sapien
ctctcggtaccacgttctggtgctt

SEQ ID NO: 218973 - DNA, 25 bp, Homo sapien
tcaggaacctctcggtaccacgttc

SEQ ID NO: 218974 - DNA, 25 bp, Homo sapien
gccaggagggagttggaggaggggc

SEQ ID NO: 218975 - DNA, 25 bp, Homo sapien
ctgccaggagggagttggaggaggg

SEQ ID NO: 218976 - DNA, 25 bp, Homo sapien
ccaggagggagttggaggaggggct

SEQ ID NO: 218977 - DNA, 25 bp, Homo sapien
caggagggagttggaggaggggctt

SEQ ID NO: 218978 - DNA, 25 bp, Homo sapien
gtaaatccaaatgatcacatatgag

SEQ ID NO: 218979 - DNA, 25 bp, Homo sapien
tggtaaatccaaatgatcacatatg

SEQ ID NO: 218980 - DNA, 25 bp, Homo sapien
ggtaaatccaaatgatcacatatga

SEQ ID NO: 218981 - DNA, 25 bp, Homo sapien
ctggtaaatccaaatgatcacatat

SEQ ID NO: 218982 - DNA, 25 bp, Homo sapien
ttccgggggagctcatctttctgga

SEQ ID NO: 218983 - DNA, 25 bp, Homo sapien
cgggggagctcatctttctggagca

SEQ ID NO: 218984 - DNA, 25 bp, Homo sapien
tgcttccgggggagctcatctttct

SEQ ID NO: 218985 - DNA, 25 bp, Homo sapien
tgtgcttccgggggagctcatcttt

SEQ ID NO: 218986 - DNA, 25 bp, Homo sapien
aattctcacactgacagccgcagag

SEQ ID NO: 218987 - DNA, 25 bp, Homo sapien
tcacaagcgtagacttgacacccct

SEQ ID NO: 218988 - DNA, 25 bp, Homo sapien
gacacccctgtatggtcaactccag

SEQ ID NO: 218989 - DNA, 25 bp, Homo sapien
tagggagccgtgtgatccagactgt

SEQ ID NO: 218990 - DNA, 25 bp, Homo sapien
cacacagccagaagtgacagtcgct

SEQ ID NO: 218991 - DNA, 25 bp, Homo sapien
catttcgctgatcacacacagccag

SEQ ID NO: 218992 - DNA, 25 bp, Homo sapien
gtgacagtcgcttctctcactgcca

SEQ ID NO: 218993 - DNA, 25 bp, Homo sapien
tctggtgtatcacaacgctccattt

SEQ ID NO: 218994 - DNA, 25 bp, Homo sapien
gacatgggctgatggattaagaaca

SEQ ID NO: 218995 - DNA, 25 bp, Homo sapien
ggcatggatgacacagggaccttga

SEQ ID NO: 218996 - DNA, 25 bp, Homo sapien
aacagctcttgatctcacatgtgag

SEQ ID NO: 218997 - DNA, 25 bp, Homo sapien
tgaacgcatcacttttccaacagct

SEQ ID NO: 218998 - DNA, 25 bp, Homo sapien
catagccctgtgcactgctgagcag

SEQ ID NO: 218999 - DNA, 25 bp, Homo sapien
tcattattgatgaccctccagcacc

SEQ ID NO: 219000 - DNA, 25 bp, Homo sapien
ctcttctcggcatgttggtcattca

SEQ ID NO: 219001 - DNA, 25 bp, Homo sapien
actagagatacagcagcagcggcgt

SEQ ID NO: 219002 - DNA, 25 bp, Homo sapien
tcaatgctactcatattctttggct

SEQ ID NO: 219003 - DNA, 25 bp, Homo sapien
ttcaatgctactcatattctttggc

SEQ ID NO: 219004 - DNA, 25 bp, Homo sapien
gctggttaaattgccgcttctcttt

SEQ ID NO: 219005 - DNA, 25 bp, Homo sapien
cttctgctggttaaattgccgcttc

SEQ ID NO: 219006 - DNA, 25 bp, Homo sapien
tctgctggttaaattgccgcttctc

SEQ ID NO: 219007 - DNA, 25 bp, Homo sapien
ttaaattgccgcttctcttttgccc

SEQ ID NO: 219008 - DNA, 25 bp, Homo sapien
cactttcaagacatgcagcaaccac

SEQ ID NO: 219009 - DNA, 25 bp, Homo sapien
aagacatgcagcaaccaccctctaa

SEQ ID NO: 219010 - DNA, 25 bp, Homo sapien
gcaaccaccctctaacaatcagaag

SEQ ID NO: 219011 - DNA, 25 bp, Homo sapien
caccctctaacaatcagaaggaaat

SEQ ID NO: 219012 - DNA, 25 bp, Homo sapien
caggataccaaggaggacagacatc

SEQ ID NO: 219013 - DNA, 25 bp, Homo sapien
ccacgttgactaactggagacagga

SEQ ID NO: 219014 - DNA, 25 bp, Homo sapien
catcattgtgaggtcccattctacg

SEQ ID NO: 219015 - DNA, 25 bp, Homo sapien
cccaaaccaacagagtcctctggaa

SEQ ID NO: 219016 - DNA, 25 bp, Homo sapien
ctcagagggagtggttgtggaaagc

SEQ ID NO: 219017 - DNA, 25 bp, Homo sapien
gtgggcactgtcctgagtaggctta

SEQ ID NO: 219018 - DNA, 25 bp, Homo sapien
gtaggcttaaactggcattgtctgt

SEQ ID NO: 219019 - DNA, 25 bp, Homo sapien
aggcaggcggcctggtggccaaggt

SEQ ID NO: 219020 - DNA, 25 bp, Homo sapien
gatcaagttggctaaacccatagtg

SEQ ID NO: 219021 - DNA, 25 bp, Homo sapien
gaggcagtctaagggcaatgagcac

SEQ ID NO: 219022 - DNA, 25 bp, Homo sapien
gaagcactctttgcgtagggtgagc

SEQ ID NO: 219023 - DNA, 25 bp, Homo sapien
taaacccatagtgtggaagcactct

SEQ ID NO: 219024 - DNA, 25 bp, Homo sapien
taaggcagcagattccgccaggatt

SEQ ID NO: 219025 - DNA, 25 bp, Homo sapien
ccagagagggctttcggccgagtcc

SEQ ID NO: 219026 - DNA, 25 bp, Homo sapien
gatccagttaatcagttcctcattg

SEQ ID NO: 219027 - DNA, 25 bp, Homo sapien
tccctctggaggatcagtctgtaga

SEQ ID NO: 219028 - DNA, 25 bp, Homo sapien
agccagggccaattcttccacctct

SEQ ID NO: 219029 - DNA, 25 bp, Homo sapien
tcatctcacttttcaggtgagcttc

SEQ ID NO: 219030 - DNA, 25 bp, Homo sapien
aagccagggccaattcttccacctc

SEQ ID NO: 219031 - DNA, 25 bp, Homo sapien
gggaggccagcacctttgttgtcat

SEQ ID NO: 219032 - DNA, 25 bp, Homo sapien
aggccagcacctttgttgtcatact

SEQ ID NO: 219033 - DNA, 25 bp, Homo sapien
gaggccagcacctttgttgtcatac

SEQ ID NO: 219034 - DNA, 25 bp, Homo sapien
ggaggccagcacctttgttgtcata

SEQ ID NO: 219035 - DNA, 25 bp, Homo sapien
ttttccgatcagttccccgagtgtc

SEQ ID NO: 219036 - DNA, 25 bp, Homo sapien
tcaaatccataggtgtactctgtga

SEQ ID NO: 219037 - DNA, 25 bp, Homo sapien
tctgtgatcctcttttccgatcagt

SEQ ID NO: 219038 - DNA, 25 bp, Homo sapien
gatcagttccccgagtgtcagtagg

SEQ ID NO: 219039 - DNA, 25 bp, Homo sapien
caaggttctgtttcccatgttccgt

SEQ ID NO: 219040 - DNA, 25 bp, Homo sapien
gagcaaggttctgtttcccatgttc

SEQ ID NO: 219041 - DNA, 25 bp, Homo sapien
ccatgttccgttacccgatccccag

SEQ ID NO: 219042 - DNA, 25 bp, Homo sapien
tcaaagagcaaggttctgtttccca

SEQ ID NO: 219043 - DNA, 25 bp, Homo sapien
tgggccatttccgccacttttcctc

SEQ ID NO: 219044 - DNA, 25 bp, Homo sapien
ctgggccatttccgccacttttcct

SEQ ID NO: 219045 - DNA, 25 bp, Homo sapien
tccgtccaagatctctctcagggct

SEQ ID NO: 219046 - DNA, 25 bp, Homo sapien
gaaaactacacagctcttactgaag

SEQ ID NO: 219047 - DNA, 25 bp, Homo sapien
ggaaggaacccatagcagaagtggt

SEQ ID NO: 219048 - DNA, 25 bp, Homo sapien
ccagccaatccgtgggatcgggcag

SEQ ID NO: 219049 - DNA, 25 bp, Homo sapien
tggatgggataatatttcctgaagc

SEQ ID NO: 219050 - DNA, 25 bp, Homo sapien
ttccagcactgcctcggattccaga

SEQ ID NO: 219051 - DNA, 25 bp, Homo sapien
tgtatgaagccagaacccaatgtcc

SEQ ID NO: 219052 - DNA, 25 bp, Homo sapien
ccattatgtggtgtgagctgtcccc

SEQ ID NO: 219053 - DNA, 25 bp, Homo sapien
acagggcaagcacaacaaagaggtc

SEQ ID NO: 219054 - DNA, 25 bp, Homo sapien
caacaaagaggtcaaatgacagaat

SEQ ID NO: 219055 - DNA, 25 bp, Homo sapien
tattggaattttccaatttacagag

SEQ ID NO: 219056 - DNA, 25 bp, Homo sapien
gtattggaattttccaatttacaga

SEQ ID NO: 219057 - DNA, 25 bp, Homo sapien
gcattggccagaatgaaggctgaaa

SEQ ID NO: 219058 - DNA, 25 bp, Homo sapien
ctagcattggccagaatgaaggctg

SEQ ID NO: 219059 - DNA, 25 bp, Homo sapien
cattggccagaatgaaggctgaaag

SEQ ID NO: 219060 - DNA, 25 bp, Homo sapien
tggccagaatgaaggctgaaagagt

SEQ ID NO: 219061 - DNA, 25 bp, Homo sapien
tttgtgatcctgtaatttgtgagag

SEQ ID NO: 219062 - DNA, 25 bp, Homo sapien
ggtctttgctgccttccgaatcctc

SEQ ID NO: 219063 - DNA, 25 bp, Homo sapien
ctcctttgtgatcctgtaatttgtg

SEQ ID NO: 219064 - DNA, 25 bp, Homo sapien
gtgatcctgtaatttgtgagagagc

SEQ ID NO: 219065 - DNA, 25 bp, Homo sapien
ggctgtctgcgtccagatgttaagg

SEQ ID NO: 219066 - DNA, 25 bp, Homo sapien
gaacgctgtattggtttctcagggc

SEQ ID NO: 219067 - DNA, 25 bp, Homo sapien
agatgacccgcgtatttccaaggtt

SEQ ID NO: 219068 - DNA, 25 bp, Homo sapien
gctgctgtggtcttcatagaagatg

SEQ ID NO: 219069 - DNA, 25 bp, Homo sapien
caacattggccattagtgttaccaa

SEQ ID NO: 219070 - DNA, 25 bp, Homo sapien
ttagtgttaccaaagcaacatccat

SEQ ID NO: 219071 - DNA, 25 bp, Homo sapien
ctgatatgcacaacattggccatta

SEQ ID NO: 219072 - DNA, 25 bp, Homo sapien
tggccattagtgttaccaaagcaac

SEQ ID NO: 219073 - DNA, 25 bp, Homo sapien
tggacatacatgccaaaagccacgg

SEQ ID NO: 219074 - DNA, 25 bp, Homo sapien
gcctgtccccacctggacatacatg

SEQ ID NO: 219075 - DNA, 25 bp, Homo sapien
tgtccccacctggacatacatgcca

SEQ ID NO: 219076 - DNA, 25 bp, Homo sapien
ccccacctggacatacatgccaaaa

SEQ ID NO: 219077 - DNA, 25 bp, Homo sapien
tggttcttaagctcggttctctttc

SEQ ID NO: 219078 - DNA, 25 bp, Homo sapien
ggtgtctggcagagagtctggtgtc

SEQ ID NO: 219079 - DNA, 25 bp, Homo sapien
tgcttgatgcttgaatctctggtgt

SEQ ID NO: 219080 - DNA, 25 bp, Homo sapien
agtgctttgtatgtaggtcatgcca

SEQ ID NO: 219081 - DNA, 25 bp, Homo sapien
ccatggcctgtgaggaaccacgagc

SEQ ID NO: 219082 - DNA, 25 bp, Homo sapien
gcctgtgaggaaccacgagcttctt

SEQ ID NO: 219083 - DNA, 25 bp, Homo sapien
cctgtgaggaaccacgagcttcttt

SEQ ID NO: 219084 - DNA, 25 bp, Homo sapien
tggcctgtgaggaaccacgagcttc

SEQ ID NO: 219085 - DNA, 25 bp, Homo sapien
cctgctccaggtgataagtggcaat

SEQ ID NO: 219086 - DNA, 25 bp, Homo sapien
atccacatccccatcctgatctggc

SEQ ID NO: 219087 - DNA, 25 bp, Homo sapien
aggtgggcacgcacatccacatcca

SEQ ID NO: 219088 - DNA, 25 bp, Homo sapien
caggaaaccgcatcccccaggaaag

SEQ ID NO: 219089 - DNA, 25 bp, Homo sapien
taatctggggctttgcgggagaaaa

SEQ ID NO: 219090 - DNA, 25 bp, Homo sapien
tgcctcacacgccatcactaatctg

SEQ ID NO: 219091 - DNA, 25 bp, Homo sapien
cttcctgagtgcttaagtgtcccca

SEQ ID NO: 219092 - DNA, 25 bp, Homo sapien
tgagtgcttaagtgtccccaaaatg

SEQ ID NO: 219093 - DNA, 25 bp, Homo sapien
ctggcctggtgtaagctcttcttcc

SEQ ID NO: 219094 - DNA, 25 bp, Homo sapien
tggcctggtgtaagctcttcttcct

SEQ ID NO: 219095 - DNA, 25 bp, Homo sapien
caatggtgggtagcacatttgctaa

SEQ ID NO: 219096 - DNA, 25 bp, Homo sapien
tcaagacccagttcaaagcccacga

SEQ ID NO: 219097 - DNA, 25 bp, Homo sapien
cagttcaaagcccacgacaatggtg

SEQ ID NO: 219098 - DNA, 25 bp, Homo sapien
catggggcaggagtatgtgaacaaa

SEQ ID NO: 219099 - DNA, 25 bp, Homo sapien
aggaggctctgaggtgtccgaaaat

SEQ ID NO: 219100 - DNA, 25 bp, Homo sapien
ggctctgaggtgtccgaaaatttac

SEQ ID NO: 219101 - DNA, 25 bp, Homo sapien
gcgaggaggctctgaggtgtccgaa

SEQ ID NO: 219102 - DNA, 25 bp, Homo sapien
tctgaggtgtccgaaaatttacatc

SEQ ID NO: 219103 - DNA, 25 bp, Homo sapien
gcaccttggctggatgaatttttat

SEQ ID NO: 219104 - DNA, 25 bp, Homo sapien
tcatgtctctgtcactcacattgtc

SEQ ID NO: 219105 - DNA, 25 bp, Homo sapien
catgtctctgtcactcacattgtct

SEQ ID NO: 219106 - DNA, 25 bp, Homo sapien
tgtctctgtcactcacattgtcttt

SEQ ID NO: 219107 - DNA, 25 bp, Homo sapien
gctggcagtgatgttaggaaaaaac

SEQ ID NO: 219108 - DNA, 25 bp, Homo sapien
agttgctggcagtgatgttaggaaa

SEQ ID NO: 219109 - DNA, 25 bp, Homo sapien
cagtgatgttaggaaaaaacagggt

SEQ ID NO: 219110 - DNA, 25 bp, Homo sapien
ggcagtgatgttaggaaaaaacagg

SEQ ID NO: 219111 - DNA, 25 bp, Homo sapien
cattaagccacttggggcagaaggt

SEQ ID NO: 219112 - DNA, 25 bp, Homo sapien
ctccttgcttggcaaaggacattaa

SEQ ID NO: 219113 - DNA, 25 bp, Homo sapien
cttgcttggcaaaggacattaagcc

SEQ ID NO: 219114 - DNA, 25 bp, Homo sapien
ggacattaagccacttggggcagaa

SEQ ID NO: 219115 - DNA, 25 bp, Homo sapien
gcatccatgaggcagtcactacaaa

SEQ ID NO: 219116 - DNA, 25 bp, Homo sapien
agctgctaatatgggcacagccctc

SEQ ID NO: 219117 - DNA, 25 bp, Homo sapien
cattcgagtacagctgccactagta

SEQ ID NO: 219118 - DNA, 25 bp, Homo sapien
cactacaaagtctgagtgaatttct

SEQ ID NO: 219119 - DNA, 25 bp, Homo sapien
ttattaaatttgattccgcggcctg

SEQ ID NO: 219120 - DNA, 25 bp, Homo sapien
ttaaatttgattccgcggcctggtg

SEQ ID NO: 219121 - DNA, 25 bp, Homo sapien
ttgattccgcggcctggtgcaatgg

SEQ ID NO: 219122 - DNA, 25 bp, Homo sapien
tttgattccgcggcctggtgcaatg

SEQ ID NO: 219123 - DNA, 25 bp, Homo sapien
gacccaaaagctcccaaagtctgga

SEQ ID NO: 219124 - DNA, 25 bp, Homo sapien
gattctaggcagcttaggtatggag

SEQ ID NO: 219125 - DNA, 25 bp, Homo sapien
tcaagagactacatgggacccaaaa

SEQ ID NO: 219126 - DNA, 25 bp, Homo sapien
gattgacaggactagaaaggtgagc

SEQ ID NO: 219127 - DNA, 25 bp, Homo sapien
tgcctctttagctccctcatttcag

SEQ ID NO: 219128 - DNA, 25 bp, Homo sapien
acaggcggctgcctttggcctgtcc

SEQ ID NO: 219129 - DNA, 25 bp, Homo sapien
ttcatccacacaggcggctgccttt

SEQ ID NO: 219130 - DNA, 25 bp, Homo sapien
agtccgcagacccacagacctcagg

SEQ ID NO: 219131 - DNA, 25 bp, Homo sapien
cagggccccagggccacaaccacca

SEQ ID NO: 219132 - DNA, 25 bp, Homo sapien
ccagggccacaaccaccagggctcc

SEQ ID NO: 219133 - DNA, 25 bp, Homo sapien
agggccacaaccaccagggctcctg

SEQ ID NO: 219134 - DNA, 25 bp, Homo sapien
gccccagggccacaaccaccagggc

SEQ ID NO: 219135 - DNA, 25 bp, Homo sapien
agcagcaagcaagctgctcaaaccc

SEQ ID NO: 219136 - DNA, 25 bp, Homo sapien
ggcacggcaggttgaaagcagcaag

SEQ ID NO: 219137 - DNA, 25 bp, Homo sapien
ctgtgggcacggcaggttgaaagca

SEQ ID NO: 219138 - DNA, 25 bp, Homo sapien
aaagcagcaagcaagctgctcaaac

SEQ ID NO: 219139 - DNA, 25 bp, Homo sapien
cctgcagcaaagtcatgatggttct

SEQ ID NO: 219140 - DNA, 25 bp, Homo sapien
aagcaccattcatggcccccggaga

SEQ ID NO: 219141 - DNA, 25 bp, Homo sapien
tgactcttccaacagctctggctgc

SEQ ID NO: 219142 - DNA, 25 bp, Homo sapien
tgtggtcctgcagcaaagtcatgat

SEQ ID NO: 219143 - DNA, 25 bp, Homo sapien
tgtgtaagcagagccttgacagccc

SEQ ID NO: 219144 - DNA, 25 bp, Homo sapien
cctcaaataactctagtgggtggca

SEQ ID NO: 219145 - DNA, 25 bp, Homo sapien
caagccaagggtgcctgtgtaagca

SEQ ID NO: 219146 - DNA, 25 bp, Homo sapien
ctcttgagggtgaccgtgcaggcca

SEQ ID NO: 219147 - DNA, 25 bp, Homo sapien
gaaaagtatcctaagctcctgaggg

SEQ ID NO: 219148 - DNA, 25 bp, Homo sapien
cacccctaagtgtctgaagtgcaca

SEQ ID NO: 219149 - DNA, 25 bp, Homo sapien
tctcccaaggtctgttagcaaagca

SEQ ID NO: 219150 - DNA, 25 bp, Homo sapien
tcctgagggtgtggataaaaggccc

SEQ ID NO: 219151 - DNA, 25 bp, Homo sapien
tctttccaagtcttatgttgtgcca

SEQ ID NO: 219152 - DNA, 25 bp, Homo sapien
tatctgttaagaccacatatgcccc

SEQ ID NO: 219153 - DNA, 25 bp, Homo sapien
tgttgtgccatgacatagagggatt

SEQ ID NO: 219154 - DNA, 25 bp, Homo sapien
gatcctaaggagacatttaatatgg

SEQ ID NO: 219155 - DNA, 25 bp, Homo sapien
cctctctggagcagcaagtgcatgt

SEQ ID NO: 219156 - DNA, 25 bp, Homo sapien
gactaggtcgtctcgatggtccctt

SEQ ID NO: 219157 - DNA, 25 bp, Homo sapien
tggtcccttccagctagcggtgttc

SEQ ID NO: 219158 - DNA, 25 bp, Homo sapien
gagctggagggagacttccatcgaa

SEQ ID NO: 219159 - DNA, 25 bp, Homo sapien
tgcaggtagccagttacctcactac

SEQ ID NO: 219160 - DNA, 25 bp, Homo sapien
cagatgcccgcacagtgaagtgcat

SEQ ID NO: 219161 - DNA, 25 bp, Homo sapien
gactgccttttaccctgcaggtagc

SEQ ID NO: 219162 - DNA, 25 bp, Homo sapien
tgaagtgcatcttgctccagcagga

SEQ ID NO: 219163 - DNA, 25 bp, Homo sapien
cagttgctccgtcagtccaataaac

SEQ ID NO: 219164 - DNA, 25 bp, Homo sapien
cctgagcaatgcaacctcaacaagt

SEQ ID NO: 219165 - DNA, 25 bp, Homo sapien
tcaacaagtccagttgctccgtcag

SEQ ID NO: 219166 - DNA, 25 bp, Homo sapien
tcagtccaataaacagaggtttctc

SEQ ID NO: 219167 - DNA, 25 bp, Homo sapien
tccaaagcgaggtagtggaggagtc

SEQ ID NO: 219168 - DNA, 25 bp, Homo sapien
caaagcgaggtagtggaggagtcag

SEQ ID NO: 219169 - DNA, 25 bp, Homo sapien
tattccaaagcgaggtagtggagga

SEQ ID NO: 219170 - DNA, 25 bp, Homo sapien
cttattccaaagcgaggtagtggag

SEQ ID NO: 219171 - DNA, 25 bp, Homo sapien
gcacactctctaatctgtggaatcc

SEQ ID NO: 219172 - DNA, 25 bp, Homo sapien
attgcctagtgctgctggcgcagag

SEQ ID NO: 219173 - DNA, 25 bp, Homo sapien
tggcgcagagtcagaatggccgctg

SEQ ID NO: 219174 - DNA, 25 bp, Homo sapien
agtgatcccggcgttcgcacactct

SEQ ID NO: 219175 - DNA, 25 bp, Homo sapien
gttccagggacagtcggcagcaccc

SEQ ID NO: 219176 - DNA, 25 bp, Homo sapien
cactcctgttctcatgccctggttc

SEQ ID NO: 219177 - DNA, 25 bp, Homo sapien
actcctgttctcatgccctggttcc

SEQ ID NO: 219178 - DNA, 25 bp, Homo sapien
ctggttccagggacagtcggcagca

SEQ ID NO: 219179 - DNA, 25 bp, Homo sapien
gcaggaaacgtagcaatctcacatt

SEQ ID NO: 219180 - DNA, 25 bp, Homo sapien
ttctaaatccaataacagcatcctt

SEQ ID NO: 219181 - DNA, 25 bp, Homo sapien
caaaagcatctcagcagcacgtgaa

SEQ ID NO: 219182 - DNA, 25 bp, Homo sapien
cataactcttcctctgtgggccctg

SEQ ID NO: 219183 - DNA, 25 bp, Homo sapien
acttcctccggttaggaatccatgt

SEQ ID NO: 219184 - DNA, 25 bp, Homo sapien
gaaaacgctgcttagtctgttccct

SEQ ID NO: 219185 - DNA, 25 bp, Homo sapien
ggaatccatgtctgataagtgcctg

SEQ ID NO: 219186 - DNA, 25 bp, Homo sapien
tttctgtccaggtatctcctgaaaa

SEQ ID NO: 219187 - DNA, 25 bp, Homo sapien
agaatgccaccctcattccactcct

SEQ ID NO: 219188 - DNA, 25 bp, Homo sapien
gaagccaccaagaatttcctgcaag

SEQ ID NO: 219189 - DNA, 25 bp, Homo sapien
attccactcctgaagccaccaagaa

SEQ ID NO: 219190 - DNA, 25 bp, Homo sapien
actcctgaagccaccaagaatttcc

SEQ ID NO: 219191 - DNA, 25 bp, Homo sapien
agccgcttcgcagcatagaacctgc

SEQ ID NO: 219192 - DNA, 25 bp, Homo sapien
gcctgagataagctcaagcatgctc

SEQ ID NO: 219193 - DNA, 25 bp, Homo sapien
gagataagctcaagcatgctcaaga

SEQ ID NO: 219194 - DNA, 25 bp, Homo sapien
gcttcgcagcatagaacctgcctga

SEQ ID NO: 219195 - DNA, 25 bp, Homo sapien
ataaaatgcccttaagcccctgcga

SEQ ID NO: 219196 - DNA, 25 bp, Homo sapien
cagtgaacgtctcttttttgattaa

SEQ ID NO: 219197 - DNA, 25 bp, Homo sapien
ctcactgcggaagggtgagaaagac

SEQ ID NO: 219198 - DNA, 25 bp, Homo sapien
tacaagtaacacagaccccaggaat

SEQ ID NO: 219199 - DNA, 25 bp, Homo sapien
gaggaaccataacgggttccatagc

SEQ ID NO: 219200 - DNA, 25 bp, Homo sapien
tgtggaggaaccataacgggttcca

SEQ ID NO: 219201 - DNA, 25 bp, Homo sapien
tggaggaaccataacgggttccata

SEQ ID NO: 219202 - DNA, 25 bp, Homo sapien
tgccagcgtttctccgacatctcag

SEQ ID NO: 219203 - DNA, 25 bp, Homo sapien
gggcagcaaccttccgggagtcacc

SEQ ID NO: 219204 - DNA, 25 bp, Homo sapien
tctccccagttttagacatcattga

SEQ ID NO: 219205 - DNA, 25 bp, Homo sapien
gagtcacccgatgaagtcaggcagg

SEQ ID NO: 219206 - DNA, 25 bp, Homo sapien
ggctccttgagagcacgactcatct

SEQ ID NO: 219207 - DNA, 25 bp, Homo sapien
acgatttttcatgagcagggatgga

SEQ ID NO: 219208 - DNA, 25 bp, Homo sapien
cctgctaagttgcatggtgagctgt

SEQ ID NO: 219209 - DNA, 25 bp, Homo sapien
gctgtattcaacgaaacacgatttt

SEQ ID NO: 219210 - DNA, 25 bp, Homo sapien
cgacctgaaccctcatgacctccat

SEQ ID NO: 219211 - DNA, 25 bp, Homo sapien
cactgggtagcgagtagattgcagc

SEQ ID NO: 219212 - DNA, 25 bp, Homo sapien
tgagctgcctctcaagccgacctga

SEQ ID NO: 219213 - DNA, 25 bp, Homo sapien
gcgggaggtcactgggtagcgagta

SEQ ID NO: 219214 - DNA, 25 bp, Homo sapien
tgtccaaagttaaggctcccataca

SEQ ID NO: 219215 - DNA, 25 bp, Homo sapien
gtccaaagttaaggctcccatacac

SEQ ID NO: 219216 - DNA, 25 bp, Homo sapien
gctgtccaaagttaaggctcccata

SEQ ID NO: 219217 - DNA, 25 bp, Homo sapien
agctgtccaaagttaaggctcccat

SEQ ID NO: 219218 - DNA, 25 bp, Homo sapien
gtgcctctctgtcgctgtctctctg

SEQ ID NO: 219219 - DNA, 25 bp, Homo sapien
tgtgtgcgcctgtgcgtgcctctct

SEQ ID NO: 219220 - DNA, 25 bp, Homo sapien
gcaagcgcctcacgggcctgatgca

SEQ ID NO: 219221 - DNA, 25 bp, Homo sapien
gcctgatgcagtcctcctgaccgtt

SEQ ID NO: 219222 - DNA, 25 bp, Homo sapien
aaattcaagaggcatgagtggaccg

SEQ ID NO: 219223 - DNA, 25 bp, Homo sapien
gacggtcacaccttctggcaaattc

SEQ ID NO: 219224 - DNA, 25 bp, Homo sapien
gtggaccgagagcacatccagcatt

SEQ ID NO: 219225 - DNA, 25 bp, Homo sapien
ccctcgctgtctggagacggtcaca

SEQ ID NO: 219226 - DNA, 25 bp, Homo sapien
tttgaatcctgcctagtgccaaaga

SEQ ID NO: 219227 - DNA, 25 bp, Homo sapien
ggtcatcccagagcgagtggtccat

SEQ ID NO: 219228 - DNA, 25 bp, Homo sapien
cctagtgccaaagacaggatcagga

SEQ ID NO: 219229 - DNA, 25 bp, Homo sapien
aggtcatcccagagcgagtggtcca

SEQ ID NO: 219230 - DNA, 25 bp, Homo sapien
cagctccttctaggccacttagtgg

SEQ ID NO: 219231 - DNA, 25 bp, Homo sapien
tcagagttcccagtggatgaagccc

SEQ ID NO: 219232 - DNA, 25 bp, Homo sapien
agtccctgcaaaagtggttggctca

SEQ ID NO: 219233 - DNA, 25 bp, Homo sapien
accccagggtttgcagtgtccagtg

SEQ ID NO: 219234 - DNA, 25 bp, Homo sapien
gaagagtctccttggaaagggtcca

SEQ ID NO: 219235 - DNA, 25 bp, Homo sapien
tgtgatgaacttaagccagcagcaa

SEQ ID NO: 219236 - DNA, 25 bp, Homo sapien
ctccatgatcagcagaaaaattctg

SEQ ID NO: 219237 - DNA, 25 bp, Homo sapien
tagtaggagtcagatgtgatgaact

SEQ ID NO: 219238 - DNA, 25 bp, Homo sapien
tacccccttgtgatttacagaaaga

SEQ ID NO: 219239 - DNA, 25 bp, Homo sapien
agaaatgggaacttccacaaactcg

SEQ ID NO: 219240 - DNA, 25 bp, Homo sapien
acagaaagaaatgggaacttccaca

SEQ ID NO: 219241 - DNA, 25 bp, Homo sapien
tgggaacttccacaaactcgttggc

SEQ ID NO: 219242 - DNA, 25 bp, Homo sapien
taagcaggaaatggcggtaaaccca

SEQ ID NO: 219243 - DNA, 25 bp, Homo sapien
gaagtctagcggataaggtccaaca

SEQ ID NO: 219244 - DNA, 25 bp, Homo sapien
catatagtgggatgttactcggcaa

SEQ ID NO: 219245 - DNA, 25 bp, Homo sapien
gccagacataaagacgtacccgtaa

SEQ ID NO: 219246 - DNA, 25 bp, Homo sapien
ctctgaaaatgctaagggaagtctg

SEQ ID NO: 219247 - DNA, 25 bp, Homo sapien
gggagagtcatccaaaatgtccaag

SEQ ID NO: 219248 - DNA, 25 bp, Homo sapien
ttgaccacacttaactccaggaggg

SEQ ID NO: 219249 - DNA, 25 bp, Homo sapien
aaatacatggcatgcacatgggtgc

SEQ ID NO: 219250 - DNA, 25 bp, Homo sapien
tgtggggaagctcgtccattttcct

SEQ ID NO: 219251 - DNA, 25 bp, Homo sapien
ctgtggggaagctcgtccattttcc

SEQ ID NO: 219252 - DNA, 25 bp, Homo sapien
tccagaaatagtgcctgagttgccc

SEQ ID NO: 219253 - DNA, 25 bp, Homo sapien
tgctttctcgggtgagggatgcctc

SEQ ID NO: 219254 - DNA, 25 bp, Homo sapien
ggatgcctcgcagtatggacaccat

SEQ ID NO: 219255 - DNA, 25 bp, Homo sapien
gagtcatcccgtgcagaaaaagttg

SEQ ID NO: 219256 - DNA, 25 bp, Homo sapien
gagcttgatacgttccttaggcagg

SEQ ID NO: 219257 - DNA, 25 bp, Homo sapien
cctgacacacgtgggaagggcacat

SEQ ID NO: 219258 - DNA, 25 bp, Homo sapien
tcatctgcaagaggcaatgcggcgt

SEQ ID NO: 219259 - DNA, 25 bp, Homo sapien
gaacgtgcgagcattccatgggata

SEQ ID NO: 219260 - DNA, 25 bp, Homo sapien
ccaggtttgcttcgtatctgcaggt

SEQ ID NO: 219261 - DNA, 25 bp, Homo sapien
gcaatcccaggtttgcttcgtatct

SEQ ID NO: 219262 - DNA, 25 bp, Homo sapien
gaagcaatcccaggtttgcttcgta

SEQ ID NO: 219263 - DNA, 25 bp, Homo sapien
ctggaagaagcaatcccaggtttgc

SEQ ID NO: 219264 - DNA, 25 bp, Homo sapien
gaatcccagcgttcacaaatggagg

SEQ ID NO: 219265 - DNA, 25 bp, Homo sapien
taccataggagccacctgccaaagc

SEQ ID NO: 219266 - DNA, 25 bp, Homo sapien
ctggtcatccttcctaccataggag

SEQ ID NO: 219267 - DNA, 25 bp, Homo sapien
tcaactagagggcatccaaggcctg

SEQ ID NO: 219268 - DNA, 25 bp, Homo sapien
gaatcgaccgtgtgacgtagacagc

SEQ ID NO: 219269 - DNA, 25 bp, Homo sapien
tcaaaagaacgttgcccacaggctt

SEQ ID NO: 219270 - DNA, 25 bp, Homo sapien
aaggcgcctgatgagaccgtgttct

SEQ ID NO: 219271 - DNA, 25 bp, Homo sapien
ccagcagggccattcagagaagtct

SEQ ID NO: 219272 - DNA, 25 bp, Homo sapien
tggagtgtgcccaatctgtacttga

SEQ ID NO: 219273 - DNA, 25 bp, Homo sapien
cagcagtgccagatacaggcgtggg

SEQ ID NO: 219274 - DNA, 25 bp, Homo sapien
tgtgcccaatctgtacttgaagccc

SEQ ID NO: 219275 - DNA, 25 bp, Homo sapien
ctggtggagtgtgcccaatctgtac

SEQ ID NO: 219276 - DNA, 25 bp, Homo sapien
taatttagccagtaacagcctgccc

SEQ ID NO: 219277 - DNA, 25 bp, Homo sapien
caggccaggtgacttcatcagttca

SEQ ID NO: 219278 - DNA, 25 bp, Homo sapien
tacaatcacgattgcttggcagagc

SEQ ID NO: 219279 - DNA, 25 bp, Homo sapien
ccgtgatggcgcgatacttgaccta

SEQ ID NO: 219280 - DNA, 25 bp, Homo sapien
cactccttagcatctatcacggcag

SEQ ID NO: 219281 - DNA, 25 bp, Homo sapien
catctatcacggcagagggaaggga

SEQ ID NO: 219282 - DNA, 25 bp, Homo sapien
ttctttttcctatacgccactgttg

SEQ ID NO: 219283 - DNA, 25 bp, Homo sapien
tttcctatacgccactgttgcttcc

SEQ ID NO: 219284 - DNA, 25 bp, Homo sapien
gaccacggaccagttagactctatg

SEQ ID NO: 219285 - DNA, 25 bp, Homo sapien
catggaagggcaaaccaagtccgta

SEQ ID NO: 219286 - DNA, 25 bp, Homo sapien
tatgacctgaggttggcactggagc

SEQ ID NO: 219287 - DNA, 25 bp, Homo sapien
tatttgctagacagggttggtgcca

SEQ ID NO: 219288 - DNA, 25 bp, Homo sapien
acttccacgacaggctaaaaaccag

SEQ ID NO: 219289 - DNA, 25 bp, Homo sapien
gtgggagtgtgagcgtggctctggc

SEQ ID NO: 219290 - DNA, 25 bp, Homo sapien
aggcctgggacttgcggcatcctgt

SEQ ID NO: 219291 - DNA, 25 bp, Homo sapien
ttctccctcgggctgagacatgggg

SEQ ID NO: 219292 - DNA, 25 bp, Homo sapien
gagaaaaaatgtgcccctctgatgg

SEQ ID NO: 219293 - DNA, 25 bp, Homo sapien
gagttctaaaatgtggccaccctgg

SEQ ID NO: 219294 - DNA, 25 bp, Homo sapien
ttattagcctttggagacagcctgc

SEQ ID NO: 219295 - DNA, 25 bp, Homo sapien
cattggcccaaggtcagtcagctag

SEQ ID NO: 219296 - DNA, 25 bp, Homo sapien
tggaaaaaggaattcagagcgtcgc

SEQ ID NO: 219297 - DNA, 25 bp, Homo sapien
ggaaaaaggaattcagagcgtcgca

SEQ ID NO: 219298 - DNA, 25 bp, Homo sapien
ttggaaaaaggaattcagagcgtcg

SEQ ID NO: 219299 - DNA, 25 bp, Homo sapien
caggagaagctgaaccaggtctcca

SEQ ID NO: 219300 - DNA, 25 bp, Homo sapien
cagcattcggacacatgattgggca

SEQ ID NO: 219301 - DNA, 25 bp, Homo sapien
ggacacatgattgggcagccttcgc

SEQ ID NO: 219302 - DNA, 25 bp, Homo sapien
acatgattgggcagccttcgctccc

SEQ ID NO: 219303 - DNA, 25 bp, Homo sapien
aatgggaaccaatgagagggcctcg

SEQ ID NO: 219304 - DNA, 25 bp, Homo sapien
aagtgcaacttccttccggtagaga

SEQ ID NO: 219305 - DNA, 25 bp, Homo sapien
taacaagtactgactggctatggcg

SEQ ID NO: 219306 - DNA, 25 bp, Homo sapien
tttaagcagtggctcaagaccaggc

SEQ ID NO: 219307 - DNA, 25 bp, Homo sapien
tgagcagttcccagcataagtggca

SEQ ID NO: 219308 - DNA, 25 bp, Homo sapien
ttgagcagttcccagcataagtggc

SEQ ID NO: 219309 - DNA, 25 bp, Homo sapien
ccactggccctaacttcttgtaaat

SEQ ID NO: 219310 - DNA, 25 bp, Homo sapien
gcaatgcagaaaccaagtcccaggc

SEQ ID NO: 219311 - DNA, 25 bp, Homo sapien
tggccctaacttcttgtaaatcctg

SEQ ID NO: 219312 - DNA, 25 bp, Homo sapien
tttggcaatgcagaaaccaagtccc

SEQ ID NO: 219313 - DNA, 25 bp, Homo sapien
taaacagtacatgtgatagcctcgg

SEQ ID NO: 219314 - DNA, 25 bp, Homo sapien
atagcctcggtcacagtcatcgcag

SEQ ID NO: 219315 - DNA, 25 bp, Homo sapien
agtcatcgcagaagagtagctggtc

SEQ ID NO: 219316 - DNA, 25 bp, Homo sapien
caccgggggatttaaacagtacatg

SEQ ID NO: 219317 - DNA, 25 bp, Homo sapien
ggtggaacacagagtaagcacagag

SEQ ID NO: 219318 - DNA, 25 bp, Homo sapien
ctggtggaacacagagtaagcacag

SEQ ID NO: 219319 - DNA, 25 bp, Homo sapien
gtaagcacagaggaggagagattcc

SEQ ID NO: 219320 - DNA, 25 bp, Homo sapien
aagcacagaggaggagagattccat

SEQ ID NO: 219321 - DNA, 25 bp, Homo sapien
ttcctatcaggtttctggtcctttg

SEQ ID NO: 219322 - DNA, 25 bp, Homo sapien
tgcaaaatgtttatgtagtcagata

SEQ ID NO: 219323 - DNA, 25 bp, Homo sapien
caggtttctggtcctttgtcctcaa

SEQ ID NO: 219324 - DNA, 25 bp, Homo sapien
tatcaggtttctggtcctttgtcct

SEQ ID NO: 219325 - DNA, 25 bp, Homo sapien
tcaaaggaccccagctctgtggatt

SEQ ID NO: 219326 - DNA, 25 bp, Homo sapien
gtggatttctccctcccacagggaa

SEQ ID NO: 219327 - DNA, 25 bp, Homo sapien
tcccacagggaaagccccaaactca

SEQ ID NO: 219328 - DNA, 25 bp, Homo sapien
ggaccccagctctgtggatttctcc

SEQ ID NO: 219329 - DNA, 25 bp, Homo sapien
gcctcggtcatgttcagggtaaact

SEQ ID NO: 219330 - DNA, 25 bp, Homo sapien
ccacagaggatacaggatttgcact

SEQ ID NO: 219331 - DNA, 25 bp, Homo sapien
gatttgcactctatgcactgccact

SEQ ID NO: 219332 - DNA, 25 bp, Homo sapien
acttgtaggtcttgacagcctcggt

SEQ ID NO: 219333 - DNA, 25 bp, Homo sapien
tattcagatcaagggcaaaacagag

SEQ ID NO: 219334 - DNA, 25 bp, Homo sapien
ggagctgggccttctgatccaacca

SEQ ID NO: 219335 - DNA, 25 bp, Homo sapien
gggcagcactatgagagacaccagt

SEQ ID NO: 219336 - DNA, 25 bp, Homo sapien
tgagaccatattccccagcaggtgt

SEQ ID NO: 219337 - DNA, 25 bp, Homo sapien
ctccagagcttccagttctgccaaa

SEQ ID NO: 219338 - DNA, 25 bp, Homo sapien
cgttctccagagcttccagttctgc

SEQ ID NO: 219339 - DNA, 25 bp, Homo sapien
gagcttccagttctgccaaacccat

SEQ ID NO: 219340 - DNA, 25 bp, Homo sapien
agagcttccagttctgccaaaccca

SEQ ID NO: 219341 - DNA, 25 bp, Homo sapien
ggattatatgctttaaagaaggatg

SEQ ID NO: 219342 - DNA, 25 bp, Homo sapien
gccttgtgttgcctctttcatttga

SEQ ID NO: 219343 - DNA, 25 bp, Homo sapien
cctctttcatttgaaggattatatg

SEQ ID NO: 219344 - DNA, 25 bp, Homo sapien
tatatggtgccttgtgttgcctctt

SEQ ID NO: 219345 - DNA, 25 bp, Homo sapien
tagtatcctccacagacaggatccc

SEQ ID NO: 219346 - DNA, 25 bp, Homo sapien
gccacatcttaacaggagcccccat

SEQ ID NO: 219347 - DNA, 25 bp, Homo sapien
caatcatggttagcaccgccaacct

SEQ ID NO: 219348 - DNA, 25 bp, Homo sapien
gttagcaccgccaacctagtatcct

SEQ ID NO: 219349 - DNA, 25 bp, Homo sapien
cacaaaaattacttcaataatacac

SEQ ID NO: 219350 - DNA, 25 bp, Homo sapien
ctgccacaaaaattacttcaataat

SEQ ID NO: 219351 - DNA, 25 bp, Homo sapien
gccacaaaaattacttcaataatac

SEQ ID NO: 219352 - DNA, 25 bp, Homo sapien
acaaaaattacttcaataatacaca

SEQ ID NO: 219353 - DNA, 25 bp, Homo sapien
ttctaatgctgaagacacctgcaaa

SEQ ID NO: 219354 - DNA, 25 bp, Homo sapien
ggtctgcaggttcacctctatctgc

SEQ ID NO: 219355 - DNA, 25 bp, Homo sapien
aatcgatgatcacaatggcactcca

SEQ ID NO: 219356 - DNA, 25 bp, Homo sapien
gacacctgcaaatcgatgatcacaa

SEQ ID NO: 219357 - DNA, 25 bp, Homo sapien
gggccaaagctaggccctgccagcc

SEQ ID NO: 219358 - DNA, 25 bp, Homo sapien
cccggcgatgaatcaaatcccactg

SEQ ID NO: 219359 - DNA, 25 bp, Homo sapien
atcccactggaagccgtgcctttct

SEQ ID NO: 219360 - DNA, 25 bp, Homo sapien
agtttctgtccttcccccggcgatg

SEQ ID NO: 219361 - DNA, 25 bp, Homo sapien
ccccagagtctgatcaagtggcagt

SEQ ID NO: 219362 - DNA, 25 bp, Homo sapien
tcttcagtcctaggtgactgagcct

SEQ ID NO: 219363 - DNA, 25 bp, Homo sapien
cagagtctgatcaagtggcagtgat

SEQ ID NO: 219364 - DNA, 25 bp, Homo sapien
cttggatcgaagatcttcagtccta

SEQ ID NO: 219365 - DNA, 25 bp, Homo sapien
gccctccttgcctccatgcggaatt

SEQ ID NO: 219366 - DNA, 25 bp, Homo sapien
tcccaggcacccatctcttttgccc

SEQ ID NO: 219367 - DNA, 25 bp, Homo sapien
tccttgcctccatgcggaatttttc

SEQ ID NO: 219368 - DNA, 25 bp, Homo sapien
ccaggcctctcaatctccctgaaga

SEQ ID NO: 219369 - DNA, 25 bp, Homo sapien
cactgcccttgagggaaaaatgagg

SEQ ID NO: 219370 - DNA, 25 bp, Homo sapien
ctccacactgcccttgagggaaaaa

SEQ ID NO: 219371 - DNA, 25 bp, Homo sapien
cttgagggaaaaatgaggacccaga

SEQ ID NO: 219372 - DNA, 25 bp, Homo sapien
gccccatccacactccacactgccc

SEQ ID NO: 219373 - DNA, 25 bp, Homo sapien
ccttctctgttagacaagctctagg

SEQ ID NO: 219374 - DNA, 25 bp, Homo sapien
tctctgttagacaagctctagggtc

SEQ ID NO: 219375 - DNA, 25 bp, Homo sapien
tccttctctgttagacaagctctag

SEQ ID NO: 219376 - DNA, 25 bp, Homo sapien
cttctctgttagacaagctctaggg

SEQ ID NO: 219377 - DNA, 25 bp, Homo sapien
ctgacagctgaggatagggcagcac

SEQ ID NO: 219378 - DNA, 25 bp, Homo sapien
tgcacaccccataggtaccctggat

SEQ ID NO: 219379 - DNA, 25 bp, Homo sapien
tccagccaatgctgtgaccagcggc

SEQ ID NO: 219380 - DNA, 25 bp, Homo sapien
ccagcggctctctgtaggtgcacac

SEQ ID NO: 219381 - DNA, 25 bp, Homo sapien
ctggagtgggtccagccaatgctgt

SEQ ID NO: 219382 - DNA, 25 bp, Homo sapien
tgaaatccatgcaccaaagatgatg

SEQ ID NO: 219383 - DNA, 25 bp, Homo sapien
gtcctgtgagcaattatgaaatcca

SEQ ID NO: 219384 - DNA, 25 bp, Homo sapien
ggtcattcaaccaaaatcatgctga

SEQ ID NO: 219385 - DNA, 25 bp, Homo sapien
ccccagattggagacaacatagtag

SEQ ID NO: 219386 - DNA, 25 bp, Homo sapien
tggtgagttaggcaccaactcttcc

SEQ ID NO: 219387 - DNA, 25 bp, Homo sapien
ggtggtgagttaggcaccaactctt

SEQ ID NO: 219388 - DNA, 25 bp, Homo sapien
gagttaggcaccaactcttccaggt

SEQ ID NO: 219389 - DNA, 25 bp, Homo sapien
gtgagttaggcaccaactcttccag

SEQ ID NO: 219390 - DNA, 25 bp, Homo sapien
gatgctaaaccattgatgaccactg

SEQ ID NO: 219391 - DNA, 25 bp, Homo sapien
gaaaactaacttctgggtgacttca

SEQ ID NO: 219392 - DNA, 25 bp, Homo sapien
tatgtgatcacagggtagaacttgg

SEQ ID NO: 219393 - DNA, 25 bp, Homo sapien
tcaggtaaccaaacgatgtgtgtcg

SEQ ID NO: 219394 - DNA, 25 bp, Homo sapien
tgtttccgagtggatgaggaacatg

SEQ ID NO: 219395 - DNA, 25 bp, Homo sapien
catctatggtaactacatgtttccg

SEQ ID NO: 219396 - DNA, 25 bp, Homo sapien
tctggcccatgtgtgtacttttgcc

SEQ ID NO: 219397 - DNA, 25 bp, Homo sapien
taactacatgtttccgagtggatga

SEQ ID NO: 219398 - DNA, 25 bp, Homo sapien
catgataactaggaggcaggctgct

SEQ ID NO: 219399 - DNA, 25 bp, Homo sapien
tgtctgaaacacacgcacaggaggg

SEQ ID NO: 219400 - DNA, 25 bp, Homo sapien
tgtagagtaattccaggcggacctg

SEQ ID NO: 219401 - DNA, 25 bp, Homo sapien
tggagtccccaggtcataatgttga

SEQ ID NO: 219402 - DNA, 25 bp, Homo sapien
tgataagcagtctgttaaccaggca

SEQ ID NO: 219403 - DNA, 25 bp, Homo sapien
gactgtcaaagtagatcttcccaga

SEQ ID NO: 219404 - DNA, 25 bp, Homo sapien
ggtctcccaacccatgtcaaatggt

SEQ ID NO: 219405 - DNA, 25 bp, Homo sapien
tcaaatggttctgcctgtgtttcca

SEQ ID NO: 219406 - DNA, 25 bp, Homo sapien
cttccaggtttagccaagggaggca

SEQ ID NO: 219407 - DNA, 25 bp, Homo sapien
ccttaaagggagtgcagaatcttcc

SEQ ID NO: 219408 - DNA, 25 bp, Homo sapien
cagccaagttgagttttgtgcctaa

SEQ ID NO: 219409 - DNA, 25 bp, Homo sapien
cacctagacatgcagtgccctgtgg

SEQ ID NO: 219410 - DNA, 25 bp, Homo sapien
tagtgcaaccgtctcccattgagga

SEQ ID NO: 219411 - DNA, 25 bp, Homo sapien
gggcggcttgcctctaaacaggata

SEQ ID NO: 219412 - DNA, 25 bp, Homo sapien
ttttgactaggacctcgcagccggt

SEQ ID NO: 219413 - DNA, 25 bp, Homo sapien
tacggtagccttgatcatccaatgg

SEQ ID NO: 219414 - DNA, 25 bp, Homo sapien
tcatcaaagccgtggaaagttgacg

SEQ ID NO: 219415 - DNA, 25 bp, Homo sapien
taagtcctccgtggtacgtgctgcg

SEQ ID NO: 219416 - DNA, 25 bp, Homo sapien
tgacgtggaaccgaataagtcctcc

SEQ ID NO: 219417 - DNA, 25 bp, Homo sapien
ttttatctgctgtgggcgaaccccg

SEQ ID NO: 219418 - DNA, 25 bp, Homo sapien
tacaatgctattcttaatagcaaga

SEQ ID NO: 219419 - DNA, 25 bp, Homo sapien
tattcttaatagcaagatataaaac

SEQ ID NO: 219420 - DNA, 25 bp, Homo sapien
cacatgggttaagcaacagacagca

SEQ ID NO: 219421 - DNA, 25 bp, Homo sapien
tgaatatatcagcacatgggttaag

SEQ ID NO: 219422 - DNA, 25 bp, Homo sapien
tgacggggatttgggacaaagcaaa

SEQ ID NO: 219423 - DNA, 25 bp, Homo sapien
cagcttccgacagcaaaagattcaa

SEQ ID NO: 219424 - DNA, 25 bp, Homo sapien
caaagggattaacccggtgcatcac

SEQ ID NO: 219425 - DNA, 25 bp, Homo sapien
tgcatcacctggtgacggggatttg

SEQ ID NO: 219426 - DNA, 25 bp, Homo sapien
tgtcagataacccattcaaggtggt

SEQ ID NO: 219427 - DNA, 25 bp, Homo sapien
cagctgtacaaaggtattactgtca

SEQ ID NO: 219428 - DNA, 25 bp, Homo sapien
tcaaggtggttaagcctccatctat

SEQ ID NO: 219429 - DNA, 25 bp, Homo sapien
tgcatacacacaggcgcttgcacgc

SEQ ID NO: 219430 - DNA, 25 bp, Homo sapien
actcgaaagcattgccaccatcgct

SEQ ID NO: 219431 - DNA, 25 bp, Homo sapien
cggatcctagggcataacttttggt

SEQ ID NO: 219432 - DNA, 25 bp, Homo sapien
gatcctagggcataacttttggttc

SEQ ID NO: 219433 - DNA, 25 bp, Homo sapien
gagctgaaaactcctctccactcga

SEQ ID NO: 219434 - DNA, 25 bp, Homo sapien
ccggtgtgggaaggggccacactca

SEQ ID NO: 219435 - DNA, 25 bp, Homo sapien
cggtgtgggaaggggccacactcac

SEQ ID NO: 219436 - DNA, 25 bp, Homo sapien
agcgtccacagtctgcgcaggacac

SEQ ID NO: 219437 - DNA, 25 bp, Homo sapien
tgcgcaggacaccagctcttcaggc

SEQ ID NO: 219438 - DNA, 25 bp, Homo sapien
cttcaggccgcccactcttcttgtt

SEQ ID NO: 219439 - DNA, 25 bp, Homo sapien
cagagcgtccacagtctgcgcagga

SEQ ID NO: 219440 - DNA, 25 bp, Homo sapien
gaatgactgttccatccggtccttt

SEQ ID NO: 219441 - DNA, 25 bp, Homo sapien
tattgggaatgactgttccatccgg

SEQ ID NO: 219442 - DNA, 25 bp, Homo sapien
gtagttattgggaatgactgttcca

SEQ ID NO: 219443 - DNA, 25 bp, Homo sapien
cagaagtcacagtagttattgggaa

SEQ ID NO: 219444 - DNA, 25 bp, Homo sapien
tgcctggaccttgccattgggaaca

SEQ ID NO: 219445 - DNA, 25 bp, Homo sapien
agtgcctggaccttgccattgggaa

SEQ ID NO: 219446 - DNA, 25 bp, Homo sapien
cagtgctcttgtttaggagatattc

SEQ ID NO: 219447 - DNA, 25 bp, Homo sapien
tgccattgggaacagtgctcttgtt

SEQ ID NO: 219448 - DNA, 25 bp, Homo sapien
ggctaacgttaatcagggtcccata

SEQ ID NO: 219449 - DNA, 25 bp, Homo sapien
gggtcccatacggtacaaatctgaa

SEQ ID NO: 219450 - DNA, 25 bp, Homo sapien
catccagacagtaagtgataaacgg

SEQ ID NO: 219451 - DNA, 25 bp, Homo sapien
tgtgagcagaaataccatccagaca

SEQ ID NO: 219452 - DNA, 25 bp, Homo sapien
gagctttgaagagtaaatgtgccta

SEQ ID NO: 219453 - DNA, 25 bp, Homo sapien
ccaaacagcctaagttagtaaagag

SEQ ID NO: 219454 - DNA, 25 bp, Homo sapien
atgtcagagtcctaacccccaaagg

SEQ ID NO: 219455 - DNA, 25 bp, Homo sapien
tatgacctagaatttgtaatgcagg

SEQ ID NO: 219456 - DNA, 25 bp, Homo sapien
gatccaagccttgggactagggccc

SEQ ID NO: 219457 - DNA, 25 bp, Homo sapien
tgaaaagccacaatgcagcatgatg

SEQ ID NO: 219458 - DNA, 25 bp, Homo sapien
taggaccatgacaaagatccaagcc

SEQ ID NO: 219459 - DNA, 25 bp, Homo sapien
gttaagggacatcggtaggaccatg

SEQ ID NO: 219460 - DNA, 25 bp, Homo sapien
tgtttgagctccaagcatccctggc

SEQ ID NO: 219461 - DNA, 25 bp, Homo sapien
ggacaaacgtacaggaaacacaaga

SEQ ID NO: 219462 - DNA, 25 bp, Homo sapien
cacaagaaatgtatactcaggagaa

SEQ ID NO: 219463 - DNA, 25 bp, Homo sapien
cagaaaagcactatttcccagaggg

SEQ ID NO: 219464 - DNA, 25 bp, Homo sapien
tgcaggcccagagaccataagggat

SEQ ID NO: 219465 - DNA, 25 bp, Homo sapien
aggcccagagaccataagggatgtt

SEQ ID NO: 219466 - DNA, 25 bp, Homo sapien
caggcccagagaccataagggatgt

SEQ ID NO: 219467 - DNA, 25 bp, Homo sapien
ctgcaggcccagagaccataaggga

SEQ ID NO: 219468 - DNA, 25 bp, Homo sapien
tgctattgctaagcctagggttggg

SEQ ID NO: 219469 - DNA, 25 bp, Homo sapien
tattgctaagcctagggttgggctg

SEQ ID NO: 219470 - DNA, 25 bp, Homo sapien
gccctgctattgctaagcctagggt

SEQ ID NO: 219471 - DNA, 25 bp, Homo sapien
ccagccctgctattgctaagcctag

SEQ ID NO: 219472 - DNA, 25 bp, Homo sapien
ctgaaagggccaacacactacagca

SEQ ID NO: 219473 - DNA, 25 bp, Homo sapien
gggccaacacactacagcacattga

SEQ ID NO: 219474 - DNA, 25 bp, Homo sapien
aacacactacagcacattgagacca

SEQ ID NO: 219475 - DNA, 25 bp, Homo sapien
gcacattgagaccactcaacggttg

SEQ ID NO: 219476 - DNA, 25 bp, Homo sapien
agtgtgagcatagtggtagctgagc

SEQ ID NO: 219477 - DNA, 25 bp, Homo sapien
ctgagccccggtcggttcttgtagc

SEQ ID NO: 219478 - DNA, 25 bp, Homo sapien
cccggtcggttcttgtagcgcttgc

SEQ ID NO: 219479 - DNA, 25 bp, Homo sapien
tcctggtcttgagcttcatccccct

SEQ ID NO: 219480 - DNA, 25 bp, Homo sapien
caggtcccaaccagtcctgagtcag

SEQ ID NO: 219481 - DNA, 25 bp, Homo sapien
ctgccaaggtgaacccaggtcccaa

SEQ ID NO: 219482 - DNA, 25 bp, Homo sapien
cagagtgattagctgctcagtagtc

SEQ ID NO: 219483 - DNA, 25 bp, Homo sapien
gagtcaggcataaaattcccttctg

SEQ ID NO: 219484 - DNA, 25 bp, Homo sapien
gctgactggcgtggcctgcttcacc

SEQ ID NO: 219485 - DNA, 25 bp, Homo sapien
gactggcgtggcctgcttcacccat

SEQ ID NO: 219486 - DNA, 25 bp, Homo sapien
ccaccccaacggcctggggctgact

SEQ ID NO: 219487 - DNA, 25 bp, Homo sapien
gggctgactggcgtggcctgcttca

SEQ ID NO: 219488 - DNA, 25 bp, Homo sapien
taatgaaaagcacctctacaatggt

SEQ ID NO: 219489 - DNA, 25 bp, Homo sapien
aataactccagagggtgtgggtcac

SEQ ID NO: 219490 - DNA, 25 bp, Homo sapien
caagaaacagttagtggagagcaag

SEQ ID NO: 219491 - DNA, 25 bp, Homo sapien
caacctctgctttgcgtatctgtaa

SEQ ID NO: 219492 - DNA, 25 bp, Homo sapien
gctgaagacgcacatctgtagggtg

SEQ ID NO: 219493 - DNA, 25 bp, Homo sapien
gaagagaccctagaccctattctga

SEQ ID NO: 219494 - DNA, 25 bp, Homo sapien
tcatgcttctaggagggctttagcc

SEQ ID NO: 219495 - DNA, 25 bp, Homo sapien
ctttgctgagacagaggtggccttg

SEQ ID NO: 219496 - DNA, 25 bp, Homo sapien
ttgtcggagggttttgagttatgct

SEQ ID NO: 219497 - DNA, 25 bp, Homo sapien
tgtcggagggttttgagttatgctt

SEQ ID NO: 219498 - DNA, 25 bp, Homo sapien
tgtcacagacgtaaggtttgtcgtg

SEQ ID NO: 219499 - DNA, 25 bp, Homo sapien
ctgagaggcggcgtcgtgcctcctc

SEQ ID NO: 219500 - DNA, 25 bp, Homo sapien
tcctgagaggcggcgtcgtgcctcc

SEQ ID NO: 219501 - DNA, 25 bp, Homo sapien
cagacgtaaggtttgtcgtggtctt

SEQ ID NO: 219502 - DNA, 25 bp, Homo sapien
caaagagcccagtcagagaggttgc

SEQ ID NO: 219503 - DNA, 25 bp, Homo sapien
ggtcacgtgtatagcaccctcgcct

SEQ ID NO: 219504 - DNA, 25 bp, Homo sapien
tggtgacaagaacacagcgaggttt

SEQ ID NO: 219505 - DNA, 25 bp, Homo sapien
acctttgtaagtcccacactggtca

SEQ ID NO: 219506 - DNA, 25 bp, Homo sapien
ttccatggctccgtgcatgggtaac

SEQ ID NO: 219507 - DNA, 25 bp, Homo sapien
catggctccgtgcatgggtaacatg

SEQ ID NO: 219508 - DNA, 25 bp, Homo sapien
ctgtacaacatggaaccattcagct

SEQ ID NO: 219509 - DNA, 25 bp, Homo sapien
gggtaacatgtccacagtatcactg

SEQ ID NO: 219510 - DNA, 25 bp, Homo sapien
aatcattggctatatgctgggccct

SEQ ID NO: 219511 - DNA, 25 bp, Homo sapien
ctaatcattggctatatgctgggcc

SEQ ID NO: 219512 - DNA, 25 bp, Homo sapien
tcattggctatatgctgggccctgg

SEQ ID NO: 219513 - DNA, 25 bp, Homo sapien
taatcattggctatatgctgggccc

SEQ ID NO: 219514 - DNA, 25 bp, Homo sapien
caggctacgacctgggatcagagct

SEQ ID NO: 219515 - DNA, 25 bp, Homo sapien
aactcttccaggctacgacctggga

SEQ ID NO: 219516 - DNA, 25 bp, Homo sapien
ttttctcctttgagcgttctccatg

SEQ ID NO: 219517 - DNA, 25 bp, Homo sapien
gagttttctcctttgagcgttctcc

SEQ ID NO: 219518 - DNA, 25 bp, Homo sapien
ctagtcctgttctttcgcttgggaa

SEQ ID NO: 219519 - DNA, 25 bp, Homo sapien
cctgttctttcgcttgggaatatcc

SEQ ID NO: 219520 - DNA, 25 bp, Homo sapien
ttcgcttgggaatatcctcttccaa

SEQ ID NO: 219521 - DNA, 25 bp, Homo sapien
cctctagtcctgttctttcgcttgg

SEQ ID NO: 219522 - DNA, 25 bp, Homo sapien
gaagagttttctaacaagagactat

SEQ ID NO: 219523 - DNA, 25 bp, Homo sapien
cccttttctatgtggggccaaaatg

SEQ ID NO: 219524 - DNA, 25 bp, Homo sapien
ctggtaggggcccttttctatgtgg

SEQ ID NO: 219525 - DNA, 25 bp, Homo sapien
ctaacaagagactatgctggtaggg

SEQ ID NO: 219526 - DNA, 25 bp, Homo sapien
gttcatcggctcagggttccccatt

SEQ ID NO: 219527 - DNA, 25 bp, Homo sapien
tgagtgctccagatcatccagtgaa

SEQ ID NO: 219528 - DNA, 25 bp, Homo sapien
gaccaaagcaaggtcaggttcatcg

SEQ ID NO: 219529 - DNA, 25 bp, Homo sapien
tttagtacccgacttgtcatggagc

SEQ ID NO: 219530 - DNA, 25 bp, Homo sapien
tagaggcagctgagctagtccccag

SEQ ID NO: 219531 - DNA, 25 bp, Homo sapien
catatctgggagtaaactgacttct

SEQ ID NO: 219532 - DNA, 25 bp, Homo sapien
ccgcaatatggactctgggttggaa

SEQ ID NO: 219533 - DNA, 25 bp, Homo sapien
gtgtcacatggcctccatatctggg

SEQ ID NO: 219534 - DNA, 25 bp, Homo sapien
cagccatccgcctgaagggtgagga

SEQ ID NO: 219535 - DNA, 25 bp, Homo sapien
tgaggacggcatgggcttgagggat

SEQ ID NO: 219536 - DNA, 25 bp, Homo sapien
catggatagagggtagtggacccat

SEQ ID NO: 219537 - DNA, 25 bp, Homo sapien
tcagtgagagttttagaagtggcat

SEQ ID NO: 219538 - DNA, 25 bp, Homo sapien
tgctctctgaggtgaacccatcctt

SEQ ID NO: 219539 - DNA, 25 bp, Homo sapien
cccctcgccacggagcaaggcttcc

SEQ ID NO: 219540 - DNA, 25 bp, Homo sapien
ttctcaaccccctcgccacggagca

SEQ ID NO: 219541 - DNA, 25 bp, Homo sapien
agcaaggcttccagcgtggtgctct

SEQ ID NO: 219542 - DNA, 25 bp, Homo sapien
gcttcaaaagccacgggaagaggag

SEQ ID NO: 219543 - DNA, 25 bp, Homo sapien
tatcaggagtttgatcagctacctg

SEQ ID NO: 219544 - DNA, 25 bp, Homo sapien
aggagcgacggcgaatgcctcacaa

SEQ ID NO: 219545 - DNA, 25 bp, Homo sapien
tcacaagccccggatgagcagagtg

SEQ ID NO: 219546 - DNA, 25 bp, Homo sapien
agagaagtggcaacccgagccagcc

SEQ ID NO: 219547 - DNA, 25 bp, Homo sapien
cagcagagaagtggcaacccgagcc

SEQ ID NO: 219548 - DNA, 25 bp, Homo sapien
gcagagaagtggcaacccgagccag

SEQ ID NO: 219549 - DNA, 25 bp, Homo sapien
ccagcagagaagtggcaacccgagc

SEQ ID NO: 219550 - DNA, 25 bp, Homo sapien
aggaagcggcaagcgggcatccatt

SEQ ID NO: 219551 - DNA, 25 bp, Homo sapien
gagggagtctgaccaatccatgagg

SEQ ID NO: 219552 - DNA, 25 bp, Homo sapien
gcgggcatccattaaaactgaacaa

SEQ ID NO: 219553 - DNA, 25 bp, Homo sapien
caatccatgaggaagcggcaagcgg

SEQ ID NO: 219554 - DNA, 25 bp, Homo sapien
agcttctgtgcaaaccgaagcaaat

SEQ ID NO: 219555 - DNA, 25 bp, Homo sapien
tgtgcaaaccgaagcaaatcggttt

SEQ ID NO: 219556 - DNA, 25 bp, Homo sapien
tctgtgcaaaccgaagcaaatcggt

SEQ ID NO: 219557 - DNA, 25 bp, Homo sapien
cttctgtgcaaaccgaagcaaatcg

SEQ ID NO: 219558 - DNA, 25 bp, Homo sapien
tccactgggttgttggagccaccga

SEQ ID NO: 219559 - DNA, 25 bp, Homo sapien
tcattaacaggatgcaggcgagatg

SEQ ID NO: 219560 - DNA, 25 bp, Homo sapien
gccatcctcttgggtgcagatcaaa

SEQ ID NO: 219561 - DNA, 25 bp, Homo sapien
tcttgggtgcagatcaaagccacaa

SEQ ID NO: 219562 - DNA, 25 bp, Homo sapien
gagctgccagcagaccaggtaaatg

SEQ ID NO: 219563 - DNA, 25 bp, Homo sapien
tgagctgccagcagaccaggtaaat

SEQ ID NO: 219564 - DNA, 25 bp, Homo sapien
gctgccagcagaccaggtaaatgca

SEQ ID NO: 219565 - DNA, 25 bp, Homo sapien
ctgccagcagaccaggtaaatgcag

SEQ ID NO: 219566 - DNA, 25 bp, Homo sapien
atgaccgtggacactcagcagcagc

SEQ ID NO: 219567 - DNA, 25 bp, Homo sapien
tcccactgcaaaacatgaccgtgga

SEQ ID NO: 219568 - DNA, 25 bp, Homo sapien
aactcatgctctacacgtggctctg

SEQ ID NO: 219569 - DNA, 25 bp, Homo sapien
tgcaaaacatgaccgtggacactca

SEQ ID NO: 219570 - DNA, 25 bp, Homo sapien
gaggccaaccagagctgacgaagct

SEQ ID NO: 219571 - DNA, 25 bp, Homo sapien
atgaggccaaccagagctgacgaag

SEQ ID NO: 219572 - DNA, 25 bp, Homo sapien
catgaggccaaccagagctgacgaa

SEQ ID NO: 219573 - DNA, 25 bp, Homo sapien
ctcatgaggccaaccagagctgacg

SEQ ID NO: 219574 - DNA, 25 bp, Homo sapien
gagataaatgactggtcatttcccc

SEQ ID NO: 219575 - DNA, 25 bp, Homo sapien
agccgtaccaagctcaggcaacccc

SEQ ID NO: 219576 - DNA, 25 bp, Homo sapien
gagacagataagcactgacagatgg

SEQ ID NO: 219577 - DNA, 25 bp, Homo sapien
atccattctcccagccgtaccaagc

SEQ ID NO: 219578 - DNA, 25 bp, Homo sapien
cgttcttgcccacccccgcctggct

SEQ ID NO: 219579 - DNA, 25 bp, Homo sapien
ctggctcgaggctccgcgggtccct

SEQ ID NO: 219580 - DNA, 25 bp, Homo sapien
gaggctccgcgggtcccttcctcca

SEQ ID NO: 219581 - DNA, 25 bp, Homo sapien
ttcttgcccacccccgcctggctca

SEQ ID NO: 219582 - DNA, 25 bp, Homo sapien
ctttgggagatacccctctgcaggt

SEQ ID NO: 219583 - DNA, 25 bp, Homo sapien
accttaagccactgtcgtcttcggg

SEQ ID NO: 219584 - DNA, 25 bp, Homo sapien
gcaggtccctacgacttgcttgttg

SEQ ID NO: 219585 - DNA, 25 bp, Homo sapien
cctctctgctttgggacaccttaag

SEQ ID NO: 219586 - DNA, 25 bp, Homo sapien
agcagaagggatcgacaaggcctca

SEQ ID NO: 219587 - DNA, 25 bp, Homo sapien
cctggagcagaagggatcgacaagg

SEQ ID NO: 219588 - DNA, 25 bp, Homo sapien
ctcggaattcggcaagggtggcaaa

SEQ ID NO: 219589 - DNA, 25 bp, Homo sapien
aggaggagcgtcaactgtaaagccc

SEQ ID NO: 219590 - DNA, 25 bp, Homo sapien
attcgcctctgtggccaagtgcaag

SEQ ID NO: 219591 - DNA, 25 bp, Homo sapien
cccaagtctttgtgttgtagaattg

SEQ ID NO: 219592 - DNA, 25 bp, Homo sapien
ccctgcccaagtctttgtgttgtag

SEQ ID NO: 219593 - DNA, 25 bp, Homo sapien
atcatgaaacaccttgcattcgcct

SEQ ID NO: 219594 - DNA, 25 bp, Homo sapien
tttccagcctgaaaggtccactcat

SEQ ID NO: 219595 - DNA, 25 bp, Homo sapien
agcaaagtgcttcgggggactgaat

SEQ ID NO: 219596 - DNA, 25 bp, Homo sapien
aacagccctcaagattcttgaacgt

SEQ ID NO: 219597 - DNA, 25 bp, Homo sapien
aaaggatggttctgtggcactgtcc

SEQ ID NO: 219598 - DNA, 25 bp, Homo sapien
aagggcatcatacgttttgtaaacg

SEQ ID NO: 219599 - DNA, 25 bp, Homo sapien
acaaaaccatatgtgctagtcaagg

SEQ ID NO: 219600 - DNA, 25 bp, Homo sapien
tgtgctagtcaaggccctggatgaa

SEQ ID NO: 219601 - DNA, 25 bp, Homo sapien
cagaaagggcatcatacgttttgta

SEQ ID NO: 219602 - DNA, 25 bp, Homo sapien
cttgtcctgggcccagcccagtcct

SEQ ID NO: 219603 - DNA, 25 bp, Homo sapien
gtcctgggcccagcccagtcctccc

SEQ ID NO: 219604 - DNA, 25 bp, Homo sapien
ttgtcctgggcccagcccagtcctc

SEQ ID NO: 219605 - DNA, 25 bp, Homo sapien
cctgggcccagcccagtcctcccac

SEQ ID NO: 219606 - DNA, 25 bp, Homo sapien
ctttcccatcacagacccagccaag

SEQ ID NO: 219607 - DNA, 25 bp, Homo sapien
atcacagacccagccaagctccaga

SEQ ID NO: 219608 - DNA, 25 bp, Homo sapien
ccatcacagacccagccaagctcca

SEQ ID NO: 219609 - DNA, 25 bp, Homo sapien
ttcccatcacagacccagccaagct

SEQ ID NO: 219610 - DNA, 25 bp, Homo sapien
cagcagccgcagttttggatcttca

SEQ ID NO: 219611 - DNA, 25 bp, Homo sapien
aatcgtctcttcttgcgccagcagc

SEQ ID NO: 219612 - DNA, 25 bp, Homo sapien
tcaggtgggtgcaatcgtctcttct

SEQ ID NO: 219613 - DNA, 25 bp, Homo sapien
ccagcagcgggcagggtatgtatac

SEQ ID NO: 219614 - DNA, 25 bp, Homo sapien
atgaggagccttcctgctcacccga

SEQ ID NO: 219615 - DNA, 25 bp, Homo sapien
cactgtcatgccaagcaccatgagg

SEQ ID NO: 219616 - DNA, 25 bp, Homo sapien
ccgacaacaattgtgtgtggctctg

SEQ ID NO: 219617 - DNA, 25 bp, Homo sapien
tcctgctcacccgacaacaattgtg

SEQ ID NO: 219618 - DNA, 25 bp, Homo sapien
cttagaggaacagggacttctccat

SEQ ID NO: 219619 - DNA, 25 bp, Homo sapien
acagggacttctccatgccaggtca

SEQ ID NO: 219620 - DNA, 25 bp, Homo sapien
ggacttctccatgccaggtcacaga

SEQ ID NO: 219621 - DNA, 25 bp, Homo sapien
gggacttctccatgccaggtcacag

SEQ ID NO: 219622 - DNA, 25 bp, Homo sapien
ccccagtggctgctttacggtgctt

SEQ ID NO: 219623 - DNA, 25 bp, Homo sapien
gtttccttcgttccccagtggctgc

SEQ ID NO: 219624 - DNA, 25 bp, Homo sapien
gtggctgctttacggtgcttccaac

SEQ ID NO: 219625 - DNA, 25 bp, Homo sapien
ccagtggctgctttacggtgcttcc

SEQ ID NO: 219626 - DNA, 25 bp, Homo sapien
acacagccgtgagttgtaactccgg

SEQ ID NO: 219627 - DNA, 25 bp, Homo sapien
tccggcagtgctcaatggcttcctt

SEQ ID NO: 219628 - DNA, 25 bp, Homo sapien
ccaccccagtctgtgagtccaggaa

SEQ ID NO: 219629 - DNA, 25 bp, Homo sapien
aagggaagacgcacgctgcgctctg

SEQ ID NO: 219630 - DNA, 25 bp, Homo sapien
agtgaaggggtgaggccagggaaga

SEQ ID NO: 219631 - DNA, 25 bp, Homo sapien
tgccagagtcagagagtgaaggggt

SEQ ID NO: 219632 - DNA, 25 bp, Homo sapien
ctgccagagtcagagagtgaagggg

SEQ ID NO: 219633 - DNA, 25 bp, Homo sapien
cagagtcagagagtgaaggggtgag

SEQ ID NO: 219634 - DNA, 25 bp, Homo sapien
acagagaggtgtccaacgtgagagc

SEQ ID NO: 219635 - DNA, 25 bp, Homo sapien
tgtccaacgtgagagcagcaatctg

SEQ ID NO: 219636 - DNA, 25 bp, Homo sapien
gacaagaacatttgacagagaggtg

SEQ ID NO: 219637 - DNA, 25 bp, Homo sapien
cacatcgatagagaactgacaagaa

SEQ ID NO: 219638 - DNA, 25 bp, Homo sapien
acagcgtcaatccagacaagaggaa

SEQ ID NO: 219639 - DNA, 25 bp, Homo sapien
agcgtcaatccagacaagaggaaca

SEQ ID NO: 219640 - DNA, 25 bp, Homo sapien
gcgtcaatccagacaagaggaacaa

SEQ ID NO: 219641 - DNA, 25 bp, Homo sapien
cagcgtcaatccagacaagaggaac

SEQ ID NO: 219642 - DNA, 25 bp, Homo sapien
gaggacaggtgtcctgccataccag

SEQ ID NO: 219643 - DNA, 25 bp, Homo sapien
aggtgtcctgccataccagaaatgt

SEQ ID NO: 219644 - DNA, 25 bp, Homo sapien
tgctcccgcccactcaagtctcaat

SEQ ID NO: 219645 - DNA, 25 bp, Homo sapien
atgtgagtccaatagcaagtttctc

SEQ ID NO: 219646 - DNA, 25 bp, Homo sapien
aaggctggaagtcagtgctggcagg

SEQ ID NO: 219647 - DNA, 25 bp, Homo sapien
tgcaactgacagcttgaatgatacc

SEQ ID NO: 219648 - DNA, 25 bp, Homo sapien
gataccgaatcctggccttgtagaa

SEQ ID NO: 219649 - DNA, 25 bp, Homo sapien
gcttgaatgataccgaatcctggcc

SEQ ID NO: 219650 - DNA, 25 bp, Homo sapien
tgcagagctgatccgtgtcctcctg

SEQ ID NO: 219651 - DNA, 25 bp, Homo sapien
cctgggcccacgggtggtgccaggg

SEQ ID NO: 219652 - DNA, 25 bp, Homo sapien
agctgatccgtgtcctcctgcagag

SEQ ID NO: 219653 - DNA, 25 bp, Homo sapien
tttcctgcagagctgatccgtgtcc

SEQ ID NO: 219654 - DNA, 25 bp, Homo sapien
ctgaaggtcatccggagggcgcagt

SEQ ID NO: 219655 - DNA, 25 bp, Homo sapien
gaaggtcatccggagggcgcagtct

SEQ ID NO: 219656 - DNA, 25 bp, Homo sapien
ggtcatccggagggcgcagtctccc

SEQ ID NO: 219657 - DNA, 25 bp, Homo sapien
aaggtcatccggagggcgcagtctc

SEQ ID NO: 219658 - DNA, 25 bp, Homo sapien
ttcccaattcgtccacctcatcaag

SEQ ID NO: 219659 - DNA, 25 bp, Homo sapien
atcttctttcccaattcgtccacct

SEQ ID NO: 219660 - DNA, 25 bp, Homo sapien
ttctttcccaattcgtccacctcat

SEQ ID NO: 219661 - DNA, 25 bp, Homo sapien
aattcgtccacctcatcaagagtca

SEQ ID NO: 219662 - DNA, 25 bp, Homo sapien
cagacacacaggattctagtcaatt

SEQ ID NO: 219663 - DNA, 25 bp, Homo sapien
gacacacaggattctagtcaattcc

SEQ ID NO: 219664 - DNA, 25 bp, Homo sapien
ccagacacacaggattctagtcaat

SEQ ID NO: 219665 - DNA, 25 bp, Homo sapien
cacacaggattctagtcaattccat

SEQ ID NO: 219666 - DNA, 25 bp, Homo sapien
agcaagcccacagcaagctgtcctc

SEQ ID NO: 219667 - DNA, 25 bp, Homo sapien
gctggcttgaaggtttgccctggca

SEQ ID NO: 219668 - DNA, 25 bp, Homo sapien
gcaagcccacagcaagctgtcctcc

SEQ ID NO: 219669 - DNA, 25 bp, Homo sapien
caagcctgcaagcacagacccctct

SEQ ID NO: 219670 - DNA, 25 bp, Homo sapien
ggcccaggactgtcacgaggagact

SEQ ID NO: 219671 - DNA, 25 bp, Homo sapien
caggcccaggactgtcacgaggaga

SEQ ID NO: 219672 - DNA, 25 bp, Homo sapien
agcctgcaagcacagacccctctga

SEQ ID NO: 219673 - DNA, 25 bp, Homo sapien
gcaaattcaacgtgattttcattgg

SEQ ID NO: 219674 - DNA, 25 bp, Homo sapien
aaattcaacgtgattttcattggac

SEQ ID NO: 219675 - DNA, 25 bp, Homo sapien
tgcctgcagctcccttgcatagatg

SEQ ID NO: 219676 - DNA, 25 bp, Homo sapien
cagctcccttgcatagatgatgctg

SEQ ID NO: 219677 - DNA, 25 bp, Homo sapien
aaaaagccagctcatgagttaactc

SEQ ID NO: 219678 - DNA, 25 bp, Homo sapien
caggcagtattatccactccagggg

SEQ ID NO: 219679 - DNA, 25 bp, Homo sapien
tccactcattgccaccaccagtgcc

SEQ ID NO: 219680 - DNA, 25 bp, Homo sapien
gccagctcatgagttaactcccagg

SEQ ID NO: 219681 - DNA, 25 bp, Homo sapien
cgattttacggttctagaggtcaga

SEQ ID NO: 219682 - DNA, 25 bp, Homo sapien
gaagctctaagggagcagtttcttc

SEQ ID NO: 219683 - DNA, 25 bp, Homo sapien
cccagaagtgggtcaagggcatcca

SEQ ID NO: 219684 - DNA, 25 bp, Homo sapien
ggagccttagcaggttggaactttg

SEQ ID NO: 219685 - DNA, 25 bp, Homo sapien
caggtctggcactgctaaatggaaa

SEQ ID NO: 219686 - DNA, 25 bp, Homo sapien
cccagtatgggaagtcagaagctcc

SEQ ID NO: 219687 - DNA, 25 bp, Homo sapien
aagtatggctcttccacaacctcag

SEQ ID NO: 219688 - DNA, 25 bp, Homo sapien
tcttgagatcagtgtagctgagctc

SEQ ID NO: 219689 - DNA, 25 bp, Homo sapien
gagggctctctctaatggggacctt

SEQ ID NO: 219690 - DNA, 25 bp, Homo sapien
tcttctgggatccagtcagggcttc

SEQ ID NO: 219691 - DNA, 25 bp, Homo sapien
cttcctcttgaattgtggtcccatg

SEQ ID NO: 219692 - DNA, 25 bp, Homo sapien
caggcaccttcagccttgaaactcc

SEQ ID NO: 219693 - DNA, 25 bp, Homo sapien
aaatgtgtaccgagcttccgggctg

SEQ ID NO: 219694 - DNA, 25 bp, Homo sapien
tacgtcagcaaatgtgtaccgagct

SEQ ID NO: 219695 - DNA, 25 bp, Homo sapien
tcatgccagggtgtgttctaatacg

SEQ ID NO: 219696 - DNA, 25 bp, Homo sapien
tgttctaatacgtcagcaaatgtgt

SEQ ID NO: 219697 - DNA, 25 bp, Homo sapien
gggctccttcgaaaatgcttcaaac

SEQ ID NO: 219698 - DNA, 25 bp, Homo sapien
tcgggggctccttcgaaaatgcttc

SEQ ID NO: 219699 - DNA, 25 bp, Homo sapien
tccttcgaaaatgcttcaaaccatg

SEQ ID NO: 219700 - DNA, 25 bp, Homo sapien
aaaatgcttcaaaccatgacaccag

SEQ ID NO: 219701 - DNA, 25 bp, Homo sapien
tcccagctgataggaactgctgagc

SEQ ID NO: 219702 - DNA, 25 bp, Homo sapien
ccagcccacagcaacgagagagttt

SEQ ID NO: 219703 - DNA, 25 bp, Homo sapien
taaagcccctctagcaaaaggatct

SEQ ID NO: 219704 - DNA, 25 bp, Homo sapien
tgagccagtaaaaccctgacaggat

SEQ ID NO: 219705 - DNA, 25 bp, Homo sapien
caagaaacaatctaggataagccac

SEQ ID NO: 219706 - DNA, 25 bp, Homo sapien
aaaaaacaagtctggccatggcggc

SEQ ID NO: 219707 - DNA, 25 bp, Homo sapien
ccatggcggctcagtcctataatcc

SEQ ID NO: 219708 - DNA, 25 bp, Homo sapien
taagccactaggttgagtaaacgct

SEQ ID NO: 219709 - DNA, 25 bp, Homo sapien
tcttctaaatgtaaactctcagatg

SEQ ID NO: 219710 - DNA, 25 bp, Homo sapien
tgtcttataattagtctccctctct

SEQ ID NO: 219711 - DNA, 25 bp, Homo sapien
tctcagatgtcaagaactagatctt

SEQ ID NO: 219712 - DNA, 25 bp, Homo sapien
cccagcctatgccttgtcttataat

SEQ ID NO: 219713 - DNA, 25 bp, Homo sapien
tcccataaggcctctcacagtacaa

SEQ ID NO: 219714 - DNA, 25 bp, Homo sapien
ggtagaaacctcttagtctgcctca

SEQ ID NO: 219715 - DNA, 25 bp, Homo sapien
tattaaatcaaactccaggagcccc

SEQ ID NO: 219716 - DNA, 25 bp, Homo sapien
tgatggctaactcgaatcaagaagc

SEQ ID NO: 219717 - DNA, 25 bp, Homo sapien
caatggaatagatgtgacgcactta

SEQ ID NO: 219718 - DNA, 25 bp, Homo sapien
tgaccatcgggaacggaagtatgac

SEQ ID NO: 219719 - DNA, 25 bp, Homo sapien
taatgactgctacccaaatttcaga

SEQ ID NO: 219720 - DNA, 25 bp, Homo sapien
gacgcacttagcatgtgaccatcgg

SEQ ID NO: 219721 - DNA, 25 bp, Homo sapien
tccctgaaacccgacacatctgagt

SEQ ID NO: 219722 - DNA, 25 bp, Homo sapien
cctgctcatgggaattaaagctgta

SEQ ID NO: 219723 - DNA, 25 bp, Homo sapien
gatctcactagttccttccctgaaa

SEQ ID NO: 219724 - DNA, 25 bp, Homo sapien
tggacaaatgaaccccttgtcaccc

SEQ ID NO: 219725 - DNA, 25 bp, Homo sapien
tcgacacctaaaacctgtgcgttgt

SEQ ID NO: 219726 - DNA, 25 bp, Homo sapien
taaaacctgtgcgttgtgttcaaga

SEQ ID NO: 219727 - DNA, 25 bp, Homo sapien
tatttgactcttcgacacctaaaac

SEQ ID NO: 219728 - DNA, 25 bp, Homo sapien
gtgttcaagatacacccgccggaga

SEQ ID NO: 219729 - DNA, 25 bp, Homo sapien
atccaggtccaaagaagaagccagt

SEQ ID NO: 219730 - DNA, 25 bp, Homo sapien
aatccaggtccaaagaagaagccag

SEQ ID NO: 219731 - DNA, 25 bp, Homo sapien
gtgttctcagaaggggttggagcct

SEQ ID NO: 219732 - DNA, 25 bp, Homo sapien
tgtgttctcagaaggggttggagcc

SEQ ID NO: 219733 - DNA, 25 bp, Homo sapien
tactccagccactggataagcgcac

SEQ ID NO: 219734 - DNA, 25 bp, Homo sapien
ctactccagccactggataagcgca

SEQ ID NO: 219735 - DNA, 25 bp, Homo sapien
gcctactccagccactggataagcg

SEQ ID NO: 219736 - DNA, 25 bp, Homo sapien
tggcctactccagccactggataag

SEQ ID NO: 219737 - DNA, 25 bp, Homo sapien
agtcaagagcagcagtgagaaaggg

SEQ ID NO: 219738 - DNA, 25 bp, Homo sapien
gataactcactaccctcagactagc

SEQ ID NO: 219739 - DNA, 25 bp, Homo sapien
agataactcactaccctcagactag

SEQ ID NO: 219740 - DNA, 25 bp, Homo sapien
actagtcaagagcagcagtgagaaa

SEQ ID NO: 219741 - DNA, 25 bp, Homo sapien
tgcctcccagattcaagtgattctc

SEQ ID NO: 219742 - DNA, 25 bp, Homo sapien
ttgctctattaaccaggctgcagtg

SEQ ID NO: 219743 - DNA, 25 bp, Homo sapien
cagtggcacgatcttggctcaacac

SEQ ID NO: 219744 - DNA, 25 bp, Homo sapien
aacctctgcctcccagattcaagtg

SEQ ID NO: 219745 - DNA, 25 bp, Homo sapien
gtgataagctgataagaaaatccaa

SEQ ID NO: 219746 - DNA, 25 bp, Homo sapien
ggaaatggagacctgacctcaaagg

SEQ ID NO: 219747 - DNA, 25 bp, Homo sapien
aatgaatttttcatgggccatcaac

SEQ ID NO: 219748 - DNA, 25 bp, Homo sapien
gctatagttgtcatcagcaaatcag

SEQ ID NO: 219749 - DNA, 25 bp, Homo sapien
tattcctggagagatagtagcccat

SEQ ID NO: 219750 - DNA, 25 bp, Homo sapien
tctagaaggttcaaccacctggtgg

SEQ ID NO: 219751 - DNA, 25 bp, Homo sapien
tggtggaagacatagaacgccttgt

SEQ ID NO: 219752 - DNA, 25 bp, Homo sapien
cacagagtggtgatctacccaggac

SEQ ID NO: 219753 - DNA, 25 bp, Homo sapien
aaagagccttaggtgtcccttcagg

SEQ ID NO: 219754 - DNA, 25 bp, Homo sapien
ccttcaggtctaaaatactactcag

SEQ ID NO: 219755 - DNA, 25 bp, Homo sapien
actaaggcgtggtccttccctccag

SEQ ID NO: 219756 - DNA, 25 bp, Homo sapien
tactactcagagattccttttgaac

SEQ ID NO: 219757 - DNA, 25 bp, Homo sapien
gactacatttggtgcacgagaactt

SEQ ID NO: 219758 - DNA, 25 bp, Homo sapien
gacccctagctctccttaagttgtg

SEQ ID NO: 219759 - DNA, 25 bp, Homo sapien
tgctaatataaccagtgacctccta

SEQ ID NO: 219760 - DNA, 25 bp, Homo sapien
gacctcctatgtgagtgcttgatca

SEQ ID NO: 219761 - DNA, 25 bp, Homo sapien
gaacacagtgacttaagtttcatgt

SEQ ID NO: 219762 - DNA, 25 bp, Homo sapien
gtctgccactgagatggctgtgatg

SEQ ID NO: 219763 - DNA, 25 bp, Homo sapien
gggtctgccactgagatggctgtga

SEQ ID NO: 219764 - DNA, 25 bp, Homo sapien
aattgaacacagtgacttaagtttc

SEQ ID NO: 219765 - DNA, 25 bp, Homo sapien
taaaaggtcagcagaaatggtggga

SEQ ID NO: 219766 - DNA, 25 bp, Homo sapien
gaacaggcccttctctattctaagg

SEQ ID NO: 219767 - DNA, 25 bp, Homo sapien
ttctcctccatagaactgggattgg

SEQ ID NO: 219768 - DNA, 25 bp, Homo sapien
tagagcgctcccacgataatagatg

SEQ ID NO: 219769 - DNA, 25 bp, Homo sapien
tgagatctgaccccaccgcaatgct

SEQ ID NO: 219770 - DNA, 25 bp, Homo sapien
caccgcaatgctctctggtctactt

SEQ ID NO: 219771 - DNA, 25 bp, Homo sapien
gtgcctttaatatcagctactcctg

SEQ ID NO: 219772 - DNA, 25 bp, Homo sapien
gaagtacaagatcacttgaacgtgg

SEQ ID NO: 219773 - DNA, 25 bp, Homo sapien
cacatccattatttcatgtgggccg

SEQ ID NO: 219774 - DNA, 25 bp, Homo sapien
ccacatccattatttcatgtgggcc

SEQ ID NO: 219775 - DNA, 25 bp, Homo sapien
ttggtcttcaagttcctcattctca

SEQ ID NO: 219776 - DNA, 25 bp, Homo sapien
cttctggatgggatgctagtgagaa

SEQ ID NO: 219777 - DNA, 25 bp, Homo sapien
cacgtcaaaataggccaattggtct

SEQ ID NO: 219778 - DNA, 25 bp, Homo sapien
accaaaaactgagtgcttatccacg

SEQ ID NO: 219779 - DNA, 25 bp, Homo sapien
tccacttgggttctcgcagacatta

SEQ ID NO: 219780 - DNA, 25 bp, Homo sapien
ctgtgacaatgcctccacttgggtt

SEQ ID NO: 219781 - DNA, 25 bp, Homo sapien
gacaatgcctccacttgggttctcg

SEQ ID NO: 219782 - DNA, 25 bp, Homo sapien
gcctccacttgggttctcgcagaca

SEQ ID NO: 219783 - DNA, 25 bp, Homo sapien
cataggtgtctcatcaaaagcagac

SEQ ID NO: 219784 - DNA, 25 bp, Homo sapien
taggtgtctcatcaaaagcagacat

SEQ ID NO: 219785 - DNA, 25 bp, Homo sapien
ataggtgtctcatcaaaagcagaca

SEQ ID NO: 219786 - DNA, 25 bp, Homo sapien
ctacatgcaggcctttatcaaatcc

SEQ ID NO: 219787 - DNA, 25 bp, Homo sapien
aaccagaacgtgactaatctacatg

SEQ ID NO: 219788 - DNA, 25 bp, Homo sapien
tcccaggtatgcacaaatcaaccag

SEQ ID NO: 219789 - DNA, 25 bp, Homo sapien
ccagaacgtgactaatctacatgca

SEQ ID NO: 219790 - DNA, 25 bp, Homo sapien
tcccacgtggaaaaagctagtacag

SEQ ID NO: 219791 - DNA, 25 bp, Homo sapien
gaactaattccactaaccggccaga

SEQ ID NO: 219792 - DNA, 25 bp, Homo sapien
cacaagcttagagatactgcgcccg

SEQ ID NO: 219793 - DNA, 25 bp, Homo sapien
caataacaacgtgtgtgctcctgcg

SEQ ID NO: 219794 - DNA, 25 bp, Homo sapien
gacttggcggcttaacagttccact

SEQ ID NO: 219795 - DNA, 25 bp, Homo sapien
ttcggtagaaacagcatcagcggtg

SEQ ID NO: 219796 - DNA, 25 bp, Homo sapien
agtgtatccgagcttccgagccaga

SEQ ID NO: 219797 - DNA, 25 bp, Homo sapien
cagagcgacactagttttccgaggc

SEQ ID NO: 219798 - DNA, 25 bp, Homo sapien
caggatctgggcaagcgctcaaagt

SEQ ID NO: 219799 - DNA, 25 bp, Homo sapien
tcgttaatccactaaagccagctcg

SEQ ID NO: 219800 - DNA, 25 bp, Homo sapien
tctcctgacatttctgcgcgttggg

SEQ ID NO: 219801 - DNA, 25 bp, Homo sapien
gagaacaccattcataagacctgcg

SEQ ID NO: 219802 - DNA, 25 bp, Homo sapien
tcagggggttgtgaatgacagtcgc

SEQ ID NO: 219803 - DNA, 25 bp, Homo sapien
cagggggttgtgaatgacagtcgcc

SEQ ID NO: 219804 - DNA, 25 bp, Homo sapien
agggggttgtgaatgacagtcgcca

SEQ ID NO: 219805 - DNA, 25 bp, Homo sapien
gggggttgtgaatgacagtcgccat

SEQ ID NO: 219806 - DNA, 25 bp, Homo sapien
tggcgagcccctgacaaaattggga

SEQ ID NO: 219807 - DNA, 25 bp, Homo sapien
tgggagacttctgcgaagtcaggct

SEQ ID NO: 219808 - DNA, 25 bp, Homo sapien
caagtcagtgtgaactcttcactgg

SEQ ID NO: 219809 - DNA, 25 bp, Homo sapien
ggcttccactgggcaccgggaagct

SEQ ID NO: 219810 - DNA, 25 bp, Homo sapien
gatcaaatagctaagatagtggggg

SEQ ID NO: 219811 - DNA, 25 bp, Homo sapien
agttcttcaaagctatgccctctcg

SEQ ID NO: 219812 - DNA, 25 bp, Homo sapien
agctatgccctctcgcttccttttg

SEQ ID NO: 219813 - DNA, 25 bp, Homo sapien
tgccaaattgccagttcttcaaagc

SEQ ID NO: 219814 - DNA, 25 bp, Homo sapien
atttgttgaatgccatccgtttgaa

SEQ ID NO: 219815 - DNA, 25 bp, Homo sapien
ccctggcccagctcaagtatttgtt

SEQ ID NO: 219816 - DNA, 25 bp, Homo sapien
gttccctgagatccagaaccagctc

SEQ ID NO: 219817 - DNA, 25 bp, Homo sapien
gaaccagctctgatatgttcctcca

SEQ ID NO: 219818 - DNA, 25 bp, Homo sapien
cagccatggcctcagcgactggttg

SEQ ID NO: 219819 - DNA, 25 bp, Homo sapien
gctctgatatgttcctccaggcact

SEQ ID NO: 219820 - DNA, 25 bp, Homo sapien
atcctggtagttcttctgtcctaag

SEQ ID NO: 219821 - DNA, 25 bp, Homo sapien
ctgaaatcctggtagttcttctgtc

SEQ ID NO: 219822 - DNA, 25 bp, Homo sapien
aaatcctggtagttcttctgtccta

SEQ ID NO: 219823 - DNA, 25 bp, Homo sapien
gaaatcctggtagttcttctgtcct

SEQ ID NO: 219824 - DNA, 25 bp, Homo sapien
ccagctttgtacactataagtgggt

SEQ ID NO: 219825 - DNA, 25 bp, Homo sapien
cagctttgtacactataatgcccag

SEQ ID NO: 219826 - DNA, 25 bp, Homo sapien
tatatgaagcctgaaggctgaggtg

SEQ ID NO: 219827 - DNA, 25 bp, Homo sapien
gaggattgcctaagtccagaggtca

SEQ ID NO: 219828 - DNA, 25 bp, Homo sapien
gggaaatcctgttgggttccagctc

SEQ ID NO: 219829 - DNA, 25 bp, Homo sapien
ggaaatcctgttgggttccagctct

SEQ ID NO: 219830 - DNA, 25 bp, Homo sapien
gaaatcctgttgggttccagctcta

SEQ ID NO: 219831 - DNA, 25 bp, Homo sapien
tgctcatgaaacctacaacaccttc

SEQ ID NO: 219832 - DNA, 25 bp, Homo sapien
tctttgctcatgaaacctacaacac

SEQ ID NO: 219833 - DNA, 25 bp, Homo sapien
tttgctcatgaaacctacaacacct

SEQ ID NO: 219834 - DNA, 25 bp, Homo sapien
tttctttgctcatgaaacctacaac

SEQ ID NO: 219835 - DNA, 25 bp, Homo sapien
ggagatgcagagttggtaatggcac

SEQ ID NO: 219836 - DNA, 25 bp, Homo sapien
gatgcagagttggtaatggcactcc

SEQ ID NO: 219837 - DNA, 25 bp, Homo sapien
ggaggagatgcagagttggtaatgg

SEQ ID NO: 219838 - DNA, 25 bp, Homo sapien
gagatgcagagttggtaatggcact

SEQ ID NO: 219839 - DNA, 25 bp, Homo sapien
gacgcttaaatagtcccagatttgg

SEQ ID NO: 219840 - DNA, 25 bp, Homo sapien
cactggttgtactgctgtcagggtc

SEQ ID NO: 219841 - DNA, 25 bp, Homo sapien
cagtaggagccccttcaaattaaat

SEQ ID NO: 219842 - DNA, 25 bp, Homo sapien
tcattttagaacttccctgctctag

SEQ ID NO: 219843 - DNA, 25 bp, Homo sapien
ggacttctagcttcccagactctga

SEQ ID NO: 219844 - DNA, 25 bp, Homo sapien
agcctgccttaagcaagttctgaga

SEQ ID NO: 219845 - DNA, 25 bp, Homo sapien
tgcataaagccacccagtctgcggt

SEQ ID NO: 219846 - DNA, 25 bp, Homo sapien
taataccgatccatctagccaaaag

SEQ ID NO: 219847 - DNA, 25 bp, Homo sapien
tccctaatgactcctgcagcaatgg

SEQ ID NO: 219848 - DNA, 25 bp, Homo sapien
tctacaacagcaacacaccgtggct

SEQ ID NO: 219849 - DNA, 25 bp, Homo sapien
taataaacagagctctaccagggct

SEQ ID NO: 219850 - DNA, 25 bp, Homo sapien
cattgccgctcattaatagtggtgc

SEQ ID NO: 219851 - DNA, 25 bp, Homo sapien
ttcctttcataagatctcataaccg

SEQ ID NO: 219852 - DNA, 25 bp, Homo sapien
tcacaaactgtctcttcgggacaca

SEQ ID NO: 219853 - DNA, 25 bp, Homo sapien
agcccatcagaggcttccgttttcc

SEQ ID NO: 219854 - DNA, 25 bp, Homo sapien
taagatctcataaccgtcagctgat

SEQ ID NO: 219855 - DNA, 25 bp, Homo sapien
tcgccgccagtcgtaacatcacgtt

SEQ ID NO: 219856 - DNA, 25 bp, Homo sapien
agaggacttctccagggccgcatca

SEQ ID NO: 219857 - DNA, 25 bp, Homo sapien
gaggccactgccgaagacttcgccg

SEQ ID NO: 219858 - DNA, 25 bp, Homo sapien
tctttccactacagcgagaggactt

SEQ ID NO: 219859 - DNA, 25 bp, Homo sapien
tatttttccgtcaagctgttcttta

SEQ ID NO: 219860 - DNA, 25 bp, Homo sapien
tcaggaagagggcaggggagggggc

SEQ ID NO: 219861 - DNA, 25 bp, Homo sapien
ttctttatttcaggaagagggcagg

SEQ ID NO: 219862 - DNA, 25 bp, Homo sapien
ctgttctttatttcaggaagagggc

SEQ ID NO: 219863 - DNA, 25 bp, Homo sapien
cggctttcctcatggcagccagtac

SEQ ID NO: 219864 - DNA, 25 bp, Homo sapien
gcagcggctttcctcatggcagcca

SEQ ID NO: 219865 - DNA, 25 bp, Homo sapien
tcagtctttcttggcagcggctttc

SEQ ID NO: 219866 - DNA, 25 bp, Homo sapien
agtctttcttggcagcggctttcct

SEQ ID NO: 219867 - DNA, 25 bp, Homo sapien
gcttcctcttggcacggatgtgcgt

SEQ ID NO: 219868 - DNA, 25 bp, Homo sapien
ttcctcttggcacggatgtgcgtcc

SEQ ID NO: 219869 - DNA, 25 bp, Homo sapien
tcttggcacggatgtgcgtccccac

SEQ ID NO: 219870 - DNA, 25 bp, Homo sapien
tcccgcttcctcttggcacggatgt

SEQ ID NO: 219871 - DNA, 25 bp, Homo sapien
cttgagggcccatttctccttgaag

SEQ ID NO: 219872 - DNA, 25 bp, Homo sapien
tgagggcccatttctccttgaagac

SEQ ID NO: 219873 - DNA, 25 bp, Homo sapien
ttgagggcccatttctccttgaaga

SEQ ID NO: 219874 - DNA, 25 bp, Homo sapien
catggcgcgcagctcgtacgaagcg

SEQ ID NO: 219875 - DNA, 25 bp, Homo sapien
gcgcagctcgtacgaagcgaagcca

SEQ ID NO: 219876 - DNA, 25 bp, Homo sapien
tcgtacgaagcgaagccacacacct

SEQ ID NO: 219877 - DNA, 25 bp, Homo sapien
agctcgtacgaagcgaagccacaca

SEQ ID NO: 219878 - DNA, 25 bp, Homo sapien
ttggtgcgtttgctcagacgcccgc

SEQ ID NO: 219879 - DNA, 25 bp, Homo sapien
gtgcgtttgctcagacgcccgcggc

SEQ ID NO: 219880 - DNA, 25 bp, Homo sapien
gcggcggcggctgtgcctgggcttg

SEQ ID NO: 219881 - DNA, 25 bp, Homo sapien
ccgcggcggcggctgtgcctgggct

SEQ ID NO: 219882 - DNA, 25 bp, Homo sapien
cacggccataaggtagcgcagagcc

SEQ ID NO: 219883 - DNA, 25 bp, Homo sapien
cggccataaggtagcgcagagccat

SEQ ID NO: 219884 - DNA, 25 bp, Homo sapien
gcccacggccataaggtagcgcaga

SEQ ID NO: 219885 - DNA, 25 bp, Homo sapien
ccacggccataaggtagcgcagagc

SEQ ID NO: 219886 - DNA, 25 bp, Homo sapien
ctgtgtccggccctaaataatgtct

SEQ ID NO: 219887 - DNA, 25 bp, Homo sapien
tgtgtgagttttgggtgtcatattt

SEQ ID NO: 219888 - DNA, 25 bp, Homo sapien
taaataatgtctttcgatgcacgga

SEQ ID NO: 219889 - DNA, 25 bp, Homo sapien
tctttcgatgcacggaagttttcaa

SEQ ID NO: 219890 - DNA, 25 bp, Homo sapien
cataatatgaatttaggatctgctt

SEQ ID NO: 219891 - DNA, 25 bp, Homo sapien
tccatatgccagtaacacagtgtct

SEQ ID NO: 219892 - DNA, 25 bp, Homo sapien
ggtgcgagtcatcccaactttgttc

SEQ ID NO: 219893 - DNA, 25 bp, Homo sapien
gaattttgaaattgcgaggtgcgag

SEQ ID NO: 219894 - DNA, 25 bp, Homo sapien
gggctcgtcccaatgcaggttctga

SEQ ID NO: 219895 - DNA, 25 bp, Homo sapien
gaacccttggttcagactccgtgat

SEQ ID NO: 219896 - DNA, 25 bp, Homo sapien
catgtcgctttggtgggtcagccca

SEQ ID NO: 219897 - DNA, 25 bp, Homo sapien
taattcagcctaagtctcggacaag

SEQ ID NO: 219898 - DNA, 25 bp, Homo sapien
gcacctggcccgattcttaaatata

SEQ ID NO: 219899 - DNA, 25 bp, Homo sapien
cgcacctggcccgattcttaaatat

SEQ ID NO: 219900 - DNA, 25 bp, Homo sapien
cacctggcccgattcttaaatatat

SEQ ID NO: 219901 - DNA, 25 bp, Homo sapien
aatatatttaatccgtccgccccag

SEQ ID NO: 219902 - DNA, 25 bp, Homo sapien
cattcaggatcatggtggcacagga

SEQ ID NO: 219903 - DNA, 25 bp, Homo sapien
cagcattgtggctgacagtcttctg

SEQ ID NO: 219904 - DNA, 25 bp, Homo sapien
ccagcaaaccccagggcagtttgca

SEQ ID NO: 219905 - DNA, 25 bp, Homo sapien
ggatagtagaatgcatcctccacat

SEQ ID NO: 219906 - DNA, 25 bp, Homo sapien
tttttctcatttctcgtgggagaaa

SEQ ID NO: 219907 - DNA, 25 bp, Homo sapien
accatttggtccaattgatcttgat

SEQ ID NO: 219908 - DNA, 25 bp, Homo sapien
tctcatttctcgtgggagaaaggca

SEQ ID NO: 219909 - DNA, 25 bp, Homo sapien
tttggtccaattgatcttgatctca

SEQ ID NO: 219910 - DNA, 25 bp, Homo sapien
gcagatggccactacaatgctgatg

SEQ ID NO: 219911 - DNA, 25 bp, Homo sapien
caagctccgtggtttatgcgtgtaa

SEQ ID NO: 219912 - DNA, 25 bp, Homo sapien
tatgcccttgcactcggagaggctt

SEQ ID NO: 219913 - DNA, 25 bp, Homo sapien
cacgtctgtctttggagaggtcacc

SEQ ID NO: 219914 - DNA, 25 bp, Homo sapien
tgaggagattctaaatctatgagta

SEQ ID NO: 219915 - DNA, 25 bp, Homo sapien
ttctaaatctatgagtaagtctgag

SEQ ID NO: 219916 - DNA, 25 bp, Homo sapien
agattctaaatctatgagtaagtct

SEQ ID NO: 219917 - DNA, 25 bp, Homo sapien
gaggagattctaaatctatgagtaa

SEQ ID NO: 219918 - DNA, 25 bp, Homo sapien
catcaactgtaattagggtgatccg

SEQ ID NO: 219919 - DNA, 25 bp, Homo sapien
tcagcaccaagggtcttcagccaca

SEQ ID NO: 219920 - DNA, 25 bp, Homo sapien
caagggtcttcagccacataggcag

SEQ ID NO: 219921 - DNA, 25 bp, Homo sapien
agggtgatccggtgttcagcaccaa

SEQ ID NO: 219922 - DNA, 25 bp, Homo sapien
agctgattcttgaacacacctgagc

SEQ ID NO: 219923 - DNA, 25 bp, Homo sapien
aaggatgtgcccagcgcttgtctag

SEQ ID NO: 219924 - DNA, 25 bp, Homo sapien
taggggggaagctgattcttgaaca

SEQ ID NO: 219925 - DNA, 25 bp, Homo sapien
cagcgcttgtctaggactttggcag

SEQ ID NO: 219926 - DNA, 25 bp, Homo sapien
gataggcgcaccaggaatgaccgcc

SEQ ID NO: 219927 - DNA, 25 bp, Homo sapien
tacacagttctagagtagggtccca

SEQ ID NO: 219928 - DNA, 25 bp, Homo sapien
ggctcatgtcacaccgataggcgca

SEQ ID NO: 219929 - DNA, 25 bp, Homo sapien
tatgatggcgaattggatggtacac

SEQ ID NO: 219930 - DNA, 25 bp, Homo sapien
tgcgataagttgcaaggtcccctgc

SEQ ID NO: 219931 - DNA, 25 bp, Homo sapien
tgataggatttcagcacaacgggcc

SEQ ID NO: 219932 - DNA, 25 bp, Homo sapien
gagggcctacctcgcaagactgttt

SEQ ID NO: 219933 - DNA, 25 bp, Homo sapien
ctcatgaggaagacgtgctgccact

SEQ ID NO: 219934 - DNA, 25 bp, Homo sapien
cggcggtcatgggagcactcatcac

SEQ ID NO: 219935 - DNA, 25 bp, Homo sapien
tggtcccagccacgagaaggaacag

SEQ ID NO: 219936 - DNA, 25 bp, Homo sapien
actccttccggcagttgtggcagtg

SEQ ID NO: 219937 - DNA, 25 bp, Homo sapien
tggaggatttcgtggtcaggcaccc

SEQ ID NO: 219938 - DNA, 25 bp, Homo sapien
ccaactgcacacagaattgctgaca

SEQ ID NO: 219939 - DNA, 25 bp, Homo sapien
catcctcggatgcttactggcttat

SEQ ID NO: 219940 - DNA, 25 bp, Homo sapien
caactagcaagaggccatcctcgga

SEQ ID NO: 219941 - DNA, 25 bp, Homo sapien
cagggaacaatggtcagggcaccca

SEQ ID NO: 219942 - DNA, 25 bp, Homo sapien
ggtagtaactagagccaatgccact

SEQ ID NO: 219943 - DNA, 25 bp, Homo sapien
ggcctggagaatacaaagaccgagt

SEQ ID NO: 219944 - DNA, 25 bp, Homo sapien
gccacttggagctgaataattaccc

SEQ ID NO: 219945 - DNA, 25 bp, Homo sapien
aagaccgagtgaggctctgctacac

SEQ ID NO: 219946 - DNA, 25 bp, Homo sapien
tcccagagtgttctgcacggcctcg

SEQ ID NO: 219947 - DNA, 25 bp, Homo sapien
gcccaccttccgagcaatgagcgtt

SEQ ID NO: 219948 - DNA, 25 bp, Homo sapien
gcaatgagcgttccaccttcatcgt

SEQ ID NO: 219949 - DNA, 25 bp, Homo sapien
tcgtccacttgtgcctcggtaacag

SEQ ID NO: 219950 - DNA, 25 bp, Homo sapien
gcttcgtagcagttgtcacagaccc

SEQ ID NO: 219951 - DNA, 25 bp, Homo sapien
aactggacgttcctggcttcgtagc

SEQ ID NO: 219952 - DNA, 25 bp, Homo sapien
aaaggacgtcgcacacttgttgcag

SEQ ID NO: 219953 - DNA, 25 bp, Homo sapien
caggcactggccgagtctttgatga

SEQ ID NO: 219954 - DNA, 25 bp, Homo sapien
aggctaagctcggacaccgactgag

SEQ ID NO: 219955 - DNA, 25 bp, Homo sapien
aatctgggagttgggcctccagtag

SEQ ID NO: 219956 - DNA, 25 bp, Homo sapien
gagccatgaagttcatcccgtccaa

SEQ ID NO: 219957 - DNA, 25 bp, Homo sapien
agcattgttgttgtccttcagaaac

SEQ ID NO: 219958 - DNA, 25 bp, Homo sapien
gaaatgaaaacgcaggcttccatca

SEQ ID NO: 219959 - DNA, 25 bp, Homo sapien
tgaaaacgcaggcttccatcatgct

SEQ ID NO: 219960 - DNA, 25 bp, Homo sapien
aaaacgcaggcttccatcatgctct

SEQ ID NO: 219961 - DNA, 25 bp, Homo sapien
aatgaaaacgcaggcttccatcatg

SEQ ID NO: 219962 - DNA, 25 bp, Homo sapien
cgtggccaactcagaaccactaact

SEQ ID NO: 219963 - DNA, 25 bp, Homo sapien
tggccaactcagaaccactaactcc

SEQ ID NO: 219964 - DNA, 25 bp, Homo sapien
gtggccaactcagaaccactaactc

SEQ ID NO: 219965 - DNA, 25 bp, Homo sapien
tcaaagtgaccataagacttgatgt

SEQ ID NO: 219966 - DNA, 25 bp, Homo sapien
cagggaagaacggagacacaccagg

SEQ ID NO: 219967 - DNA, 25 bp, Homo sapien
tggcagggaagaacggagacacacc

SEQ ID NO: 219968 - DNA, 25 bp, Homo sapien
ttcaaagtgaccataagacttgatg

SEQ ID NO: 219969 - DNA, 25 bp, Homo sapien
caccgtatccacaggatcttggttt

SEQ ID NO: 219970 - DNA, 25 bp, Homo sapien
accgtatccacaggatcttggtttc

SEQ ID NO: 219971 - DNA, 25 bp, Homo sapien
cacagttaggacattcgatcacata

SEQ ID NO: 219972 - DNA, 25 bp, Homo sapien
cacgccacagttaggacattcgatc

SEQ ID NO: 219973 - DNA, 25 bp, Homo sapien
tacgatagaccacgccacagttagg

SEQ ID NO: 219974 - DNA, 25 bp, Homo sapien
tagaccacgccacagttaggacatt

SEQ ID NO: 219975 - DNA, 25 bp, Homo sapien
catattttgcgagacccatccaggg

SEQ ID NO: 219976 - DNA, 25 bp, Homo sapien
tgttttgggcactacactgacttcc

SEQ ID NO: 219977 - DNA, 25 bp, Homo sapien
ttgggcactacactgacttcctcgc

SEQ ID NO: 219978 - DNA, 25 bp, Homo sapien
ccagaccaggcatattttgcgagac

SEQ ID NO: 219979 - DNA, 25 bp, Homo sapien
tggtgggagtatctgcagcggctct

SEQ ID NO: 219980 - DNA, 25 bp, Homo sapien
tatacactcggttgtcatactggtg

SEQ ID NO: 219981 - DNA, 25 bp, Homo sapien
cttgcaggtatacactcggttgtca

SEQ ID NO: 219982 - DNA, 25 bp, Homo sapien
gcaggtatacactcggttgtcatac

SEQ ID NO: 219983 - DNA, 25 bp, Homo sapien
aggagcaggtgaaatactcatctgg

SEQ ID NO: 219984 - DNA, 25 bp, Homo sapien
gaggagcaggtgaaatactcatctg

SEQ ID NO: 219985 - DNA, 25 bp, Homo sapien
gggatctcaccgctgaagcggtcac

SEQ ID NO: 219986 - DNA, 25 bp, Homo sapien
tcatcggggatctcaccgctgaagc

SEQ ID NO: 219987 - DNA, 25 bp, Homo sapien
ctggtcatcggggatctcaccgctg

SEQ ID NO: 219988 - DNA, 25 bp, Homo sapien
tctcaccgctgaagcggtcacttag

SEQ ID NO: 219989 - DNA, 25 bp, Homo sapien
cctcctcctgagatcccaaagctag

SEQ ID NO: 219990 - DNA, 25 bp, Homo sapien
atcattccacagtttcttgggttct

SEQ ID NO: 219991 - DNA, 25 bp, Homo sapien
cacagtttcttgggttctcctcctc

SEQ ID NO: 219992 - DNA, 25 bp, Homo sapien
tcctcctgagatcccaaagctagaa

SEQ ID NO: 219993 - DNA, 25 bp, Homo sapien
tctagtagctgctccaaagcacgcc

SEQ ID NO: 219994 - DNA, 25 bp, Homo sapien
tgtaagtcctcgttcccttgtagtg

SEQ ID NO: 219995 - DNA, 25 bp, Homo sapien
gaatggaactaaaggcttcagggaa

SEQ ID NO: 219996 - DNA, 25 bp, Homo sapien
aaagcacgccgaagcccagaaaagt

SEQ ID NO: 219997 - DNA, 25 bp, Homo sapien
gcagccggtctgcatgagttcgata

SEQ ID NO: 219998 - DNA, 25 bp, Homo sapien
tgaagaggtcgttatgcagccggtc

SEQ ID NO: 219999 - DNA, 25 bp, Homo sapien
ggaccttaagcagcagccgtgttct

SEQ ID NO: 220000 - DNA, 25 bp, Homo sapien
tctggcttagattcacggtggcccc

SEQ ID NO: 220001 - DNA, 25 bp, Homo sapien
caggagggataccaaagccacccct

SEQ ID NO: 220002 - DNA, 25 bp, Homo sapien
cagcaaacgcaggagggataccaaa

SEQ ID NO: 220003 - DNA, 25 bp, Homo sapien
aaacgcaggagggataccaaagcca

SEQ ID NO: 220004 - DNA, 25 bp, Homo sapien
caacagcaaacgcaggagggatacc

SEQ ID NO: 220005 - DNA, 25 bp, Homo sapien
gggaactttctgaggagcttctgga

SEQ ID NO: 220006 - DNA, 25 bp, Homo sapien
tttggccagctgtgaaaacagatgt

SEQ ID NO: 220007 - DNA, 25 bp, Homo sapien
gcagctgcctttttaagtggcatag

SEQ ID NO: 220008 - DNA, 25 bp, Homo sapien
aaacagatgtaagctccagtaaagg

SEQ ID NO: 220009 - DNA, 25 bp, Homo sapien
cgtctctttccatacgtctttccaa

SEQ ID NO: 220010 - DNA, 25 bp, Homo sapien
tgcgtctctttccatacgtctttcc

SEQ ID NO: 220011 - DNA, 25 bp, Homo sapien
ccatacgtctttccaactccccttg

SEQ ID NO: 220012 - DNA, 25 bp, Homo sapien
catacgtctttccaactccccttgc

SEQ ID NO: 220013 - DNA, 25 bp, Homo sapien
ttgaaaatgctcaaaacccacaaat

SEQ ID NO: 220014 - DNA, 25 bp, Homo sapien
aattgaaaatgctcaaaacccacaa

SEQ ID NO: 220015 - DNA, 25 bp, Homo sapien
aaattgaaaatgctcaaaacccaca

SEQ ID NO: 220016 - DNA, 25 bp, Homo sapien
tgtacacagtaacagggtgtctcct

SEQ ID NO: 220017 - DNA, 25 bp, Homo sapien
ggaggaaactcacaaccttctcagt

SEQ ID NO: 220018 - DNA, 25 bp, Homo sapien
catggccaggtttgagtcttatccg

SEQ ID NO: 220019 - DNA, 25 bp, Homo sapien
tgactcctggagattactgacattg

SEQ ID NO: 220020 - DNA, 25 bp, Homo sapien
cttttatggctatctgagagaggtc

SEQ ID NO: 220021 - DNA, 25 bp, Homo sapien
ggttcatcggttggacatcagctac

SEQ ID NO: 220022 - DNA, 25 bp, Homo sapien
taagactcttgtattagcagcaacg

SEQ ID NO: 220023 - DNA, 25 bp, Homo sapien
gaaacttccacagggttctgaacac

SEQ ID NO: 220024 - DNA, 25 bp, Homo sapien
tgcctttctgatagtcactcctccc

SEQ ID NO: 220025 - DNA, 25 bp, Homo sapien
acaatctaacctcagacatgcccag

SEQ ID NO: 220026 - DNA, 25 bp, Homo sapien
gccccgacaaggtgtaaagccctgc

SEQ ID NO: 220027 - DNA, 25 bp, Homo sapien
tcctcccctacagtaatcaatctat

SEQ ID NO: 220028 - DNA, 25 bp, Homo sapien
cagaggctattcctcaggacaccgg

SEQ ID NO: 220029 - DNA, 25 bp, Homo sapien
ttgggatcagctgatcggagtgaac

SEQ ID NO: 220030 - DNA, 25 bp, Homo sapien
gaacttctcccagctcggactaaca

SEQ ID NO: 220031 - DNA, 25 bp, Homo sapien
cactgagaagctcggccgcagcaag

SEQ ID NO: 220032 - DNA, 25 bp, Homo sapien
tttttgcattgagtgtggtgtccgc

SEQ ID NO: 220033 - DNA, 25 bp, Homo sapien
tgtccgcaggtttcagcacgttctt

SEQ ID NO: 220034 - DNA, 25 bp, Homo sapien
acaggctacggaggatttcgggact

SEQ ID NO: 220035 - DNA, 25 bp, Homo sapien
gactacaactcccagtactgaagag

SEQ ID NO: 220036 - DNA, 25 bp, Homo sapien
ttcactctgttggggaaagatataa

SEQ ID NO: 220037 - DNA, 25 bp, Homo sapien
ctctgttggggaaagatataattac

SEQ ID NO: 220038 - DNA, 25 bp, Homo sapien
cttttcactctgttggggaaagata

SEQ ID NO: 220039 - DNA, 25 bp, Homo sapien
cactctgttggggaaagatataatt

SEQ ID NO: 220040 - DNA, 25 bp, Homo sapien
agcaacactggaattttcatctgct

SEQ ID NO: 220041 - DNA, 25 bp, Homo sapien
gagcaacactggaattttcatctgc

SEQ ID NO: 220042 - DNA, 25 bp, Homo sapien
tctgaaatcaactcaatcttgtttc

SEQ ID NO: 220043 - DNA, 25 bp, Homo sapien
tgaaatcaactcaatcttgtttctg

SEQ ID NO: 220044 - DNA, 25 bp, Homo sapien
ctgaaatcaactcaatcttgtttct

SEQ ID NO: 220045 - DNA, 25 bp, Homo sapien
ttctgaaatcaactcaatcttgttt

SEQ ID NO: 220046 - DNA, 25 bp, Homo sapien
tagcactttactgaacaaagtacaa

SEQ ID NO: 220047 - DNA, 25 bp, Homo sapien
tcacgcacggccaaaggtattatta

SEQ ID NO: 220048 - DNA, 25 bp, Homo sapien
gtgttctattggtactcatcatatg

SEQ ID NO: 220049 - DNA, 25 bp, Homo sapien
tagttaatggtaaggaaacctagca

SEQ ID NO: 220050 - DNA, 25 bp, Homo sapien
tcggctccaatcaaacatggtgggt

SEQ ID NO: 220051 - DNA, 25 bp, Homo sapien
tcaagatggcgtcccgtagtcgtaa

SEQ ID NO: 220052 - DNA, 25 bp, Homo sapien
tagtcgtaagattcagtcggctcca

SEQ ID NO: 220053 - DNA, 25 bp, Homo sapien
taacactaaggttgcagatcgcgcc

SEQ ID NO: 220054 - DNA, 25 bp, Homo sapien
gatcagtttgggagttttgcccttc

SEQ ID NO: 220055 - DNA, 25 bp, Homo sapien
gttttgcccttctctgttggcaacc

SEQ ID NO: 220056 - DNA, 25 bp, Homo sapien
cttagcatgaacacctgatcagtag

SEQ ID NO: 220057 - DNA, 25 bp, Homo sapien
ctgatcagtagcgtgctgcagccca

SEQ ID NO: 220058 - DNA, 25 bp, Homo sapien
ttccgagaaagcttcagacatgctt

SEQ ID NO: 220059 - DNA, 25 bp, Homo sapien
acatttccgagaaagcttcagacat

SEQ ID NO: 220060 - DNA, 25 bp, Homo sapien
tttccgagaaagcttcagacatgct

SEQ ID NO: 220061 - DNA, 25 bp, Homo sapien
catttccgagaaagcttcagacatg

SEQ ID NO: 220062 - DNA, 25 bp, Homo sapien
agctggaagagagtacaaggtgctt

SEQ ID NO: 220063 - DNA, 25 bp, Homo sapien
ggttttgagctggaagagagtacaa

SEQ ID NO: 220064 - DNA, 25 bp, Homo sapien
agagagtacaaggtgcttccggaaa

SEQ ID NO: 220065 - DNA, 25 bp, Homo sapien
gaagagagtacaaggtgcttccgga

SEQ ID NO: 220066 - DNA, 25 bp, Homo sapien
agattattacatgacctgcaaattg

SEQ ID NO: 220067 - DNA, 25 bp, Homo sapien
tgcactcagattattacatgacctg

SEQ ID NO: 220068 - DNA, 25 bp, Homo sapien
aaggagccagaatctaccctccgtg

SEQ ID NO: 220069 - DNA, 25 bp, Homo sapien
taccctccgtgcactcagattatta

SEQ ID NO: 220070 - DNA, 25 bp, Homo sapien
aaataagccatcattacagccccta

SEQ ID NO: 220071 - DNA, 25 bp, Homo sapien
cattataagcactcgtagaaagcaa

SEQ ID NO: 220072 - DNA, 25 bp, Homo sapien
tctataagtggtatgtattcctgca

SEQ ID NO: 220073 - DNA, 25 bp, Homo sapien
ctttttctgagtggtagctatcaca

SEQ ID NO: 220074 - DNA, 25 bp, Homo sapien
tacatagtcattgagtggccagcca

SEQ ID NO: 220075 - DNA, 25 bp, Homo sapien
gataaggcagttcttggctgaattc

SEQ ID NO: 220076 - DNA, 25 bp, Homo sapien
aatctcccagcatccaagattggag

SEQ ID NO: 220077 - DNA, 25 bp, Homo sapien
tagaaaatatttcgaaccaccacat

SEQ ID NO: 220078 - DNA, 25 bp, Homo sapien
gatgcatacgaacgaagaaaacttg

SEQ ID NO: 220079 - DNA, 25 bp, Homo sapien
gagaacgagaacgggagcgagagag

SEQ ID NO: 220080 - DNA, 25 bp, Homo sapien
gatgaagaagatgcatacgaacgaa

SEQ ID NO: 220081 - DNA, 25 bp, Homo sapien
catacgaacgaagaaaacttgaaag

SEQ ID NO: 220082 - DNA, 25 bp, Homo sapien
tttaataagataatctccagttttg

SEQ ID NO: 220083 - DNA, 25 bp, Homo sapien
cctcaggtacccgagtagtagtacg

SEQ ID NO: 220084 - DNA, 25 bp, Homo sapien
gtagtagtacggattacaggtgtgt

SEQ ID NO: 220085 - DNA, 25 bp, Homo sapien
cccgagtagtagtacggattacagg

SEQ ID NO: 220086 - DNA, 25 bp, Homo sapien
caggtacccgagtagtagtacggat

SEQ ID NO: 220087 - DNA, 25 bp, Homo sapien
gaaaatccctacagccaaacctgag

SEQ ID NO: 220088 - DNA, 25 bp, Homo sapien
tgaagacagtgatgacgtaccccga

SEQ ID NO: 220089 - DNA, 25 bp, Homo sapien
gagctcttcgcttatcccctggatt

SEQ ID NO: 220090 - DNA, 25 bp, Homo sapien
tagtcctggtcagcctaattctgtg

SEQ ID NO: 220091 - DNA, 25 bp, Homo sapien
tttgatcagaaatggcaagcccttg

SEQ ID NO: 220092 - DNA, 25 bp, Homo sapien
tataagccgcagctactgtacacag

SEQ ID NO: 220093 - DNA, 25 bp, Homo sapien
tcccttggttgtaaagtcatctgaa

SEQ ID NO: 220094 - DNA, 25 bp, Homo sapien
catggtgttctcgtgtcgtgagcaa

SEQ ID NO: 220095 - DNA, 25 bp, Homo sapien
ccagcctaagaccttgttcgaggag

SEQ ID NO: 220096 - DNA, 25 bp, Homo sapien
ggtatctaaaggtcaaggaagccat

SEQ ID NO: 220097 - DNA, 25 bp, Homo sapien
tcgttgtagatcagaatttcaccag

SEQ ID NO: 220098 - DNA, 25 bp, Homo sapien
ttcttaccctcgaaccctgatgtgg

SEQ ID NO: 220099 - DNA, 25 bp, Homo sapien
gaaaagggtggcaatgaggtgtggc

SEQ ID NO: 220100 - DNA, 25 bp, Homo sapien
atttattaaaatgtctcaacctaat

SEQ ID NO: 220101 - DNA, 25 bp, Homo sapien
ggaaaagggtggcaatgaggtgtgg

SEQ ID NO: 220102 - DNA, 25 bp, Homo sapien
atgtctcaacctaataagggagctg

SEQ ID NO: 220103 - DNA, 25 bp, Homo sapien
cttgggccgggattagtagccgtct

SEQ ID NO: 220104 - DNA, 25 bp, Homo sapien
tttgctcgaagacgtctcagggcgc

SEQ ID NO: 220105 - DNA, 25 bp, Homo sapien
agcaactggtgaaactccgcgcctc

SEQ ID NO: 220106 - DNA, 25 bp, Homo sapien
agcattctgggcgaagtccgcacgc

SEQ ID NO: 220107 - DNA, 25 bp, Homo sapien
tcagcagttcagagcatgtattctc

SEQ ID NO: 220108 - DNA, 25 bp, Homo sapien
ataagggattctggacttgcgattc

SEQ ID NO: 220109 - DNA, 25 bp, Homo sapien
gcaaaatctggcctagttatcgtct

SEQ ID NO: 220110 - DNA, 25 bp, Homo sapien
gatcggtgagggcagttcttatttg

SEQ ID NO: 220111 - DNA, 25 bp, Homo sapien
tctgggagcctgcaagtgacaacag

SEQ ID NO: 220112 - DNA, 25 bp, Homo sapien
ctttgcggtccttagacagcttggc

SEQ ID NO: 220113 - DNA, 25 bp, Homo sapien
caagtgacaacagcctttgcggtcc

SEQ ID NO: 220114 - DNA, 25 bp, Homo sapien
gacaacagcctttgcggtccttaga

SEQ ID NO: 220115 - DNA, 25 bp, Homo sapien
cagatgtctgaggacaaccacctga

SEQ ID NO: 220116 - DNA, 25 bp, Homo sapien
agcaatactgtacgtagccaggtac

SEQ ID NO: 220117 - DNA, 25 bp, Homo sapien
tacagtgtcagtctctgaaactgcc

SEQ ID NO: 220118 - DNA, 25 bp, Homo sapien
tgcaccgttgtcctacttccagaat

SEQ ID NO: 220119 - DNA, 25 bp, Homo sapien
cactccagcaagatctgtagaggat

SEQ ID NO: 220120 - DNA, 25 bp, Homo sapien
gaggattagtccgtgaattccgcag

SEQ ID NO: 220121 - DNA, 25 bp, Homo sapien
gcactgaatggcgtggaacttcctt

SEQ ID NO: 220122 - DNA, 25 bp, Homo sapien
ttgatgtgcccagaagctaggatgg

SEQ ID NO: 220123 - DNA, 25 bp, Homo sapien
tgaatacaagttatcaattcttcct

SEQ ID NO: 220124 - DNA, 25 bp, Homo sapien
ctttgtcacctaggcagtggcgcca

SEQ ID NO: 220125 - DNA, 25 bp, Homo sapien
aaatgtaaatgcatttaagtgacaa

SEQ ID NO: 220126 - DNA, 25 bp, Homo sapien
tacaagtttagctatacctgtttta

SEQ ID NO: 220127 - DNA, 25 bp, Homo sapien
cgcccaaactagagtgcagtgacat

SEQ ID NO: 220128 - DNA, 25 bp, Homo sapien
gcccaaactagagtgcagtgacatt

SEQ ID NO: 220129 - DNA, 25 bp, Homo sapien
caaactagagtgcagtgacattagc

SEQ ID NO: 220130 - DNA, 25 bp, Homo sapien
aactagagtgcagtgacattagctc

SEQ ID NO: 220131 - DNA, 25 bp, Homo sapien
ttctcagtaggttcgtgtgtgttcc

SEQ ID NO: 220132 - DNA, 25 bp, Homo sapien
tctcccagggttagatgactgcggg

SEQ ID NO: 220133 - DNA, 25 bp, Homo sapien
acttgttatttacgtggcctcagac

SEQ ID NO: 220134 - DNA, 25 bp, Homo sapien
ttactttcagactccgggattccca

SEQ ID NO: 220135 - DNA, 25 bp, Homo sapien
taatgttttgtactgaagggcgcac

SEQ ID NO: 220136 - DNA, 25 bp, Homo sapien
tgcacagcgtgtataccgactggac

SEQ ID NO: 220137 - DNA, 25 bp, Homo sapien
ttatgtcattctgcgatacagcgac

SEQ ID NO: 220138 - DNA, 25 bp, Homo sapien
taaagttcaaacctgcacgctagta

SEQ ID NO: 220139 - DNA, 25 bp, Homo sapien
ggctcagtggtttcgaaagcttaga

SEQ ID NO: 220140 - DNA, 25 bp, Homo sapien
tgagattcagcgaagctgctcaggg

SEQ ID NO: 220141 - DNA, 25 bp, Homo sapien
gaaagctaagacctctcatctggca

SEQ ID NO: 220142 - DNA, 25 bp, Homo sapien
tagagatgagtaaacgtccttcctc

SEQ ID NO: 220143 - DNA, 25 bp, Homo sapien
tcagttcagcgcaggaaatcaaacc

SEQ ID NO: 220144 - DNA, 25 bp, Homo sapien
tgtgtgctgcactccggcagggtca

SEQ ID NO: 220145 - DNA, 25 bp, Homo sapien
gagtacagatgttccccacttcaag

SEQ ID NO: 220146 - DNA, 25 bp, Homo sapien
gagtctcggccagattagcaggatc

SEQ ID NO: 220147 - DNA, 25 bp, Homo sapien
gacgttgggtctcggtcaggtcttc

SEQ ID NO: 220148 - DNA, 25 bp, Homo sapien
ttgtcgcacggaggtaaagctcacg

SEQ ID NO: 220149 - DNA, 25 bp, Homo sapien
tctggtcccgcaggagagatggagg

SEQ ID NO: 220150 - DNA, 25 bp, Homo sapien
cccactggagagtcccgcagaagtt

SEQ ID NO: 220151 - DNA, 25 bp, Homo sapien
atgccataccagctaagggggcagg

SEQ ID NO: 220152 - DNA, 25 bp, Homo sapien
gcatgccataccagctaagggggca

SEQ ID NO: 220153 - DNA, 25 bp, Homo sapien
gaatttgcatgccataccagctaag

SEQ ID NO: 220154 - DNA, 25 bp, Homo sapien
atttgcatgccataccagctaaggg

SEQ ID NO: 220155 - DNA, 25 bp, Homo sapien
tgggaagcaggacctcattgtggtt

SEQ ID NO: 220156 - DNA, 25 bp, Homo sapien
tagacatcctagtgggtgggaagca

SEQ ID NO: 220157 - DNA, 25 bp, Homo sapien
tatgtggctgggatcataacacgtg

SEQ ID NO: 220158 - DNA, 25 bp, Homo sapien
tacaggttggtggtatttagcgcat

SEQ ID NO: 220159 - DNA, 25 bp, Homo sapien
ctttgatggttggaggaacccagca

SEQ ID NO: 220160 - DNA, 25 bp, Homo sapien
gataagagctcttgctaactcaaaa

SEQ ID NO: 220161 - DNA, 25 bp, Homo sapien
tgaaaaactggaaggatgaggaccc

SEQ ID NO: 220162 - DNA, 25 bp, Homo sapien
gaggacccaggtgactaagataagc

SEQ ID NO: 220163 - DNA, 25 bp, Homo sapien
tctaggaagagctattcagtgggct

SEQ ID NO: 220164 - DNA, 25 bp, Homo sapien
taataatgggaggaccactgcatgt

SEQ ID NO: 220165 - DNA, 25 bp, Homo sapien
cactgcatgttgaagtgaggccaag

SEQ ID NO: 220166 - DNA, 25 bp, Homo sapien
ccagagctggccaactgtgatttga

SEQ ID NO: 220167 - DNA, 25 bp, Homo sapien
gagaaaggaagatggactcttggct

SEQ ID NO: 220168 - DNA, 25 bp, Homo sapien
ttatcttctggaatacattagctct

SEQ ID NO: 220169 - DNA, 25 bp, Homo sapien
ggagttatcttctggaatacattag

SEQ ID NO: 220170 - DNA, 25 bp, Homo sapien
gaagatggactcttggcttcctctc

SEQ ID NO: 220171 - DNA, 25 bp, Homo sapien
aacggcagccagttaccagcttctc

SEQ ID NO: 220172 - DNA, 25 bp, Homo sapien
ccagtgtttagcctcaacggcagcc

SEQ ID NO: 220173 - DNA, 25 bp, Homo sapien
ttctctctgtagccttcagcagtgt

SEQ ID NO: 220174 - DNA, 25 bp, Homo sapien
gtttagcctcaacggcagccagtta

SEQ ID NO: 220175 - DNA, 25 bp, Homo sapien
cagcttccctttataatttgttaca

SEQ ID NO: 220176 - DNA, 25 bp, Homo sapien
tttgttacacaggaatagttaaatg

SEQ ID NO: 220177 - DNA, 25 bp, Homo sapien
taatttgttacacaggaatagttaa

SEQ ID NO: 220178 - DNA, 25 bp, Homo sapien
ctttacagcttccctttataatttg

SEQ ID NO: 220179 - DNA, 25 bp, Homo sapien
cacttaatttaaagctgggcaggga

SEQ ID NO: 220180 - DNA, 25 bp, Homo sapien
gcatgaaagaactggaaacgctcct

SEQ ID NO: 220181 - DNA, 25 bp, Homo sapien
taaaatcagcgatggttcattgctc

SEQ ID NO: 220182 - DNA, 25 bp, Homo sapien
ttaaagctagctgtcagggttccac

SEQ ID NO: 220183 - DNA, 25 bp, Homo sapien
tgaccagcctgctctgtacagtgac

SEQ ID NO: 220184 - DNA, 25 bp, Homo sapien
tcgagatgttggaccttgaagccct

SEQ ID NO: 220185 - DNA, 25 bp, Homo sapien
tgacacctgtgtaaagctgaccagc

SEQ ID NO: 220186 - DNA, 25 bp, Homo sapien
gcaaatctggctgtgacggttcatc

SEQ ID NO: 220187 - DNA, 25 bp, Homo sapien
tcagaggactgcctagtagcaaagg

SEQ ID NO: 220188 - DNA, 25 bp, Homo sapien
gacgggcattacagggaccaaagct

SEQ ID NO: 220189 - DNA, 25 bp, Homo sapien
cattcaacaaaggaaatgtgggctg

SEQ ID NO: 220190 - DNA, 25 bp, Homo sapien
tagcaaaggttattcctggacacag

SEQ ID NO: 220191 - DNA, 25 bp, Homo sapien
aggggaaagaacagcccttcatggg

SEQ ID NO: 220192 - DNA, 25 bp, Homo sapien
ggggaaagaacagcccttcatgggc

SEQ ID NO: 220193 - DNA, 25 bp, Homo sapien
aaggggaaagaacagcccttcatgg

SEQ ID NO: 220194 - DNA, 25 bp, Homo sapien
aaaggggaaagaacagcccttcatg

SEQ ID NO: 220195 - DNA, 25 bp, Homo sapien
caatgtgctacttacaatgaatgac

SEQ ID NO: 220196 - DNA, 25 bp, Homo sapien
ttgttatccgaggtcaagaggctgc

SEQ ID NO: 220197 - DNA, 25 bp, Homo sapien
tgacagaaaacaagctagggatcct

SEQ ID NO: 220198 - DNA, 25 bp, Homo sapien
tgattgtaaggccaacgttcaaaag

SEQ ID NO: 220199 - DNA, 25 bp, Homo sapien
caatgataaatcaatcttatgtaca

SEQ ID NO: 220200 - DNA, 25 bp, Homo sapien
tacaacttcttaatatctgagaact

SEQ ID NO: 220201 - DNA, 25 bp, Homo sapien
tgtacaatttcttacaactagcccc

SEQ ID NO: 220202 - DNA, 25 bp, Homo sapien
ttttatttcagtaggcatcaatgat

SEQ ID NO: 220203 - DNA, 25 bp, Homo sapien
agttgctgatatgccctcctgggaa

SEQ ID NO: 220204 - DNA, 25 bp, Homo sapien
tgctccctgtctggtatggacaaga

SEQ ID NO: 220205 - DNA, 25 bp, Homo sapien
tctaatacaggccactactgacagg

SEQ ID NO: 220206 - DNA, 25 bp, Homo sapien
tgggaattctggcagcatagcgtgc

SEQ ID NO: 220207 - DNA, 25 bp, Homo sapien
gcttcaaaaggatccactgggcagg

SEQ ID NO: 220208 - DNA, 25 bp, Homo sapien
cattgaaagctgcagaaccgttgag

SEQ ID NO: 220209 - DNA, 25 bp, Homo sapien
gaacctctgtatgcctgtctgctga

SEQ ID NO: 220210 - DNA, 25 bp, Homo sapien
ggactggtggtagcactgcttgcct

SEQ ID NO: 220211 - DNA, 25 bp, Homo sapien
gagtacgtctatgaccggcctggaa

SEQ ID NO: 220212 - DNA, 25 bp, Homo sapien
catcggtcggcctcagagggagtac

SEQ ID NO: 220213 - DNA, 25 bp, Homo sapien
tgagcccggacgctcttagacacct

SEQ ID NO: 220214 - DNA, 25 bp, Homo sapien
gacacctcttctaaccatcggtcgg

SEQ ID NO: 220215 - DNA, 25 bp, Homo sapien
gcagcaccagaagattgaccccact

SEQ ID NO: 220216 - DNA, 25 bp, Homo sapien
gagaggcagcaccagaagattgacc

SEQ ID NO: 220217 - DNA, 25 bp, Homo sapien
aggcagcaccagaagattgacccca

SEQ ID NO: 220218 - DNA, 25 bp, Homo sapien
caccagaagattgaccccactcggt

SEQ ID NO: 220219 - DNA, 25 bp, Homo sapien
gaagaaaacttgtcaagaccatgct

SEQ ID NO: 220220 - DNA, 25 bp, Homo sapien
taaagtctctattaccaactgggat

SEQ ID NO: 220221 - DNA, 25 bp, Homo sapien
tttgataggtaggagtaaagtctct

SEQ ID NO: 220222 - DNA, 25 bp, Homo sapien
ctggaaccaacaagatgagagacaa

SEQ ID NO: 220223 - DNA, 25 bp, Homo sapien
tctagcactttttgtaggcctccta

SEQ ID NO: 220224 - DNA, 25 bp, Homo sapien
tgacagaacaatactccacctccaa

SEQ ID NO: 220225 - DNA, 25 bp, Homo sapien
cctcctattgtaggagcagggcccc

SEQ ID NO: 220226 - DNA, 25 bp, Homo sapien
cctggccatatcttgctggcctctg

SEQ ID NO: 220227 - DNA, 25 bp, Homo sapien
cacaggcattgctacgggtgctaga

SEQ ID NO: 220228 - DNA, 25 bp, Homo sapien
tgctagagcagtatgggctggctta

SEQ ID NO: 220229 - DNA, 25 bp, Homo sapien
aagggttggtttcacgcacaggcat

SEQ ID NO: 220230 - DNA, 25 bp, Homo sapien
aatttccttgttagcagcatcaggg

SEQ ID NO: 220231 - DNA, 25 bp, Homo sapien
gaagcagggcactatctctggagta

SEQ ID NO: 220232 - DNA, 25 bp, Homo sapien
gaatcagcagaatgtaacgggtact

SEQ ID NO: 220233 - DNA, 25 bp, Homo sapien
ttcacctagaaactgggagccctct

SEQ ID NO: 220234 - DNA, 25 bp, Homo sapien
tgcatgaatacctaccacaatgtgg

SEQ ID NO: 220235 - DNA, 25 bp, Homo sapien
tacaagtctgtaacttaagttacat

SEQ ID NO: 220236 - DNA, 25 bp, Homo sapien
agctcaaattctacaagtctgtaac

SEQ ID NO: 220237 - DNA, 25 bp, Homo sapien
actatttagtcagtatctctgaaaa

SEQ ID NO: 220238 - DNA, 25 bp, Homo sapien
cactatttagtcagtatctctgaaa

SEQ ID NO: 220239 - DNA, 25 bp, Homo sapien
agttagtgagcagtgtactaaaagt

SEQ ID NO: 220240 - DNA, 25 bp, Homo sapien
agtgagcagtgtactaaaagtactg

SEQ ID NO: 220241 - DNA, 25 bp, Homo sapien
ttagtgagcagtgtactaaaagtac

SEQ ID NO: 220242 - DNA, 25 bp, Homo sapien
gagcagtgtactaaaagtactggtt

SEQ ID NO: 220243 - DNA, 25 bp, Homo sapien
cctcaggtgtgctgaaggcattggt

SEQ ID NO: 220244 - DNA, 25 bp, Homo sapien
aaggtaggagattgtggtgccacca

SEQ ID NO: 220245 - DNA, 25 bp, Homo sapien
tcggagcagatgagaaggggtcctc

SEQ ID NO: 220246 - DNA, 25 bp, Homo sapien
tctgcctccccttctacttctggca

SEQ ID NO: 220247 - DNA, 25 bp, Homo sapien
gaagacatttgcaacctgtatgcct

SEQ ID NO: 220248 - DNA, 25 bp, Homo sapien
aaatgggttcaagtctgggcactag

SEQ ID NO: 220249 - DNA, 25 bp, Homo sapien
tttgtgccaagatgttcagctagcc

SEQ ID NO: 220250 - DNA, 25 bp, Homo sapien
tgacagtatgatgcaagctggcact

SEQ ID NO: 220251 - DNA, 25 bp, Homo sapien
gaatgcttcagtgctcgagtaccca

SEQ ID NO: 220252 - DNA, 25 bp, Homo sapien
taggctagaaattccacaatggctc

SEQ ID NO: 220253 - DNA, 25 bp, Homo sapien
cagtgaatgcacttacatcaggaca

SEQ ID NO: 220254 - DNA, 25 bp, Homo sapien
gatacaactatcaacgaacctcagg

SEQ ID NO: 220255 - DNA, 25 bp, Homo sapien
tcggaaagagccttggcgagcaagc

SEQ ID NO: 220256 - DNA, 25 bp, Homo sapien
cctctgcatagtggaaggcaactca

SEQ ID NO: 220257 - DNA, 25 bp, Homo sapien
cagagaggtcgtggcatcagaagta

SEQ ID NO: 220258 - DNA, 25 bp, Homo sapien
tgttcaattggagcatgccggcgtg

SEQ ID NO: 220259 - DNA, 25 bp, Homo sapien
taatacacacgaggttttaccattg

SEQ ID NO: 220260 - DNA, 25 bp, Homo sapien
aagcttaaccatatatctttgatta

SEQ ID NO: 220261 - DNA, 25 bp, Homo sapien
ccatatatctttgattaggtgtcaa

SEQ ID NO: 220262 - DNA, 25 bp, Homo sapien
gattaggtgtcaaagaatgtcatat

SEQ ID NO: 220263 - DNA, 25 bp, Homo sapien
catagtccgtggatgctttgcagcc

SEQ ID NO: 220264 - DNA, 25 bp, Homo sapien
taaactagccactctaaaggaagcg

SEQ ID NO: 220265 - DNA, 25 bp, Homo sapien
gctgtgatgccatgtgtacctaaat

SEQ ID NO: 220266 - DNA, 25 bp, Homo sapien
tttgcagccttaagccctgggacct

SEQ ID NO: 220267 - DNA, 25 bp, Homo sapien
taataccttgttgggaaaaactgca

SEQ ID NO: 220268 - DNA, 25 bp, Homo sapien
atgagaaaatttacccctggtagct

SEQ ID NO: 220269 - DNA, 25 bp, Homo sapien
aaaactgcattccataaatacacac

SEQ ID NO: 220270 - DNA, 25 bp, Homo sapien
tgattatgagaaaatttacccctgg

SEQ ID NO: 220271 - DNA, 25 bp, Homo sapien
taaaagtggtccgactagcatcaaa

SEQ ID NO: 220272 - DNA, 25 bp, Homo sapien
tctgcttgcgctctaaacaggctgc

SEQ ID NO: 220273 - DNA, 25 bp, Homo sapien
tgttgtgacacggaatgatccttct

SEQ ID NO: 220274 - DNA, 25 bp, Homo sapien
tgcttgttcagtggctgttgtgaca

SEQ ID NO: 220275 - DNA, 25 bp, Homo sapien
gatggagtcagtggcacaaatctca

SEQ ID NO: 220276 - DNA, 25 bp, Homo sapien
tggagtcagtggcacaaatctcagc

SEQ ID NO: 220277 - DNA, 25 bp, Homo sapien
caggatggagtcagtggcacaaatc

SEQ ID NO: 220278 - DNA, 25 bp, Homo sapien
cgtgcctggccggtatttctgtttt

SEQ ID NO: 220279 - DNA, 25 bp, Homo sapien
gccatcacggcatatgtaagaaaag

SEQ ID NO: 220280 - DNA, 25 bp, Homo sapien
gaaactttctctatcgtctggtcaa

SEQ ID NO: 220281 - DNA, 25 bp, Homo sapien
gaaaaggctctatcaaagttcctgt

SEQ ID NO: 220282 - DNA, 25 bp, Homo sapien
gatccagcgacgagtggtgccatca

SEQ ID NO: 220283 - DNA, 25 bp, Homo sapien
attagccaggcgaggccgggcgcag

SEQ ID NO: 220284 - DNA, 25 bp, Homo sapien
tggctcacacctgtaatcccagcac

SEQ ID NO: 220285 - DNA, 25 bp, Homo sapien
tttgggaggccgaggtgggcggatc

SEQ ID NO: 220286 - DNA, 25 bp, Homo sapien
acctgaggtcaggagttcgagacca

SEQ ID NO: 220287 - DNA, 25 bp, Homo sapien
gacccacagaactgctttaactgct

SEQ ID NO: 220288 - DNA, 25 bp, Homo sapien
tcatccacaactctgagtccatctg

SEQ ID NO: 220289 - DNA, 25 bp, Homo sapien
caactctgagtccatctgctgagac

SEQ ID NO: 220290 - DNA, 25 bp, Homo sapien
ttttttcatccacaactctgagtcc

SEQ ID NO: 220291 - DNA, 25 bp, Homo sapien
taaggagttacaccacaagtagcgt

SEQ ID NO: 220292 - DNA, 25 bp, Homo sapien
tatttagagcaggaagtaacatgtc

SEQ ID NO: 220293 - DNA, 25 bp, Homo sapien
aagtcacaagtacagatggagtcca

SEQ ID NO: 220294 - DNA, 25 bp, Homo sapien
cagtatgttatagcaggacccttgg

SEQ ID NO: 220295 - DNA, 25 bp, Homo sapien
cagtgttcagtatctgaggcaacag

SEQ ID NO: 220296 - DNA, 25 bp, Homo sapien
cagataggactacttcaaggttgga

SEQ ID NO: 220297 - DNA, 25 bp, Homo sapien
caaatggcactgacaatcctaagat

SEQ ID NO: 220298 - DNA, 25 bp, Homo sapien
gaccagtgatatacaacattgccaa

SEQ ID NO: 220299 - DNA, 25 bp, Homo sapien
acacacatcccaattatatggttat

SEQ ID NO: 220300 - DNA, 25 bp, Homo sapien
ggagggtgagacaggagactccctt

SEQ ID NO: 220301 - DNA, 25 bp, Homo sapien
ctgagatcgcaccattgcactccag

SEQ ID NO: 220302 - DNA, 25 bp, Homo sapien
gggtgagacaggagactcccttgaa

SEQ ID NO: 220303 - DNA, 25 bp, Homo sapien
cccgggaggtggaggttgcagtgag

SEQ ID NO: 220304 - DNA, 25 bp, Homo sapien
gctgggagaccacaagtaagtacca

SEQ ID NO: 220305 - DNA, 25 bp, Homo sapien
atgacaagttggtgatatacatggt

SEQ ID NO: 220306 - DNA, 25 bp, Homo sapien
actatgcccagctgaaaccactttt

SEQ ID NO: 220307 - DNA, 25 bp, Homo sapien
ggtggaaagattcttacactgctct

SEQ ID NO: 220308 - DNA, 25 bp, Homo sapien
tccaaaatccagtgaatatacccca

SEQ ID NO: 220309 - DNA, 25 bp, Homo sapien
ggagcatgtcatgaactacacagta

SEQ ID NO: 220310 - DNA, 25 bp, Homo sapien
gtgctcaggaagagtacaataactt

SEQ ID NO: 220311 - DNA, 25 bp, Homo sapien
gatttgagattgtactgtgctcagg

SEQ ID NO: 220312 - DNA, 25 bp, Homo sapien
agaagtcaaggtcaaatccagggtt

SEQ ID NO: 220313 - DNA, 25 bp, Homo sapien
tttggctagagcatagggacagaga

SEQ ID NO: 220314 - DNA, 25 bp, Homo sapien
ggtgactagcagatatcgaagagaa

SEQ ID NO: 220315 - DNA, 25 bp, Homo sapien
gagatgctgtatattgagactggga

SEQ ID NO: 220316 - DNA, 25 bp, Homo sapien
aacaaatgagtgaagcagggacaac

SEQ ID NO: 220317 - DNA, 25 bp, Homo sapien
ttgtggcgaataggcaaagggcata

SEQ ID NO: 220318 - DNA, 25 bp, Homo sapien
tactcaggtcaggaaactgttgcca

SEQ ID NO: 220319 - DNA, 25 bp, Homo sapien
tcaaagtgacataacccagagagga

SEQ ID NO: 220320 - DNA, 25 bp, Homo sapien
aaaatgattgcttatcagtagcata

SEQ ID NO: 220321 - DNA, 25 bp, Homo sapien
taacttctgcatttaggcttgggtc

SEQ ID NO: 220322 - DNA, 25 bp, Homo sapien
caaagtagggaatgatggtaatgtc

SEQ ID NO: 220323 - DNA, 25 bp, Homo sapien
ggtaatgtcaaacaaccacagactc

SEQ ID NO: 220324 - DNA, 25 bp, Homo sapien
tcatggccccattatacgtagcaat

SEQ ID NO: 220325 - DNA, 25 bp, Homo sapien
gtgaaaaagctacccaacacagtgt

SEQ ID NO: 220326 - DNA, 25 bp, Homo sapien
cacagtgtgatccagctcagctaca

SEQ ID NO: 220327 - DNA, 25 bp, Homo sapien
cacaatgattaagagtgtgggctct

SEQ ID NO: 220328 - DNA, 25 bp, Homo sapien
tccaaagaagcctttgaagaacttc

SEQ ID NO: 220329 - DNA, 25 bp, Homo sapien
caaagaagcctttgaagaacttcct

SEQ ID NO: 220330 - DNA, 25 bp, Homo sapien
gtcactcaggatggagtgcagtggc

SEQ ID NO: 220331 - DNA, 25 bp, Homo sapien
acgatctcaggtcactgcaacctct

SEQ ID NO: 220332 - DNA, 25 bp, Homo sapien
gcctcctgggttcaagcaatgctca

SEQ ID NO: 220333 - DNA, 25 bp, Homo sapien
gtttgttgagtcagagtctcactct

SEQ ID NO: 220334 - DNA, 25 bp, Homo sapien
catataacatttgctccaaatctag

SEQ ID NO: 220335 - DNA, 25 bp, Homo sapien
caagctactgtgttcggcttaaaac

SEQ ID NO: 220336 - DNA, 25 bp, Homo sapien
attataggcgcaagctactgtgttc

SEQ ID NO: 220337 - DNA, 25 bp, Homo sapien
ttcttgataagaagtctagaaatgg

SEQ ID NO: 220338 - DNA, 25 bp, Homo sapien
taatatagactatgccgagaagcac

SEQ ID NO: 220339 - DNA, 25 bp, Homo sapien
tagtagtcaaacttgtggcagccca

SEQ ID NO: 220340 - DNA, 25 bp, Homo sapien
tatacctctggatgggcaacatgag

SEQ ID NO: 220341 - DNA, 25 bp, Homo sapien
tgttctatcgcataacaggcagagg

SEQ ID NO: 220342 - DNA, 25 bp, Homo sapien
attcctcttgattcatcaacttcta

SEQ ID NO: 220343 - DNA, 25 bp, Homo sapien
ttcctcttgattcatcaacttctac

SEQ ID NO: 220344 - DNA, 25 bp, Homo sapien
ctgtaggatctgaggaatggataca

SEQ ID NO: 220345 - DNA, 25 bp, Homo sapien
ggtttcaaagtatttccaatgggca

SEQ ID NO: 220346 - DNA, 25 bp, Homo sapien
taggatctgaggaatggatacaggt

SEQ ID NO: 220347 - DNA, 25 bp, Homo sapien
tggatacaggtttcaaagtatttcc

SEQ ID NO: 220348 - DNA, 25 bp, Homo sapien
tttcaggaatgtaaagttggttgac

SEQ ID NO: 220349 - DNA, 25 bp, Homo sapien
tcatgatgagtactaagctgagttt

SEQ ID NO: 220350 - DNA, 25 bp, Homo sapien
tcataatcatctcggctaggcatgg

SEQ ID NO: 220351 - DNA, 25 bp, Homo sapien
gttggttgactattcaaaaaatcta

SEQ ID NO: 220352 - DNA, 25 bp, Homo sapien
aaagtgttccagataccagtctagg

SEQ ID NO: 220353 - DNA, 25 bp, Homo sapien
tgtgcctgaccacaaaagtatatgc

SEQ ID NO: 220354 - DNA, 25 bp, Homo sapien
tggaagaacctacctcccttgatgg

SEQ ID NO: 220355 - DNA, 25 bp, Homo sapien
catgaggtaggtaagtgacaagacc

SEQ ID NO: 220356 - DNA, 25 bp, Homo sapien
tagtaaagctttaatagtattcgtg

SEQ ID NO: 220357 - DNA, 25 bp, Homo sapien
tattcgtgtgaaatgatctgggcct

SEQ ID NO: 220358 - DNA, 25 bp, Homo sapien
acttataaagctttaggaaacagat

SEQ ID NO: 220359 - DNA, 25 bp, Homo sapien
gaaacagataaagcatcaattttgt

SEQ ID NO: 220360 - DNA, 25 bp, Homo sapien
gagtatacttaataccgttgaactg

SEQ ID NO: 220361 - DNA, 25 bp, Homo sapien
gataactgcacaccaatatgagtat

SEQ ID NO: 220362 - DNA, 25 bp, Homo sapien
cacacgatttaatggcttcccacgt

SEQ ID NO: 220363 - DNA, 25 bp, Homo sapien
ctggagatgactggtggtgataact

SEQ ID NO: 220364 - DNA, 25 bp, Homo sapien
cggtgcgaacgccttcttcatctgt

SEQ ID NO: 220365 - DNA, 25 bp, Homo sapien
ccgggaagctacattttccggtgcg

SEQ ID NO: 220366 - DNA, 25 bp, Homo sapien
ggacgactggcctctggaacataaa

SEQ ID NO: 220367 - DNA, 25 bp, Homo sapien
ggaacataaacatccttctttctcc

SEQ ID NO: 220368 - DNA, 25 bp, Homo sapien
agtttcgtaacttcaccaagcctca

SEQ ID NO: 220369 - DNA, 25 bp, Homo sapien
tttcgtaacttcaccaagcctcagt

SEQ ID NO: 220370 - DNA, 25 bp, Homo sapien
cttggctgtgccctttacaagttgt

SEQ ID NO: 220371 - DNA, 25 bp, Homo sapien
ggctgtgccctttacaagttgtgtg

SEQ ID NO: 220372 - DNA, 25 bp, Homo sapien
tgcacccgacctcaattagttcttt

SEQ ID NO: 220373 - DNA, 25 bp, Homo sapien
ctgcacccgacctcaattagttctt

SEQ ID NO: 220374 - DNA, 25 bp, Homo sapien
gagactacagcatgctatgatggca

SEQ ID NO: 220375 - DNA, 25 bp, Homo sapien
gaatacagtgactactctgcctggt

SEQ ID NO: 220376 - DNA, 25 bp, Homo sapien
tgtctgacaaccttaactagcgggc

SEQ ID NO: 220377 - DNA, 25 bp, Homo sapien
tattaccatgaaagtcctaggaacc

SEQ ID NO: 220378 - DNA, 25 bp, Homo sapien
caggttttgaaacactataggccct

SEQ ID NO: 220379 - DNA, 25 bp, Homo sapien
tcttgatacttacaacaggttttga

SEQ ID NO: 220380 - DNA, 25 bp, Homo sapien
ttatactcttgatacttacaacagg

SEQ ID NO: 220381 - DNA, 25 bp, Homo sapien
taggccctcaatataagacttgttg

SEQ ID NO: 220382 - DNA, 25 bp, Homo sapien
taaaagtcaatattagcacccggca

SEQ ID NO: 220383 - DNA, 25 bp, Homo sapien
aagtcaatattagcacccggcaatc

SEQ ID NO: 220384 - DNA, 25 bp, Homo sapien
aataaaagtcaatattagcacccgg

SEQ ID NO: 220385 - DNA, 25 bp, Homo sapien
tcaatattagcacccggcaatcttt

SEQ ID NO: 220386 - DNA, 25 bp, Homo sapien
atgatgttaatgtgccagagatgag

SEQ ID NO: 220387 - DNA, 25 bp, Homo sapien
ttcatatgtatagctacacgtgaca

SEQ ID NO: 220388 - DNA, 25 bp, Homo sapien
gcctggcagtggtgtgtccctatag

SEQ ID NO: 220389 - DNA, 25 bp, Homo sapien
cataggttaatcattcacataggga

SEQ ID NO: 220390 - DNA, 25 bp, Homo sapien
agagcagtggggtacaatcagagct

SEQ ID NO: 220391 - DNA, 25 bp, Homo sapien
caacagtatctccttgatcacaaat

SEQ ID NO: 220392 - DNA, 25 bp, Homo sapien
tggtgggaaaagacctcataattca

SEQ ID NO: 220393 - DNA, 25 bp, Homo sapien
cacaaatacatttctagagtaaatt

SEQ ID NO: 220394 - DNA, 25 bp, Homo sapien
caagcagccacaaggagaagtcaca

SEQ ID NO: 220395 - DNA, 25 bp, Homo sapien
tatgttaacagagacaagcatccct

SEQ ID NO: 220396 - DNA, 25 bp, Homo sapien
gatatgtgagtgagcaagcctacct

SEQ ID NO: 220397 - DNA, 25 bp, Homo sapien
catcaaccagtaggacagagcaaag

SEQ ID NO: 220398 - DNA, 25 bp, Homo sapien
cccggaagaagttgcttaagcctca

SEQ ID NO: 220399 - DNA, 25 bp, Homo sapien
ttgtcctaagtgaggcgtctgagga

SEQ ID NO: 220400 - DNA, 25 bp, Homo sapien
gtctgaggattgctggcccaccaat

SEQ ID NO: 220401 - DNA, 25 bp, Homo sapien
tcttgaattgtaacagtggctgcac

SEQ ID NO: 220402 - DNA, 25 bp, Homo sapien
tatgtatgtataggctgagggcagt

SEQ ID NO: 220403 - DNA, 25 bp, Homo sapien
cacatttcaaaattatgcccatcct

SEQ ID NO: 220404 - DNA, 25 bp, Homo sapien
gggcgcactcctattcactactagc

SEQ ID NO: 220405 - DNA, 25 bp, Homo sapien
tactagcagggctttatccaacaat

SEQ ID NO: 220406 - DNA, 25 bp, Homo sapien
gttgcatgacccagacacagcttca

SEQ ID NO: 220407 - DNA, 25 bp, Homo sapien
caactctgcctggagctattgctta

SEQ ID NO: 220408 - DNA, 25 bp, Homo sapien
tctctaaggagcaggaactctaaac

SEQ ID NO: 220409 - DNA, 25 bp, Homo sapien
gaaagagaccaagccacctgctagt

SEQ ID NO: 220410 - DNA, 25 bp, Homo sapien
gcaagagaattgcttgaaaacctgg

SEQ ID NO: 220411 - DNA, 25 bp, Homo sapien
gaggcagaggttgtaatgagccgag

SEQ ID NO: 220412 - DNA, 25 bp, Homo sapien
gggaggcagaggttgtaatgagccg

SEQ ID NO: 220413 - DNA, 25 bp, Homo sapien
aggcaagagaattgcttgaaaacct

SEQ ID NO: 220414 - DNA, 25 bp, Homo sapien
aagattataatagtagctgccctca

SEQ ID NO: 220415 - DNA, 25 bp, Homo sapien
taaacttgggccactactactgcac

SEQ ID NO: 220416 - DNA, 25 bp, Homo sapien
gctctggagccaaactatctaggtt

SEQ ID NO: 220417 - DNA, 25 bp, Homo sapien
taggctatcagttctcacaagtggc

SEQ ID NO: 220418 - DNA, 25 bp, Homo sapien
acaggaggaaccaaatcagaaactg

SEQ ID NO: 220419 - DNA, 25 bp, Homo sapien
caaaagcggacaacatctgagaaac

SEQ ID NO: 220420 - DNA, 25 bp, Homo sapien
caaacaatgctttacggtacagtga

SEQ ID NO: 220421 - DNA, 25 bp, Homo sapien
tccagagtcagaggcataacacaat

SEQ ID NO: 220422 - DNA, 25 bp, Homo sapien
ggtcctctgaccaacgtgatcatca

SEQ ID NO: 220423 - DNA, 25 bp, Homo sapien
gcaagctaacatctgcgagccaggt

SEQ ID NO: 220424 - DNA, 25 bp, Homo sapien
gggccaagcaatctacattttacca

SEQ ID NO: 220425 - DNA, 25 bp, Homo sapien
tattgaacaatccagtacacacgac

SEQ ID NO: 220426 - DNA, 25 bp, Homo sapien
tcccttagggatcctcagagccgga

SEQ ID NO: 220427 - DNA, 25 bp, Homo sapien
tcaaacgcgagccactcctcgagga

SEQ ID NO: 220428 - DNA, 25 bp, Homo sapien
aacgcgagccactcctcgaggactt

SEQ ID NO: 220429 - DNA, 25 bp, Homo sapien
ttcctggtcccttagggatcctcag

SEQ ID NO: 220430 - DNA, 25 bp, Homo sapien
tcagcgcgctagaccggagcagctg

SEQ ID NO: 220431 - DNA, 25 bp, Homo sapien
agcagctggacgtcccaagggacct

SEQ ID NO: 220432 - DNA, 25 bp, Homo sapien
tggacgtcccaagggacctcctggc

SEQ ID NO: 220433 - DNA, 25 bp, Homo sapien
acagtggccgccggtcagcgcgcta

SEQ ID NO: 220434 - DNA, 25 bp, Homo sapien
ctgcctctacctcggccgccagtgg

SEQ ID NO: 220435 - DNA, 25 bp, Homo sapien
tcaagcgccactgcctctacctcgg

SEQ ID NO: 220436 - DNA, 25 bp, Homo sapien
gccagtggccaccaagcgccaccac

SEQ ID NO: 220437 - DNA, 25 bp, Homo sapien
cgctgcccccgaccaactcaagcgc

SEQ ID NO: 220438 - DNA, 25 bp, Homo sapien
gaagtggcgtattgagagttctcca

SEQ ID NO: 220439 - DNA, 25 bp, Homo sapien
tcagagagataaaaatgtccccttc

SEQ ID NO: 220440 - DNA, 25 bp, Homo sapien
tttagcagaaatcagtcaacttcgg

SEQ ID NO: 220441 - DNA, 25 bp, Homo sapien
tccaggagcctcaatgctaaagggc

SEQ ID NO: 220442 - DNA, 25 bp, Homo sapien
tactttgggtaataatggctcttgc

SEQ ID NO: 220443 - DNA, 25 bp, Homo sapien
ttaggccagccttgctaagaggact

SEQ ID NO: 220444 - DNA, 25 bp, Homo sapien
aaattgtcacaaaagtcagccgcta

SEQ ID NO: 220445 - DNA, 25 bp, Homo sapien
ccatctaagttgaagaatgcagcga

SEQ ID NO: 220446 - DNA, 25 bp, Homo sapien
taaacaaagggagactatctgggag

SEQ ID NO: 220447 - DNA, 25 bp, Homo sapien
tactgtggtttcaaagttcaaggct

SEQ ID NO: 220448 - DNA, 25 bp, Homo sapien
gtgctttcaccaccgggaagtgcca

SEQ ID NO: 220449 - DNA, 25 bp, Homo sapien
cacgctggaacaaggtactgtggtt

SEQ ID NO: 220450 - DNA, 25 bp, Homo sapien
ggcctcttcgttgagcatctcacaa

SEQ ID NO: 220451 - DNA, 25 bp, Homo sapien
gactcacttcctaaggccttggttc

SEQ ID NO: 220452 - DNA, 25 bp, Homo sapien
gcctcatgggcctcttcgttgagca

SEQ ID NO: 220453 - DNA, 25 bp, Homo sapien
ggttccccaggagctgttggccaga

SEQ ID NO: 220454 - DNA, 25 bp, Homo sapien
taatggctggttttctcccctagct

SEQ ID NO: 220455 - DNA, 25 bp, Homo sapien
taatatacataattcaggacctgac

SEQ ID NO: 220456 - DNA, 25 bp, Homo sapien
gagaatatgttcaattcgggccagc

SEQ ID NO: 220457 - DNA, 25 bp, Homo sapien
caggacctgacatgtagtaaatgct

SEQ ID NO: 220458 - DNA, 25 bp, Homo sapien
ggtcatcattgtgcagtctactcag

SEQ ID NO: 220459 - DNA, 25 bp, Homo sapien
gaaagagggacctacacaggcccta

SEQ ID NO: 220460 - DNA, 25 bp, Homo sapien
gaagaagagagtccagtttgcaaca

SEQ ID NO: 220461 - DNA, 25 bp, Homo sapien
tgaacagagacttcgctatgtgacc

SEQ ID NO: 220462 - DNA, 25 bp, Homo sapien
ctctctgcctaaatcttgtgccatc

SEQ ID NO: 220463 - DNA, 25 bp, Homo sapien
tcttgtgccatctcagatccaacac

SEQ ID NO: 220464 - DNA, 25 bp, Homo sapien
tctcagatccaacacaaattcccat

SEQ ID NO: 220465 - DNA, 25 bp, Homo sapien
ctcctctctgcctaaatcttgtgcc

SEQ ID NO: 220466 - DNA, 25 bp, Homo sapien
caagattgtacagtatcaattaaaa

SEQ ID NO: 220467 - DNA, 25 bp, Homo sapien
tataaacatagtgacaacaagattg

SEQ ID NO: 220468 - DNA, 25 bp, Homo sapien
aagacccaatgtgaccaggtccact

SEQ ID NO: 220469 - DNA, 25 bp, Homo sapien
ttcctgcatcttgaagtaagacaag

SEQ ID NO: 220470 - DNA, 25 bp, Homo sapien
taaagagctgggtagtcggatctaa

SEQ ID NO: 220471 - DNA, 25 bp, Homo sapien
gaactttgcttcgtgtggttaggcc

SEQ ID NO: 220472 - DNA, 25 bp, Homo sapien
tcggatctaaatggtcccacagcaa

SEQ ID NO: 220473 - DNA, 25 bp, Homo sapien
gaggtgcgtagatctttgacaagtg

SEQ ID NO: 220474 - DNA, 25 bp, Homo sapien
aacctctgcccccagagttcaaggg

SEQ ID NO: 220475 - DNA, 25 bp, Homo sapien
tcgaactcaggtgatccgccggcct

SEQ ID NO: 220476 - DNA, 25 bp, Homo sapien
ctctgcccccagagttcaagggatt

SEQ ID NO: 220477 - DNA, 25 bp, Homo sapien
caacctctgcccccagagttcaagg

SEQ ID NO: 220478 - DNA, 25 bp, Homo sapien
gttcttaccttgataagcatcagtg

SEQ ID NO: 220479 - DNA, 25 bp, Homo sapien
aaactcacgttcttaccttgataag

SEQ ID NO: 220480 - DNA, 25 bp, Homo sapien
cacgttcttaccttgataagcatca

SEQ ID NO: 220481 - DNA, 25 bp, Homo sapien
aactcacgttcttaccttgataagc

SEQ ID NO: 220482 - DNA, 25 bp, Homo sapien
ggtcttctaggaagaaccatctcat

SEQ ID NO: 220483 - DNA, 25 bp, Homo sapien
tcggaaggtcttctaggaagaacca

SEQ ID NO: 220484 - DNA, 25 bp, Homo sapien
cacaaacctcggaaggtcttctagg

SEQ ID NO: 220485 - DNA, 25 bp, Homo sapien
cttcagtgtcacaaacctcggaagg

SEQ ID NO: 220486 - DNA, 25 bp, Homo sapien
cttgatccgtgatcatttcagagca

SEQ ID NO: 220487 - DNA, 25 bp, Homo sapien
agtgtactgggtaacactgaccatg

SEQ ID NO: 220488 - DNA, 25 bp, Homo sapien
actgaccatgtcgttctgcttgaga

SEQ ID NO: 220489 - DNA, 25 bp, Homo sapien
gggtcagtatcctgtttgttattgt

SEQ ID NO: 220490 - DNA, 25 bp, Homo sapien
gtttcttggagtaaagtctggagtg

SEQ ID NO: 220491 - DNA, 25 bp, Homo sapien
agtaaagtctggagtgttagtggtc

SEQ ID NO: 220492 - DNA, 25 bp, Homo sapien
tcaagtaaacacgttttgcttcctc

SEQ ID NO: 220493 - DNA, 25 bp, Homo sapien
tggagtgttagtggtccttgttctc

SEQ ID NO: 220494 - DNA, 25 bp, Homo sapien
ttcctaagttgagtatcttcattgt

SEQ ID NO: 220495 - DNA, 25 bp, Homo sapien
aagttgagtatcttcattgtctggt

SEQ ID NO: 220496 - DNA, 25 bp, Homo sapien
cctaagttgagtatcttcattgtct

SEQ ID NO: 220497 - DNA, 25 bp, Homo sapien
taagttgagtatcttcattgtctgg

SEQ ID NO: 220498 - DNA, 25 bp, Homo sapien
acctacttgggtgagtggtgaatgt

SEQ ID NO: 220499 - DNA, 25 bp, Homo sapien
ttacctacttgggtgagtggtgaat

SEQ ID NO: 220500 - DNA, 25 bp, Homo sapien
agttacctacttgggtgagtggtga

SEQ ID NO: 220501 - DNA, 25 bp, Homo sapien
tcagttacctacttgggtgagtggt

SEQ ID NO: 220502 - DNA, 25 bp, Homo sapien
cagggctaggatgctacggcaagct

SEQ ID NO: 220503 - DNA, 25 bp, Homo sapien
tttagaacagcatcgtggttctcca

SEQ ID NO: 220504 - DNA, 25 bp, Homo sapien
acagcatcgtggttctccaggagca

SEQ ID NO: 220505 - DNA, 25 bp, Homo sapien
gatgctacggcaagcttccagccgt

SEQ ID NO: 220506 - DNA, 25 bp, Homo sapien
gactcttcatagtggatagcccaga

SEQ ID NO: 220507 - DNA, 25 bp, Homo sapien
tcagctcgggacttacttgcccaat

SEQ ID NO: 220508 - DNA, 25 bp, Homo sapien
gcccagagcagaagatccgtcagct

SEQ ID NO: 220509 - DNA, 25 bp, Homo sapien
gcagaagatccgtcagctcgggact

SEQ ID NO: 220510 - DNA, 25 bp, Homo sapien
gattttccagtaaggatctctctgc

SEQ ID NO: 220511 - DNA, 25 bp, Homo sapien
tttccagtaaggatctctctgcatc

SEQ ID NO: 220512 - DNA, 25 bp, Homo sapien
cagtaaggatctctctgcatcaggt

SEQ ID NO: 220513 - DNA, 25 bp, Homo sapien
aggatctctctgcatcaggttcagg

SEQ ID NO: 220514 - DNA, 25 bp, Homo sapien
tgcccgccgaactgctgtgaagtca

SEQ ID NO: 220515 - DNA, 25 bp, Homo sapien
gagagcttccacacgctcctgggaa

SEQ ID NO: 220516 - DNA, 25 bp, Homo sapien
catcttgtcgcggatctgcagggca

SEQ ID NO: 220517 - DNA, 25 bp, Homo sapien
aagcttgagctcacctatcaggtag

SEQ ID NO: 220518 - DNA, 25 bp, Homo sapien
ggctcatttgcccaagcgcctgtgc

SEQ ID NO: 220519 - DNA, 25 bp, Homo sapien
tctttcccgaggctcatttgcccaa

SEQ ID NO: 220520 - DNA, 25 bp, Homo sapien
tcacttccttattccagtcattcca

SEQ ID NO: 220521 - DNA, 25 bp, Homo sapien
ctgattatgtcgtgcacctctttcc

SEQ ID NO: 220522 - DNA, 25 bp, Homo sapien
gccaacataacttgtacctgggaga

SEQ ID NO: 220523 - DNA, 25 bp, Homo sapien
gcttactctcccaaagaatccagtg

SEQ ID NO: 220524 - DNA, 25 bp, Homo sapien
tataagtgcacttctctcagagagg

SEQ ID NO: 220525 - DNA, 25 bp, Homo sapien
gaatgggcaaagattactacacgat

SEQ ID NO: 220526 - DNA, 25 bp, Homo sapien
attgttcctaccatagtgttaattt

SEQ ID NO: 220527 - DNA, 25 bp, Homo sapien
tatattagtcttattgttcctacca

SEQ ID NO: 220528 - DNA, 25 bp, Homo sapien
tattgttcctaccatagtgttaatt

SEQ ID NO: 220529 - DNA, 25 bp, Homo sapien
tgttcctaccatagtgttaattttg

SEQ ID NO: 220530 - DNA, 25 bp, Homo sapien
gcctggcaggccacaatccggttct

SEQ ID NO: 220531 - DNA, 25 bp, Homo sapien
ggccacaatccggttcttccattga

SEQ ID NO: 220532 - DNA, 25 bp, Homo sapien
agacatttccactgatccgggagaa

SEQ ID NO: 220533 - DNA, 25 bp, Homo sapien
ccattgacagctgttcagctccaca

SEQ ID NO: 220534 - DNA, 25 bp, Homo sapien
gagatactagaaccttgaagttaca

SEQ ID NO: 220535 - DNA, 25 bp, Homo sapien
tggaagacttgtatggatattcaca

SEQ ID NO: 220536 - DNA, 25 bp, Homo sapien
caatcacttttagagatactagaac

SEQ ID NO: 220537 - DNA, 25 bp, Homo sapien
gacttgtatggatattcacaatcac

SEQ ID NO: 220538 - DNA, 25 bp, Homo sapien
gacctaattgctccccaaaactgtg

SEQ ID NO: 220539 - DNA, 25 bp, Homo sapien
gggactactcagtgtggtaccactg

SEQ ID NO: 220540 - DNA, 25 bp, Homo sapien
tcactgacctcaaagacctaattgc

SEQ ID NO: 220541 - DNA, 25 bp, Homo sapien
gctgcatttcagattgcttacattc

SEQ ID NO: 220542 - DNA, 25 bp, Homo sapien
tgcagcccagctatccacactgtta

SEQ ID NO: 220543 - DNA, 25 bp, Homo sapien
gatataagactgttcctcagtgtcc

SEQ ID NO: 220544 - DNA, 25 bp, Homo sapien
gtggaggatcctcttaatcacaggg

SEQ ID NO: 220545 - DNA, 25 bp, Homo sapien
tgtcttctcactcagatagctcagg

SEQ ID NO: 220546 - DNA, 25 bp, Homo sapien
tctagggcaggcagtagaacctccg

SEQ ID NO: 220547 - DNA, 25 bp, Homo sapien
tatgtgactgtatggcatattggca

SEQ ID NO: 220548 - DNA, 25 bp, Homo sapien
tcttgtcacaaagagcagcctctag

SEQ ID NO: 220549 - DNA, 25 bp, Homo sapien
tattgctgctgccatccgcacatgg

SEQ ID NO: 220550 - DNA, 25 bp, Homo sapien
ggttctctactgtctcatggtgcca

SEQ ID NO: 220551 - DNA, 25 bp, Homo sapien
acatgtggtgatagctttgatccga

SEQ ID NO: 220552 - DNA, 25 bp, Homo sapien
aacgtcatcatgcaggtctcccaag

SEQ ID NO: 220553 - DNA, 25 bp, Homo sapien
caaagcagctgtggcacatgtggtg

SEQ ID NO: 220554 - DNA, 25 bp, Homo sapien
gccgcagtgagggaaatgaaaagag

SEQ ID NO: 220555 - DNA, 25 bp, Homo sapien
cacctggttagggttagatattgtg

SEQ ID NO: 220556 - DNA, 25 bp, Homo sapien
accacctggttagggttagatattg

SEQ ID NO: 220557 - DNA, 25 bp, Homo sapien
ctgagccgcagtgagggaaatgaaa

SEQ ID NO: 220558 - DNA, 25 bp, Homo sapien
cctgcagtgattttgcctgcttctt

SEQ ID NO: 220559 - DNA, 25 bp, Homo sapien
acatcctcctgcagtgattttgcct

SEQ ID NO: 220560 - DNA, 25 bp, Homo sapien
cttcagcatcctccgcaggaccacc

SEQ ID NO: 220561 - DNA, 25 bp, Homo sapien
tcctcctgcagtgattttgcctgct

SEQ ID NO: 220562 - DNA, 25 bp, Homo sapien
ggtgggcaaagcagtccagcgcagg

SEQ ID NO: 220563 - DNA, 25 bp, Homo sapien
gtgggcaaagcagtccagcgcaggg

SEQ ID NO: 220564 - DNA, 25 bp, Homo sapien
agcatatccttggcgggggtgggca

SEQ ID NO: 220565 - DNA, 25 bp, Homo sapien
gggtgggcaaagcagtccagcgcag

SEQ ID NO: 220566 - DNA, 25 bp, Homo sapien
tttgccatgtgacgctccccgactt

SEQ ID NO: 220567 - DNA, 25 bp, Homo sapien
tctctcaggcgatttgaaatccctc

SEQ ID NO: 220568 - DNA, 25 bp, Homo sapien
cccgacttctctcaggcgatttgaa

SEQ ID NO: 220569 - DNA, 25 bp, Homo sapien
actttgccatgtgacgctccccgac

SEQ ID NO: 220570 - DNA, 25 bp, Homo sapien
tttgccatgtgacgctccccgactt

SEQ ID NO: 220571 - DNA, 25 bp, Homo sapien
tctctcaggcgatttgaaatccctc

SEQ ID NO: 220572 - DNA, 25 bp, Homo sapien
actttgccatgtgacgctccccgac

SEQ ID NO: 220573 - DNA, 25 bp, Homo sapien
cccgacttctctcaggcgatttgaa

SEQ ID NO: 220574 - DNA, 25 bp, Homo sapien
tgcctcatcaaattgtatggtttaa

SEQ ID NO: 220575 - DNA, 25 bp, Homo sapien
gcctcatcaaattgtatggtttaac

SEQ ID NO: 220576 - DNA, 25 bp, Homo sapien
atgcttcaggaattgcctgggcact

SEQ ID NO: 220577 - DNA, 25 bp, Homo sapien
gagtttcagggaagaccttagatag

SEQ ID NO: 220578 - DNA, 25 bp, Homo sapien
aggacaatctggtctctctttgcac

SEQ ID NO: 220579 - DNA, 25 bp, Homo sapien
tagctgcttgttgtaccgatttagg

SEQ ID NO: 220580 - DNA, 25 bp, Homo sapien
ccacttttctggagtttcagggaag

SEQ ID NO: 220581 - DNA, 25 bp, Homo sapien
gaacctatgtaaccacttagaggcc

SEQ ID NO: 220582 - DNA, 25 bp, Homo sapien
gaagagatggattgttcccaaagtc

SEQ ID NO: 220583 - DNA, 25 bp, Homo sapien
gaagaaacagcttggaacacgaaga

SEQ ID NO: 220584 - DNA, 25 bp, Homo sapien
gaagcccaggcatctaagggacagc

SEQ ID NO: 220585 - DNA, 25 bp, Homo sapien
tgttgtctgtggagtaggcaaactt

SEQ ID NO: 220586 - DNA, 25 bp, Homo sapien
aatctcctgttcaaaggtgttgtct

SEQ ID NO: 220587 - DNA, 25 bp, Homo sapien
tggagtaggcaaactttccagctcg

SEQ ID NO: 220588 - DNA, 25 bp, Homo sapien
cctgttcaaaggtgttgtctgtgga

SEQ ID NO: 220589 - DNA, 25 bp, Homo sapien
gggagaggctcgtcttttcatggat

SEQ ID NO: 220590 - DNA, 25 bp, Homo sapien
ggctgggagaggctcgtcttttcat

SEQ ID NO: 220591 - DNA, 25 bp, Homo sapien
ctggcgaaagtagctctgggtttgg

SEQ ID NO: 220592 - DNA, 25 bp, Homo sapien
ggctcgtcttttcatggatatcctc

SEQ ID NO: 220593 - DNA, 25 bp, Homo sapien
tgtagtaaacgggaagcagcagttc

SEQ ID NO: 220594 - DNA, 25 bp, Homo sapien
ggacgcttgctctggatccatcggg

SEQ ID NO: 220595 - DNA, 25 bp, Homo sapien
tggcagaggtaagctcatcccgaat

SEQ ID NO: 220596 - DNA, 25 bp, Homo sapien
tccagtcgtactgctggcgcaggaa

SEQ ID NO: 220597 - DNA, 25 bp, Homo sapien
tactggctataaggaatgctgggca

SEQ ID NO: 220598 - DNA, 25 bp, Homo sapien
gctaacaggtttctgaggccgggcc

SEQ ID NO: 220599 - DNA, 25 bp, Homo sapien
cacatctagagaaggtggccgaccc

SEQ ID NO: 220600 - DNA, 25 bp, Homo sapien
aatattggctcttgcggtgtagacg

SEQ ID NO: 220601 - DNA, 25 bp, Homo sapien
tgcctttcaattttgagtagtttaa

SEQ ID NO: 220602 - DNA, 25 bp, Homo sapien
tgagtagtttaaaatcatgccccat

SEQ ID NO: 220603 - DNA, 25 bp, Homo sapien
cactggagacagaggcacactcctc

SEQ ID NO: 220604 - DNA, 25 bp, Homo sapien
aatcatgccccatcccagtcgtggg

SEQ ID NO: 220605 - DNA, 25 bp, Homo sapien
ctgcctggcctagaggaaaggcctg

SEQ ID NO: 220606 - DNA, 25 bp, Homo sapien
gggtcctggtcataccgcgtcccag

SEQ ID NO: 220607 - DNA, 25 bp, Homo sapien
actgcctggcctagaggaaaggcct

SEQ ID NO: 220608 - DNA, 25 bp, Homo sapien
tggtcataccgcgtcccagcaaatg

SEQ ID NO: 220609 - DNA, 25 bp, Homo sapien
tcaaaatagtagtcttgaagaagct

SEQ ID NO: 220610 - DNA, 25 bp, Homo sapien
atttcaccaaatggactaaataagg

SEQ ID NO: 220611 - DNA, 25 bp, Homo sapien
aaatagtagtcttgaagaagctcaa

SEQ ID NO: 220612 - DNA, 25 bp, Homo sapien
ttcaatgtccagacattgatgacca

SEQ ID NO: 220613 - DNA, 25 bp, Homo sapien
tcctgtacaagtggtcaaagtaggt

SEQ ID NO: 220614 - DNA, 25 bp, Homo sapien
caaagtaggttgagtaacgtgtgct

SEQ ID NO: 220615 - DNA, 25 bp, Homo sapien
cgtgtgctaaaaggagtaatatctt

SEQ ID NO: 220616 - DNA, 25 bp, Homo sapien
tcaccctctggtctgatacctttat

SEQ ID NO: 220617 - DNA, 25 bp, Homo sapien
ggcctccagaaatgctgggactgcg

SEQ ID NO: 220618 - DNA, 25 bp, Homo sapien
gcctccagaaatgctgggactgcgc

SEQ ID NO: 220619 - DNA, 25 bp, Homo sapien
gagaagcaaggttctgcatcttaaa

SEQ ID NO: 220620 - DNA, 25 bp, Homo sapien
aaagcctagggcttcacacccatgg

SEQ ID NO: 220621 - DNA, 25 bp, Homo sapien
cctagggcttcacacccatgggcca

SEQ ID NO: 220622 - DNA, 25 bp, Homo sapien
agcctagggcttcacacccatgggc

SEQ ID NO: 220623 - DNA, 25 bp, Homo sapien
aagcctagggcttcacacccatggg

SEQ ID NO: 220624 - DNA, 25 bp, Homo sapien
ctgtaaacgcttgcaggcccatggg

SEQ ID NO: 220625 - DNA, 25 bp, Homo sapien
cctgtgggcgtcaacagaaatcgca

SEQ ID NO: 220626 - DNA, 25 bp, Homo sapien
ggaaccttacgctacaagggcgaga

SEQ ID NO: 220627 - DNA, 25 bp, Homo sapien
tggatgtcctgaacagccctttgga

SEQ ID NO: 220628 - DNA, 25 bp, Homo sapien
gaagcaaggttctgcatcttaagcc

SEQ ID NO: 220629 - DNA, 25 bp, Homo sapien
aaggttctgcatcttaagccttcct

SEQ ID NO: 220630 - DNA, 25 bp, Homo sapien
gagaagcaaggttctgcatcttaag

SEQ ID NO: 220631 - DNA, 25 bp, Homo sapien
gcaaggttctgcatcttaagccttc

SEQ ID NO: 220632 - DNA, 25 bp, Homo sapien
taatgttgtgggaagtcaaggaccc

SEQ ID NO: 220633 - DNA, 25 bp, Homo sapien
ggtggcagtggggaataaggagtta

SEQ ID NO: 220634 - DNA, 25 bp, Homo sapien
catgtgtttgaacaatacgaaatca

SEQ ID NO: 220635 - DNA, 25 bp, Homo sapien
agttattgtttaatgttgtgggaag

SEQ ID NO: 220636 - DNA, 25 bp, Homo sapien
taaagcatagttgttcagagcccag

SEQ ID NO: 220637 - DNA, 25 bp, Homo sapien
aattcctagacgtggagctgagtca

SEQ ID NO: 220638 - DNA, 25 bp, Homo sapien
gatatgataagcatccttgtagcca

SEQ ID NO: 220639 - DNA, 25 bp, Homo sapien
catcagtgtgatggaaaaatgctca

SEQ ID NO: 220640 - DNA, 25 bp, Homo sapien
cagtgtggaagggggaccccagcgg

SEQ ID NO: 220641 - DNA, 25 bp, Homo sapien
ctgattggtagagcccaggggtctg

SEQ ID NO: 220642 - DNA, 25 bp, Homo sapien
cacgtccccaccagaatagttagat

SEQ ID NO: 220643 - DNA, 25 bp, Homo sapien
cgtccccaccagaatagttagatac

SEQ ID NO: 220644 - DNA, 25 bp, Homo sapien
tcttcgccatcaggagtttggagcc

SEQ ID NO: 220645 - DNA, 25 bp, Homo sapien
tggagcccgagaaacctttggtgcg

SEQ ID NO: 220646 - DNA, 25 bp, Homo sapien
gaagccagcacccttcgatgtggga

SEQ ID NO: 220647 - DNA, 25 bp, Homo sapien
cattagggttcctgctcggatggcg

SEQ ID NO: 220648 - DNA, 25 bp, Homo sapien
aagcctgggcttcacacccgtgggc

SEQ ID NO: 220649 - DNA, 25 bp, Homo sapien
agccgcgtccctatgcatggcagga

SEQ ID NO: 220650 - DNA, 25 bp, Homo sapien
aaagcctgggcttcacacccgtggg

SEQ ID NO: 220651 - DNA, 25 bp, Homo sapien
agcagccgcgtccctatgcatggca

SEQ ID NO: 220652 - DNA, 25 bp, Homo sapien
ttgtcgggtggcgtgacctgctcca

SEQ ID NO: 220653 - DNA, 25 bp, Homo sapien
gctgctcgccacttgtaaaaagaag

SEQ ID NO: 220654 - DNA, 25 bp, Homo sapien
tcagtagaacggtgcagctgctcgc

SEQ ID NO: 220655 - DNA, 25 bp, Homo sapien
ccatcatggtggctagagatatctg

SEQ ID NO: 220656 - DNA, 25 bp, Homo sapien
aaaagcgtcctttcctgccctagat

SEQ ID NO: 220657 - DNA, 25 bp, Homo sapien
gatgaggccccaattacactgacag

SEQ ID NO: 220658 - DNA, 25 bp, Homo sapien
ttcaaaaagccatcagtaccgtcat

SEQ ID NO: 220659 - DNA, 25 bp, Homo sapien
ggttctagggaatgctaactccacc

SEQ ID NO: 220660 - DNA, 25 bp, Homo sapien
tgctctatcaactgagctatctggg

SEQ ID NO: 220661 - DNA, 25 bp, Homo sapien
caaaacttgcatagttcccttatct

SEQ ID NO: 220662 - DNA, 25 bp, Homo sapien
tgctttagggttcgtttgttctaca

SEQ ID NO: 220663 - DNA, 25 bp, Homo sapien
tacaattgattaaccttcactgaca

SEQ ID NO: 220664 - DNA, 25 bp, Homo sapien
ttatcaccccaaatctctagtttgc

SEQ ID NO: 220665 - DNA, 25 bp, Homo sapien
cagccatttaaatctcggtggagac

SEQ ID NO: 220666 - DNA, 25 bp, Homo sapien
gagcagtgatgtccctctcaagccc

SEQ ID NO: 220667 - DNA, 25 bp, Homo sapien
catgtataagccaaccacaggcact

SEQ ID NO: 220668 - DNA, 25 bp, Homo sapien
tctcagttatctcagcccaagtgcc

SEQ ID NO: 220669 - DNA, 25 bp, Homo sapien
tttgtgaatacagggccagcctcct

SEQ ID NO: 220670 - DNA, 25 bp, Homo sapien
gacctccccgaagatctgaatgatg

SEQ ID NO: 220671 - DNA, 25 bp, Homo sapien
tgctgcagcatccaaaggtgcgttc

SEQ ID NO: 220672 - DNA, 25 bp, Homo sapien
gaagccgtggactttatgctgcagc

SEQ ID NO: 220673 - DNA, 25 bp, Homo sapien
ttttcctccttctagagcttctgtg

SEQ ID NO: 220674 - DNA, 25 bp, Homo sapien
cttattttcctccttctagagcttc

SEQ ID NO: 220675 - DNA, 25 bp, Homo sapien
tccttctagagcttctgtgcacgct

SEQ ID NO: 220676 - DNA, 25 bp, Homo sapien
cctccttctagagcttctgtgcacg

SEQ ID NO: 220677 - DNA, 25 bp, Homo sapien
gtcatgagggccaacccctcaggaa

SEQ ID NO: 220678 - DNA, 25 bp, Homo sapien
gaagcagtctcaggccctcaccaca

SEQ ID NO: 220679 - DNA, 25 bp, Homo sapien
cttaactttattcgccacacgtccg

SEQ ID NO: 220680 - DNA, 25 bp, Homo sapien
tcgcgaggggatcctacctcttcca

SEQ ID NO: 220681 - DNA, 25 bp, Homo sapien
ggttccacacgggacctctaggagc

SEQ ID NO: 220682 - DNA, 25 bp, Homo sapien
cacacgtccggggtaaactcgcgag

SEQ ID NO: 220683 - DNA, 25 bp, Homo sapien
gaccatgtgttccagatagctaacc

SEQ ID NO: 220684 - DNA, 25 bp, Homo sapien
cttttaaggcttttgtgacatattc

SEQ ID NO: 220685 - DNA, 25 bp, Homo sapien
tactgtttactttagatgataggtc

SEQ ID NO: 220686 - DNA, 25 bp, Homo sapien
tactaggtcaaaaggtatcagtttc

SEQ ID NO: 220687 - DNA, 25 bp, Homo sapien
gatgatcttcttaaagtttgcactt

SEQ ID NO: 220688 - DNA, 25 bp, Homo sapien
agggaagatgatcttcttaaagttt

SEQ ID NO: 220689 - DNA, 25 bp, Homo sapien
aagatgatcttcttaaagtttgcac

SEQ ID NO: 220690 - DNA, 25 bp, Homo sapien
ggaagatgatcttcttaaagtttgc

SEQ ID NO: 220691 - DNA, 25 bp, Homo sapien
gaatagattatctctgtgcttccgg

SEQ ID NO: 220692 - DNA, 25 bp, Homo sapien
tgcctcttggatcagatatttgacc

SEQ ID NO: 220693 - DNA, 25 bp, Homo sapien
tgcttccggtttaagacattacgcc

SEQ ID NO: 220694 - DNA, 25 bp, Homo sapien
tctatgcatccctgttcatggaacc

SEQ ID NO: 220695 - DNA, 25 bp, Homo sapien
cctgtgtgcttaggatgttcagctg

SEQ ID NO: 220696 - DNA, 25 bp, Homo sapien
tagggctgtattacctagacaggcc

SEQ ID NO: 220697 - DNA, 25 bp, Homo sapien
ctttaaaccagaggatcaaccttgg

SEQ ID NO: 220698 - DNA, 25 bp, Homo sapien
gccatgacaacaaagatatctccag

SEQ ID NO: 220699 - DNA, 25 bp, Homo sapien
tcaataacttggtatggctactgga

SEQ ID NO: 220700 - DNA, 25 bp, Homo sapien
cattctttaagcgtcattcattgtc

SEQ ID NO: 220701 - DNA, 25 bp, Homo sapien
tgtaggaaagttagctgatgtagac

SEQ ID NO: 220702 - DNA, 25 bp, Homo sapien
tcaacagaagccaactttatgatag

SEQ ID NO: 220703 - DNA, 25 bp, Homo sapien
agtgagccgaaatagtgtgactgta

SEQ ID NO: 220704 - DNA, 25 bp, Homo sapien
gccgaaatagtgtgactgtactcca

SEQ ID NO: 220705 - DNA, 25 bp, Homo sapien
gagccgaaatagtgtgactgtactc

SEQ ID NO: 220706 - DNA, 25 bp, Homo sapien
tcagtgagccgaaatagtgtgactg

SEQ ID NO: 220707 - DNA, 25 bp, Homo sapien
cctctgtgatcagtagggtacctgc

SEQ ID NO: 220708 - DNA, 25 bp, Homo sapien
ctaacattatatgggtgggaggctc

SEQ ID NO: 220709 - DNA, 25 bp, Homo sapien
gggtaaatatctagcctgcacttgg

SEQ ID NO: 220710 - DNA, 25 bp, Homo sapien
tgggcagtttagaggagacccagcc

SEQ ID NO: 220711 - DNA, 25 bp, Homo sapien
gagcacatgcgcatagccagctcct

SEQ ID NO: 220712 - DNA, 25 bp, Homo sapien
tgattacgagcatcattccagaatc

SEQ ID NO: 220713 - DNA, 25 bp, Homo sapien
ctaagagcacatgcgcatagccagc

SEQ ID NO: 220714 - DNA, 25 bp, Homo sapien
ctggcagtcatgattacgagcatca

SEQ ID NO: 220715 - DNA, 25 bp, Homo sapien
ctgattaccagaaggtacgcaaggt

SEQ ID NO: 220716 - DNA, 25 bp, Homo sapien
tgattaccagaaggtacgcaaggta

SEQ ID NO: 220717 - DNA, 25 bp, Homo sapien
gattaccagaaggtacgcaaggtaa

SEQ ID NO: 220718 - DNA, 25 bp, Homo sapien
taatgacaaagtcttcataagaaaa

SEQ ID NO: 220719 - DNA, 25 bp, Homo sapien
tacttaggctaaaaatgtttataca

SEQ ID NO: 220720 - DNA, 25 bp, Homo sapien
gtttatacatgccagaaaaatgaga

SEQ ID NO: 220721 - DNA, 25 bp, Homo sapien
taaaaatgtttatacatgccagaaa

SEQ ID NO: 220722 - DNA, 25 bp, Homo sapien
ggtttacacagctccgtaactgcag

SEQ ID NO: 220723 - DNA, 25 bp, Homo sapien
gcttgcattgcagtcgttcacggtg

SEQ ID NO: 220724 - DNA, 25 bp, Homo sapien
tgtgagccaggcctcgtagtaaaca

SEQ ID NO: 220725 - DNA, 25 bp, Homo sapien
tccatgatgacagcgtgcactaagc

SEQ ID NO: 220726 - DNA, 25 bp, Homo sapien
gtgatctaggtctgcactaaagctg

SEQ ID NO: 220727 - DNA, 25 bp, Homo sapien
tagctgtgatctaggtctgcactaa

SEQ ID NO: 220728 - DNA, 25 bp, Homo sapien
agtagctgtgatctaggtctgcact

SEQ ID NO: 220729 - DNA, 25 bp, Homo sapien
gctgtgatctaggtctgcactaaag

SEQ ID NO: 220730 - DNA, 25 bp, Homo sapien
tggcttcctcctcacggatctgcac

SEQ ID NO: 220731 - DNA, 25 bp, Homo sapien
agtgcccttccaggcctaactgcag

SEQ ID NO: 220732 - DNA, 25 bp, Homo sapien
tccaggcctaactgcagaagggtgg

SEQ ID NO: 220733 - DNA, 25 bp, Homo sapien
gcccttccaggcctaactgcagaag

SEQ ID NO: 220734 - DNA, 25 bp, Homo sapien
cttccccagccccggtaagccacag

SEQ ID NO: 220735 - DNA, 25 bp, Homo sapien
ccagccccggtaagccacagctgcc

SEQ ID NO: 220736 - DNA, 25 bp, Homo sapien
ccccagccccggtaagccacagctg

SEQ ID NO: 220737 - DNA, 25 bp, Homo sapien
cagccccggtaagccacagctgcct

SEQ ID NO: 220738 - DNA, 25 bp, Homo sapien
taaggatgcgaataacatcagcggc

SEQ ID NO: 220739 - DNA, 25 bp, Homo sapien
gaacattctcccaagcattcggtag

SEQ ID NO: 220740 - DNA, 25 bp, Homo sapien
taggcgggcctggttcacattatct

SEQ ID NO: 220741 - DNA, 25 bp, Homo sapien
gttctgaaacccaaggacacgggca

SEQ ID NO: 220742 - DNA, 25 bp, Homo sapien
tttctcaactatcaagacgccaaat

SEQ ID NO: 220743 - DNA, 25 bp, Homo sapien
ttctcaactatcaagacgccaaatt

SEQ ID NO: 220744 - DNA, 25 bp, Homo sapien
ctcaactatcaagacgccaaattct

SEQ ID NO: 220745 - DNA, 25 bp, Homo sapien
tctcaactatcaagacgccaaattc

SEQ ID NO: 220746 - DNA, 25 bp, Homo sapien
ataccagacactcccaccaagtagg

SEQ ID NO: 220747 - DNA, 25 bp, Homo sapien
taggcccgagggaggcgaccttcat

SEQ ID NO: 220748 - DNA, 25 bp, Homo sapien
ccttcatgcagtcacgattaacaaa

SEQ ID NO: 220749 - DNA, 25 bp, Homo sapien
gacagagtcctgatctcgcccttct

SEQ ID NO: 220750 - DNA, 25 bp, Homo sapien
cgttcgcggtcgcagcctggtcttc

SEQ ID NO: 220751 - DNA, 25 bp, Homo sapien
ctcctggagaggatcgggcgttcgc

SEQ ID NO: 220752 - DNA, 25 bp, Homo sapien
aaactgtgccgaagtcgcggcggct

SEQ ID NO: 220753 - DNA, 25 bp, Homo sapien
cgaggagcggccgtttgggagacta

SEQ ID NO: 220754 - DNA, 25 bp, Homo sapien
gcaacccgccgcgacgttactgctg

SEQ ID NO: 220755 - DNA, 25 bp, Homo sapien
gccgcgacgttactgctgcagtgga

SEQ ID NO: 220756 - DNA, 25 bp, Homo sapien
ggttcaggcgctgcgcggctgctct

SEQ ID NO: 220757 - DNA, 25 bp, Homo sapien
ggctgctctggcgtccagtcctacc

SEQ ID NO: 220758 - DNA, 25 bp, Homo sapien
tgggataaatgcactcgggcctctg

SEQ ID NO: 220759 - DNA, 25 bp, Homo sapien
taaataccgtcccagaaaagcgagc

SEQ ID NO: 220760 - DNA, 25 bp, Homo sapien
gctgagccccgctatgggactggaa

SEQ ID NO: 220761 - DNA, 25 bp, Homo sapien
tgctttggacaagaacgctagcccc

SEQ ID NO: 220762 - DNA, 25 bp, Homo sapien
gttgcagccttcgaggtcctctggg

SEQ ID NO: 220763 - DNA, 25 bp, Homo sapien
gctcagacaggcctagagactgcag

SEQ ID NO: 220764 - DNA, 25 bp, Homo sapien
agagaagcccgcagactccctccaa

SEQ ID NO: 220765 - DNA, 25 bp, Homo sapien
acaggtgtcaggctgcgccccttct

SEQ ID NO: 220766 - DNA, 25 bp, Homo sapien
tccaggaaagcacgaggacagcttc

SEQ ID NO: 220767 - DNA, 25 bp, Homo sapien
gacagcttccgacagaccaaatgca

SEQ ID NO: 220768 - DNA, 25 bp, Homo sapien
tgtctcatttgtttcgcagggaaaa

SEQ ID NO: 220769 - DNA, 25 bp, Homo sapien
aagagccgtttatgtcattgtctca

SEQ ID NO: 220770 - DNA, 25 bp, Homo sapien
tgctctgcgtggctcttcatatgcg

SEQ ID NO: 220771 - DNA, 25 bp, Homo sapien
ctgcggctcttcaccttgtaaaaca

SEQ ID NO: 220772 - DNA, 25 bp, Homo sapien
tcatatgcgcactgcggctcttcac

SEQ ID NO: 220773 - DNA, 25 bp, Homo sapien
cgtggctcttcatatgcgcactgcg

SEQ ID NO: 220774 - DNA, 25 bp, Homo sapien
ggttgctcagaaccggcctagccca

SEQ ID NO: 220775 - DNA, 25 bp, Homo sapien
ctagaaacccgctgagccaaccaga

SEQ ID NO: 220776 - DNA, 25 bp, Homo sapien
ttttccgaaagctgccccatgacgt

SEQ ID NO: 220777 - DNA, 25 bp, Homo sapien
ggccagctcgcgtcattttccgaaa

SEQ ID NO: 220778 - DNA, 25 bp, Homo sapien
gaggcctggccaccggcagacccag

SEQ ID NO: 220779 - DNA, 25 bp, Homo sapien
ggaaagtgttctcctgattctgggt

SEQ ID NO: 220780 - DNA, 25 bp, Homo sapien
tcgtggctccggaggatgaggatgt

SEQ ID NO: 220781 - DNA, 25 bp, Homo sapien
gggcgttggactcgtggctccggag

SEQ ID NO: 220782 - DNA, 25 bp, Homo sapien
ttcttggcctgtgatatggtggaca

SEQ ID NO: 220783 - DNA, 25 bp, Homo sapien
tatggccagtagtcttgtttcttgg

SEQ ID NO: 220784 - DNA, 25 bp, Homo sapien
ggagaactctccctggcaaggagca

SEQ ID NO: 220785 - DNA, 25 bp, Homo sapien
caaggagcaactatggccagtagtc

SEQ ID NO: 220786 - DNA, 25 bp, Homo sapien
cgactcattggcctgtagtgtctgc

SEQ ID NO: 220787 - DNA, 25 bp, Homo sapien
tagtgtctgcgtggctttgactgcc

SEQ ID NO: 220788 - DNA, 25 bp, Homo sapien
tgcgtggctttgactgccgctgccc

SEQ ID NO: 220789 - DNA, 25 bp, Homo sapien
tcacttggggactctcttctgggaa

SEQ ID NO: 220790 - DNA, 25 bp, Homo sapien
tctgtctcactgctgtagcacagat

SEQ ID NO: 220791 - DNA, 25 bp, Homo sapien
ctgtctcactgctgtagcacagatt

SEQ ID NO: 220792 - DNA, 25 bp, Homo sapien
tagcacagattctgacccggccggg

SEQ ID NO: 220793 - DNA, 25 bp, Homo sapien
ctgtagcacagattctgacccggcc

SEQ ID NO: 220794 - DNA, 25 bp, Homo sapien
aaacagtgttagaggtctgctaagc

SEQ ID NO: 220795 - DNA, 25 bp, Homo sapien
ccagcagtatagagaggagaaccca

SEQ ID NO: 220796 - DNA, 25 bp, Homo sapien
ggaaaattaccctgtgtatcaacac

SEQ ID NO: 220797 - DNA, 25 bp, Homo sapien
tctgctaagcggagataggaagatg

SEQ ID NO: 220798 - DNA, 25 bp, Homo sapien
ttaatatccacttcaacctcttcct

SEQ ID NO: 220799 - DNA, 25 bp, Homo sapien
tccacatccccaaaggttagagtcc

SEQ ID NO: 220800 - DNA, 25 bp, Homo sapien
cattgcggccgattttcacctgctt

SEQ ID NO: 220801 - DNA, 25 bp, Homo sapien
tgggccgacttctcatcgctcgtat

SEQ ID NO: 220802 - DNA, 25 bp, Homo sapien
ctgaggtcagaaccctctggtttgg

SEQ ID NO: 220803 - DNA, 25 bp, Homo sapien
tcaaaactgaggtcagaaccctctg

SEQ ID NO: 220804 - DNA, 25 bp, Homo sapien
aaaactgaggtcagaaccctctggt

SEQ ID NO: 220805 - DNA, 25 bp, Homo sapien
tcagaaccctctggtttggctcatc

SEQ ID NO: 220806 - DNA, 25 bp, Homo sapien
cccaatcagggaatagcgtgttact

SEQ ID NO: 220807 - DNA, 25 bp, Homo sapien
ggattgagaccccagagcttggcca

SEQ ID NO: 220808 - DNA, 25 bp, Homo sapien
aactctgggtcaaaggaagtgggca

SEQ ID NO: 220809 - DNA, 25 bp, Homo sapien
cctgaggaggaagcgaaaggcctaa

SEQ ID NO: 220810 - DNA, 25 bp, Homo sapien
caatgcctttgttgaacagcttcct

SEQ ID NO: 220811 - DNA, 25 bp, Homo sapien
ctgtgtagtgataagttgccagcgg

SEQ ID NO: 220812 - DNA, 25 bp, Homo sapien
tgtagtgataagttgccagcggatg

SEQ ID NO: 220813 - DNA, 25 bp, Homo sapien
tagtgataagttgccagcggatggt

SEQ ID NO: 220814 - DNA, 25 bp, Homo sapien
tgataagttgccagcggatggttgt

SEQ ID NO: 220815 - DNA, 25 bp, Homo sapien
tgctggagaaggctctcagcaacca

SEQ ID NO: 220816 - DNA, 25 bp, Homo sapien
tcagcaaccatccagtctgagtcca

SEQ ID NO: 220817 - DNA, 25 bp, Homo sapien
tcttaagagagtccatggccccaag

SEQ ID NO: 220818 - DNA, 25 bp, Homo sapien
agacctcaggtcctcttaagagagt

SEQ ID NO: 220819 - DNA, 25 bp, Homo sapien
agcaggcggctgtcagcaggtcttc

SEQ ID NO: 220820 - DNA, 25 bp, Homo sapien
tctcctctggattcgtgcagacagt

SEQ ID NO: 220821 - DNA, 25 bp, Homo sapien
caggcggctgtcagcaggtcttcca

SEQ ID NO: 220822 - DNA, 25 bp, Homo sapien
cagggaaaatgctggagcaggcggc

SEQ ID NO: 220823 - DNA, 25 bp, Homo sapien
cacaccaagtcagccttgtggggat

SEQ ID NO: 220824 - DNA, 25 bp, Homo sapien
ggctgccacaccaagtcagccttgt

SEQ ID NO: 220825 - DNA, 25 bp, Homo sapien
gctgccacaccaagtcagccttgtg

SEQ ID NO: 220826 - DNA, 25 bp, Homo sapien
tgccacaccaagtcagccttgtggg

SEQ ID NO: 220827 - DNA, 25 bp, Homo sapien
gatttctgcctggaaccgggagccc

SEQ ID NO: 220828 - DNA, 25 bp, Homo sapien
gcctggaaccgggagcccacgttga

SEQ ID NO: 220829 - DNA, 25 bp, Homo sapien
caaggggatttctgcctggaaccgg

SEQ ID NO: 220830 - DNA, 25 bp, Homo sapien
tggaaccgggagcccacgttgatcc

SEQ ID NO: 220831 - DNA, 25 bp, Homo sapien
ggcaggaagtgaggcctcaccttgc

SEQ ID NO: 220832 - DNA, 25 bp, Homo sapien
gataagttcaagctgagccggtcct

SEQ ID NO: 220833 - DNA, 25 bp, Homo sapien
gacggagaacttgatgatccctcag

SEQ ID NO: 220834 - DNA, 25 bp, Homo sapien
cctggcaccaccagaaaggcaaggt

SEQ ID NO: 220835 - DNA, 25 bp, Homo sapien
acaggcggggttacttcagcactgt

SEQ ID NO: 220836 - DNA, 25 bp, Homo sapien
agaggacaggcggggttacttcagc

SEQ ID NO: 220837 - DNA, 25 bp, Homo sapien
aggacaggcggggttacttcagcac

SEQ ID NO: 220838 - DNA, 25 bp, Homo sapien
ggctcgatgctcactggggtggcct

SEQ ID NO: 220839 - DNA, 25 bp, Homo sapien
tgtcacctacgaaaacgcaggccct

SEQ ID NO: 220840 - DNA, 25 bp, Homo sapien
tccccaggaagcagtacagaaggct

SEQ ID NO: 220841 - DNA, 25 bp, Homo sapien
tggacagactgacctctcgctggct

SEQ ID NO: 220842 - DNA, 25 bp, Homo sapien
caaaggttaattggccaaaggcatc

SEQ ID NO: 220843 - DNA, 25 bp, Homo sapien
gccttcccgcacagggctgaggatg

SEQ ID NO: 220844 - DNA, 25 bp, Homo sapien
tgcgatgggcactcttaggcgtgat

SEQ ID NO: 220845 - DNA, 25 bp, Homo sapien
gcctgggccgctgctttggtttccg

SEQ ID NO: 220846 - DNA, 25 bp, Homo sapien
cgtgtagggaggtagctcaaagctc

SEQ ID NO: 220847 - DNA, 25 bp, Homo sapien
tcatctcctctagggcagaagtcag

SEQ ID NO: 220848 - DNA, 25 bp, Homo sapien
ttttatcatctcctctagggcagaa

SEQ ID NO: 220849 - DNA, 25 bp, Homo sapien
tatcatctcctctagggcagaagtc

SEQ ID NO: 220850 - DNA, 25 bp, Homo sapien
ccaaaagccctttttatcatctcct

SEQ ID NO: 220851 - DNA, 25 bp, Homo sapien
tcgcttggtggctaaggaaggctca

SEQ ID NO: 220852 - DNA, 25 bp, Homo sapien
actgtcttctcgtgctcgcttggtg

SEQ ID NO: 220853 - DNA, 25 bp, Homo sapien
agttgggtccacagttcgcacaggc

SEQ ID NO: 220854 - DNA, 25 bp, Homo sapien
cttggtagttgaggccaatacactt

SEQ ID NO: 220855 - DNA, 25 bp, Homo sapien
tttgcattctgcagtgaggccagct

SEQ ID NO: 220856 - DNA, 25 bp, Homo sapien
ctttgcattctgcagtgaggccagc

SEQ ID NO: 220857 - DNA, 25 bp, Homo sapien
ttgcattctgcagtgaggccagctc

SEQ ID NO: 220858 - DNA, 25 bp, Homo sapien
ccagtgatgtaggaacaggttgcca

SEQ ID NO: 220859 - DNA, 25 bp, Homo sapien
agggccttgcgcagttctgggttca

SEQ ID NO: 220860 - DNA, 25 bp, Homo sapien
taccctccttagagaggcggcggga

SEQ ID NO: 220861 - DNA, 25 bp, Homo sapien
cagcgggaatcccagagcttcagga

SEQ ID NO: 220862 - DNA, 25 bp, Homo sapien
tgcggcatggaatagaagttctcaa

SEQ ID NO: 220863 - DNA, 25 bp, Homo sapien
tggaatagaagttctcaaagagcgg

SEQ ID NO: 220864 - DNA, 25 bp, Homo sapien
ctgcggcatggaatagaagttctca

SEQ ID NO: 220865 - DNA, 25 bp, Homo sapien
aatagaagttctcaaagagcggcat

SEQ ID NO: 220866 - DNA, 25 bp, Homo sapien
gctgctgcttctgtggagggaaggc

SEQ ID NO: 220867 - DNA, 25 bp, Homo sapien
ctgctgcttctgtggagggaaggca

SEQ ID NO: 220868 - DNA, 25 bp, Homo sapien
ctgctgctgcttctgtggagggaag

SEQ ID NO: 220869 - DNA, 25 bp, Homo sapien
tgctgctgcttctgtggagggaagg

SEQ ID NO: 220870 - DNA, 25 bp, Homo sapien
ctggtggccgaatgccagctggaag

SEQ ID NO: 220871 - DNA, 25 bp, Homo sapien
caggggcagtgactggtttgggggt

SEQ ID NO: 220872 - DNA, 25 bp, Homo sapien
cttggctgcgtggaaagaattcagg

SEQ ID NO: 220873 - DNA, 25 bp, Homo sapien
ccagctggaagggttgcaggggcag

SEQ ID NO: 220874 - DNA, 25 bp, Homo sapien
tggcatcattggtcgcacatagcgg

SEQ ID NO: 220875 - DNA, 25 bp, Homo sapien
caggcccatataccacagagttcag

SEQ ID NO: 220876 - DNA, 25 bp, Homo sapien
taagtcgggactcccactccaggat

SEQ ID NO: 220877 - DNA, 25 bp, Homo sapien
gaagaggcaacgcttccgcttgttc

SEQ ID NO: 220878 - DNA, 25 bp, Homo sapien
acgtcctgctggaagccgggctcta

SEQ ID NO: 220879 - DNA, 25 bp, Homo sapien
atgtggccaactgagccctggcggt

SEQ ID NO: 220880 - DNA, 25 bp, Homo sapien
acgctggacagtgaggtcggacact

SEQ ID NO: 220881 - DNA, 25 bp, Homo sapien
ggtgagatccccttcaacagtcgcc

SEQ ID NO: 220882 - DNA, 25 bp, Homo sapien
gagctcagacttgcaaaggcctggg

SEQ ID NO: 220883 - DNA, 25 bp, Homo sapien
tccatggccaatctacaaaatatcc

SEQ ID NO: 220884 - DNA, 25 bp, Homo sapien
tggagaggcctttgggattgcaaca

SEQ ID NO: 220885 - DNA, 25 bp, Homo sapien
gtgtcacagtcctaggcagccgcag

SEQ ID NO: 220886 - DNA, 25 bp, Homo sapien
ttcactaggccttcagtctcaaccc

SEQ ID NO: 220887 - DNA, 25 bp, Homo sapien
ggcttctcggtccaccttcactagg

SEQ ID NO: 220888 - DNA, 25 bp, Homo sapien
taggccttcagtctcaaccctgaag

SEQ ID NO: 220889 - DNA, 25 bp, Homo sapien
tggcttctcggtccaccttcactag

SEQ ID NO: 220890 - DNA, 25 bp, Homo sapien
gcctcccgaggctgagaagtttgct

SEQ ID NO: 220891 - DNA, 25 bp, Homo sapien
ccgcttgcgatgcaggagcctcggc

SEQ ID NO: 220892 - DNA, 25 bp, Homo sapien
ccccagtcctgcgatgcagtgtcag

SEQ ID NO: 220893 - DNA, 25 bp, Homo sapien
gtgccgtccgcctcgcgagcgctct

SEQ ID NO: 220894 - DNA, 25 bp, Homo sapien
tacaaaggattgcacaactcgaggc

SEQ ID NO: 220895 - DNA, 25 bp, Homo sapien
gaggaggactctggcgtgctacaaa

SEQ ID NO: 220896 - DNA, 25 bp, Homo sapien
ttgcacaactcgaggctgggagcgc

SEQ ID NO: 220897 - DNA, 25 bp, Homo sapien
ctctggcgtgctacaaaggattgca

SEQ ID NO: 220898 - DNA, 25 bp, Homo sapien
gcaccgcccttcactacagctaaac

SEQ ID NO: 220899 - DNA, 25 bp, Homo sapien
agctaaacttccaaattcaggccac

SEQ ID NO: 220900 - DNA, 25 bp, Homo sapien
gcccttcactacagctaaacttcca

SEQ ID NO: 220901 - DNA, 25 bp, Homo sapien
accgcccttcactacagctaaactt

SEQ ID NO: 220902 - DNA, 25 bp, Homo sapien
catgcccagctaaattttttgtatt

SEQ ID NO: 220903 - DNA, 25 bp, Homo sapien
gactacaggcagctgtcgccatgcc

SEQ ID NO: 220904 - DNA, 25 bp, Homo sapien
tgggactacaggcagctgtcgccat

SEQ ID NO: 220905 - DNA, 25 bp, Homo sapien
caggcgtgtgccactgcccggccat

SEQ ID NO: 220906 - DNA, 25 bp, Homo sapien
ctggatgacctacacaggatttttc

SEQ ID NO: 220907 - DNA, 25 bp, Homo sapien
cactgggagtcatgagagaaaagtt

SEQ ID NO: 220908 - DNA, 25 bp, Homo sapien
gaaactcccatgaaagtaggcccat

SEQ ID NO: 220909 - DNA, 25 bp, Homo sapien
taggcccatgtaatgtggaacaagc

SEQ ID NO: 220910 - DNA, 25 bp, Homo sapien
ggttgcttaggtgggatagactttc

SEQ ID NO: 220911 - DNA, 25 bp, Homo sapien
tcccaggccacgagtcactgtcatt

SEQ ID NO: 220912 - DNA, 25 bp, Homo sapien
attcccaggccacgagtcactgtca

SEQ ID NO: 220913 - DNA, 25 bp, Homo sapien
cagaacttctggcttgtcatggaaa

SEQ ID NO: 220914 - DNA, 25 bp, Homo sapien
cacagcacctgtatatagagcccat

SEQ ID NO: 220915 - DNA, 25 bp, Homo sapien
taattacggttggtggactatatcc

SEQ ID NO: 220916 - DNA, 25 bp, Homo sapien
gcccattcagattatggtacggtaa

SEQ ID NO: 220917 - DNA, 25 bp, Homo sapien
caagagtttaaaacgctgaccaggt

SEQ ID NO: 220918 - DNA, 25 bp, Homo sapien
caatgatcagaaccaggctcaatgc

SEQ ID NO: 220919 - DNA, 25 bp, Homo sapien
tattcacatgaccagcaatgatcag

SEQ ID NO: 220920 - DNA, 25 bp, Homo sapien
gggcatctaggaataaacacgatat

SEQ ID NO: 220921 - DNA, 25 bp, Homo sapien
caatgccactgtagggcgtgaagat

SEQ ID NO: 220922 - DNA, 25 bp, Homo sapien
tgcaggaaggtatgagattaaaaaa

SEQ ID NO: 220923 - DNA, 25 bp, Homo sapien
gtgtgcaggaaggtatgagattaaa

SEQ ID NO: 220924 - DNA, 25 bp, Homo sapien
ctcaagagcaatactaatagatcaa

SEQ ID NO: 220925 - DNA, 25 bp, Homo sapien
ttcttaaattctcaagagcaatact

SEQ ID NO: 220926 - DNA, 25 bp, Homo sapien
cttctaagttgttccagagcatgtg

SEQ ID NO: 220927 - DNA, 25 bp, Homo sapien
ctaaatgccacgtgtcagcacagcc

SEQ ID NO: 220928 - DNA, 25 bp, Homo sapien
ccttggagagatggtagaagaaatc

SEQ ID NO: 220929 - DNA, 25 bp, Homo sapien
gggtcaccgagtggctattggcttc

SEQ ID NO: 220930 - DNA, 25 bp, Homo sapien
cattaactggctgttcaaagagtgc

SEQ ID NO: 220931 - DNA, 25 bp, Homo sapien
tgcattaactggctgttcaaagagt

SEQ ID NO: 220932 - DNA, 25 bp, Homo sapien
tggccggtgaggacagttggccctg

SEQ ID NO: 220933 - DNA, 25 bp, Homo sapien
gccggtgaggacagttggccctgca

SEQ ID NO: 220934 - DNA, 25 bp, Homo sapien
cagaaagtcgtaaagcgtttgccct

SEQ ID NO: 220935 - DNA, 25 bp, Homo sapien
aaactgtagcgtgttcttaagcgac

SEQ ID NO: 220936 - DNA, 25 bp, Homo sapien
aactgccggcctagaagtttgatcc

SEQ ID NO: 220937 - DNA, 25 bp, Homo sapien
gaggaggacacaaacaggactggaa

SEQ ID NO: 220938 - DNA, 25 bp, Homo sapien
tcccctgtggcaactgtaaccatac

SEQ ID NO: 220939 - DNA, 25 bp, Homo sapien
tttacatgtttgtcctcgagtttct

SEQ ID NO: 220940 - DNA, 25 bp, Homo sapien
accatacatgccagactttccagaa

SEQ ID NO: 220941 - DNA, 25 bp, Homo sapien
ttgctcaaacctcattcccctgtgg

SEQ ID NO: 220942 - DNA, 25 bp, Homo sapien
tctgaaaatgcgtagggttgttttc

SEQ ID NO: 220943 - DNA, 25 bp, Homo sapien
tctgctcttcgtcccaggaaggcca

SEQ ID NO: 220944 - DNA, 25 bp, Homo sapien
tttcccaaacttccgagctactctg

SEQ ID NO: 220945 - DNA, 25 bp, Homo sapien
cctcgacaagggctgcgaagaggaa

SEQ ID NO: 220946 - DNA, 25 bp, Homo sapien
gagtgcggcccgcagactctaactt

SEQ ID NO: 220947 - DNA, 25 bp, Homo sapien
agtcgtcacttcctcgcggagcggg

SEQ ID NO: 220948 - DNA, 25 bp, Homo sapien
cagactctaactttgttgctctcgg

SEQ ID NO: 220949 - DNA, 25 bp, Homo sapien
ttgctctcgggacggcgcagtcgtc

SEQ ID NO: 220950 - DNA, 25 bp, Homo sapien
gacccagcggctcgcgcggtggcgc

SEQ ID NO: 220951 - DNA, 25 bp, Homo sapien
cagcggctcgcgcggtggcgcgcag

SEQ ID NO: 220952 - DNA, 25 bp, Homo sapien
gcggctcgcgcggtggcgcgcaggg

SEQ ID NO: 220953 - DNA, 25 bp, Homo sapien
ggctcgcgcggtggcgcgcagggcc

SEQ ID NO: 220954 - DNA, 25 bp, Homo sapien
accagaattgacatctgtccaggca

SEQ ID NO: 220955 - DNA, 25 bp, Homo sapien
gaattgacatctgtccaggcatcct

SEQ ID NO: 220956 - DNA, 25 bp, Homo sapien
tgtgtcaccagaattgacatctgtc

SEQ ID NO: 220957 - DNA, 25 bp, Homo sapien
tgtctttgtgtcaccagaattgaca

SEQ ID NO: 220958 - DNA, 25 bp, Homo sapien
ctgagggcttggcccaaacagtggc

SEQ ID NO: 220959 - DNA, 25 bp, Homo sapien
ttggcccaaacagtggctgtggagt

SEQ ID NO: 220960 - DNA, 25 bp, Homo sapien
ggcccaaacagtggctgtggagtca

SEQ ID NO: 220961 - DNA, 25 bp, Homo sapien
gcttggcccaaacagtggctgtgga

SEQ ID NO: 220962 - DNA, 25 bp, Homo sapien
aaggtctgagctctccaacaccacg

SEQ ID NO: 220963 - DNA, 25 bp, Homo sapien
tctgagctctccaacaccacgctag

SEQ ID NO: 220964 - DNA, 25 bp, Homo sapien
tgagctctccaacaccacgctaggc

SEQ ID NO: 220965 - DNA, 25 bp, Homo sapien
agctctccaacaccacgctaggcat

SEQ ID NO: 220966 - DNA, 25 bp, Homo sapien
atgctgggctggatctacagggctt

SEQ ID NO: 220967 - DNA, 25 bp, Homo sapien
cctttggagcgggtaatttggatgc

SEQ ID NO: 220968 - DNA, 25 bp, Homo sapien
tacagggcttagaagtgtggttgaa

SEQ ID NO: 220969 - DNA, 25 bp, Homo sapien
ctcatgcctttggagcgggtaattt

SEQ ID NO: 220970 - DNA, 25 bp, Homo sapien
gtgcagtgggccgagatcgtgccat

SEQ ID NO: 220971 - DNA, 25 bp, Homo sapien
cagtgggccgagatcgtgccattac

SEQ ID NO: 220972 - DNA, 25 bp, Homo sapien
agagggtgcagtgggccgagatcgt

SEQ ID NO: 220973 - DNA, 25 bp, Homo sapien
agtgggccgagatcgtgccattaca

SEQ ID NO: 220974 - DNA, 25 bp, Homo sapien
agaagatgaccttggaaggagaacc

SEQ ID NO: 220975 - DNA, 25 bp, Homo sapien
ccagaagatgaccttggaaggagaa

SEQ ID NO: 220976 - DNA, 25 bp, Homo sapien
atcacaaccagaagatgaccttgga

SEQ ID NO: 220977 - DNA, 25 bp, Homo sapien
cacaaccagaagatgaccttggaag

SEQ ID NO: 220978 - DNA, 25 bp, Homo sapien
tggatggtccaaaaactcatattcg

SEQ ID NO: 220979 - DNA, 25 bp, Homo sapien
gaggttgtaaccaccgggaacatgc

SEQ ID NO: 220980 - DNA, 25 bp, Homo sapien
catgctatgagttaggcagacatta

SEQ ID NO: 220981 - DNA, 25 bp, Homo sapien
catattcgcctgcaaaggtggaggt

SEQ ID NO: 220982 - DNA, 25 bp, Homo sapien
tgcgttccacctgaatctgatgacc

SEQ ID NO: 220983 - DNA, 25 bp, Homo sapien
ccacctgaatctgatgacccttttc

SEQ ID NO: 220984 - DNA, 25 bp, Homo sapien
cactgcgttccacctgaatctgatg

SEQ ID NO: 220985 - DNA, 25 bp, Homo sapien
cgttccacctgaatctgatgaccct

SEQ ID NO: 220986 - DNA, 25 bp, Homo sapien
tatttacccactcatcagctgagga

SEQ ID NO: 220987 - DNA, 25 bp, Homo sapien
ggatgagccatctccttaataaagc

SEQ ID NO: 220988 - DNA, 25 bp, Homo sapien
catctcctaagggtaaatgcagttt

SEQ ID NO: 220989 - DNA, 25 bp, Homo sapien
aactctcttcgaatgggattgctag

SEQ ID NO: 220990 - DNA, 25 bp, Homo sapien
cttttgccagtagatatgtggctct

SEQ ID NO: 220991 - DNA, 25 bp, Homo sapien
aggccttcagcagcctgcccttgga

SEQ ID NO: 220992 - DNA, 25 bp, Homo sapien
ttgccagtagatatgtggctctcat

SEQ ID NO: 220993 - DNA, 25 bp, Homo sapien
cctgcccttggaaattttgcacttt

SEQ ID NO: 220994 - DNA, 25 bp, Homo sapien
cattggcttaccctgacacagagaa

SEQ ID NO: 220995 - DNA, 25 bp, Homo sapien
caagccctactcagatcattggctt

SEQ ID NO: 220996 - DNA, 25 bp, Homo sapien
aataacacaaataagaaggatgccc

SEQ ID NO: 220997 - DNA, 25 bp, Homo sapien
caaataagaaggatgcccaatacta

SEQ ID NO: 220998 - DNA, 25 bp, Homo sapien
gcagcggttgccctttctgacgcaa

SEQ ID NO: 220999 - DNA, 25 bp, Homo sapien
tgccctttctgacgcaactaggaat

SEQ ID NO: 221000 - DNA, 25 bp, Homo sapien
tcatgggcagcggttgccctttctg

SEQ ID NO: 221001 - DNA, 25 bp, Homo sapien
acgcaactaggaattcctggcacca

SEQ ID NO: 221002 - DNA, 25 bp, Homo sapien
cactttgcaatcaggcaaagattcc

SEQ ID NO: 221003 - DNA, 25 bp, Homo sapien
gcaatcaggcaaagattccacaatc

SEQ ID NO: 221004 - DNA, 25 bp, Homo sapien
cattcctgatgtttggcactttgca

SEQ ID NO: 221005 - DNA, 25 bp, Homo sapien
gatgtttggcactttgcaatcaggc

SEQ ID NO: 221006 - DNA, 25 bp, Homo sapien
gatgtggccttctgacactgagtcc

SEQ ID NO: 221007 - DNA, 25 bp, Homo sapien
gagacattgtccctttcccagtagc

SEQ ID NO: 221008 - DNA, 25 bp, Homo sapien
gcccacttgggacatgagacttgtt

SEQ ID NO: 221009 - DNA, 25 bp, Homo sapien
acttgtttgcaagattgagggcccc

SEQ ID NO: 221010 - DNA, 25 bp, Homo sapien
ggtcgattgtactgatcatttctgt

SEQ ID NO: 221011 - DNA, 25 bp, Homo sapien
tcagtatggtcgattgtactgatca

SEQ ID NO: 221012 - DNA, 25 bp, Homo sapien
tatggtcgattgtactgatcatttc

SEQ ID NO: 221013 - DNA, 25 bp, Homo sapien
tcatcagtatggtcgattgtactga

SEQ ID NO: 221014 - DNA, 25 bp, Homo sapien
gatccgaagctgtcctaggtataca

SEQ ID NO: 221015 - DNA, 25 bp, Homo sapien
gtaattctcctagtccttcctgaag

SEQ ID NO: 221016 - DNA, 25 bp, Homo sapien
caaaaggcattgaaggtctgtctac

SEQ ID NO: 221017 - DNA, 25 bp, Homo sapien
tactccatgcatgacttgtgctgag

SEQ ID NO: 221018 - DNA, 25 bp, Homo sapien
ctgaacaatcaggtgatataactca

SEQ ID NO: 221019 - DNA, 25 bp, Homo sapien
agtgcagtattgagaagggaaaaga

SEQ ID NO: 221020 - DNA, 25 bp, Homo sapien
ggggtttggcctgtaactgactgaa

SEQ ID NO: 221021 - DNA, 25 bp, Homo sapien
ctgactgaacaatcaggtgatataa

SEQ ID NO: 221022 - DNA, 25 bp, Homo sapien
acccagttgatgtcctctgcagaat

SEQ ID NO: 221023 - DNA, 25 bp, Homo sapien
taatctgtgggacctgacactatat

SEQ ID NO: 221024 - DNA, 25 bp, Homo sapien
cagaagcacagaccataacctaggg

SEQ ID NO: 221025 - DNA, 25 bp, Homo sapien
tgaatggaattaggggacacccagt

SEQ ID NO: 221026 - DNA, 25 bp, Homo sapien
gattgtctacacactgccaatatac

SEQ ID NO: 221027 - DNA, 25 bp, Homo sapien
tgtatgcaacatttgtaataagtag

SEQ ID NO: 221028 - DNA, 25 bp, Homo sapien
tattaattgtactcaaccctcgcag

SEQ ID NO: 221029 - DNA, 25 bp, Homo sapien
gaatgttttggcttatgattgtcta

SEQ ID NO: 221030 - DNA, 25 bp, Homo sapien
tttttcgggcttcgcggacatagga

SEQ ID NO: 221031 - DNA, 25 bp, Homo sapien
attgcaacgcctccgctgatgggaa

SEQ ID NO: 221032 - DNA, 25 bp, Homo sapien
gcagtcgggacatccaagagctctt

SEQ ID NO: 221033 - DNA, 25 bp, Homo sapien
ggaagtcaagtgttcaagcccgcag

SEQ ID NO: 221034 - DNA, 25 bp, Homo sapien
gtcccgcgctcgagctgcttccggc

SEQ ID NO: 221035 - DNA, 25 bp, Homo sapien
aagacgctgtgtgtggacggaattc

SEQ ID NO: 221036 - DNA, 25 bp, Homo sapien
cggcgggagccggaagacgctgtgt

SEQ ID NO: 221037 - DNA, 25 bp, Homo sapien
tggacggaattcgggaccgactgac

SEQ ID NO: 221038 - DNA, 25 bp, Homo sapien
tcacttgttgttgcattgtcttcat

SEQ ID NO: 221039 - DNA, 25 bp, Homo sapien
aatttaacatgtcagtcacttgttg

SEQ ID NO: 221040 - DNA, 25 bp, Homo sapien
ttttataatttaacatgtcagtcac

SEQ ID NO: 221041 - DNA, 25 bp, Homo sapien
ttttctgatgcttattataactagt

SEQ ID NO: 221042 - DNA, 25 bp, Homo sapien
tattacataggataagacggacatc

SEQ ID NO: 221043 - DNA, 25 bp, Homo sapien
tagtacaacatcttacgggaagagc

SEQ ID NO: 221044 - DNA, 25 bp, Homo sapien
gacggacatctttggacatagctct

SEQ ID NO: 221045 - DNA, 25 bp, Homo sapien
gaagagcatagtatttcctagagga

SEQ ID NO: 221046 - DNA, 25 bp, Homo sapien
aagccttcgggtgaatgtgggtcca

SEQ ID NO: 221047 - DNA, 25 bp, Homo sapien
cagactgtacagaaatccccggagt

SEQ ID NO: 221048 - DNA, 25 bp, Homo sapien
gaggagacgagagctcagactgtac

SEQ ID NO: 221049 - DNA, 25 bp, Homo sapien
gataggtgctacataaagctgtggt

SEQ ID NO: 221050 - DNA, 25 bp, Homo sapien
ctacttagaatggttcattttaaca

SEQ ID NO: 221051 - DNA, 25 bp, Homo sapien
cagccaaactctaaactgtttgttt

SEQ ID NO: 221052 - DNA, 25 bp, Homo sapien
cccagccaaactctaaactgtttgt

SEQ ID NO: 221053 - DNA, 25 bp, Homo sapien
atgactaccatagtgctacttagaa

SEQ ID NO: 221054 - DNA, 25 bp, Homo sapien
gtaaaacaaggcacttgatctgtaa

SEQ ID NO: 221055 - DNA, 25 bp, Homo sapien
gttagcatttgttgaggcactttag

SEQ ID NO: 221056 - DNA, 25 bp, Homo sapien
ggcactttagtatgtaccaaccaca

SEQ ID NO: 221057 - DNA, 25 bp, Homo sapien
cttgcccaacatcatgcaggtagga

SEQ ID NO: 221058 - DNA, 25 bp, Homo sapien
tcttgtcataatctcaggcctctat

SEQ ID NO: 221059 - DNA, 25 bp, Homo sapien
caatgatgattgctgtaccatgtgt

SEQ ID NO: 221060 - DNA, 25 bp, Homo sapien
gccgtgatgaataaccttgtgcaca

SEQ ID NO: 221061 - DNA, 25 bp, Homo sapien
ggtcaaagggcaagtgcatctacaa

SEQ ID NO: 221062 - DNA, 25 bp, Homo sapien
gcattcccagcaaaatacaatcagc

SEQ ID NO: 221063 - DNA, 25 bp, Homo sapien
gccttggtggagagtccttgaacct

SEQ ID NO: 221064 - DNA, 25 bp, Homo sapien
ggtggcatcccatctataggttaac

SEQ ID NO: 221065 - DNA, 25 bp, Homo sapien
ttcagacgctgaacacaagcaagga

SEQ ID NO: 221066 - DNA, 25 bp, Homo sapien
gaagaggcttcagtacccagtaaaa

SEQ ID NO: 221067 - DNA, 25 bp, Homo sapien
tggagaaaagaaagggctctctagg

SEQ ID NO: 221068 - DNA, 25 bp, Homo sapien
cttcaaaagccatatcttctggaga

SEQ ID NO: 221069 - DNA, 25 bp, Homo sapien
ttcaaaagccatatcttctggagaa

SEQ ID NO: 221070 - DNA, 25 bp, Homo sapien
ttctggagaaaagaaagggctctct

SEQ ID NO: 221071 - DNA, 25 bp, Homo sapien
tgactgtgggctgggaaactgtacc

SEQ ID NO: 221072 - DNA, 25 bp, Homo sapien
ccactgcaaatttctgggatagacc

SEQ ID NO: 221073 - DNA, 25 bp, Homo sapien
catctgatcagacaaggaatgaagc

SEQ ID NO: 221074 - DNA, 25 bp, Homo sapien
taattcctgctaccaacaacagagc

SEQ ID NO: 221075 - DNA, 25 bp, Homo sapien
tacacttctacttggtcactttgct

SEQ ID NO: 221076 - DNA, 25 bp, Homo sapien
cagtagcatgttaagagggatttca

SEQ ID NO: 221077 - DNA, 25 bp, Homo sapien
gctttcttcgttaatggaacataca

SEQ ID NO: 221078 - DNA, 25 bp, Homo sapien
caggctgaggtactatcttgtccta

SEQ ID NO: 221079 - DNA, 25 bp, Homo sapien
ttaggaaacaacaagaacatcttca

SEQ ID NO: 221080 - DNA, 25 bp, Homo sapien
gagtcttaggaaacaacaagaacat

SEQ ID NO: 221081 - DNA, 25 bp, Homo sapien
tagtgtattgatttacccttaggat

SEQ ID NO: 221082 - DNA, 25 bp, Homo sapien
aaatagtgtattgatttacccttag

SEQ ID NO: 221083 - DNA, 25 bp, Homo sapien
gcccaggtgatagttactctgtcac

SEQ ID NO: 221084 - DNA, 25 bp, Homo sapien
aggtgatagttactctgtcaccacc

SEQ ID NO: 221085 - DNA, 25 bp, Homo sapien
ccaggtgatagttactctgtcacca

SEQ ID NO: 221086 - DNA, 25 bp, Homo sapien
caggtgatagttactctgtcaccac

SEQ ID NO: 221087 - DNA, 25 bp, Homo sapien
ggcactcttgctatcagtcatcctg

SEQ ID NO: 221088 - DNA, 25 bp, Homo sapien
tgcaccgagccagaatatccaatta

SEQ ID NO: 221089 - DNA, 25 bp, Homo sapien
tgctttagttagagcaggcactctt

SEQ ID NO: 221090 - DNA, 25 bp, Homo sapien
tgtctccacagctactgagaaaata

SEQ ID NO: 221091 - DNA, 25 bp, Homo sapien
ccccatgggctagatctgatatgca

SEQ ID NO: 221092 - DNA, 25 bp, Homo sapien
cactagccccttataggcatttggg

SEQ ID NO: 221093 - DNA, 25 bp, Homo sapien
gtagccatgactcaaaacccaagtt

SEQ ID NO: 221094 - DNA, 25 bp, Homo sapien
ggcacattctaaacagataacggga

SEQ ID NO: 221095 - DNA, 25 bp, Homo sapien
tctggtgactgatgagacagctcct

SEQ ID NO: 221096 - DNA, 25 bp, Homo sapien
agcaagtgatacgagattttctggt

SEQ ID NO: 221097 - DNA, 25 bp, Homo sapien
ttaagcaagtgatacgagattttct

SEQ ID NO: 221098 - DNA, 25 bp, Homo sapien
attttctggtgactgatgagacagc

SEQ ID NO: 221099 - DNA, 25 bp, Homo sapien
gttctagagatccttctaaaccctg

SEQ ID NO: 221100 - DNA, 25 bp, Homo sapien
ggctgttctagagatccttctaaac

SEQ ID NO: 221101 - DNA, 25 bp, Homo sapien
gcaggctgttctagagatccttcta

SEQ ID NO: 221102 - DNA, 25 bp, Homo sapien
agagatccttctaaaccctgctctg

SEQ ID NO: 221103 - DNA, 25 bp, Homo sapien
gggctgctaggatttaagatacaaa

SEQ ID NO: 221104 - DNA, 25 bp, Homo sapien
ttttctccctttgactcaatatcaa

SEQ ID NO: 221105 - DNA, 25 bp, Homo sapien
tttctaggggtataaaactgagata

SEQ ID NO: 221106 - DNA, 25 bp, Homo sapien
aactgagataggaattagggtaggg

SEQ ID NO: 221107 - DNA, 25 bp, Homo sapien
cagcccgggtgccttgacccttgtt

SEQ ID NO: 221108 - DNA, 25 bp, Homo sapien
ctttctcttgaacagcccgggtgcc

SEQ ID NO: 221109 - DNA, 25 bp, Homo sapien
cgggtgccttgacccttgtttctca

SEQ ID NO: 221110 - DNA, 25 bp, Homo sapien
tgaacagcccgggtgccttgaccct

SEQ ID NO: 221111 - DNA, 25 bp, Homo sapien
tgtctagataccactgttctgcttc

SEQ ID NO: 221112 - DNA, 25 bp, Homo sapien
cccagcctgcttcagggtgtctaga

SEQ ID NO: 221113 - DNA, 25 bp, Homo sapien
gggtgtctagataccactgttctgc

SEQ ID NO: 221114 - DNA, 25 bp, Homo sapien
gcttcagggtgtctagataccactg

SEQ ID NO: 221115 - DNA, 25 bp, Homo sapien
cttggcaacttgttcaaagagatag

SEQ ID NO: 221116 - DNA, 25 bp, Homo sapien
tatattctttcgctcttttacggtc

SEQ ID NO: 221117 - DNA, 25 bp, Homo sapien
gtttgtattcgctgcttcatttcct

SEQ ID NO: 221118 - DNA, 25 bp, Homo sapien
gagatagggccttgtttgtattcgc

SEQ ID NO: 221119 - DNA, 25 bp, Homo sapien
cccttttgacacatagaggacactg

SEQ ID NO: 221120 - DNA, 25 bp, Homo sapien
ggcaagcaccccttttgacacatag

SEQ ID NO: 221121 - DNA, 25 bp, Homo sapien
tggtctgttggatcccaaggcaagc

SEQ ID NO: 221122 - DNA, 25 bp, Homo sapien
gatcccaaggcaagcaccccttttg

SEQ ID NO: 221123 - DNA, 25 bp, Homo sapien
gcacgcaaggtcacagatttggaca

SEQ ID NO: 221124 - DNA, 25 bp, Homo sapien
tatctccagccactgaatactctca

SEQ ID NO: 221125 - DNA, 25 bp, Homo sapien
gggatccatggcttttgcacgcaag

SEQ ID NO: 221126 - DNA, 25 bp, Homo sapien
gatttggacattgcttgagacttct

SEQ ID NO: 221127 - DNA, 25 bp, Homo sapien
agagggaagcaaggccgctcagaga

SEQ ID NO: 221128 - DNA, 25 bp, Homo sapien
agcaaggccgctcagagaacgactc

SEQ ID NO: 221129 - DNA, 25 bp, Homo sapien
tctgtgatgtgcacagggagagtgt

SEQ ID NO: 221130 - DNA, 25 bp, Homo sapien
tgtgatgtgcacagggagagtgttg

SEQ ID NO: 221131 - DNA, 25 bp, Homo sapien
aagataggaaaaccttgttgagaag

SEQ ID NO: 221132 - DNA, 25 bp, Homo sapien
tggccccaccctgtatttcaggccg

SEQ ID NO: 221133 - DNA, 25 bp, Homo sapien
accctgtatttcaggccgcagccct

SEQ ID NO: 221134 - DNA, 25 bp, Homo sapien
gttgagaagtgctttccaggaagac

SEQ ID NO: 221135 - DNA, 25 bp, Homo sapien
tgcctccttccggtggtggcagcat

SEQ ID NO: 221136 - DNA, 25 bp, Homo sapien
ctgcctccttccggtggtggcagca

SEQ ID NO: 221137 - DNA, 25 bp, Homo sapien
gcctccttccggtggtggcagcatc

SEQ ID NO: 221138 - DNA, 25 bp, Homo sapien
tgtaaaggccctcatagtcagggac

SEQ ID NO: 221139 - DNA, 25 bp, Homo sapien
ccagggctctcatttggatgcgaat

SEQ ID NO: 221140 - DNA, 25 bp, Homo sapien
cgcaggttggcggtcctcagcaaga

SEQ ID NO: 221141 - DNA, 25 bp, Homo sapien
tcttctctggaaggccttgtaaagg

SEQ ID NO: 221142 - DNA, 25 bp, Homo sapien
tcttttacacactagctgtaagtgt

SEQ ID NO: 221143 - DNA, 25 bp, Homo sapien
actggaggcaagtaggaacttttca

SEQ ID NO: 221144 - DNA, 25 bp, Homo sapien
gaataggagtaattatgccacagaa

SEQ ID NO: 221145 - DNA, 25 bp, Homo sapien
tctgacacgttaacatcctgtgaga

SEQ ID NO: 221146 - DNA, 25 bp, Homo sapien
gcatggcacatgctaccgaaaagtg

SEQ ID NO: 221147 - DNA, 25 bp, Homo sapien
gattgacactacctcaccaggacga

SEQ ID NO: 221148 - DNA, 25 bp, Homo sapien
caagctggtcctcaggtgtctcact

SEQ ID NO: 221149 - DNA, 25 bp, Homo sapien
ccccaggtaatttcggcgattgaca

SEQ ID NO: 221150 - DNA, 25 bp, Homo sapien
tcgcgcagcgtcatgcggaatggcc

SEQ ID NO: 221151 - DNA, 25 bp, Homo sapien
caggtagacatgtgcaggcacaggc

SEQ ID NO: 221152 - DNA, 25 bp, Homo sapien
gacttgggaatccttctggtggcct

SEQ ID NO: 221153 - DNA, 25 bp, Homo sapien
ccgagggacagtaatggatgatgcc

SEQ ID NO: 221154 - DNA, 25 bp, Homo sapien
gtctgaggcctgggaatgttggagg

SEQ ID NO: 221155 - DNA, 25 bp, Homo sapien
gctgcagcgccttgtggagccacac

SEQ ID NO: 221156 - DNA, 25 bp, Homo sapien
gagctgcagcgccttgtggagccac

SEQ ID NO: 221157 - DNA, 25 bp, Homo sapien
tggagggaaggttgttcagggagct

SEQ ID NO: 221158 - DNA, 25 bp, Homo sapien
taaatgctcccagttgagtcagaag

SEQ ID NO: 221159 - DNA, 25 bp, Homo sapien
gaggaactcgtcaagtttgctggcc

SEQ ID NO: 221160 - DNA, 25 bp, Homo sapien
aaagagagactccaacagacaccat

SEQ ID NO: 221161 - DNA, 25 bp, Homo sapien
ccttgtcttggaagaaactctccag

SEQ ID NO: 221162 - DNA, 25 bp, Homo sapien
gcaaaaccagcccatccccggacag

SEQ ID NO: 221163 - DNA, 25 bp, Homo sapien
aaaccagcccatccccggacagctc

SEQ ID NO: 221164 - DNA, 25 bp, Homo sapien
ctgggcaaaaccagcccatccccgg

SEQ ID NO: 221165 - DNA, 25 bp, Homo sapien
agcccatccccggacagctcctctc

SEQ ID NO: 221166 - DNA, 25 bp, Homo sapien
ctgcgaaggactcggggggaaatat

SEQ ID NO: 221167 - DNA, 25 bp, Homo sapien
cctgcactccaggaatcctgcccat

SEQ ID NO: 221168 - DNA, 25 bp, Homo sapien
acccctgcactccaggaatcctgcc

SEQ ID NO: 221169 - DNA, 25 bp, Homo sapien
caggctttctgacccctgcactcca

SEQ ID NO: 221170 - DNA, 25 bp, Homo sapien
gacccctgcactccaggaatcctgc

SEQ ID NO: 221171 - DNA, 25 bp, Homo sapien
tgacggctcccctccgcgcctccgg

SEQ ID NO: 221172 - DNA, 25 bp, Homo sapien
ctgacggctcccctccgcgcctccg

SEQ ID NO: 221173 - DNA, 25 bp, Homo sapien
ctccctcaggcctccccacggtcat

SEQ ID NO: 221174 - DNA, 25 bp, Homo sapien
gcctccgggggctccctcaggcctc

SEQ ID NO: 221175 - DNA, 25 bp, Homo sapien
gctggacagaggcagcagcgacagt

SEQ ID NO: 221176 - DNA, 25 bp, Homo sapien
cagctggacagaggcagcagcgaca

SEQ ID NO: 221177 - DNA, 25 bp, Homo sapien
acagaggcagcagcgacagtgacag

SEQ ID NO: 221178 - DNA, 25 bp, Homo sapien
ggacagaggcagcagcgacagtgac

SEQ ID NO: 221179 - DNA, 25 bp, Homo sapien
gcgagagctatgcggggccagggtc

SEQ ID NO: 221180 - DNA, 25 bp, Homo sapien
tccacccctttctagctttggcgtc

SEQ ID NO: 221181 - DNA, 25 bp, Homo sapien
cagcggtggcagcgagagctatgcg

SEQ ID NO: 221182 - DNA, 25 bp, Homo sapien
ggcagcgagagctatgcggggccag

SEQ ID NO: 221183 - DNA, 25 bp, Homo sapien
catgagatacagagcctttcggcga

SEQ ID NO: 221184 - DNA, 25 bp, Homo sapien
acaaggttcacattcagtccgagga

SEQ ID NO: 221185 - DNA, 25 bp, Homo sapien
tctgtcttaagatatcggagtccac

SEQ ID NO: 221186 - DNA, 25 bp, Homo sapien
tcttacgtaacaggatggagggaca

SEQ ID NO: 221187 - DNA, 25 bp, Homo sapien
ctgtgctggccctctattatttaaa

SEQ ID NO: 221188 - DNA, 25 bp, Homo sapien
tacaggctgatgtttttggagatag

SEQ ID NO: 221189 - DNA, 25 bp, Homo sapien
tattatttaaatcgctttgttgaca

SEQ ID NO: 221190 - DNA, 25 bp, Homo sapien
tgtaaatgatgtatacaggctgatg

SEQ ID NO: 221191 - DNA, 25 bp, Homo sapien
gacattgagttatctctgtggcttc

SEQ ID NO: 221192 - DNA, 25 bp, Homo sapien
ttgacattgagttatctctgtggct

SEQ ID NO: 221193 - DNA, 25 bp, Homo sapien
tttgacattgagttatctctgtggc

SEQ ID NO: 221194 - DNA, 25 bp, Homo sapien
tgacattgagttatctctgtggctt

SEQ ID NO: 221195 - DNA, 25 bp, Homo sapien
gagtttaactcatggctggcacctg

SEQ ID NO: 221196 - DNA, 25 bp, Homo sapien
tgcagatggtcacaactccggagta

SEQ ID NO: 221197 - DNA, 25 bp, Homo sapien
gagcaatctcatgggccgtcttagg

SEQ ID NO: 221198 - DNA, 25 bp, Homo sapien
cgagtgacggttctctacaggagca

SEQ ID NO: 221199 - DNA, 25 bp, Homo sapien
gaagaccgtaaatgacaatctccgt

SEQ ID NO: 221200 - DNA, 25 bp, Homo sapien
tattcctggcacaggtctaggtcct

SEQ ID NO: 221201 - DNA, 25 bp, Homo sapien
tgagaacagtctccgctttcaggaa

SEQ ID NO: 221202 - DNA, 25 bp, Homo sapien
tggtgaacactaccctactctgggc

SEQ ID NO: 221203 - DNA, 25 bp, Homo sapien
ttaattccctgctactcacatttca

SEQ ID NO: 221204 - DNA, 25 bp, Homo sapien
taattccctgctactcacatttcac

SEQ ID NO: 221205 - DNA, 25 bp, Homo sapien
tttaattccctgctactcacatttc

SEQ ID NO: 221206 - DNA, 25 bp, Homo sapien
ggtggatgccaaaagccgagttctg

SEQ ID NO: 221207 - DNA, 25 bp, Homo sapien
tgaccacacggacttcatcgacaca

SEQ ID NO: 221208 - DNA, 25 bp, Homo sapien
catcgacacagctggtgccatgctg

SEQ ID NO: 221209 - DNA, 25 bp, Homo sapien
tcagtggagtgatgctgaccacacg

SEQ ID NO: 221210 - DNA, 25 bp, Homo sapien
tcactttgctgccagaggtcacacc

SEQ ID NO: 221211 - DNA, 25 bp, Homo sapien
ggcgctcattgggtaagacgataac

SEQ ID NO: 221212 - DNA, 25 bp, Homo sapien
gacatgctgctgagtacgtcaggcc

SEQ ID NO: 221213 - DNA, 25 bp, Homo sapien
gctttattcttagggatgcagccca

SEQ ID NO: 221214 - DNA, 25 bp, Homo sapien
gacacttgggaagaatacctacgtg

SEQ ID NO: 221215 - DNA, 25 bp, Homo sapien
acaaggacacttgggaagaatacct

SEQ ID NO: 221216 - DNA, 25 bp, Homo sapien
gaatacctacgtgattattatctac

SEQ ID NO: 221217 - DNA, 25 bp, Homo sapien
cttgggaagaatacctacgtgatta

SEQ ID NO: 221218 - DNA, 25 bp, Homo sapien
tttgcaagcaaatgagtactcctct

SEQ ID NO: 221219 - DNA, 25 bp, Homo sapien
tctttgcttaatgggcctgtggcac

SEQ ID NO: 221220 - DNA, 25 bp, Homo sapien
gagcgtatattagccagaccaaagg

SEQ ID NO: 221221 - DNA, 25 bp, Homo sapien
tccaggaacagattatggcctttgc

SEQ ID NO: 221222 - DNA, 25 bp, Homo sapien
aaaaacccacaaggtgctgtctcac

SEQ ID NO: 221223 - DNA, 25 bp, Homo sapien
ctcatttccagttaatcatttctaa

SEQ ID NO: 221224 - DNA, 25 bp, Homo sapien
aaggtgctgtctcactcatttccag

SEQ ID NO: 221225 - DNA, 25 bp, Homo sapien
aacccacaaggtgctgtctcactca

SEQ ID NO: 221226 - DNA, 25 bp, Homo sapien
taatgttggtcataaatttatacag

SEQ ID NO: 221227 - DNA, 25 bp, Homo sapien
attagactcgatgcatttttgttag

SEQ ID NO: 221228 - DNA, 25 bp, Homo sapien
cctttgttacaggtatactggactt

SEQ ID NO: 221229 - DNA, 25 bp, Homo sapien
gaggtaagaattagactcgatgcat

SEQ ID NO: 221230 - DNA, 25 bp, Homo sapien
aaagctgtgtgactcctggcggaga

SEQ ID NO: 221231 - DNA, 25 bp, Homo sapien
cactgttaacacattagcctgggag

SEQ ID NO: 221232 - DNA, 25 bp, Homo sapien
cattgcacagatccgaagacctcag

SEQ ID NO: 221233 - DNA, 25 bp, Homo sapien
aaagtgcaagataaggccaggcgcg

SEQ ID NO: 221234 - DNA, 25 bp, Homo sapien
cagcccgtctctatgttgttcactt

SEQ ID NO: 221235 - DNA, 25 bp, Homo sapien
ccagcccgtctctatgttgttcact

SEQ ID NO: 221236 - DNA, 25 bp, Homo sapien
cccagcccgtctctatgttgttcac

SEQ ID NO: 221237 - DNA, 25 bp, Homo sapien
agcccgtctctatgttgttcacttt

SEQ ID NO: 221238 - DNA, 25 bp, Homo sapien
cactaatttcagataaggcaacttg

SEQ ID NO: 221239 - DNA, 25 bp, Homo sapien
gagcatggtcaggaggtgagaatag

SEQ ID NO: 221240 - DNA, 25 bp, Homo sapien
gacagacagtattctgaactttccc

SEQ ID NO: 221241 - DNA, 25 bp, Homo sapien
ctagagagatagtttagacagacag

SEQ ID NO: 221242 - DNA, 25 bp, Homo sapien
tatgtgtaaccactctattagcagc

SEQ ID NO: 221243 - DNA, 25 bp, Homo sapien
tcccatgaccgaacttcagctctag

SEQ ID NO: 221244 - DNA, 25 bp, Homo sapien
ctctagtatgtgtaaccactctatt

SEQ ID NO: 221245 - DNA, 25 bp, Homo sapien
taaccactctattagcagcagagac

SEQ ID NO: 221246 - DNA, 25 bp, Homo sapien
aagccaaagccatcctttaacaggg

SEQ ID NO: 221247 - DNA, 25 bp, Homo sapien
gactgcctgaggtgaagttttccaa

SEQ ID NO: 221248 - DNA, 25 bp, Homo sapien
gatccatgcacaggaaaggactgcc

SEQ ID NO: 221249 - DNA, 25 bp, Homo sapien
tgtgatgtagctgagatccatgcac

SEQ ID NO: 221250 - DNA, 25 bp, Homo sapien
tggcttttctttcaaaatcttcaac

SEQ ID NO: 221251 - DNA, 25 bp, Homo sapien
cctggcttttctttcaaaatcttca

SEQ ID NO: 221252 - DNA, 25 bp, Homo sapien
ctggcttttctttcaaaatcttcaa

SEQ ID NO: 221253 - DNA, 25 bp, Homo sapien
tgtgtcaacagctcggtcataatag

SEQ ID NO: 221254 - DNA, 25 bp, Homo sapien
tgaagttttcctcgtaccaccctca

SEQ ID NO: 221255 - DNA, 25 bp, Homo sapien
accctcagcacttcggcatagcagg

SEQ ID NO: 221256 - DNA, 25 bp, Homo sapien
gaaagcatagaaggaacctctctgg

SEQ ID NO: 221257 - DNA, 25 bp, Homo sapien
cttcttggttgccaccatactggta

SEQ ID NO: 221258 - DNA, 25 bp, Homo sapien
tactggtatttcacacccccaaaga

SEQ ID NO: 221259 - DNA, 25 bp, Homo sapien
taaacaggcactccggaaagtgtgc

SEQ ID NO: 221260 - DNA, 25 bp, Homo sapien
tgcttccaaccatctcggtaaacag

SEQ ID NO: 221261 - DNA, 25 bp, Homo sapien
ctcccagggttgctagtcttgcagc

SEQ ID NO: 221262 - DNA, 25 bp, Homo sapien
cccagggttgctagtcttgcagctt

SEQ ID NO: 221263 - DNA, 25 bp, Homo sapien
cagggttgctagtcttgcagctttc

SEQ ID NO: 221264 - DNA, 25 bp, Homo sapien
gctcccagggttgctagtcttgcag

SEQ ID NO: 221265 - DNA, 25 bp, Homo sapien
tgaagttctctagcctaaagctacc

SEQ ID NO: 221266 - DNA, 25 bp, Homo sapien
aatacaggattgactaatttcatgc

SEQ ID NO: 221267 - DNA, 25 bp, Homo sapien
agcctaaagctacctctttcaaaag

SEQ ID NO: 221268 - DNA, 25 bp, Homo sapien
ttcatgctggtcctgaagttctcta

SEQ ID NO: 221269 - DNA, 25 bp, Homo sapien
gagcttataagtgctgttaaacatc

SEQ ID NO: 221270 - DNA, 25 bp, Homo sapien
tgtatagagcttataagtgctgtta

SEQ ID NO: 221271 - DNA, 25 bp, Homo sapien
ctatgtgtatagagcttataagtgc

SEQ ID NO: 221272 - DNA, 25 bp, Homo sapien
aggaagtgaggtagcccctaggagt

SEQ ID NO: 221273 - DNA, 25 bp, Homo sapien
ctgcaaatcagaaaaagcaaaaaga

SEQ ID NO: 221274 - DNA, 25 bp, Homo sapien
tcagaaaaagcaaaaagactattca

SEQ ID NO: 221275 - DNA, 25 bp, Homo sapien
aaaaagcaaaaagactattcaggat

SEQ ID NO: 221276 - DNA, 25 bp, Homo sapien
gaaaaagcaaaaagactattcagga

SEQ ID NO: 221277 - DNA, 25 bp, Homo sapien
ggggcaggaacgtgatttgggtgga

SEQ ID NO: 221278 - DNA, 25 bp, Homo sapien
tggggcaggaacgtgatttgggtgg

SEQ ID NO: 221279 - DNA, 25 bp, Homo sapien
gggcaggaacgtgatttgggtggag

SEQ ID NO: 221280 - DNA, 25 bp, Homo sapien
caggaacgtgatttgggtggaggct

SEQ ID NO: 221281 - DNA, 25 bp, Homo sapien
ctgtcagaaaattcacagtaaccca

SEQ ID NO: 221282 - DNA, 25 bp, Homo sapien
aaattcacagtaacccaagctaata

SEQ ID NO: 221283 - DNA, 25 bp, Homo sapien
tcagaaaattcacagtaacccaagc

SEQ ID NO: 221284 - DNA, 25 bp, Homo sapien
ttcacagtaacccaagctaatatgc

SEQ ID NO: 221285 - DNA, 25 bp, Homo sapien
tctgtttattcctggccccagttcc

SEQ ID NO: 221286 - DNA, 25 bp, Homo sapien
tccccctggaacgcatatcaacacc

SEQ ID NO: 221287 - DNA, 25 bp, Homo sapien
ctgtttattcctggccccagttcct

SEQ ID NO: 221288 - DNA, 25 bp, Homo sapien
agatctttcactgatcctgcccctc

SEQ ID NO: 221289 - DNA, 25 bp, Homo sapien
cttcgtcggatccatccatgatgct

SEQ ID NO: 221290 - DNA, 25 bp, Homo sapien
tgccctttggtaccaggaaaggtga

SEQ ID NO: 221291 - DNA, 25 bp, Homo sapien
ccatccatgatgctaacactgccct

SEQ ID NO: 221292 - DNA, 25 bp, Homo sapien
ctaacactgccctttggtaccagga

SEQ ID NO: 221293 - DNA, 25 bp, Homo sapien
agatttccatattttgacagtgtcc

SEQ ID NO: 221294 - DNA, 25 bp, Homo sapien
gatttccatattttgacagtgtcct

SEQ ID NO: 221295 - DNA, 25 bp, Homo sapien
taagagcccttgaacggtctcagca

SEQ ID NO: 221296 - DNA, 25 bp, Homo sapien
tgctgttgcctttaggaccactggg

SEQ ID NO: 221297 - DNA, 25 bp, Homo sapien
cagtaagcgtagtcctgctgttgcc

SEQ ID NO: 221298 - DNA, 25 bp, Homo sapien
tcgggggattgagtctttggccacc

SEQ ID NO: 221299 - DNA, 25 bp, Homo sapien
gatgaacgatccatttagtggctgg

SEQ ID NO: 221300 - DNA, 25 bp, Homo sapien
ctgatgaacgatccatttagtggct

SEQ ID NO: 221301 - DNA, 25 bp, Homo sapien
acgatccatttagtggctggcactg

SEQ ID NO: 221302 - DNA, 25 bp, Homo sapien
gaacgatccatttagtggctggcac

SEQ ID NO: 221303 - DNA, 25 bp, Homo sapien
gatatggttccatcctgcatcaagg

SEQ ID NO: 221304 - DNA, 25 bp, Homo sapien
tttatttcaacatggcctcagacac

SEQ ID NO: 221305 - DNA, 25 bp, Homo sapien
tgcgcttacatgaacaaatacaact

SEQ ID NO: 221306 - DNA, 25 bp, Homo sapien
tgcatcaaggcactctgaaatggaa

SEQ ID NO: 221307 - DNA, 25 bp, Homo sapien
aaaagcagaaagtcctggcttcaca

SEQ ID NO: 221308 - DNA, 25 bp, Homo sapien
agcagaaagtcctggcttcacagaa

SEQ ID NO: 221309 - DNA, 25 bp, Homo sapien
agaaagtcctggcttcacagaatca

SEQ ID NO: 221310 - DNA, 25 bp, Homo sapien
aaagtcctggcttcacagaatcaaa

SEQ ID NO: 221311 - DNA, 25 bp, Homo sapien
acagaagagagagctggttaccaaa

SEQ ID NO: 221312 - DNA, 25 bp, Homo sapien
agaagagagagctggttaccaaaag

SEQ ID NO: 221313 - DNA, 25 bp, Homo sapien
aagagagagctggttaccaaaagtt

SEQ ID NO: 221314 - DNA, 25 bp, Homo sapien
gagagagctggttaccaaaagttag

SEQ ID NO: 221315 - DNA, 25 bp, Homo sapien
gactagagcaacctctgagggtcca

SEQ ID NO: 221316 - DNA, 25 bp, Homo sapien
tctggtggacacctaactcctccac

SEQ ID NO: 221317 - DNA, 25 bp, Homo sapien
gaagttatcccaaatgatcctagtt

SEQ ID NO: 221318 - DNA, 25 bp, Homo sapien
gatcctagttgtgaggaatgtcttg

SEQ ID NO: 221319 - DNA, 25 bp, Homo sapien
tttctgcacaaaggtgtaaacatga

SEQ ID NO: 221320 - DNA, 25 bp, Homo sapien
taattccatacaaggtgctggcgct

SEQ ID NO: 221321 - DNA, 25 bp, Homo sapien
gtgctccctgcatcaaacataattc

SEQ ID NO: 221322 - DNA, 25 bp, Homo sapien
tgaattcgagttccagtgctccctg

SEQ ID NO: 221323 - DNA, 25 bp, Homo sapien
atgaaaaagactgtgccccaagaag

SEQ ID NO: 221324 - DNA, 25 bp, Homo sapien
ctgcaaacacaggataccaccagca

SEQ ID NO: 221325 - DNA, 25 bp, Homo sapien
caggataccaccagcatgaaaaaga

SEQ ID NO: 221326 - DNA, 25 bp, Homo sapien
agactgtgccccaagaagtggccat

SEQ ID NO: 221327 - DNA, 25 bp, Homo sapien
agaagcaatcctgctcgcacacctg

SEQ ID NO: 221328 - DNA, 25 bp, Homo sapien
ggcttttgttgcagaagcaatcctg

SEQ ID NO: 221329 - DNA, 25 bp, Homo sapien
tggctgggtggaggcttttgttgca

SEQ ID NO: 221330 - DNA, 25 bp, Homo sapien
tgttgcagaagcaatcctgctcgca

SEQ ID NO: 221331 - DNA, 25 bp, Homo sapien
attggaattgaagatatattttccc

SEQ ID NO: 221332 - DNA, 25 bp, Homo sapien
tggaattgaagatatattttcccat

SEQ ID NO: 221333 - DNA, 25 bp, Homo sapien
caaaaggaaattggaattgaagata

SEQ ID NO: 221334 - DNA, 25 bp, Homo sapien
tatctagttccaaaaggaaattgga

SEQ ID NO: 221335 - DNA, 25 bp, Homo sapien
cactctggctgattcttttacagca

SEQ ID NO: 221336 - DNA, 25 bp, Homo sapien
agcaaatgagctagacatgtagatc

SEQ ID NO: 221337 - DNA, 25 bp, Homo sapien
ctctggctgattcttttacagcaaa

SEQ ID NO: 221338 - DNA, 25 bp, Homo sapien
gcaaatgagctagacatgtagatca

SEQ ID NO: 221339 - DNA, 25 bp, Homo sapien
tgtctgccggttccctgagtccttg

SEQ ID NO: 221340 - DNA, 25 bp, Homo sapien
gagtccttgctttcgctgcaggttg

SEQ ID NO: 221341 - DNA, 25 bp, Homo sapien
ctgcttgtgtctgccggttccctga

SEQ ID NO: 221342 - DNA, 25 bp, Homo sapien
ttgtgtctgccggttccctgagtcc

SEQ ID NO: 221343 - DNA, 25 bp, Homo sapien
cagaatttagaaacctggatggaac

SEQ ID NO: 221344 - DNA, 25 bp, Homo sapien
aatttagaaacctggatggaacata

SEQ ID NO: 221345 - DNA, 25 bp, Homo sapien
gaatttagaaacctggatggaacat

SEQ ID NO: 221346 - DNA, 25 bp, Homo sapien
acagaatttagaaacctggatggaa

SEQ ID NO: 221347 - DNA, 25 bp, Homo sapien
cttgctcataaccaaaactgcccat

SEQ ID NO: 221348 - DNA, 25 bp, Homo sapien
gctttatcacctaggctcaagtgca

SEQ ID NO: 221349 - DNA, 25 bp, Homo sapien
tgactagctagactacaggaatgag

SEQ ID NO: 221350 - DNA, 25 bp, Homo sapien
cctgactagctagactacaggaatg

SEQ ID NO: 221351 - DNA, 25 bp, Homo sapien
tcaagtgcagtggtgcagacacagc

SEQ ID NO: 221352 - DNA, 25 bp, Homo sapien
tccagcctcggtgacagagtgagac

SEQ ID NO: 221353 - DNA, 25 bp, Homo sapien
aggagtttgaagctgccgtgagctg

SEQ ID NO: 221354 - DNA, 25 bp, Homo sapien
ggagtttgaagctgccgtgagctgt

SEQ ID NO: 221355 - DNA, 25 bp, Homo sapien
gattgcaccactgtactccagcctc

SEQ ID NO: 221356 - DNA, 25 bp, Homo sapien
tgagtcaggcataacttcattctcc

SEQ ID NO: 221357 - DNA, 25 bp, Homo sapien
gactttgctacaataatcacttgga

SEQ ID NO: 221358 - DNA, 25 bp, Homo sapien
gaactcatttgggtgtaataacaaa

SEQ ID NO: 221359 - DNA, 25 bp, Homo sapien
tcattagacacgtgtcaaaaaggcc

SEQ ID NO: 221360 - DNA, 25 bp, Homo sapien
gttcctttattatatcactttttca

SEQ ID NO: 221361 - DNA, 25 bp, Homo sapien
tcctttattatatcactttttcaac

SEQ ID NO: 221362 - DNA, 25 bp, Homo sapien
ttctccttggttcctttattatatc

SEQ ID NO: 221363 - DNA, 25 bp, Homo sapien
ccttggttcctttattatatcactt

SEQ ID NO: 221364 - DNA, 25 bp, Homo sapien
tggatacaagtcctacctaacagca

SEQ ID NO: 221365 - DNA, 25 bp, Homo sapien
gtatgaggattcagccaagacactc

SEQ ID NO: 221366 - DNA, 25 bp, Homo sapien
cataatgatcttgtctgtatgagga

SEQ ID NO: 221367 - DNA, 25 bp, Homo sapien
tacctaacagcaccataatgatctt

SEQ ID NO: 221368 - DNA, 25 bp, Homo sapien
gcgcgccacccttgcgcggcagccc

SEQ ID NO: 221369 - DNA, 25 bp, Homo sapien
gccacccttgcgcggcagcccgccg

SEQ ID NO: 221370 - DNA, 25 bp, Homo sapien
ccacccttgcgcggcagcccgccgc

SEQ ID NO: 221371 - DNA, 25 bp, Homo sapien
taaccccttacaggcctggagttgc

SEQ ID NO: 221372 - DNA, 25 bp, Homo sapien
gctctcccggcttgtgaggattaca

SEQ ID NO: 221373 - DNA, 25 bp, Homo sapien
gaggattacagctcccatgtccata

SEQ ID NO: 221374 - DNA, 25 bp, Homo sapien
ccaagatgccgtcgaagggaaagga

SEQ ID NO: 221375 - DNA, 25 bp, Homo sapien
tggcaccagctgataaactatttaa

SEQ ID NO: 221376 - DNA, 25 bp, Homo sapien
aaaagtccggtgaactgtggcacca

SEQ ID NO: 221377 - DNA, 25 bp, Homo sapien
cgtatttgccctagtgacttgactt

SEQ ID NO: 221378 - DNA, 25 bp, Homo sapien
tatttaacgtatttgccctagtgac

SEQ ID NO: 221379 - DNA, 25 bp, Homo sapien
aagtgggcagacacaaccttaacca

SEQ ID NO: 221380 - DNA, 25 bp, Homo sapien
taagcccaaccctggccagtattct

SEQ ID NO: 221381 - DNA, 25 bp, Homo sapien
gcatagtctcaaaagattgtaccac

SEQ ID NO: 221382 - DNA, 25 bp, Homo sapien
tcatgaagaagcatcagctaagccc

SEQ ID NO: 221383 - DNA, 25 bp, Homo sapien
gagttggtccctgagtcacttagga

SEQ ID NO: 221384 - DNA, 25 bp, Homo sapien
gaaagctctggcatatcacctgaag

SEQ ID NO: 221385 - DNA, 25 bp, Homo sapien
tcagtggcatcaccacacaagggtt

SEQ ID NO: 221386 - DNA, 25 bp, Homo sapien
ggaggtaagcaatccacagcaggaa

SEQ ID NO: 221387 - DNA, 25 bp, Homo sapien
ttaaaactgcagcaacacgcaatga

SEQ ID NO: 221388 - DNA, 25 bp, Homo sapien
gaaatgaatcgtgtgaagaagctgg

SEQ ID NO: 221389 - DNA, 25 bp, Homo sapien
cacgcaatgatagagaaccaagcag

SEQ ID NO: 221390 - DNA, 25 bp, Homo sapien
gactgctctgagttacatgaccaaa

SEQ ID NO: 221391 - DNA, 25 bp, Homo sapien
tattcccctctgtctcatgatagaa

SEQ ID NO: 221392 - DNA, 25 bp, Homo sapien
tgtaccgtttactatcctgagatga

SEQ ID NO: 221393 - DNA, 25 bp, Homo sapien
ttgtaatctctaggcttagcatagc

SEQ ID NO: 221394 - DNA, 25 bp, Homo sapien
ttctcagtaggttacttgaggacag

SEQ ID NO: 221395 - DNA, 25 bp, Homo sapien
taaacatgagcccaacacgatggtt

SEQ ID NO: 221396 - DNA, 25 bp, Homo sapien
tcattacaacctagaggacaaaggc

SEQ ID NO: 221397 - DNA, 25 bp, Homo sapien
tacaaccagagttctaggcctccag

SEQ ID NO: 221398 - DNA, 25 bp, Homo sapien
ggtgctacccactattccaaaagaa

SEQ ID NO: 221399 - DNA, 25 bp, Homo sapien
tctcccagtggcatttaggtagcgc

SEQ ID NO: 221400 - DNA, 25 bp, Homo sapien
tatcaaagtgactggtaaggacgca

SEQ ID NO: 221401 - DNA, 25 bp, Homo sapien
caatccttgatttctgggcctaaaa

SEQ ID NO: 221402 - DNA, 25 bp, Homo sapien
tgatcttaagcaggagcagtgacaa

SEQ ID NO: 221403 - DNA, 25 bp, Homo sapien
tgagaagtaatggtctttaactgag

SEQ ID NO: 221404 - DNA, 25 bp, Homo sapien
ctaacggcccatggtaggcatgaca

SEQ ID NO: 221405 - DNA, 25 bp, Homo sapien
agtaatggtctttaactgagtgtag

SEQ ID NO: 221406 - DNA, 25 bp, Homo sapien
tggtaggcatgacaacagcaggtga

SEQ ID NO: 221407 - DNA, 25 bp, Homo sapien
ggtgaatgagaacattggcaaaggc

SEQ ID NO: 221408 - DNA, 25 bp, Homo sapien
ggaggatcgagagccggtgaatgag

SEQ ID NO: 221409 - DNA, 25 bp, Homo sapien
tgccatagaaattggtgtctcccct

SEQ ID NO: 221410 - DNA, 25 bp, Homo sapien
aaggcactggaatggggacattcac

SEQ ID NO: 221411 - DNA, 25 bp, Homo sapien
caagtgggcatatttccgagcagtg

SEQ ID NO: 221412 - DNA, 25 bp, Homo sapien
cagaaccacaagaactggaccaaaa

SEQ ID NO: 221413 - DNA, 25 bp, Homo sapien
gcatatttccgagcagtggctccat

SEQ ID NO: 221414 - DNA, 25 bp, Homo sapien
agtgggcatatttccgagcagtggc

SEQ ID NO: 221415 - DNA, 25 bp, Homo sapien
gctgcctttttaatacctgaacgac

SEQ ID NO: 221416 - DNA, 25 bp, Homo sapien
cctgaacgactagtttcatccaatt

SEQ ID NO: 221417 - DNA, 25 bp, Homo sapien
tccaatctatagtaaatataccagg

SEQ ID NO: 221418 - DNA, 25 bp, Homo sapien
tcctctctcaagtgtattccgtctt

SEQ ID NO: 221419 - DNA, 25 bp, Homo sapien
tgttccactatcaatcagattacag

SEQ ID NO: 221420 - DNA, 25 bp, Homo sapien
tgacattcgagatgatggttggtcc

SEQ ID NO: 221421 - DNA, 25 bp, Homo sapien
catcaagaaggatggaagctccctc

SEQ ID NO: 221422 - DNA, 25 bp, Homo sapien
ttacagactcgctctttggcctggg

SEQ ID NO: 221423 - DNA, 25 bp, Homo sapien
tgttgaaagagccatgcagcgctga

SEQ ID NO: 221424 - DNA, 25 bp, Homo sapien
ccttattggcatctggcatgactac

SEQ ID NO: 221425 - DNA, 25 bp, Homo sapien
caaccagctggttcagggtattttc

SEQ ID NO: 221426 - DNA, 25 bp, Homo sapien
ctcccacaaggactgctgttgaaag

SEQ ID NO: 221427 - DNA, 25 bp, Homo sapien
gccttacagcaataatgccagtaac

SEQ ID NO: 221428 - DNA, 25 bp, Homo sapien
cttacagcaataatgccagtaacca

SEQ ID NO: 221429 - DNA, 25 bp, Homo sapien
ccttacagcaataatgccagtaacc

SEQ ID NO: 221430 - DNA, 25 bp, Homo sapien
agccttacagcaataatgccagtaa

SEQ ID NO: 221431 - DNA, 25 bp, Homo sapien
gattgctttgatgtccggatgatcg

SEQ ID NO: 221432 - DNA, 25 bp, Homo sapien
gttggatcccacaaagctgattgct

SEQ ID NO: 221433 - DNA, 25 bp, Homo sapien
ccggatgatcgcaaataaaatttac

SEQ ID NO: 221434 - DNA, 25 bp, Homo sapien
tctcgaagatatactctcctgcctt

SEQ ID NO: 221435 - DNA, 25 bp, Homo sapien
ggcagacggtaggaataaaggtcca

SEQ ID NO: 221436 - DNA, 25 bp, Homo sapien
tcatgagggatgtcacactacaggc

SEQ ID NO: 221437 - DNA, 25 bp, Homo sapien
catggcaggaaaattgaatggagca

SEQ ID NO: 221438 - DNA, 25 bp, Homo sapien
ttgctccagggactcgctcagatgg

SEQ ID NO: 221439 - DNA, 25 bp, Homo sapien
ggcctcgaaatacatctccttcagc

SEQ ID NO: 221440 - DNA, 25 bp, Homo sapien
cagcatcagctagggtcttcccttg

SEQ ID NO: 221441 - DNA, 25 bp, Homo sapien
cttgttccaatgtgattaacttggc

SEQ ID NO: 221442 - DNA, 25 bp, Homo sapien
tccttcagcatcagctagggtcttc

SEQ ID NO: 221443 - DNA, 25 bp, Homo sapien
gatgcagtacaagggagagagtcat

SEQ ID NO: 221444 - DNA, 25 bp, Homo sapien
tgatcaacgtctctgcatactgcag

SEQ ID NO: 221445 - DNA, 25 bp, Homo sapien
ggaaaagcataccatttagatttca

SEQ ID NO: 221446 - DNA, 25 bp, Homo sapien
ctgaaaaggtctctgtgagagtgac

SEQ ID NO: 221447 - DNA, 25 bp, Homo sapien
agcacgtttgcaggaagcaatggct

SEQ ID NO: 221448 - DNA, 25 bp, Homo sapien
tgcccatgcaggaaaagcacgtttg

SEQ ID NO: 221449 - DNA, 25 bp, Homo sapien
ggcggcttaatactgaagtgtctgc

SEQ ID NO: 221450 - DNA, 25 bp, Homo sapien
ttgttgatagcggagcaagacctgc

SEQ ID NO: 221451 - DNA, 25 bp, Homo sapien
ttcaacgaatttcccaccaatgaag

SEQ ID NO: 221452 - DNA, 25 bp, Homo sapien
caacgaatttcccaccaatgaagag

SEQ ID NO: 221453 - DNA, 25 bp, Homo sapien
gattcaacgaatttcccaccaatga

SEQ ID NO: 221454 - DNA, 25 bp, Homo sapien
attcaacgaatttcccaccaatgaa

SEQ ID NO: 221455 - DNA, 25 bp, Homo sapien
tgaataccaggtgggactggatttc

SEQ ID NO: 221456 - DNA, 25 bp, Homo sapien
gctgaataccaggtgggactggatt

SEQ ID NO: 221457 - DNA, 25 bp, Homo sapien
ctgaataccaggtgggactggattt

SEQ ID NO: 221458 - DNA, 25 bp, Homo sapien
gccacagcacctgggtacttatctg

SEQ ID NO: 221459 - DNA, 25 bp, Homo sapien
tctgttacccataaagactgtcagt

SEQ ID NO: 221460 - DNA, 25 bp, Homo sapien
gattaaacctgatcaggactgtcca

SEQ ID NO: 221461 - DNA, 25 bp, Homo sapien
tagaaaagtagttagcacaaagctg

SEQ ID NO: 221462 - DNA, 25 bp, Homo sapien
tattgtttatcacttattgcagtac

SEQ ID NO: 221463 - DNA, 25 bp, Homo sapien
caatacttggctctttccctaggtc

SEQ ID NO: 221464 - DNA, 25 bp, Homo sapien
tcctattgtttatcacttattgcag

SEQ ID NO: 221465 - DNA, 25 bp, Homo sapien
ctgctagtcctgcaatacttggctc

SEQ ID NO: 221466 - DNA, 25 bp, Homo sapien
gattcacgttacaactcctagttgg

SEQ ID NO: 221467 - DNA, 25 bp, Homo sapien
cgcagcaagaaatatgagtgaggcc

SEQ ID NO: 221468 - DNA, 25 bp, Homo sapien
gctgactctgccaagaatcttaaaa

SEQ ID NO: 221469 - DNA, 25 bp, Homo sapien
cctagttggctgaggattactctat

SEQ ID NO: 221470 - DNA, 25 bp, Homo sapien
cctggtgaatactaatattacctaa

SEQ ID NO: 221471 - DNA, 25 bp, Homo sapien
ttcttgcctgcggtaaatcttgcca

SEQ ID NO: 221472 - DNA, 25 bp, Homo sapien
tgtaatgaataagaacggcactgtt

SEQ ID NO: 221473 - DNA, 25 bp, Homo sapien
tagaggaaattctcagactggatgt

SEQ ID NO: 221474 - DNA, 25 bp, Homo sapien
ttggtaggccatgaacaggggaaag

SEQ ID NO: 221475 - DNA, 25 bp, Homo sapien
cttggtaggccatgaacaggggaaa

SEQ ID NO: 221476 - DNA, 25 bp, Homo sapien
tggtaggccatgaacaggggaaaga

SEQ ID NO: 221477 - DNA, 25 bp, Homo sapien
catttctccttaggttggcttcaga

SEQ ID NO: 221478 - DNA, 25 bp, Homo sapien
agaggactcaatcccccaagtgcag

SEQ ID NO: 221479 - DNA, 25 bp, Homo sapien
gcatgcaactcctgtagctttacca

SEQ ID NO: 221480 - DNA, 25 bp, Homo sapien
ggtgtgtagcactagaagagctgat

SEQ ID NO: 221481 - DNA, 25 bp, Homo sapien
ctttctatcacccgttttaaagatg

SEQ ID NO: 221482 - DNA, 25 bp, Homo sapien
tcaccacggatagtgaagtagggtg

SEQ ID NO: 221483 - DNA, 25 bp, Homo sapien
gatcaccacggatagtgaagtaggg

SEQ ID NO: 221484 - DNA, 25 bp, Homo sapien
cagatcaccacggatagtgaagtag

SEQ ID NO: 221485 - DNA, 25 bp, Homo sapien
ctcagatcaccacggatagtgaagt

SEQ ID NO: 221486 - DNA, 25 bp, Homo sapien
ccgccgccgccaatagcgccgccat

SEQ ID NO: 221487 - DNA, 25 bp, Homo sapien
gccgccgccgccaatagcgccgcca

SEQ ID NO: 221488 - DNA, 25 bp, Homo sapien
tgccgccgccgccaatagcgccgcc

SEQ ID NO: 221489 - DNA, 25 bp, Homo sapien
cgcaccccgcgcctctactgcccag

SEQ ID NO: 221490 - DNA, 25 bp, Homo sapien
tagctccgcaccccgcgcctctact

SEQ ID NO: 221491 - DNA, 25 bp, Homo sapien
cagaagcactacagctgccaggcct

SEQ ID NO: 221492 - DNA, 25 bp, Homo sapien
tctactgcccagaagcactacagct

SEQ ID NO: 221493 - DNA, 25 bp, Homo sapien
catgggttggaagatggcgtctccc

SEQ ID NO: 221494 - DNA, 25 bp, Homo sapien
ttggaagatggcgtctcccacagac

SEQ ID NO: 221495 - DNA, 25 bp, Homo sapien
gccacgtcacgtgacatgggttgga

SEQ ID NO: 221496 - DNA, 25 bp, Homo sapien
tggcgtctcccacagacggtaagag

SEQ ID NO: 221497 - DNA, 25 bp, Homo sapien
tttagcagtggggggttgtatacaa

SEQ ID NO: 221498 - DNA, 25 bp, Homo sapien
gacactaacgttaataagttctgat

SEQ ID NO: 221499 - DNA, 25 bp, Homo sapien
agcagtggggggttgtatacaaact

SEQ ID NO: 221500 - DNA, 25 bp, Homo sapien
tatacaaactttagtgacactaacg

SEQ ID NO: 221501 - DNA, 25 bp, Homo sapien
ggtttgaagtcatttaattcggcca

SEQ ID NO: 221502 - DNA, 25 bp, Homo sapien
tgaagtcatttaattcggccacctt

SEQ ID NO: 221503 - DNA, 25 bp, Homo sapien
aagtcatttaattcggccaccttca

SEQ ID NO: 221504 - DNA, 25 bp, Homo sapien
tttgaagtcatttaattcggccacc

SEQ ID NO: 221505 - DNA, 25 bp, Homo sapien
aaaccaaaactgtataagagaaatg

SEQ ID NO: 221506 - DNA, 25 bp, Homo sapien
aaccaaaactgtataagagaaatgc

SEQ ID NO: 221507 - DNA, 25 bp, Homo sapien
accaaaactgtataagagaaatgct

SEQ ID NO: 221508 - DNA, 25 bp, Homo sapien
acagctgagattgttcagaattatc

SEQ ID NO: 221509 - DNA, 25 bp, Homo sapien
tgccaaatgagtcccatgagcacag

SEQ ID NO: 221510 - DNA, 25 bp, Homo sapien
ccaaatgagtcccatgagcacagct

SEQ ID NO: 221511 - DNA, 25 bp, Homo sapien
agctgagattgttcagaattatctt

SEQ ID NO: 221512 - DNA, 25 bp, Homo sapien
ttccatagcattgctttgcaactga

SEQ ID NO: 221513 - DNA, 25 bp, Homo sapien
gcattgctttgcaactgattgccgt

SEQ ID NO: 221514 - DNA, 25 bp, Homo sapien
ttgcaactgattgccgttttccttg

SEQ ID NO: 221515 - DNA, 25 bp, Homo sapien
ttctttcaatttccatagcattgct

SEQ ID NO: 221516 - DNA, 25 bp, Homo sapien
gccatcaaccccacgacgattgttt

SEQ ID NO: 221517 - DNA, 25 bp, Homo sapien
aaacaatcgtcgtggggttgatggc

SEQ ID NO: 221518 - DNA, 25 bp, Homo sapien
cgtgaatttagctgacatgaaatag

SEQ ID NO: 221519 - DNA, 25 bp, Homo sapien
tgctgattaatcatataattctgta

SEQ ID NO: 221520 - DNA, 25 bp, Homo sapien
cttctgctgattaatcatataattc

SEQ ID NO: 221521 - DNA, 25 bp, Homo sapien
ctgctgattaatcatataattctgt

SEQ ID NO: 221522 - DNA, 25 bp, Homo sapien
tctgctgattaatcatataattctg

SEQ ID NO: 221523 - DNA, 25 bp, Homo sapien
tccaggctttgggtttaagaatgac

SEQ ID NO: 221524 - DNA, 25 bp, Homo sapien
caagagacgatttagttggccaaag

SEQ ID NO: 221525 - DNA, 25 bp, Homo sapien
tgttttcgggctgtcttcactgtag

SEQ ID NO: 221526 - DNA, 25 bp, Homo sapien
cccatactcaggatgtgcttgcata

SEQ ID NO: 221527 - DNA, 25 bp, Homo sapien
ctaaagcctcttatctgatgtctgg

SEQ ID NO: 221528 - DNA, 25 bp, Homo sapien
cattaactctcgagcattagaacaa

SEQ ID NO: 221529 - DNA, 25 bp, Homo sapien
tgcctcattaactctcgagcattag

SEQ ID NO: 221530 - DNA, 25 bp, Homo sapien
gtctggtgtaacctgctgtaagcag

SEQ ID NO: 221531 - DNA, 25 bp, Homo sapien
caaagtcatatgctttgagcttgtc

SEQ ID NO: 221532 - DNA, 25 bp, Homo sapien
tgctatctttgtccatggcattttt

SEQ ID NO: 221533 - DNA, 25 bp, Homo sapien
tgacaatgaaagtgtggcaaagtca

SEQ ID NO: 221534 - DNA, 25 bp, Homo sapien
tatgctttgagcttgtctcttacag

SEQ ID NO: 221535 - DNA, 25 bp, Homo sapien
tctgtggcctagtatgaatttgacc

SEQ ID NO: 221536 - DNA, 25 bp, Homo sapien
tagctttaccctgctaagcctagaa

SEQ ID NO: 221537 - DNA, 25 bp, Homo sapien
taagaaagccaccatcaagtgtctg

SEQ ID NO: 221538 - DNA, 25 bp, Homo sapien
gaatttgacctgcaccttgacaatg

SEQ ID NO: 221539 - DNA, 25 bp, Homo sapien
gcctttaagttgagacatcatgatg

SEQ ID NO: 221540 - DNA, 25 bp, Homo sapien
gaggttatgcgtggtattctcacat

SEQ ID NO: 221541 - DNA, 25 bp, Homo sapien
tgatgagataagactgcaccaggcc

SEQ ID NO: 221542 - DNA, 25 bp, Homo sapien
gcaccaggcctgatcggtacatgaa

SEQ ID NO: 221543 - DNA, 25 bp, Homo sapien
cattgccaaggtgaacatagctgag

SEQ ID NO: 221544 - DNA, 25 bp, Homo sapien
tggaggtccccacaaggctgaggtt

SEQ ID NO: 221545 - DNA, 25 bp, Homo sapien
cagaagagccacacggtgcaagaag

SEQ ID NO: 221546 - DNA, 25 bp, Homo sapien
gagccccaccactgaactgtaagga

SEQ ID NO: 221547 - DNA, 25 bp, Homo sapien
gacttgtaaggaaccttcagcctta

SEQ ID NO: 221548 - DNA, 25 bp, Homo sapien
taaggaaccttcagccttatttcca

SEQ ID NO: 221549 - DNA, 25 bp, Homo sapien
ttctggtgacttgtaaggaaccttc

SEQ ID NO: 221550 - DNA, 25 bp, Homo sapien
tctggtgacttgtaaggaaccttca

SEQ ID NO: 221551 - DNA, 25 bp, Homo sapien
aaaatctgccagatggacatcagca

SEQ ID NO: 221552 - DNA, 25 bp, Homo sapien
aatctgccagatggacatcagcagt

SEQ ID NO: 221553 - DNA, 25 bp, Homo sapien
aaaaatctgccagatggacatcagc

SEQ ID NO: 221554 - DNA, 25 bp, Homo sapien
aaatctgccagatggacatcagcag

SEQ ID NO: 221555 - DNA, 25 bp, Homo sapien
cttgtgggggaaagtactccatatt

SEQ ID NO: 221556 - DNA, 25 bp, Homo sapien
tctcttgaagatcttgtgggggaaa

SEQ ID NO: 221557 - DNA, 25 bp, Homo sapien
gatcttgtgggggaaagtactccat

SEQ ID NO: 221558 - DNA, 25 bp, Homo sapien
gaaagtactccatatttgcaaagct

SEQ ID NO: 221559 - DNA, 25 bp, Homo sapien
tagcagtaattacgggtcatcttca

SEQ ID NO: 221560 - DNA, 25 bp, Homo sapien
gtaattacgggtcatcttcatttct

SEQ ID NO: 221561 - DNA, 25 bp, Homo sapien
cagtaattacgggtcatcttcattt

SEQ ID NO: 221562 - DNA, 25 bp, Homo sapien
cgtagcagtaattacgggtcatctt

SEQ ID NO: 221563 - DNA, 25 bp, Homo sapien
atctgacactgagctggagtgtggt

SEQ ID NO: 221564 - DNA, 25 bp, Homo sapien
tggagatctgacactgagctggagt

SEQ ID NO: 221565 - DNA, 25 bp, Homo sapien
tgatcacttagtgatacttttcctg

SEQ ID NO: 221566 - DNA, 25 bp, Homo sapien
gtgatacttttcctgtggagatctg

SEQ ID NO: 221567 - DNA, 25 bp, Homo sapien
agccacagggaaacgttgcacattc

SEQ ID NO: 221568 - DNA, 25 bp, Homo sapien
tgctgtacaccagctctgcgccaga

SEQ ID NO: 221569 - DNA, 25 bp, Homo sapien
gctgtacaccagctctgcgccagag

SEQ ID NO: 221570 - DNA, 25 bp, Homo sapien
agagccacagggaaacgttgcacat

SEQ ID NO: 221571 - DNA, 25 bp, Homo sapien
gtgagaaatcaatctgtaccactga

SEQ ID NO: 221572 - DNA, 25 bp, Homo sapien
gaaatcaatctgtaccactgaatct

SEQ ID NO: 221573 - DNA, 25 bp, Homo sapien
atcaatctgtaccactgaatctttt

SEQ ID NO: 221574 - DNA, 25 bp, Homo sapien
gagaaatcaatctgtaccactgaat

SEQ ID NO: 221575 - DNA, 25 bp, Homo sapien
tgtagcaggtcggtaagaatcttcg

SEQ ID NO: 221576 - DNA, 25 bp, Homo sapien
tagcaggtcggtaagaatcttcgcc

SEQ ID NO: 221577 - DNA, 25 bp, Homo sapien
gtagcaggtcggtaagaatcttcgc

SEQ ID NO: 221578 - DNA, 25 bp, Homo sapien
cgtatatctcctgtatgggactggc

SEQ ID NO: 221579 - DNA, 25 bp, Homo sapien
tagggagcggctgtgtcatacattc

SEQ ID NO: 221580 - DNA, 25 bp, Homo sapien
gcaatttctctgtgcacaaaaaggg

SEQ ID NO: 221581 - DNA, 25 bp, Homo sapien
gactggcgagtaggaaaactttctc

SEQ ID NO: 221582 - DNA, 25 bp, Homo sapien
tggttttctggtccgctttgtcctc

SEQ ID NO: 221583 - DNA, 25 bp, Homo sapien
aaaccaactcaagtctgtaactgga

SEQ ID NO: 221584 - DNA, 25 bp, Homo sapien
tttaccgtcatcctattcaccagca

SEQ ID NO: 221585 - DNA, 25 bp, Homo sapien
tatctcactaaatgcggttgaagag

SEQ ID NO: 221586 - DNA, 25 bp, Homo sapien
cttctgcactaactccgtctccaag

SEQ ID NO: 221587 - DNA, 25 bp, Homo sapien
ggcgctttttcctctcgagcagctg

SEQ ID NO: 221588 - DNA, 25 bp, Homo sapien
gggcttcagacgataccaggtgtaa

SEQ ID NO: 221589 - DNA, 25 bp, Homo sapien
tcctggttggcgtgagtgctggcaa

SEQ ID NO: 221590 - DNA, 25 bp, Homo sapien
tttgcctggcgctttttcctctcga

SEQ ID NO: 221591 - DNA, 25 bp, Homo sapien
caaccgtaccgaatcacaaacacaa

SEQ ID NO: 221592 - DNA, 25 bp, Homo sapien
cagcatggcctgagccagcaaatag

SEQ ID NO: 221593 - DNA, 25 bp, Homo sapien
tagagaaaagcgatcaaaagcgatc

SEQ ID NO: 221594 - DNA, 25 bp, Homo sapien
tctcttctaattagcacaattccag

SEQ ID NO: 221595 - DNA, 25 bp, Homo sapien
ctatttgcacccaagccattaaggc

SEQ ID NO: 221596 - DNA, 25 bp, Homo sapien
tacccttgtgcatttctggtcagga

SEQ ID NO: 221597 - DNA, 25 bp, Homo sapien
gaaccaagcaggttgtactggccca

SEQ ID NO: 221598 - DNA, 25 bp, Homo sapien
cagtcacaagctatgcctatttgca

SEQ ID NO: 221599 - DNA, 25 bp, Homo sapien
ggagcagacagccaaggaaatattg

SEQ ID NO: 221600 - DNA, 25 bp, Homo sapien
catcatggagcagacagccaaggaa

SEQ ID NO: 221601 - DNA, 25 bp, Homo sapien
cctcaggggccatcatggagcagac

SEQ ID NO: 221602 - DNA, 25 bp, Homo sapien
caaggaaatattgtccacagtacca

SEQ ID NO: 221603 - DNA, 25 bp, Homo sapien
aactgtacccctcctgataggacct

SEQ ID NO: 221604 - DNA, 25 bp, Homo sapien
ccatccctggcagaacctcatttcc

SEQ ID NO: 221605 - DNA, 25 bp, Homo sapien
gtactgtatattgcagcaatttcaa

SEQ ID NO: 221606 - DNA, 25 bp, Homo sapien
caaatggcaccattaaagattttat

SEQ ID NO: 221607 - DNA, 25 bp, Homo sapien
gggagtcatcgaggctgggccttgt

SEQ ID NO: 221608 - DNA, 25 bp, Homo sapien
aacttcggtatagcaggggcatctg

SEQ ID NO: 221609 - DNA, 25 bp, Homo sapien
tgggagtcatcgaggctgggccttg

SEQ ID NO: 221610 - DNA, 25 bp, Homo sapien
ctggcagggaacttcggtatagcag

SEQ ID NO: 221611 - DNA, 25 bp, Homo sapien
catgtgattctagctttgcccttga

SEQ ID NO: 221612 - DNA, 25 bp, Homo sapien
taatagtaatggctgctgtgggcgc

SEQ ID NO: 221613 - DNA, 25 bp, Homo sapien
gggcgccgactgttcatcatgtgat

SEQ ID NO: 221614 - DNA, 25 bp, Homo sapien
cacacatttacaacagcttaatagc

SEQ ID NO: 221615 - DNA, 25 bp, Homo sapien
tctcatgataagtcagggacatgac

SEQ ID NO: 221616 - DNA, 25 bp, Homo sapien
gctggcatctggctcatcgtggatg

SEQ ID NO: 221617 - DNA, 25 bp, Homo sapien
catcgtggatgtctcatgataagtc

SEQ ID NO: 221618 - DNA, 25 bp, Homo sapien
gacatgacagatgccattaacataa

SEQ ID NO: 221619 - DNA, 25 bp, Homo sapien
tcaaccgtttacacagaggtgccat

SEQ ID NO: 221620 - DNA, 25 bp, Homo sapien
tcccttgttcaaccgtttacacaga

SEQ ID NO: 221621 - DNA, 25 bp, Homo sapien
tgttcaaccgtttacacagaggtgc

SEQ ID NO: 221622 - DNA, 25 bp, Homo sapien
tctcccttgttcaaccgtttacaca

SEQ ID NO: 221623 - DNA, 25 bp, Homo sapien
caaatctgctttaaaccagaccaag

SEQ ID NO: 221624 - DNA, 25 bp, Homo sapien
tcctccagcgatcgaaaaatgtcca

SEQ ID NO: 221625 - DNA, 25 bp, Homo sapien
cgggatcgggtctctcggaccctat

SEQ ID NO: 221626 - DNA, 25 bp, Homo sapien
agaaacggaagaagcggcgacacag

SEQ ID NO: 221627 - DNA, 25 bp, Homo sapien
tgccctctgcggaagctcacagccc

SEQ ID NO: 221628 - DNA, 25 bp, Homo sapien
tctctccttggtactgacttactga

SEQ ID NO: 221629 - DNA, 25 bp, Homo sapien
gataaccctgtttcctactgccctc

SEQ ID NO: 221630 - DNA, 25 bp, Homo sapien
ccacatagtagtcggcatttgcctc

SEQ ID NO: 221631 - DNA, 25 bp, Homo sapien
tttatcccaggacccatcaaagggc

SEQ ID NO: 221632 - DNA, 25 bp, Homo sapien
caagtctatctttcccataagacgg

SEQ ID NO: 221633 - DNA, 25 bp, Homo sapien
tttcttcaagggtggcactacatct

SEQ ID NO: 221634 - DNA, 25 bp, Homo sapien
gggcctgaccctcaatccattattg

SEQ ID NO: 221635 - DNA, 25 bp, Homo sapien
gctagggccagatccggtgtcagct

SEQ ID NO: 221636 - DNA, 25 bp, Homo sapien
cagagctagggccagatccggtgtc

SEQ ID NO: 221637 - DNA, 25 bp, Homo sapien
tgacaccaggtccagagctagggcc

SEQ ID NO: 221638 - DNA, 25 bp, Homo sapien
ccagatccggtgtcagctctaccat

SEQ ID NO: 221639 - DNA, 25 bp, Homo sapien
cctatgccagtgtcaacattagtac

SEQ ID NO: 221640 - DNA, 25 bp, Homo sapien
agtcagctctaaagctggagtcagc

SEQ ID NO: 221641 - DNA, 25 bp, Homo sapien
gctccaaagctagagcctgctccgg

SEQ ID NO: 221642 - DNA, 25 bp, Homo sapien
ctccagatccagtgctatctccaga

SEQ ID NO: 221643 - DNA, 25 bp, Homo sapien
tccagctctagagctacagacagct

SEQ ID NO: 221644 - DNA, 25 bp, Homo sapien
tagagctacagacagctctgcacct

SEQ ID NO: 221645 - DNA, 25 bp, Homo sapien
agctacagacagctctgcacctact

SEQ ID NO: 221646 - DNA, 25 bp, Homo sapien
gctctagagctacagacagctctgc

SEQ ID NO: 221647 - DNA, 25 bp, Homo sapien
gaagctagagccagctctagcacca

SEQ ID NO: 221648 - DNA, 25 bp, Homo sapien
cgctggcactaaaggaagttctagg

SEQ ID NO: 221649 - DNA, 25 bp, Homo sapien
gctagagccagctccatcactagct

SEQ ID NO: 221650 - DNA, 25 bp, Homo sapien
ctatagccagatttagtgccagctc

SEQ ID NO: 221651 - DNA, 25 bp, Homo sapien
agccagttgtagtgccagccacaga

SEQ ID NO: 221652 - DNA, 25 bp, Homo sapien
cagctccagagctagacagttctga

SEQ ID NO: 221653 - DNA, 25 bp, Homo sapien
cctccagagctaaagccagtgctag

SEQ ID NO: 221654 - DNA, 25 bp, Homo sapien
tgtcagctctagagctagagtcagc

SEQ ID NO: 221655 - DNA, 25 bp, Homo sapien
aaaatctcagttgagtgccagtccg

SEQ ID NO: 221656 - DNA, 25 bp, Homo sapien
tgcaggcaacagcatctagccgtaa

SEQ ID NO: 221657 - DNA, 25 bp, Homo sapien
gagtgccagtccgtctaactcctca

SEQ ID NO: 221658 - DNA, 25 bp, Homo sapien
gcatctagccgtaagttaataacac

SEQ ID NO: 221659 - DNA, 25 bp, Homo sapien
aatacatagacaactgaactggagg

SEQ ID NO: 221660 - DNA, 25 bp, Homo sapien
tcatttgggttaaggtagggcagac

SEQ ID NO: 221661 - DNA, 25 bp, Homo sapien
gaggactttgggcacagtaactcca

SEQ ID NO: 221662 - DNA, 25 bp, Homo sapien
ggttctaactacacaacactggcaa

SEQ ID NO: 221663 - DNA, 25 bp, Homo sapien
cctgggagactgaacactgggagat

SEQ ID NO: 221664 - DNA, 25 bp, Homo sapien
tctatgtggcgaacctgagctcgat

SEQ ID NO: 221665 - DNA, 25 bp, Homo sapien
cacagaaacctagacctgggctcag

SEQ ID NO: 221666 - DNA, 25 bp, Homo sapien
catgtggctcctgcacgggatctat

SEQ ID NO: 221667 - DNA, 25 bp, Homo sapien
tcattccactttgattctcatcagc

SEQ ID NO: 221668 - DNA, 25 bp, Homo sapien
cacagagtttcagaaccaaggaatg

SEQ ID NO: 221669 - DNA, 25 bp, Homo sapien
ccaccaccacatggagatcaggctg

SEQ ID NO: 221670 - DNA, 25 bp, Homo sapien
caagagaccaccaccacatggagat

SEQ ID NO: 221671 - DNA, 25 bp, Homo sapien
gagaccaccaccacatggagatcag

SEQ ID NO: 221672 - DNA, 25 bp, Homo sapien
accaccacatggagatcaggctgcc

SEQ ID NO: 221673 - DNA, 25 bp, Homo sapien
gaggaggccactcggttctctctgc

SEQ ID NO: 221674 - DNA, 25 bp, Homo sapien
gctactgctactccccgttttgagg

SEQ ID NO: 221675 - DNA, 25 bp, Homo sapien
aggccactcggttctctctgctact

SEQ ID NO: 221676 - DNA, 25 bp, Homo sapien
tctgctactgctactccccgttttg

SEQ ID NO: 221677 - DNA, 25 bp, Homo sapien
aggccatccttgtgagcacgggtac

SEQ ID NO: 221678 - DNA, 25 bp, Homo sapien
tcaggccatccttgtgagcacgggt

SEQ ID NO: 221679 - DNA, 25 bp, Homo sapien
caggccatccttgtgagcacgggta

SEQ ID NO: 221680 - DNA, 25 bp, Homo sapien
tgtcccacactgatgaacgtcatcc

SEQ ID NO: 221681 - DNA, 25 bp, Homo sapien
cttcctctgtcagggcactggtggc

SEQ ID NO: 221682 - DNA, 25 bp, Homo sapien
gatgcgatagagctcgctctccact

SEQ ID NO: 221683 - DNA, 25 bp, Homo sapien
gctgctggccgatgcgatagagctc

SEQ ID NO: 221684 - DNA, 25 bp, Homo sapien
tgagcagctgcatgaaatctctcag

SEQ ID NO: 221685 - DNA, 25 bp, Homo sapien
agcagagggccagactctccaaggg

SEQ ID NO: 221686 - DNA, 25 bp, Homo sapien
ttctatagataagcaccagccactc

SEQ ID NO: 221687 - DNA, 25 bp, Homo sapien
caagggaatagcctgtgagcagctg

SEQ ID NO: 221688 - DNA, 25 bp, Homo sapien
caggtagaagagtcgggcaaaggag

SEQ ID NO: 221689 - DNA, 25 bp, Homo sapien
gagtcgggcaaaggagagccgttgc

SEQ ID NO: 221690 - DNA, 25 bp, Homo sapien
agagccgttgcatctcccccgggga

SEQ ID NO: 221691 - DNA, 25 bp, Homo sapien
ctgcgtacttcggctgcaggtagaa

SEQ ID NO: 221692 - DNA, 25 bp, Homo sapien
ttccctttcgaccataggcctacag

SEQ ID NO: 221693 - DNA, 25 bp, Homo sapien
tctgggtaggaagaggtttctctgc

SEQ ID NO: 221694 - DNA, 25 bp, Homo sapien
tatagcttggcttttacctagaatg

SEQ ID NO: 221695 - DNA, 25 bp, Homo sapien
tggcttttacctagaatggtctggg

SEQ ID NO: 221696 - DNA, 25 bp, Homo sapien
ctgtctttatggtggggctatctct

SEQ ID NO: 221697 - DNA, 25 bp, Homo sapien
gggtcaggagccgttccattccttg

SEQ ID NO: 221698 - DNA, 25 bp, Homo sapien
cgttccattccttgacagggaccct

SEQ ID NO: 221699 - DNA, 25 bp, Homo sapien
gagccgttccattccttgacaggga

SEQ ID NO: 221700 - DNA, 25 bp, Homo sapien
gttccagtccacctgctggtccagg

SEQ ID NO: 221701 - DNA, 25 bp, Homo sapien
ggccctctgtccttgccaccaagtt

SEQ ID NO: 221702 - DNA, 25 bp, Homo sapien
agttccagtccacctgctggtccag

SEQ ID NO: 221703 - DNA, 25 bp, Homo sapien
cctctgtccttgccaccaagttgga

SEQ ID NO: 221704 - DNA, 25 bp, Homo sapien
acacctctaagacaaatatatgccc

SEQ ID NO: 221705 - DNA, 25 bp, Homo sapien
gtccatgaaatggccagccctgcta

SEQ ID NO: 221706 - DNA, 25 bp, Homo sapien
tgctacctgccatcatggggaacct

SEQ ID NO: 221707 - DNA, 25 bp, Homo sapien
cagtggcataccaaggcgggggact

SEQ ID NO: 221708 - DNA, 25 bp, Homo sapien
gctcgggtcctgagggtccctctcc

SEQ ID NO: 221709 - DNA, 25 bp, Homo sapien
ggctcgggtcctgagggtccctctc

SEQ ID NO: 221710 - DNA, 25 bp, Homo sapien
tgggctcgggtcctgagggtccctc

SEQ ID NO: 221711 - DNA, 25 bp, Homo sapien
aacctcaagatcctctcatcatcgg

SEQ ID NO: 221712 - DNA, 25 bp, Homo sapien
ctcctggctggtcaaaatagacagg

SEQ ID NO: 221713 - DNA, 25 bp, Homo sapien
gctggtcaaaatagacagggcaagg

SEQ ID NO: 221714 - DNA, 25 bp, Homo sapien
ggtcaaaatagacagggcaaggctg

SEQ ID NO: 221715 - DNA, 25 bp, Homo sapien
cctggctggtcaaaatagacagggc

SEQ ID NO: 221716 - DNA, 25 bp, Homo sapien
ttccttgaatcagcggcctggctgg

SEQ ID NO: 221717 - DNA, 25 bp, Homo sapien
gatgaggccacagtcaggtagagca

SEQ ID NO: 221718 - DNA, 25 bp, Homo sapien
gagcagggacaaccatgacagaagg

SEQ ID NO: 221719 - DNA, 25 bp, Homo sapien
gaaggagaggacatgacctaaggag

SEQ ID NO: 221720 - DNA, 25 bp, Homo sapien
tagacctccttcaggggatatatca

SEQ ID NO: 221721 - DNA, 25 bp, Homo sapien
tgagtcggggtagacctccttcagg

SEQ ID NO: 221722 - DNA, 25 bp, Homo sapien
gggtagacctccttcaggggatata

SEQ ID NO: 221723 - DNA, 25 bp, Homo sapien
agacctccttcaggggatatatcac

SEQ ID NO: 221724 - DNA, 25 bp, Homo sapien
agacagcagggcaaggtccctacaa

SEQ ID NO: 221725 - DNA, 25 bp, Homo sapien
gagtagtgggcccaatccatggatg

SEQ ID NO: 221726 - DNA, 25 bp, Homo sapien
cagaatccgaccttgggtgtttgac

SEQ ID NO: 221727 - DNA, 25 bp, Homo sapien
gtatttggcgtgagtccttgcccca

SEQ ID NO: 221728 - DNA, 25 bp, Homo sapien
tgccctgactctaggacctgagact

SEQ ID NO: 221729 - DNA, 25 bp, Homo sapien
cttttgccctgactctaggacctga

SEQ ID NO: 221730 - DNA, 25 bp, Homo sapien
tttgccctgactctaggacctgaga

SEQ ID NO: 221731 - DNA, 25 bp, Homo sapien
ccctgactctaggacctgagacttg

SEQ ID NO: 221732 - DNA, 25 bp, Homo sapien
ggagtgagccccctgaactagactg

SEQ ID NO: 221733 - DNA, 25 bp, Homo sapien
ctgtgggtgggcggggttgaggagg

SEQ ID NO: 221734 - DNA, 25 bp, Homo sapien
gagggaggagtgagccccctgaact

SEQ ID NO: 221735 - DNA, 25 bp, Homo sapien
agtgagccccctgaactagactgac

SEQ ID NO: 221736 - DNA, 25 bp, Homo sapien
tttgtggcaggaatagcaccccatg

SEQ ID NO: 221737 - DNA, 25 bp, Homo sapien
tgctcccgaagggtcccgtcagtga

SEQ ID NO: 221738 - DNA, 25 bp, Homo sapien
ccaaagtccgtcagcatctgcactg

SEQ ID NO: 221739 - DNA, 25 bp, Homo sapien
ggtcccgtcagtgaagaatggcttt

SEQ ID NO: 221740 - DNA, 25 bp, Homo sapien
ctgcagagcccacagaaacctccat

SEQ ID NO: 221741 - DNA, 25 bp, Homo sapien
gccagtgcccgtgttgcctgtgatg

SEQ ID NO: 221742 - DNA, 25 bp, Homo sapien
ccagaacccggagcaaggaggtctt

SEQ ID NO: 221743 - DNA, 25 bp, Homo sapien
cagagatggagacccgctcaaggag

SEQ ID NO: 221744 - DNA, 25 bp, Homo sapien
tgtccctcggagatctttaggctca

SEQ ID NO: 221745 - DNA, 25 bp, Homo sapien
tatgatgtggccactgtccaagcac

SEQ ID NO: 221746 - DNA, 25 bp, Homo sapien
ttaacacaacagatgccggaacagc

SEQ ID NO: 221747 - DNA, 25 bp, Homo sapien
gctgacaacttgatcgtggaccata

SEQ ID NO: 221748 - DNA, 25 bp, Homo sapien
gaaaagcaagttgagtgtaggccct

SEQ ID NO: 221749 - DNA, 25 bp, Homo sapien
aggatctcgcagtcctgtgacttca

SEQ ID NO: 221750 - DNA, 25 bp, Homo sapien
tcgcccaggatctcgcagtcctgtg

SEQ ID NO: 221751 - DNA, 25 bp, Homo sapien
gtgtccaagccccactcgctctcgc

SEQ ID NO: 221752 - DNA, 25 bp, Homo sapien
cccaggatctcgcagtcctgtgact

SEQ ID NO: 221753 - DNA, 25 bp, Homo sapien
cagggtctgggagccaggtgaaggt

SEQ ID NO: 221754 - DNA, 25 bp, Homo sapien
aaggtgaactccttttcctatctca

SEQ ID NO: 221755 - DNA, 25 bp, Homo sapien
tctgggagccaggtgaaggtgaact

SEQ ID NO: 221756 - DNA, 25 bp, Homo sapien
aaagaaaatctgaggcagggtctgg

SEQ ID NO: 221757 - DNA, 25 bp, Homo sapien
tcgatgagctgggtgaagcagctga

SEQ ID NO: 221758 - DNA, 25 bp, Homo sapien
catctgagagcgtcgtggacaggtc

SEQ ID NO: 221759 - DNA, 25 bp, Homo sapien
tggacaggtcgatgagctgggtgaa

SEQ ID NO: 221760 - DNA, 25 bp, Homo sapien
gcagctgatgaggtagatgcacaca

SEQ ID NO: 221761 - DNA, 25 bp, Homo sapien
gatgggaagaggtcaagcaggtctc

SEQ ID NO: 221762 - DNA, 25 bp, Homo sapien
aggtctcgactcgagcccacagaca

SEQ ID NO: 221763 - DNA, 25 bp, Homo sapien
gaggtcaagcaggtctcgactcgag

SEQ ID NO: 221764 - DNA, 25 bp, Homo sapien
aagcaggtctcgactcgagcccaca

SEQ ID NO: 221765 - DNA, 25 bp, Homo sapien
gatgacaacgtaactcaggatgctg

SEQ ID NO: 221766 - DNA, 25 bp, Homo sapien
gggattgcgatgacaacgtaactca

SEQ ID NO: 221767 - DNA, 25 bp, Homo sapien
ggtctccatagaccccgctgaaaat

SEQ ID NO: 221768 - DNA, 25 bp, Homo sapien
ctgcccagatagtcaaaggtgttga

SEQ ID NO: 221769 - DNA, 25 bp, Homo sapien
gacacccaggaaccatccacatgcc

SEQ ID NO: 221770 - DNA, 25 bp, Homo sapien
gtgagacacccaggaaccatccaca

SEQ ID NO: 221771 - DNA, 25 bp, Homo sapien
ctgtgagacacccaggaaccatcca

SEQ ID NO: 221772 - DNA, 25 bp, Homo sapien
gagacacccaggaaccatccacatg

SEQ ID NO: 221773 - DNA, 25 bp, Homo sapien
ccttcatcatggcacatttatcctt

SEQ ID NO: 221774 - DNA, 25 bp, Homo sapien
cctcatccccggttaattccttcat

SEQ ID NO: 221775 - DNA, 25 bp, Homo sapien
ttcatcatggcacatttatccttgc

SEQ ID NO: 221776 - DNA, 25 bp, Homo sapien
tcatccccggttaattccttcatca

SEQ ID NO: 221777 - DNA, 25 bp, Homo sapien
cagtccaaccccatggttcccactt

SEQ ID NO: 221778 - DNA, 25 bp, Homo sapien
cctcatgtgctccacatgcccagct

SEQ ID NO: 221779 - DNA, 25 bp, Homo sapien
gcagcctgcggtctgtcctcatgtg

SEQ ID NO: 221780 - DNA, 25 bp, Homo sapien
tctgcagcctgcggtctgtcctcat

SEQ ID NO: 221781 - DNA, 25 bp, Homo sapien
gcctgcggtctgtcctcatgtgctc

SEQ ID NO: 221782 - DNA, 25 bp, Homo sapien
caaggaaaggctgggatgtccacag

SEQ ID NO: 221783 - DNA, 25 bp, Homo sapien
ctgacaaggaaaggctgggatgtcc

SEQ ID NO: 221784 - DNA, 25 bp, Homo sapien
aggaaaggctgggatgtccacaggg

SEQ ID NO: 221785 - DNA, 25 bp, Homo sapien
gacaaggaaaggctgggatgtccac

SEQ ID NO: 221786 - DNA, 25 bp, Homo sapien
tggagaggttcagccaggttggggg

SEQ ID NO: 221787 - DNA, 25 bp, Homo sapien
gagaggttcagccaggttggggggc

SEQ ID NO: 221788 - DNA, 25 bp, Homo sapien
ctggagaggttcagccaggttgggg

SEQ ID NO: 221789 - DNA, 25 bp, Homo sapien
cacagagcggtcactaggtgtacca

SEQ ID NO: 221790 - DNA, 25 bp, Homo sapien
gaatcaggagtactaagtgtgccct

SEQ ID NO: 221791 - DNA, 25 bp, Homo sapien
tgtctactggtagcgcccattcacg

SEQ ID NO: 221792 - DNA, 25 bp, Homo sapien
tgaggagctctcagtccagagggca

SEQ ID NO: 221793 - DNA, 25 bp, Homo sapien
ttcttggtgccctcaagtggtggag

SEQ ID NO: 221794 - DNA, 25 bp, Homo sapien
tattcttggtgccctcaagtggtgg

SEQ ID NO: 221795 - DNA, 25 bp, Homo sapien
cagtattcttggtgccctcaagtgg

SEQ ID NO: 221796 - DNA, 25 bp, Homo sapien
agtattcttggtgccctcaagtggt

SEQ ID NO: 221797 - DNA, 25 bp, Homo sapien
gcaaacccctggacctaaggatgag

SEQ ID NO: 221798 - DNA, 25 bp, Homo sapien
gatgtcttacagtcaccagcaagag

SEQ ID NO: 221799 - DNA, 25 bp, Homo sapien
catttgacaatttcaggccccacgc

SEQ ID NO: 221800 - DNA, 25 bp, Homo sapien
gagaccagacgcttggctccattag

SEQ ID NO: 221801 - DNA, 25 bp, Homo sapien
tccgcattcacccgaatctgcatgt

SEQ ID NO: 221802 - DNA, 25 bp, Homo sapien
tcacccgaatctgcatgtgcttgaa

SEQ ID NO: 221803 - DNA, 25 bp, Homo sapien
cacccgaatctgcatgtgcttgaac

SEQ ID NO: 221804 - DNA, 25 bp, Homo sapien
aggctccgcattcacccgaatctgc

SEQ ID NO: 221805 - DNA, 25 bp, Homo sapien
gatgcaccagcttcatcacaatggg

SEQ ID NO: 221806 - DNA, 25 bp, Homo sapien
cacaatggggcccatcaaagttttg

SEQ ID NO: 221807 - DNA, 25 bp, Homo sapien
ttgttcaccacggtccccaggatga

SEQ ID NO: 221808 - DNA, 25 bp, Homo sapien
gatgaaatacccgaagatgctcaca

SEQ ID NO: 221809 - DNA, 25 bp, Homo sapien
tcaggtagcccctgtccaatctgag

SEQ ID NO: 221810 - DNA, 25 bp, Homo sapien
tctgagtggcccaatgggccctctg

SEQ ID NO: 221811 - DNA, 25 bp, Homo sapien
tctgctcctatgtgggggcatctgg

SEQ ID NO: 221812 - DNA, 25 bp, Homo sapien
cctgtccaatctgagtggcccaatg

SEQ ID NO: 221813 - DNA, 25 bp, Homo sapien
ttggaagcactggtaagtgtagtag

SEQ ID NO: 221814 - DNA, 25 bp, Homo sapien
gaagcactggtaagtgtagtagacg

SEQ ID NO: 221815 - DNA, 25 bp, Homo sapien
agcactggtaagtgtagtagacgag

SEQ ID NO: 221816 - DNA, 25 bp, Homo sapien
taagtgtagtagacgagggtgaacg

SEQ ID NO: 221817 - DNA, 25 bp, Homo sapien
ctgagctgccggcagaatcgctcca

SEQ ID NO: 221818 - DNA, 25 bp, Homo sapien
tgagctgccggcagaatcgctccac

SEQ ID NO: 221819 - DNA, 25 bp, Homo sapien
ctgccggcagaatcgctccacgtcc

SEQ ID NO: 221820 - DNA, 25 bp, Homo sapien
agctgccggcagaatcgctccacgt

SEQ ID NO: 221821 - DNA, 25 bp, Homo sapien
tatgtctcatctcaccactagggcc

SEQ ID NO: 221822 - DNA, 25 bp, Homo sapien
gatgtgaatcctagactgagtcctg

SEQ ID NO: 221823 - DNA, 25 bp, Homo sapien
tgaacactgaccctatgggaagagg

SEQ ID NO: 221824 - DNA, 25 bp, Homo sapien
tattcccaatgagtgacgtgacctt

SEQ ID NO: 221825 - DNA, 25 bp, Homo sapien
catttgaaaacgactgcagatgatc

SEQ ID NO: 221826 - DNA, 25 bp, Homo sapien
tcttctttttagctgcctattcaca

SEQ ID NO: 221827 - DNA, 25 bp, Homo sapien
cacacagagtgtagaaaggactgag

SEQ ID NO: 221828 - DNA, 25 bp, Homo sapien
tagctgcctattcacagccctgcag

SEQ ID NO: 221829 - DNA, 25 bp, Homo sapien
cacggccccggaagtagaggcggtg

SEQ ID NO: 221830 - DNA, 25 bp, Homo sapien
gggttatcgatgtcatcccgcagca

SEQ ID NO: 221831 - DNA, 25 bp, Homo sapien
ttgagggtgtagtacgcacggcccc

SEQ ID NO: 221832 - DNA, 25 bp, Homo sapien
ttgcaggtgaactgatcaaagctct

SEQ ID NO: 221833 - DNA, 25 bp, Homo sapien
tgtgcagtgggggaagcaaggggaa

SEQ ID NO: 221834 - DNA, 25 bp, Homo sapien
ctgtgcagtgggggaagcaagggga

SEQ ID NO: 221835 - DNA, 25 bp, Homo sapien
gcaaggggaagggagagatggcttc

SEQ ID NO: 221836 - DNA, 25 bp, Homo sapien
gaagcaaggggaagggagagatggc

SEQ ID NO: 221837 - DNA, 25 bp, Homo sapien
gattactccgtccactcagcacttt

SEQ ID NO: 221838 - DNA, 25 bp, Homo sapien
tttttaaatcatcgagtcatgggac

SEQ ID NO: 221839 - DNA, 25 bp, Homo sapien
gctcaaagctcaaggctcgcaagag

SEQ ID NO: 221840 - DNA, 25 bp, Homo sapien
tattaaagggcttaccagaggcaag

SEQ ID NO: 221841 - DNA, 25 bp, Homo sapien
ttcagaacaatgagcatgacagcca

SEQ ID NO: 221842 - DNA, 25 bp, Homo sapien
gggatcaagccaacctggtagatca

SEQ ID NO: 221843 - DNA, 25 bp, Homo sapien
tcccaggaccccatagtactgactg

SEQ ID NO: 221844 - DNA, 25 bp, Homo sapien
tgtcagagtcttaaacccttccaag

SEQ ID NO: 221845 - DNA, 25 bp, Homo sapien
gagaaattgcagatctaacctgggc

SEQ ID NO: 221846 - DNA, 25 bp, Homo sapien
ttcagtatctgcaggaaccgctgga

SEQ ID NO: 221847 - DNA, 25 bp, Homo sapien
ggagaaattgcagatctaacctggg

SEQ ID NO: 221848 - DNA, 25 bp, Homo sapien
tatctgcaggaaccgctggagaaat

SEQ ID NO: 221849 - DNA, 25 bp, Homo sapien
gtggctgtctgaaaaggggagtgaa

SEQ ID NO: 221850 - DNA, 25 bp, Homo sapien
gagtggctgtctgaaaaggggagtg

SEQ ID NO: 221851 - DNA, 25 bp, Homo sapien
gctgtctgaaaaggggagtgaaagg

SEQ ID NO: 221852 - DNA, 25 bp, Homo sapien
tggctgtctgaaaaggggagtgaaa

SEQ ID NO: 221853 - DNA, 25 bp, Homo sapien
ctcaattttgtgcacctgaggttct

SEQ ID NO: 221854 - DNA, 25 bp, Homo sapien
tgagaaggatcaactcaattttgtg

SEQ ID NO: 221855 - DNA, 25 bp, Homo sapien
caattttgtgcacctgaggttcttc

SEQ ID NO: 221856 - DNA, 25 bp, Homo sapien
ggatcaactcaattttgtgcacctg

SEQ ID NO: 221857 - DNA, 25 bp, Homo sapien
caggagatggcacaagtccggccaa

SEQ ID NO: 221858 - DNA, 25 bp, Homo sapien
gagatggcacaagtccggccaagaa

SEQ ID NO: 221859 - DNA, 25 bp, Homo sapien
gatggcacaagtccggccaagaacg

SEQ ID NO: 221860 - DNA, 25 bp, Homo sapien
cacaagtccggccaagaacggaggg

SEQ ID NO: 221861 - DNA, 25 bp, Homo sapien
gggcggacgccccttcgagagctcc

SEQ ID NO: 221862 - DNA, 25 bp, Homo sapien
agggcggacgccccttcgagagctc

SEQ ID NO: 221863 - DNA, 25 bp, Homo sapien
ggcggacgccccttcgagagctcct

SEQ ID NO: 221864 - DNA, 25 bp, Homo sapien
cggacgccccttcgagagctcctct

SEQ ID NO: 221865 - DNA, 25 bp, Homo sapien
cattccctacagcccggaactcctg

SEQ ID NO: 221866 - DNA, 25 bp, Homo sapien
cggaactcctgctcccaaacctcct

SEQ ID NO: 221867 - DNA, 25 bp, Homo sapien
acagcccggaactcctgctcccaaa

SEQ ID NO: 221868 - DNA, 25 bp, Homo sapien
tcctgctcccaaacctcctccccga

SEQ ID NO: 221869 - DNA, 25 bp, Homo sapien
cagctccgggcgcgggccccgcgac

SEQ ID NO: 221870 - DNA, 25 bp, Homo sapien
ctggcgccagctccgggcgcgggcc

SEQ ID NO: 221871 - DNA, 25 bp, Homo sapien
gcgccagctccgggcgcgggccccg

SEQ ID NO: 221872 - DNA, 25 bp, Homo sapien
cgggcgcgggccccgcgaccgccat

SEQ ID NO: 221873 - DNA, 25 bp, Homo sapien
ctagttcagtactgggtagagtccg

SEQ ID NO: 221874 - DNA, 25 bp, Homo sapien
gagacccgagggactctggagccca

SEQ ID NO: 221875 - DNA, 25 bp, Homo sapien
cccggctaccacagagacggcgttt

SEQ ID NO: 221876 - DNA, 25 bp, Homo sapien
cagctgcccctagttcagtactggg

SEQ ID NO: 221877 - DNA, 25 bp, Homo sapien
aatagctgtctttagataatgggat

SEQ ID NO: 221878 - DNA, 25 bp, Homo sapien
gattagaacaaaatatactgagatg

SEQ ID NO: 221879 - DNA, 25 bp, Homo sapien
aactggattagaacaaaatatactg

SEQ ID NO: 221880 - DNA, 25 bp, Homo sapien
taaagagaatgcttaacttgtgtaa

SEQ ID NO: 221881 - DNA, 25 bp, Homo sapien
tcacttcatttttcttgtataaaaa

SEQ ID NO: 221882 - DNA, 25 bp, Homo sapien
tgtataaaaaccctatgttgtagcc

SEQ ID NO: 221883 - DNA, 25 bp, Homo sapien
tataaaaaccctatgttgtagccac

SEQ ID NO: 221884 - DNA, 25 bp, Homo sapien
cttgtataaaaaccctatgttgtag

SEQ ID NO: 221885 - DNA, 25 bp, Homo sapien
gcttgccagtcttgttctcccagca

SEQ ID NO: 221886 - DNA, 25 bp, Homo sapien
cagcagcctctgcttatggggacaa

SEQ ID NO: 221887 - DNA, 25 bp, Homo sapien
ccactgcaccgagactctagtgtgg

SEQ ID NO: 221888 - DNA, 25 bp, Homo sapien
gggtccactgcaccgagactctagt

SEQ ID NO: 221889 - DNA, 25 bp, Homo sapien
caggatgatggccccgcagatggca

SEQ ID NO: 221890 - DNA, 25 bp, Homo sapien
ggccaggatgatggccccgcagatg

SEQ ID NO: 221891 - DNA, 25 bp, Homo sapien
gcagatggcagtggccacctccttg

SEQ ID NO: 221892 - DNA, 25 bp, Homo sapien
tggccaggatgatggccccgcagat

SEQ ID NO: 221893 - DNA, 25 bp, Homo sapien
tcttcatggccttgagcaagcggcc

SEQ ID NO: 221894 - DNA, 25 bp, Homo sapien
cagggaaaggtcaatgatctcagat

SEQ ID NO: 221895 - DNA, 25 bp, Homo sapien
tcatggccttgagcaagcggcccag

SEQ ID NO: 221896 - DNA, 25 bp, Homo sapien
gatcttcatggccttgagcaagcgg

SEQ ID NO: 221897 - DNA, 25 bp, Homo sapien
tccgcggaagccaccattgttcccc

SEQ ID NO: 221898 - DNA, 25 bp, Homo sapien
ccattgttccccatcccagtgcccc

SEQ ID NO: 221899 - DNA, 25 bp, Homo sapien
caccattgttccccatcccagtgcc

SEQ ID NO: 221900 - DNA, 25 bp, Homo sapien
agccaccattgttccccatcccagt

SEQ ID NO: 221901 - DNA, 25 bp, Homo sapien
cagttattttgagccaccttcttag

SEQ ID NO: 221902 - DNA, 25 bp, Homo sapien
aggaagcagttattttgagccacct

SEQ ID NO: 221903 - DNA, 25 bp, Homo sapien
tggcacagtagggatcacagagttg

SEQ ID NO: 221904 - DNA, 25 bp, Homo sapien
tctgcttgttgagagcaggagtgga

SEQ ID NO: 221905 - DNA, 25 bp, Homo sapien
ggttgtttagctcccttgtgagagt

SEQ ID NO: 221906 - DNA, 25 bp, Homo sapien
tgtttagctcccttgtgagagtctg

SEQ ID NO: 221907 - DNA, 25 bp, Homo sapien
gtttagctcccttgtgagagtctgt

SEQ ID NO: 221908 - DNA, 25 bp, Homo sapien
catgggttgtttagctcccttgtga

SEQ ID NO: 221909 - DNA, 25 bp, Homo sapien
tgccaagcaaggagccgtcaagagt

SEQ ID NO: 221910 - DNA, 25 bp, Homo sapien
gataagggcaacagacactacttct

SEQ ID NO: 221911 - DNA, 25 bp, Homo sapien
gaatgctccgtcactatatgcagaa

SEQ ID NO: 221912 - DNA, 25 bp, Homo sapien
gtcactccaatagcaaagcgcacag

SEQ ID NO: 221913 - DNA, 25 bp, Homo sapien
cttaaaactgctgtgatgcaggagt

SEQ ID NO: 221914 - DNA, 25 bp, Homo sapien
aggacagtgggacaagggatgctca

SEQ ID NO: 221915 - DNA, 25 bp, Homo sapien
gataaatcagtacaataatgggacc

SEQ ID NO: 221916 - DNA, 25 bp, Homo sapien
ggaatgaccaggttcccacatcatg

SEQ ID NO: 221917 - DNA, 25 bp, Homo sapien
aggaagccttcctaagcaccgctga

SEQ ID NO: 221918 - DNA, 25 bp, Homo sapien
tgagttggcagaacccttaggaatg

SEQ ID NO: 221919 - DNA, 25 bp, Homo sapien
tattcatcctaggacttgctcaagg

SEQ ID NO: 221920 - DNA, 25 bp, Homo sapien
gacaggtgtgacgttcctccttgag

SEQ ID NO: 221921 - DNA, 25 bp, Homo sapien
tttgcacccgcatgaagaagctcca

SEQ ID NO: 221922 - DNA, 25 bp, Homo sapien
gagctgagggcactctctgggtcta

SEQ ID NO: 221923 - DNA, 25 bp, Homo sapien
caggagatcctctagggaatgggca

SEQ ID NO: 221924 - DNA, 25 bp, Homo sapien
cagaatggatggagctaggccctgc

SEQ ID NO: 221925 - DNA, 25 bp, Homo sapien
cggcgatggcgagtgtggctaggaa

SEQ ID NO: 221926 - DNA, 25 bp, Homo sapien
ccaggcggaagtcccctttggagat

SEQ ID NO: 221927 - DNA, 25 bp, Homo sapien
ccgttctgggacatgtaagctgcca

SEQ ID NO: 221928 - DNA, 25 bp, Homo sapien
accaccacagccacgtagagaccgg

SEQ ID NO: 221929 - DNA, 25 bp, Homo sapien
tttcactctccgttgaagtggcatc

SEQ ID NO: 221930 - DNA, 25 bp, Homo sapien
tcactctccgttgaagtggcatcgc

SEQ ID NO: 221931 - DNA, 25 bp, Homo sapien
cactctccgttgaagtggcatcgct

SEQ ID NO: 221932 - DNA, 25 bp, Homo sapien
ttcactctccgttgaagtggcatcg

SEQ ID NO: 221933 - DNA, 25 bp, Homo sapien
cttgaccttgtctctccccaggagg

SEQ ID NO: 221934 - DNA, 25 bp, Homo sapien
cctaggaggtaggagtagagctttt

SEQ ID NO: 221935 - DNA, 25 bp, Homo sapien
cagcagcgggttctgtagttcactc

SEQ ID NO: 221936 - DNA, 25 bp, Homo sapien
ctcttgtaccccataggacacagtc

SEQ ID NO: 221937 - DNA, 25 bp, Homo sapien
cctgggccagctgagcagtcctcag

SEQ ID NO: 221938 - DNA, 25 bp, Homo sapien
ggcctgggccagctgagcagtcctc

SEQ ID NO: 221939 - DNA, 25 bp, Homo sapien
tgggccagctgagcagtcctcagag

SEQ ID NO: 221940 - DNA, 25 bp, Homo sapien
gggccagctgagcagtcctcagagc

SEQ ID NO: 221941 - DNA, 25 bp, Homo sapien
tcttcttctgccccaagagaaatgt

SEQ ID NO: 221942 - DNA, 25 bp, Homo sapien
cttcttctgccccaagagaaatgtc

SEQ ID NO: 221943 - DNA, 25 bp, Homo sapien
agttttccagatgggcgacagagcc

SEQ ID NO: 221944 - DNA, 25 bp, Homo sapien
catagccccttgagcaggttgagga

SEQ ID NO: 221945 - DNA, 25 bp, Homo sapien
gggcttcccgactgcccctgtactg

SEQ ID NO: 221946 - DNA, 25 bp, Homo sapien
gacagagccatggattcatctcggg

SEQ ID NO: 221947 - DNA, 25 bp, Homo sapien
tactagggccacatggggagttcgc

SEQ ID NO: 221948 - DNA, 25 bp, Homo sapien
cgcggacgtgatcctggagacccag

SEQ ID NO: 221949 - DNA, 25 bp, Homo sapien
catatcctactagggccacatgggg

SEQ ID NO: 221950 - DNA, 25 bp, Homo sapien
gggagttcgcggacgtgatcctgga

SEQ ID NO: 221951 - DNA, 25 bp, Homo sapien
gatttctggctggtgataagcgaaa

SEQ ID NO: 221952 - DNA, 25 bp, Homo sapien
gcgaaagagccaccaagccagcttg

SEQ ID NO: 221953 - DNA, 25 bp, Homo sapien
actctggtggctgtttgttgatggc

SEQ ID NO: 221954 - DNA, 25 bp, Homo sapien
taaactgtgaagtgttgtgactctg

SEQ ID NO: 221955 - DNA, 25 bp, Homo sapien
gactgtccattaactccagagagct

SEQ ID NO: 221956 - DNA, 25 bp, Homo sapien
tgagggttagtgactgtccattaac

SEQ ID NO: 221957 - DNA, 25 bp, Homo sapien
attcttgccagtgctgcaccaacag

SEQ ID NO: 221958 - DNA, 25 bp, Homo sapien
tcactttgttatgagggttagtgac

SEQ ID NO: 221959 - DNA, 25 bp, Homo sapien
tcagtaggcaggatgtctaggagct

SEQ ID NO: 221960 - DNA, 25 bp, Homo sapien
cagggtcaaggcctgatgttgtgag

SEQ ID NO: 221961 - DNA, 25 bp, Homo sapien
tcagtatttcttgccgtcagtaggc

SEQ ID NO: 221962 - DNA, 25 bp, Homo sapien
tgtgaggttatggtgtcttgacccc

SEQ ID NO: 221963 - DNA, 25 bp, Homo sapien
tccgcggggctcgggggctcggcat

SEQ ID NO: 221964 - DNA, 25 bp, Homo sapien
ctcctccgcggggctcgggggctcg

SEQ ID NO: 221965 - DNA, 25 bp, Homo sapien
ctccgcggggctcgggggctcggca

SEQ ID NO: 221966 - DNA, 25 bp, Homo sapien
cgcggacggtcccgcctcctccgcg

SEQ ID NO: 221967 - DNA, 25 bp, Homo sapien
gggctcccctgctctcgtccccgcg

SEQ ID NO: 221968 - DNA, 25 bp, Homo sapien
gctcccctgctctcgtccccgcgtc

SEQ ID NO: 221969 - DNA, 25 bp, Homo sapien
ggccggtgagcgacggcgcccccgc

SEQ ID NO: 221970 - DNA, 25 bp, Homo sapien
ccgcctcgcggtcgcggtggaactc

SEQ ID NO: 221971 - DNA, 25 bp, Homo sapien
ccgcgcggtcccgggagccccgcat

SEQ ID NO: 221972 - DNA, 25 bp, Homo sapien
gatgaacctattcttcgagcgcctt

SEQ ID NO: 221973 - DNA, 25 bp, Homo sapien
tgcctgggctgcatactgaaatact

SEQ ID NO: 221974 - DNA, 25 bp, Homo sapien
cacagttcggtgtagctcctagagt

SEQ ID NO: 221975 - DNA, 25 bp, Homo sapien
gctgctgcctggagggaaaactcaa

SEQ ID NO: 221976 - DNA, 25 bp, Homo sapien
ggaggtagcaagcatcctcgctggg

SEQ ID NO: 221977 - DNA, 25 bp, Homo sapien
gaggtagcaagcatcctcgctggga

SEQ ID NO: 221978 - DNA, 25 bp, Homo sapien
ctggaggtagcaagcatcctcgctg

SEQ ID NO: 221979 - DNA, 25 bp, Homo sapien
tggaggtagcaagcatcctcgctgg

SEQ ID NO: 221980 - DNA, 25 bp, Homo sapien
taggcactggctgaaaacctgggag

SEQ ID NO: 221981 - DNA, 25 bp, Homo sapien
ttaaagagctaagaccaggacccag

SEQ ID NO: 221982 - DNA, 25 bp, Homo sapien
tagtgagccctctacctcggagttg

SEQ ID NO: 221983 - DNA, 25 bp, Homo sapien
cccttaatgctagagagaaccctgg

SEQ ID NO: 221984 - DNA, 25 bp, Homo sapien
gtgcagtcgtgcaatcttggcccgc

SEQ ID NO: 221985 - DNA, 25 bp, Homo sapien
tgagattataggcacgcacccacca

SEQ ID NO: 221986 - DNA, 25 bp, Homo sapien
gcagtcgtgcaatcttggcccgctg

SEQ ID NO: 221987 - DNA, 25 bp, Homo sapien
ttataggcacgcacccaccacacct

SEQ ID NO: 221988 - DNA, 25 bp, Homo sapien
gcttctgatagtagtgatgttttgt

SEQ ID NO: 221989 - DNA, 25 bp, Homo sapien
gatagtagtgatgttttgtgttttc

SEQ ID NO: 221990 - DNA, 25 bp, Homo sapien
tttacctccgtaatatgcattgggg

SEQ ID NO: 221991 - DNA, 25 bp, Homo sapien
tgcattggggtaggtaacccagtaa

SEQ ID NO: 221992 - DNA, 25 bp, Homo sapien
ttcctgcgattgattaaactttcta

SEQ ID NO: 221993 - DNA, 25 bp, Homo sapien
tcctgcgattgattaaactttctaa

SEQ ID NO: 221994 - DNA, 25 bp, Homo sapien
ctgtaaaaattcctgcgattgatta

SEQ ID NO: 221995 - DNA, 25 bp, Homo sapien
aaaattcctgcgattgattaaactt

SEQ ID NO: 221996 - DNA, 25 bp, Homo sapien
aataggaaaattagggctaggtgca

SEQ ID NO: 221997 - DNA, 25 bp, Homo sapien
ataggaaaattagggctaggtgcag

SEQ ID NO: 221998 - DNA, 25 bp, Homo sapien
ccttccaagctggagctggaaacca

SEQ ID NO: 221999 - DNA, 25 bp, Homo sapien
ggccaccttggctctcggcggcagg

SEQ ID NO: 222000 - DNA, 25 bp, Homo sapien
gggctggacgtatgcaataggactt

SEQ ID NO: 222001 - DNA, 25 bp, Homo sapien
caataggacttcctagtagggccac

SEQ ID NO: 222002 - DNA, 25 bp, Homo sapien
tccacttgttcctggacgcaggatt

SEQ ID NO: 222003 - DNA, 25 bp, Homo sapien
tggacgcaggatttctgtaggtgct

SEQ ID NO: 222004 - DNA, 25 bp, Homo sapien
gtcttcagcttggttgtttatattc

SEQ ID NO: 222005 - DNA, 25 bp, Homo sapien
ctgcttcctattccctttttatcca

SEQ ID NO: 222006 - DNA, 25 bp, Homo sapien
aggttgggatgagacgctgagtgga

SEQ ID NO: 222007 - DNA, 25 bp, Homo sapien
tgtgcctgtttcgtgtgatggtgtc

SEQ ID NO: 222008 - DNA, 25 bp, Homo sapien
caggccaaggggagcaagcagcact

SEQ ID NO: 222009 - DNA, 25 bp, Homo sapien
agaagttatctagagcagacagctt

SEQ ID NO: 222010 - DNA, 25 bp, Homo sapien
cacccatctggagggcttcggatgg

SEQ ID NO: 222011 - DNA, 25 bp, Homo sapien
catttggtgcagtagtggtgctgat

SEQ ID NO: 222012 - DNA, 25 bp, Homo sapien
tctgacacttcatttggtgcagtag

SEQ ID NO: 222013 - DNA, 25 bp, Homo sapien
ggagggcttcggatggtgtctgtct

SEQ ID NO: 222014 - DNA, 25 bp, Homo sapien
aagtggtcaggacaagtctcatcac

SEQ ID NO: 222015 - DNA, 25 bp, Homo sapien
tcacttgggctaaatcctggggcaa

SEQ ID NO: 222016 - DNA, 25 bp, Homo sapien
gctaaaagtggtcaggacaagtctc

SEQ ID NO: 222017 - DNA, 25 bp, Homo sapien
agaagctaaaagtggtcaggacaag

SEQ ID NO: 222018 - DNA, 25 bp, Homo sapien
gtgaacatcagcatgagggctgaac

SEQ ID NO: 222019 - DNA, 25 bp, Homo sapien
ttcactggttttgggaataatcaaa

SEQ ID NO: 222020 - DNA, 25 bp, Homo sapien
ggctgaacagatccatagaagtggg

SEQ ID NO: 222021 - DNA, 25 bp, Homo sapien
catagaagtggggtcttcactggtt

SEQ ID NO: 222022 - DNA, 25 bp, Homo sapien
ctcccactgacccaaccatcccaca

SEQ ID NO: 222023 - DNA, 25 bp, Homo sapien
cccacacaccagtcttgtaggacat

SEQ ID NO: 222024 - DNA, 25 bp, Homo sapien
catcccacacaccagtcttgtagga

SEQ ID NO: 222025 - DNA, 25 bp, Homo sapien
acccaaccatcccacacaccagtct

SEQ ID NO: 222026 - DNA, 25 bp, Homo sapien
tctacttataacactggagcagcag

SEQ ID NO: 222027 - DNA, 25 bp, Homo sapien
cacagaaccatttaggcccaaggca

SEQ ID NO: 222028 - DNA, 25 bp, Homo sapien
gagcagcaggaaaacggactaattg

SEQ ID NO: 222029 - DNA, 25 bp, Homo sapien
aaacccagagaggtgtaagacacca

SEQ ID NO: 222030 - DNA, 25 bp, Homo sapien
tgcagtatccccctttgtggcagag

SEQ ID NO: 222031 - DNA, 25 bp, Homo sapien
cctttgtggcagaggcatatggatg

SEQ ID NO: 222032 - DNA, 25 bp, Homo sapien
tctccagcgctgagaacagtctgct

SEQ ID NO: 222033 - DNA, 25 bp, Homo sapien
gctttttgatctggcacacccagca

SEQ ID NO: 222034 - DNA, 25 bp, Homo sapien
tgagcctccaaaacctgctccgtgg

SEQ ID NO: 222035 - DNA, 25 bp, Homo sapien
tccgtggactagaaaagcatgagac

SEQ ID NO: 222036 - DNA, 25 bp, Homo sapien
atgtagccccgcgatggctggcaaa

SEQ ID NO: 222037 - DNA, 25 bp, Homo sapien
cctagctcacggctgcaggcttcat

SEQ ID NO: 222038 - DNA, 25 bp, Homo sapien
gaaagaggccacaagttaatgttgt

SEQ ID NO: 222039 - DNA, 25 bp, Homo sapien
taaatttccaggtgtagaaagaggc

SEQ ID NO: 222040 - DNA, 25 bp, Homo sapien
ttccaggtgtagaaagaggccacaa

SEQ ID NO: 222041 - DNA, 25 bp, Homo sapien
aaagaggccacaagttaatgttgtt

SEQ ID NO: 222042 - DNA, 25 bp, Homo sapien
gccagatgcaccgaactcaatgagg

SEQ ID NO: 222043 - DNA, 25 bp, Homo sapien
tcagcagactcattggccagatgca

SEQ ID NO: 222044 - DNA, 25 bp, Homo sapien
tggataccattggagagcaagtcac

SEQ ID NO: 222045 - DNA, 25 bp, Homo sapien
aaaagagacatgagacaaccactga

SEQ ID NO: 222046 - DNA, 25 bp, Homo sapien
tagaggttgagaggcataaaacagc

SEQ ID NO: 222047 - DNA, 25 bp, Homo sapien
tctgagctctcaggaaatagggtct

SEQ ID NO: 222048 - DNA, 25 bp, Homo sapien
cactgtcagggcaataaccctaggg

SEQ ID NO: 222049 - DNA, 25 bp, Homo sapien
tagggtctcagatgcttttagaggt

SEQ ID NO: 222050 - DNA, 25 bp, Homo sapien
tgtcatcctgaagttgccactccac

SEQ ID NO: 222051 - DNA, 25 bp, Homo sapien
cctgaagttgccactccaccaccag

SEQ ID NO: 222052 - DNA, 25 bp, Homo sapien
catcctgaagttgccactccaccac

SEQ ID NO: 222053 - DNA, 25 bp, Homo sapien
tttgtcatcctgaagttgccactcc

SEQ ID NO: 222054 - DNA, 25 bp, Homo sapien
tttagtgctggccatgtgacacgct

SEQ ID NO: 222055 - DNA, 25 bp, Homo sapien
tgaaccgtgagctgatcaaacctct

SEQ ID NO: 222056 - DNA, 25 bp, Homo sapien
ggtggcactatgcttcaggtacagc

SEQ ID NO: 222057 - DNA, 25 bp, Homo sapien
tctgtcctaacagtaagcttcctga

SEQ ID NO: 222058 - DNA, 25 bp, Homo sapien
gatagaagattcctacagaaagcaa

SEQ ID NO: 222059 - DNA, 25 bp, Homo sapien
ggcagtctgctctgatggttcagtt

SEQ ID NO: 222060 - DNA, 25 bp, Homo sapien
tgaaaaatatgacccaacgatagaa

SEQ ID NO: 222061 - DNA, 25 bp, Homo sapien
ttgggcagtctgctctgatggttca

SEQ ID NO: 222062 - DNA, 25 bp, Homo sapien
caggcacagggcaatttacagcaat

SEQ ID NO: 222063 - DNA, 25 bp, Homo sapien
cacgtttgacttacaggacctgagg

SEQ ID NO: 222064 - DNA, 25 bp, Homo sapien
tggcaataaatgtgacctggaagat

SEQ ID NO: 222065 - DNA, 25 bp, Homo sapien
gccagaatttagcatgacagtgatg

SEQ ID NO: 222066 - DNA, 25 bp, Homo sapien
caaggcctcccgtgtcctcaataat

SEQ ID NO: 222067 - DNA, 25 bp, Homo sapien
tgtcctcaataatggtatcacttac

SEQ ID NO: 222068 - DNA, 25 bp, Homo sapien
tcccgtgtcctcaataatggtatca

SEQ ID NO: 222069 - DNA, 25 bp, Homo sapien
tcagaactctaatccagtcccaagg

SEQ ID NO: 222070 - DNA, 25 bp, Homo sapien
taggtcttgtctttttggatagggc

SEQ ID NO: 222071 - DNA, 25 bp, Homo sapien
cactcttacaaccatcaggctcagg

SEQ ID NO: 222072 - DNA, 25 bp, Homo sapien
gagggatattcgcttttcactggta

SEQ ID NO: 222073 - DNA, 25 bp, Homo sapien
gatagggcagttaattccactctta

SEQ ID NO: 222074 - DNA, 25 bp, Homo sapien
ggggcatgggctcacattcacttcc

SEQ ID NO: 222075 - DNA, 25 bp, Homo sapien
cattgacgctgtaagactgtccttt

SEQ ID NO: 222076 - DNA, 25 bp, Homo sapien
gtgacattgacgctgtaagactgtc

SEQ ID NO: 222077 - DNA, 25 bp, Homo sapien
aagactgtcctttgctcagctggca

SEQ ID NO: 222078 - DNA, 25 bp, Homo sapien
aactgcaccggttcggcctgggcag

SEQ ID NO: 222079 - DNA, 25 bp, Homo sapien
gagcaggaatgtagctgccaggaaa

SEQ ID NO: 222080 - DNA, 25 bp, Homo sapien
caggaatgtagctgccaggaaacgc

SEQ ID NO: 222081 - DNA, 25 bp, Homo sapien
agtccttgaactgcaccggttcggc

SEQ ID NO: 222082 - DNA, 25 bp, Homo sapien
ggccgcccgcggtcacaagacaaac

SEQ ID NO: 222083 - DNA, 25 bp, Homo sapien
tccaagctcgggaaagaagcagcgg

SEQ ID NO: 222084 - DNA, 25 bp, Homo sapien
cgaagttccaagctcgggaaagaag

SEQ ID NO: 222085 - DNA, 25 bp, Homo sapien
aagttccaagctcgggaaagaagca

SEQ ID NO: 222086 - DNA, 25 bp, Homo sapien
agcctgcagtctccgcccatgccat

SEQ ID NO: 222087 - DNA, 25 bp, Homo sapien
cagtaaccacagctgaggcccgccc

SEQ ID NO: 222088 - DNA, 25 bp, Homo sapien
tcaggcgacctgtcaccagtaacca

SEQ ID NO: 222089 - DNA, 25 bp, Homo sapien
tctcaggcccagaagcctgcagtct

SEQ ID NO: 222090 - DNA, 25 bp, Homo sapien
ggagcattcctagccaatcagacac

SEQ ID NO: 222091 - DNA, 25 bp, Homo sapien
ttctgcgcctctaggacaaatggga

SEQ ID NO: 222092 - DNA, 25 bp, Homo sapien
gccaggtttagcgtgaggcgctcca

SEQ ID NO: 222093 - DNA, 25 bp, Homo sapien
ggcaggtaccaagactagaaaggca

SEQ ID NO: 222094 - DNA, 25 bp, Homo sapien
aatcctgtacctatccaccctgtca

SEQ ID NO: 222095 - DNA, 25 bp, Homo sapien
tgaaaagtctcccaatcctgtacct

SEQ ID NO: 222096 - DNA, 25 bp, Homo sapien
cccacaaaccaccattggttctaag

SEQ ID NO: 222097 - DNA, 25 bp, Homo sapien
cacaaaccaccattggttctaagaa

SEQ ID NO: 222098 - DNA, 25 bp, Homo sapien
catacaatatctcaaggttggcagg

SEQ ID NO: 222099 - DNA, 25 bp, Homo sapien
tgaggtgaacagacaaccgcttctc

SEQ ID NO: 222100 - DNA, 25 bp, Homo sapien
tggaaacgtctgtcagtgagggact

SEQ ID NO: 222101 - DNA, 25 bp, Homo sapien
cagcagttacgaaggtgtagtgcca

SEQ ID NO: 222102 - DNA, 25 bp, Homo sapien
gaaatgtatgtatggcactcagcac

SEQ ID NO: 222103 - DNA, 25 bp, Homo sapien
ttggaacccatcataggctatcagc

SEQ ID NO: 222104 - DNA, 25 bp, Homo sapien
catcagagaagtacgaagtcagagc

SEQ ID NO: 222105 - DNA, 25 bp, Homo sapien
catgcttgccagctaggagtcttaa

SEQ ID NO: 222106 - DNA, 25 bp, Homo sapien
gattctgaaggacctccctagggca

SEQ ID NO: 222107 - DNA, 25 bp, Homo sapien
taagcatcccatagcaaggccagga

SEQ ID NO: 222108 - DNA, 25 bp, Homo sapien
cacaggctatcactgggcggattca

SEQ ID NO: 222109 - DNA, 25 bp, Homo sapien
gatgtcacggtgtcttcccagctag

SEQ ID NO: 222110 - DNA, 25 bp, Homo sapien
gcagtaaccatggacacagagcaca

SEQ ID NO: 222111 - DNA, 25 bp, Homo sapien
ggagccctctgtgttctcgcagtaa

SEQ ID NO: 222112 - DNA, 25 bp, Homo sapien
ggcccgttcaagtcatcacactcat

SEQ ID NO: 222113 - DNA, 25 bp, Homo sapien
cacagcaggcccgttcaagtcatca

SEQ ID NO: 222114 - DNA, 25 bp, Homo sapien
gagagtgctgtagggagcccaggtg

SEQ ID NO: 222115 - DNA, 25 bp, Homo sapien
cacctctctggttagtaagccctgg

SEQ ID NO: 222116 - DNA, 25 bp, Homo sapien
agaggaaacaaaggagagtgctgta

SEQ ID NO: 222117 - DNA, 25 bp, Homo sapien
tgccctagagtgaaaccctaagtgt

SEQ ID NO: 222118 - DNA, 25 bp, Homo sapien
aaaacagtcacaggtgtagccctcc

SEQ ID NO: 222119 - DNA, 25 bp, Homo sapien
ctacgcaggccatgtgggccgcatc

SEQ ID NO: 222120 - DNA, 25 bp, Homo sapien
ctgaagcccttcgaagccggctggg

SEQ ID NO: 222121 - DNA, 25 bp, Homo sapien
tcacagccgttcaggatgccgcact

SEQ ID NO: 222122 - DNA, 25 bp, Homo sapien
tcataaaattcttgtggaaagatgc

SEQ ID NO: 222123 - DNA, 25 bp, Homo sapien
tgggaccctcgcccttctggacaaa

SEQ ID NO: 222124 - DNA, 25 bp, Homo sapien
gaacaaaaggcagtactcttgaaaa

SEQ ID NO: 222125 - DNA, 25 bp, Homo sapien
tggtcgaggagtgtgttgctacata

SEQ ID NO: 222126 - DNA, 25 bp, Homo sapien
ggccatagatgctgtagtgcaggtc

SEQ ID NO: 222127 - DNA, 25 bp, Homo sapien
tcaatgcgagccacgttgcacagct

SEQ ID NO: 222128 - DNA, 25 bp, Homo sapien
actcaaggatgggtgtgcggtccgc

SEQ ID NO: 222129 - DNA, 25 bp, Homo sapien
atagcctggccggaagtggaccccg

SEQ ID NO: 222130 - DNA, 25 bp, Homo sapien
gatgtccatgtggatgtcgtggtca

SEQ ID NO: 222131 - DNA, 25 bp, Homo sapien
cattccgtgtaggtggtgcggtgcc

SEQ ID NO: 222132 - DNA, 25 bp, Homo sapien
tcgccgtcctggcagcagcattccg

SEQ ID NO: 222133 - DNA, 25 bp, Homo sapien
aggggttcgctgcacacatcattgg

SEQ ID NO: 222134 - DNA, 25 bp, Homo sapien
aaggagccctccgtgttgacgcact

SEQ ID NO: 222135 - DNA, 25 bp, Homo sapien
ctcgccattctcacaggccaggtcc

SEQ ID NO: 222136 - DNA, 25 bp, Homo sapien
tgttgacgcactcgccattctcaca

SEQ ID NO: 222137 - DNA, 25 bp, Homo sapien
gctgttcatgcagcgctgctggctg

SEQ ID NO: 222138 - DNA, 25 bp, Homo sapien
ctcacacttcttgtgggaagcatcg

SEQ ID NO: 222139 - DNA, 25 bp, Homo sapien
taaccaggcacggtgttgaggcacc

SEQ ID NO: 222140 - DNA, 25 bp, Homo sapien
catcgtagtggaagccgggattgca

SEQ ID NO: 222141 - DNA, 25 bp, Homo sapien
ttgcacaggcagacataaccaggca

SEQ ID NO: 222142 - DNA, 25 bp, Homo sapien
gtctgtccaaacgtccaggctcctt

SEQ ID NO: 222143 - DNA, 25 bp, Homo sapien
gccttttccactagggcagatctcg

SEQ ID NO: 222144 - DNA, 25 bp, Homo sapien
ctagggcagatctcgctgaattcag

SEQ ID NO: 222145 - DNA, 25 bp, Homo sapien
tgtgtacatggtctgtccaaacgtc

SEQ ID NO: 222146 - DNA, 25 bp, Homo sapien
tgggtgcagcagcattcagcctgtg

SEQ ID NO: 222147 - DNA, 25 bp, Homo sapien
ccttctgcccggagtagcagtccat

SEQ ID NO: 222148 - DNA, 25 bp, Homo sapien
acactggagcagggcgcatggccct

SEQ ID NO: 222149 - DNA, 25 bp, Homo sapien
tcagcctgtgtggtgttccggccca

SEQ ID NO: 222150 - DNA, 25 bp, Homo sapien
tcccccgttggggcctcagacatac

SEQ ID NO: 222151 - DNA, 25 bp, Homo sapien
ccgttggggcctcagacatactctg

SEQ ID NO: 222152 - DNA, 25 bp, Homo sapien
gttggggcctcagacatactctgac

SEQ ID NO: 222153 - DNA, 25 bp, Homo sapien
ccccgttggggcctcagacatactc

SEQ ID NO: 222154 - DNA, 25 bp, Homo sapien
cccgtgggcggcagtgcccctcctg

SEQ ID NO: 222155 - DNA, 25 bp, Homo sapien
gcggccccacataccgccagcataa

SEQ ID NO: 222156 - DNA, 25 bp, Homo sapien
cgccagcataagctcacactcgttc

SEQ ID NO: 222157 - DNA, 25 bp, Homo sapien
ggagccctccacgttctcacagagc

SEQ ID NO: 222158 - DNA, 25 bp, Homo sapien
cttgggtagcccacaggctcctcac

SEQ ID NO: 222159 - DNA, 25 bp, Homo sapien
tgccacacatggtgtcgttggcgca

SEQ ID NO: 222160 - DNA, 25 bp, Homo sapien
agagatctcgaagccctggtcacag

SEQ ID NO: 222161 - DNA, 25 bp, Homo sapien
catggtgtcgttggcgcactcgtct

SEQ ID NO: 222162 - DNA, 25 bp, Homo sapien
cacagaagccgtggctgccacacat

SEQ ID NO: 222163 - DNA, 25 bp, Homo sapien
gccacacaccgggtctccatagtcc

SEQ ID NO: 222164 - DNA, 25 bp, Homo sapien
tgccacacaccgggtctccatagtc

SEQ ID NO: 222165 - DNA, 25 bp, Homo sapien
ctccatagtcctcacactcgtcaat

SEQ ID NO: 222166 - DNA, 25 bp, Homo sapien
cctcggtgttgacacagtgccctcc

SEQ ID NO: 222167 - DNA, 25 bp, Homo sapien
gctggaagccagtctcacatagaca

SEQ ID NO: 222168 - DNA, 25 bp, Homo sapien
cacatagacagttgaaggagccctc

SEQ ID NO: 222169 - DNA, 25 bp, Homo sapien
cgggtctgtggtggcacactcgtcc

SEQ ID NO: 222170 - DNA, 25 bp, Homo sapien
agccaggcgcgcacagacagaagaa

SEQ ID NO: 222171 - DNA, 25 bp, Homo sapien
ctctgcgctgacgaagccaggcgcg

SEQ ID NO: 222172 - DNA, 25 bp, Homo sapien
gacagaagaaagacccgtggctgtt

SEQ ID NO: 222173 - DNA, 25 bp, Homo sapien
agacccgtggctgttgaggcactcg

SEQ ID NO: 222174 - DNA, 25 bp, Homo sapien
tgccattggccagctggaagccctg

SEQ ID NO: 222175 - DNA, 25 bp, Homo sapien
ggaggaagacagccgatggcagcac

SEQ ID NO: 222176 - DNA, 25 bp, Homo sapien
aggggaggaagacagccgatggcag

SEQ ID NO: 222177 - DNA, 25 bp, Homo sapien
gggaggaagacagccgatggcagca

SEQ ID NO: 222178 - DNA, 25 bp, Homo sapien
caggggaggaagacagccgatggca

SEQ ID NO: 222179 - DNA, 25 bp, Homo sapien
gctgggccggtagcccccatcgcag

SEQ ID NO: 222180 - DNA, 25 bp, Homo sapien
gagaaggagccagccgtgttggtgc

SEQ ID NO: 222181 - DNA, 25 bp, Homo sapien
cccgggaaggcacactcatctaggt

SEQ ID NO: 222182 - DNA, 25 bp, Homo sapien
ccgtgttggtgcagactccggaggg

SEQ ID NO: 222183 - DNA, 25 bp, Homo sapien
cagagcaggcgaaggagccctccgt

SEQ ID NO: 222184 - DNA, 25 bp, Homo sapien
agtacccgttctcacaggcagagca

SEQ ID NO: 222185 - DNA, 25 bp, Homo sapien
cagtgccgtcttcattcacccagta

SEQ ID NO: 222186 - DNA, 25 bp, Homo sapien
attcacccagtacccgttctcacag

SEQ ID NO: 222187 - DNA, 25 bp, Homo sapien
catgaggcccggctggcacactcat

SEQ ID NO: 222188 - DNA, 25 bp, Homo sapien
tgaggcccggctggcacactcatcc

SEQ ID NO: 222189 - DNA, 25 bp, Homo sapien
ctgtggggcatgaggcccggctggc

SEQ ID NO: 222190 - DNA, 25 bp, Homo sapien
gcccggctggcacactcatccacat

SEQ ID NO: 222191 - DNA, 25 bp, Homo sapien
taggttggtgcactttccatgggca

SEQ ID NO: 222192 - DNA, 25 bp, Homo sapien
atgggcacagaccccgggagtcaga

SEQ ID NO: 222193 - DNA, 25 bp, Homo sapien
agccttctaggttggtgcactttcc

SEQ ID NO: 222194 - DNA, 25 bp, Homo sapien
gccctgctcacaagagcatctgaag

SEQ ID NO: 222195 - DNA, 25 bp, Homo sapien
agccctcctcacaggccagacaagt

SEQ ID NO: 222196 - DNA, 25 bp, Homo sapien
ccggggtgacggcattcgttgatat

SEQ ID NO: 222197 - DNA, 25 bp, Homo sapien
aattgacgcatctcccatcagggca

SEQ ID NO: 222198 - DNA, 25 bp, Homo sapien
gagccaggggaattgacgcatctcc

SEQ ID NO: 222199 - DNA, 25 bp, Homo sapien
cctgggaacatagcaaatgggtagg

SEQ ID NO: 222200 - DNA, 25 bp, Homo sapien
gcccctcccttggtcatccctggga

SEQ ID NO: 222201 - DNA, 25 bp, Homo sapien
tcccttggtcatccctgggaacata

SEQ ID NO: 222202 - DNA, 25 bp, Homo sapien
ctgggaacatagcaaatgggtaggt

SEQ ID NO: 222203 - DNA, 25 bp, Homo sapien
ctttcctgaccatgatgtagccctg

SEQ ID NO: 222204 - DNA, 25 bp, Homo sapien
gatgtagccctgatcacactcgcag

SEQ ID NO: 222205 - DNA, 25 bp, Homo sapien
tgatcacactcgcagtggtacgagc

SEQ ID NO: 222206 - DNA, 25 bp, Homo sapien
tcgcagtggtacgagccctcggtgt

SEQ ID NO: 222207 - DNA, 25 bp, Homo sapien
ctcatgcaagggctgatctggaggt

SEQ ID NO: 222208 - DNA, 25 bp, Homo sapien
cctcatgcaagggctgatctggagg

SEQ ID NO: 222209 - DNA, 25 bp, Homo sapien
ggggtagcagtccatacagtataaa

SEQ ID NO: 222210 - DNA, 25 bp, Homo sapien
aggtggggtagcagtccatacagta

SEQ ID NO: 222211 - DNA, 25 bp, Homo sapien
cctgaggtggccagagtgtagccag

SEQ ID NO: 222212 - DNA, 25 bp, Homo sapien
agtaggaccccacgcggttgatgca

SEQ ID NO: 222213 - DNA, 25 bp, Homo sapien
tgacactcctgtgtcgcccctgagg

SEQ ID NO: 222214 - DNA, 25 bp, Homo sapien
gggtccctcagacactcgttgtcat

SEQ ID NO: 222215 - DNA, 25 bp, Homo sapien
gtatccatcggggaggttcacgcag

SEQ ID NO: 222216 - DNA, 25 bp, Homo sapien
gaggttcacgcaggttccagggcca

SEQ ID NO: 222217 - DNA, 25 bp, Homo sapien
gacacatctgtatccatcggggagg

SEQ ID NO: 222218 - DNA, 25 bp, Homo sapien
ggaggttcacgcaggttccagggcc

SEQ ID NO: 222219 - DNA, 25 bp, Homo sapien
agggtgcagggagccccaaaggtct

SEQ ID NO: 222220 - DNA, 25 bp, Homo sapien
gggcagggtgcagggagccccaaag

SEQ ID NO: 222221 - DNA, 25 bp, Homo sapien
gccccaaaggtctggctgcagctac

SEQ ID NO: 222222 - DNA, 25 bp, Homo sapien
tgcagggagccccaaaggtctggct

SEQ ID NO: 222223 - DNA, 25 bp, Homo sapien
aatcccctgttcaggcattggtggg

SEQ ID NO: 222224 - DNA, 25 bp, Homo sapien
tctgcaatcccctgttcaggcattg

SEQ ID NO: 222225 - DNA, 25 bp, Homo sapien
ctgtatctctgcaatcccctgttca

SEQ ID NO: 222226 - DNA, 25 bp, Homo sapien
gggggtcacttgttcttcctgtatc

SEQ ID NO: 222227 - DNA, 25 bp, Homo sapien
aggtgcatgagtgacactggtcgtg

SEQ ID NO: 222228 - DNA, 25 bp, Homo sapien
gtgcatgagtgacactggtcgtgac

SEQ ID NO: 222229 - DNA, 25 bp, Homo sapien
ggtgcatgagtgacactggtcgtga

SEQ ID NO: 222230 - DNA, 25 bp, Homo sapien
caggtgcatgagtgacactggtcgt

SEQ ID NO: 222231 - DNA, 25 bp, Homo sapien
ggtgtccctcaacatagccagtgga

SEQ ID NO: 222232 - DNA, 25 bp, Homo sapien
catagccagtggacagaatttgctg

SEQ ID NO: 222233 - DNA, 25 bp, Homo sapien
ctggtgtccctcaacatagccagtg

SEQ ID NO: 222234 - DNA, 25 bp, Homo sapien
cctcaacatagccagtggacagaat

SEQ ID NO: 222235 - DNA, 25 bp, Homo sapien
caaggcacccggaagaaactgtatt

SEQ ID NO: 222236 - DNA, 25 bp, Homo sapien
tggaatgttttcctgggacgacacc

SEQ ID NO: 222237 - DNA, 25 bp, Homo sapien
gagttggatgcacctttctccgtga

SEQ ID NO: 222238 - DNA, 25 bp, Homo sapien
taaaccagcgcagaaagtgccagac

SEQ ID NO: 222239 - DNA, 25 bp, Homo sapien
tgagctgctaccaggtcctgctctc

SEQ ID NO: 222240 - DNA, 25 bp, Homo sapien
tgctctctgccatgcttgcccggcc

SEQ ID NO: 222241 - DNA, 25 bp, Homo sapien
tctcttcaagtaaaatctaacagat

SEQ ID NO: 222242 - DNA, 25 bp, Homo sapien
ccccctagtgggaggacgcactcac

SEQ ID NO: 222243 - DNA, 25 bp, Homo sapien
tctcacttggtaagcggaaggccct

SEQ ID NO: 222244 - DNA, 25 bp, Homo sapien
aattgctcctggcttggccggtgtc

SEQ ID NO: 222245 - DNA, 25 bp, Homo sapien
gctttcctgtaaggcctcgggtgac

SEQ ID NO: 222246 - DNA, 25 bp, Homo sapien
gaaagcgtggactcttcttacctgc

SEQ ID NO: 222247 - DNA, 25 bp, Homo sapien
tgaccaatcacatagtttgctggcg

SEQ ID NO: 222248 - DNA, 25 bp, Homo sapien
tggcgctatgacgttccaggcctcc

SEQ ID NO: 222249 - DNA, 25 bp, Homo sapien
ggcctcctgcattcagtgttaccag

SEQ ID NO: 222250 - DNA, 25 bp, Homo sapien
gattcctggagcagtttgaccaatc

SEQ ID NO: 222251 - DNA, 25 bp, Homo sapien
cgggccaggggtctgacatgcaggt

SEQ ID NO: 222252 - DNA, 25 bp, Homo sapien
agcactctgactccaaggccgggcc

SEQ ID NO: 222253 - DNA, 25 bp, Homo sapien
ccgggccaggggtctgacatgcagg

SEQ ID NO: 222254 - DNA, 25 bp, Homo sapien
actctgactccaaggccgggccagg

SEQ ID NO: 222255 - DNA, 25 bp, Homo sapien
tgccagggttgggtgctgctgctcc

SEQ ID NO: 222256 - DNA, 25 bp, Homo sapien
gctgccagggttgggtgctgctgct

SEQ ID NO: 222257 - DNA, 25 bp, Homo sapien
ccagggttgggtgctgctgctccaa

SEQ ID NO: 222258 - DNA, 25 bp, Homo sapien
aggctgccagggttgggtgctgctg

SEQ ID NO: 222259 - DNA, 25 bp, Homo sapien
gacccaggattaacacccacacttc

SEQ ID NO: 222260 - DNA, 25 bp, Homo sapien
gattaacacccacacttctctgagg

SEQ ID NO: 222261 - DNA, 25 bp, Homo sapien
aggattaacacccacacttctctga

SEQ ID NO: 222262 - DNA, 25 bp, Homo sapien
taacacccacacttctctgaggtgc

SEQ ID NO: 222263 - DNA, 25 bp, Homo sapien
tgacgacccggaggggctgcctctc

SEQ ID NO: 222264 - DNA, 25 bp, Homo sapien
ggatgtcggagctcgcgtaggtgta

SEQ ID NO: 222265 - DNA, 25 bp, Homo sapien
ggctttcctcatggacaggcggatg

SEQ ID NO: 222266 - DNA, 25 bp, Homo sapien
ctcaagccaggtgtccgtgacgacc

SEQ ID NO: 222267 - DNA, 25 bp, Homo sapien
cggctgcagcagcatatctgcttgg

SEQ ID NO: 222268 - DNA, 25 bp, Homo sapien
gcgaccggtagcacagtccctgcag

SEQ ID NO: 222269 - DNA, 25 bp, Homo sapien
atctgcttggtgatccgctgggcca

SEQ ID NO: 222270 - DNA, 25 bp, Homo sapien
cactcgctgccccatgctttgccca

SEQ ID NO: 222271 - DNA, 25 bp, Homo sapien
cgcgatggatccagcatgaggccag

SEQ ID NO: 222272 - DNA, 25 bp, Homo sapien
tggtattcacacactccgcgtcctt

SEQ ID NO: 222273 - DNA, 25 bp, Homo sapien
ggcccagggtcaagcactcgttgat

SEQ ID NO: 222274 - DNA, 25 bp, Homo sapien
tgcatgtgcacaggtagctgcccct

SEQ ID NO: 222275 - DNA, 25 bp, Homo sapien
aggagatgaccaagtgcccgcccca

SEQ ID NO: 222276 - DNA, 25 bp, Homo sapien
ttggaggagatgaccaagtgcccgc

SEQ ID NO: 222277 - DNA, 25 bp, Homo sapien
ggaggagatgaccaagtgcccgccc

SEQ ID NO: 222278 - DNA, 25 bp, Homo sapien
ctgcagggttggaggagatgaccaa

SEQ ID NO: 222279 - DNA, 25 bp, Homo sapien
gagtgaggttcagtctcttgtaccc

SEQ ID NO: 222280 - DNA, 25 bp, Homo sapien
gtgagtgaggttcagtctcttgtac

SEQ ID NO: 222281 - DNA, 25 bp, Homo sapien
actccagctggccattctcaatcac

SEQ ID NO: 222282 - DNA, 25 bp, Homo sapien
cagctggccattctcaatcaccggg

SEQ ID NO: 222283 - DNA, 25 bp, Homo sapien
ggagatacggacaggtctcactgga

SEQ ID NO: 222284 - DNA, 25 bp, Homo sapien
aggtctcactggacggcccctgggc

SEQ ID NO: 222285 - DNA, 25 bp, Homo sapien
ctgaagagtggagatacggacaggt

SEQ ID NO: 222286 - DNA, 25 bp, Homo sapien
aagagtggagatacggacaggtctc

SEQ ID NO: 222287 - DNA, 25 bp, Homo sapien
ggatgtccagcccacccggcagcag

SEQ ID NO: 222288 - DNA, 25 bp, Homo sapien
ttacatatagtatctactacactac

SEQ ID NO: 222289 - DNA, 25 bp, Homo sapien
tacatatagtatctactacactaca

SEQ ID NO: 222290 - DNA, 25 bp, Homo sapien
attacatatagtatctactacacta

SEQ ID NO: 222291 - DNA, 25 bp, Homo sapien
tattacatatagtatctactacact

SEQ ID NO: 222292 - DNA, 25 bp, Homo sapien
ggcatggacctcacagcctgcatct

SEQ ID NO: 222293 - DNA, 25 bp, Homo sapien
tgcatctctgcacccctgatgggct

SEQ ID NO: 222294 - DNA, 25 bp, Homo sapien
tagaatcctccattggcagcagcca

SEQ ID NO: 222295 - DNA, 25 bp, Homo sapien
tccagagcttgggacaggcaggccc

SEQ ID NO: 222296 - DNA, 25 bp, Homo sapien
caggctcaggcccaggcccagaaag

SEQ ID NO: 222297 - DNA, 25 bp, Homo sapien
tcaggcccaggcccagaaaggaggc

SEQ ID NO: 222298 - DNA, 25 bp, Homo sapien
ctcaggcccaggcccagaaaggagg

SEQ ID NO: 222299 - DNA, 25 bp, Homo sapien
ggctcaggcccaggcccagaaagga

SEQ ID NO: 222300 - DNA, 25 bp, Homo sapien
tgggcatggggcacacaaagtcacc

SEQ ID NO: 222301 - DNA, 25 bp, Homo sapien
agtcaccccccagaaggctcccaca

SEQ ID NO: 222302 - DNA, 25 bp, Homo sapien
acagcagtcctcctgggtagtcagc

SEQ ID NO: 222303 - DNA, 25 bp, Homo sapien
cagtcctcctgggtagtcagctcca

SEQ ID NO: 222304 - DNA, 25 bp, Homo sapien
ctgaggcctcgggtgggtggtgaat

SEQ ID NO: 222305 - DNA, 25 bp, Homo sapien
ccagaccgagcagggatgttgttgc

SEQ ID NO: 222306 - DNA, 25 bp, Homo sapien
gaatgtgcaccttcaccagggaggg

SEQ ID NO: 222307 - DNA, 25 bp, Homo sapien
cagtgttcaggtaacaccggcccag

SEQ ID NO: 222308 - DNA, 25 bp, Homo sapien
tccggctgcgggataggcaggtggc

SEQ ID NO: 222309 - DNA, 25 bp, Homo sapien
agcattcgtccctgccgatgcagcg

SEQ ID NO: 222310 - DNA, 25 bp, Homo sapien
atgcagcggcctccgttcaggcagg

SEQ ID NO: 222311 - DNA, 25 bp, Homo sapien
tcccggtggagttggcggggcacca

SEQ ID NO: 222312 - DNA, 25 bp, Homo sapien
ctgggaaccatctgagcaggaaagg

SEQ ID NO: 222313 - DNA, 25 bp, Homo sapien
cagctgggaaccatctgagcaggaa

SEQ ID NO: 222314 - DNA, 25 bp, Homo sapien
agctgggaaccatctgagcaggaaa

SEQ ID NO: 222315 - DNA, 25 bp, Homo sapien
gccagctgggaaccatctgagcagg

SEQ ID NO: 222316 - DNA, 25 bp, Homo sapien
agatgcggaagccagacttgggatc

SEQ ID NO: 222317 - DNA, 25 bp, Homo sapien
acagggtggtggtgtcgcccctctc

SEQ ID NO: 222318 - DNA, 25 bp, Homo sapien
catggccgccctggctgtacagggt

SEQ ID NO: 222319 - DNA, 25 bp, Homo sapien
gggagtgaagacgatcttgatcttc

SEQ ID NO: 222320 - DNA, 25 bp, Homo sapien
tgttgggtgccatctctctgctcaa

SEQ ID NO: 222321 - DNA, 25 bp, Homo sapien
acagtgcgggacaaccccacgtgct

SEQ ID NO: 222322 - DNA, 25 bp, Homo sapien
cgtggcagtcgggtgaagtcggaca

SEQ ID NO: 222323 - DNA, 25 bp, Homo sapien
gctccagaggtaccgcctgttgggt

SEQ ID NO: 222324 - DNA, 25 bp, Homo sapien
aagggtgggtctggctgaggccact

SEQ ID NO: 222325 - DNA, 25 bp, Homo sapien
ggtctggctgaggccactcagggtc

SEQ ID NO: 222326 - DNA, 25 bp, Homo sapien
ggtgggtctggctgaggccactcag

SEQ ID NO: 222327 - DNA, 25 bp, Homo sapien
gaagggtgggtctggctgaggccac

SEQ ID NO: 222328 - DNA, 25 bp, Homo sapien
gtgccatgctcaggttagtggcagc

SEQ ID NO: 222329 - DNA, 25 bp, Homo sapien
ccatgctcaggttagtggcagcgcc

SEQ ID NO: 222330 - DNA, 25 bp, Homo sapien
tgctcaggttagtggcagcgccaca

SEQ ID NO: 222331 - DNA, 25 bp, Homo sapien
catgctcaggttagtggcagcgcca

SEQ ID NO: 222332 - DNA, 25 bp, Homo sapien
tttcgtggtactccttatgacttcc

SEQ ID NO: 222333 - DNA, 25 bp, Homo sapien
tgttctgacacctaaacagtttgag

SEQ ID NO: 222334 - DNA, 25 bp, Homo sapien
gcctagggaacaccaacgcttaaga

SEQ ID NO: 222335 - DNA, 25 bp, Homo sapien
actgttcccagctctaatcatgaaa

SEQ ID NO: 222336 - DNA, 25 bp, Homo sapien
tcctatggccacacctaggtctgaa

SEQ ID NO: 222337 - DNA, 25 bp, Homo sapien
ccacctggctgccatgagtcacatc

SEQ ID NO: 222338 - DNA, 25 bp, Homo sapien
gggcctctagctcttcctatggcca

SEQ ID NO: 222339 - DNA, 25 bp, Homo sapien
cacacctaggtctgaaaggactgga

SEQ ID NO: 222340 - DNA, 25 bp, Homo sapien
ccttgagttcccagctcatggcctt

SEQ ID NO: 222341 - DNA, 25 bp, Homo sapien
cccttgagttcccagctcatggcct

SEQ ID NO: 222342 - DNA, 25 bp, Homo sapien
aacccttgagttcccagctcatggc

SEQ ID NO: 222343 - DNA, 25 bp, Homo sapien
tgaacccttgagttcccagctcatg

SEQ ID NO: 222344 - DNA, 25 bp, Homo sapien
tctgggcaaattctcaaagtttctg

SEQ ID NO: 222345 - DNA, 25 bp, Homo sapien
tctgatgaccgctgctgcatttctg

SEQ ID NO: 222346 - DNA, 25 bp, Homo sapien
tatgatacaggaactagtgtcccca

SEQ ID NO: 222347 - DNA, 25 bp, Homo sapien
acagggagcctgctaacttgcccgg

SEQ ID NO: 222348 - DNA, 25 bp, Homo sapien
tgaaaaagagctttgccagtctttc

SEQ ID NO: 222349 - DNA, 25 bp, Homo sapien
cttccctgggccatctgaaaaagag

SEQ ID NO: 222350 - DNA, 25 bp, Homo sapien
tccctgggccatctgaaaaagagct

SEQ ID NO: 222351 - DNA, 25 bp, Homo sapien
cctgggccatctgaaaaagagcttt

SEQ ID NO: 222352 - DNA, 25 bp, Homo sapien
tcctgcgcaggttgggtgaacgctc

SEQ ID NO: 222353 - DNA, 25 bp, Homo sapien
aacgctcggcccagcgtcgaggtgc

SEQ ID NO: 222354 - DNA, 25 bp, Homo sapien
atcgggaatgacctcctcgcagcgg

SEQ ID NO: 222355 - DNA, 25 bp, Homo sapien
cgggctccacggaaaccagagcggc

SEQ ID NO: 222356 - DNA, 25 bp, Homo sapien
aatagcagttgtgttcgcataaaac

SEQ ID NO: 222357 - DNA, 25 bp, Homo sapien
cgcataaaacctcctaatgagagaa

SEQ ID NO: 222358 - DNA, 25 bp, Homo sapien
acttgctctctgcagacgctgtctg

SEQ ID NO: 222359 - DNA, 25 bp, Homo sapien
caagtgcccagctccaaaatagcag

SEQ ID NO: 222360 - DNA, 25 bp, Homo sapien
ctgaaggatagtcaggtggagttcc

SEQ ID NO: 222361 - DNA, 25 bp, Homo sapien
gggagctgatgtggacccaagaggg

SEQ ID NO: 222362 - DNA, 25 bp, Homo sapien
tgaaggatagtcaggtggagttcct

SEQ ID NO: 222363 - DNA, 25 bp, Homo sapien
gttcctggggagctgatgtggaccc

SEQ ID NO: 222364 - DNA, 25 bp, Homo sapien
gatacagtggttggtgctgtttgct

SEQ ID NO: 222365 - DNA, 25 bp, Homo sapien
ttgatacagtggttggtgctgtttg

SEQ ID NO: 222366 - DNA, 25 bp, Homo sapien
gtttgatacagtggttggtgctgtt

SEQ ID NO: 222367 - DNA, 25 bp, Homo sapien
atacagtggttggtgctgtttgctg

SEQ ID NO: 222368 - DNA, 25 bp, Homo sapien
atggcaacctcagtcctgccaccat

SEQ ID NO: 222369 - DNA, 25 bp, Homo sapien
gctcatggcaacctcagtcctgcca

SEQ ID NO: 222370 - DNA, 25 bp, Homo sapien
taaaaatattcttaatagagatggg

SEQ ID NO: 222371 - DNA, 25 bp, Homo sapien
tcatggcaacctcagtcctgccacc

SEQ ID NO: 222372 - DNA, 25 bp, Homo sapien
cccaaactttgcttccgggtgtctg

SEQ ID NO: 222373 - DNA, 25 bp, Homo sapien
gggtgtctggcgcactccagcagca

SEQ ID NO: 222374 - DNA, 25 bp, Homo sapien
ctgactctgcagctaaagacccaca

SEQ ID NO: 222375 - DNA, 25 bp, Homo sapien
tgactctgcagctaaagacccacat

SEQ ID NO: 222376 - DNA, 25 bp, Homo sapien
ctcctggagatctctagggactgac

SEQ ID NO: 222377 - DNA, 25 bp, Homo sapien
tctcctggagatctctagggactga

SEQ ID NO: 222378 - DNA, 25 bp, Homo sapien
ggccgggctctggcttccatcctta

SEQ ID NO: 222379 - DNA, 25 bp, Homo sapien
ggctgggccgggctctggcttccat

SEQ ID NO: 222380 - DNA, 25 bp, Homo sapien
ctgggccgggctctggcttccatcc

SEQ ID NO: 222381 - DNA, 25 bp, Homo sapien
tccttggcaggctgggccgggctct

SEQ ID NO: 222382 - DNA, 25 bp, Homo sapien
cattggaaatcatcaccgggcactg

SEQ ID NO: 222383 - DNA, 25 bp, Homo sapien
tggaaatcatcaccgggcactggaa

SEQ ID NO: 222384 - DNA, 25 bp, Homo sapien
tcattggaaatcatcaccgggcact

SEQ ID NO: 222385 - DNA, 25 bp, Homo sapien
ttggaaatcatcaccgggcactgga

SEQ ID NO: 222386 - DNA, 25 bp, Homo sapien
agccaagagttgtgccacttgggcc

SEQ ID NO: 222387 - DNA, 25 bp, Homo sapien
ccaagagttgtgccacttgggccac

SEQ ID NO: 222388 - DNA, 25 bp, Homo sapien
gccaagagttgtgccacttgggcca

SEQ ID NO: 222389 - DNA, 25 bp, Homo sapien
cagccaagagttgtgccacttgggc

SEQ ID NO: 222390 - DNA, 25 bp, Homo sapien
caccgttagcagcttcctggctgca

SEQ ID NO: 222391 - DNA, 25 bp, Homo sapien
aaagcctctctgggcgaccaccgtt

SEQ ID NO: 222392 - DNA, 25 bp, Homo sapien
gcgaccaccgttagcagcttcctgg

SEQ ID NO: 222393 - DNA, 25 bp, Homo sapien
tctgggcgaccaccgttagcagctt

SEQ ID NO: 222394 - DNA, 25 bp, Homo sapien
tcttcgaaagcggatcaaatcttcc

SEQ ID NO: 222395 - DNA, 25 bp, Homo sapien
tgccttcaactcttcgaaagcggat

SEQ ID NO: 222396 - DNA, 25 bp, Homo sapien
gcggatcaaatcttccaatcccgat

SEQ ID NO: 222397 - DNA, 25 bp, Homo sapien
caaatcttccaatcccgattttgga

SEQ ID NO: 222398 - DNA, 25 bp, Homo sapien
cctgctcccggaacagactgtacac

SEQ ID NO: 222399 - DNA, 25 bp, Homo sapien
gggagtgcttctccgggtctgcgca

SEQ ID NO: 222400 - DNA, 25 bp, Homo sapien
gcgcaggtggctggacacgccgcga

SEQ ID NO: 222401 - DNA, 25 bp, Homo sapien
tccacgggctgcaagcccgcgacag

SEQ ID NO: 222402 - DNA, 25 bp, Homo sapien
ccagggcgccgcagtcgattcgcgt

SEQ ID NO: 222403 - DNA, 25 bp, Homo sapien
gggcgccgcagtcgattcgcgtctc

SEQ ID NO: 222404 - DNA, 25 bp, Homo sapien
gcagccgctgccgggtagctgcccc

SEQ ID NO: 222405 - DNA, 25 bp, Homo sapien
tccaccagccggctcgtatctccct

SEQ ID NO: 222406 - DNA, 25 bp, Homo sapien
tgcgggctttggtccgcggcctcat

SEQ ID NO: 222407 - DNA, 25 bp, Homo sapien
tttgggcatgacccgcgcccacgaa

SEQ ID NO: 222408 - DNA, 25 bp, Homo sapien
tctccaggggttccgcagggcgcgc

SEQ ID NO: 222409 - DNA, 25 bp, Homo sapien
cgggctgcgggctttggtccgcggc

SEQ ID NO: 222410 - DNA, 25 bp, Homo sapien
cgaagagctttgtggtcggcacgct

SEQ ID NO: 222411 - DNA, 25 bp, Homo sapien
tccagctgggctcgcacggctgctg

SEQ ID NO: 222412 - DNA, 25 bp, Homo sapien
ttttcgtctcttttatccacaccag

SEQ ID NO: 222413 - DNA, 25 bp, Homo sapien
ggagcgaggaattccagcaacaccc

SEQ ID NO: 222414 - DNA, 25 bp, Homo sapien
tgacccaggcgctggtcgggcagat

SEQ ID NO: 222415 - DNA, 25 bp, Homo sapien
tggtcgggcagatggcgcctgccac

SEQ ID NO: 222416 - DNA, 25 bp, Homo sapien
cctgctctgggcaagttcgaactgc

SEQ ID NO: 222417 - DNA, 25 bp, Homo sapien
aactgcagacctgccccgaatcgtt

SEQ ID NO: 222418 - DNA, 25 bp, Homo sapien
gatatcttgtctgcgttgctcacca

SEQ ID NO: 222419 - DNA, 25 bp, Homo sapien
tatgtgacaggtacccttggttggc

SEQ ID NO: 222420 - DNA, 25 bp, Homo sapien
cagcaacatagtcagcatcagtggg

SEQ ID NO: 222421 - DNA, 25 bp, Homo sapien
gcaccgaggtgcctgtaacatccag

SEQ ID NO: 222422 - DNA, 25 bp, Homo sapien
ctggagatgtggagttatcagaact

SEQ ID NO: 222423 - DNA, 25 bp, Homo sapien
tcactggaataatgttggcagccag

SEQ ID NO: 222424 - DNA, 25 bp, Homo sapien
ggtctaccagaacctgagctaattt

SEQ ID NO: 222425 - DNA, 25 bp, Homo sapien
ttggaagtaactggacctccagccc

SEQ ID NO: 222426 - DNA, 25 bp, Homo sapien
tcttgcttggaagtaactggacctc

SEQ ID NO: 222427 - DNA, 25 bp, Homo sapien
gctgggtcatagtaacactcctcac

SEQ ID NO: 222428 - DNA, 25 bp, Homo sapien
tgggtcatagtaacactcctcacac

SEQ ID NO: 222429 - DNA, 25 bp, Homo sapien
gggtcatagtaacactcctcacacc

SEQ ID NO: 222430 - DNA, 25 bp, Homo sapien
ctgggtcatagtaacactcctcaca

SEQ ID NO: 222431 - DNA, 25 bp, Homo sapien
aaggaaagtcgtctccagctgctcc

SEQ ID NO: 222432 - DNA, 25 bp, Homo sapien
gaggaaggaaagtcgtctccagctg

SEQ ID NO: 222433 - DNA, 25 bp, Homo sapien
ggaaggaaagtcgtctccagctgct

SEQ ID NO: 222434 - DNA, 25 bp, Homo sapien
agaggaaggaaagtcgtctccagct

SEQ ID NO: 222435 - DNA, 25 bp, Homo sapien
gttccaatattgatttacagtgatg

SEQ ID NO: 222436 - DNA, 25 bp, Homo sapien
gcatcacatcttattgggatgataa

SEQ ID NO: 222437 - DNA, 25 bp, Homo sapien
gcgagggttaacagtaaatgggcat

SEQ ID NO: 222438 - DNA, 25 bp, Homo sapien
gaattatgcacttgaaaatggtaga

SEQ ID NO: 222439 - DNA, 25 bp, Homo sapien
tctggcctgtaaaagacatgcttgg

SEQ ID NO: 222440 - DNA, 25 bp, Homo sapien
cacagccagtggacacacatctggc

SEQ ID NO: 222441 - DNA, 25 bp, Homo sapien
tctccatacaagaattcacagccag

SEQ ID NO: 222442 - DNA, 25 bp, Homo sapien
ccagtggacacacatctggcctgta

SEQ ID NO: 222443 - DNA, 25 bp, Homo sapien
gtgaagaacgggaagaacagtccaa

SEQ ID NO: 222444 - DNA, 25 bp, Homo sapien
tgcttggataagtctgccaatcagc

SEQ ID NO: 222445 - DNA, 25 bp, Homo sapien
aagggcagacggcagccccagtttc

SEQ ID NO: 222446 - DNA, 25 bp, Homo sapien
tctgccaatcagcttgaacccctgg

SEQ ID NO: 222447 - DNA, 25 bp, Homo sapien
ttaggcaacagaagacctcggtagg

SEQ ID NO: 222448 - DNA, 25 bp, Homo sapien
aagacctcggtaggttttgagcatc

SEQ ID NO: 222449 - DNA, 25 bp, Homo sapien
agacctcggtaggttttgagcatct

SEQ ID NO: 222450 - DNA, 25 bp, Homo sapien
gacctcggtaggttttgagcatctg

SEQ ID NO: 222451 - DNA, 25 bp, Homo sapien
caattcctcctaatgggcctgctga

SEQ ID NO: 222452 - DNA, 25 bp, Homo sapien
gattttagggcaaacactggagaag

SEQ ID NO: 222453 - DNA, 25 bp, Homo sapien
tgagattactcccttaggccccagt

SEQ ID NO: 222454 - DNA, 25 bp, Homo sapien
cactggtctgttcggagtatccaca

SEQ ID NO: 222455 - DNA, 25 bp, Homo sapien
cccaggaggaatagatgtcagctgc

SEQ ID NO: 222456 - DNA, 25 bp, Homo sapien
taactggttttctaaaggcgatggc

SEQ ID NO: 222457 - DNA, 25 bp, Homo sapien
cagagctgtgatcccagtcagaagc

SEQ ID NO: 222458 - DNA, 25 bp, Homo sapien
tacgacagagagataaccagggact

SEQ ID NO: 222459 - DNA, 25 bp, Homo sapien
gggttgttgtgaatgagacaataaa

SEQ ID NO: 222460 - DNA, 25 bp, Homo sapien
cagggttgttgtgaatgagacaata

SEQ ID NO: 222461 - DNA, 25 bp, Homo sapien
tgttgtgaatgagacaataaatact

SEQ ID NO: 222462 - DNA, 25 bp, Homo sapien
gttgttgtgaatgagacaataaata

SEQ ID NO: 222463 - DNA, 25 bp, Homo sapien
ccaggtgtcttgagtactcattctc

SEQ ID NO: 222464 - DNA, 25 bp, Homo sapien
gtcttgagtactcattctctctggc

SEQ ID NO: 222465 - DNA, 25 bp, Homo sapien
gtgtcttgagtactcattctctctg

SEQ ID NO: 222466 - DNA, 25 bp, Homo sapien
tgggccaggtgtcttgagtactcat

SEQ ID NO: 222467 - DNA, 25 bp, Homo sapien
aatatgaacatttggctgggcccca

SEQ ID NO: 222468 - DNA, 25 bp, Homo sapien
taagtcacagtcagcatggtaacac

SEQ ID NO: 222469 - DNA, 25 bp, Homo sapien
tactgaaagaaggttgtcttgccca

SEQ ID NO: 222470 - DNA, 25 bp, Homo sapien
tcttgcccaaagttgaaccacggga

SEQ ID NO: 222471 - DNA, 25 bp, Homo sapien
ggtcaacatgacctgcagatctcta

SEQ ID NO: 222472 - DNA, 25 bp, Homo sapien
taggtggtgtgcagactcagtattc

SEQ ID NO: 222473 - DNA, 25 bp, Homo sapien
tcaccaataactttgggatagctgt

SEQ ID NO: 222474 - DNA, 25 bp, Homo sapien
gagttagaaatactagcctattcca

SEQ ID NO: 222475 - DNA, 25 bp, Homo sapien
gacttgccgccaacaaacttcttag

SEQ ID NO: 222476 - DNA, 25 bp, Homo sapien
gaaaagaatcggtaagacttgccgc

SEQ ID NO: 222477 - DNA, 25 bp, Homo sapien
gccttgcagtgttccaaagtactgg

SEQ ID NO: 222478 - DNA, 25 bp, Homo sapien
tgatgaggtaagaggagaatgcact

SEQ ID NO: 222479 - DNA, 25 bp, Homo sapien
tcttatttccaaattttctatattg

SEQ ID NO: 222480 - DNA, 25 bp, Homo sapien
tatttccaaattttctatattgaat

SEQ ID NO: 222481 - DNA, 25 bp, Homo sapien
ttatttccaaattttctatattgaa

SEQ ID NO: 222482 - DNA, 25 bp, Homo sapien
cttatttccaaattttctatattga

SEQ ID NO: 222483 - DNA, 25 bp, Homo sapien
tatgcctaccattgtgcagcgggac

SEQ ID NO: 222484 - DNA, 25 bp, Homo sapien
tagcagtccttagaggcagtccagt

SEQ ID NO: 222485 - DNA, 25 bp, Homo sapien
tatagagaccctgatgctggatccc

SEQ ID NO: 222486 - DNA, 25 bp, Homo sapien
tctccaaggagtatcagcagaggga

SEQ ID NO: 222487 - DNA, 25 bp, Homo sapien
gagcatgcggcatcttctggctgat

SEQ ID NO: 222488 - DNA, 25 bp, Homo sapien
ggcttgtaggtgacaaaatcctcca

SEQ ID NO: 222489 - DNA, 25 bp, Homo sapien
gatgtctgtaacttgcgcccagaag

SEQ ID NO: 222490 - DNA, 25 bp, Homo sapien
gagcatgggagccaactggatgaca

SEQ ID NO: 222491 - DNA, 25 bp, Homo sapien
aaccctcgctgatggccagctgcag

SEQ ID NO: 222492 - DNA, 25 bp, Homo sapien
tcataggagtcatatgtagggaggc

SEQ ID NO: 222493 - DNA, 25 bp, Homo sapien
gcacctcttcataggagtcatatgt

SEQ ID NO: 222494 - DNA, 25 bp, Homo sapien
tcagagcatgccaaagccctcgcaa

SEQ ID NO: 222495 - DNA, 25 bp, Homo sapien
taggcagcgtgctatgggtcggagc

SEQ ID NO: 222496 - DNA, 25 bp, Homo sapien
agcgtgctatgggtcggagcggcaa

SEQ ID NO: 222497 - DNA, 25 bp, Homo sapien
gtgtgcagtaggcagcgtgctatgg

SEQ ID NO: 222498 - DNA, 25 bp, Homo sapien
tgctatgggtcggagcggcaataat

SEQ ID NO: 222499 - DNA, 25 bp, Homo sapien
aaccacagtccaaaaccacctcatg

SEQ ID NO: 222500 - DNA, 25 bp, Homo sapien
aagtagccgagccaactcctcctgg

SEQ ID NO: 222501 - DNA, 25 bp, Homo sapien
agagggcggcaaagcctccaggtgg

SEQ ID NO: 222502 - DNA, 25 bp, Homo sapien
tccaggtggtagctgagaggagcct

SEQ ID NO: 222503 - DNA, 25 bp, Homo sapien
atgccatgagccaccaacaactact

SEQ ID NO: 222504 - DNA, 25 bp, Homo sapien
aacaactactgcatgggctttgaag

SEQ ID NO: 222505 - DNA, 25 bp, Homo sapien
ccatgagccaccaacaactactgca

SEQ ID NO: 222506 - DNA, 25 bp, Homo sapien
gaaatgccatgagccaccaacaact

SEQ ID NO: 222507 - DNA, 25 bp, Homo sapien
gaaataagaattgggcaagaccacc

SEQ ID NO: 222508 - DNA, 25 bp, Homo sapien
taccagtagttattcctcagcccaa

SEQ ID NO: 222509 - DNA, 25 bp, Homo sapien
gaaacgtttgcagaaagacactcct

SEQ ID NO: 222510 - DNA, 25 bp, Homo sapien
gacactcctcatagaaactacggga

SEQ ID NO: 222511 - DNA, 25 bp, Homo sapien
attacaagcgtgcatcaccacaccc

SEQ ID NO: 222512 - DNA, 25 bp, Homo sapien
ttacaagcgtgcatcaccacaccca

SEQ ID NO: 222513 - DNA, 25 bp, Homo sapien
caaaaggttctcagggaccaattca

SEQ ID NO: 222514 - DNA, 25 bp, Homo sapien
atagccaaaaggttctcagggacca

SEQ ID NO: 222515 - DNA, 25 bp, Homo sapien
gttctcagggaccaattcattcagg

SEQ ID NO: 222516 - DNA, 25 bp, Homo sapien
aaggttctcagggaccaattcattc

SEQ ID NO: 222517 - DNA, 25 bp, Homo sapien
gagtttgagctccacctgtcatgag

SEQ ID NO: 222518 - DNA, 25 bp, Homo sapien
gccagccgatattgggccagcaaat

SEQ ID NO: 222519 - DNA, 25 bp, Homo sapien
gattttattcgcattggtgactgga

SEQ ID NO: 222520 - DNA, 25 bp, Homo sapien
tctttcacttgactggccagccgat

SEQ ID NO: 222521 - DNA, 25 bp, Homo sapien
tgtcattgttgaggataaaacaaac

SEQ ID NO: 222522 - DNA, 25 bp, Homo sapien
tcatgtcattgttgaggataaaaca

SEQ ID NO: 222523 - DNA, 25 bp, Homo sapien
cactcatgtcattgttgaggataaa

SEQ ID NO: 222524 - DNA, 25 bp, Homo sapien
ctcatgtcattgttgaggataaaac

SEQ ID NO: 222525 - DNA, 25 bp, Homo sapien
gtgaagcgagctcggaccaactgct

SEQ ID NO: 222526 - DNA, 25 bp, Homo sapien
tgcttgtaggctcctcctagagagg

SEQ ID NO: 222527 - DNA, 25 bp, Homo sapien
cctagagaggactcatagagacact

SEQ ID NO: 222528 - DNA, 25 bp, Homo sapien
tacgcagtcctatgatttgggccag

SEQ ID NO: 222529 - DNA, 25 bp, Homo sapien
tgaatccttgttagtctacccatga

SEQ ID NO: 222530 - DNA, 25 bp, Homo sapien
aataggacacaggttgtcaggttcc

SEQ ID NO: 222531 - DNA, 25 bp, Homo sapien
agatgatgtgatgccttttccctaa

SEQ ID NO: 222532 - DNA, 25 bp, Homo sapien
gtcaggttcccagatcagtttcata

SEQ ID NO: 222533 - DNA, 25 bp, Homo sapien
cactgaaccgggtgaagagctgatt

SEQ ID NO: 222534 - DNA, 25 bp, Homo sapien
gtgctttgcagattagctcaaacca

SEQ ID NO: 222535 - DNA, 25 bp, Homo sapien
taatgcttggttgttgtcactgaac

SEQ ID NO: 222536 - DNA, 25 bp, Homo sapien
ttggtggtatcaaatagtgctttgc

SEQ ID NO: 222537 - DNA, 25 bp, Homo sapien
tgagtcatcattttatactctccac

SEQ ID NO: 222538 - DNA, 25 bp, Homo sapien
gagaaattccgagtggctttcagag

SEQ ID NO: 222539 - DNA, 25 bp, Homo sapien
gagatggagaaattccgagtggctt

SEQ ID NO: 222540 - DNA, 25 bp, Homo sapien
ttcatcctggaaaacaacctcaaag

SEQ ID NO: 222541 - DNA, 25 bp, Homo sapien
ctggaaaacaacctcaaagttcttg

SEQ ID NO: 222542 - DNA, 25 bp, Homo sapien
tccacaaggctaggttcagacagcg

SEQ ID NO: 222543 - DNA, 25 bp, Homo sapien
gagccatgccacacggagaatatgg

SEQ ID NO: 222544 - DNA, 25 bp, Homo sapien
taagctgtaggcaaaagaaccaagg

SEQ ID NO: 222545 - DNA, 25 bp, Homo sapien
tgagaaaacgggtttccagtcacac

SEQ ID NO: 222546 - DNA, 25 bp, Homo sapien
agccaaacatcacaaacactttctg

SEQ ID NO: 222547 - DNA, 25 bp, Homo sapien
tgtaagaactatgccagtgtctgtg

SEQ ID NO: 222548 - DNA, 25 bp, Homo sapien
aatgtaagaactatgccagtgtctg

SEQ ID NO: 222549 - DNA, 25 bp, Homo sapien
ctggggaatgtaagaactatgccag

SEQ ID NO: 222550 - DNA, 25 bp, Homo sapien
gggaatgtaagaactatgccagtgt

SEQ ID NO: 222551 - DNA, 25 bp, Homo sapien
attccaacaaggcatgtctgctgac

SEQ ID NO: 222552 - DNA, 25 bp, Homo sapien
gattccaacaaggcatgtctgctga

SEQ ID NO: 222553 - DNA, 25 bp, Homo sapien
cgattccaacaaggcatgtctgctg

SEQ ID NO: 222554 - DNA, 25 bp, Homo sapien
gactttggaatgtggtcttttcata

SEQ ID NO: 222555 - DNA, 25 bp, Homo sapien
tggaatgtggtcttttcatatgtac

SEQ ID NO: 222556 - DNA, 25 bp, Homo sapien
tcagggtgactttggaatgtggtct

SEQ ID NO: 222557 - DNA, 25 bp, Homo sapien
gtgactttggaatgtggtcttttca

SEQ ID NO: 222558 - DNA, 25 bp, Homo sapien
ccgaagctctcgctggaaaaagttc

SEQ ID NO: 222559 - DNA, 25 bp, Homo sapien
ctgccgaagctctcgctggaaaaag

SEQ ID NO: 222560 - DNA, 25 bp, Homo sapien
gaagctctcgctggaaaaagttcac

SEQ ID NO: 222561 - DNA, 25 bp, Homo sapien
gctctcgctggaaaaagttcacctt

SEQ ID NO: 222562 - DNA, 25 bp, Homo sapien
accagtgtgagcagcttatggacag

SEQ ID NO: 222563 - DNA, 25 bp, Homo sapien
aaaagtggctgctagaatgttcctc

SEQ ID NO: 222564 - DNA, 25 bp, Homo sapien
gctccacaggaggttgaatgccatc

SEQ ID NO: 222565 - DNA, 25 bp, Homo sapien
tcttatgcagggagcggataaaagt

SEQ ID NO: 222566 - DNA, 25 bp, Homo sapien
tcagcacactgggagaccaagcttg

SEQ ID NO: 222567 - DNA, 25 bp, Homo sapien
gcaacgaatcctgtgtacactgtga

SEQ ID NO: 222568 - DNA, 25 bp, Homo sapien
tagtcttgaaggcaaaggatcactg

SEQ ID NO: 222569 - DNA, 25 bp, Homo sapien
gtttctgtaggcatgcgtccttcca

SEQ ID NO: 222570 - DNA, 25 bp, Homo sapien
gtaaaggcgccaggggatgatcttc

SEQ ID NO: 222571 - DNA, 25 bp, Homo sapien
tgatcttcaggtagaactccttcac

SEQ ID NO: 222572 - DNA, 25 bp, Homo sapien
ttttgttcctggacacactcggaag

SEQ ID NO: 222573 - DNA, 25 bp, Homo sapien
cactcggaaggtgtaaaggcgccag

SEQ ID NO: 222574 - DNA, 25 bp, Homo sapien
catagcagtacaccttcttcggttt

SEQ ID NO: 222575 - DNA, 25 bp, Homo sapien
tagcagtacaccttcttcggtttct

SEQ ID NO: 222576 - DNA, 25 bp, Homo sapien
cagtacaccttcttcggtttcttca

SEQ ID NO: 222577 - DNA, 25 bp, Homo sapien
gcagtacaccttcttcggtttcttc

SEQ ID NO: 222578 - DNA, 25 bp, Homo sapien
tcagagggcgagtcttcatcttcct

SEQ ID NO: 222579 - DNA, 25 bp, Homo sapien
tcctcgtcaacagcagtggatggcc

SEQ ID NO: 222580 - DNA, 25 bp, Homo sapien
aagtaaatgctcacgcctgaagtgg

SEQ ID NO: 222581 - DNA, 25 bp, Homo sapien
gaagtggacacattgcgttcgacga

SEQ ID NO: 222582 - DNA, 25 bp, Homo sapien
tgagtcgcaagaacacctggaaagt

SEQ ID NO: 222583 - DNA, 25 bp, Homo sapien
ttttggtatgaaatgcaagcatgga

SEQ ID NO: 222584 - DNA, 25 bp, Homo sapien
ggaaagtctgcctgttggatgttac

SEQ ID NO: 222585 - DNA, 25 bp, Homo sapien
cacttaggacaataatgtcaaattc

SEQ ID NO: 222586 - DNA, 25 bp, Homo sapien
tgcccacaggtcaatacaagagtag

SEQ ID NO: 222587 - DNA, 25 bp, Homo sapien
gtgggattatcatactcatctcggg

SEQ ID NO: 222588 - DNA, 25 bp, Homo sapien
gtagaaaagtggcacacaattttgg

SEQ ID NO: 222589 - DNA, 25 bp, Homo sapien
ctcatgaatggacaaggtgtaattg

SEQ ID NO: 222590 - DNA, 25 bp, Homo sapien
gagctacagtaatcaggctgtgtga

SEQ ID NO: 222591 - DNA, 25 bp, Homo sapien
agctacagtaatcaggctgtgtgac

SEQ ID NO: 222592 - DNA, 25 bp, Homo sapien
gctacagtaatcaggctgtgtgact

SEQ ID NO: 222593 - DNA, 25 bp, Homo sapien
tactacgttggaattgggctcctga

SEQ ID NO: 222594 - DNA, 25 bp, Homo sapien
tggaatttccactgctagctcgaca

SEQ ID NO: 222595 - DNA, 25 bp, Homo sapien
gtgaactcttagtcccacaggccga

SEQ ID NO: 222596 - DNA, 25 bp, Homo sapien
tgtgatttcataacgcccagccttg

SEQ ID NO: 222597 - DNA, 25 bp, Homo sapien
gctcgcggtcctcattctggaggaa

SEQ ID NO: 222598 - DNA, 25 bp, Homo sapien
gatccaggtaatttccccgcacgta

SEQ ID NO: 222599 - DNA, 25 bp, Homo sapien
aggaagctgactacacgtgcggcaa

SEQ ID NO: 222600 - DNA, 25 bp, Homo sapien
tccaatcccaggagactttgcaaga

SEQ ID NO: 222601 - DNA, 25 bp, Homo sapien
caggtcccgtcaatgccaacagaca

SEQ ID NO: 222602 - DNA, 25 bp, Homo sapien
catgcctgtcaaggtaggagtctga

SEQ ID NO: 222603 - DNA, 25 bp, Homo sapien
gagtctgaccttagcacaggctgta

SEQ ID NO: 222604 - DNA, 25 bp, Homo sapien
tttcaagtcagcgtacactaaggct

SEQ ID NO: 222605 - DNA, 25 bp, Homo sapien
caatcagacaaactaatgggccctc

SEQ ID NO: 222606 - DNA, 25 bp, Homo sapien
gactttgtcacagtaatcaggtcag

SEQ ID NO: 222607 - DNA, 25 bp, Homo sapien
tgagaaccaagtagagcactcctat

SEQ ID NO: 222608 - DNA, 25 bp, Homo sapien
tccagggtagagaaatacagcccaa

SEQ ID NO: 222609 - DNA, 25 bp, Homo sapien
ggtgcaatcgactgccaaaggacgc

SEQ ID NO: 222610 - DNA, 25 bp, Homo sapien
tttgaatataatggggttgcagcac

SEQ ID NO: 222611 - DNA, 25 bp, Homo sapien
aggttacggacagccttatatgcca

SEQ ID NO: 222612 - DNA, 25 bp, Homo sapien
cagggtctggagcaaccacaaagac

SEQ ID NO: 222613 - DNA, 25 bp, Homo sapien
cacaaagacaagtgagatgaacgca

SEQ ID NO: 222614 - DNA, 25 bp, Homo sapien
ccaatctgggtaacatagtgagatc

SEQ ID NO: 222615 - DNA, 25 bp, Homo sapien
accaatctgggtaacatagtgagat

SEQ ID NO: 222616 - DNA, 25 bp, Homo sapien
ttcaagaccaatctgggtaacatag

SEQ ID NO: 222617 - DNA, 25 bp, Homo sapien
aagaccaatctgggtaacatagtga

SEQ ID NO: 222618 - DNA, 25 bp, Homo sapien
caaggttgaagacatacgcccagga

SEQ ID NO: 222619 - DNA, 25 bp, Homo sapien
ggacacggcctcatgaggtcctgac

SEQ ID NO: 222620 - DNA, 25 bp, Homo sapien
tactggctcagtccagaaaggcggg

SEQ ID NO: 222621 - DNA, 25 bp, Homo sapien
tcaatcaagatgtatactggctcag

SEQ ID NO: 222622 - DNA, 25 bp, Homo sapien
tcatagtcattaagttttattcccc

SEQ ID NO: 222623 - DNA, 25 bp, Homo sapien
ggttatctaaacgtttcacaagaga

SEQ ID NO: 222624 - DNA, 25 bp, Homo sapien
agagaaaatcctctcgtcaaatttt

SEQ ID NO: 222625 - DNA, 25 bp, Homo sapien
tcaaattcaatgctgcacattacca

SEQ ID NO: 222626 - DNA, 25 bp, Homo sapien
aaaactgactctgctatgcctgagc

SEQ ID NO: 222627 - DNA, 25 bp, Homo sapien
gactttggaccactgaatcttggct

SEQ ID NO: 222628 - DNA, 25 bp, Homo sapien
cattaactgcgcctgaagtggcagg

SEQ ID NO: 222629 - DNA, 25 bp, Homo sapien
gatctgcagcccagtcgggtggaac

SEQ ID NO: 222630 - DNA, 25 bp, Homo sapien
gataccccaacgctacagggtgagg

SEQ ID NO: 222631 - DNA, 25 bp, Homo sapien
tgcacaaagcaccatatcggctagg

SEQ ID NO: 222632 - DNA, 25 bp, Homo sapien
agggctggaccatagacaccggata

SEQ ID NO: 222633 - DNA, 25 bp, Homo sapien
tctcttcaccgagaggagtacacgg

SEQ ID NO: 222634 - DNA, 25 bp, Homo sapien
tctctggaactctggtaaaggcagg

SEQ ID NO: 222635 - DNA, 25 bp, Homo sapien
tctctctggaactctggtaaaggca

SEQ ID NO: 222636 - DNA, 25 bp, Homo sapien
gcctaaggctggagagaaacgttac

SEQ ID NO: 222637 - DNA, 25 bp, Homo sapien
tctctctctggaactctggtaaagg

SEQ ID NO: 222638 - DNA, 25 bp, Homo sapien
ggcagcactcagcagaagacgggct

SEQ ID NO: 222639 - DNA, 25 bp, Homo sapien
tgaatgacgtagaagtattgcgccg

SEQ ID NO: 222640 - DNA, 25 bp, Homo sapien
ttccacctccgctgtcctgggaagg

SEQ ID NO: 222641 - DNA, 25 bp, Homo sapien
tgccggaagcagtatgtgaatgacg

SEQ ID NO: 222642 - DNA, 25 bp, Homo sapien
gccacaatttcagctcctgttattg

SEQ ID NO: 222643 - DNA, 25 bp, Homo sapien
ccacaatttcagctcctgttattgg

SEQ ID NO: 222644 - DNA, 25 bp, Homo sapien
attagtcttggtagcggtttatcag

SEQ ID NO: 222645 - DNA, 25 bp, Homo sapien
cttggtagcggtttatcagttttgt

SEQ ID NO: 222646 - DNA, 25 bp, Homo sapien
cggggaattggattttcttacatgc

SEQ ID NO: 222647 - DNA, 25 bp, Homo sapien
acggggaattggattttcttacatg

SEQ ID NO: 222648 - DNA, 25 bp, Homo sapien
tgtggtgcctatacttaataatggg

SEQ ID NO: 222649 - DNA, 25 bp, Homo sapien
taactattccatattgtatccacaa

SEQ ID NO: 222650 - DNA, 25 bp, Homo sapien
gagttctgttgtacagtgtggtgcc

SEQ ID NO: 222651 - DNA, 25 bp, Homo sapien
gatatcactttgtaacccatacatt

SEQ ID NO: 222652 - DNA, 25 bp, Homo sapien
cacaggaaaatgttaatgccctaga

SEQ ID NO: 222653 - DNA, 25 bp, Homo sapien
cagttctatgtattccaagtggtca

SEQ ID NO: 222654 - DNA, 25 bp, Homo sapien
ggtatctaagcccataataggtcat

SEQ ID NO: 222655 - DNA, 25 bp, Homo sapien
tgttcgctcactctggaaattaaaa

SEQ ID NO: 222656 - DNA, 25 bp, Homo sapien
gatgaaagacttcgggtctgagcca

SEQ ID NO: 222657 - DNA, 25 bp, Homo sapien
tccggtatgggagaatgtgtgctca

SEQ ID NO: 222658 - DNA, 25 bp, Homo sapien
taccacctcaggaatcaagattgca

SEQ ID NO: 222659 - DNA, 25 bp, Homo sapien
tcttcaagacctggaatgtatccgg

SEQ ID NO: 222660 - DNA, 25 bp, Homo sapien
agtggcatgatttcagctcaccgaa

SEQ ID NO: 222661 - DNA, 25 bp, Homo sapien
cacctcttgggtttaagcgattctc

SEQ ID NO: 222662 - DNA, 25 bp, Homo sapien
gtggcatgatttcagctcaccgaaa

SEQ ID NO: 222663 - DNA, 25 bp, Homo sapien
cctccacctcttgggtttaagcgat

SEQ ID NO: 222664 - DNA, 25 bp, Homo sapien
tacagaatctccagggagtggtccc

SEQ ID NO: 222665 - DNA, 25 bp, Homo sapien
taggcaggatattcactacaaggtc

SEQ ID NO: 222666 - DNA, 25 bp, Homo sapien
catttgcagcgtgtgtactagaaac

SEQ ID NO: 222667 - DNA, 25 bp, Homo sapien
gagtggtcccatcgaacccgtgtgt

SEQ ID NO: 222668 - DNA, 25 bp, Homo sapien
tgctgtacccaagcaagacgttaat

SEQ ID NO: 222669 - DNA, 25 bp, Homo sapien
gagggagtgatagcttaactgctga

SEQ ID NO: 222670 - DNA, 25 bp, Homo sapien
gattccaacagagagtatttcctcc

SEQ ID NO: 222671 - DNA, 25 bp, Homo sapien
gataaagccgatgagattcatgggc

SEQ ID NO: 222672 - DNA, 25 bp, Homo sapien
gtctgtgctcttataccagggcagg

SEQ ID NO: 222673 - DNA, 25 bp, Homo sapien
tgtgctcttataccagggcagggtg

SEQ ID NO: 222674 - DNA, 25 bp, Homo sapien
gtgctcttataccagggcagggtgg

SEQ ID NO: 222675 - DNA, 25 bp, Homo sapien
tctgtgctcttataccagggcaggg

SEQ ID NO: 222676 - DNA, 25 bp, Homo sapien
gcagcttcctgtacttgcctgattt

SEQ ID NO: 222677 - DNA, 25 bp, Homo sapien
tgcagcttcctgtacttgcctgatt

SEQ ID NO: 222678 - DNA, 25 bp, Homo sapien
tcaacttggcgttaaagtctatcag

SEQ ID NO: 222679 - DNA, 25 bp, Homo sapien
ttgagctgtccttactacatgtgca

SEQ ID NO: 222680 - DNA, 25 bp, Homo sapien
aagtctatcagtaacatgatcccag

SEQ ID NO: 222681 - DNA, 25 bp, Homo sapien
ctgcttcactcggtagcgctccatt

SEQ ID NO: 222682 - DNA, 25 bp, Homo sapien
gaaagaggatgtgtgtcattaaagc

SEQ ID NO: 222683 - DNA, 25 bp, Homo sapien
gacctgtcacagtcaaggtgggtat

SEQ ID NO: 222684 - DNA, 25 bp, Homo sapien
cattaaagctttgttgggacctgtc

SEQ ID NO: 222685 - DNA, 25 bp, Homo sapien
tctgggcatcgtctttttcaaattc

SEQ ID NO: 222686 - DNA, 25 bp, Homo sapien
cattggtccctgagacaaggttcac

SEQ ID NO: 222687 - DNA, 25 bp, Homo sapien
caggactacaaagcccgagctgtgt

SEQ ID NO: 222688 - DNA, 25 bp, Homo sapien
tcatcagtggaaggtcagccatgga

SEQ ID NO: 222689 - DNA, 25 bp, Homo sapien
gcaattggatgtactggagggcact

SEQ ID NO: 222690 - DNA, 25 bp, Homo sapien
tgcataaagtttgtcttgagtttgc

SEQ ID NO: 222691 - DNA, 25 bp, Homo sapien
tgataaactcttccagcagacaaat

SEQ ID NO: 222692 - DNA, 25 bp, Homo sapien
ttgcattatccagctgataaactct

SEQ ID NO: 222693 - DNA, 25 bp, Homo sapien
cctgcataaagtttgtcttgagttt

SEQ ID NO: 222694 - DNA, 25 bp, Homo sapien
tgtcagcgctggatgcttactaggg

SEQ ID NO: 222695 - DNA, 25 bp, Homo sapien
tcagaaagtcttggttcctccaggc

SEQ ID NO: 222696 - DNA, 25 bp, Homo sapien
taggctttggcgagttaccttgcag

SEQ ID NO: 222697 - DNA, 25 bp, Homo sapien
tacagagataccaggaagttcccag

SEQ ID NO: 222698 - DNA, 25 bp, Homo sapien
gtacattttatagttaaatttctga

SEQ ID NO: 222699 - DNA, 25 bp, Homo sapien
ttttatagttaaatttctgatgatt

SEQ ID NO: 222700 - DNA, 25 bp, Homo sapien
agtacattttatagttaaatttctg

SEQ ID NO: 222701 - DNA, 25 bp, Homo sapien
cattttatagttaaatttctgatga

SEQ ID NO: 222702 - DNA, 25 bp, Homo sapien
tatatgactacagctaaattgccct

SEQ ID NO: 222703 - DNA, 25 bp, Homo sapien
taatagtacctgttttgatagagga

SEQ ID NO: 222704 - DNA, 25 bp, Homo sapien
gatagaggagatttccttgtgccct

SEQ ID NO: 222705 - DNA, 25 bp, Homo sapien
tcacgttgtgggatcttaaccccga

SEQ ID NO: 222706 - DNA, 25 bp, Homo sapien
taacgtcaagctggcaatttccaag

SEQ ID NO: 222707 - DNA, 25 bp, Homo sapien
cagccctgaagaactcctgtaacgt

SEQ ID NO: 222708 - DNA, 25 bp, Homo sapien
gaaggatctgagtctctccctgcgg

SEQ ID NO: 222709 - DNA, 25 bp, Homo sapien
tgtccagtttcgaaataattttata

SEQ ID NO: 222710 - DNA, 25 bp, Homo sapien
tgcatttccaaagagacccacaaga

SEQ ID NO: 222711 - DNA, 25 bp, Homo sapien
ccttgataagacagctccagtgaga

SEQ ID NO: 222712 - DNA, 25 bp, Homo sapien
gattctgcaaccctaggactcctct

SEQ ID NO: 222713 - DNA, 25 bp, Homo sapien
tcactagcgggtgctgcctgtttct

SEQ ID NO: 222714 - DNA, 25 bp, Homo sapien
gttctagaatcctaacccagactgg

SEQ ID NO: 222715 - DNA, 25 bp, Homo sapien
cctcagaaagggagacatggacaat

SEQ ID NO: 222716 - DNA, 25 bp, Homo sapien
cctttgtaggaggagctgatctcgc

SEQ ID NO: 222717 - DNA, 25 bp, Homo sapien
tgctgcctgtcccatactggccgtg

SEQ ID NO: 222718 - DNA, 25 bp, Homo sapien
cactctttgtgatcacagtcaaggg

SEQ ID NO: 222719 - DNA, 25 bp, Homo sapien
tcaaccagtggatgaccacagttct

SEQ ID NO: 222720 - DNA, 25 bp, Homo sapien
ttttggaggtatcaataaaccactc

SEQ ID NO: 222721 - DNA, 25 bp, Homo sapien
atctgtgaccagatatacccggcac

SEQ ID NO: 222722 - DNA, 25 bp, Homo sapien
actaggtgccacaactgagctcagc

SEQ ID NO: 222723 - DNA, 25 bp, Homo sapien
tgacttgctatggaaggcccactga

SEQ ID NO: 222724 - DNA, 25 bp, Homo sapien
gatgatacagagattggcccaggct

SEQ ID NO: 222725 - DNA, 25 bp, Homo sapien
gattaggaatgtgcgccagtgacac

SEQ ID NO: 222726 - DNA, 25 bp, Homo sapien
aaagttctgaattgcggagaaccac

SEQ ID NO: 222727 - DNA, 25 bp, Homo sapien
tcacgaaagttgctgaaccacttga

SEQ ID NO: 222728 - DNA, 25 bp, Homo sapien
ccttgttgtagtgcatattgagagc

SEQ ID NO: 222729 - DNA, 25 bp, Homo sapien
gacaccatctgaaattgcttgccgg

SEQ ID NO: 222730 - DNA, 25 bp, Homo sapien
tatgatgacctaggacttgcctcac

SEQ ID NO: 222731 - DNA, 25 bp, Homo sapien
aaatcagaggttgcttcagggatca

SEQ ID NO: 222732 - DNA, 25 bp, Homo sapien
tgtacaaacaagaggtccatccagt

SEQ ID NO: 222733 - DNA, 25 bp, Homo sapien
gacatttgccacgaggtgctcagaa

SEQ ID NO: 222734 - DNA, 25 bp, Homo sapien
gctgggatatcgtgtgaagaaaaac

SEQ ID NO: 222735 - DNA, 25 bp, Homo sapien
ggttggagctgggatatcgtgtgaa

SEQ ID NO: 222736 - DNA, 25 bp, Homo sapien
aataaaccttcaggaggttggagct

SEQ ID NO: 222737 - DNA, 25 bp, Homo sapien
tcttcaagtgaccagggtttagacc

SEQ ID NO: 222738 - DNA, 25 bp, Homo sapien
tcaagtggcagaacccgatgggtca

SEQ ID NO: 222739 - DNA, 25 bp, Homo sapien
ttctccaaggtcgtagggcaggctc

SEQ ID NO: 222740 - DNA, 25 bp, Homo sapien
taccctgggctatgaagactctttg

SEQ ID NO: 222741 - DNA, 25 bp, Homo sapien
taggagaatctagacgcttggccag

SEQ ID NO: 222742 - DNA, 25 bp, Homo sapien
ttttgtaataccgagtccacagcct

SEQ ID NO: 222743 - DNA, 25 bp, Homo sapien
tttcctcagaatctctagtgaagct

SEQ ID NO: 222744 - DNA, 25 bp, Homo sapien
tttgtaataccgagtccacagcctg

SEQ ID NO: 222745 - DNA, 25 bp, Homo sapien
tgccctggtcagctctttcctcaga

SEQ ID NO: 222746 - DNA, 25 bp, Homo sapien
cacatgcctcggacaatggtctcca

SEQ ID NO: 222747 - DNA, 25 bp, Homo sapien
tctctcgggccttctttgggcagcg

SEQ ID NO: 222748 - DNA, 25 bp, Homo sapien
cattgcctggcaccagaggattcgg

SEQ ID NO: 222749 - DNA, 25 bp, Homo sapien
tgtgctcatcaccaaaccattcggg

SEQ ID NO: 222750 - DNA, 25 bp, Homo sapien
tacaagcttctgctaggtgggagca

SEQ ID NO: 222751 - DNA, 25 bp, Homo sapien
gggagtctctatccagctctggagg

SEQ ID NO: 222752 - DNA, 25 bp, Homo sapien
tggaagtgcacccagaatgcgctgg

SEQ ID NO: 222753 - DNA, 25 bp, Homo sapien
cctcctctgcacttagaagggtaaa

SEQ ID NO: 222754 - DNA, 25 bp, Homo sapien
ctgcctggtaagttctgcccttacc

SEQ ID NO: 222755 - DNA, 25 bp, Homo sapien
tggtaagttctgcccttaccgtcac

SEQ ID NO: 222756 - DNA, 25 bp, Homo sapien
tctttctcaacaggggaactgccct

SEQ ID NO: 222757 - DNA, 25 bp, Homo sapien
ttctttctcaacaggggaactgccc

SEQ ID NO: 222758 - DNA, 25 bp, Homo sapien
caggctgcttactctacagggagaa

SEQ ID NO: 222759 - DNA, 25 bp, Homo sapien
tgcagagtttggagaaaggctaccc

SEQ ID NO: 222760 - DNA, 25 bp, Homo sapien
gaatgctctctagtaacctgttcag

SEQ ID NO: 222761 - DNA, 25 bp, Homo sapien
tcctcaaagtgaagaggtcagcgga

SEQ ID NO: 222762 - DNA, 25 bp, Homo sapien
tataacatacctgccaaaatgggtt

SEQ ID NO: 222763 - DNA, 25 bp, Homo sapien
ttacatatgtactttctgctggccc

SEQ ID NO: 222764 - DNA, 25 bp, Homo sapien
tccccgctaacaggtagccttgtag

SEQ ID NO: 222765 - DNA, 25 bp, Homo sapien
tatattcgtaccagcttttcatggg

SEQ ID NO: 222766 - DNA, 25 bp, Homo sapien
gcacgatatcggctccacctgccag

SEQ ID NO: 222767 - DNA, 25 bp, Homo sapien
cacgatatcggctccacctgccagg

SEQ ID NO: 222768 - DNA, 25 bp, Homo sapien
ggtcccctgaggtcatgcattgtaa

SEQ ID NO: 222769 - DNA, 25 bp, Homo sapien
gctgtgcacattctcccttgattcc

SEQ ID NO: 222770 - DNA, 25 bp, Homo sapien
gttgctgggcctcattctagcacct

SEQ ID NO: 222771 - DNA, 25 bp, Homo sapien
cctgaggtcatgcattgtaatcatc

SEQ ID NO: 222772 - DNA, 25 bp, Homo sapien
catggcccgaactagcgtttcaggt

SEQ ID NO: 222773 - DNA, 25 bp, Homo sapien
tgagcctgtcaagccatactctaga

SEQ ID NO: 222774 - DNA, 25 bp, Homo sapien
gatggcctgtgatacaactcttagg

SEQ ID NO: 222775 - DNA, 25 bp, Homo sapien
ttggaatacccttgactgagacgag

SEQ ID NO: 222776 - DNA, 25 bp, Homo sapien
gatgctcaaggtcaatacacatgaa

SEQ ID NO: 222777 - DNA, 25 bp, Homo sapien
ggatttgatagccttgtggaccaag

SEQ ID NO: 222778 - DNA, 25 bp, Homo sapien
cttgtggaccaagatgctcaaggtc

SEQ ID NO: 222779 - DNA, 25 bp, Homo sapien
acatgaacaggtgagggttgatgac

SEQ ID NO: 222780 - DNA, 25 bp, Homo sapien
cagtattctaaactcagggcccaac

SEQ ID NO: 222781 - DNA, 25 bp, Homo sapien
gtcgactgtaagagctgggacccac

SEQ ID NO: 222782 - DNA, 25 bp, Homo sapien
caggagctaccgtctgttgcaaggg

SEQ ID NO: 222783 - DNA, 25 bp, Homo sapien
ccagcctgacttagggagagtagca

SEQ ID NO: 222784 - DNA, 25 bp, Homo sapien
gcaggacgtggaccacagagagtca

SEQ ID NO: 222785 - DNA, 25 bp, Homo sapien
agcccgaggaagtcaagtctcccca

SEQ ID NO: 222786 - DNA, 25 bp, Homo sapien
gagtcatgtacaggctgcgctttca

SEQ ID NO: 222787 - DNA, 25 bp, Homo sapien
cctgaagagcccgaggaagtcaagt

SEQ ID NO: 222788 - DNA, 25 bp, Homo sapien
tcccaaaagggcatgaagtcacagt

SEQ ID NO: 222789 - DNA, 25 bp, Homo sapien
gcaagacatttctggctaagagcca

SEQ ID NO: 222790 - DNA, 25 bp, Homo sapien
gacatggtaaacagccagggcctga

SEQ ID NO: 222791 - DNA, 25 bp, Homo sapien
ccagcttttcagagaccagaggcaa

SEQ ID NO: 222792 - DNA, 25 bp, Homo sapien
tgaattgctgtcctcttgcacccct

SEQ ID NO: 222793 - DNA, 25 bp, Homo sapien
aggactcttgattctggtttcagac

SEQ ID NO: 222794 - DNA, 25 bp, Homo sapien
ccaagtctgaaatcacaagataggg

SEQ ID NO: 222795 - DNA, 25 bp, Homo sapien
tctaaactgctttggcctggaagct

SEQ ID NO: 222796 - DNA, 25 bp, Homo sapien
cagctgcacgaacagcttctggtgg

SEQ ID NO: 222797 - DNA, 25 bp, Homo sapien
ttctggtggaagaggcctactcgct

SEQ ID NO: 222798 - DNA, 25 bp, Homo sapien
tccctgcacaacagatggcatccct

SEQ ID NO: 222799 - DNA, 25 bp, Homo sapien
cctactcgctgtgtgactaagagga

SEQ ID NO: 222800 - DNA, 25 bp, Homo sapien
ggtttgggtccactgagccagtgga

SEQ ID NO: 222801 - DNA, 25 bp, Homo sapien
ggatcagtgtcctgagatgagtctc

SEQ ID NO: 222802 - DNA, 25 bp, Homo sapien
atcagtgtcctgagatgagtctcca

SEQ ID NO: 222803 - DNA, 25 bp, Homo sapien
tttgggtccactgagccagtggatc

SEQ ID NO: 222804 - DNA, 25 bp, Homo sapien
tgagtcacagaacctcacagtaggg

SEQ ID NO: 222805 - DNA, 25 bp, Homo sapien
ctcagcgccagtgccacagaaggca

SEQ ID NO: 222806 - DNA, 25 bp, Homo sapien
catggtgagtccacatgctcaacgg

SEQ ID NO: 222807 - DNA, 25 bp, Homo sapien
gaaggcaacctttaacatggtgagt

SEQ ID NO: 222808 - DNA, 25 bp, Homo sapien
aaagcccgctgatagagggccagcc

SEQ ID NO: 222809 - DNA, 25 bp, Homo sapien
agctgcttagcagggcaagccttga

SEQ ID NO: 222810 - DNA, 25 bp, Homo sapien
cctgggtggtggccataattctgag

SEQ ID NO: 222811 - DNA, 25 bp, Homo sapien
agcaggacagacagtgccctccatt

SEQ ID NO: 222812 - DNA, 25 bp, Homo sapien
cccaccagcttgctccattggatgg

SEQ ID NO: 222813 - DNA, 25 bp, Homo sapien
cattggatggtactgaaaaagggat

SEQ ID NO: 222814 - DNA, 25 bp, Homo sapien
gggacttgagtttgctgacaccacc

SEQ ID NO: 222815 - DNA, 25 bp, Homo sapien
cgccgggtaggctcgaactgcagca

SEQ ID NO: 222816 - DNA, 25 bp, Homo sapien
cgtggttcagacacagttctgtgcc

SEQ ID NO: 222817 - DNA, 25 bp, Homo sapien
catcagacactgagcacgaagcaca

SEQ ID NO: 222818 - DNA, 25 bp, Homo sapien
ggtggttggccaccaacatatagaa

SEQ ID NO: 222819 - DNA, 25 bp, Homo sapien
tagaaatgtgttgcccctactgccc

SEQ ID NO: 222820 - DNA, 25 bp, Homo sapien
cttcctcaggctaggcagctgcttc

SEQ ID NO: 222821 - DNA, 25 bp, Homo sapien
agctgcttcctctggccgggctaca

SEQ ID NO: 222822 - DNA, 25 bp, Homo sapien
ggcagctgcttcctctggccgggct

SEQ ID NO: 222823 - DNA, 25 bp, Homo sapien
ttcctcaggctaggcagctgcttcc

SEQ ID NO: 222824 - DNA, 25 bp, Homo sapien
agagaggccgctgggcgactgagcc

SEQ ID NO: 222825 - DNA, 25 bp, Homo sapien
cgactgagccactcgggcagctgga

SEQ ID NO: 222826 - DNA, 25 bp, Homo sapien
aggccgctgggcgactgagccactc

SEQ ID NO: 222827 - DNA, 25 bp, Homo sapien
ctgggcgactgagccactcgggcag

SEQ ID NO: 222828 - DNA, 25 bp, Homo sapien
tcagggcaggcactcttgggaatag

SEQ ID NO: 222829 - DNA, 25 bp, Homo sapien
cacacgggctgttcatttggcagca

SEQ ID NO: 222830 - DNA, 25 bp, Homo sapien
taatgatagttgctacagccagaca

SEQ ID NO: 222831 - DNA, 25 bp, Homo sapien
tatcttgggttgcaatcagggcagg

SEQ ID NO: 222832 - DNA, 25 bp, Homo sapien
ttcccgtcagcagttcatacagtag

SEQ ID NO: 222833 - DNA, 25 bp, Homo sapien
ggcttccgtcagctcggaaatccca

SEQ ID NO: 222834 - DNA, 25 bp, Homo sapien
tcacaggcttccgtcagctcggaaa

SEQ ID NO: 222835 - DNA, 25 bp, Homo sapien
agtagagacccaaagctccaccagt

SEQ ID NO: 222836 - DNA, 25 bp, Homo sapien
gctgtagagattgtccacggcctcc

SEQ ID NO: 222837 - DNA, 25 bp, Homo sapien
ctggggcgctgtagagattgtccac

SEQ ID NO: 222838 - DNA, 25 bp, Homo sapien
ggcgctgtagagattgtccacggcc

SEQ ID NO: 222839 - DNA, 25 bp, Homo sapien
gtagagattgtccacggcctccccg

SEQ ID NO: 222840 - DNA, 25 bp, Homo sapien
ggccaaaatatgtgagccggatgtg

SEQ ID NO: 222841 - DNA, 25 bp, Homo sapien
ccaaaatatgtgagccggatgtgac

SEQ ID NO: 222842 - DNA, 25 bp, Homo sapien
ctggccaaaatatgtgagccggatg

SEQ ID NO: 222843 - DNA, 25 bp, Homo sapien
gccaaaatatgtgagccggatgtga

SEQ ID NO: 222844 - DNA, 25 bp, Homo sapien
agagcccacagggtactcccaggag

SEQ ID NO: 222845 - DNA, 25 bp, Homo sapien
gtcatgcggtaggagccaatggcct

SEQ ID NO: 222846 - DNA, 25 bp, Homo sapien
gacagattgaggacagctgatacag

SEQ ID NO: 222847 - DNA, 25 bp, Homo sapien
gaggagcagacaaccttggaggtcc

SEQ ID NO: 222848 - DNA, 25 bp, Homo sapien
gcgcctccagcgctaccagcatctc

SEQ ID NO: 222849 - DNA, 25 bp, Homo sapien
ccctgctcgtgcagcgcctccagcg

SEQ ID NO: 222850 - DNA, 25 bp, Homo sapien
cacagcaccccctgctcgtgcagcg

SEQ ID NO: 222851 - DNA, 25 bp, Homo sapien
tccagcgctaccagcatctctgccg

SEQ ID NO: 222852 - DNA, 25 bp, Homo sapien
caagtgagcccccgagggggcccag

SEQ ID NO: 222853 - DNA, 25 bp, Homo sapien
gcccccgagggggcccagcgtctga

SEQ ID NO: 222854 - DNA, 25 bp, Homo sapien
tgagcccccgagggggcccagcgtc

SEQ ID NO: 222855 - DNA, 25 bp, Homo sapien
caggaacccaagtgagcccccgagg

SEQ ID NO: 222856 - DNA, 25 bp, Homo sapien
tcctggctgtgggttcaccttcagc

SEQ ID NO: 222857 - DNA, 25 bp, Homo sapien
tggtcctggctgtgggttcaccttc

SEQ ID NO: 222858 - DNA, 25 bp, Homo sapien
ctagcttgaaggtgcaggtggccac

SEQ ID NO: 222859 - DNA, 25 bp, Homo sapien
cctttggaaggtccgaggagccaga

SEQ ID NO: 222860 - DNA, 25 bp, Homo sapien
gagctgagcccagaatgtcgggagt

SEQ ID NO: 222861 - DNA, 25 bp, Homo sapien
cctaggaggctccagggcgattctg

SEQ ID NO: 222862 - DNA, 25 bp, Homo sapien
ccagaatgtcgggagtgcgcctggg

SEQ ID NO: 222863 - DNA, 25 bp, Homo sapien
ctaggagaaggttcggagaagtcct

SEQ ID NO: 222864 - DNA, 25 bp, Homo sapien
catgcagagggagcggtgagcgtgg

SEQ ID NO: 222865 - DNA, 25 bp, Homo sapien
ggccatgcagagggagcggtgagcg

SEQ ID NO: 222866 - DNA, 25 bp, Homo sapien
gagggagcggtgagcgtggggacag

SEQ ID NO: 222867 - DNA, 25 bp, Homo sapien
agagggagcggtgagcgtggggaca

SEQ ID NO: 222868 - DNA, 25 bp, Homo sapien
tcttgacccaactaaagtgggccca

SEQ ID NO: 222869 - DNA, 25 bp, Homo sapien
tgacccaactaaagtgggcccagcc

SEQ ID NO: 222870 - DNA, 25 bp, Homo sapien
agtgggcccagccttacaaactggc

SEQ ID NO: 222871 - DNA, 25 bp, Homo sapien
gtgggcccagccttacaaactggca

SEQ ID NO: 222872 - DNA, 25 bp, Homo sapien
gatgtgcacctcactttaaaaagtc

SEQ ID NO: 222873 - DNA, 25 bp, Homo sapien
tatgatgactatatgtcatgacccc

SEQ ID NO: 222874 - DNA, 25 bp, Homo sapien
aaaagtcaggcacacacttatgatg

SEQ ID NO: 222875 - DNA, 25 bp, Homo sapien
tatatgtcatgaccccagatgtgca

SEQ ID NO: 222876 - DNA, 25 bp, Homo sapien
cgcattttaagggttgacgacatac

SEQ ID NO: 222877 - DNA, 25 bp, Homo sapien
tccgcattttaagggttgacgacat

SEQ ID NO: 222878 - DNA, 25 bp, Homo sapien
ggctccgcattttaagggttgacga

SEQ ID NO: 222879 - DNA, 25 bp, Homo sapien
gcattttaagggttgacgacatacc

SEQ ID NO: 222880 - DNA, 25 bp, Homo sapien
ggaagatggagtcctcgctcacaaa

SEQ ID NO: 222881 - DNA, 25 bp, Homo sapien
actccgtgtgggatgatggtcagcc

SEQ ID NO: 222882 - DNA, 25 bp, Homo sapien
ggatgatggtcagccgctccctgct

SEQ ID NO: 222883 - DNA, 25 bp, Homo sapien
cacaaagtacctgagcagcttcgtc

SEQ ID NO: 222884 - DNA, 25 bp, Homo sapien
aaagtggggcatgttcaggcagaac

SEQ ID NO: 222885 - DNA, 25 bp, Homo sapien
caggttctgggtaggagtttccaag

SEQ ID NO: 222886 - DNA, 25 bp, Homo sapien
aacaaccagcttttgtgggagggag

SEQ ID NO: 222887 - DNA, 25 bp, Homo sapien
aggcagaacaaccagcttttgtggg

SEQ ID NO: 222888 - DNA, 25 bp, Homo sapien
tccggttgccgggtcctggaccagc

SEQ ID NO: 222889 - DNA, 25 bp, Homo sapien
cggttgccgggtcctggaccagctg

SEQ ID NO: 222890 - DNA, 25 bp, Homo sapien
ctccggttgccgggtcctggaccag

SEQ ID NO: 222891 - DNA, 25 bp, Homo sapien
tcaccacaaaggtccctccggttgc

SEQ ID NO: 222892 - DNA, 25 bp, Homo sapien
tctcccatggaacaaacaagcctaa

SEQ ID NO: 222893 - DNA, 25 bp, Homo sapien
ccaggcatgtgagcaaataggcagg

SEQ ID NO: 222894 - DNA, 25 bp, Homo sapien
atgcacaaagtatcaaaatcccagg

SEQ ID NO: 222895 - DNA, 25 bp, Homo sapien
ggtgccccgtctaaggcaggcatct

SEQ ID NO: 222896 - DNA, 25 bp, Homo sapien
agagctcagcgtgcgaatgggccgg

SEQ ID NO: 222897 - DNA, 25 bp, Homo sapien
gccggagcctcaggctgctgaaacc

SEQ ID NO: 222898 - DNA, 25 bp, Homo sapien
tcagcgtgcgaatgggccggagcct

SEQ ID NO: 222899 - DNA, 25 bp, Homo sapien
gcgaatgggccggagcctcaggctg

SEQ ID NO: 222900 - DNA, 25 bp, Homo sapien
tctgcccgccgcaggtatttggtaa

SEQ ID NO: 222901 - DNA, 25 bp, Homo sapien
tgcccgccgcaggtatttggtaatt

SEQ ID NO: 222902 - DNA, 25 bp, Homo sapien
acagcctcacgtcgctccttgttgg

SEQ ID NO: 222903 - DNA, 25 bp, Homo sapien
agcttcacagcctcacgtcgctcct

SEQ ID NO: 222904 - DNA, 25 bp, Homo sapien
agagccaccctgttgcgaatctgct

SEQ ID NO: 222905 - DNA, 25 bp, Homo sapien
cacgccattctgatagtggttgaag

SEQ ID NO: 222906 - DNA, 25 bp, Homo sapien
tccaggtacacgtgagcttgggacc

SEQ ID NO: 222907 - DNA, 25 bp, Homo sapien
caccagatagtcacgttttgtcatg

SEQ ID NO: 222908 - DNA, 25 bp, Homo sapien
tcagagctaaagtgggtaaggtctt

SEQ ID NO: 222909 - DNA, 25 bp, Homo sapien
cctaagtggtggtaatgatagaatc

SEQ ID NO: 222910 - DNA, 25 bp, Homo sapien
cattagggaggacctagctggtagc

SEQ ID NO: 222911 - DNA, 25 bp, Homo sapien
aatgtcagggagactcatattcacc

SEQ ID NO: 222912 - DNA, 25 bp, Homo sapien
cacccaggctggattgcagtggtgc

SEQ ID NO: 222913 - DNA, 25 bp, Homo sapien
tttttgagtcagagtctcgctatgt

SEQ ID NO: 222914 - DNA, 25 bp, Homo sapien
ggctatgttttgtatttgtagtaga

SEQ ID NO: 222915 - DNA, 25 bp, Homo sapien
ttacaggcacttgcctaccacacct

SEQ ID NO: 222916 - DNA, 25 bp, Homo sapien
cacacgctgggctcaaatgctgttc

SEQ ID NO: 222917 - DNA, 25 bp, Homo sapien
gagcaagcttggtatccagtacgca

SEQ ID NO: 222918 - DNA, 25 bp, Homo sapien
cacagggcctccgtagagcaagctt

SEQ ID NO: 222919 - DNA, 25 bp, Homo sapien
tacgcattcagcacatggaggccac

SEQ ID NO: 222920 - DNA, 25 bp, Homo sapien
gtttagcacttctccgtggaccgga

SEQ ID NO: 222921 - DNA, 25 bp, Homo sapien
tccgtggaccggatggattgcccct

SEQ ID NO: 222922 - DNA, 25 bp, Homo sapien
tagcacttctccgtggaccggatgg

SEQ ID NO: 222923 - DNA, 25 bp, Homo sapien
gatggattgcccctgctgtgttttg

SEQ ID NO: 222924 - DNA, 25 bp, Homo sapien
ctggagccagcagagagcagagcac

SEQ ID NO: 222925 - DNA, 25 bp, Homo sapien
agcagagcacagagctgggctgtaa

SEQ ID NO: 222926 - DNA, 25 bp, Homo sapien
tggagccagcagagagcagagcaca

SEQ ID NO: 222927 - DNA, 25 bp, Homo sapien
agagcacagagctgggctgtaagaa

SEQ ID NO: 222928 - DNA, 25 bp, Homo sapien
tggcagactcggtgccacgttggat

SEQ ID NO: 222929 - DNA, 25 bp, Homo sapien
ctgttggcagacggaatgactgagt

SEQ ID NO: 222930 - DNA, 25 bp, Homo sapien
atgactgagtggcagactcggtgcc

SEQ ID NO: 222931 - DNA, 25 bp, Homo sapien
cggaatgactgagtggcagactcgg

SEQ ID NO: 222932 - DNA, 25 bp, Homo sapien
tgagaaggtcatgtggcctccaagg

SEQ ID NO: 222933 - DNA, 25 bp, Homo sapien
agaaggtcatgtggcctccaaggac

SEQ ID NO: 222934 - DNA, 25 bp, Homo sapien
tttgagaaggtcatgtggcctccaa

SEQ ID NO: 222935 - DNA, 25 bp, Homo sapien
ttttgagaaggtcatgtggcctcca

SEQ ID NO: 222936 - DNA, 25 bp, Homo sapien
cccaggcggccaaagggatgacagc

SEQ ID NO: 222937 - DNA, 25 bp, Homo sapien
ggcggccaaagggatgacagccgtg

SEQ ID NO: 222938 - DNA, 25 bp, Homo sapien
caatgtgtgacccaggcggccaaag

SEQ ID NO: 222939 - DNA, 25 bp, Homo sapien
aatgtgtgacccaggcggccaaagg

SEQ ID NO: 222940 - DNA, 25 bp, Homo sapien
agaaagcggcgcgtgcaacccacgg

SEQ ID NO: 222941 - DNA, 25 bp, Homo sapien
tgaatcccggccaggatgcggccag

SEQ ID NO: 222942 - DNA, 25 bp, Homo sapien
ccccaggtcatttggagagaaagag

SEQ ID NO: 222943 - DNA, 25 bp, Homo sapien
cagccgcaaggtgcacggtcccagg

SEQ ID NO: 222944 - DNA, 25 bp, Homo sapien
ctgggagccgggtccgcgggccagg

SEQ ID NO: 222945 - DNA, 25 bp, Homo sapien
tgggagccgggtccgcgggccaggc

SEQ ID NO: 222946 - DNA, 25 bp, Homo sapien
taaagccgcaaggtctgcacggctg

SEQ ID NO: 222947 - DNA, 25 bp, Homo sapien
gctgcggatgagctcatacttgagc

SEQ ID NO: 222948 - DNA, 25 bp, Homo sapien
ttagaataaaccaccaatcaccgcc

SEQ ID NO: 222949 - DNA, 25 bp, Homo sapien
gctgctttccggcatccagcgtgcg

SEQ ID NO: 222950 - DNA, 25 bp, Homo sapien
tctttccagcgtgtctggcaagtga

SEQ ID NO: 222951 - DNA, 25 bp, Homo sapien
tcgcaggacttctttccagcgtgtc

SEQ ID NO: 222952 - DNA, 25 bp, Homo sapien
gacttctttccagcgtgtctggcaa

SEQ ID NO: 222953 - DNA, 25 bp, Homo sapien
ttccagcgtgtctggcaagtgagag

SEQ ID NO: 222954 - DNA, 25 bp, Homo sapien
cagatgctaactctcttgtgggttc

SEQ ID NO: 222955 - DNA, 25 bp, Homo sapien
gctttagcttattaaaggcccagcc

SEQ ID NO: 222956 - DNA, 25 bp, Homo sapien
aatgttcccggcatgatggcgttca

SEQ ID NO: 222957 - DNA, 25 bp, Homo sapien
tcaggaaagtccctgtcagctgtgg

SEQ ID NO: 222958 - DNA, 25 bp, Homo sapien
tggtggcaccttggccggaaagaac

SEQ ID NO: 222959 - DNA, 25 bp, Homo sapien
aatctggcttggcagtcagatggcc

SEQ ID NO: 222960 - DNA, 25 bp, Homo sapien
aatgtcccagtacaagcaaatggca

SEQ ID NO: 222961 - DNA, 25 bp, Homo sapien
gcttggcagtcagatggccctgcag

SEQ ID NO: 222962 - DNA, 25 bp, Homo sapien
caggagctccgaaagcaagggctgc

SEQ ID NO: 222963 - DNA, 25 bp, Homo sapien
ccgcatccctactttggacaggagc

SEQ ID NO: 222964 - DNA, 25 bp, Homo sapien
gagctccgaaagcaagggctgcttg

SEQ ID NO: 222965 - DNA, 25 bp, Homo sapien
cagcaggatccgcatccctactttg

SEQ ID NO: 222966 - DNA, 25 bp, Homo sapien
gctaataaatagagggcaggtacca

SEQ ID NO: 222967 - DNA, 25 bp, Homo sapien
tcgtcttgaagggagcgaggcattc

SEQ ID NO: 222968 - DNA, 25 bp, Homo sapien
taataaatacacgagccgggtgcgg

SEQ ID NO: 222969 - DNA, 25 bp, Homo sapien
cacgttgttgaaggcactgaattcc

SEQ ID NO: 222970 - DNA, 25 bp, Homo sapien
cattctaaatcctcataaagtgctt

SEQ ID NO: 222971 - DNA, 25 bp, Homo sapien
gaagtggccccagataacgtctcag

SEQ ID NO: 222972 - DNA, 25 bp, Homo sapien
taaacactaatgtgcaggaatcctg

SEQ ID NO: 222973 - DNA, 25 bp, Homo sapien
taactcgggcctggatggacttccc

SEQ ID NO: 222974 - DNA, 25 bp, Homo sapien
caatggaaacctagggctaagccgg

SEQ ID NO: 222975 - DNA, 25 bp, Homo sapien
gtggcagtctgtgggtctctgcttc

SEQ ID NO: 222976 - DNA, 25 bp, Homo sapien
aggtggcagtctgtgggtctctgct

SEQ ID NO: 222977 - DNA, 25 bp, Homo sapien
ctcctcctcttccccctgcccttgg

SEQ ID NO: 222978 - DNA, 25 bp, Homo sapien
ctctcctcctcttccccctgccctt

SEQ ID NO: 222979 - DNA, 25 bp, Homo sapien
ctttccggcttcatcttctcccgca

SEQ ID NO: 222980 - DNA, 25 bp, Homo sapien
ccggcttcatcttctcccgcagagg

SEQ ID NO: 222981 - DNA, 25 bp, Homo sapien
ttccggcttcatcttctcccgcaga

SEQ ID NO: 222982 - DNA, 25 bp, Homo sapien
cggcttcatcttctcccgcagaggc

SEQ ID NO: 222983 - DNA, 25 bp, Homo sapien
tccgacatccccagtcctggtcctg

SEQ ID NO: 222984 - DNA, 25 bp, Homo sapien
gcccggacaggtcccctccgacatc

SEQ ID NO: 222985 - DNA, 25 bp, Homo sapien
agaggaacgttaggaaagcaataag

SEQ ID NO: 222986 - DNA, 25 bp, Homo sapien
agagggacaaatcaacctcctgggg

SEQ ID NO: 222987 - DNA, 25 bp, Homo sapien
gagggagcatcagccctgaagtcac

SEQ ID NO: 222988 - DNA, 25 bp, Homo sapien
tttccgttccttccagggtgcattc

SEQ ID NO: 222989 - DNA, 25 bp, Homo sapien
cattctgggaatttcctcagggaca

SEQ ID NO: 222990 - DNA, 25 bp, Homo sapien
ccagacagcggactggctgcctgtc

SEQ ID NO: 222991 - DNA, 25 bp, Homo sapien
cccagggttgttatgagagcaggaa

SEQ ID NO: 222992 - DNA, 25 bp, Homo sapien
cacccaggagggttcattaccgagc

SEQ ID NO: 222993 - DNA, 25 bp, Homo sapien
cttacgagttaggtcagggcccaga

SEQ ID NO: 222994 - DNA, 25 bp, Homo sapien
tcttccctgaacctagctggcagtg

SEQ ID NO: 222995 - DNA, 25 bp, Homo sapien
cagcgaacgtgctgagagaacgtca

SEQ ID NO: 222996 - DNA, 25 bp, Homo sapien
tgagagaacgtcagctccacgtagg

SEQ ID NO: 222997 - DNA, 25 bp, Homo sapien
aacgtgctgagagaacgtcagctcc

SEQ ID NO: 222998 - DNA, 25 bp, Homo sapien
ggcattcgcagcgaacgtgctgaga

SEQ ID NO: 222999 - DNA, 25 bp, Homo sapien
atgggctgaacatgtgctccacctc

SEQ ID NO: 223000 - DNA, 25 bp, Homo sapien
gtgacattggccgtctccaccggca

SEQ ID NO: 223001 - DNA, 25 bp, Homo sapien
gggtactcggacacgacgtccacca

SEQ ID NO: 223002 - DNA, 25 bp, Homo sapien
gtgcagattctcatcgccgcagcag

SEQ ID NO: 223003 - DNA, 25 bp, Homo sapien
ctctgacgagccgttcccagcagac

SEQ ID NO: 223004 - DNA, 25 bp, Homo sapien
cttccacctctgacgagccgttccc

SEQ ID NO: 223005 - DNA, 25 bp, Homo sapien
cacctctgacgagccgttcccagca

SEQ ID NO: 223006 - DNA, 25 bp, Homo sapien
tctgacgagccgttcccagcagaca

SEQ ID NO: 223007 - DNA, 25 bp, Homo sapien
ttgctgcacatgctctgccctgtct

SEQ ID NO: 223008 - DNA, 25 bp, Homo sapien
tcagagcagcctgagtaccactaaa

SEQ ID NO: 223009 - DNA, 25 bp, Homo sapien
tcatttggaaaaggatgggaggcta

SEQ ID NO: 223010 - DNA, 25 bp, Homo sapien
actcactggaccctgggtaggttag

SEQ ID NO: 223011 - DNA, 25 bp, Homo sapien
ctgcaggaagcaagggaacagcctc

SEQ ID NO: 223012 - DNA, 25 bp, Homo sapien
tgcaggaagcaagggaacagcctca

SEQ ID NO: 223013 - DNA, 25 bp, Homo sapien
ggagctgcaggaagcaagggaacag

SEQ ID NO: 223014 - DNA, 25 bp, Homo sapien
agctgcaggaagcaagggaacagcc

SEQ ID NO: 223015 - DNA, 25 bp, Homo sapien
gcagacgaggttcccgagccgagtt

SEQ ID NO: 223016 - DNA, 25 bp, Homo sapien
ccggtggttcgagcatcttctggaa

SEQ ID NO: 223017 - DNA, 25 bp, Homo sapien
tcttctggaagccttgcggagtcag

SEQ ID NO: 223018 - DNA, 25 bp, Homo sapien
gatgcagtttcctccgcagacagca

SEQ ID NO: 223019 - DNA, 25 bp, Homo sapien
atgtcttgagccgtttctgggtctt

SEQ ID NO: 223020 - DNA, 25 bp, Homo sapien
tgtcttgagccgtttctgggtcttc

SEQ ID NO: 223021 - DNA, 25 bp, Homo sapien
gatgtcttgagccgtttctgggtct

SEQ ID NO: 223022 - DNA, 25 bp, Homo sapien
ctgatgtcttgagccgtttctgggt

SEQ ID NO: 223023 - DNA, 25 bp, Homo sapien
tgaaggtctggagtctccgcttggc

SEQ ID NO: 223024 - DNA, 25 bp, Homo sapien
aaggctgcagagtcgggaggcagcc

SEQ ID NO: 223025 - DNA, 25 bp, Homo sapien
gatccagtgctcatcctgatccggg

SEQ ID NO: 223026 - DNA, 25 bp, Homo sapien
gagtctccgcttggcaggagatcca

SEQ ID NO: 223027 - DNA, 25 bp, Homo sapien
cagatgacatcatgcacctgaatca

SEQ ID NO: 223028 - DNA, 25 bp, Homo sapien
tgatgaattcaatgctccagatgac

SEQ ID NO: 223029 - DNA, 25 bp, Homo sapien
cagctctagcttcaggtcaggaaag

SEQ ID NO: 223030 - DNA, 25 bp, Homo sapien
gggagtccagttctcccagatgatg

SEQ ID NO: 223031 - DNA, 25 bp, Homo sapien
ggtagcctctgactgcaatttattg

SEQ ID NO: 223032 - DNA, 25 bp, Homo sapien
tggctatctttccagagcatctcca

SEQ ID NO: 223033 - DNA, 25 bp, Homo sapien
gctttcgctcagcaatgcatcattg

SEQ ID NO: 223034 - DNA, 25 bp, Homo sapien
cttccaaggccagtaattagggtgt

SEQ ID NO: 223035 - DNA, 25 bp, Homo sapien
tagctctcagctgtatgaagcccag

SEQ ID NO: 223036 - DNA, 25 bp, Homo sapien
gaagcccagaggtgaatattccagg

SEQ ID NO: 223037 - DNA, 25 bp, Homo sapien
tgtatcctcatcacctaagctggca

SEQ ID NO: 223038 - DNA, 25 bp, Homo sapien
tcccattggtaagaacataggcaca

SEQ ID NO: 223039 - DNA, 25 bp, Homo sapien
taaatacgtttcagcaatgctgttt

SEQ ID NO: 223040 - DNA, 25 bp, Homo sapien
tggaagtggctgagccactagccca

SEQ ID NO: 223041 - DNA, 25 bp, Homo sapien
gctgagccactagcccatgcctgta

SEQ ID NO: 223042 - DNA, 25 bp, Homo sapien
atatatatggaagtggctgagccac

SEQ ID NO: 223043 - DNA, 25 bp, Homo sapien
gtttcttcctgcatcaattgacatg

SEQ ID NO: 223044 - DNA, 25 bp, Homo sapien
ttctgagagtttgtaccatgaatat

SEQ ID NO: 223045 - DNA, 25 bp, Homo sapien
gataccctttatcgagttcaggaag

SEQ ID NO: 223046 - DNA, 25 bp, Homo sapien
gggagaaagcaatcttttactgtga

SEQ ID NO: 223047 - DNA, 25 bp, Homo sapien
gctaactttggtattgacataatct

SEQ ID NO: 223048 - DNA, 25 bp, Homo sapien
tgtaacaaaagtctaaaatgtgctc

SEQ ID NO: 223049 - DNA, 25 bp, Homo sapien
cacacatactttgggttcaggtaga

SEQ ID NO: 223050 - DNA, 25 bp, Homo sapien
aaatgtgctcgcctatggattccac

SEQ ID NO: 223051 - DNA, 25 bp, Homo sapien
cacagtgcccaagaaccagtaagct

SEQ ID NO: 223052 - DNA, 25 bp, Homo sapien
acaaaagtgagacgtctgcccaagg

SEQ ID NO: 223053 - DNA, 25 bp, Homo sapien
gagacatgaacctcctagacacagg

SEQ ID NO: 223054 - DNA, 25 bp, Homo sapien
ggcgcaaacggtaccaagcaatgta

SEQ ID NO: 223055 - DNA, 25 bp, Homo sapien
gaggctgcccgaaagaggaaattcc

SEQ ID NO: 223056 - DNA, 25 bp, Homo sapien
tgaggtgatcatgaccattggcttc

SEQ ID NO: 223057 - DNA, 25 bp, Homo sapien
tccatgtcattgtagcagagtgtgc

SEQ ID NO: 223058 - DNA, 25 bp, Homo sapien
tctcccgaacagtagaggccttcct

SEQ ID NO: 223059 - DNA, 25 bp, Homo sapien
tagacatttattagcttcccctggg

SEQ ID NO: 223060 - DNA, 25 bp, Homo sapien
tgggcttccctacagcttaccagag

SEQ ID NO: 223061 - DNA, 25 bp, Homo sapien
tgccgttatgtcaagagtcaacaag

SEQ ID NO: 223062 - DNA, 25 bp, Homo sapien
tcaacaaggtgggtatatctggagt

SEQ ID NO: 223063 - DNA, 25 bp, Homo sapien
taagtttgtggctcctgaagaagtc

SEQ ID NO: 223064 - DNA, 25 bp, Homo sapien
gttttcatctctagggtacatacct

SEQ ID NO: 223065 - DNA, 25 bp, Homo sapien
tttcataagtttgtggctcctgaag

SEQ ID NO: 223066 - DNA, 25 bp, Homo sapien
agtttgtggctcctgaagaagtcct

SEQ ID NO: 223067 - DNA, 25 bp, Homo sapien
tagcctggatagtctcatgtcttgg

SEQ ID NO: 223068 - DNA, 25 bp, Homo sapien
gcagcagctcagctcattacgcgtg

SEQ ID NO: 223069 - DNA, 25 bp, Homo sapien
tcatcagcaagggtggccttacaca

SEQ ID NO: 223070 - DNA, 25 bp, Homo sapien
ctgagagcaacgcatagtagttggt

SEQ ID NO: 223071 - DNA, 25 bp, Homo sapien
ttttggagcctcttagtgacctggt

SEQ ID NO: 223072 - DNA, 25 bp, Homo sapien
aaaatccttgatactgttgcctgcc

SEQ ID NO: 223073 - DNA, 25 bp, Homo sapien
ggagtgcacaggagtccacctaaaa

SEQ ID NO: 223074 - DNA, 25 bp, Homo sapien
ttagtcaccccgtaacaagggcaca

SEQ ID NO: 223075 - DNA, 25 bp, Homo sapien
tgtgatacctaacgccagaagaagc

SEQ ID NO: 223076 - DNA, 25 bp, Homo sapien
ctcttcaggtggaaaacaggtcgtg

SEQ ID NO: 223077 - DNA, 25 bp, Homo sapien
taaagacaggcatgatcgcgactgg

SEQ ID NO: 223078 - DNA, 25 bp, Homo sapien
tgtcagggctcgctaggaactgctg

SEQ ID NO: 223079 - DNA, 25 bp, Homo sapien
tatacaaaggtgacaactaggttcc

SEQ ID NO: 223080 - DNA, 25 bp, Homo sapien
cattgcttgagtcaggctagtcagg

SEQ ID NO: 223081 - DNA, 25 bp, Homo sapien
gctagtcaggaaggccggttacata

SEQ ID NO: 223082 - DNA, 25 bp, Homo sapien
aagatttttacaactcccaggacag

SEQ ID NO: 223083 - DNA, 25 bp, Homo sapien
tttcttccatgagcacgaattggtt

SEQ ID NO: 223084 - DNA, 25 bp, Homo sapien
tcttccatgagcacgaattggtttc

SEQ ID NO: 223085 - DNA, 25 bp, Homo sapien
ttcttccatgagcacgaattggttt

SEQ ID NO: 223086 - DNA, 25 bp, Homo sapien
gaaggcagactaccccttggacttg

SEQ ID NO: 223087 - DNA, 25 bp, Homo sapien
gcatcagctgaattagatacacgca

SEQ ID NO: 223088 - DNA, 25 bp, Homo sapien
taactaaaggcctgatgaaagaccc

SEQ ID NO: 223089 - DNA, 25 bp, Homo sapien
aagcagcagcatagggaagtgaaga

SEQ ID NO: 223090 - DNA, 25 bp, Homo sapien
ggaatcatctgctcaagaaagactg

SEQ ID NO: 223091 - DNA, 25 bp, Homo sapien
cactgggctgattcagtcagggccg

SEQ ID NO: 223092 - DNA, 25 bp, Homo sapien
gctcagaggcatacagtgaacatcc

SEQ ID NO: 223093 - DNA, 25 bp, Homo sapien
aaagactgatacagagagccctgct

SEQ ID NO: 223094 - DNA, 25 bp, Homo sapien
tgtatcacactctgcttttccaaag

SEQ ID NO: 223095 - DNA, 25 bp, Homo sapien
ttttccaaagagacgccaggcctgg

SEQ ID NO: 223096 - DNA, 25 bp, Homo sapien
caggcctgggccattttgcgaagtt

SEQ ID NO: 223097 - DNA, 25 bp, Homo sapien
gcaggctctgccttgtatcacactc

SEQ ID NO: 223098 - DNA, 25 bp, Homo sapien
tctcccgtgagcacactggaatggc

SEQ ID NO: 223099 - DNA, 25 bp, Homo sapien
caagtggtctatgtcagctaacggc

SEQ ID NO: 223100 - DNA, 25 bp, Homo sapien
gacagagcttcaataaggcggcaac

SEQ ID NO: 223101 - DNA, 25 bp, Homo sapien
gctaacggcagcatagaaggtctcc

SEQ ID NO: 223102 - DNA, 25 bp, Homo sapien
gacagaaacaagaaggttatagtgt

SEQ ID NO: 223103 - DNA, 25 bp, Homo sapien
caagaaggttatagtgtatatagtg

SEQ ID NO: 223104 - DNA, 25 bp, Homo sapien
gttatagtgtatatagtgggaaacc

SEQ ID NO: 223105 - DNA, 25 bp, Homo sapien
agtgtatatagtgggaaaccaatgc

SEQ ID NO: 223106 - DNA, 25 bp, Homo sapien
tcctcatggcgcttatggtctaata

SEQ ID NO: 223107 - DNA, 25 bp, Homo sapien
tatataataggaagaccaaacccag

SEQ ID NO: 223108 - DNA, 25 bp, Homo sapien
tattgggagctttgtcaggcagtta

SEQ ID NO: 223109 - DNA, 25 bp, Homo sapien
ccagtttaggagcttaaggaaggct

SEQ ID NO: 223110 - DNA, 25 bp, Homo sapien
tgccaacaccttctggacagtcagt

SEQ ID NO: 223111 - DNA, 25 bp, Homo sapien
agtcagtggcaatgtcccttggatg

SEQ ID NO: 223112 - DNA, 25 bp, Homo sapien
catggcaggcttgggatgccaacac

SEQ ID NO: 223113 - DNA, 25 bp, Homo sapien
aatgtcccttggatgcctccggtgg

SEQ ID NO: 223114 - DNA, 25 bp, Homo sapien
tctcagatagatatgtacagcccag

SEQ ID NO: 223115 - DNA, 25 bp, Homo sapien
gacagtcaagtccagcgtttcaggc

SEQ ID NO: 223116 - DNA, 25 bp, Homo sapien
gtgtctaaacccaccttcacgatgg

SEQ ID NO: 223117 - DNA, 25 bp, Homo sapien
tcacgatggaactcctaggcaggtt

SEQ ID NO: 223118 - DNA, 25 bp, Homo sapien
tcactagtgtctggaaatacaaatt

SEQ ID NO: 223119 - DNA, 25 bp, Homo sapien
tcctctccgaagttcattggcttct

SEQ ID NO: 223120 - DNA, 25 bp, Homo sapien
cacaatactcttggtcacagtagat

SEQ ID NO: 223121 - DNA, 25 bp, Homo sapien
acatagtggtacttttcccacaagg

SEQ ID NO: 223122 - DNA, 25 bp, Homo sapien
ttgtgcctgttgcttctcgtaggaa

SEQ ID NO: 223123 - DNA, 25 bp, Homo sapien
ttttttccgaccagagccttgtgcc

SEQ ID NO: 223124 - DNA, 25 bp, Homo sapien
agacagtaattttttccgaccagag

SEQ ID NO: 223125 - DNA, 25 bp, Homo sapien
cactgttatctctagcggaggaatt

SEQ ID NO: 223126 - DNA, 25 bp, Homo sapien
caatgataagctgctccagacgtat

SEQ ID NO: 223127 - DNA, 25 bp, Homo sapien
tccagacgtatacgctcatgggcag

SEQ ID NO: 223128 - DNA, 25 bp, Homo sapien
ctgatccaccagcacgagcaggttc

SEQ ID NO: 223129 - DNA, 25 bp, Homo sapien
tcatgggcagcgtgctgatccacca

SEQ ID NO: 223130 - DNA, 25 bp, Homo sapien
taaacttgttatctacttgctggag

SEQ ID NO: 223131 - DNA, 25 bp, Homo sapien
tgcctcgccattctcttcagtctta

SEQ ID NO: 223132 - DNA, 25 bp, Homo sapien
acttgttatctacttgctggagaac

SEQ ID NO: 223133 - DNA, 25 bp, Homo sapien
tcttcagtcttagtgctcatcaaac

SEQ ID NO: 223134 - DNA, 25 bp, Homo sapien
tggccactgcttacatcaacagcaa

SEQ ID NO: 223135 - DNA, 25 bp, Homo sapien
agcctggccactgcttacatcaaca

SEQ ID NO: 223136 - DNA, 25 bp, Homo sapien
tgaatcattcctttggtgaaacgat

SEQ ID NO: 223137 - DNA, 25 bp, Homo sapien
aacgatagggatacaagatgttgtg

SEQ ID NO: 223138 - DNA, 25 bp, Homo sapien
gattcgctactaacagtatcatcca

SEQ ID NO: 223139 - DNA, 25 bp, Homo sapien
ctggataacgggcaaatactggatt

SEQ ID NO: 223140 - DNA, 25 bp, Homo sapien
gaacaaagactgaagcgattcgcta

SEQ ID NO: 223141 - DNA, 25 bp, Homo sapien
actggattgtcccattctgagaaca

SEQ ID NO: 223142 - DNA, 25 bp, Homo sapien
gtcctctctgctcgagctctcggaa

SEQ ID NO: 223143 - DNA, 25 bp, Homo sapien
agtcctctctgctcgagctctcgga

SEQ ID NO: 223144 - DNA, 25 bp, Homo sapien
cagtcctctctgctcgagctctcgg

SEQ ID NO: 223145 - DNA, 25 bp, Homo sapien
tctaaaaggttgacacctgtactga

SEQ ID NO: 223146 - DNA, 25 bp, Homo sapien
gaatgtcctcagttggggcaatgaa

SEQ ID NO: 223147 - DNA, 25 bp, Homo sapien
acagttgtcaggtctttagtacaag

SEQ ID NO: 223148 - DNA, 25 bp, Homo sapien
ttagtacaagcagcctgaatgtcct

SEQ ID NO: 223149 - DNA, 25 bp, Homo sapien
attttgttgacataaaccattcttc

SEQ ID NO: 223150 - DNA, 25 bp, Homo sapien
caaatgtttcttgggcacgtgtggg

SEQ ID NO: 223151 - DNA, 25 bp, Homo sapien
tcattttgctatggcctggaccacc

SEQ ID NO: 223152 - DNA, 25 bp, Homo sapien
gacatggtgtctgaaaagggcttaa

SEQ ID NO: 223153 - DNA, 25 bp, Homo sapien
ggcagccatgccattaacagtagta

SEQ ID NO: 223154 - DNA, 25 bp, Homo sapien
tctccaagtcctgtaccgagtggca

SEQ ID NO: 223155 - DNA, 25 bp, Homo sapien
aattcatttgcctactggtgggacc

SEQ ID NO: 223156 - DNA, 25 bp, Homo sapien
tgttacagtagtcccagcgcttgct

SEQ ID NO: 223157 - DNA, 25 bp, Homo sapien
tcaatcagagttttggctggctcca

SEQ ID NO: 223158 - DNA, 25 bp, Homo sapien
agaaagatggtgagaatgccaggca

SEQ ID NO: 223159 - DNA, 25 bp, Homo sapien
tagaaagatggtgagaatgccaggc

SEQ ID NO: 223160 - DNA, 25 bp, Homo sapien
ggtaggtagaaagatggtgagaatg

SEQ ID NO: 223161 - DNA, 25 bp, Homo sapien
aggtagaaagatggtgagaatgcca

SEQ ID NO: 223162 - DNA, 25 bp, Homo sapien
atggcatggggctgcctgaacttga

SEQ ID NO: 223163 - DNA, 25 bp, Homo sapien
gcatggggctgcctgaacttgattt

SEQ ID NO: 223164 - DNA, 25 bp, Homo sapien
taatgatggcatggggctgcctgaa

SEQ ID NO: 223165 - DNA, 25 bp, Homo sapien
aataataatgatggcatggggctgc

SEQ ID NO: 223166 - DNA, 25 bp, Homo sapien
acaccaaccgcctcggacgccgacg

SEQ ID NO: 223167 - DNA, 25 bp, Homo sapien
gcttaacaaattctccgacaccaac

SEQ ID NO: 223168 - DNA, 25 bp, Homo sapien
ctggagtcccgcttaacaaattctc

SEQ ID NO: 223169 - DNA, 25 bp, Homo sapien
gagtcccgcttaacaaattctccga

SEQ ID NO: 223170 - DNA, 25 bp, Homo sapien
gtgcgcatgcgcaccagttgttcca

SEQ ID NO: 223171 - DNA, 25 bp, Homo sapien
ggatcttgaggctcgtgcgtgccca

SEQ ID NO: 223172 - DNA, 25 bp, Homo sapien
tgcccacgagcatgcgcttcggagg

SEQ ID NO: 223173 - DNA, 25 bp, Homo sapien
aggccgcgagacaccagtgcgcatg

SEQ ID NO: 223174 - DNA, 25 bp, Homo sapien
tattaacacacaatagttctatctc

SEQ ID NO: 223175 - DNA, 25 bp, Homo sapien
ccttccatcatacaggtaatatata

SEQ ID NO: 223176 - DNA, 25 bp, Homo sapien
tattgactaatgctaatattaacac

SEQ ID NO: 223177 - DNA, 25 bp, Homo sapien
tgattagatttgtgtacagtggtaa

SEQ ID NO: 223178 - DNA, 25 bp, Homo sapien
tgaagtttgctttgtcgatgtgtga

SEQ ID NO: 223179 - DNA, 25 bp, Homo sapien
gtctgagtaatccaacttcaagatg

SEQ ID NO: 223180 - DNA, 25 bp, Homo sapien
tgtcgatgtgtgatttaggacttcc

SEQ ID NO: 223181 - DNA, 25 bp, Homo sapien
caagccattcctgcatatgacgcac

SEQ ID NO: 223182 - DNA, 25 bp, Homo sapien
gtccttgcactgtgccccggtcagt

SEQ ID NO: 223183 - DNA, 25 bp, Homo sapien
tggagatgggaccttgcaattgtcc

SEQ ID NO: 223184 - DNA, 25 bp, Homo sapien
gacccagcctaccaatcccagcttt

SEQ ID NO: 223185 - DNA, 25 bp, Homo sapien
tgtgccccggtcagtgttctggacc

SEQ ID NO: 223186 - DNA, 25 bp, Homo sapien
gaagtattggccacttgactgcatg

SEQ ID NO: 223187 - DNA, 25 bp, Homo sapien
ggtaagactacaatctgttgccaga

SEQ ID NO: 223188 - DNA, 25 bp, Homo sapien
gatattgcccagaacagtcaaaaga

SEQ ID NO: 223189 - DNA, 25 bp, Homo sapien
ttttgaaatgatcccctaaggctga

SEQ ID NO: 223190 - DNA, 25 bp, Homo sapien
catttcaaggactgtaatcaccacc

SEQ ID NO: 223191 - DNA, 25 bp, Homo sapien
aatttgaccagtgttgagaatgggc

SEQ ID NO: 223192 - DNA, 25 bp, Homo sapien
tgaatatctattgcaccaacagggt

SEQ ID NO: 223193 - DNA, 25 bp, Homo sapien
gaatgggcgtttcctactggtttca

SEQ ID NO: 223194 - DNA, 25 bp, Homo sapien
tctgaaggatggtggcacagtcaca

SEQ ID NO: 223195 - DNA, 25 bp, Homo sapien
ttttttctgaaggatggtggcacag

SEQ ID NO: 223196 - DNA, 25 bp, Homo sapien
ttttctgaaggatggtggcacagtc

SEQ ID NO: 223197 - DNA, 25 bp, Homo sapien
ttctgaaggatggtggcacagtcac

SEQ ID NO: 223198 - DNA, 25 bp, Homo sapien
caattttagaagtaagtgtgctata

SEQ ID NO: 223199 - DNA, 25 bp, Homo sapien
gaatgtagatttatgattgtcaggg

SEQ ID NO: 223200 - DNA, 25 bp, Homo sapien
ggtaactagagcagttgaattaata

SEQ ID NO: 223201 - DNA, 25 bp, Homo sapien
ggtttagttccactgtagttggaga

SEQ ID NO: 223202 - DNA, 25 bp, Homo sapien
gtgagtttcagcaattctgttttca

SEQ ID NO: 223203 - DNA, 25 bp, Homo sapien
aactggtagcaaagctaactggaac

SEQ ID NO: 223204 - DNA, 25 bp, Homo sapien
gctgtgagtttcagcaattctgttt

SEQ ID NO: 223205 - DNA, 25 bp, Homo sapien
ttgctgtgagtttcagcaattctgt

SEQ ID NO: 223206 - DNA, 25 bp, Homo sapien
tgttcctatgcccacaacctaggtt

SEQ ID NO: 223207 - DNA, 25 bp, Homo sapien
tgtatctagatgctcaggcaccact

SEQ ID NO: 223208 - DNA, 25 bp, Homo sapien
tgatgatgccacaacggcgagcact

SEQ ID NO: 223209 - DNA, 25 bp, Homo sapien
cagcggcttctagttcacatttgtc

SEQ ID NO: 223210 - DNA, 25 bp, Homo sapien
tgcttacggaaaaacaccccttgca

SEQ ID NO: 223211 - DNA, 25 bp, Homo sapien
atttcataatccactgatatcaggg

SEQ ID NO: 223212 - DNA, 25 bp, Homo sapien
ctgatatcagggtgtttccttctgc

SEQ ID NO: 223213 - DNA, 25 bp, Homo sapien
tgagtatgcttacggaaaaacaccc

SEQ ID NO: 223214 - DNA, 25 bp, Homo sapien
tttagggctaatcgacctgagaagc

SEQ ID NO: 223215 - DNA, 25 bp, Homo sapien
attttagggctaatcgacctgagaa

SEQ ID NO: 223216 - DNA, 25 bp, Homo sapien
ttttagggctaatcgacctgagaag

SEQ ID NO: 223217 - DNA, 25 bp, Homo sapien
accaaggcgcgcaaacctccgcgcc

SEQ ID NO: 223218 - DNA, 25 bp, Homo sapien
ggaccaccacgccaacggctcacca

SEQ ID NO: 223219 - DNA, 25 bp, Homo sapien
acggctcaccaaggcgcgcaaacct

SEQ ID NO: 223220 - DNA, 25 bp, Homo sapien
gccaggatcactccgggaccaccac

SEQ ID NO: 223221 - DNA, 25 bp, Homo sapien
gcctccgccctttgccagacaaggg

SEQ ID NO: 223222 - DNA, 25 bp, Homo sapien
ggagcgtcgttctcagaaaagtaca

SEQ ID NO: 223223 - DNA, 25 bp, Homo sapien
acgccggcatcctgcggcggaagca

SEQ ID NO: 223224 - DNA, 25 bp, Homo sapien
gccgagcgcgcggagaaaggccagc

SEQ ID NO: 223225 - DNA, 25 bp, Homo sapien
ggtgcagatccgaagactagaagct

SEQ ID NO: 223226 - DNA, 25 bp, Homo sapien
caaagaaacgagttggagtggaccg

SEQ ID NO: 223227 - DNA, 25 bp, Homo sapien
aactttggtgtgaggaaccagggca

SEQ ID NO: 223228 - DNA, 25 bp, Homo sapien
acaggaagtcgtgcagtacaggtga

SEQ ID NO: 223229 - DNA, 25 bp, Homo sapien
agatcatatgatctcagaggcccca

SEQ ID NO: 223230 - DNA, 25 bp, Homo sapien
gaattcactctatgtcccactgtag

SEQ ID NO: 223231 - DNA, 25 bp, Homo sapien
caaggaagtcccatccatgttcaga

SEQ ID NO: 223232 - DNA, 25 bp, Homo sapien
cactgtagcgatttatttttggcca

SEQ ID NO: 223233 - DNA, 25 bp, Homo sapien
tttcttgacattagtttacaacatt

SEQ ID NO: 223234 - DNA, 25 bp, Homo sapien
agcaacccgcatggcacaaattggg

SEQ ID NO: 223235 - DNA, 25 bp, Homo sapien
ctccagatgggaatggtagcaccag

SEQ ID NO: 223236 - DNA, 25 bp, Homo sapien
ttagtaaggtcatagatccgggccc

SEQ ID NO: 223237 - DNA, 25 bp, Homo sapien
caagagtaagctgtggccaaggtca

SEQ ID NO: 223238 - DNA, 25 bp, Homo sapien
tagtcctgattatagcccactctgc

SEQ ID NO: 223239 - DNA, 25 bp, Homo sapien
aactggcattatcacttggaaaggc

SEQ ID NO: 223240 - DNA, 25 bp, Homo sapien
tctgtgaggtttaatgatcagcgtg

SEQ ID NO: 223241 - DNA, 25 bp, Homo sapien
gcagcaatgattctgctggcaagaa

SEQ ID NO: 223242 - DNA, 25 bp, Homo sapien
ttccaagaacattatttatataaag

SEQ ID NO: 223243 - DNA, 25 bp, Homo sapien
ctgtgcagatgtcccttgcattgtt

SEQ ID NO: 223244 - DNA, 25 bp, Homo sapien
ttgcattgtttctgttccaagaaca

SEQ ID NO: 223245 - DNA, 25 bp, Homo sapien
caaagaatatttctgtgcagatgtc

SEQ ID NO: 223246 - DNA, 25 bp, Homo sapien
gaggcttagaatctggatgttttat

SEQ ID NO: 223247 - DNA, 25 bp, Homo sapien
cagagactaaggtccatgcacaggc

SEQ ID NO: 223248 - DNA, 25 bp, Homo sapien
gaatctggatgttttatccccagag

SEQ ID NO: 223249 - DNA, 25 bp, Homo sapien
atccccagagactaaggtccatgca

SEQ ID NO: 223250 - DNA, 25 bp, Homo sapien
gtaactcaggttatactgtaactca

SEQ ID NO: 223251 - DNA, 25 bp, Homo sapien
gcaacctggctaacaataaactagt

SEQ ID NO: 223252 - DNA, 25 bp, Homo sapien
aacagaaatgccaaaccactccact

SEQ ID NO: 223253 - DNA, 25 bp, Homo sapien
tgttagagcagaggagtaactcagg

SEQ ID NO: 223254 - DNA, 25 bp, Homo sapien
aaggctcccctatgaacaagaccag

SEQ ID NO: 223255 - DNA, 25 bp, Homo sapien
tgacaggtcaatcggtcctcaagaa

SEQ ID NO: 223256 - DNA, 25 bp, Homo sapien
caatatgggaaagtgcaaactgtct

SEQ ID NO: 223257 - DNA, 25 bp, Homo sapien
gaagatcccattgaacagagttgcc

SEQ ID NO: 223258 - DNA, 25 bp, Homo sapien
tggtactgaattcccaaggcagctt

SEQ ID NO: 223259 - DNA, 25 bp, Homo sapien
tcaagatcagaaccctaagagccat

SEQ ID NO: 223260 - DNA, 25 bp, Homo sapien
taccagcgcaattaaggtgagcact

SEQ ID NO: 223261 - DNA, 25 bp, Homo sapien
cctcttcaaaggtgggatcaacaga

SEQ ID NO: 223262 - DNA, 25 bp, Homo sapien
gaatctgaatctaagtcaggctttg

SEQ ID NO: 223263 - DNA, 25 bp, Homo sapien
gctgggtctacaggagtctgttccc

SEQ ID NO: 223264 - DNA, 25 bp, Homo sapien
gaggcaccaggaatctgaatctaag

SEQ ID NO: 223265 - DNA, 25 bp, Homo sapien
gagttcctttggaatgcatccccac

SEQ ID NO: 223266 - DNA, 25 bp, Homo sapien
gataaaacacggttccacattagca

SEQ ID NO: 223267 - DNA, 25 bp, Homo sapien
agtgccacctagtcacagaagtagt

SEQ ID NO: 223268 - DNA, 25 bp, Homo sapien
ggttccacattagcaacagtgccac

SEQ ID NO: 223269 - DNA, 25 bp, Homo sapien
tgccacctagtcacagaagtagttc

SEQ ID NO: 223270 - DNA, 25 bp, Homo sapien
aaacatacactaagaaaaagcaatg

SEQ ID NO: 223271 - DNA, 25 bp, Homo sapien
cagaggtatgtaattaagtattgta

SEQ ID NO: 223272 - DNA, 25 bp, Homo sapien
gtaaggacctgcaaaggaacaagtc

SEQ ID NO: 223273 - DNA, 25 bp, Homo sapien
gattcaatctaggtgcctgaacaag

SEQ ID NO: 223274 - DNA, 25 bp, Homo sapien
gctgtagcttctgttgttcagccag

SEQ ID NO: 223275 - DNA, 25 bp, Homo sapien
tcaacttctgcagttgggtaaaaat

SEQ ID NO: 223276 - DNA, 25 bp, Homo sapien
tttcttgctgtagcttctgttgttc

SEQ ID NO: 223277 - DNA, 25 bp, Homo sapien
gacactttaacaccagaccctgcaa

SEQ ID NO: 223278 - DNA, 25 bp, Homo sapien
ttactgcaggattcagccgaggtga

SEQ ID NO: 223279 - DNA, 25 bp, Homo sapien
gctgcacgcacacgcaggaggagtc

SEQ ID NO: 223280 - DNA, 25 bp, Homo sapien
gttactgcaggattcagccgaggtg

SEQ ID NO: 223281 - DNA, 25 bp, Homo sapien
gaggagtcagtggtgttcccttccc

SEQ ID NO: 223282 - DNA, 25 bp, Homo sapien
tgtgattcaaaggcaaaaagctcag

SEQ ID NO: 223283 - DNA, 25 bp, Homo sapien
attcaaaggcaaaaagctcagttac

SEQ ID NO: 223284 - DNA, 25 bp, Homo sapien
tgattcaaaggcaaaaagctcagtt

SEQ ID NO: 223285 - DNA, 25 bp, Homo sapien
ctagttgtgattcaaaggcaaaaag

SEQ ID NO: 223286 - DNA, 25 bp, Homo sapien
tgagtccttgcagctcttcataggg

SEQ ID NO: 223287 - DNA, 25 bp, Homo sapien
tcatagggcagggtatctttctcag

SEQ ID NO: 223288 - DNA, 25 bp, Homo sapien
tctgaaaacgctgcactgagaggag

SEQ ID NO: 223289 - DNA, 25 bp, Homo sapien
cgaggcttctacttggggtttgtgt

SEQ ID NO: 223290 - DNA, 25 bp, Homo sapien
tcatcctcttctgcatagccatatg

SEQ ID NO: 223291 - DNA, 25 bp, Homo sapien
tggtacaatcatggcacagctcggc

SEQ ID NO: 223292 - DNA, 25 bp, Homo sapien
agccatatgttgtgagtaactttcc

SEQ ID NO: 223293 - DNA, 25 bp, Homo sapien
tttcctattgtaaggcattccaact

SEQ ID NO: 223294 - DNA, 25 bp, Homo sapien
gactgattaaaccttccattcctcg

SEQ ID NO: 223295 - DNA, 25 bp, Homo sapien
cattcctcggtctgcttccattgtt

SEQ ID NO: 223296 - DNA, 25 bp, Homo sapien
ccattactgttccccatggcctctg

SEQ ID NO: 223297 - DNA, 25 bp, Homo sapien
taaaccttccattcctcggtctgct

SEQ ID NO: 223298 - DNA, 25 bp, Homo sapien
catttgacaaccctacttaccctgg

SEQ ID NO: 223299 - DNA, 25 bp, Homo sapien
agaccgagtctagcttctgttgctc

SEQ ID NO: 223300 - DNA, 25 bp, Homo sapien
gaaaggtgcctataagctgcatgaa

SEQ ID NO: 223301 - DNA, 25 bp, Homo sapien
caatggcaacagtgcaagtcaaatg

SEQ ID NO: 223302 - DNA, 25 bp, Homo sapien
tgagatcctacggaagcagcagaac

SEQ ID NO: 223303 - DNA, 25 bp, Homo sapien
ctgaacagcaccgatatggaacatt

SEQ ID NO: 223304 - DNA, 25 bp, Homo sapien
tgagttactagccatatgtgcccgc

SEQ ID NO: 223305 - DNA, 25 bp, Homo sapien
ttgcaaaaagatctactggacactg

SEQ ID NO: 223306 - DNA, 25 bp, Homo sapien
tagtagaactgctgtgcttagcgaa

SEQ ID NO: 223307 - DNA, 25 bp, Homo sapien
cagagatgccaagcaatgggctact

SEQ ID NO: 223308 - DNA, 25 bp, Homo sapien
caagtctagatcatgttttcagctg

SEQ ID NO: 223309 - DNA, 25 bp, Homo sapien
gcttagcgaaagatcttcagtcagt

SEQ ID NO: 223310 - DNA, 25 bp, Homo sapien
taagccactgctattggaacggatg

SEQ ID NO: 223311 - DNA, 25 bp, Homo sapien
cactgctattggaacggatggtctt

SEQ ID NO: 223312 - DNA, 25 bp, Homo sapien
cagttccaatggataagccactgct

SEQ ID NO: 223313 - DNA, 25 bp, Homo sapien
ttggaacggatggtcttagaattca

SEQ ID NO: 223314 - DNA, 25 bp, Homo sapien
ccgaggccatgaggtacagatatca

SEQ ID NO: 223315 - DNA, 25 bp, Homo sapien
gagatccaaaaataggccgaggcca

SEQ ID NO: 223316 - DNA, 25 bp, Homo sapien
acagatatcagagccatgtggtctc

SEQ ID NO: 223317 - DNA, 25 bp, Homo sapien
tggtatgccatccacggcaagacag

SEQ ID NO: 223318 - DNA, 25 bp, Homo sapien
gcaggagaccctgatcacttgcttc

SEQ ID NO: 223319 - DNA, 25 bp, Homo sapien
cagtggcagcaatggtaaactcatc

SEQ ID NO: 223320 - DNA, 25 bp, Homo sapien
aacaggttgattcccagacgcttct

SEQ ID NO: 223321 - DNA, 25 bp, Homo sapien
tggtaaactcatcaccgcaggagac

SEQ ID NO: 223322 - DNA, 25 bp, Homo sapien
tggccaaggtaaaggacgttgtgta

SEQ ID NO: 223323 - DNA, 25 bp, Homo sapien
cctggggcaatggtacggatcttat

SEQ ID NO: 223324 - DNA, 25 bp, Homo sapien
ttgcctggggcaatggtacggatct

SEQ ID NO: 223325 - DNA, 25 bp, Homo sapien
ttgtgtagggaacttcatggtatgc

SEQ ID NO: 223326 - DNA, 25 bp, Homo sapien
tgagtcagaaaacttctgtctctta

SEQ ID NO: 223327 - DNA, 25 bp, Homo sapien
gagtcagaaaacttctgtctcttaa

SEQ ID NO: 223328 - DNA, 25 bp, Homo sapien
ctttttcattgagtcagaaaacttc

SEQ ID NO: 223329 - DNA, 25 bp, Homo sapien
tcagaaaacttctgtctcttaattt

SEQ ID NO: 223330 - DNA, 25 bp, Homo sapien
tgcacacaatgcctatgagaccata

SEQ ID NO: 223331 - DNA, 25 bp, Homo sapien
ttctgatgatgtggttagaacacca

SEQ ID NO: 223332 - DNA, 25 bp, Homo sapien
aactaaagtcaaattccatggtcac

SEQ ID NO: 223333 - DNA, 25 bp, Homo sapien
tagaccattcccattactctaggat

SEQ ID NO: 223334 - DNA, 25 bp, Homo sapien
tgaattcattgagtccacaggccag

SEQ ID NO: 223335 - DNA, 25 bp, Homo sapien
tggttgataattcccgacatgcact

SEQ ID NO: 223336 - DNA, 25 bp, Homo sapien
ggtcaacagaaatgtcccatcacag

SEQ ID NO: 223337 - DNA, 25 bp, Homo sapien
cactttgcctgactgggtcaacaga

SEQ ID NO: 223338 - DNA, 25 bp, Homo sapien
aatcagaaaaagaaatcccaaatat

SEQ ID NO: 223339 - DNA, 25 bp, Homo sapien
ctgcaagaaaaaaatcagaaaaaga

SEQ ID NO: 223340 - DNA, 25 bp, Homo sapien
cagaaaaagaaatcccaaatatata

SEQ ID NO: 223341 - DNA, 25 bp, Homo sapien
tgcaagaaaaaaatcagaaaaagaa

SEQ ID NO: 223342 - DNA, 25 bp, Homo sapien
tgtataataatcctcttctgaatcc

SEQ ID NO: 223343 - DNA, 25 bp, Homo sapien
tgtggtgtataataatcctcttctg

SEQ ID NO: 223344 - DNA, 25 bp, Homo sapien
cttttgtggtgtataataatcctct

SEQ ID NO: 223345 - DNA, 25 bp, Homo sapien
ggtgtataataatcctcttctgaat

SEQ ID NO: 223346 - DNA, 25 bp, Homo sapien
ccttcccagtgaataggttctgtaa

SEQ ID NO: 223347 - DNA, 25 bp, Homo sapien
catgatgggtttagatgcatacaac

SEQ ID NO: 223348 - DNA, 25 bp, Homo sapien
actgaattaacacttctcatttagg

SEQ ID NO: 223349 - DNA, 25 bp, Homo sapien
gtcagaagttcgagcgagacaagcc

SEQ ID NO: 223350 - DNA, 25 bp, Homo sapien
tggacagagacaaggctacccctac

SEQ ID NO: 223351 - DNA, 25 bp, Homo sapien
gaagtggacagagacaaggctaccc

SEQ ID NO: 223352 - DNA, 25 bp, Homo sapien
agtggacagagacaaggctacccct

SEQ ID NO: 223353 - DNA, 25 bp, Homo sapien
agaagtggacagagacaaggctacc

SEQ ID NO: 223354 - DNA, 25 bp, Homo sapien
cacatgattatctccacaggagacc

SEQ ID NO: 223355 - DNA, 25 bp, Homo sapien
tgatccgaaggcatagagctgaccc

SEQ ID NO: 223356 - DNA, 25 bp, Homo sapien
tgtttcgtgtcagaaccaccacatg

SEQ ID NO: 223357 - DNA, 25 bp, Homo sapien
gctgcatgggttctagcacttcagg

SEQ ID NO: 223358 - DNA, 25 bp, Homo sapien
tgacggatagctttgccttgcaact

SEQ ID NO: 223359 - DNA, 25 bp, Homo sapien
ctgtcgataggaggctttgtctcca

SEQ ID NO: 223360 - DNA, 25 bp, Homo sapien
tccacatgctttggctgtcgatagg

SEQ ID NO: 223361 - DNA, 25 bp, Homo sapien
tggcccagctgaccatggagtttag

SEQ ID NO: 223362 - DNA, 25 bp, Homo sapien
acccaagtgtacagttccttctcca

SEQ ID NO: 223363 - DNA, 25 bp, Homo sapien
agacttcactggttcgtgatgttac

SEQ ID NO: 223364 - DNA, 25 bp, Homo sapien
tacagcaatgggtgcttcagtcaca

SEQ ID NO: 223365 - DNA, 25 bp, Homo sapien
agacctgccgggcactacagccact

SEQ ID NO: 223366 - DNA, 25 bp, Homo sapien
ggtgcattaagcagagtgacttttt

SEQ ID NO: 223367 - DNA, 25 bp, Homo sapien
aggtgcattaagcagagtgactttt

SEQ ID NO: 223368 - DNA, 25 bp, Homo sapien
tgcattaagcagagtgactttttcc

SEQ ID NO: 223369 - DNA, 25 bp, Homo sapien
gtgcattaagcagagtgactttttc

SEQ ID NO: 223370 - DNA, 25 bp, Homo sapien
gaagagggcgatctagaagttcatc

SEQ ID NO: 223371 - DNA, 25 bp, Homo sapien
agggcgatctagaagttcatctgca

SEQ ID NO: 223372 - DNA, 25 bp, Homo sapien
ttcctgagaagagggcgatctagaa

SEQ ID NO: 223373 - DNA, 25 bp, Homo sapien
tgagaagagggcgatctagaagttc

SEQ ID NO: 223374 - DNA, 25 bp, Homo sapien
ctggtcaaggcacgaatgaaccatt

SEQ ID NO: 223375 - DNA, 25 bp, Homo sapien
tccatggcccgaattccttgcacga

SEQ ID NO: 223376 - DNA, 25 bp, Homo sapien
catttggatcaattccaaagagtac

SEQ ID NO: 223377 - DNA, 25 bp, Homo sapien
gagtactggctagagtcaacttcca

SEQ ID NO: 223378 - DNA, 25 bp, Homo sapien
tacaggcaatactctgctgcaacag

SEQ ID NO: 223379 - DNA, 25 bp, Homo sapien
gatgatgctatactctactggtagg

SEQ ID NO: 223380 - DNA, 25 bp, Homo sapien
gatgcactgatgctatcagacagaa

SEQ ID NO: 223381 - DNA, 25 bp, Homo sapien
ctatgtggccaataatatgatgctc

SEQ ID NO: 223382 - DNA, 25 bp, Homo sapien
caactgcccagatatcagacttgaa

SEQ ID NO: 223383 - DNA, 25 bp, Homo sapien
caaacgtcctctttaaggtaagcag

SEQ ID NO: 223384 - DNA, 25 bp, Homo sapien
ctttactccttgacagagctctgga

SEQ ID NO: 223385 - DNA, 25 bp, Homo sapien
gcagttcaaaaatgacgcagccaac

SEQ ID NO: 223386 - DNA, 25 bp, Homo sapien
taagtttctttgctaggccataatc

SEQ ID NO: 223387 - DNA, 25 bp, Homo sapien
caggtttgccttggtcagaaaaata

SEQ ID NO: 223388 - DNA, 25 bp, Homo sapien
tttgctaggccataatctccaagtt

SEQ ID NO: 223389 - DNA, 25 bp, Homo sapien
tggaatactcagaattaagtttctt

SEQ ID NO: 223390 - DNA, 25 bp, Homo sapien
tccagctttatggatgcagctcact

SEQ ID NO: 223391 - DNA, 25 bp, Homo sapien
ttccagctttatggatgcagctcac

SEQ ID NO: 223392 - DNA, 25 bp, Homo sapien
tctgaaataggtaccacaccaccat

SEQ ID NO: 223393 - DNA, 25 bp, Homo sapien
aactgcaaccagaagttatgattca

SEQ ID NO: 223394 - DNA, 25 bp, Homo sapien
tgattcaacatgacttgacatctct

SEQ ID NO: 223395 - DNA, 25 bp, Homo sapien
caaccagaagttatgattcaacatg

SEQ ID NO: 223396 - DNA, 25 bp, Homo sapien
aaagctccatttaagtaaatacaca

SEQ ID NO: 223397 - DNA, 25 bp, Homo sapien
ccttctgacgaaggattttgtcata

SEQ ID NO: 223398 - DNA, 25 bp, Homo sapien
cgaaggattttgtcatacaggttcc

SEQ ID NO: 223399 - DNA, 25 bp, Homo sapien
aacttgtccttctgacgaaggattt

SEQ ID NO: 223400 - DNA, 25 bp, Homo sapien
aggattttgtcatacaggttccctc

SEQ ID NO: 223401 - DNA, 25 bp, Homo sapien
ggaccagataaatagggccatgctt

SEQ ID NO: 223402 - DNA, 25 bp, Homo sapien
tactgtatcaagtgctgccaagcca

SEQ ID NO: 223403 - DNA, 25 bp, Homo sapien
ttcttgccaaggttatagagctaga

SEQ ID NO: 223404 - DNA, 25 bp, Homo sapien
gccacactctggttaactaatgtca

SEQ ID NO: 223405 - DNA, 25 bp, Homo sapien
aatcagcagcgtggtattgtccatg

SEQ ID NO: 223406 - DNA, 25 bp, Homo sapien
catcacgacgttccttctcagacag

SEQ ID NO: 223407 - DNA, 25 bp, Homo sapien
caatctcattcaaggcatcacgacg

SEQ ID NO: 223408 - DNA, 25 bp, Homo sapien
tcagacagccgggtcaaatcgactt

SEQ ID NO: 223409 - DNA, 25 bp, Homo sapien
gaatccacacctagatctgtaagcc

SEQ ID NO: 223410 - DNA, 25 bp, Homo sapien
gcaattatctatagctggtcccagc

SEQ ID NO: 223411 - DNA, 25 bp, Homo sapien
tattgaggatactatgacagactgc

SEQ ID NO: 223412 - DNA, 25 bp, Homo sapien
tctggataagagaagtcatgacccc

SEQ ID NO: 223413 - DNA, 25 bp, Homo sapien
tttttagaccccatacactgaaatg

SEQ ID NO: 223414 - DNA, 25 bp, Homo sapien
tgtgcctcgcctcattctttgctga

SEQ ID NO: 223415 - DNA, 25 bp, Homo sapien
tctgccaagcctttacagtgttttt

SEQ ID NO: 223416 - DNA, 25 bp, Homo sapien
tagcccaggagcatctccacctatg

SEQ ID NO: 223417 - DNA, 25 bp, Homo sapien
aaaggcaatgggcaagatgtgagac

SEQ ID NO: 223418 - DNA, 25 bp, Homo sapien
ccagtaatcaagttcaacaggataa

SEQ ID NO: 223419 - DNA, 25 bp, Homo sapien
cttgtaacttaagtgagcaagtcac

SEQ ID NO: 223420 - DNA, 25 bp, Homo sapien
acatcatacattaacgtggcatcag

SEQ ID NO: 223421 - DNA, 25 bp, Homo sapien
agccttcgtttgattctcaagataa

SEQ ID NO: 223422 - DNA, 25 bp, Homo sapien
agagccttcgtttgattctcaagat

SEQ ID NO: 223423 - DNA, 25 bp, Homo sapien
gagccttcgtttgattctcaagata

SEQ ID NO: 223424 - DNA, 25 bp, Homo sapien
gaagagtggtgaagaccctaagaca

SEQ ID NO: 223425 - DNA, 25 bp, Homo sapien
tagccaatttctagtgccggtgagt

SEQ ID NO: 223426 - DNA, 25 bp, Homo sapien
cactaagctcacgacgctgggaaag

SEQ ID NO: 223427 - DNA, 25 bp, Homo sapien
cgtgggcgcctaaagcactaagctc

SEQ ID NO: 223428 - DNA, 25 bp, Homo sapien
tgcggcggtacagcgtggcttcccc

SEQ ID NO: 223429 - DNA, 25 bp, Homo sapien
gtacagcgtggcttccccgaaggcg

SEQ ID NO: 223430 - DNA, 25 bp, Homo sapien
ggtgcggcggtacagcgtggcttcc

SEQ ID NO: 223431 - DNA, 25 bp, Homo sapien
gcggtacagcgtggcttccccgaag

SEQ ID NO: 223432 - DNA, 25 bp, Homo sapien
cggatggggatgtagtgcagttcct

SEQ ID NO: 223433 - DNA, 25 bp, Homo sapien
ggcccaggacgcggatggggatgta

SEQ ID NO: 223434 - DNA, 25 bp, Homo sapien
ggatggggatgtagtgcagttcctc

SEQ ID NO: 223435 - DNA, 25 bp, Homo sapien
cgcggcccaggacgcggatggggat

SEQ ID NO: 223436 - DNA, 25 bp, Homo sapien
caaagtccgagttgatggaatcgca

SEQ ID NO: 223437 - DNA, 25 bp, Homo sapien
gaatcgcagtgtcgctcgtactcgc

SEQ ID NO: 223438 - DNA, 25 bp, Homo sapien
tgactggcgctaggccccggactcg

SEQ ID NO: 223439 - DNA, 25 bp, Homo sapien
ggactcgctcccaaagtccgagttg

SEQ ID NO: 223440 - DNA, 25 bp, Homo sapien
agatgccggcccgcggatccgtcag

SEQ ID NO: 223441 - DNA, 25 bp, Homo sapien
tcgcttcagatgccggcccgcggat

SEQ ID NO: 223442 - DNA, 25 bp, Homo sapien
cgctgcgtcccgctcgcttcagatg

SEQ ID NO: 223443 - DNA, 25 bp, Homo sapien
gcccgcggatccgtcagcccagcaa

SEQ ID NO: 223444 - DNA, 25 bp, Homo sapien
cctcttggctagtctagcggccaag

SEQ ID NO: 223445 - DNA, 25 bp, Homo sapien
ttggctagtctagcggccaaggctt

SEQ ID NO: 223446 - DNA, 25 bp, Homo sapien
gtctagcggccaaggcttcccgctt

SEQ ID NO: 223447 - DNA, 25 bp, Homo sapien
tagtctagcggccaaggcttcccgc

SEQ ID NO: 223448 - DNA, 25 bp, Homo sapien
cccggtccggactcatacaacttgg

SEQ ID NO: 223449 - DNA, 25 bp, Homo sapien
ggactcatacaacttggaggcccag

SEQ ID NO: 223450 - DNA, 25 bp, Homo sapien
ggtccggactcatacaacttggagg

SEQ ID NO: 223451 - DNA, 25 bp, Homo sapien
tgcctccccggtccggactcataca

SEQ ID NO: 223452 - DNA, 25 bp, Homo sapien
cagaactacttttatgccacaggag

SEQ ID NO: 223453 - DNA, 25 bp, Homo sapien
ctttatccaggtcaacacatcaggg

SEQ ID NO: 223454 - DNA, 25 bp, Homo sapien
taagtaagtgactggccatgcaagg

SEQ ID NO: 223455 - DNA, 25 bp, Homo sapien
tgtaaaagggcagtgcaagggatcc

SEQ ID NO: 223456 - DNA, 25 bp, Homo sapien
tcagctaagggtaaagagaaagtta

SEQ ID NO: 223457 - DNA, 25 bp, Homo sapien
gaagtccctcattgacttgttgggt

SEQ ID NO: 223458 - DNA, 25 bp, Homo sapien
aacagatcacacaagggaacccagg

SEQ ID NO: 223459 - DNA, 25 bp, Homo sapien
tcatgaaaagatatcaccagaagct

SEQ ID NO: 223460 - DNA, 25 bp, Homo sapien
tcccagcgatgttctgctggctgag

SEQ ID NO: 223461 - DNA, 25 bp, Homo sapien
tggctgaggtacaaggtgggaggag

SEQ ID NO: 223462 - DNA, 25 bp, Homo sapien
tgctggctgaggtacaaggtgggag

SEQ ID NO: 223463 - DNA, 25 bp, Homo sapien
gtcccagcgatgttctgctggctga

SEQ ID NO: 223464 - DNA, 25 bp, Homo sapien
tggccttgaagaagcgtcgcaggta

SEQ ID NO: 223465 - DNA, 25 bp, Homo sapien
ggccttgaagaagcgtcgcaggtag

SEQ ID NO: 223466 - DNA, 25 bp, Homo sapien
gcaacaacagcgaagcaagcaattt

SEQ ID NO: 223467 - DNA, 25 bp, Homo sapien
ctaattgaggatgttgtcacctgcc

SEQ ID NO: 223468 - DNA, 25 bp, Homo sapien
catttacctttagcagcaacaacag

SEQ ID NO: 223469 - DNA, 25 bp, Homo sapien
tgcctatcacagtaggagtttctac

SEQ ID NO: 223470 - DNA, 25 bp, Homo sapien
gaattgaaagtttggagactgtctc

SEQ ID NO: 223471 - DNA, 25 bp, Homo sapien
gagaaaagggtacaccagaattgaa

SEQ ID NO: 223472 - DNA, 25 bp, Homo sapien
cacttaagaagtaagagtcgccttc

SEQ ID NO: 223473 - DNA, 25 bp, Homo sapien
aactgagaaaagggtacaccagaat

SEQ ID NO: 223474 - DNA, 25 bp, Homo sapien
ttctaggcgtcgcagctctacctct

SEQ ID NO: 223475 - DNA, 25 bp, Homo sapien
taggcgtcgcagctctacctctaat

SEQ ID NO: 223476 - DNA, 25 bp, Homo sapien
ggcgtcgcagctctacctctaatgg

SEQ ID NO: 223477 - DNA, 25 bp, Homo sapien
ggtcttctaggcgtcgcagctctac

SEQ ID NO: 223478 - DNA, 25 bp, Homo sapien
taactagaggcatctgtcacaccag

SEQ ID NO: 223479 - DNA, 25 bp, Homo sapien
tctgctctcaagttagacccctaag

SEQ ID NO: 223480 - DNA, 25 bp, Homo sapien
caaggaattccctgtatgctgagga

SEQ ID NO: 223481 - DNA, 25 bp, Homo sapien
gagatacaccaccagagctttccag

SEQ ID NO: 223482 - DNA, 25 bp, Homo sapien
gcttttgtagattacagccccccac

SEQ ID NO: 223483 - DNA, 25 bp, Homo sapien
aatgatggaattaaacctggtactg

SEQ ID NO: 223484 - DNA, 25 bp, Homo sapien
tgttgttgttaaaggacaatagtcc

SEQ ID NO: 223485 - DNA, 25 bp, Homo sapien
caatagtccagagacctaaaacccg

SEQ ID NO: 223486 - DNA, 25 bp, Homo sapien
tcttctgagacactatgcttttgta

SEQ ID NO: 223487 - DNA, 25 bp, Homo sapien
cacagctagtattccacattgttta

SEQ ID NO: 223488 - DNA, 25 bp, Homo sapien
tacaggtgctacttcagactctaca

SEQ ID NO: 223489 - DNA, 25 bp, Homo sapien
tccaaaaatgtcagtgcttatcaat

SEQ ID NO: 223490 - DNA, 25 bp, Homo sapien
cagtatgcattcagaagaggaccct

SEQ ID NO: 223491 - DNA, 25 bp, Homo sapien
tgaaatctagcttgccattccaaac

SEQ ID NO: 223492 - DNA, 25 bp, Homo sapien
tttcaaaccaccaaaatctgacgga

SEQ ID NO: 223493 - DNA, 25 bp, Homo sapien
tgctattaaggaaagtaattccgcc

SEQ ID NO: 223494 - DNA, 25 bp, Homo sapien
gccaaactctgctgtaaaattcgag

SEQ ID NO: 223495 - DNA, 25 bp, Homo sapien
gaaggcaggctggtattctattcta

SEQ ID NO: 223496 - DNA, 25 bp, Homo sapien
tcatcactggaagcatgaggtatgt

SEQ ID NO: 223497 - DNA, 25 bp, Homo sapien
agttactcagccctttgggtgtcca

SEQ ID NO: 223498 - DNA, 25 bp, Homo sapien
tgtccaaagagagagcaacttctgt

SEQ ID NO: 223499 - DNA, 25 bp, Homo sapien
tacttcctgttgcagaattaaccag

SEQ ID NO: 223500 - DNA, 25 bp, Homo sapien
tttgaacaaggaaagagctgcaact

SEQ ID NO: 223501 - DNA, 25 bp, Homo sapien
gaatggtccacagttcgggaacaga

SEQ ID NO: 223502 - DNA, 25 bp, Homo sapien
atgtctaggatcacgagttggtcag

SEQ ID NO: 223503 - DNA, 25 bp, Homo sapien
atcacgagttggtcaggtatccgcc

SEQ ID NO: 223504 - DNA, 25 bp, Homo sapien
taggatcacgagttggtcaggtatc

SEQ ID NO: 223505 - DNA, 25 bp, Homo sapien
ccatgcttcatgtctaggatcacga

SEQ ID NO: 223506 - DNA, 25 bp, Homo sapien
gaaatcaaaggaatcattgtgtgaa

SEQ ID NO: 223507 - DNA, 25 bp, Homo sapien
aaagaaatcaaaggaatcattgtgt

SEQ ID NO: 223508 - DNA, 25 bp, Homo sapien
ctgagaaagaaatcaaaggaatcat

SEQ ID NO: 223509 - DNA, 25 bp, Homo sapien
aaatcaaaggaatcattgtgtgaaa

SEQ ID NO: 223510 - DNA, 25 bp, Homo sapien
ccccttggttgcatcctctttggag

SEQ ID NO: 223511 - DNA, 25 bp, Homo sapien
ggcaaatttccccttggttgcatcc

SEQ ID NO: 223512 - DNA, 25 bp, Homo sapien
cataatcttcagtggtaaaggcaaa

SEQ ID NO: 223513 - DNA, 25 bp, Homo sapien
cctctttggagtagagaatatggcc

SEQ ID NO: 223514 - DNA, 25 bp, Homo sapien
ggtagtcaggtacactctcaaggaa

SEQ ID NO: 223515 - DNA, 25 bp, Homo sapien
taacctaagagtactaatggatggc

SEQ ID NO: 223516 - DNA, 25 bp, Homo sapien
ggatggcaaactagataaattgtgc

SEQ ID NO: 223517 - DNA, 25 bp, Homo sapien
gattagggcccaaatggctattgca

SEQ ID NO: 223518 - DNA, 25 bp, Homo sapien
aaatgacgagttgatacttcctgct

SEQ ID NO: 223519 - DNA, 25 bp, Homo sapien
tttatacctgacactagttagcctg

SEQ ID NO: 223520 - DNA, 25 bp, Homo sapien
aaatctttgcaggagaggaccaccc

SEQ ID NO: 223521 - DNA, 25 bp, Homo sapien
tttctgagtccctacaacaggcttt

SEQ ID NO: 223522 - DNA, 25 bp, Homo sapien
tatatggactgggtatcaaggaatc

SEQ ID NO: 223523 - DNA, 25 bp, Homo sapien
ctggttaaaagacacctctaggaag

SEQ ID NO: 223524 - DNA, 25 bp, Homo sapien
gcaaaagacaactccgaaatgctgt

SEQ ID NO: 223525 - DNA, 25 bp, Homo sapien
gagactgctctagattagacacttg

SEQ ID NO: 223526 - DNA, 25 bp, Homo sapien
caaatatgaaaactagccggatatg

SEQ ID NO: 223527 - DNA, 25 bp, Homo sapien
gtacgcgccagtcactagcaggtcc

SEQ ID NO: 223528 - DNA, 25 bp, Homo sapien
tgaatctcctcacggaggcacttgc

SEQ ID NO: 223529 - DNA, 25 bp, Homo sapien
agactggtcggagatctcgtacgcg

SEQ ID NO: 223530 - DNA, 25 bp, Homo sapien
tccttgtgaatctcctcacggaggc

SEQ ID NO: 223531 - DNA, 25 bp, Homo sapien
cagatggaaggagatggcaaggacc

SEQ ID NO: 223532 - DNA, 25 bp, Homo sapien
gggcagatggaaggagatggcaagg

SEQ ID NO: 223533 - DNA, 25 bp, Homo sapien
gatggaaggagatggcaaggaccaa

SEQ ID NO: 223534 - DNA, 25 bp, Homo sapien
atggaaggagatggcaaggaccaat

SEQ ID NO: 223535 - DNA, 25 bp, Homo sapien
cagcaacgctaacggaaaagggccg

SEQ ID NO: 223536 - DNA, 25 bp, Homo sapien
agcagcaacgctaacggaaaagggc

SEQ ID NO: 223537 - DNA, 25 bp, Homo sapien
gcagcaacgctaacggaaaagggcc

SEQ ID NO: 223538 - DNA, 25 bp, Homo sapien
gtgctggagactcgttcaccaccga

SEQ ID NO: 223539 - DNA, 25 bp, Homo sapien
caccgaaggcctcaaccgcgccgga

SEQ ID NO: 223540 - DNA, 25 bp, Homo sapien
ctggagactcgttcaccaccgaagg

SEQ ID NO: 223541 - DNA, 25 bp, Homo sapien
tggagactcgttcaccaccgaaggc

SEQ ID NO: 223542 - DNA, 25 bp, Homo sapien
gatgccgtccgcgccattttggaga

SEQ ID NO: 223543 - DNA, 25 bp, Homo sapien
ccgtccgcgccattttggagactgg

SEQ ID NO: 223544 - DNA, 25 bp, Homo sapien
ttctgatgccgtccgcgccattttg

SEQ ID NO: 223545 - DNA, 25 bp, Homo sapien
cttctgatgccgtccgcgccatttt

SEQ ID NO: 223546 - DNA, 25 bp, Homo sapien
agcggcgccatcatagctcagtgct

SEQ ID NO: 223547 - DNA, 25 bp, Homo sapien
catcatagctcagtgctgcctccat

SEQ ID NO: 223548 - DNA, 25 bp, Homo sapien
cctccccagtgctggggactacagg

SEQ ID NO: 223549 - DNA, 25 bp, Homo sapien
cgccatcatagctcagtgctgcctc

SEQ ID NO: 223550 - DNA, 25 bp, Homo sapien
ctggcaatgtgagtagactgggtgg

SEQ ID NO: 223551 - DNA, 25 bp, Homo sapien
tctctggcaatgtgagtagactggg

SEQ ID NO: 223552 - DNA, 25 bp, Homo sapien
tctctgagcagcacacgccagtctt

SEQ ID NO: 223553 - DNA, 25 bp, Homo sapien
acacgccagtcttcctgggtaccag

SEQ ID NO: 223554 - DNA, 25 bp, Homo sapien
tttttggtatgtgttagcagtactg

SEQ ID NO: 223555 - DNA, 25 bp, Homo sapien
caatttgtactcattacatttagag

SEQ ID NO: 223556 - DNA, 25 bp, Homo sapien
aatttgtactcattacatttagagt

SEQ ID NO: 223557 - DNA, 25 bp, Homo sapien
atttgtactcattacatttagagtc

SEQ ID NO: 223558 - DNA, 25 bp, Homo sapien
ggatctggaaattacacactggact

SEQ ID NO: 223559 - DNA, 25 bp, Homo sapien
tgcttgcagcagaacgtggccaaag

SEQ ID NO: 223560 - DNA, 25 bp, Homo sapien
ggatccccacatctccttgacattg

SEQ ID NO: 223561 - DNA, 25 bp, Homo sapien
ttccagtagatagtcatggatctgg

SEQ ID NO: 223562 - DNA, 25 bp, Homo sapien
tgccagagatataccttgtagctcc

SEQ ID NO: 223563 - DNA, 25 bp, Homo sapien
gaggttgccagagatataccttgta

SEQ ID NO: 223564 - DNA, 25 bp, Homo sapien
gttgccagagatataccttgtagct

SEQ ID NO: 223565 - DNA, 25 bp, Homo sapien
cagagatataccttgtagctcccca

SEQ ID NO: 223566 - DNA, 25 bp, Homo sapien
aatctggcagccgtttccatagggc

SEQ ID NO: 223567 - DNA, 25 bp, Homo sapien
gacttggcatggacacctcttggct

SEQ ID NO: 223568 - DNA, 25 bp, Homo sapien
tgatttgggcttcccgtcactggca

SEQ ID NO: 223569 - DNA, 25 bp, Homo sapien
tgaaagacgttgaagacccctctct

SEQ ID NO: 223570 - DNA, 25 bp, Homo sapien
ctttagatagtttagcacagtctgg

SEQ ID NO: 223571 - DNA, 25 bp, Homo sapien
tgggaagtcagccatttctgagttt

SEQ ID NO: 223572 - DNA, 25 bp, Homo sapien
gtcagccatttctgagtttgaatct

SEQ ID NO: 223573 - DNA, 25 bp, Homo sapien
gttgggaaagttaacttctctatgc

SEQ ID NO: 223574 - DNA, 25 bp, Homo sapien
gatcctttcgttgatctggctggat

SEQ ID NO: 223575 - DNA, 25 bp, Homo sapien
gatgaccatgactgtgaccttcagc

SEQ ID NO: 223576 - DNA, 25 bp, Homo sapien
ctaggccttgttcttgcccctggag

SEQ ID NO: 223577 - DNA, 25 bp, Homo sapien
agcccatggaagctagtgcacttct

SEQ ID NO: 223578 - DNA, 25 bp, Homo sapien
tggcactgccaccccattcacgggt

SEQ ID NO: 223579 - DNA, 25 bp, Homo sapien
agacatgatgaagtgctctgagggc

SEQ ID NO: 223580 - DNA, 25 bp, Homo sapien
tgccaccccattcacgggtccagac

SEQ ID NO: 223581 - DNA, 25 bp, Homo sapien
gtggcccgtgggcattcctgtccag

SEQ ID NO: 223582 - DNA, 25 bp, Homo sapien
gcagaatctgcattatggttggata

SEQ ID NO: 223583 - DNA, 25 bp, Homo sapien
cctagaggtaaattgcatcagtgct

SEQ ID NO: 223584 - DNA, 25 bp, Homo sapien
gaattagtaaattgctaccttgccc

SEQ ID NO: 223585 - DNA, 25 bp, Homo sapien
gaagtctagcttaaccattcgttga

SEQ ID NO: 223586 - DNA, 25 bp, Homo sapien
caataagctactgtcttctattaag

SEQ ID NO: 223587 - DNA, 25 bp, Homo sapien
cagaagttccaataagctactgtct

SEQ ID NO: 223588 - DNA, 25 bp, Homo sapien
tggacagaagttccaataagctact

SEQ ID NO: 223589 - DNA, 25 bp, Homo sapien
agttccaataagctactgtcttcta

SEQ ID NO: 223590 - DNA, 25 bp, Homo sapien
caattatggccaactgacggtggag

SEQ ID NO: 223591 - DNA, 25 bp, Homo sapien
agtggtctcggtttggccctcagtc

SEQ ID NO: 223592 - DNA, 25 bp, Homo sapien
cagagagatgttggctcaggacctg

SEQ ID NO: 223593 - DNA, 25 bp, Homo sapien
gggaggtcaccctgacaattatggc

SEQ ID NO: 223594 - DNA, 25 bp, Homo sapien
ttcactgcaagcaaagtccaggtga

SEQ ID NO: 223595 - DNA, 25 bp, Homo sapien
tcatgatgtattcccagccacctga

SEQ ID NO: 223596 - DNA, 25 bp, Homo sapien
ctgggcaggtaactcatgatgtatt

SEQ ID NO: 223597 - DNA, 25 bp, Homo sapien
agcaaagattcttcacccgcagaaa

SEQ ID NO: 223598 - DNA, 25 bp, Homo sapien
ggatagaggtaataaaccacccatc

SEQ ID NO: 223599 - DNA, 25 bp, Homo sapien
taataaaccacccatcaaagctctc

SEQ ID NO: 223600 - DNA, 25 bp, Homo sapien
ctgagaaggatagaggtaataaacc

SEQ ID NO: 223601 - DNA, 25 bp, Homo sapien
taaaccacccatcaaagctctctgt

SEQ ID NO: 223602 - DNA, 25 bp, Homo sapien
gaatggcagtcatggccagactcag

SEQ ID NO: 223603 - DNA, 25 bp, Homo sapien
ttagaagtaccgaaggccgcagaat

SEQ ID NO: 223604 - DNA, 25 bp, Homo sapien
gctttaggattcagagcagctccaa

SEQ ID NO: 223605 - DNA, 25 bp, Homo sapien
ttcctgttaagtggcctgagatcta

SEQ ID NO: 223606 - DNA, 25 bp, Homo sapien
gttgcctggagacggccctggcggc

SEQ ID NO: 223607 - DNA, 25 bp, Homo sapien
cctggcggcgctgtgttgctgtaaa

SEQ ID NO: 223608 - DNA, 25 bp, Homo sapien
tactatctatagcaggatctcctgg

SEQ ID NO: 223609 - DNA, 25 bp, Homo sapien
ggccgcgcggcgttgcctggagacg

SEQ ID NO: 223610 - DNA, 25 bp, Homo sapien
tgtcaacgcgcaggtaaggctggct

SEQ ID NO: 223611 - DNA, 25 bp, Homo sapien
cattagctggagcagacgtgtccca

SEQ ID NO: 223612 - DNA, 25 bp, Homo sapien
tctcgggcttcaacgcagactacga

SEQ ID NO: 223613 - DNA, 25 bp, Homo sapien
taaccgccacgatgatgttctcggg

SEQ ID NO: 223614 - DNA, 25 bp, Homo sapien
tatctgtgcgtgaaacacaccaggc

SEQ ID NO: 223615 - DNA, 25 bp, Homo sapien
tagtagcatgttgagccaggcctgg

SEQ ID NO: 223616 - DNA, 25 bp, Homo sapien
tgactgatacactccaagcggtagg

SEQ ID NO: 223617 - DNA, 25 bp, Homo sapien
gaactctagcgtactcttcctggga

SEQ ID NO: 223618 - DNA, 25 bp, Homo sapien
tggagcttgtaccaataggagctgt

SEQ ID NO: 223619 - DNA, 25 bp, Homo sapien
cgcttcatccaagggtctagtttga

SEQ ID NO: 223620 - DNA, 25 bp, Homo sapien
gatgtaagggattatccatacgggc

SEQ ID NO: 223621 - DNA, 25 bp, Homo sapien
attggccggaagctggttcgcttca

SEQ ID NO: 223622 - DNA, 25 bp, Homo sapien
ggtgccaggagctcgcgagtcctct

SEQ ID NO: 223623 - DNA, 25 bp, Homo sapien
acggtgacacgtaggcgccgtcagc

SEQ ID NO: 223624 - DNA, 25 bp, Homo sapien
cgcgagtcctctgtttactgtttgg

SEQ ID NO: 223625 - DNA, 25 bp, Homo sapien
ggtttccacggtgacacgtaggcgc

SEQ ID NO: 223626 - DNA, 25 bp, Homo sapien
tttcctggcatgataaaacgaaccg

SEQ ID NO: 223627 - DNA, 25 bp, Homo sapien
tcctggcatgataaaacgaaccgtg

SEQ ID NO: 223628 - DNA, 25 bp, Homo sapien
ttttcctggcatgataaaacgaacc

SEQ ID NO: 223629 - DNA, 25 bp, Homo sapien
ctggcatgataaaacgaaccgtggg

SEQ ID NO: 223630 - DNA, 25 bp, Homo sapien
tggaggaatggacgccatagcctac

SEQ ID NO: 223631 - DNA, 25 bp, Homo sapien
acaatcccaaaagctgcagccgcag

SEQ ID NO: 223632 - DNA, 25 bp, Homo sapien
gttcaaatgattgtcagccccacag

SEQ ID NO: 223633 - DNA, 25 bp, Homo sapien
tccggctgtattgtcagggcctcag

SEQ ID NO: 223634 - DNA, 25 bp, Homo sapien
tgcacctgcttcagtgtgaggtctc

SEQ ID NO: 223635 - DNA, 25 bp, Homo sapien
gcacctgcttcagtgtgaggtctcc

SEQ ID NO: 223636 - DNA, 25 bp, Homo sapien
tgctggaccataccacctttcctag

SEQ ID NO: 223637 - DNA, 25 bp, Homo sapien
ttgggctttgctggaccataccacc

SEQ ID NO: 223638 - DNA, 25 bp, Homo sapien
gaccataccacctttcctagagttg

SEQ ID NO: 223639 - DNA, 25 bp, Homo sapien
ccacctttcctagagttgctgtttt

SEQ ID NO: 223640 - DNA, 25 bp, Homo sapien
tcctaaatctcttgttgcacatggg

SEQ ID NO: 223641 - DNA, 25 bp, Homo sapien
tacccagatatgtggagagacctct

SEQ ID NO: 223642 - DNA, 25 bp, Homo sapien
gttaaggaaccattgactgatcagt

SEQ ID NO: 223643 - DNA, 25 bp, Homo sapien
tcatgggccattaggtaccatcctg

SEQ ID NO: 223644 - DNA, 25 bp, Homo sapien
tgactcggaggtggtttggcatcat

SEQ ID NO: 223645 - DNA, 25 bp, Homo sapien
ccttgactcggaggtggtttggcat

SEQ ID NO: 223646 - DNA, 25 bp, Homo sapien
gcatcatatcagtcagaggctttga

SEQ ID NO: 223647 - DNA, 25 bp, Homo sapien
tggtttggcatcatatcagtcagag

SEQ ID NO: 223648 - DNA, 25 bp, Homo sapien
cgtgccaaagaggagagaaccgtcc

SEQ ID NO: 223649 - DNA, 25 bp, Homo sapien
tagcaacgtgccaaagaggagagaa

SEQ ID NO: 223650 - DNA, 25 bp, Homo sapien
tcttcgggggtacaggacaatcaca

SEQ ID NO: 223651 - DNA, 25 bp, Homo sapien
caaagaggagagaaccgtccgtgga

SEQ ID NO: 223652 - DNA, 25 bp, Homo sapien
tacaagtgtggggtaaagctcagca

SEQ ID NO: 223653 - DNA, 25 bp, Homo sapien
gatttggagcataggacgtaatcca

SEQ ID NO: 223654 - DNA, 25 bp, Homo sapien
gcataggacgtaatccagggttttc

SEQ ID NO: 223655 - DNA, 25 bp, Homo sapien
tgggatttggagcataggacgtaat

SEQ ID NO: 223656 - DNA, 25 bp, Homo sapien
tgatacatgaaggatagagccagtg

SEQ ID NO: 223657 - DNA, 25 bp, Homo sapien
tacatgaaggatagagccagtggga

SEQ ID NO: 223658 - DNA, 25 bp, Homo sapien
gatttgtgatacatgaaggatagag

SEQ ID NO: 223659 - DNA, 25 bp, Homo sapien
tgtttgatttgtgatacatgaagga

SEQ ID NO: 223660 - DNA, 25 bp, Homo sapien
ggagacagtggtaagctagagcctc

SEQ ID NO: 223661 - DNA, 25 bp, Homo sapien
tagagcctcctctagtgtggcttgt

SEQ ID NO: 223662 - DNA, 25 bp, Homo sapien
ggcttgttcgccctggctgccaatc

SEQ ID NO: 223663 - DNA, 25 bp, Homo sapien
tctagtgtggcttgttcgccctggc

SEQ ID NO: 223664 - DNA, 25 bp, Homo sapien
agttgagggtgtccctcaggcagct

SEQ ID NO: 223665 - DNA, 25 bp, Homo sapien
gctgggagagttgagggtgtccctc

SEQ ID NO: 223666 - DNA, 25 bp, Homo sapien
aagggcttataaccagcaggtgcgg

SEQ ID NO: 223667 - DNA, 25 bp, Homo sapien
ttataaccagcaggtgcggcggatg

SEQ ID NO: 223668 - DNA, 25 bp, Homo sapien
gatgagtctccgacagcctgtgtaa

SEQ ID NO: 223669 - DNA, 25 bp, Homo sapien
ggaagtcacccaaagagatgagtct

SEQ ID NO: 223670 - DNA, 25 bp, Homo sapien
taaaccaaggtgaacagttgcccaa

SEQ ID NO: 223671 - DNA, 25 bp, Homo sapien
ttgatgaccaagagatagccagttg

SEQ ID NO: 223672 - DNA, 25 bp, Homo sapien
cccaatacccagcttccttgttgtt

SEQ ID NO: 223673 - DNA, 25 bp, Homo sapien
tccttgttgttggcaggtgttggca

SEQ ID NO: 223674 - DNA, 25 bp, Homo sapien
ttgttgttggcaggtgttggcagcc

SEQ ID NO: 223675 - DNA, 25 bp, Homo sapien
ccccaatacccagcttccttgttgt

SEQ ID NO: 223676 - DNA, 25 bp, Homo sapien
agagccactcatacatggtgatatg

SEQ ID NO: 223677 - DNA, 25 bp, Homo sapien
aatttaaacaaggctccaggtggtg

SEQ ID NO: 223678 - DNA, 25 bp, Homo sapien
cataggaaatttaaacaaggctcca

SEQ ID NO: 223679 - DNA, 25 bp, Homo sapien
tatggataaacttaaccataggaaa

SEQ ID NO: 223680 - DNA, 25 bp, Homo sapien
ctctcagaaggaggccgaaagtcgc

SEQ ID NO: 223681 - DNA, 25 bp, Homo sapien
ttgccataaggaagcgcgtgccgtg

SEQ ID NO: 223682 - DNA, 25 bp, Homo sapien
tgtctgtccctaagagccagtggta

SEQ ID NO: 223683 - DNA, 25 bp, Homo sapien
tctttacaaagagctcgggattcat

SEQ ID NO: 223684 - DNA, 25 bp, Homo sapien
ggactgcatggaacccgggacgccc

SEQ ID NO: 223685 - DNA, 25 bp, Homo sapien
agtgggtgtgaagcgccggctccac

SEQ ID NO: 223686 - DNA, 25 bp, Homo sapien
ggaggttaaggtcagtgggtgtgaa

SEQ ID NO: 223687 - DNA, 25 bp, Homo sapien
gctcgccgcgtcctgctttctcgag

SEQ ID NO: 223688 - DNA, 25 bp, Homo sapien
cgcaccttctgcacggtgggtgcga

SEQ ID NO: 223689 - DNA, 25 bp, Homo sapien
gggccgctatatagccggggctgat

SEQ ID NO: 223690 - DNA, 25 bp, Homo sapien
ctgatgcaacccgtcccgccgcccg

SEQ ID NO: 223691 - DNA, 25 bp, Homo sapien
ggcgcggagcgggcacggcgcctgc

SEQ ID NO: 223692 - DNA, 25 bp, Homo sapien
tggccaatgaaaccgggcctggctc

SEQ ID NO: 223693 - DNA, 25 bp, Homo sapien
cagagggtctcctatgcctttgagg

SEQ ID NO: 223694 - DNA, 25 bp, Homo sapien
catatgcagcgtatggtggccaatg

SEQ ID NO: 223695 - DNA, 25 bp, Homo sapien
actgttttggctgcgtcccgggcca

SEQ ID NO: 223696 - DNA, 25 bp, Homo sapien
tctcatgggaaactgacaacgggca

SEQ ID NO: 223697 - DNA, 25 bp, Homo sapien
gctgggtgacttactgagatggcaa

SEQ ID NO: 223698 - DNA, 25 bp, Homo sapien
caacgggcaggcaaacatgcatgtg

SEQ ID NO: 223699 - DNA, 25 bp, Homo sapien
tcagtaaagacgtcaagaaggagca

SEQ ID NO: 223700 - DNA, 25 bp, Homo sapien
tgagaccaaagttgaccctcgggta

SEQ ID NO: 223701 - DNA, 25 bp, Homo sapien
cgagcagctcgagaagaagtgacca

SEQ ID NO: 223702 - DNA, 25 bp, Homo sapien
tgtacaatgaggttcagcacagcca

SEQ ID NO: 223703 - DNA, 25 bp, Homo sapien
catgagttgcaaccaaaacgcggct

SEQ ID NO: 223704 - DNA, 25 bp, Homo sapien
agttcctggtgctcatgaaacaagc

SEQ ID NO: 223705 - DNA, 25 bp, Homo sapien
tgcacaaggagcagacgatccacgt

SEQ ID NO: 223706 - DNA, 25 bp, Homo sapien
gggagtccaaggtcacagttcctgg

SEQ ID NO: 223707 - DNA, 25 bp, Homo sapien
tgcatttctaaagcggcctctagcc

SEQ ID NO: 223708 - DNA, 25 bp, Homo sapien
gctctcattagcagcttggcggtgg

SEQ ID NO: 223709 - DNA, 25 bp, Homo sapien
ctctcattagcagcttggcggtggg

SEQ ID NO: 223710 - DNA, 25 bp, Homo sapien
ttgaaggaggacaagtgaatcagtc

SEQ ID NO: 223711 - DNA, 25 bp, Homo sapien
tcaggtggacttgaaggaggacaag

SEQ ID NO: 223712 - DNA, 25 bp, Homo sapien
ctgatgttatcgagtttctgcagaa

SEQ ID NO: 223713 - DNA, 25 bp, Homo sapien
tgcagaaggagctcgctcagcctgg

SEQ ID NO: 223714 - DNA, 25 bp, Homo sapien
tctgatgttatcgagtttctgcaga

SEQ ID NO: 223715 - DNA, 25 bp, Homo sapien
ttctgatgttatcgagtttctgcag

SEQ ID NO: 223716 - DNA, 25 bp, Homo sapien
atccaggccagcaaatggcggagac

SEQ ID NO: 223717 - DNA, 25 bp, Homo sapien
aatggtcgagctttgtctgggtcca

SEQ ID NO: 223718 - DNA, 25 bp, Homo sapien
caggccagcaaatggcggagacatc

SEQ ID NO: 223719 - DNA, 25 bp, Homo sapien
agaaaatggtcgagctttgtctggg

SEQ ID NO: 223720 - DNA, 25 bp, Homo sapien
cacagagccccaagtcatatagtca

SEQ ID NO: 223721 - DNA, 25 bp, Homo sapien
tatgcctggtcacttctagggctgg

SEQ ID NO: 223722 - DNA, 25 bp, Homo sapien
aatgtcagagcccaaagagtcagct

SEQ ID NO: 223723 - DNA, 25 bp, Homo sapien
ggtaatctctagagcttgagggtcc

SEQ ID NO: 223724 - DNA, 25 bp, Homo sapien
gtgagaaagaagcagtacccggact

SEQ ID NO: 223725 - DNA, 25 bp, Homo sapien
cagtggtctggtccacactcgggaa

SEQ ID NO: 223726 - DNA, 25 bp, Homo sapien
cactcgggaagaagtatccagggaa

SEQ ID NO: 223727 - DNA, 25 bp, Homo sapien
tccagagatgcacataccagtggtc

SEQ ID NO: 223728 - DNA, 25 bp, Homo sapien
cagctggcccacttctagacggctt

SEQ ID NO: 223729 - DNA, 25 bp, Homo sapien
agatgatagaagctccagctggccc

SEQ ID NO: 223730 - DNA, 25 bp, Homo sapien
taaacaattcccctagctcagtggt

SEQ ID NO: 223731 - DNA, 25 bp, Homo sapien
aacatcagtagtacagaggtggagc

SEQ ID NO: 223732 - DNA, 25 bp, Homo sapien
taggccatcatttctaagcttgagg

SEQ ID NO: 223733 - DNA, 25 bp, Homo sapien
gaaataggactcatctaggaaatgc

SEQ ID NO: 223734 - DNA, 25 bp, Homo sapien
tcttgtgaggccacctagaaatagg

SEQ ID NO: 223735 - DNA, 25 bp, Homo sapien
cttgaggagcgcacactgagtcgtt

SEQ ID NO: 223736 - DNA, 25 bp, Homo sapien
gagagcgtgtgttacatagtttatc

SEQ ID NO: 223737 - DNA, 25 bp, Homo sapien
aaaatatccacaagtcctgagacag

SEQ ID NO: 223738 - DNA, 25 bp, Homo sapien
gatatgcagtacaactcaattctac

SEQ ID NO: 223739 - DNA, 25 bp, Homo sapien
tctacagatacgtattgagagcgtg

SEQ ID NO: 223740 - DNA, 25 bp, Homo sapien
agaaagaataatgccggctcccaac

SEQ ID NO: 223741 - DNA, 25 bp, Homo sapien
agttcaatgccagaggttcgttccc

SEQ ID NO: 223742 - DNA, 25 bp, Homo sapien
gagttgctgatagcctccagtgggc

SEQ ID NO: 223743 - DNA, 25 bp, Homo sapien
cattctgcaagaggccacacaagct

SEQ ID NO: 223744 - DNA, 25 bp, Homo sapien
tgctatttcactataggacgctgag

SEQ ID NO: 223745 - DNA, 25 bp, Homo sapien
ccagaagagctcatgggaaaggcca

SEQ ID NO: 223746 - DNA, 25 bp, Homo sapien
ctgcttgttctgatgctatttcact

SEQ ID NO: 223747 - DNA, 25 bp, Homo sapien
actataggacgctgagtaacacacc

SEQ ID NO: 223748 - DNA, 25 bp, Homo sapien
gaatgcatcccgcaagctgtggcga

SEQ ID NO: 223749 - DNA, 25 bp, Homo sapien
cattacttcgggaaggcggatcttc

SEQ ID NO: 223750 - DNA, 25 bp, Homo sapien
tgaattccccagaacacttaggtgg

SEQ ID NO: 223751 - DNA, 25 bp, Homo sapien
acagaggtcagtgcaacgagtcgag

SEQ ID NO: 223752 - DNA, 25 bp, Homo sapien
ttctacggtgtcagtgcctttgcca

SEQ ID NO: 223753 - DNA, 25 bp, Homo sapien
ctttcagtggatccagtacggctcc

SEQ ID NO: 223754 - DNA, 25 bp, Homo sapien
gaggacctcagcgtgatcaaggtga

SEQ ID NO: 223755 - DNA, 25 bp, Homo sapien
tctttccggtcaccgtggtgggcca

SEQ ID NO: 223756 - DNA, 25 bp, Homo sapien
ttgtgaaaaatccacaatggccaca

SEQ ID NO: 223757 - DNA, 25 bp, Homo sapien
tccacaatggccacagattacacca

SEQ ID NO: 223758 - DNA, 25 bp, Homo sapien
caatggccacagattacaccattgc

SEQ ID NO: 223759 - DNA, 25 bp, Homo sapien
ttattaatattcttgtgaaaaatcc

SEQ ID NO: 223760 - DNA, 25 bp, Homo sapien
tggcctttgcagtccccctgacttt

SEQ ID NO: 223761 - DNA, 25 bp, Homo sapien
ccaccaccaaaatgagttttgaatg

SEQ ID NO: 223762 - DNA, 25 bp, Homo sapien
actccttcagctttttgccagcacc

SEQ ID NO: 223763 - DNA, 25 bp, Homo sapien
ctcattctgttcttgcgttcctctc

SEQ ID NO: 223764 - DNA, 25 bp, Homo sapien
tgaaggatatcaatgactgtttgtt

SEQ ID NO: 223765 - DNA, 25 bp, Homo sapien
gtgaaggatatcaatgactgtttgt

SEQ ID NO: 223766 - DNA, 25 bp, Homo sapien
ggtgaaggatatcaatgactgtttg

SEQ ID NO: 223767 - DNA, 25 bp, Homo sapien
cagacagccagggaggaaaagcatg

SEQ ID NO: 223768 - DNA, 25 bp, Homo sapien
acagccagggaggaaaagcatgact

SEQ ID NO: 223769 - DNA, 25 bp, Homo sapien
cctcagacagccagggaggaaaagc

SEQ ID NO: 223770 - DNA, 25 bp, Homo sapien
ctatcctcagacagccagggaggaa

SEQ ID NO: 223771 - DNA, 25 bp, Homo sapien
tctatatgtgcctaagatggttcct

SEQ ID NO: 223772 - DNA, 25 bp, Homo sapien
gaagctatacttgctgatttgatcc

SEQ ID NO: 223773 - DNA, 25 bp, Homo sapien
tgagctgagctgttcggcggctcca

SEQ ID NO: 223774 - DNA, 25 bp, Homo sapien
gaaactgaccgcttgctgcagaggg

SEQ ID NO: 223775 - DNA, 25 bp, Homo sapien
tccttgatcccgagttgaccttttc

SEQ ID NO: 223776 - DNA, 25 bp, Homo sapien
tcacaaataacagtcatatgagcgg

SEQ ID NO: 223777 - DNA, 25 bp, Homo sapien
tttgcctggacattatcggttaccg

SEQ ID NO: 223778 - DNA, 25 bp, Homo sapien
ggttaccgtggagccgcctggcatt

SEQ ID NO: 223779 - DNA, 25 bp, Homo sapien
gagtgagcctcagcccgatgagcta

SEQ ID NO: 223780 - DNA, 25 bp, Homo sapien
caagctctagtaactggtagggccg

SEQ ID NO: 223781 - DNA, 25 bp, Homo sapien
gatgatggtttgtatgacttcccca

SEQ ID NO: 223782 - DNA, 25 bp, Homo sapien
tcctcttgtggattaggaaacacac

SEQ ID NO: 223783 - DNA, 25 bp, Homo sapien
tgtggacaaagagctccttgccttg

SEQ ID NO: 223784 - DNA, 25 bp, Homo sapien
ggaaagatgccaaatgctccatgtg

SEQ ID NO: 223785 - DNA, 25 bp, Homo sapien
tgatttgtaccccagaggtttcctg

SEQ ID NO: 223786 - DNA, 25 bp, Homo sapien
caaaaccagttagcagtgacattca

SEQ ID NO: 223787 - DNA, 25 bp, Homo sapien
gacttccgtgttgactagtatcaca

SEQ ID NO: 223788 - DNA, 25 bp, Homo sapien
gataaagtgtattacatattcggcg

SEQ ID NO: 223789 - DNA, 25 bp, Homo sapien
ccactgtgagtacaatgtagaaaga

SEQ ID NO: 223790 - DNA, 25 bp, Homo sapien
tagatgctcaagatacactagggta

SEQ ID NO: 223791 - DNA, 25 bp, Homo sapien
catattcggcgcatagtagatgctc

SEQ ID NO: 223792 - DNA, 25 bp, Homo sapien
gctgtgattctcctagggctcagag

SEQ ID NO: 223793 - DNA, 25 bp, Homo sapien
caaatgacagtaaggagccggaggc

SEQ ID NO: 223794 - DNA, 25 bp, Homo sapien
ccaagtgtccggcatggagaagtac

SEQ ID NO: 223795 - DNA, 25 bp, Homo sapien
gactataatataaggcccacagggc

SEQ ID NO: 223796 - DNA, 25 bp, Homo sapien
aagaactgcctgtcccttggaaggt

SEQ ID NO: 223797 - DNA, 25 bp, Homo sapien
aaggttcagagtcttgggtccagca

SEQ ID NO: 223798 - DNA, 25 bp, Homo sapien
caaggtggaaaacgagaaagtcctg

SEQ ID NO: 223799 - DNA, 25 bp, Homo sapien
cacaaatacagctgaccagaaggtc

SEQ ID NO: 223800 - DNA, 25 bp, Homo sapien
tactggttctacttctagataccgg

SEQ ID NO: 223801 - DNA, 25 bp, Homo sapien
tctacttctagataccggagcccga

SEQ ID NO: 223802 - DNA, 25 bp, Homo sapien
gcccgaccagcatacccaggatgga

SEQ ID NO: 223803 - DNA, 25 bp, Homo sapien
tcttctgtctggatactggttctac

SEQ ID NO: 223804 - DNA, 25 bp, Homo sapien
acagctcctgtaggaggtctagggt

SEQ ID NO: 223805 - DNA, 25 bp, Homo sapien
cctgtaggaggtctagggtggttgg

SEQ ID NO: 223806 - DNA, 25 bp, Homo sapien
tggcacagctcctgtaggaggtcta

SEQ ID NO: 223807 - DNA, 25 bp, Homo sapien
tcctgtaggaggtctagggtggttg

SEQ ID NO: 223808 - DNA, 25 bp, Homo sapien
gctgcagttccatagacaaacaact

SEQ ID NO: 223809 - DNA, 25 bp, Homo sapien
agggcaaggaggaaggtccagagtg

SEQ ID NO: 223810 - DNA, 25 bp, Homo sapien
gacgccaatcgtgggagctgcagtt

SEQ ID NO: 223811 - DNA, 25 bp, Homo sapien
atcaggggtgccaggacgccaatcg

SEQ ID NO: 223812 - DNA, 25 bp, Homo sapien
ttccaacaaaaggatgctaaagctc

SEQ ID NO: 223813 - DNA, 25 bp, Homo sapien
tgattaacagttcccattactcaag

SEQ ID NO: 223814 - DNA, 25 bp, Homo sapien
taacaggtatgcctcgcatctgatt

SEQ ID NO: 223815 - DNA, 25 bp, Homo sapien
ttctaagctaatgcattaaaatgat

SEQ ID NO: 223816 - DNA, 25 bp, Homo sapien
aaggtccgagcttggaggccattca

SEQ ID NO: 223817 - DNA, 25 bp, Homo sapien
cccaaaggtccgagcttggaggcca

SEQ ID NO: 223818 - DNA, 25 bp, Homo sapien
aatcactgatgagagcagcgtccag

SEQ ID NO: 223819 - DNA, 25 bp, Homo sapien
gaatgtcaatggcacagaggcagcg

SEQ ID NO: 223820 - DNA, 25 bp, Homo sapien
ggagctggacctgacctctctgtgg

SEQ ID NO: 223821 - DNA, 25 bp, Homo sapien
ggtcctagtggcaacatgggaacta

SEQ ID NO: 223822 - DNA, 25 bp, Homo sapien
caaactcctcctatttcactggtgg

SEQ ID NO: 223823 - DNA, 25 bp, Homo sapien
tcaaatgtctacagttggaagggaa

SEQ ID NO: 223824 - DNA, 25 bp, Homo sapien
agaaaagtgtggtctcggaagctct

SEQ ID NO: 223825 - DNA, 25 bp, Homo sapien
gagaaaagtgtggtctcggaagctc

SEQ ID NO: 223826 - DNA, 25 bp, Homo sapien
caaggtttggcttgccagtgtagag

SEQ ID NO: 223827 - DNA, 25 bp, Homo sapien
gtttggcttgccagtgtagagcttt

SEQ ID NO: 223828 - DNA, 25 bp, Homo sapien
gatggacaccataaccagccaactt

SEQ ID NO: 223829 - DNA, 25 bp, Homo sapien
tgatggacaccataaccagccaact

SEQ ID NO: 223830 - DNA, 25 bp, Homo sapien
gacaccataaccagccaacttctta

SEQ ID NO: 223831 - DNA, 25 bp, Homo sapien
tggacaccataaccagccaacttct

SEQ ID NO: 223832 - DNA, 25 bp, Homo sapien
ctttggcaatacaagtttcggtatt

SEQ ID NO: 223833 - DNA, 25 bp, Homo sapien
ggcaatacaagtttcggtattgttc

SEQ ID NO: 223834 - DNA, 25 bp, Homo sapien
atacaagtttcggtattgttctctg

SEQ ID NO: 223835 - DNA, 25 bp, Homo sapien
actttggcaatacaagtttcggtat

SEQ ID NO: 223836 - DNA, 25 bp, Homo sapien
ttggctgtcccggtttcgcccgagc

SEQ ID NO: 223837 - DNA, 25 bp, Homo sapien
tcctgttggacctagcggaactccg

SEQ ID NO: 223838 - DNA, 25 bp, Homo sapien
tttactgccaatcagcggttgccgc

SEQ ID NO: 223839 - DNA, 25 bp, Homo sapien
gattgggccgtttccgtcagtactc

SEQ ID NO: 223840 - DNA, 25 bp, Homo sapien
cggttgcttgttggttgttgtagta

SEQ ID NO: 223841 - DNA, 25 bp, Homo sapien
tgctcgccccgaaccatgggaagat

SEQ ID NO: 223842 - DNA, 25 bp, Homo sapien
cagtggctccgagcgggcggttgct

SEQ ID NO: 223843 - DNA, 25 bp, Homo sapien
gatgagacaggtaaacgcctgcgcc

SEQ ID NO: 223844 - DNA, 25 bp, Homo sapien
gaacctcccttatattcctgagata

SEQ ID NO: 223845 - DNA, 25 bp, Homo sapien
tctgtcattgcgtatgatactagct

SEQ ID NO: 223846 - DNA, 25 bp, Homo sapien
taaatcccactttgtcagagtgtaa

SEQ ID NO: 223847 - DNA, 25 bp, Homo sapien
taacgtggtacattacattgactga

SEQ ID NO: 223848 - DNA, 25 bp, Homo sapien
tctatcaggtttgcaactgtgcgat

SEQ ID NO: 223849 - DNA, 25 bp, Homo sapien
caatgtcttgttgtgattaagtcca

SEQ ID NO: 223850 - DNA, 25 bp, Homo sapien
tatctcattgatcctcagttccagc

SEQ ID NO: 223851 - DNA, 25 bp, Homo sapien
aactctgttcctggcatttaacctg

SEQ ID NO: 223852 - DNA, 25 bp, Homo sapien
gattcccagattgtataattgcctg

SEQ ID NO: 223853 - DNA, 25 bp, Homo sapien
gattagaaagaggtactcccagccc

SEQ ID NO: 223854 - DNA, 25 bp, Homo sapien
cacatggtaggcacacacacggaaa

SEQ ID NO: 223855 - DNA, 25 bp, Homo sapien
tgtgctttccaggttggctcttaag

SEQ ID NO: 223856 - DNA, 25 bp, Homo sapien
tttccagcttgctctgttttcataa

SEQ ID NO: 223857 - DNA, 25 bp, Homo sapien
taatagggaattttcagcttgtgct

SEQ ID NO: 223858 - DNA, 25 bp, Homo sapien
ccacctattaatagggaattttcag

SEQ ID NO: 223859 - DNA, 25 bp, Homo sapien
cctattaatagggaattttcagctt

SEQ ID NO: 223860 - DNA, 25 bp, Homo sapien
cgcaattgcgctccagcctaggcag

SEQ ID NO: 223861 - DNA, 25 bp, Homo sapien
ggcaggcacctgtaaatcccaagta

SEQ ID NO: 223862 - DNA, 25 bp, Homo sapien
caggcacctgtaaatcccaagtact

SEQ ID NO: 223863 - DNA, 25 bp, Homo sapien
gatcgcgcaattgcgctccagccta

SEQ ID NO: 223864 - DNA, 25 bp, Homo sapien
tccgatactgggagattttccctgc

SEQ ID NO: 223865 - DNA, 25 bp, Homo sapien
cttagattcgtttttgttcagtgac

SEQ ID NO: 223866 - DNA, 25 bp, Homo sapien
gattcgtttttgttcagtgactcct

SEQ ID NO: 223867 - DNA, 25 bp, Homo sapien
gcttgtagggtttattaaggtctca

SEQ ID NO: 223868 - DNA, 25 bp, Homo sapien
tcagcgtattacctacccagtacag

SEQ ID NO: 223869 - DNA, 25 bp, Homo sapien
tcacaggcgtgatgaaacacagtct

SEQ ID NO: 223870 - DNA, 25 bp, Homo sapien
taagaggcctggttatgacaaagtt

SEQ ID NO: 223871 - DNA, 25 bp, Homo sapien
tcaactggccgtaactcacgtacaa

SEQ ID NO: 223872 - DNA, 25 bp, Homo sapien
ttattgccctcattagactctaata

SEQ ID NO: 223873 - DNA, 25 bp, Homo sapien
tgccctcattagactctaatatact

SEQ ID NO: 223874 - DNA, 25 bp, Homo sapien
cctcattagactctaatatactcac

SEQ ID NO: 223875 - DNA, 25 bp, Homo sapien
ttatttattgccctcattagactct

SEQ ID NO: 223876 - DNA, 25 bp, Homo sapien
gcttctcttcttgtgtattgcaaat

SEQ ID NO: 223877 - DNA, 25 bp, Homo sapien
tcaccaggttgatgttatgcttctc

SEQ ID NO: 223878 - DNA, 25 bp, Homo sapien
ggagccaaccagctcaacatttcat

SEQ ID NO: 223879 - DNA, 25 bp, Homo sapien
gtattgcaaatggactctgctctat

SEQ ID NO: 223880 - DNA, 25 bp, Homo sapien
tccactggctgcttacatgacctca

SEQ ID NO: 223881 - DNA, 25 bp, Homo sapien
gtttcactctcatatgcgtaatgag

SEQ ID NO: 223882 - DNA, 25 bp, Homo sapien
tcatgctggctgtcgacaggaggcc

SEQ ID NO: 223883 - DNA, 25 bp, Homo sapien
tgagtaattcaacagagagtagggt

SEQ ID NO: 223884 - DNA, 25 bp, Homo sapien
gatggccagtgaattcccaattagg

SEQ ID NO: 223885 - DNA, 25 bp, Homo sapien
ttccagaagtaagaggtcagatagc

SEQ ID NO: 223886 - DNA, 25 bp, Homo sapien
ggtgcaggtctttactagatggcca

SEQ ID NO: 223887 - DNA, 25 bp, Homo sapien
aaaagcactacatggtagccagagt

SEQ ID NO: 223888 - DNA, 25 bp, Homo sapien
ggtggtgcaacccctggctaaggtg

SEQ ID NO: 223889 - DNA, 25 bp, Homo sapien
tcagagggtggtgcaacccctggct

SEQ ID NO: 223890 - DNA, 25 bp, Homo sapien
agggtggtgcaacccctggctaagg

SEQ ID NO: 223891 - DNA, 25 bp, Homo sapien
agagggtggtgcaacccctggctaa

SEQ ID NO: 223892 - DNA, 25 bp, Homo sapien
taccaggtataagcagcagcttttt

SEQ ID NO: 223893 - DNA, 25 bp, Homo sapien
tcatgagtaccaggtataagcagca

SEQ ID NO: 223894 - DNA, 25 bp, Homo sapien
tttgagtgcaggacctaagatgttg

SEQ ID NO: 223895 - DNA, 25 bp, Homo sapien
ctttttgagtgcaggacctaagatg

SEQ ID NO: 223896 - DNA, 25 bp, Homo sapien
ctttgggggcgagggtgaggcacat

SEQ ID NO: 223897 - DNA, 25 bp, Homo sapien
agcacagagccgcagcagccagtca

SEQ ID NO: 223898 - DNA, 25 bp, Homo sapien
gcacatcagcacagagccgcagcag

SEQ ID NO: 223899 - DNA, 25 bp, Homo sapien
gggggcgagggtgaggcacatcagc

SEQ ID NO: 223900 - DNA, 25 bp, Homo sapien
agcagggtgataaccccacagatgc

SEQ ID NO: 223901 - DNA, 25 bp, Homo sapien
agatgctactgtccgcctccttgga

SEQ ID NO: 223902 - DNA, 25 bp, Homo sapien
gcagagtgtggagcttgctgatctt

SEQ ID NO: 223903 - DNA, 25 bp, Homo sapien
ttccattggatccttgctgcatggg

SEQ ID NO: 223904 - DNA, 25 bp, Homo sapien
gccacaagtatagtcttcaaaacct

SEQ ID NO: 223905 - DNA, 25 bp, Homo sapien
tgccacaagtatagtcttcaaaacc

SEQ ID NO: 223906 - DNA, 25 bp, Homo sapien
ttgccacaagtatagtcttcaaaac

SEQ ID NO: 223907 - DNA, 25 bp, Homo sapien
tttgccacaagtatagtcttcaaaa

SEQ ID NO: 223908 - DNA, 25 bp, Homo sapien
gcagcccagcatgcggatggtgaca

SEQ ID NO: 223909 - DNA, 25 bp, Homo sapien
gggtgtccccagaaatgtcgatgat

SEQ ID NO: 223910 - DNA, 25 bp, Homo sapien
catgcggatggtgacacactccttg

SEQ ID NO: 223911 - DNA, 25 bp, Homo sapien
agaaatgtcgatgatctcagattcc

SEQ ID NO: 223912 - DNA, 25 bp, Homo sapien
agcacacctgcggtctagaccctcc

SEQ ID NO: 223913 - DNA, 25 bp, Homo sapien
acacctgcggtctagaccctcccat

SEQ ID NO: 223914 - DNA, 25 bp, Homo sapien
cggtctagaccctcccatagcgctg

SEQ ID NO: 223915 - DNA, 25 bp, Homo sapien
ctgcggtctagaccctcccatagcg

SEQ ID NO: 223916 - DNA, 25 bp, Homo sapien
ccactttgaagaaatcctggtatat

SEQ ID NO: 223917 - DNA, 25 bp, Homo sapien
tcaaaggtggtgtccactttgaaga

SEQ ID NO: 223918 - DNA, 25 bp, Homo sapien
gacacttcctttgagtcagcctcaa

SEQ ID NO: 223919 - DNA, 25 bp, Homo sapien
tggtatatttcagtgccctttttgc

SEQ ID NO: 223920 - DNA, 25 bp, Homo sapien
cattcgtcagtgctcacatccagtg

SEQ ID NO: 223921 - DNA, 25 bp, Homo sapien
cagcaggcttccaccataggaaagt

SEQ ID NO: 223922 - DNA, 25 bp, Homo sapien
tctctctggcgggtgagactggcaa

SEQ ID NO: 223923 - DNA, 25 bp, Homo sapien
tagagcattctgcagcgggattggc

SEQ ID NO: 223924 - DNA, 25 bp, Homo sapien
gatggctcagtgtagaactgttctt

SEQ ID NO: 223925 - DNA, 25 bp, Homo sapien
gggaatttctttatggatggctcag

SEQ ID NO: 223926 - DNA, 25 bp, Homo sapien
cagtgtagaactgttcttcagccct

SEQ ID NO: 223927 - DNA, 25 bp, Homo sapien
gaatttctttatggatggctcagtg

SEQ ID NO: 223928 - DNA, 25 bp, Homo sapien
tggaagttggtggtaacgactgttc

SEQ ID NO: 223929 - DNA, 25 bp, Homo sapien
ttaggtgattctcatcagggtgacc

SEQ ID NO: 223930 - DNA, 25 bp, Homo sapien
acgactgttctgtgtcagcacccag

SEQ ID NO: 223931 - DNA, 25 bp, Homo sapien
gacctgagtggaagttggtggtaac

SEQ ID NO: 223932 - DNA, 25 bp, Homo sapien
agctgccccttcgtcacctcctcat

SEQ ID NO: 223933 - DNA, 25 bp, Homo sapien
ccagctgccccttcgtcacctcctc

SEQ ID NO: 223934 - DNA, 25 bp, Homo sapien
cagctgccccttcgtcacctcctca

SEQ ID NO: 223935 - DNA, 25 bp, Homo sapien
cccagctgccccttcgtcacctcct

SEQ ID NO: 223936 - DNA, 25 bp, Homo sapien
taagatagtagaaatgagtccaaat

SEQ ID NO: 223937 - DNA, 25 bp, Homo sapien
aactaagatagtagaaatgagtcca

SEQ ID NO: 223938 - DNA, 25 bp, Homo sapien
ctaagatagtagaaatgagtccaaa

SEQ ID NO: 223939 - DNA, 25 bp, Homo sapien
aaactaagatagtagaaatgagtcc

SEQ ID NO: 223940 - DNA, 25 bp, Homo sapien
gaaattaagacttgtgacaagccca

SEQ ID NO: 223941 - DNA, 25 bp, Homo sapien
aaagtgagagtgaggtattttcctt

SEQ ID NO: 223942 - DNA, 25 bp, Homo sapien
aaaagcagctgcttagaagttgctg

SEQ ID NO: 223943 - DNA, 25 bp, Homo sapien
tggtgttggttagaagaatcactct

SEQ ID NO: 223944 - DNA, 25 bp, Homo sapien
ggttacttaactgctccctctacta

SEQ ID NO: 223945 - DNA, 25 bp, Homo sapien
cctggaatgcgaggatcaggtccaa

SEQ ID NO: 223946 - DNA, 25 bp, Homo sapien
caagtggactctaaaactctagggt

SEQ ID NO: 223947 - DNA, 25 bp, Homo sapien
ctctagggtctagcatagtgcccag

SEQ ID NO: 223948 - DNA, 25 bp, Homo sapien
caccacgtgaatcttgtgacaaggg

SEQ ID NO: 223949 - DNA, 25 bp, Homo sapien
tccatagtcccctgatgaggtgtag

SEQ ID NO: 223950 - DNA, 25 bp, Homo sapien
gaatgcattccaaatgtccccggga

SEQ ID NO: 223951 - DNA, 25 bp, Homo sapien
caaaggtttgggcacatggacacat

SEQ ID NO: 223952 - DNA, 25 bp, Homo sapien
gattccctagagcagatgtggtaca

SEQ ID NO: 223953 - DNA, 25 bp, Homo sapien
tgatgggccaggaactgcatgacct

SEQ ID NO: 223954 - DNA, 25 bp, Homo sapien
gcatcctgacctggaaggcgtctaa

SEQ ID NO: 223955 - DNA, 25 bp, Homo sapien
gattttctccctgtagtgacccacg

SEQ ID NO: 223956 - DNA, 25 bp, Homo sapien
cccaacatagtacaggatggtcagg

SEQ ID NO: 223957 - DNA, 25 bp, Homo sapien
cgaggcagatgcttcagggttcaga

SEQ ID NO: 223958 - DNA, 25 bp, Homo sapien
gggtcctcccaacatagtacaggat

SEQ ID NO: 223959 - DNA, 25 bp, Homo sapien
gggcacgcagcaaggcgaggcagat

SEQ ID NO: 223960 - DNA, 25 bp, Homo sapien
gccacgggtgctctttaagaggaac

SEQ ID NO: 223961 - DNA, 25 bp, Homo sapien
aacccaggaagtcgcccagttccag

SEQ ID NO: 223962 - DNA, 25 bp, Homo sapien
cagtgagaggttggaaggccaagtc

SEQ ID NO: 223963 - DNA, 25 bp, Homo sapien
gaagggacatgtcagtgagaggttg

SEQ ID NO: 223964 - DNA, 25 bp, Homo sapien
tgatcacttcggtgagaaatgttct

SEQ ID NO: 223965 - DNA, 25 bp, Homo sapien
gctggaactgatcacttcggtgaga

SEQ ID NO: 223966 - DNA, 25 bp, Homo sapien
gttctcacaaaacattgccttgagc

SEQ ID NO: 223967 - DNA, 25 bp, Homo sapien
gccatttagtaagtgcagcgtgcag

SEQ ID NO: 223968 - DNA, 25 bp, Homo sapien
taagttttctacattcgagaggctg

SEQ ID NO: 223969 - DNA, 25 bp, Homo sapien
tgacatagggtaacacgtggcagtt

SEQ ID NO: 223970 - DNA, 25 bp, Homo sapien
gggttgtggactctcggctatctca

SEQ ID NO: 223971 - DNA, 25 bp, Homo sapien
agagttctgatagaagcctttctac

SEQ ID NO: 223972 - DNA, 25 bp, Homo sapien
gcagaatgtgactgagtagaactga

SEQ ID NO: 223973 - DNA, 25 bp, Homo sapien
agtgcctcagatggcatgagcctgc

SEQ ID NO: 223974 - DNA, 25 bp, Homo sapien
taacaagtggtctggtcggtcagcc

SEQ ID NO: 223975 - DNA, 25 bp, Homo sapien
gaggaattttactcaccccagacca

SEQ ID NO: 223976 - DNA, 25 bp, Homo sapien
tctgcactgcggaggtatgggcaag

SEQ ID NO: 223977 - DNA, 25 bp, Homo sapien
cagcccagatcctgtcggaagtcaa

SEQ ID NO: 223978 - DNA, 25 bp, Homo sapien
tagcccttaggttcatggacccact

SEQ ID NO: 223979 - DNA, 25 bp, Homo sapien
cctgagcagaagttggcatagtagc

SEQ ID NO: 223980 - DNA, 25 bp, Homo sapien
ggctctgatcaatggaatcccaggt

SEQ ID NO: 223981 - DNA, 25 bp, Homo sapien
taaagaccaggatcccaaggatgta

SEQ ID NO: 223982 - DNA, 25 bp, Homo sapien
ggcacattcatgtgttaaagaccag

SEQ ID NO: 223983 - DNA, 25 bp, Homo sapien
tggagtcctttcatgccatcatagg

SEQ ID NO: 223984 - DNA, 25 bp, Homo sapien
tactatagtaggtgactgctgagac

SEQ ID NO: 223985 - DNA, 25 bp, Homo sapien
tttaccctcctaatgtgcacccaga

SEQ ID NO: 223986 - DNA, 25 bp, Homo sapien
tattagccaactcagctttgttgag

SEQ ID NO: 223987 - DNA, 25 bp, Homo sapien
tacaaagcagtgctatgaagcgctc

SEQ ID NO: 223988 - DNA, 25 bp, Homo sapien
cagggaccctctgttgagtgtggct

SEQ ID NO: 223989 - DNA, 25 bp, Homo sapien
agctccttccagagttagcctatgg

SEQ ID NO: 223990 - DNA, 25 bp, Homo sapien
tgtttgtgaatagcatcagggaccc

SEQ ID NO: 223991 - DNA, 25 bp, Homo sapien
taggcaggcagtagatgttggttcc

SEQ ID NO: 223992 - DNA, 25 bp, Homo sapien
ctgcttcttgaggcgccccagatct

SEQ ID NO: 223993 - DNA, 25 bp, Homo sapien
aagcagtaattggtgtccaaagccc

SEQ ID NO: 223994 - DNA, 25 bp, Homo sapien
ccccagatctccacggccatggtca

SEQ ID NO: 223995 - DNA, 25 bp, Homo sapien
cctggcccgggttgtcgagccggtg

SEQ ID NO: 223996 - DNA, 25 bp, Homo sapien
gctgatttctagacctaagttggac

SEQ ID NO: 223997 - DNA, 25 bp, Homo sapien
catcacctcgtgaatgttttccagg

SEQ ID NO: 223998 - DNA, 25 bp, Homo sapien
caggatatctccattgggctgaaag

SEQ ID NO: 223999 - DNA, 25 bp, Homo sapien
tgatttccatcacctcgtgaatgtt

SEQ ID NO: 224000 - DNA, 25 bp, Homo sapien
gactgtgggcctagacaaagtggca

SEQ ID NO: 224001 - DNA, 25 bp, Homo sapien
gaagatcacggttacactgggccat

SEQ ID NO: 224002 - DNA, 25 bp, Homo sapien
cattctggtgcgtgaagggcaactc

SEQ ID NO: 224003 - DNA, 25 bp, Homo sapien
gatcgttgagccaatctactgcaga

SEQ ID NO: 224004 - DNA, 25 bp, Homo sapien
agaatgcagcctgggtacctggtgc

SEQ ID NO: 224005 - DNA, 25 bp, Homo sapien
cacaagggtatgagacctgggtccc

SEQ ID NO: 224006 - DNA, 25 bp, Homo sapien
tgctgaatgaatccaagaccacatg

SEQ ID NO: 224007 - DNA, 25 bp, Homo sapien
tacctggtgcacaagggctctcaga

SEQ ID NO: 224008 - DNA, 25 bp, Homo sapien
aggatggaaatcattctcaatgcaa

SEQ ID NO: 224009 - DNA, 25 bp, Homo sapien
ggaggatggaaatcattctcaatgc

SEQ ID NO: 224010 - DNA, 25 bp, Homo sapien
gaggatggaaatcattctcaatgca

SEQ ID NO: 224011 - DNA, 25 bp, Homo sapien
cataggttttattacgaaattatct

SEQ ID NO: 224012 - DNA, 25 bp, Homo sapien
gatatagcgctgtttggcaatgtgc

SEQ ID NO: 224013 - DNA, 25 bp, Homo sapien
cagattcttgccaccgatatagcgc

SEQ ID NO: 224014 - DNA, 25 bp, Homo sapien
caatgtgctcatctggccgaaggat

SEQ ID NO: 224015 - DNA, 25 bp, Homo sapien
agccactcggcagtgccccgtgtgg

SEQ ID NO: 224016 - DNA, 25 bp, Homo sapien
tctgctcggaataggttggttctat

SEQ ID NO: 224017 - DNA, 25 bp, Homo sapien
tgggcacccgcaagacccggaattc

SEQ ID NO: 224018 - DNA, 25 bp, Homo sapien
ggacacattgaagcggaaaaccttg

SEQ ID NO: 224019 - DNA, 25 bp, Homo sapien
gatcctctgctcattccgcttagag

SEQ ID NO: 224020 - DNA, 25 bp, Homo sapien
tctcgtgggtcacgtgggtggggta

SEQ ID NO: 224021 - DNA, 25 bp, Homo sapien
acagacattaatttggggcaggtat

SEQ ID NO: 224022 - DNA, 25 bp, Homo sapien
tggggtagaccaaagggcccaggca

SEQ ID NO: 224023 - DNA, 25 bp, Homo sapien
gactcggtgttttcctgggtgcagc

SEQ ID NO: 224024 - DNA, 25 bp, Homo sapien
tcccgggtgctgttgtaaagggcca

SEQ ID NO: 224025 - DNA, 25 bp, Homo sapien
gacgtgggtcatcaccgttggctca

SEQ ID NO: 224026 - DNA, 25 bp, Homo sapien
tgaccgtggcaaagttcagcagggc

SEQ ID NO: 224027 - DNA, 25 bp, Homo sapien
agagaggccagggggacggcaaggc

SEQ ID NO: 224028 - DNA, 25 bp, Homo sapien
ggaagagaggccagggggacggcaa

SEQ ID NO: 224029 - DNA, 25 bp, Homo sapien
ctgggaagagaggccagggggacgg

SEQ ID NO: 224030 - DNA, 25 bp, Homo sapien
gaagagaggccagggggacggcaag

SEQ ID NO: 224031 - DNA, 25 bp, Homo sapien
cccagatcccaaagactgaggcttg

SEQ ID NO: 224032 - DNA, 25 bp, Homo sapien
agatcccaaagactgaggcttggca

SEQ ID NO: 224033 - DNA, 25 bp, Homo sapien
accccagcagacgtgcagaaggagg

SEQ ID NO: 224034 - DNA, 25 bp, Homo sapien
gagaccccagcagacgtgcagaagg

SEQ ID NO: 224035 - DNA, 25 bp, Homo sapien
tgcactgcgagagcttcaggacttc

SEQ ID NO: 224036 - DNA, 25 bp, Homo sapien
cactgcgagagcttcaggacttcca

SEQ ID NO: 224037 - DNA, 25 bp, Homo sapien
gcactgcgagagcttcaggacttcc

SEQ ID NO: 224038 - DNA, 25 bp, Homo sapien
tagcgctgggattcttgtccatgtg

SEQ ID NO: 224039 - DNA, 25 bp, Homo sapien
ctgaggacgaagaagcggactgtgt

SEQ ID NO: 224040 - DNA, 25 bp, Homo sapien
actgtgtgccttgtagcgctgggat

SEQ ID NO: 224041 - DNA, 25 bp, Homo sapien
tgtccatgtgtctaaacaggttttg

SEQ ID NO: 224042 - DNA, 25 bp, Homo sapien
tggatatctgatattgccaaacgcc

SEQ ID NO: 224043 - DNA, 25 bp, Homo sapien
aatagagtggatatctgatattgcc

SEQ ID NO: 224044 - DNA, 25 bp, Homo sapien
gatattgccaaacgccgcttggcga

SEQ ID NO: 224045 - DNA, 25 bp, Homo sapien
ccgggcagttgctggcccagctaaa

SEQ ID NO: 224046 - DNA, 25 bp, Homo sapien
taaatgactttgttcacgctgcctc

SEQ ID NO: 224047 - DNA, 25 bp, Homo sapien
gctgcctctcgtcttcattggctgg

SEQ ID NO: 224048 - DNA, 25 bp, Homo sapien
gcacctcggcttgtcttctgcctcg

SEQ ID NO: 224049 - DNA, 25 bp, Homo sapien
ttctgcctcggccattgcttctgtc

SEQ ID NO: 224050 - DNA, 25 bp, Homo sapien
ttcacggcacgcctgctccggaaag

SEQ ID NO: 224051 - DNA, 25 bp, Homo sapien
gcctgctccggaaagctgttattcc

SEQ ID NO: 224052 - DNA, 25 bp, Homo sapien
agctgttattccttctctcgcacgc

SEQ ID NO: 224053 - DNA, 25 bp, Homo sapien
taaaatagaagccagttcacggcac

SEQ ID NO: 224054 - DNA, 25 bp, Homo sapien
agctgcgccagcgagcgcgaagtca

SEQ ID NO: 224055 - DNA, 25 bp, Homo sapien
aagtcagcagttggcccgagcccat

SEQ ID NO: 224056 - DNA, 25 bp, Homo sapien
tttcccacgagcagccaagggaggg

SEQ ID NO: 224057 - DNA, 25 bp, Homo sapien
cagggcttgcctctgaactgaactt

SEQ ID NO: 224058 - DNA, 25 bp, Homo sapien
gaagttcctgcaaaagccgcactgt

SEQ ID NO: 224059 - DNA, 25 bp, Homo sapien
gagtgcgaacttccccagaacagat

SEQ ID NO: 224060 - DNA, 25 bp, Homo sapien
cagaacagatcgatcacagggtgat

SEQ ID NO: 224061 - DNA, 25 bp, Homo sapien
caagaccgatttgtaacgtgaggga

SEQ ID NO: 224062 - DNA, 25 bp, Homo sapien
cattttccagcgtttttcatagccg

SEQ ID NO: 224063 - DNA, 25 bp, Homo sapien
taacgttgccaaagagggatgcagg

SEQ ID NO: 224064 - DNA, 25 bp, Homo sapien
ccaatcggctgggttgaatgatgct

SEQ ID NO: 224065 - DNA, 25 bp, Homo sapien
tgtgcagatgtgcatcgctgaccca

SEQ ID NO: 224066 - DNA, 25 bp, Homo sapien
tgggacagggatgacatcttctact

SEQ ID NO: 224067 - DNA, 25 bp, Homo sapien
tcatggaacatttgggacagggatg

SEQ ID NO: 224068 - DNA, 25 bp, Homo sapien
ccagtgccgagttccccacataggt

SEQ ID NO: 224069 - DNA, 25 bp, Homo sapien
tattgcacctagtgcacatgggacc

SEQ ID NO: 224070 - DNA, 25 bp, Homo sapien
gctgtccttggctctgaagttgccc

SEQ ID NO: 224071 - DNA, 25 bp, Homo sapien
ctgaagttgcccgaggtaggacact

SEQ ID NO: 224072 - DNA, 25 bp, Homo sapien
ttgcccgaggtaggacacttatggt

SEQ ID NO: 224073 - DNA, 25 bp, Homo sapien
acttatggtgggtcactgacttcgc

SEQ ID NO: 224074 - DNA, 25 bp, Homo sapien
gaccctgaggccacacattgtccaa

SEQ ID NO: 224075 - DNA, 25 bp, Homo sapien
gggcccaagtcagcagaactgtttc

SEQ ID NO: 224076 - DNA, 25 bp, Homo sapien
gaactgtttcccaactgcctgtggg

SEQ ID NO: 224077 - DNA, 25 bp, Homo sapien
tccaattgctgtacctctaagggcc

SEQ ID NO: 224078 - DNA, 25 bp, Homo sapien
taattgtgttgtggaaagcagtggc

SEQ ID NO: 224079 - DNA, 25 bp, Homo sapien
cagctggtgcggaggctttgtgagc

SEQ ID NO: 224080 - DNA, 25 bp, Homo sapien
ctgctgagaaattgagcggtaaatt

SEQ ID NO: 224081 - DNA, 25 bp, Homo sapien
ctttgtgagcgggataaaatgtttc

SEQ ID NO: 224082 - DNA, 25 bp, Homo sapien
ggtctatgtagctatcctctttcca

SEQ ID NO: 224083 - DNA, 25 bp, Homo sapien
ttcttagagtcctctctgatgtggg

SEQ ID NO: 224084 - DNA, 25 bp, Homo sapien
gggttcttagagtcctctctgatgt

SEQ ID NO: 224085 - DNA, 25 bp, Homo sapien
gtttggaaggtttagcaggtctatg

SEQ ID NO: 224086 - DNA, 25 bp, Homo sapien
gtcggtcagtgattttaccttttga

SEQ ID NO: 224087 - DNA, 25 bp, Homo sapien
tggtctagtgggtcggtcagtgatt

SEQ ID NO: 224088 - DNA, 25 bp, Homo sapien
catccgagttttttctggtctagtg

SEQ ID NO: 224089 - DNA, 25 bp, Homo sapien
atcatccgagttttttctggtctag

SEQ ID NO: 224090 - DNA, 25 bp, Homo sapien
cagagctgaatactgatggctacac

SEQ ID NO: 224091 - DNA, 25 bp, Homo sapien
gctgaatactgatggctacaccagt

SEQ ID NO: 224092 - DNA, 25 bp, Homo sapien
gtttctccaggtttcacagcaccca

SEQ ID NO: 224093 - DNA, 25 bp, Homo sapien
tactgatggctacaccagtttctcc

SEQ ID NO: 224094 - DNA, 25 bp, Homo sapien
aagcagttccaaagtctgaagcctg

SEQ ID NO: 224095 - DNA, 25 bp, Homo sapien
cgttgcaagtcgcaagtgctgacag

SEQ ID NO: 224096 - DNA, 25 bp, Homo sapien
aactgcgaggcgaggacatcccttt

SEQ ID NO: 224097 - DNA, 25 bp, Homo sapien
aaggtcctctcgtccttcgtgtgaa

SEQ ID NO: 224098 - DNA, 25 bp, Homo sapien
cataggacagtaaggtgaccatcca

SEQ ID NO: 224099 - DNA, 25 bp, Homo sapien
tctagagcctctggtttgaaccggc

SEQ ID NO: 224100 - DNA, 25 bp, Homo sapien
ccaagaggttgtacccaaggactga

SEQ ID NO: 224101 - DNA, 25 bp, Homo sapien
ttcagccattggttgcataggacag

SEQ ID NO: 224102 - DNA, 25 bp, Homo sapien
ctgaccctcgcaagaggcaaacttc

SEQ ID NO: 224103 - DNA, 25 bp, Homo sapien
tctgaccctcgcaagaggcaaactt

SEQ ID NO: 224104 - DNA, 25 bp, Homo sapien
ctctgaccctcgcaagaggcaaact

SEQ ID NO: 224105 - DNA, 25 bp, Homo sapien
gctgaacacggctctttgtaaatga

SEQ ID NO: 224106 - DNA, 25 bp, Homo sapien
catgaatatgaaacgcccatgatgc

SEQ ID NO: 224107 - DNA, 25 bp, Homo sapien
gacatagtgtcgcagcagctcatga

SEQ ID NO: 224108 - DNA, 25 bp, Homo sapien
tactggagcgtttgatgtctctctg

SEQ ID NO: 224109 - DNA, 25 bp, Homo sapien
tgttcctagcatctgtcgtggtgac

SEQ ID NO: 224110 - DNA, 25 bp, Homo sapien
taattcacggcatatgttcctagca

SEQ ID NO: 224111 - DNA, 25 bp, Homo sapien
tggctgtgccggagtgaattaattc

SEQ ID NO: 224112 - DNA, 25 bp, Homo sapien
cagaacgaggaagaagccgttcttc

SEQ ID NO: 224113 - DNA, 25 bp, Homo sapien
gggcgccagtagcagatccctcttt

SEQ ID NO: 224114 - DNA, 25 bp, Homo sapien
taagcaccaatgtggaatccaaccc

SEQ ID NO: 224115 - DNA, 25 bp, Homo sapien
ttcattcaggtaagcaccaatgtgg

SEQ ID NO: 224116 - DNA, 25 bp, Homo sapien
gcagatccctctttcattcaggtaa

SEQ ID NO: 224117 - DNA, 25 bp, Homo sapien
gaaggacaggcgtctgtttgactct

SEQ ID NO: 224118 - DNA, 25 bp, Homo sapien
agagctagcctttcagcatgctgga

SEQ ID NO: 224119 - DNA, 25 bp, Homo sapien
cagagggagcactcgtcttctggga

SEQ ID NO: 224120 - DNA, 25 bp, Homo sapien
gactcttttctaatgacctgctggg

SEQ ID NO: 224121 - DNA, 25 bp, Homo sapien
tgaccacctttaagtgggccactaa

SEQ ID NO: 224122 - DNA, 25 bp, Homo sapien
tctgaccacctttaagtgggccact

SEQ ID NO: 224123 - DNA, 25 bp, Homo sapien
gcaccaaggacatcaggttttcctt

SEQ ID NO: 224124 - DNA, 25 bp, Homo sapien
tccttctgaccacctttaagtgggc

SEQ ID NO: 224125 - DNA, 25 bp, Homo sapien
atcgcagctgcacgcggcgcctccg

SEQ ID NO: 224126 - DNA, 25 bp, Homo sapien
ctgccatcgcagctgcacgcggcgc

SEQ ID NO: 224127 - DNA, 25 bp, Homo sapien
gtgcagcgacagagcccggcaggtg

SEQ ID NO: 224128 - DNA, 25 bp, Homo sapien
gccctcagtggggtgcagcgacaga

SEQ ID NO: 224129 - DNA, 25 bp, Homo sapien
ggctgtctgggatcatgtcggaggc

SEQ ID NO: 224130 - DNA, 25 bp, Homo sapien
tgtctgggatcatgtcggaggccca

SEQ ID NO: 224131 - DNA, 25 bp, Homo sapien
ctggctgtctgggatcatgtcggag

SEQ ID NO: 224132 - DNA, 25 bp, Homo sapien
ctgggatcatgtcggaggcccagac

SEQ ID NO: 224133 - DNA, 25 bp, Homo sapien
cagggcctctgcctgaagaggcctc

SEQ ID NO: 224134 - DNA, 25 bp, Homo sapien
ggcctctgcctgaagaggcctcagc

SEQ ID NO: 224135 - DNA, 25 bp, Homo sapien
cctgaagaggcctcagcagcatcat

SEQ ID NO: 224136 - DNA, 25 bp, Homo sapien
gcctgaagaggcctcagcagcatca

SEQ ID NO: 224137 - DNA, 25 bp, Homo sapien
tcagtttggctgtagcagagtgctg

SEQ ID NO: 224138 - DNA, 25 bp, Homo sapien
tgaaatggaaaagatcgtcgctttt

SEQ ID NO: 224139 - DNA, 25 bp, Homo sapien
tactgtcggtggtcagatgaaatgg

SEQ ID NO: 224140 - DNA, 25 bp, Homo sapien
ggggtttagcagcactgagcctcca

SEQ ID NO: 224141 - DNA, 25 bp, Homo sapien
cagtggagctgtccaaaagtcttgg

SEQ ID NO: 224142 - DNA, 25 bp, Homo sapien
agtggagctgtccaaaagtcttggt

SEQ ID NO: 224143 - DNA, 25 bp, Homo sapien
gtggagctgtccaaaagtcttggtg

SEQ ID NO: 224144 - DNA, 25 bp, Homo sapien
tcagtggagctgtccaaaagtcttg

SEQ ID NO: 224145 - DNA, 25 bp, Homo sapien
gaagcgatatctcctcagcggaggc

SEQ ID NO: 224146 - DNA, 25 bp, Homo sapien
tgccgaaatgaagcgatatctcctc

SEQ ID NO: 224147 - DNA, 25 bp, Homo sapien
cttgccgaaatgaagcgatatctcc

SEQ ID NO: 224148 - DNA, 25 bp, Homo sapien
gaaatgaagcgatatctcctcagcg

SEQ ID NO: 224149 - DNA, 25 bp, Homo sapien
ataaatgaagacaaagtgccggcgg

SEQ ID NO: 224150 - DNA, 25 bp, Homo sapien
gctgccgctggcataataaatgaag

SEQ ID NO: 224151 - DNA, 25 bp, Homo sapien
agtgccggcggcatagaccatctct

SEQ ID NO: 224152 - DNA, 25 bp, Homo sapien
tgaagacaaagtgccggcggcatag

SEQ ID NO: 224153 - DNA, 25 bp, Homo sapien
ggctgcggcagacggccggagggtg

SEQ ID NO: 224154 - DNA, 25 bp, Homo sapien
ctggggatgtgggtcgggccgtctc

SEQ ID NO: 224155 - DNA, 25 bp, Homo sapien
ggatcggagcgccaagccgcggctg

SEQ ID NO: 224156 - DNA, 25 bp, Homo sapien
gctgagcggctaagggcgtcttggg

SEQ ID NO: 224157 - DNA, 25 bp, Homo sapien
tcatggatgagctggtacacgactt

SEQ ID NO: 224158 - DNA, 25 bp, Homo sapien
tgctgctacagcgaggcctctgagt

SEQ ID NO: 224159 - DNA, 25 bp, Homo sapien
ccgaggtcggaagcgtcgttctgac

SEQ ID NO: 224160 - DNA, 25 bp, Homo sapien
catctgagcagaataagcttggtga

SEQ ID NO: 224161 - DNA, 25 bp, Homo sapien
gcgtgttaatgacccatgaatctca

SEQ ID NO: 224162 - DNA, 25 bp, Homo sapien
tgttggcaggaataaactctagtgg

SEQ ID NO: 224163 - DNA, 25 bp, Homo sapien
ctggaatccagtgtacattagagac

SEQ ID NO: 224164 - DNA, 25 bp, Homo sapien
gaagtttgtactaccaacagtctgg

SEQ ID NO: 224165 - DNA, 25 bp, Homo sapien
taaagcggtccagtctaacacagta

SEQ ID NO: 224166 - DNA, 25 bp, Homo sapien
aaatatagcaagaaatccctcaggt

SEQ ID NO: 224167 - DNA, 25 bp, Homo sapien
tagtcaggctttgggttcagatcct

SEQ ID NO: 224168 - DNA, 25 bp, Homo sapien
aatcaagaaggaccagaacaatgcc

SEQ ID NO: 224169 - DNA, 25 bp, Homo sapien
tcataatgtagcttgtgctcctgca

SEQ ID NO: 224170 - DNA, 25 bp, Homo sapien
cagaatcctgcgttgagaagtacta

SEQ ID NO: 224171 - DNA, 25 bp, Homo sapien
tctcatgctcggttcacagtagggt

SEQ ID NO: 224172 - DNA, 25 bp, Homo sapien
gaagcctaaacgtatggagcagaag

SEQ ID NO: 224173 - DNA, 25 bp, Homo sapien
tagtaaggacaaagctgagcaaaaa

SEQ ID NO: 224174 - DNA, 25 bp, Homo sapien
gagtggtagaagacataactggtgt

SEQ ID NO: 224175 - DNA, 25 bp, Homo sapien
tgagttgatatacacgatccacatt

SEQ ID NO: 224176 - DNA, 25 bp, Homo sapien
gatgtaattatggtatcaagcctgt

SEQ ID NO: 224177 - DNA, 25 bp, Homo sapien
gcaatgctccatatgatgaacttgg

SEQ ID NO: 224178 - DNA, 25 bp, Homo sapien
tgatagctgaatagagagtaaacct

SEQ ID NO: 224179 - DNA, 25 bp, Homo sapien
ggcagtgaccaagagagggcacaaa

SEQ ID NO: 224180 - DNA, 25 bp, Homo sapien
tagaatctggagctgtgcacttagg

SEQ ID NO: 224181 - DNA, 25 bp, Homo sapien
taaatcacgctacggcatacatctg

SEQ ID NO: 224182 - DNA, 25 bp, Homo sapien
taacatcgggccatctcggattcca

SEQ ID NO: 224183 - DNA, 25 bp, Homo sapien
tgttatcggactcttcaccagtgtg

SEQ ID NO: 224184 - DNA, 25 bp, Homo sapien
gagtctgagccatcagtcagtagaa

SEQ ID NO: 224185 - DNA, 25 bp, Homo sapien
gaaaaagactgtaaatgaccatagg

SEQ ID NO: 224186 - DNA, 25 bp, Homo sapien
gaaccacaccctggatcttagtgag

SEQ ID NO: 224187 - DNA, 25 bp, Homo sapien
cctttacggctttctagcatgcagg

SEQ ID NO: 224188 - DNA, 25 bp, Homo sapien
tattaataaggctagagaggtgaag

SEQ ID NO: 224189 - DNA, 25 bp, Homo sapien
tgcttctcagacttgatacaccaga

SEQ ID NO: 224190 - DNA, 25 bp, Homo sapien
gatacaccagaacagggatttccct

SEQ ID NO: 224191 - DNA, 25 bp, Homo sapien
gacttgatacaccagaacagggatt

SEQ ID NO: 224192 - DNA, 25 bp, Homo sapien
accagaacagggatttccctgcaag

SEQ ID NO: 224193 - DNA, 25 bp, Homo sapien
ggagatgaaaacagccacagagttg

SEQ ID NO: 224194 - DNA, 25 bp, Homo sapien
tgatcatggcctattagtgaaaacc

SEQ ID NO: 224195 - DNA, 25 bp, Homo sapien
tctgccctgggttataatctcttgt

SEQ ID NO: 224196 - DNA, 25 bp, Homo sapien
cacagagttgagtgacttgctccaa

SEQ ID NO: 224197 - DNA, 25 bp, Homo sapien
gcggcacagtgtataatgtcgtaag

SEQ ID NO: 224198 - DNA, 25 bp, Homo sapien
ggcctgtctgaatcctagtttagtg

SEQ ID NO: 224199 - DNA, 25 bp, Homo sapien
gctcatgtatttgatctgctcaaaa

SEQ ID NO: 224200 - DNA, 25 bp, Homo sapien
gctggctacacaaatggcctgtctg

SEQ ID NO: 224201 - DNA, 25 bp, Homo sapien
cattactgtgattctgagccacaca

SEQ ID NO: 224202 - DNA, 25 bp, Homo sapien
tccactttggctccaggcgaaggct

SEQ ID NO: 224203 - DNA, 25 bp, Homo sapien
tgctgatgcgatgggttctccactt

SEQ ID NO: 224204 - DNA, 25 bp, Homo sapien
ggtggtgatgcatgattgatttcag

SEQ ID NO: 224205 - DNA, 25 bp, Homo sapien
agtctagttggaggcatggcttgga

SEQ ID NO: 224206 - DNA, 25 bp, Homo sapien
gcagtctagttggaggcatggcttg

SEQ ID NO: 224207 - DNA, 25 bp, Homo sapien
gtagcagctgtggatgcagtctagt

SEQ ID NO: 224208 - DNA, 25 bp, Homo sapien
cagctgtggatgcagtctagttgga

SEQ ID NO: 224209 - DNA, 25 bp, Homo sapien
gaattacagcgctgagcaaaagaag

SEQ ID NO: 224210 - DNA, 25 bp, Homo sapien
gcagcaacacgtatgaatctcagaa

SEQ ID NO: 224211 - DNA, 25 bp, Homo sapien
tggaaatgataccaacacccatcaa

SEQ ID NO: 224212 - DNA, 25 bp, Homo sapien
tgctgtagatgtgagtagtaactgg

SEQ ID NO: 224213 - DNA, 25 bp, Homo sapien
ccgtagactgtttcgttgctataaa

SEQ ID NO: 224214 - DNA, 25 bp, Homo sapien
tcagcacagcccgtagactgtttcg

SEQ ID NO: 224215 - DNA, 25 bp, Homo sapien
tagactgtttcgttgctataaattc

SEQ ID NO: 224216 - DNA, 25 bp, Homo sapien
cagcccgtagactgtttcgttgcta

SEQ ID NO: 224217 - DNA, 25 bp, Homo sapien
tgtctctccatttggtggaatggat

SEQ ID NO: 224218 - DNA, 25 bp, Homo sapien
catcgacagggaagcattaacaggg

SEQ ID NO: 224219 - DNA, 25 bp, Homo sapien
ggatgaaatatcaaaccatatcaca

SEQ ID NO: 224220 - DNA, 25 bp, Homo sapien
taatcaatgatgctgtgtcctgaaa

SEQ ID NO: 224221 - DNA, 25 bp, Homo sapien
gtgcagggacagttctccctttttg

SEQ ID NO: 224222 - DNA, 25 bp, Homo sapien
cgtgcagggacagttctcccttttt

SEQ ID NO: 224223 - DNA, 25 bp, Homo sapien
ctccctttttgtctccatggcccat

SEQ ID NO: 224224 - DNA, 25 bp, Homo sapien
gttctccctttttgtctccatggcc

SEQ ID NO: 224225 - DNA, 25 bp, Homo sapien
gctggaagctgcagatcagtcttca

SEQ ID NO: 224226 - DNA, 25 bp, Homo sapien
ctttgtagttgtgtttttctgctgg

SEQ ID NO: 224227 - DNA, 25 bp, Homo sapien
ttgtagttgtgtttttctgctggaa

SEQ ID NO: 224228 - DNA, 25 bp, Homo sapien
tagttgtgtttttctgctggaagct

SEQ ID NO: 224229 - DNA, 25 bp, Homo sapien
tttgtggaatatttttacaaatgtg

SEQ ID NO: 224230 - DNA, 25 bp, Homo sapien
tgtggaatatttttacaaatgtgtt

SEQ ID NO: 224231 - DNA, 25 bp, Homo sapien
ttgtggaatatttttacaaatgtgt

SEQ ID NO: 224232 - DNA, 25 bp, Homo sapien
tggaatatttttacaaatgtgttta

SEQ ID NO: 224233 - DNA, 25 bp, Homo sapien
aggactctgggactaaggcccatgg

SEQ ID NO: 224234 - DNA, 25 bp, Homo sapien
tcagggcgaaggaactgacgcgcct

SEQ ID NO: 224235 - DNA, 25 bp, Homo sapien
cacgtgctcatttcgcctgtccaat

SEQ ID NO: 224236 - DNA, 25 bp, Homo sapien
ttcgcctgtccaatggtaagggtgc

SEQ ID NO: 224237 - DNA, 25 bp, Homo sapien
ctggagacttttattaagtgtggca

SEQ ID NO: 224238 - DNA, 25 bp, Homo sapien
gaagacgttaaggtgaaatgaagcc

SEQ ID NO: 224239 - DNA, 25 bp, Homo sapien
taagtgtggcaaagttccctgggct

SEQ ID NO: 224240 - DNA, 25 bp, Homo sapien
ctcgggagtaatcgcccagaatgcc

SEQ ID NO: 224241 - DNA, 25 bp, Homo sapien
gagatccttctgcaattcccaggca

SEQ ID NO: 224242 - DNA, 25 bp, Homo sapien
tctgcaattcccaggcatcattctt

SEQ ID NO: 224243 - DNA, 25 bp, Homo sapien
cccaggcatcattcttttcaagctt

SEQ ID NO: 224244 - DNA, 25 bp, Homo sapien
cttttgagatccttctgcaattccc

SEQ ID NO: 224245 - DNA, 25 bp, Homo sapien
tgctcacaatgtggtacaatatcac

SEQ ID NO: 224246 - DNA, 25 bp, Homo sapien
tgtggtacaatatcactccaaaagt

SEQ ID NO: 224247 - DNA, 25 bp, Homo sapien
caatatcactccaaaagtacagatc

SEQ ID NO: 224248 - DNA, 25 bp, Homo sapien
ccaaaagtacagatctacaaggcac

SEQ ID NO: 224249 - DNA, 25 bp, Homo sapien
ctgcattaggcaaaaggccacggcg

SEQ ID NO: 224250 - DNA, 25 bp, Homo sapien
aaggccacggcggttagtggagctg

SEQ ID NO: 224251 - DNA, 25 bp, Homo sapien
cattaggcaaaaggccacggcggtt

SEQ ID NO: 224252 - DNA, 25 bp, Homo sapien
ggccacggcggttagtggagctggg

SEQ ID NO: 224253 - DNA, 25 bp, Homo sapien
tccaccattatagggctagaggctg

SEQ ID NO: 224254 - DNA, 25 bp, Homo sapien
ggagggcatgtccagtcaagtaact

SEQ ID NO: 224255 - DNA, 25 bp, Homo sapien
caataaagaaatggcgtctcaggga

SEQ ID NO: 224256 - DNA, 25 bp, Homo sapien
catgctgcagggtgtgttaagcttc

SEQ ID NO: 224257 - DNA, 25 bp, Homo sapien
ggaggcaggtaaggctcaggcttga

SEQ ID NO: 224258 - DNA, 25 bp, Homo sapien
ggcagaggctgtgtcaacagagatt

SEQ ID NO: 224259 - DNA, 25 bp, Homo sapien
ctagggaggcaggtaaggctcaggc

SEQ ID NO: 224260 - DNA, 25 bp, Homo sapien
gggcagaggctgtgtcaacagagat

SEQ ID NO: 224261 - DNA, 25 bp, Homo sapien
cttcagtttaggccaaaacaaatag

SEQ ID NO: 224262 - DNA, 25 bp, Homo sapien
ctttcccggagggatgcgctggacc

SEQ ID NO: 224263 - DNA, 25 bp, Homo sapien
cagaagacctgagttagctttttca

SEQ ID NO: 224264 - DNA, 25 bp, Homo sapien
attccaagggcttcatcgagtgctt

SEQ ID NO: 224265 - DNA, 25 bp, Homo sapien
agcagcagtgttggctccgaacctg

SEQ ID NO: 224266 - DNA, 25 bp, Homo sapien
acaccacgatgccaaatgcgggctg

SEQ ID NO: 224267 - DNA, 25 bp, Homo sapien
tggctccgaacctgacctgaggagg

SEQ ID NO: 224268 - DNA, 25 bp, Homo sapien
aagactccattgagagctggtcgct

SEQ ID NO: 224269 - DNA, 25 bp, Homo sapien
gttttctagaggtcccacagccgtc

SEQ ID NO: 224270 - DNA, 25 bp, Homo sapien
tctgttcatgcggagtacgggccag

SEQ ID NO: 224271 - DNA, 25 bp, Homo sapien
tagaactgtcgttggaggaacaccg

SEQ ID NO: 224272 - DNA, 25 bp, Homo sapien
caccttcctgtgctcgtcttagagg

SEQ ID NO: 224273 - DNA, 25 bp, Homo sapien
tctctcccctcgagtctacacctcg

SEQ ID NO: 224274 - DNA, 25 bp, Homo sapien
tcccctcgagtctacacctcggtct

SEQ ID NO: 224275 - DNA, 25 bp, Homo sapien
gagtctacacctcggtctccatctt

SEQ ID NO: 224276 - DNA, 25 bp, Homo sapien
cctcgagtctacacctcggtctcca

SEQ ID NO: 224277 - DNA, 25 bp, Homo sapien
ctgttgacatgctggggacatgttc

SEQ ID NO: 224278 - DNA, 25 bp, Homo sapien
cagaacaaggctgctggattgccag

SEQ ID NO: 224279 - DNA, 25 bp, Homo sapien
taattaggttacttcccactgctgt

SEQ ID NO: 224280 - DNA, 25 bp, Homo sapien
ggtgggcagtctatcaaataactac

SEQ ID NO: 224281 - DNA, 25 bp, Homo sapien
attgtgaatatcatggacaatgagg

SEQ ID NO: 224282 - DNA, 25 bp, Homo sapien
tgtgaatatcatggacaatgaggtt

SEQ ID NO: 224283 - DNA, 25 bp, Homo sapien
cctcagtttattaacagttagaatc

SEQ ID NO: 224284 - DNA, 25 bp, Homo sapien
tgaatatcatggacaatgaggttcc

SEQ ID NO: 224285 - DNA, 25 bp, Homo sapien
tctctgtgatgatactccacgctgc

SEQ ID NO: 224286 - DNA, 25 bp, Homo sapien
cacacagtagcacatcgtagattct

SEQ ID NO: 224287 - DNA, 25 bp, Homo sapien
gcagagagcacacagtagcacatcg

SEQ ID NO: 224288 - DNA, 25 bp, Homo sapien
agcacatcgtagattctctgtgatg

SEQ ID NO: 224289 - DNA, 25 bp, Homo sapien
tcaactgtgccgggacaccagggca

SEQ ID NO: 224290 - DNA, 25 bp, Homo sapien
actgtgccgggacaccagggcatct

SEQ ID NO: 224291 - DNA, 25 bp, Homo sapien
aactgtgccgggacaccagggcatc

SEQ ID NO: 224292 - DNA, 25 bp, Homo sapien
caactgtgccgggacaccagggcat

SEQ ID NO: 224293 - DNA, 25 bp, Homo sapien
tggactggcctatcccagagaggcg

SEQ ID NO: 224294 - DNA, 25 bp, Homo sapien
agcccatacttgtgccgtttcacca

SEQ ID NO: 224295 - DNA, 25 bp, Homo sapien
gcagtgcttcttagagaccctccgg

SEQ ID NO: 224296 - DNA, 25 bp, Homo sapien
ggaaatcttttcagacgacttgacg

SEQ ID NO: 224297 - DNA, 25 bp, Homo sapien
tatttgctggcagctccggtgtagg

SEQ ID NO: 224298 - DNA, 25 bp, Homo sapien
tgcagctcagcagggtagcgatgtc

SEQ ID NO: 224299 - DNA, 25 bp, Homo sapien
gaaaacttttatttgctggcagctc

SEQ ID NO: 224300 - DNA, 25 bp, Homo sapien
cgatgtcgcccagcgtgaaaacttt

SEQ ID NO: 224301 - DNA, 25 bp, Homo sapien
tctggatattgaatagtattcaccc

SEQ ID NO: 224302 - DNA, 25 bp, Homo sapien
tgccacgagcttcccgtgcaacgtt

SEQ ID NO: 224303 - DNA, 25 bp, Homo sapien
tattcacccgaaatcctgtacttgg

SEQ ID NO: 224304 - DNA, 25 bp, Homo sapien
gagcttcccgtgcaacgtttgggac

SEQ ID NO: 224305 - DNA, 25 bp, Homo sapien
ggtgtcctctcgtgggatgtctgca

SEQ ID NO: 224306 - DNA, 25 bp, Homo sapien
gatgcggccaggcaatgctctctct

SEQ ID NO: 224307 - DNA, 25 bp, Homo sapien
ggagttcctgcaagaggtgtcctct

SEQ ID NO: 224308 - DNA, 25 bp, Homo sapien
gcttttatagggcagctggtgactg

SEQ ID NO: 224309 - DNA, 25 bp, Homo sapien
ctccggtagtcggaaggatggccca

SEQ ID NO: 224310 - DNA, 25 bp, Homo sapien
tggaaagaggcccagtgttggagac

SEQ ID NO: 224311 - DNA, 25 bp, Homo sapien
cagtgttggagaccgcttccgcccg

SEQ ID NO: 224312 - DNA, 25 bp, Homo sapien
cgcgggctccggtagtcggaaggat

SEQ ID NO: 224313 - DNA, 25 bp, Homo sapien
aattcctcttccctgcgtagcatag

SEQ ID NO: 224314 - DNA, 25 bp, Homo sapien
tgccacatatttgatggtgcatctt

SEQ ID NO: 224315 - DNA, 25 bp, Homo sapien
ggttgcttgtttgccacatatttga

SEQ ID NO: 224316 - DNA, 25 bp, Homo sapien
ctaagcattcagaaccactggagtg

SEQ ID NO: 224317 - DNA, 25 bp, Homo sapien
ctttttcaagtgtgcctcccctgta

SEQ ID NO: 224318 - DNA, 25 bp, Homo sapien
gttgtctagtgcttgcctggttctt

SEQ ID NO: 224319 - DNA, 25 bp, Homo sapien
tctagtgcttgcctggttcttgact

SEQ ID NO: 224320 - DNA, 25 bp, Homo sapien
tcaagtgtgcctcccctgtattact

SEQ ID NO: 224321 - DNA, 25 bp, Homo sapien
catcccatagacaatgttttcattc

SEQ ID NO: 224322 - DNA, 25 bp, Homo sapien
ttccacaggtcatctttcttgagac

SEQ ID NO: 224323 - DNA, 25 bp, Homo sapien
tgaacctggtagtccatcacctctc

SEQ ID NO: 224324 - DNA, 25 bp, Homo sapien
tcttgagacctgaacctggtagtcc

SEQ ID NO: 224325 - DNA, 25 bp, Homo sapien
tctatctgcccgtgaccttccgtgg

SEQ ID NO: 224326 - DNA, 25 bp, Homo sapien
tggagtccagcatgcgctcactgtt

SEQ ID NO: 224327 - DNA, 25 bp, Homo sapien
ttccgtggacacaggttcatcaggt

SEQ ID NO: 224328 - DNA, 25 bp, Homo sapien
gacacaggttcatcaggtttctgcc

SEQ ID NO: 224329 - DNA, 25 bp, Homo sapien
cttggctttcttctctggctgtgcc

SEQ ID NO: 224330 - DNA, 25 bp, Homo sapien
cacttggctttcttctctggctgtg

SEQ ID NO: 224331 - DNA, 25 bp, Homo sapien
gccacttggctttcttctctggctg

SEQ ID NO: 224332 - DNA, 25 bp, Homo sapien
ctttgaaggccacttggctttcttc

SEQ ID NO: 224333 - DNA, 25 bp, Homo sapien
gtgaatcccaatgccggctggccca

SEQ ID NO: 224334 - DNA, 25 bp, Homo sapien
gagctgggaggttccgtgaatccca

SEQ ID NO: 224335 - DNA, 25 bp, Homo sapien
gggccagcaggttctctctgtgtgc

SEQ ID NO: 224336 - DNA, 25 bp, Homo sapien
gcaggttctctctgtgtgccagttc

SEQ ID NO: 224337 - DNA, 25 bp, Homo sapien
cagcagaaagatgcacagcacactc

SEQ ID NO: 224338 - DNA, 25 bp, Homo sapien
agaaagatgcacagcacactccagg

SEQ ID NO: 224339 - DNA, 25 bp, Homo sapien
gcagaaagatgcacagcacactcca

SEQ ID NO: 224340 - DNA, 25 bp, Homo sapien
cacagcagaaagatgcacagcacac

SEQ ID NO: 224341 - DNA, 25 bp, Homo sapien
tctctgtgtacccattccccaccgc

SEQ ID NO: 224342 - DNA, 25 bp, Homo sapien
ctgtgtacccattccccaccgcagg

SEQ ID NO: 224343 - DNA, 25 bp, Homo sapien
accgcaggccaggatgggccctggt

SEQ ID NO: 224344 - DNA, 25 bp, Homo sapien
cggccctccttgccggccagcaggg

SEQ ID NO: 224345 - DNA, 25 bp, Homo sapien
tccaaaactgttgcagcctcgcgct

SEQ ID NO: 224346 - DNA, 25 bp, Homo sapien
tgactccaaaactgttgcagcctcg

SEQ ID NO: 224347 - DNA, 25 bp, Homo sapien
gactccaaaactgttgcagcctcgc

SEQ ID NO: 224348 - DNA, 25 bp, Homo sapien
actccaaaactgttgcagcctcgcg

SEQ ID NO: 224349 - DNA, 25 bp, Homo sapien
actgatatccttgaatctccattag

SEQ ID NO: 224350 - DNA, 25 bp, Homo sapien
tgaagggcgccgtagttccctattg

SEQ ID NO: 224351 - DNA, 25 bp, Homo sapien
tacctggtgattggccagcccctct

SEQ ID NO: 224352 - DNA, 25 bp, Homo sapien
gcaactcgctttgcactgagtccat

SEQ ID NO: 224353 - DNA, 25 bp, Homo sapien
gctgtaggtggaatccatagaacct

SEQ ID NO: 224354 - DNA, 25 bp, Homo sapien
ctgtaggtggaatccatagaacctt

SEQ ID NO: 224355 - DNA, 25 bp, Homo sapien
taattagacacgtccgagagggcag

SEQ ID NO: 224356 - DNA, 25 bp, Homo sapien
gactttaattagacacgtccgagag

SEQ ID NO: 224357 - DNA, 25 bp, Homo sapien
tcaatcaggactttaattagacacg

SEQ ID NO: 224358 - DNA, 25 bp, Homo sapien
gacacgtccgagagggcagttccat

SEQ ID NO: 224359 - DNA, 25 bp, Homo sapien
tgaggatgcatctggataagaattc

SEQ ID NO: 224360 - DNA, 25 bp, Homo sapien
aattctcacataaagctttggcaaa

SEQ ID NO: 224361 - DNA, 25 bp, Homo sapien
tggcaaattcatgcttgtccttctc

SEQ ID NO: 224362 - DNA, 25 bp, Homo sapien
gcaaattcatgcttgtccttctcca

SEQ ID NO: 224363 - DNA, 25 bp, Homo sapien
gtgaggagttggaggtggtactctg

SEQ ID NO: 224364 - DNA, 25 bp, Homo sapien
agttggaggtggtactctggcaaga

SEQ ID NO: 224365 - DNA, 25 bp, Homo sapien
aggtggtactctggcaagagtccac

SEQ ID NO: 224366 - DNA, 25 bp, Homo sapien
tggaggtggtactctggcaagagtc

SEQ ID NO: 224367 - DNA, 25 bp, Homo sapien
tgaggccatggcctggagttgggct

SEQ ID NO: 224368 - DNA, 25 bp, Homo sapien
gaccccagggaggaacttcagaatg

SEQ ID NO: 224369 - DNA, 25 bp, Homo sapien
ccatggcctggagttgggctgatgg

SEQ ID NO: 224370 - DNA, 25 bp, Homo sapien
tgagattgcccagtgaggccatggc

SEQ ID NO: 224371 - DNA, 25 bp, Homo sapien
gggatgccactaacttcaaggcctg

SEQ ID NO: 224372 - DNA, 25 bp, Homo sapien
catcctcaaatgtaattgtgtctga

SEQ ID NO: 224373 - DNA, 25 bp, Homo sapien
cagaaaagctttcactagcttgttc

SEQ ID NO: 224374 - DNA, 25 bp, Homo sapien
gctttcactagcttgttctgtgccc

SEQ ID NO: 224375 - DNA, 25 bp, Homo sapien
cacactccttttcttgggtacctgt

SEQ ID NO: 224376 - DNA, 25 bp, Homo sapien
agattcatcaggcttactattctct

SEQ ID NO: 224377 - DNA, 25 bp, Homo sapien
aggcttactattctctctgccacct

SEQ ID NO: 224378 - DNA, 25 bp, Homo sapien
tcatcaggcttactattctctctgc

SEQ ID NO: 224379 - DNA, 25 bp, Homo sapien
tacatcagtgacatgaggctttggc

SEQ ID NO: 224380 - DNA, 25 bp, Homo sapien
ccttcggcaggaatcaacaggcagt

SEQ ID NO: 224381 - DNA, 25 bp, Homo sapien
acagcttgatggactagcaggacgc

SEQ ID NO: 224382 - DNA, 25 bp, Homo sapien
tggactagcaggacgcagcttctcc

SEQ ID NO: 224383 - DNA, 25 bp, Homo sapien
gcgtgccattgtcccggagagtccg

SEQ ID NO: 224384 - DNA, 25 bp, Homo sapien
tctgaggcaccctagaccttggctt

SEQ ID NO: 224385 - DNA, 25 bp, Homo sapien
tggccacggacctttgccctctgag

SEQ ID NO: 224386 - DNA, 25 bp, Homo sapien
gagagtccgggagttgaaacagccc

SEQ ID NO: 224387 - DNA, 25 bp, Homo sapien
gtcacttgtttcgtctgccacgtcc

SEQ ID NO: 224388 - DNA, 25 bp, Homo sapien
ctcttgggcccaagtcacttgtttc

SEQ ID NO: 224389 - DNA, 25 bp, Homo sapien
gggcccaagtcacttgtttcgtctg

SEQ ID NO: 224390 - DNA, 25 bp, Homo sapien
caagtcacttgtttcgtctgccacg

SEQ ID NO: 224391 - DNA, 25 bp, Homo sapien
catttggacctgctccaaccaagca

SEQ ID NO: 224392 - DNA, 25 bp, Homo sapien
attggtcctcatggggaaattttgc

SEQ ID NO: 224393 - DNA, 25 bp, Homo sapien
gacctgctccaaccaagcaaattgg

SEQ ID NO: 224394 - DNA, 25 bp, Homo sapien
tgcttggcagtggacggtcttcctt

SEQ ID NO: 224395 - DNA, 25 bp, Homo sapien
cacgccacgaagcagtacacagagt

SEQ ID NO: 224396 - DNA, 25 bp, Homo sapien
ggagctgccctcctgaacttctggg

SEQ ID NO: 224397 - DNA, 25 bp, Homo sapien
agagggaagctgactaagagagaca

SEQ ID NO: 224398 - DNA, 25 bp, Homo sapien
ggcttctcagcaagccagatcttag

SEQ ID NO: 224399 - DNA, 25 bp, Homo sapien
tatccttggtgtcgtggcagcagtg

SEQ ID NO: 224400 - DNA, 25 bp, Homo sapien
cagtgctaataggacatgagccttc

SEQ ID NO: 224401 - DNA, 25 bp, Homo sapien
ttcttgccccagtaatggcccatta

SEQ ID NO: 224402 - DNA, 25 bp, Homo sapien
cccattacggcttcaggaaaagcca

SEQ ID NO: 224403 - DNA, 25 bp, Homo sapien
ttcactcgctcttccgcgtgatttc

SEQ ID NO: 224404 - DNA, 25 bp, Homo sapien
ggaatgctaaaacgggactgatgga

SEQ ID NO: 224405 - DNA, 25 bp, Homo sapien
ctttctctaccaactgggaatgcta

SEQ ID NO: 224406 - DNA, 25 bp, Homo sapien
acgtgtccgaactctgcatcccgga

SEQ ID NO: 224407 - DNA, 25 bp, Homo sapien
ctgcacattcttgtgtaaaagtgga

SEQ ID NO: 224408 - DNA, 25 bp, Homo sapien
tgtctgtccttctgcccgtctggca

SEQ ID NO: 224409 - DNA, 25 bp, Homo sapien
gggatcgcagttccttttctgcaca

SEQ ID NO: 224410 - DNA, 25 bp, Homo sapien
cacaaccagtaggtgccctgcttct

SEQ ID NO: 224411 - DNA, 25 bp, Homo sapien
gaaaagccgcacacttctgggtttc

SEQ ID NO: 224412 - DNA, 25 bp, Homo sapien
caagagtggcgctttctcatgcact

SEQ ID NO: 224413 - DNA, 25 bp, Homo sapien
caaatccacactttcaggcaagagt

SEQ ID NO: 224414 - DNA, 25 bp, Homo sapien
tctgatcttgctccggggtgagaaa

SEQ ID NO: 224415 - DNA, 25 bp, Homo sapien
gcccagcgctgcgtcgtaggcaaag

SEQ ID NO: 224416 - DNA, 25 bp, Homo sapien
tcgtaggcaaagttcgttctcggct

SEQ ID NO: 224417 - DNA, 25 bp, Homo sapien
tgtgaccagcggaacagaagggcac

SEQ ID NO: 224418 - DNA, 25 bp, Homo sapien
catttccctgctccgaggcggcttt

SEQ ID NO: 224419 - DNA, 25 bp, Homo sapien
gcaaagtggtccctcggaaggctta

SEQ ID NO: 224420 - DNA, 25 bp, Homo sapien
gaagcgactctcagaaaccgcgggt

SEQ ID NO: 224421 - DNA, 25 bp, Homo sapien
tggtcaacccgcgtgtcatgtccgg

SEQ ID NO: 224422 - DNA, 25 bp, Homo sapien
ggaaagtgaactgatcgcctaagca

SEQ ID NO: 224423 - DNA, 25 bp, Homo sapien
agctgggtaattcatcgagttgacg

SEQ ID NO: 224424 - DNA, 25 bp, Homo sapien
tggaggctttaacagctgggtaatt

SEQ ID NO: 224425 - DNA, 25 bp, Homo sapien
gaggctttaacagctgggtaattca

SEQ ID NO: 224426 - DNA, 25 bp, Homo sapien
ttcatcgagttgacggcagccctga

SEQ ID NO: 224427 - DNA, 25 bp, Homo sapien
tatagtgccggcatttcccagggaa

SEQ ID NO: 224428 - DNA, 25 bp, Homo sapien
ccatgggtagtaaagtaacagagca

SEQ ID NO: 224429 - DNA, 25 bp, Homo sapien
ttttgacccctgtggattggctgac

SEQ ID NO: 224430 - DNA, 25 bp, Homo sapien
agtgggttcgtgtatgctctgctca

SEQ ID NO: 224431 - DNA, 25 bp, Homo sapien
tcctgtagccaatcctgtaggtgac

SEQ ID NO: 224432 - DNA, 25 bp, Homo sapien
tcctgtaggtgactccattacccat

SEQ ID NO: 224433 - DNA, 25 bp, Homo sapien
ttttcctgtagccaatcctgtaggt

SEQ ID NO: 224434 - DNA, 25 bp, Homo sapien
tagccaatcctgtaggtgactccat

SEQ ID NO: 224435 - DNA, 25 bp, Homo sapien
taaagggactcattgtgacttccat

SEQ ID NO: 224436 - DNA, 25 bp, Homo sapien
actgctttgggtagggagcctggtc

SEQ ID NO: 224437 - DNA, 25 bp, Homo sapien
ggcagtagcttgtattcacccatct

SEQ ID NO: 224438 - DNA, 25 bp, Homo sapien
ctggtcataggagagcacaggctca

SEQ ID NO: 224439 - DNA, 25 bp, Homo sapien
tacttttagcttcactctttgtcat

SEQ ID NO: 224440 - DNA, 25 bp, Homo sapien
tcttgggtttgttgacattgtctac

SEQ ID NO: 224441 - DNA, 25 bp, Homo sapien
ggacttcagcatgcagagcgcagta

SEQ ID NO: 224442 - DNA, 25 bp, Homo sapien
tttgatggtgaaacaggacttcagc

SEQ ID NO: 224443 - DNA, 25 bp, Homo sapien
taaatatcttcgtgcaaacataaac

SEQ ID NO: 224444 - DNA, 25 bp, Homo sapien
tcatagtagctggatgagggtgacc

SEQ ID NO: 224445 - DNA, 25 bp, Homo sapien
gagggtgaccgtttcttgctcccaa

SEQ ID NO: 224446 - DNA, 25 bp, Homo sapien
ccaaaaagcgcaaagcaattctcgt

SEQ ID NO: 224447 - DNA, 25 bp, Homo sapien
ctgaattcacccaggagcaaaaact

SEQ ID NO: 224448 - DNA, 25 bp, Homo sapien
tcacccaggagcaaaaactgcctgg

SEQ ID NO: 224449 - DNA, 25 bp, Homo sapien
attcacccaggagcaaaaactgcct

SEQ ID NO: 224450 - DNA, 25 bp, Homo sapien
cccaggagcaaaaactgcctggtct

SEQ ID NO: 224451 - DNA, 25 bp, Homo sapien
tatggctgcttgagcgttacaacag

SEQ ID NO: 224452 - DNA, 25 bp, Homo sapien
gaagatgggcaaactacggcctgta

SEQ ID NO: 224453 - DNA, 25 bp, Homo sapien
gagtagttgcaatagtgacggcctg

SEQ ID NO: 224454 - DNA, 25 bp, Homo sapien
gaaacactcctctgcactacattga

SEQ ID NO: 224455 - DNA, 25 bp, Homo sapien
tgtggcaaaatatacgtcaagtaca

SEQ ID NO: 224456 - DNA, 25 bp, Homo sapien
aatcaccggccatgtactgtggctc

SEQ ID NO: 224457 - DNA, 25 bp, Homo sapien
cccagtatttcgggaggctgaagag

SEQ ID NO: 224458 - DNA, 25 bp, Homo sapien
cagtttgatagcgttttgtattcct

SEQ ID NO: 224459 - DNA, 25 bp, Homo sapien
taatgattgtacctgcaggattcac

SEQ ID NO: 224460 - DNA, 25 bp, Homo sapien
cactgtaaaccgttgaaggcaggga

SEQ ID NO: 224461 - DNA, 25 bp, Homo sapien
gagcagttctggactgagcacacca

SEQ ID NO: 224462 - DNA, 25 bp, Homo sapien
tgcgtttccagaagcctagtcctta

SEQ ID NO: 224463 - DNA, 25 bp, Homo sapien
agagagccatcctgcagttggtgca

SEQ ID NO: 224464 - DNA, 25 bp, Homo sapien
ggtatgaggtttcaggtctccggac

SEQ ID NO: 224465 - DNA, 25 bp, Homo sapien
ttgccccagcaacatgtagagagcc

SEQ ID NO: 224466 - DNA, 25 bp, Homo sapien
tgcttattccagagagccgcagtcc

SEQ ID NO: 224467 - DNA, 25 bp, Homo sapien
ggagtgcttgccaaagtacctgtga

SEQ ID NO: 224468 - DNA, 25 bp, Homo sapien
tacttcagggtcagtgagacctggg

SEQ ID NO: 224469 - DNA, 25 bp, Homo sapien
tatcacagaccagtaacctccagag

SEQ ID NO: 224470 - DNA, 25 bp, Homo sapien
ggcaacctgacctttgtgagtctca

SEQ ID NO: 224471 - DNA, 25 bp, Homo sapien
ccggatagcacagcccacatgttat

SEQ ID NO: 224472 - DNA, 25 bp, Homo sapien
ttttgaattgcatctgtgacacaca

SEQ ID NO: 224473 - DNA, 25 bp, Homo sapien
tgacacacacaacaccggatagcac

SEQ ID NO: 224474 - DNA, 25 bp, Homo sapien
catgttattccaggacacactcagg

SEQ ID NO: 224475 - DNA, 25 bp, Homo sapien
gaagataaatgataacagcgctggg

SEQ ID NO: 224476 - DNA, 25 bp, Homo sapien
catgttgtcagagcaatgaagccag

SEQ ID NO: 224477 - DNA, 25 bp, Homo sapien
gccagctcttacaagaggaagataa

SEQ ID NO: 224478 - DNA, 25 bp, Homo sapien
agcacattgcaagtcatgggcccca

SEQ ID NO: 224479 - DNA, 25 bp, Homo sapien
ttcatggagaccgacgatgtgatcg

SEQ ID NO: 224480 - DNA, 25 bp, Homo sapien
gtttccgcttctgctgatctcacct

SEQ ID NO: 224481 - DNA, 25 bp, Homo sapien
gctgatctcacctcgcccagcagca

SEQ ID NO: 224482 - DNA, 25 bp, Homo sapien
cgatgtgatcgggtttccgcttctg

SEQ ID NO: 224483 - DNA, 25 bp, Homo sapien
agctgagagctcttctagaatagtt

SEQ ID NO: 224484 - DNA, 25 bp, Homo sapien
gaacggcagaggcttataacctgag

SEQ ID NO: 224485 - DNA, 25 bp, Homo sapien
taacctgagagacccagtgatggga

SEQ ID NO: 224486 - DNA, 25 bp, Homo sapien
ggagtccacaaagtcgaacggcaga

SEQ ID NO: 224487 - DNA, 25 bp, Homo sapien
gcacccggtaaactgtagtagccat

SEQ ID NO: 224488 - DNA, 25 bp, Homo sapien
cagcacccggtaaactgtagtagcc

SEQ ID NO: 224489 - DNA, 25 bp, Homo sapien
agcacccggtaaactgtagtagcca

SEQ ID NO: 224490 - DNA, 25 bp, Homo sapien
ttagagacaaatagcctgcagccca

SEQ ID NO: 224491 - DNA, 25 bp, Homo sapien
gcaagaagggccaacatcctggagt

SEQ ID NO: 224492 - DNA, 25 bp, Homo sapien
agttctgcagaggaggaccttggta

SEQ ID NO: 224493 - DNA, 25 bp, Homo sapien
gagtgccacttatacagttctgcag

SEQ ID NO: 224494 - DNA, 25 bp, Homo sapien
atgttggcatctgcttgccttctgg

SEQ ID NO: 224495 - DNA, 25 bp, Homo sapien
gcatgatgttggcatctgcttgcct

SEQ ID NO: 224496 - DNA, 25 bp, Homo sapien
gaagcatgatgttggcatctgcttg

SEQ ID NO: 224497 - DNA, 25 bp, Homo sapien
catgatgttggcatctgcttgcctt

SEQ ID NO: 224498 - DNA, 25 bp, Homo sapien
aatcccatgacaacactcgtctctg

SEQ ID NO: 224499 - DNA, 25 bp, Homo sapien
ggtagctcctagtattcttcccctg

SEQ ID NO: 224500 - DNA, 25 bp, Homo sapien
taccagaataatggaggaagtattc

SEQ ID NO: 224501 - DNA, 25 bp, Homo sapien
catccttgtagcttttaggtagctc

SEQ ID NO: 224502 - DNA, 25 bp, Homo sapien
gtgaggccagcacaagactaggcct

SEQ ID NO: 224503 - DNA, 25 bp, Homo sapien
aagtgaggccagcacaagactaggc

SEQ ID NO: 224504 - DNA, 25 bp, Homo sapien
agtgaggccagcacaagactaggcc

SEQ ID NO: 224505 - DNA, 25 bp, Homo sapien
tgaggccagcacaagactaggccta

SEQ ID NO: 224506 - DNA, 25 bp, Homo sapien
atgttgcttaagagcctatgcaaga

SEQ ID NO: 224507 - DNA, 25 bp, Homo sapien
ccatgttgcttaagagcctatgcaa

SEQ ID NO: 224508 - DNA, 25 bp, Homo sapien
gaaactgatgtttattttccattaa

SEQ ID NO: 224509 - DNA, 25 bp, Homo sapien
ttccattaaccatttttccatgttg

SEQ ID NO: 224510 - DNA, 25 bp, Homo sapien
cctgaaattcctcctcggtcactgc

SEQ ID NO: 224511 - DNA, 25 bp, Homo sapien
ttctatggcaggctgagcgctccag

SEQ ID NO: 224512 - DNA, 25 bp, Homo sapien
tcttctatggcaggctgagcgctcc

SEQ ID NO: 224513 - DNA, 25 bp, Homo sapien
agtcttctatggcaggctgagcgct

SEQ ID NO: 224514 - DNA, 25 bp, Homo sapien
cacgggaaatggtgccatgcatgcg

SEQ ID NO: 224515 - DNA, 25 bp, Homo sapien
atgcatgcgcagaacttcccaagcc

SEQ ID NO: 224516 - DNA, 25 bp, Homo sapien
tcacgggaaatggtgccatgcatgc

SEQ ID NO: 224517 - DNA, 25 bp, Homo sapien
gccatgcatgcgcagaacttcccaa

SEQ ID NO: 224518 - DNA, 25 bp, Homo sapien
ttacacagagcaatggtaggtaggt

SEQ ID NO: 224519 - DNA, 25 bp, Homo sapien
ctgtgttacacagagcaatggtagg

SEQ ID NO: 224520 - DNA, 25 bp, Homo sapien
tgttacacagagcaatggtaggtag

SEQ ID NO: 224521 - DNA, 25 bp, Homo sapien
tgtgttacacagagcaatggtaggt

SEQ ID NO: 224522 - DNA, 25 bp, Homo sapien
gagaggctggtggtcagccctggga

SEQ ID NO: 224523 - DNA, 25 bp, Homo sapien
ctggtggtcagccctgggatcagta

SEQ ID NO: 224524 - DNA, 25 bp, Homo sapien
gaggctggtggtcagccctgggatc

SEQ ID NO: 224525 - DNA, 25 bp, Homo sapien
ttaagatgcctctgtgagaggctgg

SEQ ID NO: 224526 - DNA, 25 bp, Homo sapien
gctgcctggatctcgttagtgaagg

SEQ ID NO: 224527 - DNA, 25 bp, Homo sapien
agaaggctgcctggatctcgttagt

SEQ ID NO: 224528 - DNA, 25 bp, Homo sapien
ctcccagaaggctgcctggatctcg

SEQ ID NO: 224529 - DNA, 25 bp, Homo sapien
cacaagaagccgtggctcccagaag

SEQ ID NO: 224530 - DNA, 25 bp, Homo sapien
acaacagcacaagctgccagagaag

SEQ ID NO: 224531 - DNA, 25 bp, Homo sapien
caacaacagcacaagctgccagaga

SEQ ID NO: 224532 - DNA, 25 bp, Homo sapien
gcaacaacagcacaagctgccagag

SEQ ID NO: 224533 - DNA, 25 bp, Homo sapien
aacagcacaagctgccagagaagct

SEQ ID NO: 224534 - DNA, 25 bp, Homo sapien
atgccatcacttttccttttataga

SEQ ID NO: 224535 - DNA, 25 bp, Homo sapien
agatttatgatatagatgccatcac

SEQ ID NO: 224536 - DNA, 25 bp, Homo sapien
ctcttcagatttatgatatagatgc

SEQ ID NO: 224537 - DNA, 25 bp, Homo sapien
tccttttatagatgtactgttccat

SEQ ID NO: 224538 - DNA, 25 bp, Homo sapien
ctggaagtcaagattggtgctacct

SEQ ID NO: 224539 - DNA, 25 bp, Homo sapien
caagattggtgctacctaagtgggt

SEQ ID NO: 224540 - DNA, 25 bp, Homo sapien
gtcaagattggtgctacctaagtgg

SEQ ID NO: 224541 - DNA, 25 bp, Homo sapien
aagtcaagattggtgctacctaagt

SEQ ID NO: 224542 - DNA, 25 bp, Homo sapien
ggatccctctgcaggtagcacggaa

SEQ ID NO: 224543 - DNA, 25 bp, Homo sapien
gtatggatccctctgcaggtagcac

SEQ ID NO: 224544 - DNA, 25 bp, Homo sapien
tatggatccctctgcaggtagcacg

SEQ ID NO: 224545 - DNA, 25 bp, Homo sapien
tccctctgcaggtagcacggaaagg

SEQ ID NO: 224546 - DNA, 25 bp, Homo sapien
ggtttctgttggctcgtgtgactat

SEQ ID NO: 224547 - DNA, 25 bp, Homo sapien
cactgaccacatcgtgtggtttctg

SEQ ID NO: 224548 - DNA, 25 bp, Homo sapien
tgtggtttctgttggctcgtgtgac

SEQ ID NO: 224549 - DNA, 25 bp, Homo sapien
gcctttaatagagcactgaccacat

SEQ ID NO: 224550 - DNA, 25 bp, Homo sapien
gctgaaatatctaagttcctgcaat

SEQ ID NO: 224551 - DNA, 25 bp, Homo sapien
gaggtgctttcttagcaagcaatct

SEQ ID NO: 224552 - DNA, 25 bp, Homo sapien
gtccgggatcccagctggcagctca

SEQ ID NO: 224553 - DNA, 25 bp, Homo sapien
tcctggatgggtcggaggctgctga

SEQ ID NO: 224554 - DNA, 25 bp, Homo sapien
ggcgccgagggccccaagccgcaga

SEQ ID NO: 224555 - DNA, 25 bp, Homo sapien
agggaaaggactgcggggcgccgag

SEQ ID NO: 224556 - DNA, 25 bp, Homo sapien
acagggaaaggactgcggggcgccg

SEQ ID NO: 224557 - DNA, 25 bp, Homo sapien
cgagggccccaagccgcagaaacat

SEQ ID NO: 224558 - DNA, 25 bp, Homo sapien
tgatcttgggcaaggcgcgtgacct

SEQ ID NO: 224559 - DNA, 25 bp, Homo sapien
gatcttgggcaaggcgcgtgacctc

SEQ ID NO: 224560 - DNA, 25 bp, Homo sapien
tgggcaaggcgcgtgacctctttca

SEQ ID NO: 224561 - DNA, 25 bp, Homo sapien
gcaaggcgcgtgacctctttcatcc

SEQ ID NO: 224562 - DNA, 25 bp, Homo sapien
ttgaatccaggagacggaggttgca

SEQ ID NO: 224563 - DNA, 25 bp, Homo sapien
cagcaggctaaggctggagaatcac

SEQ ID NO: 224564 - DNA, 25 bp, Homo sapien
tcagcaggctaaggctggagaatca

SEQ ID NO: 224565 - DNA, 25 bp, Homo sapien
acggaggttgcagggagcggagatc

SEQ ID NO: 224566 - DNA, 25 bp, Homo sapien
aagagctgaatatctgccacctcac

SEQ ID NO: 224567 - DNA, 25 bp, Homo sapien
ctgaagagctgaatatctgccacct

SEQ ID NO: 224568 - DNA, 25 bp, Homo sapien
gaagagctgaatatctgccacctca

SEQ ID NO: 224569 - DNA, 25 bp, Homo sapien
tgaagagctgaatatctgccacctc

SEQ ID NO: 224570 - DNA, 25 bp, Homo sapien
tatataatccatcggctccaggcct

SEQ ID NO: 224571 - DNA, 25 bp, Homo sapien
tgagcccttgttgcctatgatgtgc

SEQ ID NO: 224572 - DNA, 25 bp, Homo sapien
tgcacttaccctcaacgagtccgtg

SEQ ID NO: 224573 - DNA, 25 bp, Homo sapien
cacttaaggaaattgccaagggaca

SEQ ID NO: 224574 - DNA, 25 bp, Homo sapien
actgccgacatgctatgaagcccat

SEQ ID NO: 224575 - DNA, 25 bp, Homo sapien
tcatggacagcagtttcagaaccct

SEQ ID NO: 224576 - DNA, 25 bp, Homo sapien
cagaaccctggtgtagaaggtgtac

SEQ ID NO: 224577 - DNA, 25 bp, Homo sapien
gaaggtgtaccctctctctgagaga

SEQ ID NO: 224578 - DNA, 25 bp, Homo sapien
tcttccctttacatctatctttcat

SEQ ID NO: 224579 - DNA, 25 bp, Homo sapien
tatttctatgtccttggtgatctgg

SEQ ID NO: 224580 - DNA, 25 bp, Homo sapien
cattctcaaccagctacgttcttcc

SEQ ID NO: 224581 - DNA, 25 bp, Homo sapien
gagagaacaagtgaggtttgaaacc

SEQ ID NO: 224582 - DNA, 25 bp, Homo sapien
aaaggagagctttgactcgagagtg

SEQ ID NO: 224583 - DNA, 25 bp, Homo sapien
gactgtttaatcattcgaccctcct

SEQ ID NO: 224584 - DNA, 25 bp, Homo sapien
gggaccaatgcgaagaaaaacagaa

SEQ ID NO: 224585 - DNA, 25 bp, Homo sapien
ctcctccgtggcagattgtgggtct

SEQ ID NO: 224586 - DNA, 25 bp, Homo sapien
atttgggagacgtcggcagctctgc

SEQ ID NO: 224587 - DNA, 25 bp, Homo sapien
tttgcctcacctggtttgttggggc

SEQ ID NO: 224588 - DNA, 25 bp, Homo sapien
tgcttttttcaccttgcccgagttg

SEQ ID NO: 224589 - DNA, 25 bp, Homo sapien
ggctgcatctaatttgggagacgtc

SEQ ID NO: 224590 - DNA, 25 bp, Homo sapien
gggggagccatcttcctagactgaa

SEQ ID NO: 224591 - DNA, 25 bp, Homo sapien
gggagccatcttcctagactgaatt

SEQ ID NO: 224592 - DNA, 25 bp, Homo sapien
ctgtccgggggagccatcttcctag

SEQ ID NO: 224593 - DNA, 25 bp, Homo sapien
tccgggggagccatcttcctagact

SEQ ID NO: 224594 - DNA, 25 bp, Homo sapien
aagtggaggatgtccccaggagaac

SEQ ID NO: 224595 - DNA, 25 bp, Homo sapien
tgaggtacacgctggtggccaggac

SEQ ID NO: 224596 - DNA, 25 bp, Homo sapien
tccttccagccgttccagagtgtct

SEQ ID NO: 224597 - DNA, 25 bp, Homo sapien
cctggcgaggaggttgaggtacacg

SEQ ID NO: 224598 - DNA, 25 bp, Homo sapien
cgtccctcccggtgtagacacctct

SEQ ID NO: 224599 - DNA, 25 bp, Homo sapien
tccctcccggtgtagacacctcttc

SEQ ID NO: 224600 - DNA, 25 bp, Homo sapien
cccggtgtagacacctcttcatcct

SEQ ID NO: 224601 - DNA, 25 bp, Homo sapien
cctcccggtgtagacacctcttcat

SEQ ID NO: 224602 - DNA, 25 bp, Homo sapien
caggtgtttgagtttacatgattgc

SEQ ID NO: 224603 - DNA, 25 bp, Homo sapien
cccaggtgtttgagtttacatgatt

SEQ ID NO: 224604 - DNA, 25 bp, Homo sapien
ccaggtgtttgagtttacatgattg

SEQ ID NO: 224605 - DNA, 25 bp, Homo sapien
ttgcttccaggaattgcttctgtgc

SEQ ID NO: 224606 - DNA, 25 bp, Homo sapien
tctgctttgcttccaggaattgctt

SEQ ID NO: 224607 - DNA, 25 bp, Homo sapien
ctggatgagtttctgctttgcttcc

SEQ ID NO: 224608 - DNA, 25 bp, Homo sapien
gctttgcttccaggaattgcttctg

SEQ ID NO: 224609 - DNA, 25 bp, Homo sapien
agatcccatgtcatggcagggactg

SEQ ID NO: 224610 - DNA, 25 bp, Homo sapien
ttaagatcccatgtcatggcaggga

SEQ ID NO: 224611 - DNA, 25 bp, Homo sapien
aagatcccatgtcatggcagggact

SEQ ID NO: 224612 - DNA, 25 bp, Homo sapien
taagatcccatgtcatggcagggac

SEQ ID NO: 224613 - DNA, 25 bp, Homo sapien
tcaagtgtgccctcggtgttccctt

SEQ ID NO: 224614 - DNA, 25 bp, Homo sapien
gtgttcccttcccttctcgcactgg

SEQ ID NO: 224615 - DNA, 25 bp, Homo sapien
tcgcactgggtggtatgaagcagct

SEQ ID NO: 224616 - DNA, 25 bp, Homo sapien
ccactcaagtgtgccctcggtgttc

SEQ ID NO: 224617 - DNA, 25 bp, Homo sapien
cacaaatgcagtgtgaacccaaaaa

SEQ ID NO: 224618 - DNA, 25 bp, Homo sapien
tatgaaggtatgtccggaattggtg

SEQ ID NO: 224619 - DNA, 25 bp, Homo sapien
ttaagagttcttacaggcggcgtgt

SEQ ID NO: 224620 - DNA, 25 bp, Homo sapien
gaacccaaaaactaagcagtagcaa

SEQ ID NO: 224621 - DNA, 25 bp, Homo sapien
ctatgataacagtgacttctggaat

SEQ ID NO: 224622 - DNA, 25 bp, Homo sapien
ttacacacgttagggtcaggatcac

SEQ ID NO: 224623 - DNA, 25 bp, Homo sapien
cacattacacacgttagggtcagga

SEQ ID NO: 224624 - DNA, 25 bp, Homo sapien
catctgtacaaaacgttttcttaga

SEQ ID NO: 224625 - DNA, 25 bp, Homo sapien
tagacgtttataagcctggcagcgc

SEQ ID NO: 224626 - DNA, 25 bp, Homo sapien
tatgacgttgccacagctatgacct

SEQ ID NO: 224627 - DNA, 25 bp, Homo sapien
ggctatgtaattcagctccactgca

SEQ ID NO: 224628 - DNA, 25 bp, Homo sapien
gcatgaccgcaaacctgtgagtaat

SEQ ID NO: 224629 - DNA, 25 bp, Homo sapien
cgagtgctggggctagtcagtaact

SEQ ID NO: 224630 - DNA, 25 bp, Homo sapien
gctagtcagtaacttgaagtccaag

SEQ ID NO: 224631 - DNA, 25 bp, Homo sapien
caagatccctaattcagctctgtgc

SEQ ID NO: 224632 - DNA, 25 bp, Homo sapien
tcttctttgtgagcttggcgagtgc

SEQ ID NO: 224633 - DNA, 25 bp, Homo sapien
gtatatccaaagatgttaatttcag

SEQ ID NO: 224634 - DNA, 25 bp, Homo sapien
ttgtaagtttcatcagtccctttct

SEQ ID NO: 224635 - DNA, 25 bp, Homo sapien
gtaagtttcatcagtccctttctta

SEQ ID NO: 224636 - DNA, 25 bp, Homo sapien
atatccaaagatgttaatttcagca

SEQ ID NO: 224637 - DNA, 25 bp, Homo sapien
tttgccagtcagtggcctgccggca

SEQ ID NO: 224638 - DNA, 25 bp, Homo sapien
gtgggtgtgttcctccacagagcac

SEQ ID NO: 224639 - DNA, 25 bp, Homo sapien
cccagccaaacaccgcgttgttttg

SEQ ID NO: 224640 - DNA, 25 bp, Homo sapien
ttccctggagtcggtctgcttggcg

SEQ ID NO: 224641 - DNA, 25 bp, Homo sapien
gagttctgggtctacaatttaaatc

SEQ ID NO: 224642 - DNA, 25 bp, Homo sapien
tagtggttttagagttctgggtcta

SEQ ID NO: 224643 - DNA, 25 bp, Homo sapien
tggttttagagttctgggtctacaa

SEQ ID NO: 224644 - DNA, 25 bp, Homo sapien
tactgttgagttttgttgagtttct

SEQ ID NO: 224645 - DNA, 25 bp, Homo sapien
tctagaataagattatatctgcaaa

SEQ ID NO: 224646 - DNA, 25 bp, Homo sapien
gtatcttgcgactttcctgaattta

SEQ ID NO: 224647 - DNA, 25 bp, Homo sapien
ttttctagaataagattatatctgc

SEQ ID NO: 224648 - DNA, 25 bp, Homo sapien
tatcttgcgactttcctgaatttat

SEQ ID NO: 224649 - DNA, 25 bp, Homo sapien
tggcggtagcagtgacaggacaaac

SEQ ID NO: 224650 - DNA, 25 bp, Homo sapien
tactataaatgggtccaggtaggcc

SEQ ID NO: 224651 - DNA, 25 bp, Homo sapien
ccaggtgggtcagcgggctctttta

SEQ ID NO: 224652 - DNA, 25 bp, Homo sapien
aacagccactagatgacctcgagga

SEQ ID NO: 224653 - DNA, 25 bp, Homo sapien
ggttgctggcaatgggacactctca

SEQ ID NO: 224654 - DNA, 25 bp, Homo sapien
cagaacagatgaaggcgacacctgg

SEQ ID NO: 224655 - DNA, 25 bp, Homo sapien
cctcagtgtgggctaagacgctgct

SEQ ID NO: 224656 - DNA, 25 bp, Homo sapien
gaaaattctcccatatcttgaccag

SEQ ID NO: 224657 - DNA, 25 bp, Homo sapien
gagacaccacggagttctcatttcc

SEQ ID NO: 224658 - DNA, 25 bp, Homo sapien
ctgtccgagacaccacggagttctc

SEQ ID NO: 224659 - DNA, 25 bp, Homo sapien
tgtccgagacaccacggagttctca

SEQ ID NO: 224660 - DNA, 25 bp, Homo sapien
tccgagacaccacggagttctcatt

SEQ ID NO: 224661 - DNA, 25 bp, Homo sapien
tatctgactccataagggtggacat

SEQ ID NO: 224662 - DNA, 25 bp, Homo sapien
tcatccatgtagcaataaccctggg

SEQ ID NO: 224663 - DNA, 25 bp, Homo sapien
ggcggttcttcaaggattatctgac

SEQ ID NO: 224664 - DNA, 25 bp, Homo sapien
gacattaagatgacgtagaaaacac

SEQ ID NO: 224665 - DNA, 25 bp, Homo sapien
agagaattttaaaccaatatccctg

SEQ ID NO: 224666 - DNA, 25 bp, Homo sapien
tacgcaaatcaataaacataatcca

SEQ ID NO: 224667 - DNA, 25 bp, Homo sapien
aacatacgcaaatcaataaacataa

SEQ ID NO: 224668 - DNA, 25 bp, Homo sapien
gtatctcaaaatgataagagctatt

SEQ ID NO: 224669 - DNA, 25 bp, Homo sapien
tgatggatgtaaacaggccaccctt

SEQ ID NO: 224670 - DNA, 25 bp, Homo sapien
gatgctactttagtcccgactcaag

SEQ ID NO: 224671 - DNA, 25 bp, Homo sapien
tctttgttgtccctaacccagcctg

SEQ ID NO: 224672 - DNA, 25 bp, Homo sapien
catctccagggactacctcagtggt

SEQ ID NO: 224673 - DNA, 25 bp, Homo sapien
tactagggacagctttagagaacag

SEQ ID NO: 224674 - DNA, 25 bp, Homo sapien
ttgctacgggagcacagggtaccca

SEQ ID NO: 224675 - DNA, 25 bp, Homo sapien
gagtttaagaagatccaggctgaac

SEQ ID NO: 224676 - DNA, 25 bp, Homo sapien
tgcaacgaccccacaactaaggaat

SEQ ID NO: 224677 - DNA, 25 bp, Homo sapien
gcgcgggccgtagtcgagcctggtg

SEQ ID NO: 224678 - DNA, 25 bp, Homo sapien
cagcgatcggctggtgggcttctcg

SEQ ID NO: 224679 - DNA, 25 bp, Homo sapien
tcgttggcgggctccgcgttggcgg

SEQ ID NO: 224680 - DNA, 25 bp, Homo sapien
gggtaacttgggacagaggcaccgc

SEQ ID NO: 224681 - DNA, 25 bp, Homo sapien
tgcagcccgagcgaacagccacgga

SEQ ID NO: 224682 - DNA, 25 bp, Homo sapien
agctgcagcccgagcgaacagccac

SEQ ID NO: 224683 - DNA, 25 bp, Homo sapien
gcccgagcgaacagccacggagcat

SEQ ID NO: 224684 - DNA, 25 bp, Homo sapien
agcccgagcgaacagccacggagca

SEQ ID NO: 224685 - DNA, 25 bp, Homo sapien
gtctcgtcgcgtcggagaaatcgcc

SEQ ID NO: 224686 - DNA, 25 bp, Homo sapien
gtcttggttccgagctcgcgcggcc

SEQ ID NO: 224687 - DNA, 25 bp, Homo sapien
agctgcgagtcttggctcccggact

SEQ ID NO: 224688 - DNA, 25 bp, Homo sapien
cgtgccctgcgatggctcggctggt

SEQ ID NO: 224689 - DNA, 25 bp, Homo sapien
tcttaaaggcgccttgcactctggc

SEQ ID NO: 224690 - DNA, 25 bp, Homo sapien
attttattgtacaggagccacgccc

SEQ ID NO: 224691 - DNA, 25 bp, Homo sapien
tgttatctctgcagccggtgtgtgg

SEQ ID NO: 224692 - DNA, 25 bp, Homo sapien
cgagacggaggcgtccccttctttg

SEQ ID NO: 224693 - DNA, 25 bp, Homo sapien
aactgtgagcagacaaatgtaatga

SEQ ID NO: 224694 - DNA, 25 bp, Homo sapien
tccacgttttacaggaggggacagc

SEQ ID NO: 224695 - DNA, 25 bp, Homo sapien
agtaggatggcttgacgtctcattt

SEQ ID NO: 224696 - DNA, 25 bp, Homo sapien
gcttgacgtctcatttgcttgatga

SEQ ID NO: 224697 - DNA, 25 bp, Homo sapien
caccctcataggagagagactggtc

SEQ ID NO: 224698 - DNA, 25 bp, Homo sapien
acacaaagaggctgcgggtgccctt

SEQ ID NO: 224699 - DNA, 25 bp, Homo sapien
gcaggcatttgctaacagggcaggc

SEQ ID NO: 224700 - DNA, 25 bp, Homo sapien
tgaggccacccgagaaattcaggct

SEQ ID NO: 224701 - DNA, 25 bp, Homo sapien
ccctgaagtagagagagctcgtgct

SEQ ID NO: 224702 - DNA, 25 bp, Homo sapien
gaggatgccagtttgcaatccctga

SEQ ID NO: 224703 - DNA, 25 bp, Homo sapien
cgtgctggggagaagtccaccaaga

SEQ ID NO: 224704 - DNA, 25 bp, Homo sapien
tttgaggcgggctgtagcaaagtcc

SEQ ID NO: 224705 - DNA, 25 bp, Homo sapien
tactatgcctaagaagagatggctc

SEQ ID NO: 224706 - DNA, 25 bp, Homo sapien
ccctgggaggatgcctaacctaact

SEQ ID NO: 224707 - DNA, 25 bp, Homo sapien
tgtggtctccatgttcctactatgc

SEQ ID NO: 224708 - DNA, 25 bp, Homo sapien
cctaactccagccagactaataggg

SEQ ID NO: 224709 - DNA, 25 bp, Homo sapien
gagtcttaggaggttccaacttgca

SEQ ID NO: 224710 - DNA, 25 bp, Homo sapien
gaggtgccaggctgaaactaggtcc

SEQ ID NO: 224711 - DNA, 25 bp, Homo sapien
aacttgcaggatcctttcccagagc

SEQ ID NO: 224712 - DNA, 25 bp, Homo sapien
gcttcccgggaatgacagggtttga

SEQ ID NO: 224713 - DNA, 25 bp, Homo sapien
gagccaagaagttgaccacgtgtga

SEQ ID NO: 224714 - DNA, 25 bp, Homo sapien
gcagcaacatctgtgagcccagtgt

SEQ ID NO: 224715 - DNA, 25 bp, Homo sapien
gatgataaagcaagcctagggccag

SEQ ID NO: 224716 - DNA, 25 bp, Homo sapien
tgagttcaagaaagctacctgtgga

SEQ ID NO: 224717 - DNA, 25 bp, Homo sapien
agagaagaaacatgggtgtgcttgg

SEQ ID NO: 224718 - DNA, 25 bp, Homo sapien
agaagaaacatgggtgtgcttggcc

SEQ ID NO: 224719 - DNA, 25 bp, Homo sapien
gatggacctccccgctccctcaagc

SEQ ID NO: 224720 - DNA, 25 bp, Homo sapien
tggtgatggacctccccgctccctc

SEQ ID NO: 224721 - DNA, 25 bp, Homo sapien
gccagtccccacaagatcgtggcta

SEQ ID NO: 224722 - DNA, 25 bp, Homo sapien
agaagtgtagcttcgcaccgccaag

SEQ ID NO: 224723 - DNA, 25 bp, Homo sapien
cccgcaggaatccatagacatctgg

SEQ ID NO: 224724 - DNA, 25 bp, Homo sapien
aaaaggagaggtgacccgcaggaat

SEQ ID NO: 224725 - DNA, 25 bp, Homo sapien
gatgctcagcaagaggcatgtgcca

SEQ ID NO: 224726 - DNA, 25 bp, Homo sapien
gacatttttccagcgacagatggcc

SEQ ID NO: 224727 - DNA, 25 bp, Homo sapien
gcttggctggtcttactacataggg

SEQ ID NO: 224728 - DNA, 25 bp, Homo sapien
gcaccaacagaggtaggcctaggaa

SEQ ID NO: 224729 - DNA, 25 bp, Homo sapien
tggacagagccaatccgcaagtact

SEQ ID NO: 224730 - DNA, 25 bp, Homo sapien
aatcagcttaggtcttcagtcccag

SEQ ID NO: 224731 - DNA, 25 bp, Homo sapien
tacttgggtagactctgaacctgcc

SEQ ID NO: 224732 - DNA, 25 bp, Homo sapien
tgtgcagaagtctcaccccaagagg

SEQ ID NO: 224733 - DNA, 25 bp, Homo sapien
gcggtgacttccatcccgaagctgg

SEQ ID NO: 224734 - DNA, 25 bp, Homo sapien
tcatggggcggtgacttccatcccg

SEQ ID NO: 224735 - DNA, 25 bp, Homo sapien
ggtgacttccatcccgaagctggct

SEQ ID NO: 224736 - DNA, 25 bp, Homo sapien
gggcggtgacttccatcccgaagct

SEQ ID NO: 224737 - DNA, 25 bp, Homo sapien
gagagttccatctcgatacagcctg

SEQ ID NO: 224738 - DNA, 25 bp, Homo sapien
ccaggagcttgagagttccatctcg

SEQ ID NO: 224739 - DNA, 25 bp, Homo sapien
ccattggcagcccagagtatctctt

SEQ ID NO: 224740 - DNA, 25 bp, Homo sapien
gaagggagagacgacccaggagctt

SEQ ID NO: 224741 - DNA, 25 bp, Homo sapien
aatgggtaaaagcagccgcagccac

SEQ ID NO: 224742 - DNA, 25 bp, Homo sapien
tggggcacaaagcagaagccaatgg

SEQ ID NO: 224743 - DNA, 25 bp, Homo sapien
agaagccaatgggtaaaagcagccg

SEQ ID NO: 224744 - DNA, 25 bp, Homo sapien
ctggggcacaaagcagaagccaatg

SEQ ID NO: 224745 - DNA, 25 bp, Homo sapien
tttgattttccaagagaagctagag

SEQ ID NO: 224746 - DNA, 25 bp, Homo sapien
ccattataagatcttttgattttcc

SEQ ID NO: 224747 - DNA, 25 bp, Homo sapien
gaagctagagatccagcttttctat

SEQ ID NO: 224748 - DNA, 25 bp, Homo sapien
tccaagagaagctagagatccagct

SEQ ID NO: 224749 - DNA, 25 bp, Homo sapien
acccaatggcattgtagtgacctct

SEQ ID NO: 224750 - DNA, 25 bp, Homo sapien
tatactgacgtcaggtggaggcagt

SEQ ID NO: 224751 - DNA, 25 bp, Homo sapien
tgagaagaagatgtaatctactgtc

SEQ ID NO: 224752 - DNA, 25 bp, Homo sapien
tactgtcattccaagacccaatggc

SEQ ID NO: 224753 - DNA, 25 bp, Homo sapien
tcaagctccgatgcatcttcctcaa

SEQ ID NO: 224754 - DNA, 25 bp, Homo sapien
gagaaggcaggctcaagctccgatg

SEQ ID NO: 224755 - DNA, 25 bp, Homo sapien
gactcagcccaacccgcaggtcgct

SEQ ID NO: 224756 - DNA, 25 bp, Homo sapien
gcaggctcaagctccgatgcatctt

SEQ ID NO: 224757 - DNA, 25 bp, Homo sapien
tctggcagttatacaggactcaagg

SEQ ID NO: 224758 - DNA, 25 bp, Homo sapien
cattcagcaatagtagcagccacgc

SEQ ID NO: 224759 - DNA, 25 bp, Homo sapien
gctccaggtcacataagctgctacc

SEQ ID NO: 224760 - DNA, 25 bp, Homo sapien
ggactcaaggcttccacctactctg

SEQ ID NO: 224761 - DNA, 25 bp, Homo sapien
agtatctgtcactccttccataagg

SEQ ID NO: 224762 - DNA, 25 bp, Homo sapien
cagtcctactggtcgctgacaagcg

SEQ ID NO: 224763 - DNA, 25 bp, Homo sapien
cagaagcggaaacgtagcaggaagt

SEQ ID NO: 224764 - DNA, 25 bp, Homo sapien
tgacaagcgatgctgcagaagcgga

SEQ ID NO: 224765 - DNA, 25 bp, Homo sapien
tgacaggaggtgacatactgacagc

SEQ ID NO: 224766 - DNA, 25 bp, Homo sapien
aggaggtgacatactgacagcaatc

SEQ ID NO: 224767 - DNA, 25 bp, Homo sapien
gacaggaggtgacatactgacagca

SEQ ID NO: 224768 - DNA, 25 bp, Homo sapien
ggtgacatactgacagcaatcagtg

SEQ ID NO: 224769 - DNA, 25 bp, Homo sapien
tccacagggaatatcaactctcagg

SEQ ID NO: 224770 - DNA, 25 bp, Homo sapien
ggaaacattcggcaacatcagtcat

SEQ ID NO: 224771 - DNA, 25 bp, Homo sapien
tccaacgtgtgtagcaaaagtccct

SEQ ID NO: 224772 - DNA, 25 bp, Homo sapien
tagagcagcaatagacagaatcccc

SEQ ID NO: 224773 - DNA, 25 bp, Homo sapien
ctaactacccgcataacctagggca

SEQ ID NO: 224774 - DNA, 25 bp, Homo sapien
tgttataagcaatgacagcacagta

SEQ ID NO: 224775 - DNA, 25 bp, Homo sapien
tgagatccatatgcaaattgctgag

SEQ ID NO: 224776 - DNA, 25 bp, Homo sapien
tatttgagggtaagagctctgcagc

SEQ ID NO: 224777 - DNA, 25 bp, Homo sapien
tttaggtccccgcacaagatgatgg

SEQ ID NO: 224778 - DNA, 25 bp, Homo sapien
ggctggcatcccatggtactggagc

SEQ ID NO: 224779 - DNA, 25 bp, Homo sapien
ccatccctgatgaagttgtagagag

SEQ ID NO: 224780 - DNA, 25 bp, Homo sapien
ggctgccatctgacagtctggccac

SEQ ID NO: 224781 - DNA, 25 bp, Homo sapien
gacagcacagccatcggttttacac

SEQ ID NO: 224782 - DNA, 25 bp, Homo sapien
gattaagtagctccaagccaggccg

SEQ ID NO: 224783 - DNA, 25 bp, Homo sapien
ccttctgggacgagtggttgcagta

SEQ ID NO: 224784 - DNA, 25 bp, Homo sapien
gatatgggtatttgccacacacagc

SEQ ID NO: 224785 - DNA, 25 bp, Homo sapien
ccatcattcgcagagagggttccag

SEQ ID NO: 224786 - DNA, 25 bp, Homo sapien
agctgctcccagtaatgatcttcct

SEQ ID NO: 224787 - DNA, 25 bp, Homo sapien
gctgctcccagtaatgatcttcctg

SEQ ID NO: 224788 - DNA, 25 bp, Homo sapien
agtgctggaatgtgacccccaccct

SEQ ID NO: 224789 - DNA, 25 bp, Homo sapien
agaaacccaatcactccagagtgct

SEQ ID NO: 224790 - DNA, 25 bp, Homo sapien
caggcccagacttaagctgaagaga

SEQ ID NO: 224791 - DNA, 25 bp, Homo sapien
aacaggcccagacttaagctgaaga

SEQ ID NO: 224792 - DNA, 25 bp, Homo sapien
gatagttccaattgaggatgtctgg

SEQ ID NO: 224793 - DNA, 25 bp, Homo sapien
tcctgcatgaggttcacgaagcgat

SEQ ID NO: 224794 - DNA, 25 bp, Homo sapien
tgctgcatcaggtcctgagccagga

SEQ ID NO: 224795 - DNA, 25 bp, Homo sapien
gcaatgtagatagagctctgagctc

SEQ ID NO: 224796 - DNA, 25 bp, Homo sapien
acaggctcaggtgctatgctccagg

SEQ ID NO: 224797 - DNA, 25 bp, Homo sapien
tctcctagcatctcagggaaaggct

SEQ ID NO: 224798 - DNA, 25 bp, Homo sapien
gggaaaggctcatccaggttctctg

SEQ ID NO: 224799 - DNA, 25 bp, Homo sapien
gattatccatcagaagtgccaggct

SEQ ID NO: 224800 - DNA, 25 bp, Homo sapien
cgccctctacctggggggatgagct

SEQ ID NO: 224801 - DNA, 25 bp, Homo sapien
ggggatgagctgttcgccagaagga

SEQ ID NO: 224802 - DNA, 25 bp, Homo sapien
gggggatgagctgttcgccagaagg

SEQ ID NO: 224803 - DNA, 25 bp, Homo sapien
ggggggatgagctgttcgccagaag

SEQ ID NO: 224804 - DNA, 25 bp, Homo sapien
ttttttcgacatgtgaagaaagcat

SEQ ID NO: 224805 - DNA, 25 bp, Homo sapien
cattttttcgacatgtgaagaaagc

SEQ ID NO: 224806 - DNA, 25 bp, Homo sapien
attttttcgacatgtgaagaaagca

SEQ ID NO: 224807 - DNA, 25 bp, Homo sapien
cttgaacaatgcccctagtcagatg

SEQ ID NO: 224808 - DNA, 25 bp, Homo sapien
aatgcccctagtcagatgaagttac

SEQ ID NO: 224809 - DNA, 25 bp, Homo sapien
gatgaagttactcttgactgtaaaa

SEQ ID NO: 224810 - DNA, 25 bp, Homo sapien
gaacaatgcccctagtcagatgaag

SEQ ID NO: 224811 - DNA, 25 bp, Homo sapien
gcactcgcctaggtccgagctacta

SEQ ID NO: 224812 - DNA, 25 bp, Homo sapien
gtacttcggccataaacctcccaga

SEQ ID NO: 224813 - DNA, 25 bp, Homo sapien
agatcggtgcgtccagtacttcggc

SEQ ID NO: 224814 - DNA, 25 bp, Homo sapien
ccgcctcgcccgctgagaatttggg

SEQ ID NO: 224815 - DNA, 25 bp, Homo sapien
ggtaacacaagcacgacgcgatcat

SEQ ID NO: 224816 - DNA, 25 bp, Homo sapien
gcaggtaacacaagcacgacgcgat

SEQ ID NO: 224817 - DNA, 25 bp, Homo sapien
caggtaacacaagcacgacgcgatc

SEQ ID NO: 224818 - DNA, 25 bp, Homo sapien
aggtaacacaagcacgacgcgatca

SEQ ID NO: 224819 - DNA, 25 bp, Homo sapien
cgcccgcgcccgcctccgctcctca

SEQ ID NO: 224820 - DNA, 25 bp, Homo sapien
ccgcccgcgcccgcctccgctcctc

SEQ ID NO: 224821 - DNA, 25 bp, Homo sapien
cggccgcccgcgcccgcctccgctc

SEQ ID NO: 224822 - DNA, 25 bp, Homo sapien
gccgcccgcgcccgcctccgctcct

SEQ ID NO: 224823 - DNA, 25 bp, Homo sapien
agccagcaggtcctccctcagctcg

SEQ ID NO: 224824 - DNA, 25 bp, Homo sapien
gcagccagcaggtcctccctcagct

SEQ ID NO: 224825 - DNA, 25 bp, Homo sapien
ccagcaggtcctccctcagctcggc

SEQ ID NO: 224826 - DNA, 25 bp, Homo sapien
ctgcagccagcaggtcctccctcag

SEQ ID NO: 224827 - DNA, 25 bp, Homo sapien
ttcagctccaaggttaagatgctct

SEQ ID NO: 224828 - DNA, 25 bp, Homo sapien
gatgctctcccacggggaaaagaaa

SEQ ID NO: 224829 - DNA, 25 bp, Homo sapien
tgatcttcagctccaaggttaagat

SEQ ID NO: 224830 - DNA, 25 bp, Homo sapien
tcacccgtcactgaaatacttcata

SEQ ID NO: 224831 - DNA, 25 bp, Homo sapien
ggcttggccccagtagacatatgag

SEQ ID NO: 224832 - DNA, 25 bp, Homo sapien
ctcttcacagtcacctaattaaggg

SEQ ID NO: 224833 - DNA, 25 bp, Homo sapien
ctctcttgcgagaagaacatgatgg

SEQ ID NO: 224834 - DNA, 25 bp, Homo sapien
aagcacagctctcttgcgagaagaa

SEQ ID NO: 224835 - DNA, 25 bp, Homo sapien
cacccaactaataggtgttggaaat

SEQ ID NO: 224836 - DNA, 25 bp, Homo sapien
cagaagaatttgtccatggtcttgg

SEQ ID NO: 224837 - DNA, 25 bp, Homo sapien
catggcttcaggctggcattaaaac

SEQ ID NO: 224838 - DNA, 25 bp, Homo sapien
tggcttcaggctggcattaaaacag

SEQ ID NO: 224839 - DNA, 25 bp, Homo sapien
gtgtgggcagcgcagtatcataggc

SEQ ID NO: 224840 - DNA, 25 bp, Homo sapien
ggtgggtcttatggtccctgaagct

SEQ ID NO: 224841 - DNA, 25 bp, Homo sapien
caggccctgactaagtgctccctgg

SEQ ID NO: 224842 - DNA, 25 bp, Homo sapien
tggtgggtcttatggtccctgaagc

SEQ ID NO: 224843 - DNA, 25 bp, Homo sapien
tgactaagtgctccctggtaggagg

SEQ ID NO: 224844 - DNA, 25 bp, Homo sapien
ctagaactcgctgttggaggaggct

SEQ ID NO: 224845 - DNA, 25 bp, Homo sapien
tagaactcgctgttggaggaggctg

SEQ ID NO: 224846 - DNA, 25 bp, Homo sapien
gaactcgctgttggaggaggctgca

SEQ ID NO: 224847 - DNA, 25 bp, Homo sapien
agaactcgctgttggaggaggctgc

SEQ ID NO: 224848 - DNA, 25 bp, Homo sapien
gtatgcgcaaccagtcacatagatt

SEQ ID NO: 224849 - DNA, 25 bp, Homo sapien
agtatgcgcaaccagtcacatagat

SEQ ID NO: 224850 - DNA, 25 bp, Homo sapien
cttggatgtcacagtgatcttgctc

SEQ ID NO: 224851 - DNA, 25 bp, Homo sapien
atcttgctcttgctcctttcgttgg

SEQ ID NO: 224852 - DNA, 25 bp, Homo sapien
ccattcactttgatcctttcttgca

SEQ ID NO: 224853 - DNA, 25 bp, Homo sapien
gctcttgctcctttcgttggtcacc

SEQ ID NO: 224854 - DNA, 25 bp, Homo sapien
cttctacagggtgggtgcaatcaag

SEQ ID NO: 224855 - DNA, 25 bp, Homo sapien
atcttctacagggtgggtgcaatca

SEQ ID NO: 224856 - DNA, 25 bp, Homo sapien
ccatcttctacagggtgggtgcaat

SEQ ID NO: 224857 - DNA, 25 bp, Homo sapien
ctacagggtgggtgcaatcaagagt

SEQ ID NO: 224858 - DNA, 25 bp, Homo sapien
tcccccttcgccacaagctttttca

SEQ ID NO: 224859 - DNA, 25 bp, Homo sapien
ccccttcgccacaagctttttcaca

SEQ ID NO: 224860 - DNA, 25 bp, Homo sapien
ttcgccacaagctttttcacaggag

SEQ ID NO: 224861 - DNA, 25 bp, Homo sapien
ccttcgccacaagctttttcacagg

SEQ ID NO: 224862 - DNA, 25 bp, Homo sapien
tgtgaatctccatcacgatcaggga

SEQ ID NO: 224863 - DNA, 25 bp, Homo sapien
gaccttcatagacccaggattagga

SEQ ID NO: 224864 - DNA, 25 bp, Homo sapien
catttcagaaggtttgctggccctc

SEQ ID NO: 224865 - DNA, 25 bp, Homo sapien
gacgcgcacaattatctctagaaga

SEQ ID NO: 224866 - DNA, 25 bp, Homo sapien
tgagcggctctcgtcctcagatatg

SEQ ID NO: 224867 - DNA, 25 bp, Homo sapien
tagtctcttaatctggccccactta

SEQ ID NO: 224868 - DNA, 25 bp, Homo sapien
gtccttaactgatgcaaacatagtc

SEQ ID NO: 224869 - DNA, 25 bp, Homo sapien
tgtaaatggcatcgagttcagtcct

SEQ ID NO: 224870 - DNA, 25 bp, Homo sapien
ttctcagaacagcatgacgaaaaac

SEQ ID NO: 224871 - DNA, 25 bp, Homo sapien
gctggggtctctccaaacatattct

SEQ ID NO: 224872 - DNA, 25 bp, Homo sapien
tcggcctcctgagtattcgggactg

SEQ ID NO: 224873 - DNA, 25 bp, Homo sapien
tgtctggcacagcacagggtagttg

SEQ ID NO: 224874 - DNA, 25 bp, Homo sapien
tttgtaaccagggccgtaggtctga

SEQ ID NO: 224875 - DNA, 25 bp, Homo sapien
gggttattcagggtcggcattccag

SEQ ID NO: 224876 - DNA, 25 bp, Homo sapien
attcagggtcggcattccagttgtt

SEQ ID NO: 224877 - DNA, 25 bp, Homo sapien
gggccgtaggtctgagcatttcttt

SEQ ID NO: 224878 - DNA, 25 bp, Homo sapien
gagagacttacacaccaggagacag

SEQ ID NO: 224879 - DNA, 25 bp, Homo sapien
tgaaccaggaactcgcaaacaagct

SEQ ID NO: 224880 - DNA, 25 bp, Homo sapien
acagaatgagttatgcaaagtccca

SEQ ID NO: 224881 - DNA, 25 bp, Homo sapien
tagtccagtccccactaggtgctag

SEQ ID NO: 224882 - DNA, 25 bp, Homo sapien
tgtgatggcactcgtgatccaccag

SEQ ID NO: 224883 - DNA, 25 bp, Homo sapien
tgatccaccaggtgtcgctgcgcag

SEQ ID NO: 224884 - DNA, 25 bp, Homo sapien
cgtgatccaccaggtgtcgctgcgc

SEQ ID NO: 224885 - DNA, 25 bp, Homo sapien
gggtctccttgtgatggcactcgtg

SEQ ID NO: 224886 - DNA, 25 bp, Homo sapien
gccccgatgcaggagaacgtagaca

SEQ ID NO: 224887 - DNA, 25 bp, Homo sapien
ttcccatctcctcgggctgggaagg

SEQ ID NO: 224888 - DNA, 25 bp, Homo sapien
ctaatctaaaggcttgtcactcaga

SEQ ID NO: 224889 - DNA, 25 bp, Homo sapien
aggcttgtcactcagaaaccagcag

SEQ ID NO: 224890 - DNA, 25 bp, Homo sapien
tggagttacagttctggcatttctg

SEQ ID NO: 224891 - DNA, 25 bp, Homo sapien
ggagttacagttctggcatttctgg

SEQ ID NO: 224892 - DNA, 25 bp, Homo sapien
gaggtggagttacagttctggcatt

SEQ ID NO: 224893 - DNA, 25 bp, Homo sapien
ctgcagatcccagaggtggagttac

SEQ ID NO: 224894 - DNA, 25 bp, Homo sapien
gggcctcaaatgtctgccggaaatt

SEQ ID NO: 224895 - DNA, 25 bp, Homo sapien
aagagactggcccacattatgcaga

SEQ ID NO: 224896 - DNA, 25 bp, Homo sapien
cccctggcaaggaccgcgtatagtt

SEQ ID NO: 224897 - DNA, 25 bp, Homo sapien
cagctgttccccgttgctaagagac

SEQ ID NO: 224898 - DNA, 25 bp, Homo sapien
tagaaaggtgacaggcttcagcagc

SEQ ID NO: 224899 - DNA, 25 bp, Homo sapien
gattgttcaggctgcatgcacaccc

SEQ ID NO: 224900 - DNA, 25 bp, Homo sapien
ggttccagaagggttatccaggaca

SEQ ID NO: 224901 - DNA, 25 bp, Homo sapien
tgggcactaactccttagaaaggtg

SEQ ID NO: 224902 - DNA, 25 bp, Homo sapien
ttcggcttacctccttattctttgc

SEQ ID NO: 224903 - DNA, 25 bp, Homo sapien
ctgagcattcggcttacctccttat

SEQ ID NO: 224904 - DNA, 25 bp, Homo sapien
aaacacccgagcttggcttccagct

SEQ ID NO: 224905 - DNA, 25 bp, Homo sapien
gcataagcttccagtaagccaggag

SEQ ID NO: 224906 - DNA, 25 bp, Homo sapien
aaacgcatcgaagttcttggcacac

SEQ ID NO: 224907 - DNA, 25 bp, Homo sapien
ttgtgaagacgcagtaagaaaacgc

SEQ ID NO: 224908 - DNA, 25 bp, Homo sapien
ttgagcaagacgctcgctgcgccgc

SEQ ID NO: 224909 - DNA, 25 bp, Homo sapien
ggctgttgtgaagacgcagtaagaa

SEQ ID NO: 224910 - DNA, 25 bp, Homo sapien
gtgggaggcgagtatcttgtgggaa

SEQ ID NO: 224911 - DNA, 25 bp, Homo sapien
ggactgtgggaggcgagtatcttgt

SEQ ID NO: 224912 - DNA, 25 bp, Homo sapien
tttggtggaaagagatgagctggga

SEQ ID NO: 224913 - DNA, 25 bp, Homo sapien
gatgccccacctgcctatcacatcc

SEQ ID NO: 224914 - DNA, 25 bp, Homo sapien
ttccgatcttctgtcactcaatggg

SEQ ID NO: 224915 - DNA, 25 bp, Homo sapien
tgtgactatccattccgatcttctg

SEQ ID NO: 224916 - DNA, 25 bp, Homo sapien
aatgaggggaacttggaagaggcca

SEQ ID NO: 224917 - DNA, 25 bp, Homo sapien
gggcaggcatgtgactatccattcc

SEQ ID NO: 224918 - DNA, 25 bp, Homo sapien
taaggacacataccagtagcccagg

SEQ ID NO: 224919 - DNA, 25 bp, Homo sapien
tctcccaaccgaaggtagatgctgg

SEQ ID NO: 224920 - DNA, 25 bp, Homo sapien
tccagtgaaagaggagccggagatc

SEQ ID NO: 224921 - DNA, 25 bp, Homo sapien
tgaagtcggaacctgagagaaacgc

SEQ ID NO: 224922 - DNA, 25 bp, Homo sapien
tcatgagaaaatacagcagtcccta

SEQ ID NO: 224923 - DNA, 25 bp, Homo sapien
gaaaatacagcagtccctagagaac

SEQ ID NO: 224924 - DNA, 25 bp, Homo sapien
tacagcagtccctagagaacttgaa

SEQ ID NO: 224925 - DNA, 25 bp, Homo sapien
tgagaaaatacagcagtccctagag

SEQ ID NO: 224926 - DNA, 25 bp, Homo sapien
tgcagccaacacacaaggagtagac

SEQ ID NO: 224927 - DNA, 25 bp, Homo sapien
gccaagggcacacttctctgttttc

SEQ ID NO: 224928 - DNA, 25 bp, Homo sapien
cagattcttgtcctcagccaagggc

SEQ ID NO: 224929 - DNA, 25 bp, Homo sapien
gctgacagagccaaacgggaaagtt

SEQ ID NO: 224930 - DNA, 25 bp, Homo sapien
tctctctggactgctatttgcttct

SEQ ID NO: 224931 - DNA, 25 bp, Homo sapien
ttgcatgcacttgtcgtttggggat

SEQ ID NO: 224932 - DNA, 25 bp, Homo sapien
tgcatttgtggacaccgtcttggtg

SEQ ID NO: 224933 - DNA, 25 bp, Homo sapien
cgtttggggatgcatttgtggacac

SEQ ID NO: 224934 - DNA, 25 bp, Homo sapien
agagtggcccccagaggggtgggag

SEQ ID NO: 224935 - DNA, 25 bp, Homo sapien
gagagtggcccccagaggggtggga

SEQ ID NO: 224936 - DNA, 25 bp, Homo sapien
acaaagtggcgtgaggaggaagcct

SEQ ID NO: 224937 - DNA, 25 bp, Homo sapien
agcccctgagacttgttgctgccag

SEQ ID NO: 224938 - DNA, 25 bp, Homo sapien
ccagaggacaaagtggcgtgaggag

SEQ ID NO: 224939 - DNA, 25 bp, Homo sapien
gcccctgagacttgttgctgccaga

SEQ ID NO: 224940 - DNA, 25 bp, Homo sapien
ctctggagaggtttcgggagagcca

SEQ ID NO: 224941 - DNA, 25 bp, Homo sapien
agagcccatggttatttgctgcttc

SEQ ID NO: 224942 - DNA, 25 bp, Homo sapien
ccactgagagcccatggttatttgc

SEQ ID NO: 224943 - DNA, 25 bp, Homo sapien
ctgcttctcatctggacccagtgcc

SEQ ID NO: 224944 - DNA, 25 bp, Homo sapien
aaggcctgtgaaatgccgggcatca

SEQ ID NO: 224945 - DNA, 25 bp, Homo sapien
caatcatgcataccctgctggctgg

SEQ ID NO: 224946 - DNA, 25 bp, Homo sapien
catttttgactgactcatgaccaga

SEQ ID NO: 224947 - DNA, 25 bp, Homo sapien
tggttgccccagatggctttcccca

SEQ ID NO: 224948 - DNA, 25 bp, Homo sapien
ttgctgggcatggggtgccagtggc

SEQ ID NO: 224949 - DNA, 25 bp, Homo sapien
ttccttgctgggcatggggtgccag

SEQ ID NO: 224950 - DNA, 25 bp, Homo sapien
ccttgctgggcatggggtgccagtg

SEQ ID NO: 224951 - DNA, 25 bp, Homo sapien
gctgggcatggggtgccagtggctg

SEQ ID NO: 224952 - DNA, 25 bp, Homo sapien
gttcaagagagctgccgagatccca

SEQ ID NO: 224953 - DNA, 25 bp, Homo sapien
aagagagctgccgagatcccagtcc

SEQ ID NO: 224954 - DNA, 25 bp, Homo sapien
agagctgccgagatcccagtccttc

SEQ ID NO: 224955 - DNA, 25 bp, Homo sapien
gctgtaggtggcctcaggtacctgg

SEQ ID NO: 224956 - DNA, 25 bp, Homo sapien
tacaaaacagtggtgctgagaactt

SEQ ID NO: 224957 - DNA, 25 bp, Homo sapien
gaactttgagtagggaggaagccaa

SEQ ID NO: 224958 - DNA, 25 bp, Homo sapien
ttagtttgggttccctctctcatct

SEQ ID NO: 224959 - DNA, 25 bp, Homo sapien
tctgtgggtttcttatacaaaacag

SEQ ID NO: 224960 - DNA, 25 bp, Homo sapien
gggagcaagggttgttgtagccagc

SEQ ID NO: 224961 - DNA, 25 bp, Homo sapien
atctggatatatgggctgggggagc

SEQ ID NO: 224962 - DNA, 25 bp, Homo sapien
tggaatctggatatatgggctgggg

SEQ ID NO: 224963 - DNA, 25 bp, Homo sapien
gcaagggttgttgtagccagctgcc

SEQ ID NO: 224964 - DNA, 25 bp, Homo sapien
ccagggattctgctttcagctgcag

SEQ ID NO: 224965 - DNA, 25 bp, Homo sapien
gcccagggattctgctttcagctgc

SEQ ID NO: 224966 - DNA, 25 bp, Homo sapien
cagggattctgctttcagctgcagc

SEQ ID NO: 224967 - DNA, 25 bp, Homo sapien
gtgagcaaaatctccagaccgagcc

SEQ ID NO: 224968 - DNA, 25 bp, Homo sapien
aaaatctccagaccgagccagacag

SEQ ID NO: 224969 - DNA, 25 bp, Homo sapien
agcaaaatctccagaccgagccaga

SEQ ID NO: 224970 - DNA, 25 bp, Homo sapien
tctccagaccgagccagacagacag

SEQ ID NO: 224971 - DNA, 25 bp, Homo sapien
cagtttccatgaaaggaccccctgg

SEQ ID NO: 224972 - DNA, 25 bp, Homo sapien
ctagaaccaccctcctcacgtccag

SEQ ID NO: 224973 - DNA, 25 bp, Homo sapien
tggtgagaggggacttgactctgcg

SEQ ID NO: 224974 - DNA, 25 bp, Homo sapien
gcgaccctcccctctgcacgccagg

SEQ ID NO: 224975 - DNA, 25 bp, Homo sapien
ctgcctgtaagagtcccacgggcat

SEQ ID NO: 224976 - DNA, 25 bp, Homo sapien
ttgtcgctcactggcagaagtgtca

SEQ ID NO: 224977 - DNA, 25 bp, Homo sapien
tctttgtcgctcactggcagaagtg

SEQ ID NO: 224978 - DNA, 25 bp, Homo sapien
ggctctttgtcgctcactggcagaa

SEQ ID NO: 224979 - DNA, 25 bp, Homo sapien
agagttctgggcgaaccagtgattt

SEQ ID NO: 224980 - DNA, 25 bp, Homo sapien
tgcgcgtgcacacagagtcctggtt

SEQ ID NO: 224981 - DNA, 25 bp, Homo sapien
tgttattaacaagttccgacaccag

SEQ ID NO: 224982 - DNA, 25 bp, Homo sapien
tgtaccaggattaagaggctgcagc

SEQ ID NO: 224983 - DNA, 25 bp, Homo sapien
taaagggcagtagtcttctctccgc

SEQ ID NO: 224984 - DNA, 25 bp, Homo sapien
cagatcaggtttgtttgccttcccc

SEQ ID NO: 224985 - DNA, 25 bp, Homo sapien
tgcctcccaggaaagtacaaggttc

SEQ ID NO: 224986 - DNA, 25 bp, Homo sapien
aacgccgccaaaagctgattagatg

SEQ ID NO: 224987 - DNA, 25 bp, Homo sapien
accgccacagggcgaggcaccagaa

SEQ ID NO: 224988 - DNA, 25 bp, Homo sapien
gaggcaccagaaagcattcttgaca

SEQ ID NO: 224989 - DNA, 25 bp, Homo sapien
cgccacagggcgaggcaccagaaag

SEQ ID NO: 224990 - DNA, 25 bp, Homo sapien
tcaccgccacagggcgaggcaccag

SEQ ID NO: 224991 - DNA, 25 bp, Homo sapien
cagcagtcgttgctaagggctatta

SEQ ID NO: 224992 - DNA, 25 bp, Homo sapien
ggcagtttagaaggaagctttcacc

SEQ ID NO: 224993 - DNA, 25 bp, Homo sapien
tacaagttactaagctccaaggcac

SEQ ID NO: 224994 - DNA, 25 bp, Homo sapien
gctaacgatatgatgcaaatgaccc

SEQ ID NO: 224995 - DNA, 25 bp, Homo sapien
cgaaaataatgtctatacataagac

SEQ ID NO: 224996 - DNA, 25 bp, Homo sapien
tacataagactaactttttgcagtt

SEQ ID NO: 224997 - DNA, 25 bp, Homo sapien
tcaaaatatagaaacatacgacgaa

SEQ ID NO: 224998 - DNA, 25 bp, Homo sapien
tgcagtttcgttatattcacaattc

SEQ ID NO: 224999 - DNA, 25 bp, Homo sapien
taagatagtcgcgatttcgccctgc

SEQ ID NO: 225000 - DNA, 25 bp, Homo sapien
caaggtacattcgacccgactaggg

SEQ ID NO: 225001 - DNA, 25 bp, Homo sapien
tccaaacgttcgtggcaaatggtgc

SEQ ID NO: 225002 - DNA, 25 bp, Homo sapien
gaacgaaatgcgtatcctccaaacg

SEQ ID NO: 225003 - DNA, 25 bp, Homo sapien
aaattcaggtccccgttacgtgatg

SEQ ID NO: 225004 - DNA, 25 bp, Homo sapien
attcaggtccccgttacgtgatgcc

SEQ ID NO: 225005 - DNA, 25 bp, Homo sapien
gcgggggcgccacctgtaaattcag

SEQ ID NO: 225006 - DNA, 25 bp, Homo sapien
caggtccccgttacgtgatgccaag

SEQ ID NO: 225007 - DNA, 25 bp, Homo sapien
gtatctgccaccgacatgagagcgg

SEQ ID NO: 225008 - DNA, 25 bp, Homo sapien
tttcgccgcgccgacgcagtggtag

SEQ ID NO: 225009 - DNA, 25 bp, Homo sapien
ccatccttgggcgagtgcgctgtgc

SEQ ID NO: 225010 - DNA, 25 bp, Homo sapien
gagtgcacggaactgccatccttgg

SEQ ID NO: 225011 - DNA, 25 bp, Homo sapien
gctctggttcgccatccactgctgc

SEQ ID NO: 225012 - DNA, 25 bp, Homo sapien
agcttcagcgcctcgctctggttcg

SEQ ID NO: 225013 - DNA, 25 bp, Homo sapien
aagcccccggcggacatggtgagct

SEQ ID NO: 225014 - DNA, 25 bp, Homo sapien
agcttcagcgcgccctcggctgagt

SEQ ID NO: 225015 - DNA, 25 bp, Homo sapien
ttcaattcgtagtccatgccgggct

SEQ ID NO: 225016 - DNA, 25 bp, Homo sapien
tcttgaagcgaacctcgtagggcgt

SEQ ID NO: 225017 - DNA, 25 bp, Homo sapien
gatgcactggagtacacgttgcccg

SEQ ID NO: 225018 - DNA, 25 bp, Homo sapien
cgtgtcgcggaccatcttgggcttg

SEQ ID NO: 225019 - DNA, 25 bp, Homo sapien
cttccttagccgacagggccactgt

SEQ ID NO: 225020 - DNA, 25 bp, Homo sapien
gcaggcttgctggaaccatcaacgt

SEQ ID NO: 225021 - DNA, 25 bp, Homo sapien
tcagctggcgcgctgtctcgatcac

SEQ ID NO: 225022 - DNA, 25 bp, Homo sapien
gcgcttaggccgtagcgctccaggc

SEQ ID NO: 225023 - DNA, 25 bp, Homo sapien
aattcgatgcgatcagcgccctcgt

SEQ ID NO: 225024 - DNA, 25 bp, Homo sapien
catacgggttccgagaagtcccaga

SEQ ID NO: 225025 - DNA, 25 bp, Homo sapien
gtcgcacaggtagcaagattgtctc

SEQ ID NO: 225026 - DNA, 25 bp, Homo sapien
gattgtctccgggacgaggacacct

SEQ ID NO: 225027 - DNA, 25 bp, Homo sapien
ccgggctgtctccgcggcgccttct

SEQ ID NO: 225028 - DNA, 25 bp, Homo sapien
tggagggaacgcgagtctccaccgc

SEQ ID NO: 225029 - DNA, 25 bp, Homo sapien
ggctggagggaacgcgagtctccac

SEQ ID NO: 225030 - DNA, 25 bp, Homo sapien
ggcagcggacgggttcagccctctc

SEQ ID NO: 225031 - DNA, 25 bp, Homo sapien
agggaacgcgagtctccaccgccgg

SEQ ID NO: 225032 - DNA, 25 bp, Homo sapien
tggaagctcgaaaggggctgtctct

SEQ ID NO: 225033 - DNA, 25 bp, Homo sapien
ccctccccggagtggctggtgcgtg

SEQ ID NO: 225034 - DNA, 25 bp, Homo sapien
ctactgcggttgactcgtcgcgagg

SEQ ID NO: 225035 - DNA, 25 bp, Homo sapien
tggtggccgccgttgcctcttggcc

SEQ ID NO: 225036 - DNA, 25 bp, Homo sapien
ggcagccgagaaaggaccttctccc

SEQ ID NO: 225037 - DNA, 25 bp, Homo sapien
ctggcggcgactgggtttgcacccc

SEQ ID NO: 225038 - DNA, 25 bp, Homo sapien
ggtgcccgggtccaatcttgctgaa

SEQ ID NO: 225039 - DNA, 25 bp, Homo sapien
gcagcgtcggccgttctgctggcgg

SEQ ID NO: 225040 - DNA, 25 bp, Homo sapien
ttccaggacgcacgagagcagagga

SEQ ID NO: 225041 - DNA, 25 bp, Homo sapien
cggcgctcacgttggctgcagggcg

SEQ ID NO: 225042 - DNA, 25 bp, Homo sapien
aggagtgcacgcacgcaggctcccg

SEQ ID NO: 225043 - DNA, 25 bp, Homo sapien
cgtgctcacgctcgcccggaatgtg

SEQ ID NO: 225044 - DNA, 25 bp, Homo sapien
cggcttggccgcgcgggatgccgcc

SEQ ID NO: 225045 - DNA, 25 bp, Homo sapien
ggaggcgcgtctcggcgctcctgct

SEQ ID NO: 225046 - DNA, 25 bp, Homo sapien
gttccggaggcgcgtctcggcgctc

SEQ ID NO: 225047 - DNA, 25 bp, Homo sapien
ttggccgcgcgggatgccgcccggg

SEQ ID NO: 225048 - DNA, 25 bp, Homo sapien
ttctccctgaagaagagtcccgtgg

SEQ ID NO: 225049 - DNA, 25 bp, Homo sapien
gaggagcctcaacgtaaactgccag

SEQ ID NO: 225050 - DNA, 25 bp, Homo sapien
cgctccagcgagagaaaggcctttt

SEQ ID NO: 225051 - DNA, 25 bp, Homo sapien
ttactagtggtgagaaggtcgccag

SEQ ID NO: 225052 - DNA, 25 bp, Homo sapien
tgaaaacaaacgtctgcgttgggcc

SEQ ID NO: 225053 - DNA, 25 bp, Homo sapien
gccaggaaccccagaggcgcagttt

SEQ ID NO: 225054 - DNA, 25 bp, Homo sapien
tggcctttcgatggcccctgatcgc

SEQ ID NO: 225055 - DNA, 25 bp, Homo sapien
tgcgagatccgccttggagaagatg

SEQ ID NO: 225056 - DNA, 25 bp, Homo sapien
ccgggctctccgtgcaaaatcgggt

SEQ ID NO: 225057 - DNA, 25 bp, Homo sapien
gagagcgggcgtagtgtttagtgca

SEQ ID NO: 225058 - DNA, 25 bp, Homo sapien
gcgtagtgtttagtgcaggcacagt

SEQ ID NO: 225059 - DNA, 25 bp, Homo sapien
tccgtgcaaaatcgggtggaaggaa

SEQ ID NO: 225060 - DNA, 25 bp, Homo sapien
tgtgcactcttgagaaagaccccag

SEQ ID NO: 225061 - DNA, 25 bp, Homo sapien
gaaagcgagcctagccgaggcttct

SEQ ID NO: 225062 - DNA, 25 bp, Homo sapien
cagggactaagggtgtaattacagg

SEQ ID NO: 225063 - DNA, 25 bp, Homo sapien
aacaaaactaggcaggaagtgtact

SEQ ID NO: 225064 - DNA, 25 bp, Homo sapien
cagcattttcgagtaattaaatcca

SEQ ID NO: 225065 - DNA, 25 bp, Homo sapien
ttccttttgggacaagcagtctgtg

SEQ ID NO: 225066 - DNA, 25 bp, Homo sapien
cacaagcgcacctggtttgcaacgc

SEQ ID NO: 225067 - DNA, 25 bp, Homo sapien
ggtgacattttcagcgtgcacagct

SEQ ID NO: 225068 - DNA, 25 bp, Homo sapien
tcaaagcctagggatgcgcgggctc

SEQ ID NO: 225069 - DNA, 25 bp, Homo sapien
tatcagaacgggcagccaagaaacc

SEQ ID NO: 225070 - DNA, 25 bp, Homo sapien
tcagaacgggcagccaagaaaccta

SEQ ID NO: 225071 - DNA, 25 bp, Homo sapien
agattgtttatcagaacgggcagcc

SEQ ID NO: 225072 - DNA, 25 bp, Homo sapien
tgtttatcagaacgggcagccaaga

SEQ ID NO: 225073 - DNA, 25 bp, Homo sapien
cgcctaagcggcagacaattttcat

SEQ ID NO: 225074 - DNA, 25 bp, Homo sapien
taaatagtccttgcacagcagggtc

SEQ ID NO: 225075 - DNA, 25 bp, Homo sapien
cagggtctggactagtgaaaacagt

SEQ ID NO: 225076 - DNA, 25 bp, Homo sapien
cagacatcaggttagcaaaaggtaa

SEQ ID NO: 225077 - DNA, 25 bp, Homo sapien
gccagctttaagcagccctgacagt

SEQ ID NO: 225078 - DNA, 25 bp, Homo sapien
cctgtgcgcagaaggaactgataaa

SEQ ID NO: 225079 - DNA, 25 bp, Homo sapien
aatgctggaagcctgccatgtgcaa

SEQ ID NO: 225080 - DNA, 25 bp, Homo sapien
tgataaatgccgttgcagttgccat

SEQ ID NO: 225081 - DNA, 25 bp, Homo sapien
tgagaccgcaggaaatctgggtctt

SEQ ID NO: 225082 - DNA, 25 bp, Homo sapien
tggaaccgcggcctttagaatgaac

SEQ ID NO: 225083 - DNA, 25 bp, Homo sapien
cctttagaatgaacatgacatcacc

SEQ ID NO: 225084 - DNA, 25 bp, Homo sapien
tcttgtggtgtagtccccttggaac

SEQ ID NO: 225085 - DNA, 25 bp, Homo sapien
tgtcgtggttctggcagtaaaatct

SEQ ID NO: 225086 - DNA, 25 bp, Homo sapien
gcagcactgtcgtggttctggcagt

SEQ ID NO: 225087 - DNA, 25 bp, Homo sapien
cactgtcgtggttctggcagtaaaa

SEQ ID NO: 225088 - DNA, 25 bp, Homo sapien
ggttctggcagtaaaatctccttcc

SEQ ID NO: 225089 - DNA, 25 bp, Homo sapien
tagtatatcatgcagtagagttggg

SEQ ID NO: 225090 - DNA, 25 bp, Homo sapien
tgtcccagcaaaatcttggagcatt

SEQ ID NO: 225091 - DNA, 25 bp, Homo sapien
tctgggttgaaatcgtaacttggtc

SEQ ID NO: 225092 - DNA, 25 bp, Homo sapien
tatgacgtaattttattgtcaccaa

SEQ ID NO: 225093 - DNA, 25 bp, Homo sapien
tgactccagcaagcagggtctgagc

SEQ ID NO: 225094 - DNA, 25 bp, Homo sapien
gcagaggactgggaagcaaggaaga

SEQ ID NO: 225095 - DNA, 25 bp, Homo sapien
tctgagctccataagtggaggtgtc

SEQ ID NO: 225096 - DNA, 25 bp, Homo sapien
gaggtgtcagggaagcatgcagagg

SEQ ID NO: 225097 - DNA, 25 bp, Homo sapien
cagctctagaggacatgggtcaaaa

SEQ ID NO: 225098 - DNA, 25 bp, Homo sapien
tattccatgcgtgcctgtaacacag

SEQ ID NO: 225099 - DNA, 25 bp, Homo sapien
tacaaacaattctgcaccgagcatg

SEQ ID NO: 225100 - DNA, 25 bp, Homo sapien
tctccaggcattgatgattcagggt

SEQ ID NO: 225101 - DNA, 25 bp, Homo sapien
tatggatttctttcttctgggccat

SEQ ID NO: 225102 - DNA, 25 bp, Homo sapien
ctgggcccaggtgggtatggatttc

SEQ ID NO: 225103 - DNA, 25 bp, Homo sapien
gggtatggatttctttcttctgggc

SEQ ID NO: 225104 - DNA, 25 bp, Homo sapien
gcccaggtgggtatggatttctttc

SEQ ID NO: 225105 - DNA, 25 bp, Homo sapien
gaaacgtctctggatagaaacactg

SEQ ID NO: 225106 - DNA, 25 bp, Homo sapien
ttgctcagactccatagaaggccag

SEQ ID NO: 225107 - DNA, 25 bp, Homo sapien
tatgtacgtgccctcacagacgtga

SEQ ID NO: 225108 - DNA, 25 bp, Homo sapien
ttctgagggcaaagcgctctgggac

SEQ ID NO: 225109 - DNA, 25 bp, Homo sapien
ggagaatcaagaagcatggcctcag

SEQ ID NO: 225110 - DNA, 25 bp, Homo sapien
gggagaatcaagaagcatggcctca

SEQ ID NO: 225111 - DNA, 25 bp, Homo sapien
gagaatcaagaagcatggcctcagc

SEQ ID NO: 225112 - DNA, 25 bp, Homo sapien
agaatcaagaagcatggcctcagca

SEQ ID NO: 225113 - DNA, 25 bp, Homo sapien
caaaatgtcaagtagggatgcagtc

SEQ ID NO: 225114 - DNA, 25 bp, Homo sapien
tctgacggccgcagatgtttcttgg

SEQ ID NO: 225115 - DNA, 25 bp, Homo sapien
catggaaggtgctcattggtgaaac

SEQ ID NO: 225116 - DNA, 25 bp, Homo sapien
gactatattagatccacagggctgc

SEQ ID NO: 225117 - DNA, 25 bp, Homo sapien
ttagggctgcaacatatcttctggg

SEQ ID NO: 225118 - DNA, 25 bp, Homo sapien
tgtaagctaccccaccaaggagtta

SEQ ID NO: 225119 - DNA, 25 bp, Homo sapien
cctgttcacggagggaggagacaca

SEQ ID NO: 225120 - DNA, 25 bp, Homo sapien
tagcaagtggctacaagggtcggcc

SEQ ID NO: 225121 - DNA, 25 bp, Homo sapien
ctaagcatgaccagaagagcctcgg

SEQ ID NO: 225122 - DNA, 25 bp, Homo sapien
ggggaaatgcttcccttgctttagc

SEQ ID NO: 225123 - DNA, 25 bp, Homo sapien
gctgagctttcagccaggggaaggg

SEQ ID NO: 225124 - DNA, 25 bp, Homo sapien
gagcctcggggtcagctgagctttc

SEQ ID NO: 225125 - DNA, 25 bp, Homo sapien
caaccctccccgccatggcagagcc

SEQ ID NO: 225126 - DNA, 25 bp, Homo sapien
aaccctccccgccatggcagagcca

SEQ ID NO: 225127 - DNA, 25 bp, Homo sapien
ccaaccctccccgccatggcagagc

SEQ ID NO: 225128 - DNA, 25 bp, Homo sapien
tctattttgatccagtaactatctc

SEQ ID NO: 225129 - DNA, 25 bp, Homo sapien
ttattgtgtaatcaatgcacatgaa

SEQ ID NO: 225130 - DNA, 25 bp, Homo sapien
gatccagtaactatctcttcataac

SEQ ID NO: 225131 - DNA, 25 bp, Homo sapien
tgtaatcaatgcacatgaatatttt

SEQ ID NO: 225132 - DNA, 25 bp, Homo sapien
gccagtgttctatcacagcctttac

SEQ ID NO: 225133 - DNA, 25 bp, Homo sapien
tatgttggctaaatacaggacaaat

SEQ ID NO: 225134 - DNA, 25 bp, Homo sapien
catgccagtgttctatcacagcctt

SEQ ID NO: 225135 - DNA, 25 bp, Homo sapien
ttatgttggctaaatacaggacaaa

SEQ ID NO: 225136 - DNA, 25 bp, Homo sapien
tcttttaatagagatcctgtgtttc

SEQ ID NO: 225137 - DNA, 25 bp, Homo sapien
cgtgtggaagtgacgtttcgtgttc

SEQ ID NO: 225138 - DNA, 25 bp, Homo sapien
aaattgcaggtcgtgtggaagtgac

SEQ ID NO: 225139 - DNA, 25 bp, Homo sapien
tctccattctagaaattgcaggtcg

SEQ ID NO: 225140 - DNA, 25 bp, Homo sapien
gaagtctacttttagggcaatccca

SEQ ID NO: 225141 - DNA, 25 bp, Homo sapien
ttctcccaggattgcgttctcacag

SEQ ID NO: 225142 - DNA, 25 bp, Homo sapien
cacttaacgaagtgcagccagtctg

SEQ ID NO: 225143 - DNA, 25 bp, Homo sapien
ttgagagactcatttccagcccctg

SEQ ID NO: 225144 - DNA, 25 bp, Homo sapien
caccagatgagtcaattcacgggaa

SEQ ID NO: 225145 - DNA, 25 bp, Homo sapien
aaaggcgctagtcaagtcccaggct

SEQ ID NO: 225146 - DNA, 25 bp, Homo sapien
gaggatgaagatgccacaattcacc

SEQ ID NO: 225147 - DNA, 25 bp, Homo sapien
caattcacgggaaaggcgctagtca

SEQ ID NO: 225148 - DNA, 25 bp, Homo sapien
aaaagaagtatggaaatacattctt

SEQ ID NO: 225149 - DNA, 25 bp, Homo sapien
tcttgaaaagaaagctaaccactct

SEQ ID NO: 225150 - DNA, 25 bp, Homo sapien
cattcttgaaaagaaagctaaccac

SEQ ID NO: 225151 - DNA, 25 bp, Homo sapien
aaagaagtatggaaatacattcttg

SEQ ID NO: 225152 - DNA, 25 bp, Homo sapien
ggttatcccattatacttgtccaca

SEQ ID NO: 225153 - DNA, 25 bp, Homo sapien
cacaaagcaggaggccaaacgtacc

SEQ ID NO: 225154 - DNA, 25 bp, Homo sapien
aaatcctgtgggttatcccattata

SEQ ID NO: 225155 - DNA, 25 bp, Homo sapien
cccattatacttgtccacaaagcag

SEQ ID NO: 225156 - DNA, 25 bp, Homo sapien
caggtggcattttggttatatgagt

SEQ ID NO: 225157 - DNA, 25 bp, Homo sapien
tcatggataaaagccacggttttcg

SEQ ID NO: 225158 - DNA, 25 bp, Homo sapien
agcggcccggctcctaattacttgg

SEQ ID NO: 225159 - DNA, 25 bp, Homo sapien
tacctgtgtctagaggactaacgtg

SEQ ID NO: 225160 - DNA, 25 bp, Homo sapien
ttgagtcctaatgggcaaaaacgcc

SEQ ID NO: 225161 - DNA, 25 bp, Homo sapien
gaacagcgtgcggtctccatggtgc

SEQ ID NO: 225162 - DNA, 25 bp, Homo sapien
cacccagcgacgacgaggttgtcat

SEQ ID NO: 225163 - DNA, 25 bp, Homo sapien
gggatagcgagacacccagcgacga

SEQ ID NO: 225164 - DNA, 25 bp, Homo sapien
ccgggtcatccgagtcgggtcacgt

SEQ ID NO: 225165 - DNA, 25 bp, Homo sapien
tcaggagctggacgattctggtaac

SEQ ID NO: 225166 - DNA, 25 bp, Homo sapien
ggcgagacctaaaattccctgggca

SEQ ID NO: 225167 - DNA, 25 bp, Homo sapien
catagccggcatatctcatggtcag

SEQ ID NO: 225168 - DNA, 25 bp, Homo sapien
gcacctgggtgtgagcacttaatca

SEQ ID NO: 225169 - DNA, 25 bp, Homo sapien
cagcttcattaaataggcaactatg

SEQ ID NO: 225170 - DNA, 25 bp, Homo sapien
aatggagaccatgaccagagtttcc

SEQ ID NO: 225171 - DNA, 25 bp, Homo sapien
ccttcatgtgttagatattggcaac

SEQ ID NO: 225172 - DNA, 25 bp, Homo sapien
ccagatgatacacgttcttttcagc

SEQ ID NO: 225173 - DNA, 25 bp, Homo sapien
gagatccattgagtccagaagccag

SEQ ID NO: 225174 - DNA, 25 bp, Homo sapien
cagatcagcaaatggaggaacctcg

SEQ ID NO: 225175 - DNA, 25 bp, Homo sapien
aaagatctccatcggttgcccaagg

SEQ ID NO: 225176 - DNA, 25 bp, Homo sapien
tagactccactcatgaacgcagaat

SEQ ID NO: 225177 - DNA, 25 bp, Homo sapien
ctgttgcgcagctatcagcgggtca

SEQ ID NO: 225178 - DNA, 25 bp, Homo sapien
aagagtcaaggccaaaattgcccag

SEQ ID NO: 225179 - DNA, 25 bp, Homo sapien
tgcaagcagccaacatcctgtaggt

SEQ ID NO: 225180 - DNA, 25 bp, Homo sapien
tgaaggcagaaccacagtaaagtcc

SEQ ID NO: 225181 - DNA, 25 bp, Homo sapien
ggcacttgtgttgtccctactccct

SEQ ID NO: 225182 - DNA, 25 bp, Homo sapien
cacttgtgttgtccctactccctta

SEQ ID NO: 225183 - DNA, 25 bp, Homo sapien
tgtgttgtccctactcccttatatg

SEQ ID NO: 225184 - DNA, 25 bp, Homo sapien
tgttgtccctactcccttatatgcc

SEQ ID NO: 225185 - DNA, 25 bp, Homo sapien
gacgactgcctagactctgctggaa

SEQ ID NO: 225186 - DNA, 25 bp, Homo sapien
taaacatttgccagcctctaggtcc

SEQ ID NO: 225187 - DNA, 25 bp, Homo sapien
tgtaagctcacctagaatgaccctg

SEQ ID NO: 225188 - DNA, 25 bp, Homo sapien
gacttggctgcctcttacacgtggt

SEQ ID NO: 225189 - DNA, 25 bp, Homo sapien
ctacttatcctgctgcttggagctc

SEQ ID NO: 225190 - DNA, 25 bp, Homo sapien
cgacattgaacatggggaccagcag

SEQ ID NO: 225191 - DNA, 25 bp, Homo sapien
acttccgacattgaacatggggacc

SEQ ID NO: 225192 - DNA, 25 bp, Homo sapien
tccgacattgaacatggggaccagc

SEQ ID NO: 225193 - DNA, 25 bp, Homo sapien
tcacttccgacattgaacatgggga

SEQ ID NO: 225194 - DNA, 25 bp, Homo sapien
gccgatggcgaaccagaggtagagc

SEQ ID NO: 225195 - DNA, 25 bp, Homo sapien
agagcatgaggatgacgaacatttc

SEQ ID NO: 225196 - DNA, 25 bp, Homo sapien
acctggtggcgggtctgcccgcgga

SEQ ID NO: 225197 - DNA, 25 bp, Homo sapien
tctgcccgcggaggatcaacagcag

SEQ ID NO: 225198 - DNA, 25 bp, Homo sapien
ttttgtagcaacctcagcgctgcag

SEQ ID NO: 225199 - DNA, 25 bp, Homo sapien
gggaaacaccagagccgctttacac

SEQ ID NO: 225200 - DNA, 25 bp, Homo sapien
ggagattaatgagattgacgctaca

SEQ ID NO: 225201 - DNA, 25 bp, Homo sapien
gcataactgcgatctaggcaggctt

SEQ ID NO: 225202 - DNA, 25 bp, Homo sapien
tccatgtcggcacagattagcttgg

SEQ ID NO: 225203 - DNA, 25 bp, Homo sapien
ccatggtgctctttggcgtgaggaa

SEQ ID NO: 225204 - DNA, 25 bp, Homo sapien
tggaggatcccaggtccatggtgct

SEQ ID NO: 225205 - DNA, 25 bp, Homo sapien
tgtgccatcccctgacccacttctt

SEQ ID NO: 225206 - DNA, 25 bp, Homo sapien
tggccctcaagctgggatgtgagaa

SEQ ID NO: 225207 - DNA, 25 bp, Homo sapien
gcaaaggtggccctcaagctgggat

SEQ ID NO: 225208 - DNA, 25 bp, Homo sapien
cctcaagctgggatgtgagaacatc

SEQ ID NO: 225209 - DNA, 25 bp, Homo sapien
caagctgggatgtgagaacatcaga

SEQ ID NO: 225210 - DNA, 25 bp, Homo sapien
gagagggtgctaccaactgttcgga

SEQ ID NO: 225211 - DNA, 25 bp, Homo sapien
taagaagtcttgctcgcctgtttcc

SEQ ID NO: 225212 - DNA, 25 bp, Homo sapien
tatggacaggcctcaagcccagatt

SEQ ID NO: 225213 - DNA, 25 bp, Homo sapien
caggcttgttggctctcttcatccc

SEQ ID NO: 225214 - DNA, 25 bp, Homo sapien
gatggaaaggacagcggagatgtag

SEQ ID NO: 225215 - DNA, 25 bp, Homo sapien
aggagatggaaaggacagcggagat

SEQ ID NO: 225216 - DNA, 25 bp, Homo sapien
cggagatgtaggccacgccggccac

SEQ ID NO: 225217 - DNA, 25 bp, Homo sapien
aaaggacagcggagatgtaggccac

SEQ ID NO: 225218 - DNA, 25 bp, Homo sapien
caaggacgtaattgcccagggcgtt

SEQ ID NO: 225219 - DNA, 25 bp, Homo sapien
tctggcgcacactcggcagaagtgg

SEQ ID NO: 225220 - DNA, 25 bp, Homo sapien
gaagttgcgcatgttcctgctgccg

SEQ ID NO: 225221 - DNA, 25 bp, Homo sapien
gaagaaacagtgatggtcgtgcctc

SEQ ID NO: 225222 - DNA, 25 bp, Homo sapien
gaatacctgtgtcagcgggtcctgg

SEQ ID NO: 225223 - DNA, 25 bp, Homo sapien
gaaacaatcgatacactcacactcg

SEQ ID NO: 225224 - DNA, 25 bp, Homo sapien
tggccagcacatctctccaacgctg

SEQ ID NO: 225225 - DNA, 25 bp, Homo sapien
tcgctctcgggcaccgggtgaggtg

SEQ ID NO: 225226 - DNA, 25 bp, Homo sapien
gaagccaccgagaaataggattccg

SEQ ID NO: 225227 - DNA, 25 bp, Homo sapien
cagccggaggcgcgagaaaagttct

SEQ ID NO: 225228 - DNA, 25 bp, Homo sapien
ttccgtgcgcccgagagaacttttc

SEQ ID NO: 225229 - DNA, 25 bp, Homo sapien
gggctaaggaatcggccagccggag

SEQ ID NO: 225230 - DNA, 25 bp, Homo sapien
ccgcggagagcgtgggcctctccct

SEQ ID NO: 225231 - DNA, 25 bp, Homo sapien
gaatcccctttgcaggtcccagcgc

SEQ ID NO: 225232 - DNA, 25 bp, Homo sapien
cagcgctgggaaggcggcgaaggac

SEQ ID NO: 225233 - DNA, 25 bp, Homo sapien
gggctccggcgaagcaagtgccttc

SEQ ID NO: 225234 - DNA, 25 bp, Homo sapien
gagcagccagatgcgccgcagcgct

SEQ ID NO: 225235 - DNA, 25 bp, Homo sapien
agtgcacgcctgagggtggtcgccg

SEQ ID NO: 225236 - DNA, 25 bp, Homo sapien
ctctggtcgccgacaagaggagccc

SEQ ID NO: 225237 - DNA, 25 bp, Homo sapien
acttgggcgccagcgagtaagggcc

SEQ ID NO: 225238 - DNA, 25 bp, Homo sapien
tcgcttcgggaactgggcaagtagc

SEQ ID NO: 225239 - DNA, 25 bp, Homo sapien
gctgcaaagttgtggactcggcccg

SEQ ID NO: 225240 - DNA, 25 bp, Homo sapien
tcgtctgtaaattccagtgtgatct

SEQ ID NO: 225241 - DNA, 25 bp, Homo sapien
tcactactgtgagatctcagattcc

SEQ ID NO: 225242 - DNA, 25 bp, Homo sapien
tgtgagatctcagattccagtttct

SEQ ID NO: 225243 - DNA, 25 bp, Homo sapien
ttcgtctgtaaattccagtgtgatc

SEQ ID NO: 225244 - DNA, 25 bp, Homo sapien
cagagcttgaacttggagcttcttc

SEQ ID NO: 225245 - DNA, 25 bp, Homo sapien
ggttctagcattaatgctcctgcac

SEQ ID NO: 225246 - DNA, 25 bp, Homo sapien
gaaggaaagacaatgggagtttatc

SEQ ID NO: 225247 - DNA, 25 bp, Homo sapien
tttatccagacacagagcttgaact

SEQ ID NO: 225248 - DNA, 25 bp, Homo sapien
tcacgttctcagtttgtggatgaca

SEQ ID NO: 225249 - DNA, 25 bp, Homo sapien
taccgtagtgcctggtacacgggaa

SEQ ID NO: 225250 - DNA, 25 bp, Homo sapien
cgttctcagtttgtggatgacaaca

SEQ ID NO: 225251 - DNA, 25 bp, Homo sapien
gggtgaggatgaatgaagtcctacc

SEQ ID NO: 225252 - DNA, 25 bp, Homo sapien
cagtgtggctgccaccaggagggga

SEQ ID NO: 225253 - DNA, 25 bp, Homo sapien
gtggctgccaccaggaggggaagca

SEQ ID NO: 225254 - DNA, 25 bp, Homo sapien
agccagtgtggctgccaccaggagg

SEQ ID NO: 225255 - DNA, 25 bp, Homo sapien
gcaggggacagggagcgggcggcag

SEQ ID NO: 225256 - DNA, 25 bp, Homo sapien
gaaatatcaggtctactgccgtcaa

SEQ ID NO: 225257 - DNA, 25 bp, Homo sapien
ggcatgagaatcagagaatcacctg

SEQ ID NO: 225258 - DNA, 25 bp, Homo sapien
caaggccggtatgatcgcttatgcc

SEQ ID NO: 225259 - DNA, 25 bp, Homo sapien
attgagactctttggcacttacgac

SEQ ID NO: 225260 - DNA, 25 bp, Homo sapien
aagggaattccagaaggactctctt

SEQ ID NO: 225261 - DNA, 25 bp, Homo sapien
ctaagggaattccagaaggactctc

SEQ ID NO: 225262 - DNA, 25 bp, Homo sapien
taagggaattccagaaggactctct

SEQ ID NO: 225263 - DNA, 25 bp, Homo sapien
agggaattccagaaggactctcttc

SEQ ID NO: 225264 - DNA, 25 bp, Homo sapien
ttcttctgtcaggatgcagccgccc

SEQ ID NO: 225265 - DNA, 25 bp, Homo sapien
gccaggaggtactagcccactcaac

SEQ ID NO: 225266 - DNA, 25 bp, Homo sapien
agccgcccggcagccatcttaagac

SEQ ID NO: 225267 - DNA, 25 bp, Homo sapien
gaggtactagcccactcaacatctt

SEQ ID NO: 225268 - DNA, 25 bp, Homo sapien
ccaatgttgagttttaacagcccaa

SEQ ID NO: 225269 - DNA, 25 bp, Homo sapien
ggtggtaaaagtacaaagcaatgca

SEQ ID NO: 225270 - DNA, 25 bp, Homo sapien
ttaacagcccaacatgaaagtatat

SEQ ID NO: 225271 - DNA, 25 bp, Homo sapien
taatgtacactcaaaatacagacca

SEQ ID NO: 225272 - DNA, 25 bp, Homo sapien
ttccgaggggctgagccgaggcaaa

SEQ ID NO: 225273 - DNA, 25 bp, Homo sapien
ccctgatctgttcccagagacagag

SEQ ID NO: 225274 - DNA, 25 bp, Homo sapien
gaacccagaccatcgcagccctgat

SEQ ID NO: 225275 - DNA, 25 bp, Homo sapien
caggctccacactccatggaggggc

SEQ ID NO: 225276 - DNA, 25 bp, Homo sapien
tggctggcctggatttggagctggg

SEQ ID NO: 225277 - DNA, 25 bp, Homo sapien
actggctggcctggatttggagctg

SEQ ID NO: 225278 - DNA, 25 bp, Homo sapien
ctggcctggatttggagctggggca

SEQ ID NO: 225279 - DNA, 25 bp, Homo sapien
cactggctggcctggatttggagct

SEQ ID NO: 225280 - DNA, 25 bp, Homo sapien
gcagatagaaaaccaagtgggaaac

SEQ ID NO: 225281 - DNA, 25 bp, Homo sapien
cagatagaaaaccaagtgggaaacg

SEQ ID NO: 225282 - DNA, 25 bp, Homo sapien
taggctggctaagagcaaggtagca

SEQ ID NO: 225283 - DNA, 25 bp, Homo sapien
cctccttcctgccccctccagactc

SEQ ID NO: 225284 - DNA, 25 bp, Homo sapien
ctatggctgcttcacctccttctcc

SEQ ID NO: 225285 - DNA, 25 bp, Homo sapien
ttctcctccttcctgccccctccag

SEQ ID NO: 225286 - DNA, 25 bp, Homo sapien
ctcctccttcctgccccctccagac

SEQ ID NO: 225287 - DNA, 25 bp, Homo sapien
gattttgccatgataggctttgagc

SEQ ID NO: 225288 - DNA, 25 bp, Homo sapien
gccatgataggctttgagcaaagcc

SEQ ID NO: 225289 - DNA, 25 bp, Homo sapien
agattttgccatgataggctttgag

SEQ ID NO: 225290 - DNA, 25 bp, Homo sapien
ctctggctttcaggcagacgcccag

SEQ ID NO: 225291 - DNA, 25 bp, Homo sapien
cttcgatgatgcaccaccttggctt

SEQ ID NO: 225292 - DNA, 25 bp, Homo sapien
ggccactttggcttcgatgatgcac

SEQ ID NO: 225293 - DNA, 25 bp, Homo sapien
ctggctttcaggcagacgcccaggg

SEQ ID NO: 225294 - DNA, 25 bp, Homo sapien
agaaagccatgggttggggtccagg

SEQ ID NO: 225295 - DNA, 25 bp, Homo sapien
cagaaagccatgggttggggtccag

SEQ ID NO: 225296 - DNA, 25 bp, Homo sapien
tcaggggcataggcagaaagccatg

SEQ ID NO: 225297 - DNA, 25 bp, Homo sapien
aggggcataggcagaaagccatggg

SEQ ID NO: 225298 - DNA, 25 bp, Homo sapien
gaaacttcctggcaaggagaggcat

SEQ ID NO: 225299 - DNA, 25 bp, Homo sapien
gacaaggaaaagaaacttcctggca

SEQ ID NO: 225300 - DNA, 25 bp, Homo sapien
aaaagaaacttcctggcaaggagag

SEQ ID NO: 225301 - DNA, 25 bp, Homo sapien
aagaaacttcctggcaaggagaggc

SEQ ID NO: 225302 - DNA, 25 bp, Homo sapien
tgctgagagcccagctggacccagc

SEQ ID NO: 225303 - DNA, 25 bp, Homo sapien
gtgctgagagcccagctggacccag

SEQ ID NO: 225304 - DNA, 25 bp, Homo sapien
gcatcagagattgctgaatgcagag

SEQ ID NO: 225305 - DNA, 25 bp, Homo sapien
tgctgaatgcagagatgattgtcat

SEQ ID NO: 225306 - DNA, 25 bp, Homo sapien
gattgtcattgagccccgtctgcat

SEQ ID NO: 225307 - DNA, 25 bp, Homo sapien
tggatggtgactgcatcagagattg

SEQ ID NO: 225308 - DNA, 25 bp, Homo sapien
gctacaacagatacaggccaacaga

SEQ ID NO: 225309 - DNA, 25 bp, Homo sapien
cctgggattccaccaagaaggctaa

SEQ ID NO: 225310 - DNA, 25 bp, Homo sapien
caaaggaaaccgactctgtcagggc

SEQ ID NO: 225311 - DNA, 25 bp, Homo sapien
tggactctaggatactgagacccag

SEQ ID NO: 225312 - DNA, 25 bp, Homo sapien
atggcctgcactacggccccgtaga

SEQ ID NO: 225313 - DNA, 25 bp, Homo sapien
tacggccccgtagagttggctccag

SEQ ID NO: 225314 - DNA, 25 bp, Homo sapien
ccagacacttctccagcatgtagag

SEQ ID NO: 225315 - DNA, 25 bp, Homo sapien
cgccatcccagcctcgactcatggc

SEQ ID NO: 225316 - DNA, 25 bp, Homo sapien
tgaggacaggtcttccacattggtc

SEQ ID NO: 225317 - DNA, 25 bp, Homo sapien
gtgaggacaggtcttccacattggt

SEQ ID NO: 225318 - DNA, 25 bp, Homo sapien
ctgcagcatcaatcacgagcatcac

SEQ ID NO: 225319 - DNA, 25 bp, Homo sapien
aactcaggcgaggagagacagtcct

SEQ ID NO: 225320 - DNA, 25 bp, Homo sapien
aggaactcaggcgaggagagacagt

SEQ ID NO: 225321 - DNA, 25 bp, Homo sapien
ggctggagaactggcggcagttgta

SEQ ID NO: 225322 - DNA, 25 bp, Homo sapien
aactggcggcagttgtactggaaga

SEQ ID NO: 225323 - DNA, 25 bp, Homo sapien
ctgcggctcactgcccgccagctct

SEQ ID NO: 225324 - DNA, 25 bp, Homo sapien
agctctgccggatcagctcgggctc

SEQ ID NO: 225325 - DNA, 25 bp, Homo sapien
ctggcaaacaggacggtgccgtgct

SEQ ID NO: 225326 - DNA, 25 bp, Homo sapien
aaacaggacggtgccgtgctccagc

SEQ ID NO: 225327 - DNA, 25 bp, Homo sapien
ggccagtcgtaggtggagacacccc

SEQ ID NO: 225328 - DNA, 25 bp, Homo sapien
ctgggctgggcgctttaaagccgcc

SEQ ID NO: 225329 - DNA, 25 bp, Homo sapien
tccctggcgcgggagagaaaaggcg

SEQ ID NO: 225330 - DNA, 25 bp, Homo sapien
tccgccagccgctatggtggcctgg

SEQ ID NO: 225331 - DNA, 25 bp, Homo sapien
tgggaccaatatccagtctccgtgg

SEQ ID NO: 225332 - DNA, 25 bp, Homo sapien
tgtgggccacctgctttgctaagag

SEQ ID NO: 225333 - DNA, 25 bp, Homo sapien
tattcatagaagcaccctgacagcc

SEQ ID NO: 225334 - DNA, 25 bp, Homo sapien
tcatggccggatggtccagtactgc

SEQ ID NO: 225335 - DNA, 25 bp, Homo sapien
tcaaaagtcccatgagtccagccac

SEQ ID NO: 225336 - DNA, 25 bp, Homo sapien
gggaccaaccatcccgtaagccaga

SEQ ID NO: 225337 - DNA, 25 bp, Homo sapien
cttagtcctgccattggactttggg

SEQ ID NO: 225338 - DNA, 25 bp, Homo sapien
accatcccgtaagccagagggtgga

SEQ ID NO: 225339 - DNA, 25 bp, Homo sapien
ggagagcttagtagatgctgactca

SEQ ID NO: 225340 - DNA, 25 bp, Homo sapien
tttcacggccttgtctgtctgagtc

SEQ ID NO: 225341 - DNA, 25 bp, Homo sapien
caatgacaatcatggaaagggctct

SEQ ID NO: 225342 - DNA, 25 bp, Homo sapien
gaaccagtaggaggcagttggcacc

SEQ ID NO: 225343 - DNA, 25 bp, Homo sapien
aggctcaggattcccgccacatgta

SEQ ID NO: 225344 - DNA, 25 bp, Homo sapien
cgcaggagggtgtcccacagaatgc

SEQ ID NO: 225345 - DNA, 25 bp, Homo sapien
acagagccgcaggagggtgtcccac

SEQ ID NO: 225346 - DNA, 25 bp, Homo sapien
tcgccaggggccatgaggccaagcc

SEQ ID NO: 225347 - DNA, 25 bp, Homo sapien
ggagtgtccagccgagcaggacctg

SEQ ID NO: 225348 - DNA, 25 bp, Homo sapien
tggaagtagaggacccggcccatca

SEQ ID NO: 225349 - DNA, 25 bp, Homo sapien
tggagtgtccagccgagcaggacct

SEQ ID NO: 225350 - DNA, 25 bp, Homo sapien
tagaggacccggcccatcaggaaaa

SEQ ID NO: 225351 - DNA, 25 bp, Homo sapien
aagacaaggagcgggcagagattcc

SEQ ID NO: 225352 - DNA, 25 bp, Homo sapien
cagaagacaaggagcgggcagagat

SEQ ID NO: 225353 - DNA, 25 bp, Homo sapien
aggagcgggcagagattccaggctc

SEQ ID NO: 225354 - DNA, 25 bp, Homo sapien
ccaagcagcacagcccagtcagaag

SEQ ID NO: 225355 - DNA, 25 bp, Homo sapien
tgtacacagcatggggctaaaagtg

SEQ ID NO: 225356 - DNA, 25 bp, Homo sapien
aaagatgggcagctctgtacacagc

SEQ ID NO: 225357 - DNA, 25 bp, Homo sapien
gagtcagattgcacgggtttgagcc

SEQ ID NO: 225358 - DNA, 25 bp, Homo sapien
gattgcacgggtttgagcctcagct

SEQ ID NO: 225359 - DNA, 25 bp, Homo sapien
ggtggtaaacgcaaaggatggccca

SEQ ID NO: 225360 - DNA, 25 bp, Homo sapien
aaatgggggtcataatagccaacgc

SEQ ID NO: 225361 - DNA, 25 bp, Homo sapien
taaacgcaaaggatggcccatcagc

SEQ ID NO: 225362 - DNA, 25 bp, Homo sapien
caacgctctagtgttgttgggagga

SEQ ID NO: 225363 - DNA, 25 bp, Homo sapien
tccctgagaggaggtagagggcgat

SEQ ID NO: 225364 - DNA, 25 bp, Homo sapien
tagagggcgatgctcaacagattca

SEQ ID NO: 225365 - DNA, 25 bp, Homo sapien
cctgagaggaggtagagggcgatgc

SEQ ID NO: 225366 - DNA, 25 bp, Homo sapien
aggtagagggcgatgctcaacagat

SEQ ID NO: 225367 - DNA, 25 bp, Homo sapien
atgggcagatgagaacgcagccgct

SEQ ID NO: 225368 - DNA, 25 bp, Homo sapien
gagccgggaatgtttaggcactcac

SEQ ID NO: 225369 - DNA, 25 bp, Homo sapien
ctccacgggcaagtgctccagggcc

SEQ ID NO: 225370 - DNA, 25 bp, Homo sapien
cagatgagaacgcagccgctctcca

SEQ ID NO: 225371 - DNA, 25 bp, Homo sapien
tgccaagcagatagactcggaaatc

SEQ ID NO: 225372 - DNA, 25 bp, Homo sapien
cgggttgccaagcagatagactcgg

SEQ ID NO: 225373 - DNA, 25 bp, Homo sapien
gaaatctgtgtcattgacccctgag

SEQ ID NO: 225374 - DNA, 25 bp, Homo sapien
cagatagactcggaaatctgtgtca

SEQ ID NO: 225375 - DNA, 25 bp, Homo sapien
tgtccttgggtttgaggccactgtt

SEQ ID NO: 225376 - DNA, 25 bp, Homo sapien
gtgccagggtttggacgtgaactca

SEQ ID NO: 225377 - DNA, 25 bp, Homo sapien
ttgtccttgggtttgaggccactgt

SEQ ID NO: 225378 - DNA, 25 bp, Homo sapien
tggacgtgaactcattgtccttggg

SEQ ID NO: 225379 - DNA, 25 bp, Homo sapien
ccggatcatgaccatgtgggattcc

SEQ ID NO: 225380 - DNA, 25 bp, Homo sapien
aactgggctgtagcacatccaggct

SEQ ID NO: 225381 - DNA, 25 bp, Homo sapien
ggatcatgaccatgtgggattccag

SEQ ID NO: 225382 - DNA, 25 bp, Homo sapien
agatctcaggaaaactgggctgtag

SEQ ID NO: 225383 - DNA, 25 bp, Homo sapien
aaaatgcaggagaaaagcctttgtc

SEQ ID NO: 225384 - DNA, 25 bp, Homo sapien
aatgcaggagaaaagcctttgtcat

SEQ ID NO: 225385 - DNA, 25 bp, Homo sapien
aaatgcaggagaaaagcctttgtca

SEQ ID NO: 225386 - DNA, 25 bp, Homo sapien
aaaaaatgcaggagaaaagcctttg

SEQ ID NO: 225387 - DNA, 25 bp, Homo sapien
acttgggattgatatggtcctccac

SEQ ID NO: 225388 - DNA, 25 bp, Homo sapien
gattgatatggtcctccacattcca

SEQ ID NO: 225389 - DNA, 25 bp, Homo sapien
gcaagtaacttccaactgctcccag

SEQ ID NO: 225390 - DNA, 25 bp, Homo sapien
ggtttctttcaggtatggggtgcaa

SEQ ID NO: 225391 - DNA, 25 bp, Homo sapien
ccaaatggatgaagcgaattcgact

SEQ ID NO: 225392 - DNA, 25 bp, Homo sapien
tgtttacgacctcaatccgccagaa

SEQ ID NO: 225393 - DNA, 25 bp, Homo sapien
ggcagaacctttcccgaggagccca

SEQ ID NO: 225394 - DNA, 25 bp, Homo sapien
gaattcgacttctcagcactttgat

SEQ ID NO: 225395 - DNA, 25 bp, Homo sapien
atgccatagccggtgacctgatagt

SEQ ID NO: 225396 - DNA, 25 bp, Homo sapien
cggtgacctgatagtgcttccgggt

SEQ ID NO: 225397 - DNA, 25 bp, Homo sapien
tagccggtgacctgatagtgcttcc

SEQ ID NO: 225398 - DNA, 25 bp, Homo sapien
tgcttccgggtcatgggggcctcat

SEQ ID NO: 225399 - DNA, 25 bp, Homo sapien
gcactggacggcatgccaagaaagg

SEQ ID NO: 225400 - DNA, 25 bp, Homo sapien
gtagctttgaagcacttagcttgcc

SEQ ID NO: 225401 - DNA, 25 bp, Homo sapien
tccaacatatcaggaactggtttcc

SEQ ID NO: 225402 - DNA, 25 bp, Homo sapien
tggagaagagatgagcccaaaccag

SEQ ID NO: 225403 - DNA, 25 bp, Homo sapien
ttctgctcccatcgccagatttttt

SEQ ID NO: 225404 - DNA, 25 bp, Homo sapien
ctgctcccatcgccagattttttta

SEQ ID NO: 225405 - DNA, 25 bp, Homo sapien
gctcccatcgccagatttttttaag

SEQ ID NO: 225406 - DNA, 25 bp, Homo sapien
ctttctgctcccatcgccagatttt

SEQ ID NO: 225407 - DNA, 25 bp, Homo sapien
aactctcacttttatctggaacaaa

SEQ ID NO: 225408 - DNA, 25 bp, Homo sapien
tataacaactctcacttttatctgg

SEQ ID NO: 225409 - DNA, 25 bp, Homo sapien
ttttatataacaactctcactttta

SEQ ID NO: 225410 - DNA, 25 bp, Homo sapien
ctcacttttatctggaacaaataat

SEQ ID NO: 225411 - DNA, 25 bp, Homo sapien
cataagtggatagggcagatttacc

SEQ ID NO: 225412 - DNA, 25 bp, Homo sapien
tcctaaagtggacctgggcataagt

SEQ ID NO: 225413 - DNA, 25 bp, Homo sapien
ccactttgggtgagcctaggtttga

SEQ ID NO: 225414 - DNA, 25 bp, Homo sapien
gactcctacgtctttctaaaggcag

SEQ ID NO: 225415 - DNA, 25 bp, Homo sapien
ttgtgttctagtcgaataatgtctc

SEQ ID NO: 225416 - DNA, 25 bp, Homo sapien
tctttgtgttctagtcgaataatgt

SEQ ID NO: 225417 - DNA, 25 bp, Homo sapien
tctagtcgaataatgtctccatgtc

SEQ ID NO: 225418 - DNA, 25 bp, Homo sapien
gttctagtcgaataatgtctccatg

SEQ ID NO: 225419 - DNA, 25 bp, Homo sapien
taatccacaggttgttgtagtcctt

SEQ ID NO: 225420 - DNA, 25 bp, Homo sapien
ggttgttgtagtccttgtgcaaata

SEQ ID NO: 225421 - DNA, 25 bp, Homo sapien
agtccttgtgcaaataggtggtgac

SEQ ID NO: 225422 - DNA, 25 bp, Homo sapien
ataatccacaggttgttgtagtcct

SEQ ID NO: 225423 - DNA, 25 bp, Homo sapien
gagaataccatcactatcagcacag

SEQ ID NO: 225424 - DNA, 25 bp, Homo sapien
caggagggagaataccatcactatc

SEQ ID NO: 225425 - DNA, 25 bp, Homo sapien
gctggccaaggacaatcaacctcaa

SEQ ID NO: 225426 - DNA, 25 bp, Homo sapien
ggccaaggacaatcaacctcaaacc

SEQ ID NO: 225427 - DNA, 25 bp, Homo sapien
tgggctctacgtacataacactagc

SEQ ID NO: 225428 - DNA, 25 bp, Homo sapien
taacagagcctttcagagtttggcc

SEQ ID NO: 225429 - DNA, 25 bp, Homo sapien
cacagtgtagatgttctggtcacca

SEQ ID NO: 225430 - DNA, 25 bp, Homo sapien
aatgcataatgcatgggcctcatcc

SEQ ID NO: 225431 - DNA, 25 bp, Homo sapien
gatggccatccggaggttcttcaca

SEQ ID NO: 225432 - DNA, 25 bp, Homo sapien
ggagtgcagatagccgatggccatc

SEQ ID NO: 225433 - DNA, 25 bp, Homo sapien
tcttcacagtgatcacagagccgta

SEQ ID NO: 225434 - DNA, 25 bp, Homo sapien
gctgacgggcaccaatgccctcggg

SEQ ID NO: 225435 - DNA, 25 bp, Homo sapien
ctccatctctggagggtgagcacgc

SEQ ID NO: 225436 - DNA, 25 bp, Homo sapien
atctctggagggtgagcacgcgctc

SEQ ID NO: 225437 - DNA, 25 bp, Homo sapien
tggagggtgagcacgcgctccacta

SEQ ID NO: 225438 - DNA, 25 bp, Homo sapien
tccagccacaccgtgtggagctcct

SEQ ID NO: 225439 - DNA, 25 bp, Homo sapien
aaggcagaactgaagaaaccgtcac

SEQ ID NO: 225440 - DNA, 25 bp, Homo sapien
gatggaagcattgtgcaggttgttc

SEQ ID NO: 225441 - DNA, 25 bp, Homo sapien
actgaagaaaccgtcaccagggcca

SEQ ID NO: 225442 - DNA, 25 bp, Homo sapien
ttgttccctgaaagccgggcctgga

SEQ ID NO: 225443 - DNA, 25 bp, Homo sapien
agcaaaggtggctgtatagagagcc

SEQ ID NO: 225444 - DNA, 25 bp, Homo sapien
caaaggtggctgtatagagagccag

SEQ ID NO: 225445 - DNA, 25 bp, Homo sapien
gggcagcactatgaggcacaggaca

SEQ ID NO: 225446 - DNA, 25 bp, Homo sapien
gacacgagcagtcaggtgttttccc

SEQ ID NO: 225447 - DNA, 25 bp, Homo sapien
taaagcgtttcgcatagtgcctggc

SEQ ID NO: 225448 - DNA, 25 bp, Homo sapien
cacacagtggctggatgatctttac

SEQ ID NO: 225449 - DNA, 25 bp, Homo sapien
tccaaatatggagaccgtgggtcag

SEQ ID NO: 225450 - DNA, 25 bp, Homo sapien
tcctggattgcctgggactggccga

SEQ ID NO: 225451 - DNA, 25 bp, Homo sapien
aaacttgacccctaaagcaccagca

SEQ ID NO: 225452 - DNA, 25 bp, Homo sapien
gataaagaggccaacaaacttgacc

SEQ ID NO: 225453 - DNA, 25 bp, Homo sapien
tctccgaacaggtaccaaaggtctg

SEQ ID NO: 225454 - DNA, 25 bp, Homo sapien
tgcaatggtgttcagccccacttga

SEQ ID NO: 225455 - DNA, 25 bp, Homo sapien
gaaccaccagggggcagagaagggc

SEQ ID NO: 225456 - DNA, 25 bp, Homo sapien
tcggcgcaagagttgtacttgacca

SEQ ID NO: 225457 - DNA, 25 bp, Homo sapien
catggcagccatgatgaagaacatc

SEQ ID NO: 225458 - DNA, 25 bp, Homo sapien
caaggaggatgtactgggacagagt

SEQ ID NO: 225459 - DNA, 25 bp, Homo sapien
gggtcaaggaggatgtactgggaca

SEQ ID NO: 225460 - DNA, 25 bp, Homo sapien
ggacttggacagatccagtacagtg

SEQ ID NO: 225461 - DNA, 25 bp, Homo sapien
gtgaggtaggcaaaggggaccagcc

SEQ ID NO: 225462 - DNA, 25 bp, Homo sapien
tggacagatccagtacagtgaggta

SEQ ID NO: 225463 - DNA, 25 bp, Homo sapien
agtgctgccgagagggacttggaca

SEQ ID NO: 225464 - DNA, 25 bp, Homo sapien
caggagactcctgattgcccgggtt

SEQ ID NO: 225465 - DNA, 25 bp, Homo sapien
tctgagaggtccacactggaggtca

SEQ ID NO: 225466 - DNA, 25 bp, Homo sapien
agttctgagtatctacaccacaggg

SEQ ID NO: 225467 - DNA, 25 bp, Homo sapien
taaggccctgccatgttccatcaag

SEQ ID NO: 225468 - DNA, 25 bp, Homo sapien
accacgccagggctgctaactataa

SEQ ID NO: 225469 - DNA, 25 bp, Homo sapien
tggtttagtgtggccccagggttca

SEQ ID NO: 225470 - DNA, 25 bp, Homo sapien
tgctaactataacatttctggttta

SEQ ID NO: 225471 - DNA, 25 bp, Homo sapien
gtccatttcaagtcaggaagcctta

SEQ ID NO: 225472 - DNA, 25 bp, Homo sapien
tcaggtagccagcaagacctatcag

SEQ ID NO: 225473 - DNA, 25 bp, Homo sapien
gtgatgctcatatttatccccaggc

SEQ ID NO: 225474 - DNA, 25 bp, Homo sapien
ggtaccatcatatccactcaggtag

SEQ ID NO: 225475 - DNA, 25 bp, Homo sapien
cattcccatgtagctgtgatgctca

SEQ ID NO: 225476 - DNA, 25 bp, Homo sapien
taaaataaaacacggcagctcttgg

SEQ ID NO: 225477 - DNA, 25 bp, Homo sapien
ttatggccgaggtctaggaacagca

SEQ ID NO: 225478 - DNA, 25 bp, Homo sapien
ccacaatttgaagggtagagtcagt

SEQ ID NO: 225479 - DNA, 25 bp, Homo sapien
aaatcctctcttgtattatggccga

SEQ ID NO: 225480 - DNA, 25 bp, Homo sapien
tacataatagaatgacacacggcca

SEQ ID NO: 225481 - DNA, 25 bp, Homo sapien
aagtatgatcgtaccagtgctggca

SEQ ID NO: 225482 - DNA, 25 bp, Homo sapien
ccaccaactgaagagggataaatac

SEQ ID NO: 225483 - DNA, 25 bp, Homo sapien
ggaagaaagcactgtcatacactgt

SEQ ID NO: 225484 - DNA, 25 bp, Homo sapien
gaaaaatgtacggttgatatagtaa

SEQ ID NO: 225485 - DNA, 25 bp, Homo sapien
aaaatgtacggttgatatagtaact

SEQ ID NO: 225486 - DNA, 25 bp, Homo sapien
tcaaagaaaaatgtacggttgatat

SEQ ID NO: 225487 - DNA, 25 bp, Homo sapien
aagaaaaatgtacggttgatatagt

SEQ ID NO: 225488 - DNA, 25 bp, Homo sapien
tctcataatatggaaaggtttgtag

SEQ ID NO: 225489 - DNA, 25 bp, Homo sapien
cataatatggaaaggtttgtagtaa

SEQ ID NO: 225490 - DNA, 25 bp, Homo sapien
ataatatggaaaggtttgtagtaag

SEQ ID NO: 225491 - DNA, 25 bp, Homo sapien
ctcataatatggaaaggtttgtagt

SEQ ID NO: 225492 - DNA, 25 bp, Homo sapien
cgtttggggcttcgcgccacagcct

SEQ ID NO: 225493 - DNA, 25 bp, Homo sapien
cggtggaagcgggtggcgaaggaca

SEQ ID NO: 225494 - DNA, 25 bp, Homo sapien
ggcggctcgtccaagcggtggaagc

SEQ ID NO: 225495 - DNA, 25 bp, Homo sapien
ggacgcagctcggactctgccaggc

SEQ ID NO: 225496 - DNA, 25 bp, Homo sapien
gaaggatctttctagtccagcccct

SEQ ID NO: 225497 - DNA, 25 bp, Homo sapien
gaggcacactttgtctgaccagccg

SEQ ID NO: 225498 - DNA, 25 bp, Homo sapien
aaatgcaacgcccttcactgcagcg

SEQ ID NO: 225499 - DNA, 25 bp, Homo sapien
agccagaggcgaccggaaggatctt

SEQ ID NO: 225500 - DNA, 25 bp, Homo sapien
ggtcgcgcgaagtgccagatgcagg

SEQ ID NO: 225501 - DNA, 25 bp, Homo sapien
tcactgagccttagtcgtcggcagg

SEQ ID NO: 225502 - DNA, 25 bp, Homo sapien
acgcgcacccgggtggagggaagct

SEQ ID NO: 225503 - DNA, 25 bp, Homo sapien
ggtcccaggcgcgaagtttctcggc

SEQ ID NO: 225504 - DNA, 25 bp, Homo sapien
ctgagggcctagctcccaaatcctg

SEQ ID NO: 225505 - DNA, 25 bp, Homo sapien
aggcctggaaacgagagtcttaatt

SEQ ID NO: 225506 - DNA, 25 bp, Homo sapien
agatacacccactgagctgagggcc

SEQ ID NO: 225507 - DNA, 25 bp, Homo sapien
gagatgggagactcgaactctagcc

SEQ ID NO: 225508 - DNA, 25 bp, Homo sapien
gactgatctgagtacatggcaccaa

SEQ ID NO: 225509 - DNA, 25 bp, Homo sapien
tatattcgataggtttgctctcccc

SEQ ID NO: 225510 - DNA, 25 bp, Homo sapien
tgtaatcgcagtaacacacccagtg

SEQ ID NO: 225511 - DNA, 25 bp, Homo sapien
gttctcaagcagcacaaaacggtgt

SEQ ID NO: 225512 - DNA, 25 bp, Homo sapien
tcaatgatgcaagagcggtcactca

SEQ ID NO: 225513 - DNA, 25 bp, Homo sapien
tacctcgggcacatgttctaagaac

SEQ ID NO: 225514 - DNA, 25 bp, Homo sapien
gatgctactagggacccactgggaa

SEQ ID NO: 225515 - DNA, 25 bp, Homo sapien
tgctggactgtaccccaaacatgga

SEQ ID NO: 225516 - DNA, 25 bp, Homo sapien
tacgtgggccaacagtcaggcatgc

SEQ ID NO: 225517 - DNA, 25 bp, Homo sapien
tcaacaactgaagagagtgggtgcc

SEQ ID NO: 225518 - DNA, 25 bp, Homo sapien
ggaatagtaatagccctccaaaggc

SEQ ID NO: 225519 - DNA, 25 bp, Homo sapien
tgacaggctggatagagctttctcc

SEQ ID NO: 225520 - DNA, 25 bp, Homo sapien
tggaagtagagagtcttgttgcgca

SEQ ID NO: 225521 - DNA, 25 bp, Homo sapien
agcctgcacgtctcggtggctgtcc

SEQ ID NO: 225522 - DNA, 25 bp, Homo sapien
tcaccagggtagtcatggctgccag

SEQ ID NO: 225523 - DNA, 25 bp, Homo sapien
ctgtcccgccggtacacaggcatga

SEQ ID NO: 225524 - DNA, 25 bp, Homo sapien
gcgaccccgcaaggagctcctggag

SEQ ID NO: 225525 - DNA, 25 bp, Homo sapien
atagcgaccccgcaaggagctcctg

SEQ ID NO: 225526 - DNA, 25 bp, Homo sapien
ctccccatagcgaccccgcaaggag

SEQ ID NO: 225527 - DNA, 25 bp, Homo sapien
tccccatagcgaccccgcaaggagc

SEQ ID NO: 225528 - DNA, 25 bp, Homo sapien
ctcttcctcttcttcatcctcatcg

SEQ ID NO: 225529 - DNA, 25 bp, Homo sapien
acgcttcaccaccagacggctgttc

SEQ ID NO: 225530 - DNA, 25 bp, Homo sapien
gatgagtaggtacccggatggtcac

SEQ ID NO: 225531 - DNA, 25 bp, Homo sapien
aagccaatgtcatagtcatcggtcg

SEQ ID NO: 225532 - DNA, 25 bp, Homo sapien
cacagttatgtcagtgctagttaca

SEQ ID NO: 225533 - DNA, 25 bp, Homo sapien
tctatagctcctgtatgttcagact

SEQ ID NO: 225534 - DNA, 25 bp, Homo sapien
gttcagactggatcataacgatgtc

SEQ ID NO: 225535 - DNA, 25 bp, Homo sapien
ggatcataacgatgtccccagacct

SEQ ID NO: 225536 - DNA, 25 bp, Homo sapien
gctcctgtatgttcagactggatca

SEQ ID NO: 225537 - DNA, 25 bp, Homo sapien
aatcctgtttcaccaaggcctgagc

SEQ ID NO: 225538 - DNA, 25 bp, Homo sapien
caaaggaccagttgctttccgcaga

SEQ ID NO: 225539 - DNA, 25 bp, Homo sapien
gctttccgcagatcttccgtggcat

SEQ ID NO: 225540 - DNA, 25 bp, Homo sapien
tccgtggcatccttactcactggag

SEQ ID NO: 225541 - DNA, 25 bp, Homo sapien
tgatagtcctcaaacaccccaagta

SEQ ID NO: 225542 - DNA, 25 bp, Homo sapien
caacagcctcttcaatccttgatag

SEQ ID NO: 225543 - DNA, 25 bp, Homo sapien
tactcttctaggacattaactcttc

SEQ ID NO: 225544 - DNA, 25 bp, Homo sapien
taaggccctttgcactctgacctca

SEQ ID NO: 225545 - DNA, 25 bp, Homo sapien
agttatgactgcctaccgtgctcca

SEQ ID NO: 225546 - DNA, 25 bp, Homo sapien
tgtgccacccacataaatttaatat

SEQ ID NO: 225547 - DNA, 25 bp, Homo sapien
aacatattttaaggctcggtgtggt

SEQ ID NO: 225548 - DNA, 25 bp, Homo sapien
tatgttaaacaggatatgtgccacc

SEQ ID NO: 225549 - DNA, 25 bp, Homo sapien
caataaagaggtatccttgttttct

SEQ ID NO: 225550 - DNA, 25 bp, Homo sapien
gaagccaataaagaggtatccttgt

SEQ ID NO: 225551 - DNA, 25 bp, Homo sapien
gatcggtggcagaagccaataaaga

SEQ ID NO: 225552 - DNA, 25 bp, Homo sapien
agcagggttctggatcggtggcaga

SEQ ID NO: 225553 - DNA, 25 bp, Homo sapien
actctgtaaagaggcccattcactg

SEQ ID NO: 225554 - DNA, 25 bp, Homo sapien
ggtcatcttcacactatatagcctg

SEQ ID NO: 225555 - DNA, 25 bp, Homo sapien
aattatgactctcggcctcttggca

SEQ ID NO: 225556 - DNA, 25 bp, Homo sapien
tctgttgacctaagtgaagtgtgct

SEQ ID NO: 225557 - DNA, 25 bp, Homo sapien
gctgcccacaagagactcattttag

SEQ ID NO: 225558 - DNA, 25 bp, Homo sapien
cactgattatgacactggctttggg

SEQ ID NO: 225559 - DNA, 25 bp, Homo sapien
ccaattagaagacaccgagtgggtg

SEQ ID NO: 225560 - DNA, 25 bp, Homo sapien
tctgcaaatggacataacttctacc

SEQ ID NO: 225561 - DNA, 25 bp, Homo sapien
tacacttaggaccaaatgggcccaa

SEQ ID NO: 225562 - DNA, 25 bp, Homo sapien
cagtaacagagggaattcagggaaa

SEQ ID NO: 225563 - DNA, 25 bp, Homo sapien
taaatgggtcaagccatcaagagga

SEQ ID NO: 225564 - DNA, 25 bp, Homo sapien
gggcccaattttccatacaacagta

SEQ ID NO: 225565 - DNA, 25 bp, Homo sapien
tctcggaaacaatgaacggaggagg

SEQ ID NO: 225566 - DNA, 25 bp, Homo sapien
tcctcagtggccgaaatctcggaaa

SEQ ID NO: 225567 - DNA, 25 bp, Homo sapien
cattctgatcatgctagggattcaa

SEQ ID NO: 225568 - DNA, 25 bp, Homo sapien
gtaacggtattctccagtgtggcaa

SEQ ID NO: 225569 - DNA, 25 bp, Homo sapien
caagtttacctgacctgtttccatc

SEQ ID NO: 225570 - DNA, 25 bp, Homo sapien
taagaacaccatgaccactggagag

SEQ ID NO: 225571 - DNA, 25 bp, Homo sapien
taagtgatgcaacaagtatgcctca

SEQ ID NO: 225572 - DNA, 25 bp, Homo sapien
gaagaacccaggtgcctcaaataaa

SEQ ID NO: 225573 - DNA, 25 bp, Homo sapien
aaggaacattcttggttatctcaac

SEQ ID NO: 225574 - DNA, 25 bp, Homo sapien
aaccattgctctaacccaaggaaca

SEQ ID NO: 225575 - DNA, 25 bp, Homo sapien
gcaaatatttgcgaaacctctaaaa

SEQ ID NO: 225576 - DNA, 25 bp, Homo sapien
caacatcaagggctctagataaata

SEQ ID NO: 225577 - DNA, 25 bp, Homo sapien
tccctggcagtccccgacgccgcca

SEQ ID NO: 225578 - DNA, 25 bp, Homo sapien
ccctggcagtccccgacgccgccag

SEQ ID NO: 225579 - DNA, 25 bp, Homo sapien
gtgacagacgatttttaaagtcagg

SEQ ID NO: 225580 - DNA, 25 bp, Homo sapien
ccgcgagtggctccggaaacagccg

SEQ ID NO: 225581 - DNA, 25 bp, Homo sapien
caggaagacactgccggaaatcgtg

SEQ ID NO: 225582 - DNA, 25 bp, Homo sapien
ggttactgcgtgcttgtgacagacg

SEQ ID NO: 225583 - DNA, 25 bp, Homo sapien
agcctgagaggcctgaactgcctgg

SEQ ID NO: 225584 - DNA, 25 bp, Homo sapien
aggattatgattccggcccagatga

SEQ ID NO: 225585 - DNA, 25 bp, Homo sapien
gcgcgtctgctaagctgcaaatggc

SEQ ID NO: 225586 - DNA, 25 bp, Homo sapien
aaatggctgaagtcccggaggatta

SEQ ID NO: 225587 - DNA, 25 bp, Homo sapien
aatcagggcacaactattataggga

SEQ ID NO: 225588 - DNA, 25 bp, Homo sapien
aacaagacttttctgcgggagcagc

SEQ ID NO: 225589 - DNA, 25 bp, Homo sapien
cagatacatattgatggataggacc

SEQ ID NO: 225590 - DNA, 25 bp, Homo sapien
gctacctactgctggcaaatggatt

SEQ ID NO: 225591 - DNA, 25 bp, Homo sapien
gaagcacagtatagatgggtaaggt

SEQ ID NO: 225592 - DNA, 25 bp, Homo sapien
actacttgagagatgctggctaaac

SEQ ID NO: 225593 - DNA, 25 bp, Homo sapien
caaatgaagcacagtatagatgggt

SEQ ID NO: 225594 - DNA, 25 bp, Homo sapien
taaacggagtttccttgagttgcac

SEQ ID NO: 225595 - DNA, 25 bp, Homo sapien
gcacgttcagggtggtatggctgta

SEQ ID NO: 225596 - DNA, 25 bp, Homo sapien
acgttcagggtggtatggctgtaga

SEQ ID NO: 225597 - DNA, 25 bp, Homo sapien
tgagatcagatgatatcaggcacgt

SEQ ID NO: 225598 - DNA, 25 bp, Homo sapien
tctgagatcagatgatatcaggcac

SEQ ID NO: 225599 - DNA, 25 bp, Homo sapien
caaagtgcacggagagaaagagttc

SEQ ID NO: 225600 - DNA, 25 bp, Homo sapien
tgagacaaattcttgccataggctt

SEQ ID NO: 225601 - DNA, 25 bp, Homo sapien
gtttagggccgcatagaacactccc

SEQ ID NO: 225602 - DNA, 25 bp, Homo sapien
gcaactttgggcaagatgctgtgtc

SEQ ID NO: 225603 - DNA, 25 bp, Homo sapien
taaacccctgacagtgaatagccgc

SEQ ID NO: 225604 - DNA, 25 bp, Homo sapien
tgctaatggcaaaaagtgtctctgg

SEQ ID NO: 225605 - DNA, 25 bp, Homo sapien
tgtgttgaccatcccaaaagtggac

SEQ ID NO: 225606 - DNA, 25 bp, Homo sapien
taagtagctctcctgcagtaccttg

SEQ ID NO: 225607 - DNA, 25 bp, Homo sapien
aaagaatgccagaaatatgttgagc

SEQ ID NO: 225608 - DNA, 25 bp, Homo sapien
ttaataagatagcaatgggccaaca

SEQ ID NO: 225609 - DNA, 25 bp, Homo sapien
taagatagcaatgggccaacaggaa

SEQ ID NO: 225610 - DNA, 25 bp, Homo sapien
tgccagaaatatgttgagccgtgac

SEQ ID NO: 225611 - DNA, 25 bp, Homo sapien
tagggacaggtagcttgaagaatcg

SEQ ID NO: 225612 - DNA, 25 bp, Homo sapien
gaatcgtaggatcttggagagcagc

SEQ ID NO: 225613 - DNA, 25 bp, Homo sapien
gagcagctatgactcccttattggc

SEQ ID NO: 225614 - DNA, 25 bp, Homo sapien
tactgaggccgcaagatattggtgt

SEQ ID NO: 225615 - DNA, 25 bp, Homo sapien
gaaacaaccaactctaagagatagg

SEQ ID NO: 225616 - DNA, 25 bp, Homo sapien
tggaaacaaccaactctaagagata

SEQ ID NO: 225617 - DNA, 25 bp, Homo sapien
ctggaaacaaccaactctaagagat

SEQ ID NO: 225618 - DNA, 25 bp, Homo sapien
aacaaccaactctaagagatagggg

SEQ ID NO: 225619 - DNA, 25 bp, Homo sapien
aaatttctacgcagatattaggcag

SEQ ID NO: 225620 - DNA, 25 bp, Homo sapien
caaagctgtacacaatgctggcctt

SEQ ID NO: 225621 - DNA, 25 bp, Homo sapien
aggctggtgtaaatttctacgcaga

SEQ ID NO: 225622 - DNA, 25 bp, Homo sapien
ctgggtagtgggatggcagctacaa

SEQ ID NO: 225623 - DNA, 25 bp, Homo sapien
cagaggaatatcacatcggcccaac

SEQ ID NO: 225624 - DNA, 25 bp, Homo sapien
agcagaggaatatcacatcggccca

SEQ ID NO: 225625 - DNA, 25 bp, Homo sapien
ctgagacggcaagcagcagaggaat

SEQ ID NO: 225626 - DNA, 25 bp, Homo sapien
ggaatatcacatcggcccaactcac

SEQ ID NO: 225627 - DNA, 25 bp, Homo sapien
cgttatggtaaaagcatttgattcc

SEQ ID NO: 225628 - DNA, 25 bp, Homo sapien
gttatggtaaaagcatttgattccc

SEQ ID NO: 225629 - DNA, 25 bp, Homo sapien
ggcttcaagtgatccccctgccata

SEQ ID NO: 225630 - DNA, 25 bp, Homo sapien
cttcaagtgatccccctgccatagc

SEQ ID NO: 225631 - DNA, 25 bp, Homo sapien
gcttcaagtgatccccctgccatag

SEQ ID NO: 225632 - DNA, 25 bp, Homo sapien
gagtggctgaattaagggagccaat

SEQ ID NO: 225633 - DNA, 25 bp, Homo sapien
tggagatccgcaggctttcagcagg

SEQ ID NO: 225634 - DNA, 25 bp, Homo sapien
accttaaactcttcaggagtggctg

SEQ ID NO: 225635 - DNA, 25 bp, Homo sapien
gagccaattgagagatgtctggaac

SEQ ID NO: 225636 - DNA, 25 bp, Homo sapien
gaagcacaggtttgcaagagatagt

SEQ ID NO: 225637 - DNA, 25 bp, Homo sapien
ttgaagcacaggtttgcaagagata

SEQ ID NO: 225638 - DNA, 25 bp, Homo sapien
agcacaggtttgcaagagatagtat

SEQ ID NO: 225639 - DNA, 25 bp, Homo sapien
cacaggtttgcaagagatagtattc

SEQ ID NO: 225640 - DNA, 25 bp, Homo sapien
tagtttgctatttcaaatctgcaga

SEQ ID NO: 225641 - DNA, 25 bp, Homo sapien
cagaactgagaaactaaggatgaag

SEQ ID NO: 225642 - DNA, 25 bp, Homo sapien
acttgagaaaccagataacttggct

SEQ ID NO: 225643 - DNA, 25 bp, Homo sapien
gagtgcattcctttcctacgataca

SEQ ID NO: 225644 - DNA, 25 bp, Homo sapien
ccaccaataggtttatgcatcctta

SEQ ID NO: 225645 - DNA, 25 bp, Homo sapien
gtcatattgagtaccaccaataggt

SEQ ID NO: 225646 - DNA, 25 bp, Homo sapien
ctgcaagtttcatatattgttttct

SEQ ID NO: 225647 - DNA, 25 bp, Homo sapien
ttttctcccagtcatattgagtacc

SEQ ID NO: 225648 - DNA, 25 bp, Homo sapien
cagaatcaagactggactgacagct

SEQ ID NO: 225649 - DNA, 25 bp, Homo sapien
cacagggcctgtgaagtcccgggta

SEQ ID NO: 225650 - DNA, 25 bp, Homo sapien
ccgggtagcttcctgtaagggagca

SEQ ID NO: 225651 - DNA, 25 bp, Homo sapien
acattagcaactgtggagggcaagc

SEQ ID NO: 225652 - DNA, 25 bp, Homo sapien
agaagaaggttgcatgggcacaagc

SEQ ID NO: 225653 - DNA, 25 bp, Homo sapien
tcgatcatcagtccccgagaacggc

SEQ ID NO: 225654 - DNA, 25 bp, Homo sapien
tttgcagaagaaggttgcatgggca

SEQ ID NO: 225655 - DNA, 25 bp, Homo sapien
gcatgggcacaagcctcgatcatca

SEQ ID NO: 225656 - DNA, 25 bp, Homo sapien
tggaaccccatactcaaactgcagg

SEQ ID NO: 225657 - DNA, 25 bp, Homo sapien
gatacgatcttcctctggaacccca

SEQ ID NO: 225658 - DNA, 25 bp, Homo sapien
gcagggactcaaggtcctggagcat

SEQ ID NO: 225659 - DNA, 25 bp, Homo sapien
aatacagccagatacgatcttcctc

SEQ ID NO: 225660 - DNA, 25 bp, Homo sapien
atttggctccctgtcccggtagaag

SEQ ID NO: 225661 - DNA, 25 bp, Homo sapien
actcatgatgatgggcttcagcacc

SEQ ID NO: 225662 - DNA, 25 bp, Homo sapien
tgcccaggtcacaagcactcatgat

SEQ ID NO: 225663 - DNA, 25 bp, Homo sapien
tttggctccctgtcccggtagaaga

SEQ ID NO: 225664 - DNA, 25 bp, Homo sapien
aaacagagaagattggctctgctcc

SEQ ID NO: 225665 - DNA, 25 bp, Homo sapien
caaacagagaagattggctctgctc

SEQ ID NO: 225666 - DNA, 25 bp, Homo sapien
aacagagaagattggctctgctcct

SEQ ID NO: 225667 - DNA, 25 bp, Homo sapien
aggggcaacagttgggcctgtaact

SEQ ID NO: 225668 - DNA, 25 bp, Homo sapien
cagttgggcctgtaactgctacatc

SEQ ID NO: 225669 - DNA, 25 bp, Homo sapien
gggcaacagttgggcctgtaactgc

SEQ ID NO: 225670 - DNA, 25 bp, Homo sapien
caacagttgggcctgtaactgctac

SEQ ID NO: 225671 - DNA, 25 bp, Homo sapien
cttctatgacttcacccactccaca

SEQ ID NO: 225672 - DNA, 25 bp, Homo sapien
tctatgacttcacccactccacagt

SEQ ID NO: 225673 - DNA, 25 bp, Homo sapien
ttctatgacttcacccactccacag

SEQ ID NO: 225674 - DNA, 25 bp, Homo sapien
ccagcatcacataactatttagtgg

SEQ ID NO: 225675 - DNA, 25 bp, Homo sapien
tatttagtggtagagctggaaaaag

SEQ ID NO: 225676 - DNA, 25 bp, Homo sapien
gactcacccagcatcacataactat

SEQ ID NO: 225677 - DNA, 25 bp, Homo sapien
catcacataactatttagtggtaga

SEQ ID NO: 225678 - DNA, 25 bp, Homo sapien
gaaaaacccagttcagtcacagaaa

SEQ ID NO: 225679 - DNA, 25 bp, Homo sapien
tacctttattaggagtctaggcatg

SEQ ID NO: 225680 - DNA, 25 bp, Homo sapien
gagtctaggcatgtcagaaaaaccc

SEQ ID NO: 225681 - DNA, 25 bp, Homo sapien
ggcatgtcagaaaaacccagttcag

SEQ ID NO: 225682 - DNA, 25 bp, Homo sapien
gaaacactggcattccttcctgagg

SEQ ID NO: 225683 - DNA, 25 bp, Homo sapien
gaccaagtgagatcttacccagtag

SEQ ID NO: 225684 - DNA, 25 bp, Homo sapien
ggatgtctcatcacccaagcaaggt

SEQ ID NO: 225685 - DNA, 25 bp, Homo sapien
taatgggcccaagcgatgtgatgcc

SEQ ID NO: 225686 - DNA, 25 bp, Homo sapien
tcatttgaccctaaggtaggttcca

SEQ ID NO: 225687 - DNA, 25 bp, Homo sapien
gaaaaagtagaatcagatcaggagg

SEQ ID NO: 225688 - DNA, 25 bp, Homo sapien
gggagttcatttattcaaagatgca

SEQ ID NO: 225689 - DNA, 25 bp, Homo sapien
caagcctaattttggtcatttgacc

SEQ ID NO: 225690 - DNA, 25 bp, Homo sapien
ctaacagggaactaactttcatatt

SEQ ID NO: 225691 - DNA, 25 bp, Homo sapien
cagggaactaactttcatattaaca

SEQ ID NO: 225692 - DNA, 25 bp, Homo sapien
taacaaagagctcagtaatttcctg

SEQ ID NO: 225693 - DNA, 25 bp, Homo sapien
tcatattaacaaagagctcagtaat

SEQ ID NO: 225694 - DNA, 25 bp, Homo sapien
catccatccccacgagaccatacag

SEQ ID NO: 225695 - DNA, 25 bp, Homo sapien
gctaacatctatttcacccacttct

SEQ ID NO: 225696 - DNA, 25 bp, Homo sapien
gctccccaggtagctaacatctatt

SEQ ID NO: 225697 - DNA, 25 bp, Homo sapien
ctgtgagagacgaaccagctgtgct

SEQ ID NO: 225698 - DNA, 25 bp, Homo sapien
gtgaactgtctgtctcctgagcctg

SEQ ID NO: 225699 - DNA, 25 bp, Homo sapien
tgtgaactgtctgtctcctgagcct

SEQ ID NO: 225700 - DNA, 25 bp, Homo sapien
ctgctgagaagagcatcaatcttct

SEQ ID NO: 225701 - DNA, 25 bp, Homo sapien
tgatcctttatctaccttactcctg

SEQ ID NO: 225702 - DNA, 25 bp, Homo sapien
cctgtatgctagcaactgttgacga

SEQ ID NO: 225703 - DNA, 25 bp, Homo sapien
tgttgacgatccttcaggtcccggt

SEQ ID NO: 225704 - DNA, 25 bp, Homo sapien
tcttccaccagattgacatactcct

SEQ ID NO: 225705 - DNA, 25 bp, Homo sapien
aacttagtggctaagttcaacttcg

SEQ ID NO: 225706 - DNA, 25 bp, Homo sapien
caatgacgacatcatggcacttgaa

SEQ ID NO: 225707 - DNA, 25 bp, Homo sapien
taagttcaacttcgtgtccacatct

SEQ ID NO: 225708 - DNA, 25 bp, Homo sapien
gaaaacaagagcagatcgggtctcc

SEQ ID NO: 225709 - DNA, 25 bp, Homo sapien
ctgtcttgaggcctattgcagccat

SEQ ID NO: 225710 - DNA, 25 bp, Homo sapien
gcagatcgggtctcccatcactgac

SEQ ID NO: 225711 - DNA, 25 bp, Homo sapien
gaggcctattgcagccattgtgctg

SEQ ID NO: 225712 - DNA, 25 bp, Homo sapien
gaatatcctgtacccaactctcttc

SEQ ID NO: 225713 - DNA, 25 bp, Homo sapien
agaggcttaaagttaggtctccaag

SEQ ID NO: 225714 - DNA, 25 bp, Homo sapien
gtctccaagaatatcctgtacccaa

SEQ ID NO: 225715 - DNA, 25 bp, Homo sapien
gtacccaactctcttcaggacccat

SEQ ID NO: 225716 - DNA, 25 bp, Homo sapien
cacaggggcattgttcttgtgcaaa

SEQ ID NO: 225717 - DNA, 25 bp, Homo sapien
tgtgcaaaatttcgacaacccgatg

SEQ ID NO: 225718 - DNA, 25 bp, Homo sapien
tcttcttggtatagcccagccagtt

SEQ ID NO: 225719 - DNA, 25 bp, Homo sapien
cccgatggaagccaatgggtgctct

SEQ ID NO: 225720 - DNA, 25 bp, Homo sapien
ttgaaatactactaaatgggataag

SEQ ID NO: 225721 - DNA, 25 bp, Homo sapien
tgctgagggatacagaaataatgag

SEQ ID NO: 225722 - DNA, 25 bp, Homo sapien
tttacgatcagaccagaataatgtg

SEQ ID NO: 225723 - DNA, 25 bp, Homo sapien
tagatctatagaaacgaatgcaggg

SEQ ID NO: 225724 - DNA, 25 bp, Homo sapien
ggtgagataggagtaggtagaaaat

SEQ ID NO: 225725 - DNA, 25 bp, Homo sapien
gattttgacaacagacacatattgc

SEQ ID NO: 225726 - DNA, 25 bp, Homo sapien
aaaggaacttcactctttctatact

SEQ ID NO: 225727 - DNA, 25 bp, Homo sapien
aacagtgtttgccttgagaaagggg

SEQ ID NO: 225728 - DNA, 25 bp, Homo sapien
gtcagcacatactgtttatctggga

SEQ ID NO: 225729 - DNA, 25 bp, Homo sapien
catcattccaggctcgaagcttggc

SEQ ID NO: 225730 - DNA, 25 bp, Homo sapien
tgtggtgaatagggcatctacatca

SEQ ID NO: 225731 - DNA, 25 bp, Homo sapien
tcgaagcttggcacgagcagccagg

SEQ ID NO: 225732 - DNA, 25 bp, Homo sapien
caggttgacgggactgctgaatgtc

SEQ ID NO: 225733 - DNA, 25 bp, Homo sapien
gtcttcttcaggttgacgggactgc

SEQ ID NO: 225734 - DNA, 25 bp, Homo sapien
ggttgacgggactgctgaatgtccc

SEQ ID NO: 225735 - DNA, 25 bp, Homo sapien
tcttcaggttgacgggactgctgaa

SEQ ID NO: 225736 - DNA, 25 bp, Homo sapien
gaagcaggagtagaaaagtgttgtc

SEQ ID NO: 225737 - DNA, 25 bp, Homo sapien
tcactagtggcatgttgaggatgga

SEQ ID NO: 225738 - DNA, 25 bp, Homo sapien
cctctgtgtagtgatagaagcagga

SEQ ID NO: 225739 - DNA, 25 bp, Homo sapien
tgctttcggaagatctcagtctgtc

SEQ ID NO: 225740 - DNA, 25 bp, Homo sapien
cactgaagcaaaagatatagagatg

SEQ ID NO: 225741 - DNA, 25 bp, Homo sapien
ctgagccttggcactgaagcaaaag

SEQ ID NO: 225742 - DNA, 25 bp, Homo sapien
aagatatagagatgaagagtctaac

SEQ ID NO: 225743 - DNA, 25 bp, Homo sapien
tcctagatgctgaacggcactgagc

SEQ ID NO: 225744 - DNA, 25 bp, Homo sapien
tccaggagcgtgtaatggtcctgta

SEQ ID NO: 225745 - DNA, 25 bp, Homo sapien
tcctgtatgtgtgcggaatcttctg

SEQ ID NO: 225746 - DNA, 25 bp, Homo sapien
ctcaataatgatctgacgttccagg

SEQ ID NO: 225747 - DNA, 25 bp, Homo sapien
aatgatctgacgttccaggagcgtg

SEQ ID NO: 225748 - DNA, 25 bp, Homo sapien
tcttttcgtttgtcagggtcctgaa

SEQ ID NO: 225749 - DNA, 25 bp, Homo sapien
tgttcaaatgctctcgataatgaga

SEQ ID NO: 225750 - DNA, 25 bp, Homo sapien
cctgaatgttcaaatgctctcgata

SEQ ID NO: 225751 - DNA, 25 bp, Homo sapien
agggtcctgaatgttcaaatgctct

SEQ ID NO: 225752 - DNA, 25 bp, Homo sapien
gcaatcctgccatcgacagtgctga

SEQ ID NO: 225753 - DNA, 25 bp, Homo sapien
gctaccgtgcttggctggaaattct

SEQ ID NO: 225754 - DNA, 25 bp, Homo sapien
taaactatatgatcacgcaccactg

SEQ ID NO: 225755 - DNA, 25 bp, Homo sapien
tacttgggagcctaaggcttgagcc

SEQ ID NO: 225756 - DNA, 25 bp, Homo sapien
taacacctggccattgaattctcag

SEQ ID NO: 225757 - DNA, 25 bp, Homo sapien
tattgggtgtatcatcaacttgacc

SEQ ID NO: 225758 - DNA, 25 bp, Homo sapien
tctttgtgagaagccaaaaccccaa

SEQ ID NO: 225759 - DNA, 25 bp, Homo sapien
gaattctcagccaaaacgtgtattg

SEQ ID NO: 225760 - DNA, 25 bp, Homo sapien
caagctcttctgttctatctaggaa

SEQ ID NO: 225761 - DNA, 25 bp, Homo sapien
gcaagctcttctgttctatctagga

SEQ ID NO: 225762 - DNA, 25 bp, Homo sapien
aagctcttctgttctatctaggaac

SEQ ID NO: 225763 - DNA, 25 bp, Homo sapien
cgcaagctcttctgttctatctagg

SEQ ID NO: 225764 - DNA, 25 bp, Homo sapien
ggcagtataacctcacaaaatcgag

SEQ ID NO: 225765 - DNA, 25 bp, Homo sapien
tatctattgatgtgtggcagtataa

SEQ ID NO: 225766 - DNA, 25 bp, Homo sapien
tgatgtgtggcagtataacctcaca

SEQ ID NO: 225767 - DNA, 25 bp, Homo sapien
taacctcacaaaatcgagtgcctcc

SEQ ID NO: 225768 - DNA, 25 bp, Homo sapien
tgttaacagttctgacagggaggct

SEQ ID NO: 225769 - DNA, 25 bp, Homo sapien
tactctagcccacagaaaacttggt

SEQ ID NO: 225770 - DNA, 25 bp, Homo sapien
gacaagaaggtactgcaaggaacta

SEQ ID NO: 225771 - DNA, 25 bp, Homo sapien
tggaggtgatgcctgataaagccct

SEQ ID NO: 225772 - DNA, 25 bp, Homo sapien
tgaagaggtctaaaagcaacttttg

SEQ ID NO: 225773 - DNA, 25 bp, Homo sapien
gaggtctaaaagcaacttttgatcc

SEQ ID NO: 225774 - DNA, 25 bp, Homo sapien
tctaaaagcaacttttgatccccta

SEQ ID NO: 225775 - DNA, 25 bp, Homo sapien
ctaaaagcaacttttgatcccctat

SEQ ID NO: 225776 - DNA, 25 bp, Homo sapien
tgaataagatgtctcagggcaacct

SEQ ID NO: 225777 - DNA, 25 bp, Homo sapien
tgtctcagggcaacctgtcgcacct

SEQ ID NO: 225778 - DNA, 25 bp, Homo sapien
gatgtctcagggcaacctgtcgcac

SEQ ID NO: 225779 - DNA, 25 bp, Homo sapien
taagatgtctcagggcaacctgtcg

SEQ ID NO: 225780 - DNA, 25 bp, Homo sapien
gtgtcctcttcaggaaaatcagaac

SEQ ID NO: 225781 - DNA, 25 bp, Homo sapien
tcagtgtcctcttcaggaaaatcag

SEQ ID NO: 225782 - DNA, 25 bp, Homo sapien
tgctcagtgtcctcttcaggaaaat

SEQ ID NO: 225783 - DNA, 25 bp, Homo sapien
ctttgctcagtgtcctcttcaggaa

SEQ ID NO: 225784 - DNA, 25 bp, Homo sapien
tgcttactgcctcttctaggagttg

SEQ ID NO: 225785 - DNA, 25 bp, Homo sapien
agtaatgacgtttccatcatgcatg

SEQ ID NO: 225786 - DNA, 25 bp, Homo sapien
tgcagtaatgacgtttccatcatgc

SEQ ID NO: 225787 - DNA, 25 bp, Homo sapien
tccatcatgcatgcttactgcctct

SEQ ID NO: 225788 - DNA, 25 bp, Homo sapien
tgtaaggagcggaatctctctagtg

SEQ ID NO: 225789 - DNA, 25 bp, Homo sapien
ctgtaaggagcggaatctctctagt

SEQ ID NO: 225790 - DNA, 25 bp, Homo sapien
aaggagcggaatctctctagtgagc

SEQ ID NO: 225791 - DNA, 25 bp, Homo sapien
taaggagcggaatctctctagtgag

SEQ ID NO: 225792 - DNA, 25 bp, Homo sapien
cccttccggagacgtcgcactgtat

SEQ ID NO: 225793 - DNA, 25 bp, Homo sapien
ttccggagacgtcgcactgtatcac

SEQ ID NO: 225794 - DNA, 25 bp, Homo sapien
ggagacgtcgcactgtatcactggg

SEQ ID NO: 225795 - DNA, 25 bp, Homo sapien
ttgcccttccggagacgtcgcactg

SEQ ID NO: 225796 - DNA, 25 bp, Homo sapien
ctggagcatagcttttggcaggtgt

SEQ ID NO: 225797 - DNA, 25 bp, Homo sapien
ccagctctggagcatagcttttggc

SEQ ID NO: 225798 - DNA, 25 bp, Homo sapien
gctctggagcatagcttttggcagg

SEQ ID NO: 225799 - DNA, 25 bp, Homo sapien
ccccagctctggagcatagcttttg

SEQ ID NO: 225800 - DNA, 25 bp, Homo sapien
agggactggaaacttccaggtctag

SEQ ID NO: 225801 - DNA, 25 bp, Homo sapien
tggaaacttccaggtctagttctac

SEQ ID NO: 225802 - DNA, 25 bp, Homo sapien
catcagaaagggactggaaacttcc

SEQ ID NO: 225803 - DNA, 25 bp, Homo sapien
gactggaaacttccaggtctagttc

SEQ ID NO: 225804 - DNA, 25 bp, Homo sapien
tttagctgttcacgcccctcgtggg

SEQ ID NO: 225805 - DNA, 25 bp, Homo sapien
ctcagggagtaggtagaagtaggct

SEQ ID NO: 225806 - DNA, 25 bp, Homo sapien
tagttgtgcataggaggagaagctg

SEQ ID NO: 225807 - DNA, 25 bp, Homo sapien
ggagaagctgtttcggctctttagc

SEQ ID NO: 225808 - DNA, 25 bp, Homo sapien
ccagctgactcgctccaggtcatca

SEQ ID NO: 225809 - DNA, 25 bp, Homo sapien
tcaccgcccgcttggactcctttaa

SEQ ID NO: 225810 - DNA, 25 bp, Homo sapien
tccagctgactcgctccaggtcatc

SEQ ID NO: 225811 - DNA, 25 bp, Homo sapien
aagtctcggaggctgttcaccgccc

SEQ ID NO: 225812 - DNA, 25 bp, Homo sapien
ctgtgaaagctcatcgtcttcatcg

SEQ ID NO: 225813 - DNA, 25 bp, Homo sapien
tgaacttggagctgttccaatactc

SEQ ID NO: 225814 - DNA, 25 bp, Homo sapien
tcctcatcaccctttgtccgattca

SEQ ID NO: 225815 - DNA, 25 bp, Homo sapien
aagctcatcgtcttcatcgtcaaag

SEQ ID NO: 225816 - DNA, 25 bp, Homo sapien
gatcaaatcatacttctaatcttct

SEQ ID NO: 225817 - DNA, 25 bp, Homo sapien
ttcttaagagcatccactttgtcca

SEQ ID NO: 225818 - DNA, 25 bp, Homo sapien
gcactctctcaggtgttgtaaggta

SEQ ID NO: 225819 - DNA, 25 bp, Homo sapien
ggtctccaactgatcaaatcatact

SEQ ID NO: 225820 - DNA, 25 bp, Homo sapien
taagagtgacaggtgcttcaacatg

SEQ ID NO: 225821 - DNA, 25 bp, Homo sapien
taaccatgcaatggcagtagacaac

SEQ ID NO: 225822 - DNA, 25 bp, Homo sapien
gaatcagcaagaaaaccacaacatg

SEQ ID NO: 225823 - DNA, 25 bp, Homo sapien
caggtacgattgtcactcttaagag

SEQ ID NO: 225824 - DNA, 25 bp, Homo sapien
gaagccatggatctaccgcagtcgt

SEQ ID NO: 225825 - DNA, 25 bp, Homo sapien
tctacgggtgaacgtccaggaagcc

SEQ ID NO: 225826 - DNA, 25 bp, Homo sapien
gtttcaattatcttccgagccagga

SEQ ID NO: 225827 - DNA, 25 bp, Homo sapien
gaaccaatcgctggtgctcactcgc

SEQ ID NO: 225828 - DNA, 25 bp, Homo sapien
gagaatcaggcctgtagtcataggg

SEQ ID NO: 225829 - DNA, 25 bp, Homo sapien
gctggatccagccagatacgcgacc

SEQ ID NO: 225830 - DNA, 25 bp, Homo sapien
tagggtgtagggatgcctcctagaa

SEQ ID NO: 225831 - DNA, 25 bp, Homo sapien
ggaaaagatcaagatgcggagaggc

SEQ ID NO: 225832 - DNA, 25 bp, Homo sapien
gagaaaacacgaataacgagaccgc

SEQ ID NO: 225833 - DNA, 25 bp, Homo sapien
cagggcatgctggaagtcgtagttt

SEQ ID NO: 225834 - DNA, 25 bp, Homo sapien
ataacgagaccgcagggcatgctgg

SEQ ID NO: 225835 - DNA, 25 bp, Homo sapien
aatcgtagggcggagagaaaacacg

SEQ ID NO: 225836 - DNA, 25 bp, Homo sapien
tgttagtatgtctgtgcgcctgcac

SEQ ID NO: 225837 - DNA, 25 bp, Homo sapien
tgactccagagatgtgttatgacct

SEQ ID NO: 225838 - DNA, 25 bp, Homo sapien
ccttgaaggacttagcagcatagct

SEQ ID NO: 225839 - DNA, 25 bp, Homo sapien
taacttggttctacttggtgcctgc

SEQ ID NO: 225840 - DNA, 25 bp, Homo sapien
cacgcttattttagggccagcggca

SEQ ID NO: 225841 - DNA, 25 bp, Homo sapien
gacctttggctatggcgcacgctta

SEQ ID NO: 225842 - DNA, 25 bp, Homo sapien
gactcacaggattgcatcgtcccag

SEQ ID NO: 225843 - DNA, 25 bp, Homo sapien
tggcagcggtactactttgagggca

SEQ ID NO: 225844 - DNA, 25 bp, Homo sapien
tgctttattgctgaggagcccagag

SEQ ID NO: 225845 - DNA, 25 bp, Homo sapien
taggagtgactcgtggcagatcccg

SEQ ID NO: 225846 - DNA, 25 bp, Homo sapien
aaagttctcccgtgcaacagcagca

SEQ ID NO: 225847 - DNA, 25 bp, Homo sapien
ggacactgctgggagaatttacacc

SEQ ID NO: 225848 - DNA, 25 bp, Homo sapien
agacagcatggaacgcaggcagaag

SEQ ID NO: 225849 - DNA, 25 bp, Homo sapien
tgcaactgtgctaggtactcctcct

SEQ ID NO: 225850 - DNA, 25 bp, Homo sapien
tgtcctcgtcatagcagcagtgctg

SEQ ID NO: 225851 - DNA, 25 bp, Homo sapien
tccagggcgtcgtgtcgaacttgaa

SEQ ID NO: 225852 - DNA, 25 bp, Homo sapien
tcagccacttctcacagctgtccac

SEQ ID NO: 225853 - DNA, 25 bp, Homo sapien
catgtccgtagcattgcgggccagg

SEQ ID NO: 225854 - DNA, 25 bp, Homo sapien
caggccacctcagtgccgctgatgg

SEQ ID NO: 225855 - DNA, 25 bp, Homo sapien
tgccgctgatggggaaaccccccca

SEQ ID NO: 225856 - DNA, 25 bp, Homo sapien
ggtggctccgcaggccacctcagtg

SEQ ID NO: 225857 - DNA, 25 bp, Homo sapien
cgcaggccacctcagtgccgctgat

SEQ ID NO: 225858 - DNA, 25 bp, Homo sapien
ctcctatgcaggggtaggggctcat

SEQ ID NO: 225859 - DNA, 25 bp, Homo sapien
cctatgcaggggtaggggctcatct

SEQ ID NO: 225860 - DNA, 25 bp, Homo sapien
ccactcctatgcaggggtaggggct

SEQ ID NO: 225861 - DNA, 25 bp, Homo sapien
cagccactcctatgcaggggtaggg

SEQ ID NO: 225862 - DNA, 25 bp, Homo sapien
gtacgggtctcggtggcagtgcagc

SEQ ID NO: 225863 - DNA, 25 bp, Homo sapien
agccatagccacagggccgagtcct

SEQ ID NO: 225864 - DNA, 25 bp, Homo sapien
tcacaggtacgggtctcggtggcag

SEQ ID NO: 225865 - DNA, 25 bp, Homo sapien
gcaggtcacaggtacgggtctcggt

SEQ ID NO: 225866 - DNA, 25 bp, Homo sapien
cagggactccactccttctgaggct

SEQ ID NO: 225867 - DNA, 25 bp, Homo sapien
agggactccactccttctgaggctc

SEQ ID NO: 225868 - DNA, 25 bp, Homo sapien
agaccagggactccactccttctga

SEQ ID NO: 225869 - DNA, 25 bp, Homo sapien
cagggagaccagggactccactcct

SEQ ID NO: 225870 - DNA, 25 bp, Homo sapien
agttccattgaaccagagcgcctgc

SEQ ID NO: 225871 - DNA, 25 bp, Homo sapien
gtcccagttgtctgtagttccattg

SEQ ID NO: 225872 - DNA, 25 bp, Homo sapien
agaatccttgaagacccaatccccg

SEQ ID NO: 225873 - DNA, 25 bp, Homo sapien
tcctctgaaggatagtcctcgtctt

SEQ ID NO: 225874 - DNA, 25 bp, Homo sapien
gccaacaggtctatcgacacctcgg

SEQ ID NO: 225875 - DNA, 25 bp, Homo sapien
ggctcagccaacaggtctatcgaca

SEQ ID NO: 225876 - DNA, 25 bp, Homo sapien
ttgctgggctcagccaacaggtcta

SEQ ID NO: 225877 - DNA, 25 bp, Homo sapien
caggtctatcgacacctcggcctgg

SEQ ID NO: 225878 - DNA, 25 bp, Homo sapien
cctggcctcttagggcacaagaatc

SEQ ID NO: 225879 - DNA, 25 bp, Homo sapien
gctgcattccaaagagacgagggat

SEQ ID NO: 225880 - DNA, 25 bp, Homo sapien
gacatttttggctaaccttcctggc

SEQ ID NO: 225881 - DNA, 25 bp, Homo sapien
ggtgagaggcccaacctttccttca

SEQ ID NO: 225882 - DNA, 25 bp, Homo sapien
gattcctggaatcccttgtagccta

SEQ ID NO: 225883 - DNA, 25 bp, Homo sapien
tagggtatcctgagcccaccttgtc

SEQ ID NO: 225884 - DNA, 25 bp, Homo sapien
ccatggtctagagaacaaaggctca

SEQ ID NO: 225885 - DNA, 25 bp, Homo sapien
ccctacaccacagggagagcatggg

SEQ ID NO: 225886 - DNA, 25 bp, Homo sapien
cctgggaggcgtggcattccctggg

SEQ ID NO: 225887 - DNA, 25 bp, Homo sapien
ggtactcaaggttgcgtggaccaat

SEQ ID NO: 225888 - DNA, 25 bp, Homo sapien
gcgtggaccaattctggcagcttct

SEQ ID NO: 225889 - DNA, 25 bp, Homo sapien
cagcaagggagtaacctcctgggtc

SEQ ID NO: 225890 - DNA, 25 bp, Homo sapien
gttctggggagcagtcgtgcctcct

SEQ ID NO: 225891 - DNA, 25 bp, Homo sapien
ctcttccctcagaggcctaggatct

SEQ ID NO: 225892 - DNA, 25 bp, Homo sapien
gggagcagtcgtgcctcctcctctt

SEQ ID NO: 225893 - DNA, 25 bp, Homo sapien
tcttccctcagaggcctaggatctg

SEQ ID NO: 225894 - DNA, 25 bp, Homo sapien
ctcaaggttgtgttggccaatcccg

SEQ ID NO: 225895 - DNA, 25 bp, Homo sapien
cagccgcaacggagtaacctctggg

SEQ ID NO: 225896 - DNA, 25 bp, Homo sapien
tgtgttggccaatcccggcagcttc

SEQ ID NO: 225897 - DNA, 25 bp, Homo sapien
ccagccgcaacggagtaacctctgg

SEQ ID NO: 225898 - DNA, 25 bp, Homo sapien
acagtccagcatccatgttggtgtg

SEQ ID NO: 225899 - DNA, 25 bp, Homo sapien
tgctggctcagtgacagtccagcat

SEQ ID NO: 225900 - DNA, 25 bp, Homo sapien
ttccttcagaggcctaggatctggg

SEQ ID NO: 225901 - DNA, 25 bp, Homo sapien
ccatgttggtgtggctctgcctgca

SEQ ID NO: 225902 - DNA, 25 bp, Homo sapien
cagacagtggactgtatccacaaag

SEQ ID NO: 225903 - DNA, 25 bp, Homo sapien
gggtaagtgagggtgtagctggtca

SEQ ID NO: 225904 - DNA, 25 bp, Homo sapien
tgtgtatctgtagtgtaaaatctcc

SEQ ID NO: 225905 - DNA, 25 bp, Homo sapien
tgcctgctttaaggccctcaacggg

SEQ ID NO: 225906 - DNA, 25 bp, Homo sapien
ctgcactaaacgcctggtcccaggg

SEQ ID NO: 225907 - DNA, 25 bp, Homo sapien
gacctccccttctgcggtgtccaaa

SEQ ID NO: 225908 - DNA, 25 bp, Homo sapien
gggctcctgcactaaacgcctggtc

SEQ ID NO: 225909 - DNA, 25 bp, Homo sapien
cagggctcctgcactaaacgcctgg

SEQ ID NO: 225910 - DNA, 25 bp, Homo sapien
cagggccgggcacccagaggcccag

SEQ ID NO: 225911 - DNA, 25 bp, Homo sapien
aagggctgaggggatcagggccggg

SEQ ID NO: 225912 - DNA, 25 bp, Homo sapien
atctcccagaagggctgaggggatc

SEQ ID NO: 225913 - DNA, 25 bp, Homo sapien
gctgaggggatcagggccgggcacc

SEQ ID NO: 225914 - DNA, 25 bp, Homo sapien
aatgaacgtccgctgcattccaggg

SEQ ID NO: 225915 - DNA, 25 bp, Homo sapien
cctaatacaagtctggctgtctttg

SEQ ID NO: 225916 - DNA, 25 bp, Homo sapien
cattccagggggcaataagctggac

SEQ ID NO: 225917 - DNA, 25 bp, Homo sapien
agctggactgtagacccctcagtga

SEQ ID NO: 225918 - DNA, 25 bp, Homo sapien
tgaccgtttgaacctcagcggccct

SEQ ID NO: 225919 - DNA, 25 bp, Homo sapien
agattcctcgcaccggcgggactcc

SEQ ID NO: 225920 - DNA, 25 bp, Homo sapien
ccgccactccgcaaagcgccagatt

SEQ ID NO: 225921 - DNA, 25 bp, Homo sapien
ggcgggactcctctccgagctagcg

SEQ ID NO: 225922 - DNA, 25 bp, Homo sapien
gaggtccgctcagggcgaggaagcc

SEQ ID NO: 225923 - DNA, 25 bp, Homo sapien
ctgcaggcgaggtccgctcagggcg

SEQ ID NO: 225924 - DNA, 25 bp, Homo sapien
cccggccaccgtggagtgtcggcca

SEQ ID NO: 225925 - DNA, 25 bp, Homo sapien
ctcagggcgaggaagcccggccacc

SEQ ID NO: 225926 - DNA, 25 bp, Homo sapien
ccggctcgcggtcacgcgcgaggag

SEQ ID NO: 225927 - DNA, 25 bp, Homo sapien
agtggaagccccgaagtccggcgca

SEQ ID NO: 225928 - DNA, 25 bp, Homo sapien
aagtcaaacttgtcacccggctggt

SEQ ID NO: 225929 - DNA, 25 bp, Homo sapien
agtcaaacttgtcacccggctggtc

SEQ ID NO: 225930 - DNA, 25 bp, Homo sapien
tgtgtgtgtcccggtcccgctcccc

SEQ ID NO: 225931 - DNA, 25 bp, Homo sapien
cccctctctccatcggggggtcgct

SEQ ID NO: 225932 - DNA, 25 bp, Homo sapien
ctgtgtgtgtcccggtcccgctccc

SEQ ID NO: 225933 - DNA, 25 bp, Homo sapien
ggaggtgggaccgacagcgcgctcc

SEQ ID NO: 225934 - DNA, 25 bp, Homo sapien
gtgggaccgacagcgcgctccgcag

SEQ ID NO: 225935 - DNA, 25 bp, Homo sapien
aggtgggaccgacagcgcgctccgc

SEQ ID NO: 225936 - DNA, 25 bp, Homo sapien
ggggaggtgggaccgacagcgcgct

SEQ ID NO: 225937 - DNA, 25 bp, Homo sapien
agcctcgtgaggctcccaggccgtg

SEQ ID NO: 225938 - DNA, 25 bp, Homo sapien
ggaggagcccggctcggtcgcggag

SEQ ID NO: 225939 - DNA, 25 bp, Homo sapien
tcgtgaggctcccaggccgtggtcc

SEQ ID NO: 225940 - DNA, 25 bp, Homo sapien
tctgcgagcctcgtgaggctcccag

SEQ ID NO: 225941 - DNA, 25 bp, Homo sapien
aggctgctctgcctgcacctctgca

SEQ ID NO: 225942 - DNA, 25 bp, Homo sapien
tgcctgcacctctgcacgcggccgc

SEQ ID NO: 225943 - DNA, 25 bp, Homo sapien
tctgcctgcacctctgcacgcggcc

SEQ ID NO: 225944 - DNA, 25 bp, Homo sapien
gctgctctgcctgcacctctgcacg

SEQ ID NO: 225945 - DNA, 25 bp, Homo sapien
cgtcttgaccctgtgggcggctctc

SEQ ID NO: 225946 - DNA, 25 bp, Homo sapien
acagctctagggtccgcgcacctgg

SEQ ID NO: 225947 - DNA, 25 bp, Homo sapien
ccccagcgaattcctgttcgcggga

SEQ ID NO: 225948 - DNA, 25 bp, Homo sapien
tcctgttcgcgggaagctgcggccc

SEQ ID NO: 225949 - DNA, 25 bp, Homo sapien
ttaagtcatctcaagtagttcccct

SEQ ID NO: 225950 - DNA, 25 bp, Homo sapien
acaagatatttgcatgggatgcttc

SEQ ID NO: 225951 - DNA, 25 bp, Homo sapien
tcacagtcatccagtaaagtacaaa

SEQ ID NO: 225952 - DNA, 25 bp, Homo sapien
cgcttcacagtcatccagtaaagta

SEQ ID NO: 225953 - DNA, 25 bp, Homo sapien
tgatacctaggatatgactggaccc

SEQ ID NO: 225954 - DNA, 25 bp, Homo sapien
catccacgtgaagcaagtagcaggg

SEQ ID NO: 225955 - DNA, 25 bp, Homo sapien
tgttaagggtaaagacaccacgcca

SEQ ID NO: 225956 - DNA, 25 bp, Homo sapien
tacggagcagctttgtacccaacac

SEQ ID NO: 225957 - DNA, 25 bp, Homo sapien
ctgaaaaagcaaagtgagtcacctt

SEQ ID NO: 225958 - DNA, 25 bp, Homo sapien
tttaatggactgaaaaagcaaagtg

SEQ ID NO: 225959 - DNA, 25 bp, Homo sapien
taatggactgaaaaagcaaagtgag

SEQ ID NO: 225960 - DNA, 25 bp, Homo sapien
aaaaagcaaagtgagtcaccttcgt

SEQ ID NO: 225961 - DNA, 25 bp, Homo sapien
tcatttagagtggaggtggccacct

SEQ ID NO: 225962 - DNA, 25 bp, Homo sapien
tagctgaggcaatgtctttcacgtg

SEQ ID NO: 225963 - DNA, 25 bp, Homo sapien
gatggccacagaagtgtggttcctg

SEQ ID NO: 225964 - DNA, 25 bp, Homo sapien
gagatttagcaaaggaaggattaga

SEQ ID NO: 225965 - DNA, 25 bp, Homo sapien
tcagctgcaataggtccccaacttc

SEQ ID NO: 225966 - DNA, 25 bp, Homo sapien
caaagggcctgtccagtagaggtac

SEQ ID NO: 225967 - DNA, 25 bp, Homo sapien
tagaggtaccaaccgatgacgggaa

SEQ ID NO: 225968 - DNA, 25 bp, Homo sapien
catacgtcgtctcgtcaaagggcct

SEQ ID NO: 225969 - DNA, 25 bp, Homo sapien
aatccaaccacaacgacaccgatgt

SEQ ID NO: 225970 - DNA, 25 bp, Homo sapien
gacaccgatgttccgcttcagcatc

SEQ ID NO: 225971 - DNA, 25 bp, Homo sapien
gaaatccaaccacaacgacaccgat

SEQ ID NO: 225972 - DNA, 25 bp, Homo sapien
acaacgacaccgatgttccgcttca

SEQ ID NO: 225973 - DNA, 25 bp, Homo sapien
gcccatatgacttcatgttgaaacc

SEQ ID NO: 225974 - DNA, 25 bp, Homo sapien
tcacccatccaacaagatgtgcctt

SEQ ID NO: 225975 - DNA, 25 bp, Homo sapien
caatgagttcaatcaaactggagaa

SEQ ID NO: 225976 - DNA, 25 bp, Homo sapien
tactgagcctatactaagcaggtca

SEQ ID NO: 225977 - DNA, 25 bp, Homo sapien
ttggcaggcatgtagagcatcaaag

SEQ ID NO: 225978 - DNA, 25 bp, Homo sapien
tagagcatcaaaggcactactggag

SEQ ID NO: 225979 - DNA, 25 bp, Homo sapien
ggcatgtagagcatcaaaggcacta

SEQ ID NO: 225980 - DNA, 25 bp, Homo sapien
ccaattttggcaggcatgtagagca

SEQ ID NO: 225981 - DNA, 25 bp, Homo sapien
cagctaactgttgtacacactcttt

SEQ ID NO: 225982 - DNA, 25 bp, Homo sapien
gctaactgttgtacacactctttac

SEQ ID NO: 225983 - DNA, 25 bp, Homo sapien
gaaatacctggtgttttcagctaac

SEQ ID NO: 225984 - DNA, 25 bp, Homo sapien
cctgaaatacctggtgttttcagct

SEQ ID NO: 225985 - DNA, 25 bp, Homo sapien
ctggaaagtcacggtgagagaaaac

SEQ ID NO: 225986 - DNA, 25 bp, Homo sapien
atagtataaaatcgtatctttaatc

SEQ ID NO: 225987 - DNA, 25 bp, Homo sapien
aacagtaacatatctgtaatagtat

SEQ ID NO: 225988 - DNA, 25 bp, Homo sapien
cagtaacatatctgtaatagtataa

SEQ ID NO: 225989 - DNA, 25 bp, Homo sapien
gtataaaatcgtatctttaatccta

SEQ ID NO: 225990 - DNA, 25 bp, Homo sapien
ttctggccatggagtactagaggct

SEQ ID NO: 225991 - DNA, 25 bp, Homo sapien
gaactgatgagccaagtcccctaac

SEQ ID NO: 225992 - DNA, 25 bp, Homo sapien
gggaatgccagactgtgctgcctga

SEQ ID NO: 225993 - DNA, 25 bp, Homo sapien
cctagtgtgagcactgaagagcatc

SEQ ID NO: 225994 - DNA, 25 bp, Homo sapien
tattaccaagtcaactgctagcctg

SEQ ID NO: 225995 - DNA, 25 bp, Homo sapien
gaacaacagcttaatctcatctcag

SEQ ID NO: 225996 - DNA, 25 bp, Homo sapien
catctcagctgaaggtatcttggac

SEQ ID NO: 225997 - DNA, 25 bp, Homo sapien
gctagcctgccttatctcctgataa

SEQ ID NO: 225998 - DNA, 25 bp, Homo sapien
tatgagaccaacatggaccagactg

SEQ ID NO: 225999 - DNA, 25 bp, Homo sapien
taggcactggtgactaaatacaggg

SEQ ID NO: 226000 - DNA, 25 bp, Homo sapien
tactggaactctctgtacggatatc

SEQ ID NO: 226001 - DNA, 25 bp, Homo sapien
taaggaagcatgatccataggcact

SEQ ID NO: 226002 - DNA, 25 bp, Homo sapien
gcctataggccgagtttaagcaaaa

SEQ ID NO: 226003 - DNA, 25 bp, Homo sapien
aactcctatggacaattttctgcag

SEQ ID NO: 226004 - DNA, 25 bp, Homo sapien
tgaccaatggattcacgtcaccagg

SEQ ID NO: 226005 - DNA, 25 bp, Homo sapien
tagagttctgcacctcttatgacaa

SEQ ID NO: 226006 - DNA, 25 bp, Homo sapien
cgcttaagaggcttttgaagctata

SEQ ID NO: 226007 - DNA, 25 bp, Homo sapien
tagtcaaaaacagattgctgactga

SEQ ID NO: 226008 - DNA, 25 bp, Homo sapien
tgtgcccagccgcttaagaggcttt

SEQ ID NO: 226009 - DNA, 25 bp, Homo sapien
ttttgtagctggcacgtggttaagt

SEQ ID NO: 226010 - DNA, 25 bp, Homo sapien
ccatctatcaggtcactggtttata

SEQ ID NO: 226011 - DNA, 25 bp, Homo sapien
attaagtatctgctataaagttggg

SEQ ID NO: 226012 - DNA, 25 bp, Homo sapien
gctaggatcaagtctatttgatgaa

SEQ ID NO: 226013 - DNA, 25 bp, Homo sapien
tgcccggccgggtatcaggttctta

SEQ ID NO: 226014 - DNA, 25 bp, Homo sapien
gaaacgaggcacaaaaggagagaat

SEQ ID NO: 226015 - DNA, 25 bp, Homo sapien
aaagggctactgatccatggagaga

SEQ ID NO: 226016 - DNA, 25 bp, Homo sapien
gaggcaaatgcccaaaagagctttc

SEQ ID NO: 226017 - DNA, 25 bp, Homo sapien
tcatttgttgggctgattactcaca

SEQ ID NO: 226018 - DNA, 25 bp, Homo sapien
cagcatcagataaactgctaaactc

SEQ ID NO: 226019 - DNA, 25 bp, Homo sapien
gaagcgagtctgattcccagcatca

SEQ ID NO: 226020 - DNA, 25 bp, Homo sapien
caaaactgtgcttaccagaaaactt

SEQ ID NO: 226021 - DNA, 25 bp, Homo sapien
tactttaaagcacaacaaagaagaa

SEQ ID NO: 226022 - DNA, 25 bp, Homo sapien
tatggtgcttgacgggagggttaaa

SEQ ID NO: 226023 - DNA, 25 bp, Homo sapien
ttgacgggagggttaaaagctgtca

SEQ ID NO: 226024 - DNA, 25 bp, Homo sapien
tgcttgacgggagggttaaaagctg

SEQ ID NO: 226025 - DNA, 25 bp, Homo sapien
ggaagtatggtgcttgacgggaggg

SEQ ID NO: 226026 - DNA, 25 bp, Homo sapien
ccagcaaggctgtgttttttcaaca

SEQ ID NO: 226027 - DNA, 25 bp, Homo sapien
gaagacaggcaggaaagtctctctt

SEQ ID NO: 226028 - DNA, 25 bp, Homo sapien
ttttcaacacttctaacccttctgc

SEQ ID NO: 226029 - DNA, 25 bp, Homo sapien
acccttctgcatgggaatcttggaa

SEQ ID NO: 226030 - DNA, 25 bp, Homo sapien
tgcagacacgtctctggcacagtgt

SEQ ID NO: 226031 - DNA, 25 bp, Homo sapien
acttggtgcagacacgtctctggca

SEQ ID NO: 226032 - DNA, 25 bp, Homo sapien
cagacacgtctctggcacagtgtgc

SEQ ID NO: 226033 - DNA, 25 bp, Homo sapien
ggtgcagacacgtctctggcacagt

SEQ ID NO: 226034 - DNA, 25 bp, Homo sapien
aagtcgtgtggaaactggatctcac

SEQ ID NO: 226035 - DNA, 25 bp, Homo sapien
aaagtcgtgtggaaactggatctca

SEQ ID NO: 226036 - DNA, 25 bp, Homo sapien
tgaaggctctgtactctcaccaaag

SEQ ID NO: 226037 - DNA, 25 bp, Homo sapien
ggctctgtactctcaccaaagagca

SEQ ID NO: 226038 - DNA, 25 bp, Homo sapien
cttcccttacatgctgcagcttttc

SEQ ID NO: 226039 - DNA, 25 bp, Homo sapien
gtactctcaccaaagagcaacattt

SEQ ID NO: 226040 - DNA, 25 bp, Homo sapien
tcaagaaaaacagcacgtttggctg

SEQ ID NO: 226041 - DNA, 25 bp, Homo sapien
cacactaaaaaagtgtccatggaaa

SEQ ID NO: 226042 - DNA, 25 bp, Homo sapien
gggtcgttctcatggcatatgtatc

SEQ ID NO: 226043 - DNA, 25 bp, Homo sapien
gccagctctgcctattagtaaacct

SEQ ID NO: 226044 - DNA, 25 bp, Homo sapien
tgcactatgagaatgtgttcgcagg

SEQ ID NO: 226045 - DNA, 25 bp, Homo sapien
gatgcacttcatggaggtgatgatc

SEQ ID NO: 226046 - DNA, 25 bp, Homo sapien
gaggtgacaatgacgtggcatacac

SEQ ID NO: 226047 - DNA, 25 bp, Homo sapien
gatctgctccactacaggaggtgac

SEQ ID NO: 226048 - DNA, 25 bp, Homo sapien
ttcttgcattcaccggcaatgtcag

SEQ ID NO: 226049 - DNA, 25 bp, Homo sapien
agaggactcctcacttcaatggcac

SEQ ID NO: 226050 - DNA, 25 bp, Homo sapien
tccttctaagttctagaggactcct

SEQ ID NO: 226051 - DNA, 25 bp, Homo sapien
cactggaatagggacactaatctga

SEQ ID NO: 226052 - DNA, 25 bp, Homo sapien
tacaatgctttgtagtaccccacag

SEQ ID NO: 226053 - DNA, 25 bp, Homo sapien
tgcatcaaaattcaccgtatgattt

SEQ ID NO: 226054 - DNA, 25 bp, Homo sapien
ctgcatcaaaattcaccgtatgatt

SEQ ID NO: 226055 - DNA, 25 bp, Homo sapien
atgctttgtagtaccccacagctgg

SEQ ID NO: 226056 - DNA, 25 bp, Homo sapien
catcctcgggatccaggccaaagta

SEQ ID NO: 226057 - DNA, 25 bp, Homo sapien
caaaactctttgtgaacgttcccat

SEQ ID NO: 226058 - DNA, 25 bp, Homo sapien
gaagacgaacaatagatccctccat

SEQ ID NO: 226059 - DNA, 25 bp, Homo sapien
cagggcgccaatgctgtgagcctca

SEQ ID NO: 226060 - DNA, 25 bp, Homo sapien
tcgtgtccgaggctgaccataaaca

SEQ ID NO: 226061 - DNA, 25 bp, Homo sapien
catcgaaacttgactaaaggacggt

SEQ ID NO: 226062 - DNA, 25 bp, Homo sapien
tctaatcccagtgagtcattcggaa

SEQ ID NO: 226063 - DNA, 25 bp, Homo sapien
aaaaaacttcacagtgcgtgctcca

SEQ ID NO: 226064 - DNA, 25 bp, Homo sapien
taccctgccattaagttagcttctg

SEQ ID NO: 226065 - DNA, 25 bp, Homo sapien
cttatggtggttaatgggcctggaa

SEQ ID NO: 226066 - DNA, 25 bp, Homo sapien
gctactgccattaatgatgatcata

SEQ ID NO: 226067 - DNA, 25 bp, Homo sapien
gttcttgtggctctgttggttctta

SEQ ID NO: 226068 - DNA, 25 bp, Homo sapien
taagcaagcctgacaatcagttgaa

SEQ ID NO: 226069 - DNA, 25 bp, Homo sapien
tgttgccacactacagatttcatac

SEQ ID NO: 226070 - DNA, 25 bp, Homo sapien
gttgccacactacagatttcatact

SEQ ID NO: 226071 - DNA, 25 bp, Homo sapien
gccacactacagatttcatacttaa

SEQ ID NO: 226072 - DNA, 25 bp, Homo sapien
cacactacagatttcatacttaaaa

SEQ ID NO: 226073 - DNA, 25 bp, Homo sapien
caacattaagtctggggaatactta

SEQ ID NO: 226074 - DNA, 25 bp, Homo sapien
taataggggtgggagacatcctatc

SEQ ID NO: 226075 - DNA, 25 bp, Homo sapien
aataggggtgggagacatcctatca

SEQ ID NO: 226076 - DNA, 25 bp, Homo sapien
tttaagcaacattaagtctggggaa

SEQ ID NO: 226077 - DNA, 25 bp, Homo sapien
taagatagtctaaggttgtgactgt

SEQ ID NO: 226078 - DNA, 25 bp, Homo sapien
tggaggaaggagttataaaagtaca

SEQ ID NO: 226079 - DNA, 25 bp, Homo sapien
agtctaaggttgtgactgtgcttac

SEQ ID NO: 226080 - DNA, 25 bp, Homo sapien
acacaaataagatagtctaaggttg

SEQ ID NO: 226081 - DNA, 25 bp, Homo sapien
ctgcaaagcctccagttcttaggca

SEQ ID NO: 226082 - DNA, 25 bp, Homo sapien
aagcctccagttcttaggcagagag

SEQ ID NO: 226083 - DNA, 25 bp, Homo sapien
gcctccccaagtcctgcaaagcctc

SEQ ID NO: 226084 - DNA, 25 bp, Homo sapien
cctccagttcttaggcagagagcaa

SEQ ID NO: 226085 - DNA, 25 bp, Homo sapien
tgagtacatacagacacgactaagg

SEQ ID NO: 226086 - DNA, 25 bp, Homo sapien
tacagacacgactaagggaacaaca

SEQ ID NO: 226087 - DNA, 25 bp, Homo sapien
tgctgattacctgggtggcgaaata

SEQ ID NO: 226088 - DNA, 25 bp, Homo sapien
tctgtacacaaacccccgagacatg

SEQ ID NO: 226089 - DNA, 25 bp, Homo sapien
tggatcgaaagaatagcaaaaccaa

SEQ ID NO: 226090 - DNA, 25 bp, Homo sapien
gatcgaaagaatagcaaaaccaagg

SEQ ID NO: 226091 - DNA, 25 bp, Homo sapien
catggatcgaaagaatagcaaaacc

SEQ ID NO: 226092 - DNA, 25 bp, Homo sapien
tcgaaagaatagcaaaaccaaggcc

SEQ ID NO: 226093 - DNA, 25 bp, Homo sapien
ctcccagaaccagtgatgcatgatt

SEQ ID NO: 226094 - DNA, 25 bp, Homo sapien
gttcatcactcagaatcaggcaacc

SEQ ID NO: 226095 - DNA, 25 bp, Homo sapien
ctaatggttgctcctgacagtctgg

SEQ ID NO: 226096 - DNA, 25 bp, Homo sapien
ccatctgagcattgctttagcttca

SEQ ID NO: 226097 - DNA, 25 bp, Homo sapien
caacctgtataaacgtttaatgcta

SEQ ID NO: 226098 - DNA, 25 bp, Homo sapien
caaactataataggttacatttcca

SEQ ID NO: 226099 - DNA, 25 bp, Homo sapien
cactcaaaatatttacgagtttgaa

SEQ ID NO: 226100 - DNA, 25 bp, Homo sapien
gaagatatacatgagggagttttca

SEQ ID NO: 226101 - DNA, 25 bp, Homo sapien
gttttcataaatgacagagtatctt

SEQ ID NO: 226102 - DNA, 25 bp, Homo sapien
agatatacatgagggagttttcata

SEQ ID NO: 226103 - DNA, 25 bp, Homo sapien
catgagggagttttcataaatgaca

SEQ ID NO: 226104 - DNA, 25 bp, Homo sapien
ggaatgttcattgaattcgttgcaa

SEQ ID NO: 226105 - DNA, 25 bp, Homo sapien
tgccatacgccatagcagcttctac

SEQ ID NO: 226106 - DNA, 25 bp, Homo sapien
tcctaagaaccttgctacaagctcc

SEQ ID NO: 226107 - DNA, 25 bp, Homo sapien
tgaattcgttgcaaatcccatgcca

SEQ ID NO: 226108 - DNA, 25 bp, Homo sapien
tatacagaaggatgatgctacgggt

SEQ ID NO: 226109 - DNA, 25 bp, Homo sapien
ttagtggacatctgtaattctgaac

SEQ ID NO: 226110 - DNA, 25 bp, Homo sapien
ttttgacgtcctcattcccagaaga

SEQ ID NO: 226111 - DNA, 25 bp, Homo sapien
agcacctaaaagtagggtcaacctg

SEQ ID NO: 226112 - DNA, 25 bp, Homo sapien
gacgagaggacttgatgatcccaac

SEQ ID NO: 226113 - DNA, 25 bp, Homo sapien
caacttggctaattgcttggtgtaa

SEQ ID NO: 226114 - DNA, 25 bp, Homo sapien
cttggtgtaagaggcctcgcttttg

SEQ ID NO: 226115 - DNA, 25 bp, Homo sapien
tctcatggaggtagcgagtaaaaca

SEQ ID NO: 226116 - DNA, 25 bp, Homo sapien
tactcctcaaggactttggcggctg

SEQ ID NO: 226117 - DNA, 25 bp, Homo sapien
tcttgacatgatccagtattccgtg

SEQ ID NO: 226118 - DNA, 25 bp, Homo sapien
gctccatactcctcaaggactttgg

SEQ ID NO: 226119 - DNA, 25 bp, Homo sapien
tccgtgcaaatccaagatagttgta

SEQ ID NO: 226120 - DNA, 25 bp, Homo sapien
ataacaccctttattatattccctg

SEQ ID NO: 226121 - DNA, 25 bp, Homo sapien
caccctttattatattccctgtata

SEQ ID NO: 226122 - DNA, 25 bp, Homo sapien
acaccctttattatattccctgtat

SEQ ID NO: 226123 - DNA, 25 bp, Homo sapien
aatatgtaaggaaaccaatcatatt

SEQ ID NO: 226124 - DNA, 25 bp, Homo sapien
aaaccaatcatattgtatcctcagc

SEQ ID NO: 226125 - DNA, 25 bp, Homo sapien
accaatcatattgtatcctcagctg

SEQ ID NO: 226126 - DNA, 25 bp, Homo sapien
aaccaatcatattgtatcctcagct

SEQ ID NO: 226127 - DNA, 25 bp, Homo sapien
catgtacagattccttgtataaaag

SEQ ID NO: 226128 - DNA, 25 bp, Homo sapien
gttgtctcttatcctcatgtacaga

SEQ ID NO: 226129 - DNA, 25 bp, Homo sapien
tcaaaatcttgatacaatgacacaa

SEQ ID NO: 226130 - DNA, 25 bp, Homo sapien
cacactacagattggccgattccag

SEQ ID NO: 226131 - DNA, 25 bp, Homo sapien
cacccttgtgatcgggttgcggatg

SEQ ID NO: 226132 - DNA, 25 bp, Homo sapien
tggacacccttgtgatcgggttgcg

SEQ ID NO: 226133 - DNA, 25 bp, Homo sapien
ttcctggacacccttgtgatcgggt

SEQ ID NO: 226134 - DNA, 25 bp, Homo sapien
tcgggttgcggatgtgatgtagggt

SEQ ID NO: 226135 - DNA, 25 bp, Homo sapien
cacaagctgtatgaaaaatcccctg

SEQ ID NO: 226136 - DNA, 25 bp, Homo sapien
ctatgcatctacactaggagaggtc

SEQ ID NO: 226137 - DNA, 25 bp, Homo sapien
cagcaatacacgtcaattatcaagt

SEQ ID NO: 226138 - DNA, 25 bp, Homo sapien
tccctgcagataaagagtttttagt

SEQ ID NO: 226139 - DNA, 25 bp, Homo sapien
gctaccatcggtcataactgccatc

SEQ ID NO: 226140 - DNA, 25 bp, Homo sapien
taccatcggtcataactgccatcaa

SEQ ID NO: 226141 - DNA, 25 bp, Homo sapien
tcagctaccatcggtcataactgcc

SEQ ID NO: 226142 - DNA, 25 bp, Homo sapien
cagctaccatcggtcataactgcca

SEQ ID NO: 226143 - DNA, 25 bp, Homo sapien
acaatactgtacaacctaggaaggg

SEQ ID NO: 226144 - DNA, 25 bp, Homo sapien
caatactgtacaacctaggaagggt

SEQ ID NO: 226145 - DNA, 25 bp, Homo sapien
tggtgacacttttcaattctccaat

SEQ ID NO: 226146 - DNA, 25 bp, Homo sapien
gagtacgccataccccacatacgtg

SEQ ID NO: 226147 - DNA, 25 bp, Homo sapien
catacgtgagcacagcaaccagcat

SEQ ID NO: 226148 - DNA, 25 bp, Homo sapien
gaaatctcgaagatatccaaagagg

SEQ ID NO: 226149 - DNA, 25 bp, Homo sapien
cccagcctagtctacaagtttattc

SEQ ID NO: 226150 - DNA, 25 bp, Homo sapien
cctggattatatgttgccttctgtc

SEQ ID NO: 226151 - DNA, 25 bp, Homo sapien
gattttgtcaaacgtcctaatgata

SEQ ID NO: 226152 - DNA, 25 bp, Homo sapien
tattgcactgtaaactgactcagaa

SEQ ID NO: 226153 - DNA, 25 bp, Homo sapien
taacagcttatgtgtcaccacaatc

SEQ ID NO: 226154 - DNA, 25 bp, Homo sapien
caccacaatccatttcttacttatg

SEQ ID NO: 226155 - DNA, 25 bp, Homo sapien
tgttttaaaccacttgcaaacctga

SEQ ID NO: 226156 - DNA, 25 bp, Homo sapien
agaacattcagtaaaccgctattgt

SEQ ID NO: 226157 - DNA, 25 bp, Homo sapien
cttgctgcaaatcccctggagatct

SEQ ID NO: 226158 - DNA, 25 bp, Homo sapien
ttccctcgggcaaattgccacacct

SEQ ID NO: 226159 - DNA, 25 bp, Homo sapien
cagaattttctatcaagactgattt

SEQ ID NO: 226160 - DNA, 25 bp, Homo sapien
gagaaaaacttgctgcaaatcccct

SEQ ID NO: 226161 - DNA, 25 bp, Homo sapien
aataaaggtttgtgctcctcccact

SEQ ID NO: 226162 - DNA, 25 bp, Homo sapien
caaataaaggtttgtgctcctccca

SEQ ID NO: 226163 - DNA, 25 bp, Homo sapien
aaaggtttgtgctcctcccactcat

SEQ ID NO: 226164 - DNA, 25 bp, Homo sapien
ctcaaataaaggtttgtgctcctcc

SEQ ID NO: 226165 - DNA, 25 bp, Homo sapien
gtattgctctcatgtagttaccaag

SEQ ID NO: 226166 - DNA, 25 bp, Homo sapien
cctgttcattaaaagacatggtggg

SEQ ID NO: 226167 - DNA, 25 bp, Homo sapien
tgatggcacagttggcaacatttcc

SEQ ID NO: 226168 - DNA, 25 bp, Homo sapien
taaagtgatcctagacgtttctgac

SEQ ID NO: 226169 - DNA, 25 bp, Homo sapien
gaggtcgggccagcggccggacact

SEQ ID NO: 226170 - DNA, 25 bp, Homo sapien
cagagctccgggagtaagacctcca

SEQ ID NO: 226171 - DNA, 25 bp, Homo sapien
gtccttgagcctccaggctcgtgga

SEQ ID NO: 226172 - DNA, 25 bp, Homo sapien
gggcagagaaaagtacccggagctc

SEQ ID NO: 226173 - DNA, 25 bp, Homo sapien
gttcgccacgcagccattcgcccgc

SEQ ID NO: 226174 - DNA, 25 bp, Homo sapien
ttcgcccgcaccgtgcggcggcagc

SEQ ID NO: 226175 - DNA, 25 bp, Homo sapien
ccgtacttccccgttcgccacgcag

SEQ ID NO: 226176 - DNA, 25 bp, Homo sapien
tgctcctcacgtacccgttccgtac

SEQ ID NO: 226177 - DNA, 25 bp, Homo sapien
tggcagcaccaggcgcaaggcaggc

SEQ ID NO: 226178 - DNA, 25 bp, Homo sapien
ctggcagcaccaggcgcaaggcagg

SEQ ID NO: 226179 - DNA, 25 bp, Homo sapien
ggcagcaccaggcgcaaggcaggct

SEQ ID NO: 226180 - DNA, 25 bp, Homo sapien
gctgctccaagtcccgctccgcacc

SEQ ID NO: 226181 - DNA, 25 bp, Homo sapien
tgtggtcctgaggaccgctgaccaa

SEQ ID NO: 226182 - DNA, 25 bp, Homo sapien
agaggaccggtctcggccaaggcca

SEQ ID NO: 226183 - DNA, 25 bp, Homo sapien
tccccgaaaccggaaatggctgcag

SEQ ID NO: 226184 - DNA, 25 bp, Homo sapien
ccacgcagcgaagggaaaaagcggc

SEQ ID NO: 226185 - DNA, 25 bp, Homo sapien
tagggcttgcctgtttaatggtcca

SEQ ID NO: 226186 - DNA, 25 bp, Homo sapien
caattagagtgtgaggaaataaaag

SEQ ID NO: 226187 - DNA, 25 bp, Homo sapien
tggccaatcacggacgagagcaaag

SEQ ID NO: 226188 - DNA, 25 bp, Homo sapien
agaaggaggcggaccccatgctgct

SEQ ID NO: 226189 - DNA, 25 bp, Homo sapien
atttgcatccacaaaactgggcagg

SEQ ID NO: 226190 - DNA, 25 bp, Homo sapien
tttgcatccacaaaactgggcaggt

SEQ ID NO: 226191 - DNA, 25 bp, Homo sapien
atatttgcatccacaaaactgggca

SEQ ID NO: 226192 - DNA, 25 bp, Homo sapien
tatttgcatccacaaaactgggcag

SEQ ID NO: 226193 - DNA, 25 bp, Homo sapien
ctccagaagcacctgagagcttcct

SEQ ID NO: 226194 - DNA, 25 bp, Homo sapien
acactgccaccctggacttcctctg

SEQ ID NO: 226195 - DNA, 25 bp, Homo sapien
ctctgctccagaagcacctgagagc

SEQ ID NO: 226196 - DNA, 25 bp, Homo sapien
accctggacttcctctgggcactca

SEQ ID NO: 226197 - DNA, 25 bp, Homo sapien
ctgctccaggaagcaagtggacttt

SEQ ID NO: 226198 - DNA, 25 bp, Homo sapien
tgctccaggaagcaagtggactttt

SEQ ID NO: 226199 - DNA, 25 bp, Homo sapien
caaagagcaagtgaccctcagacac

SEQ ID NO: 226200 - DNA, 25 bp, Homo sapien
gatgacaaagagcaagtgaccctca

SEQ ID NO: 226201 - DNA, 25 bp, Homo sapien
gttaggaggatgacaaagagcaagt

SEQ ID NO: 226202 - DNA, 25 bp, Homo sapien
gaggatgacaaagagcaagtgaccc

SEQ ID NO: 226203 - DNA, 25 bp, Homo sapien
gctggcactctgtggagaagacgca

SEQ ID NO: 226204 - DNA, 25 bp, Homo sapien
tttacccttgatgccgctggcactc

SEQ ID NO: 226205 - DNA, 25 bp, Homo sapien
gcactctgtggagaagacgcattat

SEQ ID NO: 226206 - DNA, 25 bp, Homo sapien
gatgccgctggcactctgtggagaa

SEQ ID NO: 226207 - DNA, 25 bp, Homo sapien
ctaggtgatgcaactcaaataaatt

SEQ ID NO: 226208 - DNA, 25 bp, Homo sapien
gacaaacttctaggtgatgcaactc

SEQ ID NO: 226209 - DNA, 25 bp, Homo sapien
ttcatgtttctagttcaagaacaca

SEQ ID NO: 226210 - DNA, 25 bp, Homo sapien
catgtttctagttcaagaacacaag

SEQ ID NO: 226211 - DNA, 25 bp, Homo sapien
gcgacccccgcagatacaatgagtt

SEQ ID NO: 226212 - DNA, 25 bp, Homo sapien
ctgcgacccccgcagatacaatgag

SEQ ID NO: 226213 - DNA, 25 bp, Homo sapien
tgcgacccccgcagatacaatgagt

SEQ ID NO: 226214 - DNA, 25 bp, Homo sapien
gctgcgacccccgcagatacaatga

SEQ ID NO: 226215 - DNA, 25 bp, Homo sapien
gaaggccacgcatcgggtttcgtca

SEQ ID NO: 226216 - DNA, 25 bp, Homo sapien
tgcaggaaaaccatactactgtcat

SEQ ID NO: 226217 - DNA, 25 bp, Homo sapien
aacaagatgaaagcacaggtgcttg

SEQ ID NO: 226218 - DNA, 25 bp, Homo sapien
gataggtatgccagccttaacaaca

SEQ ID NO: 226219 - DNA, 25 bp, Homo sapien
tgaggaagacggttcccccgtcata

SEQ ID NO: 226220 - DNA, 25 bp, Homo sapien
ggcagagagagttccggaagttcca

SEQ ID NO: 226221 - DNA, 25 bp, Homo sapien
tttccttacatcagtggtcctgtcc

SEQ ID NO: 226222 - DNA, 25 bp, Homo sapien
tccggaagttccactcattaagctt

SEQ ID NO: 226223 - DNA, 25 bp, Homo sapien
cattcccacggtagtacatgagtgc

SEQ ID NO: 226224 - DNA, 25 bp, Homo sapien
gaactgtactagacaccagggcacg

SEQ ID NO: 226225 - DNA, 25 bp, Homo sapien
tgccatgcggcacttacagcctagt

SEQ ID NO: 226226 - DNA, 25 bp, Homo sapien
tagtcaaggaagatctcaccaaagt

SEQ ID NO: 226227 - DNA, 25 bp, Homo sapien
caggcaagaggctctaccaaaataa

SEQ ID NO: 226228 - DNA, 25 bp, Homo sapien
taagaccagcttatcttagtgacca

SEQ ID NO: 226229 - DNA, 25 bp, Homo sapien
tcagcaggacatctatgtctgaggc

SEQ ID NO: 226230 - DNA, 25 bp, Homo sapien
ggatccaccttagccagacatattt

SEQ ID NO: 226231 - DNA, 25 bp, Homo sapien
gctagagggcttcaatagcatgaac

SEQ ID NO: 226232 - DNA, 25 bp, Homo sapien
catcatgtttgtagaaaggagcact

SEQ ID NO: 226233 - DNA, 25 bp, Homo sapien
catgcattgcaaacagtaggtacca

SEQ ID NO: 226234 - DNA, 25 bp, Homo sapien
gaaatgtaaagtaacctggaccatg

SEQ ID NO: 226235 - DNA, 25 bp, Homo sapien
gcttgtctgggtgctgaagtccacg

SEQ ID NO: 226236 - DNA, 25 bp, Homo sapien
gctgttgtggaagaacatacctcct

SEQ ID NO: 226237 - DNA, 25 bp, Homo sapien
tcatttacggtaagcaggtgcctga

SEQ ID NO: 226238 - DNA, 25 bp, Homo sapien
gagtttacttctgcgtgggttccaa

SEQ ID NO: 226239 - DNA, 25 bp, Homo sapien
ctgtcagggtttatcctggcccgtt

SEQ ID NO: 226240 - DNA, 25 bp, Homo sapien
agctgtcagggtttatcctggcccg

SEQ ID NO: 226241 - DNA, 25 bp, Homo sapien
cagctgtcagggtttatcctggccc

SEQ ID NO: 226242 - DNA, 25 bp, Homo sapien
tcagctgtcagggtttatcctggcc

SEQ ID NO: 226243 - DNA, 25 bp, Homo sapien
catcctcgatgggttctagagggaa

SEQ ID NO: 226244 - DNA, 25 bp, Homo sapien
tgtcggacagtcatgttaacacgag

SEQ ID NO: 226245 - DNA, 25 bp, Homo sapien
ttaacacgagcggtcttcaagtagc

SEQ ID NO: 226246 - DNA, 25 bp, Homo sapien
tgccagtcctccatagaacaaggct

SEQ ID NO: 226247 - DNA, 25 bp, Homo sapien
cccaggagaaagatggcggactgtc

SEQ ID NO: 226248 - DNA, 25 bp, Homo sapien
cactgtgcataaacatggccgtggg

SEQ ID NO: 226249 - DNA, 25 bp, Homo sapien
cgtggttcaagaggcggctgaaacc

SEQ ID NO: 226250 - DNA, 25 bp, Homo sapien
gctgaaacccgacattatcatgatg

SEQ ID NO: 226251 - DNA, 25 bp, Homo sapien
cctgcttcagctcggaaatcctcaa

SEQ ID NO: 226252 - DNA, 25 bp, Homo sapien
agctcagatctgtctacgtggattc

SEQ ID NO: 226253 - DNA, 25 bp, Homo sapien
aaatccacaggcagcggctacttgc

SEQ ID NO: 226254 - DNA, 25 bp, Homo sapien
gagtccaggcggtagtaattcagga

SEQ ID NO: 226255 - DNA, 25 bp, Homo sapien
ggtgtgtaatgatctgctgagtatt

SEQ ID NO: 226256 - DNA, 25 bp, Homo sapien
aggtgtgtaatgatctgctgagtat

SEQ ID NO: 226257 - DNA, 25 bp, Homo sapien
aaggtgtgtaatgatctgctgagta

SEQ ID NO: 226258 - DNA, 25 bp, Homo sapien
tctattagggtaaaaatgcaactca

SEQ ID NO: 226259 - DNA, 25 bp, Homo sapien
tgctcaaaacatcggaactaactct

SEQ ID NO: 226260 - DNA, 25 bp, Homo sapien
catttatagcatggccaagataggc

SEQ ID NO: 226261 - DNA, 25 bp, Homo sapien
aaaaccgtcattgccaacaggtgcc

SEQ ID NO: 226262 - DNA, 25 bp, Homo sapien
tatttgggctatatgtacctgacag

SEQ ID NO: 226263 - DNA, 25 bp, Homo sapien
cctggcctggccataatactctcta

SEQ ID NO: 226264 - DNA, 25 bp, Homo sapien
taagactttcacttacaggttccta

SEQ ID NO: 226265 - DNA, 25 bp, Homo sapien
caggttcctatatggatgaatctga

SEQ ID NO: 226266 - DNA, 25 bp, Homo sapien
gtcacccaacgcagtttctccagta

SEQ ID NO: 226267 - DNA, 25 bp, Homo sapien
tgtcccagttataatggtagcctac

SEQ ID NO: 226268 - DNA, 25 bp, Homo sapien
tataatggtagcctacggtcaccca

SEQ ID NO: 226269 - DNA, 25 bp, Homo sapien
gtctccgtttagtcgcttctttata

SEQ ID NO: 226270 - DNA, 25 bp, Homo sapien
ttccagcagctcaggctccttccca

SEQ ID NO: 226271 - DNA, 25 bp, Homo sapien
atgctatgaatccatagagaatagg

SEQ ID NO: 226272 - DNA, 25 bp, Homo sapien
ttatgctatgaatccatagagaata

SEQ ID NO: 226273 - DNA, 25 bp, Homo sapien
gctccttcccatttgttctcacaaa

SEQ ID NO: 226274 - DNA, 25 bp, Homo sapien
ctggcacttcagttgaactcaggta

SEQ ID NO: 226275 - DNA, 25 bp, Homo sapien
ggcacttcagttgaactcaggtacc

SEQ ID NO: 226276 - DNA, 25 bp, Homo sapien
cacttcagttgaactcaggtacctt

SEQ ID NO: 226277 - DNA, 25 bp, Homo sapien
tctctttgggttctttttctgatca

SEQ ID NO: 226278 - DNA, 25 bp, Homo sapien
gagtgcttaatgtgctcaatgcgca

SEQ ID NO: 226279 - DNA, 25 bp, Homo sapien
tgcttaatgtgctcaatgcgcacat

SEQ ID NO: 226280 - DNA, 25 bp, Homo sapien
cttaatgtgctcaatgcgcacatta

SEQ ID NO: 226281 - DNA, 25 bp, Homo sapien
agtgcttaatgtgctcaatgcgcac

SEQ ID NO: 226282 - DNA, 25 bp, Homo sapien
ggcaagagtcttgcccttaacttac

SEQ ID NO: 226283 - DNA, 25 bp, Homo sapien
ttggcaagagtcttgcccttaactt

SEQ ID NO: 226284 - DNA, 25 bp, Homo sapien
cttggcaagagtcttgcccttaact

SEQ ID NO: 226285 - DNA, 25 bp, Homo sapien
tggcaagagtcttgcccttaactta

SEQ ID NO: 226286 - DNA, 25 bp, Homo sapien
ttttgccatggcaacatttatgggc

SEQ ID NO: 226287 - DNA, 25 bp, Homo sapien
ccagttttgccatggcaacatttat

SEQ ID NO: 226288 - DNA, 25 bp, Homo sapien
agttttgccatggcaacatttatgg

SEQ ID NO: 226289 - DNA, 25 bp, Homo sapien
ttgccatggcaacatttatgggcca

SEQ ID NO: 226290 - DNA, 25 bp, Homo sapien
taatgtcgacaacatcatcctcctt

SEQ ID NO: 226291 - DNA, 25 bp, Homo sapien
tccctcttacagatgcgcatataca

SEQ ID NO: 226292 - DNA, 25 bp, Homo sapien
aatatcatccctcttacagatgcgc

SEQ ID NO: 226293 - DNA, 25 bp, Homo sapien
cactgcgtccagctgacaatatcat

SEQ ID NO: 226294 - DNA, 25 bp, Homo sapien
gaagcctgctcaaatgatccagtga

SEQ ID NO: 226295 - DNA, 25 bp, Homo sapien
gaaacatgctatgctccctgctgcc

SEQ ID NO: 226296 - DNA, 25 bp, Homo sapien
ggtccagggatgtaaaacaagccag

SEQ ID NO: 226297 - DNA, 25 bp, Homo sapien
gacccatgtaagtgcattagaccct

SEQ ID NO: 226298 - DNA, 25 bp, Homo sapien
tcctcatatccttctggctgcttga

SEQ ID NO: 226299 - DNA, 25 bp, Homo sapien
ttcttcatcctgtgctgaggcttcc

SEQ ID NO: 226300 - DNA, 25 bp, Homo sapien
tttcttcatcctgtgctgaggcttc

SEQ ID NO: 226301 - DNA, 25 bp, Homo sapien
tggctgcttgatgtcttttcctgct

SEQ ID NO: 226302 - DNA, 25 bp, Homo sapien
tcccacaaggtatgctattctcatg

SEQ ID NO: 226303 - DNA, 25 bp, Homo sapien
tgaaatgctctactccactctcagc

SEQ ID NO: 226304 - DNA, 25 bp, Homo sapien
tccacaatgagggtaacagtgggaa

SEQ ID NO: 226305 - DNA, 25 bp, Homo sapien
catggccgtgcctctgactatacaa

SEQ ID NO: 226306 - DNA, 25 bp, Homo sapien
cttcctaggtagaacagcctgtaca

SEQ ID NO: 226307 - DNA, 25 bp, Homo sapien
aaaaatcttgagcatgcctagtgtg

SEQ ID NO: 226308 - DNA, 25 bp, Homo sapien
aaaattgtagttccggctattcagg

SEQ ID NO: 226309 - DNA, 25 bp, Homo sapien
gatagcactggaggtcaatgtggca

SEQ ID NO: 226310 - DNA, 25 bp, Homo sapien
tcactgctcctgttgataccataac

SEQ ID NO: 226311 - DNA, 25 bp, Homo sapien
cacaggctggtttaatagcagtagg

SEQ ID NO: 226312 - DNA, 25 bp, Homo sapien
tctcagttgcgaagaagacactact

SEQ ID NO: 226313 - DNA, 25 bp, Homo sapien
cactactaaaagctcatggacagga

SEQ ID NO: 226314 - DNA, 25 bp, Homo sapien
tcttctttagacatgtgtttgtcca

SEQ ID NO: 226315 - DNA, 25 bp, Homo sapien
tgggtctcttctttagacatgtgtt

SEQ ID NO: 226316 - DNA, 25 bp, Homo sapien
gttacatacattaggtttctgggaa

SEQ ID NO: 226317 - DNA, 25 bp, Homo sapien
catgtgtttgtccaggttacataca

SEQ ID NO: 226318 - DNA, 25 bp, Homo sapien
ctgtttcacccagtgccactggtaa

SEQ ID NO: 226319 - DNA, 25 bp, Homo sapien
tgtttcacccagtgccactggtaac

SEQ ID NO: 226320 - DNA, 25 bp, Homo sapien
agcagacagactggtggttgaactt

SEQ ID NO: 226321 - DNA, 25 bp, Homo sapien
tgaacttggaggtgttgaaaaagcc

SEQ ID NO: 226322 - DNA, 25 bp, Homo sapien
cttggacacagcagacagactggtg

SEQ ID NO: 226323 - DNA, 25 bp, Homo sapien
acagcagacagactggtggttgaac

SEQ ID NO: 226324 - DNA, 25 bp, Homo sapien
tgagtccataggcttgccacttgct

SEQ ID NO: 226325 - DNA, 25 bp, Homo sapien
gagtccataggcttgccacttgctg

SEQ ID NO: 226326 - DNA, 25 bp, Homo sapien
agtccataggcttgccacttgctga

SEQ ID NO: 226327 - DNA, 25 bp, Homo sapien
gacacatttagctgagatttgatca

SEQ ID NO: 226328 - DNA, 25 bp, Homo sapien
agacacatttagctgagatttgatc

SEQ ID NO: 226329 - DNA, 25 bp, Homo sapien
agaagacacatttagctgagatttg

SEQ ID NO: 226330 - DNA, 25 bp, Homo sapien
acacatttagctgagatttgatcac

SEQ ID NO: 226331 - DNA, 25 bp, Homo sapien
gagaagtcgatgaccccttccaggt

SEQ ID NO: 226332 - DNA, 25 bp, Homo sapien
caggacccttgccacgggctgcgtg

SEQ ID NO: 226333 - DNA, 25 bp, Homo sapien
tccccgggctcagtcgccagagtcg

SEQ ID NO: 226334 - DNA, 25 bp, Homo sapien
ctctgacggtagaagcggaaaagtt

SEQ ID NO: 226335 - DNA, 25 bp, Homo sapien
ctcaagtgacccgcccgcctgggct

SEQ ID NO: 226336 - DNA, 25 bp, Homo sapien
tgggcttcccaaaatgctgggatta

SEQ ID NO: 226337 - DNA, 25 bp, Homo sapien
caagtgacccgcccgcctgggcttc

SEQ ID NO: 226338 - DNA, 25 bp, Homo sapien
cctgggcttcccaaaatgctgggat

SEQ ID NO: 226339 - DNA, 25 bp, Homo sapien
actgcccctggtctgatttacaatt

SEQ ID NO: 226340 - DNA, 25 bp, Homo sapien
ttgagggttagggagtcataatacc

SEQ ID NO: 226341 - DNA, 25 bp, Homo sapien
tgcccctggtctgatttacaatttt

SEQ ID NO: 226342 - DNA, 25 bp, Homo sapien
gagggttagggagtcataataccaa

SEQ ID NO: 226343 - DNA, 25 bp, Homo sapien
ggtgggagaagcacaaacacaaccc

SEQ ID NO: 226344 - DNA, 25 bp, Homo sapien
gggtaactttactcatatgcagctg

SEQ ID NO: 226345 - DNA, 25 bp, Homo sapien
agagttcattcactttggagagacc

SEQ ID NO: 226346 - DNA, 25 bp, Homo sapien
caagaggttactttgcccactccaa

SEQ ID NO: 226347 - DNA, 25 bp, Homo sapien
tgctatctgagggtcttttagagcc

SEQ ID NO: 226348 - DNA, 25 bp, Homo sapien
ctatctgagggtcttttagagccac

SEQ ID NO: 226349 - DNA, 25 bp, Homo sapien
tatctgagggtcttttagagccacc

SEQ ID NO: 226350 - DNA, 25 bp, Homo sapien
gctatctgagggtcttttagagcca

SEQ ID NO: 226351 - DNA, 25 bp, Homo sapien
ctgaaccagaaaactccttgtcggg

SEQ ID NO: 226352 - DNA, 25 bp, Homo sapien
tgaaccagaaaactccttgtcggga

SEQ ID NO: 226353 - DNA, 25 bp, Homo sapien
tttgctttcaccagtgtaaacactg

SEQ ID NO: 226354 - DNA, 25 bp, Homo sapien
gaaattgagttgtatggcttggcac

SEQ ID NO: 226355 - DNA, 25 bp, Homo sapien
actactttgctttcaccagtgtaaa

SEQ ID NO: 226356 - DNA, 25 bp, Homo sapien
agtgtaaacactgaaattgagttgt

SEQ ID NO: 226357 - DNA, 25 bp, Homo sapien
ttctggcttctaggtcatcaccata

SEQ ID NO: 226358 - DNA, 25 bp, Homo sapien
tttattctggcttctaggtcatcac

SEQ ID NO: 226359 - DNA, 25 bp, Homo sapien
tattctggcttctaggtcatcacca

SEQ ID NO: 226360 - DNA, 25 bp, Homo sapien
tctggcttctaggtcatcaccatac

SEQ ID NO: 226361 - DNA, 25 bp, Homo sapien
tctccaggcttgatcataaacatta

SEQ ID NO: 226362 - DNA, 25 bp, Homo sapien
gccatatctttaccacctctccagg

SEQ ID NO: 226363 - DNA, 25 bp, Homo sapien
ttttactgggcctataaatactctg

SEQ ID NO: 226364 - DNA, 25 bp, Homo sapien
tgtccttgtccagatttttactggg

SEQ ID NO: 226365 - DNA, 25 bp, Homo sapien
ccgaggattaggaacaccgagagca

SEQ ID NO: 226366 - DNA, 25 bp, Homo sapien
catactgaacttcattggaagtccg

SEQ ID NO: 226367 - DNA, 25 bp, Homo sapien
tggaagtccgaggattaggaacacc

SEQ ID NO: 226368 - DNA, 25 bp, Homo sapien
tgaagagcctttggtcatactgaac

SEQ ID NO: 226369 - DNA, 25 bp, Homo sapien
gaattccaccttagtattgcagcgt

SEQ ID NO: 226370 - DNA, 25 bp, Homo sapien
ggtgagccataaacttccccaattc

SEQ ID NO: 226371 - DNA, 25 bp, Homo sapien
aacttttagtcctcagcctttggtg

SEQ ID NO: 226372 - DNA, 25 bp, Homo sapien
cttatttcctgtctaaagaggcaca

SEQ ID NO: 226373 - DNA, 25 bp, Homo sapien
tctcttttcgcctgtcatgccggat

SEQ ID NO: 226374 - DNA, 25 bp, Homo sapien
gctgtctctcttttcgcctgtcatg

SEQ ID NO: 226375 - DNA, 25 bp, Homo sapien
tgtctctcttttcgcctgtcatgcc

SEQ ID NO: 226376 - DNA, 25 bp, Homo sapien
tttcgcctgtcatgccggatttcat

SEQ ID NO: 226377 - DNA, 25 bp, Homo sapien
tgtgtgaacagttgaaaagtacttc

SEQ ID NO: 226378 - DNA, 25 bp, Homo sapien
ctgtgtgaacagttgaaaagtactt

SEQ ID NO: 226379 - DNA, 25 bp, Homo sapien
gtgtgaacagttgaaaagtacttca

SEQ ID NO: 226380 - DNA, 25 bp, Homo sapien
gggtcccacttatgttgtcgaggct

SEQ ID NO: 226381 - DNA, 25 bp, Homo sapien
ggggtcccacttatgttgtcgaggc

SEQ ID NO: 226382 - DNA, 25 bp, Homo sapien
ggtcccacttatgttgtcgaggctg

SEQ ID NO: 226383 - DNA, 25 bp, Homo sapien
gatgggcaaatatgtgataaagcaa

SEQ ID NO: 226384 - DNA, 25 bp, Homo sapien
aagcatgcggctaaaatatttaagg

SEQ ID NO: 226385 - DNA, 25 bp, Homo sapien
cactcagccttttaaaccttacttg

SEQ ID NO: 226386 - DNA, 25 bp, Homo sapien
ttgaatgtgaattctagaatcaagc

SEQ ID NO: 226387 - DNA, 25 bp, Homo sapien
taaaaatccacgcattggctgggca

SEQ ID NO: 226388 - DNA, 25 bp, Homo sapien
aaaaattccatgcatttatagccga

SEQ ID NO: 226389 - DNA, 25 bp, Homo sapien
catgtgactattcggttttcacagc

SEQ ID NO: 226390 - DNA, 25 bp, Homo sapien
tccccaatgtatgctttgggcatca

SEQ ID NO: 226391 - DNA, 25 bp, Homo sapien
cagcctcttcaattactttcatcag

SEQ ID NO: 226392 - DNA, 25 bp, Homo sapien
tctagagctagctttgggtagtatg

SEQ ID NO: 226393 - DNA, 25 bp, Homo sapien
agggattgcattgtgtctagagcta

SEQ ID NO: 226394 - DNA, 25 bp, Homo sapien
attcatgagcatgggctatctttcc

SEQ ID NO: 226395 - DNA, 25 bp, Homo sapien
aaaaaattagtgtagaatctaggtg

SEQ ID NO: 226396 - DNA, 25 bp, Homo sapien
ttgtctagttttggtgtcagtatac

SEQ ID NO: 226397 - DNA, 25 bp, Homo sapien
tggaatagtctgagtagaactggta

SEQ ID NO: 226398 - DNA, 25 bp, Homo sapien
gtcagtatactaatgaccttgtaga

SEQ ID NO: 226399 - DNA, 25 bp, Homo sapien
ttctctctacttgggcacgcatttc

SEQ ID NO: 226400 - DNA, 25 bp, Homo sapien
cacgcatttccacagcttcacgagc

SEQ ID NO: 226401 - DNA, 25 bp, Homo sapien
ctgggccatttctctaagtttctct

SEQ ID NO: 226402 - DNA, 25 bp, Homo sapien
ccacatgagttttgatcccagctct

SEQ ID NO: 226403 - DNA, 25 bp, Homo sapien
cagcaatgtagagggcttctgccaa

SEQ ID NO: 226404 - DNA, 25 bp, Homo sapien
gccaatttggcgaaattttcattta

SEQ ID NO: 226405 - DNA, 25 bp, Homo sapien
tagagggcttctgccaatttggcga

SEQ ID NO: 226406 - DNA, 25 bp, Homo sapien
caatgtagagggcttctgccaattt

SEQ ID NO: 226407 - DNA, 25 bp, Homo sapien
tagaaatacaaggaggaatcttcca

SEQ ID NO: 226408 - DNA, 25 bp, Homo sapien
cactcttgttgttcctttacagtca

SEQ ID NO: 226409 - DNA, 25 bp, Homo sapien
tgcatttttccagttagaaatacaa

SEQ ID NO: 226410 - DNA, 25 bp, Homo sapien
gaatcttccactcttgttgttcctt

SEQ ID NO: 226411 - DNA, 25 bp, Homo sapien
ctttcggctaggagaatgcatgaca

SEQ ID NO: 226412 - DNA, 25 bp, Homo sapien
tcggctaggagaatgcatgacaggc

SEQ ID NO: 226413 - DNA, 25 bp, Homo sapien
ttcggctaggagaatgcatgacagg

SEQ ID NO: 226414 - DNA, 25 bp, Homo sapien
tttcggctaggagaatgcatgacag

SEQ ID NO: 226415 - DNA, 25 bp, Homo sapien
cttggaggctccattggatctttct

SEQ ID NO: 226416 - DNA, 25 bp, Homo sapien
ggaggctccattggatctttctgca

SEQ ID NO: 226417 - DNA, 25 bp, Homo sapien
aggctccattggatctttctgcatt

SEQ ID NO: 226418 - DNA, 25 bp, Homo sapien
tggaggctccattggatctttctgc

SEQ ID NO: 226419 - DNA, 25 bp, Homo sapien
ccactccttgctgagatggtgtgta

SEQ ID NO: 226420 - DNA, 25 bp, Homo sapien
cactccttgctgagatggtgtgtat

SEQ ID NO: 226421 - DNA, 25 bp, Homo sapien
gccactccttgctgagatggtgtgt

SEQ ID NO: 226422 - DNA, 25 bp, Homo sapien
tgcggcgaccttctgtgatacagat

SEQ ID NO: 226423 - DNA, 25 bp, Homo sapien
agctgctcgaactggcatggctgcg

SEQ ID NO: 226424 - DNA, 25 bp, Homo sapien
catggctgcggcgaccttctgtgat

SEQ ID NO: 226425 - DNA, 25 bp, Homo sapien
tcgaactggcatggctgcggcgacc

SEQ ID NO: 226426 - DNA, 25 bp, Homo sapien
ggatcatctgcattcataacctcct

SEQ ID NO: 226427 - DNA, 25 bp, Homo sapien
tcataacctcctttggaaccaggtc

SEQ ID NO: 226428 - DNA, 25 bp, Homo sapien
ataacctcctttggaaccaggtcag

SEQ ID NO: 226429 - DNA, 25 bp, Homo sapien
tctgcattcataacctcctttggaa

SEQ ID NO: 226430 - DNA, 25 bp, Homo sapien
actgtccttgtcgagcaattgcatc

SEQ ID NO: 226431 - DNA, 25 bp, Homo sapien
atggccagcgcattcgacatttttt

SEQ ID NO: 226432 - DNA, 25 bp, Homo sapien
ccttgtcgagcaattgcatcatatt

SEQ ID NO: 226433 - DNA, 25 bp, Homo sapien
gaatggccagcgcattcgacatttt

SEQ ID NO: 226434 - DNA, 25 bp, Homo sapien
ctaataaccgaggtatccagccttt

SEQ ID NO: 226435 - DNA, 25 bp, Homo sapien
ggaggttctcttcgggaggagacca

SEQ ID NO: 226436 - DNA, 25 bp, Homo sapien
ttctcttcgggaggagaccagtgag

SEQ ID NO: 226437 - DNA, 25 bp, Homo sapien
ccagtgaggtctgccgtgatctctg

SEQ ID NO: 226438 - DNA, 25 bp, Homo sapien
gcaagatgctcacgcgaaaaaccca

SEQ ID NO: 226439 - DNA, 25 bp, Homo sapien
tagccgtagtcttggcccacgtcat

SEQ ID NO: 226440 - DNA, 25 bp, Homo sapien
actaggcctagtcgtagcggcggcc

SEQ ID NO: 226441 - DNA, 25 bp, Homo sapien
cacccagtggacagcgaaaggagag

SEQ ID NO: 226442 - DNA, 25 bp, Homo sapien
ttcttccagcgcgagcgacagcacc

SEQ ID NO: 226443 - DNA, 25 bp, Homo sapien
cagcgcgagcgacagcaccgctggg

SEQ ID NO: 226444 - DNA, 25 bp, Homo sapien
cgagcgacagcaccgctgggcgggt

SEQ ID NO: 226445 - DNA, 25 bp, Homo sapien
ccgcttcttccagcgcgagcgacag

SEQ ID NO: 226446 - DNA, 25 bp, Homo sapien
tgaccagaccaagcggttatcaagg

SEQ ID NO: 226447 - DNA, 25 bp, Homo sapien
gagtaccgtttgtattctgaccaga

SEQ ID NO: 226448 - DNA, 25 bp, Homo sapien
tatgcgacatgatagggcgttccct

SEQ ID NO: 226449 - DNA, 25 bp, Homo sapien
gcaacaaatgcataactcgatcgct

SEQ ID NO: 226450 - DNA, 25 bp, Homo sapien
tctcaagatctaactgaatggtagt

SEQ ID NO: 226451 - DNA, 25 bp, Homo sapien
acaaaaccattttcccagtcagtag

SEQ ID NO: 226452 - DNA, 25 bp, Homo sapien
accattttcccagtcagtagaaatc

SEQ ID NO: 226453 - DNA, 25 bp, Homo sapien
aatggtagtgaccaggactctttct

SEQ ID NO: 226454 - DNA, 25 bp, Homo sapien
tcagtaatattccaagtccgtcgcc

SEQ ID NO: 226455 - DNA, 25 bp, Homo sapien
tggagcgtggtctgggcaagagcag

SEQ ID NO: 226456 - DNA, 25 bp, Homo sapien
gaacgtgccccagaccgctgcttat

SEQ ID NO: 226457 - DNA, 25 bp, Homo sapien
ctccacccggtcttgcgaacgtgcc

SEQ ID NO: 226458 - DNA, 25 bp, Homo sapien
tggccctgtgagttccgaggcagaa

SEQ ID NO: 226459 - DNA, 25 bp, Homo sapien
tggcctgaccacttttgacctgagt

SEQ ID NO: 226460 - DNA, 25 bp, Homo sapien
cgccattttggctgtggcctgacca

SEQ ID NO: 226461 - DNA, 25 bp, Homo sapien
cttttgacctgagtgtagtgggcta

SEQ ID NO: 226462 - DNA, 25 bp, Homo sapien
tgggctagtgatgcctgtatgtgca

SEQ ID NO: 226463 - DNA, 25 bp, Homo sapien
ataactcaataccttcaggccagcc

SEQ ID NO: 226464 - DNA, 25 bp, Homo sapien
ttgagataactcaataccttcaggc

SEQ ID NO: 226465 - DNA, 25 bp, Homo sapien
aaggggagaaagagtagagcaagga

SEQ ID NO: 226466 - DNA, 25 bp, Homo sapien
ggagaaagagtagagcaaggagttt

SEQ ID NO: 226467 - DNA, 25 bp, Homo sapien
caagcactgtgcgtctagacccact

SEQ ID NO: 226468 - DNA, 25 bp, Homo sapien
ttgtcatcacggaatgtttgcttgg

SEQ ID NO: 226469 - DNA, 25 bp, Homo sapien
ctacagctcctttgcacgtgcagca

SEQ ID NO: 226470 - DNA, 25 bp, Homo sapien
cctgtcgacctgtcatggaatcttt

SEQ ID NO: 226471 - DNA, 25 bp, Homo sapien
agaaacttggtagggcccatggcca

SEQ ID NO: 226472 - DNA, 25 bp, Homo sapien
ttctgaatactgcatcgaaatctgt

SEQ ID NO: 226473 - DNA, 25 bp, Homo sapien
gtaggttcttgagccttgacgtgac

SEQ ID NO: 226474 - DNA, 25 bp, Homo sapien
caaaaccgttctgattctggaggat

SEQ ID NO: 226475 - DNA, 25 bp, Homo sapien
atgcatatgcaaataaatattctgg

SEQ ID NO: 226476 - DNA, 25 bp, Homo sapien
atatgcaaataaatattctgggtac

SEQ ID NO: 226477 - DNA, 25 bp, Homo sapien
gcatatgcaaataaatattctgggt

SEQ ID NO: 226478 - DNA, 25 bp, Homo sapien
ctaatgcatatgcaaataaatattc

SEQ ID NO: 226479 - DNA, 25 bp, Homo sapien
aattgcctcttgtaccaccttttgc

SEQ ID NO: 226480 - DNA, 25 bp, Homo sapien
tgaaattgcctcttgtaccaccttt

SEQ ID NO: 226481 - DNA, 25 bp, Homo sapien
cagctgaaattgcctcttgtaccac

SEQ ID NO: 226482 - DNA, 25 bp, Homo sapien
gctgaaattgcctcttgtaccacct

SEQ ID NO: 226483 - DNA, 25 bp, Homo sapien
tcgtactttgagaaacaaggctgca

SEQ ID NO: 226484 - DNA, 25 bp, Homo sapien
caaggctgcagcatccgtagcagat

SEQ ID NO: 226485 - DNA, 25 bp, Homo sapien
ggcttgcacccactcttgtctcgat

SEQ ID NO: 226486 - DNA, 25 bp, Homo sapien
tagcagatgctactgggctatgccc

SEQ ID NO: 226487 - DNA, 25 bp, Homo sapien
ggttctgtgttgtatcagggcatca

SEQ ID NO: 226488 - DNA, 25 bp, Homo sapien
tccaggccagtggtccatacagcat

SEQ ID NO: 226489 - DNA, 25 bp, Homo sapien
gagccatctgtcaagcctcgagaca

SEQ ID NO: 226490 - DNA, 25 bp, Homo sapien
aggccagtggtccatacagcatggg

SEQ ID NO: 226491 - DNA, 25 bp, Homo sapien
tctggggcagcttttgctatcgtac

SEQ ID NO: 226492 - DNA, 25 bp, Homo sapien
tttgctatcgtacttcacactccag

SEQ ID NO: 226493 - DNA, 25 bp, Homo sapien
tatcgtacttcacactccagaagtt

SEQ ID NO: 226494 - DNA, 25 bp, Homo sapien
gcagcttttgctatcgtacttcaca

SEQ ID NO: 226495 - DNA, 25 bp, Homo sapien
catgcaggaccctgggtaacagttc

SEQ ID NO: 226496 - DNA, 25 bp, Homo sapien
ggatcctccaacagagaccctctag

SEQ ID NO: 226497 - DNA, 25 bp, Homo sapien
gccttgagaagcagtcggagtccat

SEQ ID NO: 226498 - DNA, 25 bp, Homo sapien
gagtccatgactgtcctggaagcca

SEQ ID NO: 226499 - DNA, 25 bp, Homo sapien
actgggtgaaaggaactccttgctc

SEQ ID NO: 226500 - DNA, 25 bp, Homo sapien
gaagcggagaagctgatcatatcca

SEQ ID NO: 226501 - DNA, 25 bp, Homo sapien
gaggctcagacaaaaagaggatttt

SEQ ID NO: 226502 - DNA, 25 bp, Homo sapien
ttcttctgtggacccgaagcggaga

SEQ ID NO: 226503 - DNA, 25 bp, Homo sapien
tcccaatctgtttctataacgaggc

SEQ ID NO: 226504 - DNA, 25 bp, Homo sapien
ccagatccccctgtgtgttcatgaa

SEQ ID NO: 226505 - DNA, 25 bp, Homo sapien
aatttgttcccaatctcagagtttg

SEQ ID NO: 226506 - DNA, 25 bp, Homo sapien
tttctataacgaggccttccagatc

SEQ ID NO: 226507 - DNA, 25 bp, Homo sapien
aacagttcccgggagcccagacgtg

SEQ ID NO: 226508 - DNA, 25 bp, Homo sapien
cagttcccgggagcccagacgtggc

SEQ ID NO: 226509 - DNA, 25 bp, Homo sapien
tcccgggagcccagacgtggccaga

SEQ ID NO: 226510 - DNA, 25 bp, Homo sapien
tggaacagttcccgggagcccagac

SEQ ID NO: 226511 - DNA, 25 bp, Homo sapien
actacctgttgccagaggagtacac

SEQ ID NO: 226512 - DNA, 25 bp, Homo sapien
tgcaggtgcaccttcgctctgccag

SEQ ID NO: 226513 - DNA, 25 bp, Homo sapien
ggctccacagagcagcatgcaagag

SEQ ID NO: 226514 - DNA, 25 bp, Homo sapien
gatccgccaggtcatccgagaagat

SEQ ID NO: 226515 - DNA, 25 bp, Homo sapien
gctgaattcttgcagcctcgaccag

SEQ ID NO: 226516 - DNA, 25 bp, Homo sapien
tgctggggatccaccagtgacacaa

SEQ ID NO: 226517 - DNA, 25 bp, Homo sapien
tgcttcagaaaaggccccggctgaa

SEQ ID NO: 226518 - DNA, 25 bp, Homo sapien
ggccttggttgggatgcttcagaaa

SEQ ID NO: 226519 - DNA, 25 bp, Homo sapien
gcactgactattggtcccttaatgt

SEQ ID NO: 226520 - DNA, 25 bp, Homo sapien
actgactattggtcccttaatgtgg

SEQ ID NO: 226521 - DNA, 25 bp, Homo sapien
ggcactgactattggtcccttaatg

SEQ ID NO: 226522 - DNA, 25 bp, Homo sapien
cactgactattggtcccttaatgtg

SEQ ID NO: 226523 - DNA, 25 bp, Homo sapien
tcagtgatatcctggcctggagcgg

SEQ ID NO: 226524 - DNA, 25 bp, Homo sapien
ggagcgggggttggatcatacagca

SEQ ID NO: 226525 - DNA, 25 bp, Homo sapien
aggtgaacatagaaacatctctgac

SEQ ID NO: 226526 - DNA, 25 bp, Homo sapien
aggtaaacccgaactgtggctggag

SEQ ID NO: 226527 - DNA, 25 bp, Homo sapien
cttcctaggtcccagtcctcggata

SEQ ID NO: 226528 - DNA, 25 bp, Homo sapien
agagattccataagtgctcctaaag

SEQ ID NO: 226529 - DNA, 25 bp, Homo sapien
tcccagtcctcggataggctttgag

SEQ ID NO: 226530 - DNA, 25 bp, Homo sapien
aggttaccttgagctcagagattcc

SEQ ID NO: 226531 - DNA, 25 bp, Homo sapien
ctttatttggttgttaggcttatat

SEQ ID NO: 226532 - DNA, 25 bp, Homo sapien
tttatttggttgttaggcttatatc

SEQ ID NO: 226533 - DNA, 25 bp, Homo sapien
tgtagccagggatgggtacgacctc

SEQ ID NO: 226534 - DNA, 25 bp, Homo sapien
gatggttgtaaagacctggcccttc

SEQ ID NO: 226535 - DNA, 25 bp, Homo sapien
ttcgtgctgttgaaggaacgcaggc

SEQ ID NO: 226536 - DNA, 25 bp, Homo sapien
gacatctctacaccctgaatgggca

SEQ ID NO: 226537 - DNA, 25 bp, Homo sapien
tgtgcaacgggtagaataattcata

SEQ ID NO: 226538 - DNA, 25 bp, Homo sapien
tacgtagggacaagcgtatgctgca

SEQ ID NO: 226539 - DNA, 25 bp, Homo sapien
catctgactggagtttcaatgagaa

SEQ ID NO: 226540 - DNA, 25 bp, Homo sapien
ttacagctccccatagtacgtaggg

SEQ ID NO: 226541 - DNA, 25 bp, Homo sapien
cattgtccttgggaccttgtagttt

SEQ ID NO: 226542 - DNA, 25 bp, Homo sapien
cagtgggcctccgtagcttgcattg

SEQ ID NO: 226543 - DNA, 25 bp, Homo sapien
caatcgagcaatcgggctgggcttg

SEQ ID NO: 226544 - DNA, 25 bp, Homo sapien
gagagggcagcactcaatcgagcaa

SEQ ID NO: 226545 - DNA, 25 bp, Homo sapien
tgcggactttgaggaagccatattt

SEQ ID NO: 226546 - DNA, 25 bp, Homo sapien
atattttcctaagtccaggatccta

SEQ ID NO: 226547 - DNA, 25 bp, Homo sapien
caggatcctatggttctttttgtcc

SEQ ID NO: 226548 - DNA, 25 bp, Homo sapien
ctgcggactttgaggaagccatatt

SEQ ID NO: 226549 - DNA, 25 bp, Homo sapien
agggtcgtgcccaagccctctgatc

SEQ ID NO: 226550 - DNA, 25 bp, Homo sapien
tgcccaagccctctgatcggctggt

SEQ ID NO: 226551 - DNA, 25 bp, Homo sapien
cctctgatcggctggtgtgtctgga

SEQ ID NO: 226552 - DNA, 25 bp, Homo sapien
ggatctagtgctcagggtcgtgccc

SEQ ID NO: 226553 - DNA, 25 bp, Homo sapien
tgtgcctgcatgtaaccgggcagtg

SEQ ID NO: 226554 - DNA, 25 bp, Homo sapien
tgtgccactttggaagggaagcctc

SEQ ID NO: 226555 - DNA, 25 bp, Homo sapien
ctggcatgtgcataagtgtgcgtgt

SEQ ID NO: 226556 - DNA, 25 bp, Homo sapien
gaagcctcggcaactgctggcatgt

SEQ ID NO: 226557 - DNA, 25 bp, Homo sapien
aggtgcttttgatgcagtgctgagc

SEQ ID NO: 226558 - DNA, 25 bp, Homo sapien
gtaccatcaggtgtaaggtgctttt

SEQ ID NO: 226559 - DNA, 25 bp, Homo sapien
ttttgatgcagtgctgagcaaaagc

SEQ ID NO: 226560 - DNA, 25 bp, Homo sapien
cgagtaccatcaggtgtaaggtgct

SEQ ID NO: 226561 - DNA, 25 bp, Homo sapien
ttgccgaacatttctttcaggattg

SEQ ID NO: 226562 - DNA, 25 bp, Homo sapien
cttgccgaacatttctttcaggatt

SEQ ID NO: 226563 - DNA, 25 bp, Homo sapien
gctgttaccgtcaggtcaccttgga

SEQ ID NO: 226564 - DNA, 25 bp, Homo sapien
cgggaaatgagtgtgcttgtgccac

SEQ ID NO: 226565 - DNA, 25 bp, Homo sapien
ggaaatgagtgtgcttgtgccactt

SEQ ID NO: 226566 - DNA, 25 bp, Homo sapien
cacttgctgttaccgtcaggtcacc

SEQ ID NO: 226567 - DNA, 25 bp, Homo sapien
catctggagccagacatttcggtgt

SEQ ID NO: 226568 - DNA, 25 bp, Homo sapien
gccctaagtgggaactgcttggtct

SEQ ID NO: 226569 - DNA, 25 bp, Homo sapien
taaaaccaaaatcggcctgacgtga

SEQ ID NO: 226570 - DNA, 25 bp, Homo sapien
cctgacgtgaccgagtatgggaaca

SEQ ID NO: 226571 - DNA, 25 bp, Homo sapien
ttctcctgatggaggtgagagccct

SEQ ID NO: 226572 - DNA, 25 bp, Homo sapien
ccaggtccacaaggcagtgctgcat

SEQ ID NO: 226573 - DNA, 25 bp, Homo sapien
tgttccagagcttcgatgacacccc

SEQ ID NO: 226574 - DNA, 25 bp, Homo sapien
caaaggtgcgggctcagagctcgaa

SEQ ID NO: 226575 - DNA, 25 bp, Homo sapien
ggaagctgcctctgcgtagtaaagc

SEQ ID NO: 226576 - DNA, 25 bp, Homo sapien
ttcttgctggctccctaagtaatgg

SEQ ID NO: 226577 - DNA, 25 bp, Homo sapien
catcagggcccacttggacagtgag

SEQ ID NO: 226578 - DNA, 25 bp, Homo sapien
gacagctgtcgctttttctttgcgt

SEQ ID NO: 226579 - DNA, 25 bp, Homo sapien
tgggcttcgtctctggtgggaaaag

SEQ ID NO: 226580 - DNA, 25 bp, Homo sapien
ccaactggaaagctcgtacttgaag

SEQ ID NO: 226581 - DNA, 25 bp, Homo sapien
ctgtgttgagacctaaatggtgtct

SEQ ID NO: 226582 - DNA, 25 bp, Homo sapien
tatatttaggaatgacaatccaaga

SEQ ID NO: 226583 - DNA, 25 bp, Homo sapien
gggctaccagaaacttagggacaga

SEQ ID NO: 226584 - DNA, 25 bp, Homo sapien
tcctttcatgccaactccaggtgtg

SEQ ID NO: 226585 - DNA, 25 bp, Homo sapien
caggtgtggtgtgcccttatgcttc

SEQ ID NO: 226586 - DNA, 25 bp, Homo sapien
gcatagcctctacgtctcctttcat

SEQ ID NO: 226587 - DNA, 25 bp, Homo sapien
catttacagggtgatagaggtctac

SEQ ID NO: 226588 - DNA, 25 bp, Homo sapien
tatatttgcatcttaagaggtgacc

SEQ ID NO: 226589 - DNA, 25 bp, Homo sapien
agcaatctgatgaaagcagttcaca

SEQ ID NO: 226590 - DNA, 25 bp, Homo sapien
agagagtgactgataggcttaacct

SEQ ID NO: 226591 - DNA, 25 bp, Homo sapien
tattgtccagaagtaatgcccactc

SEQ ID NO: 226592 - DNA, 25 bp, Homo sapien
acagttcctggtgttacaagtaggg

SEQ ID NO: 226593 - DNA, 25 bp, Homo sapien
gaagatgtctggaacttgggtcagc

SEQ ID NO: 226594 - DNA, 25 bp, Homo sapien
ctttcagttggctctaagaatcaga

SEQ ID NO: 226595 - DNA, 25 bp, Homo sapien
tggagtgttgagtaggtggtaggca

SEQ ID NO: 226596 - DNA, 25 bp, Homo sapien
taggcactggtgaaaacattggctg

SEQ ID NO: 226597 - DNA, 25 bp, Homo sapien
aggtggtaggcactggtgaaaacat

SEQ ID NO: 226598 - DNA, 25 bp, Homo sapien
ctttggataacacatgtgaacatat

SEQ ID NO: 226599 - DNA, 25 bp, Homo sapien
ggtatatgctgtgggccaaatgact

SEQ ID NO: 226600 - DNA, 25 bp, Homo sapien
ccagatgctcaggcattttgacttc

SEQ ID NO: 226601 - DNA, 25 bp, Homo sapien
tgtgggccaaatgactggggtgctt

SEQ ID NO: 226602 - DNA, 25 bp, Homo sapien
cttggtatatgctgtgggccaaatg

SEQ ID NO: 226603 - DNA, 25 bp, Homo sapien
ggatactctgctgccatttaccggc

SEQ ID NO: 226604 - DNA, 25 bp, Homo sapien
ctcaggatactctgctgccatttac

SEQ ID NO: 226605 - DNA, 25 bp, Homo sapien
aggatactctgctgccatttaccgg

SEQ ID NO: 226606 - DNA, 25 bp, Homo sapien
caggatactctgctgccatttaccg

SEQ ID NO: 226607 - DNA, 25 bp, Homo sapien
tgttgaagagggtgtcgttttccac

SEQ ID NO: 226608 - DNA, 25 bp, Homo sapien
tgttccatcggtctacgtgcttatt

SEQ ID NO: 226609 - DNA, 25 bp, Homo sapien
ttgttgaagagggtgtcgttttcca

SEQ ID NO: 226610 - DNA, 25 bp, Homo sapien
tcggtctacgtgcttatttttatac

SEQ ID NO: 226611 - DNA, 25 bp, Homo sapien
tgtcacgttgctgcatcagagcgct

SEQ ID NO: 226612 - DNA, 25 bp, Homo sapien
tcctttctcaacatgtcacgttgct

SEQ ID NO: 226613 - DNA, 25 bp, Homo sapien
tgctgcgtggcattgaggccgccct

SEQ ID NO: 226614 - DNA, 25 bp, Homo sapien
ttgaagaccaacgacctgctgcgtg

SEQ ID NO: 226615 - DNA, 25 bp, Homo sapien
ttgtcaagatgtgccacgggtgcca

SEQ ID NO: 226616 - DNA, 25 bp, Homo sapien
ggctgaccgggtcttggccctaata

SEQ ID NO: 226617 - DNA, 25 bp, Homo sapien
catgagctcatcctgcgtgtgaagg

SEQ ID NO: 226618 - DNA, 25 bp, Homo sapien
aggacccagatctctttcagcgagg

SEQ ID NO: 226619 - DNA, 25 bp, Homo sapien
ttggaaccatctgcaccaactcaac

SEQ ID NO: 226620 - DNA, 25 bp, Homo sapien
tgatcagtccccatgagtggtgggc

SEQ ID NO: 226621 - DNA, 25 bp, Homo sapien
ccagtggggtgttggcatggagctc

SEQ ID NO: 226622 - DNA, 25 bp, Homo sapien
gggcttggaaccatctgcaccaact

SEQ ID NO: 226623 - DNA, 25 bp, Homo sapien
gagccccgggtaatgaatgttggaa

SEQ ID NO: 226624 - DNA, 25 bp, Homo sapien
gctggtggccagctgtatcaagccc

SEQ ID NO: 226625 - DNA, 25 bp, Homo sapien
aatgttggaagtggtcggtggccct

SEQ ID NO: 226626 - DNA, 25 bp, Homo sapien
gccagctgtatcaagcccatgagcc

SEQ ID NO: 226627 - DNA, 25 bp, Homo sapien
cagcttctagtaaaacggaggaatc

SEQ ID NO: 226628 - DNA, 25 bp, Homo sapien
tctagtaaaacggaggaatctagct

SEQ ID NO: 226629 - DNA, 25 bp, Homo sapien
ctagtaaaacggaggaatctagctg

SEQ ID NO: 226630 - DNA, 25 bp, Homo sapien
gcttctagtaaaacggaggaatcta

SEQ ID NO: 226631 - DNA, 25 bp, Homo sapien
aagaaaggggattggcagtgggctg

SEQ ID NO: 226632 - DNA, 25 bp, Homo sapien
agaaaggggattggcagtgggctgt

SEQ ID NO: 226633 - DNA, 25 bp, Homo sapien
aaagaaaggggattggcagtgggct

SEQ ID NO: 226634 - DNA, 25 bp, Homo sapien
caaagaaaggggattggcagtgggc

SEQ ID NO: 226635 - DNA, 25 bp, Homo sapien
ctctaacactgtgcttgcctgggtg

SEQ ID NO: 226636 - DNA, 25 bp, Homo sapien
tccgcgcacagcaatcacagtagca

SEQ ID NO: 226637 - DNA, 25 bp, Homo sapien
gatgttcctcattcctctctgctta

SEQ ID NO: 226638 - DNA, 25 bp, Homo sapien
gactctattacgacttccgcgcaca

SEQ ID NO: 226639 - DNA, 25 bp, Homo sapien
tgcgtgtccagaatagccgctcaga

SEQ ID NO: 226640 - DNA, 25 bp, Homo sapien
ctgggtgtcggtgccctgctctcct

SEQ ID NO: 226641 - DNA, 25 bp, Homo sapien
ctctgggcgccaggatgttcctgcc

SEQ ID NO: 226642 - DNA, 25 bp, Homo sapien
ttctaacgagggctcagctccgact

SEQ ID NO: 226643 - DNA, 25 bp, Homo sapien
agtcccgcttgcccggccagcgggt

SEQ ID NO: 226644 - DNA, 25 bp, Homo sapien
cttgcccggccagcgggtaccactc

SEQ ID NO: 226645 - DNA, 25 bp, Homo sapien
tggggtcgcggaagtcccgcttgcc

SEQ ID NO: 226646 - DNA, 25 bp, Homo sapien
ctggggtcgcggaagtcccgcttgc

SEQ ID NO: 226647 - DNA, 25 bp, Homo sapien
gcagtggtcgcagctcggcagaggt

SEQ ID NO: 226648 - DNA, 25 bp, Homo sapien
ggtgattatgaacgcattccttgtt

SEQ ID NO: 226649 - DNA, 25 bp, Homo sapien
gctggtgattatgaacgcattcctt

SEQ ID NO: 226650 - DNA, 25 bp, Homo sapien
gtggtcgcagctcggcagaggtgac

SEQ ID NO: 226651 - DNA, 25 bp, Homo sapien
gtgccacgttggcattctgcatttg

SEQ ID NO: 226652 - DNA, 25 bp, Homo sapien
cttgactctgaactcttgtctgagt

SEQ ID NO: 226653 - DNA, 25 bp, Homo sapien
actctgaactcttgtctgagttttc

SEQ ID NO: 226654 - DNA, 25 bp, Homo sapien
cacgttggcattctgcatttgcctc

SEQ ID NO: 226655 - DNA, 25 bp, Homo sapien
ccactgtcggggcttcctatatagc

SEQ ID NO: 226656 - DNA, 25 bp, Homo sapien
gggcttcctatatagctcagcaaag

SEQ ID NO: 226657 - DNA, 25 bp, Homo sapien
tgtcggggcttcctatatagctcag

SEQ ID NO: 226658 - DNA, 25 bp, Homo sapien
tatatagctcagcaaagagccttct

SEQ ID NO: 226659 - DNA, 25 bp, Homo sapien
tgatgctaccagatggtctaggact

SEQ ID NO: 226660 - DNA, 25 bp, Homo sapien
tcttgccactatttccaggccctag

SEQ ID NO: 226661 - DNA, 25 bp, Homo sapien
tggtctaggactccaaaatttgtgg

SEQ ID NO: 226662 - DNA, 25 bp, Homo sapien
caggccctagggacattcctgatgc

SEQ ID NO: 226663 - DNA, 25 bp, Homo sapien
cagattgcgggatcccaaaggttaa

SEQ ID NO: 226664 - DNA, 25 bp, Homo sapien
ttagaggtatgggtcacagattgcg

SEQ ID NO: 226665 - DNA, 25 bp, Homo sapien
caaaggttaaccttgcaggcaatgt

SEQ ID NO: 226666 - DNA, 25 bp, Homo sapien
gcagcggttggcactcatttgtaac

SEQ ID NO: 226667 - DNA, 25 bp, Homo sapien
atgtggctttggcaactatgagaac

SEQ ID NO: 226668 - DNA, 25 bp, Homo sapien
gtggctttggcaactatgagaacat

SEQ ID NO: 226669 - DNA, 25 bp, Homo sapien
tgatgtggctttggcaactatgaga

SEQ ID NO: 226670 - DNA, 25 bp, Homo sapien
aactatgagaacatctctgctccca

SEQ ID NO: 226671 - DNA, 25 bp, Homo sapien
ttgtcctctagccaaatcccaccgc

SEQ ID NO: 226672 - DNA, 25 bp, Homo sapien
tagccaaatcccaccgcatgtggca

SEQ ID NO: 226673 - DNA, 25 bp, Homo sapien
accgcatgtggcaccctgaacatac

SEQ ID NO: 226674 - DNA, 25 bp, Homo sapien
tcactttgtcctctagccaaatccc

SEQ ID NO: 226675 - DNA, 25 bp, Homo sapien
tcgcatgtggagctgtccttttcct

SEQ ID NO: 226676 - DNA, 25 bp, Homo sapien
acaaccccttctgtgaagtccaaag

SEQ ID NO: 226677 - DNA, 25 bp, Homo sapien
tttctctgccttcgcatgtggagct

SEQ ID NO: 226678 - DNA, 25 bp, Homo sapien
agtccaaagtagtctcaccctccac

SEQ ID NO: 226679 - DNA, 25 bp, Homo sapien
gtggctggtgcgtcatctctgacat

SEQ ID NO: 226680 - DNA, 25 bp, Homo sapien
ggctggtgcgtcatctctgacatct

SEQ ID NO: 226681 - DNA, 25 bp, Homo sapien
catgttggggcccttgattctgcag

SEQ ID NO: 226682 - DNA, 25 bp, Homo sapien
cataacatgttggggcccttgattc

SEQ ID NO: 226683 - DNA, 25 bp, Homo sapien
taactgcgtcaaaggcttcgtccct

SEQ ID NO: 226684 - DNA, 25 bp, Homo sapien
tttagatctgtataggccctgggca

SEQ ID NO: 226685 - DNA, 25 bp, Homo sapien
tccagttctgtgcaaggaaagcctt

SEQ ID NO: 226686 - DNA, 25 bp, Homo sapien
gctgtggcctgaaagtaactgcgtc

SEQ ID NO: 226687 - DNA, 25 bp, Homo sapien
ttggttggctaaaggctgcattcag

SEQ ID NO: 226688 - DNA, 25 bp, Homo sapien
ttattggaagaagtatgaaggaggc

SEQ ID NO: 226689 - DNA, 25 bp, Homo sapien
gctggtgacattgaccctgatgatt

SEQ ID NO: 226690 - DNA, 25 bp, Homo sapien
tctcattgggtaaaaacttattgga

SEQ ID NO: 226691 - DNA, 25 bp, Homo sapien
cattgcccaactgtcttcagaagca

SEQ ID NO: 226692 - DNA, 25 bp, Homo sapien
aaaagataagggatatggtgtgagg

SEQ ID NO: 226693 - DNA, 25 bp, Homo sapien
ttccacagagccattacccattgcc

SEQ ID NO: 226694 - DNA, 25 bp, Homo sapien
aaaaacccaacagacctcagctgtg

SEQ ID NO: 226695 - DNA, 25 bp, Homo sapien
ttttcccagtcccatcataattctt

SEQ ID NO: 226696 - DNA, 25 bp, Homo sapien
tcatgggagtacatgcagtttttcc

SEQ ID NO: 226697 - DNA, 25 bp, Homo sapien
gggacacgctgtcatgggagtacat

SEQ ID NO: 226698 - DNA, 25 bp, Homo sapien
caagtgtcttttctggaataggcca

SEQ ID NO: 226699 - DNA, 25 bp, Homo sapien
ataggttcctagatctccacccagt

SEQ ID NO: 226700 - DNA, 25 bp, Homo sapien
gtccagcgtttcctccgctagtcag

SEQ ID NO: 226701 - DNA, 25 bp, Homo sapien
ccagcgtttcctccgctagtcagtt

SEQ ID NO: 226702 - DNA, 25 bp, Homo sapien
agcgtttcctccgctagtcagtttc

SEQ ID NO: 226703 - DNA, 25 bp, Homo sapien
tccagcgtttcctccgctagtcagt

SEQ ID NO: 226704 - DNA, 25 bp, Homo sapien
gaagaccaagctacactggatacag

SEQ ID NO: 226705 - DNA, 25 bp, Homo sapien
ttctggaagaccaagctacactgga

SEQ ID NO: 226706 - DNA, 25 bp, Homo sapien
tctggaagaccaagctacactggat

SEQ ID NO: 226707 - DNA, 25 bp, Homo sapien
tggaagaccaagctacactggatac

SEQ ID NO: 226708 - DNA, 25 bp, Homo sapien
cagcctcttggggaagtccaagctg

SEQ ID NO: 226709 - DNA, 25 bp, Homo sapien
ctgaactaaagtcagtgctctctgg

SEQ ID NO: 226710 - DNA, 25 bp, Homo sapien
gcttctgaactaaagtcagtgctct

SEQ ID NO: 226711 - DNA, 25 bp, Homo sapien
cagaggcttctgaactaaagtcagt

SEQ ID NO: 226712 - DNA, 25 bp, Homo sapien
gagtcctctgtctctaccacatcat

SEQ ID NO: 226713 - DNA, 25 bp, Homo sapien
ctcgactggaaaaccttctgtaagt

SEQ ID NO: 226714 - DNA, 25 bp, Homo sapien
tattctggccgacgagtcctctgtc

SEQ ID NO: 226715 - DNA, 25 bp, Homo sapien
ttctgtaagtattctggccgacgag

SEQ ID NO: 226716 - DNA, 25 bp, Homo sapien
gggcggctgttggtacaagtcaaac

SEQ ID NO: 226717 - DNA, 25 bp, Homo sapien
cagggctagcgctggagctgacact

SEQ ID NO: 226718 - DNA, 25 bp, Homo sapien
tgaatcctttccagattgtagtggg

SEQ ID NO: 226719 - DNA, 25 bp, Homo sapien
caggctcgtagggaaataccaccga

SEQ ID NO: 226720 - DNA, 25 bp, Homo sapien
gcagtgggaagggattcagagatgg

SEQ ID NO: 226721 - DNA, 25 bp, Homo sapien
gtgggaagggattcagagatggaga

SEQ ID NO: 226722 - DNA, 25 bp, Homo sapien
tggcagtgggaagggattcagagat

SEQ ID NO: 226723 - DNA, 25 bp, Homo sapien
cagtgggaagggattcagagatgga

SEQ ID NO: 226724 - DNA, 25 bp, Homo sapien
gagcgcctatgctggttcttgtttg

SEQ ID NO: 226725 - DNA, 25 bp, Homo sapien
tgtcacactgagtaatgatatagct

SEQ ID NO: 226726 - DNA, 25 bp, Homo sapien
cttgtttggagatacagttatcaaa

SEQ ID NO: 226727 - DNA, 25 bp, Homo sapien
aatttattgccagctccatggagcg

SEQ ID NO: 226728 - DNA, 25 bp, Homo sapien
catgattggtaagcaggccctgacc

SEQ ID NO: 226729 - DNA, 25 bp, Homo sapien
tctgagtaccaggtggaagtttgcc

SEQ ID NO: 226730 - DNA, 25 bp, Homo sapien
tggccagagcatgattggtaagcag

SEQ ID NO: 226731 - DNA, 25 bp, Homo sapien
aatggaaaggtttcagctctctgag

SEQ ID NO: 226732 - DNA, 25 bp, Homo sapien
aaagccacatatgaggagctgaatc

SEQ ID NO: 226733 - DNA, 25 bp, Homo sapien
tggaaaagccacatatgaggagctg

SEQ ID NO: 226734 - DNA, 25 bp, Homo sapien
ttggaaaagccacatatgaggagct

SEQ ID NO: 226735 - DNA, 25 bp, Homo sapien
ccacatatgaggagctgaatcccta

SEQ ID NO: 226736 - DNA, 25 bp, Homo sapien
gcttcggacttgacatatgtgttcg

SEQ ID NO: 226737 - DNA, 25 bp, Homo sapien
cttggcttcggacttgacatatgtg

SEQ ID NO: 226738 - DNA, 25 bp, Homo sapien
acttgacatatgtgttcgtcttctc

SEQ ID NO: 226739 - DNA, 25 bp, Homo sapien
tcggacttgacatatgtgttcgtct

SEQ ID NO: 226740 - DNA, 25 bp, Homo sapien
ctcgccctgcttgccatgggtctgt

SEQ ID NO: 226741 - DNA, 25 bp, Homo sapien
cctctttcgagcactgtcctcgccc

SEQ ID NO: 226742 - DNA, 25 bp, Homo sapien
tctttcgagcactgtcctcgccctg

SEQ ID NO: 226743 - DNA, 25 bp, Homo sapien
atgggtctgtatcttgggacactac

SEQ ID NO: 226744 - DNA, 25 bp, Homo sapien
cagatgaaaagctggcgacattggt

SEQ ID NO: 226745 - DNA, 25 bp, Homo sapien
gcttgtggctagatcggtcagattt

SEQ ID NO: 226746 - DNA, 25 bp, Homo sapien
agatttcttgatagctgcagtaggg

SEQ ID NO: 226747 - DNA, 25 bp, Homo sapien
cattggtagggctggaatcgatccc

SEQ ID NO: 226748 - DNA, 25 bp, Homo sapien
ctatgagggaggtagcattggaaaa

SEQ ID NO: 226749 - DNA, 25 bp, Homo sapien
gtagcattggaaaaagcggagtgac

SEQ ID NO: 226750 - DNA, 25 bp, Homo sapien
ttggaaaaagcggagtgaccagcag

SEQ ID NO: 226751 - DNA, 25 bp, Homo sapien
gcattggaaaaagcggagtgaccag

SEQ ID NO: 226752 - DNA, 25 bp, Homo sapien
cacgtctccggttccatcctgttct

SEQ ID NO: 226753 - DNA, 25 bp, Homo sapien
tcctcctttggggttatctgctcta

SEQ ID NO: 226754 - DNA, 25 bp, Homo sapien
tgcctcttctataggggagcctctc

SEQ ID NO: 226755 - DNA, 25 bp, Homo sapien
tctgctctaggagctttattacggt

SEQ ID NO: 226756 - DNA, 25 bp, Homo sapien
ctacaggatgaggatgtctgcacat

SEQ ID NO: 226757 - DNA, 25 bp, Homo sapien
gggtggtcatgttcagctgtctcag

SEQ ID NO: 226758 - DNA, 25 bp, Homo sapien
ggttcagggctagtggctgtggctt

SEQ ID NO: 226759 - DNA, 25 bp, Homo sapien
aaactccaggggtgtgcaaggttca

SEQ ID NO: 226760 - DNA, 25 bp, Homo sapien
tttctggtgccctggtctgggtgct

SEQ ID NO: 226761 - DNA, 25 bp, Homo sapien
ctcctgctaccctattatggagggc

SEQ ID NO: 226762 - DNA, 25 bp, Homo sapien
cggcaatgtgagagtggatttctcc

SEQ ID NO: 226763 - DNA, 25 bp, Homo sapien
gctaccctattatggagggctttct

SEQ ID NO: 226764 - DNA, 25 bp, Homo sapien
gacacggttcttcagagcctcagag

SEQ ID NO: 226765 - DNA, 25 bp, Homo sapien
ttgtgctaccaaggttaccctctgt

SEQ ID NO: 226766 - DNA, 25 bp, Homo sapien
gctttgtgctaccaaggttaccctc

SEQ ID NO: 226767 - DNA, 25 bp, Homo sapien
tctctgaaggctttgtgctaccaag

SEQ ID NO: 226768 - DNA, 25 bp, Homo sapien
gaaggctttgtgctaccaaggttac

SEQ ID NO: 226769 - DNA, 25 bp, Homo sapien
gccctgggcttcctcggattgcaag

SEQ ID NO: 226770 - DNA, 25 bp, Homo sapien
gagcctgactagattcatccctggg

SEQ ID NO: 226771 - DNA, 25 bp, Homo sapien
tccccaggaagatcatcagacttcc

SEQ ID NO: 226772 - DNA, 25 bp, Homo sapien
aggagtggccgggaataggtctgag

SEQ ID NO: 226773 - DNA, 25 bp, Homo sapien
atcaacagcaggtgtacctgcgaag

SEQ ID NO: 226774 - DNA, 25 bp, Homo sapien
gcaggtgtacctgcgaaggcttgtt

SEQ ID NO: 226775 - DNA, 25 bp, Homo sapien
cctgcgaaggcttgttctccaccat

SEQ ID NO: 226776 - DNA, 25 bp, Homo sapien
tgtacctgcgaaggcttgttctcca

SEQ ID NO: 226777 - DNA, 25 bp, Homo sapien
ctgtgactatttcccatagaggcgg

SEQ ID NO: 226778 - DNA, 25 bp, Homo sapien
gaaggccggttcttggcactggcta

SEQ ID NO: 226779 - DNA, 25 bp, Homo sapien
tgcagttatctgtgactatttccca

SEQ ID NO: 226780 - DNA, 25 bp, Homo sapien
gctataaggcctttgacactatgaa

SEQ ID NO: 226781 - DNA, 25 bp, Homo sapien
ctggctgtggtatgggctgcatgtc

SEQ ID NO: 226782 - DNA, 25 bp, Homo sapien
tttgctttccgcactctttctggta

SEQ ID NO: 226783 - DNA, 25 bp, Homo sapien
tccattttgctttccgcactctttc

SEQ ID NO: 226784 - DNA, 25 bp, Homo sapien
cttttcagaaggtcgtggggtccat

SEQ ID NO: 226785 - DNA, 25 bp, Homo sapien
attttgctttccgcactctttctgg

SEQ ID NO: 226786 - DNA, 25 bp, Homo sapien
gcaccttgctgttcattactaggag

SEQ ID NO: 226787 - DNA, 25 bp, Homo sapien
ctctgtgaagccggagaagcccaga

SEQ ID NO: 226788 - DNA, 25 bp, Homo sapien
catgcaccttgctgttcattactag

SEQ ID NO: 226789 - DNA, 25 bp, Homo sapien
tgcaccttgctgttcattactagga

SEQ ID NO: 226790 - DNA, 25 bp, Homo sapien
ataaagcaatttgggcctggggcaa

SEQ ID NO: 226791 - DNA, 25 bp, Homo sapien
ctcccattttcggtgagcatcaact

SEQ ID NO: 226792 - DNA, 25 bp, Homo sapien
actgtgacatcataaagcaatttgg

SEQ ID NO: 226793 - DNA, 25 bp, Homo sapien
tcggtgagcatcaactgtgacatca

SEQ ID NO: 226794 - DNA, 25 bp, Homo sapien
gccctgccactccaaccactgttat

SEQ ID NO: 226795 - DNA, 25 bp, Homo sapien
gtttcttgccaatactcttggagat

SEQ ID NO: 226796 - DNA, 25 bp, Homo sapien
ccaaccactgttattgttattgctg

SEQ ID NO: 226797 - DNA, 25 bp, Homo sapien
tgaagcactggggactgccctgcca

SEQ ID NO: 226798 - DNA, 25 bp, Homo sapien
aggcagagatattgtggctggccca

SEQ ID NO: 226799 - DNA, 25 bp, Homo sapien
atgctgagccatgcacggcccttgg

SEQ ID NO: 226800 - DNA, 25 bp, Homo sapien
gtcacttctttatcaaccatggtcc

SEQ ID NO: 226801 - DNA, 25 bp, Homo sapien
acttctttatcaaccatggtcctga

SEQ ID NO: 226802 - DNA, 25 bp, Homo sapien
tttgagatcctattgccagagtggc

SEQ ID NO: 226803 - DNA, 25 bp, Homo sapien
tatttgagaacatgcgagagcttgg

SEQ ID NO: 226804 - DNA, 25 bp, Homo sapien
ggtagcacttgcacttttgagatcc

SEQ ID NO: 226805 - DNA, 25 bp, Homo sapien
tagcaatttctatgatgccccgagg

SEQ ID NO: 226806 - DNA, 25 bp, Homo sapien
tgaatcacccgccagaacttctgga

SEQ ID NO: 226807 - DNA, 25 bp, Homo sapien
caagaacacagggtttggctggtgc

SEQ ID NO: 226808 - DNA, 25 bp, Homo sapien
tctgaaagctcacccacacagaaag

SEQ ID NO: 226809 - DNA, 25 bp, Homo sapien
agagctgaatcacccgccagaactt

SEQ ID NO: 226810 - DNA, 25 bp, Homo sapien
tggaacctgtcccttggaatcaagg

SEQ ID NO: 226811 - DNA, 25 bp, Homo sapien
gccgcaagttcacactaaccacaga

SEQ ID NO: 226812 - DNA, 25 bp, Homo sapien
ttaggcttatctccactcccccagt

SEQ ID NO: 226813 - DNA, 25 bp, Homo sapien
cccacttgccgcaagttcacactaa

SEQ ID NO: 226814 - DNA, 25 bp, Homo sapien
taggatcccagtgatgaggcagcct

SEQ ID NO: 226815 - DNA, 25 bp, Homo sapien
cagcctctctcgtaggatcccagtg

SEQ ID NO: 226816 - DNA, 25 bp, Homo sapien
ctctcgtaggatcccagtgatgagg

SEQ ID NO: 226817 - DNA, 25 bp, Homo sapien
gatcccagtgatgaggcagcctctc

SEQ ID NO: 226818 - DNA, 25 bp, Homo sapien
aaatattctgtctgctgatgtctgc

SEQ ID NO: 226819 - DNA, 25 bp, Homo sapien
cccttcacataggactctggtttgc

SEQ ID NO: 226820 - DNA, 25 bp, Homo sapien
ccatgtgcatagggcattaatcact

SEQ ID NO: 226821 - DNA, 25 bp, Homo sapien
catttactacatatccaatggggag

SEQ ID NO: 226822 - DNA, 25 bp, Homo sapien
gcatggcccatgtctaataatacta

SEQ ID NO: 226823 - DNA, 25 bp, Homo sapien
tcacataggtgacagaaagccaaat

SEQ ID NO: 226824 - DNA, 25 bp, Homo sapien
gctgtcacctattaataacactgga

SEQ ID NO: 226825 - DNA, 25 bp, Homo sapien
ccagggacaagtctttttgtacaag

SEQ ID NO: 226826 - DNA, 25 bp, Homo sapien
accatcttcacaaatttggagctat

SEQ ID NO: 226827 - DNA, 25 bp, Homo sapien
cttcacaaatttggagctatctggg

SEQ ID NO: 226828 - DNA, 25 bp, Homo sapien
tctgcaaggagacccatcttactct

SEQ ID NO: 226829 - DNA, 25 bp, Homo sapien
tgcaaggagacccatcttactctct

SEQ ID NO: 226830 - DNA, 25 bp, Homo sapien
ctggtgtttgccacaggaatcccac

SEQ ID NO: 226831 - DNA, 25 bp, Homo sapien
tccttcctaggctggtgtttgccac

SEQ ID NO: 226832 - DNA, 25 bp, Homo sapien
cagggcactgagtcctcaggctctc

SEQ ID NO: 226833 - DNA, 25 bp, Homo sapien
tacagtttccctggctattcccgat

SEQ ID NO: 226834 - DNA, 25 bp, Homo sapien
cccgagatgagcgtacagtttccct

SEQ ID NO: 226835 - DNA, 25 bp, Homo sapien
tattcccgatgtcctgctggatcat

SEQ ID NO: 226836 - DNA, 25 bp, Homo sapien
taatttgccgttctgggtagagcct

SEQ ID NO: 226837 - DNA, 25 bp, Homo sapien
cttggtacccaggatagtctatctg

SEQ ID NO: 226838 - DNA, 25 bp, Homo sapien
aatttgaactcccagcacgctgcgt

SEQ ID NO: 226839 - DNA, 25 bp, Homo sapien
cagatgaccgtttgcctttgtgatg

SEQ ID NO: 226840 - DNA, 25 bp, Homo sapien
aaacgatatttcagacgggtgctgg

SEQ ID NO: 226841 - DNA, 25 bp, Homo sapien
cgggtgctggttgtgcagatattcc

SEQ ID NO: 226842 - DNA, 25 bp, Homo sapien
agcctgaggttcatcctgcgagtca

SEQ ID NO: 226843 - DNA, 25 bp, Homo sapien
gttgtgcagatattcctattgtttg

SEQ ID NO: 226844 - DNA, 25 bp, Homo sapien
gcttggtcgtaattagcccactgct

SEQ ID NO: 226845 - DNA, 25 bp, Homo sapien
gaaatccatcggcaccagctttggg

SEQ ID NO: 226846 - DNA, 25 bp, Homo sapien
gacgggttgtcagtcttggatgaac

SEQ ID NO: 226847 - DNA, 25 bp, Homo sapien
tagcccactgctgcaaaactgagat

SEQ ID NO: 226848 - DNA, 25 bp, Homo sapien
gcatccctctcccttcttggggctg

SEQ ID NO: 226849 - DNA, 25 bp, Homo sapien
tccctctcccttcttggggctgacc

SEQ ID NO: 226850 - DNA, 25 bp, Homo sapien
ctttctagcatccctctcccttctt

SEQ ID NO: 226851 - DNA, 25 bp, Homo sapien
tttctagcatccctctcccttcttg

SEQ ID NO: 226852 - DNA, 25 bp, Homo sapien
caggtgtggataggagacttgcaaa

SEQ ID NO: 226853 - DNA, 25 bp, Homo sapien
taggagacttgcaaaagaagaagca

SEQ ID NO: 226854 - DNA, 25 bp, Homo sapien
agacttgcaaaagaagaagcattcc

SEQ ID NO: 226855 - DNA, 25 bp, Homo sapien
acccctcaggtgtggataggagact

SEQ ID NO: 226856 - DNA, 25 bp, Homo sapien
tgctggcccgtggtcggctgtggtc

SEQ ID NO: 226857 - DNA, 25 bp, Homo sapien
acctgctgggggaagaactgttgcg

SEQ ID NO: 226858 - DNA, 25 bp, Homo sapien
gaaatgtgctggcccgtggtcggct

SEQ ID NO: 226859 - DNA, 25 bp, Homo sapien
ggaagaactgttgcgctgcagctct

SEQ ID NO: 226860 - DNA, 25 bp, Homo sapien
gaagcaagtgcggtgctgtggctgg

SEQ ID NO: 226861 - DNA, 25 bp, Homo sapien
gatgaagcaagtgcggtgctgtggc

SEQ ID NO: 226862 - DNA, 25 bp, Homo sapien
ctgaggatgaagcaagtgcggtgct

SEQ ID NO: 226863 - DNA, 25 bp, Homo sapien
gaggatgaagcaagtgcggtgctgt

SEQ ID NO: 226864 - DNA, 25 bp, Homo sapien
caggccagaccctgcttagcttccg

SEQ ID NO: 226865 - DNA, 25 bp, Homo sapien
gatcagatgagatcgggcatgttca

SEQ ID NO: 226866 - DNA, 25 bp, Homo sapien
tcagatgagatcgggcatgttcagg

SEQ ID NO: 226867 - DNA, 25 bp, Homo sapien
catgttcagggtggtatggctgtaa

SEQ ID NO: 226868 - DNA, 25 bp, Homo sapien
ggctgctggttgtagcactgctgct

SEQ ID NO: 226869 - DNA, 25 bp, Homo sapien
tagaggcatttcaggcttaggagga

SEQ ID NO: 226870 - DNA, 25 bp, Homo sapien
ctctgggacttgctgaaggtgctgc

SEQ ID NO: 226871 - DNA, 25 bp, Homo sapien
cttaggagtaatgctgctggttgtc

SEQ ID NO: 226872 - DNA, 25 bp, Homo sapien
ctgtgtcacaggataaagggtggga

SEQ ID NO: 226873 - DNA, 25 bp, Homo sapien
cttcccccgtggagcaggaacatgt

SEQ ID NO: 226874 - DNA, 25 bp, Homo sapien
caggaacatgtgcactgacaacatc

SEQ ID NO: 226875 - DNA, 25 bp, Homo sapien
tgacaacatccccctacatctgtgt

SEQ ID NO: 226876 - DNA, 25 bp, Homo sapien
taaaaagtggtccagcccttgctgg

SEQ ID NO: 226877 - DNA, 25 bp, Homo sapien
ctggtgttgctcgagtttggatgct

SEQ ID NO: 226878 - DNA, 25 bp, Homo sapien
aaccctgctggtgttgctcgagttt

SEQ ID NO: 226879 - DNA, 25 bp, Homo sapien
gcttaaaggaggtttatgatacaga

SEQ ID NO: 226880 - DNA, 25 bp, Homo sapien
tgcctcaaagtcaataggacgcttt

SEQ ID NO: 226881 - DNA, 25 bp, Homo sapien
gatctgttggggtggctgaaaacta

SEQ ID NO: 226882 - DNA, 25 bp, Homo sapien
tccttgaaatggacgtagaagcctt

SEQ ID NO: 226883 - DNA, 25 bp, Homo sapien
ggcaaaagagggcttttctgacttg

SEQ ID NO: 226884 - DNA, 25 bp, Homo sapien
cctgtggtgtcattgtcactcctga

SEQ ID NO: 226885 - DNA, 25 bp, Homo sapien
ttgtcactcctgaattttgaaacct

SEQ ID NO: 226886 - DNA, 25 bp, Homo sapien
gatgcctgtggtgtcattgtcactc

SEQ ID NO: 226887 - DNA, 25 bp, Homo sapien
aggagatgcctgtggtgtcattgtc

SEQ ID NO: 226888 - DNA, 25 bp, Homo sapien
tgttgcggacaactccttaaggttc

SEQ ID NO: 226889 - DNA, 25 bp, Homo sapien
gatagtggatattattgttgcggac

SEQ ID NO: 226890 - DNA, 25 bp, Homo sapien
tacaatatttagcaagctgagagaa

SEQ ID NO: 226891 - DNA, 25 bp, Homo sapien
taccccacctctaatggaatatggg

SEQ ID NO: 226892 - DNA, 25 bp, Homo sapien
tcttgctcagacatttcagaggtgt

SEQ ID NO: 226893 - DNA, 25 bp, Homo sapien
tgcagaagtggctcaattgatgacc

SEQ ID NO: 226894 - DNA, 25 bp, Homo sapien
tttgtgtctaatctgcaacgtgtgc

SEQ ID NO: 226895 - DNA, 25 bp, Homo sapien
tcagaggtgttaagaagcccttggt

SEQ ID NO: 226896 - DNA, 25 bp, Homo sapien
tcatctccgagtactgcctttgtcc

SEQ ID NO: 226897 - DNA, 25 bp, Homo sapien
tactgcctttgtccatgtctggcgg

SEQ ID NO: 226898 - DNA, 25 bp, Homo sapien
tgggcagggctccttcatctccgag

SEQ ID NO: 226899 - DNA, 25 bp, Homo sapien
ccatgtctggcggtcatgagggact

SEQ ID NO: 226900 - DNA, 25 bp, Homo sapien
gcttgctctctttaggagaccctcc

SEQ ID NO: 226901 - DNA, 25 bp, Homo sapien
ctggagctgcggaagtgtggcagtt

SEQ ID NO: 226902 - DNA, 25 bp, Homo sapien
ggcagtttgcttgtatcttctgttc

SEQ ID NO: 226903 - DNA, 25 bp, Homo sapien
tgctctctttaggagaccctcctgc

SEQ ID NO: 226904 - DNA, 25 bp, Homo sapien
caggaggtttgatgagccctgaagg

SEQ ID NO: 226905 - DNA, 25 bp, Homo sapien
gtttgatgagccctgaaggctgttg

SEQ ID NO: 226906 - DNA, 25 bp, Homo sapien
cctgaaggctgttgtgttggaagac

SEQ ID NO: 226907 - DNA, 25 bp, Homo sapien
tgatgagccctgaaggctgttgtgt

SEQ ID NO: 226908 - DNA, 25 bp, Homo sapien
tgctgatgcgagcagctgccttggc

SEQ ID NO: 226909 - DNA, 25 bp, Homo sapien
tgccttggccttttctgaggtggaa

SEQ ID NO: 226910 - DNA, 25 bp, Homo sapien
ttccaacctgccgtgagccagggag

SEQ ID NO: 226911 - DNA, 25 bp, Homo sapien
cccctgcagtggatattgtagactt

SEQ ID NO: 226912 - DNA, 25 bp, Homo sapien
caggcgagtgtcagctgctttggaa

SEQ ID NO: 226913 - DNA, 25 bp, Homo sapien
tgcagcaggcgagtgtcagctgctt

SEQ ID NO: 226914 - DNA, 25 bp, Homo sapien
gcaggcgagtgtcagctgctttgga

SEQ ID NO: 226915 - DNA, 25 bp, Homo sapien
cagcaggcgagtgtcagctgctttg

SEQ ID NO: 226916 - DNA, 25 bp, Homo sapien
ctcctggcattcaacaatctctggc

SEQ ID NO: 226917 - DNA, 25 bp, Homo sapien
ggtccctctcaccagattgtgacag

SEQ ID NO: 226918 - DNA, 25 bp, Homo sapien
tgaatggagaagaccaagggtaagt

SEQ ID NO: 226919 - DNA, 25 bp, Homo sapien
tgctgctttagggtccctctcacca

SEQ ID NO: 226920 - DNA, 25 bp, Homo sapien
caccacgggctggtgagacagagca

SEQ ID NO: 226921 - DNA, 25 bp, Homo sapien
atcttctccgatgacgcgcgtctga

SEQ ID NO: 226922 - DNA, 25 bp, Homo sapien
gaaattggctacagcgaccaaggcc

SEQ ID NO: 226923 - DNA, 25 bp, Homo sapien
tctgaagtgtgactcggaggccgca

SEQ ID NO: 226924 - DNA, 25 bp, Homo sapien
tgaatctaaggtccatttctggcta

SEQ ID NO: 226925 - DNA, 25 bp, Homo sapien
tggtgttcgtgttttcttggaatac

SEQ ID NO: 226926 - DNA, 25 bp, Homo sapien
tatcccatgaaatggtgttcgtgtt

SEQ ID NO: 226927 - DNA, 25 bp, Homo sapien
gaaatggtgttcgtgttttcttgga

SEQ ID NO: 226928 - DNA, 25 bp, Homo sapien
gacacagtatcccatgaaatggtgt

SEQ ID NO: 226929 - DNA, 25 bp, Homo sapien
tcttgtgccctgagaagaatgcttc

SEQ ID NO: 226930 - DNA, 25 bp, Homo sapien
cttgtgccctgagaagaatgcttct

SEQ ID NO: 226931 - DNA, 25 bp, Homo sapien
tggggaagaaactctctcttgtgcc

SEQ ID NO: 226932 - DNA, 25 bp, Homo sapien
gtggggaagaaactctctcttgtgc

SEQ ID NO: 226933 - DNA, 25 bp, Homo sapien
cctgggaggtgacaagatgttctaa

SEQ ID NO: 226934 - DNA, 25 bp, Homo sapien
cttgtccccagcaggttggttttgt

SEQ ID NO: 226935 - DNA, 25 bp, Homo sapien
tctaaaccaagcaggtggtgtgcag

SEQ ID NO: 226936 - DNA, 25 bp, Homo sapien
gcaaggtgtgaaggcttgcttggga

SEQ ID NO: 226937 - DNA, 25 bp, Homo sapien
ggaagagcatggagaacctgaggta

SEQ ID NO: 226938 - DNA, 25 bp, Homo sapien
ggacacactcgggatgcttagtcat

SEQ ID NO: 226939 - DNA, 25 bp, Homo sapien
ctccatgccggacacactcgggatg

SEQ ID NO: 226940 - DNA, 25 bp, Homo sapien
cgtgttcagacatggtacattgtgc

SEQ ID NO: 226941 - DNA, 25 bp, Homo sapien
tgttcagacatggtacattgtgcct

SEQ ID NO: 226942 - DNA, 25 bp, Homo sapien
ggtgctgggaagtttcgtttgtgct

SEQ ID NO: 226943 - DNA, 25 bp, Homo sapien
gctgggaagtttcgtttgtgctggg

SEQ ID NO: 226944 - DNA, 25 bp, Homo sapien
cacagctgtttcctgccgctgcttt

SEQ ID NO: 226945 - DNA, 25 bp, Homo sapien
gccgctgctttgttggtgctgggaa

SEQ ID NO: 226946 - DNA, 25 bp, Homo sapien
tgaactttgaccccgttcctgcttc

SEQ ID NO: 226947 - DNA, 25 bp, Homo sapien
ttctgaactttgaccccgttcctgc

SEQ ID NO: 226948 - DNA, 25 bp, Homo sapien
ccactctttggatctcccacatctg

SEQ ID NO: 226949 - DNA, 25 bp, Homo sapien
cactctttggatctcccacatctgt

SEQ ID NO: 226950 - DNA, 25 bp, Homo sapien
ggtgttgtaaagaccagccgccaca

SEQ ID NO: 226951 - DNA, 25 bp, Homo sapien
cagccgccacatcgccttgaatgag

SEQ ID NO: 226952 - DNA, 25 bp, Homo sapien
gaatgaggctttgggtgcttctccc

SEQ ID NO: 226953 - DNA, 25 bp, Homo sapien
ttgggaaggtgttgtaaagaccagc

SEQ ID NO: 226954 - DNA, 25 bp, Homo sapien
ttgaagtctagttgtttgtcgggag

SEQ ID NO: 226955 - DNA, 25 bp, Homo sapien
cagaattgaagtctagttgtttgtc

SEQ ID NO: 226956 - DNA, 25 bp, Homo sapien
caaagggcagaattgaagtctagtt

SEQ ID NO: 226957 - DNA, 25 bp, Homo sapien
tctagttgtttgtcgggaggacctg

SEQ ID NO: 226958 - DNA, 25 bp, Homo sapien
tcttgggatgcagggccaaacctgg

SEQ ID NO: 226959 - DNA, 25 bp, Homo sapien
cttgggatgcagggccaaacctgga

SEQ ID NO: 226960 - DNA, 25 bp, Homo sapien
atgattcatgcatgtcctgatggct

SEQ ID NO: 226961 - DNA, 25 bp, Homo sapien
aaataggctgaatatggctgtggtc

SEQ ID NO: 226962 - DNA, 25 bp, Homo sapien
cacatagggccaaattcatgcaata

SEQ ID NO: 226963 - DNA, 25 bp, Homo sapien
tggccttgtccttggctacacatag

SEQ ID NO: 226964 - DNA, 25 bp, Homo sapien
tcactggctttcaattgaatctttt

SEQ ID NO: 226965 - DNA, 25 bp, Homo sapien
tataaattattaactctcccagcag

SEQ ID NO: 226966 - DNA, 25 bp, Homo sapien
ccaagaggggaggatcttgaagggt

SEQ ID NO: 226967 - DNA, 25 bp, Homo sapien
aaattattaactctcccagcagcca

SEQ ID NO: 226968 - DNA, 25 bp, Homo sapien
gatagatagtgctgactatgtgagc

SEQ ID NO: 226969 - DNA, 25 bp, Homo sapien
gcttgccctaatggtgtggtgtctg

SEQ ID NO: 226970 - DNA, 25 bp, Homo sapien
acatgcagtagagcctttgctgttg

SEQ ID NO: 226971 - DNA, 25 bp, Homo sapien
cagtttaattgagggagcacatttc

SEQ ID NO: 226972 - DNA, 25 bp, Homo sapien
ggagcagtgaacatggggcaaaacc

SEQ ID NO: 226973 - DNA, 25 bp, Homo sapien
tgagggcaggtcataggaagcttct

SEQ ID NO: 226974 - DNA, 25 bp, Homo sapien
ggactgtgggatgcccgcaaaggct

SEQ ID NO: 226975 - DNA, 25 bp, Homo sapien
ggctgggcacaaggacagtcatcat

SEQ ID NO: 226976 - DNA, 25 bp, Homo sapien
tcgcttgattcccacacaacagaga

SEQ ID NO: 226977 - DNA, 25 bp, Homo sapien
tgtgtgcgtggctgcctgcgttctc

SEQ ID NO: 226978 - DNA, 25 bp, Homo sapien
caggctctggggcaaaccacctgtg

SEQ ID NO: 226979 - DNA, 25 bp, Homo sapien
tctggggcaaaccacctgtgtgcgt

SEQ ID NO: 226980 - DNA, 25 bp, Homo sapien
cttgcacctggcatggaaggtccgt

SEQ ID NO: 226981 - DNA, 25 bp, Homo sapien
tatttgatggtgtgaaggcttgcac

SEQ ID NO: 226982 - DNA, 25 bp, Homo sapien
gtttgcttggcttgtctggctctcc

SEQ ID NO: 226983 - DNA, 25 bp, Homo sapien
tggtcagcttgttggaggcgccttc

SEQ ID NO: 226984 - DNA, 25 bp, Homo sapien
cttgttggctccaaaatgtcatcat

SEQ ID NO: 226985 - DNA, 25 bp, Homo sapien
gccttgttggctccaaaatgtcatc

SEQ ID NO: 226986 - DNA, 25 bp, Homo sapien
ccttgttggctccaaaatgtcatca

SEQ ID NO: 226987 - DNA, 25 bp, Homo sapien
ttctgactctccattggaacatgct

SEQ ID NO: 226988 - DNA, 25 bp, Homo sapien
agttttgcccacgatcatagagctt

SEQ ID NO: 226989 - DNA, 25 bp, Homo sapien
acttctgactctccattggaacatg

SEQ ID NO: 226990 - DNA, 25 bp, Homo sapien
tgtcagtggtagcactgggatttga

SEQ ID NO: 226991 - DNA, 25 bp, Homo sapien
gaagggataatttctcaggctctgc

SEQ ID NO: 226992 - DNA, 25 bp, Homo sapien
tccgaagggataatttctcaggctc

SEQ ID NO: 226993 - DNA, 25 bp, Homo sapien
tctctcctccgaagggataatttct

SEQ ID NO: 226994 - DNA, 25 bp, Homo sapien
gggctgtttatggtgctccaatgac

SEQ ID NO: 226995 - DNA, 25 bp, Homo sapien
catgtagatgtaaggcaagatagca

SEQ ID NO: 226996 - DNA, 25 bp, Homo sapien
gcttgagggtcaaatccagcttgca

SEQ ID NO: 226997 - DNA, 25 bp, Homo sapien
tggtcactgttcaggcacactctgt

SEQ ID NO: 226998 - DNA, 25 bp, Homo sapien
ttactgaccacttagtctgcgctgg

SEQ ID NO: 226999 - DNA, 25 bp, Homo sapien
catcatcatcagtccagcaattcga

SEQ ID NO: 227000 - DNA, 25 bp, Homo sapien
gtccagcaattcgatccattctcag

SEQ ID NO: 227001 - DNA, 25 bp, Homo sapien
gagaattagcagcaggatctctctc

SEQ ID NO: 227002 - DNA, 25 bp, Homo sapien
tcgatccattctcagtgctgtgtaa

SEQ ID NO: 227003 - DNA, 25 bp, Homo sapien
ttagtcattctcatgacaggcttca

SEQ ID NO: 227004 - DNA, 25 bp, Homo sapien
cttcatgatggccacagccgcttac

SEQ ID NO: 227005 - DNA, 25 bp, Homo sapien
tagtcattctcatgacaggcttcat

SEQ ID NO: 227006 - DNA, 25 bp, Homo sapien
caggcttcatgatggccacagccgc

SEQ ID NO: 227007 - DNA, 25 bp, Homo sapien
gactttgctttcatagccatttcca

SEQ ID NO: 227008 - DNA, 25 bp, Homo sapien
aaatgactttgctttcatagccatt

SEQ ID NO: 227009 - DNA, 25 bp, Homo sapien
tgcaaaagcagctatagctatctcc

SEQ ID NO: 227010 - DNA, 25 bp, Homo sapien
catttccattttcccgagctgcaaa

SEQ ID NO: 227011 - DNA, 25 bp, Homo sapien
gatccatctcgttcacagtattgca

SEQ ID NO: 227012 - DNA, 25 bp, Homo sapien
gaaccctcaatgtctcccatcaatg

SEQ ID NO: 227013 - DNA, 25 bp, Homo sapien
catgatactaatgtaggtccttccc

SEQ ID NO: 227014 - DNA, 25 bp, Homo sapien
aatgacaagatcaagtccactttgc

SEQ ID NO: 227015 - DNA, 25 bp, Homo sapien
tcactggcaggccattcgctgcctg

SEQ ID NO: 227016 - DNA, 25 bp, Homo sapien
gaacaaggtaggtgctttgtgcttg

SEQ ID NO: 227017 - DNA, 25 bp, Homo sapien
tgagtgaacaaggtaggtgctttgt

SEQ ID NO: 227018 - DNA, 25 bp, Homo sapien
gcttgcctccgtgcctctggctggt

SEQ ID NO: 227019 - DNA, 25 bp, Homo sapien
gatgcatcgtggtttcccaccccta

SEQ ID NO: 227020 - DNA, 25 bp, Homo sapien
ttgtcattttgggcgctggccctgc

SEQ ID NO: 227021 - DNA, 25 bp, Homo sapien
gcaccttccttgatgcatcgtggtt

SEQ ID NO: 227022 - DNA, 25 bp, Homo sapien
cacccctattgtccccttggcttct

SEQ ID NO: 227023 - DNA, 25 bp, Homo sapien
gactgttttgatcacgagggctctc

SEQ ID NO: 227024 - DNA, 25 bp, Homo sapien
ggctctcaagtgtcaaagtcatttg

SEQ ID NO: 227025 - DNA, 25 bp, Homo sapien
tccttcagactgttttgatcacgag

SEQ ID NO: 227026 - DNA, 25 bp, Homo sapien
gatcacgagggctctcaagtgtcaa

SEQ ID NO: 227027 - DNA, 25 bp, Homo sapien
cagtgtctatattggctgatggctc

SEQ ID NO: 227028 - DNA, 25 bp, Homo sapien
aggaggctcatatttcacaactggt

SEQ ID NO: 227029 - DNA, 25 bp, Homo sapien
catatttcacaactggttgccagtg

SEQ ID NO: 227030 - DNA, 25 bp, Homo sapien
gcggtggccttggttgaaacattta

SEQ ID NO: 227031 - DNA, 25 bp, Homo sapien
tatttacctagcatatagtcagagg

SEQ ID NO: 227032 - DNA, 25 bp, Homo sapien
tagtcagaggaatcgaaagtgcttg

SEQ ID NO: 227033 - DNA, 25 bp, Homo sapien
cagaaggatgtgaatatttacctag

SEQ ID NO: 227034 - DNA, 25 bp, Homo sapien
attatttcccagtagatctgacggg

SEQ ID NO: 227035 - DNA, 25 bp, Homo sapien
ggcttgaaatgaggatgattaaatc

SEQ ID NO: 227036 - DNA, 25 bp, Homo sapien
gatttgagttttaaagaccgaggca

SEQ ID NO: 227037 - DNA, 25 bp, Homo sapien
gacttttagagctgatactctaggc

SEQ ID NO: 227038 - DNA, 25 bp, Homo sapien
gcccagtttgagaaaggtcaccaaa

SEQ ID NO: 227039 - DNA, 25 bp, Homo sapien
tgacaataccgagggaaactgagac

SEQ ID NO: 227040 - DNA, 25 bp, Homo sapien
ttttctgtagcatcaggtccctggg

SEQ ID NO: 227041 - DNA, 25 bp, Homo sapien
gacaggccctgagtgttgtacctac

SEQ ID NO: 227042 - DNA, 25 bp, Homo sapien
aaaccggctgccacttgttgcaaaa

SEQ ID NO: 227043 - DNA, 25 bp, Homo sapien
gaggcttgtccactaaatgtggaaa

SEQ ID NO: 227044 - DNA, 25 bp, Homo sapien
gcagaggcttgtccactaaatgtgg

SEQ ID NO: 227045 - DNA, 25 bp, Homo sapien
gggcagaggcttgtccactaaatgt

SEQ ID NO: 227046 - DNA, 25 bp, Homo sapien
tgtgggcagaggcttgtccactaaa

SEQ ID NO: 227047 - DNA, 25 bp, Homo sapien
ggactttgctgacagcaaagggtga

SEQ ID NO: 227048 - DNA, 25 bp, Homo sapien
actttgctgacagcaaagggtgatg

SEQ ID NO: 227049 - DNA, 25 bp, Homo sapien
gactttgctgacagcaaagggtgat

SEQ ID NO: 227050 - DNA, 25 bp, Homo sapien
aaatcgacaatagaaggtgaattgg

SEQ ID NO: 227051 - DNA, 25 bp, Homo sapien
caagggcctagagctgtgtcaatat

SEQ ID NO: 227052 - DNA, 25 bp, Homo sapien
gagctgtgtcaatatgaaaatcgac

SEQ ID NO: 227053 - DNA, 25 bp, Homo sapien
tgaaaatcgacaatagaaggtgaat

SEQ ID NO: 227054 - DNA, 25 bp, Homo sapien
tgaggttcgtctttttccctggtca

SEQ ID NO: 227055 - DNA, 25 bp, Homo sapien
gctggagagggattctatatactca

SEQ ID NO: 227056 - DNA, 25 bp, Homo sapien
tagtcagtttataagccggtgtagc

SEQ ID NO: 227057 - DNA, 25 bp, Homo sapien
ggaaagactgctttgatccaaggtc

SEQ ID NO: 227058 - DNA, 25 bp, Homo sapien
tgaaattaactcgagcttggcaggt

SEQ ID NO: 227059 - DNA, 25 bp, Homo sapien
ggcagcttcctgcacactgttgtag

SEQ ID NO: 227060 - DNA, 25 bp, Homo sapien
gctttctcagggatatgcactctgc

SEQ ID NO: 227061 - DNA, 25 bp, Homo sapien
gattatcaattgctccgggagagac

SEQ ID NO: 227062 - DNA, 25 bp, Homo sapien
ggttgcatgttgtcaatacaggctg

SEQ ID NO: 227063 - DNA, 25 bp, Homo sapien
tttaagttgtcgctgcatgggagca

SEQ ID NO: 227064 - DNA, 25 bp, Homo sapien
tgagttatagctgtgatgttcccta

SEQ ID NO: 227065 - DNA, 25 bp, Homo sapien
tacaggctgcagaagtcaataagca

SEQ ID NO: 227066 - DNA, 25 bp, Homo sapien
tagtgatcggcttgagaccagggac

SEQ ID NO: 227067 - DNA, 25 bp, Homo sapien
tacttttgggataagctcggattga

SEQ ID NO: 227068 - DNA, 25 bp, Homo sapien
ctcggattgatattctgggttctgc

SEQ ID NO: 227069 - DNA, 25 bp, Homo sapien
gaaatcataatgtcaccctggagat

SEQ ID NO: 227070 - DNA, 25 bp, Homo sapien
tcagtataatttgggtctgcttcct

SEQ ID NO: 227071 - DNA, 25 bp, Homo sapien
ctcttgatatgaatttagcattcaa

SEQ ID NO: 227072 - DNA, 25 bp, Homo sapien
tgatatgaatttagcattcaaaggc

SEQ ID NO: 227073 - DNA, 25 bp, Homo sapien
gtgttcagtataatttgggtctgct

SEQ ID NO: 227074 - DNA, 25 bp, Homo sapien
tcagcccatgtgcatccagctgaaa

SEQ ID NO: 227075 - DNA, 25 bp, Homo sapien
cctgcataggtcttgttcagagaag

SEQ ID NO: 227076 - DNA, 25 bp, Homo sapien
catgtgcatccagctgaaaggcttt

SEQ ID NO: 227077 - DNA, 25 bp, Homo sapien
gaaaggctttcatacctctgccctg

SEQ ID NO: 227078 - DNA, 25 bp, Homo sapien
ctctgagaagtatcaagctgttcag

SEQ ID NO: 227079 - DNA, 25 bp, Homo sapien
gaagtatcaagctgttcagcattgg

SEQ ID NO: 227080 - DNA, 25 bp, Homo sapien
tcaagctgttcagcattggctagaa

SEQ ID NO: 227081 - DNA, 25 bp, Homo sapien
agcattggctagaacaagctcttct

SEQ ID NO: 227082 - DNA, 25 bp, Homo sapien
actggtataattgttggaatcagga

SEQ ID NO: 227083 - DNA, 25 bp, Homo sapien
caactccaagtctcttgtcatttcc

SEQ ID NO: 227084 - DNA, 25 bp, Homo sapien
ggcaggtatacctgacagactggta

SEQ ID NO: 227085 - DNA, 25 bp, Homo sapien
tcctcttgtcctaataccttcaact

SEQ ID NO: 227086 - DNA, 25 bp, Homo sapien
gttgtgcaatattcaggtctgccag

SEQ ID NO: 227087 - DNA, 25 bp, Homo sapien
agggttgcaattcacggacaccgga

SEQ ID NO: 227088 - DNA, 25 bp, Homo sapien
tctctgaactgggacaagggttgca

SEQ ID NO: 227089 - DNA, 25 bp, Homo sapien
cagaaggtggcgcattatcactaat

SEQ ID NO: 227090 - DNA, 25 bp, Homo sapien
attctgatgggtagctctcctccgc

SEQ ID NO: 227091 - DNA, 25 bp, Homo sapien
cattctgatgggtagctctcctccg

SEQ ID NO: 227092 - DNA, 25 bp, Homo sapien
gcattctgatgggtagctctcctcc

SEQ ID NO: 227093 - DNA, 25 bp, Homo sapien
tctgatgggtagctctcctccgcat

SEQ ID NO: 227094 - DNA, 25 bp, Homo sapien
cctgaagagtgccttccattgggct

SEQ ID NO: 227095 - DNA, 25 bp, Homo sapien
agatgaaactgaccccagtcttcag

SEQ ID NO: 227096 - DNA, 25 bp, Homo sapien
tgtataaagatgaaactgaccccag

SEQ ID NO: 227097 - DNA, 25 bp, Homo sapien
agagtgccttccattgggcttccac

SEQ ID NO: 227098 - DNA, 25 bp, Homo sapien
ccattttgctaaagcccaggtctac

SEQ ID NO: 227099 - DNA, 25 bp, Homo sapien
gatgcagcagccaactaggaccatg

SEQ ID NO: 227100 - DNA, 25 bp, Homo sapien
gatatatgccgattgaccattttgc

SEQ ID NO: 227101 - DNA, 25 bp, Homo sapien
ggaccatgcggccaactaagaactg

SEQ ID NO: 227102 - DNA, 25 bp, Homo sapien
ccaggtcgagagtagtatcttgcac

SEQ ID NO: 227103 - DNA, 25 bp, Homo sapien
tctcataagaggagcattgccgtct

SEQ ID NO: 227104 - DNA, 25 bp, Homo sapien
cattttgatgcccagggctgtaggc

SEQ ID NO: 227105 - DNA, 25 bp, Homo sapien
aagacaaaagcccaaggagggtgtg

SEQ ID NO: 227106 - DNA, 25 bp, Homo sapien
tttgcccagaactcaatttgttgag

SEQ ID NO: 227107 - DNA, 25 bp, Homo sapien
cttttgcccagaactcaatttgttg

SEQ ID NO: 227108 - DNA, 25 bp, Homo sapien
cccagaactcaatttgttgagctgc

SEQ ID NO: 227109 - DNA, 25 bp, Homo sapien
cagaactcaatttgttgagctgctg

SEQ ID NO: 227110 - DNA, 25 bp, Homo sapien
agtcccctctagctgtgtgaaatca

SEQ ID NO: 227111 - DNA, 25 bp, Homo sapien
ctgagtcccctctagctgtgtgaaa

SEQ ID NO: 227112 - DNA, 25 bp, Homo sapien
tgagtcccctctagctgtgtgaaat

SEQ ID NO: 227113 - DNA, 25 bp, Homo sapien
cccctctagctgtgtgaaatcatat

SEQ ID NO: 227114 - DNA, 25 bp, Homo sapien
tccaaccagttagtcagagaaaaga

SEQ ID NO: 227115 - DNA, 25 bp, Homo sapien
taatgggacatttgcctctcccctg

SEQ ID NO: 227116 - DNA, 25 bp, Homo sapien
ggaccatttttagtgtctgtccatc

SEQ ID NO: 227117 - DNA, 25 bp, Homo sapien
gagaaaagagccctgatgtaagtag

SEQ ID NO: 227118 - DNA, 25 bp, Homo sapien
ccatggatatcttctaagatggtca

SEQ ID NO: 227119 - DNA, 25 bp, Homo sapien
ccttgatccatggatatcttctaag

SEQ ID NO: 227120 - DNA, 25 bp, Homo sapien
tgccttgatccatggatatcttcta

SEQ ID NO: 227121 - DNA, 25 bp, Homo sapien
gatccatggatatcttctaagatgg

SEQ ID NO: 227122 - DNA, 25 bp, Homo sapien
tcttcaaagtagctgctttccctcc

SEQ ID NO: 227123 - DNA, 25 bp, Homo sapien
taatgtcagtcttcaaagtagctgc

SEQ ID NO: 227124 - DNA, 25 bp, Homo sapien
tgtcagtcttcaaagtagctgcttt

SEQ ID NO: 227125 - DNA, 25 bp, Homo sapien
gataatgtcagtcttcaaagtagct

SEQ ID NO: 227126 - DNA, 25 bp, Homo sapien
tcagggttgcaagccatggcaaagg

SEQ ID NO: 227127 - DNA, 25 bp, Homo sapien
tcaatgttttcagggttgcaagcca

SEQ ID NO: 227128 - DNA, 25 bp, Homo sapien
gcactatgacaaagtctctttaagt

SEQ ID NO: 227129 - DNA, 25 bp, Homo sapien
aggtccagaattagcatgaaattgc

SEQ ID NO: 227130 - DNA, 25 bp, Homo sapien
aaagtcatgcagcaatgaccgtcag

SEQ ID NO: 227131 - DNA, 25 bp, Homo sapien
gtcatgcagcaatgaccgtcagcat

SEQ ID NO: 227132 - DNA, 25 bp, Homo sapien
gcagcaatgaccgtcagcatgatta

SEQ ID NO: 227133 - DNA, 25 bp, Homo sapien
atgaccgtcagcatgattaggccta

SEQ ID NO: 227134 - DNA, 25 bp, Homo sapien
ccagggttgaatgttgatgagtttt

SEQ ID NO: 227135 - DNA, 25 bp, Homo sapien
ctgggtaccagggttgaatgttgat

SEQ ID NO: 227136 - DNA, 25 bp, Homo sapien
taccctcgttatttctcttgatcat

SEQ ID NO: 227137 - DNA, 25 bp, Homo sapien
tttaccctcgttatttctcttgatc

SEQ ID NO: 227138 - DNA, 25 bp, Homo sapien
tacaacagcctggtgatataggtaa

SEQ ID NO: 227139 - DNA, 25 bp, Homo sapien
caacagcctggtgatataggtaatg

SEQ ID NO: 227140 - DNA, 25 bp, Homo sapien
cagcctggtgatataggtaatggta

SEQ ID NO: 227141 - DNA, 25 bp, Homo sapien
gcctggtgatataggtaatggtaat

SEQ ID NO: 227142 - DNA, 25 bp, Homo sapien
caaggttgatggtggaaataatcat

SEQ ID NO: 227143 - DNA, 25 bp, Homo sapien
tagagaaaggcagccgctgatcact

SEQ ID NO: 227144 - DNA, 25 bp, Homo sapien
aaaggcagccgctgatcactgttag

SEQ ID NO: 227145 - DNA, 25 bp, Homo sapien
tctctaagagaatgggatatttccc

SEQ ID NO: 227146 - DNA, 25 bp, Homo sapien
tagacctgtattctttctctaagag

SEQ ID NO: 227147 - DNA, 25 bp, Homo sapien
tctggaggatcataggaggcaagtg

SEQ ID NO: 227148 - DNA, 25 bp, Homo sapien
atctggaggatcataggaggcaagt

SEQ ID NO: 227149 - DNA, 25 bp, Homo sapien
tggaagagatgccactgagagcctg

SEQ ID NO: 227150 - DNA, 25 bp, Homo sapien
cctgggcttgtctggtgaaagagtg

SEQ ID NO: 227151 - DNA, 25 bp, Homo sapien
gatgccactgagagcctgggcttgt

SEQ ID NO: 227152 - DNA, 25 bp, Homo sapien
tgggcttgtctggtgaaagagtggg

SEQ ID NO: 227153 - DNA, 25 bp, Homo sapien
gccaaagtggttgacgttggcctta

SEQ ID NO: 227154 - DNA, 25 bp, Homo sapien
agaacccagcactgtcctccttgcc

SEQ ID NO: 227155 - DNA, 25 bp, Homo sapien
gttgttcatctccacgcctctgtga

SEQ ID NO: 227156 - DNA, 25 bp, Homo sapien
agatattattgaaacagaacccagc

SEQ ID NO: 227157 - DNA, 25 bp, Homo sapien
cccaaaatatttgatgaccggtatt

SEQ ID NO: 227158 - DNA, 25 bp, Homo sapien
tgtttttctgtccatagctgaccca

SEQ ID NO: 227159 - DNA, 25 bp, Homo sapien
agtgctccctttgccggtctaccat

SEQ ID NO: 227160 - DNA, 25 bp, Homo sapien
ttgtcctctttgagtgctccctttg

SEQ ID NO: 227161 - DNA, 25 bp, Homo sapien
attcagaaaagagttgcattgctgg

SEQ ID NO: 227162 - DNA, 25 bp, Homo sapien
caggaattgctacagatggttgact

SEQ ID NO: 227163 - DNA, 25 bp, Homo sapien
tgcctcgaaagtgaccaggaattgc

SEQ ID NO: 227164 - DNA, 25 bp, Homo sapien
gcttccagatccaaaggatgcctcg

SEQ ID NO: 227165 - DNA, 25 bp, Homo sapien
taccctttccgataatgcttccaga

SEQ ID NO: 227166 - DNA, 25 bp, Homo sapien
caccagggctgttggcccttgttgc

SEQ ID NO: 227167 - DNA, 25 bp, Homo sapien
ccagggctgttggcccttgttgctg

SEQ ID NO: 227168 - DNA, 25 bp, Homo sapien
cagggctgttggcccttgttgctgc

SEQ ID NO: 227169 - DNA, 25 bp, Homo sapien
accagggctgttggcccttgttgct

SEQ ID NO: 227170 - DNA, 25 bp, Homo sapien
cagactcttttcccaaagaaatttg

SEQ ID NO: 227171 - DNA, 25 bp, Homo sapien
ctgaacagactcttttcccaaagaa

SEQ ID NO: 227172 - DNA, 25 bp, Homo sapien
gtctgaacagactcttttcccaaag

SEQ ID NO: 227173 - DNA, 25 bp, Homo sapien
cagtctgaacagactcttttcccaa

SEQ ID NO: 227174 - DNA, 25 bp, Homo sapien
taggccattccatccgggcccgaca

SEQ ID NO: 227175 - DNA, 25 bp, Homo sapien
ggcccgacaagagggtcacagctct

SEQ ID NO: 227176 - DNA, 25 bp, Homo sapien
ccatccgggcccgacaagagggtca

SEQ ID NO: 227177 - DNA, 25 bp, Homo sapien
aagagggtcacagctcttagaccca

SEQ ID NO: 227178 - DNA, 25 bp, Homo sapien
cagtgttgttttcacctccagaggg

SEQ ID NO: 227179 - DNA, 25 bp, Homo sapien
gacctctctattgaccacagacttg

SEQ ID NO: 227180 - DNA, 25 bp, Homo sapien
acaatggaactctgcgatttggccc

SEQ ID NO: 227181 - DNA, 25 bp, Homo sapien
gatttggcccttcaccgcctgttag

SEQ ID NO: 227182 - DNA, 25 bp, Homo sapien
cctttggatgaagaaagtgaaactc

SEQ ID NO: 227183 - DNA, 25 bp, Homo sapien
cagacaaacctttggatgaagaaag

SEQ ID NO: 227184 - DNA, 25 bp, Homo sapien
ggcttgtctgccctaagaaacacaa

SEQ ID NO: 227185 - DNA, 25 bp, Homo sapien
ccagattctcagacaaacctttgga

SEQ ID NO: 227186 - DNA, 25 bp, Homo sapien
gacataaaagcttgtaagcaccaga

SEQ ID NO: 227187 - DNA, 25 bp, Homo sapien
ataaaagcttgtaagcaccagatct

SEQ ID NO: 227188 - DNA, 25 bp, Homo sapien
cataaaagcttgtaagcaccagatc

SEQ ID NO: 227189 - DNA, 25 bp, Homo sapien
ttgacataaaagcttgtaagcacca

SEQ ID NO: 227190 - DNA, 25 bp, Homo sapien
ggttgtatgtgtttgaattctttgg

SEQ ID NO: 227191 - DNA, 25 bp, Homo sapien
ttgtatgtgtttgaattctttggag

SEQ ID NO: 227192 - DNA, 25 bp, Homo sapien
tatgtgtttgaattctttggagaaa

SEQ ID NO: 227193 - DNA, 25 bp, Homo sapien
ttggagaaaattttatgacttgcat

SEQ ID NO: 227194 - DNA, 25 bp, Homo sapien
tcctgggtacaaaatgcgagctctt

SEQ ID NO: 227195 - DNA, 25 bp, Homo sapien
tatccttgacacatatgggagcagg

SEQ ID NO: 227196 - DNA, 25 bp, Homo sapien
ggagcaggctttaccagaggcaaga

SEQ ID NO: 227197 - DNA, 25 bp, Homo sapien
ggtgagatcatagcccatgccctaa

SEQ ID NO: 227198 - DNA, 25 bp, Homo sapien
gagacagaacactgcgaattagcac

SEQ ID NO: 227199 - DNA, 25 bp, Homo sapien
agtgaaagttaggagctgtgaagac

SEQ ID NO: 227200 - DNA, 25 bp, Homo sapien
tactggataggttggaaggttgtcc

SEQ ID NO: 227201 - DNA, 25 bp, Homo sapien
ttgtccaactggtgcccctcatgat

SEQ ID NO: 227202 - DNA, 25 bp, Homo sapien
gaaaagtccttacactgtggtacag

SEQ ID NO: 227203 - DNA, 25 bp, Homo sapien
acagtgatccgctggaggaaagtgc

SEQ ID NO: 227204 - DNA, 25 bp, Homo sapien
attcttccgggatatataaacgtgg

SEQ ID NO: 227205 - DNA, 25 bp, Homo sapien
tggagttctgtcagggccacattct

SEQ ID NO: 227206 - DNA, 25 bp, Homo sapien
ccacctaagaccgattgaatcaggt

SEQ ID NO: 227207 - DNA, 25 bp, Homo sapien
ttttctgccagtctatagaatggcc

SEQ ID NO: 227208 - DNA, 25 bp, Homo sapien
gaaacttcatgagccagatacgaat

SEQ ID NO: 227209 - DNA, 25 bp, Homo sapien
acttccccaggcgatttttctgcca

SEQ ID NO: 227210 - DNA, 25 bp, Homo sapien
tgtgtccatggaactcaggccacat

SEQ ID NO: 227211 - DNA, 25 bp, Homo sapien
ttgtgtccatggaactcaggccaca

SEQ ID NO: 227212 - DNA, 25 bp, Homo sapien
ccatggaactcaggccacatgattg

SEQ ID NO: 227213 - DNA, 25 bp, Homo sapien
tgtccatggaactcaggccacatga

SEQ ID NO: 227214 - DNA, 25 bp, Homo sapien
gacatcctgggctactttcatgagg

SEQ ID NO: 227215 - DNA, 25 bp, Homo sapien
cccttttatggccattacacacaaa

SEQ ID NO: 227216 - DNA, 25 bp, Homo sapien
ttcatgaggaagcttaggacaggag

SEQ ID NO: 227217 - DNA, 25 bp, Homo sapien
acacaaatctgagctggccctcttc

SEQ ID NO: 227218 - DNA, 25 bp, Homo sapien
taccatgcatatggccactatggcc

SEQ ID NO: 227219 - DNA, 25 bp, Homo sapien
tttctgttggtataaagtaccatgc

SEQ ID NO: 227220 - DNA, 25 bp, Homo sapien
aagcaccttcctttctgttggtata

SEQ ID NO: 227221 - DNA, 25 bp, Homo sapien
catccgttaccaaggttgaagcacc

SEQ ID NO: 227222 - DNA, 25 bp, Homo sapien
aagcttcttaggacggccccactag

SEQ ID NO: 227223 - DNA, 25 bp, Homo sapien
gatcatttcccatgacttggacagg

SEQ ID NO: 227224 - DNA, 25 bp, Homo sapien
cagagaaggtggctttgagctatag

SEQ ID NO: 227225 - DNA, 25 bp, Homo sapien
ccaagtggaacaaaggtgattgctc

SEQ ID NO: 227226 - DNA, 25 bp, Homo sapien
gtcccctgcacacgttttgcacatt

SEQ ID NO: 227227 - DNA, 25 bp, Homo sapien
actggttgttacattgtcccctgca

SEQ ID NO: 227228 - DNA, 25 bp, Homo sapien
attgtcccctgcacacgttttgcac

SEQ ID NO: 227229 - DNA, 25 bp, Homo sapien
atcccaactggttgttacattgtcc

SEQ ID NO: 227230 - DNA, 25 bp, Homo sapien
tgtagggctctctgcacgttcccat

SEQ ID NO: 227231 - DNA, 25 bp, Homo sapien
gattcgccctgtagggctctctgca

SEQ ID NO: 227232 - DNA, 25 bp, Homo sapien
tctttcatgtaattctgattcgccc

SEQ ID NO: 227233 - DNA, 25 bp, Homo sapien
cgttcccatcaaatgcttgttccat

SEQ ID NO: 227234 - DNA, 25 bp, Homo sapien
catctgccccaacgaaatcagaaga

SEQ ID NO: 227235 - DNA, 25 bp, Homo sapien
ctgccccaacgaaatcagaagagga

SEQ ID NO: 227236 - DNA, 25 bp, Homo sapien
tgacatctgccccaacgaaatcaga

SEQ ID NO: 227237 - DNA, 25 bp, Homo sapien
tctgccccaacgaaatcagaagagg

SEQ ID NO: 227238 - DNA, 25 bp, Homo sapien
aaattatcagaaaacaagagaccca

SEQ ID NO: 227239 - DNA, 25 bp, Homo sapien
cctgagtcacctttctagatggata

SEQ ID NO: 227240 - DNA, 25 bp, Homo sapien
ttgtcttccatgttatccaacagtt

SEQ ID NO: 227241 - DNA, 25 bp, Homo sapien
tagatggatattctgtgtcttcgac

SEQ ID NO: 227242 - DNA, 25 bp, Homo sapien
gctttgcttgttgcaagactccagt

SEQ ID NO: 227243 - DNA, 25 bp, Homo sapien
gtcctgcctgacaataaggggccat

SEQ ID NO: 227244 - DNA, 25 bp, Homo sapien
aaattgtctgatctctcgaaggtcc

SEQ ID NO: 227245 - DNA, 25 bp, Homo sapien
ctgtgtatgccctcaatgctttgct

SEQ ID NO: 227246 - DNA, 25 bp, Homo sapien
agcaggtcacatgatcatgcttacc

SEQ ID NO: 227247 - DNA, 25 bp, Homo sapien
tcagggacctatacgctcagaagct

SEQ ID NO: 227248 - DNA, 25 bp, Homo sapien
tgatgtgaccatctcgacatgagtc

SEQ ID NO: 227249 - DNA, 25 bp, Homo sapien
tacatgcccttgaagagaagagacc

SEQ ID NO: 227250 - DNA, 25 bp, Homo sapien
caagtccttggcctggtaatgaagg

SEQ ID NO: 227251 - DNA, 25 bp, Homo sapien
ggaatcaagtccttggcctggtaat

SEQ ID NO: 227252 - DNA, 25 bp, Homo sapien
tggcctggtaatgaaggtccttcga

SEQ ID NO: 227253 - DNA, 25 bp, Homo sapien
gaaggtccttcgatctggtctgcat

SEQ ID NO: 227254 - DNA, 25 bp, Homo sapien
cttcaggtccagggaggctactgtc

SEQ ID NO: 227255 - DNA, 25 bp, Homo sapien
aagggccaaatggtgacttcaggtc

SEQ ID NO: 227256 - DNA, 25 bp, Homo sapien
gccaaatggtgacttcaggtccagg

SEQ ID NO: 227257 - DNA, 25 bp, Homo sapien
aaatggtgacttcaggtccagggag

SEQ ID NO: 227258 - DNA, 25 bp, Homo sapien
tcccattttatcgagtccctctgag

SEQ ID NO: 227259 - DNA, 25 bp, Homo sapien
agcgagctctgcgtgcttgccccga

SEQ ID NO: 227260 - DNA, 25 bp, Homo sapien
aaggtgaaggagcagcgagctctgc

SEQ ID NO: 227261 - DNA, 25 bp, Homo sapien
ttatcgagtccctctgagatggctg

SEQ ID NO: 227262 - DNA, 25 bp, Homo sapien
actgtgctcagctggctttggatga

SEQ ID NO: 227263 - DNA, 25 bp, Homo sapien
ctggctgtgccagtaaactgtgctc

SEQ ID NO: 227264 - DNA, 25 bp, Homo sapien
cagtaaactgtgctcagctggcttt

SEQ ID NO: 227265 - DNA, 25 bp, Homo sapien
tgtgccagtaaactgtgctcagctg

SEQ ID NO: 227266 - DNA, 25 bp, Homo sapien
agtaaacctggccatatctaatgac

SEQ ID NO: 227267 - DNA, 25 bp, Homo sapien
tgggcgcagctttagttttgtcttt

SEQ ID NO: 227268 - DNA, 25 bp, Homo sapien
agagtaaacctggccatatctaatg

SEQ ID NO: 227269 - DNA, 25 bp, Homo sapien
tgaatttatggttttgggcgcagct

SEQ ID NO: 227270 - DNA, 25 bp, Homo sapien
gccgtatctatcctccataaggtac

SEQ ID NO: 227271 - DNA, 25 bp, Homo sapien
gatgccgtatctatcctccataagg

SEQ ID NO: 227272 - DNA, 25 bp, Homo sapien
cataaggtacttattaattttcgca

SEQ ID NO: 227273 - DNA, 25 bp, Homo sapien
taattttcgcatcatcctgcttcat

SEQ ID NO: 227274 - DNA, 25 bp, Homo sapien
gctctgttggcttgcaaagtggaaa

SEQ ID NO: 227275 - DNA, 25 bp, Homo sapien
tctgatgtcgtcgtcatcggcagag

SEQ ID NO: 227276 - DNA, 25 bp, Homo sapien
ttaatctgtagtaggacccatgtcc

SEQ ID NO: 227277 - DNA, 25 bp, Homo sapien
cacaggcactgaatggagggagcct

SEQ ID NO: 227278 - DNA, 25 bp, Homo sapien
ttgctgctggatagctgtgtttgtg

SEQ ID NO: 227279 - DNA, 25 bp, Homo sapien
attgctgctggatagctgtgtttgt

SEQ ID NO: 227280 - DNA, 25 bp, Homo sapien
actctttgaagtgagactgcacgaa

SEQ ID NO: 227281 - DNA, 25 bp, Homo sapien
ctctgaaagcgtccctctagaatga

SEQ ID NO: 227282 - DNA, 25 bp, Homo sapien
tgaagtgagactgcacgaagataaa

SEQ ID NO: 227283 - DNA, 25 bp, Homo sapien
tagaatgagcatggaggccttctga

SEQ ID NO: 227284 - DNA, 25 bp, Homo sapien
gaactcaaaaggtctctgcttcaca

SEQ ID NO: 227285 - DNA, 25 bp, Homo sapien
tgcagaactcaaaaggtctctgctt

SEQ ID NO: 227286 - DNA, 25 bp, Homo sapien
gatgcagaactcaaaaggtctctgc

SEQ ID NO: 227287 - DNA, 25 bp, Homo sapien
cagaactcaaaaggtctctgcttca

SEQ ID NO: 227288 - DNA, 25 bp, Homo sapien
actgtagccttcaatttgaggaaca

SEQ ID NO: 227289 - DNA, 25 bp, Homo sapien
attttcatggataattactgtagcc

SEQ ID NO: 227290 - DNA, 25 bp, Homo sapien
ttcatggataattactgtagccttc

SEQ ID NO: 227291 - DNA, 25 bp, Homo sapien
tactgtagccttcaatttgaggaac

SEQ ID NO: 227292 - DNA, 25 bp, Homo sapien
gggagccaatatctcggtaattggc

SEQ ID NO: 227293 - DNA, 25 bp, Homo sapien
atctcggtaattggctaaggtttgc

SEQ ID NO: 227294 - DNA, 25 bp, Homo sapien
agttgtagcagagggagccaatatc

SEQ ID NO: 227295 - DNA, 25 bp, Homo sapien
tatatgtagttgtagcagagggagc

SEQ ID NO: 227296 - DNA, 25 bp, Homo sapien
gacaagtgatatcgtctgaggatgg

SEQ ID NO: 227297 - DNA, 25 bp, Homo sapien
aagtcatccatgagtctgcagggaa

SEQ ID NO: 227298 - DNA, 25 bp, Homo sapien
ctgcagggaaatactgaaggcttga

SEQ ID NO: 227299 - DNA, 25 bp, Homo sapien
ctagcctgactgtgtaaagattgca

SEQ ID NO: 227300 - DNA, 25 bp, Homo sapien
ctatagttctacgatgaatgaccta

SEQ ID NO: 227301 - DNA, 25 bp, Homo sapien
tatagttctacgatgaatgacctat

SEQ ID NO: 227302 - DNA, 25 bp, Homo sapien
ccaggagacacggaagtcaggtcta

SEQ ID NO: 227303 - DNA, 25 bp, Homo sapien
ttccaggagacacggaagtcaggtc

SEQ ID NO: 227304 - DNA, 25 bp, Homo sapien
ctaaattagacgcttgaaagctcca

SEQ ID NO: 227305 - DNA, 25 bp, Homo sapien
agacgcttgaaagctccaaagccag

SEQ ID NO: 227306 - DNA, 25 bp, Homo sapien
taaaagtatagttagtgccatactc

SEQ ID NO: 227307 - DNA, 25 bp, Homo sapien
tagtgccatactcatcgttgtattt

SEQ ID NO: 227308 - DNA, 25 bp, Homo sapien
agttagtgccatactcatcgttgta

SEQ ID NO: 227309 - DNA, 25 bp, Homo sapien
agtatagttagtgccatactcatcg

SEQ ID NO: 227310 - DNA, 25 bp, Homo sapien
tcaccatcttcactaatgattatca

SEQ ID NO: 227311 - DNA, 25 bp, Homo sapien
atcaccatcttcactaatgattatc

SEQ ID NO: 227312 - DNA, 25 bp, Homo sapien
catcaccatcttcactaatgattat

SEQ ID NO: 227313 - DNA, 25 bp, Homo sapien
tcaaaacccagtcgttccttaggca

SEQ ID NO: 227314 - DNA, 25 bp, Homo sapien
tgacttgaatcatgtctatctttgc

SEQ ID NO: 227315 - DNA, 25 bp, Homo sapien
atctttgccattgctaccttcttag

SEQ ID NO: 227316 - DNA, 25 bp, Homo sapien
cctagagacctcaaagcaattattc

SEQ ID NO: 227317 - DNA, 25 bp, Homo sapien
gaggtcataagtcagtttcactggg

SEQ ID NO: 227318 - DNA, 25 bp, Homo sapien
gaatctgttgcttgactcttcccat

SEQ ID NO: 227319 - DNA, 25 bp, Homo sapien
gggctgcatgtcctcttaaatgtca

SEQ ID NO: 227320 - DNA, 25 bp, Homo sapien
gaatacaggatagtctcacctcaag

SEQ ID NO: 227321 - DNA, 25 bp, Homo sapien
gagtgacatggtcttatccgctgac

SEQ ID NO: 227322 - DNA, 25 bp, Homo sapien
tggatcattggtgctcaggcctcaa

SEQ ID NO: 227323 - DNA, 25 bp, Homo sapien
gaaaatgtccacagcgtccttactt

SEQ ID NO: 227324 - DNA, 25 bp, Homo sapien
gagatttgtagtcaactctgctcca

SEQ ID NO: 227325 - DNA, 25 bp, Homo sapien
ggcttttttggagcttgtgtgcaca

SEQ ID NO: 227326 - DNA, 25 bp, Homo sapien
tgtttgcaagattgattcacatggc

SEQ ID NO: 227327 - DNA, 25 bp, Homo sapien
gaataatgacatccgtctggagctg

SEQ ID NO: 227328 - DNA, 25 bp, Homo sapien
tctgacaacacaagaaattggccag

SEQ ID NO: 227329 - DNA, 25 bp, Homo sapien
tacgatcctggagctaaggatggtt

SEQ ID NO: 227330 - DNA, 25 bp, Homo sapien
ttgtcactcactgcgcaattgtctc

SEQ ID NO: 227331 - DNA, 25 bp, Homo sapien
cattctccgcttatctctcttgtca

SEQ ID NO: 227332 - DNA, 25 bp, Homo sapien
agtgatagctctacgatcctggagc

SEQ ID NO: 227333 - DNA, 25 bp, Homo sapien
ggagtaaattcaggattgagaaaag

SEQ ID NO: 227334 - DNA, 25 bp, Homo sapien
tccaaggggcaaacatgagaaatac

SEQ ID NO: 227335 - DNA, 25 bp, Homo sapien
tgagaaatacattgggatggaagct

SEQ ID NO: 227336 - DNA, 25 bp, Homo sapien
aaatacattgggatggaagctgtcc

SEQ ID NO: 227337 - DNA, 25 bp, Homo sapien
cttctttatcccccctattcttcat

SEQ ID NO: 227338 - DNA, 25 bp, Homo sapien
tcttctttatcccccctattcttca

SEQ ID NO: 227339 - DNA, 25 bp, Homo sapien
tctttgcagagcaaagtgatgggtg

SEQ ID NO: 227340 - DNA, 25 bp, Homo sapien
gtaggctcttgacccgtgagctgca

SEQ ID NO: 227341 - DNA, 25 bp, Homo sapien
atgtagtaggctcttgacccgtgag

SEQ ID NO: 227342 - DNA, 25 bp, Homo sapien
caaagtgatgggtgccctcattact

SEQ ID NO: 227343 - DNA, 25 bp, Homo sapien
ttctccgtcataagttctccatcac

SEQ ID NO: 227344 - DNA, 25 bp, Homo sapien
ctgcctgtgaacgccaagcctccac

SEQ ID NO: 227345 - DNA, 25 bp, Homo sapien
gagcctgcctgtgaacgccaagcct

SEQ ID NO: 227346 - DNA, 25 bp, Homo sapien
gcctgcctgtgaacgccaagcctcc

SEQ ID NO: 227347 - DNA, 25 bp, Homo sapien
ttgagtctggattaacacagtagat

SEQ ID NO: 227348 - DNA, 25 bp, Homo sapien
tctggattaacacagtagatgctgc

SEQ ID NO: 227349 - DNA, 25 bp, Homo sapien
gtctggattaacacagtagatgctg

SEQ ID NO: 227350 - DNA, 25 bp, Homo sapien
gagtctggattaacacagtagatgc

SEQ ID NO: 227351 - DNA, 25 bp, Homo sapien
gattgtccctggaggtagtgcagcc

SEQ ID NO: 227352 - DNA, 25 bp, Homo sapien
caaaacttggctctgaagacagtca

SEQ ID NO: 227353 - DNA, 25 bp, Homo sapien
caaaacttggtacccttggactcag

SEQ ID NO: 227354 - DNA, 25 bp, Homo sapien
tgcggtgcctacagaagttatcagt

SEQ ID NO: 227355 - DNA, 25 bp, Homo sapien
acaaacgttgaagggattcatttgg

SEQ ID NO: 227356 - DNA, 25 bp, Homo sapien
tcagttgcccacgattcatacattt

SEQ ID NO: 227357 - DNA, 25 bp, Homo sapien
gagaatttcagttgcccacgattca

SEQ ID NO: 227358 - DNA, 25 bp, Homo sapien
aaaagagaatttcagttgcccacga

SEQ ID NO: 227359 - DNA, 25 bp, Homo sapien
tcagcctggacagcaaccttgcaga

SEQ ID NO: 227360 - DNA, 25 bp, Homo sapien
agaattctaagtctgctggccaagg

SEQ ID NO: 227361 - DNA, 25 bp, Homo sapien
tcccaggcattgatccagcattagt

SEQ ID NO: 227362 - DNA, 25 bp, Homo sapien
tcaactaggaaagggcaactgggtc

SEQ ID NO: 227363 - DNA, 25 bp, Homo sapien
attaagaaaagcttttatgctcatt

SEQ ID NO: 227364 - DNA, 25 bp, Homo sapien
ttattaagaaaagcttttatgctca

SEQ ID NO: 227365 - DNA, 25 bp, Homo sapien
agaaaagcttttatgctcatttcac

SEQ ID NO: 227366 - DNA, 25 bp, Homo sapien
taagaaaagcttttatgctcatttc

SEQ ID NO: 227367 - DNA, 25 bp, Homo sapien
cagtgaagtattgatttgataaaag

SEQ ID NO: 227368 - DNA, 25 bp, Homo sapien
gaaacgagtcctgctgctgattgct

SEQ ID NO: 227369 - DNA, 25 bp, Homo sapien
tgctgattgcttagacacttgttag

SEQ ID NO: 227370 - DNA, 25 bp, Homo sapien
cagatttatcctagtttcattttca

SEQ ID NO: 227371 - DNA, 25 bp, Homo sapien
taattaagagattcccactcttcca

SEQ ID NO: 227372 - DNA, 25 bp, Homo sapien
tgctgactgcttcctaaagaaagtg

SEQ ID NO: 227373 - DNA, 25 bp, Homo sapien
agagattcccactcttccagcactg

SEQ ID NO: 227374 - DNA, 25 bp, Homo sapien
actgcttcctaaagaaagtgtgcct

SEQ ID NO: 227375 - DNA, 25 bp, Homo sapien
tatggtctagtcaatagaagaagcc

SEQ ID NO: 227376 - DNA, 25 bp, Homo sapien
gagaatgagatctagtcttgtcacc

SEQ ID NO: 227377 - DNA, 25 bp, Homo sapien
catcgatggtgcaatagactctagg

SEQ ID NO: 227378 - DNA, 25 bp, Homo sapien
ggaagtggcctcatatatggtctag

SEQ ID NO: 227379 - DNA, 25 bp, Homo sapien
tggatcatcagtgtccttcgcaaag

SEQ ID NO: 227380 - DNA, 25 bp, Homo sapien
aaagaagtatagctgtagattctcc

SEQ ID NO: 227381 - DNA, 25 bp, Homo sapien
tagctgaattgtggcctggatcatc

SEQ ID NO: 227382 - DNA, 25 bp, Homo sapien
cttagctgaattgtggcctggatca

SEQ ID NO: 227383 - DNA, 25 bp, Homo sapien
aggtagtaattaccaaacagagtag

SEQ ID NO: 227384 - DNA, 25 bp, Homo sapien
ccaaacagagtagtatagatcaccg

SEQ ID NO: 227385 - DNA, 25 bp, Homo sapien
gagtagtatagatcaccgtaatgac

SEQ ID NO: 227386 - DNA, 25 bp, Homo sapien
gatcaccgtaatgacatatttggaa

SEQ ID NO: 227387 - DNA, 25 bp, Homo sapien
gctaaggccacctggattttctctg

SEQ ID NO: 227388 - DNA, 25 bp, Homo sapien
cagctcgaggtctatgtctaaagga

SEQ ID NO: 227389 - DNA, 25 bp, Homo sapien
catcaataatttgcagctcgaggtc

SEQ ID NO: 227390 - DNA, 25 bp, Homo sapien
gataagagtttccacaagttgattg

SEQ ID NO: 227391 - DNA, 25 bp, Homo sapien
ggatcaacttcttgaactcccatat

SEQ ID NO: 227392 - DNA, 25 bp, Homo sapien
cattggtgctttccgtggcgtggcc

SEQ ID NO: 227393 - DNA, 25 bp, Homo sapien
gctggttccagagcacacattggtg

SEQ ID NO: 227394 - DNA, 25 bp, Homo sapien
acaataaggacctcacccagggtcg

SEQ ID NO: 227395 - DNA, 25 bp, Homo sapien
cagggtcgcccagcgctggtaaatg

SEQ ID NO: 227396 - DNA, 25 bp, Homo sapien
caaagcctgcggcccgcatagcaaa

SEQ ID NO: 227397 - DNA, 25 bp, Homo sapien
caaaagatggtattcaacccttcaa

SEQ ID NO: 227398 - DNA, 25 bp, Homo sapien
agcctgcggcccgcatagcaaacag

SEQ ID NO: 227399 - DNA, 25 bp, Homo sapien
tcaaaagatggtattcaacccttca

SEQ ID NO: 227400 - DNA, 25 bp, Homo sapien
caggggcatggcctcctctgtctgg

SEQ ID NO: 227401 - DNA, 25 bp, Homo sapien
ggcatggcctcctctgtctggtaat

SEQ ID NO: 227402 - DNA, 25 bp, Homo sapien
ggcctcctctgtctggtaatcatac

SEQ ID NO: 227403 - DNA, 25 bp, Homo sapien
catggcctcctctgtctggtaatca

SEQ ID NO: 227404 - DNA, 25 bp, Homo sapien
tgacaaacctaaccgcacgaaacca

SEQ ID NO: 227405 - DNA, 25 bp, Homo sapien
cagatttttctcaagagatgttctt

SEQ ID NO: 227406 - DNA, 25 bp, Homo sapien
cccacttttctgttgcggttgacga

SEQ ID NO: 227407 - DNA, 25 bp, Homo sapien
tgttgcggttgacgacacatgacaa

SEQ ID NO: 227408 - DNA, 25 bp, Homo sapien
tagcacggtgctaatcatatagaag

SEQ ID NO: 227409 - DNA, 25 bp, Homo sapien
tgtatcttcaccatctagcacggtg

SEQ ID NO: 227410 - DNA, 25 bp, Homo sapien
ttatcataatgagggcacttgccca

SEQ ID NO: 227411 - DNA, 25 bp, Homo sapien
catatagaaggcattagtgaacact

SEQ ID NO: 227412 - DNA, 25 bp, Homo sapien
tacccaccctggatagaaatttata

SEQ ID NO: 227413 - DNA, 25 bp, Homo sapien
ttttatgtcttacccaccctggata

SEQ ID NO: 227414 - DNA, 25 bp, Homo sapien
taaggcacaagtgttgtttgtgcag

SEQ ID NO: 227415 - DNA, 25 bp, Homo sapien
gttcaaagagacatttaaggcacaa

SEQ ID NO: 227416 - DNA, 25 bp, Homo sapien
gatgtcagttggataacattgatcc

SEQ ID NO: 227417 - DNA, 25 bp, Homo sapien
cttggatgtcagttggataacattg

SEQ ID NO: 227418 - DNA, 25 bp, Homo sapien
tggatgtcagttggataacattgat

SEQ ID NO: 227419 - DNA, 25 bp, Homo sapien
gcttggatgtcagttggataacatt

SEQ ID NO: 227420 - DNA, 25 bp, Homo sapien
tgccctgctaaataaagaaccgaca

SEQ ID NO: 227421 - DNA, 25 bp, Homo sapien
gcatgaaacacttgaccctgccctg

SEQ ID NO: 227422 - DNA, 25 bp, Homo sapien
gtttgggtctcctgaactgtgttcc

SEQ ID NO: 227423 - DNA, 25 bp, Homo sapien
tgtgcagatactgctgcggctacca

SEQ ID NO: 227424 - DNA, 25 bp, Homo sapien
gcccaagtacttcagtcttcttttc

SEQ ID NO: 227425 - DNA, 25 bp, Homo sapien
gtgatctcagatcctagacagtgtc

SEQ ID NO: 227426 - DNA, 25 bp, Homo sapien
aggtgatctcagatcctagacagtg

SEQ ID NO: 227427 - DNA, 25 bp, Homo sapien
cttccctggtgtgtcattgaacaca

SEQ ID NO: 227428 - DNA, 25 bp, Homo sapien
tgtcattgaacacaagtgttgagat

SEQ ID NO: 227429 - DNA, 25 bp, Homo sapien
gtcaggtgctggataaccgttaaaa

SEQ ID NO: 227430 - DNA, 25 bp, Homo sapien
gaaagcaagccctctggcggctggc

SEQ ID NO: 227431 - DNA, 25 bp, Homo sapien
aagcaagccctctggcggctggcat

SEQ ID NO: 227432 - DNA, 25 bp, Homo sapien
caggtgctggataaccgttaaaaga

SEQ ID NO: 227433 - DNA, 25 bp, Homo sapien
gagttagtcgtctcccagactctac

SEQ ID NO: 227434 - DNA, 25 bp, Homo sapien
caggagagttagtcgtctcccagac

SEQ ID NO: 227435 - DNA, 25 bp, Homo sapien
agccaggagagttagtcgtctccca

SEQ ID NO: 227436 - DNA, 25 bp, Homo sapien
ggagagttagtcgtctcccagactc

SEQ ID NO: 227437 - DNA, 25 bp, Homo sapien
taagaatgctaatgcatctacctcc

SEQ ID NO: 227438 - DNA, 25 bp, Homo sapien
ctcttaagtcaggtggaggagcatt

SEQ ID NO: 227439 - DNA, 25 bp, Homo sapien
gaatttctggttaggtgtgacccaa

SEQ ID NO: 227440 - DNA, 25 bp, Homo sapien
aggagcattttaggactggctctgc

SEQ ID NO: 227441 - DNA, 25 bp, Homo sapien
tatacatgtatcatacggttttttt

SEQ ID NO: 227442 - DNA, 25 bp, Homo sapien
gatgaggctctacaaggattgggat

SEQ ID NO: 227443 - DNA, 25 bp, Homo sapien
gaaatttgatgcgtccaaactctgt

SEQ ID NO: 227444 - DNA, 25 bp, Homo sapien
cattacaagcatggaagctgtagag

SEQ ID NO: 227445 - DNA, 25 bp, Homo sapien
ttagggttgaaattcgcaatccatt

SEQ ID NO: 227446 - DNA, 25 bp, Homo sapien
tacttcagataggatttgacgtacg

SEQ ID NO: 227447 - DNA, 25 bp, Homo sapien
tgctgattgaacctttattctgctc

SEQ ID NO: 227448 - DNA, 25 bp, Homo sapien
cagtggactcaggtttccggaggac

SEQ ID NO: 227449 - DNA, 25 bp, Homo sapien
gacgtacgtttaagttctcagtgga

SEQ ID NO: 227450 - DNA, 25 bp, Homo sapien
ctttgccagcttgtttgaagtgttt

SEQ ID NO: 227451 - DNA, 25 bp, Homo sapien
cctttgccagcttgtttgaagtgtt

SEQ ID NO: 227452 - DNA, 25 bp, Homo sapien
tgccagcttgtttgaagtgtttgtt

SEQ ID NO: 227453 - DNA, 25 bp, Homo sapien
tttgccagcttgtttgaagtgtttg

SEQ ID NO: 227454 - DNA, 25 bp, Homo sapien
cattaccgtattctgagttggtggt

SEQ ID NO: 227455 - DNA, 25 bp, Homo sapien
atcactgccattaccgtattctgag

SEQ ID NO: 227456 - DNA, 25 bp, Homo sapien
tctgagttggtggtataaatggcat

SEQ ID NO: 227457 - DNA, 25 bp, Homo sapien
cttgataataacatcactgccatta

SEQ ID NO: 227458 - DNA, 25 bp, Homo sapien
tcatctccaacagggtaagttctgc

SEQ ID NO: 227459 - DNA, 25 bp, Homo sapien
attcatctccaacagggtaagttct

SEQ ID NO: 227460 - DNA, 25 bp, Homo sapien
atctccaacagggtaagttctgcac

SEQ ID NO: 227461 - DNA, 25 bp, Homo sapien
ctccaacagggtaagttctgcacat

SEQ ID NO: 227462 - DNA, 25 bp, Homo sapien
cagttggcagagtgtcttccttctc

SEQ ID NO: 227463 - DNA, 25 bp, Homo sapien
ttcccattcactctgtgccactgct

SEQ ID NO: 227464 - DNA, 25 bp, Homo sapien
tcagttggcagagtgtcttccttct

SEQ ID NO: 227465 - DNA, 25 bp, Homo sapien
tttttcccattcactctgtgccact

SEQ ID NO: 227466 - DNA, 25 bp, Homo sapien
agctctctctttgctggcaggtgtc

SEQ ID NO: 227467 - DNA, 25 bp, Homo sapien
gctctctctttgctggcaggtgtca

SEQ ID NO: 227468 - DNA, 25 bp, Homo sapien
ctccatgcccaaatctccagctctc

SEQ ID NO: 227469 - DNA, 25 bp, Homo sapien
catgcccaaatctccagctctctct

SEQ ID NO: 227470 - DNA, 25 bp, Homo sapien
tctgacactgatttggggtcaagtc

SEQ ID NO: 227471 - DNA, 25 bp, Homo sapien
ggttctgaatcaggagcctgtgttt

SEQ ID NO: 227472 - DNA, 25 bp, Homo sapien
gtcaagtctggggttctgaatcagg

SEQ ID NO: 227473 - DNA, 25 bp, Homo sapien
cagaaggcattgacaagtggcacca

SEQ ID NO: 227474 - DNA, 25 bp, Homo sapien
gagttcatctactaggcatggacaa

SEQ ID NO: 227475 - DNA, 25 bp, Homo sapien
taatctgtgctagtgataccccagc

SEQ ID NO: 227476 - DNA, 25 bp, Homo sapien
catggacaagccacttcaggaagtt

SEQ ID NO: 227477 - DNA, 25 bp, Homo sapien
gctagattctatgataagtgattga

SEQ ID NO: 227478 - DNA, 25 bp, Homo sapien
ccttttctttgccatccacttgcgt

SEQ ID NO: 227479 - DNA, 25 bp, Homo sapien
ttttctttgccatccacttgcgtca

SEQ ID NO: 227480 - DNA, 25 bp, Homo sapien
ttccttttctttgccatccacttgc

SEQ ID NO: 227481 - DNA, 25 bp, Homo sapien
tttctttgccatccacttgcgtcat

SEQ ID NO: 227482 - DNA, 25 bp, Homo sapien
gatgatacgaattgtgttggatttc

SEQ ID NO: 227483 - DNA, 25 bp, Homo sapien
atgggaactccccaggtacagtgat

SEQ ID NO: 227484 - DNA, 25 bp, Homo sapien
ctccccaggtacagtgatgatacga

SEQ ID NO: 227485 - DNA, 25 bp, Homo sapien
gaactccccaggtacagtgatgata

SEQ ID NO: 227486 - DNA, 25 bp, Homo sapien
ctgtctccatcacaccggttttcta

SEQ ID NO: 227487 - DNA, 25 bp, Homo sapien
tctgtctccatcacaccggttttct

SEQ ID NO: 227488 - DNA, 25 bp, Homo sapien
tgtctccatcacaccggttttctag

SEQ ID NO: 227489 - DNA, 25 bp, Homo sapien
aataaatgtgggcagcagaccattc

SEQ ID NO: 227490 - DNA, 25 bp, Homo sapien
gaccattcaaagtaagattatctgg

SEQ ID NO: 227491 - DNA, 25 bp, Homo sapien
aaagtgcttggagtttctgagtggt

SEQ ID NO: 227492 - DNA, 25 bp, Homo sapien
gctgttggatccatttgttttagaa

SEQ ID NO: 227493 - DNA, 25 bp, Homo sapien
tcctgacctggagcacccaggaatg

SEQ ID NO: 227494 - DNA, 25 bp, Homo sapien
tatagccatttaaacagagtctgtg

SEQ ID NO: 227495 - DNA, 25 bp, Homo sapien
taggtgtcaggcatctatagccatt

SEQ ID NO: 227496 - DNA, 25 bp, Homo sapien
tgtgtaacagtcttgagctgctgat

SEQ ID NO: 227497 - DNA, 25 bp, Homo sapien
cagtccaactggaccgagcttgtga

SEQ ID NO: 227498 - DNA, 25 bp, Homo sapien
actggaccgagcttgtgaataaaac

SEQ ID NO: 227499 - DNA, 25 bp, Homo sapien
cattaacagtcataatgagattcag

SEQ ID NO: 227500 - DNA, 25 bp, Homo sapien
tgagattcagtccaactggaccgag

SEQ ID NO: 227501 - DNA, 25 bp, Homo sapien
tgaggcagtttatcttctgaacagc

SEQ ID NO: 227502 - DNA, 25 bp, Homo sapien
gtttatcttctgaacagctgctttg

SEQ ID NO: 227503 - DNA, 25 bp, Homo sapien
ttgaatgaggcagtttatcttctga

SEQ ID NO: 227504 - DNA, 25 bp, Homo sapien
aggcagtttatcttctgaacagctg

SEQ ID NO: 227505 - DNA, 25 bp, Homo sapien
tgggcccagcaagagtgctgtttct

SEQ ID NO: 227506 - DNA, 25 bp, Homo sapien
aaggcagattgctggacggattcac

SEQ ID NO: 227507 - DNA, 25 bp, Homo sapien
tctcctaccgatgcctttactccag

SEQ ID NO: 227508 - DNA, 25 bp, Homo sapien
acggattcacaaaccacggcagctc

SEQ ID NO: 227509 - DNA, 25 bp, Homo sapien
ttgctgtagttgatgcctctgctgc

SEQ ID NO: 227510 - DNA, 25 bp, Homo sapien
tgctgtagttgatgcctctgctgct

SEQ ID NO: 227511 - DNA, 25 bp, Homo sapien
tttgctgtagttgatgcctctgctg

SEQ ID NO: 227512 - DNA, 25 bp, Homo sapien
ctttgctgtagttgatgcctctgct

SEQ ID NO: 227513 - DNA, 25 bp, Homo sapien
cctctttgaaacagcaggggctcac

SEQ ID NO: 227514 - DNA, 25 bp, Homo sapien
ccctctttgaaacagcaggggctca

SEQ ID NO: 227515 - DNA, 25 bp, Homo sapien
ggatacaacagctgggaaacactgg

SEQ ID NO: 227516 - DNA, 25 bp, Homo sapien
aacactggtcctgttacaccattgc

SEQ ID NO: 227517 - DNA, 25 bp, Homo sapien
ccctgctgatgaagtagttacaaga

SEQ ID NO: 227518 - DNA, 25 bp, Homo sapien
tgccatattagtcttccctgctgat

SEQ ID NO: 227519 - DNA, 25 bp, Homo sapien
gttatggaggtctgatctgaagttc

SEQ ID NO: 227520 - DNA, 25 bp, Homo sapien
ggttatggaggtctgatctgaagtt

SEQ ID NO: 227521 - DNA, 25 bp, Homo sapien
catgatattggttttgagagccacg

SEQ ID NO: 227522 - DNA, 25 bp, Homo sapien
tactggttcataactctttgtaaga

SEQ ID NO: 227523 - DNA, 25 bp, Homo sapien
attggttttgagagccacgtgggca

SEQ ID NO: 227524 - DNA, 25 bp, Homo sapien
cacctattgagtatgaatgttttaa

SEQ ID NO: 227525 - DNA, 25 bp, Homo sapien
cagacaggggtatttcatatcatcc

SEQ ID NO: 227526 - DNA, 25 bp, Homo sapien
gcaaggatcatccatcataatcaga

SEQ ID NO: 227527 - DNA, 25 bp, Homo sapien
gatcatccatcataatcagacaggg

SEQ ID NO: 227528 - DNA, 25 bp, Homo sapien
agagcaaggatcatccatcataatc

SEQ ID NO: 227529 - DNA, 25 bp, Homo sapien
ctggcagaatgtgaattctatccaa

SEQ ID NO: 227530 - DNA, 25 bp, Homo sapien
aattctctggcagaatgtgaattct

SEQ ID NO: 227531 - DNA, 25 bp, Homo sapien
tctctggcagaatgtgaattctatc

SEQ ID NO: 227532 - DNA, 25 bp, Homo sapien
ttatggttctgttgaattctctggc

SEQ ID NO: 227533 - DNA, 25 bp, Homo sapien
tctagtacgattggctgccttgtcc

SEQ ID NO: 227534 - DNA, 25 bp, Homo sapien
tctcttaaagggcactctaaagtgc

SEQ ID NO: 227535 - DNA, 25 bp, Homo sapien
cccagtgtgtaggaacaggactgaa

SEQ ID NO: 227536 - DNA, 25 bp, Homo sapien
tgccttgtccacaacatcctaaagg

SEQ ID NO: 227537 - DNA, 25 bp, Homo sapien
ctggttttgatatggaagatgctct

SEQ ID NO: 227538 - DNA, 25 bp, Homo sapien
cctggttttgatatggaagatgctc

SEQ ID NO: 227539 - DNA, 25 bp, Homo sapien
taacgtcatcataaatggtaatgtc

SEQ ID NO: 227540 - DNA, 25 bp, Homo sapien
ctaattcattaacgtcatcataaat

SEQ ID NO: 227541 - DNA, 25 bp, Homo sapien
tcattaacgtcatcataaatggtaa

SEQ ID NO: 227542 - DNA, 25 bp, Homo sapien
aattcattaacgtcatcataaatgg

SEQ ID NO: 227543 - DNA, 25 bp, Homo sapien
gcaagcagctggttcctacgggacc

SEQ ID NO: 227544 - DNA, 25 bp, Homo sapien
tcctacgggacccaggctgaactct

SEQ ID NO: 227545 - DNA, 25 bp, Homo sapien
ttctttcattatgctcaatgggttc

SEQ ID NO: 227546 - DNA, 25 bp, Homo sapien
ctttcattatgctcaatgggttcaa

SEQ ID NO: 227547 - DNA, 25 bp, Homo sapien
aaggcatggaatagactgcggaaaa

SEQ ID NO: 227548 - DNA, 25 bp, Homo sapien
aatcaaggttgctggactttagggt

SEQ ID NO: 227549 - DNA, 25 bp, Homo sapien
tgcggaaaatcaaggttgctggact

SEQ ID NO: 227550 - DNA, 25 bp, Homo sapien
tagactgcggaaaatcaaggttgct

SEQ ID NO: 227551 - DNA, 25 bp, Homo sapien
ttaacagtggtgtcctgattttttc

SEQ ID NO: 227552 - DNA, 25 bp, Homo sapien
acagtggtgtcctgattttttccaa

SEQ ID NO: 227553 - DNA, 25 bp, Homo sapien
aacagtggtgtcctgattttttcca

SEQ ID NO: 227554 - DNA, 25 bp, Homo sapien
cagtggtgtcctgattttttccaaa

SEQ ID NO: 227555 - DNA, 25 bp, Homo sapien
cagatttgggctgctgagtagatga

SEQ ID NO: 227556 - DNA, 25 bp, Homo sapien
aaccattgagcaggttacgaacctc

SEQ ID NO: 227557 - DNA, 25 bp, Homo sapien
gagtagatgatgctgacttccgata

SEQ ID NO: 227558 - DNA, 25 bp, Homo sapien
tgaacttaaacgaaagaaatcagtg

SEQ ID NO: 227559 - DNA, 25 bp, Homo sapien
ttcttgttatggaaggaaacctgag

SEQ ID NO: 227560 - DNA, 25 bp, Homo sapien
tctgttaggctggacgccaaggaca

SEQ ID NO: 227561 - DNA, 25 bp, Homo sapien
caggcctgttcagctgtatttggct

SEQ ID NO: 227562 - DNA, 25 bp, Homo sapien
taatccacgaactgaaacagggctt

SEQ ID NO: 227563 - DNA, 25 bp, Homo sapien
tggtggaattaccttcttaagaaca

SEQ ID NO: 227564 - DNA, 25 bp, Homo sapien
aatgctgttgccaatcttccacagc

SEQ ID NO: 227565 - DNA, 25 bp, Homo sapien
ggaatgctgttgccaatcttccaca

SEQ ID NO: 227566 - DNA, 25 bp, Homo sapien
ggtgataagaattaaattccctcat

SEQ ID NO: 227567 - DNA, 25 bp, Homo sapien
gaccgaggaaacgttctttctgcta

SEQ ID NO: 227568 - DNA, 25 bp, Homo sapien
cgaggaaacgttctttctgctaatc

SEQ ID NO: 227569 - DNA, 25 bp, Homo sapien
ggaaacgttctttctgctaatctgg

SEQ ID NO: 227570 - DNA, 25 bp, Homo sapien
gttctttctgctaatctggttccac

SEQ ID NO: 227571 - DNA, 25 bp, Homo sapien
ttcctggcactcttctgattcctgg

SEQ ID NO: 227572 - DNA, 25 bp, Homo sapien
cttttagtgacacaagcaagcctgc

SEQ ID NO: 227573 - DNA, 25 bp, Homo sapien
agctcctcaggaggcaactctgcta

SEQ ID NO: 227574 - DNA, 25 bp, Homo sapien
tgctactgcagaacaaagatcattc

SEQ ID NO: 227575 - DNA, 25 bp, Homo sapien
tagccttctttttagtgccactcca

SEQ ID NO: 227576 - DNA, 25 bp, Homo sapien
ttagccttctttttagtgccactcc

SEQ ID NO: 227577 - DNA, 25 bp, Homo sapien
tttagccttctttttagtgccactc

SEQ ID NO: 227578 - DNA, 25 bp, Homo sapien
cacagaatgttctctgtctgtcata

SEQ ID NO: 227579 - DNA, 25 bp, Homo sapien
tcacagaatgttctctgtctgtcat

SEQ ID NO: 227580 - DNA, 25 bp, Homo sapien
catgtgtttccggtacttctgggct

SEQ ID NO: 227581 - DNA, 25 bp, Homo sapien
gggcacagtcaaaagttgctgtatt

SEQ ID NO: 227582 - DNA, 25 bp, Homo sapien
attaagtcatgtgtttccggtactt

SEQ ID NO: 227583 - DNA, 25 bp, Homo sapien
ctctgggcacagtcaaaagttgctg

SEQ ID NO: 227584 - DNA, 25 bp, Homo sapien
taacccacaggttgtttcttgctcc

SEQ ID NO: 227585 - DNA, 25 bp, Homo sapien
acccacaggttgtttcttgctccca

SEQ ID NO: 227586 - DNA, 25 bp, Homo sapien
tctcttgattcctgtaggaagacac

SEQ ID NO: 227587 - DNA, 25 bp, Homo sapien
gaagacactgaacagaattctgcat

SEQ ID NO: 227588 - DNA, 25 bp, Homo sapien
ccaagcccagattcttcaaatgtgc

SEQ ID NO: 227589 - DNA, 25 bp, Homo sapien
ccagattcttcaaatgtgctttctc

SEQ ID NO: 227590 - DNA, 25 bp, Homo sapien
tctccatggagggaaggactcagat

SEQ ID NO: 227591 - DNA, 25 bp, Homo sapien
taaggtatcacagaagggtgcagag

SEQ ID NO: 227592 - DNA, 25 bp, Homo sapien
aatgatcactagctgtccctaaagg

SEQ ID NO: 227593 - DNA, 25 bp, Homo sapien
gcttttagcctgtgatattgtctcc

SEQ ID NO: 227594 - DNA, 25 bp, Homo sapien
ttctcagaggatgatcattcacttt

SEQ ID NO: 227595 - DNA, 25 bp, Homo sapien
tgaagaagttttgaccacgaatagc

SEQ ID NO: 227596 - DNA, 25 bp, Homo sapien
tgtttgccaacttattccactgcgg

SEQ ID NO: 227597 - DNA, 25 bp, Homo sapien
gcggctctttttgtcttgcaatgca

SEQ ID NO: 227598 - DNA, 25 bp, Homo sapien
cacgaatagctgacaaatatgtgca

SEQ ID NO: 227599 - DNA, 25 bp, Homo sapien
tagcaccctctgcttattcgtctct

SEQ ID NO: 227600 - DNA, 25 bp, Homo sapien
gcaccctctgcttattcgtctcttt

SEQ ID NO: 227601 - DNA, 25 bp, Homo sapien
cctctgcttattcgtctctttgttt

SEQ ID NO: 227602 - DNA, 25 bp, Homo sapien
caccctctgcttattcgtctctttg

SEQ ID NO: 227603 - DNA, 25 bp, Homo sapien
tctctggctggcaaggtcagtaagg

SEQ ID NO: 227604 - DNA, 25 bp, Homo sapien
gaacaggtaatggtacagagtcttc

SEQ ID NO: 227605 - DNA, 25 bp, Homo sapien
tactcagagacaatatgttgccctg

SEQ ID NO: 227606 - DNA, 25 bp, Homo sapien
tgctcacagctctaatgtaggtctg

SEQ ID NO: 227607 - DNA, 25 bp, Homo sapien
caactgctgtccagagttaaattta

SEQ ID NO: 227608 - DNA, 25 bp, Homo sapien
atttatagtcacaaagcaagagaaa

SEQ ID NO: 227609 - DNA, 25 bp, Homo sapien
actgctgtccagagttaaatttata

SEQ ID NO: 227610 - DNA, 25 bp, Homo sapien
ggctgggtttccagaggcataaatc

SEQ ID NO: 227611 - DNA, 25 bp, Homo sapien
taggtcccagcttcatgccatctgt

SEQ ID NO: 227612 - DNA, 25 bp, Homo sapien
agttaggtcccagcttcatgccatc

SEQ ID NO: 227613 - DNA, 25 bp, Homo sapien
tcccagcttcatgccatctgttatt

SEQ ID NO: 227614 - DNA, 25 bp, Homo sapien
tcagttaggtcccagcttcatgcca

SEQ ID NO: 227615 - DNA, 25 bp, Homo sapien
tggctgattgctttaagatctggaa

SEQ ID NO: 227616 - DNA, 25 bp, Homo sapien
gaagctcagaggagtcataatggct

SEQ ID NO: 227617 - DNA, 25 bp, Homo sapien
actgcagaataaatatgatctggct

SEQ ID NO: 227618 - DNA, 25 bp, Homo sapien
ttttcttccccatgacagaaggtag

SEQ ID NO: 227619 - DNA, 25 bp, Homo sapien
catccgtcccgttgacaaaagttgg

SEQ ID NO: 227620 - DNA, 25 bp, Homo sapien
gttgtgggacactcatccgtcccgt

SEQ ID NO: 227621 - DNA, 25 bp, Homo sapien
tgtgggacactcatccgtcccgttg

SEQ ID NO: 227622 - DNA, 25 bp, Homo sapien
gacactcatccgtcccgttgacaaa

SEQ ID NO: 227623 - DNA, 25 bp, Homo sapien
tgcaaaaaactcggatgcatgtctc

SEQ ID NO: 227624 - DNA, 25 bp, Homo sapien
ttgcaaaaaactcggatgcatgtct

SEQ ID NO: 227625 - DNA, 25 bp, Homo sapien
cttgcaaaaaactcggatgcatgtc

SEQ ID NO: 227626 - DNA, 25 bp, Homo sapien
tgtttaccacccatcatgctctgaa

SEQ ID NO: 227627 - DNA, 25 bp, Homo sapien
atatattgtttaccacccatcatgc

SEQ ID NO: 227628 - DNA, 25 bp, Homo sapien
caaaatatgatgcttgccaatatat

SEQ ID NO: 227629 - DNA, 25 bp, Homo sapien
tattgtttaccacccatcatgctct

SEQ ID NO: 227630 - DNA, 25 bp, Homo sapien
cccgtcgtggaaaattggtgtcaca

SEQ ID NO: 227631 - DNA, 25 bp, Homo sapien
tcactcaagaggttgtggcatccta

SEQ ID NO: 227632 - DNA, 25 bp, Homo sapien
tatacagagattgagagtccaccat

SEQ ID NO: 227633 - DNA, 25 bp, Homo sapien
tggtgtcacattgccacatggagca

SEQ ID NO: 227634 - DNA, 25 bp, Homo sapien
ctggttggcgttataaatatgcatg

SEQ ID NO: 227635 - DNA, 25 bp, Homo sapien
agtctggttggcgttataaatatgc

SEQ ID NO: 227636 - DNA, 25 bp, Homo sapien
taaagtctggttggcgttataaata

SEQ ID NO: 227637 - DNA, 25 bp, Homo sapien
ctaaagtctggttggcgttataaat

SEQ ID NO: 227638 - DNA, 25 bp, Homo sapien
ttattgttaaccacctcacattttc

SEQ ID NO: 227639 - DNA, 25 bp, Homo sapien
ttctgtggtatcgtagaacagaaat

SEQ ID NO: 227640 - DNA, 25 bp, Homo sapien
tgtggtatcgtagaacagaaattgt

SEQ ID NO: 227641 - DNA, 25 bp, Homo sapien
tcactctgttattgttaaccacctc

SEQ ID NO: 227642 - DNA, 25 bp, Homo sapien
cattcataaaagtcgaaaggattcc

SEQ ID NO: 227643 - DNA, 25 bp, Homo sapien
tcttgcattcataaaagtcgaaagg

SEQ ID NO: 227644 - DNA, 25 bp, Homo sapien
tcataaaagtcgaaaggattccagc

SEQ ID NO: 227645 - DNA, 25 bp, Homo sapien
tgacaagctcttgcattcataaaag

SEQ ID NO: 227646 - DNA, 25 bp, Homo sapien
gacttccatagcgtagcctggaaca

SEQ ID NO: 227647 - DNA, 25 bp, Homo sapien
caaagttgacttccatagcgtagcc

SEQ ID NO: 227648 - DNA, 25 bp, Homo sapien
aatcccacaaagttgacttccatag

SEQ ID NO: 227649 - DNA, 25 bp, Homo sapien
gttgacttccatagcgtagcctgga

SEQ ID NO: 227650 - DNA, 25 bp, Homo sapien
ctgtgaatagatatggaatcctcaa

SEQ ID NO: 227651 - DNA, 25 bp, Homo sapien
gaatcctcaaatggttttgaagcca

SEQ ID NO: 227652 - DNA, 25 bp, Homo sapien
gaatagatatggaatcctcaaatgg

SEQ ID NO: 227653 - DNA, 25 bp, Homo sapien
gatatggaatcctcaaatggttttg

SEQ ID NO: 227654 - DNA, 25 bp, Homo sapien
tgtctcttttggctttgcacattcc

SEQ ID NO: 227655 - DNA, 25 bp, Homo sapien
ccagctgtctcttttggctttgcac

SEQ ID NO: 227656 - DNA, 25 bp, Homo sapien
tttggctttgcacattcctgtctca

SEQ ID NO: 227657 - DNA, 25 bp, Homo sapien
tcttttggctttgcacattcctgtc

SEQ ID NO: 227658 - DNA, 25 bp, Homo sapien
tttttctgctgtgatagttaaccaa

SEQ ID NO: 227659 - DNA, 25 bp, Homo sapien
tttctgctgtgatagttaaccaagg

SEQ ID NO: 227660 - DNA, 25 bp, Homo sapien
ttctgctgtgatagttaaccaaggc

SEQ ID NO: 227661 - DNA, 25 bp, Homo sapien
ttttctgctgtgatagttaaccaag

SEQ ID NO: 227662 - DNA, 25 bp, Homo sapien
tgcaaaccttaaccgatgtttatta

SEQ ID NO: 227663 - DNA, 25 bp, Homo sapien
gtcatcactttgtccgtagaaacac

SEQ ID NO: 227664 - DNA, 25 bp, Homo sapien
gccctaaaggtctcttacagtcatc

SEQ ID NO: 227665 - DNA, 25 bp, Homo sapien
tcatcactttgtccgtagaaacaca

SEQ ID NO: 227666 - DNA, 25 bp, Homo sapien
ctaaaggtctcttacagtcatcact

SEQ ID NO: 227667 - DNA, 25 bp, Homo sapien
gaagccactgctttgaatcagcgag

SEQ ID NO: 227668 - DNA, 25 bp, Homo sapien
caatgcgtggcacataccaactcaa

SEQ ID NO: 227669 - DNA, 25 bp, Homo sapien
gggacagaaagaacatatggcaact

SEQ ID NO: 227670 - DNA, 25 bp, Homo sapien
aagtcaaggccttttgggccaggct

SEQ ID NO: 227671 - DNA, 25 bp, Homo sapien
gctgagacttggtgtatgtacacac

SEQ ID NO: 227672 - DNA, 25 bp, Homo sapien
taattgccgcgaatagtaacttttc

SEQ ID NO: 227673 - DNA, 25 bp, Homo sapien
gatacaccagcaaagatgactagag

SEQ ID NO: 227674 - DNA, 25 bp, Homo sapien
caatcctttggcaggtggtatcaca

SEQ ID NO: 227675 - DNA, 25 bp, Homo sapien
tgctcggccacatccacacagttct

SEQ ID NO: 227676 - DNA, 25 bp, Homo sapien
ctcggccacatccacacagttctct

SEQ ID NO: 227677 - DNA, 25 bp, Homo sapien
atctgctcggccacatccacacagt

SEQ ID NO: 227678 - DNA, 25 bp, Homo sapien
acatagccatctgctcggccacatc

SEQ ID NO: 227679 - DNA, 25 bp, Homo sapien
tgtggatccagctgaatataatttc

SEQ ID NO: 227680 - DNA, 25 bp, Homo sapien
tgtctttttgctaaatctggatgtg

SEQ ID NO: 227681 - DNA, 25 bp, Homo sapien
tttgctaaatctggatgtggatcca

SEQ ID NO: 227682 - DNA, 25 bp, Homo sapien
gatccagctgaatataatttcttcc

SEQ ID NO: 227683 - DNA, 25 bp, Homo sapien
tgaataggatataggtcttggtttc

SEQ ID NO: 227684 - DNA, 25 bp, Homo sapien
ctatgaataggatataggtcttggt

SEQ ID NO: 227685 - DNA, 25 bp, Homo sapien
aataggatataggtcttggtttcca

SEQ ID NO: 227686 - DNA, 25 bp, Homo sapien
ataggatataggtcttggtttccat

SEQ ID NO: 227687 - DNA, 25 bp, Homo sapien
taaagacagatctgtcctgtttgtc

SEQ ID NO: 227688 - DNA, 25 bp, Homo sapien
tcaggagcagaaagtatgctggcga

SEQ ID NO: 227689 - DNA, 25 bp, Homo sapien
gagcagaaagtatgctggcgaaaac

SEQ ID NO: 227690 - DNA, 25 bp, Homo sapien
agaaagtatgctggcgaaaacgaac

SEQ ID NO: 227691 - DNA, 25 bp, Homo sapien
caggaagatgaattaccccaggaag

SEQ ID NO: 227692 - DNA, 25 bp, Homo sapien
aatttgccagctgtccgtcttgtcc

SEQ ID NO: 227693 - DNA, 25 bp, Homo sapien
gtgtagatctagtgcagccacagaa

SEQ ID NO: 227694 - DNA, 25 bp, Homo sapien
ttgcgctgccagcaacaagcctgtg

SEQ ID NO: 227695 - DNA, 25 bp, Homo sapien
ccttgggactagctgaagggccgct

SEQ ID NO: 227696 - DNA, 25 bp, Homo sapien
gaggctcagagtaactaaatgcagc

SEQ ID NO: 227697 - DNA, 25 bp, Homo sapien
ccagaggtgagccataatgaggctc

SEQ ID NO: 227698 - DNA, 25 bp, Homo sapien
gtatctggacttgagcctgagcatt

SEQ ID NO: 227699 - DNA, 25 bp, Homo sapien
aatctgctgcactttgtatctggac

SEQ ID NO: 227700 - DNA, 25 bp, Homo sapien
gaaaggctttttctaatcagcattg

SEQ ID NO: 227701 - DNA, 25 bp, Homo sapien
agagatcatgcccttttcttctgac

SEQ ID NO: 227702 - DNA, 25 bp, Homo sapien
gagagatcatgcccttttcttctga

SEQ ID NO: 227703 - DNA, 25 bp, Homo sapien
gtgagagatcatgcccttttcttct

SEQ ID NO: 227704 - DNA, 25 bp, Homo sapien
cagtgagagatcatgcccttttctt

SEQ ID NO: 227705 - DNA, 25 bp, Homo sapien
tgtggcatctttggctgcccttttt

SEQ ID NO: 227706 - DNA, 25 bp, Homo sapien
ttttatgtgcttgtctttgtgctcc

SEQ ID NO: 227707 - DNA, 25 bp, Homo sapien
tacatcaatctcataaaacatcctt

SEQ ID NO: 227708 - DNA, 25 bp, Homo sapien
gcatctttggctgccctttttatgt

SEQ ID NO: 227709 - DNA, 25 bp, Homo sapien
ctaggcattgaagtttctaagagtc

SEQ ID NO: 227710 - DNA, 25 bp, Homo sapien
taactctgtttaaagtttaatggca

SEQ ID NO: 227711 - DNA, 25 bp, Homo sapien
gacctctggggtcgttggttttgca

SEQ ID NO: 227712 - DNA, 25 bp, Homo sapien
tgacctctggggtcgttggttttgc

SEQ ID NO: 227713 - DNA, 25 bp, Homo sapien
ttctcacttctgtcattgacagcca

SEQ ID NO: 227714 - DNA, 25 bp, Homo sapien
ggcttctaagtaagtcctgcagtct

SEQ ID NO: 227715 - DNA, 25 bp, Homo sapien
tctaagtaagtcctgcagtcttatt

SEQ ID NO: 227716 - DNA, 25 bp, Homo sapien
aaaatgtggcttctaagtaagtcct

SEQ ID NO: 227717 - DNA, 25 bp, Homo sapien
atttcccacaaagaatgcactgtgg

SEQ ID NO: 227718 - DNA, 25 bp, Homo sapien
aatttcccacaaagaatgcactgtg

SEQ ID NO: 227719 - DNA, 25 bp, Homo sapien
cactgtggctccactccaggacttt

SEQ ID NO: 227720 - DNA, 25 bp, Homo sapien
tgtggctccactccaggactttgcc

SEQ ID NO: 227721 - DNA, 25 bp, Homo sapien
ttgtcagtgagtcgccaatgcctta

SEQ ID NO: 227722 - DNA, 25 bp, Homo sapien
caggaagtgcaacttgtttgtcagt

SEQ ID NO: 227723 - DNA, 25 bp, Homo sapien
tctcttcaggaagtgcaacttgttt

SEQ ID NO: 227724 - DNA, 25 bp, Homo sapien
tgcaacttgtttgtcagtgagtcgc

SEQ ID NO: 227725 - DNA, 25 bp, Homo sapien
tgcagtgcctaatctactgcgtggt

SEQ ID NO: 227726 - DNA, 25 bp, Homo sapien
tgcctaatctactgcgtggttgagc

SEQ ID NO: 227727 - DNA, 25 bp, Homo sapien
ctactgcgtggttgagctggtgaca

SEQ ID NO: 227728 - DNA, 25 bp, Homo sapien
ctaatctactgcgtggttgagctgg

SEQ ID NO: 227729 - DNA, 25 bp, Homo sapien
gcacagccacccacaacataggtgt

SEQ ID NO: 227730 - DNA, 25 bp, Homo sapien
tatgatttcgtatctggtgctgttc

SEQ ID NO: 227731 - DNA, 25 bp, Homo sapien
tctctgtatgatttcgtatctggtg

SEQ ID NO: 227732 - DNA, 25 bp, Homo sapien
gccacccacaacataggtgtatatt

SEQ ID NO: 227733 - DNA, 25 bp, Homo sapien
tctggggtttcatagcctgcattac

SEQ ID NO: 227734 - DNA, 25 bp, Homo sapien
aaacaattctggggtttcatagcct

SEQ ID NO: 227735 - DNA, 25 bp, Homo sapien
ttctggggtttcatagcctgcatta

SEQ ID NO: 227736 - DNA, 25 bp, Homo sapien
acaattctggggtttcatagcctgc

SEQ ID NO: 227737 - DNA, 25 bp, Homo sapien
gttggcttggaggacatttataaga

SEQ ID NO: 227738 - DNA, 25 bp, Homo sapien
ttggagttggcttggaggacattta

SEQ ID NO: 227739 - DNA, 25 bp, Homo sapien
tgagcttcgttgttttggagttggc

SEQ ID NO: 227740 - DNA, 25 bp, Homo sapien
cagggaccaatcatgagcttcgttg

SEQ ID NO: 227741 - DNA, 25 bp, Homo sapien
aattctgaaatggacttgatgtatg

SEQ ID NO: 227742 - DNA, 25 bp, Homo sapien
ttctgaaatggacttgatgtatgac

SEQ ID NO: 227743 - DNA, 25 bp, Homo sapien
attctgaaatggacttgatgtatga

SEQ ID NO: 227744 - DNA, 25 bp, Homo sapien
tttaaccagcaagtattgttcactc

SEQ ID NO: 227745 - DNA, 25 bp, Homo sapien
gtctcaaggatgaatagggctgtct

SEQ ID NO: 227746 - DNA, 25 bp, Homo sapien
ggctgtcttaatccctgttctttat

SEQ ID NO: 227747 - DNA, 25 bp, Homo sapien
tatataataggtgctataagctcct

SEQ ID NO: 227748 - DNA, 25 bp, Homo sapien
gcaaatgtaatgggctttttaccca

SEQ ID NO: 227749 - DNA, 25 bp, Homo sapien
atgggctttttacccaaggtgaatg

SEQ ID NO: 227750 - DNA, 25 bp, Homo sapien
tccctgcaaatgtaatgggcttttt

SEQ ID NO: 227751 - DNA, 25 bp, Homo sapien
ccctgcaaatgtaatgggcttttta

SEQ ID NO: 227752 - DNA, 25 bp, Homo sapien
ctgtgtggacaacaacctggcctga

SEQ ID NO: 227753 - DNA, 25 bp, Homo sapien
gcctgagagggcagcctgttgggtt

SEQ ID NO: 227754 - DNA, 25 bp, Homo sapien
gtgtggacaacaacctggcctgaga

SEQ ID NO: 227755 - DNA, 25 bp, Homo sapien
gagggcagcctgttgggtttgtcct

SEQ ID NO: 227756 - DNA, 25 bp, Homo sapien
ctgcgcatgagacatactggagggg

SEQ ID NO: 227757 - DNA, 25 bp, Homo sapien
gacaggcgccagtcacttctctttg

SEQ ID NO: 227758 - DNA, 25 bp, Homo sapien
ttctctttgagccagccgacttggc

SEQ ID NO: 227759 - DNA, 25 bp, Homo sapien
tctgcagccagttccggacaggcgc

SEQ ID NO: 227760 - DNA, 25 bp, Homo sapien
tttgagccagccgacttggccctct

SEQ ID NO: 227761 - DNA, 25 bp, Homo sapien
aattgtgagaaggtgccttcatggc

SEQ ID NO: 227762 - DNA, 25 bp, Homo sapien
attgtgagaaggtgccttcatggct

SEQ ID NO: 227763 - DNA, 25 bp, Homo sapien
catccagttgggaaacccaggaagc

SEQ ID NO: 227764 - DNA, 25 bp, Homo sapien
tgccacgttggtttgggtggctgct

SEQ ID NO: 227765 - DNA, 25 bp, Homo sapien
tttgggtggctgctccgcaccgggt

SEQ ID NO: 227766 - DNA, 25 bp, Homo sapien
tggtttgggtggctgctccgcaccg

SEQ ID NO: 227767 - DNA, 25 bp, Homo sapien
cgtgcgttgaccatgcacctgagaa

SEQ ID NO: 227768 - DNA, 25 bp, Homo sapien
ggatgtatcgtcagctctgtatgga

SEQ ID NO: 227769 - DNA, 25 bp, Homo sapien
acctgagaatccacgcgagacggag

SEQ ID NO: 227770 - DNA, 25 bp, Homo sapien
tcaaactgcccatctgtagtggtcc

SEQ ID NO: 227771 - DNA, 25 bp, Homo sapien
gagagcagcatgacaaccaagatac

SEQ ID NO: 227772 - DNA, 25 bp, Homo sapien
ccagcaccacttggataacaaatga

SEQ ID NO: 227773 - DNA, 25 bp, Homo sapien
tgacaaccaagatactccaaacact

SEQ ID NO: 227774 - DNA, 25 bp, Homo sapien
gatactccaaacactcgcactgttt

SEQ ID NO: 227775 - DNA, 25 bp, Homo sapien
tcattgcaacaaagcccaggttccc

SEQ ID NO: 227776 - DNA, 25 bp, Homo sapien
ttgcaacaaagcccaggttcccagc

SEQ ID NO: 227777 - DNA, 25 bp, Homo sapien
aacaaagcccaggttcccagctcac

SEQ ID NO: 227778 - DNA, 25 bp, Homo sapien
gcaacaaagcccaggttcccagctc

SEQ ID NO: 227779 - DNA, 25 bp, Homo sapien
gaaatttgatttcatcggcagctgt

SEQ ID NO: 227780 - DNA, 25 bp, Homo sapien
caatcatgtggactatctgctgtga

SEQ ID NO: 227781 - DNA, 25 bp, Homo sapien
tctgctgtgattgactgtggctgag

SEQ ID NO: 227782 - DNA, 25 bp, Homo sapien
tggctgagtgtttgccctggcagct

SEQ ID NO: 227783 - DNA, 25 bp, Homo sapien
cttcattaagatgggttgtggacac

SEQ ID NO: 227784 - DNA, 25 bp, Homo sapien
tgggttgtggacacttcaaggccat

SEQ ID NO: 227785 - DNA, 25 bp, Homo sapien
gatgggttgtggacacttcaaggcc

SEQ ID NO: 227786 - DNA, 25 bp, Homo sapien
attaagatgggttgtggacacttca

SEQ ID NO: 227787 - DNA, 25 bp, Homo sapien
catcatttgagataagccccagttg

SEQ ID NO: 227788 - DNA, 25 bp, Homo sapien
tgaggtctccaagatgctagctttc

SEQ ID NO: 227789 - DNA, 25 bp, Homo sapien
gccctgacacctagttcatcatttg

SEQ ID NO: 227790 - DNA, 25 bp, Homo sapien
tcggcaaattgcaatctcatcaggt

SEQ ID NO: 227791 - DNA, 25 bp, Homo sapien
tgtcttgtggaatggtctgagaacc

SEQ ID NO: 227792 - DNA, 25 bp, Homo sapien
gagggaggggtctgtgcatctttct

SEQ ID NO: 227793 - DNA, 25 bp, Homo sapien
tcctggctgccctgtagatattcca

SEQ ID NO: 227794 - DNA, 25 bp, Homo sapien
agatttgatgtcttgtggaatggtc

SEQ ID NO: 227795 - DNA, 25 bp, Homo sapien
gaagccctcgatgcatgcaaaggca

SEQ ID NO: 227796 - DNA, 25 bp, Homo sapien
ctcgatgcatgcaaaggcaagcaca

SEQ ID NO: 227797 - DNA, 25 bp, Homo sapien
ccctcgatgcatgcaaaggcaagca

SEQ ID NO: 227798 - DNA, 25 bp, Homo sapien
acagaagccctcgatgcatgcaaag

SEQ ID NO: 227799 - DNA, 25 bp, Homo sapien
caggacaagctgattcaatgaagaa

SEQ ID NO: 227800 - DNA, 25 bp, Homo sapien
actacacccccctgagcatctagaa

SEQ ID NO: 227801 - DNA, 25 bp, Homo sapien
aggcaggtttagctgtatcctcagg

SEQ ID NO: 227802 - DNA, 25 bp, Homo sapien
actgatcaaaggcaggtttagctgt

SEQ ID NO: 227803 - DNA, 25 bp, Homo sapien
acattttatgcatggagttttctaa

SEQ ID NO: 227804 - DNA, 25 bp, Homo sapien
aacattttatgcatggagttttcta

SEQ ID NO: 227805 - DNA, 25 bp, Homo sapien
cttggtccgtttctgtctctttcat

SEQ ID NO: 227806 - DNA, 25 bp, Homo sapien
tggtccgtttctgtctctttcattc

SEQ ID NO: 227807 - DNA, 25 bp, Homo sapien
ggtccgtttctgtctctttcattct

SEQ ID NO: 227808 - DNA, 25 bp, Homo sapien
ccgtttctgtctctttcattctcat

SEQ ID NO: 227809 - DNA, 25 bp, Homo sapien
gaatactgctgtgtgccgatcttga

SEQ ID NO: 227810 - DNA, 25 bp, Homo sapien
tgagaagctgcacttccagtgtagt

SEQ ID NO: 227811 - DNA, 25 bp, Homo sapien
aatactgctgtgtgccgatcttgag

SEQ ID NO: 227812 - DNA, 25 bp, Homo sapien
agaagctgcacttccagtgtagttc

SEQ ID NO: 227813 - DNA, 25 bp, Homo sapien
tatgctgccgttaaaaacgcttcac

SEQ ID NO: 227814 - DNA, 25 bp, Homo sapien
gctgccgttaaaaacgcttcaccta

SEQ ID NO: 227815 - DNA, 25 bp, Homo sapien
aaatgaccgacaagatgtttttcgt

SEQ ID NO: 227816 - DNA, 25 bp, Homo sapien
aaatatgctgccgttaaaaacgctt

SEQ ID NO: 227817 - DNA, 25 bp, Homo sapien
caaataaattgctggagcaggtgat

SEQ ID NO: 227818 - DNA, 25 bp, Homo sapien
ggttgcaaataaattgctggagcag

SEQ ID NO: 227819 - DNA, 25 bp, Homo sapien
tgttggttgcaaataaattgctgga

SEQ ID NO: 227820 - DNA, 25 bp, Homo sapien
tgcaaataaattgctggagcaggtg

SEQ ID NO: 227821 - DNA, 25 bp, Homo sapien
gccatgtacgtaggaacagttccag

SEQ ID NO: 227822 - DNA, 25 bp, Homo sapien
gtaattagtgttatgctccatggag

SEQ ID NO: 227823 - DNA, 25 bp, Homo sapien
tcttaaatggtatctggtgtctaca

SEQ ID NO: 227824 - DNA, 25 bp, Homo sapien
ggcagaagaccagctgaacaaacag

SEQ ID NO: 227825 - DNA, 25 bp, Homo sapien
atctgtgttctggagtaagtctttg

SEQ ID NO: 227826 - DNA, 25 bp, Homo sapien
aagataatcccatgtttctgcttct

SEQ ID NO: 227827 - DNA, 25 bp, Homo sapien
gaatccaagaagataatcccatgtt

SEQ ID NO: 227828 - DNA, 25 bp, Homo sapien
aagtctttgagttgactcttggagc

SEQ ID NO: 227829 - DNA, 25 bp, Homo sapien
tctggggcactcctgctgaagtctc

SEQ ID NO: 227830 - DNA, 25 bp, Homo sapien
tgctcatgcactgtctggggcactc

SEQ ID NO: 227831 - DNA, 25 bp, Homo sapien
gagtgtctttggtttgttgtctgag

SEQ ID NO: 227832 - DNA, 25 bp, Homo sapien
agtctcaggagtgtctttggtttgt

SEQ ID NO: 227833 - DNA, 25 bp, Homo sapien
gctgtgttgttcttccgatgactgg

SEQ ID NO: 227834 - DNA, 25 bp, Homo sapien
acttgatacacatcagtgggcatgc

SEQ ID NO: 227835 - DNA, 25 bp, Homo sapien
cgcagcgggacgtgcacttgataca

SEQ ID NO: 227836 - DNA, 25 bp, Homo sapien
acacgtgtctctttccgcagcggga

SEQ ID NO: 227837 - DNA, 25 bp, Homo sapien
ttgttattccttctgaaccagtagt

SEQ ID NO: 227838 - DNA, 25 bp, Homo sapien
tccttctgaaccagtagtaacacaa

SEQ ID NO: 227839 - DNA, 25 bp, Homo sapien
cttctgaaccagtagtaacacaata

SEQ ID NO: 227840 - DNA, 25 bp, Homo sapien
tattccttctgaaccagtagtaaca

SEQ ID NO: 227841 - DNA, 25 bp, Homo sapien
ggtataaggccagtgtataggtggg

SEQ ID NO: 227842 - DNA, 25 bp, Homo sapien
tctcttgggtataaggccagtgtat

SEQ ID NO: 227843 - DNA, 25 bp, Homo sapien
gtgtataggtgggaatcccatagac

SEQ ID NO: 227844 - DNA, 25 bp, Homo sapien
tcttgggtataaggccagtgtatag

SEQ ID NO: 227845 - DNA, 25 bp, Homo sapien
gactcatgctagatctcggttcatt

SEQ ID NO: 227846 - DNA, 25 bp, Homo sapien
agccctcgactcatgctagatctcg

SEQ ID NO: 227847 - DNA, 25 bp, Homo sapien
tagatctcggttcattctgtatcca

SEQ ID NO: 227848 - DNA, 25 bp, Homo sapien
catgctagatctcggttcattctgt

SEQ ID NO: 227849 - DNA, 25 bp, Homo sapien
tgaatgaatgcaagtgtagtttttt

SEQ ID NO: 227850 - DNA, 25 bp, Homo sapien
aatgaatgcaagtgtagttttttga

SEQ ID NO: 227851 - DNA, 25 bp, Homo sapien
catgaatgaatgcaagtgtagtttt

SEQ ID NO: 227852 - DNA, 25 bp, Homo sapien
acatgaatgaatgcaagtgtagttt

SEQ ID NO: 227853 - DNA, 25 bp, Homo sapien
tgcatgtacttcttcgcaagggctt

SEQ ID NO: 227854 - DNA, 25 bp, Homo sapien
gtcattgacttacccagatctatcg

SEQ ID NO: 227855 - DNA, 25 bp, Homo sapien
tcgcaagggcttctagtcattgact

SEQ ID NO: 227856 - DNA, 25 bp, Homo sapien
tacgatcgccaaatgatagcagctg

SEQ ID NO: 227857 - DNA, 25 bp, Homo sapien
cattgactgaatccggttctggaga

SEQ ID NO: 227858 - DNA, 25 bp, Homo sapien
ggtgcaagttgtccgcagccaggac

SEQ ID NO: 227859 - DNA, 25 bp, Homo sapien
ccaggacttccaacatctggaggat

SEQ ID NO: 227860 - DNA, 25 bp, Homo sapien
ggatgagcaccctaatcttgaaggc

SEQ ID NO: 227861 - DNA, 25 bp, Homo sapien
gtatgccactggcttgtttctattt

SEQ ID NO: 227862 - DNA, 25 bp, Homo sapien
gtttctatttcaggaatcatctctt

SEQ ID NO: 227863 - DNA, 25 bp, Homo sapien
cttgtttctatttcaggaatcatct

SEQ ID NO: 227864 - DNA, 25 bp, Homo sapien
agctgtatgccactggcttgtttct

SEQ ID NO: 227865 - DNA, 25 bp, Homo sapien
gtccaagccctctagattgtagaag

SEQ ID NO: 227866 - DNA, 25 bp, Homo sapien
tgtccaagccctctagattgtagaa

SEQ ID NO: 227867 - DNA, 25 bp, Homo sapien
catgtggtttggggacccgtgtcca

SEQ ID NO: 227868 - DNA, 25 bp, Homo sapien
tagtgattcaggtagacgcagcaga

SEQ ID NO: 227869 - DNA, 25 bp, Homo sapien
acatagtgagtacagggccttggcc

SEQ ID NO: 227870 - DNA, 25 bp, Homo sapien
gctggcgctacgtacatctttggga

SEQ ID NO: 227871 - DNA, 25 bp, Homo sapien
tagggtctcaacagtgtgctacagc

SEQ ID NO: 227872 - DNA, 25 bp, Homo sapien
agtattctgcatttcttctctgtca

SEQ ID NO: 227873 - DNA, 25 bp, Homo sapien
tgcatttcttctctgtcacgggcat

SEQ ID NO: 227874 - DNA, 25 bp, Homo sapien
attctgcatttcttctctgtcacgg

SEQ ID NO: 227875 - DNA, 25 bp, Homo sapien
tctgcatttcttctctgtcacgggc

SEQ ID NO: 227876 - DNA, 25 bp, Homo sapien
tcctgggaccaagaagaggtacaat

SEQ ID NO: 227877 - DNA, 25 bp, Homo sapien
ggtgatgaagccagaacgtaaacag

SEQ ID NO: 227878 - DNA, 25 bp, Homo sapien
tcgtgaacaaaggaaccataatccc

SEQ ID NO: 227879 - DNA, 25 bp, Homo sapien
tacagtagttcactgtcctgggacc

SEQ ID NO: 227880 - DNA, 25 bp, Homo sapien
ggctttttttttcactgcaagctct

SEQ ID NO: 227881 - DNA, 25 bp, Homo sapien
tttttttttcactgcaagctctccc

SEQ ID NO: 227882 - DNA, 25 bp, Homo sapien
tttttttcactgcaagctctcccat

SEQ ID NO: 227883 - DNA, 25 bp, Homo sapien
gctttttttttcactgcaagctctc

SEQ ID NO: 227884 - DNA, 25 bp, Homo sapien
tatgggcttggatacaaattgtaat

SEQ ID NO: 227885 - DNA, 25 bp, Homo sapien
tactttcacattctgtagctatatg

SEQ ID NO: 227886 - DNA, 25 bp, Homo sapien
cattctgtagctatatgggcttgga

SEQ ID NO: 227887 - DNA, 25 bp, Homo sapien
tcattcaatagtactttcacattct

SEQ ID NO: 227888 - DNA, 25 bp, Homo sapien
gtttagtcgtttgcaagaaacagcc

SEQ ID NO: 227889 - DNA, 25 bp, Homo sapien
cgtttgcaagaaacagcctgctggc

SEQ ID NO: 227890 - DNA, 25 bp, Homo sapien
cctcctgtttagtcgtttgcaagaa

SEQ ID NO: 227891 - DNA, 25 bp, Homo sapien
tcatttgacctcctgtttagtcgtt

SEQ ID NO: 227892 - DNA, 25 bp, Homo sapien
gatgggtgcatcatgttgaggattc

SEQ ID NO: 227893 - DNA, 25 bp, Homo sapien
caacttcttcatggtagtaaccctt

SEQ ID NO: 227894 - DNA, 25 bp, Homo sapien
gaaatacctcgaacatctccatcaa

SEQ ID NO: 227895 - DNA, 25 bp, Homo sapien
tgatcctgctctacagcagatgctt

SEQ ID NO: 227896 - DNA, 25 bp, Homo sapien
ctgcatgcctgcgaccttcagcaaa

SEQ ID NO: 227897 - DNA, 25 bp, Homo sapien
tgcatgcctgcgaccttcagcaaac

SEQ ID NO: 227898 - DNA, 25 bp, Homo sapien
catgcctgcgaccttcagcaaacaa

SEQ ID NO: 227899 - DNA, 25 bp, Homo sapien
gcatgcctgcgaccttcagcaaaca

SEQ ID NO: 227900 - DNA, 25 bp, Homo sapien
catatggtgacccttgtgctctcca

SEQ ID NO: 227901 - DNA, 25 bp, Homo sapien
gatgagaggatggtgtgttttactt

SEQ ID NO: 227902 - DNA, 25 bp, Homo sapien
ttgatgagaggatggtgtgttttac

SEQ ID NO: 227903 - DNA, 25 bp, Homo sapien
atctgctgcatatggtgacccttgt

SEQ ID NO: 227904 - DNA, 25 bp, Homo sapien
ctcccaaagttatgttgaaacaggc

SEQ ID NO: 227905 - DNA, 25 bp, Homo sapien
tctttacctcgtcgtcttgctattt

SEQ ID NO: 227906 - DNA, 25 bp, Homo sapien
ccaaagttatgttgaaacaggcaaa

SEQ ID NO: 227907 - DNA, 25 bp, Homo sapien
tgagatccaggtattcctctttacc

SEQ ID NO: 227908 - DNA, 25 bp, Homo sapien
actgttattataccaactctaggtg

SEQ ID NO: 227909 - DNA, 25 bp, Homo sapien
cattcacaatctgcactgttattat

SEQ ID NO: 227910 - DNA, 25 bp, Homo sapien
tattataccaactctaggtgaagga

SEQ ID NO: 227911 - DNA, 25 bp, Homo sapien
taccaactctaggtgaaggatgcat

SEQ ID NO: 227912 - DNA, 25 bp, Homo sapien
gagtgggtatgggagccttccctct

SEQ ID NO: 227913 - DNA, 25 bp, Homo sapien
gagcagaggagtgggtatgggagcc

SEQ ID NO: 227914 - DNA, 25 bp, Homo sapien
tctccgtggtcctgttagggcacct

SEQ ID NO: 227915 - DNA, 25 bp, Homo sapien
tttcagcacactggacggtgcagaa

SEQ ID NO: 227916 - DNA, 25 bp, Homo sapien
cttggagtgacaatagaagagccta

SEQ ID NO: 227917 - DNA, 25 bp, Homo sapien
cctcactgagattgtgcacagcaga

SEQ ID NO: 227918 - DNA, 25 bp, Homo sapien
gaagagcctatagcacttgtaagag

SEQ ID NO: 227919 - DNA, 25 bp, Homo sapien
tagcacttgtaagagcagggtcctc

SEQ ID NO: 227920 - DNA, 25 bp, Homo sapien
tcagcctggcttagtcggaaagatg

SEQ ID NO: 227921 - DNA, 25 bp, Homo sapien
gaaaggtcattaagggttcagcctg

SEQ ID NO: 227922 - DNA, 25 bp, Homo sapien
tgcttcatctgaaaaaggtacctaa

SEQ ID NO: 227923 - DNA, 25 bp, Homo sapien
gccattctgccttgtacgtaataca

SEQ ID NO: 227924 - DNA, 25 bp, Homo sapien
cctttcatggaacttacgtagctga

SEQ ID NO: 227925 - DNA, 25 bp, Homo sapien
cgtagctgattcatagcctgagtca

SEQ ID NO: 227926 - DNA, 25 bp, Homo sapien
tagggtcacttcatgcttagaggca

SEQ ID NO: 227927 - DNA, 25 bp, Homo sapien
tgaaagtggaggtcagcgtgatcct

SEQ ID NO: 227928 - DNA, 25 bp, Homo sapien
ttttctcgtattttatgcaagaagc

SEQ ID NO: 227929 - DNA, 25 bp, Homo sapien
ctcgtattttatgcaagaagctggg

SEQ ID NO: 227930 - DNA, 25 bp, Homo sapien
ttctcgtattttatgcaagaagctg

SEQ ID NO: 227931 - DNA, 25 bp, Homo sapien
cgtattttatgcaagaagctgggaa

SEQ ID NO: 227932 - DNA, 25 bp, Homo sapien
ttcctttatctctgtgcctgaacaa

SEQ ID NO: 227933 - DNA, 25 bp, Homo sapien
gaacaagccccccttgctataatct

SEQ ID NO: 227934 - DNA, 25 bp, Homo sapien
ggtactacgttcctttatctctgtg

SEQ ID NO: 227935 - DNA, 25 bp, Homo sapien
tctttattgccaaggtactacgttc

SEQ ID NO: 227936 - DNA, 25 bp, Homo sapien
ctaggtgacatctgtattcaaccaa

SEQ ID NO: 227937 - DNA, 25 bp, Homo sapien
tttgactaggcccaggtcctttgcc

SEQ ID NO: 227938 - DNA, 25 bp, Homo sapien
tgacatctgtattcaaccaattttg

SEQ ID NO: 227939 - DNA, 25 bp, Homo sapien
ctcttctgattggatttagcaggag

SEQ ID NO: 227940 - DNA, 25 bp, Homo sapien
tacggttctatgtcatgggcctcct

SEQ ID NO: 227941 - DNA, 25 bp, Homo sapien
tcacatacacactcccccagttgtc

SEQ ID NO: 227942 - DNA, 25 bp, Homo sapien
ctctgtaatacggttctatgtcatg

SEQ ID NO: 227943 - DNA, 25 bp, Homo sapien
tgtaatacggttctatgtcatgggc

SEQ ID NO: 227944 - DNA, 25 bp, Homo sapien
tgatttatatggattctggactttt

SEQ ID NO: 227945 - DNA, 25 bp, Homo sapien
tccgttcaggactagcgttgctttc

SEQ ID NO: 227946 - DNA, 25 bp, Homo sapien
ggactagcgttgctttcagttcaac

SEQ ID NO: 227947 - DNA, 25 bp, Homo sapien
gctcattcatccgttcaggactagc

SEQ ID NO: 227948 - DNA, 25 bp, Homo sapien
tcatccgttcaggactagcgttgct

SEQ ID NO: 227949 - DNA, 25 bp, Homo sapien
gcaaggttctatggcacatacaaaa

SEQ ID NO: 227950 - DNA, 25 bp, Homo sapien
tctcatatctaggagctatttcttg

SEQ ID NO: 227951 - DNA, 25 bp, Homo sapien
tagacatgttcctcagatagccaag

SEQ ID NO: 227952 - DNA, 25 bp, Homo sapien
aaaaagtattgcctttgtgctagca

SEQ ID NO: 227953 - DNA, 25 bp, Homo sapien
aacagggctaaggataggcaacagg

SEQ ID NO: 227954 - DNA, 25 bp, Homo sapien
ctttgaatctggagactgcaacgga

SEQ ID NO: 227955 - DNA, 25 bp, Homo sapien
catccttggacccctaagacttttg

SEQ ID NO: 227956 - DNA, 25 bp, Homo sapien
aatcctcataggagatagtgtttcc

SEQ ID NO: 227957 - DNA, 25 bp, Homo sapien
catttaggttcgctgcattgcaaac

SEQ ID NO: 227958 - DNA, 25 bp, Homo sapien
ggctatatcatttaggttcgctgca

SEQ ID NO: 227959 - DNA, 25 bp, Homo sapien
gttcgctgcattgcaaaccactcca

SEQ ID NO: 227960 - DNA, 25 bp, Homo sapien
cctgaattcctggctatatcattta

SEQ ID NO: 227961 - DNA, 25 bp, Homo sapien
tctctgggagagatagccaagtcca

SEQ ID NO: 227962 - DNA, 25 bp, Homo sapien
caagagggtttgacatgagctatcc

SEQ ID NO: 227963 - DNA, 25 bp, Homo sapien
catggtgtggcttgactggatctca

SEQ ID NO: 227964 - DNA, 25 bp, Homo sapien
tattcctggttggtcaaatgtcagc

SEQ ID NO: 227965 - DNA, 25 bp, Homo sapien
aaacacgataccgggcctcagactt

SEQ ID NO: 227966 - DNA, 25 bp, Homo sapien
ttcccaaacacgataccgggcctca

SEQ ID NO: 227967 - DNA, 25 bp, Homo sapien
cgataccgggcctcagactttgttt

SEQ ID NO: 227968 - DNA, 25 bp, Homo sapien
acacgataccgggcctcagactttg

SEQ ID NO: 227969 - DNA, 25 bp, Homo sapien
ttcctttgcaatgcactatgaaagg

SEQ ID NO: 227970 - DNA, 25 bp, Homo sapien
tgcactatgaaaggcgattgtgtta

SEQ ID NO: 227971 - DNA, 25 bp, Homo sapien
tatgaaaggcgattgtgttagagaa

SEQ ID NO: 227972 - DNA, 25 bp, Homo sapien
cgattgtgttagagaatatcagaga

SEQ ID NO: 227973 - DNA, 25 bp, Homo sapien
gcaggaaaatgctgaattcaccgat

SEQ ID NO: 227974 - DNA, 25 bp, Homo sapien
ctttatcacttaacacgatcggagg

SEQ ID NO: 227975 - DNA, 25 bp, Homo sapien
ctgtgtgtggtaatgaagttggtcc

SEQ ID NO: 227976 - DNA, 25 bp, Homo sapien
tttctgtgcaggattgcaacaattc

SEQ ID NO: 227977 - DNA, 25 bp, Homo sapien
tccccgattattggcccatgggttg

SEQ ID NO: 227978 - DNA, 25 bp, Homo sapien
agctggtgggtccccgattattggc

SEQ ID NO: 227979 - DNA, 25 bp, Homo sapien
gcccatgggttgtccactttgtggt

SEQ ID NO: 227980 - DNA, 25 bp, Homo sapien
ggcccatgggttgtccactttgtgg

SEQ ID NO: 227981 - DNA, 25 bp, Homo sapien
caagggtgtacggatatggaaaatg

SEQ ID NO: 227982 - DNA, 25 bp, Homo sapien
gactgtctggtatctgatggctttc

SEQ ID NO: 227983 - DNA, 25 bp, Homo sapien
gctttccattctgaacaagggtgta

SEQ ID NO: 227984 - DNA, 25 bp, Homo sapien
gagaagttaatcgtcttgggcattg

SEQ ID NO: 227985 - DNA, 25 bp, Homo sapien
gcttcactatgcatgagagcacatc

SEQ ID NO: 227986 - DNA, 25 bp, Homo sapien
gggctgcttcactatgcatgagagc

SEQ ID NO: 227987 - DNA, 25 bp, Homo sapien
tatgcatgagagcacatccacacct

SEQ ID NO: 227988 - DNA, 25 bp, Homo sapien
cactatgcatgagagcacatccaca

SEQ ID NO: 227989 - DNA, 25 bp, Homo sapien
tttgttggttgagttcacttccttc

SEQ ID NO: 227990 - DNA, 25 bp, Homo sapien
tgttggttgagttcacttccttcca

SEQ ID NO: 227991 - DNA, 25 bp, Homo sapien
ttgttggttgagttcacttccttcc

SEQ ID NO: 227992 - DNA, 25 bp, Homo sapien
gttggttgagttcacttccttccat

SEQ ID NO: 227993 - DNA, 25 bp, Homo sapien
ttatcgcgatgctgacaaagtgcac

SEQ ID NO: 227994 - DNA, 25 bp, Homo sapien
aaagagcttcatagaggccatctac

SEQ ID NO: 227995 - DNA, 25 bp, Homo sapien
tctacacgtgttctcttctgggtta

SEQ ID NO: 227996 - DNA, 25 bp, Homo sapien
tgctaactttgaccagctgctaaca

SEQ ID NO: 227997 - DNA, 25 bp, Homo sapien
tcaactctctgaccacaagttttca

SEQ ID NO: 227998 - DNA, 25 bp, Homo sapien
tcttcctcattatactcatctatca

SEQ ID NO: 227999 - DNA, 25 bp, Homo sapien
tctgaccacaagttttcaaggaatc

SEQ ID NO: 228000 - DNA, 25 bp, Homo sapien
cacaagttttcaaggaatcttcctc

SEQ ID NO: 228001 - DNA, 25 bp, Homo sapien
tcattcataaccactagtagctgac

SEQ ID NO: 228002 - DNA, 25 bp, Homo sapien
ctaatgctcgaagtattaagtgtgt

SEQ ID NO: 228003 - DNA, 25 bp, Homo sapien
aaagcaccctgcactaatgctcgaa

SEQ ID NO: 228004 - DNA, 25 bp, Homo sapien
cataaccactagtagctgacaacct

SEQ ID NO: 228005 - DNA, 25 bp, Homo sapien
tgttcattctaccacctgatgactt

SEQ ID NO: 228006 - DNA, 25 bp, Homo sapien
catgttcattctaccacctgatgac

SEQ ID NO: 228007 - DNA, 25 bp, Homo sapien
tcattctaccacctgatgacttcat

SEQ ID NO: 228008 - DNA, 25 bp, Homo sapien
tgcatgttcattctaccacctgatg

SEQ ID NO: 228009 - DNA, 25 bp, Homo sapien
actgtgtctggcccaggctcttttt

SEQ ID NO: 228010 - DNA, 25 bp, Homo sapien
ctccttcatccccaaaagttctgta

SEQ ID NO: 228011 - DNA, 25 bp, Homo sapien
tcatccccaaaagttctgtaattac

SEQ ID NO: 228012 - DNA, 25 bp, Homo sapien
tgtgtctggcccaggctcttttttt

SEQ ID NO: 228013 - DNA, 25 bp, Homo sapien
ctggtgactaatgagtgccaaagga

SEQ ID NO: 228014 - DNA, 25 bp, Homo sapien
tggtgactaatgagtgccaaaggag

SEQ ID NO: 228015 - DNA, 25 bp, Homo sapien
caaaggaggagaccaatcccgtggc

SEQ ID NO: 228016 - DNA, 25 bp, Homo sapien
gaggagaccaatcccgtggcgccct

SEQ ID NO: 228017 - DNA, 25 bp, Homo sapien
tggttaggccggtcacattgccagc

SEQ ID NO: 228018 - DNA, 25 bp, Homo sapien
agagctaccacatggccacttttag

SEQ ID NO: 228019 - DNA, 25 bp, Homo sapien
ccacttttagttgcaaaggaggctt

SEQ ID NO: 228020 - DNA, 25 bp, Homo sapien
cattgccagctctcgcaaggaggaa

SEQ ID NO: 228021 - DNA, 25 bp, Homo sapien
gtgaattctccgatcctgtactgct

SEQ ID NO: 228022 - DNA, 25 bp, Homo sapien
gtcaacccatatgagagtgaattct

SEQ ID NO: 228023 - DNA, 25 bp, Homo sapien
ttttgcagctttgagtcaacccata

SEQ ID NO: 228024 - DNA, 25 bp, Homo sapien
tttgagtcaacccatatgagagtga

SEQ ID NO: 228025 - DNA, 25 bp, Homo sapien
tgaaatccattcatgctgtgaaaat

SEQ ID NO: 228026 - DNA, 25 bp, Homo sapien
tgtgttgagcatcatggccgcttcc

SEQ ID NO: 228027 - DNA, 25 bp, Homo sapien
tttacaatggcctggcatggaaggt

SEQ ID NO: 228028 - DNA, 25 bp, Homo sapien
gagcttgtttatctgtctgcaacac

SEQ ID NO: 228029 - DNA, 25 bp, Homo sapien
gaggagaaaacaggttggaatgtcc

SEQ ID NO: 228030 - DNA, 25 bp, Homo sapien
ttgcctttgtggttcgcctacctgg

SEQ ID NO: 228031 - DNA, 25 bp, Homo sapien
tgcctttgtggttcgcctacctggg

SEQ ID NO: 228032 - DNA, 25 bp, Homo sapien
gtcttgcctttgtggttcgcctacc

SEQ ID NO: 228033 - DNA, 25 bp, Homo sapien
tcttgcctttgtggttcgcctacct

SEQ ID NO: 228034 - DNA, 25 bp, Homo sapien
ttgaagaagttgcagcttagggtgt

SEQ ID NO: 228035 - DNA, 25 bp, Homo sapien
atttttggagtaattgcatgttgaa

SEQ ID NO: 228036 - DNA, 25 bp, Homo sapien
tgagattgtcagtgttagagttctg

SEQ ID NO: 228037 - DNA, 25 bp, Homo sapien
tccatagatgggcatgtgtaggctc

SEQ ID NO: 228038 - DNA, 25 bp, Homo sapien
cagggctttgcctcctaagatatca

SEQ ID NO: 228039 - DNA, 25 bp, Homo sapien
caaatgactcggtgtttgtgccaga

SEQ ID NO: 228040 - DNA, 25 bp, Homo sapien
ttttgaaacaacaagtacactgtgg

SEQ ID NO: 228041 - DNA, 25 bp, Homo sapien
ccggttgggtgtcacagatggtaca

SEQ ID NO: 228042 - DNA, 25 bp, Homo sapien
ctttggtgcatatagagtcctcttc

SEQ ID NO: 228043 - DNA, 25 bp, Homo sapien
tctcctgatgctttccttccgggaa

SEQ ID NO: 228044 - DNA, 25 bp, Homo sapien
ggttatcccatgttaagatgtgaac

SEQ ID NO: 228045 - DNA, 25 bp, Homo sapien
gaacagctattgataatctaccaaa

SEQ ID NO: 228046 - DNA, 25 bp, Homo sapien
tgctgtcatgactgagtgtgcatcc

SEQ ID NO: 228047 - DNA, 25 bp, Homo sapien
cctggtctcgtagatgctgtcatga

SEQ ID NO: 228048 - DNA, 25 bp, Homo sapien
caccatcctggtctcgtagatgctg

SEQ ID NO: 228049 - DNA, 25 bp, Homo sapien
tcatgactgagtgtgcatccttctg

SEQ ID NO: 228050 - DNA, 25 bp, Homo sapien
ggctgtaaattgtacttcctctgaa

SEQ ID NO: 228051 - DNA, 25 bp, Homo sapien
ctgtaaattgtacttcctctgaact

SEQ ID NO: 228052 - DNA, 25 bp, Homo sapien
gaggctgtaaattgtacttcctctg

SEQ ID NO: 228053 - DNA, 25 bp, Homo sapien
gctgtaaattgtacttcctctgaac

SEQ ID NO: 228054 - DNA, 25 bp, Homo sapien
tctcttgatcccagtatccatacat

SEQ ID NO: 228055 - DNA, 25 bp, Homo sapien
tgcttggcccttctgattatccaat

SEQ ID NO: 228056 - DNA, 25 bp, Homo sapien
caattggttactcttaaacttctct

SEQ ID NO: 228057 - DNA, 25 bp, Homo sapien
gcccttctgattatccaattggtta

SEQ ID NO: 228058 - DNA, 25 bp, Homo sapien
aatcattcttatggtccccctcagc

SEQ ID NO: 228059 - DNA, 25 bp, Homo sapien
tcattcttatggtccccctcagctc

SEQ ID NO: 228060 - DNA, 25 bp, Homo sapien
caatcattcttatggtccccctcag

SEQ ID NO: 228061 - DNA, 25 bp, Homo sapien
tcaatcattcttatggtccccctca

SEQ ID NO: 228062 - DNA, 25 bp, Homo sapien
gcttttcaggatgatcataatgcag

SEQ ID NO: 228063 - DNA, 25 bp, Homo sapien
aaatttactgccgaaactagctcag

SEQ ID NO: 228064 - DNA, 25 bp, Homo sapien
atcaaatgtggctccggttgcccca

SEQ ID NO: 228065 - DNA, 25 bp, Homo sapien
tggaggtagacataatctgatggga

SEQ ID NO: 228066 - DNA, 25 bp, Homo sapien
caaacccagtgagcccataaaagtg

SEQ ID NO: 228067 - DNA, 25 bp, Homo sapien
agagatgcagcagaaggtgtcgggc

SEQ ID NO: 228068 - DNA, 25 bp, Homo sapien
tctggcccctggttgaggccatctg

SEQ ID NO: 228069 - DNA, 25 bp, Homo sapien
agccaaacccagtgagcccataaaa

SEQ ID NO: 228070 - DNA, 25 bp, Homo sapien
ttgcctttcttagagtctgtctgac

SEQ ID NO: 228071 - DNA, 25 bp, Homo sapien
ttggcatatttgactgcctttgcct

SEQ ID NO: 228072 - DNA, 25 bp, Homo sapien
gtaattggcatatttgactgccttt

SEQ ID NO: 228073 - DNA, 25 bp, Homo sapien
tttcttagagtctgtctgacattct

SEQ ID NO: 228074 - DNA, 25 bp, Homo sapien
ctctgttgaaggcatccagccctgg

SEQ ID NO: 228075 - DNA, 25 bp, Homo sapien
tccagagaagaagaccaagaccact

SEQ ID NO: 228076 - DNA, 25 bp, Homo sapien
gccctggaggcactatagcttcgta

SEQ ID NO: 228077 - DNA, 25 bp, Homo sapien
tcgtaaggagcaatggcaacatcat

SEQ ID NO: 228078 - DNA, 25 bp, Homo sapien
tgctgcaagtactgtcatcctgtgt

SEQ ID NO: 228079 - DNA, 25 bp, Homo sapien
gggatggtgatctctaaaagctgca

SEQ ID NO: 228080 - DNA, 25 bp, Homo sapien
taatagacttttccaaccttgcgta

SEQ ID NO: 228081 - DNA, 25 bp, Homo sapien
tacattgacttctggatgacctaag

SEQ ID NO: 228082 - DNA, 25 bp, Homo sapien
ttttatagtatgcttcctgtgttcg

SEQ ID NO: 228083 - DNA, 25 bp, Homo sapien
tatagtatgcttcctgtgttcgtct

SEQ ID NO: 228084 - DNA, 25 bp, Homo sapien
ttatagtatgcttcctgtgttcgtc

SEQ ID NO: 228085 - DNA, 25 bp, Homo sapien
tttatagtatgcttcctgtgttcgt

SEQ ID NO: 228086 - DNA, 25 bp, Homo sapien
gacaattctggcatgcctctccatt

SEQ ID NO: 228087 - DNA, 25 bp, Homo sapien
agatgcactgacaattctggcatgc

SEQ ID NO: 228088 - DNA, 25 bp, Homo sapien
cactgacaattctggcatgcctctc

SEQ ID NO: 228089 - DNA, 25 bp, Homo sapien
tgcactgacaattctggcatgcctc

SEQ ID NO: 228090 - DNA, 25 bp, Homo sapien
aaaagctagatcaaataaacgtgct

SEQ ID NO: 228091 - DNA, 25 bp, Homo sapien
aataaacgtgctttgcattgcgacc

SEQ ID NO: 228092 - DNA, 25 bp, Homo sapien
gcattgcgacccagtgatggcagct

SEQ ID NO: 228093 - DNA, 25 bp, Homo sapien
cgtgctttgcattgcgacccagtga

SEQ ID NO: 228094 - DNA, 25 bp, Homo sapien
caacgacttcatacaagtggtatca

SEQ ID NO: 228095 - DNA, 25 bp, Homo sapien
tttccaagttgtaaagcaattgatg

SEQ ID NO: 228096 - DNA, 25 bp, Homo sapien
caattgatgtggttgcatatctgta

SEQ ID NO: 228097 - DNA, 25 bp, Homo sapien
gcatatctgtagtaccactttttgg

SEQ ID NO: 228098 - DNA, 25 bp, Homo sapien
catttgtactatgtgattcaattct

SEQ ID NO: 228099 - DNA, 25 bp, Homo sapien
tgtgattcaattctctgacaataac

SEQ ID NO: 228100 - DNA, 25 bp, Homo sapien
ttgtactatgtgattcaattctctg

SEQ ID NO: 228101 - DNA, 25 bp, Homo sapien
tactatgtgattcaattctctgaca

SEQ ID NO: 228102 - DNA, 25 bp, Homo sapien
ccaaaattatatagagagacatccc

SEQ ID NO: 228103 - DNA, 25 bp, Homo sapien
tccaaatccaaaattatatagagag

SEQ ID NO: 228104 - DNA, 25 bp, Homo sapien
aaattatatagagagacatccccat

SEQ ID NO: 228105 - DNA, 25 bp, Homo sapien
aactttctcttgatatccctcctcc

SEQ ID NO: 228106 - DNA, 25 bp, Homo sapien
aaatagaaatagctagatgtttgga

SEQ ID NO: 228107 - DNA, 25 bp, Homo sapien
tcccatttcaacttcttattctgca

SEQ ID NO: 228108 - DNA, 25 bp, Homo sapien
tctgagctgtcccatttcaacttct

SEQ ID NO: 228109 - DNA, 25 bp, Homo sapien
gaaagtacaggacaacaattcattt

SEQ ID NO: 228110 - DNA, 25 bp, Homo sapien
tgtggatgtagatttgtagctcttc

SEQ ID NO: 228111 - DNA, 25 bp, Homo sapien
ttgtagctcttctctgaagtacagt

SEQ ID NO: 228112 - DNA, 25 bp, Homo sapien
gctcttctctgaagtacagtgtcac

SEQ ID NO: 228113 - DNA, 25 bp, Homo sapien
catgtggatgtagatttgtagctct

SEQ ID NO: 228114 - DNA, 25 bp, Homo sapien
tggaaggcactgcatccaattgaaa

SEQ ID NO: 228115 - DNA, 25 bp, Homo sapien
ggaaatggaaggcactgcatccaat

SEQ ID NO: 228116 - DNA, 25 bp, Homo sapien
gcactgcatccaattgaaaactgca

SEQ ID NO: 228117 - DNA, 25 bp, Homo sapien
actgcatccaattgaaaactgcagg

SEQ ID NO: 228118 - DNA, 25 bp, Homo sapien
tagatcgttgggttaacacaagacc

SEQ ID NO: 228119 - DNA, 25 bp, Homo sapien
caaaggctgcaactgagctctggtc

SEQ ID NO: 228120 - DNA, 25 bp, Homo sapien
tagttccaaagatcaggttcaccag

SEQ ID NO: 228121 - DNA, 25 bp, Homo sapien
tatcaggagcattagtctgcaaagg

SEQ ID NO: 228122 - DNA, 25 bp, Homo sapien
acagaactaaggaagtattttctgt

SEQ ID NO: 228123 - DNA, 25 bp, Homo sapien
aggaatctctgtgacatatcatcag

SEQ ID NO: 228124 - DNA, 25 bp, Homo sapien
ttgagcttcatgtgtgaataacact

SEQ ID NO: 228125 - DNA, 25 bp, Homo sapien
ctgtgacatatcatcagggaccatc

SEQ ID NO: 228126 - DNA, 25 bp, Homo sapien
tctctgtgacatatcatcagggacc

SEQ ID NO: 228127 - DNA, 25 bp, Homo sapien
ctggtgctggtctaaaaactttggc

SEQ ID NO: 228128 - DNA, 25 bp, Homo sapien
taggacaccaagattaggtttctcc

SEQ ID NO: 228129 - DNA, 25 bp, Homo sapien
aataaatactaggaggcaacagctg

SEQ ID NO: 228130 - DNA, 25 bp, Homo sapien
taggccaattcaacaccaacctgtg

SEQ ID NO: 228131 - DNA, 25 bp, Homo sapien
ttttctggggcctgattctgtttct

SEQ ID NO: 228132 - DNA, 25 bp, Homo sapien
ttctggggcctgattctgtttctgc

SEQ ID NO: 228133 - DNA, 25 bp, Homo sapien
ctttttctggggcctgattctgttt

SEQ ID NO: 228134 - DNA, 25 bp, Homo sapien
ctggggcctgattctgtttctgcat

SEQ ID NO: 228135 - DNA, 25 bp, Homo sapien
tgcttcgctggacttttgcaaatgt

SEQ ID NO: 228136 - DNA, 25 bp, Homo sapien
cctgaaccaggtgaccagtgcttcg

SEQ ID NO: 228137 - DNA, 25 bp, Homo sapien
tgaccagtgcttcgctggacttttg

SEQ ID NO: 228138 - DNA, 25 bp, Homo sapien
caggtgaccagtgcttcgctggact

SEQ ID NO: 228139 - DNA, 25 bp, Homo sapien
tttggagacattgtagcaacaagac

SEQ ID NO: 228140 - DNA, 25 bp, Homo sapien
acactctctgttagtctgaatttgg

SEQ ID NO: 228141 - DNA, 25 bp, Homo sapien
tgaatttggagacattgtagcaaca

SEQ ID NO: 228142 - DNA, 25 bp, Homo sapien
ctctgttagtctgaatttggagaca

SEQ ID NO: 228143 - DNA, 25 bp, Homo sapien
tatgtgcgatgtgagttcttgttca

SEQ ID NO: 228144 - DNA, 25 bp, Homo sapien
tgtaatgatggattgagcatcgcaa

SEQ ID NO: 228145 - DNA, 25 bp, Homo sapien
ttgttcagctcgttccaatagtggg

SEQ ID NO: 228146 - DNA, 25 bp, Homo sapien
atttgaattatatccaccccagagc

SEQ ID NO: 228147 - DNA, 25 bp, Homo sapien
tgttctctgtttccccgtctcttgg

SEQ ID NO: 228148 - DNA, 25 bp, Homo sapien
caggccctttagagtgttctctgtt

SEQ ID NO: 228149 - DNA, 25 bp, Homo sapien
gactgtagagtaagcagcacattct

SEQ ID NO: 228150 - DNA, 25 bp, Homo sapien
caattccctccatgtgactgtagag

SEQ ID NO: 228151 - DNA, 25 bp, Homo sapien
aataattttcaacccagcattcata

SEQ ID NO: 228152 - DNA, 25 bp, Homo sapien
tgaaggagaaataaaatactttaca

SEQ ID NO: 228153 - DNA, 25 bp, Homo sapien
gaaaataattttcaacccagcattc

SEQ ID NO: 228154 - DNA, 25 bp, Homo sapien
tccagccaaactaagcttcataatt

SEQ ID NO: 228155 - DNA, 25 bp, Homo sapien
tctgggacacattcaaagcagtgtg

SEQ ID NO: 228156 - DNA, 25 bp, Homo sapien
caggaaagatccaaaattgacaccc

SEQ ID NO: 228157 - DNA, 25 bp, Homo sapien
gatccaaaattgacaccctaacatc

SEQ ID NO: 228158 - DNA, 25 bp, Homo sapien
tatagcactaaatgaccacaagaga

SEQ ID NO: 228159 - DNA, 25 bp, Homo sapien
tagtctctcagtgcactattctctg

SEQ ID NO: 228160 - DNA, 25 bp, Homo sapien
taaaattgtagtctctcagtgcact

SEQ ID NO: 228161 - DNA, 25 bp, Homo sapien
tgcaaagttaaaattgtagtctctc

SEQ ID NO: 228162 - DNA, 25 bp, Homo sapien
gtctctcagtgcactattctctgac

SEQ ID NO: 228163 - DNA, 25 bp, Homo sapien
tgcaagcaacatcaaagggaaccca

SEQ ID NO: 228164 - DNA, 25 bp, Homo sapien
cggaaatgccagagactactacgtg

SEQ ID NO: 228165 - DNA, 25 bp, Homo sapien
tgaaaccagcttaaccatggaggat

SEQ ID NO: 228166 - DNA, 25 bp, Homo sapien
tgatatgtacaaagcaccgtgagtg

SEQ ID NO: 228167 - DNA, 25 bp, Homo sapien
cggttcaaccagattgtggcattat

SEQ ID NO: 228168 - DNA, 25 bp, Homo sapien
ggttgtgtacaagaatcctagaact

SEQ ID NO: 228169 - DNA, 25 bp, Homo sapien
taaattcgacctctcggttcaacca

SEQ ID NO: 228170 - DNA, 25 bp, Homo sapien
acaagaatcctagaacttgtgaaag

SEQ ID NO: 228171 - DNA, 25 bp, Homo sapien
gatcacagtgctgtgcaaattcaaa

SEQ ID NO: 228172 - DNA, 25 bp, Homo sapien
ctctgatcacagtgctgtgcaaatt

SEQ ID NO: 228173 - DNA, 25 bp, Homo sapien
tcacagtgctgtgcaaattcaaatc

SEQ ID NO: 228174 - DNA, 25 bp, Homo sapien
tctgatcacagtgctgtgcaaattc

SEQ ID NO: 228175 - DNA, 25 bp, Homo sapien
gttgtagtgatcaggcagttctccc

SEQ ID NO: 228176 - DNA, 25 bp, Homo sapien
aaatgttgtagtgatcaggcagttc

SEQ ID NO: 228177 - DNA, 25 bp, Homo sapien
atgttgtagtgatcaggcagttctc

SEQ ID NO: 228178 - DNA, 25 bp, Homo sapien
ttgtagtgatcaggcagttctccca

SEQ ID NO: 228179 - DNA, 25 bp, Homo sapien
tatacaatgcagcgggagctagact

SEQ ID NO: 228180 - DNA, 25 bp, Homo sapien
tgcagcgggagctagactgataacc

SEQ ID NO: 228181 - DNA, 25 bp, Homo sapien
ggagctagactgataaccaaaggtg

SEQ ID NO: 228182 - DNA, 25 bp, Homo sapien
caatgcagcgggagctagactgata

SEQ ID NO: 228183 - DNA, 25 bp, Homo sapien
agagagaacctcttcaagggctgac

SEQ ID NO: 228184 - DNA, 25 bp, Homo sapien
gctgaccaaagtcttgacacctggg

SEQ ID NO: 228185 - DNA, 25 bp, Homo sapien
tccggttgctttcgacttggtgcca

SEQ ID NO: 228186 - DNA, 25 bp, Homo sapien
gccagcagctggcttagagagaacc

SEQ ID NO: 228187 - DNA, 25 bp, Homo sapien
tgtgctgttccattctgctggaaag

SEQ ID NO: 228188 - DNA, 25 bp, Homo sapien
gctggaaagtgtctctttggctttg

SEQ ID NO: 228189 - DNA, 25 bp, Homo sapien
tctttggctttggtgctaatgtatg

SEQ ID NO: 228190 - DNA, 25 bp, Homo sapien
ggtgctaatgtatgcttcatctttc

SEQ ID NO: 228191 - DNA, 25 bp, Homo sapien
catctcctttactaagtgatttcgc

SEQ ID NO: 228192 - DNA, 25 bp, Homo sapien
cgcttgatctctattgtctcagtca

SEQ ID NO: 228193 - DNA, 25 bp, Homo sapien
tcagtcacatatccagcagctacag

SEQ ID NO: 228194 - DNA, 25 bp, Homo sapien
caagtgttgggtagatccctctgaa

SEQ ID NO: 228195 - DNA, 25 bp, Homo sapien
aagtattggtggagcatgaggccca

SEQ ID NO: 228196 - DNA, 25 bp, Homo sapien
gacacaagaggggaagtccacaatg

SEQ ID NO: 228197 - DNA, 25 bp, Homo sapien
tgaggaacaggaggccgagacacaa

SEQ ID NO: 228198 - DNA, 25 bp, Homo sapien
ttttaagtattggtggagcatgagg

SEQ ID NO: 228199 - DNA, 25 bp, Homo sapien
tcctggtgtcccagacagtactgct

SEQ ID NO: 228200 - DNA, 25 bp, Homo sapien
ccagacagtactgcttgcctctggc

SEQ ID NO: 228201 - DNA, 25 bp, Homo sapien
gagaaggtctatgagctcatttctg

SEQ ID NO: 228202 - DNA, 25 bp, Homo sapien
ccatgatgagaaggtctatgagctc

SEQ ID NO: 228203 - DNA, 25 bp, Homo sapien
cttgctggccagctttggataagca

SEQ ID NO: 228204 - DNA, 25 bp, Homo sapien
catcatctgggcccttagtaagcac

SEQ ID NO: 228205 - DNA, 25 bp, Homo sapien
cagctttggataagcaaaactcatc

SEQ ID NO: 228206 - DNA, 25 bp, Homo sapien
catctgggcccttagtaagcaccat

SEQ ID NO: 228207 - DNA, 25 bp, Homo sapien
tctatctgggtcagctttgtctccc

SEQ ID NO: 228208 - DNA, 25 bp, Homo sapien
acttctatctgggtcagctttgtct

SEQ ID NO: 228209 - DNA, 25 bp, Homo sapien
gtacttctatctgggtcagctttgt

SEQ ID NO: 228210 - DNA, 25 bp, Homo sapien
ctgtacttctatctgggtcagcttt

SEQ ID NO: 228211 - DNA, 25 bp, Homo sapien
catgaagctattcaagtgatgtgtc

SEQ ID NO: 228212 - DNA, 25 bp, Homo sapien
catatagaatcttgttcaccatcct

SEQ ID NO: 228213 - DNA, 25 bp, Homo sapien
aaaggatgcatatagaatcttgttc

SEQ ID NO: 228214 - DNA, 25 bp, Homo sapien
ttcccatgaagctattcaagtgatg

SEQ ID NO: 228215 - DNA, 25 bp, Homo sapien
acaagaacaaattgtataagcacac

SEQ ID NO: 228216 - DNA, 25 bp, Homo sapien
tctgcaactgagaagcacatatgtg

SEQ ID NO: 228217 - DNA, 25 bp, Homo sapien
catttacccaggactcttagcatca

SEQ ID NO: 228218 - DNA, 25 bp, Homo sapien
gataatctcccaaagcagttcattt

SEQ ID NO: 228219 - DNA, 25 bp, Homo sapien
catatgcacgcgtgcattctcacca

SEQ ID NO: 228220 - DNA, 25 bp, Homo sapien
gcttcgcacataggccatagggcat

SEQ ID NO: 228221 - DNA, 25 bp, Homo sapien
gaattttatgcagcaaggcagcacc

SEQ ID NO: 228222 - DNA, 25 bp, Homo sapien
tcagaggtcgggtggaacaaatgtc

SEQ ID NO: 228223 - DNA, 25 bp, Homo sapien
gattggtagaccaagccctcagggc

SEQ ID NO: 228224 - DNA, 25 bp, Homo sapien
agttactaatctgcctctaaggagg

SEQ ID NO: 228225 - DNA, 25 bp, Homo sapien
tctacattactgtgcgggcatctcc

SEQ ID NO: 228226 - DNA, 25 bp, Homo sapien
tgatgagagaataagcacttcctgg

SEQ ID NO: 228227 - DNA, 25 bp, Homo sapien
tgtaaacacagcctatgggagaaac

SEQ ID NO: 228228 - DNA, 25 bp, Homo sapien
gacattctacatagcgtaggattcc

SEQ ID NO: 228229 - DNA, 25 bp, Homo sapien
acaccaagacattctacatagcgta

SEQ ID NO: 228230 - DNA, 25 bp, Homo sapien
gaaattcttgcatgttctattgaac

SEQ ID NO: 228231 - DNA, 25 bp, Homo sapien
tctacatagcgtaggattcctgagc

SEQ ID NO: 228232 - DNA, 25 bp, Homo sapien
tccattgggctaacctcagggagaa

SEQ ID NO: 228233 - DNA, 25 bp, Homo sapien
tataccagctggtgacacgactgat

SEQ ID NO: 228234 - DNA, 25 bp, Homo sapien
gctgaatggccatggtacctacctc

SEQ ID NO: 228235 - DNA, 25 bp, Homo sapien
gctaatgggaccaagggaagatcca

SEQ ID NO: 228236 - DNA, 25 bp, Homo sapien
tgaagactgagagcactacatggct

SEQ ID NO: 228237 - DNA, 25 bp, Homo sapien
tcttaacgtagacagtagcttccct

SEQ ID NO: 228238 - DNA, 25 bp, Homo sapien
ctacatggctagaagctggaacatc

SEQ ID NO: 228239 - DNA, 25 bp, Homo sapien
tctctacagcttaagggtgaaactc

SEQ ID NO: 228240 - DNA, 25 bp, Homo sapien
cagccaatgccggacttcttgaagg

SEQ ID NO: 228241 - DNA, 25 bp, Homo sapien
ggctaccccgtaagctatgttggcg

SEQ ID NO: 228242 - DNA, 25 bp, Homo sapien
gcgttattgtccatgcggtcagcca

SEQ ID NO: 228243 - DNA, 25 bp, Homo sapien
ggctgctgcacatcgatcttcctgg

SEQ ID NO: 228244 - DNA, 25 bp, Homo sapien
gtggctccctcagctatcttctcct

SEQ ID NO: 228245 - DNA, 25 bp, Homo sapien
ctagtgggcgctcagggctggcaaa

SEQ ID NO: 228246 - DNA, 25 bp, Homo sapien
cacactggaattgggggcatcctca

SEQ ID NO: 228247 - DNA, 25 bp, Homo sapien
tgtactggagacatgcaccacactg

SEQ ID NO: 228248 - DNA, 25 bp, Homo sapien
cgtaccgtgataagaagacctaaat

SEQ ID NO: 228249 - DNA, 25 bp, Homo sapien
tgttttttagtcaccaccacagaga

SEQ ID NO: 228250 - DNA, 25 bp, Homo sapien
tactgtgtgcctcaacgtaccgtga

SEQ ID NO: 228251 - DNA, 25 bp, Homo sapien
gacttcctgttaagtaagcaacctg

SEQ ID NO: 228252 - DNA, 25 bp, Homo sapien
aacacagactaatttgccttgggaa

SEQ ID NO: 228253 - DNA, 25 bp, Homo sapien
gaccagtagtctgcttttataagct

SEQ ID NO: 228254 - DNA, 25 bp, Homo sapien
tataagcttcatatactagtcataa

SEQ ID NO: 228255 - DNA, 25 bp, Homo sapien
catctttgctaaaacctgatggagg

SEQ ID NO: 228256 - DNA, 25 bp, Homo sapien
tccataaatccaaatgtgagtagac

SEQ ID NO: 228257 - DNA, 25 bp, Homo sapien
ttgaaaatgtagctctaagctctat

SEQ ID NO: 228258 - DNA, 25 bp, Homo sapien
taagctctatcattccccaatgttt

SEQ ID NO: 228259 - DNA, 25 bp, Homo sapien
tccattgtggaaactagtgtcaaag

SEQ ID NO: 228260 - DNA, 25 bp, Homo sapien
ccattgtggaaactagtgtcaaagg

SEQ ID NO: 228261 - DNA, 25 bp, Homo sapien
gacgtgcattgtggtaaaatttccc

SEQ ID NO: 228262 - DNA, 25 bp, Homo sapien
tacttttctagatctcccgtcctca

SEQ ID NO: 228263 - DNA, 25 bp, Homo sapien
tgttagaactttgagcaccaattca

SEQ ID NO: 228264 - DNA, 25 bp, Homo sapien
gatatacttgtgtactcctccacct

SEQ ID NO: 228265 - DNA, 25 bp, Homo sapien
tgtaggcatcgaggaggaagctctt

SEQ ID NO: 228266 - DNA, 25 bp, Homo sapien
ctgtttgtaggcatcgaggaggaag

SEQ ID NO: 228267 - DNA, 25 bp, Homo sapien
agcgcagtccctctgaggtcagcat

SEQ ID NO: 228268 - DNA, 25 bp, Homo sapien
ggaagctcttccagacgcagcgcag

SEQ ID NO: 228269 - DNA, 25 bp, Homo sapien
cgtgcttgagcagaatgaccgagtc

SEQ ID NO: 228270 - DNA, 25 bp, Homo sapien
acttggagcggctcaacagcagcac

SEQ ID NO: 228271 - DNA, 25 bp, Homo sapien
gccactctccgcgagtggacttgga

SEQ ID NO: 228272 - DNA, 25 bp, Homo sapien
tgaccgagtcatagagagccaggaa

SEQ ID NO: 228273 - DNA, 25 bp, Homo sapien
gcaagtctacgctgaggatgcccat

SEQ ID NO: 228274 - DNA, 25 bp, Homo sapien
tgtgatcagcaagtctacgctgagg

SEQ ID NO: 228275 - DNA, 25 bp, Homo sapien
tcagcaagtctacgctgaggatgcc

SEQ ID NO: 228276 - DNA, 25 bp, Homo sapien
agtgtgatcagcaagtctacgctga

SEQ ID NO: 228277 - DNA, 25 bp, Homo sapien
ttcccttgtgcgctctggttcccct

SEQ ID NO: 228278 - DNA, 25 bp, Homo sapien
aaaagctggcgtactcgtccctaat

SEQ ID NO: 228279 - DNA, 25 bp, Homo sapien
attcattcaattcggagctgctgcc

SEQ ID NO: 228280 - DNA, 25 bp, Homo sapien
tggagtgtgcccatcaattcattca

SEQ ID NO: 228281 - DNA, 25 bp, Homo sapien
gcgtactcgtccctaatccagttac

SEQ ID NO: 228282 - DNA, 25 bp, Homo sapien
tcagagtccgttaaagacaggcagt

SEQ ID NO: 228283 - DNA, 25 bp, Homo sapien
caagcacctatgagactgtggcaga

SEQ ID NO: 228284 - DNA, 25 bp, Homo sapien
tgacgtcattgagaaagagggcttt

SEQ ID NO: 228285 - DNA, 25 bp, Homo sapien
tactttggccaggattgcagtgaat

SEQ ID NO: 228286 - DNA, 25 bp, Homo sapien
gttttgagaacagtttatcagcctc

SEQ ID NO: 228287 - DNA, 25 bp, Homo sapien
cttgactcttatttggttttgagaa

SEQ ID NO: 228288 - DNA, 25 bp, Homo sapien
tagtctggatccacattgatagcca

SEQ ID NO: 228289 - DNA, 25 bp, Homo sapien
tatcagcctctagagacacccagag

SEQ ID NO: 228290 - DNA, 25 bp, Homo sapien
tcaagcacaatagtgcgttctttaa

SEQ ID NO: 228291 - DNA, 25 bp, Homo sapien
gcacaatagtgcgttctttaaaatg

SEQ ID NO: 228292 - DNA, 25 bp, Homo sapien
cttgtcaattagtatgtcaagcaca

SEQ ID NO: 228293 - DNA, 25 bp, Homo sapien
caatagtgcgttctttaaaatgact

SEQ ID NO: 228294 - DNA, 25 bp, Homo sapien
catttgatgtgaatgtaatagtcat

SEQ ID NO: 228295 - DNA, 25 bp, Homo sapien
tcattttcgtctggcgttgaaattc

SEQ ID NO: 228296 - DNA, 25 bp, Homo sapien
ttcatttgatgtgaatgtaatagtc

SEQ ID NO: 228297 - DNA, 25 bp, Homo sapien
tcatatcattttcgtctggcgttga

SEQ ID NO: 228298 - DNA, 25 bp, Homo sapien
cacagtgtccgtagttggcaagcta

SEQ ID NO: 228299 - DNA, 25 bp, Homo sapien
ccgtagttggcaagctagaggccca

SEQ ID NO: 228300 - DNA, 25 bp, Homo sapien
tgatgtgtagttccggcccaagtcc

SEQ ID NO: 228301 - DNA, 25 bp, Homo sapien
gagagctgatgtgtagttccggccc

SEQ ID NO: 228302 - DNA, 25 bp, Homo sapien
tgaagaatttaacacctcaaaccca

SEQ ID NO: 228303 - DNA, 25 bp, Homo sapien
ttgatgttcttgtctgactccctca

SEQ ID NO: 228304 - DNA, 25 bp, Homo sapien
caaacccattgatgttcttgtctga

SEQ ID NO: 228305 - DNA, 25 bp, Homo sapien
ggcaatgggagagcttgaagaattt

SEQ ID NO: 228306 - DNA, 25 bp, Homo sapien
ttgcatagtgattattagccatatt

SEQ ID NO: 228307 - DNA, 25 bp, Homo sapien
tccatactgtatcaacttttaaatg

SEQ ID NO: 228308 - DNA, 25 bp, Homo sapien
tcctccatactgtatcaacttttaa

SEQ ID NO: 228309 - DNA, 25 bp, Homo sapien
tagtgattattagccatattccttt

SEQ ID NO: 228310 - DNA, 25 bp, Homo sapien
ggcagattcctaaaaggacttctcc

SEQ ID NO: 228311 - DNA, 25 bp, Homo sapien
taaacatggcagattcctaaaagga

SEQ ID NO: 228312 - DNA, 25 bp, Homo sapien
ttcctaaaaggacttctccacataa

SEQ ID NO: 228313 - DNA, 25 bp, Homo sapien
catggcagattcctaaaaggacttc

SEQ ID NO: 228314 - DNA, 25 bp, Homo sapien
ttattattatcatagatgttaaaac

SEQ ID NO: 228315 - DNA, 25 bp, Homo sapien
tagctctaggatttaaatattatta

SEQ ID NO: 228316 - DNA, 25 bp, Homo sapien
taaaacaaaaatacacagaggtcat

SEQ ID NO: 228317 - DNA, 25 bp, Homo sapien
ttattatcatagatgttaaaacaaa

SEQ ID NO: 228318 - DNA, 25 bp, Homo sapien
gcactcaaccactatgttacaccat

SEQ ID NO: 228319 - DNA, 25 bp, Homo sapien
cgactcatgcactcaaccactatgt

SEQ ID NO: 228320 - DNA, 25 bp, Homo sapien
tgttacaccattcctcaccattatt

SEQ ID NO: 228321 - DNA, 25 bp, Homo sapien
actatgttacaccattcctcaccat

SEQ ID NO: 228322 - DNA, 25 bp, Homo sapien
ccccaagattgtagagtggcccaaa

SEQ ID NO: 228323 - DNA, 25 bp, Homo sapien
cgtagatgactgttgtataattgcc

SEQ ID NO: 228324 - DNA, 25 bp, Homo sapien
taatgtgatagttgatgaccagcca

SEQ ID NO: 228325 - DNA, 25 bp, Homo sapien
ggccttgggaagactactaatgtga

SEQ ID NO: 228326 - DNA, 25 bp, Homo sapien
gtagattttggtctcactaccaagg

SEQ ID NO: 228327 - DNA, 25 bp, Homo sapien
caaatgctgccaagttctcgaagag

SEQ ID NO: 228328 - DNA, 25 bp, Homo sapien
caagttctcgaagagtagattttgg

SEQ ID NO: 228329 - DNA, 25 bp, Homo sapien
tagattttggtctcactaccaaggt

SEQ ID NO: 228330 - DNA, 25 bp, Homo sapien
ttttctcaactttattctgggtcca

SEQ ID NO: 228331 - DNA, 25 bp, Homo sapien
tcaactttattctgggtccacgtta

SEQ ID NO: 228332 - DNA, 25 bp, Homo sapien
ttctcaactttattctgggtccacg

SEQ ID NO: 228333 - DNA, 25 bp, Homo sapien
tctcaactttattctgggtccacgt

SEQ ID NO: 228334 - DNA, 25 bp, Homo sapien
taagcaccccgtgaccaatggttgt

SEQ ID NO: 228335 - DNA, 25 bp, Homo sapien
tcatggaggccaacgaggcaacatt

SEQ ID NO: 228336 - DNA, 25 bp, Homo sapien
gaaagcatgcgttacagaaagtcca

SEQ ID NO: 228337 - DNA, 25 bp, Homo sapien
tttgacagccatcgtacagtcatgg

SEQ ID NO: 228338 - DNA, 25 bp, Homo sapien
catcgagaggtttcaattatttcca

SEQ ID NO: 228339 - DNA, 25 bp, Homo sapien
tcatcgagaggtttcaattatttcc

SEQ ID NO: 228340 - DNA, 25 bp, Homo sapien
attcctcagttattacgctactcac

SEQ ID NO: 228341 - DNA, 25 bp, Homo sapien
cattcctcagttattacgctactca

SEQ ID NO: 228342 - DNA, 25 bp, Homo sapien
tgtctagctaatctacagcacagct

SEQ ID NO: 228343 - DNA, 25 bp, Homo sapien
caggaggggctttttgtaatgtcta

SEQ ID NO: 228344 - DNA, 25 bp, Homo sapien
cagtgctaaaccaactttgaggaac

SEQ ID NO: 228345 - DNA, 25 bp, Homo sapien
catttcactgtttagctgactcagg

SEQ ID NO: 228346 - DNA, 25 bp, Homo sapien
gcctgaaggagcaacgtataagctg

SEQ ID NO: 228347 - DNA, 25 bp, Homo sapien
gcaacgtataagctgctagagacat

SEQ ID NO: 228348 - DNA, 25 bp, Homo sapien
gaaggagcaacgtataagctgctag

SEQ ID NO: 228349 - DNA, 25 bp, Homo sapien
ggagcaacgtataagctgctagaga

SEQ ID NO: 228350 - DNA, 25 bp, Homo sapien
gggccatgacttagagtcactctga

SEQ ID NO: 228351 - DNA, 25 bp, Homo sapien
gcccttgacttagggccatgactta

SEQ ID NO: 228352 - DNA, 25 bp, Homo sapien
gagtcactctgaccttgaggactag

SEQ ID NO: 228353 - DNA, 25 bp, Homo sapien
gaccttgaggactagagttaaatta

SEQ ID NO: 228354 - DNA, 25 bp, Homo sapien
tctcatgaacattcagccaaaagtc

SEQ ID NO: 228355 - DNA, 25 bp, Homo sapien
tgttctctcgataacaagccagaga

SEQ ID NO: 228356 - DNA, 25 bp, Homo sapien
agattaaatattggtctttctcatg

SEQ ID NO: 228357 - DNA, 25 bp, Homo sapien
caggcaagtgatgcaaaatgttctc

SEQ ID NO: 228358 - DNA, 25 bp, Homo sapien
tgattgtgttggcttattggaaaaa

SEQ ID NO: 228359 - DNA, 25 bp, Homo sapien
ttgtgttggcttattggaaaaatgg

SEQ ID NO: 228360 - DNA, 25 bp, Homo sapien
ccactaaaaagatcccagaagtcca

SEQ ID NO: 228361 - DNA, 25 bp, Homo sapien
agccactaaaaagatcccagaagtc

SEQ ID NO: 228362 - DNA, 25 bp, Homo sapien
gtttgcaccaaacaacacagtgggc

SEQ ID NO: 228363 - DNA, 25 bp, Homo sapien
atagttggagggctcatcaaatatt

SEQ ID NO: 228364 - DNA, 25 bp, Homo sapien
tattaataattacagggattctgag

SEQ ID NO: 228365 - DNA, 25 bp, Homo sapien
ctccactattaataattacagggat

SEQ ID NO: 228366 - DNA, 25 bp, Homo sapien
ttattggggagtttagaaggagcca

SEQ ID NO: 228367 - DNA, 25 bp, Homo sapien
aggagccaggccattatgtgttctc

SEQ ID NO: 228368 - DNA, 25 bp, Homo sapien
tagaaggagccaggccattatgtgt

SEQ ID NO: 228369 - DNA, 25 bp, Homo sapien
tgtgttctccctctttctcggttca

SEQ ID NO: 228370 - DNA, 25 bp, Homo sapien
gatctggtaaacatggaaaggcggc

SEQ ID NO: 228371 - DNA, 25 bp, Homo sapien
gaacaaatagagcatgtccttcccg

SEQ ID NO: 228372 - DNA, 25 bp, Homo sapien
tggaaactttttcggctcagcccat

SEQ ID NO: 228373 - DNA, 25 bp, Homo sapien
tatcgatggacttgcaaatagcact

SEQ ID NO: 228374 - DNA, 25 bp, Homo sapien
cacacaccatggaaagcttagcgag

SEQ ID NO: 228375 - DNA, 25 bp, Homo sapien
tcactgtcgtcctgagagaactctg

SEQ ID NO: 228376 - DNA, 25 bp, Homo sapien
tcatggctccacgagatttaagcag

SEQ ID NO: 228377 - DNA, 25 bp, Homo sapien
tggagtcagttattgcttaagcccc

SEQ ID NO: 228378 - DNA, 25 bp, Homo sapien
agataggcccccatgattgaattac

SEQ ID NO: 228379 - DNA, 25 bp, Homo sapien
gataggcccccatgattgaattacc

SEQ ID NO: 228380 - DNA, 25 bp, Homo sapien
atgagaatatcacgggaaagatagg

SEQ ID NO: 228381 - DNA, 25 bp, Homo sapien
aacccattccaatctcatgagactt

SEQ ID NO: 228382 - DNA, 25 bp, Homo sapien
tactacttctgtccttcaagccaaa

SEQ ID NO: 228383 - DNA, 25 bp, Homo sapien
cctggcatagtctgttagaaggagg

SEQ ID NO: 228384 - DNA, 25 bp, Homo sapien
ggctttaagacctccacttgggtga

SEQ ID NO: 228385 - DNA, 25 bp, Homo sapien
cagaagaactatactataggccctg

SEQ ID NO: 228386 - DNA, 25 bp, Homo sapien
gattggtttaccattcacaaggacc

SEQ ID NO: 228387 - DNA, 25 bp, Homo sapien
tagtcacagtaaaccaaagacggtc

SEQ ID NO: 228388 - DNA, 25 bp, Homo sapien
tcagctacggtatgcagttgtggac

SEQ ID NO: 228389 - DNA, 25 bp, Homo sapien
tccctgaatctaaagtgctggcaac

SEQ ID NO: 228390 - DNA, 25 bp, Homo sapien
ccatattcctcttttttgggttgtg

SEQ ID NO: 228391 - DNA, 25 bp, Homo sapien
ttgggttgtgaacttgttccattca

SEQ ID NO: 228392 - DNA, 25 bp, Homo sapien
tttgggttgtgaacttgttccattc

SEQ ID NO: 228393 - DNA, 25 bp, Homo sapien
catattcctcttttttgggttgtga

SEQ ID NO: 228394 - DNA, 25 bp, Homo sapien
tggatttgacctacttcctagtggc

SEQ ID NO: 228395 - DNA, 25 bp, Homo sapien
aatgaatccatgaatataaaccagc

SEQ ID NO: 228396 - DNA, 25 bp, Homo sapien
aagagttatcacctttggatttgac

SEQ ID NO: 228397 - DNA, 25 bp, Homo sapien
tatagagtgccaaggaaacagtggt

SEQ ID NO: 228398 - DNA, 25 bp, Homo sapien
tcttggactagacaggaagcgactg

SEQ ID NO: 228399 - DNA, 25 bp, Homo sapien
gaaaatcttggactagacaggaagc

SEQ ID NO: 228400 - DNA, 25 bp, Homo sapien
gaagcgactgtgatcctgccaagag

SEQ ID NO: 228401 - DNA, 25 bp, Homo sapien
tgagtgatctaacccacgagtgtgg

SEQ ID NO: 228402 - DNA, 25 bp, Homo sapien
tttaggactattccttatgacaaat

SEQ ID NO: 228403 - DNA, 25 bp, Homo sapien
atttaggactattccttatgacaaa

SEQ ID NO: 228404 - DNA, 25 bp, Homo sapien
atatttaggactattccttatgaca

SEQ ID NO: 228405 - DNA, 25 bp, Homo sapien
tatttaggactattccttatgacaa

SEQ ID NO: 228406 - DNA, 25 bp, Homo sapien
tcagtaccagtagaagatcatatca

SEQ ID NO: 228407 - DNA, 25 bp, Homo sapien
gctatgatgtatgacactggtggat

SEQ ID NO: 228408 - DNA, 25 bp, Homo sapien
taggacttccaaggctatgtttaat

SEQ ID NO: 228409 - DNA, 25 bp, Homo sapien
agttctaatagcttctcagtaccag

SEQ ID NO: 228410 - DNA, 25 bp, Homo sapien
agaaacagtgaacaaccagtacttc

SEQ ID NO: 228411 - DNA, 25 bp, Homo sapien
ggctgcaccagatcatctctaagtc

SEQ ID NO: 228412 - DNA, 25 bp, Homo sapien
gtacttctaactatgcaaactatgc

SEQ ID NO: 228413 - DNA, 25 bp, Homo sapien
actatgcaaatttaccattgggaat

SEQ ID NO: 228414 - DNA, 25 bp, Homo sapien
tccatttccacagaattgaaagtct

SEQ ID NO: 228415 - DNA, 25 bp, Homo sapien
ggttgtagccttaaacatggatact

SEQ ID NO: 228416 - DNA, 25 bp, Homo sapien
agaggctgcttaagaggttgtagcc

SEQ ID NO: 228417 - DNA, 25 bp, Homo sapien
catggatactacttaaagactaaaa

SEQ ID NO: 228418 - DNA, 25 bp, Homo sapien
tgcgaaccctgtatttggaatatct

SEQ ID NO: 228419 - DNA, 25 bp, Homo sapien
gctgaagagaatttctgcgaaccct

SEQ ID NO: 228420 - DNA, 25 bp, Homo sapien
ctgcgaaccctgtatttggaatatc

SEQ ID NO: 228421 - DNA, 25 bp, Homo sapien
tgaagagaatttctgcgaaccctgt

SEQ ID NO: 228422 - DNA, 25 bp, Homo sapien
ggtgggaggatagctctagtccagg

SEQ ID NO: 228423 - DNA, 25 bp, Homo sapien
ggctcagtttctcaggcacagactc

SEQ ID NO: 228424 - DNA, 25 bp, Homo sapien
gcacagactccagatggtccaaggc

SEQ ID NO: 228425 - DNA, 25 bp, Homo sapien
tctttgaaatcttctagtaggctca

SEQ ID NO: 228426 - DNA, 25 bp, Homo sapien
actccagatggtccaaggccacttg

SEQ ID NO: 228427 - DNA, 25 bp, Homo sapien
taatactctcagaatccacatacta

SEQ ID NO: 228428 - DNA, 25 bp, Homo sapien
tcagaatccacatactaaaaatcag

SEQ ID NO: 228429 - DNA, 25 bp, Homo sapien
aaaaatcagatgcaccactgtaaga

SEQ ID NO: 228430 - DNA, 25 bp, Homo sapien
taaaaaattgattaatactctcaga

SEQ ID NO: 228431 - DNA, 25 bp, Homo sapien
cacttgtggtaactcgatccagcac

SEQ ID NO: 228432 - DNA, 25 bp, Homo sapien
gatagactgtatgccttttcacttg

SEQ ID NO: 228433 - DNA, 25 bp, Homo sapien
tccagcacagctgtattggcttcat

SEQ ID NO: 228434 - DNA, 25 bp, Homo sapien
gacctgagtaaacacgtttctggga

SEQ ID NO: 228435 - DNA, 25 bp, Homo sapien
cacccaagatccctcatgagagatt

SEQ ID NO: 228436 - DNA, 25 bp, Homo sapien
gcgaatatacagaaggtagactaac

SEQ ID NO: 228437 - DNA, 25 bp, Homo sapien
tagactaacattagagcagtgggaa

SEQ ID NO: 228438 - DNA, 25 bp, Homo sapien
gatatttccgtttgccctcgatgcg

SEQ ID NO: 228439 - DNA, 25 bp, Homo sapien
tgcgttttatttggtgtaaagccaa

SEQ ID NO: 228440 - DNA, 25 bp, Homo sapien
gagaggctcatagccttggcaaaac

SEQ ID NO: 228441 - DNA, 25 bp, Homo sapien
aaatgaacctagcttgatctttggt

SEQ ID NO: 228442 - DNA, 25 bp, Homo sapien
ggactgaacctttcaggcaacttca

SEQ ID NO: 228443 - DNA, 25 bp, Homo sapien
tgaaactatcaaaaaactactgctg

SEQ ID NO: 228444 - DNA, 25 bp, Homo sapien
gatcgttagcactattactgagcat

SEQ ID NO: 228445 - DNA, 25 bp, Homo sapien
gcataagcggcattttgtacaccaa

SEQ ID NO: 228446 - DNA, 25 bp, Homo sapien
gaagtaacaagcaatcgtggtaacg

SEQ ID NO: 228447 - DNA, 25 bp, Homo sapien
tttcgaaatgatttctgaaactgtt

SEQ ID NO: 228448 - DNA, 25 bp, Homo sapien
ttcctttggtgtgctgtgaaatcca

SEQ ID NO: 228449 - DNA, 25 bp, Homo sapien
tcttagatgtagttttcgaaatgat

SEQ ID NO: 228450 - DNA, 25 bp, Homo sapien
cttttagatacagtttagcttgttt

SEQ ID NO: 228451 - DNA, 25 bp, Homo sapien
gctttttcttcaaactgagcttcac

SEQ ID NO: 228452 - DNA, 25 bp, Homo sapien
caaggtggaagtttaaacagtagct

SEQ ID NO: 228453 - DNA, 25 bp, Homo sapien
gagatacgcagttatttgcctaagc

SEQ ID NO: 228454 - DNA, 25 bp, Homo sapien
tcagaagaagacatagagatacgca

SEQ ID NO: 228455 - DNA, 25 bp, Homo sapien
ttgcctaagctttgaggaatgcacc

SEQ ID NO: 228456 - DNA, 25 bp, Homo sapien
ccttgagaagaatacgtgggtatgc

SEQ ID NO: 228457 - DNA, 25 bp, Homo sapien
tcttttctttgggtctcttccagta

SEQ ID NO: 228458 - DNA, 25 bp, Homo sapien
ctgcagagatcccatttcttcatct

SEQ ID NO: 228459 - DNA, 25 bp, Homo sapien
tttctttgggtctcttccagtagat

SEQ ID NO: 228460 - DNA, 25 bp, Homo sapien
tgcagagatcccatttcttcatctt

SEQ ID NO: 228461 - DNA, 25 bp, Homo sapien
agcagccctgtgtattttccttgga

SEQ ID NO: 228462 - DNA, 25 bp, Homo sapien
cagtctttgcaaccagtgatctggc

SEQ ID NO: 228463 - DNA, 25 bp, Homo sapien
tctggctgtttaaggaggtttgaca

SEQ ID NO: 228464 - DNA, 25 bp, Homo sapien
tcaactaccatgtaaattgctgtgg

SEQ ID NO: 228465 - DNA, 25 bp, Homo sapien
tggtgatggatttgcactttgcttc

SEQ ID NO: 228466 - DNA, 25 bp, Homo sapien
ggatttgcactttgcttcatcaggt

SEQ ID NO: 228467 - DNA, 25 bp, Homo sapien
actttgcttcatcaggtctcccttg

SEQ ID NO: 228468 - DNA, 25 bp, Homo sapien
caggtctcccttgggccaagaacac

SEQ ID NO: 228469 - DNA, 25 bp, Homo sapien
cacccaggtagcctgctttatgaga

SEQ ID NO: 228470 - DNA, 25 bp, Homo sapien
tcccacccaggtagcctgctttatg

SEQ ID NO: 228471 - DNA, 25 bp, Homo sapien
cccacccaggtagcctgctttatga

SEQ ID NO: 228472 - DNA, 25 bp, Homo sapien
tgtcccacccaggtagcctgcttta

SEQ ID NO: 228473 - DNA, 25 bp, Homo sapien
taatcagccccaaagatagtcaggt

SEQ ID NO: 228474 - DNA, 25 bp, Homo sapien
gccaatatcaagtgagcctgtatta

SEQ ID NO: 228475 - DNA, 25 bp, Homo sapien
ttagcatgggttattcaggagatcc

SEQ ID NO: 228476 - DNA, 25 bp, Homo sapien
cactggtatattgaataatcagccc

SEQ ID NO: 228477 - DNA, 25 bp, Homo sapien
gaagtaaaaaccatgtctgctcact

SEQ ID NO: 228478 - DNA, 25 bp, Homo sapien
cattgggctataaaatgaaagtccc

SEQ ID NO: 228479 - DNA, 25 bp, Homo sapien
tagagctagagcaataacctcattg

SEQ ID NO: 228480 - DNA, 25 bp, Homo sapien
aaggcagtctagcttcgggagtaag

SEQ ID NO: 228481 - DNA, 25 bp, Homo sapien
aggttgccttgagccgtgactgcca

SEQ ID NO: 228482 - DNA, 25 bp, Homo sapien
ggtgccagagttagaccctgcctag

SEQ ID NO: 228483 - DNA, 25 bp, Homo sapien
gctgagtcaagtggcaagtgcatac

SEQ ID NO: 228484 - DNA, 25 bp, Homo sapien
cctagttcgggtgtgtaagcttctc

SEQ ID NO: 228485 - DNA, 25 bp, Homo sapien
tggaatagttttacaaggaatagta

SEQ ID NO: 228486 - DNA, 25 bp, Homo sapien
cttttagaattaggagggtgtatat

SEQ ID NO: 228487 - DNA, 25 bp, Homo sapien
tttacaaggaatagtaccagctcct

SEQ ID NO: 228488 - DNA, 25 bp, Homo sapien
atttgcatagaagtgtttacagtac

SEQ ID NO: 228489 - DNA, 25 bp, Homo sapien
aacaggcacaagcaactagcagaac

SEQ ID NO: 228490 - DNA, 25 bp, Homo sapien
tttatgagaagaagtccggttgatc

SEQ ID NO: 228491 - DNA, 25 bp, Homo sapien
gcagaacctgtctcatgaggtccat

SEQ ID NO: 228492 - DNA, 25 bp, Homo sapien
gtccggttgatcaagaatttgaaac

SEQ ID NO: 228493 - DNA, 25 bp, Homo sapien
caagctggccagtgctacagggaag

SEQ ID NO: 228494 - DNA, 25 bp, Homo sapien
ggacacatacccaggtctcagaaga

SEQ ID NO: 228495 - DNA, 25 bp, Homo sapien
tgagggtatggaacagactctcctg

SEQ ID NO: 228496 - DNA, 25 bp, Homo sapien
gctgccgtaactgctgtgagggtat

SEQ ID NO: 228497 - DNA, 25 bp, Homo sapien
tggataccttgcagcaactgcctgc

SEQ ID NO: 228498 - DNA, 25 bp, Homo sapien
tgcccttgacattatagctgctcaa

SEQ ID NO: 228499 - DNA, 25 bp, Homo sapien
tgaactctgctatattaagagctac

SEQ ID NO: 228500 - DNA, 25 bp, Homo sapien
ctgctcaaagaggatttattgttcc

SEQ ID NO: 228501 - DNA, 25 bp, Homo sapien
tgcctctgaattttagctagtagtc

SEQ ID NO: 228502 - DNA, 25 bp, Homo sapien
aaactgctatgcaatcaaattagtc

SEQ ID NO: 228503 - DNA, 25 bp, Homo sapien
tcatgtaaatttaatctgtagccac

SEQ ID NO: 228504 - DNA, 25 bp, Homo sapien
aaattagtcaatctttactccctga

SEQ ID NO: 228505 - DNA, 25 bp, Homo sapien
ttttaaggtcttaattggctgaggc

SEQ ID NO: 228506 - DNA, 25 bp, Homo sapien
gctaactggaagctattgctgaaac

SEQ ID NO: 228507 - DNA, 25 bp, Homo sapien
gattgccaggtcacttgagaacaga

SEQ ID NO: 228508 - DNA, 25 bp, Homo sapien
ggcaatgggagaccatacaaagccc

SEQ ID NO: 228509 - DNA, 25 bp, Homo sapien
tctcctatgtctgatgaccatgaca

SEQ ID NO: 228510 - DNA, 25 bp, Homo sapien
gtggtttagaaaccaacagacatct

SEQ ID NO: 228511 - DNA, 25 bp, Homo sapien
cagacatctcctatgtctgatgacc

SEQ ID NO: 228512 - DNA, 25 bp, Homo sapien
ttctcttgtggtttagaaaccaaca

SEQ ID NO: 228513 - DNA, 25 bp, Homo sapien
aatctatactgctacaaaggacaac

SEQ ID NO: 228514 - DNA, 25 bp, Homo sapien
actactctagtagacacagtgtcga

SEQ ID NO: 228515 - DNA, 25 bp, Homo sapien
tatactcttagagcataatctatac

SEQ ID NO: 228516 - DNA, 25 bp, Homo sapien
cataatctgtgaagttagatcctcc

SEQ ID NO: 228517 - DNA, 25 bp, Homo sapien
tttaagaattaggtaaaaatgcata

SEQ ID NO: 228518 - DNA, 25 bp, Homo sapien
ttaagaattaggtaaaaatgcatac

SEQ ID NO: 228519 - DNA, 25 bp, Homo sapien
gaccttcgaatctcctgtgagtcct

SEQ ID NO: 228520 - DNA, 25 bp, Homo sapien
ctaaatcaactagttcctgactttc

SEQ ID NO: 228521 - DNA, 25 bp, Homo sapien
gcaaaaccactgagaccttcgaatc

SEQ ID NO: 228522 - DNA, 25 bp, Homo sapien
ccactaaatcaactagttcctgact

SEQ ID NO: 228523 - DNA, 25 bp, Homo sapien
attccactaccaaggtgcttcttca

SEQ ID NO: 228524 - DNA, 25 bp, Homo sapien
ttttccaattccactaccaaggtgc

SEQ ID NO: 228525 - DNA, 25 bp, Homo sapien
ggtcctccacaacgtcttttgcatt

SEQ ID NO: 228526 - DNA, 25 bp, Homo sapien
ggctggtcctccacaacgtcttttg

SEQ ID NO: 228527 - DNA, 25 bp, Homo sapien
tttactaagacagaagcagtatgtc

SEQ ID NO: 228528 - DNA, 25 bp, Homo sapien
aatgcagttatcatatacacaggag

SEQ ID NO: 228529 - DNA, 25 bp, Homo sapien
ttctcttctcgtcccagaaatgaag

SEQ ID NO: 228530 - DNA, 25 bp, Homo sapien
ttatcaattaattcctgcacacagc

SEQ ID NO: 228531 - DNA, 25 bp, Homo sapien
gagttgttgtctgcagagcatcagc

SEQ ID NO: 228532 - DNA, 25 bp, Homo sapien
catcagctggtgtcgcagatttttc

SEQ ID NO: 228533 - DNA, 25 bp, Homo sapien
tcttctcacgatgtatttcatccag

SEQ ID NO: 228534 - DNA, 25 bp, Homo sapien
gagacactgcaactcagattccttg

SEQ ID NO: 228535 - DNA, 25 bp, Homo sapien
tgctaaccagcgatgtgggtcataa

SEQ ID NO: 228536 - DNA, 25 bp, Homo sapien
ggtcataatgtatatcaggaccaga

SEQ ID NO: 228537 - DNA, 25 bp, Homo sapien
taatgtatatcaggaccagatgaaa

SEQ ID NO: 228538 - DNA, 25 bp, Homo sapien
aaccagcgatgtgggtcataatgta

SEQ ID NO: 228539 - DNA, 25 bp, Homo sapien
tatcacaccaagaatggattcctgt

SEQ ID NO: 228540 - DNA, 25 bp, Homo sapien
gatccttgagctgcaatctggcctc

SEQ ID NO: 228541 - DNA, 25 bp, Homo sapien
tcctgttcagtctccaagcaaagaa

SEQ ID NO: 228542 - DNA, 25 bp, Homo sapien
agtctccaagcaaagaagttgatcc

SEQ ID NO: 228543 - DNA, 25 bp, Homo sapien
ctagttgatccttcaaacattgata

SEQ ID NO: 228544 - DNA, 25 bp, Homo sapien
ctgtcacactgtgatttcaacttct

SEQ ID NO: 228545 - DNA, 25 bp, Homo sapien
gctgaccacgatgaattttagccat

SEQ ID NO: 228546 - DNA, 25 bp, Homo sapien
tgtcagtctgtcacactgtgatttc

SEQ ID NO: 228547 - DNA, 25 bp, Homo sapien
cttgctggcaacagctgactgacca

SEQ ID NO: 228548 - DNA, 25 bp, Homo sapien
ccctcttcactgtggtttttggcat

SEQ ID NO: 228549 - DNA, 25 bp, Homo sapien
ggcaacagctgactgaccagtcacc

SEQ ID NO: 228550 - DNA, 25 bp, Homo sapien
tgactgaccagtcaccctcttcact

SEQ ID NO: 228551 - DNA, 25 bp, Homo sapien
acgctttattaacttcatgagccac

SEQ ID NO: 228552 - DNA, 25 bp, Homo sapien
ttacgctttattaacttcatgagcc

SEQ ID NO: 228553 - DNA, 25 bp, Homo sapien
tacgctttattaacttcatgagcca

SEQ ID NO: 228554 - DNA, 25 bp, Homo sapien
agtatcatcaggataatttagcaga

SEQ ID NO: 228555 - DNA, 25 bp, Homo sapien
catcaggataatttagcagaggtac

SEQ ID NO: 228556 - DNA, 25 bp, Homo sapien
tcatcaggataatttagcagaggta

SEQ ID NO: 228557 - DNA, 25 bp, Homo sapien
tatcatcaggataatttagcagagg

SEQ ID NO: 228558 - DNA, 25 bp, Homo sapien
cttcagagtcctgatatgattctca

SEQ ID NO: 228559 - DNA, 25 bp, Homo sapien
ttcagagtcctgatatgattctcag

SEQ ID NO: 228560 - DNA, 25 bp, Homo sapien
tgatggactcttgcatctcaagaag

SEQ ID NO: 228561 - DNA, 25 bp, Homo sapien
aagatctgctcggatggcactcagg

SEQ ID NO: 228562 - DNA, 25 bp, Homo sapien
ggtgcacatctcgttccagctttaa

SEQ ID NO: 228563 - DNA, 25 bp, Homo sapien
aagctcctggatattctgttcgtgt

SEQ ID NO: 228564 - DNA, 25 bp, Homo sapien
caattcgctctccagtctatggatg

SEQ ID NO: 228565 - DNA, 25 bp, Homo sapien
ccagtctatggatggtatccaggga

SEQ ID NO: 228566 - DNA, 25 bp, Homo sapien
ggatggtatccagggaattcttaac

SEQ ID NO: 228567 - DNA, 25 bp, Homo sapien
tttcaattcgctctccagtctatgg

SEQ ID NO: 228568 - DNA, 25 bp, Homo sapien
taatgctgcatacagctgggttttc

SEQ ID NO: 228569 - DNA, 25 bp, Homo sapien
tctcctccttggagtgaagctcctc

SEQ ID NO: 228570 - DNA, 25 bp, Homo sapien
cctcctgaagggcacgctttgttag

SEQ ID NO: 228571 - DNA, 25 bp, Homo sapien
caaggtcagcttgatgagacttaat

SEQ ID NO: 228572 - DNA, 25 bp, Homo sapien
gggatcagatcagttcagacacaag

SEQ ID NO: 228573 - DNA, 25 bp, Homo sapien
gggcaaccagccacccagtatgtgt

SEQ ID NO: 228574 - DNA, 25 bp, Homo sapien
cattgagccagttgccagatcaggc

SEQ ID NO: 228575 - DNA, 25 bp, Homo sapien
gaactgctttacttcagggcaacca

SEQ ID NO: 228576 - DNA, 25 bp, Homo sapien
cagtgtcacgcatttaagtaagccc

SEQ ID NO: 228577 - DNA, 25 bp, Homo sapien
tgctcagtcagtgagatcctcagtg

SEQ ID NO: 228578 - DNA, 25 bp, Homo sapien
taagcccatcacagttgctgccagt

SEQ ID NO: 228579 - DNA, 25 bp, Homo sapien
gttgtgatcccataacactgctcag

SEQ ID NO: 228580 - DNA, 25 bp, Homo sapien
tacgctcggcctcacatgtgtcaaa

SEQ ID NO: 228581 - DNA, 25 bp, Homo sapien
gaaggtcagcatgcttacgctcggc

SEQ ID NO: 228582 - DNA, 25 bp, Homo sapien
tggttgcatcctccgcatggcgagt

SEQ ID NO: 228583 - DNA, 25 bp, Homo sapien
tgaggtaccgctcagcctgcttggt

SEQ ID NO: 228584 - DNA, 25 bp, Homo sapien
atatattattctgtccttgaaggac

SEQ ID NO: 228585 - DNA, 25 bp, Homo sapien
tctgtccttgaaggacaggagccat

SEQ ID NO: 228586 - DNA, 25 bp, Homo sapien
tttgtcttctgagtctttgctttta

SEQ ID NO: 228587 - DNA, 25 bp, Homo sapien
taaatatattattctgtccttgaag

SEQ ID NO: 228588 - DNA, 25 bp, Homo sapien
aaccaaagcccgtgcaccactgcat

SEQ ID NO: 228589 - DNA, 25 bp, Homo sapien
gacgaatcacacagaagatccatga

SEQ ID NO: 228590 - DNA, 25 bp, Homo sapien
tgtaaacttctgttgactgcacagt

SEQ ID NO: 228591 - DNA, 25 bp, Homo sapien
taactgtgtaaacttctgttgactg

SEQ ID NO: 228592 - DNA, 25 bp, Homo sapien
tatttgacaagaccacatatgaggt

SEQ ID NO: 228593 - DNA, 25 bp, Homo sapien
tatatatatgttcttgggcctgacc

SEQ ID NO: 228594 - DNA, 25 bp, Homo sapien
aaacatacccagattacttcaagag

SEQ ID NO: 228595 - DNA, 25 bp, Homo sapien
gaaacagtgaacaactggcacaaag

SEQ ID NO: 228596 - DNA, 25 bp, Homo sapien
tgtaaagagtatgtcaatatttcat

SEQ ID NO: 228597 - DNA, 25 bp, Homo sapien
ttaaacatgtagagggctttgtaaa

SEQ ID NO: 228598 - DNA, 25 bp, Homo sapien
tacaatccaaatcttgaaccaaatt

SEQ ID NO: 228599 - DNA, 25 bp, Homo sapien
aatatttcattatctttacaatcca

SEQ ID NO: 228600 - DNA, 25 bp, Homo sapien
ggaggcattgcaattccacctcatg

SEQ ID NO: 228601 - DNA, 25 bp, Homo sapien
aatggtagctgcctagttatactcc

SEQ ID NO: 228602 - DNA, 25 bp, Homo sapien
tctgccagtttcacccgcaaaataa

SEQ ID NO: 228603 - DNA, 25 bp, Homo sapien
aacagatacagggaggattgataca

SEQ ID NO: 228604 - DNA, 25 bp, Homo sapien
taaaatatttcgaatatgacttaaa

SEQ ID NO: 228605 - DNA, 25 bp, Homo sapien
aagcaattccatgagataaaattaa

SEQ ID NO: 228606 - DNA, 25 bp, Homo sapien
ttaagcaattccatgagataaaatt

SEQ ID NO: 228607 - DNA, 25 bp, Homo sapien
aaattaaaatatttcgaatatgact

SEQ ID NO: 228608 - DNA, 25 bp, Homo sapien
tccaggtcctgtttttcccgctcaa

SEQ ID NO: 228609 - DNA, 25 bp, Homo sapien
tcacttcctctaactcagatgccat

SEQ ID NO: 228610 - DNA, 25 bp, Homo sapien
tctaactcagatgccattgcgctga

SEQ ID NO: 228611 - DNA, 25 bp, Homo sapien
ttcctctaactcagatgccattgcg

SEQ ID NO: 228612 - DNA, 25 bp, Homo sapien
gataaaatgtaaggctcaagggttg

SEQ ID NO: 228613 - DNA, 25 bp, Homo sapien
caaatagtactgagccctgatgttt

SEQ ID NO: 228614 - DNA, 25 bp, Homo sapien
aaatctctgattgtgtatgaccaac

SEQ ID NO: 228615 - DNA, 25 bp, Homo sapien
tactcaacagactttgccagcctgt

SEQ ID NO: 228616 - DNA, 25 bp, Homo sapien
gtcctccccttgttcatcctgatag

SEQ ID NO: 228617 - DNA, 25 bp, Homo sapien
tctgctttcgtaagttgtgtacgca

SEQ ID NO: 228618 - DNA, 25 bp, Homo sapien
cctgatagtttgactgttgcttgga

SEQ ID NO: 228619 - DNA, 25 bp, Homo sapien
tgtaaaccctttcgatcaccttctg

SEQ ID NO: 228620 - DNA, 25 bp, Homo sapien
ctgatgcaaaagtgtttctcggctg

SEQ ID NO: 228621 - DNA, 25 bp, Homo sapien
gatgcaaaagtgtttctcggctgcc

SEQ ID NO: 228622 - DNA, 25 bp, Homo sapien
gattgattcaataaccttcgagata

SEQ ID NO: 228623 - DNA, 25 bp, Homo sapien
cgagatagctccaattcctgttcaa

SEQ ID NO: 228624 - DNA, 25 bp, Homo sapien
cagtttcagtttgtcttagcttatt

SEQ ID NO: 228625 - DNA, 25 bp, Homo sapien
cctcatgctcatctgctttagcttc

SEQ ID NO: 228626 - DNA, 25 bp, Homo sapien
tcttctcagtttcagtttgtcttag

SEQ ID NO: 228627 - DNA, 25 bp, Homo sapien
cttattttttattgccccctcatgc

SEQ ID NO: 228628 - DNA, 25 bp, Homo sapien
cattccatgaaagtgtttttcacaa

SEQ ID NO: 228629 - DNA, 25 bp, Homo sapien
acattccatgaaagtgtttttcaca

SEQ ID NO: 228630 - DNA, 25 bp, Homo sapien
gagtcccagttgatcctggcgtctt

SEQ ID NO: 228631 - DNA, 25 bp, Homo sapien
ggacatgagtcccagttgatcctgg

SEQ ID NO: 228632 - DNA, 25 bp, Homo sapien
ttgatcctggcgtctttccaccagc

SEQ ID NO: 228633 - DNA, 25 bp, Homo sapien
ctcctgtagctgcagggacatgagt

SEQ ID NO: 228634 - DNA, 25 bp, Homo sapien
ttcacctttccaaggctcttcacaa

SEQ ID NO: 228635 - DNA, 25 bp, Homo sapien
ttgccacacattaattggaaagacg

SEQ ID NO: 228636 - DNA, 25 bp, Homo sapien
ttagataccacattgccacacatta

SEQ ID NO: 228637 - DNA, 25 bp, Homo sapien
tggaaagacgttgtctacttcagca

SEQ ID NO: 228638 - DNA, 25 bp, Homo sapien
tttctgggcttcattaagtttttca

SEQ ID NO: 228639 - DNA, 25 bp, Homo sapien
cagtcaattcttccaaagccctttt

SEQ ID NO: 228640 - DNA, 25 bp, Homo sapien
ttaagtttttcagtcaattcttcca

SEQ ID NO: 228641 - DNA, 25 bp, Homo sapien
agccctttttgtttcggcatctgac

SEQ ID NO: 228642 - DNA, 25 bp, Homo sapien
taacttcctgtccattatttttata

SEQ ID NO: 228643 - DNA, 25 bp, Homo sapien
caacatcaaatagaaagttaaactt

SEQ ID NO: 228644 - DNA, 25 bp, Homo sapien
atttttataaacatgaagtaagaat

SEQ ID NO: 228645 - DNA, 25 bp, Homo sapien
ctttcaacatcaaatagaaagttaa

SEQ ID NO: 228646 - DNA, 25 bp, Homo sapien
tcatctccaaggcgaatttgttcac

SEQ ID NO: 228647 - DNA, 25 bp, Homo sapien
catctccaaggcgaatttgttcact

SEQ ID NO: 228648 - DNA, 25 bp, Homo sapien
gagtcatatcatcagtctcttgaac

SEQ ID NO: 228649 - DNA, 25 bp, Homo sapien
cattcgtttaataccctgtggatcc

SEQ ID NO: 228650 - DNA, 25 bp, Homo sapien
gatctcattcgtttaataccctgtg

SEQ ID NO: 228651 - DNA, 25 bp, Homo sapien
aaaccggacaccagttcttgatctc

SEQ ID NO: 228652 - DNA, 25 bp, Homo sapien
ttgagaggtgaggtaggtggaaaat

SEQ ID NO: 228653 - DNA, 25 bp, Homo sapien
cttgagaggtgaggtaggtggaaaa

SEQ ID NO: 228654 - DNA, 25 bp, Homo sapien
tgagaggtgaggtaggtggaaaatg

SEQ ID NO: 228655 - DNA, 25 bp, Homo sapien
tgccaccatcaaggtcacttgcact

SEQ ID NO: 228656 - DNA, 25 bp, Homo sapien
tttctcaataaacgttgactccgga

SEQ ID NO: 228657 - DNA, 25 bp, Homo sapien
acttgcactcaaacttgtaacagaa

SEQ ID NO: 228658 - DNA, 25 bp, Homo sapien
tccggagttggtcgattgattgttc

SEQ ID NO: 228659 - DNA, 25 bp, Homo sapien
atgttctatcgcacccgcctgtcca

SEQ ID NO: 228660 - DNA, 25 bp, Homo sapien
tgtattctcggtatcgtccaagcat

SEQ ID NO: 228661 - DNA, 25 bp, Homo sapien
cattactgtattctcggtatcgtcc

SEQ ID NO: 228662 - DNA, 25 bp, Homo sapien
gcacccgcctgtccattactgtatt

SEQ ID NO: 228663 - DNA, 25 bp, Homo sapien
tccacttgtcgcaggttccgactgg

SEQ ID NO: 228664 - DNA, 25 bp, Homo sapien
cacttgtcgcaggttccgactggta

SEQ ID NO: 228665 - DNA, 25 bp, Homo sapien
cttgtcgcaggttccgactggtatc

SEQ ID NO: 228666 - DNA, 25 bp, Homo sapien
ctggtccacttgtcgcaggttccga

SEQ ID NO: 228667 - DNA, 25 bp, Homo sapien
tggactcaatcggtcacgacagcgg

SEQ ID NO: 228668 - DNA, 25 bp, Homo sapien
tcccctgtgcgttgatctggcagcc

SEQ ID NO: 228669 - DNA, 25 bp, Homo sapien
tatagtgttgaccttctcggtaact

SEQ ID NO: 228670 - DNA, 25 bp, Homo sapien
acttctactgtaggaagacttcgag

SEQ ID NO: 228671 - DNA, 25 bp, Homo sapien
gatacatgagaaggtggcatcttca

SEQ ID NO: 228672 - DNA, 25 bp, Homo sapien
acatgagaaggtggcatcttcaaca

SEQ ID NO: 228673 - DNA, 25 bp, Homo sapien
cagatacatgagaaggtggcatctt

SEQ ID NO: 228674 - DNA, 25 bp, Homo sapien
gatttcaaatagagtagaattaaac

SEQ ID NO: 228675 - DNA, 25 bp, Homo sapien
caccactaggattacatacttttac

SEQ ID NO: 228676 - DNA, 25 bp, Homo sapien
ggcatgagtttcactagtacacaca

SEQ ID NO: 228677 - DNA, 25 bp, Homo sapien
agacagaatcacaagttccggcatg

SEQ ID NO: 228678 - DNA, 25 bp, Homo sapien
taagacagaatcacaagttccggca

SEQ ID NO: 228679 - DNA, 25 bp, Homo sapien
aagttccggcatgagtttcactagt

SEQ ID NO: 228680 - DNA, 25 bp, Homo sapien
caagaatctccgatctatcatcagc

SEQ ID NO: 228681 - DNA, 25 bp, Homo sapien
tcatcagccaacaccactacaaccc

SEQ ID NO: 228682 - DNA, 25 bp, Homo sapien
accactacaacccagacacaggact

SEQ ID NO: 228683 - DNA, 25 bp, Homo sapien
gaatctccgatctatcatcagccaa

SEQ ID NO: 228684 - DNA, 25 bp, Homo sapien
atgcagaaacaattaacaattgtac

SEQ ID NO: 228685 - DNA, 25 bp, Homo sapien
catgcagaaacaattaacaattgta

SEQ ID NO: 228686 - DNA, 25 bp, Homo sapien
tctttacatcagtgctcttctgtaa

SEQ ID NO: 228687 - DNA, 25 bp, Homo sapien
cttctttacatcagtgctcttctgt

SEQ ID NO: 228688 - DNA, 25 bp, Homo sapien
ctgtcttctttacatcagtgctctt

SEQ ID NO: 228689 - DNA, 25 bp, Homo sapien
tacatcagtgctcttctgtaacttc

SEQ ID NO: 228690 - DNA, 25 bp, Homo sapien
gcatcgaaccgtgtttactcccaga

SEQ ID NO: 228691 - DNA, 25 bp, Homo sapien
cagaaagtgtgctatagccacaggc

SEQ ID NO: 228692 - DNA, 25 bp, Homo sapien
tgaagtctgctggttaactgaggca

SEQ ID NO: 228693 - DNA, 25 bp, Homo sapien
caaatgcccttggtcagaaccgagg

SEQ ID NO: 228694 - DNA, 25 bp, Homo sapien
tagaaacaggtacatcactgttgct

SEQ ID NO: 228695 - DNA, 25 bp, Homo sapien
taaaaggtgtctgacagaatgcctg

SEQ ID NO: 228696 - DNA, 25 bp, Homo sapien
gcaacactgcatacacaatcattcg

SEQ ID NO: 228697 - DNA, 25 bp, Homo sapien
caatgatcactcttttggctccaga

SEQ ID NO: 228698 - DNA, 25 bp, Homo sapien
aggttcagggcaaagggcctagtca

SEQ ID NO: 228699 - DNA, 25 bp, Homo sapien
gatgatctttggttgcccctacact

SEQ ID NO: 228700 - DNA, 25 bp, Homo sapien
caaagggcctagtcaagccgatgat

SEQ ID NO: 228701 - DNA, 25 bp, Homo sapien
gagctcaacgctctttttaggcaca

SEQ ID NO: 228702 - DNA, 25 bp, Homo sapien
gtgcaactgaccaaacgcagcgact

SEQ ID NO: 228703 - DNA, 25 bp, Homo sapien
tgagacggaggatgatcccagctcc

SEQ ID NO: 228704 - DNA, 25 bp, Homo sapien
ttaatgccggatcatcgcctaggcc

SEQ ID NO: 228705 - DNA, 25 bp, Homo sapien
gcagcgactcaaccgactgtgctct

SEQ ID NO: 228706 - DNA, 25 bp, Homo sapien
gagacacctgagacaatttgggcca

SEQ ID NO: 228707 - DNA, 25 bp, Homo sapien
ttagacaaggagtagagagacacct

SEQ ID NO: 228708 - DNA, 25 bp, Homo sapien
tgaggccgccatagagaggtgacca

SEQ ID NO: 228709 - DNA, 25 bp, Homo sapien
ggcactcaagctcccaattggttgc

SEQ ID NO: 228710 - DNA, 25 bp, Homo sapien
tcaagaagcagctgacaatgctaac

SEQ ID NO: 228711 - DNA, 25 bp, Homo sapien
tgcccataggcatcaaaggaggatg

SEQ ID NO: 228712 - DNA, 25 bp, Homo sapien
tctgcccataggcatcaaaggagga

SEQ ID NO: 228713 - DNA, 25 bp, Homo sapien
caaaggaggatgttacttcaaatgt

SEQ ID NO: 228714 - DNA, 25 bp, Homo sapien
cataggcatcaaaggaggatgttac

SEQ ID NO: 228715 - DNA, 25 bp, Homo sapien
tgtcctagccaagttcatataaaag

SEQ ID NO: 228716 - DNA, 25 bp, Homo sapien
caatgaaattcttgggtcgaccaga

SEQ ID NO: 228717 - DNA, 25 bp, Homo sapien
taacctccagcctaattacgatatg

SEQ ID NO: 228718 - DNA, 25 bp, Homo sapien
tacgatatggaaaccctgtgtgttc

SEQ ID NO: 228719 - DNA, 25 bp, Homo sapien
taagtaggtgatgttattatgctca

SEQ ID NO: 228720 - DNA, 25 bp, Homo sapien
gggtcctgttctcagcgctttgcat

SEQ ID NO: 228721 - DNA, 25 bp, Homo sapien
tctcagcgctttgcatgaactcacc

SEQ ID NO: 228722 - DNA, 25 bp, Homo sapien
aatccaattaagtaggtgatgttat

SEQ ID NO: 228723 - DNA, 25 bp, Homo sapien
gtgcatgagaagatccttccttctc

SEQ ID NO: 228724 - DNA, 25 bp, Homo sapien
tcatgggtcgcagtcagactcccat

SEQ ID NO: 228725 - DNA, 25 bp, Homo sapien
tccacgtcagcctgattcatagcct

SEQ ID NO: 228726 - DNA, 25 bp, Homo sapien
gggtcgcagtcagactcccattctc

SEQ ID NO: 228727 - DNA, 25 bp, Homo sapien
tagcctcttcgtactcattctctct

SEQ ID NO: 228728 - DNA, 25 bp, Homo sapien
tatgttgcagcaatatcagcacaaa

SEQ ID NO: 228729 - DNA, 25 bp, Homo sapien
agcacaaaagaaacttactgaatcc

SEQ ID NO: 228730 - DNA, 25 bp, Homo sapien
gcacaaaagaaacttactgaatcct

SEQ ID NO: 228731 - DNA, 25 bp, Homo sapien
ctgaaaaggaacagattgttccaga

SEQ ID NO: 228732 - DNA, 25 bp, Homo sapien
ccttaagttcggcatttctctcagc

SEQ ID NO: 228733 - DNA, 25 bp, Homo sapien
aaggccagtagcaaatcttaggtgc

SEQ ID NO: 228734 - DNA, 25 bp, Homo sapien
ccgaccatgagctctataaggccag

SEQ ID NO: 228735 - DNA, 25 bp, Homo sapien
tacctgggtatgctcaatgacctga

SEQ ID NO: 228736 - DNA, 25 bp, Homo sapien
acttggtggcttttcgtacaggcac

SEQ ID NO: 228737 - DNA, 25 bp, Homo sapien
caggcacacccttgttggcctgggc

SEQ ID NO: 228738 - DNA, 25 bp, Homo sapien
gtcgagtgaacagaaaactattttc

SEQ ID NO: 228739 - DNA, 25 bp, Homo sapien
ctgggtcgagtgaacagaaaactat

SEQ ID NO: 228740 - DNA, 25 bp, Homo sapien
ttgaggggttttctgggtcgagtga

SEQ ID NO: 228741 - DNA, 25 bp, Homo sapien
tattcttgtgtacgtcaactgtgcc

SEQ ID NO: 228742 - DNA, 25 bp, Homo sapien
gcaaaggttgctagactgaacatcc

SEQ ID NO: 228743 - DNA, 25 bp, Homo sapien
tactctttggagtgattgtagcaga

SEQ ID NO: 228744 - DNA, 25 bp, Homo sapien
tcccctatgatgagctttaagttgt

SEQ ID NO: 228745 - DNA, 25 bp, Homo sapien
tctgatgtgctatggaaacactgga

SEQ ID NO: 228746 - DNA, 25 bp, Homo sapien
gccatcctggccactttacagagaa

SEQ ID NO: 228747 - DNA, 25 bp, Homo sapien
gacagctccgaaagtgaatgacagg

SEQ ID NO: 228748 - DNA, 25 bp, Homo sapien
gggccagagcatccactacttggta

SEQ ID NO: 228749 - DNA, 25 bp, Homo sapien
catgggaccaacaatcatacgaaaa

SEQ ID NO: 228750 - DNA, 25 bp, Homo sapien
tgggaccaacaatcatacgaaaaaa

SEQ ID NO: 228751 - DNA, 25 bp, Homo sapien
tacatgggaccaacaatcatacgaa

SEQ ID NO: 228752 - DNA, 25 bp, Homo sapien
atacatgggaccaacaatcatacga

SEQ ID NO: 228753 - DNA, 25 bp, Homo sapien
ccaatggaaagctctggcaaggagt

SEQ ID NO: 228754 - DNA, 25 bp, Homo sapien
gagagaaccacctcaacagagattg

SEQ ID NO: 228755 - DNA, 25 bp, Homo sapien
tcactcaggactactcgttcaacga

SEQ ID NO: 228756 - DNA, 25 bp, Homo sapien
gaggatctttccatgcagggtcttg

SEQ ID NO: 228757 - DNA, 25 bp, Homo sapien
gtcgttcatcataaaattccctcat

SEQ ID NO: 228758 - DNA, 25 bp, Homo sapien
acttctgtacatctggtatggcaat

SEQ ID NO: 228759 - DNA, 25 bp, Homo sapien
ttgctgtgctgtcgttcatcataaa

SEQ ID NO: 228760 - DNA, 25 bp, Homo sapien
tacatctggtatggcaatgacagag

SEQ ID NO: 228761 - DNA, 25 bp, Homo sapien
ggcctgcaggccttatggaataatc

SEQ ID NO: 228762 - DNA, 25 bp, Homo sapien
caagaggattccattacggcagtgg

SEQ ID NO: 228763 - DNA, 25 bp, Homo sapien
tatgggatggtactctgtagactac

SEQ ID NO: 228764 - DNA, 25 bp, Homo sapien
ttttcacgtgaagaaccagttaggc

SEQ ID NO: 228765 - DNA, 25 bp, Homo sapien
aattagtcatagaaacacagcaaca

SEQ ID NO: 228766 - DNA, 25 bp, Homo sapien
taattagtcatagaaacacagcaac

SEQ ID NO: 228767 - DNA, 25 bp, Homo sapien
taatccccagtgtttcgggaggctg

SEQ ID NO: 228768 - DNA, 25 bp, Homo sapien
taaaaggtatcatgtaaatccagtg

SEQ ID NO: 228769 - DNA, 25 bp, Homo sapien
taaagggcaagcgtgggatcaagat

SEQ ID NO: 228770 - DNA, 25 bp, Homo sapien
tatttggcgttagaaagtacagatc

SEQ ID NO: 228771 - DNA, 25 bp, Homo sapien
ccattgtgtggcgaaatatgtactc

SEQ ID NO: 228772 - DNA, 25 bp, Homo sapien
tacagagatggtgaacttggcactg

SEQ ID NO: 228773 - DNA, 25 bp, Homo sapien
catcttagccaggtctctgaatgca

SEQ ID NO: 228774 - DNA, 25 bp, Homo sapien
cactgaccaaaggaattccatggac

SEQ ID NO: 228775 - DNA, 25 bp, Homo sapien
aaagcaatcgtctgtgtcaccctaa

SEQ ID NO: 228776 - DNA, 25 bp, Homo sapien
cccacggtttcaacgaagactcatg

SEQ ID NO: 228777 - DNA, 25 bp, Homo sapien
ctcccacggtttcaacgaagactca

SEQ ID NO: 228778 - DNA, 25 bp, Homo sapien
ccacggtttcaacgaagactcatgc

SEQ ID NO: 228779 - DNA, 25 bp, Homo sapien
tcccacggtttcaacgaagactcat

SEQ ID NO: 228780 - DNA, 25 bp, Homo sapien
tctagagtcagaggatctattatcc

SEQ ID NO: 228781 - DNA, 25 bp, Homo sapien
cagcatgtgagaggtcaataggaga

SEQ ID NO: 228782 - DNA, 25 bp, Homo sapien
aaagcaggtgcaatatctagagtca

SEQ ID NO: 228783 - DNA, 25 bp, Homo sapien
gatcccagaggaaataagtggtgtc

SEQ ID NO: 228784 - DNA, 25 bp, Homo sapien
tctagttagggtgatcagcaaaagc

SEQ ID NO: 228785 - DNA, 25 bp, Homo sapien
tgtctataggaaaacatgggatgtg

SEQ ID NO: 228786 - DNA, 25 bp, Homo sapien
gtagttataaggataagacacagcc

SEQ ID NO: 228787 - DNA, 25 bp, Homo sapien
tgccaaccctagtgcaaatggtcca

SEQ ID NO: 228788 - DNA, 25 bp, Homo sapien
acatctccagaggcacagcaaaggg

SEQ ID NO: 228789 - DNA, 25 bp, Homo sapien
tcacatctccagaggcacagcaaag

SEQ ID NO: 228790 - DNA, 25 bp, Homo sapien
catctccagaggcacagcaaagggt

SEQ ID NO: 228791 - DNA, 25 bp, Homo sapien
cacatctccagaggcacagcaaagg

SEQ ID NO: 228792 - DNA, 25 bp, Homo sapien
tgcagaatccattatgttgcaatag

SEQ ID NO: 228793 - DNA, 25 bp, Homo sapien
caacttacaggatacggcaattttc

SEQ ID NO: 228794 - DNA, 25 bp, Homo sapien
taaacgctgaaagatttcatagatc

SEQ ID NO: 228795 - DNA, 25 bp, Homo sapien
gttgcaatagtaaacgctgaaagat

SEQ ID NO: 228796 - DNA, 25 bp, Homo sapien
agtagattgtctaatgttggtctta

SEQ ID NO: 228797 - DNA, 25 bp, Homo sapien
ggaaaatcagtagattgtctaatgt

SEQ ID NO: 228798 - DNA, 25 bp, Homo sapien
gctggaaaatcagtagattgtctaa

SEQ ID NO: 228799 - DNA, 25 bp, Homo sapien
gtctaatgttggtcttaattccaca

SEQ ID NO: 228800 - DNA, 25 bp, Homo sapien
gttgaatgacttatcagccactgat

SEQ ID NO: 228801 - DNA, 25 bp, Homo sapien
tcagccactgatttgactgggtgtg

SEQ ID NO: 228802 - DNA, 25 bp, Homo sapien
aagttgtaagttgaatgacttatca

SEQ ID NO: 228803 - DNA, 25 bp, Homo sapien
gacttatcagccactgatttgactg

SEQ ID NO: 228804 - DNA, 25 bp, Homo sapien
caaagcaacgttattccaggaagtg

SEQ ID NO: 228805 - DNA, 25 bp, Homo sapien
cataagaattccttagatgaagcca

SEQ ID NO: 228806 - DNA, 25 bp, Homo sapien
aatgatttagcctccctttgacacc

SEQ ID NO: 228807 - DNA, 25 bp, Homo sapien
tatctgtataccgacctcctttgcc

SEQ ID NO: 228808 - DNA, 25 bp, Homo sapien
taatgaggaacctgctcttaatggg

SEQ ID NO: 228809 - DNA, 25 bp, Homo sapien
cttaatgggtaagtagtcatctccg

SEQ ID NO: 228810 - DNA, 25 bp, Homo sapien
tcatctccgaagtcagactgggtcc

SEQ ID NO: 228811 - DNA, 25 bp, Homo sapien
gaaatctaaagcgtagtgcattggg

SEQ ID NO: 228812 - DNA, 25 bp, Homo sapien
cacacagacacgaggctgaagagga

SEQ ID NO: 228813 - DNA, 25 bp, Homo sapien
taacagatgcagtcaataagtgctg

SEQ ID NO: 228814 - DNA, 25 bp, Homo sapien
ttcgcagtgaaacgctgagtccaca

SEQ ID NO: 228815 - DNA, 25 bp, Homo sapien
gaaggtggctataggcgcctatccc

SEQ ID NO: 228816 - DNA, 25 bp, Homo sapien
gaatgctttccaggcagcttgggag

SEQ ID NO: 228817 - DNA, 25 bp, Homo sapien
gctagcgaccccgcctgaatgcttt

SEQ ID NO: 228818 - DNA, 25 bp, Homo sapien
ccagcctgagttcttgctagcgacc

SEQ ID NO: 228819 - DNA, 25 bp, Homo sapien
tctggttgttcctgcaggagtgtgt

SEQ ID NO: 228820 - DNA, 25 bp, Homo sapien
gaagtatttgttccgagtccccatc

SEQ ID NO: 228821 - DNA, 25 bp, Homo sapien
tgcatacttcaaaaccagtatttcc

SEQ ID NO: 228822 - DNA, 25 bp, Homo sapien
ttttcttcatacttgctgcatactt

SEQ ID NO: 228823 - DNA, 25 bp, Homo sapien
actcttggttgtgggagacgaattc

SEQ ID NO: 228824 - DNA, 25 bp, Homo sapien
tgttagtgtgaattcgcccaaccta

SEQ ID NO: 228825 - DNA, 25 bp, Homo sapien
caaaaaggcgagcttcttaatgatt

SEQ ID NO: 228826 - DNA, 25 bp, Homo sapien
taacctctgaactaagaggaagtgg

SEQ ID NO: 228827 - DNA, 25 bp, Homo sapien
caacctaaattcctgtgtgcctgga

SEQ ID NO: 228828 - DNA, 25 bp, Homo sapien
tgccatatactagtaagcaaagcaa

SEQ ID NO: 228829 - DNA, 25 bp, Homo sapien
acaatgccatatactagtaagcaaa

SEQ ID NO: 228830 - DNA, 25 bp, Homo sapien
gccatatactagtaagcaaagcaag

SEQ ID NO: 228831 - DNA, 25 bp, Homo sapien
aatgccatatactagtaagcaaagc

SEQ ID NO: 228832 - DNA, 25 bp, Homo sapien
gaatgtttgtctacatagagggccc

SEQ ID NO: 228833 - DNA, 25 bp, Homo sapien
aaatggccaccaagcaagagtttgt

SEQ ID NO: 228834 - DNA, 25 bp, Homo sapien
tgtagactggactgattaaggaacc

SEQ ID NO: 228835 - DNA, 25 bp, Homo sapien
gaacagcaaaaaggattagccccgc

SEQ ID NO: 228836 - DNA, 25 bp, Homo sapien
ggagccaacgtctttattttcaatg

SEQ ID NO: 228837 - DNA, 25 bp, Homo sapien
gctttcttcccaatgtgcaaactgg

SEQ ID NO: 228838 - DNA, 25 bp, Homo sapien
cccaatgtgcaaactggagccaacg

SEQ ID NO: 228839 - DNA, 25 bp, Homo sapien
gcaaactggagccaacgtctttatt

SEQ ID NO: 228840 - DNA, 25 bp, Homo sapien
tgccctatgctaatcaatgcacaga

SEQ ID NO: 228841 - DNA, 25 bp, Homo sapien
gaaagagaggtaacttagtggccca

SEQ ID NO: 228842 - DNA, 25 bp, Homo sapien
tcagctagatggtatgcttgcaaaa

SEQ ID NO: 228843 - DNA, 25 bp, Homo sapien
taaaaatccaggtcctcaccacctg

SEQ ID NO: 228844 - DNA, 25 bp, Homo sapien
tacatgctaattaccggtggcaggt

SEQ ID NO: 228845 - DNA, 25 bp, Homo sapien
aaccctaggtgctacagttccatgg

SEQ ID NO: 228846 - DNA, 25 bp, Homo sapien
tcttctgattgaacccaagttggag

SEQ ID NO: 228847 - DNA, 25 bp, Homo sapien
cgaagttttggttggcatatgcccc

SEQ ID NO: 228848 - DNA, 25 bp, Homo sapien
aagattcataatgccatccttgaga

SEQ ID NO: 228849 - DNA, 25 bp, Homo sapien
agattcataatgccatccttgagat

SEQ ID NO: 228850 - DNA, 25 bp, Homo sapien
taagattcataatgccatccttgag

SEQ ID NO: 228851 - DNA, 25 bp, Homo sapien
attgagagatacaatcagaaaacag

SEQ ID NO: 228852 - DNA, 25 bp, Homo sapien
tgtagaagaagggtctcctatgttg

SEQ ID NO: 228853 - DNA, 25 bp, Homo sapien
ccaacctcattttgcgcagtcaaag

SEQ ID NO: 228854 - DNA, 25 bp, Homo sapien
ttatccacccacacgtaagcaagaa

SEQ ID NO: 228855 - DNA, 25 bp, Homo sapien
tcatgggccaactaatccacacagt

SEQ ID NO: 228856 - DNA, 25 bp, Homo sapien
aagcaatctatttaccggccctaag

SEQ ID NO: 228857 - DNA, 25 bp, Homo sapien
ttatcatattggcatacaacaacat

SEQ ID NO: 228858 - DNA, 25 bp, Homo sapien
catcatcttcactattgaggggctc

SEQ ID NO: 228859 - DNA, 25 bp, Homo sapien
catattggcatacaacaacattttc

SEQ ID NO: 228860 - DNA, 25 bp, Homo sapien
tggcatacaacaacattttctgtgt

SEQ ID NO: 228861 - DNA, 25 bp, Homo sapien
cagatgatgtatccccagttccatc

SEQ ID NO: 228862 - DNA, 25 bp, Homo sapien
atgatgtatccccagttccatcaac

SEQ ID NO: 228863 - DNA, 25 bp, Homo sapien
ttcttcagatgatgtatccccagtt

SEQ ID NO: 228864 - DNA, 25 bp, Homo sapien
ttcagatgatgtatccccagttcca

SEQ ID NO: 228865 - DNA, 25 bp, Homo sapien
tgtctgtggtgaaatccctccagga

SEQ ID NO: 228866 - DNA, 25 bp, Homo sapien
caatggagcttgtgtttgagcaggc

SEQ ID NO: 228867 - DNA, 25 bp, Homo sapien
ggtgctgccactgtcgtaggtataa

SEQ ID NO: 228868 - DNA, 25 bp, Homo sapien
tcctgtaaataagatttgctgaggc

SEQ ID NO: 228869 - DNA, 25 bp, Homo sapien
ctgctgtataacaggagcttgtact

SEQ ID NO: 228870 - DNA, 25 bp, Homo sapien
gctgtataacaggagcttgtactcc

SEQ ID NO: 228871 - DNA, 25 bp, Homo sapien
tgtataacaggagcttgtactccac

SEQ ID NO: 228872 - DNA, 25 bp, Homo sapien
tgctgtataacaggagcttgtactc

SEQ ID NO: 228873 - DNA, 25 bp, Homo sapien
gtagaaccactgactgctgaggctg

SEQ ID NO: 228874 - DNA, 25 bp, Homo sapien
gaaagatatattgggcaccattggc

SEQ ID NO: 228875 - DNA, 25 bp, Homo sapien
ggctgcatttgtggtataacctgtt

SEQ ID NO: 228876 - DNA, 25 bp, Homo sapien
ggtataacctgttgttgtagaacca

SEQ ID NO: 228877 - DNA, 25 bp, Homo sapien
aaaatggttccatcattcctaatta

SEQ ID NO: 228878 - DNA, 25 bp, Homo sapien
taaaatggttccatcattcctaatt

SEQ ID NO: 228879 - DNA, 25 bp, Homo sapien
aaatggttccatcattcctaattac

SEQ ID NO: 228880 - DNA, 25 bp, Homo sapien
ttaaaatggttccatcattcctaat

SEQ ID NO: 228881 - DNA, 25 bp, Homo sapien
gaacaggagtcacacctgcagggag

SEQ ID NO: 228882 - DNA, 25 bp, Homo sapien
cctgcagggagtgctaaggtagcag

SEQ ID NO: 228883 - DNA, 25 bp, Homo sapien
acctgcagggagtgctaaggtagca

SEQ ID NO: 228884 - DNA, 25 bp, Homo sapien
ttagaatctggaacaataacttgtg

SEQ ID NO: 228885 - DNA, 25 bp, Homo sapien
tcatatgctgtatcaacttagaatc

SEQ ID NO: 228886 - DNA, 25 bp, Homo sapien
gctgtatcaacttagaatctggaac

SEQ ID NO: 228887 - DNA, 25 bp, Homo sapien
ggaacaataacttgtggtgctgtgg

SEQ ID NO: 228888 - DNA, 25 bp, Homo sapien
cttgctgtgatgcaggaataagaac

SEQ ID NO: 228889 - DNA, 25 bp, Homo sapien
ggaataagaacctgctgggtctgcg

SEQ ID NO: 228890 - DNA, 25 bp, Homo sapien
tgctgtgatgcaggaataagaacct

SEQ ID NO: 228891 - DNA, 25 bp, Homo sapien
gcaggaataagaacctgctgggtct

SEQ ID NO: 228892 - DNA, 25 bp, Homo sapien
ggctgagcttgctgatgatggtgat

SEQ ID NO: 228893 - DNA, 25 bp, Homo sapien
tctactgccctggactgcattagtt

SEQ ID NO: 228894 - DNA, 25 bp, Homo sapien
tgccctggactgcattagtttgttt

SEQ ID NO: 228895 - DNA, 25 bp, Homo sapien
tactgccctggactgcattagtttg

SEQ ID NO: 228896 - DNA, 25 bp, Homo sapien
taagaaactggccaaaaagtcacaa

SEQ ID NO: 228897 - DNA, 25 bp, Homo sapien
ttaagaaactggccaaaaagtcaca

SEQ ID NO: 228898 - DNA, 25 bp, Homo sapien
tggccaaaaagtcacaaactattcc

SEQ ID NO: 228899 - DNA, 25 bp, Homo sapien
aactggccaaaaagtcacaaactat

SEQ ID NO: 228900 - DNA, 25 bp, Homo sapien
tctctaatggcttactgagaaagca

SEQ ID NO: 228901 - DNA, 25 bp, Homo sapien
tggtaacaagatctatctcactggt

SEQ ID NO: 228902 - DNA, 25 bp, Homo sapien
tggcaggcccagtatttagacttac

SEQ ID NO: 228903 - DNA, 25 bp, Homo sapien
cagtgttacataaagttggtgatca

SEQ ID NO: 228904 - DNA, 25 bp, Homo sapien
tttctaccaaagtatgaacatcttc

SEQ ID NO: 228905 - DNA, 25 bp, Homo sapien
aagtatgaacatcttctgggcagca

SEQ ID NO: 228906 - DNA, 25 bp, Homo sapien
atgaacatcttctgggcagcaactg

SEQ ID NO: 228907 - DNA, 25 bp, Homo sapien
taccaaagtatgaacatcttctggg

SEQ ID NO: 228908 - DNA, 25 bp, Homo sapien
tcatccagaaagatgtctctcacat

SEQ ID NO: 228909 - DNA, 25 bp, Homo sapien
caatcacagatctgtataatttagg

SEQ ID NO: 228910 - DNA, 25 bp, Homo sapien
tctcacatcattaatgacatcttca

SEQ ID NO: 228911 - DNA, 25 bp, Homo sapien
tcaatcacagatctgtataatttag

SEQ ID NO: 228912 - DNA, 25 bp, Homo sapien
accactgtatcttagactttggaga

SEQ ID NO: 228913 - DNA, 25 bp, Homo sapien
agactttggagaatcttatgtccgg

SEQ ID NO: 228914 - DNA, 25 bp, Homo sapien
tcaccactgtatcttagactttgga

SEQ ID NO: 228915 - DNA, 25 bp, Homo sapien
ggagaatcttatgtccgggagtcat

SEQ ID NO: 228916 - DNA, 25 bp, Homo sapien
ctgcccaggtaatgctatgaaacat

SEQ ID NO: 228917 - DNA, 25 bp, Homo sapien
ggatttctcctctactactgcccag

SEQ ID NO: 228918 - DNA, 25 bp, Homo sapien
cccaaggaacaaggtatactgattt

SEQ ID NO: 228919 - DNA, 25 bp, Homo sapien
aatggcaggtcttaaggtcccaagg

SEQ ID NO: 228920 - DNA, 25 bp, Homo sapien
accttttgcttggagatccagacat

SEQ ID NO: 228921 - DNA, 25 bp, Homo sapien
aaaaaccttttgcttggagatccag

SEQ ID NO: 228922 - DNA, 25 bp, Homo sapien
ctctaaaaaccttttgcttggagat

SEQ ID NO: 228923 - DNA, 25 bp, Homo sapien
aaaccttttgcttggagatccagac

SEQ ID NO: 228924 - DNA, 25 bp, Homo sapien
gtaagcggccgcagccatgatggtt

SEQ ID NO: 228925 - DNA, 25 bp, Homo sapien
agtctatattagagagcggcaatgg

SEQ ID NO: 228926 - DNA, 25 bp, Homo sapien
catgatggttagacccgagtcgcca

SEQ ID NO: 228927 - DNA, 25 bp, Homo sapien
gagaggcggtgacgtaggcctgaaa

SEQ ID NO: 228928 - DNA, 25 bp, Homo sapien
cggtccggccgttgctgcagcctga

SEQ ID NO: 228929 - DNA, 25 bp, Homo sapien
cgttgctgcagcctgaacgaagccc

SEQ ID NO: 228930 - DNA, 25 bp, Homo sapien
gccgttgctgcagcctgaacgaagc

SEQ ID NO: 228931 - DNA, 25 bp, Homo sapien
tccggccgttgctgcagcctgaacg

SEQ ID NO: 228932 - DNA, 25 bp, Homo sapien
cggtgtttgtatttgccgagttcgc

SEQ ID NO: 228933 - DNA, 25 bp, Homo sapien
cacggtgtttgtatttgccgagttc

SEQ ID NO: 228934 - DNA, 25 bp, Homo sapien
gtgtttgtatttgccgagttcgcca

SEQ ID NO: 228935 - DNA, 25 bp, Homo sapien
tgtttgtatttgccgagttcgccat

SEQ ID NO: 228936 - DNA, 25 bp, Homo sapien
cacaacacaaacaagagggggcaac

SEQ ID NO: 228937 - DNA, 25 bp, Homo sapien
cggagggtgacccaaatcaccgcaa

SEQ ID NO: 228938 - DNA, 25 bp, Homo sapien
tgacccaaatcaccgcaagattggg

SEQ ID NO: 228939 - DNA, 25 bp, Homo sapien
cagctgaaaacctcgagaatcgcct

SEQ ID NO: 228940 - DNA, 25 bp, Homo sapien
aaccaccaccggtcaccgctccctg

SEQ ID NO: 228941 - DNA, 25 bp, Homo sapien
ccaccaccggtcaccgctccctgcg

SEQ ID NO: 228942 - DNA, 25 bp, Homo sapien
caccaccggtcaccgctccctgcgc

SEQ ID NO: 228943 - DNA, 25 bp, Homo sapien
accaccaccggtcaccgctccctgc

SEQ ID NO: 228944 - DNA, 25 bp, Homo sapien
ctcctttatatagcgagccaacaag

SEQ ID NO: 228945 - DNA, 25 bp, Homo sapien
gcagctccagccgtccggtccgccc

SEQ ID NO: 228946 - DNA, 25 bp, Homo sapien
ctctcctttatatagcgagccaaca

SEQ ID NO: 228947 - DNA, 25 bp, Homo sapien
ttctctcctttatatagcgagccaa

SEQ ID NO: 228948 - DNA, 25 bp, Homo sapien
ctgcgcgagccaccaccgccgccgc

SEQ ID NO: 228949 - DNA, 25 bp, Homo sapien
tgcgcgagccaccaccgccgccgcc

SEQ ID NO: 228950 - DNA, 25 bp, Homo sapien
cgcgagccaccaccgccgccgccgc

SEQ ID NO: 228951 - DNA, 25 bp, Homo sapien
cgagccaccaccgccgccgccgccg

SEQ ID NO: 228952 - DNA, 25 bp, Homo sapien
tggtcccgcgctttaggagctagga

SEQ ID NO: 228953 - DNA, 25 bp, Homo sapien
gaaaagacgggagttctactgacac

SEQ ID NO: 228954 - DNA, 25 bp, Homo sapien
tgcaaagcgttgctggaaaagacgg

SEQ ID NO: 228955 - DNA, 25 bp, Homo sapien
gcgtgatcacgtggttggcacccag

SEQ ID NO: 228956 - DNA, 25 bp, Homo sapien
cttgtgatccgcctgcctcagcctc

SEQ ID NO: 228957 - DNA, 25 bp, Homo sapien
cgccaggctaattttctgtgttttt

SEQ ID NO: 228958 - DNA, 25 bp, Homo sapien
acgccaggctaattttctgtgtttt

SEQ ID NO: 228959 - DNA, 25 bp, Homo sapien
ttgtgatccgcctgcctcagcctcc

SEQ ID NO: 228960 - DNA, 25 bp, Homo sapien
catcgaggagttcccttagcaaggt

SEQ ID NO: 228961 - DNA, 25 bp, Homo sapien
caacaaaggttcaaacatcgaggag

SEQ ID NO: 228962 - DNA, 25 bp, Homo sapien
gtaaccacaacaagctagtacagag

SEQ ID NO: 228963 - DNA, 25 bp, Homo sapien
tggatggaccactgggtgtgtggca

SEQ ID NO: 228964 - DNA, 25 bp, Homo sapien
cagatttgaacagaagaatggccac

SEQ ID NO: 228965 - DNA, 25 bp, Homo sapien
aaccagatttgaacagaagaatggc

SEQ ID NO: 228966 - DNA, 25 bp, Homo sapien
ttaaccagatttgaacagaagaatg

SEQ ID NO: 228967 - DNA, 25 bp, Homo sapien
ccagatttgaacagaagaatggcca

SEQ ID NO: 228968 - DNA, 25 bp, Homo sapien
ccaggtagaagtagatgaagtgttt

SEQ ID NO: 228969 - DNA, 25 bp, Homo sapien
caggtagaagtagatgaagtgtttg

SEQ ID NO: 228970 - DNA, 25 bp, Homo sapien
cctgaggagcgcactccactgagtt

SEQ ID NO: 228971 - DNA, 25 bp, Homo sapien
ctccactgagttctgttgcatctcc

SEQ ID NO: 228972 - DNA, 25 bp, Homo sapien
gcagtgttcttctctatgttgtatt

SEQ ID NO: 228973 - DNA, 25 bp, Homo sapien
tatgagccgcagtgttcttctctat

SEQ ID NO: 228974 - DNA, 25 bp, Homo sapien
agaaaggggctggccaactccaacg

SEQ ID NO: 228975 - DNA, 25 bp, Homo sapien
ggagaaaggggctggccaactccaa

SEQ ID NO: 228976 - DNA, 25 bp, Homo sapien
gagaaaggggctggccaactccaac

SEQ ID NO: 228977 - DNA, 25 bp, Homo sapien
gcacagctcaggcccggctggagct

SEQ ID NO: 228978 - DNA, 25 bp, Homo sapien
cagcacagctcaggcccggctggag

SEQ ID NO: 228979 - DNA, 25 bp, Homo sapien
ctgggaggtgccagcacagctcagg

SEQ ID NO: 228980 - DNA, 25 bp, Homo sapien
gccagcacagctcaggcccggctgg

SEQ ID NO: 228981 - DNA, 25 bp, Homo sapien
tatgttctggtgtggagctttgtca

SEQ ID NO: 228982 - DNA, 25 bp, Homo sapien
ggctctgacggtagatttgctatca

SEQ ID NO: 228983 - DNA, 25 bp, Homo sapien
aagtgtgttgctcttggctctgacg

SEQ ID NO: 228984 - DNA, 25 bp, Homo sapien
gctcttgatctacctgcagtattct

SEQ ID NO: 228985 - DNA, 25 bp, Homo sapien
gatgcttattgttccgaaggtcaac

SEQ ID NO: 228986 - DNA, 25 bp, Homo sapien
gactagttaaaaggaaggctcttgc

SEQ ID NO: 228987 - DNA, 25 bp, Homo sapien
cctgaggtgggattccagaggtaac

SEQ ID NO: 228988 - DNA, 25 bp, Homo sapien
gaacattccccgatggaagcactgt

SEQ ID NO: 228989 - DNA, 25 bp, Homo sapien
gcagttgtcattcccttattagaag

SEQ ID NO: 228990 - DNA, 25 bp, Homo sapien
ttaggtgctaatgatacgactggtg

SEQ ID NO: 228991 - DNA, 25 bp, Homo sapien
tcataccccgatctcagagggaggg

SEQ ID NO: 228992 - DNA, 25 bp, Homo sapien
cctgacgtacagcttctaaaaccct

SEQ ID NO: 228993 - DNA, 25 bp, Homo sapien
tcagaactgttgcattgaggaaccg

SEQ ID NO: 228994 - DNA, 25 bp, Homo sapien
gaattgcctgttcactccaggtgga

SEQ ID NO: 228995 - DNA, 25 bp, Homo sapien
gcaacagtagggagaagactttcca

SEQ ID NO: 228996 - DNA, 25 bp, Homo sapien
gaactaagcccttcaacccgtgaga

SEQ ID NO: 228997 - DNA, 25 bp, Homo sapien
tcaagttattttgtctgccattcca

SEQ ID NO: 228998 - DNA, 25 bp, Homo sapien
ttgtctgccattccactcagtgggt

SEQ ID NO: 228999 - DNA, 25 bp, Homo sapien
ttttgtctgccattccactcagtgg

SEQ ID NO: 229000 - DNA, 25 bp, Homo sapien
tattttgtctgccattccactcagt

SEQ ID NO: 229001 - DNA, 25 bp, Homo sapien
caagaactggaacacatcgttcagg

SEQ ID NO: 229002 - DNA, 25 bp, Homo sapien
gaacacatcgttcaggtggctggga

SEQ ID NO: 229003 - DNA, 25 bp, Homo sapien
aaccaagaactggaacacatcgttc

SEQ ID NO: 229004 - DNA, 25 bp, Homo sapien
aactggaacacatcgttcaggtggc

SEQ ID NO: 229005 - DNA, 25 bp, Homo sapien
ttcagtgttgccgaaaaaataccgc

SEQ ID NO: 229006 - DNA, 25 bp, Homo sapien
tagcagcaggtacaatactagggct

SEQ ID NO: 229007 - DNA, 25 bp, Homo sapien
taactctaggagaagctcatccccg

SEQ ID NO: 229008 - DNA, 25 bp, Homo sapien
cgttaaggctcataccacggagtat

SEQ ID NO: 229009 - DNA, 25 bp, Homo sapien
agtttgcatattttgggctgaagcc

SEQ ID NO: 229010 - DNA, 25 bp, Homo sapien
gtttgcatattttgggctgaagcca

SEQ ID NO: 229011 - DNA, 25 bp, Homo sapien
tttgcatattttgggctgaagccat

SEQ ID NO: 229012 - DNA, 25 bp, Homo sapien
gatcgcacaggcctttggacactaa

SEQ ID NO: 229013 - DNA, 25 bp, Homo sapien
gatcaaaaccatctgtctgtaggca

SEQ ID NO: 229014 - DNA, 25 bp, Homo sapien
tccaaactaggcagagatcgcacag

SEQ ID NO: 229015 - DNA, 25 bp, Homo sapien
catttggtcacagagtagcctttgc

SEQ ID NO: 229016 - DNA, 25 bp, Homo sapien
cagttttccgaactctccattgagg

SEQ ID NO: 229017 - DNA, 25 bp, Homo sapien
tctgcaacaaatcccgttcgtttta

SEQ ID NO: 229018 - DNA, 25 bp, Homo sapien
atcccgttcgttttatagaatacag

SEQ ID NO: 229019 - DNA, 25 bp, Homo sapien
tcttccaactctcaccaaacaccac

SEQ ID NO: 229020 - DNA, 25 bp, Homo sapien
ttttcatagctcagaaaaggatata

SEQ ID NO: 229021 - DNA, 25 bp, Homo sapien
atataatcagtagaacaactaaaaa

SEQ ID NO: 229022 - DNA, 25 bp, Homo sapien
gggttgctgatccaaagcacatgga

SEQ ID NO: 229023 - DNA, 25 bp, Homo sapien
cacatggaggcgcaacagtgcttaa

SEQ ID NO: 229024 - DNA, 25 bp, Homo sapien
tgttgggacctgactatacatctgc

SEQ ID NO: 229025 - DNA, 25 bp, Homo sapien
taacacgagcaagcaggaagaggat

SEQ ID NO: 229026 - DNA, 25 bp, Homo sapien
tatcatccccagtacttggagggtt

SEQ ID NO: 229027 - DNA, 25 bp, Homo sapien
cctatcatccccagtacttggaggg

SEQ ID NO: 229028 - DNA, 25 bp, Homo sapien
ttatcctatcatccccagtacttgg

SEQ ID NO: 229029 - DNA, 25 bp, Homo sapien
tcatccccagtacttggagggttag

SEQ ID NO: 229030 - DNA, 25 bp, Homo sapien
catctattttggagacctgtctgtg

SEQ ID NO: 229031 - DNA, 25 bp, Homo sapien
cttcatgctcacaccattgttctga

SEQ ID NO: 229032 - DNA, 25 bp, Homo sapien
gatagatgatgccagtggaacttcc

SEQ ID NO: 229033 - DNA, 25 bp, Homo sapien
tccaaagaagcattccacctgatct

SEQ ID NO: 229034 - DNA, 25 bp, Homo sapien
ggatttggaaggttgtctgtttctg

SEQ ID NO: 229035 - DNA, 25 bp, Homo sapien
gaggatttggaaggttgtctgtttc

SEQ ID NO: 229036 - DNA, 25 bp, Homo sapien
aatatagaggatttggaaggttgtc

SEQ ID NO: 229037 - DNA, 25 bp, Homo sapien
tgcaatatagaggatttggaaggtt

SEQ ID NO: 229038 - DNA, 25 bp, Homo sapien
cagcagatttgctaaggcacactag

SEQ ID NO: 229039 - DNA, 25 bp, Homo sapien
aatcctcaatgtcctcgtgtctagc

SEQ ID NO: 229040 - DNA, 25 bp, Homo sapien
gaagctggctgctaacacagcacct

SEQ ID NO: 229041 - DNA, 25 bp, Homo sapien
gcacctgaccagagtagacatttga

SEQ ID NO: 229042 - DNA, 25 bp, Homo sapien
catctccttcacgtttaattcctta

SEQ ID NO: 229043 - DNA, 25 bp, Homo sapien
tacatttgtggttgccttatacatc

SEQ ID NO: 229044 - DNA, 25 bp, Homo sapien
tttctacatttgtggttgccttata

SEQ ID NO: 229045 - DNA, 25 bp, Homo sapien
tttgtggttgccttatacatctcct

SEQ ID NO: 229046 - DNA, 25 bp, Homo sapien
tgtaaagtcaaaaagcaggccctag

SEQ ID NO: 229047 - DNA, 25 bp, Homo sapien
taaatgcaaagtaacggtcagcggt

SEQ ID NO: 229048 - DNA, 25 bp, Homo sapien
tcaatcaccgtgactatggacagca

SEQ ID NO: 229049 - DNA, 25 bp, Homo sapien
taaagttaccactcgaactgggagc

SEQ ID NO: 229050 - DNA, 25 bp, Homo sapien
gaacctcgtgctttaggcatgacca

SEQ ID NO: 229051 - DNA, 25 bp, Homo sapien
tacagtaagctccaacagtcaggtg

SEQ ID NO: 229052 - DNA, 25 bp, Homo sapien
ggaagacaccctatcatgactctgg

SEQ ID NO: 229053 - DNA, 25 bp, Homo sapien
taaacgatctagagccaggagggaa

SEQ ID NO: 229054 - DNA, 25 bp, Homo sapien
tctccttcaaagtccggcttcaaac

SEQ ID NO: 229055 - DNA, 25 bp, Homo sapien
catctccttcaaagtccggcttcaa

SEQ ID NO: 229056 - DNA, 25 bp, Homo sapien
ccatttcatctccttcaaagtccgg

SEQ ID NO: 229057 - DNA, 25 bp, Homo sapien
tttcatctccttcaaagtccggctt

SEQ ID NO: 229058 - DNA, 25 bp, Homo sapien
ctgaagcatatgctttgggatagca

SEQ ID NO: 229059 - DNA, 25 bp, Homo sapien
caagctcactactctgtgacataaa

SEQ ID NO: 229060 - DNA, 25 bp, Homo sapien
gttatagcccagtacccaggtcatg

SEQ ID NO: 229061 - DNA, 25 bp, Homo sapien
caggtccacttcatcaactctaact

SEQ ID NO: 229062 - DNA, 25 bp, Homo sapien
tttctctcatccactagccagatta

SEQ ID NO: 229063 - DNA, 25 bp, Homo sapien
tcatccactagccagattatgcatt

SEQ ID NO: 229064 - DNA, 25 bp, Homo sapien
aacctttctctcatccactagccag

SEQ ID NO: 229065 - DNA, 25 bp, Homo sapien
ttttccaacctttctctcatccact

SEQ ID NO: 229066 - DNA, 25 bp, Homo sapien
tatgtatggtgaacttcctctaagg

SEQ ID NO: 229067 - DNA, 25 bp, Homo sapien
acagctatgtatggtgaacttcctc

SEQ ID NO: 229068 - DNA, 25 bp, Homo sapien
gctatgtatggtgaacttcctctaa

SEQ ID NO: 229069 - DNA, 25 bp, Homo sapien
ccacagctatgtatggtgaacttcc

SEQ ID NO: 229070 - DNA, 25 bp, Homo sapien
ttaccaggcgaacatagtaagcatg

SEQ ID NO: 229071 - DNA, 25 bp, Homo sapien
taccaggcgaacatagtaagcatgg

SEQ ID NO: 229072 - DNA, 25 bp, Homo sapien
aagcattagccagatgcttcccaag

SEQ ID NO: 229073 - DNA, 25 bp, Homo sapien
gaagcattagccagatgcttcccaa

SEQ ID NO: 229074 - DNA, 25 bp, Homo sapien
ggaagcattagccagatgcttccca

SEQ ID NO: 229075 - DNA, 25 bp, Homo sapien
gaacaaatggagttggaagcattag

SEQ ID NO: 229076 - DNA, 25 bp, Homo sapien
tgtagtgtgcagaataattgaccca

SEQ ID NO: 229077 - DNA, 25 bp, Homo sapien
gtagtgtgcagaataattgacccac

SEQ ID NO: 229078 - DNA, 25 bp, Homo sapien
ctgtagtgtgcagaataattgaccc

SEQ ID NO: 229079 - DNA, 25 bp, Homo sapien
tgtcttctacagagatagatctcac

SEQ ID NO: 229080 - DNA, 25 bp, Homo sapien
cagtcttgtcttctacagagataga

SEQ ID NO: 229081 - DNA, 25 bp, Homo sapien
ttcctgacgtcagtcttgtcttcta

SEQ ID NO: 229082 - DNA, 25 bp, Homo sapien
tgacgtcagtcttgtcttctacaga

SEQ ID NO: 229083 - DNA, 25 bp, Homo sapien
caaaagaaacagtgtgggtgaccgg

SEQ ID NO: 229084 - DNA, 25 bp, Homo sapien
cgtgattggcaaatctggaaggcac

SEQ ID NO: 229085 - DNA, 25 bp, Homo sapien
aagttgtgggcatgctgaactcgac

SEQ ID NO: 229086 - DNA, 25 bp, Homo sapien
acttcccggtcagagccgagttcaa

SEQ ID NO: 229087 - DNA, 25 bp, Homo sapien
gggctgtctgaacacctagacagca

SEQ ID NO: 229088 - DNA, 25 bp, Homo sapien
ggaaagggctattactgaaagataa

SEQ ID NO: 229089 - DNA, 25 bp, Homo sapien
aggaaagggctattactgaaagata

SEQ ID NO: 229090 - DNA, 25 bp, Homo sapien
ctgaacacctagacagcagagccca

SEQ ID NO: 229091 - DNA, 25 bp, Homo sapien
aatggaactgttttgggagcgcctc

SEQ ID NO: 229092 - DNA, 25 bp, Homo sapien
tccaggcgggtgagcatctagttca

SEQ ID NO: 229093 - DNA, 25 bp, Homo sapien
gaatggtttttctaggccctgctca

SEQ ID NO: 229094 - DNA, 25 bp, Homo sapien
aagtcatcgtaattggtggtgccca

SEQ ID NO: 229095 - DNA, 25 bp, Homo sapien
atcttcttgaagcgaggaggaattg

SEQ ID NO: 229096 - DNA, 25 bp, Homo sapien
tcatcttcttgaagcgaggaggaat

SEQ ID NO: 229097 - DNA, 25 bp, Homo sapien
tcttcttgaagcgaggaggaattgt

SEQ ID NO: 229098 - DNA, 25 bp, Homo sapien
catcttcttgaagcgaggaggaatt

SEQ ID NO: 229099 - DNA, 25 bp, Homo sapien
aaaaggagaacatatgagctactgt

SEQ ID NO: 229100 - DNA, 25 bp, Homo sapien
agaacatatgagctactgttcaggg

SEQ ID NO: 229101 - DNA, 25 bp, Homo sapien
ttcaggggctctagaggtaaggaaa

SEQ ID NO: 229102 - DNA, 25 bp, Homo sapien
actgttcaggggctctagaggtaag

SEQ ID NO: 229103 - DNA, 25 bp, Homo sapien
ggttatcctttttgtcttggagctc

SEQ ID NO: 229104 - DNA, 25 bp, Homo sapien
ccctggcatcagggttatccttttt

SEQ ID NO: 229105 - DNA, 25 bp, Homo sapien
tggcatcagggttatcctttttgtc

SEQ ID NO: 229106 - DNA, 25 bp, Homo sapien
ttatcctttttgtcttggagctcac

SEQ ID NO: 229107 - DNA, 25 bp, Homo sapien
ttggagggcggctttctgccaaagc

SEQ ID NO: 229108 - DNA, 25 bp, Homo sapien
caaagctgtttacacttgccaccaa

SEQ ID NO: 229109 - DNA, 25 bp, Homo sapien
tacacttgccaccaaaggattccct

SEQ ID NO: 229110 - DNA, 25 bp, Homo sapien
caaaggattcccttctgttgggaat

SEQ ID NO: 229111 - DNA, 25 bp, Homo sapien
tgcctctgttttaccattgcccact

SEQ ID NO: 229112 - DNA, 25 bp, Homo sapien
tgttttaccattgcccacttcccca

SEQ ID NO: 229113 - DNA, 25 bp, Homo sapien
tctctctggttctaaacttctgcct

SEQ ID NO: 229114 - DNA, 25 bp, Homo sapien
gtggtgaccaagaatatcttttctc

SEQ ID NO: 229115 - DNA, 25 bp, Homo sapien
actcattaggactgccctctgccac

SEQ ID NO: 229116 - DNA, 25 bp, Homo sapien
gaccaggacaggtgactcattagga

SEQ ID NO: 229117 - DNA, 25 bp, Homo sapien
gtgaccaggacaggtgactcattag

SEQ ID NO: 229118 - DNA, 25 bp, Homo sapien
gactcattaggactgccctctgcca

SEQ ID NO: 229119 - DNA, 25 bp, Homo sapien
acatcctcactattcacctgcccac

SEQ ID NO: 229120 - DNA, 25 bp, Homo sapien
ctccacatcctcactattcacctgc

SEQ ID NO: 229121 - DNA, 25 bp, Homo sapien
tcatgtgcacctccacatcctcact

SEQ ID NO: 229122 - DNA, 25 bp, Homo sapien
cacatcctcactattcacctgccca

SEQ ID NO: 229123 - DNA, 25 bp, Homo sapien
ttcctggatgttagtgaagggctag

SEQ ID NO: 229124 - DNA, 25 bp, Homo sapien
ttagtgaagggctaggctgtatcag

SEQ ID NO: 229125 - DNA, 25 bp, Homo sapien
gcaacaacgcaggatgcttgcaaga

SEQ ID NO: 229126 - DNA, 25 bp, Homo sapien
ctttgaaggggtcaggaacaattag

SEQ ID NO: 229127 - DNA, 25 bp, Homo sapien
tcattttgaaccttagtgatgagaa

SEQ ID NO: 229128 - DNA, 25 bp, Homo sapien
ttcacagtcctgaaacagttataat

SEQ ID NO: 229129 - DNA, 25 bp, Homo sapien
tctaccagattcaaagtctgatcat

SEQ ID NO: 229130 - DNA, 25 bp, Homo sapien
cagttataatagtgccattctacca

SEQ ID NO: 229131 - DNA, 25 bp, Homo sapien
tgatatgggcaaagaaagagagctg

SEQ ID NO: 229132 - DNA, 25 bp, Homo sapien
ctggtgatatgggcaaagaaagaga

SEQ ID NO: 229133 - DNA, 25 bp, Homo sapien
aaagaaagagagctgagatctcttg

SEQ ID NO: 229134 - DNA, 25 bp, Homo sapien
agaaagagagctgagatctcttgca

SEQ ID NO: 229135 - DNA, 25 bp, Homo sapien
tggactttccagcaatgacactgac

SEQ ID NO: 229136 - DNA, 25 bp, Homo sapien
caagtactgcaagctgaaaggatcc

SEQ ID NO: 229137 - DNA, 25 bp, Homo sapien
tagctcatgtatgcagtaggcctgt

SEQ ID NO: 229138 - DNA, 25 bp, Homo sapien
cagcatcacccacaggaaggttagg

SEQ ID NO: 229139 - DNA, 25 bp, Homo sapien
tgagtcttaaaggtgccaaggttcc

SEQ ID NO: 229140 - DNA, 25 bp, Homo sapien
tctatctgtactcttgggcagctgc

SEQ ID NO: 229141 - DNA, 25 bp, Homo sapien
caactaggctactcatgggactgca

SEQ ID NO: 229142 - DNA, 25 bp, Homo sapien
tccaagaccataatgtgagtgaccc

SEQ ID NO: 229143 - DNA, 25 bp, Homo sapien
tgcccatactctcttatctacacct

SEQ ID NO: 229144 - DNA, 25 bp, Homo sapien
ctgcccatactctcttatctacacc

SEQ ID NO: 229145 - DNA, 25 bp, Homo sapien
gcccatactctcttatctacacctg

SEQ ID NO: 229146 - DNA, 25 bp, Homo sapien
cccatactctcttatctacacctgt

SEQ ID NO: 229147 - DNA, 25 bp, Homo sapien
ggacaggtctctgcgatgtctcttc

SEQ ID NO: 229148 - DNA, 25 bp, Homo sapien
caggacaggtctctgcgatgtctct

SEQ ID NO: 229149 - DNA, 25 bp, Homo sapien
tcaggacaggtctctgcgatgtctc

SEQ ID NO: 229150 - DNA, 25 bp, Homo sapien
gttcaggacaggtctctgcgatgtc

SEQ ID NO: 229151 - DNA, 25 bp, Homo sapien
tcgccggggttctggctcctcttgg

SEQ ID NO: 229152 - DNA, 25 bp, Homo sapien
gcagaggccccctccggaccctcgc

SEQ ID NO: 229153 - DNA, 25 bp, Homo sapien
ccctcgccggggttctggctcctct

SEQ ID NO: 229154 - DNA, 25 bp, Homo sapien
cattgggagcagaggccccctccgg

SEQ ID NO: 229155 - DNA, 25 bp, Homo sapien
tgcgggtggaggtatgctccgagca

SEQ ID NO: 229156 - DNA, 25 bp, Homo sapien
ggtgcgggtggaggtatgctccgag

SEQ ID NO: 229157 - DNA, 25 bp, Homo sapien
gcgggtggaggtatgctccgagcat

SEQ ID NO: 229158 - DNA, 25 bp, Homo sapien
gtgcgggtggaggtatgctccgagc

SEQ ID NO: 229159 - DNA, 25 bp, Homo sapien
agcaaggcacagctgaatcttgcca

SEQ ID NO: 229160 - DNA, 25 bp, Homo sapien
gagcacatgatttagcacttaattg

SEQ ID NO: 229161 - DNA, 25 bp, Homo sapien
tacaacattgctcaattgttcagca

SEQ ID NO: 229162 - DNA, 25 bp, Homo sapien
cacttaattggtggctaattattgc

SEQ ID NO: 229163 - DNA, 25 bp, Homo sapien
cgttggacttgggttaaaagctgca

SEQ ID NO: 229164 - DNA, 25 bp, Homo sapien
tctccatgcagagcagctaattgag

SEQ ID NO: 229165 - DNA, 25 bp, Homo sapien
ctaactgctgccaactactgtggga

SEQ ID NO: 229166 - DNA, 25 bp, Homo sapien
gagacctatgttgaagccgttggac

SEQ ID NO: 229167 - DNA, 25 bp, Homo sapien
ttagtttattgatcttcctgtgaaa

SEQ ID NO: 229168 - DNA, 25 bp, Homo sapien
agtttattgatcttcctgtgaaaaa

SEQ ID NO: 229169 - DNA, 25 bp, Homo sapien
ttttagtttattgatcttcctgtga

SEQ ID NO: 229170 - DNA, 25 bp, Homo sapien
tagtttattgatcttcctgtgaaaa

SEQ ID NO: 229171 - DNA, 25 bp, Homo sapien
tttaccccttcagctgtgatccaat

SEQ ID NO: 229172 - DNA, 25 bp, Homo sapien
taccccttcagctgtgatccaatct

SEQ ID NO: 229173 - DNA, 25 bp, Homo sapien
tccaatctccacagctcactgctag

SEQ ID NO: 229174 - DNA, 25 bp, Homo sapien
aatctccacagctcactgctagaca

SEQ ID NO: 229175 - DNA, 25 bp, Homo sapien
ttagcgacaccaactttggcctttg

SEQ ID NO: 229176 - DNA, 25 bp, Homo sapien
tagcgacaccaactttggcctttgc

SEQ ID NO: 229177 - DNA, 25 bp, Homo sapien
gcgacaccaactttggcctttgcag

SEQ ID NO: 229178 - DNA, 25 bp, Homo sapien
catttctttttagcgacaccaactt

SEQ ID NO: 229179 - DNA, 25 bp, Homo sapien
tgtccctcttgttgctttcttgagt

SEQ ID NO: 229180 - DNA, 25 bp, Homo sapien
tcttgtgtccctcttgttgctttct

SEQ ID NO: 229181 - DNA, 25 bp, Homo sapien
tctgttcttgtgtccctcttgttgc

SEQ ID NO: 229182 - DNA, 25 bp, Homo sapien
ctcattctgttcttgtgtccctctt

SEQ ID NO: 229183 - DNA, 25 bp, Homo sapien
aagtctatgtttggattcatatttc

SEQ ID NO: 229184 - DNA, 25 bp, Homo sapien
tctttgcataatccaagaaatcata

SEQ ID NO: 229185 - DNA, 25 bp, Homo sapien
gtctatgtttggattcatatttctt

SEQ ID NO: 229186 - DNA, 25 bp, Homo sapien
caccaaaatgagttctgaatccaag

SEQ ID NO: 229187 - DNA, 25 bp, Homo sapien
tctgtcttaggtacggtactgttgc

SEQ ID NO: 229188 - DNA, 25 bp, Homo sapien
atttctgtcttaggtacggtactgt

SEQ ID NO: 229189 - DNA, 25 bp, Homo sapien
tgctagtttttcccgaatttctgtc

SEQ ID NO: 229190 - DNA, 25 bp, Homo sapien
aatttctgtcttaggtacggtactg

SEQ ID NO: 229191 - DNA, 25 bp, Homo sapien
tggcggtctatcctcagacagccag

SEQ ID NO: 229192 - DNA, 25 bp, Homo sapien
tagttcagatagttaccatgtcatt

SEQ ID NO: 229193 - DNA, 25 bp, Homo sapien
atgtcattcatgatggcggtctatc

SEQ ID NO: 229194 - DNA, 25 bp, Homo sapien
aactttctagttcagatagttacca

SEQ ID NO: 229195 - DNA, 25 bp, Homo sapien
cagagctccaattaactcctgggat

SEQ ID NO: 229196 - DNA, 25 bp, Homo sapien
tcactgctggaaaaagggcctcaaa

SEQ ID NO: 229197 - DNA, 25 bp, Homo sapien
tgaatcctatttccgggaggtcaca

SEQ ID NO: 229198 - DNA, 25 bp, Homo sapien
gaacactagcaattgagaaggcaca

SEQ ID NO: 229199 - DNA, 25 bp, Homo sapien
ggagtcccgggtacatgaaccatgg

SEQ ID NO: 229200 - DNA, 25 bp, Homo sapien
gccagaacagagtccaagccagggt

SEQ ID NO: 229201 - DNA, 25 bp, Homo sapien
caacctgtgaggcagtaatgggtgg

SEQ ID NO: 229202 - DNA, 25 bp, Homo sapien
gggacaagtgaagccagagagcgcc

SEQ ID NO: 229203 - DNA, 25 bp, Homo sapien
gctcagcagcagtaaattctatcag

SEQ ID NO: 229204 - DNA, 25 bp, Homo sapien
tccaatgagcatccttggtactgcc

SEQ ID NO: 229205 - DNA, 25 bp, Homo sapien
tatgatgtttcgtccctttgaccca

SEQ ID NO: 229206 - DNA, 25 bp, Homo sapien
gacatcttgttgacagccctgtttg

SEQ ID NO: 229207 - DNA, 25 bp, Homo sapien
agcacttgatgtccactgatacttt

SEQ ID NO: 229208 - DNA, 25 bp, Homo sapien
gcacttgatgtccactgatactttg

SEQ ID NO: 229209 - DNA, 25 bp, Homo sapien
gagcacttgatgtccactgatactt

SEQ ID NO: 229210 - DNA, 25 bp, Homo sapien
ccactctggtttggagctctatgag

SEQ ID NO: 229211 - DNA, 25 bp, Homo sapien
ccctccactctggtttggagctcta

SEQ ID NO: 229212 - DNA, 25 bp, Homo sapien
tgcaaatctgggccctccactctgg

SEQ ID NO: 229213 - DNA, 25 bp, Homo sapien
tctgggccctccactctggtttgga

SEQ ID NO: 229214 - DNA, 25 bp, Homo sapien
tacgaacatccaaagctaggactgc

SEQ ID NO: 229215 - DNA, 25 bp, Homo sapien
cagctgctctcagaagtcagagggc

SEQ ID NO: 229216 - DNA, 25 bp, Homo sapien
tcttcagaatgggtggtccagctgc

SEQ ID NO: 229217 - DNA, 25 bp, Homo sapien
tgagctgcagatctgtatacgaaca

SEQ ID NO: 229218 - DNA, 25 bp, Homo sapien
tcaggaacactattggctaaaggac

SEQ ID NO: 229219 - DNA, 25 bp, Homo sapien
tgctatattcttcccggtacctggt

SEQ ID NO: 229220 - DNA, 25 bp, Homo sapien
cagccttggctttgagagaacagta

SEQ ID NO: 229221 - DNA, 25 bp, Homo sapien
gcaggcatttgcagacatgttctaa

SEQ ID NO: 229222 - DNA, 25 bp, Homo sapien
tcactgaaaagcatccctgctgacc

SEQ ID NO: 229223 - DNA, 25 bp, Homo sapien
actgaaaagcatccctgctgaccac

SEQ ID NO: 229224 - DNA, 25 bp, Homo sapien
tgaaaagcatccctgctgaccacaa

SEQ ID NO: 229225 - DNA, 25 bp, Homo sapien
gaaaagcatccctgctgaccacaaa

SEQ ID NO: 229226 - DNA, 25 bp, Homo sapien
cagctgtttcctgatgaggtggaga

SEQ ID NO: 229227 - DNA, 25 bp, Homo sapien
ctcagctgtttcctgatgaggtgga

SEQ ID NO: 229228 - DNA, 25 bp, Homo sapien
ctgtttcctgatgaggtggagatgt

SEQ ID NO: 229229 - DNA, 25 bp, Homo sapien
tttcctgatgaggtggagatgtgct

SEQ ID NO: 229230 - DNA, 25 bp, Homo sapien
tcttttcagaggagtcatcctgctc

SEQ ID NO: 229231 - DNA, 25 bp, Homo sapien
cctgctccgagtgggaatggtcttg

SEQ ID NO: 229232 - DNA, 25 bp, Homo sapien
tgtcatcttcaaactgaacccagtt

SEQ ID NO: 229233 - DNA, 25 bp, Homo sapien
cacatggttctccccggaggagctc

SEQ ID NO: 229234 - DNA, 25 bp, Homo sapien
aagatgacagtcctgggaggtgctc

SEQ ID NO: 229235 - DNA, 25 bp, Homo sapien
cctgggaggtgctcttccgtgcccc

SEQ ID NO: 229236 - DNA, 25 bp, Homo sapien
acagtcctgggaggtgctcttccgt

SEQ ID NO: 229237 - DNA, 25 bp, Homo sapien
tgacagtcctgggaggtgctcttcc

SEQ ID NO: 229238 - DNA, 25 bp, Homo sapien
tctcccatcactagccaaccggtcc

SEQ ID NO: 229239 - DNA, 25 bp, Homo sapien
tatacatgtgctgaaattcatcagc

SEQ ID NO: 229240 - DNA, 25 bp, Homo sapien
tgtatacatgtgctgaaattcatca

SEQ ID NO: 229241 - DNA, 25 bp, Homo sapien
actatatcctgattatggtggtaga

SEQ ID NO: 229242 - DNA, 25 bp, Homo sapien
ttggagagcatacctgtcgactcac

SEQ ID NO: 229243 - DNA, 25 bp, Homo sapien
tatcactcatccctggtgcaacagg

SEQ ID NO: 229244 - DNA, 25 bp, Homo sapien
tcaaggatgaccgtactgagctctt

SEQ ID NO: 229245 - DNA, 25 bp, Homo sapien
acggtgggatgacttcagttggcac

SEQ ID NO: 229246 - DNA, 25 bp, Homo sapien
gcgagtgggcaggaaagggtggctc

SEQ ID NO: 229247 - DNA, 25 bp, Homo sapien
gtgggcaggaaagggtggctcttca

SEQ ID NO: 229248 - DNA, 25 bp, Homo sapien
agtgggcaggaaagggtggctcttc

SEQ ID NO: 229249 - DNA, 25 bp, Homo sapien
cctgcgagtgggcaggaaagggtgg

SEQ ID NO: 229250 - DNA, 25 bp, Homo sapien
gtggcaatcacatggtccaaagtcg

SEQ ID NO: 229251 - DNA, 25 bp, Homo sapien
caatcacatggtccaaagtcgtcat

SEQ ID NO: 229252 - DNA, 25 bp, Homo sapien
tctgactggtgggtggcaatcacat

SEQ ID NO: 229253 - DNA, 25 bp, Homo sapien
gtgggtggcaatcacatggtccaaa

SEQ ID NO: 229254 - DNA, 25 bp, Homo sapien
tcttgccgttggttaatctgccagg

SEQ ID NO: 229255 - DNA, 25 bp, Homo sapien
tctgttctaggtgtcttgccaaggg

SEQ ID NO: 229256 - DNA, 25 bp, Homo sapien
ttgccaagggcagtactcagaatgt

SEQ ID NO: 229257 - DNA, 25 bp, Homo sapien
tcagaatgtagacagatcagcctct

SEQ ID NO: 229258 - DNA, 25 bp, Homo sapien
tctgttcaaatctggttaaaagcat

SEQ ID NO: 229259 - DNA, 25 bp, Homo sapien
tcttctgttcaaatctggttaaaag

SEQ ID NO: 229260 - DNA, 25 bp, Homo sapien
cttctgttcaaatctggttaaaagc

SEQ ID NO: 229261 - DNA, 25 bp, Homo sapien
ttctgttcaaatctggttaaaagca

SEQ ID NO: 229262 - DNA, 25 bp, Homo sapien
tgctgcatccacgctctagagacca

SEQ ID NO: 229263 - DNA, 25 bp, Homo sapien
gctctagagaccacctgatgcatag

SEQ ID NO: 229264 - DNA, 25 bp, Homo sapien
catagacaaggacaggggatgcatg

SEQ ID NO: 229265 - DNA, 25 bp, Homo sapien
tgatgcatagtgttcttccctcttc

SEQ ID NO: 229266 - DNA, 25 bp, Homo sapien
tgggctctcatctcagtggctaaga

SEQ ID NO: 229267 - DNA, 25 bp, Homo sapien
tagaaatttcccaccatgtatgcct

SEQ ID NO: 229268 - DNA, 25 bp, Homo sapien
taaggcattccttatagtgggagga

SEQ ID NO: 229269 - DNA, 25 bp, Homo sapien
ttggtcctgacaccactaatagcag

SEQ ID NO: 229270 - DNA, 25 bp, Homo sapien
taactcccaaaggtttcactgagcc

SEQ ID NO: 229271 - DNA, 25 bp, Homo sapien
ctgcaaagcggcttcacactcttcg

SEQ ID NO: 229272 - DNA, 25 bp, Homo sapien
acataactcccaaaggtttcactga

SEQ ID NO: 229273 - DNA, 25 bp, Homo sapien
agccattagcaatctgcaaagcggc

SEQ ID NO: 229274 - DNA, 25 bp, Homo sapien
tacatccacagttttgtttgctgca

SEQ ID NO: 229275 - DNA, 25 bp, Homo sapien
ttacatccacagttttgtttgctgc

SEQ ID NO: 229276 - DNA, 25 bp, Homo sapien
acatccacagttttgtttgctgcac

SEQ ID NO: 229277 - DNA, 25 bp, Homo sapien
ctggaaacctgagctggagggaact

SEQ ID NO: 229278 - DNA, 25 bp, Homo sapien
ggaactgtggtagttcaccatagaa

SEQ ID NO: 229279 - DNA, 25 bp, Homo sapien
tcaagtgaaggcagtaccgaggcca

SEQ ID NO: 229280 - DNA, 25 bp, Homo sapien
ggtagttcaccatagaatagatcaa

SEQ ID NO: 229281 - DNA, 25 bp, Homo sapien
gacgccggctccagactcgagctcg

SEQ ID NO: 229282 - DNA, 25 bp, Homo sapien
ggcttctctggccgcgggataccca

SEQ ID NO: 229283 - DNA, 25 bp, Homo sapien
ggtcgccgcggcaaagccggcttct

SEQ ID NO: 229284 - DNA, 25 bp, Homo sapien
ccgctcctgattggccgcggcgcgc

SEQ ID NO: 229285 - DNA, 25 bp, Homo sapien
cataattcaggttgctggctttcca

SEQ ID NO: 229286 - DNA, 25 bp, Homo sapien
ttccatagctgtggcttctgccaaa

SEQ ID NO: 229287 - DNA, 25 bp, Homo sapien
tgggaggaacaccagacagagcacg

SEQ ID NO: 229288 - DNA, 25 bp, Homo sapien
catggagacatcagcccataattca

SEQ ID NO: 229289 - DNA, 25 bp, Homo sapien
tgaggttcttagctggacagtcact

SEQ ID NO: 229290 - DNA, 25 bp, Homo sapien
gacctaatgttggaaagaatgcatt

SEQ ID NO: 229291 - DNA, 25 bp, Homo sapien
actcttgctgccctccagacttatt

SEQ ID NO: 229292 - DNA, 25 bp, Homo sapien
ttaggacctaatgttggaaagaatg

SEQ ID NO: 229293 - DNA, 25 bp, Homo sapien
atctctcgtgctgttgcaatatcct

SEQ ID NO: 229294 - DNA, 25 bp, Homo sapien
aatctctcgtgctgttgcaatatcc

SEQ ID NO: 229295 - DNA, 25 bp, Homo sapien
taaaatctctcgtgctgttgcaata

SEQ ID NO: 229296 - DNA, 25 bp, Homo sapien
aaatctctcgtgctgttgcaatatc

SEQ ID NO: 229297 - DNA, 25 bp, Homo sapien
agtcacttacgtcccattgtcacca

SEQ ID NO: 229298 - DNA, 25 bp, Homo sapien
tctaatccaatgtatcccaaatttc

SEQ ID NO: 229299 - DNA, 25 bp, Homo sapien
tccatgtatcatctgcacaattatg

SEQ ID NO: 229300 - DNA, 25 bp, Homo sapien
caaatttcagtcacttacgtcccat

SEQ ID NO: 229301 - DNA, 25 bp, Homo sapien
atgatcccacaaatagcaaccacca

SEQ ID NO: 229302 - DNA, 25 bp, Homo sapien
gaggctcatgaccatgatcccacaa

SEQ ID NO: 229303 - DNA, 25 bp, Homo sapien
tcatgaccatgatcccacaaatagc

SEQ ID NO: 229304 - DNA, 25 bp, Homo sapien
atgtagaggctcatgaccatgatcc

SEQ ID NO: 229305 - DNA, 25 bp, Homo sapien
gcaagggttggaccggtggtctcaa

SEQ ID NO: 229306 - DNA, 25 bp, Homo sapien
taacgagcttccagggaatgctgct

SEQ ID NO: 229307 - DNA, 25 bp, Homo sapien
tttctaacgagcttccagggaatgc

SEQ ID NO: 229308 - DNA, 25 bp, Homo sapien
tggtccagggcctttagttgcaagg

SEQ ID NO: 229309 - DNA, 25 bp, Homo sapien
gagggaggtaatatctgcaggttct

SEQ ID NO: 229310 - DNA, 25 bp, Homo sapien
catttctaaagccctcccgttgaag

SEQ ID NO: 229311 - DNA, 25 bp, Homo sapien
ccctcccgttgaaggaatatgcagc

SEQ ID NO: 229312 - DNA, 25 bp, Homo sapien
cagggctgagaccacggttctggag

SEQ ID NO: 229313 - DNA, 25 bp, Homo sapien
tgagctcccctttcccaaccacagg

SEQ ID NO: 229314 - DNA, 25 bp, Homo sapien
cctttcccaaccacagggacatcca

SEQ ID NO: 229315 - DNA, 25 bp, Homo sapien
cctgagctcccctttcccaaccaca

SEQ ID NO: 229316 - DNA, 25 bp, Homo sapien
ctttcccaaccacagggacatccat

SEQ ID NO: 229317 - DNA, 25 bp, Homo sapien
tccaagcccatgaaaaggccagagc

SEQ ID NO: 229318 - DNA, 25 bp, Homo sapien
ctccaagcccatgaaaaggccagag

SEQ ID NO: 229319 - DNA, 25 bp, Homo sapien
cttcaaggacgcccttgaagaggcc

SEQ ID NO: 229320 - DNA, 25 bp, Homo sapien
caagcccatgaaaaggccagagcca

SEQ ID NO: 229321 - DNA, 25 bp, Homo sapien
ctgcaggttgatggcagagcccgtc

SEQ ID NO: 229322 - DNA, 25 bp, Homo sapien
ccaagctgcgatctgaaaagccctc

SEQ ID NO: 229323 - DNA, 25 bp, Homo sapien
agagccgcagctcaggaggagctgc

SEQ ID NO: 229324 - DNA, 25 bp, Homo sapien
gggcagagcgggaagagccgcagct

SEQ ID NO: 229325 - DNA, 25 bp, Homo sapien
tagtgtgtcatctaattgagtgaca

SEQ ID NO: 229326 - DNA, 25 bp, Homo sapien
tgatggcaaccgatgactgagtcca

SEQ ID NO: 229327 - DNA, 25 bp, Homo sapien
actgagtccagatgagagcttaact

SEQ ID NO: 229328 - DNA, 25 bp, Homo sapien
cttcagtggactgtagtgtgtcatc

SEQ ID NO: 229329 - DNA, 25 bp, Homo sapien
attcagttaactaaccacattccac

SEQ ID NO: 229330 - DNA, 25 bp, Homo sapien
gcagcaacaaattatttatatgaac

SEQ ID NO: 229331 - DNA, 25 bp, Homo sapien
ccacattccactcaacttacatgag

SEQ ID NO: 229332 - DNA, 25 bp, Homo sapien
taactaaccacattccactcaactt

SEQ ID NO: 229333 - DNA, 25 bp, Homo sapien
catgagaaggaacgtacaaagccca

SEQ ID NO: 229334 - DNA, 25 bp, Homo sapien
tagcatagtgaattttcaggatcta

SEQ ID NO: 229335 - DNA, 25 bp, Homo sapien
caatttgatggcgaagtagtgacgt

SEQ ID NO: 229336 - DNA, 25 bp, Homo sapien
gaatttggcctctagggaaaatcag

SEQ ID NO: 229337 - DNA, 25 bp, Homo sapien
cacctgctggtgttaaggctctgac

SEQ ID NO: 229338 - DNA, 25 bp, Homo sapien
taatcaggctaaagtgaatcacgct

SEQ ID NO: 229339 - DNA, 25 bp, Homo sapien
tactgtgtggtacgtgtctctgcaa

SEQ ID NO: 229340 - DNA, 25 bp, Homo sapien
tttaggtcagtcaaggtcatctggg

SEQ ID NO: 229341 - DNA, 25 bp, Homo sapien
ttcaccaacctttatactgcatttc

SEQ ID NO: 229342 - DNA, 25 bp, Homo sapien
caagatacagtacaaaacgattctg

SEQ ID NO: 229343 - DNA, 25 bp, Homo sapien
aggtggaatctttatttcacaagtt

SEQ ID NO: 229344 - DNA, 25 bp, Homo sapien
caaaaagagtctaccatggtgttcc

SEQ ID NO: 229345 - DNA, 25 bp, Homo sapien
tgtgaaatgttagtccgaacctctg

SEQ ID NO: 229346 - DNA, 25 bp, Homo sapien
taaaatccagatcgtgcctcaggca

SEQ ID NO: 229347 - DNA, 25 bp, Homo sapien
cctggaggcatcaacggctctttaa

SEQ ID NO: 229348 - DNA, 25 bp, Homo sapien
taatcaaagagaatagtgtcagcct

SEQ ID NO: 229349 - DNA, 25 bp, Homo sapien
tcagtaggcatagaaaacctgctca

SEQ ID NO: 229350 - DNA, 25 bp, Homo sapien
tactgtcatcaagttcgaaggcagg

SEQ ID NO: 229351 - DNA, 25 bp, Homo sapien
caagatacaggctggtgaacaccac

SEQ ID NO: 229352 - DNA, 25 bp, Homo sapien
gatgggctaccatggacaaatgaag

SEQ ID NO: 229353 - DNA, 25 bp, Homo sapien
gataacttccttcgctgtcactgat

SEQ ID NO: 229354 - DNA, 25 bp, Homo sapien
cgcgttagtgcaaggagtcagttca

SEQ ID NO: 229355 - DNA, 25 bp, Homo sapien
tgtgtctgtgatcgtagtaccccaa

SEQ ID NO: 229356 - DNA, 25 bp, Homo sapien
tagtcactgtaagccataccctggc

SEQ ID NO: 229357 - DNA, 25 bp, Homo sapien
tgaggtaaaggtcccactcaggtcc

SEQ ID NO: 229358 - DNA, 25 bp, Homo sapien
cagcgcaatgatggtcatgaggtaa

SEQ ID NO: 229359 - DNA, 25 bp, Homo sapien
gctatgactgttcccaacagcagcg

SEQ ID NO: 229360 - DNA, 25 bp, Homo sapien
tgcctttgcctgtaagctatgactg

SEQ ID NO: 229361 - DNA, 25 bp, Homo sapien
caagttgggtgaacatatctcgaat

SEQ ID NO: 229362 - DNA, 25 bp, Homo sapien
tcaagttgggtgaacatatctcgaa

SEQ ID NO: 229363 - DNA, 25 bp, Homo sapien
gtcaaacgctacctaaaaactgcag

SEQ ID NO: 229364 - DNA, 25 bp, Homo sapien
gagaagggaacacacccgatacctg

SEQ ID NO: 229365 - DNA, 25 bp, Homo sapien
taaggtcctcgggtacctgagctga

SEQ ID NO: 229366 - DNA, 25 bp, Homo sapien
tgctttagcgtcaggaagtgtcaaa

SEQ ID NO: 229367 - DNA, 25 bp, Homo sapien
tgcaagaaatagacgacgcccaatt

SEQ ID NO: 229368 - DNA, 25 bp, Homo sapien
aagactggaacttgtgcatctgggc

SEQ ID NO: 229369 - DNA, 25 bp, Homo sapien
ccaatttgcagagggctaggaagac

SEQ ID NO: 229370 - DNA, 25 bp, Homo sapien
tcagctgccatgtcataaaaacgtt

SEQ ID NO: 229371 - DNA, 25 bp, Homo sapien
tctcatgcatatatcccagattaaa

SEQ ID NO: 229372 - DNA, 25 bp, Homo sapien
tatatcccagattaaacatagcttg

SEQ ID NO: 229373 - DNA, 25 bp, Homo sapien
gcccagtcctttctcatgcatatat

SEQ ID NO: 229374 - DNA, 25 bp, Homo sapien
taaacatagcttgtgcactgtgttg

SEQ ID NO: 229375 - DNA, 25 bp, Homo sapien
aatgcagtttcataatctacatcgg

SEQ ID NO: 229376 - DNA, 25 bp, Homo sapien
ctgctcagaagccagacggtaatga

SEQ ID NO: 229377 - DNA, 25 bp, Homo sapien
cataatctacatcggtgccaaaccc

SEQ ID NO: 229378 - DNA, 25 bp, Homo sapien
ccagacggtaatgaataaatgcagt

SEQ ID NO: 229379 - DNA, 25 bp, Homo sapien
tctccgagcttaattctagccacag

SEQ ID NO: 229380 - DNA, 25 bp, Homo sapien
gagcttaattctagccacagtatag

SEQ ID NO: 229381 - DNA, 25 bp, Homo sapien
agaaatggtagtctccgagcttaat

SEQ ID NO: 229382 - DNA, 25 bp, Homo sapien
tggtagtctccgagcttaattctag

SEQ ID NO: 229383 - DNA, 25 bp, Homo sapien
cctcccattgacatgcttacataaa

SEQ ID NO: 229384 - DNA, 25 bp, Homo sapien
atgcagaactgccaataaataaagt

SEQ ID NO: 229385 - DNA, 25 bp, Homo sapien
ttttctcctcccattgacatgctta

SEQ ID NO: 229386 - DNA, 25 bp, Homo sapien
aagtatgtttaaaacagatcaaact

SEQ ID NO: 229387 - DNA, 25 bp, Homo sapien
cttgagaggcggccctgttccaatg

SEQ ID NO: 229388 - DNA, 25 bp, Homo sapien
tgggataagtttcattctcacctac

SEQ ID NO: 229389 - DNA, 25 bp, Homo sapien
caaagctctgggataagtttcattc

SEQ ID NO: 229390 - DNA, 25 bp, Homo sapien
tccaatgtagcaaagctctgggata

SEQ ID NO: 229391 - DNA, 25 bp, Homo sapien
tgtgccacttcatagccctgttcag

SEQ ID NO: 229392 - DNA, 25 bp, Homo sapien
cacttcatagccctgttcagccagg

SEQ ID NO: 229393 - DNA, 25 bp, Homo sapien
gctttgtgccacttcatagccctgt

SEQ ID NO: 229394 - DNA, 25 bp, Homo sapien
catagccctgttcagccaggaggag

SEQ ID NO: 229395 - DNA, 25 bp, Homo sapien
ggcctcgttcacatacattcttaaa

SEQ ID NO: 229396 - DNA, 25 bp, Homo sapien
gctgttataggcagtcataagcctt

SEQ ID NO: 229397 - DNA, 25 bp, Homo sapien
ttgtaatcgccatctttatagctgt

SEQ ID NO: 229398 - DNA, 25 bp, Homo sapien
gcctttcagaccaacggcctcgttc

SEQ ID NO: 229399 - DNA, 25 bp, Homo sapien
tgttaaaagccccatttgacaagtg

SEQ ID NO: 229400 - DNA, 25 bp, Homo sapien
tttatcaatgtcactctaaagtgcc

SEQ ID NO: 229401 - DNA, 25 bp, Homo sapien
aaaatgaccatttactctgcccggg

SEQ ID NO: 229402 - DNA, 25 bp, Homo sapien
gattcatgaggaaccaccctaggag

SEQ ID NO: 229403 - DNA, 25 bp, Homo sapien
tcggtcttccctcagtatatcaaag

SEQ ID NO: 229404 - DNA, 25 bp, Homo sapien
aaaaccagaattgaaagcgcagact

SEQ ID NO: 229405 - DNA, 25 bp, Homo sapien
tatcaaagctaggtaggctgagtct

SEQ ID NO: 229406 - DNA, 25 bp, Homo sapien
tggtaattacacacagacccctcgg

SEQ ID NO: 229407 - DNA, 25 bp, Homo sapien
catctgagctaggttatagaaagcc

SEQ ID NO: 229408 - DNA, 25 bp, Homo sapien
ccactgcagtgtgacatgatcgcat

SEQ ID NO: 229409 - DNA, 25 bp, Homo sapien
ccaagatatggcctccctgagaagc

SEQ ID NO: 229410 - DNA, 25 bp, Homo sapien
tcacgccggtgccactggcatgcat

SEQ ID NO: 229411 - DNA, 25 bp, Homo sapien
gggagaacatttaaccagccagaat

SEQ ID NO: 229412 - DNA, 25 bp, Homo sapien
gaatttgatagcacccatttccaca

SEQ ID NO: 229413 - DNA, 25 bp, Homo sapien
taatgccatctagtagaaaacagct

SEQ ID NO: 229414 - DNA, 25 bp, Homo sapien
tacaaatcattgaactgggagaaca

SEQ ID NO: 229415 - DNA, 25 bp, Homo sapien
ggaaccaagctgtagctgcccatcc

SEQ ID NO: 229416 - DNA, 25 bp, Homo sapien
catccacccagccttgttcagcagc

SEQ ID NO: 229417 - DNA, 25 bp, Homo sapien
agtacatggaaccaagctgtagctg

SEQ ID NO: 229418 - DNA, 25 bp, Homo sapien
tggaaatacttaagggctagatcat

SEQ ID NO: 229419 - DNA, 25 bp, Homo sapien
tgtagaaaaagatgtcatatgatga

SEQ ID NO: 229420 - DNA, 25 bp, Homo sapien
gctcaaaaggcagacatactcaaaa

SEQ ID NO: 229421 - DNA, 25 bp, Homo sapien
tgatgagaaagctcaaaaggcagac

SEQ ID NO: 229422 - DNA, 25 bp, Homo sapien
gatgtcatatgatgagaaagctcaa

SEQ ID NO: 229423 - DNA, 25 bp, Homo sapien
aacttgaactcctctcccatagagg

SEQ ID NO: 229424 - DNA, 25 bp, Homo sapien
cccatagaggtaggccattccaagc

SEQ ID NO: 229425 - DNA, 25 bp, Homo sapien
agcccactctgtccaactgggttgc

SEQ ID NO: 229426 - DNA, 25 bp, Homo sapien
caagcccactctgtccaactgggtt

SEQ ID NO: 229427 - DNA, 25 bp, Homo sapien
gaggtaagtgtacatactgaagaca

SEQ ID NO: 229428 - DNA, 25 bp, Homo sapien
tctgagccaaagaaagcctaaatta

SEQ ID NO: 229429 - DNA, 25 bp, Homo sapien
caagatttcaggtactcatatgcag

SEQ ID NO: 229430 - DNA, 25 bp, Homo sapien
ccccgattaggaaacttctcagtga

SEQ ID NO: 229431 - DNA, 25 bp, Homo sapien
cattactctgaggtacaatgtcact

SEQ ID NO: 229432 - DNA, 25 bp, Homo sapien
tctcattactctgaggtacaatgtc

SEQ ID NO: 229433 - DNA, 25 bp, Homo sapien
gctgtctcattactctgaggtacaa

SEQ ID NO: 229434 - DNA, 25 bp, Homo sapien
gagctgtctcattactctgaggtac

SEQ ID NO: 229435 - DNA, 25 bp, Homo sapien
tgctgctaaattgaagtagtcaaat

SEQ ID NO: 229436 - DNA, 25 bp, Homo sapien
tttgctgctaaattgaagtagtcaa

SEQ ID NO: 229437 - DNA, 25 bp, Homo sapien
ttgctgctaaattgaagtagtcaaa

SEQ ID NO: 229438 - DNA, 25 bp, Homo sapien
gcaaagcgaacatcagcctgcttaa

SEQ ID NO: 229439 - DNA, 25 bp, Homo sapien
atttaagagcagcttgacttctttg

SEQ ID NO: 229440 - DNA, 25 bp, Homo sapien
aaagcgaacatcagcctgcttaaaa

SEQ ID NO: 229441 - DNA, 25 bp, Homo sapien
ttaagagcagcttgacttctttggt

SEQ ID NO: 229442 - DNA, 25 bp, Homo sapien
gttccccctcaatcacattctataa

SEQ ID NO: 229443 - DNA, 25 bp, Homo sapien
ttccttgctgacttaacttctccct

SEQ ID NO: 229444 - DNA, 25 bp, Homo sapien
ggaaccagttccccctcaatcacat

SEQ ID NO: 229445 - DNA, 25 bp, Homo sapien
tttccttgctgacttaacttctccc

SEQ ID NO: 229446 - DNA, 25 bp, Homo sapien
tccacgccctccgtgcaggtgcagt

SEQ ID NO: 229447 - DNA, 25 bp, Homo sapien
cgccctccgtgcaggtgcagttgtc

SEQ ID NO: 229448 - DNA, 25 bp, Homo sapien
gatgattctgttctactccacgccc

SEQ ID NO: 229449 - DNA, 25 bp, Homo sapien
tgatgattctgttctactccacgcc

SEQ ID NO: 229450 - DNA, 25 bp, Homo sapien
agctaggaactggtaatattgaatc

SEQ ID NO: 229451 - DNA, 25 bp, Homo sapien
catcaggcagccgtattctctgtac

SEQ ID NO: 229452 - DNA, 25 bp, Homo sapien
tctgtactactgagcctcctgttag

SEQ ID NO: 229453 - DNA, 25 bp, Homo sapien
tacatcacctttttcagctaggaac

SEQ ID NO: 229454 - DNA, 25 bp, Homo sapien
gcaacaagacgatagtgagtcaggg

SEQ ID NO: 229455 - DNA, 25 bp, Homo sapien
acaagacgatagtgagtcagggcag

SEQ ID NO: 229456 - DNA, 25 bp, Homo sapien
cacaactctggaggacgccgatgcc

SEQ ID NO: 229457 - DNA, 25 bp, Homo sapien
ggacgccgatgccagcccagtatct

SEQ ID NO: 229458 - DNA, 25 bp, Homo sapien
tgtaaaacaacttcacgtgaggagg

SEQ ID NO: 229459 - DNA, 25 bp, Homo sapien
ggtaatggattcagcaacttcaaca

SEQ ID NO: 229460 - DNA, 25 bp, Homo sapien
caagaaggccatagctaagagcaag

SEQ ID NO: 229461 - DNA, 25 bp, Homo sapien
tttgatccaagtacactaacacctt

SEQ ID NO: 229462 - DNA, 25 bp, Homo sapien
taaagctaagcatacccagaatttt

SEQ ID NO: 229463 - DNA, 25 bp, Homo sapien
gcaaatctggatcatgaaagctgaa

SEQ ID NO: 229464 - DNA, 25 bp, Homo sapien
gctgaaaaagttgtggccgctataa

SEQ ID NO: 229465 - DNA, 25 bp, Homo sapien
gcacagtgtcactagcaataaatga

SEQ ID NO: 229466 - DNA, 25 bp, Homo sapien
aatgagactactggaagcaggcaca

SEQ ID NO: 229467 - DNA, 25 bp, Homo sapien
ggctattagattgcccccaagagct

SEQ ID NO: 229468 - DNA, 25 bp, Homo sapien
tgtgggctattagattgcccccaag

SEQ ID NO: 229469 - DNA, 25 bp, Homo sapien
caaaaccatgtgggctattagattg

SEQ ID NO: 229470 - DNA, 25 bp, Homo sapien
aaaaccatgtgggctattagattgc

SEQ ID NO: 229471 - DNA, 25 bp, Homo sapien
taacaccaagtccagaggcatacag

SEQ ID NO: 229472 - DNA, 25 bp, Homo sapien
gtccagaggcatacagaaagccaag

SEQ ID NO: 229473 - DNA, 25 bp, Homo sapien
ctttgcctgacttgaattaacacca

SEQ ID NO: 229474 - DNA, 25 bp, Homo sapien
tgaattaacaccaagtccagaggca

SEQ ID NO: 229475 - DNA, 25 bp, Homo sapien
tctaatattagagggaactgatgcc

SEQ ID NO: 229476 - DNA, 25 bp, Homo sapien
aataaaataccgaggaaagagctgc

SEQ ID NO: 229477 - DNA, 25 bp, Homo sapien
gaagccccgtgtagcaatcagtgta

SEQ ID NO: 229478 - DNA, 25 bp, Homo sapien
taaatccaggtgtcaatcttagcat

SEQ ID NO: 229479 - DNA, 25 bp, Homo sapien
aagagcatatgacactctctccagg

SEQ ID NO: 229480 - DNA, 25 bp, Homo sapien
gatattctgtggcaagtaatcacca

SEQ ID NO: 229481 - DNA, 25 bp, Homo sapien
gctttggtatggttcatgcttgctg

SEQ ID NO: 229482 - DNA, 25 bp, Homo sapien
tgccttttggagataccgatatgct

SEQ ID NO: 229483 - DNA, 25 bp, Homo sapien
ttcctgcatctgccgtctcttagca

SEQ ID NO: 229484 - DNA, 25 bp, Homo sapien
tgcatctgccgtctcttagcagcct

SEQ ID NO: 229485 - DNA, 25 bp, Homo sapien
gcttcctgcatctgccgtctcttag

SEQ ID NO: 229486 - DNA, 25 bp, Homo sapien
ctgcatctgccgtctcttagcagcc

SEQ ID NO: 229487 - DNA, 25 bp, Homo sapien
gctggccatttctgaccaatgtgga

SEQ ID NO: 229488 - DNA, 25 bp, Homo sapien
aaaaacattgccctagacataaagc

SEQ ID NO: 229489 - DNA, 25 bp, Homo sapien
aaaacgtgagtgtgacttgagtgac

SEQ ID NO: 229490 - DNA, 25 bp, Homo sapien
gacataaagcaatgcagatctgcct

SEQ ID NO: 229491 - DNA, 25 bp, Homo sapien
gatgtacattcatcatactccttat

SEQ ID NO: 229492 - DNA, 25 bp, Homo sapien
cctcccatctgatgtacattcatca

SEQ ID NO: 229493 - DNA, 25 bp, Homo sapien
taggttgtagcacaccacagtctgc

SEQ ID NO: 229494 - DNA, 25 bp, Homo sapien
ggttgtagcacaccacagtctgcca

SEQ ID NO: 229495 - DNA, 25 bp, Homo sapien
tccccatgtgctgtgccttcaatgg

SEQ ID NO: 229496 - DNA, 25 bp, Homo sapien
gctccccatgtgctgtgccttcaat

SEQ ID NO: 229497 - DNA, 25 bp, Homo sapien
agggctccccatgtgctgtgccttc

SEQ ID NO: 229498 - DNA, 25 bp, Homo sapien
aaagggaagtggcagggctccccat

SEQ ID NO: 229499 - DNA, 25 bp, Homo sapien
atattaaaatctagaaattctctcc

SEQ ID NO: 229500 - DNA, 25 bp, Homo sapien
tatttgtgggtaataatcagtgaag

SEQ ID NO: 229501 - DNA, 25 bp, Homo sapien
tcagtgaagccagtcttcttcagcc

SEQ ID NO: 229502 - DNA, 25 bp, Homo sapien
aattctctccaaactacactccata

SEQ ID NO: 229503 - DNA, 25 bp, Homo sapien
gaaagctgatatcttctgtgacact

SEQ ID NO: 229504 - DNA, 25 bp, Homo sapien
caagaaatatttgaccagcaactac

SEQ ID NO: 229505 - DNA, 25 bp, Homo sapien
gcctgcagtagtatggtcctttact

SEQ ID NO: 229506 - DNA, 25 bp, Homo sapien
tctggatttggagactctagaaagc

SEQ ID NO: 229507 - DNA, 25 bp, Homo sapien
cttggaatctaaggattcatcctgg

SEQ ID NO: 229508 - DNA, 25 bp, Homo sapien
gggcccgcacaggtgttttatgata

SEQ ID NO: 229509 - DNA, 25 bp, Homo sapien
tcacacctggagttacgtagagatg

SEQ ID NO: 229510 - DNA, 25 bp, Homo sapien
taccattgaaatgttgtggcacagc

SEQ ID NO: 229511 - DNA, 25 bp, Homo sapien
tgaacttcatgtgagcacagcactg

SEQ ID NO: 229512 - DNA, 25 bp, Homo sapien
cacctgtcctgttaactgaaactga

SEQ ID NO: 229513 - DNA, 25 bp, Homo sapien
catggatagaatttaggtttaagcc

SEQ ID NO: 229514 - DNA, 25 bp, Homo sapien
tttagaagcagaatgacgttatggc

SEQ ID NO: 229515 - DNA, 25 bp, Homo sapien
gggattcagataaccatctgggaaa

SEQ ID NO: 229516 - DNA, 25 bp, Homo sapien
ctctaccccagggtcgaggaagctc

SEQ ID NO: 229517 - DNA, 25 bp, Homo sapien
ggtcgaggaagctccactcgggctc

SEQ ID NO: 229518 - DNA, 25 bp, Homo sapien
gaggaagctccactcgggctcctgt

SEQ ID NO: 229519 - DNA, 25 bp, Homo sapien
ggaagctccactcgggctcctgtat

SEQ ID NO: 229520 - DNA, 25 bp, Homo sapien
gcagcgtcagccctatccggacccg

SEQ ID NO: 229521 - DNA, 25 bp, Homo sapien
ccgaggacgccgaggccaagctcag

SEQ ID NO: 229522 - DNA, 25 bp, Homo sapien
gcgtcagccctatccggacccgcat

SEQ ID NO: 229523 - DNA, 25 bp, Homo sapien
agctcagcagcaccgcacacagcag

SEQ ID NO: 229524 - DNA, 25 bp, Homo sapien
tgtcgccttcgcctctgccaccacg

SEQ ID NO: 229525 - DNA, 25 bp, Homo sapien
gtcgccttcgcctctgccaccacgg

SEQ ID NO: 229526 - DNA, 25 bp, Homo sapien
ccaagtctccaaagtggttcagaat

SEQ ID NO: 229527 - DNA, 25 bp, Homo sapien
tgagaattctcataggacctgactt

SEQ ID NO: 229528 - DNA, 25 bp, Homo sapien
tgcgaaaagggcttagagctgctag

SEQ ID NO: 229529 - DNA, 25 bp, Homo sapien
tgcctttagccagcaatgagtagct

SEQ ID NO: 229530 - DNA, 25 bp, Homo sapien
gccacccatggctctgtccagcggt

SEQ ID NO: 229531 - DNA, 25 bp, Homo sapien
tttgggggcacaggaattgttctgt

SEQ ID NO: 229532 - DNA, 25 bp, Homo sapien
gcaggcaacaatgtcctctctgcat

SEQ ID NO: 229533 - DNA, 25 bp, Homo sapien
agaaacagcaggcaacaatgtcctc

SEQ ID NO: 229534 - DNA, 25 bp, Homo sapien
ggccctaaatctatgtaggaagtac

SEQ ID NO: 229535 - DNA, 25 bp, Homo sapien
ggaagtacatgtgcatgaagccatg

SEQ ID NO: 229536 - DNA, 25 bp, Homo sapien
agctgacggccctaaatctatgtag

SEQ ID NO: 229537 - DNA, 25 bp, Homo sapien
tctatgtaggaagtacatgtgcatg

SEQ ID NO: 229538 - DNA, 25 bp, Homo sapien
tcactgggcaacatctattctctgt

SEQ ID NO: 229539 - DNA, 25 bp, Homo sapien
ctgaatgtgagcattcctgggtccc

SEQ ID NO: 229540 - DNA, 25 bp, Homo sapien
gggatggcatgaaagagacctgaat

SEQ ID NO: 229541 - DNA, 25 bp, Homo sapien
tctattctctgtgatgtgtgcatgg

SEQ ID NO: 229542 - DNA, 25 bp, Homo sapien
cagcactgggttgagatgtgtgctt

SEQ ID NO: 229543 - DNA, 25 bp, Homo sapien
gtctgtgtctggaagcgtgtgcttc

SEQ ID NO: 229544 - DNA, 25 bp, Homo sapien
tcaagacgagctgtgggcagactct

SEQ ID NO: 229545 - DNA, 25 bp, Homo sapien
gtgcttctttcaagacgagctgtgg

SEQ ID NO: 229546 - DNA, 25 bp, Homo sapien
tctctctccagtcctgtactctgac

SEQ ID NO: 229547 - DNA, 25 bp, Homo sapien
tccccactggattcatgatattcac

SEQ ID NO: 229548 - DNA, 25 bp, Homo sapien
taactctctgggtagtggttgaaga

SEQ ID NO: 229549 - DNA, 25 bp, Homo sapien
gaaaatggtaagagcttccctgtcc

SEQ ID NO: 229550 - DNA, 25 bp, Homo sapien
catgctgttcacttatagagggccc

SEQ ID NO: 229551 - DNA, 25 bp, Homo sapien
tcctgaatactatatttcacactag

SEQ ID NO: 229552 - DNA, 25 bp, Homo sapien
gaatactatatttcacactagcaaa

SEQ ID NO: 229553 - DNA, 25 bp, Homo sapien
agcaaaatctctaggcattgggaat

SEQ ID NO: 229554 - DNA, 25 bp, Homo sapien
actagcaaaatctctaggcattggg

SEQ ID NO: 229555 - DNA, 25 bp, Homo sapien
ctgatttggatgttcttagtcacgg

SEQ ID NO: 229556 - DNA, 25 bp, Homo sapien
gattatgagggtaatcactcaacag

SEQ ID NO: 229557 - DNA, 25 bp, Homo sapien
tttctgaagagacaatacgtcttgc

SEQ ID NO: 229558 - DNA, 25 bp, Homo sapien
tgatgaagcaagtgataaagtttta

SEQ ID NO: 229559 - DNA, 25 bp, Homo sapien
taaatccctatgagaagtggctggt

SEQ ID NO: 229560 - DNA, 25 bp, Homo sapien
tatgctaatagtgggaggaaccaca

SEQ ID NO: 229561 - DNA, 25 bp, Homo sapien
tattcgacgagctgccatgtcggga

SEQ ID NO: 229562 - DNA, 25 bp, Homo sapien
catgtcgggaccagtcgccagttta

SEQ ID NO: 229563 - DNA, 25 bp, Homo sapien
cacatccctgggacatttggcctca

SEQ ID NO: 229564 - DNA, 25 bp, Homo sapien
gcctcatttggatgattaaagagaa

SEQ ID NO: 229565 - DNA, 25 bp, Homo sapien
tctcaaagtcccttgtctttgaaaa

SEQ ID NO: 229566 - DNA, 25 bp, Homo sapien
aaatatatgtcccagacacctgcca

SEQ ID NO: 229567 - DNA, 25 bp, Homo sapien
ctttttgctgttttcattctggacc

SEQ ID NO: 229568 - DNA, 25 bp, Homo sapien
tcatcctttttgctgttttcattct

SEQ ID NO: 229569 - DNA, 25 bp, Homo sapien
cttccccactgggttcttcatcctt

SEQ ID NO: 229570 - DNA, 25 bp, Homo sapien
ttgctgttttcattctggaccaact

SEQ ID NO: 229571 - DNA, 25 bp, Homo sapien
taggttaggtcagatcattatcttc

SEQ ID NO: 229572 - DNA, 25 bp, Homo sapien
ttcagccaatagtaggttaggtcag

SEQ ID NO: 229573 - DNA, 25 bp, Homo sapien
tatcttcctgtaggaactgtacttt

SEQ ID NO: 229574 - DNA, 25 bp, Homo sapien
cattatcttcctgtaggaactgtac

SEQ ID NO: 229575 - DNA, 25 bp, Homo sapien
tgggaactctatatacagctgtgtg

SEQ ID NO: 229576 - DNA, 25 bp, Homo sapien
caaagatgttcaagcatggcagagg

SEQ ID NO: 229577 - DNA, 25 bp, Homo sapien
gaaaggattctacaagtcatgcatg

SEQ ID NO: 229578 - DNA, 25 bp, Homo sapien
cagctatgacttctggtgtgggacc

SEQ ID NO: 229579 - DNA, 25 bp, Homo sapien
aaatatatggatttgatggtgacaa

SEQ ID NO: 229580 - DNA, 25 bp, Homo sapien
tgaaaatatatggatttgatggtga

SEQ ID NO: 229581 - DNA, 25 bp, Homo sapien
gaaaatatatggatttgatggtgac

SEQ ID NO: 229582 - DNA, 25 bp, Homo sapien
cttgaaaatatatggatttgatggt

SEQ ID NO: 229583 - DNA, 25 bp, Homo sapien
gcctgcagggagtaagactggcttc

SEQ ID NO: 229584 - DNA, 25 bp, Homo sapien
tgcctgcagggagtaagactggctt

SEQ ID NO: 229585 - DNA, 25 bp, Homo sapien
ttgcctgcagggagtaagactggct

SEQ ID NO: 229586 - DNA, 25 bp, Homo sapien
ccatgggcccctggaagaccctaga

SEQ ID NO: 229587 - DNA, 25 bp, Homo sapien
gcccctggaagaccctagagtccat

SEQ ID NO: 229588 - DNA, 25 bp, Homo sapien
atgggcccctggaagaccctagagt

SEQ ID NO: 229589 - DNA, 25 bp, Homo sapien
tgggcccctggaagaccctagagtc

SEQ ID NO: 229590 - DNA, 25 bp, Homo sapien
gaattgggttcttggtcttactgac

SEQ ID NO: 229591 - DNA, 25 bp, Homo sapien
aaagaactaaagcttccacactggg

SEQ ID NO: 229592 - DNA, 25 bp, Homo sapien
cagtgtaaacgcagcgtggacccaa

SEQ ID NO: 229593 - DNA, 25 bp, Homo sapien
tcataaacacagtgtaaacgcagcg

SEQ ID NO: 229594 - DNA, 25 bp, Homo sapien
agcttccacactggggaaggatacc

SEQ ID NO: 229595 - DNA, 25 bp, Homo sapien
tgcccctccaggtatttgagctgcc

SEQ ID NO: 229596 - DNA, 25 bp, Homo sapien
cactggaattgggagcacagggtct

SEQ ID NO: 229597 - DNA, 25 bp, Homo sapien
gtaagatgattagactgccagtgtg

SEQ ID NO: 229598 - DNA, 25 bp, Homo sapien
tgtcccatcaacctcttgcaggaag

SEQ ID NO: 229599 - DNA, 25 bp, Homo sapien
tgggcagatccaggagcatgctctc

SEQ ID NO: 229600 - DNA, 25 bp, Homo sapien
ccttggtgttagcaaaatagattcc

SEQ ID NO: 229601 - DNA, 25 bp, Homo sapien
caggcatatcttaggctggctgtgc

SEQ ID NO: 229602 - DNA, 25 bp, Homo sapien
catctctaagaatgggcagatccag

SEQ ID NO: 229603 - DNA, 25 bp, Homo sapien
tgggaccacactgcctgaagctctg

SEQ ID NO: 229604 - DNA, 25 bp, Homo sapien
tcgtccgtaaagatggcaatgccag

SEQ ID NO: 229605 - DNA, 25 bp, Homo sapien
ggaccacactgcctgaagctctgga

SEQ ID NO: 229606 - DNA, 25 bp, Homo sapien
gatggaaagtcgtccgtaaagatgg

SEQ ID NO: 229607 - DNA, 25 bp, Homo sapien
aaaaggtgcctgtcaaagatgttca

SEQ ID NO: 229608 - DNA, 25 bp, Homo sapien
ccatccaggccaaatcagtgttggt

SEQ ID NO: 229609 - DNA, 25 bp, Homo sapien
tgtggcaacactgctggtaacagca

SEQ ID NO: 229610 - DNA, 25 bp, Homo sapien
taagcttcaatgtcaaaaaggtgcc

SEQ ID NO: 229611 - DNA, 25 bp, Homo sapien
cgtaaggagatactccggtgattga

SEQ ID NO: 229612 - DNA, 25 bp, Homo sapien
gccctgccttgctcgtaaggagata

SEQ ID NO: 229613 - DNA, 25 bp, Homo sapien
gattgatatcttggtgatggcccca

SEQ ID NO: 229614 - DNA, 25 bp, Homo sapien
ccagcattcttgaaagcagtcgttc

SEQ ID NO: 229615 - DNA, 25 bp, Homo sapien
tcagacttaatagctcaagcacctg

SEQ ID NO: 229616 - DNA, 25 bp, Homo sapien
agaactgtcagacttaatagctcaa

SEQ ID NO: 229617 - DNA, 25 bp, Homo sapien
tgtcagacttaatagctcaagcacc

SEQ ID NO: 229618 - DNA, 25 bp, Homo sapien
actgtcagacttaatagctcaagca

SEQ ID NO: 229619 - DNA, 25 bp, Homo sapien
tttgtaacaactttgttctcacagg

SEQ ID NO: 229620 - DNA, 25 bp, Homo sapien
gtttgtaacaactttgttctcacag

SEQ ID NO: 229621 - DNA, 25 bp, Homo sapien
ggtcaagtccaaggccagcatgatg

SEQ ID NO: 229622 - DNA, 25 bp, Homo sapien
catgatgggtaagcaactccccata

SEQ ID NO: 229623 - DNA, 25 bp, Homo sapien
ccattacatgggtcaagtccaaggc

SEQ ID NO: 229624 - DNA, 25 bp, Homo sapien
cagcatgatgggtaagcaactcccc

SEQ ID NO: 229625 - DNA, 25 bp, Homo sapien
cagggtgttggataccagcggaaac

SEQ ID NO: 229626 - DNA, 25 bp, Homo sapien
tcagaccaaatgagagcttccaggg

SEQ ID NO: 229627 - DNA, 25 bp, Homo sapien
gatacgctgaagtagttcaggctgc

SEQ ID NO: 229628 - DNA, 25 bp, Homo sapien
tagtgcctcattagctgatagctgt

SEQ ID NO: 229629 - DNA, 25 bp, Homo sapien
ggcttatagctttcccggtcacgtg

SEQ ID NO: 229630 - DNA, 25 bp, Homo sapien
tgtctgattacaaggctactaggcc

SEQ ID NO: 229631 - DNA, 25 bp, Homo sapien
tagtcatcagctaagcacagcccct

SEQ ID NO: 229632 - DNA, 25 bp, Homo sapien
ggcagtctattcgtggctttaagaa

SEQ ID NO: 229633 - DNA, 25 bp, Homo sapien
gcttttgttgtggagtcgtgcttaa

SEQ ID NO: 229634 - DNA, 25 bp, Homo sapien
gaccctgagtgatgacaagtgtttc

SEQ ID NO: 229635 - DNA, 25 bp, Homo sapien
ggacataatctgcaaatctgtgata

SEQ ID NO: 229636 - DNA, 25 bp, Homo sapien
catcggtttgggtggttgagaccct

SEQ ID NO: 229637 - DNA, 25 bp, Homo sapien
ttcagtccacctgaaataacatttg

SEQ ID NO: 229638 - DNA, 25 bp, Homo sapien
tgacatgtaggagttcctgtgtgac

SEQ ID NO: 229639 - DNA, 25 bp, Homo sapien
taccagacatttgtagtttcagagt

SEQ ID NO: 229640 - DNA, 25 bp, Homo sapien
tctgttccttccatgtcatttatga

SEQ ID NO: 229641 - DNA, 25 bp, Homo sapien
tccaagatctgtgtcatgaactcgt

SEQ ID NO: 229642 - DNA, 25 bp, Homo sapien
taacctcagggtacctagaagcaga

SEQ ID NO: 229643 - DNA, 25 bp, Homo sapien
tgagtaaaagtccagtccaagatct

SEQ ID NO: 229644 - DNA, 25 bp, Homo sapien
gagtcttgagtccaaaccaggaact

SEQ ID NO: 229645 - DNA, 25 bp, Homo sapien
cagacagaccctgaagtagggatgc

SEQ ID NO: 229646 - DNA, 25 bp, Homo sapien
cagaccctgaagtagggatgctttt

SEQ ID NO: 229647 - DNA, 25 bp, Homo sapien
tatcaatatagaaccgaaactccac

SEQ ID NO: 229648 - DNA, 25 bp, Homo sapien
gcttttgtgtcactgatttatcaat

SEQ ID NO: 229649 - DNA, 25 bp, Homo sapien
ttctaatattccgtgcacttctgat

SEQ ID NO: 229650 - DNA, 25 bp, Homo sapien
taatattccgtgcacttctgatggg

SEQ ID NO: 229651 - DNA, 25 bp, Homo sapien
gccctcagagctcccggaaggcttc

SEQ ID NO: 229652 - DNA, 25 bp, Homo sapien
tcagagctcccggaaggcttcctta

SEQ ID NO: 229653 - DNA, 25 bp, Homo sapien
tttcgtagtctttgctttgccattt

SEQ ID NO: 229654 - DNA, 25 bp, Homo sapien
gcttgtgtctctgactttttctcat

SEQ ID NO: 229655 - DNA, 25 bp, Homo sapien
tctttgctttgccattttgcactgt

SEQ ID NO: 229656 - DNA, 25 bp, Homo sapien
ttgcactgtgttttcatcttccttc

SEQ ID NO: 229657 - DNA, 25 bp, Homo sapien
ggatcgccgtgagacttcgaagatg

SEQ ID NO: 229658 - DNA, 25 bp, Homo sapien
tatacagaatggatcgccgtgagac

SEQ ID NO: 229659 - DNA, 25 bp, Homo sapien
tttgttatacagaatggatcgccgt

SEQ ID NO: 229660 - DNA, 25 bp, Homo sapien
gaatggatcgccgtgagacttcgaa

SEQ ID NO: 229661 - DNA, 25 bp, Homo sapien
cctgcactcccagtccagcttcggg

SEQ ID NO: 229662 - DNA, 25 bp, Homo sapien
tgcactcccagtccagcttcgggga

SEQ ID NO: 229663 - DNA, 25 bp, Homo sapien
ctgcactcccagtccagcttcgggg

SEQ ID NO: 229664 - DNA, 25 bp, Homo sapien
gcactcccagtccagcttcggggac

SEQ ID NO: 229665 - DNA, 25 bp, Homo sapien
tcttacagtgtagacgttctcaaac

SEQ ID NO: 229666 - DNA, 25 bp, Homo sapien
ggacaaatgattagctatagaagcc

SEQ ID NO: 229667 - DNA, 25 bp, Homo sapien
tgtagaatgcatcaaaatgtctgga

SEQ ID NO: 229668 - DNA, 25 bp, Homo sapien
ccaacaacctagctgtgtgagcatg

SEQ ID NO: 229669 - DNA, 25 bp, Homo sapien
acagatcactgttgggtagacagca

SEQ ID NO: 229670 - DNA, 25 bp, Homo sapien
attttatgacttcataagatgcaga

SEQ ID NO: 229671 - DNA, 25 bp, Homo sapien
gaagtgagaaacagatacagatcac

SEQ ID NO: 229672 - DNA, 25 bp, Homo sapien
tatgacttcataagatgcagaagtg

SEQ ID NO: 229673 - DNA, 25 bp, Homo sapien
aggtggaacctttctcacttgtaag

SEQ ID NO: 229674 - DNA, 25 bp, Homo sapien
taagcgaggcggtattcttcaaaac

SEQ ID NO: 229675 - DNA, 25 bp, Homo sapien
caatagactttgtgaatgtagaaga

SEQ ID NO: 229676 - DNA, 25 bp, Homo sapien
cagtagtcagaattacaatagactt

SEQ ID NO: 229677 - DNA, 25 bp, Homo sapien
gtagtaggtccatctgatacatgca

SEQ ID NO: 229678 - DNA, 25 bp, Homo sapien
ttgtagtaggtccatctgatacatg

SEQ ID NO: 229679 - DNA, 25 bp, Homo sapien
gttgtagtaggtccatctgatacat

SEQ ID NO: 229680 - DNA, 25 bp, Homo sapien
tgtagtaggtccatctgatacatgc

SEQ ID NO: 229681 - DNA, 25 bp, Homo sapien
aactattgaatatactcttgacctg

SEQ ID NO: 229682 - DNA, 25 bp, Homo sapien
tgaatatactcttgacctgagacca

SEQ ID NO: 229683 - DNA, 25 bp, Homo sapien
ctgtcaactattgaatatactcttg

SEQ ID NO: 229684 - DNA, 25 bp, Homo sapien
ctcttgacctgagaccatgatgcat

SEQ ID NO: 229685 - DNA, 25 bp, Homo sapien
acatagggaccctgaatgcataggg

SEQ ID NO: 229686 - DNA, 25 bp, Homo sapien
taaaaacatagggaccctgaatgca

SEQ ID NO: 229687 - DNA, 25 bp, Homo sapien
catagggaccctgaatgcatagggc

SEQ ID NO: 229688 - DNA, 25 bp, Homo sapien
tctgcaactgtggtcatcgcacaca

SEQ ID NO: 229689 - DNA, 25 bp, Homo sapien
ccttggtgagattaagtgaagtttc

SEQ ID NO: 229690 - DNA, 25 bp, Homo sapien
caactgtggtcatcgcacacaggtc

SEQ ID NO: 229691 - DNA, 25 bp, Homo sapien
atgtagcttctaatagccttggtga

SEQ ID NO: 229692 - DNA, 25 bp, Homo sapien
tagagtcatatctaggctccagcca

SEQ ID NO: 229693 - DNA, 25 bp, Homo sapien
tcatatctaggctccagccaaacat

SEQ ID NO: 229694 - DNA, 25 bp, Homo sapien
gagtcatatctaggctccagccaaa

SEQ ID NO: 229695 - DNA, 25 bp, Homo sapien
attcctagagtcatatctaggctcc

SEQ ID NO: 229696 - DNA, 25 bp, Homo sapien
taactgctgtaacttgctaaatcaa

SEQ ID NO: 229697 - DNA, 25 bp, Homo sapien
catcttctcgtttccatagctggat

SEQ ID NO: 229698 - DNA, 25 bp, Homo sapien
atactgatggaacaagccacacttg

SEQ ID NO: 229699 - DNA, 25 bp, Homo sapien
gctgaatttggtacaagtttactgt

SEQ ID NO: 229700 - DNA, 25 bp, Homo sapien
gacttcatcctgtagcatacacaga

SEQ ID NO: 229701 - DNA, 25 bp, Homo sapien
acttcatcctgtagcatacacagac

SEQ ID NO: 229702 - DNA, 25 bp, Homo sapien
catgactatggatagtgtgaaccag

SEQ ID NO: 229703 - DNA, 25 bp, Homo sapien
ccgagttctacattaatatgagtga

SEQ ID NO: 229704 - DNA, 25 bp, Homo sapien
cctagtgtaatgttctggatcctgt

SEQ ID NO: 229705 - DNA, 25 bp, Homo sapien
tccactgtgccaacttgaagcctct

SEQ ID NO: 229706 - DNA, 25 bp, Homo sapien
gagtccattcagagtgatattgaca

SEQ ID NO: 229707 - DNA, 25 bp, Homo sapien
tccattcagagtgatattgacattt

SEQ ID NO: 229708 - DNA, 25 bp, Homo sapien
ctgtgagtccattcagagtgatatt

SEQ ID NO: 229709 - DNA, 25 bp, Homo sapien
tgagtccattcagagtgatattgac

SEQ ID NO: 229710 - DNA, 25 bp, Homo sapien
aacctgacaaagcttgcagcatctg

SEQ ID NO: 229711 - DNA, 25 bp, Homo sapien
gcatctgtcaatgtagtcaacctga

SEQ ID NO: 229712 - DNA, 25 bp, Homo sapien
agccagaaaatgtgctgtcctaggg

SEQ ID NO: 229713 - DNA, 25 bp, Homo sapien
ttttggagtctatggtcatcaagcc

SEQ ID NO: 229714 - DNA, 25 bp, Homo sapien
gatagcactaggccacatctccttc

SEQ ID NO: 229715 - DNA, 25 bp, Homo sapien
tagcactaggccacatctccttcct

SEQ ID NO: 229716 - DNA, 25 bp, Homo sapien
taggatagcactaggccacatctcc

SEQ ID NO: 229717 - DNA, 25 bp, Homo sapien
agtaggatagcactaggccacatct

SEQ ID NO: 229718 - DNA, 25 bp, Homo sapien
cttcgttcttgttaaccatatatcg

SEQ ID NO: 229719 - DNA, 25 bp, Homo sapien
taaaattcagagtataggactggtg

SEQ ID NO: 229720 - DNA, 25 bp, Homo sapien
cctatatggggcagaaacttttcca

SEQ ID NO: 229721 - DNA, 25 bp, Homo sapien
accatatatcgagttgttatttgta

SEQ ID NO: 229722 - DNA, 25 bp, Homo sapien
gagaggtgatgcaatcagtctgcag

SEQ ID NO: 229723 - DNA, 25 bp, Homo sapien
ctcgccactgggagcaggataacat

SEQ ID NO: 229724 - DNA, 25 bp, Homo sapien
gaatgacagctttggctcgccactg

SEQ ID NO: 229725 - DNA, 25 bp, Homo sapien
gaactcagttgtccaggaagacttg

SEQ ID NO: 229726 - DNA, 25 bp, Homo sapien
agcaggagtgactgttttcacaagc

SEQ ID NO: 229727 - DNA, 25 bp, Homo sapien
tagatctcccttgcaattttggcag

SEQ ID NO: 229728 - DNA, 25 bp, Homo sapien
gagtgactgttttcacaagccatgg

SEQ ID NO: 229729 - DNA, 25 bp, Homo sapien
ttgcaattttggcagcaggagtgac

SEQ ID NO: 229730 - DNA, 25 bp, Homo sapien
tgaggattaagatggacagcaggca

SEQ ID NO: 229731 - DNA, 25 bp, Homo sapien
gaggattaagatggacagcaggcag

SEQ ID NO: 229732 - DNA, 25 bp, Homo sapien
ctgaggattaagatggacagcaggc

SEQ ID NO: 229733 - DNA, 25 bp, Homo sapien
tttttctgatggcagtcatggaact

SEQ ID NO: 229734 - DNA, 25 bp, Homo sapien
ttaaacctcattctccagggtactg

SEQ ID NO: 229735 - DNA, 25 bp, Homo sapien
gctactgccaagagcggaaaacttt

SEQ ID NO: 229736 - DNA, 25 bp, Homo sapien
caaaacctcaatcagccagtttctc

SEQ ID NO: 229737 - DNA, 25 bp, Homo sapien
gtttctgtagcattacagttggttt

SEQ ID NO: 229738 - DNA, 25 bp, Homo sapien
tttctgtagcattacagttggtttc

SEQ ID NO: 229739 - DNA, 25 bp, Homo sapien
aatgcctcagtagacaggtgtggcc

SEQ ID NO: 229740 - DNA, 25 bp, Homo sapien
gatctgcacttggtcgatgacaaaa

SEQ ID NO: 229741 - DNA, 25 bp, Homo sapien
tgtggcctatcagtacagagttcct

SEQ ID NO: 229742 - DNA, 25 bp, Homo sapien
ggagttgcgtttaggctgaccagca

SEQ ID NO: 229743 - DNA, 25 bp, Homo sapien
caattcattgtgaatcaacagaggt

SEQ ID NO: 229744 - DNA, 25 bp, Homo sapien
catatatgccatagactgattaaga

SEQ ID NO: 229745 - DNA, 25 bp, Homo sapien
gggaagatttaaagccaattcattg

SEQ ID NO: 229746 - DNA, 25 bp, Homo sapien
tacaaattggttgccgtgtggaaat

SEQ ID NO: 229747 - DNA, 25 bp, Homo sapien
tactgggtctcctgatattgactag

SEQ ID NO: 229748 - DNA, 25 bp, Homo sapien
cactgtgctcgtagataattggatc

SEQ ID NO: 229749 - DNA, 25 bp, Homo sapien
gaaagaggcaagagtttactgggtc

SEQ ID NO: 229750 - DNA, 25 bp, Homo sapien
tattgactagcatttgggtctcttg

SEQ ID NO: 229751 - DNA, 25 bp, Homo sapien
tcttgagattctagttggaagaaca

SEQ ID NO: 229752 - DNA, 25 bp, Homo sapien
ggctttagcaggcttttctctttgg

SEQ ID NO: 229753 - DNA, 25 bp, Homo sapien
tgtaggtgcagatttgaggaataga

SEQ ID NO: 229754 - DNA, 25 bp, Homo sapien
tctggcagggttagaagttgtctct

SEQ ID NO: 229755 - DNA, 25 bp, Homo sapien
gccataaaataatccgggggctcag

SEQ ID NO: 229756 - DNA, 25 bp, Homo sapien
agcctccagacagttgtctggagct

SEQ ID NO: 229757 - DNA, 25 bp, Homo sapien
ttgactgacgtgcaaggccataaaa

SEQ ID NO: 229758 - DNA, 25 bp, Homo sapien
agagctccccaagtcagtccgttga

SEQ ID NO: 229759 - DNA, 25 bp, Homo sapien
cttggagagagcctgaagccaatgc

SEQ ID NO: 229760 - DNA, 25 bp, Homo sapien
tgtcaggaaactcagtcaatgtgtc

SEQ ID NO: 229761 - DNA, 25 bp, Homo sapien
ggttgtcaggaaactcagtcaatgt

SEQ ID NO: 229762 - DNA, 25 bp, Homo sapien
tcaggaaactcagtcaatgtgtctt

SEQ ID NO: 229763 - DNA, 25 bp, Homo sapien
gccccagtctgtgttgttggttaag

SEQ ID NO: 229764 - DNA, 25 bp, Homo sapien
tctgtgttgttggttaagtgatgct

SEQ ID NO: 229765 - DNA, 25 bp, Homo sapien
aagccccagtctgtgttgttggtta

SEQ ID NO: 229766 - DNA, 25 bp, Homo sapien
cagtctgtgttgttggttaagtgat

SEQ ID NO: 229767 - DNA, 25 bp, Homo sapien
cacagatgtagtgcagacaggtgct

SEQ ID NO: 229768 - DNA, 25 bp, Homo sapien
ggtgcttggtaaacttgtatctgtg

SEQ ID NO: 229769 - DNA, 25 bp, Homo sapien
caatcggttgctctagcacagatgt

SEQ ID NO: 229770 - DNA, 25 bp, Homo sapien
ctttctttggaagcaatcggttgct

SEQ ID NO: 229771 - DNA, 25 bp, Homo sapien
tccctcctctcattcgcttatctcc

SEQ ID NO: 229772 - DNA, 25 bp, Homo sapien
tcattcgcttatctcctctagtttc

SEQ ID NO: 229773 - DNA, 25 bp, Homo sapien
ctctcattcgcttatctcctctagt

SEQ ID NO: 229774 - DNA, 25 bp, Homo sapien
attcgcttatctcctctagtttcag

SEQ ID NO: 229775 - DNA, 25 bp, Homo sapien
tggtgtcttgtagacagcactggca

SEQ ID NO: 229776 - DNA, 25 bp, Homo sapien
tgctttcataacaggggcgtttggt

SEQ ID NO: 229777 - DNA, 25 bp, Homo sapien
ctccagttgtttagtggaattattt

SEQ ID NO: 229778 - DNA, 25 bp, Homo sapien
gcacttagatactccagtgtctcca

SEQ ID NO: 229779 - DNA, 25 bp, Homo sapien
tattccgtcacatctctagtattcc

SEQ ID NO: 229780 - DNA, 25 bp, Homo sapien
aaactcagcctcagatgcgtgatgg

SEQ ID NO: 229781 - DNA, 25 bp, Homo sapien
ggaagagagtggcagctccaaaact

SEQ ID NO: 229782 - DNA, 25 bp, Homo sapien
gatggtttatcttctgcagatggaa

SEQ ID NO: 229783 - DNA, 25 bp, Homo sapien
cctacactgcaaattgtagagtact

SEQ ID NO: 229784 - DNA, 25 bp, Homo sapien
tccaagtttttcagcgtctcatatc

SEQ ID NO: 229785 - DNA, 25 bp, Homo sapien
gctccgcctccctggatgaaattgg

SEQ ID NO: 229786 - DNA, 25 bp, Homo sapien
gaaattggcaggaacccatatggtt

SEQ ID NO: 229787 - DNA, 25 bp, Homo sapien
aaattagtacatttcgccattcaca

SEQ ID NO: 229788 - DNA, 25 bp, Homo sapien
agtacatttcgccattcacacagcc

SEQ ID NO: 229789 - DNA, 25 bp, Homo sapien
cacacagccctgactgaggataact

SEQ ID NO: 229790 - DNA, 25 bp, Homo sapien
agccctgactgaggataactacaga

SEQ ID NO: 229791 - DNA, 25 bp, Homo sapien
gccatgaacaaacagagagctctcc

SEQ ID NO: 229792 - DNA, 25 bp, Homo sapien
tgggtcaaagtcaaaccaggatata

SEQ ID NO: 229793 - DNA, 25 bp, Homo sapien
caggatataaatcttactggaggtc

SEQ ID NO: 229794 - DNA, 25 bp, Homo sapien
tctcttgcatcactagctactgggt

SEQ ID NO: 229795 - DNA, 25 bp, Homo sapien
attactttcgaaaataatcatgtgg

SEQ ID NO: 229796 - DNA, 25 bp, Homo sapien
ccaggtcacacatgtcttattactt

SEQ ID NO: 229797 - DNA, 25 bp, Homo sapien
gacacgtcggaagggctgattttcc

SEQ ID NO: 229798 - DNA, 25 bp, Homo sapien
ctgacacgtcggaagggctgatttt

SEQ ID NO: 229799 - DNA, 25 bp, Homo sapien
cacagattttgggaatctgaagctt

SEQ ID NO: 229800 - DNA, 25 bp, Homo sapien
caactatgatctgcacacagatttt

SEQ ID NO: 229801 - DNA, 25 bp, Homo sapien
cggaaatctaacattactttgaaga

SEQ ID NO: 229802 - DNA, 25 bp, Homo sapien
acttcggaaatctaacattactttg

SEQ ID NO: 229803 - DNA, 25 bp, Homo sapien
ggagtctgagtcaggctctcaaaga

SEQ ID NO: 229804 - DNA, 25 bp, Homo sapien
aacatcctgctggatgtaactggac

SEQ ID NO: 229805 - DNA, 25 bp, Homo sapien
ccattggaataatggagacctgaga

SEQ ID NO: 229806 - DNA, 25 bp, Homo sapien
actgacttaagcaggaaacatcctg

SEQ ID NO: 229807 - DNA, 25 bp, Homo sapien
gtcacattagctccaatggtaagaa

SEQ ID NO: 229808 - DNA, 25 bp, Homo sapien
tcacattagctccaatggtaagaaa

SEQ ID NO: 229809 - DNA, 25 bp, Homo sapien
ctttagtcacattagctccaatggt

SEQ ID NO: 229810 - DNA, 25 bp, Homo sapien
tagtcacattagctccaatggtaag

SEQ ID NO: 229811 - DNA, 25 bp, Homo sapien
atgctgcagatgtagtgactccagt

SEQ ID NO: 229812 - DNA, 25 bp, Homo sapien
agtgacccatgttgcctgcgtggca

SEQ ID NO: 229813 - DNA, 25 bp, Homo sapien
caggggactgtggatcaaaattcat

SEQ ID NO: 229814 - DNA, 25 bp, Homo sapien
gtgactccagtgacccatgttgcct

SEQ ID NO: 229815 - DNA, 25 bp, Homo sapien
gagttagtaactccatcagtaacgg

SEQ ID NO: 229816 - DNA, 25 bp, Homo sapien
tgctttagagagaacacatggctct

SEQ ID NO: 229817 - DNA, 25 bp, Homo sapien
ccaacaatggttgcctgggcagctc

SEQ ID NO: 229818 - DNA, 25 bp, Homo sapien
cagtaacggtttcaaggctaaatgc

SEQ ID NO: 229819 - DNA, 25 bp, Homo sapien
gactccagtcaaacacagttctgta

SEQ ID NO: 229820 - DNA, 25 bp, Homo sapien
tctaattctaaaagcggtttcagac

SEQ ID NO: 229821 - DNA, 25 bp, Homo sapien
aacacagttctgtattgaataagat

SEQ ID NO: 229822 - DNA, 25 bp, Homo sapien
gtttcagactccagtcaaacacagt

SEQ ID NO: 229823 - DNA, 25 bp, Homo sapien
gtggttcctggtattggttctgaag

SEQ ID NO: 229824 - DNA, 25 bp, Homo sapien
ggttctgaagtatgccatgaagcca

SEQ ID NO: 229825 - DNA, 25 bp, Homo sapien
tccatggcagttctgcggagtctct

SEQ ID NO: 229826 - DNA, 25 bp, Homo sapien
gagtctctggtgtcttaatgtggca

SEQ ID NO: 229827 - DNA, 25 bp, Homo sapien
gtaattccttttaagctctctgcag

SEQ ID NO: 229828 - DNA, 25 bp, Homo sapien
agacccaagcaccacttttctcttt

SEQ ID NO: 229829 - DNA, 25 bp, Homo sapien
tgcagacccaagcaccacttttctc

SEQ ID NO: 229830 - DNA, 25 bp, Homo sapien
taattccttttaagctctctgcaga

SEQ ID NO: 229831 - DNA, 25 bp, Homo sapien
tgtgcttatttgataaggatccctt

SEQ ID NO: 229832 - DNA, 25 bp, Homo sapien
gacttggcaatgtgaccaggacagc

SEQ ID NO: 229833 - DNA, 25 bp, Homo sapien
ctgtgcttatttgataaggatccct

SEQ ID NO: 229834 - DNA, 25 bp, Homo sapien
aaggacttggcaatgtgaccaggac

SEQ ID NO: 229835 - DNA, 25 bp, Homo sapien
accttggacagcaccagcctgttca

SEQ ID NO: 229836 - DNA, 25 bp, Homo sapien
cagcctgttcaaatgcacggcagtc

SEQ ID NO: 229837 - DNA, 25 bp, Homo sapien
aatgcacggcagtcaggtgtaaatg

SEQ ID NO: 229838 - DNA, 25 bp, Homo sapien
tggacagcaccagcctgttcaaatg

SEQ ID NO: 229839 - DNA, 25 bp, Homo sapien
gattatatggtccagtgtgggtact

SEQ ID NO: 229840 - DNA, 25 bp, Homo sapien
aatagatggctgtggaagggattat

SEQ ID NO: 229841 - DNA, 25 bp, Homo sapien
gctgtggaagggattatatggtcca

SEQ ID NO: 229842 - DNA, 25 bp, Homo sapien
tggaagggattatatggtccagtgt

SEQ ID NO: 229843 - DNA, 25 bp, Homo sapien
ttttcactttgttggtgtgaatagt

SEQ ID NO: 229844 - DNA, 25 bp, Homo sapien
acttctagaagatgatgttgtgttt

SEQ ID NO: 229845 - DNA, 25 bp, Homo sapien
gtgtgaatagttgagtgaaaatatc

SEQ ID NO: 229846 - DNA, 25 bp, Homo sapien
ctagaagatgatgttgtgttttcac

SEQ ID NO: 229847 - DNA, 25 bp, Homo sapien
cagtacactgtaccagttgtccatt

SEQ ID NO: 229848 - DNA, 25 bp, Homo sapien
gtagttcagagaagtgcttctattt

SEQ ID NO: 229849 - DNA, 25 bp, Homo sapien
acagtacactgtaccagttgtccat

SEQ ID NO: 229850 - DNA, 25 bp, Homo sapien
tttttctgagcagcagaacctaaga

SEQ ID NO: 229851 - DNA, 25 bp, Homo sapien
ttttctgagcagcagaacctaagac

SEQ ID NO: 229852 - DNA, 25 bp, Homo sapien
gtttttctgagcagcagaacctaag

SEQ ID NO: 229853 - DNA, 25 bp, Homo sapien
gcttactcagggtgtctgaatgcaa

SEQ ID NO: 229854 - DNA, 25 bp, Homo sapien
tattgcactaggttctattgcaccc

SEQ ID NO: 229855 - DNA, 25 bp, Homo sapien
tcatcctaaggctataaccaccaga

SEQ ID NO: 229856 - DNA, 25 bp, Homo sapien
gaattaaatagactgacacattgtg

SEQ ID NO: 229857 - DNA, 25 bp, Homo sapien
tcccatgatgtaaaaacctgtggca

SEQ ID NO: 229858 - DNA, 25 bp, Homo sapien
catctttgccaggttcacactccat

SEQ ID NO: 229859 - DNA, 25 bp, Homo sapien
gattcatggtcattgagttccttgg

SEQ ID NO: 229860 - DNA, 25 bp, Homo sapien
tcatgttctcatgggaattccttcc

SEQ ID NO: 229861 - DNA, 25 bp, Homo sapien
gattgatgaatttcaattaccatcc

SEQ ID NO: 229862 - DNA, 25 bp, Homo sapien
taccatcctccggtagcagttcaca

SEQ ID NO: 229863 - DNA, 25 bp, Homo sapien
gaatttcaattaccatcctccggta

SEQ ID NO: 229864 - DNA, 25 bp, Homo sapien
ttcaattaccatcctccggtagcag

SEQ ID NO: 229865 - DNA, 25 bp, Homo sapien
tatatggactggcattgattgctgg

SEQ ID NO: 229866 - DNA, 25 bp, Homo sapien
gcaaatagcctgctaggaagagact

SEQ ID NO: 229867 - DNA, 25 bp, Homo sapien
gaagagactgtgcaacatccatcag

SEQ ID NO: 229868 - DNA, 25 bp, Homo sapien
gctttccttctcctatgaggcctgc

SEQ ID NO: 229869 - DNA, 25 bp, Homo sapien
tgctaactcttgcagctgtaaaagg

SEQ ID NO: 229870 - DNA, 25 bp, Homo sapien
cagtgccagcttttatcttaagaaa

SEQ ID NO: 229871 - DNA, 25 bp, Homo sapien
tagatatggaatcagtgccagcttt

SEQ ID NO: 229872 - DNA, 25 bp, Homo sapien
aataatgcaatgtcgggtctgtcag

SEQ ID NO: 229873 - DNA, 25 bp, Homo sapien
ttactccaggttttctcccctgcag

SEQ ID NO: 229874 - DNA, 25 bp, Homo sapien
tagatacttggcctgaattaggcag

SEQ ID NO: 229875 - DNA, 25 bp, Homo sapien
caaaaggttgtaagagcacatggaa

SEQ ID NO: 229876 - DNA, 25 bp, Homo sapien
tctgggctctgcaatttaattcata

SEQ ID NO: 229877 - DNA, 25 bp, Homo sapien
tagttcactttcgtaatctttggga

SEQ ID NO: 229878 - DNA, 25 bp, Homo sapien
gagattgttcgcacagtaagcactg

SEQ ID NO: 229879 - DNA, 25 bp, Homo sapien
ggaatcaggtttttgctttaggcac

SEQ ID NO: 229880 - DNA, 25 bp, Homo sapien
tcatagagagattgttcgcacagta

SEQ ID NO: 229881 - DNA, 25 bp, Homo sapien
cttttgactggtacttggaatcagg

SEQ ID NO: 229882 - DNA, 25 bp, Homo sapien
tagccccctgaaaggtggctgatgg

SEQ ID NO: 229883 - DNA, 25 bp, Homo sapien
cccctgaaaggtggctgatggctgg

SEQ ID NO: 229884 - DNA, 25 bp, Homo sapien
gtttagccccctgaaaggtggctga

SEQ ID NO: 229885 - DNA, 25 bp, Homo sapien
gccccctgaaaggtggctgatggct

SEQ ID NO: 229886 - DNA, 25 bp, Homo sapien
tccggatagcggttgtttccattaa

SEQ ID NO: 229887 - DNA, 25 bp, Homo sapien
gatgaaagtgcaaaccttttcttgc

SEQ ID NO: 229888 - DNA, 25 bp, Homo sapien
gacagttgtctcttcgaatggagaa

SEQ ID NO: 229889 - DNA, 25 bp, Homo sapien
tagcaaattggctagcatgcagctc

SEQ ID NO: 229890 - DNA, 25 bp, Homo sapien
aggtataaaggtcactagcaaatgt

SEQ ID NO: 229891 - DNA, 25 bp, Homo sapien
caggtataaaggtcactagcaaatg

SEQ ID NO: 229892 - DNA, 25 bp, Homo sapien
aggctggacattttcactgatccaa

SEQ ID NO: 229893 - DNA, 25 bp, Homo sapien
ctgagggctggatacactcatcaag

SEQ ID NO: 229894 - DNA, 25 bp, Homo sapien
gctggatacactcatcaagtcaaga

SEQ ID NO: 229895 - DNA, 25 bp, Homo sapien
gacattttcactgatccaaaggtca

SEQ ID NO: 229896 - DNA, 25 bp, Homo sapien
gactgcagcttgacttaatgtttca

SEQ ID NO: 229897 - DNA, 25 bp, Homo sapien
gaaagtcttattccctgaaatgccg

SEQ ID NO: 229898 - DNA, 25 bp, Homo sapien
aggacatgatgaaagtcttattccc

SEQ ID NO: 229899 - DNA, 25 bp, Homo sapien
tattccctgaaatgccgactgcagc

SEQ ID NO: 229900 - DNA, 25 bp, Homo sapien
cagtgtcgggatagtacttctcaac

SEQ ID NO: 229901 - DNA, 25 bp, Homo sapien
gggaaggcatgtctccctaagttaa

SEQ ID NO: 229902 - DNA, 25 bp, Homo sapien
gatgtctgtgggtcatggtgattat

SEQ ID NO: 229903 - DNA, 25 bp, Homo sapien
ttaatcctttccttcagtgtcggga

SEQ ID NO: 229904 - DNA, 25 bp, Homo sapien
ctagtgtgttctactgttgtgacca

SEQ ID NO: 229905 - DNA, 25 bp, Homo sapien
ctactgataggaggtacagaagatc

SEQ ID NO: 229906 - DNA, 25 bp, Homo sapien
gaatataattactagtgtgttctac

SEQ ID NO: 229907 - DNA, 25 bp, Homo sapien
gataggaggtacagaagatccaaca

SEQ ID NO: 229908 - DNA, 25 bp, Homo sapien
tgtcttgagcattaccactgtctta

SEQ ID NO: 229909 - DNA, 25 bp, Homo sapien
tgcagcagtgttgggtgatcaattg

SEQ ID NO: 229910 - DNA, 25 bp, Homo sapien
cagcaatataatcagtgaatggcaa

SEQ ID NO: 229911 - DNA, 25 bp, Homo sapien
tagtaaaaccttatgtatgcagcag

SEQ ID NO: 229912 - DNA, 25 bp, Homo sapien
tgaaactgaataatgctaaactgtt

SEQ ID NO: 229913 - DNA, 25 bp, Homo sapien
gaagaaacgtaggaatgaaactgaa

SEQ ID NO: 229914 - DNA, 25 bp, Homo sapien
taaacatagttatgcttcctcatgg

SEQ ID NO: 229915 - DNA, 25 bp, Homo sapien
cttgttgctctgtattctcttttgt

SEQ ID NO: 229916 - DNA, 25 bp, Homo sapien
atctgcatatgtagatccatgatcc

SEQ ID NO: 229917 - DNA, 25 bp, Homo sapien
tctgcatatgtagatccatgatcca

SEQ ID NO: 229918 - DNA, 25 bp, Homo sapien
gcagctactaccgataaaccaggtg

SEQ ID NO: 229919 - DNA, 25 bp, Homo sapien
gaatgatttatgaaagagtggaaga

SEQ ID NO: 229920 - DNA, 25 bp, Homo sapien
ggaggagataccagaggcagctact

SEQ ID NO: 229921 - DNA, 25 bp, Homo sapien
tgataaagttgtgagtctgtagcat

SEQ ID NO: 229922 - DNA, 25 bp, Homo sapien
cttaacaatgaatttgatactgttg

SEQ ID NO: 229923 - DNA, 25 bp, Homo sapien
gatttataagttattgtcactggcg

SEQ ID NO: 229924 - DNA, 25 bp, Homo sapien
ccaattaacatctacttgtcaccag

SEQ ID NO: 229925 - DNA, 25 bp, Homo sapien
ttccactttcttagacaattttgta

SEQ ID NO: 229926 - DNA, 25 bp, Homo sapien
tgtcactggcgtacatttttccact

SEQ ID NO: 229927 - DNA, 25 bp, Homo sapien
gatctcctgccttcaaactcttatg

SEQ ID NO: 229928 - DNA, 25 bp, Homo sapien
taaatgccaagcacacaatggtttg

SEQ ID NO: 229929 - DNA, 25 bp, Homo sapien
gaagaacgacgtgtttacttctcca

SEQ ID NO: 229930 - DNA, 25 bp, Homo sapien
tataacgggccaaagaggatgttct

SEQ ID NO: 229931 - DNA, 25 bp, Homo sapien
ttaactcttatgtatgacttccatg

SEQ ID NO: 229932 - DNA, 25 bp, Homo sapien
taatggatctgtatgcattgctagt

SEQ ID NO: 229933 - DNA, 25 bp, Homo sapien
tatgtatgacttccatggaatctct

SEQ ID NO: 229934 - DNA, 25 bp, Homo sapien
ttttaatggatctgtatgcattgct

SEQ ID NO: 229935 - DNA, 25 bp, Homo sapien
tttctccattggttgctgatagtgc

SEQ ID NO: 229936 - DNA, 25 bp, Homo sapien
tctccattggttgctgatagtgctt

SEQ ID NO: 229937 - DNA, 25 bp, Homo sapien
aagtgtatttcaggaggttgtgccc

SEQ ID NO: 229938 - DNA, 25 bp, Homo sapien
cattggttgctgatagtgctttctt

SEQ ID NO: 229939 - DNA, 25 bp, Homo sapien
aagaggctcttcgactgtgtttttc

SEQ ID NO: 229940 - DNA, 25 bp, Homo sapien
gaatggtagttaaagaggctcttcg

SEQ ID NO: 229941 - DNA, 25 bp, Homo sapien
tagttaaagaggctcttcgactgtg

SEQ ID NO: 229942 - DNA, 25 bp, Homo sapien
tctaccacaagaatggtagttaaag

SEQ ID NO: 229943 - DNA, 25 bp, Homo sapien
catcagaagcacaggagcacctttg

SEQ ID NO: 229944 - DNA, 25 bp, Homo sapien
taagaagaacatcctttgatgtaca

SEQ ID NO: 229945 - DNA, 25 bp, Homo sapien
tcaccatgtgttttggagaaatccg

SEQ ID NO: 229946 - DNA, 25 bp, Homo sapien
tgctcccagaaattcgtgtgctaaa

SEQ ID NO: 229947 - DNA, 25 bp, Homo sapien
cactggagcacctgggccagtctct

SEQ ID NO: 229948 - DNA, 25 bp, Homo sapien
gcacctgggccagtctcttccccat

SEQ ID NO: 229949 - DNA, 25 bp, Homo sapien
gagcacctgggccagtctcttcccc

SEQ ID NO: 229950 - DNA, 25 bp, Homo sapien
ctggagcacctgggccagtctcttc

SEQ ID NO: 229951 - DNA, 25 bp, Homo sapien
ctgcttgtccgggttttcaacagag

SEQ ID NO: 229952 - DNA, 25 bp, Homo sapien
agcccctgatggatatggaactctg

SEQ ID NO: 229953 - DNA, 25 bp, Homo sapien
ctgcttgtctctggagacttgacag

SEQ ID NO: 229954 - DNA, 25 bp, Homo sapien
tctctggagacttgacagcctcact

SEQ ID NO: 229955 - DNA, 25 bp, Homo sapien
ccctgtgctgacaaaatggcagctg

SEQ ID NO: 229956 - DNA, 25 bp, Homo sapien
ctgtgctgacaaaatggcagctgaa

SEQ ID NO: 229957 - DNA, 25 bp, Homo sapien
cctgtgctgacaaaatggcagctga

SEQ ID NO: 229958 - DNA, 25 bp, Homo sapien
tccactggacacaatataatgacgt

SEQ ID NO: 229959 - DNA, 25 bp, Homo sapien
gttctgttgtacattgggtcatagt

SEQ ID NO: 229960 - DNA, 25 bp, Homo sapien
tccttctagatctgttgtctgtgaa

SEQ ID NO: 229961 - DNA, 25 bp, Homo sapien
taaacaatagtgagtgaatggattc

SEQ ID NO: 229962 - DNA, 25 bp, Homo sapien
ctgtgttcttggatccatttcttat

SEQ ID NO: 229963 - DNA, 25 bp, Homo sapien
cctgtgttcttggatccatttctta

SEQ ID NO: 229964 - DNA, 25 bp, Homo sapien
gtgttcttggatccatttcttattc

SEQ ID NO: 229965 - DNA, 25 bp, Homo sapien
ccctgtgttcttggatccatttctt

SEQ ID NO: 229966 - DNA, 25 bp, Homo sapien
ttaagattctcccagtagattggta

SEQ ID NO: 229967 - DNA, 25 bp, Homo sapien
aagatcctctcaagttcttgatcag

SEQ ID NO: 229968 - DNA, 25 bp, Homo sapien
agacctctttctgagatccattgac

SEQ ID NO: 229969 - DNA, 25 bp, Homo sapien
tcttgtagacctctttctgagatcc

SEQ ID NO: 229970 - DNA, 25 bp, Homo sapien
atttcctcatactcatcaaacacca

SEQ ID NO: 229971 - DNA, 25 bp, Homo sapien
tactcatcaaacaccaagtcataca

SEQ ID NO: 229972 - DNA, 25 bp, Homo sapien
ctcatactcatcaaacaccaagtca

SEQ ID NO: 229973 - DNA, 25 bp, Homo sapien
tttcctcatactcatcaaacaccaa

SEQ ID NO: 229974 - DNA, 25 bp, Homo sapien
gatgaaggcagcaagtagcacagga

SEQ ID NO: 229975 - DNA, 25 bp, Homo sapien
tagacgagtcgtttcaggcagcaaa

SEQ ID NO: 229976 - DNA, 25 bp, Homo sapien
tccaagtaatctccatagggcgtgc

SEQ ID NO: 229977 - DNA, 25 bp, Homo sapien
gccagagggtgccagatgtgtccaa

SEQ ID NO: 229978 - DNA, 25 bp, Homo sapien
tgagagcagttgatatgtcactaga

SEQ ID NO: 229979 - DNA, 25 bp, Homo sapien
gcagttgatatgtcactagaatcaa

SEQ ID NO: 229980 - DNA, 25 bp, Homo sapien
gcttgagagcagttgatatgtcact

SEQ ID NO: 229981 - DNA, 25 bp, Homo sapien
atagcttgagagcagttgatatgtc

SEQ ID NO: 229982 - DNA, 25 bp, Homo sapien
tcttcaagcttggctcctatctcca

SEQ ID NO: 229983 - DNA, 25 bp, Homo sapien
ttcttcaagcttggctcctatctcc

SEQ ID NO: 229984 - DNA, 25 bp, Homo sapien
cttcaagcttggctcctatctccat

SEQ ID NO: 229985 - DNA, 25 bp, Homo sapien
attcttcaagcttggctcctatctc

SEQ ID NO: 229986 - DNA, 25 bp, Homo sapien
tgaagtccccagagtttctccgatg

SEQ ID NO: 229987 - DNA, 25 bp, Homo sapien
gcctgcgggatagctgcctgaagtc

SEQ ID NO: 229988 - DNA, 25 bp, Homo sapien
tcctgcaatattacagcctgcggga

SEQ ID NO: 229989 - DNA, 25 bp, Homo sapien
tctccgatggccagtatgcaatcct

SEQ ID NO: 229990 - DNA, 25 bp, Homo sapien
gagctctctgattgttgcactgaca

SEQ ID NO: 229991 - DNA, 25 bp, Homo sapien
agtaacgatgacaaaagagcttcag

SEQ ID NO: 229992 - DNA, 25 bp, Homo sapien
gagactattatttgccctagtaacg

SEQ ID NO: 229993 - DNA, 25 bp, Homo sapien
ttttgctggtgttccctgcgagagc

SEQ ID NO: 229994 - DNA, 25 bp, Homo sapien
acagatactgtcactgcagaccagg

SEQ ID NO: 229995 - DNA, 25 bp, Homo sapien
tgtgacagatactgtcactgcagac

SEQ ID NO: 229996 - DNA, 25 bp, Homo sapien
atttctgctagtcttggaaactcct

SEQ ID NO: 229997 - DNA, 25 bp, Homo sapien
atccagtcttgtgacagatactgtc

SEQ ID NO: 229998 - DNA, 25 bp, Homo sapien
cagattttcttgtcaaagatgttat

SEQ ID NO: 229999 - DNA, 25 bp, Homo sapien
aaagatgttatactggtccaggttc

SEQ ID NO: 230000 - DNA, 25 bp, Homo sapien
cactagctgtctcctttagggatct

SEQ ID NO: 230001 - DNA, 25 bp, Homo sapien
tcattacagcctgtgtcccacagat

SEQ ID NO: 230002 - DNA, 25 bp, Homo sapien
taagtaagagccaaaattcataggg

SEQ ID NO: 230003 - DNA, 25 bp, Homo sapien
gctctctggaatttcggtatcatga

SEQ ID NO: 230004 - DNA, 25 bp, Homo sapien
tcatgagaacacataagtaagagcc

SEQ ID NO: 230005 - DNA, 25 bp, Homo sapien
tctctggggctatcattgcaccctc

SEQ ID NO: 230006 - DNA, 25 bp, Homo sapien
gatgtttctcatagcttgaattact

SEQ ID NO: 230007 - DNA, 25 bp, Homo sapien
agatgtttctcatagcttgaattac

SEQ ID NO: 230008 - DNA, 25 bp, Homo sapien
atgtttctcatagcttgaattactg

SEQ ID NO: 230009 - DNA, 25 bp, Homo sapien
cagccagagctagtagaaactggtt

SEQ ID NO: 230010 - DNA, 25 bp, Homo sapien
aaatgggctgccgtagtggcatata

SEQ ID NO: 230011 - DNA, 25 bp, Homo sapien
tattgcttcggtacgcactgcagcc

SEQ ID NO: 230012 - DNA, 25 bp, Homo sapien
actgcagccagagctagtagaaact

SEQ ID NO: 230013 - DNA, 25 bp, Homo sapien
cacttaccagaaggtaagaactact

SEQ ID NO: 230014 - DNA, 25 bp, Homo sapien
cagaaggtaagaactacttgttagg

SEQ ID NO: 230015 - DNA, 25 bp, Homo sapien
tcctcacttaccagaaggtaagaac

SEQ ID NO: 230016 - DNA, 25 bp, Homo sapien
cttaccagaaggtaagaactacttg

SEQ ID NO: 230017 - DNA, 25 bp, Homo sapien
ccttgcagacagtcaacatggaagg

SEQ ID NO: 230018 - DNA, 25 bp, Homo sapien
accgcagattactattccttgcaga

SEQ ID NO: 230019 - DNA, 25 bp, Homo sapien
cgcagattactattccttgcagaca

SEQ ID NO: 230020 - DNA, 25 bp, Homo sapien
cagattactattccttgcagacagt

SEQ ID NO: 230021 - DNA, 25 bp, Homo sapien
acgccattagtatgacagcattttg

SEQ ID NO: 230022 - DNA, 25 bp, Homo sapien
ggacgccattagtatgacagcattt

SEQ ID NO: 230023 - DNA, 25 bp, Homo sapien
aggacgccattagtatgacagcatt

SEQ ID NO: 230024 - DNA, 25 bp, Homo sapien
ttatggaatcggcaggcaggacgcc

SEQ ID NO: 230025 - DNA, 25 bp, Homo sapien
aaaagcaactgcctgcttgaaatcc

SEQ ID NO: 230026 - DNA, 25 bp, Homo sapien
gtaaaagcaactgcctgcttgaaat

SEQ ID NO: 230027 - DNA, 25 bp, Homo sapien
ggtaaaagcaactgcctgcttgaaa

SEQ ID NO: 230028 - DNA, 25 bp, Homo sapien
caggtaaaagcaactgcctgcttga

SEQ ID NO: 230029 - DNA, 25 bp, Homo sapien
tgggagaggtcaataagggtaacca

SEQ ID NO: 230030 - DNA, 25 bp, Homo sapien
gaagtggagaagctgagttgatatt

SEQ ID NO: 230031 - DNA, 25 bp, Homo sapien
ggagaagctgagttgatattcaagc

SEQ ID NO: 230032 - DNA, 25 bp, Homo sapien
gatattcaagcttacttccaggtgg

SEQ ID NO: 230033 - DNA, 25 bp, Homo sapien
ggcaatgttattgcaggggctgaaa

SEQ ID NO: 230034 - DNA, 25 bp, Homo sapien
tattgcaggggctgaaatcctgggc

SEQ ID NO: 230035 - DNA, 25 bp, Homo sapien
tcaggcaatgttattgcaggggctg

SEQ ID NO: 230036 - DNA, 25 bp, Homo sapien
caatgttattgcaggggctgaaatc

SEQ ID NO: 230037 - DNA, 25 bp, Homo sapien
gcgggatcgtgggtgagtcaagcag

SEQ ID NO: 230038 - DNA, 25 bp, Homo sapien
gagcgggatcgtgggtgagtcaagc

SEQ ID NO: 230039 - DNA, 25 bp, Homo sapien
ctacgagcgggatcgtgggtgagtc

SEQ ID NO: 230040 - DNA, 25 bp, Homo sapien
tacgagcgggatcgtgggtgagtca

SEQ ID NO: 230041 - DNA, 25 bp, Homo sapien
tggagtgatccctccttgctaagga

SEQ ID NO: 230042 - DNA, 25 bp, Homo sapien
cattacttgaaaggcagagcaaact

SEQ ID NO: 230043 - DNA, 25 bp, Homo sapien
ggattttggagtgatccctccttgc

SEQ ID NO: 230044 - DNA, 25 bp, Homo sapien
ggcaagaggattacaaaatctcact

SEQ ID NO: 230045 - DNA, 25 bp, Homo sapien
tggtgacgagcgaggactttctctg

SEQ ID NO: 230046 - DNA, 25 bp, Homo sapien
caagcttgctggtgacgagcgagga

SEQ ID NO: 230047 - DNA, 25 bp, Homo sapien
tgctggtgacgagcgaggactttct

SEQ ID NO: 230048 - DNA, 25 bp, Homo sapien
agcttgctggtgacgagcgaggact

SEQ ID NO: 230049 - DNA, 25 bp, Homo sapien
caaagtacttttgccctttctggag

SEQ ID NO: 230050 - DNA, 25 bp, Homo sapien
agtacttttgccctttctggagtct

SEQ ID NO: 230051 - DNA, 25 bp, Homo sapien
tcaaagtacttttgccctttctgga

SEQ ID NO: 230052 - DNA, 25 bp, Homo sapien
gctcctatcactagggttgctcagt

SEQ ID NO: 230053 - DNA, 25 bp, Homo sapien
gctgcttcggctcctatcactaggg

SEQ ID NO: 230054 - DNA, 25 bp, Homo sapien
ctagggttgctcagttaaaatggcg

SEQ ID NO: 230055 - DNA, 25 bp, Homo sapien
tgcgctgctgcttcggctcctatca

SEQ ID NO: 230056 - DNA, 25 bp, Homo sapien
acagtttccgctgaaattttcaagc

SEQ ID NO: 230057 - DNA, 25 bp, Homo sapien
ctacaccagggcagatatccagatg

SEQ ID NO: 230058 - DNA, 25 bp, Homo sapien
tatgatgcccaggtactacaccagg

SEQ ID NO: 230059 - DNA, 25 bp, Homo sapien
gccaagtggctgctatgacaaagac

SEQ ID NO: 230060 - DNA, 25 bp, Homo sapien
taccgtatgccccagagtggttaaa

SEQ ID NO: 230061 - DNA, 25 bp, Homo sapien
tcatgaccttcaccactatttggct

SEQ ID NO: 230062 - DNA, 25 bp, Homo sapien
gggccactggtatcctttgctgtta

SEQ ID NO: 230063 - DNA, 25 bp, Homo sapien
tagtgacacttcaattcttgtactg

SEQ ID NO: 230064 - DNA, 25 bp, Homo sapien
catcatgtttccacattgccagata

SEQ ID NO: 230065 - DNA, 25 bp, Homo sapien
tcatgtttccacattgccagatacc

SEQ ID NO: 230066 - DNA, 25 bp, Homo sapien
cttctccgttgcttattctcacaat

SEQ ID NO: 230067 - DNA, 25 bp, Homo sapien
tctccgttgcttattctcacaatga

SEQ ID NO: 230068 - DNA, 25 bp, Homo sapien
aagggcctgatacatgctgttgatc

SEQ ID NO: 230069 - DNA, 25 bp, Homo sapien
cttggaactcaaacaaagggcctga

SEQ ID NO: 230070 - DNA, 25 bp, Homo sapien
gctgaactagctgtatttggccttg

SEQ ID NO: 230071 - DNA, 25 bp, Homo sapien
ggcaggtaccacactaaatcatttt

SEQ ID NO: 230072 - DNA, 25 bp, Homo sapien
aacaaagcctatgtgcatacagtca

SEQ ID NO: 230073 - DNA, 25 bp, Homo sapien
caacaaagcctatgtgcatacagtc

SEQ ID NO: 230074 - DNA, 25 bp, Homo sapien
gccttgttcttggacccacatggga

SEQ ID NO: 230075 - DNA, 25 bp, Homo sapien
tggcgggcagcaccttgggtctaaa

SEQ ID NO: 230076 - DNA, 25 bp, Homo sapien
tgcccttgatagctgtggactctgc

SEQ ID NO: 230077 - DNA, 25 bp, Homo sapien
cacaagcactggagatacgagcatc

SEQ ID NO: 230078 - DNA, 25 bp, Homo sapien
ccctttttggcatgactgttattcc

SEQ ID NO: 230079 - DNA, 25 bp, Homo sapien
ggccctttttggcatgactgttatt

SEQ ID NO: 230080 - DNA, 25 bp, Homo sapien
tttttggcatgactgttattccttc

SEQ ID NO: 230081 - DNA, 25 bp, Homo sapien
ggcatgactgttattccttcttttt

SEQ ID NO: 230082 - DNA, 25 bp, Homo sapien
aatatcgcttttcggggcagtcaga

SEQ ID NO: 230083 - DNA, 25 bp, Homo sapien
tcacactgagaaatatcgcttttcg

SEQ ID NO: 230084 - DNA, 25 bp, Homo sapien
ggcttacaagggtatagagtatggc

SEQ ID NO: 230085 - DNA, 25 bp, Homo sapien
tggcttacaagggtatagagtatgg

SEQ ID NO: 230086 - DNA, 25 bp, Homo sapien
tgaaaaactttcaaggatgctggat

SEQ ID NO: 230087 - DNA, 25 bp, Homo sapien
tattcctgacagatgcaccgtggtc

SEQ ID NO: 230088 - DNA, 25 bp, Homo sapien
tccattgtatgaagccagctgcctt

SEQ ID NO: 230089 - DNA, 25 bp, Homo sapien
tatagctgggtccaaattgtttcca

SEQ ID NO: 230090 - DNA, 25 bp, Homo sapien
taaactctgtgggaaaagctgtaga

SEQ ID NO: 230091 - DNA, 25 bp, Homo sapien
tggaactagaaccacttgccaaccc

SEQ ID NO: 230092 - DNA, 25 bp, Homo sapien
tctgcgaatgtaggagctaaactct

SEQ ID NO: 230093 - DNA, 25 bp, Homo sapien
gccaaccctcggtactgaattcatt

SEQ ID NO: 230094 - DNA, 25 bp, Homo sapien
gaattgcatctctcgaaaatatatt

SEQ ID NO: 230095 - DNA, 25 bp, Homo sapien
gtttgaattgcatctctcgaaaata

SEQ ID NO: 230096 - DNA, 25 bp, Homo sapien
tggtttgaattgcatctctcgaaaa

SEQ ID NO: 230097 - DNA, 25 bp, Homo sapien
tgcatctctcgaaaatatattttga

SEQ ID NO: 230098 - DNA, 25 bp, Homo sapien
tcagaaggaaccaatccagtggaca

SEQ ID NO: 230099 - DNA, 25 bp, Homo sapien
gtgacgcagctacaagccgggaact

SEQ ID NO: 230100 - DNA, 25 bp, Homo sapien
ggtcatcctaggttagagtgggccc

SEQ ID NO: 230101 - DNA, 25 bp, Homo sapien
ccgggaactccaaagattgcaagca

SEQ ID NO: 230102 - DNA, 25 bp, Homo sapien
catgctacaatctcatcaacagctc

SEQ ID NO: 230103 - DNA, 25 bp, Homo sapien
tcacacatgctacaatctcatcaac

SEQ ID NO: 230104 - DNA, 25 bp, Homo sapien
cacatgctacaatctcatcaacagc

SEQ ID NO: 230105 - DNA, 25 bp, Homo sapien
attctgctgtgacatacaatcttgt

SEQ ID NO: 230106 - DNA, 25 bp, Homo sapien
cttctttatcacctgcaggttgctc

SEQ ID NO: 230107 - DNA, 25 bp, Homo sapien
gttcttctttatcacctgcaggttg

SEQ ID NO: 230108 - DNA, 25 bp, Homo sapien
tctttatcacctgcaggttgctctg

SEQ ID NO: 230109 - DNA, 25 bp, Homo sapien
ttcttctttatcacctgcaggttgc

SEQ ID NO: 230110 - DNA, 25 bp, Homo sapien
tgaagaccccgagccaagcctggaa

SEQ ID NO: 230111 - DNA, 25 bp, Homo sapien
gaccatcaaactttaaagcatcatg

SEQ ID NO: 230112 - DNA, 25 bp, Homo sapien
aagcatcatgaagaccccgagccaa

SEQ ID NO: 230113 - DNA, 25 bp, Homo sapien
ttccgctccagaccatcaaacttta

SEQ ID NO: 230114 - DNA, 25 bp, Homo sapien
gaatgaccttggctttgcccaaaag

SEQ ID NO: 230115 - DNA, 25 bp, Homo sapien
gcagagtagttcacgatggcaagta

SEQ ID NO: 230116 - DNA, 25 bp, Homo sapien
tcaaagacatcgaaacccaagttag

SEQ ID NO: 230117 - DNA, 25 bp, Homo sapien
cagggatatgagtttagcaagagcc

SEQ ID NO: 230118 - DNA, 25 bp, Homo sapien
taaagtcactggaatttgggagtac

SEQ ID NO: 230119 - DNA, 25 bp, Homo sapien
tggcctcagcaatgttcctaaagtc

SEQ ID NO: 230120 - DNA, 25 bp, Homo sapien
tagaaggccttttgagcacaacggg

SEQ ID NO: 230121 - DNA, 25 bp, Homo sapien
catgaagcgcaaacggaaaatgtag

SEQ ID NO: 230122 - DNA, 25 bp, Homo sapien
ttatgctacacagctctctctctgc

SEQ ID NO: 230123 - DNA, 25 bp, Homo sapien
tctctctctgcaccgagtgtcctct

SEQ ID NO: 230124 - DNA, 25 bp, Homo sapien
tctctgcaccgagtgtcctctatag

SEQ ID NO: 230125 - DNA, 25 bp, Homo sapien
tctctctgcaccgagtgtcctctat

SEQ ID NO: 230126 - DNA, 25 bp, Homo sapien
tcagcccccttatccagtgattttc

SEQ ID NO: 230127 - DNA, 25 bp, Homo sapien
tcttcagcccccttatccagtgatt

SEQ ID NO: 230128 - DNA, 25 bp, Homo sapien
ccttttgcctaaagaatgccattta

SEQ ID NO: 230129 - DNA, 25 bp, Homo sapien
atcttcagcccccttatccagtgat

SEQ ID NO: 230130 - DNA, 25 bp, Homo sapien
tcttgttgaccctttccctgtttca

SEQ ID NO: 230131 - DNA, 25 bp, Homo sapien
cattggtgactagggagtggatttc

SEQ ID NO: 230132 - DNA, 25 bp, Homo sapien
tcagcattggtgactagggagtgga

SEQ ID NO: 230133 - DNA, 25 bp, Homo sapien
tctactgtcgttgccaaacagatta

SEQ ID NO: 230134 - DNA, 25 bp, Homo sapien
ttattttctactgtcgttgccaaac

SEQ ID NO: 230135 - DNA, 25 bp, Homo sapien
tctgtaagcggattgtccgaaggca

SEQ ID NO: 230136 - DNA, 25 bp, Homo sapien
tgacttccttgatccttaacctctt

SEQ ID NO: 230137 - DNA, 25 bp, Homo sapien
tcaactggtctattgtgactgagat

SEQ ID NO: 230138 - DNA, 25 bp, Homo sapien
gcagagacaccgagatcctggatgt

SEQ ID NO: 230139 - DNA, 25 bp, Homo sapien
catgcatcataaaaagaaccatatt

SEQ ID NO: 230140 - DNA, 25 bp, Homo sapien
gagaggtgctaataaaaatgaaggc

SEQ ID NO: 230141 - DNA, 25 bp, Homo sapien
aggcttttctatttcactcaatccc

SEQ ID NO: 230142 - DNA, 25 bp, Homo sapien
ttaaaagcaaaatagagaggtgcta

SEQ ID NO: 230143 - DNA, 25 bp, Homo sapien
tgagtgaaggagtaattaggcacaa

SEQ ID NO: 230144 - DNA, 25 bp, Homo sapien
caatggcactaatgttatgacacac

SEQ ID NO: 230145 - DNA, 25 bp, Homo sapien
cttgctagctgctgatgagtgaagg

SEQ ID NO: 230146 - DNA, 25 bp, Homo sapien
tctggagagaatttccaatggcact

SEQ ID NO: 230147 - DNA, 25 bp, Homo sapien
atggaatgaagccaagccatcaaac

SEQ ID NO: 230148 - DNA, 25 bp, Homo sapien
gatttaggactgtgaacctgaattc

SEQ ID NO: 230149 - DNA, 25 bp, Homo sapien
atcaaactcatctgatttaggactg

SEQ ID NO: 230150 - DNA, 25 bp, Homo sapien
gactgtgaacctgaattcctatgga

SEQ ID NO: 230151 - DNA, 25 bp, Homo sapien
gctgctgatctgcaagccaccaggg

SEQ ID NO: 230152 - DNA, 25 bp, Homo sapien
aagagccaaggacgaggaaatatat

SEQ ID NO: 230153 - DNA, 25 bp, Homo sapien
gttgaaaagagccaaggacgaggaa

SEQ ID NO: 230154 - DNA, 25 bp, Homo sapien
tgaaatagacacgtgtgttgctgct

SEQ ID NO: 230155 - DNA, 25 bp, Homo sapien
taattaggaatgtttggtctgtggc

SEQ ID NO: 230156 - DNA, 25 bp, Homo sapien
gtggctttagttgccaaagagcagc

SEQ ID NO: 230157 - DNA, 25 bp, Homo sapien
gccccattgttctaacacacagaca

SEQ ID NO: 230158 - DNA, 25 bp, Homo sapien
tctcctaggtaaaatgacaacatct

SEQ ID NO: 230159 - DNA, 25 bp, Homo sapien
tgcaccacctgtgtatgcacgttgg

SEQ ID NO: 230160 - DNA, 25 bp, Homo sapien
tggcaacacatgtcacgggtttctg

SEQ ID NO: 230161 - DNA, 25 bp, Homo sapien
taagctcacgtgtagttgttccaca

SEQ ID NO: 230162 - DNA, 25 bp, Homo sapien
gccaatgacgacacgaatgccaagt

SEQ ID NO: 230163 - DNA, 25 bp, Homo sapien
ataaaactattttaaggcacagtga

SEQ ID NO: 230164 - DNA, 25 bp, Homo sapien
actattttaaggcacagtgattttt

SEQ ID NO: 230165 - DNA, 25 bp, Homo sapien
ctggggttacatgcgtgtgcctcca

SEQ ID NO: 230166 - DNA, 25 bp, Homo sapien
gggttacatgcgtgtgcctccacac

SEQ ID NO: 230167 - DNA, 25 bp, Homo sapien
tgccacatctgctaggtatctcttg

SEQ ID NO: 230168 - DNA, 25 bp, Homo sapien
cttcagaagtggcagccgtgcccag

SEQ ID NO: 230169 - DNA, 25 bp, Homo sapien
ccactgatattctgcttccagcggg

SEQ ID NO: 230170 - DNA, 25 bp, Homo sapien
ggcagcattaatgacctggtcccag

SEQ ID NO: 230171 - DNA, 25 bp, Homo sapien
agacaggagtgtagatttaaaatgc

SEQ ID NO: 230172 - DNA, 25 bp, Homo sapien
gacaggagtgtagatttaaaatgca

SEQ ID NO: 230173 - DNA, 25 bp, Homo sapien
gcagacaggagtgtagatttaaaat

SEQ ID NO: 230174 - DNA, 25 bp, Homo sapien
cagacaggagtgtagatttaaaatg

SEQ ID NO: 230175 - DNA, 25 bp, Homo sapien
catccgacgttaagtttggtgtaat

SEQ ID NO: 230176 - DNA, 25 bp, Homo sapien
gatagaataaccatcccagtggagt

SEQ ID NO: 230177 - DNA, 25 bp, Homo sapien
cagggaataggctagagataactca

SEQ ID NO: 230178 - DNA, 25 bp, Homo sapien
aatacagcttctaaaccatccgacg

SEQ ID NO: 230179 - DNA, 25 bp, Homo sapien
actgcagcacaagcaaaatgtatct

SEQ ID NO: 230180 - DNA, 25 bp, Homo sapien
tcatgccaacacgatcaagtaagtt

SEQ ID NO: 230181 - DNA, 25 bp, Homo sapien
gcaatgcccatagaggttatagact

SEQ ID NO: 230182 - DNA, 25 bp, Homo sapien
tatgtcatagtgatcgcaatgccca

SEQ ID NO: 230183 - DNA, 25 bp, Homo sapien
tagaagattaccgtgcagaacgtgg

SEQ ID NO: 230184 - DNA, 25 bp, Homo sapien
cacaacccatgggtctgtttctcat

SEQ ID NO: 230185 - DNA, 25 bp, Homo sapien
tcacaacccatgggtctgtttctca

SEQ ID NO: 230186 - DNA, 25 bp, Homo sapien
gctgactggctcacataagggctag

SEQ ID NO: 230187 - DNA, 25 bp, Homo sapien
tagtatcagaaagaggcctctcctc

SEQ ID NO: 230188 - DNA, 25 bp, Homo sapien
catcccctgaactctgctctttaaa

SEQ ID NO: 230189 - DNA, 25 bp, Homo sapien
ctttaaatccctgacaaccatattt

SEQ ID NO: 230190 - DNA, 25 bp, Homo sapien
ttatcttctaaacttaataagctca

SEQ ID NO: 230191 - DNA, 25 bp, Homo sapien
tttatcttctaaacttaataagctc

SEQ ID NO: 230192 - DNA, 25 bp, Homo sapien
tatcttctaaacttaataagctcat

SEQ ID NO: 230193 - DNA, 25 bp, Homo sapien
aactccaaggtgtagaatatgcctg

SEQ ID NO: 230194 - DNA, 25 bp, Homo sapien
tttaccagcaactccaaggtgtaga

SEQ ID NO: 230195 - DNA, 25 bp, Homo sapien
gtagaatatgcctgaacctgatccc

SEQ ID NO: 230196 - DNA, 25 bp, Homo sapien
ccaaggtgtagaatatgcctgaacc

SEQ ID NO: 230197 - DNA, 25 bp, Homo sapien
ttctttctgccgatattttaagtgg

SEQ ID NO: 230198 - DNA, 25 bp, Homo sapien
tttctttctgccgatattttaagtg

SEQ ID NO: 230199 - DNA, 25 bp, Homo sapien
tctttctgccgatattttaagtgga

SEQ ID NO: 230200 - DNA, 25 bp, Homo sapien
gcatcttgcacgatatggtaacttt

SEQ ID NO: 230201 - DNA, 25 bp, Homo sapien
atcttgcacgatatggtaacttttc

SEQ ID NO: 230202 - DNA, 25 bp, Homo sapien
cagcatcttgcacgatatggtaact

SEQ ID NO: 230203 - DNA, 25 bp, Homo sapien
aacagcatcttgcacgatatggtaa

SEQ ID NO: 230204 - DNA, 25 bp, Homo sapien
tcactgtgctgtaacctcaacttgt

SEQ ID NO: 230205 - DNA, 25 bp, Homo sapien
cctgggatgattgttgagaggtcaa

SEQ ID NO: 230206 - DNA, 25 bp, Homo sapien
ggtcaatatcacactctgtcactgt

SEQ ID NO: 230207 - DNA, 25 bp, Homo sapien
cacttatcggattaagagcagcatg

SEQ ID NO: 230208 - DNA, 25 bp, Homo sapien
tgtaactctaatagactccttcttc

SEQ ID NO: 230209 - DNA, 25 bp, Homo sapien
catagtctcaacattctgtgcttca

SEQ ID NO: 230210 - DNA, 25 bp, Homo sapien
taatagactccttcttcatagtctc

SEQ ID NO: 230211 - DNA, 25 bp, Homo sapien
ccttcttcatagtctcaacattctg

SEQ ID NO: 230212 - DNA, 25 bp, Homo sapien
ttctgtgctccactcagctgcagtg

SEQ ID NO: 230213 - DNA, 25 bp, Homo sapien
tctcagcattctgtgctccactcag

SEQ ID NO: 230214 - DNA, 25 bp, Homo sapien
gattccttcttctgcatggtctcag

SEQ ID NO: 230215 - DNA, 25 bp, Homo sapien
ttcttctgcatggtctcagcattct

SEQ ID NO: 230216 - DNA, 25 bp, Homo sapien
tcagcttcccgggtttactactgct

SEQ ID NO: 230217 - DNA, 25 bp, Homo sapien
aaatcagcatgactggaaagtgact

SEQ ID NO: 230218 - DNA, 25 bp, Homo sapien
tattggcattcgctcatttgagtca

SEQ ID NO: 230219 - DNA, 25 bp, Homo sapien
gaatagcagtgtcgccagtgtctgt

SEQ ID NO: 230220 - DNA, 25 bp, Homo sapien
gattctgccaaaaagagtctgccat

SEQ ID NO: 230221 - DNA, 25 bp, Homo sapien
ctgttgactctggattctgccaaaa

SEQ ID NO: 230222 - DNA, 25 bp, Homo sapien
tctgccattccagcaatgcgtttac

SEQ ID NO: 230223 - DNA, 25 bp, Homo sapien
tgaccttcccagattgggaacttgg

SEQ ID NO: 230224 - DNA, 25 bp, Homo sapien
ttttgttctctagccaaatttagca

SEQ ID NO: 230225 - DNA, 25 bp, Homo sapien
tttataattagtatcttggctcaga

SEQ ID NO: 230226 - DNA, 25 bp, Homo sapien
tctttataattagtatcttggctca

SEQ ID NO: 230227 - DNA, 25 bp, Homo sapien
gttctttataattagtatcttggct

SEQ ID NO: 230228 - DNA, 25 bp, Homo sapien
cgcccgtgaatgtgtcaaattctgg

SEQ ID NO: 230229 - DNA, 25 bp, Homo sapien
gtttaatttctatcactccctccat

SEQ ID NO: 230230 - DNA, 25 bp, Homo sapien
tgggtttaatttctatcactccctc

SEQ ID NO: 230231 - DNA, 25 bp, Homo sapien
ttctctgggtttaatttctatcact

SEQ ID NO: 230232 - DNA, 25 bp, Homo sapien
ttccagaagagttctctgggtttaa

SEQ ID NO: 230233 - DNA, 25 bp, Homo sapien
tgctttctgggagcagatcattgat

SEQ ID NO: 230234 - DNA, 25 bp, Homo sapien
tctgggagcagatcattgattgagt

SEQ ID NO: 230235 - DNA, 25 bp, Homo sapien
ctttctgggagcagatcattgattg

SEQ ID NO: 230236 - DNA, 25 bp, Homo sapien
ttgctttctgggagcagatcattga

SEQ ID NO: 230237 - DNA, 25 bp, Homo sapien
gaaacaggtcttatctgcagtgcat

SEQ ID NO: 230238 - DNA, 25 bp, Homo sapien
cattgttaattgaggacatggataa

SEQ ID NO: 230239 - DNA, 25 bp, Homo sapien
tatctgcagtgcattgttaattgag

SEQ ID NO: 230240 - DNA, 25 bp, Homo sapien
ggattaagaaacaggtcttatctgc

SEQ ID NO: 230241 - DNA, 25 bp, Homo sapien
caacacgctccatactgaagttgct

SEQ ID NO: 230242 - DNA, 25 bp, Homo sapien
ccacggaagaatgacagctttcctc

SEQ ID NO: 230243 - DNA, 25 bp, Homo sapien
cacggaagaatgacagctttcctcc

SEQ ID NO: 230244 - DNA, 25 bp, Homo sapien
tccaaaagcaacacgctccatactg

SEQ ID NO: 230245 - DNA, 25 bp, Homo sapien
agaatgagagctatgtccttgtcct

SEQ ID NO: 230246 - DNA, 25 bp, Homo sapien
gcagcagtttctattaacagaatga

SEQ ID NO: 230247 - DNA, 25 bp, Homo sapien
gaatgagagctatgtccttgtcctg

SEQ ID NO: 230248 - DNA, 25 bp, Homo sapien
tgtgcagcagtttctattaacagaa

SEQ ID NO: 230249 - DNA, 25 bp, Homo sapien
taattcctttatccgatagcttttc

SEQ ID NO: 230250 - DNA, 25 bp, Homo sapien
aattcctttatccgatagcttttct

SEQ ID NO: 230251 - DNA, 25 bp, Homo sapien
ttctaattcctttatccgatagctt

SEQ ID NO: 230252 - DNA, 25 bp, Homo sapien
cctttatccgatagcttttcttcat

SEQ ID NO: 230253 - DNA, 25 bp, Homo sapien
gctttcctgtgatacccaggtgtcc

SEQ ID NO: 230254 - DNA, 25 bp, Homo sapien
tgttctactttgagttggcctctgt

SEQ ID NO: 230255 - DNA, 25 bp, Homo sapien
cagatacaccactggcaatggcttt

SEQ ID NO: 230256 - DNA, 25 bp, Homo sapien
ttctcagtgatgttcatgtccttgt

SEQ ID NO: 230257 - DNA, 25 bp, Homo sapien
actgttctcctagggttggttgaca

SEQ ID NO: 230258 - DNA, 25 bp, Homo sapien
tcagtggagccagaacaatctgtcc

SEQ ID NO: 230259 - DNA, 25 bp, Homo sapien
gaattattaggcttctcagtggagc

SEQ ID NO: 230260 - DNA, 25 bp, Homo sapien
tccagtgatacttgatccgatcaag

SEQ ID NO: 230261 - DNA, 25 bp, Homo sapien
atttgtggcatcctcttaagtgttg

SEQ ID NO: 230262 - DNA, 25 bp, Homo sapien
tattgaacaagggatcaacgccacc

SEQ ID NO: 230263 - DNA, 25 bp, Homo sapien
tgattcaattatataaggactccgg

SEQ ID NO: 230264 - DNA, 25 bp, Homo sapien
gactccggttccttctatgttgaat

SEQ ID NO: 230265 - DNA, 25 bp, Homo sapien
tatggtagatgttagcttgtactgg

SEQ ID NO: 230266 - DNA, 25 bp, Homo sapien
aaatatggtagatgttagcttgtac

SEQ ID NO: 230267 - DNA, 25 bp, Homo sapien
tttaaatatggtagatgttagcttg

SEQ ID NO: 230268 - DNA, 25 bp, Homo sapien
tagatgttagcttgtactggaaaag

SEQ ID NO: 230269 - DNA, 25 bp, Homo sapien
tacttcatcaaaccctcactgttct

SEQ ID NO: 230270 - DNA, 25 bp, Homo sapien
atacttcatcaaaccctcactgttc

SEQ ID NO: 230271 - DNA, 25 bp, Homo sapien
tgctaagtgccaatgcatacttcat

SEQ ID NO: 230272 - DNA, 25 bp, Homo sapien
taagtgccaatgcatacttcatcaa

SEQ ID NO: 230273 - DNA, 25 bp, Homo sapien
catcgtttggagtgcttgtaaagct

SEQ ID NO: 230274 - DNA, 25 bp, Homo sapien
catttcctgggggttgtatctcaac

SEQ ID NO: 230275 - DNA, 25 bp, Homo sapien
cagaacattaggctgaaatctgcct

SEQ ID NO: 230276 - DNA, 25 bp, Homo sapien
ttgtaaagctagatcagaaataccc

SEQ ID NO: 230277 - DNA, 25 bp, Homo sapien
gaatatcaatatgcttctcactcat

SEQ ID NO: 230278 - DNA, 25 bp, Homo sapien
agaatatcaatatgcttctcactca

SEQ ID NO: 230279 - DNA, 25 bp, Homo sapien
gagaatatcaatatgcttctcactc

SEQ ID NO: 230280 - DNA, 25 bp, Homo sapien
aatatcaatatgcttctcactcata

SEQ ID NO: 230281 - DNA, 25 bp, Homo sapien
aatggctggtaccactagaatctat

SEQ ID NO: 230282 - DNA, 25 bp, Homo sapien
ttctattggttcattaaggactcta

SEQ ID NO: 230283 - DNA, 25 bp, Homo sapien
gcttaacgtcaagcattatgtccac

SEQ ID NO: 230284 - DNA, 25 bp, Homo sapien
tagaatctattttgctcacagaaga

SEQ ID NO: 230285 - DNA, 25 bp, Homo sapien
ccaacattttcccttgccttgcaca

SEQ ID NO: 230286 - DNA, 25 bp, Homo sapien
aaccaacattttcccttgccttgca

SEQ ID NO: 230287 - DNA, 25 bp, Homo sapien
accaacattttcccttgccttgcac

SEQ ID NO: 230288 - DNA, 25 bp, Homo sapien
caacattttcccttgccttgcacat

SEQ ID NO: 230289 - DNA, 25 bp, Homo sapien
gatattcttcaaccaccccgttcat

SEQ ID NO: 230290 - DNA, 25 bp, Homo sapien
accccgttcatcttcatcaaagaaa

SEQ ID NO: 230291 - DNA, 25 bp, Homo sapien
tcttattcaggtgatattcttcaac

SEQ ID NO: 230292 - DNA, 25 bp, Homo sapien
tcatcaaagaaagatgaatcgccat

SEQ ID NO: 230293 - DNA, 25 bp, Homo sapien
tatcaaggcttaattttgggtggca

SEQ ID NO: 230294 - DNA, 25 bp, Homo sapien
tcttgcattcaaggtttctgacatt

SEQ ID NO: 230295 - DNA, 25 bp, Homo sapien
catcatggatatttgagccactaca

SEQ ID NO: 230296 - DNA, 25 bp, Homo sapien
aaaatctatcttgaattggagaagc

SEQ ID NO: 230297 - DNA, 25 bp, Homo sapien
ctcgaacaaagggagacatagccat

SEQ ID NO: 230298 - DNA, 25 bp, Homo sapien
tgttggcagtcctcgaacaaaggga

SEQ ID NO: 230299 - DNA, 25 bp, Homo sapien
gaagtttgttggcagtcctcgaaca

SEQ ID NO: 230300 - DNA, 25 bp, Homo sapien
aagtacactctggaagtttgttggc

SEQ ID NO: 230301 - DNA, 25 bp, Homo sapien
tgtattccaatatgctctccagtat

SEQ ID NO: 230302 - DNA, 25 bp, Homo sapien
tgctttacttgcaagtgtgactgaa

SEQ ID NO: 230303 - DNA, 25 bp, Homo sapien
gaaatggtcgtggtctgtattccaa

SEQ ID NO: 230304 - DNA, 25 bp, Homo sapien
tgtgactgaaacactagccctgaaa

SEQ ID NO: 230305 - DNA, 25 bp, Homo sapien
tcttaatgtagtcctgatgctgcgc

SEQ ID NO: 230306 - DNA, 25 bp, Homo sapien
taatgtagtcctgatgctgcgccat

SEQ ID NO: 230307 - DNA, 25 bp, Homo sapien
ctttcttaatgtagtcctgatgctg

SEQ ID NO: 230308 - DNA, 25 bp, Homo sapien
tcctttcttaatgtagtcctgatgc

SEQ ID NO: 230309 - DNA, 25 bp, Homo sapien
atttcccaccttcatcatttttacg

SEQ ID NO: 230310 - DNA, 25 bp, Homo sapien
tcatttcccaccttcatcattttta

SEQ ID NO: 230311 - DNA, 25 bp, Homo sapien
catttcccaccttcatcatttttac

SEQ ID NO: 230312 - DNA, 25 bp, Homo sapien
agttgtgcgtatggcctgattcatc

SEQ ID NO: 230313 - DNA, 25 bp, Homo sapien
ggaacttcttcagattccgcagata

SEQ ID NO: 230314 - DNA, 25 bp, Homo sapien
gcttgaaagattaaacgttgcacat

SEQ ID NO: 230315 - DNA, 25 bp, Homo sapien
cagataccgactttttgcttgaaag

SEQ ID NO: 230316 - DNA, 25 bp, Homo sapien
agctgcttctccacagctcccagat

SEQ ID NO: 230317 - DNA, 25 bp, Homo sapien
tctccacagctcccagatttctcat

SEQ ID NO: 230318 - DNA, 25 bp, Homo sapien
gctgcttctccacagctcccagatt

SEQ ID NO: 230319 - DNA, 25 bp, Homo sapien
gcttctccacagctcccagatttct

SEQ ID NO: 230320 - DNA, 25 bp, Homo sapien
tcggatttaatatggttgctagcaa

SEQ ID NO: 230321 - DNA, 25 bp, Homo sapien
aatctggcgatctctttctctggtc

SEQ ID NO: 230322 - DNA, 25 bp, Homo sapien
aagagtttacacatagaatctggcg

SEQ ID NO: 230323 - DNA, 25 bp, Homo sapien
gaaaacctcagcttttggatacaaa

SEQ ID NO: 230324 - DNA, 25 bp, Homo sapien
tgcctgaggatcacagcctactgac

SEQ ID NO: 230325 - DNA, 25 bp, Homo sapien
tgccaaaaccattgatattttgact

SEQ ID NO: 230326 - DNA, 25 bp, Homo sapien
aattgtgatgcaactacctggcaga

SEQ ID NO: 230327 - DNA, 25 bp, Homo sapien
tactgaccccccagtatttatctgt

SEQ ID NO: 230328 - DNA, 25 bp, Homo sapien
ctgactgacccaacgtgttaactga

SEQ ID NO: 230329 - DNA, 25 bp, Homo sapien
taaggattcatctccgatgtctctc

SEQ ID NO: 230330 - DNA, 25 bp, Homo sapien
tcttctgactgacccaacgtgttaa

SEQ ID NO: 230331 - DNA, 25 bp, Homo sapien
tatttcttctgactgacccaacgtg

SEQ ID NO: 230332 - DNA, 25 bp, Homo sapien
ggcggcagctttgctccaagtctta

SEQ ID NO: 230333 - DNA, 25 bp, Homo sapien
tgaagtacaggcactcctcgctgtc

SEQ ID NO: 230334 - DNA, 25 bp, Homo sapien
taaccgggtcctgaactgaagtaca

SEQ ID NO: 230335 - DNA, 25 bp, Homo sapien
tgaagagctcggtggctgtacctcc

SEQ ID NO: 230336 - DNA, 25 bp, Homo sapien
gctggcggtccactaagaaactagt

SEQ ID NO: 230337 - DNA, 25 bp, Homo sapien
tttgggtgcgattgatcagtgaacc

SEQ ID NO: 230338 - DNA, 25 bp, Homo sapien
gattgatcagtgaaccaagagctgg

SEQ ID NO: 230339 - DNA, 25 bp, Homo sapien
ctaagaaactagtgtttctttgcgg

SEQ ID NO: 230340 - DNA, 25 bp, Homo sapien
cacttcttcaatagactgccacagg

SEQ ID NO: 230341 - DNA, 25 bp, Homo sapien
tagactgccacaggtcttccagaag

SEQ ID NO: 230342 - DNA, 25 bp, Homo sapien
tcttcaatagactgccacaggtctt

SEQ ID NO: 230343 - DNA, 25 bp, Homo sapien
tcaatagactgccacaggtcttcca

SEQ ID NO: 230344 - DNA, 25 bp, Homo sapien
aggtcatgatgaaattttccaggtg

SEQ ID NO: 230345 - DNA, 25 bp, Homo sapien
tttccaggtgtaagccggatgcctt

SEQ ID NO: 230346 - DNA, 25 bp, Homo sapien
ttttccaggtgtaagccggatgcct

SEQ ID NO: 230347 - DNA, 25 bp, Homo sapien
gatcaggtcatgatgaaattttcca

SEQ ID NO: 230348 - DNA, 25 bp, Homo sapien
ggaattgtgtaaacccatctagaca

SEQ ID NO: 230349 - DNA, 25 bp, Homo sapien
tttatggaattgtgtaaacccatct

SEQ ID NO: 230350 - DNA, 25 bp, Homo sapien
cgtttatggaattgtgtaaacccat

SEQ ID NO: 230351 - DNA, 25 bp, Homo sapien
tatggaattgtgtaaacccatctag

SEQ ID NO: 230352 - DNA, 25 bp, Homo sapien
cttcagataaagtagacctcttcat

SEQ ID NO: 230353 - DNA, 25 bp, Homo sapien
aagctcaaagacatgttgaacaaaa

SEQ ID NO: 230354 - DNA, 25 bp, Homo sapien
aaagctcaaagacatgttgaacaaa

SEQ ID NO: 230355 - DNA, 25 bp, Homo sapien
aaaagctcaaagacatgttgaacaa

SEQ ID NO: 230356 - DNA, 25 bp, Homo sapien
gataggccatcaagatttaacagag

SEQ ID NO: 230357 - DNA, 25 bp, Homo sapien
gatttagctgtgacgcaaacttcct

SEQ ID NO: 230358 - DNA, 25 bp, Homo sapien
tgagcaagatactgcctgataggcc

SEQ ID NO: 230359 - DNA, 25 bp, Homo sapien
gacaatgagcttctatgatgtactc

SEQ ID NO: 230360 - DNA, 25 bp, Homo sapien
ccagcgtgcactcgctgatgtacaa

SEQ ID NO: 230361 - DNA, 25 bp, Homo sapien
agggttttactccagcgtgcactcg

SEQ ID NO: 230362 - DNA, 25 bp, Homo sapien
tgacttgaacgtaaaggcttttcca

SEQ ID NO: 230363 - DNA, 25 bp, Homo sapien
tctctcctgtatgttgataatcata

SEQ ID NO: 230364 - DNA, 25 bp, Homo sapien
aaagtgaattcacaggagataccaa

SEQ ID NO: 230365 - DNA, 25 bp, Homo sapien
gtgaattcacaggagataccaacaa

SEQ ID NO: 230366 - DNA, 25 bp, Homo sapien
aagtgaattcacaggagataccaac

SEQ ID NO: 230367 - DNA, 25 bp, Homo sapien
agtgaattcacaggagataccaaca

SEQ ID NO: 230368 - DNA, 25 bp, Homo sapien
gagaaattctgctgatcgaatacaa

SEQ ID NO: 230369 - DNA, 25 bp, Homo sapien
caatgatcataaaaactggcacttg

SEQ ID NO: 230370 - DNA, 25 bp, Homo sapien
tgatcataaaaactggcacttgcat

SEQ ID NO: 230371 - DNA, 25 bp, Homo sapien
tctgctgatcgaatacaatgatcat

SEQ ID NO: 230372 - DNA, 25 bp, Homo sapien
agaccgttcataaacatctgatgtg

SEQ ID NO: 230373 - DNA, 25 bp, Homo sapien
gggctttgacgatatattcttttga

SEQ ID NO: 230374 - DNA, 25 bp, Homo sapien
taacctttctagggctttgacgata

SEQ ID NO: 230375 - DNA, 25 bp, Homo sapien
tgaaataaagacctctatagaccgt

SEQ ID NO: 230376 - DNA, 25 bp, Homo sapien
gcagaatttatctcccatgtgaatc

SEQ ID NO: 230377 - DNA, 25 bp, Homo sapien
ccatattcactgcattcgcagaatt

SEQ ID NO: 230378 - DNA, 25 bp, Homo sapien
agtactcagtgagggatttcccaca

SEQ ID NO: 230379 - DNA, 25 bp, Homo sapien
aaaggatgagtactcagtgagggat

SEQ ID NO: 230380 - DNA, 25 bp, Homo sapien
cccctgcagggagcaaacgaaacta

SEQ ID NO: 230381 - DNA, 25 bp, Homo sapien
ggatccatccccatagacctgaggg

SEQ ID NO: 230382 - DNA, 25 bp, Homo sapien
gaaaggctgccaacttagagaaccc

SEQ ID NO: 230383 - DNA, 25 bp, Homo sapien
taaccagaaaaatatcggcgaggat

SEQ ID NO: 230384 - DNA, 25 bp, Homo sapien
gagacttagactgcagagtatttgc

SEQ ID NO: 230385 - DNA, 25 bp, Homo sapien
acaaatgagacttagactgcagagt

SEQ ID NO: 230386 - DNA, 25 bp, Homo sapien
gcagagtatttgcctctgtgttaaa

SEQ ID NO: 230387 - DNA, 25 bp, Homo sapien
ttctttgcggtaagaaaagcattat

SEQ ID NO: 230388 - DNA, 25 bp, Homo sapien
ctcagatttattcttggtcagatgg

SEQ ID NO: 230389 - DNA, 25 bp, Homo sapien
ttattcttggtcagatgggtcccaa

SEQ ID NO: 230390 - DNA, 25 bp, Homo sapien
cattcttacgagctttctcagattt

SEQ ID NO: 230391 - DNA, 25 bp, Homo sapien
gctgcttcattcttacgagctttct

SEQ ID NO: 230392 - DNA, 25 bp, Homo sapien
tgtctgcagtaagggctgtgcaggc

SEQ ID NO: 230393 - DNA, 25 bp, Homo sapien
tgagtgtctgcagtaagggctgtgc

SEQ ID NO: 230394 - DNA, 25 bp, Homo sapien
ttgtgagtgtctgcagtaagggctg

SEQ ID NO: 230395 - DNA, 25 bp, Homo sapien
gagtgtctgcagtaagggctgtgca

SEQ ID NO: 230396 - DNA, 25 bp, Homo sapien
tcgctcaaagactgtgtatattatg

SEQ ID NO: 230397 - DNA, 25 bp, Homo sapien
aaaacaggaggtcgctcaaagactg

SEQ ID NO: 230398 - DNA, 25 bp, Homo sapien
catgtaccagttatggggaacatct

SEQ ID NO: 230399 - DNA, 25 bp, Homo sapien
gtgtatattatgttctccttggcta

SEQ ID NO: 230400 - DNA, 25 bp, Homo sapien
tgccgaatttcaaccgaaagaaatc

SEQ ID NO: 230401 - DNA, 25 bp, Homo sapien
tgcaatttcttatgccgaataccag

SEQ ID NO: 230402 - DNA, 25 bp, Homo sapien
gccgaataccagtacctccaatatt

SEQ ID NO: 230403 - DNA, 25 bp, Homo sapien
cctctttctgccgaatttcaaccga

SEQ ID NO: 230404 - DNA, 25 bp, Homo sapien
gtgcactgtggactgtcctatatgc

SEQ ID NO: 230405 - DNA, 25 bp, Homo sapien
ggactgtcctatatgctctcaagga

SEQ ID NO: 230406 - DNA, 25 bp, Homo sapien
aggacacaaagatgcaccagtcagc

SEQ ID NO: 230407 - DNA, 25 bp, Homo sapien
tcaaggacacaaagatgcaccagtc

SEQ ID NO: 230408 - DNA, 25 bp, Homo sapien
tttcaacatgctttatgtagctcca

SEQ ID NO: 230409 - DNA, 25 bp, Homo sapien
gagaatcctcaatgttttcagtacc

SEQ ID NO: 230410 - DNA, 25 bp, Homo sapien
ctggttacaacaaggagtccttgta

SEQ ID NO: 230411 - DNA, 25 bp, Homo sapien
gatcaagatcggctcctggttacaa

SEQ ID NO: 230412 - DNA, 25 bp, Homo sapien
agggctgtatgtgagtctttgaatc

SEQ ID NO: 230413 - DNA, 25 bp, Homo sapien
aatgcatcattgtggagaatcagta

SEQ ID NO: 230414 - DNA, 25 bp, Homo sapien
gctaccacatgtaaaacagtcagca

SEQ ID NO: 230415 - DNA, 25 bp, Homo sapien
tctgcaatcatgaagagggctgtat

SEQ ID NO: 230416 - DNA, 25 bp, Homo sapien
tagttggatatcactccaatttgtc

SEQ ID NO: 230417 - DNA, 25 bp, Homo sapien
gaagtccttcagctacatccagctt

SEQ ID NO: 230418 - DNA, 25 bp, Homo sapien
ttagaacaagaagtccttcagctac

SEQ ID NO: 230419 - DNA, 25 bp, Homo sapien
ttggatatcactccaatttgtctcc

SEQ ID NO: 230420 - DNA, 25 bp, Homo sapien
ctctaagatcttgataggaaccact

SEQ ID NO: 230421 - DNA, 25 bp, Homo sapien
agatcttgataggaaccactatcgt

SEQ ID NO: 230422 - DNA, 25 bp, Homo sapien
tctgatcacaatagcatgttcctat

SEQ ID NO: 230423 - DNA, 25 bp, Homo sapien
tgatcacaatagcatgttcctatcc

SEQ ID NO: 230424 - DNA, 25 bp, Homo sapien
taataaatgatgatgttgtgcagtt

SEQ ID NO: 230425 - DNA, 25 bp, Homo sapien
tgcagtttatataactggtattatt

SEQ ID NO: 230426 - DNA, 25 bp, Homo sapien
ttaataaatgatgatgttgtgcagt

SEQ ID NO: 230427 - DNA, 25 bp, Homo sapien
tcttttctccaacgtatgcctttgg

SEQ ID NO: 230428 - DNA, 25 bp, Homo sapien
tggaataacctagtcagagaaaaag

SEQ ID NO: 230429 - DNA, 25 bp, Homo sapien
gacatattggacactaaagagccac

SEQ ID NO: 230430 - DNA, 25 bp, Homo sapien
tcaacaataaactggatcaagcaga

SEQ ID NO: 230431 - DNA, 25 bp, Homo sapien
cagaaaagggatatcataggcaggc

SEQ ID NO: 230432 - DNA, 25 bp, Homo sapien
gacaggctagcgctgttgtctacag

SEQ ID NO: 230433 - DNA, 25 bp, Homo sapien
tttgggtgcatgcaaatatgccagc

SEQ ID NO: 230434 - DNA, 25 bp, Homo sapien
gtcagctccacacaaattatccagg

SEQ ID NO: 230435 - DNA, 25 bp, Homo sapien
ttccatctggtaaagtattaagaat

SEQ ID NO: 230436 - DNA, 25 bp, Homo sapien
ctaatgcataagagctgaaatggca

SEQ ID NO: 230437 - DNA, 25 bp, Homo sapien
taatgcataagagctgaaatggcaa

SEQ ID NO: 230438 - DNA, 25 bp, Homo sapien
atctggtaaagtattaagaatcgtc

SEQ ID NO: 230439 - DNA, 25 bp, Homo sapien
tttagagacccaaactcagtgcgag

SEQ ID NO: 230440 - DNA, 25 bp, Homo sapien
ccacaatgaactgcttgggtagccc

SEQ ID NO: 230441 - DNA, 25 bp, Homo sapien
gaggatgaacaatctggtcacagcc

SEQ ID NO: 230442 - DNA, 25 bp, Homo sapien
aacaggaacatttgattttgctgag

SEQ ID NO: 230443 - DNA, 25 bp, Homo sapien
tcatctgtaccctgtacccaaagtg

SEQ ID NO: 230444 - DNA, 25 bp, Homo sapien
aatgaactgccttcacactgtagcc

SEQ ID NO: 230445 - DNA, 25 bp, Homo sapien
agtgactggacctcaactttctgta

SEQ ID NO: 230446 - DNA, 25 bp, Homo sapien
tgtagcaaagctaggcaaccaggct

SEQ ID NO: 230447 - DNA, 25 bp, Homo sapien
ttagcttggaaaattcaaactccat

SEQ ID NO: 230448 - DNA, 25 bp, Homo sapien
tttagcttggaaaattcaaactcca

SEQ ID NO: 230449 - DNA, 25 bp, Homo sapien
gatatatgcgagtacagcacagtca

SEQ ID NO: 230450 - DNA, 25 bp, Homo sapien
atatatgcgagtacagcacagtcat

SEQ ID NO: 230451 - DNA, 25 bp, Homo sapien
aggatatatgcgagtacagcacagt

SEQ ID NO: 230452 - DNA, 25 bp, Homo sapien
ggatatatgcgagtacagcacagtc

SEQ ID NO: 230453 - DNA, 25 bp, Homo sapien
cagcggcttctccttggcaccagaa

SEQ ID NO: 230454 - DNA, 25 bp, Homo sapien
ggtatatgaaccgaagcagcggctt

SEQ ID NO: 230455 - DNA, 25 bp, Homo sapien
tccaggagttgggtatatgaaccga

SEQ ID NO: 230456 - DNA, 25 bp, Homo sapien
tctccttggcaccagaataggacag

SEQ ID NO: 230457 - DNA, 25 bp, Homo sapien
cattataatggctcatagtaggctg

SEQ ID NO: 230458 - DNA, 25 bp, Homo sapien
catctttgaatatgcatcacactca

SEQ ID NO: 230459 - DNA, 25 bp, Homo sapien
cagtgtgcacttgatagctgtcttc

SEQ ID NO: 230460 - DNA, 25 bp, Homo sapien
cccttgtggcgttcatgcattgatt

SEQ ID NO: 230461 - DNA, 25 bp, Homo sapien
tataaagtaaacatctagctgcagt

SEQ ID NO: 230462 - DNA, 25 bp, Homo sapien
cagtggttgaatttgtaaggttgag

SEQ ID NO: 230463 - DNA, 25 bp, Homo sapien
taaacatctagctgcagtggttgaa

SEQ ID NO: 230464 - DNA, 25 bp, Homo sapien
ctgcagtggttgaatttgtaaggtt

SEQ ID NO: 230465 - DNA, 25 bp, Homo sapien
ttcagagatgactcatgggattggg

SEQ ID NO: 230466 - DNA, 25 bp, Homo sapien
gagatgactcatgggattgggtttc

SEQ ID NO: 230467 - DNA, 25 bp, Homo sapien
ctttcagagatgactcatgggattg

SEQ ID NO: 230468 - DNA, 25 bp, Homo sapien
atcctttcagagatgactcatggga

SEQ ID NO: 230469 - DNA, 25 bp, Homo sapien
gagtatttctttgttccggatattc

SEQ ID NO: 230470 - DNA, 25 bp, Homo sapien
ttgttccggatattctttgcattct

SEQ ID NO: 230471 - DNA, 25 bp, Homo sapien
ttctttgttccggatattctttgca

SEQ ID NO: 230472 - DNA, 25 bp, Homo sapien
tctttgttccggatattctttgcat

SEQ ID NO: 230473 - DNA, 25 bp, Homo sapien
actccctgctcaagaatatccatgc

SEQ ID NO: 230474 - DNA, 25 bp, Homo sapien
tccctgctcaagaatatccatgcca

SEQ ID NO: 230475 - DNA, 25 bp, Homo sapien
ccatgccaaaggtacctgtccaggt

SEQ ID NO: 230476 - DNA, 25 bp, Homo sapien
aatatccatgccaaaggtacctgtc

SEQ ID NO: 230477 - DNA, 25 bp, Homo sapien
gtagtttcggagcaatatctggcag

SEQ ID NO: 230478 - DNA, 25 bp, Homo sapien
acacctggtagtttcggagcaatat

SEQ ID NO: 230479 - DNA, 25 bp, Homo sapien
tgactgtaagagtttccagtgggaa

SEQ ID NO: 230480 - DNA, 25 bp, Homo sapien
gactgtaagagtttccagtgggaat

SEQ ID NO: 230481 - DNA, 25 bp, Homo sapien
aatgtttacaacaggcagaggctat

SEQ ID NO: 230482 - DNA, 25 bp, Homo sapien
gaggctatgtccctcttcaagagac

SEQ ID NO: 230483 - DNA, 25 bp, Homo sapien
gatttcactcatggccacatcatgc

SEQ ID NO: 230484 - DNA, 25 bp, Homo sapien
ggaatgcttacacaaagagcccgat

SEQ ID NO: 230485 - DNA, 25 bp, Homo sapien
ttaacttgcggccaggtccgatatt

SEQ ID NO: 230486 - DNA, 25 bp, Homo sapien
taaactctagttcctgatggcatct

SEQ ID NO: 230487 - DNA, 25 bp, Homo sapien
taacttgcggccaggtccgatattt

SEQ ID NO: 230488 - DNA, 25 bp, Homo sapien
tttaaactctagttcctgatggcat

SEQ ID NO: 230489 - DNA, 25 bp, Homo sapien
actttctttcagtgatgaaactccc

SEQ ID NO: 230490 - DNA, 25 bp, Homo sapien
ctttctttcagtgatgaaactccca

SEQ ID NO: 230491 - DNA, 25 bp, Homo sapien
tttgtaacctactttctttcagtga

SEQ ID NO: 230492 - DNA, 25 bp, Homo sapien
gtaacctactttctttcagtgatga

SEQ ID NO: 230493 - DNA, 25 bp, Homo sapien
cggtcaccgctggaaaacccatgtt

SEQ ID NO: 230494 - DNA, 25 bp, Homo sapien
gacaagctgtcggtcaccgctggaa

SEQ ID NO: 230495 - DNA, 25 bp, Homo sapien
gtttgtgtatgttctcgttacatca

SEQ ID NO: 230496 - DNA, 25 bp, Homo sapien
ctaattaacggcatccgacaagctg

SEQ ID NO: 230497 - DNA, 25 bp, Homo sapien
cttttaagtacatttgtccaataat

SEQ ID NO: 230498 - DNA, 25 bp, Homo sapien
ttaattcatccattataccagactg

SEQ ID NO: 230499 - DNA, 25 bp, Homo sapien
tataccagactgtctcttatgtgaa

SEQ ID NO: 230500 - DNA, 25 bp, Homo sapien
ccagactgtctcttatgtgaaactg

SEQ ID NO: 230501 - DNA, 25 bp, Homo sapien
actgacaggtaacggcctttaccat

SEQ ID NO: 230502 - DNA, 25 bp, Homo sapien
tcatggtataagatgcggcattcat

SEQ ID NO: 230503 - DNA, 25 bp, Homo sapien
ttcatggtataagatgcggcattca

SEQ ID NO: 230504 - DNA, 25 bp, Homo sapien
gaattaggattcatggtataagatg

SEQ ID NO: 230505 - DNA, 25 bp, Homo sapien
tggcatgcacatttactggaaggtc

SEQ ID NO: 230506 - DNA, 25 bp, Homo sapien
ggaaggtctaatagtacctctgaag

SEQ ID NO: 230507 - DNA, 25 bp, Homo sapien
gtctctattttggtctggcatgcac

SEQ ID NO: 230508 - DNA, 25 bp, Homo sapien
atttcagatattggcctaaatggcc

SEQ ID NO: 230509 - DNA, 25 bp, Homo sapien
aagagtaatgaggataaattaaact

SEQ ID NO: 230510 - DNA, 25 bp, Homo sapien
gagctactgaaggagacatctttat

SEQ ID NO: 230511 - DNA, 25 bp, Homo sapien
gcttttctttgagctactgaaggag

SEQ ID NO: 230512 - DNA, 25 bp, Homo sapien
tctttgagctactgaaggagacatc

SEQ ID NO: 230513 - DNA, 25 bp, Homo sapien
tctgcattattttccaacagtctgt

SEQ ID NO: 230514 - DNA, 25 bp, Homo sapien
ctgcattattttccaacagtctgtc

SEQ ID NO: 230515 - DNA, 25 bp, Homo sapien
ttctgcattattttccaacagtctg

SEQ ID NO: 230516 - DNA, 25 bp, Homo sapien
tatactctccatcaaaatttgagag

SEQ ID NO: 230517 - DNA, 25 bp, Homo sapien
tgataatgagatctcgcgctgaaaa

SEQ ID NO: 230518 - DNA, 25 bp, Homo sapien
aaagaagctatactctccatcaaaa

SEQ ID NO: 230519 - DNA, 25 bp, Homo sapien
gataatgagatctcgcgctgaaaat

SEQ ID NO: 230520 - DNA, 25 bp, Homo sapien
gatgtctttagccttgacaatgaga

SEQ ID NO: 230521 - DNA, 25 bp, Homo sapien
atgtctttagccttgacaatgagaa

SEQ ID NO: 230522 - DNA, 25 bp, Homo sapien
gtgatgtctttagccttgacaatga

SEQ ID NO: 230523 - DNA, 25 bp, Homo sapien
agtgatgtctttagccttgacaatg

SEQ ID NO: 230524 - DNA, 25 bp, Homo sapien
cagtttgatcataagctcgtaaaag

SEQ ID NO: 230525 - DNA, 25 bp, Homo sapien
gtttgatcataagctcgtaaaaggc

SEQ ID NO: 230526 - DNA, 25 bp, Homo sapien
cataccctgaaatctcaattgttct

SEQ ID NO: 230527 - DNA, 25 bp, Homo sapien
tagaaccataccctgaaatctcaat

SEQ ID NO: 230528 - DNA, 25 bp, Homo sapien
tagtctaaagagggacaactcttta

SEQ ID NO: 230529 - DNA, 25 bp, Homo sapien
aatgttaaccaaacacaggtatgcc

SEQ ID NO: 230530 - DNA, 25 bp, Homo sapien
cagttaacagcctaatattaaacga

SEQ ID NO: 230531 - DNA, 25 bp, Homo sapien
tcagactggaataacacgctgacag

SEQ ID NO: 230532 - DNA, 25 bp, Homo sapien
tattaaacgatataataagcaccct

SEQ ID NO: 230533 - DNA, 25 bp, Homo sapien
gactaatgacacgaaaaatcatcat

SEQ ID NO: 230534 - DNA, 25 bp, Homo sapien
atgactaatgacacgaaaaatcatc

SEQ ID NO: 230535 - DNA, 25 bp, Homo sapien
ctaatgacacgaaaaatcatcattg

SEQ ID NO: 230536 - DNA, 25 bp, Homo sapien
accatgactaatgacacgaaaaatc

SEQ ID NO: 230537 - DNA, 25 bp, Homo sapien
aaagcattcacaggatacatgctcc

SEQ ID NO: 230538 - DNA, 25 bp, Homo sapien
tctgaggcgctacaataattacaaa

SEQ ID NO: 230539 - DNA, 25 bp, Homo sapien
aagcattcacaggatacatgctccc

SEQ ID NO: 230540 - DNA, 25 bp, Homo sapien
attctgaggcgctacaataattaca

SEQ ID NO: 230541 - DNA, 25 bp, Homo sapien
gagttttgactagatgtgcccgtgg

SEQ ID NO: 230542 - DNA, 25 bp, Homo sapien
taaatggccttctccggttagagct

SEQ ID NO: 230543 - DNA, 25 bp, Homo sapien
gcaagggtctattaagcgaagcaca

SEQ ID NO: 230544 - DNA, 25 bp, Homo sapien
accagatgggatttagagactaccg

SEQ ID NO: 230545 - DNA, 25 bp, Homo sapien
tagtccacggccattgtgacctctt

SEQ ID NO: 230546 - DNA, 25 bp, Homo sapien
ccacatagtccacggccattgtgac

SEQ ID NO: 230547 - DNA, 25 bp, Homo sapien
tattccacatagtccacggccattg

SEQ ID NO: 230548 - DNA, 25 bp, Homo sapien
ctattccacatagtccacggccatt

SEQ ID NO: 230549 - DNA, 25 bp, Homo sapien
cccacggcccacttaacttcttcag

SEQ ID NO: 230550 - DNA, 25 bp, Homo sapien
tggtggccagaccatccccttcttt

SEQ ID NO: 230551 - DNA, 25 bp, Homo sapien
ttttcccacacgctccctgcaggcc

SEQ ID NO: 230552 - DNA, 25 bp, Homo sapien
aggctacagtggtggccagaccatc

SEQ ID NO: 230553 - DNA, 25 bp, Homo sapien
gcaacagtaagattgataacagagg

SEQ ID NO: 230554 - DNA, 25 bp, Homo sapien
gacctcaaggatctgccattatgga

SEQ ID NO: 230555 - DNA, 25 bp, Homo sapien
tttgttcacataaaagccattagct

SEQ ID NO: 230556 - DNA, 25 bp, Homo sapien
ggccaaaaggtcttgactggataaa

SEQ ID NO: 230557 - DNA, 25 bp, Homo sapien
aagagctccgactgtagaggttgca

SEQ ID NO: 230558 - DNA, 25 bp, Homo sapien
gatcactgacaaagagctccgactg

SEQ ID NO: 230559 - DNA, 25 bp, Homo sapien
gcagagatcactgacaaagagctcc

SEQ ID NO: 230560 - DNA, 25 bp, Homo sapien
gaggttgcatctgtttgccccatat

SEQ ID NO: 230561 - DNA, 25 bp, Homo sapien
tctgattggtctggaattagccctc

SEQ ID NO: 230562 - DNA, 25 bp, Homo sapien
cctcttatcgtgtgaaacatctgta

SEQ ID NO: 230563 - DNA, 25 bp, Homo sapien
tactgtattgttccaggggattagc

SEQ ID NO: 230564 - DNA, 25 bp, Homo sapien
tattttggaatgctgacatttggag

SEQ ID NO: 230565 - DNA, 25 bp, Homo sapien
gtgaagtcaggacaatggaggtcat

SEQ ID NO: 230566 - DNA, 25 bp, Homo sapien
tgtgaagtcaggacaatggaggtca

SEQ ID NO: 230567 - DNA, 25 bp, Homo sapien
ggatattctcctctgcctaatgtga

SEQ ID NO: 230568 - DNA, 25 bp, Homo sapien
caattccttctagggcgaagtgaca

SEQ ID NO: 230569 - DNA, 25 bp, Homo sapien
agtgacaggtttagcagcccacaga

SEQ ID NO: 230570 - DNA, 25 bp, Homo sapien
gaatctattgttggtccctcaaagg

SEQ ID NO: 230571 - DNA, 25 bp, Homo sapien
gttcacacaaagcgactttaatttg

SEQ ID NO: 230572 - DNA, 25 bp, Homo sapien
cacacaaagcgactttaatttgggc

SEQ ID NO: 230573 - DNA, 25 bp, Homo sapien
tcacacaaagcgactttaatttggg

SEQ ID NO: 230574 - DNA, 25 bp, Homo sapien
tggttcacacaaagcgactttaatt

SEQ ID NO: 230575 - DNA, 25 bp, Homo sapien
ctccccaatacttaagcactagaat

SEQ ID NO: 230576 - DNA, 25 bp, Homo sapien
tccccaatacttaagcactagaatt

SEQ ID NO: 230577 - DNA, 25 bp, Homo sapien
tacacaatcggaggaagtaaactca

SEQ ID NO: 230578 - DNA, 25 bp, Homo sapien
tctgtgcttttattagttgcctgga

SEQ ID NO: 230579 - DNA, 25 bp, Homo sapien
ccatgtgagggcgtttttttatagc

SEQ ID NO: 230580 - DNA, 25 bp, Homo sapien
gctattccaattttaccctcatctg

SEQ ID NO: 230581 - DNA, 25 bp, Homo sapien
cagcttggttggtgctcccatagga

SEQ ID NO: 230582 - DNA, 25 bp, Homo sapien
ttggtgctcccataggagcaaggcc

SEQ ID NO: 230583 - DNA, 25 bp, Homo sapien
ctcccataggagcaaggccctggct

SEQ ID NO: 230584 - DNA, 25 bp, Homo sapien
ttggttggtgctcccataggagcaa

SEQ ID NO: 230585 - DNA, 25 bp, Homo sapien
tagtttgcactccagggaagcacgg

SEQ ID NO: 230586 - DNA, 25 bp, Homo sapien
tggtgtgctgggctagtttgcactc

SEQ ID NO: 230587 - DNA, 25 bp, Homo sapien
tggccactagcactgctactgtgaa

SEQ ID NO: 230588 - DNA, 25 bp, Homo sapien
actgctactgtgaaggtggtgtgct

SEQ ID NO: 230589 - DNA, 25 bp, Homo sapien
gtgagcaaagtgccaggctagtctt

SEQ ID NO: 230590 - DNA, 25 bp, Homo sapien
tgtgagcaaagtgccaggctagtct

SEQ ID NO: 230591 - DNA, 25 bp, Homo sapien
aacatgtcagatgccgcatgccaca

SEQ ID NO: 230592 - DNA, 25 bp, Homo sapien
tctttagactatacaccagacccaa

SEQ ID NO: 230593 - DNA, 25 bp, Homo sapien
tcttttcctcagtggactggccaga

SEQ ID NO: 230594 - DNA, 25 bp, Homo sapien
ggccagaggaactaccttgtctatg

SEQ ID NO: 230595 - DNA, 25 bp, Homo sapien
gaatgcatatgcaattccgaatcag

SEQ ID NO: 230596 - DNA, 25 bp, Homo sapien
ggcagaaactggttgaatacacaat

SEQ ID NO: 230597 - DNA, 25 bp, Homo sapien
gcagctttggctactccaagggaaa

SEQ ID NO: 230598 - DNA, 25 bp, Homo sapien
caataactgtttaggcattgtgcag

SEQ ID NO: 230599 - DNA, 25 bp, Homo sapien
aaaccagctctgagagaactgtcat

SEQ ID NO: 230600 - DNA, 25 bp, Homo sapien
tttggttttgctcaaaaccagctct

SEQ ID NO: 230601 - DNA, 25 bp, Homo sapien
ttttggttttgctcaaaaccagctc

SEQ ID NO: 230602 - DNA, 25 bp, Homo sapien
agcttttggttttgctcaaaaccag

SEQ ID NO: 230603 - DNA, 25 bp, Homo sapien
ttatatagactttgacgtgcaggac

SEQ ID NO: 230604 - DNA, 25 bp, Homo sapien
gactttgacgtgcaggacatcgtat

SEQ ID NO: 230605 - DNA, 25 bp, Homo sapien
ctagtttatatagactttgacgtgc

SEQ ID NO: 230606 - DNA, 25 bp, Homo sapien
gcaggacatcgtatattgtctgagt

SEQ ID NO: 230607 - DNA, 25 bp, Homo sapien
cttgtctcgtttgcctgtcagctgg

SEQ ID NO: 230608 - DNA, 25 bp, Homo sapien
tgttagtaatctatacagcccttgc

SEQ ID NO: 230609 - DNA, 25 bp, Homo sapien
tagagcttccatgggttagaaatgt

SEQ ID NO: 230610 - DNA, 25 bp, Homo sapien
aagcagatgcttgacctctttagag

SEQ ID NO: 230611 - DNA, 25 bp, Homo sapien
gctgtctagcaggaagtatattgcc

SEQ ID NO: 230612 - DNA, 25 bp, Homo sapien
gtaacgtatgagtataaaagagcag

SEQ ID NO: 230613 - DNA, 25 bp, Homo sapien
ccagacacaagtgggtcattcagct

SEQ ID NO: 230614 - DNA, 25 bp, Homo sapien
gcttcctagcaatatattggctcta

SEQ ID NO: 230615 - DNA, 25 bp, Homo sapien
tcctccgacatctcctgctggtttt

SEQ ID NO: 230616 - DNA, 25 bp, Homo sapien
tgccatctgtcaccttggggccatg

SEQ ID NO: 230617 - DNA, 25 bp, Homo sapien
actgctaaagactccctgccttgaa

SEQ ID NO: 230618 - DNA, 25 bp, Homo sapien
tgttctagtggctccacccaagctg

SEQ ID NO: 230619 - DNA, 25 bp, Homo sapien
aagcaaggaccttcatggtctctgc

SEQ ID NO: 230620 - DNA, 25 bp, Homo sapien
tgtctccatagcatcgaagacaaag

SEQ ID NO: 230621 - DNA, 25 bp, Homo sapien
tgcaattgaatctgcacttaaaatg

SEQ ID NO: 230622 - DNA, 25 bp, Homo sapien
ccatagcatcgaagacaaagtccag

SEQ ID NO: 230623 - DNA, 25 bp, Homo sapien
tcttctctgcgctgatctcataaaa

SEQ ID NO: 230624 - DNA, 25 bp, Homo sapien
tcttttctccggcagagcttttagc

SEQ ID NO: 230625 - DNA, 25 bp, Homo sapien
tctctgcgctgatctcataaaattt

SEQ ID NO: 230626 - DNA, 25 bp, Homo sapien
ttttctccggcagagcttttagctc

SEQ ID NO: 230627 - DNA, 25 bp, Homo sapien
tttgctcaactctaacgtacttgac

SEQ ID NO: 230628 - DNA, 25 bp, Homo sapien
tagatacttgacatacacctttgaa

SEQ ID NO: 230629 - DNA, 25 bp, Homo sapien
ctctaacgtacttgacatagatact

SEQ ID NO: 230630 - DNA, 25 bp, Homo sapien
gatacttgtcttgatcaactcatag

SEQ ID NO: 230631 - DNA, 25 bp, Homo sapien
tgagcaaactgtatcaagagagaag

SEQ ID NO: 230632 - DNA, 25 bp, Homo sapien
tttgctgacagtttgacaaaaggac

SEQ ID NO: 230633 - DNA, 25 bp, Homo sapien
tgcagccagttgacattgcagaagg

SEQ ID NO: 230634 - DNA, 25 bp, Homo sapien
gagaggttaggcgttacagcaccac

SEQ ID NO: 230635 - DNA, 25 bp, Homo sapien
tttcttgttcaatcatatctggaat

SEQ ID NO: 230636 - DNA, 25 bp, Homo sapien
gctttgactctgtgggcttagccat

SEQ ID NO: 230637 - DNA, 25 bp, Homo sapien
tctgtgggcttagccattcttgcag

SEQ ID NO: 230638 - DNA, 25 bp, Homo sapien
tgtgggcttagccattcttgcagct

SEQ ID NO: 230639 - DNA, 25 bp, Homo sapien
aagaagtccctatctccagcttgta

SEQ ID NO: 230640 - DNA, 25 bp, Homo sapien
cataagccaaacaattgtatgcccc

SEQ ID NO: 230641 - DNA, 25 bp, Homo sapien
aggatgtcttgccttcccactctga

SEQ ID NO: 230642 - DNA, 25 bp, Homo sapien
cacaaagagatcaacgccagtacca

SEQ ID NO: 230643 - DNA, 25 bp, Homo sapien
tgcaaaatgtaggtgtcccctctgc

SEQ ID NO: 230644 - DNA, 25 bp, Homo sapien
ttgtacagggtatctctttagcctc

SEQ ID NO: 230645 - DNA, 25 bp, Homo sapien
tgtacagggtatctctttagcctca

SEQ ID NO: 230646 - DNA, 25 bp, Homo sapien
ggttgtacagggtatctctttagcc

SEQ ID NO: 230647 - DNA, 25 bp, Homo sapien
ctggttgtacagggtatctctttag

SEQ ID NO: 230648 - DNA, 25 bp, Homo sapien
taaaaggggtcaacataccactcag

SEQ ID NO: 230649 - DNA, 25 bp, Homo sapien
tcctagcttcttgagctgtagctgt

SEQ ID NO: 230650 - DNA, 25 bp, Homo sapien
gaacatggtgccctgtatcctagct

SEQ ID NO: 230651 - DNA, 25 bp, Homo sapien
tctagtgcaacctcagaacatggtg

SEQ ID NO: 230652 - DNA, 25 bp, Homo sapien
caatggccctgtcaatctggaggta

SEQ ID NO: 230653 - DNA, 25 bp, Homo sapien
tcacaatggccctgtcaatctggag

SEQ ID NO: 230654 - DNA, 25 bp, Homo sapien
cctgtcaatctggaggtatttccac

SEQ ID NO: 230655 - DNA, 25 bp, Homo sapien
gctgcagacatcacaatggccctgt

SEQ ID NO: 230656 - DNA, 25 bp, Homo sapien
cagaaattgtaattcaggttcatgc

SEQ ID NO: 230657 - DNA, 25 bp, Homo sapien
gcttagtcactacatctgagagatg

SEQ ID NO: 230658 - DNA, 25 bp, Homo sapien
gaggtctaaaggcttagtcactaca

SEQ ID NO: 230659 - DNA, 25 bp, Homo sapien
ggttcatgctgcgaatactgaagaa

SEQ ID NO: 230660 - DNA, 25 bp, Homo sapien
ttctactgtcaattcatcaggataa

SEQ ID NO: 230661 - DNA, 25 bp, Homo sapien
gaactacgtctctgaagttctactg

SEQ ID NO: 230662 - DNA, 25 bp, Homo sapien
caggaaattgaactacgtctctgaa

SEQ ID NO: 230663 - DNA, 25 bp, Homo sapien
ctgaagttctactgtcaattcatca

SEQ ID NO: 230664 - DNA, 25 bp, Homo sapien
gccatgtgaggcagaatttggtcag

SEQ ID NO: 230665 - DNA, 25 bp, Homo sapien
ctttctgaacgcttgtatgattgct

SEQ ID NO: 230666 - DNA, 25 bp, Homo sapien
caggttcttctgtagtgaggttgtg

SEQ ID NO: 230667 - DNA, 25 bp, Homo sapien
gaaagagctaacagaaaccaaccat

SEQ ID NO: 230668 - DNA, 25 bp, Homo sapien
gtgactacactaaggagcaagttga

SEQ ID NO: 230669 - DNA, 25 bp, Homo sapien
cacagattgaagcagtgactacact

SEQ ID NO: 230670 - DNA, 25 bp, Homo sapien
gaaactcacagattgaagcagtgac

SEQ ID NO: 230671 - DNA, 25 bp, Homo sapien
ggagcaagttgaacattccttgttc

SEQ ID NO: 230672 - DNA, 25 bp, Homo sapien
gaatgtaacaagatgaatgacgtgc

SEQ ID NO: 230673 - DNA, 25 bp, Homo sapien
tgaatgtaacaagatgaatgacgtg

SEQ ID NO: 230674 - DNA, 25 bp, Homo sapien
tctgaatgtaacaagatgaatgacg

SEQ ID NO: 230675 - DNA, 25 bp, Homo sapien
atgtaacaagatgaatgacgtgcac

SEQ ID NO: 230676 - DNA, 25 bp, Homo sapien
ctctgtttcagcatcatcaatctct

SEQ ID NO: 230677 - DNA, 25 bp, Homo sapien
tctgtttcagcatcatcaatctctc

SEQ ID NO: 230678 - DNA, 25 bp, Homo sapien
tgtcctcatgataacttcactgaag

SEQ ID NO: 230679 - DNA, 25 bp, Homo sapien
gactgtcctcatgataacttcactg

SEQ ID NO: 230680 - DNA, 25 bp, Homo sapien
tagggactgtcctcatgataacttc

SEQ ID NO: 230681 - DNA, 25 bp, Homo sapien
agttagggactgtcctcatgataac

SEQ ID NO: 230682 - DNA, 25 bp, Homo sapien
gggaattattatgagtttcaatcaa

SEQ ID NO: 230683 - DNA, 25 bp, Homo sapien
tatattttgtttttcggtcatgtaa

SEQ ID NO: 230684 - DNA, 25 bp, Homo sapien
tcatgtaaaattccttgtatgcaca

SEQ ID NO: 230685 - DNA, 25 bp, Homo sapien
gagtttcaatcaataggccttttat

SEQ ID NO: 230686 - DNA, 25 bp, Homo sapien
tgtgcttgtaaggtgagtggagagg

SEQ ID NO: 230687 - DNA, 25 bp, Homo sapien
gggaagaactgctccgtaaacctca

SEQ ID NO: 230688 - DNA, 25 bp, Homo sapien
agcagtttctctaacagctggggaa

SEQ ID NO: 230689 - DNA, 25 bp, Homo sapien
gtaaacctcaccattccgcattccc

SEQ ID NO: 230690 - DNA, 25 bp, Homo sapien
ggtcctcctcatacagtggattctg

SEQ ID NO: 230691 - DNA, 25 bp, Homo sapien
tcactgccagtgtaccattacccat

SEQ ID NO: 230692 - DNA, 25 bp, Homo sapien
gatggtgtcctacccagatcccctt

SEQ ID NO: 230693 - DNA, 25 bp, Homo sapien
tcctcatacagtggattctgatggt

SEQ ID NO: 230694 - DNA, 25 bp, Homo sapien
ctttactagctctgagaagacttcc

SEQ ID NO: 230695 - DNA, 25 bp, Homo sapien
agaatcatgttaggctttactagct

SEQ ID NO: 230696 - DNA, 25 bp, Homo sapien
tgatatgctgaagccacaggtcctt

SEQ ID NO: 230697 - DNA, 25 bp, Homo sapien
acttccttgatatgctgaagccaca

SEQ ID NO: 230698 - DNA, 25 bp, Homo sapien
caatgaaagataaacgagtgaatat

SEQ ID NO: 230699 - DNA, 25 bp, Homo sapien
tcaatgaaagataaacgagtgaata

SEQ ID NO: 230700 - DNA, 25 bp, Homo sapien
taaagcatcatgaggtaactgtgtt

SEQ ID NO: 230701 - DNA, 25 bp, Homo sapien
gcatcatgaggtaactgtgttttca

SEQ ID NO: 230702 - DNA, 25 bp, Homo sapien
ttttcatattatgataatctgaagc

SEQ ID NO: 230703 - DNA, 25 bp, Homo sapien
agaagagtaaagcatcatgaggtaa

SEQ ID NO: 230704 - DNA, 25 bp, Homo sapien
cagtctcctgagaatacgatttgtg

SEQ ID NO: 230705 - DNA, 25 bp, Homo sapien
aaacagcccttatcccatttggcaa

SEQ ID NO: 230706 - DNA, 25 bp, Homo sapien
tagcacaaattgtaggacctggagc

SEQ ID NO: 230707 - DNA, 25 bp, Homo sapien
catttggcaattggggatttagcac

SEQ ID NO: 230708 - DNA, 25 bp, Homo sapien
tcaagaacgaagtgctttctcttgt

SEQ ID NO: 230709 - DNA, 25 bp, Homo sapien
agaacgaagtgctttctcttgtccc

SEQ ID NO: 230710 - DNA, 25 bp, Homo sapien
aagaacgaagtgctttctcttgtcc

SEQ ID NO: 230711 - DNA, 25 bp, Homo sapien
caagaacgaagtgctttctcttgtc

SEQ ID NO: 230712 - DNA, 25 bp, Homo sapien
cagtttcttgcattaggaagattgg

SEQ ID NO: 230713 - DNA, 25 bp, Homo sapien
gccgtaagtaatccaatgtcattct

SEQ ID NO: 230714 - DNA, 25 bp, Homo sapien
cattcttgagaatccaacagtttct

SEQ ID NO: 230715 - DNA, 25 bp, Homo sapien
cattaggaagattggtatgcaagtc

SEQ ID NO: 230716 - DNA, 25 bp, Homo sapien
agtataactctacttaatgtagttt

SEQ ID NO: 230717 - DNA, 25 bp, Homo sapien
gagtataactctacttaatgtagtt

SEQ ID NO: 230718 - DNA, 25 bp, Homo sapien
agagtataactctacttaatgtagt

SEQ ID NO: 230719 - DNA, 25 bp, Homo sapien
tccaaatgggagtgccagaaatctc

SEQ ID NO: 230720 - DNA, 25 bp, Homo sapien
gccactccctgaaccaagattactg

SEQ ID NO: 230721 - DNA, 25 bp, Homo sapien
tcttgacggtaagtgatcacatcca

SEQ ID NO: 230722 - DNA, 25 bp, Homo sapien
taagttgttatcttccccgccagca

SEQ ID NO: 230723 - DNA, 25 bp, Homo sapien
ccaagatgcaacgtgtcagctccat

SEQ ID NO: 230724 - DNA, 25 bp, Homo sapien
agccaagatgcaacgtgtcagctcc

SEQ ID NO: 230725 - DNA, 25 bp, Homo sapien
gccaagatgcaacgtgtcagctcca

SEQ ID NO: 230726 - DNA, 25 bp, Homo sapien
cagccaagatgcaacgtgtcagctc

SEQ ID NO: 230727 - DNA, 25 bp, Homo sapien
gcagctgagtaatctttccgctgag

SEQ ID NO: 230728 - DNA, 25 bp, Homo sapien
gtcagtacattggttccaaagaccc

SEQ ID NO: 230729 - DNA, 25 bp, Homo sapien
tcagaatatcggaactcctgcagct

SEQ ID NO: 230730 - DNA, 25 bp, Homo sapien
tctttccgctgagtcagtacattgg

SEQ ID NO: 230731 - DNA, 25 bp, Homo sapien
cagaaggtacatcatggatctgcat

SEQ ID NO: 230732 - DNA, 25 bp, Homo sapien
ctttctctgcatcagaaggtacatc

SEQ ID NO: 230733 - DNA, 25 bp, Homo sapien
cctcaagctctaaaaatgtctgtac

SEQ ID NO: 230734 - DNA, 25 bp, Homo sapien
tgcatcagaaggtacatcatggatc

SEQ ID NO: 230735 - DNA, 25 bp, Homo sapien
actttctcgattcaccaggttttgg

SEQ ID NO: 230736 - DNA, 25 bp, Homo sapien
ctgactgagacactactttctcgat

SEQ ID NO: 230737 - DNA, 25 bp, Homo sapien
tcaaccagggcataatctgtctcat

SEQ ID NO: 230738 - DNA, 25 bp, Homo sapien
aggttttggatcaaccagggcataa

SEQ ID NO: 230739 - DNA, 25 bp, Homo sapien
tgtcaaacctgtactaagcaaaata

SEQ ID NO: 230740 - DNA, 25 bp, Homo sapien
gcacaggtaccgagttgccagacaa

SEQ ID NO: 230741 - DNA, 25 bp, Homo sapien
tagcagcatcttggcttgtcaaacc

SEQ ID NO: 230742 - DNA, 25 bp, Homo sapien
tgattgtacttagactcaggtgcac

SEQ ID NO: 230743 - DNA, 25 bp, Homo sapien
tagaattccgattcactatgtcaga

SEQ ID NO: 230744 - DNA, 25 bp, Homo sapien
gattcactatgtcagagtccacata

SEQ ID NO: 230745 - DNA, 25 bp, Homo sapien
tctcatagaattccgattcactatg

SEQ ID NO: 230746 - DNA, 25 bp, Homo sapien
aaaattcttcaataagagtctctct

SEQ ID NO: 230747 - DNA, 25 bp, Homo sapien
ctggagactttggtactcagacagc

SEQ ID NO: 230748 - DNA, 25 bp, Homo sapien
gactttggtactcagacagccactg

SEQ ID NO: 230749 - DNA, 25 bp, Homo sapien
actttggtactcagacagccactgt

SEQ ID NO: 230750 - DNA, 25 bp, Homo sapien
ggagactttggtactcagacagcca

SEQ ID NO: 230751 - DNA, 25 bp, Homo sapien
ttccactaaatttcccgcagaaatc

SEQ ID NO: 230752 - DNA, 25 bp, Homo sapien
ttcccgcagaaatcaggttctggtt

SEQ ID NO: 230753 - DNA, 25 bp, Homo sapien
ctaaatttcccgcagaaatcaggtt

SEQ ID NO: 230754 - DNA, 25 bp, Homo sapien
aatttcccgcagaaatcaggttctg

SEQ ID NO: 230755 - DNA, 25 bp, Homo sapien
taataatggactccatgctgctctc

SEQ ID NO: 230756 - DNA, 25 bp, Homo sapien
ggccccttgttgataggcttcaaag

SEQ ID NO: 230757 - DNA, 25 bp, Homo sapien
tcagtctcaggtattacggccccag

SEQ ID NO: 230758 - DNA, 25 bp, Homo sapien
gcttcaaagattacgatcacctcag

SEQ ID NO: 230759 - DNA, 25 bp, Homo sapien
ccatggacctctatgtcctctggac

SEQ ID NO: 230760 - DNA, 25 bp, Homo sapien
gaactttataaccttctccatggac

SEQ ID NO: 230761 - DNA, 25 bp, Homo sapien
ctgaactttataaccttctccatgg

SEQ ID NO: 230762 - DNA, 25 bp, Homo sapien
atggacctctatgtcctctggactc

SEQ ID NO: 230763 - DNA, 25 bp, Homo sapien
tttccattgaccattcccaactgca

SEQ ID NO: 230764 - DNA, 25 bp, Homo sapien
actaccagggctttccattgaccat

SEQ ID NO: 230765 - DNA, 25 bp, Homo sapien
ttccattgaccattcccaactgcaa

SEQ ID NO: 230766 - DNA, 25 bp, Homo sapien
tactaccagggctttccattgacca

SEQ ID NO: 230767 - DNA, 25 bp, Homo sapien
agccacatagtaagccagtgtctgt

SEQ ID NO: 230768 - DNA, 25 bp, Homo sapien
tgcactcaaagtcacttgtaagagt

SEQ ID NO: 230769 - DNA, 25 bp, Homo sapien
tcacctttgccctggcatatgaagc

SEQ ID NO: 230770 - DNA, 25 bp, Homo sapien
tgatggcacctgcactcaaagtcac

SEQ ID NO: 230771 - DNA, 25 bp, Homo sapien
ctaacaatttcgtgagaggctgctg

SEQ ID NO: 230772 - DNA, 25 bp, Homo sapien
ggctgcagttcatccgttcaacatt

SEQ ID NO: 230773 - DNA, 25 bp, Homo sapien
agttacatgcgctgacactgactaa

SEQ ID NO: 230774 - DNA, 25 bp, Homo sapien
tgtttaatacatggcactggctcct

SEQ ID NO: 230775 - DNA, 25 bp, Homo sapien
ctttgtacatgagtagaaacattag

SEQ ID NO: 230776 - DNA, 25 bp, Homo sapien
ctgatacaaagcctgttccacaagg

SEQ ID NO: 230777 - DNA, 25 bp, Homo sapien
tcttctcttatcacttgtcttcaac

SEQ ID NO: 230778 - DNA, 25 bp, Homo sapien
aaagcctgttccacaaggctttcca

SEQ ID NO: 230779 - DNA, 25 bp, Homo sapien
gggaggctcctcacatacaactatc

SEQ ID NO: 230780 - DNA, 25 bp, Homo sapien
taaatgaacaagtgccatggtcctg

SEQ ID NO: 230781 - DNA, 25 bp, Homo sapien
tactagaacatacctgcaccatgcc

SEQ ID NO: 230782 - DNA, 25 bp, Homo sapien
taattccctactgagagtcaaatgg

SEQ ID NO: 230783 - DNA, 25 bp, Homo sapien
gagaaccagtctggaatcccactgg

SEQ ID NO: 230784 - DNA, 25 bp, Homo sapien
ccttgtttggctgctggttgagaac

SEQ ID NO: 230785 - DNA, 25 bp, Homo sapien
cacacatctggatctatggagctac

SEQ ID NO: 230786 - DNA, 25 bp, Homo sapien
cactggctaacctctgaactgctag

SEQ ID NO: 230787 - DNA, 25 bp, Homo sapien
gaacttcttcattgctttcattgtc

SEQ ID NO: 230788 - DNA, 25 bp, Homo sapien
cttcattgctttcattgtcaaaaca

SEQ ID NO: 230789 - DNA, 25 bp, Homo sapien
tgtcaaaacaaaattcaaagtctac

SEQ ID NO: 230790 - DNA, 25 bp, Homo sapien
cttgaacttcttcattgctttcatt

SEQ ID NO: 230791 - DNA, 25 bp, Homo sapien
cttgcttcaacctgctgagtatttt

SEQ ID NO: 230792 - DNA, 25 bp, Homo sapien
cctgctgagtattttctgtaatctg

SEQ ID NO: 230793 - DNA, 25 bp, Homo sapien
cttcaacctgctgagtattttctgt

SEQ ID NO: 230794 - DNA, 25 bp, Homo sapien
tgcttcaacctgctgagtattttct

SEQ ID NO: 230795 - DNA, 25 bp, Homo sapien
tattcctgtcaaaagtcaggcgcgt

SEQ ID NO: 230796 - DNA, 25 bp, Homo sapien
taaggcctgagtacaagcagctgca

SEQ ID NO: 230797 - DNA, 25 bp, Homo sapien
ttccctcactccaatttaaggcctg

SEQ ID NO: 230798 - DNA, 25 bp, Homo sapien
gcgcgtcaatggcaagtcttcttct

SEQ ID NO: 230799 - DNA, 25 bp, Homo sapien
cagacttaatctgaacttgaccgaa

SEQ ID NO: 230800 - DNA, 25 bp, Homo sapien
taatatcctcgaagccagacacagg

SEQ ID NO: 230801 - DNA, 25 bp, Homo sapien
ccatcagggaggtatggtaatatcc

SEQ ID NO: 230802 - DNA, 25 bp, Homo sapien
cctacagggttatcagaaccagact

SEQ ID NO: 230803 - DNA, 25 bp, Homo sapien
cactggagagcttgtactgtgtttc

SEQ ID NO: 230804 - DNA, 25 bp, Homo sapien
taaatgtttggacactggagagctt

SEQ ID NO: 230805 - DNA, 25 bp, Homo sapien
ataatcgccgacctaaatgtttgga

SEQ ID NO: 230806 - DNA, 25 bp, Homo sapien
cgattttgcataatcgccgacctaa

SEQ ID NO: 230807 - DNA, 25 bp, Homo sapien
ctttattttctcgtaacatgcccat

SEQ ID NO: 230808 - DNA, 25 bp, Homo sapien
catgactgaatatggcgtgcacgta

SEQ ID NO: 230809 - DNA, 25 bp, Homo sapien
gaagaattactaggagttactcatg

SEQ ID NO: 230810 - DNA, 25 bp, Homo sapien
agttgtctcctctttacatcgttag

SEQ ID NO: 230811 - DNA, 25 bp, Homo sapien
cagtaatccataaaagcatccacca

SEQ ID NO: 230812 - DNA, 25 bp, Homo sapien
actggtcatgtatgaccttttctgc

SEQ ID NO: 230813 - DNA, 25 bp, Homo sapien
cagcgatgaaaatggtactggtcat

SEQ ID NO: 230814 - DNA, 25 bp, Homo sapien
gaaccaacaggaggattcctatggg

SEQ ID NO: 230815 - DNA, 25 bp, Homo sapien
acggggccaaaggaaatgttggcag

SEQ ID NO: 230816 - DNA, 25 bp, Homo sapien
gccaaaggaaatgttggcagggcca

SEQ ID NO: 230817 - DNA, 25 bp, Homo sapien
gggccaaaggaaatgttggcagggc

SEQ ID NO: 230818 - DNA, 25 bp, Homo sapien
ccagggccagggcctgggccagcat

SEQ ID NO: 230819 - DNA, 25 bp, Homo sapien
tagagcagttcattttcgattcaaa

SEQ ID NO: 230820 - DNA, 25 bp, Homo sapien
agccatgatggatgtattcaataga

SEQ ID NO: 230821 - DNA, 25 bp, Homo sapien
attaattcagcaacctgagaccctc

SEQ ID NO: 230822 - DNA, 25 bp, Homo sapien
taattcagcaacctgagaccctcca

SEQ ID NO: 230823 - DNA, 25 bp, Homo sapien
gactctttatctggttcatgtctga

SEQ ID NO: 230824 - DNA, 25 bp, Homo sapien
gagtccttttgtttcgctcgtctga

SEQ ID NO: 230825 - DNA, 25 bp, Homo sapien
tctccatttgataacacttgagtcc

SEQ ID NO: 230826 - DNA, 25 bp, Homo sapien
tgtttcgctcgtctgaattttagac

SEQ ID NO: 230827 - DNA, 25 bp, Homo sapien
ctatgaagggaagccggaaacttca

SEQ ID NO: 230828 - DNA, 25 bp, Homo sapien
tatgaagggaagccggaaacttcag

SEQ ID NO: 230829 - DNA, 25 bp, Homo sapien
gaagccggaaacttcagtaacacca

SEQ ID NO: 230830 - DNA, 25 bp, Homo sapien
tgaagggaagccggaaacttcagta

SEQ ID NO: 230831 - DNA, 25 bp, Homo sapien
taaaagccttgtgttcaacactgag

SEQ ID NO: 230832 - DNA, 25 bp, Homo sapien
tcaatgtccgtgtggaaagaaagct

SEQ ID NO: 230833 - DNA, 25 bp, Homo sapien
cactgtctgccaagattaatagagg

SEQ ID NO: 230834 - DNA, 25 bp, Homo sapien
tgcaaggccacatgaaaaggcatct

SEQ ID NO: 230835 - DNA, 25 bp, Homo sapien
tttttgaccccagtaatattctgca

SEQ ID NO: 230836 - DNA, 25 bp, Homo sapien
gcactggaacgtattcgtgattttc

SEQ ID NO: 230837 - DNA, 25 bp, Homo sapien
tgcagaaagtcaattttttaagtcc

SEQ ID NO: 230838 - DNA, 25 bp, Homo sapien
tctccattggagaggccttatgttt

SEQ ID NO: 230839 - DNA, 25 bp, Homo sapien
cttttatgtagcgagtggaagtacc

SEQ ID NO: 230840 - DNA, 25 bp, Homo sapien
gtggaagtaccatatgctttgttaa

SEQ ID NO: 230841 - DNA, 25 bp, Homo sapien
tgactctctttgtagtgctctttta

SEQ ID NO: 230842 - DNA, 25 bp, Homo sapien
ttgtagtgctcttttatgtagcgag

SEQ ID NO: 230843 - DNA, 25 bp, Homo sapien
gattatgttatacaccgtggccttg

SEQ ID NO: 230844 - DNA, 25 bp, Homo sapien
ttcttacgagcatcaagtgaacatg

SEQ ID NO: 230845 - DNA, 25 bp, Homo sapien
ccttctcaaaacaacaggagtaggg

SEQ ID NO: 230846 - DNA, 25 bp, Homo sapien
caaactttcataaggcacagtgtcg

SEQ ID NO: 230847 - DNA, 25 bp, Homo sapien
tgttggaggtctgttcatcagcagg

SEQ ID NO: 230848 - DNA, 25 bp, Homo sapien
gaccatggaaaggagatcagtagat

SEQ ID NO: 230849 - DNA, 25 bp, Homo sapien
ggctgccagctagttgaggtactgc

SEQ ID NO: 230850 - DNA, 25 bp, Homo sapien
ttcaaatcttgttgtgcacagagtc

SEQ ID NO: 230851 - DNA, 25 bp, Homo sapien
tgtttttccactttaagtgctcttc

SEQ ID NO: 230852 - DNA, 25 bp, Homo sapien
ttttccactttaagtgctcttcctc

SEQ ID NO: 230853 - DNA, 25 bp, Homo sapien
actttaagtgctcttcctctaactc

SEQ ID NO: 230854 - DNA, 25 bp, Homo sapien
tccactttaagtgctcttcctctaa

SEQ ID NO: 230855 - DNA, 25 bp, Homo sapien
agcggggctgcgtagtaagtcttaa

SEQ ID NO: 230856 - DNA, 25 bp, Homo sapien
gcgtagtaagtcttaagacttgctc

SEQ ID NO: 230857 - DNA, 25 bp, Homo sapien
gggctgcgtagtaagtcttaagact

SEQ ID NO: 230858 - DNA, 25 bp, Homo sapien
tataagagtggatagagcggggctg

SEQ ID NO: 230859 - DNA, 25 bp, Homo sapien
actcaaatgcataaatccttgccta

SEQ ID NO: 230860 - DNA, 25 bp, Homo sapien
ggcttgcaaacatttccgtcgcttc

SEQ ID NO: 230861 - DNA, 25 bp, Homo sapien
aatccttgcctacgccttgcattca

SEQ ID NO: 230862 - DNA, 25 bp, Homo sapien
ttccgtcgcttctctactcaaatgc

SEQ ID NO: 230863 - DNA, 25 bp, Homo sapien
tttctaggaatcagattacatcagc

SEQ ID NO: 230864 - DNA, 25 bp, Homo sapien
ctggctagagcttctaatagtatgt

SEQ ID NO: 230865 - DNA, 25 bp, Homo sapien
tctttggctaaatctattcctaggt

SEQ ID NO: 230866 - DNA, 25 bp, Homo sapien
tacaatgactactgatttttctaca

SEQ ID NO: 230867 - DNA, 25 bp, Homo sapien
agtgttactcactcatcagacaaac

SEQ ID NO: 230868 - DNA, 25 bp, Homo sapien
ctgttaagactcacttgaggtttca

SEQ ID NO: 230869 - DNA, 25 bp, Homo sapien
aggaagtgttactcactcatcagac

SEQ ID NO: 230870 - DNA, 25 bp, Homo sapien
ttaagactcacttgaggtttcacct

SEQ ID NO: 230871 - DNA, 25 bp, Homo sapien
ggagaaatattatggaccatgttca

SEQ ID NO: 230872 - DNA, 25 bp, Homo sapien
taacagcaggtctcccatgaaaaat

SEQ ID NO: 230873 - DNA, 25 bp, Homo sapien
gattggctaacagcaggtctcccat

SEQ ID NO: 230874 - DNA, 25 bp, Homo sapien
cctgattggctaacagcaggtctcc

SEQ ID NO: 230875 - DNA, 25 bp, Homo sapien
ggctaacagcaggtctcccatgaaa

SEQ ID NO: 230876 - DNA, 25 bp, Homo sapien
tgctgcccagcaaacctgtgatcct

SEQ ID NO: 230877 - DNA, 25 bp, Homo sapien
aaacttgcatagcacctgccctgct

SEQ ID NO: 230878 - DNA, 25 bp, Homo sapien
cagagatgtattcatgagcagctga

SEQ ID NO: 230879 - DNA, 25 bp, Homo sapien
cactttggcagaattgtgcggacag

SEQ ID NO: 230880 - DNA, 25 bp, Homo sapien
gtgcaatagcctgagatactcatag

SEQ ID NO: 230881 - DNA, 25 bp, Homo sapien
cctctgggacggttgtgcaatagcc

SEQ ID NO: 230882 - DNA, 25 bp, Homo sapien
aagcggaccatctgacagcctctgg

SEQ ID NO: 230883 - DNA, 25 bp, Homo sapien
taaatggacagctcattattggact

SEQ ID NO: 230884 - DNA, 25 bp, Homo sapien
gaagggctttgaatggatgtccata

SEQ ID NO: 230885 - DNA, 25 bp, Homo sapien
gggctttgaatggatgtccatagca

SEQ ID NO: 230886 - DNA, 25 bp, Homo sapien
ctttgaatggatgtccatagcatcc

SEQ ID NO: 230887 - DNA, 25 bp, Homo sapien
gctttgaatggatgtccatagcatc

SEQ ID NO: 230888 - DNA, 25 bp, Homo sapien
tgaatctgcttttgtaggacatccc

SEQ ID NO: 230889 - DNA, 25 bp, Homo sapien
aattagagactgctgtgccatagca

SEQ ID NO: 230890 - DNA, 25 bp, Homo sapien
tcttgcttgtcaccaggaacccatc

SEQ ID NO: 230891 - DNA, 25 bp, Homo sapien
ttaagtgagctctacttttatctgt

SEQ ID NO: 230892 - DNA, 25 bp, Homo sapien
tactcggacccataatcatatctgg

SEQ ID NO: 230893 - DNA, 25 bp, Homo sapien
gaactgccgtgtcagtgtatccggg

SEQ ID NO: 230894 - DNA, 25 bp, Homo sapien
tgagcttagagtccatactcggacc

SEQ ID NO: 230895 - DNA, 25 bp, Homo sapien
ccactagcggctcacagttttgatg

SEQ ID NO: 230896 - DNA, 25 bp, Homo sapien
ctcaaagcaaagaagatgataaaag

SEQ ID NO: 230897 - DNA, 25 bp, Homo sapien
gtcaatattcctagccacaggctct

SEQ ID NO: 230898 - DNA, 25 bp, Homo sapien
caaatattcaacttcaagcttcggt

SEQ ID NO: 230899 - DNA, 25 bp, Homo sapien
tctccagttccaaacctacgttgcc

SEQ ID NO: 230900 - DNA, 25 bp, Homo sapien
tcaagcttcggtctaccttagatat

SEQ ID NO: 230901 - DNA, 25 bp, Homo sapien
gcatcttcaggtaacgctgatacat

SEQ ID NO: 230902 - DNA, 25 bp, Homo sapien
cgtgcatcttcaggtaacgctgata

SEQ ID NO: 230903 - DNA, 25 bp, Homo sapien
tgcgtgcatcttcaggtaacgctga

SEQ ID NO: 230904 - DNA, 25 bp, Homo sapien
gcagtgcgtgcatcttcaggtaacg

SEQ ID NO: 230905 - DNA, 25 bp, Homo sapien
ttgttccctttaagacttgtgacat

SEQ ID NO: 230906 - DNA, 25 bp, Homo sapien
tgttccctttaagacttgtgacatg

SEQ ID NO: 230907 - DNA, 25 bp, Homo sapien
gttccctttaagacttgtgacatgc

SEQ ID NO: 230908 - DNA, 25 bp, Homo sapien
cattgactgtacaccatgatggcgg

SEQ ID NO: 230909 - DNA, 25 bp, Homo sapien
tcagcggtgcctccggtgaggagct

SEQ ID NO: 230910 - DNA, 25 bp, Homo sapien
tccctgaccacgaggacggggccaa

SEQ ID NO: 230911 - DNA, 25 bp, Homo sapien
tgaactttcgggcattcattgactg

SEQ ID NO: 230912 - DNA, 25 bp, Homo sapien
cccatctgggtacacagcgtggata

SEQ ID NO: 230913 - DNA, 25 bp, Homo sapien
catctgggtacacagcgtggataca

SEQ ID NO: 230914 - DNA, 25 bp, Homo sapien
gcccccatctgggtacacagcgtgg

SEQ ID NO: 230915 - DNA, 25 bp, Homo sapien
aagcccccatctgggtacacagcgt

SEQ ID NO: 230916 - DNA, 25 bp, Homo sapien
gaattcggtacacacgtgtcagctt

SEQ ID NO: 230917 - DNA, 25 bp, Homo sapien
tgcttatctgcccagtccggatgtg

SEQ ID NO: 230918 - DNA, 25 bp, Homo sapien
gaatgtgtagaattcggtacacacg

SEQ ID NO: 230919 - DNA, 25 bp, Homo sapien
cccagtccggatgtgaatgtgtaga

SEQ ID NO: 230920 - DNA, 25 bp, Homo sapien
aagacgtggctgtgcaagcctcacc

SEQ ID NO: 230921 - DNA, 25 bp, Homo sapien
caccgaaaagacgtggctgtgcaag

SEQ ID NO: 230922 - DNA, 25 bp, Homo sapien
cacgtgttgggcaccgaaaagacgt

SEQ ID NO: 230923 - DNA, 25 bp, Homo sapien
ttgtgatggggaaaacagacaacac

SEQ ID NO: 230924 - DNA, 25 bp, Homo sapien
tgtcggaggtcagaaagggtccgga

SEQ ID NO: 230925 - DNA, 25 bp, Homo sapien
gaaagggtccggagtcttcagtgtc

SEQ ID NO: 230926 - DNA, 25 bp, Homo sapien
ttatcatatcactgagaacacttcc

SEQ ID NO: 230927 - DNA, 25 bp, Homo sapien
tttatcatatcactgagaacacttc

SEQ ID NO: 230928 - DNA, 25 bp, Homo sapien
tgcttaaactctgtttagtaaacag

SEQ ID NO: 230929 - DNA, 25 bp, Homo sapien
gatctctgtctatgcccattgctta

SEQ ID NO: 230930 - DNA, 25 bp, Homo sapien
gactgctcacagctaactgctctga

SEQ ID NO: 230931 - DNA, 25 bp, Homo sapien
catctggtagacattaagctgaaag

SEQ ID NO: 230932 - DNA, 25 bp, Homo sapien
taacgacattggtctatcttcaagt

SEQ ID NO: 230933 - DNA, 25 bp, Homo sapien
gaatctgggtaacgacattggtcta

SEQ ID NO: 230934 - DNA, 25 bp, Homo sapien
gctgggtccattgttcttgtgggta

SEQ ID NO: 230935 - DNA, 25 bp, Homo sapien
ggtagaatctgggtaacgacattgg

SEQ ID NO: 230936 - DNA, 25 bp, Homo sapien
agaaggcagtagatattcctaacca

SEQ ID NO: 230937 - DNA, 25 bp, Homo sapien
gaaagaaggcagtagatattcctaa

SEQ ID NO: 230938 - DNA, 25 bp, Homo sapien
gcagtagatattcctaaccactcta

SEQ ID NO: 230939 - DNA, 25 bp, Homo sapien
ggcagtagatattcctaaccactct

SEQ ID NO: 230940 - DNA, 25 bp, Homo sapien
actggtgccttcaccaatggtagtt

SEQ ID NO: 230941 - DNA, 25 bp, Homo sapien
ggtgccttcaccaatggtagttggt

SEQ ID NO: 230942 - DNA, 25 bp, Homo sapien
tcactggtgccttcaccaatggtag

SEQ ID NO: 230943 - DNA, 25 bp, Homo sapien
tggtgccttcaccaatggtagttgg

SEQ ID NO: 230944 - DNA, 25 bp, Homo sapien
gaagtagccgttttcccatcatgaa

SEQ ID NO: 230945 - DNA, 25 bp, Homo sapien
ttgtagaagtagccgttttcccatc

SEQ ID NO: 230946 - DNA, 25 bp, Homo sapien
gtagaagtagccgttttcccatcat

SEQ ID NO: 230947 - DNA, 25 bp, Homo sapien
ctccggataattaaactcatgttgt

SEQ ID NO: 230948 - DNA, 25 bp, Homo sapien
ctgcaggtaatatctctcttgaaca

SEQ ID NO: 230949 - DNA, 25 bp, Homo sapien
gcaggtaatatctctcttgaacacc

SEQ ID NO: 230950 - DNA, 25 bp, Homo sapien
tgcaggtaatatctctcttgaacac

SEQ ID NO: 230951 - DNA, 25 bp, Homo sapien
actactattccttctttctcttcca

SEQ ID NO: 230952 - DNA, 25 bp, Homo sapien
tcactactattccttctttctcttc

SEQ ID NO: 230953 - DNA, 25 bp, Homo sapien
ctactattccttctttctcttccat

SEQ ID NO: 230954 - DNA, 25 bp, Homo sapien
cctcactactattccttctttctct

SEQ ID NO: 230955 - DNA, 25 bp, Homo sapien
ggagtgccagagttggcagcattcc

SEQ ID NO: 230956 - DNA, 25 bp, Homo sapien
gtaaatggactatctgttacttgca

SEQ ID NO: 230957 - DNA, 25 bp, Homo sapien
gagttggcagcattcctagagttct

SEQ ID NO: 230958 - DNA, 25 bp, Homo sapien
cctagagttctcatttgggtgaaat

SEQ ID NO: 230959 - DNA, 25 bp, Homo sapien
gcttttgatgagcacgtctgctgtc

SEQ ID NO: 230960 - DNA, 25 bp, Homo sapien
gtgaatgttccagtgcttgctcaac

SEQ ID NO: 230961 - DNA, 25 bp, Homo sapien
ttgattagtccatgcatgtccatcc

SEQ ID NO: 230962 - DNA, 25 bp, Homo sapien
cacgtctgctgtctgcctttgtgaa

SEQ ID NO: 230963 - DNA, 25 bp, Homo sapien
tttaggaagcattcgaatagtatcc

SEQ ID NO: 230964 - DNA, 25 bp, Homo sapien
tgttgaaatagggtttaggaagcat

SEQ ID NO: 230965 - DNA, 25 bp, Homo sapien
gaatagtatccagctcttcttggct

SEQ ID NO: 230966 - DNA, 25 bp, Homo sapien
gcattcgaatagtatccagctcttc

SEQ ID NO: 230967 - DNA, 25 bp, Homo sapien
cctttgaccacttagagcaagatct

SEQ ID NO: 230968 - DNA, 25 bp, Homo sapien
tgaccacttagagcaagatcttcag

SEQ ID NO: 230969 - DNA, 25 bp, Homo sapien
tttgaccacttagagcaagatcttc

SEQ ID NO: 230970 - DNA, 25 bp, Homo sapien
accacttagagcaagatcttcagga

SEQ ID NO: 230971 - DNA, 25 bp, Homo sapien
aaaatggaaagatgcgatgttttgc

SEQ ID NO: 230972 - DNA, 25 bp, Homo sapien
aaatggaaagatgcgatgttttgct

SEQ ID NO: 230973 - DNA, 25 bp, Homo sapien
taaaatggaaagatgcgatgttttg

SEQ ID NO: 230974 - DNA, 25 bp, Homo sapien
aatggaaagatgcgatgttttgctt

SEQ ID NO: 230975 - DNA, 25 bp, Homo sapien
tttctcccaacccagatgcatagtg

SEQ ID NO: 230976 - DNA, 25 bp, Homo sapien
gagcttgcagccctttctcaggtat

SEQ ID NO: 230977 - DNA, 25 bp, Homo sapien
tcaactgctctccttgatgatgccc

SEQ ID NO: 230978 - DNA, 25 bp, Homo sapien
ggtatccccataaccatttcactca

SEQ ID NO: 230979 - DNA, 25 bp, Homo sapien
aagccacggatttgtatgagttaga

SEQ ID NO: 230980 - DNA, 25 bp, Homo sapien
catattttgaagatccgggctgtga

SEQ ID NO: 230981 - DNA, 25 bp, Homo sapien
gagttagatttctatgcagggatac

SEQ ID NO: 230982 - DNA, 25 bp, Homo sapien
ccaataatactggtcaagccacgga

SEQ ID NO: 230983 - DNA, 25 bp, Homo sapien
cggctgactgttttatgcctaagga

SEQ ID NO: 230984 - DNA, 25 bp, Homo sapien
tgattaccaaatccatagagcccaa

SEQ ID NO: 230985 - DNA, 25 bp, Homo sapien
gctctgacttgaagccggctgactg

SEQ ID NO: 230986 - DNA, 25 bp, Homo sapien
tgatctgacgacaaacgatgcataa

SEQ ID NO: 230987 - DNA, 25 bp, Homo sapien
ctgaaagtctatacacatctgcaaa

SEQ ID NO: 230988 - DNA, 25 bp, Homo sapien
gaaaactgttgctgtactaactgtc

SEQ ID NO: 230989 - DNA, 25 bp, Homo sapien
tacatgtagcccagtgtgaaaactg

SEQ ID NO: 230990 - DNA, 25 bp, Homo sapien
tccacgtggctgatacaacgtgtgt

SEQ ID NO: 230991 - DNA, 25 bp, Homo sapien
tatcacaatacaggagttctctctg

SEQ ID NO: 230992 - DNA, 25 bp, Homo sapien
tgcctgtagtagtagaattagctga

SEQ ID NO: 230993 - DNA, 25 bp, Homo sapien
tataagatagaaaaaccaagggcaa

SEQ ID NO: 230994 - DNA, 25 bp, Homo sapien
taaaatcgctgaccccattagatcc

SEQ ID NO: 230995 - DNA, 25 bp, Homo sapien
tgactaacttgtacagtgccttctg

SEQ ID NO: 230996 - DNA, 25 bp, Homo sapien
catgtgactaacttgtacagtgcct

SEQ ID NO: 230997 - DNA, 25 bp, Homo sapien
gtgactaacttgtacagtgccttct

SEQ ID NO: 230998 - DNA, 25 bp, Homo sapien
tgtgactaacttgtacagtgccttc

SEQ ID NO: 230999 - DNA, 25 bp, Homo sapien
tctacacctttgaagctctcagagg

SEQ ID NO: 231000 - DNA, 25 bp, Homo sapien
taagatcttccaagaccaagctcag

SEQ ID NO: 231001 - DNA, 25 bp, Homo sapien
tatggaacaagggtaccagcaaagc

SEQ ID NO: 231002 - DNA, 25 bp, Homo sapien
tccctggtaagatggagacatgaag

SEQ ID NO: 231003 - DNA, 25 bp, Homo sapien
ggaaatctccatggtttaacgtgct

SEQ ID NO: 231004 - DNA, 25 bp, Homo sapien
cctgtggaacagacagcaactgctt

SEQ ID NO: 231005 - DNA, 25 bp, Homo sapien
tacaatggtagcatctaggtttgag

SEQ ID NO: 231006 - DNA, 25 bp, Homo sapien
cccagtgcagttggagaatgtttgt

SEQ ID NO: 231007 - DNA, 25 bp, Homo sapien
aaggcaaagaaaccacggcttgagg

SEQ ID NO: 231008 - DNA, 25 bp, Homo sapien
agaaaggcaaagaaaccacggcttg

SEQ ID NO: 231009 - DNA, 25 bp, Homo sapien
aggcaaagaaaccacggcttgagga

SEQ ID NO: 231010 - DNA, 25 bp, Homo sapien
gaaaggcaaagaaaccacggcttga

SEQ ID NO: 231011 - DNA, 25 bp, Homo sapien
tcttggcccaaaggactttcctcga

SEQ ID NO: 231012 - DNA, 25 bp, Homo sapien
gcccaaaggactttcctcgagactg

SEQ ID NO: 231013 - DNA, 25 bp, Homo sapien
tggcccaaaggactttcctcgagac

SEQ ID NO: 231014 - DNA, 25 bp, Homo sapien
ccaaaggactttcctcgagactggg

SEQ ID NO: 231015 - DNA, 25 bp, Homo sapien
tctctagggagtgtcaggcgcacac

SEQ ID NO: 231016 - DNA, 25 bp, Homo sapien
gatttacaacggagttctgcacagg

SEQ ID NO: 231017 - DNA, 25 bp, Homo sapien
tctggtccggatgaaacgctagggc

SEQ ID NO: 231018 - DNA, 25 bp, Homo sapien
taggcttactcggacactggatggg

SEQ ID NO: 231019 - DNA, 25 bp, Homo sapien
tgatacccgggaaactcctagagcg

SEQ ID NO: 231020 - DNA, 25 bp, Homo sapien
tcagtgcccctaaccttgtcagagt

SEQ ID NO: 231021 - DNA, 25 bp, Homo sapien
ggctggacccatacttgatacccgg

SEQ ID NO: 231022 - DNA, 25 bp, Homo sapien
cttggagagcatacgaggcggaatc

SEQ ID NO: 231023 - DNA, 25 bp, Homo sapien
gcgatcccgcgaattcattactgta

SEQ ID NO: 231024 - DNA, 25 bp, Homo sapien
agcgcgggagctgcggaggcgatcc

SEQ ID NO: 231025 - DNA, 25 bp, Homo sapien
gccagagcgcgagggacggagggag

SEQ ID NO: 231026 - DNA, 25 bp, Homo sapien
agcggagcgcgccagagcgcgaggg

SEQ ID NO: 231027 - DNA, 25 bp, Homo sapien
aaaaaacagcaagggtgccgagcgg

SEQ ID NO: 231028 - DNA, 25 bp, Homo sapien
tacgagtttgactttgaccggctgg

SEQ ID NO: 231029 - DNA, 25 bp, Homo sapien
tctgtagagacccagtgtgaacatc

SEQ ID NO: 231030 - DNA, 25 bp, Homo sapien
tggagtccccaaagcagtcctggct

SEQ ID NO: 231031 - DNA, 25 bp, Homo sapien
ccactgccaatgaagggattgtaca

SEQ ID NO: 231032 - DNA, 25 bp, Homo sapien
tccatatagcattgacagtgtgatc

SEQ ID NO: 231033 - DNA, 25 bp, Homo sapien
tgttatggactaatagagaggcaac

SEQ ID NO: 231034 - DNA, 25 bp, Homo sapien
taaaacaccagagctatccactgcc

SEQ ID NO: 231035 - DNA, 25 bp, Homo sapien
aaagcagtgtcattgttacatccgg

SEQ ID NO: 231036 - DNA, 25 bp, Homo sapien
tacatccggatctgttaatcaggga

SEQ ID NO: 231037 - DNA, 25 bp, Homo sapien
tgccatgtgccttgagtcacccaaa

SEQ ID NO: 231038 - DNA, 25 bp, Homo sapien
cctgcaaaagtgtgcagtgccatgt

SEQ ID NO: 231039 - DNA, 25 bp, Homo sapien
ggcagagccatcataactaatccca

SEQ ID NO: 231040 - DNA, 25 bp, Homo sapien
ggtattcctgcaatccttccgagac

SEQ ID NO: 231041 - DNA, 25 bp, Homo sapien
tgcagacaggtaagacacggagacc

SEQ ID NO: 231042 - DNA, 25 bp, Homo sapien
cacggagacctttgggttgatggca

SEQ ID NO: 231043 - DNA, 25 bp, Homo sapien
gcactgttcttactgcccagaggaa

SEQ ID NO: 231044 - DNA, 25 bp, Homo sapien
ttttttaacctcatagcagctcagc

SEQ ID NO: 231045 - DNA, 25 bp, Homo sapien
tccggatctcctgatggcattagca

SEQ ID NO: 231046 - DNA, 25 bp, Homo sapien
cattagcagcgtttagtcagtgact

SEQ ID NO: 231047 - DNA, 25 bp, Homo sapien
tcttacatgtctccaactccatgtg

SEQ ID NO: 231048 - DNA, 25 bp, Homo sapien
tggatttacatcctactgggtgagg

SEQ ID NO: 231049 - DNA, 25 bp, Homo sapien
tgtgtctataggtgagaagatgtga

SEQ ID NO: 231050 - DNA, 25 bp, Homo sapien
actaagtctagaatcatgaagccag

SEQ ID NO: 231051 - DNA, 25 bp, Homo sapien
aatgttattgtgcacgttccctgag

SEQ ID NO: 231052 - DNA, 25 bp, Homo sapien
tggcaaggcatcctgatgcacggct

SEQ ID NO: 231053 - DNA, 25 bp, Homo sapien
tccctgagattatatccgctagaca

SEQ ID NO: 231054 - DNA, 25 bp, Homo sapien
aatggtgccatctgctaggttatga

SEQ ID NO: 231055 - DNA, 25 bp, Homo sapien
tctccctccgttattacagcaaatg

SEQ ID NO: 231056 - DNA, 25 bp, Homo sapien
tacagcaaatgatactgttgacagc

SEQ ID NO: 231057 - DNA, 25 bp, Homo sapien
tgttgacagccaataaagttacaga

SEQ ID NO: 231058 - DNA, 25 bp, Homo sapien
catggaaattctccctccgttatta

SEQ ID NO: 231059 - DNA, 25 bp, Homo sapien
tataccgtgagggaaaatcaatgga

SEQ ID NO: 231060 - DNA, 25 bp, Homo sapien
tcaggccacacggttcaataacggg

SEQ ID NO: 231061 - DNA, 25 bp, Homo sapien
caatggattgtaacagaaccctgca

SEQ ID NO: 231062 - DNA, 25 bp, Homo sapien
cctttagggcagtattcaggccaca

SEQ ID NO: 231063 - DNA, 25 bp, Homo sapien
gggaagaaagtgtcatctcgtggct

SEQ ID NO: 231064 - DNA, 25 bp, Homo sapien
catacggtggaatatacaaggttta

SEQ ID NO: 231065 - DNA, 25 bp, Homo sapien
tgaaaaatagtctcagtgttggata

SEQ ID NO: 231066 - DNA, 25 bp, Homo sapien
tagttgatccaaatacatacggtgg

SEQ ID NO: 231067 - DNA, 25 bp, Homo sapien
cgaagcttccttcggcatcttcctt

SEQ ID NO: 231068 - DNA, 25 bp, Homo sapien
tccaaagatacctggaatctcgaag

SEQ ID NO: 231069 - DNA, 25 bp, Homo sapien
tggacagtttcctgaacgctgtggt

SEQ ID NO: 231070 - DNA, 25 bp, Homo sapien
acagtttcctgaacgctgtggtttc

SEQ ID NO: 231071 - DNA, 25 bp, Homo sapien
cagcaacccagatttgtctatcata

SEQ ID NO: 231072 - DNA, 25 bp, Homo sapien
aactgggttgaaactcatagtcagc

SEQ ID NO: 231073 - DNA, 25 bp, Homo sapien
gagtcatcattttgggcatagaact

SEQ ID NO: 231074 - DNA, 25 bp, Homo sapien
tgaaactcatagtcagcaacccaga

SEQ ID NO: 231075 - DNA, 25 bp, Homo sapien
cgggttgagtgatataataaacctc

SEQ ID NO: 231076 - DNA, 25 bp, Homo sapien
tgacacaggcaaagaaaatagtcat

SEQ ID NO: 231077 - DNA, 25 bp, Homo sapien
caaagctttcaaccctgacacaggc

SEQ ID NO: 231078 - DNA, 25 bp, Homo sapien
aaaatagtcatcgtagcatcgtggg

SEQ ID NO: 231079 - DNA, 25 bp, Homo sapien
aaggttaatttagagcatgtcatac

SEQ ID NO: 231080 - DNA, 25 bp, Homo sapien
tggctgcagggccagtaaggttaat

SEQ ID NO: 231081 - DNA, 25 bp, Homo sapien
ggctgcagggccagtaaggttaatt

SEQ ID NO: 231082 - DNA, 25 bp, Homo sapien
agtaaggttaatttagagcatgtca

SEQ ID NO: 231083 - DNA, 25 bp, Homo sapien
ctgtgagtgccagtagggttttcaa

SEQ ID NO: 231084 - DNA, 25 bp, Homo sapien
tatgattgaaactctgttgattgaa

SEQ ID NO: 231085 - DNA, 25 bp, Homo sapien
tcacagggctcttccttacatatga

SEQ ID NO: 231086 - DNA, 25 bp, Homo sapien
gtgttgagcccaaatctgtgagtgc

SEQ ID NO: 231087 - DNA, 25 bp, Homo sapien
cctaggtgcggcttagcttgactgt

SEQ ID NO: 231088 - DNA, 25 bp, Homo sapien
cagttgagaactttctccctgagct

SEQ ID NO: 231089 - DNA, 25 bp, Homo sapien
gctcaataaacagttgagaactttc

SEQ ID NO: 231090 - DNA, 25 bp, Homo sapien
gcggcttagcttgactgtgactatt

SEQ ID NO: 231091 - DNA, 25 bp, Homo sapien
ctttggagttgttttaatctcactc

SEQ ID NO: 231092 - DNA, 25 bp, Homo sapien
aagaatgagggtctttggagttgtt

SEQ ID NO: 231093 - DNA, 25 bp, Homo sapien
ttggagttgttttaatctcactcat

SEQ ID NO: 231094 - DNA, 25 bp, Homo sapien
ctgaaagaatgagggtctttggagt

SEQ ID NO: 231095 - DNA, 25 bp, Homo sapien
gtagggactttatctgtcttgctca

SEQ ID NO: 231096 - DNA, 25 bp, Homo sapien
cagtggccactcaacaattgcctga

SEQ ID NO: 231097 - DNA, 25 bp, Homo sapien
ttgctcacctgtgcgtcacacgggc

SEQ ID NO: 231098 - DNA, 25 bp, Homo sapien
aacatagcaccttcctgactgtagg

SEQ ID NO: 231099 - DNA, 25 bp, Homo sapien
caaaagtgggctccggtgatgacaa

SEQ ID NO: 231100 - DNA, 25 bp, Homo sapien
gctctcgctaacattctgggcctga

SEQ ID NO: 231101 - DNA, 25 bp, Homo sapien
taggctcatgctgctggaccaagga

SEQ ID NO: 231102 - DNA, 25 bp, Homo sapien
taaggccaagtgtcgtacatagtca

SEQ ID NO: 231103 - DNA, 25 bp, Homo sapien
gggctctactcacaggtgtccaaac

SEQ ID NO: 231104 - DNA, 25 bp, Homo sapien
tgccctagtgtgtgccgctgcgaca

SEQ ID NO: 231105 - DNA, 25 bp, Homo sapien
tacttcagaaatgggcctacagacc

SEQ ID NO: 231106 - DNA, 25 bp, Homo sapien
tacagaccacaaagtggcccagcca

SEQ ID NO: 231107 - DNA, 25 bp, Homo sapien
tgaccaacaagggtatcgccgaggg

SEQ ID NO: 231108 - DNA, 25 bp, Homo sapien
cagaatctcacgagcttggagcgtc

SEQ ID NO: 231109 - DNA, 25 bp, Homo sapien
ggatatatccaacaaccaactgcgg

SEQ ID NO: 231110 - DNA, 25 bp, Homo sapien
tcaaatctgcgtaagctggaacggc

SEQ ID NO: 231111 - DNA, 25 bp, Homo sapien
aaggtgatcagtgtagcagtaagac

SEQ ID NO: 231112 - DNA, 25 bp, Homo sapien
cccttttgctggaggtgttcctgaa

SEQ ID NO: 231113 - DNA, 25 bp, Homo sapien
gcaatgcttaagatggtctgacagg

SEQ ID NO: 231114 - DNA, 25 bp, Homo sapien
tcaccttgtgtacaacatggcaaag

SEQ ID NO: 231115 - DNA, 25 bp, Homo sapien
aacaaaaagtacgtgaccagtctgg

SEQ ID NO: 231116 - DNA, 25 bp, Homo sapien
ggcaatattgcagtccacagggaat

SEQ ID NO: 231117 - DNA, 25 bp, Homo sapien
cagaggccatcgcagcttttgaaaa

SEQ ID NO: 231118 - DNA, 25 bp, Homo sapien
gaatggatgcttcacttgatctccg

SEQ ID NO: 231119 - DNA, 25 bp, Homo sapien
ctgactctgacttggttaagaccct

SEQ ID NO: 231120 - DNA, 25 bp, Homo sapien
ttttgagcagaatatggccaggctg

SEQ ID NO: 231121 - DNA, 25 bp, Homo sapien
ggattctgctagttccagcaccaga

SEQ ID NO: 231122 - DNA, 25 bp, Homo sapien
ccgaggcctggtaagttctggtgca

SEQ ID NO: 231123 - DNA, 25 bp, Homo sapien
gccattatccaaagacttggtcatc

SEQ ID NO: 231124 - DNA, 25 bp, Homo sapien
caaagacttggtcatctgaagtgaa

SEQ ID NO: 231125 - DNA, 25 bp, Homo sapien
cattatccaaagacttggtcatctg

SEQ ID NO: 231126 - DNA, 25 bp, Homo sapien
acttggtcatctgaagtgaaaaatc

SEQ ID NO: 231127 - DNA, 25 bp, Homo sapien
taaatgcctctcaaatctgagcagg

SEQ ID NO: 231128 - DNA, 25 bp, Homo sapien
gacacagccggtgcctgggatagct

SEQ ID NO: 231129 - DNA, 25 bp, Homo sapien
tttgtgatagttcctgccagagctc

SEQ ID NO: 231130 - DNA, 25 bp, Homo sapien
tgagacccacttggctcttttagaa

SEQ ID NO: 231131 - DNA, 25 bp, Homo sapien
ttcacccttcgatgaatcatattta

SEQ ID NO: 231132 - DNA, 25 bp, Homo sapien
aatcatatttaagaacataggaact

SEQ ID NO: 231133 - DNA, 25 bp, Homo sapien
tactcttagttctttcacccttcga

SEQ ID NO: 231134 - DNA, 25 bp, Homo sapien
tcatatttaagaacataggaacttt

SEQ ID NO: 231135 - DNA, 25 bp, Homo sapien
ccaaattcccatgtatcttatgtgg

SEQ ID NO: 231136 - DNA, 25 bp, Homo sapien
aaattcccatgtatcttatgtggag

SEQ ID NO: 231137 - DNA, 25 bp, Homo sapien
ttcccatgtatcttatgtggagtgg

SEQ ID NO: 231138 - DNA, 25 bp, Homo sapien
acccaaattcccatgtatcttatgt

SEQ ID NO: 231139 - DNA, 25 bp, Homo sapien
gaacagtcagtagaaatgttggaat

SEQ ID NO: 231140 - DNA, 25 bp, Homo sapien
cagtcagtagaaatgttggaattta

SEQ ID NO: 231141 - DNA, 25 bp, Homo sapien
gagaggaacagtcagtagaaatgtt

SEQ ID NO: 231142 - DNA, 25 bp, Homo sapien
gaggaacagtcagtagaaatgttgg

SEQ ID NO: 231143 - DNA, 25 bp, Homo sapien
gaaggaaggttgaaatctctctctg

SEQ ID NO: 231144 - DNA, 25 bp, Homo sapien
aggaaggttgaaatctctctctggt

SEQ ID NO: 231145 - DNA, 25 bp, Homo sapien
agaaggaaggttgaaatctctctct

SEQ ID NO: 231146 - DNA, 25 bp, Homo sapien
agagaaggaaggttgaaatctctct

SEQ ID NO: 231147 - DNA, 25 bp, Homo sapien
cggttacctcaatgacagatgtgga

SEQ ID NO: 231148 - DNA, 25 bp, Homo sapien
agagcggttacctcaatgacagatg

SEQ ID NO: 231149 - DNA, 25 bp, Homo sapien
gcggttacctcaatgacagatgtgg

SEQ ID NO: 231150 - DNA, 25 bp, Homo sapien
gagcggttacctcaatgacagatgt

SEQ ID NO: 231151 - DNA, 25 bp, Homo sapien
tcatggcttcactcaaggcctgtgt

SEQ ID NO: 231152 - DNA, 25 bp, Homo sapien
catggcttcactcaaggcctgtgtg

SEQ ID NO: 231153 - DNA, 25 bp, Homo sapien
tcactcaaggcctgtgtgaacagca

SEQ ID NO: 231154 - DNA, 25 bp, Homo sapien
ttcactcaaggcctgtgtgaacagc

SEQ ID NO: 231155 - DNA, 25 bp, Homo sapien
gagaagctgccgtcagtattcgaat

SEQ ID NO: 231156 - DNA, 25 bp, Homo sapien
cgtgtgtatcacttatgcttgttgc

SEQ ID NO: 231157 - DNA, 25 bp, Homo sapien
cacctggaaccactttagagaagct

SEQ ID NO: 231158 - DNA, 25 bp, Homo sapien
tgctaaattcacacagaaatgattc

SEQ ID NO: 231159 - DNA, 25 bp, Homo sapien
tgcgccaattagtaccacatgtggt

SEQ ID NO: 231160 - DNA, 25 bp, Homo sapien
ttcttaaaccgccaactgcgccaat

SEQ ID NO: 231161 - DNA, 25 bp, Homo sapien
ccacatgtggtgtgagtttgcagcg

SEQ ID NO: 231162 - DNA, 25 bp, Homo sapien
gtggttattgctgccaactcctcaa

SEQ ID NO: 231163 - DNA, 25 bp, Homo sapien
gaatctcagatcaattgttactccc

SEQ ID NO: 231164 - DNA, 25 bp, Homo sapien
cctctgcctagaacaaattagatcc

SEQ ID NO: 231165 - DNA, 25 bp, Homo sapien
tcaaattcagttcactgagggtagg

SEQ ID NO: 231166 - DNA, 25 bp, Homo sapien
tgttactccctctgaaagactctcc

SEQ ID NO: 231167 - DNA, 25 bp, Homo sapien
tgttgcaaagtagcgatcagaaatg

SEQ ID NO: 231168 - DNA, 25 bp, Homo sapien
tggctttgcttgcagctaactggtt

SEQ ID NO: 231169 - DNA, 25 bp, Homo sapien
tttttgctaactccaaactgtagag

SEQ ID NO: 231170 - DNA, 25 bp, Homo sapien
cagacctagcacatgcatagttgga

SEQ ID NO: 231171 - DNA, 25 bp, Homo sapien
tctgtttgtctaaggagccaaagct

SEQ ID NO: 231172 - DNA, 25 bp, Homo sapien
cagcattaccgatcttcaggataag

SEQ ID NO: 231173 - DNA, 25 bp, Homo sapien
ctagcccatgtcacagaatgccaag

SEQ ID NO: 231174 - DNA, 25 bp, Homo sapien
gagggctgctacacacgtttcttta

SEQ ID NO: 231175 - DNA, 25 bp, Homo sapien
gacaatctgatgtgtatatgtggag

SEQ ID NO: 231176 - DNA, 25 bp, Homo sapien
aggatggaagtgttctgacaatctg

SEQ ID NO: 231177 - DNA, 25 bp, Homo sapien
gaagtgttctgacaatctgatgtgt

SEQ ID NO: 231178 - DNA, 25 bp, Homo sapien
tctgacaatctgatgtgtatatgtg

SEQ ID NO: 231179 - DNA, 25 bp, Homo sapien
cactacccattcaagtgacacattt

SEQ ID NO: 231180 - DNA, 25 bp, Homo sapien
ttttcaccactgacacattttgatc

SEQ ID NO: 231181 - DNA, 25 bp, Homo sapien
ctgttgtgtttgaggggaagctaga

SEQ ID NO: 231182 - DNA, 25 bp, Homo sapien
gatctctgtacctcagctgttgtgt

SEQ ID NO: 231183 - DNA, 25 bp, Homo sapien
caataggagtggctttgaccttatc

SEQ ID NO: 231184 - DNA, 25 bp, Homo sapien
ggtctttcaacagccaaattggtac

SEQ ID NO: 231185 - DNA, 25 bp, Homo sapien
gtcttcttatgtcctggtctttcaa

SEQ ID NO: 231186 - DNA, 25 bp, Homo sapien
gggtcatcttatttcccaccaatag

SEQ ID NO: 231187 - DNA, 25 bp, Homo sapien
cactttctgaggtttagctgtaaaa

SEQ ID NO: 231188 - DNA, 25 bp, Homo sapien
cacgttttccttgtgcttagcttac

SEQ ID NO: 231189 - DNA, 25 bp, Homo sapien
tctacattgagaaaacaggtcatct

SEQ ID NO: 231190 - DNA, 25 bp, Homo sapien
gctgtaaaacaatctgccatggtca

SEQ ID NO: 231191 - DNA, 25 bp, Homo sapien
ctttcttgcatgtcctgccgtggtg

SEQ ID NO: 231192 - DNA, 25 bp, Homo sapien
gtggtgtctggccaccgatcatgaa

SEQ ID NO: 231193 - DNA, 25 bp, Homo sapien
attctttcttgcatgtcctgccgtg

SEQ ID NO: 231194 - DNA, 25 bp, Homo sapien
ccaccgatcatgaaagggagattct

SEQ ID NO: 231195 - DNA, 25 bp, Homo sapien
tccaaagggcgcgctgaggtaaaga

SEQ ID NO: 231196 - DNA, 25 bp, Homo sapien
gggttctccaaagggcgcgctgagg

SEQ ID NO: 231197 - DNA, 25 bp, Homo sapien
ttctccaaagggcgcgctgaggtaa

SEQ ID NO: 231198 - DNA, 25 bp, Homo sapien
caaagggcgcgctgaggtaaagact

SEQ ID NO: 231199 - DNA, 25 bp, Homo sapien
ttggctgcttggcaatgcacccagg

SEQ ID NO: 231200 - DNA, 25 bp, Homo sapien
tagtcgtactggtgtgggttatttg

SEQ ID NO: 231201 - DNA, 25 bp, Homo sapien
tgtgggttatttgtgcgatttctaa

SEQ ID NO: 231202 - DNA, 25 bp, Homo sapien
aagaccttgggtcgaatgtgtagtc

SEQ ID NO: 231203 - DNA, 25 bp, Homo sapien
cacacacaaagtatcatgcacacga

SEQ ID NO: 231204 - DNA, 25 bp, Homo sapien
cctgcagttaggcttgggcacaggc

SEQ ID NO: 231205 - DNA, 25 bp, Homo sapien
ctctcctgcagttaggcttgggcac

SEQ ID NO: 231206 - DNA, 25 bp, Homo sapien
cgaagaacatgtgtttgcagaaaac

SEQ ID NO: 231207 - DNA, 25 bp, Homo sapien
ttcctctagcatctgactgagctgc

SEQ ID NO: 231208 - DNA, 25 bp, Homo sapien
tggattcctctagcatctgactgag

SEQ ID NO: 231209 - DNA, 25 bp, Homo sapien
cctctagcatctgactgagctgcat

SEQ ID NO: 231210 - DNA, 25 bp, Homo sapien
gattcctctagcatctgactgagct

SEQ ID NO: 231211 - DNA, 25 bp, Homo sapien
cttgtccaagaccatgaattaaata

SEQ ID NO: 231212 - DNA, 25 bp, Homo sapien
tccaagaccatgaattaaatactcc

SEQ ID NO: 231213 - DNA, 25 bp, Homo sapien
tgtccaagaccatgaattaaatact

SEQ ID NO: 231214 - DNA, 25 bp, Homo sapien
caagaccatgaattaaatactccat

SEQ ID NO: 231215 - DNA, 25 bp, Homo sapien
gatttgcctactctctggacagtac

SEQ ID NO: 231216 - DNA, 25 bp, Homo sapien
ctacaacctaaagcaaacactaatg

SEQ ID NO: 231217 - DNA, 25 bp, Homo sapien
tcttattcagtttgtcaccaagtcc

SEQ ID NO: 231218 - DNA, 25 bp, Homo sapien
cacagagttgcacaactgttacaag

SEQ ID NO: 231219 - DNA, 25 bp, Homo sapien
tatgagtatagggttatttcccttg

SEQ ID NO: 231220 - DNA, 25 bp, Homo sapien
tgtcatttccaatacatcgttccct

SEQ ID NO: 231221 - DNA, 25 bp, Homo sapien
tgcttgtacgttttccttgaaagcc

SEQ ID NO: 231222 - DNA, 25 bp, Homo sapien
aagcccctttgccaatagtgtcaaa

SEQ ID NO: 231223 - DNA, 25 bp, Homo sapien
aaaatagattccatgattaatgcag

SEQ ID NO: 231224 - DNA, 25 bp, Homo sapien
aatgaaaatagattccatgattaat

SEQ ID NO: 231225 - DNA, 25 bp, Homo sapien
tgaaaatagattccatgattaatgc

SEQ ID NO: 231226 - DNA, 25 bp, Homo sapien
cagaaatatgacactaaggtgtttc

SEQ ID NO: 231227 - DNA, 25 bp, Homo sapien
ctgctctcatgtttcttattcgtgt

SEQ ID NO: 231228 - DNA, 25 bp, Homo sapien
tctcatgtttcttattcgtgttttc

SEQ ID NO: 231229 - DNA, 25 bp, Homo sapien
gctctcatgtttcttattcgtgttt

SEQ ID NO: 231230 - DNA, 25 bp, Homo sapien
catgtttcttattcgtgttttcttc

SEQ ID NO: 231231 - DNA, 25 bp, Homo sapien
tatccacggggatactgcttgagga

SEQ ID NO: 231232 - DNA, 25 bp, Homo sapien
tccatgaaaacctcattataaacat

SEQ ID NO: 231233 - DNA, 25 bp, Homo sapien
gataaatccccggagcttctagctg

SEQ ID NO: 231234 - DNA, 25 bp, Homo sapien
tctagctgtgaactgcgggattctg

SEQ ID NO: 231235 - DNA, 25 bp, Homo sapien
agaggacatgaccaaattcaatttc

SEQ ID NO: 231236 - DNA, 25 bp, Homo sapien
cagaggacatgaccaaattcaattt

SEQ ID NO: 231237 - DNA, 25 bp, Homo sapien
gaattgtgatcaaccagttatagat

SEQ ID NO: 231238 - DNA, 25 bp, Homo sapien
aaataaatctgaattgtgatcaacc

SEQ ID NO: 231239 - DNA, 25 bp, Homo sapien
taaatctgaattgtgatcaaccagt

SEQ ID NO: 231240 - DNA, 25 bp, Homo sapien
tctgaattgtgatcaaccagttata

SEQ ID NO: 231241 - DNA, 25 bp, Homo sapien
ccagggcacactttcatatagtaag

SEQ ID NO: 231242 - DNA, 25 bp, Homo sapien
tcctcatagatttccaccactctag

SEQ ID NO: 231243 - DNA, 25 bp, Homo sapien
ttggcatgagtcattcacttctctt

SEQ ID NO: 231244 - DNA, 25 bp, Homo sapien
tacggaccatgagcttccagaagtt

SEQ ID NO: 231245 - DNA, 25 bp, Homo sapien
gaagtctgctggtgaaactcgtagc

SEQ ID NO: 231246 - DNA, 25 bp, Homo sapien
gctggtgaaactcgtagcccaggat

SEQ ID NO: 231247 - DNA, 25 bp, Homo sapien
tctgctggtgaaactcgtagcccag

SEQ ID NO: 231248 - DNA, 25 bp, Homo sapien
agtctgctggtgaaactcgtagccc

SEQ ID NO: 231249 - DNA, 25 bp, Homo sapien
tatttttgttggtattagcggtaga

SEQ ID NO: 231250 - DNA, 25 bp, Homo sapien
tggctctctggtcagcgttccccct

SEQ ID NO: 231251 - DNA, 25 bp, Homo sapien
tacacaatagcttgcttatctggag

SEQ ID NO: 231252 - DNA, 25 bp, Homo sapien
cccctggactccgatgggaagagaa

SEQ ID NO: 231253 - DNA, 25 bp, Homo sapien
gcttgcttatctggagttctttttc

SEQ ID NO: 231254 - DNA, 25 bp, Homo sapien
ggaatactaacagataactagcata

SEQ ID NO: 231255 - DNA, 25 bp, Homo sapien
ctgctggcctggaatactaacagat

SEQ ID NO: 231256 - DNA, 25 bp, Homo sapien
cctggaatactaacagataactagc

SEQ ID NO: 231257 - DNA, 25 bp, Homo sapien
gctggcctggaatactaacagataa

SEQ ID NO: 231258 - DNA, 25 bp, Homo sapien
tttggcctttttcccaagatactgc

SEQ ID NO: 231259 - DNA, 25 bp, Homo sapien
ttggcctttttcccaagatactgcc

SEQ ID NO: 231260 - DNA, 25 bp, Homo sapien
atttggcctttttcccaagatactg

SEQ ID NO: 231261 - DNA, 25 bp, Homo sapien
gctacttcttccgtttttgaacatg

SEQ ID NO: 231262 - DNA, 25 bp, Homo sapien
tgccaaatcctcagtgcctgcttct

SEQ ID NO: 231263 - DNA, 25 bp, Homo sapien
ccaagtctgaagtctttgataaagc

SEQ ID NO: 231264 - DNA, 25 bp, Homo sapien
gtactaaggtgctaggaagttttga

SEQ ID NO: 231265 - DNA, 25 bp, Homo sapien
ccttaaagtcctctattcttggaca

SEQ ID NO: 231266 - DNA, 25 bp, Homo sapien
tcgtttctacaagcgtgtctttcaa

SEQ ID NO: 231267 - DNA, 25 bp, Homo sapien
gacagtttggcaccatcgtttctac

SEQ ID NO: 231268 - DNA, 25 bp, Homo sapien
gagaaaggtatcatgtggcatttta

SEQ ID NO: 231269 - DNA, 25 bp, Homo sapien
ctgttcaactgtcaagtcaccagct

SEQ ID NO: 231270 - DNA, 25 bp, Homo sapien
ggaaatggaagtgaacatctgttca

SEQ ID NO: 231271 - DNA, 25 bp, Homo sapien
ttcaactgtcaagtcaccagctaaa

SEQ ID NO: 231272 - DNA, 25 bp, Homo sapien
gaaatggaagtgaacatctgttcaa

SEQ ID NO: 231273 - DNA, 25 bp, Homo sapien
gagatttttagtcagcaatttgatg

SEQ ID NO: 231274 - DNA, 25 bp, Homo sapien
atttttagtcagcaatttgatgtat

SEQ ID NO: 231275 - DNA, 25 bp, Homo sapien
gatttttagtcagcaatttgatgta

SEQ ID NO: 231276 - DNA, 25 bp, Homo sapien
agatttttagtcagcaatttgatgt

SEQ ID NO: 231277 - DNA, 25 bp, Homo sapien
ttttacatgttccgaaatatcttac

SEQ ID NO: 231278 - DNA, 25 bp, Homo sapien
acatgttccgaaatatcttacttgg

SEQ ID NO: 231279 - DNA, 25 bp, Homo sapien
tttctatcctataattagctaacat

SEQ ID NO: 231280 - DNA, 25 bp, Homo sapien
tacatgttccgaaatatcttacttg

SEQ ID NO: 231281 - DNA, 25 bp, Homo sapien
tgggaacagttgagcctttggatct

SEQ ID NO: 231282 - DNA, 25 bp, Homo sapien
cagtacacatgggaacagttgagcc

SEQ ID NO: 231283 - DNA, 25 bp, Homo sapien
aacagttgagcctttggatcttctg

SEQ ID NO: 231284 - DNA, 25 bp, Homo sapien
acatgggaacagttgagcctttgga

SEQ ID NO: 231285 - DNA, 25 bp, Homo sapien
tttctccaagcccatgcatatgtgt

SEQ ID NO: 231286 - DNA, 25 bp, Homo sapien
gctatatggctctgtacatgtcatt

SEQ ID NO: 231287 - DNA, 25 bp, Homo sapien
caaatggacgtagcacttgaaaggt

SEQ ID NO: 231288 - DNA, 25 bp, Homo sapien
tagaggtaaacaggtagatgacaag

SEQ ID NO: 231289 - DNA, 25 bp, Homo sapien
tgattgttagtattgtaatggaaaa

SEQ ID NO: 231290 - DNA, 25 bp, Homo sapien
tattgcaagggtagttgtagtccta

SEQ ID NO: 231291 - DNA, 25 bp, Homo sapien
gcaagggtagttgtagtcctaagtg

SEQ ID NO: 231292 - DNA, 25 bp, Homo sapien
tctattgcaagggtagttgtagtcc

SEQ ID NO: 231293 - DNA, 25 bp, Homo sapien
ggccatttgagatcgaattctaaaa

SEQ ID NO: 231294 - DNA, 25 bp, Homo sapien
gcaaaagggccatttgagatcgaat

SEQ ID NO: 231295 - DNA, 25 bp, Homo sapien
aaaagggccatttgagatcgaattc

SEQ ID NO: 231296 - DNA, 25 bp, Homo sapien
aagggccatttgagatcgaattcta

SEQ ID NO: 231297 - DNA, 25 bp, Homo sapien
aacttggtgtcagaaaccttcaggc

SEQ ID NO: 231298 - DNA, 25 bp, Homo sapien
ctgtttctagagatctgttttggag

SEQ ID NO: 231299 - DNA, 25 bp, Homo sapien
gcacttggttccaatccctggagat

SEQ ID NO: 231300 - DNA, 25 bp, Homo sapien
gattggtatatggtaaagataaagc

SEQ ID NO: 231301 - DNA, 25 bp, Homo sapien
ggaaaacacatggcaccttttagga

SEQ ID NO: 231302 - DNA, 25 bp, Homo sapien
gaaaacacatggcaccttttaggaa

SEQ ID NO: 231303 - DNA, 25 bp, Homo sapien
gcagctaggaaattttggaggttcc

SEQ ID NO: 231304 - DNA, 25 bp, Homo sapien
ctttgtgcagctaggaaattttgga

SEQ ID NO: 231305 - DNA, 25 bp, Homo sapien
atttctttgtgcagctaggaaattt

SEQ ID NO: 231306 - DNA, 25 bp, Homo sapien
tgtgcagctaggaaattttggaggt

SEQ ID NO: 231307 - DNA, 25 bp, Homo sapien
gaaaagctaggacgagtccaagaat

SEQ ID NO: 231308 - DNA, 25 bp, Homo sapien
ttgaaaagctaggacgagtccaaga

SEQ ID NO: 231309 - DNA, 25 bp, Homo sapien
atgttcttaattctactaaaacatt

SEQ ID NO: 231310 - DNA, 25 bp, Homo sapien
tcttaattctactaaaacatttgaa

SEQ ID NO: 231311 - DNA, 25 bp, Homo sapien
cacagagtagttcccgtgattttaa

SEQ ID NO: 231312 - DNA, 25 bp, Homo sapien
gaggggctaaaacactcacagagta

SEQ ID NO: 231313 - DNA, 25 bp, Homo sapien
aaactcggtttctcagtgtcttgcc

SEQ ID NO: 231314 - DNA, 25 bp, Homo sapien
ttaaactcggtttctcagtgtcttg

SEQ ID NO: 231315 - DNA, 25 bp, Homo sapien
gagtttgtctgcctgcgcctaacac

SEQ ID NO: 231316 - DNA, 25 bp, Homo sapien
taatgaatttagaacggagcctggc

SEQ ID NO: 231317 - DNA, 25 bp, Homo sapien
catagtggctttgaacaagggtaaa

SEQ ID NO: 231318 - DNA, 25 bp, Homo sapien
catgcgaacaggacttcatagtggc

SEQ ID NO: 231319 - DNA, 25 bp, Homo sapien
gagattgacaactagtatcagcatg

SEQ ID NO: 231320 - DNA, 25 bp, Homo sapien
tgggtggtaggctaagtaaactgaa

SEQ ID NO: 231321 - DNA, 25 bp, Homo sapien
taaactgaaggtacttctacaacga

SEQ ID NO: 231322 - DNA, 25 bp, Homo sapien
tctcagtgtctacacgtgtgggtgg

SEQ ID NO: 231323 - DNA, 25 bp, Homo sapien
gttaatatagctctcactggtgatg

SEQ ID NO: 231324 - DNA, 25 bp, Homo sapien
gatgcttcacggatgttgtaaaaaa

SEQ ID NO: 231325 - DNA, 25 bp, Homo sapien
tctgaccaataattgttaatatagc

SEQ ID NO: 231326 - DNA, 25 bp, Homo sapien
gctaccaggcatttatccctcttga

SEQ ID NO: 231327 - DNA, 25 bp, Homo sapien
caccatcatcagtcgctgaatccca

SEQ ID NO: 231328 - DNA, 25 bp, Homo sapien
tcagtcgctgaatcccactgtactc

SEQ ID NO: 231329 - DNA, 25 bp, Homo sapien
catcatcagtcgctgaatcccactg

SEQ ID NO: 231330 - DNA, 25 bp, Homo sapien
cctcaccatcatcagtcgctgaatc

SEQ ID NO: 231331 - DNA, 25 bp, Homo sapien
ccagaatcagttatggcatctaggg

SEQ ID NO: 231332 - DNA, 25 bp, Homo sapien
aacctcttctcatgtcatcatggcc

SEQ ID NO: 231333 - DNA, 25 bp, Homo sapien
gcatctagggtaaaacctcttctca

SEQ ID NO: 231334 - DNA, 25 bp, Homo sapien
atcatggccaccctggtatcttggg

SEQ ID NO: 231335 - DNA, 25 bp, Homo sapien
tctcttctcctcaatcagtgatgtt

SEQ ID NO: 231336 - DNA, 25 bp, Homo sapien
ctcaatcagtgatgttggatagaaa

SEQ ID NO: 231337 - DNA, 25 bp, Homo sapien
tcctcaatcagtgatgttggataga

SEQ ID NO: 231338 - DNA, 25 bp, Homo sapien
tcttctcctcaatcagtgatgttgg

SEQ ID NO: 231339 - DNA, 25 bp, Homo sapien
aaactcttcccagatagggctattt

SEQ ID NO: 231340 - DNA, 25 bp, Homo sapien
tcccagatagggctatttttccact

SEQ ID NO: 231341 - DNA, 25 bp, Homo sapien
tcttcccagatagggctatttttcc

SEQ ID NO: 231342 - DNA, 25 bp, Homo sapien
tttccactgactctattgttattcc

SEQ ID NO: 231343 - DNA, 25 bp, Homo sapien
tttgatgctttttattttggttagc

SEQ ID NO: 231344 - DNA, 25 bp, Homo sapien
ctgtttttgatgctttttattttgg

SEQ ID NO: 231345 - DNA, 25 bp, Homo sapien
cctcctctgtttttgatgcttttta

SEQ ID NO: 231346 - DNA, 25 bp, Homo sapien
tttccctcctctgtttttgatgctt

SEQ ID NO: 231347 - DNA, 25 bp, Homo sapien
ctgctctactcttgaattgtccaag

SEQ ID NO: 231348 - DNA, 25 bp, Homo sapien
tactgcaatatcgagctgctctact

SEQ ID NO: 231349 - DNA, 25 bp, Homo sapien
tatagcagcatagcattaactgcca

SEQ ID NO: 231350 - DNA, 25 bp, Homo sapien
taactgccatagctcctttataact

SEQ ID NO: 231351 - DNA, 25 bp, Homo sapien
tagaggatcagttccagtgtgccat

SEQ ID NO: 231352 - DNA, 25 bp, Homo sapien
catcactgtacgatttgcaggtgct

SEQ ID NO: 231353 - DNA, 25 bp, Homo sapien
cactgggtgaatcaatagagaaaac

SEQ ID NO: 231354 - DNA, 25 bp, Homo sapien
tggctcattgccatctcagggacat

SEQ ID NO: 231355 - DNA, 25 bp, Homo sapien
ttgtgctgcaagtgaagaaccctat

SEQ ID NO: 231356 - DNA, 25 bp, Homo sapien
cctcttgtgctgcaagtgaagaacc

SEQ ID NO: 231357 - DNA, 25 bp, Homo sapien
cttgtgctgcaagtgaagaacccta

SEQ ID NO: 231358 - DNA, 25 bp, Homo sapien
tcttgtgctgcaagtgaagaaccct

SEQ ID NO: 231359 - DNA, 25 bp, Homo sapien
tggtcatgccctgaaaatggaggct

SEQ ID NO: 231360 - DNA, 25 bp, Homo sapien
aacgatctctatgcttgtctttgaa

SEQ ID NO: 231361 - DNA, 25 bp, Homo sapien
tgtctttgaaatgccgcctcatgtg

SEQ ID NO: 231362 - DNA, 25 bp, Homo sapien
aatggaggctttgtttcccgactga

SEQ ID NO: 231363 - DNA, 25 bp, Homo sapien
taatttactgtgaaatcactatcca

SEQ ID NO: 231364 - DNA, 25 bp, Homo sapien
aagttacaattgatgatggcactac

SEQ ID NO: 231365 - DNA, 25 bp, Homo sapien
gccagagaagcattgtaagttacaa

SEQ ID NO: 231366 - DNA, 25 bp, Homo sapien
ctctgtgatccgatataatttactg

SEQ ID NO: 231367 - DNA, 25 bp, Homo sapien
tctggcttccacaaccgtgagacca

SEQ ID NO: 231368 - DNA, 25 bp, Homo sapien
taccctgaagaatagccctttatcc

SEQ ID NO: 231369 - DNA, 25 bp, Homo sapien
tcttgataacgtaagggctctgagc

SEQ ID NO: 231370 - DNA, 25 bp, Homo sapien
tatcccatgcttagtagcccaccaa

SEQ ID NO: 231371 - DNA, 25 bp, Homo sapien
taatacggtttagtcgaagcagttg

SEQ ID NO: 231372 - DNA, 25 bp, Homo sapien
tgcgtttgaataggagctgacagag

SEQ ID NO: 231373 - DNA, 25 bp, Homo sapien
cacggtgctacatcatgcgtttgaa

SEQ ID NO: 231374 - DNA, 25 bp, Homo sapien
aatgataactcttgatctaggaagc

SEQ ID NO: 231375 - DNA, 25 bp, Homo sapien
gttcagtaagcctggagttgttttg

SEQ ID NO: 231376 - DNA, 25 bp, Homo sapien
cagtaagcctggagttgttttgaat

SEQ ID NO: 231377 - DNA, 25 bp, Homo sapien
gttgttttgaatggtttccaagagc

SEQ ID NO: 231378 - DNA, 25 bp, Homo sapien
tcagtaagcctggagttgttttgaa

SEQ ID NO: 231379 - DNA, 25 bp, Homo sapien
gcagaggcagtagccggagcagcgg

SEQ ID NO: 231380 - DNA, 25 bp, Homo sapien
gaggcagtagccggagcagcggcag

SEQ ID NO: 231381 - DNA, 25 bp, Homo sapien
agaggcagtagccggagcagcggca

SEQ ID NO: 231382 - DNA, 25 bp, Homo sapien
cagcagaggcagtagccggagcagc

SEQ ID NO: 231383 - DNA, 25 bp, Homo sapien
tacagccagattccttaagaagaag

SEQ ID NO: 231384 - DNA, 25 bp, Homo sapien
aattttggaatcactctcacgtagg

SEQ ID NO: 231385 - DNA, 25 bp, Homo sapien
caagggcaggccatctaataattat

SEQ ID NO: 231386 - DNA, 25 bp, Homo sapien
tcttaagtgtcataacatgcagcag

SEQ ID NO: 231387 - DNA, 25 bp, Homo sapien
gaagtcaaggctccagtaacatccc

SEQ ID NO: 231388 - DNA, 25 bp, Homo sapien
gccttacatatgttctcaaacctga

SEQ ID NO: 231389 - DNA, 25 bp, Homo sapien
gatgttgtgactcctgttactgtac

SEQ ID NO: 231390 - DNA, 25 bp, Homo sapien
ccttactactcagatgggcttttag

SEQ ID NO: 231391 - DNA, 25 bp, Homo sapien
acaataagtggtgtctatgctgaac

SEQ ID NO: 231392 - DNA, 25 bp, Homo sapien
taaggtgatcttctaagctctggga

SEQ ID NO: 231393 - DNA, 25 bp, Homo sapien
gacttaaaccttagaatctgtggga

SEQ ID NO: 231394 - DNA, 25 bp, Homo sapien
gcaaagaagacaatccgtttcctga

SEQ ID NO: 231395 - DNA, 25 bp, Homo sapien
cccttcattcacatcgtgtgtctga

SEQ ID NO: 231396 - DNA, 25 bp, Homo sapien
tcacatcgtgtgtctgataaacctg

SEQ ID NO: 231397 - DNA, 25 bp, Homo sapien
acatcgtgtgtctgataaacctgtc

SEQ ID NO: 231398 - DNA, 25 bp, Homo sapien
cattcacatcgtgtgtctgataaac

SEQ ID NO: 231399 - DNA, 25 bp, Homo sapien
tgctctgcaaatttccgggtaatta

SEQ ID NO: 231400 - DNA, 25 bp, Homo sapien
ttgtggaactgaaagccactcattg

SEQ ID NO: 231401 - DNA, 25 bp, Homo sapien
caggaatatcgcagcatgttatgct

SEQ ID NO: 231402 - DNA, 25 bp, Homo sapien
aagccactcattggagaaggttttc

SEQ ID NO: 231403 - DNA, 25 bp, Homo sapien
tgctgcctctttcccgcttaatgtc

SEQ ID NO: 231404 - DNA, 25 bp, Homo sapien
gataatgatagtccaagccatttac

SEQ ID NO: 231405 - DNA, 25 bp, Homo sapien
ccttaaggtcaacaattgtcctaca

SEQ ID NO: 231406 - DNA, 25 bp, Homo sapien
tcagtcttgataatgatagtccaag

SEQ ID NO: 231407 - DNA, 25 bp, Homo sapien
taaggtcaacaattgtcctacacct

SEQ ID NO: 231408 - DNA, 25 bp, Homo sapien
cagctcatcttcttgcaaactattg

SEQ ID NO: 231409 - DNA, 25 bp, Homo sapien
tcatcttcttgcaaactattgcttc

SEQ ID NO: 231410 - DNA, 25 bp, Homo sapien
gctcatcttcttgcaaactattgct

SEQ ID NO: 231411 - DNA, 25 bp, Homo sapien
tcagctcatcttcttgcaaactatt

SEQ ID NO: 231412 - DNA, 25 bp, Homo sapien
ttgtctgtgctctcatagttcactg

SEQ ID NO: 231413 - DNA, 25 bp, Homo sapien
tgctctcatagttcactgtgcttaa

SEQ ID NO: 231414 - DNA, 25 bp, Homo sapien
cctttctattgtcagccttctctga

SEQ ID NO: 231415 - DNA, 25 bp, Homo sapien
tccatccacctttctattgtcagcc

SEQ ID NO: 231416 - DNA, 25 bp, Homo sapien
ttcaaaaggactccccgtcagccac

SEQ ID NO: 231417 - DNA, 25 bp, Homo sapien
tcttcaaaaggactccccgtcagcc

SEQ ID NO: 231418 - DNA, 25 bp, Homo sapien
ctatggtaccagggtgcctatcttc

SEQ ID NO: 231419 - DNA, 25 bp, Homo sapien
tggtaccagggtgcctatcttcaaa

SEQ ID NO: 231420 - DNA, 25 bp, Homo sapien
ctatatatccgtagttttcagtgga

SEQ ID NO: 231421 - DNA, 25 bp, Homo sapien
gatatgctgcctgtttgatgtaaat

SEQ ID NO: 231422 - DNA, 25 bp, Homo sapien
ccaatggatgtagatgtggttcgac

SEQ ID NO: 231423 - DNA, 25 bp, Homo sapien
taaatgaacacataagggccaatgg

SEQ ID NO: 231424 - DNA, 25 bp, Homo sapien
catgccaagggacatcatagcattt

SEQ ID NO: 231425 - DNA, 25 bp, Homo sapien
tgccaagggacatcatagcatttat

SEQ ID NO: 231426 - DNA, 25 bp, Homo sapien
ttacatgccaagggacatcatagca

SEQ ID NO: 231427 - DNA, 25 bp, Homo sapien
gccaagggacatcatagcatttatc

SEQ ID NO: 231428 - DNA, 25 bp, Homo sapien
accctttccttccgatctgattcat

SEQ ID NO: 231429 - DNA, 25 bp, Homo sapien
caaccctttccttccgatctgattc

SEQ ID NO: 231430 - DNA, 25 bp, Homo sapien
aaccctttccttccgatctgattca

SEQ ID NO: 231431 - DNA, 25 bp, Homo sapien
tgagcaccaagatcctgactacaat

SEQ ID NO: 231432 - DNA, 25 bp, Homo sapien
accaagatcctgactacaattgtca

SEQ ID NO: 231433 - DNA, 25 bp, Homo sapien
gagcaccaagatcctgactacaatt

SEQ ID NO: 231434 - DNA, 25 bp, Homo sapien
gcaccaagatcctgactacaattgt

SEQ ID NO: 231435 - DNA, 25 bp, Homo sapien
ctttaagttaccattgcaagctgtc

SEQ ID NO: 231436 - DNA, 25 bp, Homo sapien
ggctgtttttatccagatcacccct

SEQ ID NO: 231437 - DNA, 25 bp, Homo sapien
ttaagttaccattgcaagctgtcct

SEQ ID NO: 231438 - DNA, 25 bp, Homo sapien
ctgtttttatccagatcaccccttc

SEQ ID NO: 231439 - DNA, 25 bp, Homo sapien
agaacttggccgctcaataccaatg

SEQ ID NO: 231440 - DNA, 25 bp, Homo sapien
acctgagaacttggccgctcaatac

SEQ ID NO: 231441 - DNA, 25 bp, Homo sapien
tcaacctgagaacttggccgctcaa

SEQ ID NO: 231442 - DNA, 25 bp, Homo sapien
acttggccgctcaataccaatggtg

SEQ ID NO: 231443 - DNA, 25 bp, Homo sapien
tatagctgaaaagtgccggaaggcc

SEQ ID NO: 231444 - DNA, 25 bp, Homo sapien
tagccagattgccattatagctgaa

SEQ ID NO: 231445 - DNA, 25 bp, Homo sapien
tcggcagccagtgtaattatgcaag

SEQ ID NO: 231446 - DNA, 25 bp, Homo sapien
ttaagccagtgggaaattagccaga

SEQ ID NO: 231447 - DNA, 25 bp, Homo sapien
ccaacttggtgtatctcattggata

SEQ ID NO: 231448 - DNA, 25 bp, Homo sapien
tcattggatatgttgaaggtacttc

SEQ ID NO: 231449 - DNA, 25 bp, Homo sapien
gcttgcctcgttcatgatttttcca

SEQ ID NO: 231450 - DNA, 25 bp, Homo sapien
agagtagcttatgccctccagggtc

SEQ ID NO: 231451 - DNA, 25 bp, Homo sapien
gctcagagccgggactatccattaa

SEQ ID NO: 231452 - DNA, 25 bp, Homo sapien
cattttggcagaaatcttgagctgc

SEQ ID NO: 231453 - DNA, 25 bp, Homo sapien
tcctcgggtggtgtttttctatctg

SEQ ID NO: 231454 - DNA, 25 bp, Homo sapien
tatctgtaatagcagctggattcca

SEQ ID NO: 231455 - DNA, 25 bp, Homo sapien
ctatgtagtggagagtagaagagag

SEQ ID NO: 231456 - DNA, 25 bp, Homo sapien
tttccctactgcatgcaatgtgaag

SEQ ID NO: 231457 - DNA, 25 bp, Homo sapien
ttccagtttccctactgcatgcaat

SEQ ID NO: 231458 - DNA, 25 bp, Homo sapien
cctactgcatgcaatgtgaagaaag

SEQ ID NO: 231459 - DNA, 25 bp, Homo sapien
cacattgactctcttagagaggatt

SEQ ID NO: 231460 - DNA, 25 bp, Homo sapien
tatgacatcctccaaacttgttctc

SEQ ID NO: 231461 - DNA, 25 bp, Homo sapien
tagtatatgacatcctccaaacttg

SEQ ID NO: 231462 - DNA, 25 bp, Homo sapien
gagaggattcatagtatatgacatc

SEQ ID NO: 231463 - DNA, 25 bp, Homo sapien
tgttaattggaagttatcactctgc

SEQ ID NO: 231464 - DNA, 25 bp, Homo sapien
gttaattggaagttatcactctgct

SEQ ID NO: 231465 - DNA, 25 bp, Homo sapien
ttctgttaattggaagttatcactc

SEQ ID NO: 231466 - DNA, 25 bp, Homo sapien
tttttctgttaattggaagttatca

SEQ ID NO: 231467 - DNA, 25 bp, Homo sapien
gtaccattagtggtatttctgagtc

SEQ ID NO: 231468 - DNA, 25 bp, Homo sapien
accattagtggtatttctgagtcac

SEQ ID NO: 231469 - DNA, 25 bp, Homo sapien
ttactgtaccattagtggtatttct

SEQ ID NO: 231470 - DNA, 25 bp, Homo sapien
ctgtaccattagtggtatttctgag

SEQ ID NO: 231471 - DNA, 25 bp, Homo sapien
ttttcttcctttttcttctcacata

SEQ ID NO: 231472 - DNA, 25 bp, Homo sapien
ttcttcctttttcttctcacatata

SEQ ID NO: 231473 - DNA, 25 bp, Homo sapien
tcttcctttttcttctcacatatat

SEQ ID NO: 231474 - DNA, 25 bp, Homo sapien
attttcttcctttttcttctcacat

SEQ ID NO: 231475 - DNA, 25 bp, Homo sapien
gtggctgtctgctgtaatttctggt

SEQ ID NO: 231476 - DNA, 25 bp, Homo sapien
aaccggcacatagcactacgagtct

SEQ ID NO: 231477 - DNA, 25 bp, Homo sapien
agctcaaaccggcacatagcactac

SEQ ID NO: 231478 - DNA, 25 bp, Homo sapien
tcaaaccggcacatagcactacgag

SEQ ID NO: 231479 - DNA, 25 bp, Homo sapien
tatcctaggaacaatgaagtatccg

SEQ ID NO: 231480 - DNA, 25 bp, Homo sapien
ggcttcccacgtactggccagagta

SEQ ID NO: 231481 - DNA, 25 bp, Homo sapien
tgtgacactatgacttggagcaact

SEQ ID NO: 231482 - DNA, 25 bp, Homo sapien
ggcgtctgagaatgatgaggcatcc

SEQ ID NO: 231483 - DNA, 25 bp, Homo sapien
acactccctctatatcaatttccag

SEQ ID NO: 231484 - DNA, 25 bp, Homo sapien
tttccagattagcaaactctgccga

SEQ ID NO: 231485 - DNA, 25 bp, Homo sapien
tataacactccctctatatcaattt

SEQ ID NO: 231486 - DNA, 25 bp, Homo sapien
gattagcaaactctgccgatggttt

SEQ ID NO: 231487 - DNA, 25 bp, Homo sapien
cttcaaggaatctggagtcattttg

SEQ ID NO: 231488 - DNA, 25 bp, Homo sapien
caaggaatctggagtcattttggaa

SEQ ID NO: 231489 - DNA, 25 bp, Homo sapien
tcaaggaatctggagtcattttgga

SEQ ID NO: 231490 - DNA, 25 bp, Homo sapien
aggaatctggagtcattttggaaaa

SEQ ID NO: 231491 - DNA, 25 bp, Homo sapien
cttccattcgccattgttgcggggg

SEQ ID NO: 231492 - DNA, 25 bp, Homo sapien
ttgttgcgggggtgacacatttgaa

SEQ ID NO: 231493 - DNA, 25 bp, Homo sapien
cattcgccattgttgcgggggtgac

SEQ ID NO: 231494 - DNA, 25 bp, Homo sapien
cgggggtgacacatttgaaacttgt

SEQ ID NO: 231495 - DNA, 25 bp, Homo sapien
gttacaggcctcgttttgttgagca

SEQ ID NO: 231496 - DNA, 25 bp, Homo sapien
tacaggcctcgttttgttgagcaaa

SEQ ID NO: 231497 - DNA, 25 bp, Homo sapien
ttacaggcctcgttttgttgagcaa

SEQ ID NO: 231498 - DNA, 25 bp, Homo sapien
tgtgtgcttctggtgcttttcactg

SEQ ID NO: 231499 - DNA, 25 bp, Homo sapien
cctcctgtgtgcttctggtgctttt

SEQ ID NO: 231500 - DNA, 25 bp, Homo sapien
ctggtgcttttcactggatgagcat

SEQ ID NO: 231501 - DNA, 25 bp, Homo sapien
ttctggtgcttttcactggatgagc

SEQ ID NO: 231502 - DNA, 25 bp, Homo sapien
gcaaggacatcagggagaggcaatc

SEQ ID NO: 231503 - DNA, 25 bp, Homo sapien
tctgaaaggatcctattcctggatg

SEQ ID NO: 231504 - DNA, 25 bp, Homo sapien
gacatcagggagaggcaatctgaaa

SEQ ID NO: 231505 - DNA, 25 bp, Homo sapien
cagggagaggcaatctgaaaggatc

SEQ ID NO: 231506 - DNA, 25 bp, Homo sapien
cagggaagaaaagtgtggagaatgt

SEQ ID NO: 231507 - DNA, 25 bp, Homo sapien
agggaagaaaagtgtggagaatgtt

SEQ ID NO: 231508 - DNA, 25 bp, Homo sapien
aacagggaagaaaagtgtggagaat

SEQ ID NO: 231509 - DNA, 25 bp, Homo sapien
ctgaacagggaagaaaagtgtggag

SEQ ID NO: 231510 - DNA, 25 bp, Homo sapien
gcagtaacttttaggccatctccct

SEQ ID NO: 231511 - DNA, 25 bp, Homo sapien
tctccctcctggtttgcaatttttg

SEQ ID NO: 231512 - DNA, 25 bp, Homo sapien
cctcatatagggcagtaacttttag

SEQ ID NO: 231513 - DNA, 25 bp, Homo sapien
ccattggttatctgcctcacctgga

SEQ ID NO: 231514 - DNA, 25 bp, Homo sapien
gcacataaacccgtactggtgagct

SEQ ID NO: 231515 - DNA, 25 bp, Homo sapien
gtaatggtccaataggatgtgttac

SEQ ID NO: 231516 - DNA, 25 bp, Homo sapien
tgagctagcgttggtaatggtccaa

SEQ ID NO: 231517 - DNA, 25 bp, Homo sapien
cgtactggtgagctagcgttggtaa

SEQ ID NO: 231518 - DNA, 25 bp, Homo sapien
gctttcggcaatgtgccagctggtg

SEQ ID NO: 231519 - DNA, 25 bp, Homo sapien
gacagatagatataggtgttcgcca

SEQ ID NO: 231520 - DNA, 25 bp, Homo sapien
gctggtggagtacctttagctcttc

SEQ ID NO: 231521 - DNA, 25 bp, Homo sapien
catgaggcctgttcagctttcggca

SEQ ID NO: 231522 - DNA, 25 bp, Homo sapien
gctttaattataatgctttccttag

SEQ ID NO: 231523 - DNA, 25 bp, Homo sapien
ttaattataatgctttccttagccc

SEQ ID NO: 231524 - DNA, 25 bp, Homo sapien
ccagtgtaaattgttcctggcgttc

SEQ ID NO: 231525 - DNA, 25 bp, Homo sapien
ggcgttcttatcaccagctttaatt

SEQ ID NO: 231526 - DNA, 25 bp, Homo sapien
gattccgcctgtgtctccaaccaca

SEQ ID NO: 231527 - DNA, 25 bp, Homo sapien
gtgattccgcctgtgtctccaacca

SEQ ID NO: 231528 - DNA, 25 bp, Homo sapien
tgtgattccgcctgtgtctccaacc

SEQ ID NO: 231529 - DNA, 25 bp, Homo sapien
tgattccgcctgtgtctccaaccac

SEQ ID NO: 231530 - DNA, 25 bp, Homo sapien
ttatctataaggagctttagaaatg

SEQ ID NO: 231531 - DNA, 25 bp, Homo sapien
gagctttagaaatggggtcaaactg

SEQ ID NO: 231532 - DNA, 25 bp, Homo sapien
gctttagaaatggggtcaaactgat

SEQ ID NO: 231533 - DNA, 25 bp, Homo sapien
atctataaggagctttagaaatggg

SEQ ID NO: 231534 - DNA, 25 bp, Homo sapien
cttgggaataagggtttgaattgtg

SEQ ID NO: 231535 - DNA, 25 bp, Homo sapien
gatgcctcactcatagcaacagtat

SEQ ID NO: 231536 - DNA, 25 bp, Homo sapien
tgcctcactcatagcaacagtatct

SEQ ID NO: 231537 - DNA, 25 bp, Homo sapien
cctcactcatagcaacagtatctat

SEQ ID NO: 231538 - DNA, 25 bp, Homo sapien
tgtatctgctccaaggttaaatcaa

SEQ ID NO: 231539 - DNA, 25 bp, Homo sapien
tgtcgatttgttttcgagaagttca

SEQ ID NO: 231540 - DNA, 25 bp, Homo sapien
gatttgttttcgagaagttcaggca

SEQ ID NO: 231541 - DNA, 25 bp, Homo sapien
aaatcaagggcagcaaatgtcgatt

SEQ ID NO: 231542 - DNA, 25 bp, Homo sapien
tgacattctctaagaggctcagaca

SEQ ID NO: 231543 - DNA, 25 bp, Homo sapien
cattctctaagaggctcagacatta

SEQ ID NO: 231544 - DNA, 25 bp, Homo sapien
cttgacattctctaagaggctcaga

SEQ ID NO: 231545 - DNA, 25 bp, Homo sapien
cccttcttgacattctctaagaggc

SEQ ID NO: 231546 - DNA, 25 bp, Homo sapien
cagatgttgcaccttgagagcccat

SEQ ID NO: 231547 - DNA, 25 bp, Homo sapien
tggatctgggcccatgactttgcag

SEQ ID NO: 231548 - DNA, 25 bp, Homo sapien
ccaatatctcccatctggatctggg

SEQ ID NO: 231549 - DNA, 25 bp, Homo sapien
tttgcagatgttgcaccttgagagc

SEQ ID NO: 231550 - DNA, 25 bp, Homo sapien
ttgggctaatctgatgatcctgtca

SEQ ID NO: 231551 - DNA, 25 bp, Homo sapien
tcttcttcgttggtattgggctggt

SEQ ID NO: 231552 - DNA, 25 bp, Homo sapien
tttctccacaaacgcaaattgggct

SEQ ID NO: 231553 - DNA, 25 bp, Homo sapien
ttgtaatcggaagttctttctccac

SEQ ID NO: 231554 - DNA, 25 bp, Homo sapien
caagtgcctctaccagaagcttcaa

SEQ ID NO: 231555 - DNA, 25 bp, Homo sapien
gaagcttcaaggcatcttttctcac

SEQ ID NO: 231556 - DNA, 25 bp, Homo sapien
ccagaagcttcaaggcatcttttct

SEQ ID NO: 231557 - DNA, 25 bp, Homo sapien
tcaagtgcctctaccagaagcttca

SEQ ID NO: 231558 - DNA, 25 bp, Homo sapien
gtgcttgttagcctcgtcgtggttt

SEQ ID NO: 231559 - DNA, 25 bp, Homo sapien
gagcttttcaactgaaagtccactt

SEQ ID NO: 231560 - DNA, 25 bp, Homo sapien
cctcgtcgtggtttgggccagaaag

SEQ ID NO: 231561 - DNA, 25 bp, Homo sapien
aagttcaggcttgacaagagaaact

SEQ ID NO: 231562 - DNA, 25 bp, Homo sapien
gatgggtggccaatatgagcaaaaa

SEQ ID NO: 231563 - DNA, 25 bp, Homo sapien
ggatgggtggccaatatgagcaaaa

SEQ ID NO: 231564 - DNA, 25 bp, Homo sapien
tatagagatcgaacctgaaatatta

SEQ ID NO: 231565 - DNA, 25 bp, Homo sapien
tgtctgttcagatccaaaatggtta

SEQ ID NO: 231566 - DNA, 25 bp, Homo sapien
taaatatagagatcgaacctgaaat

SEQ ID NO: 231567 - DNA, 25 bp, Homo sapien
gttaaatatagagatcgaacctgaa

SEQ ID NO: 231568 - DNA, 25 bp, Homo sapien
ttaaatatgaaacgatcaccagagg

SEQ ID NO: 231569 - DNA, 25 bp, Homo sapien
aggtagctgcaggaaatcttggtta

SEQ ID NO: 231570 - DNA, 25 bp, Homo sapien
aatcttggttactcctgctttttct

SEQ ID NO: 231571 - DNA, 25 bp, Homo sapien
tcacgaaagacagatcttttcagtg

SEQ ID NO: 231572 - DNA, 25 bp, Homo sapien
ccattctttcttaactagcatttgg

SEQ ID NO: 231573 - DNA, 25 bp, Homo sapien
aatgcaaaatgcaagcctttctttt

SEQ ID NO: 231574 - DNA, 25 bp, Homo sapien
catttggtttagcagtagggaggac

SEQ ID NO: 231575 - DNA, 25 bp, Homo sapien
caccccgcatcaacccattctttct

SEQ ID NO: 231576 - DNA, 25 bp, Homo sapien
tttactacgctgtgcctgagaggcc

SEQ ID NO: 231577 - DNA, 25 bp, Homo sapien
ggtttctttgtccatcagtctttcc

SEQ ID NO: 231578 - DNA, 25 bp, Homo sapien
gagaggcccagcaattaattttgaa

SEQ ID NO: 231579 - DNA, 25 bp, Homo sapien
tgtccagggaccactgcacattctc

SEQ ID NO: 231580 - DNA, 25 bp, Homo sapien
caagtcaacaatttacactgtgcat

SEQ ID NO: 231581 - DNA, 25 bp, Homo sapien
tcaacaatttacactgtgcatcttg

SEQ ID NO: 231582 - DNA, 25 bp, Homo sapien
tattgttgtgagagcctttggagga

SEQ ID NO: 231583 - DNA, 25 bp, Homo sapien
aacaatttacactgtgcatcttgcc

SEQ ID NO: 231584 - DNA, 25 bp, Homo sapien
ggtcatatgcccctttcagcttttc

SEQ ID NO: 231585 - DNA, 25 bp, Homo sapien
ttagatctccagattcacttacttc

SEQ ID NO: 231586 - DNA, 25 bp, Homo sapien
taagtcatatgtgaggtcatatgcc

SEQ ID NO: 231587 - DNA, 25 bp, Homo sapien
tgccagggcagtagctgatagaagc

SEQ ID NO: 231588 - DNA, 25 bp, Homo sapien
tgtaaaggaatcaaacctgttcttc

SEQ ID NO: 231589 - DNA, 25 bp, Homo sapien
agctccatgttatcctctaggtgaa

SEQ ID NO: 231590 - DNA, 25 bp, Homo sapien
gaagcacttcatgagaggtcactgg

SEQ ID NO: 231591 - DNA, 25 bp, Homo sapien
tattttctcaggtatgcacaaattc

SEQ ID NO: 231592 - DNA, 25 bp, Homo sapien
tatccttccagatctagctccatgt

SEQ ID NO: 231593 - DNA, 25 bp, Homo sapien
gatacagcagaaagttattgatttt

SEQ ID NO: 231594 - DNA, 25 bp, Homo sapien
tacgccttgtgaaaaattaaccaga

SEQ ID NO: 231595 - DNA, 25 bp, Homo sapien
tattgatttttgagggatctacgcc

SEQ ID NO: 231596 - DNA, 25 bp, Homo sapien
cagaactattacactgagtctgact

SEQ ID NO: 231597 - DNA, 25 bp, Homo sapien
gggattgttcaaatgatggcaccac

SEQ ID NO: 231598 - DNA, 25 bp, Homo sapien
gcaaaagagtctgtcccctatgaag

SEQ ID NO: 231599 - DNA, 25 bp, Homo sapien
ccatttggcaattggaagtcagtca

SEQ ID NO: 231600 - DNA, 25 bp, Homo sapien
gagtctttttacacgcaaccaaggc

SEQ ID NO: 231601 - DNA, 25 bp, Homo sapien
ctcacaagtaactgggattgcaggt

SEQ ID NO: 231602 - DNA, 25 bp, Homo sapien
ctatgcccagctactttttgtattt

SEQ ID NO: 231603 - DNA, 25 bp, Homo sapien
ctgcccaccttggcctcccaaagtg

SEQ ID NO: 231604 - DNA, 25 bp, Homo sapien
gattgcaggtgcacaccactatgcc

SEQ ID NO: 231605 - DNA, 25 bp, Homo sapien
cattggatattagagcttcagcata

SEQ ID NO: 231606 - DNA, 25 bp, Homo sapien
gacacaaacagtccatagccacttg

SEQ ID NO: 231607 - DNA, 25 bp, Homo sapien
tgctagtaaaacctatatgttgagg

SEQ ID NO: 231608 - DNA, 25 bp, Homo sapien
ggttattgcaaggactaaattagtg

SEQ ID NO: 231609 - DNA, 25 bp, Homo sapien
tattcaattcggtcactttctttga

SEQ ID NO: 231610 - DNA, 25 bp, Homo sapien
taagtaatggcccttcaacacagag

SEQ ID NO: 231611 - DNA, 25 bp, Homo sapien
ggaaataagtaatggcccttcaaca

SEQ ID NO: 231612 - DNA, 25 bp, Homo sapien
tctctgtattcaattcggtcacttt

SEQ ID NO: 231613 - DNA, 25 bp, Homo sapien
gaggcaagccccctttttgcattcc

SEQ ID NO: 231614 - DNA, 25 bp, Homo sapien
ccatttcctgaacctaatcttatag

SEQ ID NO: 231615 - DNA, 25 bp, Homo sapien
cattccaagcattaacaacgtttgc

SEQ ID NO: 231616 - DNA, 25 bp, Homo sapien
tcctctcctctcagactttgagctc

SEQ ID NO: 231617 - DNA, 25 bp, Homo sapien
aaacaagcagcatgagactatagct

SEQ ID NO: 231618 - DNA, 25 bp, Homo sapien
ggatagttaatccacaaataattct

SEQ ID NO: 231619 - DNA, 25 bp, Homo sapien
taaagtcataattaagagcaaagat

SEQ ID NO: 231620 - DNA, 25 bp, Homo sapien
atgaatgagccttcagacttgcagg

SEQ ID NO: 231621 - DNA, 25 bp, Homo sapien
tcccacttcagtcttttgactggtg

SEQ ID NO: 231622 - DNA, 25 bp, Homo sapien
ccacttcagtcttttgactggtgtt

SEQ ID NO: 231623 - DNA, 25 bp, Homo sapien
acttcagtcttttgactggtgtttg

SEQ ID NO: 231624 - DNA, 25 bp, Homo sapien
cccacttcagtcttttgactggtgt

SEQ ID NO: 231625 - DNA, 25 bp, Homo sapien
tttagggaaacatattcaagctggt

SEQ ID NO: 231626 - DNA, 25 bp, Homo sapien
aacatattcaagctggtatttcaga

SEQ ID NO: 231627 - DNA, 25 bp, Homo sapien
aactccccaggcagtttggttgcca

SEQ ID NO: 231628 - DNA, 25 bp, Homo sapien
gtttggttgccaagactgttctgga

SEQ ID NO: 231629 - DNA, 25 bp, Homo sapien
tcacctgtcacgtgtcatgtcagcc

SEQ ID NO: 231630 - DNA, 25 bp, Homo sapien
tcaatacagccattttatattcttg

SEQ ID NO: 231631 - DNA, 25 bp, Homo sapien
catttgctagtaaggatactgagtg

SEQ ID NO: 231632 - DNA, 25 bp, Homo sapien
cacactgcatttgctagtaaggata

SEQ ID NO: 231633 - DNA, 25 bp, Homo sapien
tggctggctggttcagacctatgtc

SEQ ID NO: 231634 - DNA, 25 bp, Homo sapien
gctggctggttcagacctatgtctt

SEQ ID NO: 231635 - DNA, 25 bp, Homo sapien
tggctggttcagacctatgtctttc

SEQ ID NO: 231636 - DNA, 25 bp, Homo sapien
ggctggttcagacctatgtctttcc

SEQ ID NO: 231637 - DNA, 25 bp, Homo sapien
tcgatggtgagattgatgtttactt

SEQ ID NO: 231638 - DNA, 25 bp, Homo sapien
tagtttcgatggtgagattgatgtt

SEQ ID NO: 231639 - DNA, 25 bp, Homo sapien
gagattgatgtttactttcatctgg

SEQ ID NO: 231640 - DNA, 25 bp, Homo sapien
ctttagtttcgatggtgagattgat

SEQ ID NO: 231641 - DNA, 25 bp, Homo sapien
ggtgactcttcatcgaatgtttcca

SEQ ID NO: 231642 - DNA, 25 bp, Homo sapien
tttgggtgactcttcatcgaatgtt

SEQ ID NO: 231643 - DNA, 25 bp, Homo sapien
tgggtgactcttcatcgaatgtttc

SEQ ID NO: 231644 - DNA, 25 bp, Homo sapien
gactcttcatcgaatgtttccatga

SEQ ID NO: 231645 - DNA, 25 bp, Homo sapien
tagcaattggcatgctcgcctctct

SEQ ID NO: 231646 - DNA, 25 bp, Homo sapien
gcaattggcatgctcgcctctcttc

SEQ ID NO: 231647 - DNA, 25 bp, Homo sapien
ttaatagcaattggcatgctcgcct

SEQ ID NO: 231648 - DNA, 25 bp, Homo sapien
aatagcaattggcatgctcgcctct

SEQ ID NO: 231649 - DNA, 25 bp, Homo sapien
gctctggagtcctgattcttttcaa

SEQ ID NO: 231650 - DNA, 25 bp, Homo sapien
gagagatacaaacattttgggctca

SEQ ID NO: 231651 - DNA, 25 bp, Homo sapien
cttttcaaactggtttgccacagag

SEQ ID NO: 231652 - DNA, 25 bp, Homo sapien
ggtttgccacagagagagatacaaa

SEQ ID NO: 231653 - DNA, 25 bp, Homo sapien
gtggaaagtgctcagctgtgaattc

SEQ ID NO: 231654 - DNA, 25 bp, Homo sapien
taggaatcagatgagcaagtgacat

SEQ ID NO: 231655 - DNA, 25 bp, Homo sapien
tggaaagtgctcagctgtgaattct

SEQ ID NO: 231656 - DNA, 25 bp, Homo sapien
tctttgaatcttataataggaatca

SEQ ID NO: 231657 - DNA, 25 bp, Homo sapien
tgttcttccgtgtgatcccccacag

SEQ ID NO: 231658 - DNA, 25 bp, Homo sapien
ccacagccttttggtgatatagtcc

SEQ ID NO: 231659 - DNA, 25 bp, Homo sapien
acagccttttggtgatatagtccca

SEQ ID NO: 231660 - DNA, 25 bp, Homo sapien
agttcctgttcttccgtgtgatccc

SEQ ID NO: 231661 - DNA, 25 bp, Homo sapien
taacgggactaacagaactatacac

SEQ ID NO: 231662 - DNA, 25 bp, Homo sapien
aaaagcagctgaatatacaacaggt

SEQ ID NO: 231663 - DNA, 25 bp, Homo sapien
tacaacaggtaatagagctgtaaca

SEQ ID NO: 231664 - DNA, 25 bp, Homo sapien
agagcataatgctatctggtaagaa

SEQ ID NO: 231665 - DNA, 25 bp, Homo sapien
tgctaagtctgaggttagataaaac

SEQ ID NO: 231666 - DNA, 25 bp, Homo sapien
ttagacggcgtaactgctaagtctg

SEQ ID NO: 231667 - DNA, 25 bp, Homo sapien
gataaaacttcaggcacactggaac

SEQ ID NO: 231668 - DNA, 25 bp, Homo sapien
aatgatcataaaagctttcactttc

SEQ ID NO: 231669 - DNA, 25 bp, Homo sapien
cactgatgaaagatacaaggaattt

SEQ ID NO: 231670 - DNA, 25 bp, Homo sapien
ggagcggtgaagaactgttacattc

SEQ ID NO: 231671 - DNA, 25 bp, Homo sapien
tgcatttcatgccaactatcgcctg

SEQ ID NO: 231672 - DNA, 25 bp, Homo sapien
gaatttcccaactgcgagagaggcc

SEQ ID NO: 231673 - DNA, 25 bp, Homo sapien
gtggagcgtacaaatatactcggtc

SEQ ID NO: 231674 - DNA, 25 bp, Homo sapien
cggtccctgccagggttattaatat

SEQ ID NO: 231675 - DNA, 25 bp, Homo sapien
tctatagcagattgccaaaatattg

SEQ ID NO: 231676 - DNA, 25 bp, Homo sapien
tctacactgtttacactgtgattga

SEQ ID NO: 231677 - DNA, 25 bp, Homo sapien
tatgtaatgtttctccaatcctgtg

SEQ ID NO: 231678 - DNA, 25 bp, Homo sapien
tctataggagttaagtgacatctgt

SEQ ID NO: 231679 - DNA, 25 bp, Homo sapien
cactctaagagctgaatttttgcct

SEQ ID NO: 231680 - DNA, 25 bp, Homo sapien
caatctgttttggttgaggtaacta

SEQ ID NO: 231681 - DNA, 25 bp, Homo sapien
tatctatcatcccatggggtttgtt

SEQ ID NO: 231682 - DNA, 25 bp, Homo sapien
caactctctgcctcataatcacatg

SEQ ID NO: 231683 - DNA, 25 bp, Homo sapien
cacatgtttctaggagcctgggaga

SEQ ID NO: 231684 - DNA, 25 bp, Homo sapien
aactgtgtgatacctgcggggaggt

SEQ ID NO: 231685 - DNA, 25 bp, Homo sapien
gaggcataaatctggtcttttcgac

SEQ ID NO: 231686 - DNA, 25 bp, Homo sapien
ttcgacatgctctcaaccagatcat

SEQ ID NO: 231687 - DNA, 25 bp, Homo sapien
tagctgtcatgagaggcataaatct

SEQ ID NO: 231688 - DNA, 25 bp, Homo sapien
cattgtggccaagttatagctgtca

SEQ ID NO: 231689 - DNA, 25 bp, Homo sapien
tataagcatttgagcagatgccctg

SEQ ID NO: 231690 - DNA, 25 bp, Homo sapien
cagccttgttcctatggtgatataa

SEQ ID NO: 231691 - DNA, 25 bp, Homo sapien
gagaagtgttctggtcagccttgtt

SEQ ID NO: 231692 - DNA, 25 bp, Homo sapien
ctgctgtaatctgcttctcataata

SEQ ID NO: 231693 - DNA, 25 bp, Homo sapien
tgagcttgtcagtccaaacacaact

SEQ ID NO: 231694 - DNA, 25 bp, Homo sapien
cttgagcctttagtattgggagagc

SEQ ID NO: 231695 - DNA, 25 bp, Homo sapien
gttgaagtgtcaacaaagccatctt

SEQ ID NO: 231696 - DNA, 25 bp, Homo sapien
catggttgggatttgagcttgtcag

SEQ ID NO: 231697 - DNA, 25 bp, Homo sapien
tcaatggagaccttcctacgtggca

SEQ ID NO: 231698 - DNA, 25 bp, Homo sapien
cccagggccatttcaatggagacct

SEQ ID NO: 231699 - DNA, 25 bp, Homo sapien
ttcctacgtggcacatgcttttggt

SEQ ID NO: 231700 - DNA, 25 bp, Homo sapien
tggagaccttcctacgtggcacatg

SEQ ID NO: 231701 - DNA, 25 bp, Homo sapien
acgtggctaccctgcttctcaggag

SEQ ID NO: 231702 - DNA, 25 bp, Homo sapien
tcagcatatactgaatcaaagccta

SEQ ID NO: 231703 - DNA, 25 bp, Homo sapien
tatactgaatcaaagcctacgtggc

SEQ ID NO: 231704 - DNA, 25 bp, Homo sapien
tcaaagcctacgtggctaccctgct

SEQ ID NO: 231705 - DNA, 25 bp, Homo sapien
tcattggataaacactaatcgagat

SEQ ID NO: 231706 - DNA, 25 bp, Homo sapien
gataaacactaatcgagataattgg

SEQ ID NO: 231707 - DNA, 25 bp, Homo sapien
cactaatcgagataattggcaaggg

SEQ ID NO: 231708 - DNA, 25 bp, Homo sapien
ctaatcgagataattggcaagggtc

SEQ ID NO: 231709 - DNA, 25 bp, Homo sapien
gcaagtccaggccagtctgacaagt

SEQ ID NO: 231710 - DNA, 25 bp, Homo sapien
gtggaagtaagaagccagtatgagg

SEQ ID NO: 231711 - DNA, 25 bp, Homo sapien
tgaggggtacccgtcctgaccgctg

SEQ ID NO: 231712 - DNA, 25 bp, Homo sapien
atcaagggagaagctaggctctgga

SEQ ID NO: 231713 - DNA, 25 bp, Homo sapien
aatgagagggggaatgtccaaaagt

SEQ ID NO: 231714 - DNA, 25 bp, Homo sapien
ttgaagaccacttcacaatgcctga

SEQ ID NO: 231715 - DNA, 25 bp, Homo sapien
tgtggagattccattgaagaccact

SEQ ID NO: 231716 - DNA, 25 bp, Homo sapien
gaaacttgtggagattccattgaag

SEQ ID NO: 231717 - DNA, 25 bp, Homo sapien
gattccattgaagaccacttcacaa

SEQ ID NO: 231718 - DNA, 25 bp, Homo sapien
ggatatcaacgtgtaatctacagac

SEQ ID NO: 231719 - DNA, 25 bp, Homo sapien
gacatggcgtgacatcattcttttg

SEQ ID NO: 231720 - DNA, 25 bp, Homo sapien
tcttcctgtaaatgtagcctaatgc

SEQ ID NO: 231721 - DNA, 25 bp, Homo sapien
tttttgagaggctaatgacatggcg

SEQ ID NO: 231722 - DNA, 25 bp, Homo sapien
accctgcggagtcttctcttgtctc

SEQ ID NO: 231723 - DNA, 25 bp, Homo sapien
gtgttatagcctgtcctccatcacc

SEQ ID NO: 231724 - DNA, 25 bp, Homo sapien
tttatgtgttatagcctgtcctcca

SEQ ID NO: 231725 - DNA, 25 bp, Homo sapien
catcaccctgcggagtcttctcttg

SEQ ID NO: 231726 - DNA, 25 bp, Homo sapien
aacctttaagtaatgactcataaag

SEQ ID NO: 231727 - DNA, 25 bp, Homo sapien
aatggagcatgtgtttaatcagttc

SEQ ID NO: 231728 - DNA, 25 bp, Homo sapien
gtgtggcaatctggtgataaaacct

SEQ ID NO: 231729 - DNA, 25 bp, Homo sapien
taagtaatgactcataaagagataa

SEQ ID NO: 231730 - DNA, 25 bp, Homo sapien
ggggggctgagataagaggatcttt

SEQ ID NO: 231731 - DNA, 25 bp, Homo sapien
gatcttttgatcctaggagccagag

SEQ ID NO: 231732 - DNA, 25 bp, Homo sapien
ggatcttttgatcctaggagccaga

SEQ ID NO: 231733 - DNA, 25 bp, Homo sapien
cttttgatcctaggagccagaggtt

SEQ ID NO: 231734 - DNA, 25 bp, Homo sapien
ctccaactttggctgagaaactttt

SEQ ID NO: 231735 - DNA, 25 bp, Homo sapien
cacatcttgctaagcccttcaactc

SEQ ID NO: 231736 - DNA, 25 bp, Homo sapien
cctgcttaagctgatttaacacaca

SEQ ID NO: 231737 - DNA, 25 bp, Homo sapien
cagtttgaccctccaactttggctg

SEQ ID NO: 231738 - DNA, 25 bp, Homo sapien
gatcaaacaatccttaaaggctgag

SEQ ID NO: 231739 - DNA, 25 bp, Homo sapien
tgctcagtttgttatgtttaatgcg

SEQ ID NO: 231740 - DNA, 25 bp, Homo sapien
tctgcttaaaataacaccattctgg

SEQ ID NO: 231741 - DNA, 25 bp, Homo sapien
ccaagacatgaaagggttaggatac

SEQ ID NO: 231742 - DNA, 25 bp, Homo sapien
gctctgattggtcgtggttaatata

SEQ ID NO: 231743 - DNA, 25 bp, Homo sapien
tgctgctctgattggtcgtggttaa

SEQ ID NO: 231744 - DNA, 25 bp, Homo sapien
tttgctgctctgattggtcgtggtt

SEQ ID NO: 231745 - DNA, 25 bp, Homo sapien
gattggtcgtggttaatataattgt

SEQ ID NO: 231746 - DNA, 25 bp, Homo sapien
ccagccacatatttgttgctcagca

SEQ ID NO: 231747 - DNA, 25 bp, Homo sapien
accagccacatatttgttgctcagc

SEQ ID NO: 231748 - DNA, 25 bp, Homo sapien
cagccacatatttgttgctcagcat

SEQ ID NO: 231749 - DNA, 25 bp, Homo sapien
tagatcacaccttattttaactcgg

SEQ ID NO: 231750 - DNA, 25 bp, Homo sapien
ccctagatcacaccttattttaact

SEQ ID NO: 231751 - DNA, 25 bp, Homo sapien
gatcacaccttattttaactcggaa

SEQ ID NO: 231752 - DNA, 25 bp, Homo sapien
tttccctagatcacaccttatttta

SEQ ID NO: 231753 - DNA, 25 bp, Homo sapien
tcatgtaagtgaagctccctggcct

SEQ ID NO: 231754 - DNA, 25 bp, Homo sapien
aatcacatagcccaggtttaacggt

SEQ ID NO: 231755 - DNA, 25 bp, Homo sapien
cggtttcgtcataatcacttccaga

SEQ ID NO: 231756 - DNA, 25 bp, Homo sapien
caccaacagaatagcagcaatgatg

SEQ ID NO: 231757 - DNA, 25 bp, Homo sapien
tctcttgagatacgaaacttaaggt

SEQ ID NO: 231758 - DNA, 25 bp, Homo sapien
actgaggtcccattttcccgtcctg

SEQ ID NO: 231759 - DNA, 25 bp, Homo sapien
gagttcatactgagattcttctcca

SEQ ID NO: 231760 - DNA, 25 bp, Homo sapien
ttcctttggaatgttgactatgcaa

SEQ ID NO: 231761 - DNA, 25 bp, Homo sapien
atttggaagttaggctccggcatgt

SEQ ID NO: 231762 - DNA, 25 bp, Homo sapien
gcaactggtggatggtaatagagaa

SEQ ID NO: 231763 - DNA, 25 bp, Homo sapien
agatagtccatttgacagcgtaagg

SEQ ID NO: 231764 - DNA, 25 bp, Homo sapien
gcgtaaggaccataactcaggtaat

SEQ ID NO: 231765 - DNA, 25 bp, Homo sapien
ctctccaatgccctccatgggtcag

SEQ ID NO: 231766 - DNA, 25 bp, Homo sapien
acaaggcctgccctatggaagtaga

SEQ ID NO: 231767 - DNA, 25 bp, Homo sapien
cctatggaagtagaactttgcacag

SEQ ID NO: 231768 - DNA, 25 bp, Homo sapien
cctgccctatggaagtagaactttg

SEQ ID NO: 231769 - DNA, 25 bp, Homo sapien
tgggacaagggaattatcgacctcc

SEQ ID NO: 231770 - DNA, 25 bp, Homo sapien
cctgtgttcaaaacctaaggctcca

SEQ ID NO: 231771 - DNA, 25 bp, Homo sapien
aacgcagccaaatcctctctaggca

SEQ ID NO: 231772 - DNA, 25 bp, Homo sapien
catttgaggctcctaaaaacgcagc

SEQ ID NO: 231773 - DNA, 25 bp, Homo sapien
tttggtggtcacctatgcgtcccat

SEQ ID NO: 231774 - DNA, 25 bp, Homo sapien
tattcttcactatttggtggtcacc

SEQ ID NO: 231775 - DNA, 25 bp, Homo sapien
gggatgaccatggattttcatattc

SEQ ID NO: 231776 - DNA, 25 bp, Homo sapien
cttttctgggatgaccatggatttt

SEQ ID NO: 231777 - DNA, 25 bp, Homo sapien
tttcttggtaaaagcacgagaattg

SEQ ID NO: 231778 - DNA, 25 bp, Homo sapien
tcttggtaaaagcacgagaattgtc

SEQ ID NO: 231779 - DNA, 25 bp, Homo sapien
cttggtaaaagcacgagaattgtcc

SEQ ID NO: 231780 - DNA, 25 bp, Homo sapien
aatttcttggtaaaagcacgagaat

SEQ ID NO: 231781 - DNA, 25 bp, Homo sapien
catgctgagagtctcttgagaagcc

SEQ ID NO: 231782 - DNA, 25 bp, Homo sapien
atgctgagagtctcttgagaagcca

SEQ ID NO: 231783 - DNA, 25 bp, Homo sapien
ccatgctgagagtctcttgagaagc

SEQ ID NO: 231784 - DNA, 25 bp, Homo sapien
ttccatgctgagagtctcttgagaa

SEQ ID NO: 231785 - DNA, 25 bp, Homo sapien
ctctagacatgctggaatttcttac

SEQ ID NO: 231786 - DNA, 25 bp, Homo sapien
ggcacactcgcattgttgcctgcag

SEQ ID NO: 231787 - DNA, 25 bp, Homo sapien
agttgaggaaataaggcacactcgc

SEQ ID NO: 231788 - DNA, 25 bp, Homo sapien
gaaataaggcacactcgcattgttg

SEQ ID NO: 231789 - DNA, 25 bp, Homo sapien
actcgcattgttgcctgcagctggt

SEQ ID NO: 231790 - DNA, 25 bp, Homo sapien
tctttcaggggccatacgacataaa

SEQ ID NO: 231791 - DNA, 25 bp, Homo sapien
cgacataaacatgtagaacactcag

SEQ ID NO: 231792 - DNA, 25 bp, Homo sapien
gggccatacgacataaacatgtaga

SEQ ID NO: 231793 - DNA, 25 bp, Homo sapien
catacgacataaacatgtagaacac

SEQ ID NO: 231794 - DNA, 25 bp, Homo sapien
taacttcaagccttgtaacaggaca

SEQ ID NO: 231795 - DNA, 25 bp, Homo sapien
caggctccttgtgatgggatgtcac

SEQ ID NO: 231796 - DNA, 25 bp, Homo sapien
ttctgccacaggctccttgtgatgg

SEQ ID NO: 231797 - DNA, 25 bp, Homo sapien
gatgggatgtcacttgtttcttcat

SEQ ID NO: 231798 - DNA, 25 bp, Homo sapien
ccttgtgatgggatgtcacttgttt

SEQ ID NO: 231799 - DNA, 25 bp, Homo sapien
tctcttctgaatttacaaatgaaaa

SEQ ID NO: 231800 - DNA, 25 bp, Homo sapien
aatatggcaattggattttttctct

SEQ ID NO: 231801 - DNA, 25 bp, Homo sapien
catagctgattgacatggactcaaa

SEQ ID NO: 231802 - DNA, 25 bp, Homo sapien
cacagactgaaggttaatggaactg

SEQ ID NO: 231803 - DNA, 25 bp, Homo sapien
agtggaagtgactcctccaaattcc

SEQ ID NO: 231804 - DNA, 25 bp, Homo sapien
tggaagtgactcctccaaattccag

SEQ ID NO: 231805 - DNA, 25 bp, Homo sapien
cagtggaagtgactcctccaaattc

SEQ ID NO: 231806 - DNA, 25 bp, Homo sapien
gtggaagtgactcctccaaattcca

SEQ ID NO: 231807 - DNA, 25 bp, Homo sapien
agcaaatttgtgtgctttccctttc

SEQ ID NO: 231808 - DNA, 25 bp, Homo sapien
cagcaaatttgtgtgctttcccttt

SEQ ID NO: 231809 - DNA, 25 bp, Homo sapien
gcaaatttgtgtgctttccctttca

SEQ ID NO: 231810 - DNA, 25 bp, Homo sapien
caaatttgtgtgctttccctttcat

SEQ ID NO: 231811 - DNA, 25 bp, Homo sapien
gatacattcccaactcaattgaagg

SEQ ID NO: 231812 - DNA, 25 bp, Homo sapien
gaaacgttgggtatcccactcaaca

SEQ ID NO: 231813 - DNA, 25 bp, Homo sapien
agagaagcccggtgcagttgcagaa

SEQ ID NO: 231814 - DNA, 25 bp, Homo sapien
tagggtcttctatgccaatcagcag

SEQ ID NO: 231815 - DNA, 25 bp, Homo sapien
gggacagataagatgctccacaata

SEQ ID NO: 231816 - DNA, 25 bp, Homo sapien
gacagataagatgctccacaataaa

SEQ ID NO: 231817 - DNA, 25 bp, Homo sapien
tgggggacagataagatgctccaca

SEQ ID NO: 231818 - DNA, 25 bp, Homo sapien
cagataagatgctccacaataaaca

SEQ ID NO: 231819 - DNA, 25 bp, Homo sapien
tgtgctagctgggcttcttcttttt

SEQ ID NO: 231820 - DNA, 25 bp, Homo sapien
ctgtgctagctgggcttcttctttt

SEQ ID NO: 231821 - DNA, 25 bp, Homo sapien
tgctagctgggcttcttcttttttt

SEQ ID NO: 231822 - DNA, 25 bp, Homo sapien
gtgctagctgggcttcttctttttt

SEQ ID NO: 231823 - DNA, 25 bp, Homo sapien
cttgctgacacaataagtacgcttc

SEQ ID NO: 231824 - DNA, 25 bp, Homo sapien
ttgctgacacaataagtacgcttcc

SEQ ID NO: 231825 - DNA, 25 bp, Homo sapien
tcttgctgacacaataagtacgctt

SEQ ID NO: 231826 - DNA, 25 bp, Homo sapien
gctgacacaataagtacgcttccag

SEQ ID NO: 231827 - DNA, 25 bp, Homo sapien
tgttcacggagtcttaatagctcag

SEQ ID NO: 231828 - DNA, 25 bp, Homo sapien
taatccataaggatgggtccctaga

SEQ ID NO: 231829 - DNA, 25 bp, Homo sapien
ctttgcacgataagcccaaggaata

SEQ ID NO: 231830 - DNA, 25 bp, Homo sapien
cctagagtaatctgttgttcacgga

SEQ ID NO: 231831 - DNA, 25 bp, Homo sapien
tccgtcccataatcatagctcctgg

SEQ ID NO: 231832 - DNA, 25 bp, Homo sapien
ggagttccgtcccataatcatagct

SEQ ID NO: 231833 - DNA, 25 bp, Homo sapien
tttggtagagcaggggatctcactg

SEQ ID NO: 231834 - DNA, 25 bp, Homo sapien
ggtagagcaggggatctcactgtat

SEQ ID NO: 231835 - DNA, 25 bp, Homo sapien
gctccatctgcccatagaaaccttt

SEQ ID NO: 231836 - DNA, 25 bp, Homo sapien
catctgcccatagaaacctttgcaa

SEQ ID NO: 231837 - DNA, 25 bp, Homo sapien
tgctccatctgcccatagaaacctt

SEQ ID NO: 231838 - DNA, 25 bp, Homo sapien
tccatctgcccatagaaacctttgc

SEQ ID NO: 231839 - DNA, 25 bp, Homo sapien
tgttcagactaactctggccttcat

SEQ ID NO: 231840 - DNA, 25 bp, Homo sapien
aagtttgcttcgagattcttctaca

SEQ ID NO: 231841 - DNA, 25 bp, Homo sapien
taacttagacaactgcctgttgatg

SEQ ID NO: 231842 - DNA, 25 bp, Homo sapien
taagcacggtcttattggggttggc

SEQ ID NO: 231843 - DNA, 25 bp, Homo sapien
tatttgcgtgctgacaatctgctct

SEQ ID NO: 231844 - DNA, 25 bp, Homo sapien
tatttgctggctcggtgttacggca

SEQ ID NO: 231845 - DNA, 25 bp, Homo sapien
agtttttcttcagggcggtcatcag

SEQ ID NO: 231846 - DNA, 25 bp, Homo sapien
gcaagtgacaattggaaggcaccat

SEQ ID NO: 231847 - DNA, 25 bp, Homo sapien
aaatcccagatctccgttggctcgc

SEQ ID NO: 231848 - DNA, 25 bp, Homo sapien
agtccactggatcaagtctaaaact

SEQ ID NO: 231849 - DNA, 25 bp, Homo sapien
ttgacattaattaattagccagtcc

SEQ ID NO: 231850 - DNA, 25 bp, Homo sapien
tggatcaagtctaaaactgactcag

SEQ ID NO: 231851 - DNA, 25 bp, Homo sapien
tgtctactgagttgacattaattaa

SEQ ID NO: 231852 - DNA, 25 bp, Homo sapien
tcaattccagtggacggcaggcaat

SEQ ID NO: 231853 - DNA, 25 bp, Homo sapien
taactgattcgtggatgcctggaga

SEQ ID NO: 231854 - DNA, 25 bp, Homo sapien
ggcaattgctgagactaacactgta

SEQ ID NO: 231855 - DNA, 25 bp, Homo sapien
ggttgacagcatttgcccctcaaga

SEQ ID NO: 231856 - DNA, 25 bp, Homo sapien
taagttaaagctgccacagtcaaag

SEQ ID NO: 231857 - DNA, 25 bp, Homo sapien
aaatggtgctcttatccctctgaag

SEQ ID NO: 231858 - DNA, 25 bp, Homo sapien
gccaacatgtaatccctagtcacca

SEQ ID NO: 231859 - DNA, 25 bp, Homo sapien
tcagtgctggacacctccaaaggga

SEQ ID NO: 231860 - DNA, 25 bp, Homo sapien
aatcaactgaaatgaccaagtctcc

SEQ ID NO: 231861 - DNA, 25 bp, Homo sapien
ggctcactcataaatcgtcctgctt

SEQ ID NO: 231862 - DNA, 25 bp, Homo sapien
caaggcccttagcagtcactggagg

SEQ ID NO: 231863 - DNA, 25 bp, Homo sapien
tcaaaacaataggatcaggctcact

SEQ ID NO: 231864 - DNA, 25 bp, Homo sapien
accaacttcatgccaatgtgccact

SEQ ID NO: 231865 - DNA, 25 bp, Homo sapien
ctttgcctgcattcattacttgcac

SEQ ID NO: 231866 - DNA, 25 bp, Homo sapien
cactttacaccttgggaattgattc

SEQ ID NO: 231867 - DNA, 25 bp, Homo sapien
tgtgccactttacaccttgggaatt

SEQ ID NO: 231868 - DNA, 25 bp, Homo sapien
tcactggcttttcggcagcacatca

SEQ ID NO: 231869 - DNA, 25 bp, Homo sapien
ctgaagtcatagaagaaacagcaaa

SEQ ID NO: 231870 - DNA, 25 bp, Homo sapien
gctgaagtcatagaagaaacagcaa

SEQ ID NO: 231871 - DNA, 25 bp, Homo sapien
gcttttcggcagcacatcagctgaa

SEQ ID NO: 231872 - DNA, 25 bp, Homo sapien
ctgcatatattgttggaactgagct

SEQ ID NO: 231873 - DNA, 25 bp, Homo sapien
gcatatattgttggaactgagctga

SEQ ID NO: 231874 - DNA, 25 bp, Homo sapien
ttgtaaaattgatgaatgtctccct

SEQ ID NO: 231875 - DNA, 25 bp, Homo sapien
catatattgttggaactgagctgat

SEQ ID NO: 231876 - DNA, 25 bp, Homo sapien
aggccatattggcagcagacagcag

SEQ ID NO: 231877 - DNA, 25 bp, Homo sapien
cagcctgatccacaaagacggtcat

SEQ ID NO: 231878 - DNA, 25 bp, Homo sapien
tctgcttccgaccttgaatgtaaag

SEQ ID NO: 231879 - DNA, 25 bp, Homo sapien
taaaggcagcctgatccacaaagac

SEQ ID NO: 231880 - DNA, 25 bp, Homo sapien
ccttgaatgtaaaggcagcctgatc

SEQ ID NO: 231881 - DNA, 25 bp, Homo sapien
tagcgggttgatggaggtggtaacc

SEQ ID NO: 231882 - DNA, 25 bp, Homo sapien
gtggtaaccttggcgtgtcgaagtc

SEQ ID NO: 231883 - DNA, 25 bp, Homo sapien
tgctgctctctagtggccagtggcc

SEQ ID NO: 231884 - DNA, 25 bp, Homo sapien
ggcgtgtcgaagtccctccatcagg

SEQ ID NO: 231885 - DNA, 25 bp, Homo sapien
gaaacagctgggcatatttatgaaa

SEQ ID NO: 231886 - DNA, 25 bp, Homo sapien
taatcagtgatttgcaggcgacaca

SEQ ID NO: 231887 - DNA, 25 bp, Homo sapien
gaaagtttgtcagggatgtagcagc

SEQ ID NO: 231888 - DNA, 25 bp, Homo sapien
ctttctagaatctgtagcagctgtg

SEQ ID NO: 231889 - DNA, 25 bp, Homo sapien
attccacttgtcacctgattttccc

SEQ ID NO: 231890 - DNA, 25 bp, Homo sapien
cctgattttcccctagcgtgtcctt

SEQ ID NO: 231891 - DNA, 25 bp, Homo sapien
tgttttctccgaatgcccttttgaa

SEQ ID NO: 231892 - DNA, 25 bp, Homo sapien
tgtcctccggtgtagtaaattccac

SEQ ID NO: 231893 - DNA, 25 bp, Homo sapien
gagcacattgggttgctgtccctga

SEQ ID NO: 231894 - DNA, 25 bp, Homo sapien
aaggttaccgctgacctcttagcag

SEQ ID NO: 231895 - DNA, 25 bp, Homo sapien
cagttctggagcacattgggttgct

SEQ ID NO: 231896 - DNA, 25 bp, Homo sapien
ctgtccctgaaggttaccgctgacc

SEQ ID NO: 231897 - DNA, 25 bp, Homo sapien
gattttatgtttgaccgcaagctca

SEQ ID NO: 231898 - DNA, 25 bp, Homo sapien
ccttgaagccttggtccttaataag

SEQ ID NO: 231899 - DNA, 25 bp, Homo sapien
tgaagccttggtccttaataaggat

SEQ ID NO: 231900 - DNA, 25 bp, Homo sapien
attttatgtttgaccgcaagctcat

SEQ ID NO: 231901 - DNA, 25 bp, Homo sapien
ggtattgccagaaaagatactttcg

SEQ ID NO: 231902 - DNA, 25 bp, Homo sapien
attttgattgtgatgctcatggctt

SEQ ID NO: 231903 - DNA, 25 bp, Homo sapien
gctctatggagaacaagggtattgc

SEQ ID NO: 231904 - DNA, 25 bp, Homo sapien
tgattgtgatgctcatggcttcttg

SEQ ID NO: 231905 - DNA, 25 bp, Homo sapien
gctgttgctacttccttatcacttg

SEQ ID NO: 231906 - DNA, 25 bp, Homo sapien
gctgctgttgctacttccttatcac

SEQ ID NO: 231907 - DNA, 25 bp, Homo sapien
ctgctgttgctacttccttatcact

SEQ ID NO: 231908 - DNA, 25 bp, Homo sapien
tgctgttgctacttccttatcactt

SEQ ID NO: 231909 - DNA, 25 bp, Homo sapien
caggatcgtcatttcagcaagtgca

SEQ ID NO: 231910 - DNA, 25 bp, Homo sapien
tgggaactaagacctccaaagtagc

SEQ ID NO: 231911 - DNA, 25 bp, Homo sapien
actggtatgagtagcccaaagggcc

SEQ ID NO: 231912 - DNA, 25 bp, Homo sapien
ccaaagtagcagaccccaagttgca

SEQ ID NO: 231913 - DNA, 25 bp, Homo sapien
tgttcctctagtccttcggctcaaa

SEQ ID NO: 231914 - DNA, 25 bp, Homo sapien
gttcctctagtccttcggctcaaag

SEQ ID NO: 231915 - DNA, 25 bp, Homo sapien
ttcctctagtccttcggctcaaaga

SEQ ID NO: 231916 - DNA, 25 bp, Homo sapien
tatcacgtagaacttaagccaagca

SEQ ID NO: 231917 - DNA, 25 bp, Homo sapien
tagtcgacccagtcctgacatgagg

SEQ ID NO: 231918 - DNA, 25 bp, Homo sapien
gtttgtgggagatggaacagcttct

SEQ ID NO: 231919 - DNA, 25 bp, Homo sapien
cagttgcaaggtacacagggcatcc

SEQ ID NO: 231920 - DNA, 25 bp, Homo sapien
tctactaatgagaaaaacgggattc

SEQ ID NO: 231921 - DNA, 25 bp, Homo sapien
cagacttggcccacaggtcgatagg

SEQ ID NO: 231922 - DNA, 25 bp, Homo sapien
gtttgtgttccttatgatcagatca

SEQ ID NO: 231923 - DNA, 25 bp, Homo sapien
ttcacttgacttgggactcaaagtt

SEQ ID NO: 231924 - DNA, 25 bp, Homo sapien
tctagtctggtagaggtttgacttc

SEQ ID NO: 231925 - DNA, 25 bp, Homo sapien
tctgtctagtctggtagaggtttga

SEQ ID NO: 231926 - DNA, 25 bp, Homo sapien
taagagatagacatgcaaattctgt

SEQ ID NO: 231927 - DNA, 25 bp, Homo sapien
tgtctagtctggtagaggtttgact

SEQ ID NO: 231928 - DNA, 25 bp, Homo sapien
agaacaagaggtcacatcttgtgag

SEQ ID NO: 231929 - DNA, 25 bp, Homo sapien
caagaggtcacatcttgtgaggccc

SEQ ID NO: 231930 - DNA, 25 bp, Homo sapien
cttgctgtatcataacatagcagaa

SEQ ID NO: 231931 - DNA, 25 bp, Homo sapien
catagcagaatgcatcacatggtga

SEQ ID NO: 231932 - DNA, 25 bp, Homo sapien
caatagaatgcagtggaagcgacac

SEQ ID NO: 231933 - DNA, 25 bp, Homo sapien
gacactgtggcaatttgggtaccta

SEQ ID NO: 231934 - DNA, 25 bp, Homo sapien
ggagcatcacctgtagtcagacaac

SEQ ID NO: 231935 - DNA, 25 bp, Homo sapien
ccagcttggtcacagaataactttg

SEQ ID NO: 231936 - DNA, 25 bp, Homo sapien
cccatcctgttagcaagggtcttat

SEQ ID NO: 231937 - DNA, 25 bp, Homo sapien
aaatccaatgtcacgtcggacttag

SEQ ID NO: 231938 - DNA, 25 bp, Homo sapien
ggtaggacgtgggtcaaatccaatg

SEQ ID NO: 231939 - DNA, 25 bp, Homo sapien
ctcttagaattggagtgccacccat

SEQ ID NO: 231940 - DNA, 25 bp, Homo sapien
gctcctggttgcgtcattccaatgt

SEQ ID NO: 231941 - DNA, 25 bp, Homo sapien
cttggctcctggttgcgtcattcca

SEQ ID NO: 231942 - DNA, 25 bp, Homo sapien
ttttgtgtgcctcttgtaaaaacac

SEQ ID NO: 231943 - DNA, 25 bp, Homo sapien
ttccttggctcctggttgcgtcatt

SEQ ID NO: 231944 - DNA, 25 bp, Homo sapien
ctaaggtataaagctttggaattgt

SEQ ID NO: 231945 - DNA, 25 bp, Homo sapien
aggtataaagctttggaattgttgg

SEQ ID NO: 231946 - DNA, 25 bp, Homo sapien
ctctaaggtataaagctttggaatt

SEQ ID NO: 231947 - DNA, 25 bp, Homo sapien
aaggtataaagctttggaattgttg

SEQ ID NO: 231948 - DNA, 25 bp, Homo sapien
tcactgcagaaaagggcaatccgca

SEQ ID NO: 231949 - DNA, 25 bp, Homo sapien
tgcaatttatgaggaatgaaaggag

SEQ ID NO: 231950 - DNA, 25 bp, Homo sapien
tcagcaactggaggtatgcctcact

SEQ ID NO: 231951 - DNA, 25 bp, Homo sapien
gaaaggagattctacattaaagtca

SEQ ID NO: 231952 - DNA, 25 bp, Homo sapien
tgctatgacttgtgttaagcgaggg

SEQ ID NO: 231953 - DNA, 25 bp, Homo sapien
tcttgcatacgggaatgctatgact

SEQ ID NO: 231954 - DNA, 25 bp, Homo sapien
gatagctataacaatctggcccagc

SEQ ID NO: 231955 - DNA, 25 bp, Homo sapien
tgcaaatcactctcacagccatgac

SEQ ID NO: 231956 - DNA, 25 bp, Homo sapien
ttgtgtcagaaaatgactggctgtc

SEQ ID NO: 231957 - DNA, 25 bp, Homo sapien
tcctggtgcttcatcgttttgtttt

SEQ ID NO: 231958 - DNA, 25 bp, Homo sapien
actggctgtcagcttcctggtgctt

SEQ ID NO: 231959 - DNA, 25 bp, Homo sapien
aaaatgactggctgtcagcttcctg

SEQ ID NO: 231960 - DNA, 25 bp, Homo sapien
agagggctgcacttcacggaaaatg

SEQ ID NO: 231961 - DNA, 25 bp, Homo sapien
gagggctgcacttcacggaaaatga

SEQ ID NO: 231962 - DNA, 25 bp, Homo sapien
gagagggctgcacttcacggaaaat

SEQ ID NO: 231963 - DNA, 25 bp, Homo sapien
gagataccagaaaccctccactgga

SEQ ID NO: 231964 - DNA, 25 bp, Homo sapien
ttgaaacaatacataactcaggtga

SEQ ID NO: 231965 - DNA, 25 bp, Homo sapien
ataccagaaaccctccactggatgt

SEQ ID NO: 231966 - DNA, 25 bp, Homo sapien
gatgtttgaaacaatacataactca

SEQ ID NO: 231967 - DNA, 25 bp, Homo sapien
acctggggattagcattcaagttag

SEQ ID NO: 231968 - DNA, 25 bp, Homo sapien
gaaactgaaaggaacgcatcattag

SEQ ID NO: 231969 - DNA, 25 bp, Homo sapien
cattagagaaggttaaggaaactat

SEQ ID NO: 231970 - DNA, 25 bp, Homo sapien
ggaaactatttgaacataattccaa

SEQ ID NO: 231971 - DNA, 25 bp, Homo sapien
gtaatgatactcatgcccaagctgc

SEQ ID NO: 231972 - DNA, 25 bp, Homo sapien
actttctctacttttgccaatgcct

SEQ ID NO: 231973 - DNA, 25 bp, Homo sapien
tgatctcctcaacactcttctgcaa

SEQ ID NO: 231974 - DNA, 25 bp, Homo sapien
ccaatgcctaacttataattccctg

SEQ ID NO: 231975 - DNA, 25 bp, Homo sapien
cataaaaatagacttgtattcttgg

SEQ ID NO: 231976 - DNA, 25 bp, Homo sapien
cattctcagatacaatgacttattt

SEQ ID NO: 231977 - DNA, 25 bp, Homo sapien
tgggctatcattctcagatacaatg

SEQ ID NO: 231978 - DNA, 25 bp, Homo sapien
tgtattcttgggctatcattctcag

SEQ ID NO: 231979 - DNA, 25 bp, Homo sapien
ctctcatagagttgccatttgttaa

SEQ ID NO: 231980 - DNA, 25 bp, Homo sapien
aagcccgtttaatctgcttttctcg

SEQ ID NO: 231981 - DNA, 25 bp, Homo sapien
taaactctcatagagttgccatttg

SEQ ID NO: 231982 - DNA, 25 bp, Homo sapien
atctgcttttctcggaataaaattc

SEQ ID NO: 231983 - DNA, 25 bp, Homo sapien
tttgatgattcaccttgcatcctcc

SEQ ID NO: 231984 - DNA, 25 bp, Homo sapien
tgcatcctccccgtaacttgtgttg

SEQ ID NO: 231985 - DNA, 25 bp, Homo sapien
tggccgagaacctgggattctggtt

SEQ ID NO: 231986 - DNA, 25 bp, Homo sapien
ttatttgatgattcaccttgcatcc

SEQ ID NO: 231987 - DNA, 25 bp, Homo sapien
ttccatcttgtaggaagggccccac

SEQ ID NO: 231988 - DNA, 25 bp, Homo sapien
tggagacaaatatccatttcttcct

SEQ ID NO: 231989 - DNA, 25 bp, Homo sapien
gattttggcaagtgcttgaggattg

SEQ ID NO: 231990 - DNA, 25 bp, Homo sapien
tccatcttgtaggaagggccccact

SEQ ID NO: 231991 - DNA, 25 bp, Homo sapien
tgaactgaactgacgactctgggtc

SEQ ID NO: 231992 - DNA, 25 bp, Homo sapien
gacataagatgaaggtcctggagaa

SEQ ID NO: 231993 - DNA, 25 bp, Homo sapien
caggaacggaggaagagatcagcac

SEQ ID NO: 231994 - DNA, 25 bp, Homo sapien
tctctgaagctacctccgccagagg

SEQ ID NO: 231995 - DNA, 25 bp, Homo sapien
gtatttccaacactctctgagcaca

SEQ ID NO: 231996 - DNA, 25 bp, Homo sapien
tgtatttccaacactctctgagcac

SEQ ID NO: 231997 - DNA, 25 bp, Homo sapien
tatttccaacactctctgagcacag

SEQ ID NO: 231998 - DNA, 25 bp, Homo sapien
tacttagcacgggactgccataatc

SEQ ID NO: 231999 - DNA, 25 bp, Homo sapien
ctacttagcacgggactgccataat

SEQ ID NO: 232000 - DNA, 25 bp, Homo sapien
cttagcacgggactgccataatctt

SEQ ID NO: 232001 - DNA, 25 bp, Homo sapien
ttagcacgggactgccataatcttc

SEQ ID NO: 232002 - DNA, 25 bp, Homo sapien
gggagagattcgccatacaactccc

SEQ ID NO: 232003 - DNA, 25 bp, Homo sapien
gagagattcgccatacaactcccac

SEQ ID NO: 232004 - DNA, 25 bp, Homo sapien
gattcgccatacaactcccaccttt

SEQ ID NO: 232005 - DNA, 25 bp, Homo sapien
gagattcgccatacaactcccacct

SEQ ID NO: 232006 - DNA, 25 bp, Homo sapien
tgcttccacgggtaaatttcaaaca

SEQ ID NO: 232007 - DNA, 25 bp, Homo sapien
atgtgctccactaactcgttttttg

SEQ ID NO: 232008 - DNA, 25 bp, Homo sapien
gcatgtgctccactaactcgttttt

SEQ ID NO: 232009 - DNA, 25 bp, Homo sapien
tgcatgtgctccactaactcgtttt

SEQ ID NO: 232010 - DNA, 25 bp, Homo sapien
catgtgctccactaactcgtttttt

SEQ ID NO: 232011 - DNA, 25 bp, Homo sapien
tgtatattctctggcttggaaccca

SEQ ID NO: 232012 - DNA, 25 bp, Homo sapien
caaaccatctagaggccccatcaat

SEQ ID NO: 232013 - DNA, 25 bp, Homo sapien
tggctctcagttgtactcagggaca

SEQ ID NO: 232014 - DNA, 25 bp, Homo sapien
tgtactcagggacagccgatcatcc

SEQ ID NO: 232015 - DNA, 25 bp, Homo sapien
tacacctctcaggcgtacctgtgct

SEQ ID NO: 232016 - DNA, 25 bp, Homo sapien
ctctcaggcgtacctgtgcttttac

SEQ ID NO: 232017 - DNA, 25 bp, Homo sapien
cacctctcaggcgtacctgtgcttt

SEQ ID NO: 232018 - DNA, 25 bp, Homo sapien
atgcttcctacacctctcaggcgta

SEQ ID NO: 232019 - DNA, 25 bp, Homo sapien
aaggtctgagaagtagacattctca

SEQ ID NO: 232020 - DNA, 25 bp, Homo sapien
aaagcccagtgcaaggtctgagaag

SEQ ID NO: 232021 - DNA, 25 bp, Homo sapien
gaaagcccagtgcaaggtctgagaa

SEQ ID NO: 232022 - DNA, 25 bp, Homo sapien
tgagaagtagacattctcagccctc

SEQ ID NO: 232023 - DNA, 25 bp, Homo sapien
cactccagaagcttcgatgcttggg

SEQ ID NO: 232024 - DNA, 25 bp, Homo sapien
cttctgtggatttggagcctcccac

SEQ ID NO: 232025 - DNA, 25 bp, Homo sapien
tgcaatgtaaacagcttctccaggg

SEQ ID NO: 232026 - DNA, 25 bp, Homo sapien
ccgaccatgcctgcgtgcaatgtaa

SEQ ID NO: 232027 - DNA, 25 bp, Homo sapien
ctccatgaaggggatcagccgtctt

SEQ ID NO: 232028 - DNA, 25 bp, Homo sapien
tttctctccatgaaggggatcagcc

SEQ ID NO: 232029 - DNA, 25 bp, Homo sapien
catgaaggggatcagccgtctttca

SEQ ID NO: 232030 - DNA, 25 bp, Homo sapien
ttccccatcagaggctacttttctc

SEQ ID NO: 232031 - DNA, 25 bp, Homo sapien
cacttggacatgatggcaggagcct

SEQ ID NO: 232032 - DNA, 25 bp, Homo sapien
gagagagtcagtccatgaggcacat

SEQ ID NO: 232033 - DNA, 25 bp, Homo sapien
gcaggagccttgagagagtcagtcc

SEQ ID NO: 232034 - DNA, 25 bp, Homo sapien
gatgtcattccaccacttggacatg

SEQ ID NO: 232035 - DNA, 25 bp, Homo sapien
cctgatctgtggcttacaggtatgg

SEQ ID NO: 232036 - DNA, 25 bp, Homo sapien
ccaacaattgggagtgaaaggaact

SEQ ID NO: 232037 - DNA, 25 bp, Homo sapien
gaactgactgagcaggtatacaaga

SEQ ID NO: 232038 - DNA, 25 bp, Homo sapien
cactgaatcacacaacatggacaaa

SEQ ID NO: 232039 - DNA, 25 bp, Homo sapien
gaatacacagtacatgacgccgctt

SEQ ID NO: 232040 - DNA, 25 bp, Homo sapien
tacaacatgatgaacacgctcacgt

SEQ ID NO: 232041 - DNA, 25 bp, Homo sapien
ttaggagatgatccaattctgggag

SEQ ID NO: 232042 - DNA, 25 bp, Homo sapien
taactgatttgctacatagagccac

SEQ ID NO: 232043 - DNA, 25 bp, Homo sapien
cactgtagctaagcctatgttagac

SEQ ID NO: 232044 - DNA, 25 bp, Homo sapien
gctgtgtgagtctgttaccagtgca

SEQ ID NO: 232045 - DNA, 25 bp, Homo sapien
ccagtgcacatgtgaggacagacca

SEQ ID NO: 232046 - DNA, 25 bp, Homo sapien
gaggaaacgactacaacagcattgg

SEQ ID NO: 232047 - DNA, 25 bp, Homo sapien
tagcaaatgtctaagtgctcccctc

SEQ ID NO: 232048 - DNA, 25 bp, Homo sapien
ctggaaaaacgttcacagagagtta

SEQ ID NO: 232049 - DNA, 25 bp, Homo sapien
aaataacccaattaatctgctaata

SEQ ID NO: 232050 - DNA, 25 bp, Homo sapien
aaacgttcacagagagttatagtgg

SEQ ID NO: 232051 - DNA, 25 bp, Homo sapien
agagagttatagtggttacaagacc

SEQ ID NO: 232052 - DNA, 25 bp, Homo sapien
ggacacacggtcagcatgcataaat

SEQ ID NO: 232053 - DNA, 25 bp, Homo sapien
gaagacactggctcacttggacaca

SEQ ID NO: 232054 - DNA, 25 bp, Homo sapien
tacaggaccgcttgcaaataagatg

SEQ ID NO: 232055 - DNA, 25 bp, Homo sapien
cagtgttagcagcaaggcttcgagg

SEQ ID NO: 232056 - DNA, 25 bp, Homo sapien
tgtctgtccacagagacttgtcatt

SEQ ID NO: 232057 - DNA, 25 bp, Homo sapien
cttgtcattcagcatgccagaggtg

SEQ ID NO: 232058 - DNA, 25 bp, Homo sapien
caaattcaaaggagtgagttccaat

SEQ ID NO: 232059 - DNA, 25 bp, Homo sapien
aggagtgagttccaattgcagccca

SEQ ID NO: 232060 - DNA, 25 bp, Homo sapien
tcaagtactacccactcagtgaggt

SEQ ID NO: 232061 - DNA, 25 bp, Homo sapien
ttttatgcgtggaaacactgaggct

SEQ ID NO: 232062 - DNA, 25 bp, Homo sapien
tcaatattaacaccgagccaaggga

SEQ ID NO: 232063 - DNA, 25 bp, Homo sapien
tcctattactacagacttgcacagc

SEQ ID NO: 232064 - DNA, 25 bp, Homo sapien
taatagttaacgtgagtgtatacca

SEQ ID NO: 232065 - DNA, 25 bp, Homo sapien
acttcaacacgtcctaaagcatata

SEQ ID NO: 232066 - DNA, 25 bp, Homo sapien
gctgtaacttcaacacgtcctaaag

SEQ ID NO: 232067 - DNA, 25 bp, Homo sapien
cttaatagttaacgtgagtgtatac

SEQ ID NO: 232068 - DNA, 25 bp, Homo sapien
cttctaatcaaaataccacctttat

SEQ ID NO: 232069 - DNA, 25 bp, Homo sapien
aaattcctctggcacttctaatcaa

SEQ ID NO: 232070 - DNA, 25 bp, Homo sapien
tgtaaccctgtaagatccatttgca

SEQ ID NO: 232071 - DNA, 25 bp, Homo sapien
tatttactcttcctgcaatgaacac

SEQ ID NO: 232072 - DNA, 25 bp, Homo sapien
tgtatacatcacactttatagtcag

SEQ ID NO: 232073 - DNA, 25 bp, Homo sapien
atgtatacatcacactttatagtca

SEQ ID NO: 232074 - DNA, 25 bp, Homo sapien
cagtttccaagcttcggatatggct

SEQ ID NO: 232075 - DNA, 25 bp, Homo sapien
gtactagctctaaacctggaatgtg

SEQ ID NO: 232076 - DNA, 25 bp, Homo sapien
cactccatagacaggcaattcaagg

SEQ ID NO: 232077 - DNA, 25 bp, Homo sapien
ggcttggtattactagtactagctc

SEQ ID NO: 232078 - DNA, 25 bp, Homo sapien
cccatgtaatgggtctctggttgag

SEQ ID NO: 232079 - DNA, 25 bp, Homo sapien
cgtgaagtgatgctcgccagggtct

SEQ ID NO: 232080 - DNA, 25 bp, Homo sapien
tctggttgagaacttggcgtagcgt

SEQ ID NO: 232081 - DNA, 25 bp, Homo sapien
tgttggatgcatcggcagcccatgt

SEQ ID NO: 232082 - DNA, 25 bp, Homo sapien
atataactacaatgaccatgtcttc

SEQ ID NO: 232083 - DNA, 25 bp, Homo sapien
ctacaatgaccatgtcttctaactt

SEQ ID NO: 232084 - DNA, 25 bp, Homo sapien
tctaacaactttaggacagatcttc

SEQ ID NO: 232085 - DNA, 25 bp, Homo sapien
ttctaacaactttaggacagatctt

SEQ ID NO: 232086 - DNA, 25 bp, Homo sapien
ggtagctgcctttgcgaccagtggt

SEQ ID NO: 232087 - DNA, 25 bp, Homo sapien
tgcctttgcgaccagtggtgagagt

SEQ ID NO: 232088 - DNA, 25 bp, Homo sapien
gaagcgggtagctgcctttgcgacc

SEQ ID NO: 232089 - DNA, 25 bp, Homo sapien
gctgggattttggaggaagcgggta

SEQ ID NO: 232090 - DNA, 25 bp, Homo sapien
tcaggttgaagaataaccccaaatg

SEQ ID NO: 232091 - DNA, 25 bp, Homo sapien
gaccgttatattcaggttgaagaat

SEQ ID NO: 232092 - DNA, 25 bp, Homo sapien
caggttgaagaataaccccaaatga

SEQ ID NO: 232093 - DNA, 25 bp, Homo sapien
ctgaccgttatattcaggttgaaga

SEQ ID NO: 232094 - DNA, 25 bp, Homo sapien
tgcttaaaaagaaatctttcggatg

SEQ ID NO: 232095 - DNA, 25 bp, Homo sapien
tagagaatccagctgcttaaaaaga

SEQ ID NO: 232096 - DNA, 25 bp, Homo sapien
ctgcttaaaaagaaatctttcggat

SEQ ID NO: 232097 - DNA, 25 bp, Homo sapien
ccatagagaatccagctgcttaaaa

SEQ ID NO: 232098 - DNA, 25 bp, Homo sapien
ttcttgcaagtgacttttgtaagtg

SEQ ID NO: 232099 - DNA, 25 bp, Homo sapien
ctttcttgcaagtgacttttgtaag

SEQ ID NO: 232100 - DNA, 25 bp, Homo sapien
actttcttgcaagtgacttttgtaa

SEQ ID NO: 232101 - DNA, 25 bp, Homo sapien
aactttcttgcaagtgacttttgta

SEQ ID NO: 232102 - DNA, 25 bp, Homo sapien
gaagaaatggccgtatgcacttaga

SEQ ID NO: 232103 - DNA, 25 bp, Homo sapien
tgttgtgacacattgaaataaggaa

SEQ ID NO: 232104 - DNA, 25 bp, Homo sapien
agaacaaaggtggcaaattgttgtg

SEQ ID NO: 232105 - DNA, 25 bp, Homo sapien
ggccgtatgcacttagaatgtttat

SEQ ID NO: 232106 - DNA, 25 bp, Homo sapien
tactccagcctggaagtgcagagta

SEQ ID NO: 232107 - DNA, 25 bp, Homo sapien
ctgtactccagcctggaagtgcaga

SEQ ID NO: 232108 - DNA, 25 bp, Homo sapien
tccagcctggaagtgcagagtaaga

SEQ ID NO: 232109 - DNA, 25 bp, Homo sapien
ccagcctggaagtgcagagtaagat

SEQ ID NO: 232110 - DNA, 25 bp, Homo sapien
gaagtgagttaatccaatagcaaca

SEQ ID NO: 232111 - DNA, 25 bp, Homo sapien
agaagtgagttaatccaatagcaac

SEQ ID NO: 232112 - DNA, 25 bp, Homo sapien
gtaaagaagtgagttaatccaatag

SEQ ID NO: 232113 - DNA, 25 bp, Homo sapien
aaagaagtgagttaatccaatagca

SEQ ID NO: 232114 - DNA, 25 bp, Homo sapien
ggccaactgtcttcaggtaatacca

SEQ ID NO: 232115 - DNA, 25 bp, Homo sapien
tggtgaggttccctaagccatcagt

SEQ ID NO: 232116 - DNA, 25 bp, Homo sapien
agagctacgtagcttcctcctttct

SEQ ID NO: 232117 - DNA, 25 bp, Homo sapien
ccaggttgagtaaactgagtggtat

SEQ ID NO: 232118 - DNA, 25 bp, Homo sapien
tgagtctgattcatccaaacaagct

SEQ ID NO: 232119 - DNA, 25 bp, Homo sapien
aaaaaagctgtatatcaatttgagt

SEQ ID NO: 232120 - DNA, 25 bp, Homo sapien
tttgagtctgattcatccaaacaag

SEQ ID NO: 232121 - DNA, 25 bp, Homo sapien
gtctgattcatccaaacaagctatt

SEQ ID NO: 232122 - DNA, 25 bp, Homo sapien
tcatcaacccgcatctcccataagg

SEQ ID NO: 232123 - DNA, 25 bp, Homo sapien
ccataaggcaactgttcatagtaac

SEQ ID NO: 232124 - DNA, 25 bp, Homo sapien
gagattctaccacgtagtgcccact

SEQ ID NO: 232125 - DNA, 25 bp, Homo sapien
tagccactaaattccatgcgattgt

SEQ ID NO: 232126 - DNA, 25 bp, Homo sapien
tatggaacaaggtctgggccgtagt

SEQ ID NO: 232127 - DNA, 25 bp, Homo sapien
caggccctaacagtccagagcaggt

SEQ ID NO: 232128 - DNA, 25 bp, Homo sapien
aattgctgatctgctttgtggccca

SEQ ID NO: 232129 - DNA, 25 bp, Homo sapien
ctgtggtatagccagaagacgaatc

SEQ ID NO: 232130 - DNA, 25 bp, Homo sapien
ttctgatttaaaatgcgaccccagc

SEQ ID NO: 232131 - DNA, 25 bp, Homo sapien
aagcttcttcccagtcaactttgca

SEQ ID NO: 232132 - DNA, 25 bp, Homo sapien
taaagtgctaaagtcttcagaagac

SEQ ID NO: 232133 - DNA, 25 bp, Homo sapien
gcttcttcccagtcaactttgcatc

SEQ ID NO: 232134 - DNA, 25 bp, Homo sapien
cagcctagaacactccaagaggaga

SEQ ID NO: 232135 - DNA, 25 bp, Homo sapien
caagatggatggaagcatgttgaag

SEQ ID NO: 232136 - DNA, 25 bp, Homo sapien
tatgcccttttgtctcagcatgcca

SEQ ID NO: 232137 - DNA, 25 bp, Homo sapien
gggataaacctacaacagcatacag

SEQ ID NO: 232138 - DNA, 25 bp, Homo sapien
gctatgattttcactcgctggagac

SEQ ID NO: 232139 - DNA, 25 bp, Homo sapien
actcgctggagaccttgataattca

SEQ ID NO: 232140 - DNA, 25 bp, Homo sapien
gttcggcatcaaggagcatggatgc

SEQ ID NO: 232141 - DNA, 25 bp, Homo sapien
tgcagagatggactcccagagatta

SEQ ID NO: 232142 - DNA, 25 bp, Homo sapien
caagattcagtaggattgagaaccc

SEQ ID NO: 232143 - DNA, 25 bp, Homo sapien
caattaatgtgctcttttaggacgc

SEQ ID NO: 232144 - DNA, 25 bp, Homo sapien
gatcagttgagttctaggacaccct

SEQ ID NO: 232145 - DNA, 25 bp, Homo sapien
gatcctttgtagcaaaccgagacca

SEQ ID NO: 232146 - DNA, 25 bp, Homo sapien
gaattgcccttgagtacctagctct

SEQ ID NO: 232147 - DNA, 25 bp, Homo sapien
gctctggctgcaatagatcttctca

SEQ ID NO: 232148 - DNA, 25 bp, Homo sapien
gagttatccagtatacatgcaccaa

SEQ ID NO: 232149 - DNA, 25 bp, Homo sapien
ctatgaagatgctgtagcaacacca

SEQ ID NO: 232150 - DNA, 25 bp, Homo sapien
tctttgcacatgatatgcccctgcc

SEQ ID NO: 232151 - DNA, 25 bp, Homo sapien
tcagttctttgcacatgatatgccc

SEQ ID NO: 232152 - DNA, 25 bp, Homo sapien
tccatccgttcttgaagattcaaat

SEQ ID NO: 232153 - DNA, 25 bp, Homo sapien
gcaaagtggagagttcctatccatc

SEQ ID NO: 232154 - DNA, 25 bp, Homo sapien
aaagactacaaatttggttcagtgt

SEQ ID NO: 232155 - DNA, 25 bp, Homo sapien
ctcacaaataaccactaaggaactt

SEQ ID NO: 232156 - DNA, 25 bp, Homo sapien
tcagtgtatactgctccagtgatgg

SEQ ID NO: 232157 - DNA, 25 bp, Homo sapien
aaatctcacaaataaccactaagga

SEQ ID NO: 232158 - DNA, 25 bp, Homo sapien
aattggcattatatgacctctcatt

SEQ ID NO: 232159 - DNA, 25 bp, Homo sapien
taattggcattatatgacctctcat

SEQ ID NO: 232160 - DNA, 25 bp, Homo sapien
tggcattatatgacctctcattcca

SEQ ID NO: 232161 - DNA, 25 bp, Homo sapien
ttggcattatatgacctctcattcc

SEQ ID NO: 232162 - DNA, 25 bp, Homo sapien
caaatcatggtaacgcttggcgccc

SEQ ID NO: 232163 - DNA, 25 bp, Homo sapien
caatccaggtcacgacataataggc

SEQ ID NO: 232164 - DNA, 25 bp, Homo sapien
catccagggaatgaccatggcaacc

SEQ ID NO: 232165 - DNA, 25 bp, Homo sapien
tcagctgaagattgacataaggcca

SEQ ID NO: 232166 - DNA, 25 bp, Homo sapien
cgtatcctcggaaataattctcatc

SEQ ID NO: 232167 - DNA, 25 bp, Homo sapien
caatgagtgtaatattgggattcct

SEQ ID NO: 232168 - DNA, 25 bp, Homo sapien
tgcataatgcatgtgggagggctca

SEQ ID NO: 232169 - DNA, 25 bp, Homo sapien
ttctttcatcaaccaccactcgtat

SEQ ID NO: 232170 - DNA, 25 bp, Homo sapien
tcagaacccacacctttagcctata

SEQ ID NO: 232171 - DNA, 25 bp, Homo sapien
tttcagcttttcaacgctggatatg

SEQ ID NO: 232172 - DNA, 25 bp, Homo sapien
gcttttcaacgctggatatgaatcc

SEQ ID NO: 232173 - DNA, 25 bp, Homo sapien
tccctggactcgtgagccctgttct

SEQ ID NO: 232174 - DNA, 25 bp, Homo sapien
tgaaatcacagtccatatgctgagg

SEQ ID NO: 232175 - DNA, 25 bp, Homo sapien
tgtggatttgtttactaccgattac

SEQ ID NO: 232176 - DNA, 25 bp, Homo sapien
gatggaccagtcatattctatataa

SEQ ID NO: 232177 - DNA, 25 bp, Homo sapien
ttaaaatgttgatgggagaaatcct

SEQ ID NO: 232178 - DNA, 25 bp, Homo sapien
ctgttgtctgcccatcaccacctat

SEQ ID NO: 232179 - DNA, 25 bp, Homo sapien
aaatatgcaaagaggcaccaaaatt

SEQ ID NO: 232180 - DNA, 25 bp, Homo sapien
tatgcaaagaggcaccaaaattcgg

SEQ ID NO: 232181 - DNA, 25 bp, Homo sapien
catcaccacctatttccacttttaa

SEQ ID NO: 232182 - DNA, 25 bp, Homo sapien
tgtgaggctaataaattctatggtg

SEQ ID NO: 232183 - DNA, 25 bp, Homo sapien
tcaaaaactagaattgtgaggctaa

SEQ ID NO: 232184 - DNA, 25 bp, Homo sapien
tgtatgaagcttcaagacaattact

SEQ ID NO: 232185 - DNA, 25 bp, Homo sapien
tgccttaggttttacagacgcaaaa

SEQ ID NO: 232186 - DNA, 25 bp, Homo sapien
tatctgagaacgatagggctctggg

SEQ ID NO: 232187 - DNA, 25 bp, Homo sapien
ctgagaacgatagggctctgggtaa

SEQ ID NO: 232188 - DNA, 25 bp, Homo sapien
caatatctgagaacgatagggctct

SEQ ID NO: 232189 - DNA, 25 bp, Homo sapien
aatccaatatctgagaacgataggg

SEQ ID NO: 232190 - DNA, 25 bp, Homo sapien
gtctgtccgacagctaaaaaagttc

SEQ ID NO: 232191 - DNA, 25 bp, Homo sapien
ggaaaagttcctcacaagttgtctg

SEQ ID NO: 232192 - DNA, 25 bp, Homo sapien
caatcattgggcaagtagggctgct

SEQ ID NO: 232193 - DNA, 25 bp, Homo sapien
taactgggaggtaagcttgctaacc

SEQ ID NO: 232194 - DNA, 25 bp, Homo sapien
taaagagaccttgaggcaccagtcc

SEQ ID NO: 232195 - DNA, 25 bp, Homo sapien
tacccggtagtttcaggccgctcgc

SEQ ID NO: 232196 - DNA, 25 bp, Homo sapien
tattcggcgctaccctctctggagg

SEQ ID NO: 232197 - DNA, 25 bp, Homo sapien
agtcctgcctccaaacgaaatccta

SEQ ID NO: 232198 - DNA, 25 bp, Homo sapien
cctgcactaacaactgcacgggact

SEQ ID NO: 232199 - DNA, 25 bp, Homo sapien
gggcgttctctttcgcacacggacg

SEQ ID NO: 232200 - DNA, 25 bp, Homo sapien
tgcacgggacttaacgactccacca

SEQ ID NO: 232201 - DNA, 25 bp, Homo sapien
tttctggagcgacgctccccgactg

SEQ ID NO: 232202 - DNA, 25 bp, Homo sapien
tactctctgcacctatactctctgg

SEQ ID NO: 232203 - DNA, 25 bp, Homo sapien
agccccggctacttcactacttaga

SEQ ID NO: 232204 - DNA, 25 bp, Homo sapien
tacttagacctgtcactttactctc

SEQ ID NO: 232205 - DNA, 25 bp, Homo sapien
tcgtgttaaacgagaaagcacccgc

SEQ ID NO: 232206 - DNA, 25 bp, Homo sapien
gcgtatccccgcagcttgccgctca

SEQ ID NO: 232207 - DNA, 25 bp, Homo sapien
tgctgactggcaccctaggggaatg

SEQ ID NO: 232208 - DNA, 25 bp, Homo sapien
gaatgcggcggagagtggagccggt

SEQ ID NO: 232209 - DNA, 25 bp, Homo sapien
ggtggaaacgcagggcaacgccgcg

SEQ ID NO: 232210 - DNA, 25 bp, Homo sapien
gcgccgatgccgtcgaactcccggc

SEQ ID NO: 232211 - DNA, 25 bp, Homo sapien
gagtcgtcgagcacgtacgcgccgc

SEQ ID NO: 232212 - DNA, 25 bp, Homo sapien
agcccgtcggagtcgtcgagcacgt

SEQ ID NO: 232213 - DNA, 25 bp, Homo sapien
ggcccagcccgtcggagtcgtcgag

SEQ ID NO: 232214 - DNA, 25 bp, Homo sapien
tcgctcggcgttgccaggaagccga

SEQ ID NO: 232215 - DNA, 25 bp, Homo sapien
agctttcgctcggcgttgccaggaa

SEQ ID NO: 232216 - DNA, 25 bp, Homo sapien
aagccgagagtagccactcagccat

SEQ ID NO: 232217 - DNA, 25 bp, Homo sapien
caggaagccgagagtagccactcag

SEQ ID NO: 232218 - DNA, 25 bp, Homo sapien
ccgccacgatagatacgggcaggag

SEQ ID NO: 232219 - DNA, 25 bp, Homo sapien
ccacgatagatacgggcaggaggcc

SEQ ID NO: 232220 - DNA, 25 bp, Homo sapien
tcacatgactccggcgcccagggag

SEQ ID NO: 232221 - DNA, 25 bp, Homo sapien
cgtcgccgccacgatagatacgggc

SEQ ID NO: 232222 - DNA, 25 bp, Homo sapien
cctctgacgcagctggcggagtgtt

SEQ ID NO: 232223 - DNA, 25 bp, Homo sapien
ttttgagtgcgggtcaagggcctct

SEQ ID NO: 232224 - DNA, 25 bp, Homo sapien
gagctttttcttatcgctcgcgtgt

SEQ ID NO: 232225 - DNA, 25 bp, Homo sapien
gagaaaagaagcagcgagctttttc

SEQ ID NO: 232226 - DNA, 25 bp, Homo sapien
tggtggagcactttaacgcagggaa

SEQ ID NO: 232227 - DNA, 25 bp, Homo sapien
cagcatctcagggagtatctacctc

SEQ ID NO: 232228 - DNA, 25 bp, Homo sapien
gaaggtggattccaaggtccgccaa

SEQ ID NO: 232229 - DNA, 25 bp, Homo sapien
tatctacctcgtgcgaggaccaggc

SEQ ID NO: 232230 - DNA, 25 bp, Homo sapien
gaggccacactgatctctgtaacat

SEQ ID NO: 232231 - DNA, 25 bp, Homo sapien
aacattccagtgtttgtaaatgtgc

SEQ ID NO: 232232 - DNA, 25 bp, Homo sapien
tccttgctcagaggccacactgatc

SEQ ID NO: 232233 - DNA, 25 bp, Homo sapien
gtttgtaaatgtgctgccaaaggaa

SEQ ID NO: 232234 - DNA, 25 bp, Homo sapien
ggtccccagattgtgaccacagaaa

SEQ ID NO: 232235 - DNA, 25 bp, Homo sapien
ccatgagtagcccaactggccagtg

SEQ ID NO: 232236 - DNA, 25 bp, Homo sapien
ggaaccaggtagatccacaatctcc

SEQ ID NO: 232237 - DNA, 25 bp, Homo sapien
gatagtgtggcctcacaaaggaccc

SEQ ID NO: 232238 - DNA, 25 bp, Homo sapien
gaaatatgagtgcaatttcctgtcc

SEQ ID NO: 232239 - DNA, 25 bp, Homo sapien
tcttgacttgatgcaggcacagatt

SEQ ID NO: 232240 - DNA, 25 bp, Homo sapien
gctgcttcctcattggtttgtgctg

SEQ ID NO: 232241 - DNA, 25 bp, Homo sapien
tatgagtgcaatttcctgtcccctc

SEQ ID NO: 232242 - DNA, 25 bp, Homo sapien
caatctgacacgtagttgcttatta

SEQ ID NO: 232243 - DNA, 25 bp, Homo sapien
tttctaagcttcataaatctgcaga

SEQ ID NO: 232244 - DNA, 25 bp, Homo sapien
gatctaatcagttggttactccctg

SEQ ID NO: 232245 - DNA, 25 bp, Homo sapien
gattccttcatcagttctagaaagc

SEQ ID NO: 232246 - DNA, 25 bp, Homo sapien
gatttcagtggtgttactatatccc

SEQ ID NO: 232247 - DNA, 25 bp, Homo sapien
tatgttgaacaaatacctagaggtg

SEQ ID NO: 232248 - DNA, 25 bp, Homo sapien
tgatcttcaaccatgcgattgcatg

SEQ ID NO: 232249 - DNA, 25 bp, Homo sapien
tcatatggcatgcataagtgcctag

SEQ ID NO: 232250 - DNA, 25 bp, Homo sapien
tctgatccctagtgagttcctccag

SEQ ID NO: 232251 - DNA, 25 bp, Homo sapien
tgtaaatgatctcagccaccagtag

SEQ ID NO: 232252 - DNA, 25 bp, Homo sapien
gaattcttgtgacttgtgatggcag

SEQ ID NO: 232253 - DNA, 25 bp, Homo sapien
cagtaggcctcagcagcaaagggat

SEQ ID NO: 232254 - DNA, 25 bp, Homo sapien
agccataaagggatgagctagagag

SEQ ID NO: 232255 - DNA, 25 bp, Homo sapien
agctctttatgatgcaccggtgcat

SEQ ID NO: 232256 - DNA, 25 bp, Homo sapien
tgttacaattcgatgttcaaaaagc

SEQ ID NO: 232257 - DNA, 25 bp, Homo sapien
gctagagaggtctccatattatcat

SEQ ID NO: 232258 - DNA, 25 bp, Homo sapien
gcatatggcaacaagatgcttgctc

SEQ ID NO: 232259 - DNA, 25 bp, Homo sapien
gaaggtatcataaggaagacacatc

SEQ ID NO: 232260 - DNA, 25 bp, Homo sapien
taccataaggtcacgtaagcctctc

SEQ ID NO: 232261 - DNA, 25 bp, Homo sapien
tacttttacagaatgccccatgagc

SEQ ID NO: 232262 - DNA, 25 bp, Homo sapien
gaaagttaagaattcatcctgttgt

SEQ ID NO: 232263 - DNA, 25 bp, Homo sapien
taatatatatgaggacaatagggag

SEQ ID NO: 232264 - DNA, 25 bp, Homo sapien
aatggcacattcacgatgtggctcc

SEQ ID NO: 232265 - DNA, 25 bp, Homo sapien
ggacaatagggagcctgaaagttaa

SEQ ID NO: 232266 - DNA, 25 bp, Homo sapien
tcagacagaacatttgctccaaagc

SEQ ID NO: 232267 - DNA, 25 bp, Homo sapien
tcatctcccacaactgtggctttgt

SEQ ID NO: 232268 - DNA, 25 bp, Homo sapien
tgcatggttttagcttcatctccca

SEQ ID NO: 232269 - DNA, 25 bp, Homo sapien
tagaagtcctcgttttgacctctgc

SEQ ID NO: 232270 - DNA, 25 bp, Homo sapien
aggctgctgaccagctggccaccat

SEQ ID NO: 232271 - DNA, 25 bp, Homo sapien
aaataggctgctgaccagctggcca

SEQ ID NO: 232272 - DNA, 25 bp, Homo sapien
taggctgctgaccagctggccacca

SEQ ID NO: 232273 - DNA, 25 bp, Homo sapien
cagaaataggctgctgaccagctgg

SEQ ID NO: 232274 - DNA, 25 bp, Homo sapien
tcaagcttacacacaacctgcagtg

SEQ ID NO: 232275 - DNA, 25 bp, Homo sapien
tatgccttccgatgatagctaaacc

SEQ ID NO: 232276 - DNA, 25 bp, Homo sapien
taaaccatcagcaaagcagtccagg

SEQ ID NO: 232277 - DNA, 25 bp, Homo sapien
taggatccagtatctgccggaggag

SEQ ID NO: 232278 - DNA, 25 bp, Homo sapien
ctgttgtatggtaaagatgaaggaa

SEQ ID NO: 232279 - DNA, 25 bp, Homo sapien
gtatcccttctgtaattaagtcctg

SEQ ID NO: 232280 - DNA, 25 bp, Homo sapien
atcaaaagataaattaccctgggtg

SEQ ID NO: 232281 - DNA, 25 bp, Homo sapien
ggagagcccttaaaatgagtttaga

SEQ ID NO: 232282 - DNA, 25 bp, Homo sapien
agtctgcccaacaccatgatttagg

SEQ ID NO: 232283 - DNA, 25 bp, Homo sapien
tgtgacacctggtatggaagaccca

SEQ ID NO: 232284 - DNA, 25 bp, Homo sapien
taatggtctccagcttcgtcaatgt

SEQ ID NO: 232285 - DNA, 25 bp, Homo sapien
cagccaaccaactgagggagctttc

SEQ ID NO: 232286 - DNA, 25 bp, Homo sapien
ctactactagtagccctccatggga

SEQ ID NO: 232287 - DNA, 25 bp, Homo sapien
tcttaaggaagcatgtcaactcagg

SEQ ID NO: 232288 - DNA, 25 bp, Homo sapien
tgtgcactgctcctaagagatggtt

SEQ ID NO: 232289 - DNA, 25 bp, Homo sapien
tcaactcaggtaagggatgtaaggg

SEQ ID NO: 232290 - DNA, 25 bp, Homo sapien
aaaatgaggtggtctgtgatctgcc

SEQ ID NO: 232291 - DNA, 25 bp, Homo sapien
taagacatagggaaaggtgaacaac

SEQ ID NO: 232292 - DNA, 25 bp, Homo sapien
cagtcagggttcatggctcttcata

SEQ ID NO: 232293 - DNA, 25 bp, Homo sapien
caagtggtctcaactggttcaagcc

SEQ ID NO: 232294 - DNA, 25 bp, Homo sapien
taaagcataccaaaagatgggagac

SEQ ID NO: 232295 - DNA, 25 bp, Homo sapien
taaatgacatccactctcagttacc

SEQ ID NO: 232296 - DNA, 25 bp, Homo sapien
tcttctcccagttcagtttgtgcct

SEQ ID NO: 232297 - DNA, 25 bp, Homo sapien
tcaatatcatgcctcagaaggaagt

SEQ ID NO: 232298 - DNA, 25 bp, Homo sapien
cacgtaagtgcataatctgaggctg

SEQ ID NO: 232299 - DNA, 25 bp, Homo sapien
cagttttgtttgaatcgatgggcca

SEQ ID NO: 232300 - DNA, 25 bp, Homo sapien
tcataagtgactcatgtgggccagg

SEQ ID NO: 232301 - DNA, 25 bp, Homo sapien
cgatgggccagattttatacagact

SEQ ID NO: 232302 - DNA, 25 bp, Homo sapien
tttgtagaatggcattgacatgtgt

SEQ ID NO: 232303 - DNA, 25 bp, Homo sapien
ttccaatagcaactgactccttttt

SEQ ID NO: 232304 - DNA, 25 bp, Homo sapien
tagcaactgactcctttttcagaaa

SEQ ID NO: 232305 - DNA, 25 bp, Homo sapien
ttgacatgtgtctccttaaataata

SEQ ID NO: 232306 - DNA, 25 bp, Homo sapien
cctcagagagccagtagaaaacacc

SEQ ID NO: 232307 - DNA, 25 bp, Homo sapien
ccctctgacaggagttgggagagca

SEQ ID NO: 232308 - DNA, 25 bp, Homo sapien
ggcaccggcgtcaacgtatgggacc

SEQ ID NO: 232309 - DNA, 25 bp, Homo sapien
tcactgcacagataagaagagagct

SEQ ID NO: 232310 - DNA, 25 bp, Homo sapien
tctctccaacatcctctcctacatt

SEQ ID NO: 232311 - DNA, 25 bp, Homo sapien
tgaatcaaagagtagttccattttt

SEQ ID NO: 232312 - DNA, 25 bp, Homo sapien
ttgctgaatcaaagagtagttccat

SEQ ID NO: 232313 - DNA, 25 bp, Homo sapien
tctccaacatcctctcctacatttt

SEQ ID NO: 232314 - DNA, 25 bp, Homo sapien
tcaaagaagcccatactgccatggt

SEQ ID NO: 232315 - DNA, 25 bp, Homo sapien
aaacgaggaccatgttgccactgcc

SEQ ID NO: 232316 - DNA, 25 bp, Homo sapien
gtattgcatccacctgtttcctgag

SEQ ID NO: 232317 - DNA, 25 bp, Homo sapien
tacaaacaaatgaactacagggcag

SEQ ID NO: 232318 - DNA, 25 bp, Homo sapien
gacttgtctaaatccaactcccagt

SEQ ID NO: 232319 - DNA, 25 bp, Homo sapien
aaggattatactcccagactctcag

SEQ ID NO: 232320 - DNA, 25 bp, Homo sapien
ctctgaggcccatagtgacttgtct

SEQ ID NO: 232321 - DNA, 25 bp, Homo sapien
cagacatctagccttgcaaggttag

SEQ ID NO: 232322 - DNA, 25 bp, Homo sapien
taaaggtctgccgaaaaattcacaa

SEQ ID NO: 232323 - DNA, 25 bp, Homo sapien
gaaatgtcagattccaagacctggc

SEQ ID NO: 232324 - DNA, 25 bp, Homo sapien
catactctctgtgtagaccttgcca

SEQ ID NO: 232325 - DNA, 25 bp, Homo sapien
aaaatcttggacctgcctagctggg

SEQ ID NO: 232326 - DNA, 25 bp, Homo sapien
ctatttcaggcccaccagcgctatt

SEQ ID NO: 232327 - DNA, 25 bp, Homo sapien
atgctcctacacctgcgctgctgaa

SEQ ID NO: 232328 - DNA, 25 bp, Homo sapien
ctattaccgatcttggacaggtcca

SEQ ID NO: 232329 - DNA, 25 bp, Homo sapien
caccagcgctattaccgatcttgga

SEQ ID NO: 232330 - DNA, 25 bp, Homo sapien
tgagaaagtcatacacagggcctcc

SEQ ID NO: 232331 - DNA, 25 bp, Homo sapien
aagggccatgcaaggtcccctaagc

SEQ ID NO: 232332 - DNA, 25 bp, Homo sapien
catgcctcaggaagttggctttgcc

SEQ ID NO: 232333 - DNA, 25 bp, Homo sapien
aagttcaaggcaatcccactaccga

SEQ ID NO: 232334 - DNA, 25 bp, Homo sapien
tttcctttcccttctgcgttctcac

SEQ ID NO: 232335 - DNA, 25 bp, Homo sapien
cctgttttctgcccagtgtttcctt

SEQ ID NO: 232336 - DNA, 25 bp, Homo sapien
tgcccagtgtttcctttcccttctg

SEQ ID NO: 232337 - DNA, 25 bp, Homo sapien
gtttcctttcccttctgcgttctca

SEQ ID NO: 232338 - DNA, 25 bp, Homo sapien
ccttccatcgtctctagcaactgct

SEQ ID NO: 232339 - DNA, 25 bp, Homo sapien
cctctctcatcaggctctctttgtg

SEQ ID NO: 232340 - DNA, 25 bp, Homo sapien
tccatcgtctctagcaactgctcca

SEQ ID NO: 232341 - DNA, 25 bp, Homo sapien
ctcatcaggctctctttgtgcagct

SEQ ID NO: 232342 - DNA, 25 bp, Homo sapien
tctaggtgccttcatacaagaggaa

SEQ ID NO: 232343 - DNA, 25 bp, Homo sapien
tcagtgtgatcaaagtccaaagccc

SEQ ID NO: 232344 - DNA, 25 bp, Homo sapien
gccacaagggacataggagacctct

SEQ ID NO: 232345 - DNA, 25 bp, Homo sapien
caggctcagtggacacctttcagaa

SEQ ID NO: 232346 - DNA, 25 bp, Homo sapien
ttcatggattgctttgcgctcctcc

SEQ ID NO: 232347 - DNA, 25 bp, Homo sapien
ggtttctcttcatggattgctttgc

SEQ ID NO: 232348 - DNA, 25 bp, Homo sapien
ttaaggtttctcttcatggattgct

SEQ ID NO: 232349 - DNA, 25 bp, Homo sapien
catggattgctttgcgctcctcctc

SEQ ID NO: 232350 - DNA, 25 bp, Homo sapien
cataggtctgctgaatcgacggagc

SEQ ID NO: 232351 - DNA, 25 bp, Homo sapien
aatagacaggcagcattgacgaagc

SEQ ID NO: 232352 - DNA, 25 bp, Homo sapien
tttaaagcaccatgaaatcctacgg

SEQ ID NO: 232353 - DNA, 25 bp, Homo sapien
gatgcacccacaatcacaggctatg

SEQ ID NO: 232354 - DNA, 25 bp, Homo sapien
cctccagatttgtcatgcaagaaaa

SEQ ID NO: 232355 - DNA, 25 bp, Homo sapien
tgaagcaaaagacagcccccactga

SEQ ID NO: 232356 - DNA, 25 bp, Homo sapien
cactgaagatggtggacgtgtgctc

SEQ ID NO: 232357 - DNA, 25 bp, Homo sapien
gtgcctgcttgccagtgaagcaaaa

SEQ ID NO: 232358 - DNA, 25 bp, Homo sapien
tcaagtaacttcaaaccaactggcc

SEQ ID NO: 232359 - DNA, 25 bp, Homo sapien
cccagcccaaggttatgtttgatcc

SEQ ID NO: 232360 - DNA, 25 bp, Homo sapien
gaccttgtgccctcttggtggtgga

SEQ ID NO: 232361 - DNA, 25 bp, Homo sapien
cacaaggatgcatgacacagacact

SEQ ID NO: 232362 - DNA, 25 bp, Homo sapien
tgtggactacctacccctgtgagaa

SEQ ID NO: 232363 - DNA, 25 bp, Homo sapien
tcctctgcgggatgttctagcctca

SEQ ID NO: 232364 - DNA, 25 bp, Homo sapien
gaagggtctcataagcaatgccaga

SEQ ID NO: 232365 - DNA, 25 bp, Homo sapien
cgtgtggcccaaagagctagctgtg

SEQ ID NO: 232366 - DNA, 25 bp, Homo sapien
gtaatgagttgttctccggctcccg

SEQ ID NO: 232367 - DNA, 25 bp, Homo sapien
tggatacagtccgtcagcatggctg

SEQ ID NO: 232368 - DNA, 25 bp, Homo sapien
tctggaggtggacccgaacttgttg

SEQ ID NO: 232369 - DNA, 25 bp, Homo sapien
gattttctgaacgtcctcgggcaag

SEQ ID NO: 232370 - DNA, 25 bp, Homo sapien
accccaagaagcctcagatttggag

SEQ ID NO: 232371 - DNA, 25 bp, Homo sapien
gacttaaagagagggggacggcatc

SEQ ID NO: 232372 - DNA, 25 bp, Homo sapien
ggtgggcaaccccaagaagcctcag

SEQ ID NO: 232373 - DNA, 25 bp, Homo sapien
tggagatggtgacttaaagagaggg

SEQ ID NO: 232374 - DNA, 25 bp, Homo sapien
ccaatctccgatcatactgaggaca

SEQ ID NO: 232375 - DNA, 25 bp, Homo sapien
gaacccgtagccaatctccgatcat

SEQ ID NO: 232376 - DNA, 25 bp, Homo sapien
tggacagaacccgtagccaatctcc

SEQ ID NO: 232377 - DNA, 25 bp, Homo sapien
tctttttggacagaacccgtagcca

SEQ ID NO: 232378 - DNA, 25 bp, Homo sapien
tgcaaagtaggcaaggccaacaagg

SEQ ID NO: 232379 - DNA, 25 bp, Homo sapien
gggcttataccactcccgataattg

SEQ ID NO: 232380 - DNA, 25 bp, Homo sapien
ccgataattgatgccagcgtttccc

SEQ ID NO: 232381 - DNA, 25 bp, Homo sapien
gccaacaaggatccaaaaccacact

SEQ ID NO: 232382 - DNA, 25 bp, Homo sapien
catgaggctcgacagctgctgccac

SEQ ID NO: 232383 - DNA, 25 bp, Homo sapien
taggatacgatctgagttcccgcac

SEQ ID NO: 232384 - DNA, 25 bp, Homo sapien
ctgcatcattagagctgtaggatac

SEQ ID NO: 232385 - DNA, 25 bp, Homo sapien
cccccttcggtttggtgcagctgct

SEQ ID NO: 232386 - DNA, 25 bp, Homo sapien
tgccaagcccccttcggtttggtgc

SEQ ID NO: 232387 - DNA, 25 bp, Homo sapien
gcaagtcactattacccagcaaaga

SEQ ID NO: 232388 - DNA, 25 bp, Homo sapien
tcatttcgtttctgtgctacgccag

SEQ ID NO: 232389 - DNA, 25 bp, Homo sapien
ccagcaaagatggtcactagggtgc

SEQ ID NO: 232390 - DNA, 25 bp, Homo sapien
tacgccagagaaatctgtagctttc

SEQ ID NO: 232391 - DNA, 25 bp, Homo sapien
gtccagccctcgatgtacttaaaga

SEQ ID NO: 232392 - DNA, 25 bp, Homo sapien
caaagtaaatggactccaaggccgt

SEQ ID NO: 232393 - DNA, 25 bp, Homo sapien
gacagcagggatcgtcacaaacaca

SEQ ID NO: 232394 - DNA, 25 bp, Homo sapien
caaagcccaccgtggtcagagtgac

SEQ ID NO: 232395 - DNA, 25 bp, Homo sapien
tggacaccaggtcaaacaaacaaaa

SEQ ID NO: 232396 - DNA, 25 bp, Homo sapien
ccctgaagcctgttcgtggacacca

SEQ ID NO: 232397 - DNA, 25 bp, Homo sapien
gaggaaatttgatgaacgctgtgaa

SEQ ID NO: 232398 - DNA, 25 bp, Homo sapien
caagtggtctaggaggttctcaggc

SEQ ID NO: 232399 - DNA, 25 bp, Homo sapien
tgcctttcgaaagggctcgctgcat

SEQ ID NO: 232400 - DNA, 25 bp, Homo sapien
aagtgtggccgacgacgaagaagac

SEQ ID NO: 232401 - DNA, 25 bp, Homo sapien
ttcacgcagaccgaatggcaacggc

SEQ ID NO: 232402 - DNA, 25 bp, Homo sapien
gagcacatctgcgtgaacacttgca

SEQ ID NO: 232403 - DNA, 25 bp, Homo sapien
cgcggccagtgcatcttctcctccc

SEQ ID NO: 232404 - DNA, 25 bp, Homo sapien
ggccagtgcatcttctcctcccaag

SEQ ID NO: 232405 - DNA, 25 bp, Homo sapien
cagtgcatcttctcctcccaaggcc

SEQ ID NO: 232406 - DNA, 25 bp, Homo sapien
gtgcatcttctcctcccaaggccat

SEQ ID NO: 232407 - DNA, 25 bp, Homo sapien
acctcacccaagtaatttgaatctt

SEQ ID NO: 232408 - DNA, 25 bp, Homo sapien
ccacctcacccaagtaatttgaatc

SEQ ID NO: 232409 - DNA, 25 bp, Homo sapien
ttaccacctcacccaagtaatttga

SEQ ID NO: 232410 - DNA, 25 bp, Homo sapien
taccacctcacccaagtaatttgaa

SEQ ID NO: 232411 - DNA, 25 bp, Homo sapien
aaagaatcttgatctttgatggtgc

SEQ ID NO: 232412 - DNA, 25 bp, Homo sapien
tggaattcggtcaccctttccaata

SEQ ID NO: 232413 - DNA, 25 bp, Homo sapien
caaatgcattcattgtgcactgcca

SEQ ID NO: 232414 - DNA, 25 bp, Homo sapien
ataatatgcaactgtctcgccttcc

SEQ ID NO: 232415 - DNA, 25 bp, Homo sapien
ggccaccattcctagatcctggaaa

SEQ ID NO: 232416 - DNA, 25 bp, Homo sapien
tttggccaccattcctagatcctgg

SEQ ID NO: 232417 - DNA, 25 bp, Homo sapien
gctgatctgcctttggccaccattc

SEQ ID NO: 232418 - DNA, 25 bp, Homo sapien
tctgcctttggccaccattcctaga

SEQ ID NO: 232419 - DNA, 25 bp, Homo sapien
atgcccctgatactgcctcctggat

SEQ ID NO: 232420 - DNA, 25 bp, Homo sapien
gatactgcctcctggatcctgtcag

SEQ ID NO: 232421 - DNA, 25 bp, Homo sapien
gcctcctggatcctgtcaggctaaa

SEQ ID NO: 232422 - DNA, 25 bp, Homo sapien
ctggatcctgtcaggctaaagccaa

SEQ ID NO: 232423 - DNA, 25 bp, Homo sapien
tggatcacagtggttagaatttaaa

SEQ ID NO: 232424 - DNA, 25 bp, Homo sapien
gatcacagtggttagaatttaaata

SEQ ID NO: 232425 - DNA, 25 bp, Homo sapien
cagtggttagaatttaaatatgaca

SEQ ID NO: 232426 - DNA, 25 bp, Homo sapien
cacagtggttagaatttaaatatga

SEQ ID NO: 232427 - DNA, 25 bp, Homo sapien
cagtgctcggagcaatattcccata

SEQ ID NO: 232428 - DNA, 25 bp, Homo sapien
aaagatggttccaagttggtctcca

SEQ ID NO: 232429 - DNA, 25 bp, Homo sapien
tccagccaataagaaaccaaagagt

SEQ ID NO: 232430 - DNA, 25 bp, Homo sapien
gagtggaattccaaagatggcatat

SEQ ID NO: 232431 - DNA, 25 bp, Homo sapien
ctttcaggaacttggacaaaatcat

SEQ ID NO: 232432 - DNA, 25 bp, Homo sapien
taagctgacctaacctggcctagag

SEQ ID NO: 232433 - DNA, 25 bp, Homo sapien
tatactaaatggtgtcaggccaccc

SEQ ID NO: 232434 - DNA, 25 bp, Homo sapien
tctcaaaaggcatagctgggcttca

SEQ ID NO: 232435 - DNA, 25 bp, Homo sapien
aattctaggcagaacaacccaaggg

SEQ ID NO: 232436 - DNA, 25 bp, Homo sapien
gagatattagcaaacaaacgggtac

SEQ ID NO: 232437 - DNA, 25 bp, Homo sapien
ggctgctgttgttggaagagtttcc

SEQ ID NO: 232438 - DNA, 25 bp, Homo sapien
ccgcattgtcagcatcaagagcatg

SEQ ID NO: 232439 - DNA, 25 bp, Homo sapien
tcctattggactgactcccgcattg

SEQ ID NO: 232440 - DNA, 25 bp, Homo sapien
ggtcgtaatgacagttccagcaaag

SEQ ID NO: 232441 - DNA, 25 bp, Homo sapien
gtggcttttctcctatgatctgtgc

SEQ ID NO: 232442 - DNA, 25 bp, Homo sapien
catcatgagcgttagtgctgcactg

SEQ ID NO: 232443 - DNA, 25 bp, Homo sapien
tgcactcggtgagatcatctgtttc

SEQ ID NO: 232444 - DNA, 25 bp, Homo sapien
gggaccactaactgtctgtggcttt

SEQ ID NO: 232445 - DNA, 25 bp, Homo sapien
tccatcttccaagcctcgcttaaag

SEQ ID NO: 232446 - DNA, 25 bp, Homo sapien
aaaggtcctctaagcacctcctcag

SEQ ID NO: 232447 - DNA, 25 bp, Homo sapien
gcctcgcttaaagctttcagtgact

SEQ ID NO: 232448 - DNA, 25 bp, Homo sapien
aacataaaggtcctctaagcacctc

SEQ ID NO: 232449 - DNA, 25 bp, Homo sapien
tcacccacatacctggtggcctctt

SEQ ID NO: 232450 - DNA, 25 bp, Homo sapien
caaagatggcaaccaccgtcttcca

SEQ ID NO: 232451 - DNA, 25 bp, Homo sapien
catgatcccgcaggaattccgcctt

SEQ ID NO: 232452 - DNA, 25 bp, Homo sapien
tccaaggcgatggtattcttctggc

SEQ ID NO: 232453 - DNA, 25 bp, Homo sapien
gacaagaccgccagtgacaaggtag

SEQ ID NO: 232454 - DNA, 25 bp, Homo sapien
agtggcgctcttgggctggcacacc

SEQ ID NO: 232455 - DNA, 25 bp, Homo sapien
ttgcccgttagtggcgctcttgggc

SEQ ID NO: 232456 - DNA, 25 bp, Homo sapien
gggttgcccgttagtggcgctcttg

SEQ ID NO: 232457 - DNA, 25 bp, Homo sapien
aggaaatggacaggcgcggagttgg

SEQ ID NO: 232458 - DNA, 25 bp, Homo sapien
caaatgtgaggatgaaacgctggtt

SEQ ID NO: 232459 - DNA, 25 bp, Homo sapien
atgtcttctttgagccagctttcaa

SEQ ID NO: 232460 - DNA, 25 bp, Homo sapien
aggatgaaacgctggttcaccaagc

SEQ ID NO: 232461 - DNA, 25 bp, Homo sapien
tcttctttgagccagctttcaaatg

SEQ ID NO: 232462 - DNA, 25 bp, Homo sapien
ctgggcagaattgggcttgagaaac

SEQ ID NO: 232463 - DNA, 25 bp, Homo sapien
ccaagcttctagcatccctgaggct

SEQ ID NO: 232464 - DNA, 25 bp, Homo sapien
ttcccaagcttctagcatccctgag

SEQ ID NO: 232465 - DNA, 25 bp, Homo sapien
cttgagaaacgtctcttcaggccag

SEQ ID NO: 232466 - DNA, 25 bp, Homo sapien
tcctgtcccccttaaatccatcctc

SEQ ID NO: 232467 - DNA, 25 bp, Homo sapien
atcactgcgacagccttcagtcctg

SEQ ID NO: 232468 - DNA, 25 bp, Homo sapien
gaatcactgcgacagccttcagtcc

SEQ ID NO: 232469 - DNA, 25 bp, Homo sapien
ctgaatcactgcgacagccttcagt

SEQ ID NO: 232470 - DNA, 25 bp, Homo sapien
tgaaggcgccaccaacattcagagt

SEQ ID NO: 232471 - DNA, 25 bp, Homo sapien
tctctcaggtgtcagtgtgatcaca

SEQ ID NO: 232472 - DNA, 25 bp, Homo sapien
catgtacatggtgtgtcactctctc

SEQ ID NO: 232473 - DNA, 25 bp, Homo sapien
cagagtaaagtgcaggctccatgcc

SEQ ID NO: 232474 - DNA, 25 bp, Homo sapien
gactgcagagttaatcctgcatatg

SEQ ID NO: 232475 - DNA, 25 bp, Homo sapien
gaaactttgactgcagagttaatcc

SEQ ID NO: 232476 - DNA, 25 bp, Homo sapien
tcctgcatatggaagcacccctggc

SEQ ID NO: 232477 - DNA, 25 bp, Homo sapien
ctggcactattgtggttttttccca

SEQ ID NO: 232478 - DNA, 25 bp, Homo sapien
tggtttgtacaagcgctagagtgga

SEQ ID NO: 232479 - DNA, 25 bp, Homo sapien
tgggctccaaacactcagttcgggc

SEQ ID NO: 232480 - DNA, 25 bp, Homo sapien
agtattttacttcactgggctccaa

SEQ ID NO: 232481 - DNA, 25 bp, Homo sapien
tacaagcgctagagtggacagacaa

SEQ ID NO: 232482 - DNA, 25 bp, Homo sapien
taaactgtgatttgaggacccaaaa

SEQ ID NO: 232483 - DNA, 25 bp, Homo sapien
gggccaaactgcataaactgtgatt

SEQ ID NO: 232484 - DNA, 25 bp, Homo sapien
caaactgcataaactgtgatttgag

SEQ ID NO: 232485 - DNA, 25 bp, Homo sapien
actgcataaactgtgatttgaggac

SEQ ID NO: 232486 - DNA, 25 bp, Homo sapien
agcaccattcacaaggcctgaccca

SEQ ID NO: 232487 - DNA, 25 bp, Homo sapien
actataccatagcagcattttgctg

SEQ ID NO: 232488 - DNA, 25 bp, Homo sapien
gcctgatgacttcagtactatacca

SEQ ID NO: 232489 - DNA, 25 bp, Homo sapien
tcagtactataccatagcagcattt

SEQ ID NO: 232490 - DNA, 25 bp, Homo sapien
tgactgtggtggagccaaaagcagc

SEQ ID NO: 232491 - DNA, 25 bp, Homo sapien
aaggagtgtgcacaaggagggaaaa

SEQ ID NO: 232492 - DNA, 25 bp, Homo sapien
gagtgtgcacaaggagggaaaagga

SEQ ID NO: 232493 - DNA, 25 bp, Homo sapien
ggagtgtgcacaaggagggaaaagg

SEQ ID NO: 232494 - DNA, 25 bp, Homo sapien
ttctgcagtgggaataccaaatctc

SEQ ID NO: 232495 - DNA, 25 bp, Homo sapien
gcctaaaggtatgcccaggagagtc

SEQ ID NO: 232496 - DNA, 25 bp, Homo sapien
tgaggaaatttccagtgggccaccc

SEQ ID NO: 232497 - DNA, 25 bp, Homo sapien
caaagctgctcgttatgcgttcatc

SEQ ID NO: 232498 - DNA, 25 bp, Homo sapien
tcactcagctgaccagtggcagagc

SEQ ID NO: 232499 - DNA, 25 bp, Homo sapien
gacctgtcaggcctacatctcactt

SEQ ID NO: 232500 - DNA, 25 bp, Homo sapien
ttacatggcagagattggacctgtc

SEQ ID NO: 232501 - DNA, 25 bp, Homo sapien
gagctgatatcagatggcttatcta

SEQ ID NO: 232502 - DNA, 25 bp, Homo sapien
ttttcatgctgcatggatcactcac

SEQ ID NO: 232503 - DNA, 25 bp, Homo sapien
gagaggttgagcatcccctcactcc

SEQ ID NO: 232504 - DNA, 25 bp, Homo sapien
cagcaccagggtttgttctgaagat

SEQ ID NO: 232505 - DNA, 25 bp, Homo sapien
gaaaactgccaatcagctgtggatt

SEQ ID NO: 232506 - DNA, 25 bp, Homo sapien
gagccattagcctgcctgagaggtt

SEQ ID NO: 232507 - DNA, 25 bp, Homo sapien
gggagtatggccactgttaataatc

SEQ ID NO: 232508 - DNA, 25 bp, Homo sapien
gagtatggccactgttaataatcat

SEQ ID NO: 232509 - DNA, 25 bp, Homo sapien
tgggagtatggccactgttaataat

SEQ ID NO: 232510 - DNA, 25 bp, Homo sapien
ggagtatggccactgttaataatca

SEQ ID NO: 232511 - DNA, 25 bp, Homo sapien
acctgttttcttggcgtctcgattg

SEQ ID NO: 232512 - DNA, 25 bp, Homo sapien
taggatcccagttcacctgttttct

SEQ ID NO: 232513 - DNA, 25 bp, Homo sapien
cttggcgtctcgattggaaatttca

SEQ ID NO: 232514 - DNA, 25 bp, Homo sapien
ctttaggatcccagttcacctgttt

SEQ ID NO: 232515 - DNA, 25 bp, Homo sapien
agtcctcaagctttacacgcctcgg

SEQ ID NO: 232516 - DNA, 25 bp, Homo sapien
cggtttagcagtccaacaaaacaat

SEQ ID NO: 232517 - DNA, 25 bp, Homo sapien
tcccaaaagcggtgccggcaggtta

SEQ ID NO: 232518 - DNA, 25 bp, Homo sapien
gacaggtgggaaaatattagcttgg

SEQ ID NO: 232519 - DNA, 25 bp, Homo sapien
ttgggcgggcacgtcagcctcgctc

SEQ ID NO: 232520 - DNA, 25 bp, Homo sapien
gctcggccgcgctgagcgcacacgc

SEQ ID NO: 232521 - DNA, 25 bp, Homo sapien
gtcagcctcgctcggccgcgctgag

SEQ ID NO: 232522 - DNA, 25 bp, Homo sapien
ggcgcgcgcttgggcgggcacgtca

SEQ ID NO: 232523 - DNA, 25 bp, Homo sapien
cgcgcttgctggagttgcagccgga

SEQ ID NO: 232524 - DNA, 25 bp, Homo sapien
cggagacacgcttggttgcctggaa

SEQ ID NO: 232525 - DNA, 25 bp, Homo sapien
acacgcttggttgcctggaaggcgc

SEQ ID NO: 232526 - DNA, 25 bp, Homo sapien
agttgcagccggagacacgcttggt

SEQ ID NO: 232527 - DNA, 25 bp, Homo sapien
gaaagaaagaagtctgtgtagagaa

SEQ ID NO: 232528 - DNA, 25 bp, Homo sapien
caaggaaagaaagaagtctgtgtag

SEQ ID NO: 232529 - DNA, 25 bp, Homo sapien
agaagtctgtgtagagaaaaaacat

SEQ ID NO: 232530 - DNA, 25 bp, Homo sapien
aagaagtctgtgtagagaaaaaaca

SEQ ID NO: 232531 - DNA, 25 bp, Homo sapien
acaaaacatcgtggcgcaaagtctc

SEQ ID NO: 232532 - DNA, 25 bp, Homo sapien
actttaatgaatgccgtgtggcccg

SEQ ID NO: 232533 - DNA, 25 bp, Homo sapien
aaagagactgcctagcgttcctgcg

SEQ ID NO: 232534 - DNA, 25 bp, Homo sapien
catctctggcaacgaagtttccccg

SEQ ID NO: 232535 - DNA, 25 bp, Homo sapien
aatggcagggagtgatgaagcagct

SEQ ID NO: 232536 - DNA, 25 bp, Homo sapien
gcttggggaatcctctttagtgcca

SEQ ID NO: 232537 - DNA, 25 bp, Homo sapien
aatttcctgggacagcgaatggcag

SEQ ID NO: 232538 - DNA, 25 bp, Homo sapien
agaagagtcgaacacggattccggg

SEQ ID NO: 232539 - DNA, 25 bp, Homo sapien
agctgagactcatgcctacccaaat

SEQ ID NO: 232540 - DNA, 25 bp, Homo sapien
cagtcatgtattttacaccattttt

SEQ ID NO: 232541 - DNA, 25 bp, Homo sapien
taaggataagcttaaatagcccatc

SEQ ID NO: 232542 - DNA, 25 bp, Homo sapien
gatagagacctctatttttagctgt

SEQ ID NO: 232543 - DNA, 25 bp, Homo sapien
tatgtcccagggaggttgccgatag

SEQ ID NO: 232544 - DNA, 25 bp, Homo sapien
agtcaatactagaatctctagcagc

SEQ ID NO: 232545 - DNA, 25 bp, Homo sapien
cacctggaatgaatgcctgaagcca

SEQ ID NO: 232546 - DNA, 25 bp, Homo sapien
gaggttgccgataggatggtgtgct

SEQ ID NO: 232547 - DNA, 25 bp, Homo sapien
gatcaccaccaaactttctatcttg

SEQ ID NO: 232548 - DNA, 25 bp, Homo sapien
acagaggaagtctttctgtacccag

SEQ ID NO: 232549 - DNA, 25 bp, Homo sapien
ggaagtctttctgtacccagatcac

SEQ ID NO: 232550 - DNA, 25 bp, Homo sapien
cattcactctgcatcttataaataa

SEQ ID NO: 232551 - DNA, 25 bp, Homo sapien
cactcgggtaaatttatgtgtcagg

SEQ ID NO: 232552 - DNA, 25 bp, Homo sapien
catgtgtttacgtttcactcgggta

SEQ ID NO: 232553 - DNA, 25 bp, Homo sapien
aatcatgtatcgttttgggtctggc

SEQ ID NO: 232554 - DNA, 25 bp, Homo sapien
gagttgaccagttgtaacagactgt

SEQ ID NO: 232555 - DNA, 25 bp, Homo sapien
tgctgcatgtcctgaaagtagactt

SEQ ID NO: 232556 - DNA, 25 bp, Homo sapien
ctgctgcatgtcctgaaagtagact

SEQ ID NO: 232557 - DNA, 25 bp, Homo sapien
tgcatgtcctgaaagtagacttagg

SEQ ID NO: 232558 - DNA, 25 bp, Homo sapien
gctgcatgtcctgaaagtagactta

SEQ ID NO: 232559 - DNA, 25 bp, Homo sapien
cagacagtttaacagatcgggaaac

SEQ ID NO: 232560 - DNA, 25 bp, Homo sapien
ggcgacaataatcatgacatggagt

SEQ ID NO: 232561 - DNA, 25 bp, Homo sapien
tcattgaaggtgatagtgaccctga

SEQ ID NO: 232562 - DNA, 25 bp, Homo sapien
agttctccagtgtcaaaggcgacaa

SEQ ID NO: 232563 - DNA, 25 bp, Homo sapien
aaaattacatggctcttaggaatga

SEQ ID NO: 232564 - DNA, 25 bp, Homo sapien
gacgccaaacatgcaacattttaag

SEQ ID NO: 232565 - DNA, 25 bp, Homo sapien
tatcaaattattacaacaggaacac

SEQ ID NO: 232566 - DNA, 25 bp, Homo sapien
atattcactaactgcaattaaaagt

SEQ ID NO: 232567 - DNA, 25 bp, Homo sapien
aacggagtaagtcactggcggtcac

SEQ ID NO: 232568 - DNA, 25 bp, Homo sapien
cagagttaggctggtgcacacacta

SEQ ID NO: 232569 - DNA, 25 bp, Homo sapien
tttgtaaagacgaaggcatcctgca

SEQ ID NO: 232570 - DNA, 25 bp, Homo sapien
ggaagtcctgtctcgtggctgacaa

SEQ ID NO: 232571 - DNA, 25 bp, Homo sapien
taatgattgccagaattgcccagca

SEQ ID NO: 232572 - DNA, 25 bp, Homo sapien
tgtgcttcgcacgtttccttcagcg

SEQ ID NO: 232573 - DNA, 25 bp, Homo sapien
cacgctgcgtggatcaagtgtcaac

SEQ ID NO: 232574 - DNA, 25 bp, Homo sapien
tgcaagtactgcaaaccggacagac

SEQ ID NO: 232575 - DNA, 25 bp, Homo sapien
aagctgtaaacgcttcacatgactg

SEQ ID NO: 232576 - DNA, 25 bp, Homo sapien
gcttcacatgactggccccgtaaga

SEQ ID NO: 232577 - DNA, 25 bp, Homo sapien
aaacgcttcacatgactggccccgt

SEQ ID NO: 232578 - DNA, 25 bp, Homo sapien
tgtaaacgcttcacatgactggccc

SEQ ID NO: 232579 - DNA, 25 bp, Homo sapien
ccagcatcattctctgttgcctcag

SEQ ID NO: 232580 - DNA, 25 bp, Homo sapien
ctctgtacacaaatgtgtactggca

SEQ ID NO: 232581 - DNA, 25 bp, Homo sapien
atgtccagcactctcgggatgtcca

SEQ ID NO: 232582 - DNA, 25 bp, Homo sapien
gcagagagtctgcaccagcatcatt

SEQ ID NO: 232583 - DNA, 25 bp, Homo sapien
agaaacggtaatgaagataatgtgt

SEQ ID NO: 232584 - DNA, 25 bp, Homo sapien
gagagaaacggtaatgaagataatg

SEQ ID NO: 232585 - DNA, 25 bp, Homo sapien
ttgagagaaacggtaatgaagataa

SEQ ID NO: 232586 - DNA, 25 bp, Homo sapien
gagaaacggtaatgaagataatgtg

SEQ ID NO: 232587 - DNA, 25 bp, Homo sapien
ggccaggtgatcataagcgccatca

SEQ ID NO: 232588 - DNA, 25 bp, Homo sapien
aaggccaggtgatcataagcgccat

SEQ ID NO: 232589 - DNA, 25 bp, Homo sapien
aaaaggccaggtgatcataagcgcc

SEQ ID NO: 232590 - DNA, 25 bp, Homo sapien
gccaggtgatcataagcgccatcac

SEQ ID NO: 232591 - DNA, 25 bp, Homo sapien
aaatcaccacgccagtccttcctac

SEQ ID NO: 232592 - DNA, 25 bp, Homo sapien
catgatctccgacaaaatcaccacg

SEQ ID NO: 232593 - DNA, 25 bp, Homo sapien
gtgttccaggcaggcgatcatgatc

SEQ ID NO: 232594 - DNA, 25 bp, Homo sapien
ggcaggcgatcatgatctccgacaa

SEQ ID NO: 232595 - DNA, 25 bp, Homo sapien
gcagtggaccaacaacggagggttg

SEQ ID NO: 232596 - DNA, 25 bp, Homo sapien
tgcagtggaccaacaacggagggtt

SEQ ID NO: 232597 - DNA, 25 bp, Homo sapien
cagtggaccaacaacggagggttgg

SEQ ID NO: 232598 - DNA, 25 bp, Homo sapien
tgtatggcgtcgaacagactggatc

SEQ ID NO: 232599 - DNA, 25 bp, Homo sapien
tggcgtcgaacagactggatctctt

SEQ ID NO: 232600 - DNA, 25 bp, Homo sapien
ttgtgctatttgtatggcgtcgaac

SEQ ID NO: 232601 - DNA, 25 bp, Homo sapien
tatttgtatggcgtcgaacagactg

SEQ ID NO: 232602 - DNA, 25 bp, Homo sapien
tggacagccatgttcaggccagtct

SEQ ID NO: 232603 - DNA, 25 bp, Homo sapien
tgtgcctggaaccaagtcgtggcca

SEQ ID NO: 232604 - DNA, 25 bp, Homo sapien
tgcggaaccgggtcgtgatcttaaa

SEQ ID NO: 232605 - DNA, 25 bp, Homo sapien
tcaggcctgtggtggcatagcagcc

SEQ ID NO: 232606 - DNA, 25 bp, Homo sapien
atgattaacattaactgttcttcag

SEQ ID NO: 232607 - DNA, 25 bp, Homo sapien
ctgagaaaatcacttaagagaaata

SEQ ID NO: 232608 - DNA, 25 bp, Homo sapien
gatgattaacattaactgttcttca

SEQ ID NO: 232609 - DNA, 25 bp, Homo sapien
tgccaaaaatcttgacaggtattct

SEQ ID NO: 232610 - DNA, 25 bp, Homo sapien
cccattcgattccactgacagagac

SEQ ID NO: 232611 - DNA, 25 bp, Homo sapien
gtccctgtgtggcaatataatccca

SEQ ID NO: 232612 - DNA, 25 bp, Homo sapien
tgacaggtattctgtaatggtccct

SEQ ID NO: 232613 - DNA, 25 bp, Homo sapien
gtggatgagtaccaggttataacag

SEQ ID NO: 232614 - DNA, 25 bp, Homo sapien
gatgagtaccaggttataacagtga

SEQ ID NO: 232615 - DNA, 25 bp, Homo sapien
gctccacatcgtctcactgagcacc

SEQ ID NO: 232616 - DNA, 25 bp, Homo sapien
gagtaccaggttataacagtgaata

SEQ ID NO: 232617 - DNA, 25 bp, Homo sapien
tccttgttctaatcgttgttccaga

SEQ ID NO: 232618 - DNA, 25 bp, Homo sapien
cgtgctgttgagcactccccatcaa

SEQ ID NO: 232619 - DNA, 25 bp, Homo sapien
tctttagttgggaccaactccactc

SEQ ID NO: 232620 - DNA, 25 bp, Homo sapien
tatgtgatgcgttgatgtaaccagt

SEQ ID NO: 232621 - DNA, 25 bp, Homo sapien
cattcgttgctctggtagccacttc

SEQ ID NO: 232622 - DNA, 25 bp, Homo sapien
tttttgcatctactcgagtcttttt

SEQ ID NO: 232623 - DNA, 25 bp, Homo sapien
gcactcgagatagggagagtccatt

SEQ ID NO: 232624 - DNA, 25 bp, Homo sapien
gagagtccatttagggcagccagtt

SEQ ID NO: 232625 - DNA, 25 bp, Homo sapien
cacacagagggagtgttctcctttg

SEQ ID NO: 232626 - DNA, 25 bp, Homo sapien
acacaaatacaacccctgtgaaaag

SEQ ID NO: 232627 - DNA, 25 bp, Homo sapien
tatacacaaatacaacccctgtgaa

SEQ ID NO: 232628 - DNA, 25 bp, Homo sapien
acagagggagtgttctcctttgcca

SEQ ID NO: 232629 - DNA, 25 bp, Homo sapien
gagctgaaaaacacgggacgtgatg

SEQ ID NO: 232630 - DNA, 25 bp, Homo sapien
ccggcactgctcgccgcgtggctta

SEQ ID NO: 232631 - DNA, 25 bp, Homo sapien
aagcgccagggcgaacgcgcggtcc

SEQ ID NO: 232632 - DNA, 25 bp, Homo sapien
atgagtgaaagaagcgccagggcga

SEQ ID NO: 232633 - DNA, 25 bp, Homo sapien
gcgggagcccttccacgatgttctt

SEQ ID NO: 232634 - DNA, 25 bp, Homo sapien
ctccgacatggagggcatcagcagc

SEQ ID NO: 232635 - DNA, 25 bp, Homo sapien
tcttcccagagagaaggtccgacac

SEQ ID NO: 232636 - DNA, 25 bp, Homo sapien
cgacaccggccttttcttcagagag

SEQ ID NO: 232637 - DNA, 25 bp, Homo sapien
caggggcccggcgagcaggacgcga

SEQ ID NO: 232638 - DNA, 25 bp, Homo sapien
gaggctcgcgcgcacgtgcaggagg

SEQ ID NO: 232639 - DNA, 25 bp, Homo sapien
tggattagcatggtggcgtccgaca

SEQ ID NO: 232640 - DNA, 25 bp, Homo sapien
gctgtggattagcatggtggcgtcc

SEQ ID NO: 232641 - DNA, 25 bp, Homo sapien
tacgagctgccgatgttgaggtttc

SEQ ID NO: 232642 - DNA, 25 bp, Homo sapien
tagacactgccattacggatccgac

SEQ ID NO: 232643 - DNA, 25 bp, Homo sapien
tcctggaacgtttgcaccgagtggt

SEQ ID NO: 232644 - DNA, 25 bp, Homo sapien
tgtcctctcggtgaaaacgctgggc

SEQ ID NO: 232645 - DNA, 25 bp, Homo sapien
tcttataagtcagtgagaaagggct

SEQ ID NO: 232646 - DNA, 25 bp, Homo sapien
aggagtgggcgggtaaccagcaagc

SEQ ID NO: 232647 - DNA, 25 bp, Homo sapien
cagagagtactcttataagtcagtg

SEQ ID NO: 232648 - DNA, 25 bp, Homo sapien
ccagagggccgctttaacagagtgg

SEQ ID NO: 232649 - DNA, 25 bp, Homo sapien
gaagcatatggttctgtataatgtc

SEQ ID NO: 232650 - DNA, 25 bp, Homo sapien
ttgggaagaagcatatggttctgta

SEQ ID NO: 232651 - DNA, 25 bp, Homo sapien
ggaagaagcatatggttctgtataa

SEQ ID NO: 232652 - DNA, 25 bp, Homo sapien
gcatatggttctgtataatgtccat

SEQ ID NO: 232653 - DNA, 25 bp, Homo sapien
gtgggggaggcatcacgtagggctg

SEQ ID NO: 232654 - DNA, 25 bp, Homo sapien
gaggcatcacgtagggctggggttt

SEQ ID NO: 232655 - DNA, 25 bp, Homo sapien
ggggaggcatcacgtagggctgggg

SEQ ID NO: 232656 - DNA, 25 bp, Homo sapien
tgggggaggcatcacgtagggctgg

SEQ ID NO: 232657 - DNA, 25 bp, Homo sapien
tccttgaagaagacctcctcctgat

SEQ ID NO: 232658 - DNA, 25 bp, Homo sapien
cagagacatccttgaagaagacctc

SEQ ID NO: 232659 - DNA, 25 bp, Homo sapien
ctgattgggttcactgtgacagtct

SEQ ID NO: 232660 - DNA, 25 bp, Homo sapien
gaagacctcctcctgattgggttca

SEQ ID NO: 232661 - DNA, 25 bp, Homo sapien
caccgtgaccggccgacatgtgtgg

SEQ ID NO: 232662 - DNA, 25 bp, Homo sapien
ccgtgaccggccgacatgtgtggtt

SEQ ID NO: 232663 - DNA, 25 bp, Homo sapien
cgtgaccggccgacatgtgtggttt

SEQ ID NO: 232664 - DNA, 25 bp, Homo sapien
gaccggccgacatgtgtggttttcc

SEQ ID NO: 232665 - DNA, 25 bp, Homo sapien
cagaaaaagccgctgcctctcctcg

SEQ ID NO: 232666 - DNA, 25 bp, Homo sapien
ccaccaggggtccatgtccccatac

SEQ ID NO: 232667 - DNA, 25 bp, Homo sapien
cctcggctccaccaggggtccatgt

SEQ ID NO: 232668 - DNA, 25 bp, Homo sapien
tcggctccaccaggggtccatgtcc

SEQ ID NO: 232669 - DNA, 25 bp, Homo sapien
ccactgtttggccttgtggctgctc

SEQ ID NO: 232670 - DNA, 25 bp, Homo sapien
ggtcccactgtttggccttgtggct

SEQ ID NO: 232671 - DNA, 25 bp, Homo sapien
ccagaggtcccactgtttggccttg

SEQ ID NO: 232672 - DNA, 25 bp, Homo sapien
gaggtcccactgtttggccttgtgg

SEQ ID NO: 232673 - DNA, 25 bp, Homo sapien
cagacttcctatagtctcttcaagc

SEQ ID NO: 232674 - DNA, 25 bp, Homo sapien
actgggtcctctctacacttctggg

SEQ ID NO: 232675 - DNA, 25 bp, Homo sapien
cttccagacttcctatagtctcttc

SEQ ID NO: 232676 - DNA, 25 bp, Homo sapien
ggaactactgggtcctctctacact

SEQ ID NO: 232677 - DNA, 25 bp, Homo sapien
tgtgtcgcgcaacacagagtctcca

SEQ ID NO: 232678 - DNA, 25 bp, Homo sapien
tgtcgcgcaacacagagtctccaaa

SEQ ID NO: 232679 - DNA, 25 bp, Homo sapien
acttgtgtcgcgcaacacagagtct

SEQ ID NO: 232680 - DNA, 25 bp, Homo sapien
gtaaaacttgtgtcgcgcaacacag

SEQ ID NO: 232681 - DNA, 25 bp, Homo sapien
ctttatttgccagctctaatgcaaa

SEQ ID NO: 232682 - DNA, 25 bp, Homo sapien
aggacttgttgtgggacatgttggc

SEQ ID NO: 232683 - DNA, 25 bp, Homo sapien
acaggatgccttccattcttgtgtt

SEQ ID NO: 232684 - DNA, 25 bp, Homo sapien
ccattcttgtgtttcacaaagatac

SEQ ID NO: 232685 - DNA, 25 bp, Homo sapien
ctaaataccacaggatgccttccat

SEQ ID NO: 232686 - DNA, 25 bp, Homo sapien
accacaggatgccttccattcttgt

SEQ ID NO: 232687 - DNA, 25 bp, Homo sapien
tcaagacacgctccaatggatatgt

SEQ ID NO: 232688 - DNA, 25 bp, Homo sapien
gacacgctccaatggatatgtcact

SEQ ID NO: 232689 - DNA, 25 bp, Homo sapien
aagacacgctccaatggatatgtca

SEQ ID NO: 232690 - DNA, 25 bp, Homo sapien
cttcaagacacgctccaatggatat

SEQ ID NO: 232691 - DNA, 25 bp, Homo sapien
ctcctgcatgtacagcatttcagca

SEQ ID NO: 232692 - DNA, 25 bp, Homo sapien
ctccatagccatccattctctctac

SEQ ID NO: 232693 - DNA, 25 bp, Homo sapien
gcatttcagcatcaggagctgtgag

SEQ ID NO: 232694 - DNA, 25 bp, Homo sapien
atttcagcatcaggagctgtgagcc

SEQ ID NO: 232695 - DNA, 25 bp, Homo sapien
tttctgatgtagtaaggccactttt

SEQ ID NO: 232696 - DNA, 25 bp, Homo sapien
tatttctgatgtagtaaggccactt

SEQ ID NO: 232697 - DNA, 25 bp, Homo sapien
ctgatgtagtaaggccactttttgg

SEQ ID NO: 232698 - DNA, 25 bp, Homo sapien
gtatttctgatgtagtaaggccact

SEQ ID NO: 232699 - DNA, 25 bp, Homo sapien
tctgaagaaagtcctgggattcata

SEQ ID NO: 232700 - DNA, 25 bp, Homo sapien
gattcatactgatcaaagtcaccaa

SEQ ID NO: 232701 - DNA, 25 bp, Homo sapien
cctgggattcatactgatcaaagtc

SEQ ID NO: 232702 - DNA, 25 bp, Homo sapien
aagtcctgggattcatactgatcaa

SEQ ID NO: 232703 - DNA, 25 bp, Homo sapien
gctagctgaattgcttgttctaagg

SEQ ID NO: 232704 - DNA, 25 bp, Homo sapien
tgttctaaggtacaaggaatacttc

SEQ ID NO: 232705 - DNA, 25 bp, Homo sapien
gaacagctaagcctgctagctgaat

SEQ ID NO: 232706 - DNA, 25 bp, Homo sapien
tacaaggaatacttccttccaagat

SEQ ID NO: 232707 - DNA, 25 bp, Homo sapien
aatgttgggactacggacatgaacc

SEQ ID NO: 232708 - DNA, 25 bp, Homo sapien
gagcccctagacagtttcaaacaag

SEQ ID NO: 232709 - DNA, 25 bp, Homo sapien
ggatgagaaagtcctcaaccacatg

SEQ ID NO: 232710 - DNA, 25 bp, Homo sapien
ggctcaggcaatcctagtgcttgga

SEQ ID NO: 232711 - DNA, 25 bp, Homo sapien
tgtcctccgtatctggtgcctgtga

SEQ ID NO: 232712 - DNA, 25 bp, Homo sapien
taaatggaaatcacagacactctgc

SEQ ID NO: 232713 - DNA, 25 bp, Homo sapien
tagtattctgcacgaacttgggcaa

SEQ ID NO: 232714 - DNA, 25 bp, Homo sapien
tgtgaaggaccaagagcatagccgg

SEQ ID NO: 232715 - DNA, 25 bp, Homo sapien
gttattaacagaaatggagccattt

SEQ ID NO: 232716 - DNA, 25 bp, Homo sapien
tccaaacaaggtctacagattacat

SEQ ID NO: 232717 - DNA, 25 bp, Homo sapien
gacttttctgattgtagtctcatgg

SEQ ID NO: 232718 - DNA, 25 bp, Homo sapien
ggcaagtttacatgttctcacatct

SEQ ID NO: 232719 - DNA, 25 bp, Homo sapien
tacacggacaatcctaataacaggg

SEQ ID NO: 232720 - DNA, 25 bp, Homo sapien
ggaggaggtaccttctgaaccacaa

SEQ ID NO: 232721 - DNA, 25 bp, Homo sapien
ccagggtgggattaaagcatattca

SEQ ID NO: 232722 - DNA, 25 bp, Homo sapien
ggtggtaagccaaaactcattctat

SEQ ID NO: 232723 - DNA, 25 bp, Homo sapien
tccccaaccggtctacagaatatag

SEQ ID NO: 232724 - DNA, 25 bp, Homo sapien
ttaaaaaggtcaggtagtgatggga

SEQ ID NO: 232725 - DNA, 25 bp, Homo sapien
tgcttttgtccctattaagtgcact

SEQ ID NO: 232726 - DNA, 25 bp, Homo sapien
aattattcctttgtgcctagtgaac

SEQ ID NO: 232727 - DNA, 25 bp, Homo sapien
gtaaaacactctgacatgccacata

SEQ ID NO: 232728 - DNA, 25 bp, Homo sapien
tacatctcactagactatttcctaa

SEQ ID NO: 232729 - DNA, 25 bp, Homo sapien
gagaatctctttgtaacaccgtggc

SEQ ID NO: 232730 - DNA, 25 bp, Homo sapien
aaacaaacggcatgtaatttctcac

SEQ ID NO: 232731 - DNA, 25 bp, Homo sapien
caaaatagacggtaggttccaatgc

SEQ ID NO: 232732 - DNA, 25 bp, Homo sapien
agtaccagaggctgaagtaagtgac

SEQ ID NO: 232733 - DNA, 25 bp, Homo sapien
gttccaatgcatatttatccagctg

SEQ ID NO: 232734 - DNA, 25 bp, Homo sapien
tacccaccggcgctgattttgcttg

SEQ ID NO: 232735 - DNA, 25 bp, Homo sapien
ttcagtcgcactaatccctgacctg

SEQ ID NO: 232736 - DNA, 25 bp, Homo sapien
aaggatttcaatgacttcagtcgca

SEQ ID NO: 232737 - DNA, 25 bp, Homo sapien
aatgacagcagtctcttattgcctt

SEQ ID NO: 232738 - DNA, 25 bp, Homo sapien
gacagcagtctcttattgcctttct

SEQ ID NO: 232739 - DNA, 25 bp, Homo sapien
tctcaacttcatcactgtttgtgta

SEQ ID NO: 232740 - DNA, 25 bp, Homo sapien
gtgtacctgaattttgtatcctaaa

SEQ ID NO: 232741 - DNA, 25 bp, Homo sapien
cagtctcagctatgactatcagcag

SEQ ID NO: 232742 - DNA, 25 bp, Homo sapien
gctctttctggtgatagtgaataag

SEQ ID NO: 232743 - DNA, 25 bp, Homo sapien
gccataaataatgaagtatcgtact

SEQ ID NO: 232744 - DNA, 25 bp, Homo sapien
tctgccataaataatgaagtatcgt

SEQ ID NO: 232745 - DNA, 25 bp, Homo sapien
cagagtctgccataaataatgaagt

SEQ ID NO: 232746 - DNA, 25 bp, Homo sapien
ctttacagagtctgccataaataat

SEQ ID NO: 232747 - DNA, 25 bp, Homo sapien
atccattcaattcctgaagatgcat

SEQ ID NO: 232748 - DNA, 25 bp, Homo sapien
tcaattcctgaagatgcatcacata

SEQ ID NO: 232749 - DNA, 25 bp, Homo sapien
cattcaattcctgaagatgcatcac

SEQ ID NO: 232750 - DNA, 25 bp, Homo sapien
tcatccattcaattcctgaagatgc

SEQ ID NO: 232751 - DNA, 25 bp, Homo sapien
tgggggaattcccactcatgacctc

SEQ ID NO: 232752 - DNA, 25 bp, Homo sapien
gacagacatggatctaccatcagca

SEQ ID NO: 232753 - DNA, 25 bp, Homo sapien
ccttaatagtaagttgtcccactga

SEQ ID NO: 232754 - DNA, 25 bp, Homo sapien
agtaagttgtcccactgagcaatga

SEQ ID NO: 232755 - DNA, 25 bp, Homo sapien
ctcttggcaggctaaggcaaaagga

SEQ ID NO: 232756 - DNA, 25 bp, Homo sapien
ttgaggatgcattgagctatgacgg

SEQ ID NO: 232757 - DNA, 25 bp, Homo sapien
tgaggatgcattgagctatgacggt

SEQ ID NO: 232758 - DNA, 25 bp, Homo sapien
cagctcttggcaggctaaggcaaaa

SEQ ID NO: 232759 - DNA, 25 bp, Homo sapien
ggcaactcttgctggacaccgtgta

SEQ ID NO: 232760 - DNA, 25 bp, Homo sapien
cagtgctctccacggacagggtgaa

SEQ ID NO: 232761 - DNA, 25 bp, Homo sapien
tattaagcagttggatccgggcaac

SEQ ID NO: 232762 - DNA, 25 bp, Homo sapien
gcgccgggtgcgtttcagtttcaac

SEQ ID NO: 232763 - DNA, 25 bp, Homo sapien
atggaggagcaaagagggaaaagct

SEQ ID NO: 232764 - DNA, 25 bp, Homo sapien
gaggagcaaagagggaaaagctacc

SEQ ID NO: 232765 - DNA, 25 bp, Homo sapien
ggaggagcaaagagggaaaagctac

SEQ ID NO: 232766 - DNA, 25 bp, Homo sapien
gaatggaggagcaaagagggaaaag

SEQ ID NO: 232767 - DNA, 25 bp, Homo sapien
gatgggacgaacactgtccggcctc

SEQ ID NO: 232768 - DNA, 25 bp, Homo sapien
gatcctctccggatgggacgaacac

SEQ ID NO: 232769 - DNA, 25 bp, Homo sapien
gagaaagcgatcctctccggatggg

SEQ ID NO: 232770 - DNA, 25 bp, Homo sapien
gacgccaggagaaagcgatcctctc

SEQ ID NO: 232771 - DNA, 25 bp, Homo sapien
cggagtctccaatggcccgaggaag

SEQ ID NO: 232772 - DNA, 25 bp, Homo sapien
taaaaagcaacggagtctccaatgg

SEQ ID NO: 232773 - DNA, 25 bp, Homo sapien
gccattaaaaagcaacggagtctcc

SEQ ID NO: 232774 - DNA, 25 bp, Homo sapien
agccgctgccgccattaaaaagcaa

SEQ ID NO: 232775 - DNA, 25 bp, Homo sapien
gccttcacctaagcggagccgcggc

SEQ ID NO: 232776 - DNA, 25 bp, Homo sapien
ggccttcacctaagcggagccgcgg

SEQ ID NO: 232777 - DNA, 25 bp, Homo sapien
caggccttcacctaagcggagccgc

SEQ ID NO: 232778 - DNA, 25 bp, Homo sapien
aggccttcacctaagcggagccgcg

SEQ ID NO: 232779 - DNA, 25 bp, Homo sapien
cctgagttaatgagcggccggaggc

SEQ ID NO: 232780 - DNA, 25 bp, Homo sapien
gcggccggaggcaacaaacccaaga

SEQ ID NO: 232781 - DNA, 25 bp, Homo sapien
ctccccttgggaagagcacgcggcg

SEQ ID NO: 232782 - DNA, 25 bp, Homo sapien
gagcacgcggcgttgccaggccaac

SEQ ID NO: 232783 - DNA, 25 bp, Homo sapien
cttcaggaagagaagcggctttcgc

SEQ ID NO: 232784 - DNA, 25 bp, Homo sapien
cacttagggttagggaatggcagac

SEQ ID NO: 232785 - DNA, 25 bp, Homo sapien
gtttcacgctaggacgggctgagct

SEQ ID NO: 232786 - DNA, 25 bp, Homo sapien
accgcgcggagaggcaagatctatt

SEQ ID NO: 232787 - DNA, 25 bp, Homo sapien
tattaaggtccttaccacatgtaat

SEQ ID NO: 232788 - DNA, 25 bp, Homo sapien
ctctcaatcttacagcgtttcccct

SEQ ID NO: 232789 - DNA, 25 bp, Homo sapien
tctcaatcttacagcgtttcccctt

SEQ ID NO: 232790 - DNA, 25 bp, Homo sapien
ttcctattaaggtccttaccacatg

SEQ ID NO: 232791 - DNA, 25 bp, Homo sapien
gcgcgccccgctcagcgacccgcct

SEQ ID NO: 232792 - DNA, 25 bp, Homo sapien
tcccgctcccgcatcctcggggccg

SEQ ID NO: 232793 - DNA, 25 bp, Homo sapien
gccgcagccgcacccgcacgccagc

SEQ ID NO: 232794 - DNA, 25 bp, Homo sapien
cagccgcacccgcacgccagcccgg

SEQ ID NO: 232795 - DNA, 25 bp, Homo sapien
accacacacgcagtacaaggccaaa

SEQ ID NO: 232796 - DNA, 25 bp, Homo sapien
ctgcacaccacacacgcagtacaag

SEQ ID NO: 232797 - DNA, 25 bp, Homo sapien
agtacaaggccaaagtggggagcat

SEQ ID NO: 232798 - DNA, 25 bp, Homo sapien
acaccacacacgcagtacaaggcca

SEQ ID NO: 232799 - DNA, 25 bp, Homo sapien
tatatgagattattaaaggaccacg

SEQ ID NO: 232800 - DNA, 25 bp, Homo sapien
cctgacccctagtgtggattgctta

SEQ ID NO: 232801 - DNA, 25 bp, Homo sapien
tagcttccatatagatgccatagga

SEQ ID NO: 232802 - DNA, 25 bp, Homo sapien
ggaccacgtgacagaccctaggtag

SEQ ID NO: 232803 - DNA, 25 bp, Homo sapien
atcctcccacctctacttcactgag

SEQ ID NO: 232804 - DNA, 25 bp, Homo sapien
cccacctctacttcactgagctgaa

SEQ ID NO: 232805 - DNA, 25 bp, Homo sapien
ctcccacctctacttcactgagctg

SEQ ID NO: 232806 - DNA, 25 bp, Homo sapien
tcctcccacctctacttcactgagc

SEQ ID NO: 232807 - DNA, 25 bp, Homo sapien
tctctcatcaaggctgtagtggcat

SEQ ID NO: 232808 - DNA, 25 bp, Homo sapien
cagacatgttagtgaaccctttggc

SEQ ID NO: 232809 - DNA, 25 bp, Homo sapien
tgaacagacatgttagtgaaccctt

SEQ ID NO: 232810 - DNA, 25 bp, Homo sapien
cttttactggcgtaagtgaacagac

SEQ ID NO: 232811 - DNA, 25 bp, Homo sapien
tctgataattgataggcctgaggac

SEQ ID NO: 232812 - DNA, 25 bp, Homo sapien
tattgttcagtttgccatgacagcg

SEQ ID NO: 232813 - DNA, 25 bp, Homo sapien
taaaaggactgcagtggtctactcc

SEQ ID NO: 232814 - DNA, 25 bp, Homo sapien
gtctgttatctgacccctgggcctg

SEQ ID NO: 232815 - DNA, 25 bp, Homo sapien
caaaaggtgccagaagtcccaggtt

SEQ ID NO: 232816 - DNA, 25 bp, Homo sapien
gaaataaacctatggagtggcacac

SEQ ID NO: 232817 - DNA, 25 bp, Homo sapien
catgattatacaggcctctcaggct

SEQ ID NO: 232818 - DNA, 25 bp, Homo sapien
gataggctagacagcgaattcctga

SEQ ID NO: 232819 - DNA, 25 bp, Homo sapien
tacttttccattagtgaggctacag

SEQ ID NO: 232820 - DNA, 25 bp, Homo sapien
gggttagcaccacttgaccatgcag

SEQ ID NO: 232821 - DNA, 25 bp, Homo sapien
ggattacggattatacccagtgcat

SEQ ID NO: 232822 - DNA, 25 bp, Homo sapien
gcaggtctgccgaaatcacacactt

SEQ ID NO: 232823 - DNA, 25 bp, Homo sapien
cagtgaggtgtatgtacacatttcc

SEQ ID NO: 232824 - DNA, 25 bp, Homo sapien
tgtatgtacacatttccagacaaat

SEQ ID NO: 232825 - DNA, 25 bp, Homo sapien
atgtacacatttccagacaaataag

SEQ ID NO: 232826 - DNA, 25 bp, Homo sapien
tcagtgaggtgtatgtacacatttc

SEQ ID NO: 232827 - DNA, 25 bp, Homo sapien
ttcataaaccaaagctgtaggagtt

SEQ ID NO: 232828 - DNA, 25 bp, Homo sapien
taagtctcttaactagtaacatagt

SEQ ID NO: 232829 - DNA, 25 bp, Homo sapien
gagttgttgtattaagtctcttaac

SEQ ID NO: 232830 - DNA, 25 bp, Homo sapien
catagtctgctcttcatgggctgag

SEQ ID NO: 232831 - DNA, 25 bp, Homo sapien
tcacatggggcgaatgacccaagaa

SEQ ID NO: 232832 - DNA, 25 bp, Homo sapien
gtaaatcgaatatttgtcacatggg

SEQ ID NO: 232833 - DNA, 25 bp, Homo sapien
atcacctccagcactaacaacatgt

SEQ ID NO: 232834 - DNA, 25 bp, Homo sapien
taacaacatgtcgatcaccactggt

SEQ ID NO: 232835 - DNA, 25 bp, Homo sapien
gaagtcaaataacttaaccatgcca

SEQ ID NO: 232836 - DNA, 25 bp, Homo sapien
taacttaaccatgccaaagtcatct

SEQ ID NO: 232837 - DNA, 25 bp, Homo sapien
caaataacttaaccatgccaaagtc

SEQ ID NO: 232838 - DNA, 25 bp, Homo sapien
gtcaaataacttaaccatgccaaag

SEQ ID NO: 232839 - DNA, 25 bp, Homo sapien
ctagtccatgtagcccaagtaattc

SEQ ID NO: 232840 - DNA, 25 bp, Homo sapien
gcggcatgatccataagatgttttc

SEQ ID NO: 232841 - DNA, 25 bp, Homo sapien
catagacatgccgtttatagcagcc

SEQ ID NO: 232842 - DNA, 25 bp, Homo sapien
tcctgaaggcacttcatagacatgc

SEQ ID NO: 232843 - DNA, 25 bp, Homo sapien
ctgggtatacagtattggtactgta

SEQ ID NO: 232844 - DNA, 25 bp, Homo sapien
tgggtatacagtattggtactgtac

SEQ ID NO: 232845 - DNA, 25 bp, Homo sapien
agagaagtccatttgaatgacaaag

SEQ ID NO: 232846 - DNA, 25 bp, Homo sapien
ttgaatgacaaagcttggaatgtct

SEQ ID NO: 232847 - DNA, 25 bp, Homo sapien
tggaatgtctttgcagtagctgatt

SEQ ID NO: 232848 - DNA, 25 bp, Homo sapien
ataactgctatctgcagagaagtcc

SEQ ID NO: 232849 - DNA, 25 bp, Homo sapien
actagaacctactgccagataccgg

SEQ ID NO: 232850 - DNA, 25 bp, Homo sapien
tgagttctcactagaacctactgcc

SEQ ID NO: 232851 - DNA, 25 bp, Homo sapien
cagataccgggaatccggactaaat

SEQ ID NO: 232852 - DNA, 25 bp, Homo sapien
tggggcccagcgttaggtcataaaa

SEQ ID NO: 232853 - DNA, 25 bp, Homo sapien
cgtaaaaagtattagaccacatgaa

SEQ ID NO: 232854 - DNA, 25 bp, Homo sapien
tcaaatagatttacctgtcagacac

SEQ ID NO: 232855 - DNA, 25 bp, Homo sapien
tattaaggtgaaatgacacaacttg

SEQ ID NO: 232856 - DNA, 25 bp, Homo sapien
taaaagtaacgtgtgataaggcctc

SEQ ID NO: 232857 - DNA, 25 bp, Homo sapien
tccccttcagggctgtaacacacag

SEQ ID NO: 232858 - DNA, 25 bp, Homo sapien
ttcattccaatagccaccatgtccc

SEQ ID NO: 232859 - DNA, 25 bp, Homo sapien
ttccccatatttttagagaactcac

SEQ ID NO: 232860 - DNA, 25 bp, Homo sapien
taacacacagtacgagcagcatgtc

SEQ ID NO: 232861 - DNA, 25 bp, Homo sapien
tgtgttgctagtccccagattggcc

SEQ ID NO: 232862 - DNA, 25 bp, Homo sapien
gattggcccatccacatgaccgtta

SEQ ID NO: 232863 - DNA, 25 bp, Homo sapien
tcagcattccttgtcccaacaagga

SEQ ID NO: 232864 - DNA, 25 bp, Homo sapien
ttatcagcaatatcccaaagtctca

SEQ ID NO: 232865 - DNA, 25 bp, Homo sapien
tctatagggcatagggtaatacgca

SEQ ID NO: 232866 - DNA, 25 bp, Homo sapien
tagggcatagggtaatacgcataac

SEQ ID NO: 232867 - DNA, 25 bp, Homo sapien
taattatacatatctatagggcata

SEQ ID NO: 232868 - DNA, 25 bp, Homo sapien
gggtaatacgcataaccatcacctc

SEQ ID NO: 232869 - DNA, 25 bp, Homo sapien
ctcagttcctgatcccacagtttaa

SEQ ID NO: 232870 - DNA, 25 bp, Homo sapien
tgtctcaagcctgaaggcacggcac

SEQ ID NO: 232871 - DNA, 25 bp, Homo sapien
tgcacacagaacgaacacaatctgt

SEQ ID NO: 232872 - DNA, 25 bp, Homo sapien
tgaaggcacggcaccgcctcagttc

SEQ ID NO: 232873 - DNA, 25 bp, Homo sapien
taaacatccagtttcagtgaatttt

SEQ ID NO: 232874 - DNA, 25 bp, Homo sapien
tattcttgtaaactttctatggcaa

SEQ ID NO: 232875 - DNA, 25 bp, Homo sapien
cattacaatacattatcctctctca

SEQ ID NO: 232876 - DNA, 25 bp, Homo sapien
tatttagcctctacaatacattaca

SEQ ID NO: 232877 - DNA, 25 bp, Homo sapien
aacacaggcccgttgtgagctctcg

SEQ ID NO: 232878 - DNA, 25 bp, Homo sapien
tggtgtacatggcaaacacaggccc

SEQ ID NO: 232879 - DNA, 25 bp, Homo sapien
gccacgattctacacaatatgtgat

SEQ ID NO: 232880 - DNA, 25 bp, Homo sapien
gtcacgataagtccatctcgcaggg

SEQ ID NO: 232881 - DNA, 25 bp, Homo sapien
tgcatccgggcatcttccagtgtgc

SEQ ID NO: 232882 - DNA, 25 bp, Homo sapien
gaatctggtcggaattctgccacaa

SEQ ID NO: 232883 - DNA, 25 bp, Homo sapien
aatacgttgattgtgaccagctctg

SEQ ID NO: 232884 - DNA, 25 bp, Homo sapien
aatagcgagcatggtctgcatccgg

SEQ ID NO: 232885 - DNA, 25 bp, Homo sapien
ctccaaatggtaatagtatgttctg

SEQ ID NO: 232886 - DNA, 25 bp, Homo sapien
ccctttgaatggtagcatcttagga

SEQ ID NO: 232887 - DNA, 25 bp, Homo sapien
gcaatagtttgccagtagcactgaa

SEQ ID NO: 232888 - DNA, 25 bp, Homo sapien
tgaagctgactgaacatactccctt

SEQ ID NO: 232889 - DNA, 25 bp, Homo sapien
aatatatagaacacttcttcaggcc

SEQ ID NO: 232890 - DNA, 25 bp, Homo sapien
caaatagacaaaggcagtagatagg

SEQ ID NO: 232891 - DNA, 25 bp, Homo sapien
gtatcaaaaagttgtaatctacctg

SEQ ID NO: 232892 - DNA, 25 bp, Homo sapien
taacaaagaacagctcaaaactaag

SEQ ID NO: 232893 - DNA, 25 bp, Homo sapien
agttgccactatgttgataaatttg

SEQ ID NO: 232894 - DNA, 25 bp, Homo sapien
ttgccactatgttgataaatttggg

SEQ ID NO: 232895 - DNA, 25 bp, Homo sapien
gctggtttactgtgaggcacagaat

SEQ ID NO: 232896 - DNA, 25 bp, Homo sapien
gcacagaatatcatcattatgttcc

SEQ ID NO: 232897 - DNA, 25 bp, Homo sapien
tacagtctctgcctcgataaccaaa

SEQ ID NO: 232898 - DNA, 25 bp, Homo sapien
gaattccaacagatgcagtgtgata

SEQ ID NO: 232899 - DNA, 25 bp, Homo sapien
caaaaatgagctccaacacaaggtc

SEQ ID NO: 232900 - DNA, 25 bp, Homo sapien
aatagtgaacattattcctacagtc

SEQ ID NO: 232901 - DNA, 25 bp, Homo sapien
gcctacattgtttgtctggagtttc

SEQ ID NO: 232902 - DNA, 25 bp, Homo sapien
ttgcctacattgtttgtctggagtt

SEQ ID NO: 232903 - DNA, 25 bp, Homo sapien
tgcctacattgtttgtctggagttt

SEQ ID NO: 232904 - DNA, 25 bp, Homo sapien
tggggaggaggaaaggcatgcagca

SEQ ID NO: 232905 - DNA, 25 bp, Homo sapien
gaagtggggaggaggaaaggcatgc

SEQ ID NO: 232906 - DNA, 25 bp, Homo sapien
aagtggggaggaggaaaggcatgca

SEQ ID NO: 232907 - DNA, 25 bp, Homo sapien
ctgcaacagagaagtggggaggagg

SEQ ID NO: 232908 - DNA, 25 bp, Homo sapien
cttcccaaagatgacccattctgtg

SEQ ID NO: 232909 - DNA, 25 bp, Homo sapien
tctgtggtccactagactgccctct

SEQ ID NO: 232910 - DNA, 25 bp, Homo sapien
accatccctcccagagaggtgtctt

SEQ ID NO: 232911 - DNA, 25 bp, Homo sapien
ggtgtcttgtcacaccttcccaaag

SEQ ID NO: 232912 - DNA, 25 bp, Homo sapien
tgtctattaggtccgtttgtccaga

SEQ ID NO: 232913 - DNA, 25 bp, Homo sapien
caattcaattgcactatggtttgag

SEQ ID NO: 232914 - DNA, 25 bp, Homo sapien
agttccaattcaattgcactatggt

SEQ ID NO: 232915 - DNA, 25 bp, Homo sapien
ttcaattgcactatggtttgagaga

SEQ ID NO: 232916 - DNA, 25 bp, Homo sapien
gattcctaacattgggcgaatattt

SEQ ID NO: 232917 - DNA, 25 bp, Homo sapien
ggctctgatggtgtaactgatttca

SEQ ID NO: 232918 - DNA, 25 bp, Homo sapien
ttgtaaatgaggcttgattcctaac

SEQ ID NO: 232919 - DNA, 25 bp, Homo sapien
tcccttgtaacatcactgtcatagc

SEQ ID NO: 232920 - DNA, 25 bp, Homo sapien
cttcactatcacaaggccttttttc

SEQ ID NO: 232921 - DNA, 25 bp, Homo sapien
aatcaatgtcggattcttcactatc

SEQ ID NO: 232922 - DNA, 25 bp, Homo sapien
cttcttcagaatcaatgtcggattc

SEQ ID NO: 232923 - DNA, 25 bp, Homo sapien
tttttctcgatagccttccatctca

SEQ ID NO: 232924 - DNA, 25 bp, Homo sapien
tgggccacatacctcttaaactttc

SEQ ID NO: 232925 - DNA, 25 bp, Homo sapien
taagtccagcgaacatttgtgacat

SEQ ID NO: 232926 - DNA, 25 bp, Homo sapien
accaacatgctgtcatcataagtcc

SEQ ID NO: 232927 - DNA, 25 bp, Homo sapien
ctatgggccacatacctcttaaact

SEQ ID NO: 232928 - DNA, 25 bp, Homo sapien
ggtagctagaaccattttgtcactg

SEQ ID NO: 232929 - DNA, 25 bp, Homo sapien
tagtaggatatctaaataacttcac

SEQ ID NO: 232930 - DNA, 25 bp, Homo sapien
atcccaaatcgtccccggtagctag

SEQ ID NO: 232931 - DNA, 25 bp, Homo sapien
cactggtgaggcaagaagcagttac

SEQ ID NO: 232932 - DNA, 25 bp, Homo sapien
tcacagcataaaccaagtacacttg

SEQ ID NO: 232933 - DNA, 25 bp, Homo sapien
taaaccaagtacacttgtccatgat

SEQ ID NO: 232934 - DNA, 25 bp, Homo sapien
cttgtccatgatgcccaagcaattt

SEQ ID NO: 232935 - DNA, 25 bp, Homo sapien
tacacttgtccatgatgcccaagca

SEQ ID NO: 232936 - DNA, 25 bp, Homo sapien
ttaatatagtgtttcttccttcacc

SEQ ID NO: 232937 - DNA, 25 bp, Homo sapien
taatttgagaacagacttcacgtgt

SEQ ID NO: 232938 - DNA, 25 bp, Homo sapien
tcttccttcacccatgtattctgac

SEQ ID NO: 232939 - DNA, 25 bp, Homo sapien
tgtattctgactcaataaactcaat

SEQ ID NO: 232940 - DNA, 25 bp, Homo sapien
attgttccttagcaccagtgttgac

SEQ ID NO: 232941 - DNA, 25 bp, Homo sapien
aattgttccttagcaccagtgttga

SEQ ID NO: 232942 - DNA, 25 bp, Homo sapien
aactggtagctcctttgcatattcc

SEQ ID NO: 232943 - DNA, 25 bp, Homo sapien
gatgctacagcaagatatttcccag

SEQ ID NO: 232944 - DNA, 25 bp, Homo sapien
gtatatatctataaagctgtcatgg

SEQ ID NO: 232945 - DNA, 25 bp, Homo sapien
ctctaatatcccaatcaatatgggt

SEQ ID NO: 232946 - DNA, 25 bp, Homo sapien
tgagacctacggctaaagctttacc

SEQ ID NO: 232947 - DNA, 25 bp, Homo sapien
taagaagcttccatcgttgagacct

SEQ ID NO: 232948 - DNA, 25 bp, Homo sapien
gatgaaaagacacaagatcctctag

SEQ ID NO: 232949 - DNA, 25 bp, Homo sapien
gatcctctagagtatccgcatttgc

SEQ ID NO: 232950 - DNA, 25 bp, Homo sapien
ggacagccaacatacaatgactagg

SEQ ID NO: 232951 - DNA, 25 bp, Homo sapien
ttatcatcgcttacagtagcacaga

SEQ ID NO: 232952 - DNA, 25 bp, Homo sapien
ggtgagagatcccatattcttaagg

SEQ ID NO: 232953 - DNA, 25 bp, Homo sapien
taagggtgtgtagctaaaccccaca

SEQ ID NO: 232954 - DNA, 25 bp, Homo sapien
tgtcctaatgatatggcacgtatag

SEQ ID NO: 232955 - DNA, 25 bp, Homo sapien
gggccacttttatccacttctagta

SEQ ID NO: 232956 - DNA, 25 bp, Homo sapien
ctgaaccagaagtgttattgggcca

SEQ ID NO: 232957 - DNA, 25 bp, Homo sapien
tctttgtgccaactaaaatatgacc

SEQ ID NO: 232958 - DNA, 25 bp, Homo sapien
caatgcagctctttttatagcatag

SEQ ID NO: 232959 - DNA, 25 bp, Homo sapien
catcccaaagagctactataccatc

SEQ ID NO: 232960 - DNA, 25 bp, Homo sapien
tagcataggtcttgagacatctttc

SEQ ID NO: 232961 - DNA, 25 bp, Homo sapien
gagacatctttcaaaagagtcatcc

SEQ ID NO: 232962 - DNA, 25 bp, Homo sapien
cccatcatgcgctttcactgttttt

SEQ ID NO: 232963 - DNA, 25 bp, Homo sapien
tggcccatcatgcgctttcactgtt

SEQ ID NO: 232964 - DNA, 25 bp, Homo sapien
cactgcacacatcattgtgtcattt

SEQ ID NO: 232965 - DNA, 25 bp, Homo sapien
ctgcacacatcattgtgtcattttt

SEQ ID NO: 232966 - DNA, 25 bp, Homo sapien
atacactgcacacatcattgtgtca

SEQ ID NO: 232967 - DNA, 25 bp, Homo sapien
tacactgcacacatcattgtgtcat

SEQ ID NO: 232968 - DNA, 25 bp, Homo sapien
aaggcctcttctatacaagtgcaag

SEQ ID NO: 232969 - DNA, 25 bp, Homo sapien
gaatgcctatatatccgctgaccta

SEQ ID NO: 232970 - DNA, 25 bp, Homo sapien
gaaaactacaggtgtctcaatcagt

SEQ ID NO: 232971 - DNA, 25 bp, Homo sapien
tcaatcagtgatgtgggtaacacct

SEQ ID NO: 232972 - DNA, 25 bp, Homo sapien
ccttccaccttatcgtcccaagaag

SEQ ID NO: 232973 - DNA, 25 bp, Homo sapien
tccaccttatcgtcccaagaagctg

SEQ ID NO: 232974 - DNA, 25 bp, Homo sapien
tccttccaccttatcgtcccaagaa

SEQ ID NO: 232975 - DNA, 25 bp, Homo sapien
ttccaccttatcgtcccaagaagct

SEQ ID NO: 232976 - DNA, 25 bp, Homo sapien
tgctttacgccaaaatttcatgtgt

SEQ ID NO: 232977 - DNA, 25 bp, Homo sapien
taattccagctgtaattagtttatc

SEQ ID NO: 232978 - DNA, 25 bp, Homo sapien
ctgctttacgccaaaatttcatgtg

SEQ ID NO: 232979 - DNA, 25 bp, Homo sapien
ctgtaattagtttatcaggcacata

SEQ ID NO: 232980 - DNA, 25 bp, Homo sapien
gagcacaacagtatggctatcatct

SEQ ID NO: 232981 - DNA, 25 bp, Homo sapien
actgatgccaaacgtttcccatccg

SEQ ID NO: 232982 - DNA, 25 bp, Homo sapien
tcttccagtcccagagcacaacagt

SEQ ID NO: 232983 - DNA, 25 bp, Homo sapien
tatcatctatgccaactgatgccaa

SEQ ID NO: 232984 - DNA, 25 bp, Homo sapien
ctgagaaatcaacggcactaacacc

SEQ ID NO: 232985 - DNA, 25 bp, Homo sapien
taacaccatactggtggtggccctt

SEQ ID NO: 232986 - DNA, 25 bp, Homo sapien
tggacaatggtttaatggtctctgt

SEQ ID NO: 232987 - DNA, 25 bp, Homo sapien
ggtggccctttaatatggacaatgg

SEQ ID NO: 232988 - DNA, 25 bp, Homo sapien
tacacagtgtttaaagccagacaga

SEQ ID NO: 232989 - DNA, 25 bp, Homo sapien
cctcatcatttgtagactgaaggaa

SEQ ID NO: 232990 - DNA, 25 bp, Homo sapien
gatgcaagttgatcccttttccaca

SEQ ID NO: 232991 - DNA, 25 bp, Homo sapien
gaaagagcaagtaaggagaggcaca

SEQ ID NO: 232992 - DNA, 25 bp, Homo sapien
tggcctgttgccacgtagtctttca

SEQ ID NO: 232993 - DNA, 25 bp, Homo sapien
caaaggatgaatagttaggcagaga

SEQ ID NO: 232994 - DNA, 25 bp, Homo sapien
tcatgacccagataaaaacgctgtg

SEQ ID NO: 232995 - DNA, 25 bp, Homo sapien
tataaaacagattacttcgacagtc

SEQ ID NO: 232996 - DNA, 25 bp, Homo sapien
ccgtgaacaaagtgtaatcgaatac

SEQ ID NO: 232997 - DNA, 25 bp, Homo sapien
taatcgaatactatttcctggagcc

SEQ ID NO: 232998 - DNA, 25 bp, Homo sapien
ctgttctttaagctgaggtagatct

SEQ ID NO: 232999 - DNA, 25 bp, Homo sapien
tttgcactgttctttaagctgaggt

SEQ ID NO: 233000 - DNA, 25 bp, Homo sapien
gaacatcagacagatctgaatctga

SEQ ID NO: 233001 - DNA, 25 bp, Homo sapien
cgacggtaggtgagctgtgtctctt

SEQ ID NO: 233002 - DNA, 25 bp, Homo sapien
catcagacagatctgaatctgattc

SEQ ID NO: 233003 - DNA, 25 bp, Homo sapien
ctgtcgacggtaggtgagctgtgtc

SEQ ID NO: 233004 - DNA, 25 bp, Homo sapien
tgacacagatgtcagtaaactgtac

SEQ ID NO: 233005 - DNA, 25 bp, Homo sapien
ccaatgaccgctacatcaaatttaa

SEQ ID NO: 233006 - DNA, 25 bp, Homo sapien
tgtactacagattatcttcctctcc

SEQ ID NO: 233007 - DNA, 25 bp, Homo sapien
caaactcaatagctcctttaaatcc

SEQ ID NO: 233008 - DNA, 25 bp, Homo sapien
taacccactgataatcatgtgacca

SEQ ID NO: 233009 - DNA, 25 bp, Homo sapien
ggtgctatgtgaacagcatctttca

SEQ ID NO: 233010 - DNA, 25 bp, Homo sapien
gaccatctgacattagttacgtgag

SEQ ID NO: 233011 - DNA, 25 bp, Homo sapien
gaaagacagagtgatctgctccacc

SEQ ID NO: 233012 - DNA, 25 bp, Homo sapien
gaatggccaatatattttctaaact

SEQ ID NO: 233013 - DNA, 25 bp, Homo sapien
tgaatggccaatatattttctaaac

SEQ ID NO: 233014 - DNA, 25 bp, Homo sapien
ctgaatggccaatatattttctaaa

SEQ ID NO: 233015 - DNA, 25 bp, Homo sapien
tgatatctgaatacttgggccaaat

SEQ ID NO: 233016 - DNA, 25 bp, Homo sapien
tccatgaagcccaatgaacaccttt

SEQ ID NO: 233017 - DNA, 25 bp, Homo sapien
taattccatagtcatcagctgtaac

SEQ ID NO: 233018 - DNA, 25 bp, Homo sapien
tcaaggcctgaaacacatgtccatg

SEQ ID NO: 233019 - DNA, 25 bp, Homo sapien
taaatatcaaccgagctgtcattgc

SEQ ID NO: 233020 - DNA, 25 bp, Homo sapien
caaatatctactgtctgaagaccag

SEQ ID NO: 233021 - DNA, 25 bp, Homo sapien
tcgccaacttttttataacgctgag

SEQ ID NO: 233022 - DNA, 25 bp, Homo sapien
tgtcattgcatccaacagcaaggta

SEQ ID NO: 233023 - DNA, 25 bp, Homo sapien
agatcacaagatcagagagagacca

SEQ ID NO: 233024 - DNA, 25 bp, Homo sapien
cacaagatcagagagagaccatcct

SEQ ID NO: 233025 - DNA, 25 bp, Homo sapien
cagatcacaagatcagagagagacc

SEQ ID NO: 233026 - DNA, 25 bp, Homo sapien
gggcagatcacaagatcagagagag

SEQ ID NO: 233027 - DNA, 25 bp, Homo sapien
tggattccatctgcattgacagctg

SEQ ID NO: 233028 - DNA, 25 bp, Homo sapien
tgacagctgcacaacgaattggttc

SEQ ID NO: 233029 - DNA, 25 bp, Homo sapien
cattccaagggcaagatggattcca

SEQ ID NO: 233030 - DNA, 25 bp, Homo sapien
tctaagtacagtgaatgagccatcc

SEQ ID NO: 233031 - DNA, 25 bp, Homo sapien
agttcaccttcacaatgcccttgca

SEQ ID NO: 233032 - DNA, 25 bp, Homo sapien
tttagtaggatggacagcaagtgcc

SEQ ID NO: 233033 - DNA, 25 bp, Homo sapien
tagaatgtggtcacctcgccaacac

SEQ ID NO: 233034 - DNA, 25 bp, Homo sapien
gtcctgtgttccaactagaatgtgg

SEQ ID NO: 233035 - DNA, 25 bp, Homo sapien
tcccaaagacgaatacaaccatctc

SEQ ID NO: 233036 - DNA, 25 bp, Homo sapien
aaagacgaatacaaccatctctgcc

SEQ ID NO: 233037 - DNA, 25 bp, Homo sapien
agacgaatacaaccatctctgccac

SEQ ID NO: 233038 - DNA, 25 bp, Homo sapien
taaatcccaaagacgaatacaacca

SEQ ID NO: 233039 - DNA, 25 bp, Homo sapien
caggctaggcacagtattgtctgaa

SEQ ID NO: 233040 - DNA, 25 bp, Homo sapien
tgaaggtcacccgtcttaccaaaga

SEQ ID NO: 233041 - DNA, 25 bp, Homo sapien
gcatgggctccttgtattgttcgta

SEQ ID NO: 233042 - DNA, 25 bp, Homo sapien
tccccattgagtgcaccagaatatg

SEQ ID NO: 233043 - DNA, 25 bp, Homo sapien
caagtttatttggctggtacaaatc

SEQ ID NO: 233044 - DNA, 25 bp, Homo sapien
tatttggctggtacaaatcccaaga

SEQ ID NO: 233045 - DNA, 25 bp, Homo sapien
gatatgttttacaccacagctgaca

SEQ ID NO: 233046 - DNA, 25 bp, Homo sapien
tgatatgttttacaccacagctgac

SEQ ID NO: 233047 - DNA, 25 bp, Homo sapien
atgaccaggagccatagacaacatt

SEQ ID NO: 233048 - DNA, 25 bp, Homo sapien
ccaggagccatagacaacatttttc

SEQ ID NO: 233049 - DNA, 25 bp, Homo sapien
actgcattctttgaatcaagtccaa

SEQ ID NO: 233050 - DNA, 25 bp, Homo sapien
aatcaagtccaactgaaaccaagcg

SEQ ID NO: 233051 - DNA, 25 bp, Homo sapien
tctgcacagtgtatgaatcccaaat

SEQ ID NO: 233052 - DNA, 25 bp, Homo sapien
gccaagcaagctataccatgtgtat

SEQ ID NO: 233053 - DNA, 25 bp, Homo sapien
ccatctaagtcaaacgccaagcaag

SEQ ID NO: 233054 - DNA, 25 bp, Homo sapien
cactcgttcaggatgcaatgcaagg

SEQ ID NO: 233055 - DNA, 25 bp, Homo sapien
agagtctaggatgttagcctctgca

SEQ ID NO: 233056 - DNA, 25 bp, Homo sapien
gcctctgcatactatcatatacttc

SEQ ID NO: 233057 - DNA, 25 bp, Homo sapien
gagttcttaatatattcttggtaca

SEQ ID NO: 233058 - DNA, 25 bp, Homo sapien
tgtgtctgcttgtggcctacctttt

SEQ ID NO: 233059 - DNA, 25 bp, Homo sapien
tccctgtgagtgagcatttttctgg

SEQ ID NO: 233060 - DNA, 25 bp, Homo sapien
tcggtgttttcagctcatgatgaca

SEQ ID NO: 233061 - DNA, 25 bp, Homo sapien
gacactgaacagatccaccaataga

SEQ ID NO: 233062 - DNA, 25 bp, Homo sapien
aatgcaggatatctgtctttcggtg

SEQ ID NO: 233063 - DNA, 25 bp, Homo sapien
ggtggatccgcggacctgatcttcc

SEQ ID NO: 233064 - DNA, 25 bp, Homo sapien
cttttcgcagttttcgtaattgtga

SEQ ID NO: 233065 - DNA, 25 bp, Homo sapien
ttcctgcacggacccgagagagagt

SEQ ID NO: 233066 - DNA, 25 bp, Homo sapien
ttcgtaattgtgatggagtgggaaa

SEQ ID NO: 233067 - DNA, 25 bp, Homo sapien
cactcgagccgcaggtggcagctcg

SEQ ID NO: 233068 - DNA, 25 bp, Homo sapien
tgtggccccggtagaacttctgcct

SEQ ID NO: 233069 - DNA, 25 bp, Homo sapien
gaagtatacgatctccttggccgca

SEQ ID NO: 233070 - DNA, 25 bp, Homo sapien
ctgatgatgtcgtcgctgtggcccc

SEQ ID NO: 233071 - DNA, 25 bp, Homo sapien
gcaacgaaagccctcccgctggctg

SEQ ID NO: 233072 - DNA, 25 bp, Homo sapien
gctggctgccgggacttcccgccag

SEQ ID NO: 233073 - DNA, 25 bp, Homo sapien
gcccgtcaggtgcatctcgtttcgg

SEQ ID NO: 233074 - DNA, 25 bp, Homo sapien
gccagccgcgtcctctaagccgcgc

SEQ ID NO: 233075 - DNA, 25 bp, Homo sapien
ccgccggctgtcaagtggatgccca

SEQ ID NO: 233076 - DNA, 25 bp, Homo sapien
gcctcggctcgcctagtctcctcag

SEQ ID NO: 233077 - DNA, 25 bp, Homo sapien
cctcgcggaacatgctgagggccgc

SEQ ID NO: 233078 - DNA, 25 bp, Homo sapien
tcagcccgtagcgcctgggccgaga

SEQ ID NO: 233079 - DNA, 25 bp, Homo sapien
caagcgcctgccattgcacctgact

SEQ ID NO: 233080 - DNA, 25 bp, Homo sapien
agcgcctgccattgcacctgactaa

SEQ ID NO: 233081 - DNA, 25 bp, Homo sapien
tacaagcgcctgccattgcacctga

SEQ ID NO: 233082 - DNA, 25 bp, Homo sapien
attacaagcgcctgccattgcacct

SEQ ID NO: 233083 - DNA, 25 bp, Homo sapien
tggttgcttgaagctacagatgagg

SEQ ID NO: 233084 - DNA, 25 bp, Homo sapien
gccactgtgaacggccttaaatatt

SEQ ID NO: 233085 - DNA, 25 bp, Homo sapien
gaactcacacttatggagggcccac

SEQ ID NO: 233086 - DNA, 25 bp, Homo sapien
tgctctgtatctctcctagcttggg

SEQ ID NO: 233087 - DNA, 25 bp, Homo sapien
gtgtataagtactctccggccagga

SEQ ID NO: 233088 - DNA, 25 bp, Homo sapien
caacactttggaagattgaagcacg

SEQ ID NO: 233089 - DNA, 25 bp, Homo sapien
gaagcacgcagagtacttgagtcca

SEQ ID NO: 233090 - DNA, 25 bp, Homo sapien
aaattagaggagctacctggctgca

SEQ ID NO: 233091 - DNA, 25 bp, Homo sapien
aaccatgggctgcttcattaggacc

SEQ ID NO: 233092 - DNA, 25 bp, Homo sapien
gattacatttctaccggcagttcca

SEQ ID NO: 233093 - DNA, 25 bp, Homo sapien
gacgctgtgaaatattgagcccaat

SEQ ID NO: 233094 - DNA, 25 bp, Homo sapien
caattgtcaattgtcggcatgtgcg

SEQ ID NO: 233095 - DNA, 25 bp, Homo sapien
tacaatccggaatcaccatgtgagt

SEQ ID NO: 233096 - DNA, 25 bp, Homo sapien
tgagtaaaagcaaaccacttgcagt

SEQ ID NO: 233097 - DNA, 25 bp, Homo sapien
aaactgtcaccaatttacaatccgg

SEQ ID NO: 233098 - DNA, 25 bp, Homo sapien
ggacctcgagaaacagcggacaatt

SEQ ID NO: 233099 - DNA, 25 bp, Homo sapien
atcaactccagggactcttccggac

SEQ ID NO: 233100 - DNA, 25 bp, Homo sapien
agagatcaactccagggactcttcc

SEQ ID NO: 233101 - DNA, 25 bp, Homo sapien
tggaaacgagcgaatggaagaagta

SEQ ID NO: 233102 - DNA, 25 bp, Homo sapien
ctagaatcggaaggtaaagcgaaag

SEQ ID NO: 233103 - DNA, 25 bp, Homo sapien
cagagcattcggttgctaggcagct

SEQ ID NO: 233104 - DNA, 25 bp, Homo sapien
caggggcaggtgtctaactcactac

SEQ ID NO: 233105 - DNA, 25 bp, Homo sapien
attcggttgctaggcagctgcgcct

SEQ ID NO: 233106 - DNA, 25 bp, Homo sapien
agggcaggcagagcattcggttgct

SEQ ID NO: 233107 - DNA, 25 bp, Homo sapien
ggttgccgggcagagtcggacgccg

SEQ ID NO: 233108 - DNA, 25 bp, Homo sapien
ggagctattttaggcgcaggaagtt

SEQ ID NO: 233109 - DNA, 25 bp, Homo sapien
tgggccttcgctggccgcaccggca

SEQ ID NO: 233110 - DNA, 25 bp, Homo sapien
caccggcagccatgagctcggagat

SEQ ID NO: 233111 - DNA, 25 bp, Homo sapien
agcctgtgcatcctgacgctgaggc

SEQ ID NO: 233112 - DNA, 25 bp, Homo sapien
tgtgcatcctgacgctgaggctgcg

SEQ ID NO: 233113 - DNA, 25 bp, Homo sapien
cgtcagcctgtgcatcctgacgctg

SEQ ID NO: 233114 - DNA, 25 bp, Homo sapien
cggccagctcccgtcagcctgtgca

SEQ ID NO: 233115 - DNA, 25 bp, Homo sapien
tgtgactagcgggtccgctgtccgc

SEQ ID NO: 233116 - DNA, 25 bp, Homo sapien
tggagctgtgactagcgggtccgct

SEQ ID NO: 233117 - DNA, 25 bp, Homo sapien
tgactagcgggtccgctgtccgcca

SEQ ID NO: 233118 - DNA, 25 bp, Homo sapien
gagctgtgactagcgggtccgctgt

SEQ ID NO: 233119 - DNA, 25 bp, Homo sapien
gagagtcagcggaatgacaaatgtc

SEQ ID NO: 233120 - DNA, 25 bp, Homo sapien
tcttggttttaactgacctggtggc

SEQ ID NO: 233121 - DNA, 25 bp, Homo sapien
tctgaaagactgtgatggatgggat

SEQ ID NO: 233122 - DNA, 25 bp, Homo sapien
gatgggatggcatgtcttgagtcaa

SEQ ID NO: 233123 - DNA, 25 bp, Homo sapien
tgtttaatcaagcagtgatatgtga

SEQ ID NO: 233124 - DNA, 25 bp, Homo sapien
actcaggaagattaattttctcaaa

SEQ ID NO: 233125 - DNA, 25 bp, Homo sapien
tcataccattgtttcttaagaatca

SEQ ID NO: 233126 - DNA, 25 bp, Homo sapien
taaaattgaataacagtctgagtag

SEQ ID NO: 233127 - DNA, 25 bp, Homo sapien
ctctggaacctgagacctgaggtgg

SEQ ID NO: 233128 - DNA, 25 bp, Homo sapien
tactctggaacctgagacctgaggt

SEQ ID NO: 233129 - DNA, 25 bp, Homo sapien
actctggaacctgagacctgaggtg

SEQ ID NO: 233130 - DNA, 25 bp, Homo sapien
ccttccttccactcccaggtagctg

SEQ ID NO: 233131 - DNA, 25 bp, Homo sapien
cccaggtagctggacacatttcctc

SEQ ID NO: 233132 - DNA, 25 bp, Homo sapien
acacatttcctctgttctatcacac

SEQ ID NO: 233133 - DNA, 25 bp, Homo sapien
acatttcctctgttctatcacacac

SEQ ID NO: 233134 - DNA, 25 bp, Homo sapien
atgggaatgaacaagcagagcccat

SEQ ID NO: 233135 - DNA, 25 bp, Homo sapien
agtaggtgccccctggtaatatggg

SEQ ID NO: 233136 - DNA, 25 bp, Homo sapien
ggactatgatttactcctctttgta

SEQ ID NO: 233137 - DNA, 25 bp, Homo sapien
tctttccagttagaactaggactat

SEQ ID NO: 233138 - DNA, 25 bp, Homo sapien
aagccaaaagccaatcatctaacca

SEQ ID NO: 233139 - DNA, 25 bp, Homo sapien
tcactttgggaacctaaatatgttg

SEQ ID NO: 233140 - DNA, 25 bp, Homo sapien
tcccattaaaatgaacgcatgatgt

SEQ ID NO: 233141 - DNA, 25 bp, Homo sapien
taatccagtaaacctcaaccagaaa

SEQ ID NO: 233142 - DNA, 25 bp, Homo sapien
tttccagaccatgtggacacacaac

SEQ ID NO: 233143 - DNA, 25 bp, Homo sapien
cagagaagctatgttgctgcgcaga

SEQ ID NO: 233144 - DNA, 25 bp, Homo sapien
ccacatatgttcttatgaagcagca

SEQ ID NO: 233145 - DNA, 25 bp, Homo sapien
tgacacataagggtgacacagaatg

SEQ ID NO: 233146 - DNA, 25 bp, Homo sapien
caccgtggatgactgtatcagaagc

SEQ ID NO: 233147 - DNA, 25 bp, Homo sapien
caacatttcctatggactgcgtaac

SEQ ID NO: 233148 - DNA, 25 bp, Homo sapien
cgtaacttctggcttctgtgccaac

SEQ ID NO: 233149 - DNA, 25 bp, Homo sapien
tatcagaagcgacattcaggatgtc

SEQ ID NO: 233150 - DNA, 25 bp, Homo sapien
ttatttcacttctttgatgtcaaag

SEQ ID NO: 233151 - DNA, 25 bp, Homo sapien
tttcacttctttgatgtcaaagcca

SEQ ID NO: 233152 - DNA, 25 bp, Homo sapien
ttcacttctttgatgtcaaagccag

SEQ ID NO: 233153 - DNA, 25 bp, Homo sapien
cacttctttgatgtcaaagccagtc

SEQ ID NO: 233154 - DNA, 25 bp, Homo sapien
cattccaggcaaagctaatgggtga

SEQ ID NO: 233155 - DNA, 25 bp, Homo sapien
gtaggattttgacaaccagagagga

SEQ ID NO: 233156 - DNA, 25 bp, Homo sapien
aagctaatgggtgaacagatttggg

SEQ ID NO: 233157 - DNA, 25 bp, Homo sapien
agtaggattttgacaaccagagagg

SEQ ID NO: 233158 - DNA, 25 bp, Homo sapien
caaagtcagtggagcatttggtgac

SEQ ID NO: 233159 - DNA, 25 bp, Homo sapien
tgacgttatcgtagcagaaagccat

SEQ ID NO: 233160 - DNA, 25 bp, Homo sapien
tgcctcggcagggacactgctcttg

SEQ ID NO: 233161 - DNA, 25 bp, Homo sapien
gctcttgcaagttccaaagtcagtg

SEQ ID NO: 233162 - DNA, 25 bp, Homo sapien
ttctgtacaggtggccatatttggc

SEQ ID NO: 233163 - DNA, 25 bp, Homo sapien
tttggagagacagcctgggtacacg

SEQ ID NO: 233164 - DNA, 25 bp, Homo sapien
tgaggcatccgcactcacgggtctt

SEQ ID NO: 233165 - DNA, 25 bp, Homo sapien
gggtacacggatgcccactgagact

SEQ ID NO: 233166 - DNA, 25 bp, Homo sapien
agagcacccttcagggataatgcag

SEQ ID NO: 233167 - DNA, 25 bp, Homo sapien
caaacctgggttttataacatgtga

SEQ ID NO: 233168 - DNA, 25 bp, Homo sapien
gagctctgcttcatgacaagcagag

SEQ ID NO: 233169 - DNA, 25 bp, Homo sapien
gttttataacatgtgacaggttttc

SEQ ID NO: 233170 - DNA, 25 bp, Homo sapien
agtcaccgcacccagatagattctg

SEQ ID NO: 233171 - DNA, 25 bp, Homo sapien
gtcaccgcacccagatagattctgg

SEQ ID NO: 233172 - DNA, 25 bp, Homo sapien
tcccgggctggtgtccggccacgca

SEQ ID NO: 233173 - DNA, 25 bp, Homo sapien
gatagctctcggatgtccattattt

SEQ ID NO: 233174 - DNA, 25 bp, Homo sapien
tgtccggccacgcacaggcaggttg

SEQ ID NO: 233175 - DNA, 25 bp, Homo sapien
cagtgatagctctcggatgtccatt

SEQ ID NO: 233176 - DNA, 25 bp, Homo sapien
gaaactcctcaatgttgccttcttc

SEQ ID NO: 233177 - DNA, 25 bp, Homo sapien
ctcaaggagactccttttataacct

SEQ ID NO: 233178 - DNA, 25 bp, Homo sapien
tcaaggagactccttttataacctg

SEQ ID NO: 233179 - DNA, 25 bp, Homo sapien
aacctgaaactcctcaatgttgcct

SEQ ID NO: 233180 - DNA, 25 bp, Homo sapien
tcatggaggttcttggtgctactgg

SEQ ID NO: 233181 - DNA, 25 bp, Homo sapien
cataatacgcatgtactgagcatcc

SEQ ID NO: 233182 - DNA, 25 bp, Homo sapien
gcttcagaggctaacccacgaggta

SEQ ID NO: 233183 - DNA, 25 bp, Homo sapien
tctgtggtacacattgactgagctt

SEQ ID NO: 233184 - DNA, 25 bp, Homo sapien
ctttgtccgacagtggacccggcgg

SEQ ID NO: 233185 - DNA, 25 bp, Homo sapien
tccgacagtggacccggcggtgttc

SEQ ID NO: 233186 - DNA, 25 bp, Homo sapien
tcaaatactttgtccgacagtggac

SEQ ID NO: 233187 - DNA, 25 bp, Homo sapien
aatactttgtccgacagtggacccg

SEQ ID NO: 233188 - DNA, 25 bp, Homo sapien
tcacagcgcatgcagggatggtctc

SEQ ID NO: 233189 - DNA, 25 bp, Homo sapien
tgagagaatgcaccgcagcaaccac

SEQ ID NO: 233190 - DNA, 25 bp, Homo sapien
atgcaccgcagcaaccacagcctga

SEQ ID NO: 233191 - DNA, 25 bp, Homo sapien
ctgagagaatgcaccgcagcaacca

SEQ ID NO: 233192 - DNA, 25 bp, Homo sapien
gagaatgcaccgcagcaaccacagc

SEQ ID NO: 233193 - DNA, 25 bp, Homo sapien
ctccagaccaagggtgaaggactct

SEQ ID NO: 233194 - DNA, 25 bp, Homo sapien
ccagaccaagggtgaaggactctac

SEQ ID NO: 233195 - DNA, 25 bp, Homo sapien
cagaccaagggtgaaggactctacc

SEQ ID NO: 233196 - DNA, 25 bp, Homo sapien
gaccaagggtgaaggactctaccga

SEQ ID NO: 233197 - DNA, 25 bp, Homo sapien
gcgatgaaggagcacccgcgtcttc

SEQ ID NO: 233198 - DNA, 25 bp, Homo sapien
cagcgatgaaggagcacccgcgtct

SEQ ID NO: 233199 - DNA, 25 bp, Homo sapien
gtcttcaagcccttccgtgcaccac

SEQ ID NO: 233200 - DNA, 25 bp, Homo sapien
cgtgcaccaccgcttcctggtgtcc

SEQ ID NO: 233201 - DNA, 25 bp, Homo sapien
tgctagaaccaagtcttgtgatgaa

SEQ ID NO: 233202 - DNA, 25 bp, Homo sapien
ccttgggtgtctgctagaaccaagt

SEQ ID NO: 233203 - DNA, 25 bp, Homo sapien
tgggtgtctgctagaaccaagtctt

SEQ ID NO: 233204 - DNA, 25 bp, Homo sapien
tgtctgctagaaccaagtcttgtga

SEQ ID NO: 233205 - DNA, 25 bp, Homo sapien
gggaagcctcctgctctgttctgtt

SEQ ID NO: 233206 - DNA, 25 bp, Homo sapien
cttcagggaagcctcctgctctgtt

SEQ ID NO: 233207 - DNA, 25 bp, Homo sapien
gaagcctcctgctctgttctgttcc

SEQ ID NO: 233208 - DNA, 25 bp, Homo sapien
cagggaagcctcctgctctgttctg

SEQ ID NO: 233209 - DNA, 25 bp, Homo sapien
tgtgagccattacccaaccctagag

SEQ ID NO: 233210 - DNA, 25 bp, Homo sapien
attgtttttagcttcgggagcatcc

SEQ ID NO: 233211 - DNA, 25 bp, Homo sapien
gggattagacgtgtgagccattacc

SEQ ID NO: 233212 - DNA, 25 bp, Homo sapien
tcgggagcatccacaatttattatg

SEQ ID NO: 233213 - DNA, 25 bp, Homo sapien
tcaataatgatagcaacagggatgg

SEQ ID NO: 233214 - DNA, 25 bp, Homo sapien
ggatggtcatagcaacagcaggaag

SEQ ID NO: 233215 - DNA, 25 bp, Homo sapien
aatttgtgaagcacacaccaaggtc

SEQ ID NO: 233216 - DNA, 25 bp, Homo sapien
tgtggacattcatgagctgacagct

SEQ ID NO: 233217 - DNA, 25 bp, Homo sapien
tcaaggacaacccagcattggccca

SEQ ID NO: 233218 - DNA, 25 bp, Homo sapien
ctaggagccagtcgttgttctcaag

SEQ ID NO: 233219 - DNA, 25 bp, Homo sapien
aaggacaacccagcattggcccagg

SEQ ID NO: 233220 - DNA, 25 bp, Homo sapien
gccagtcgttgttctcaaggacaac

SEQ ID NO: 233221 - DNA, 25 bp, Homo sapien
aacagcgaccgctgcttccgggagt

SEQ ID NO: 233222 - DNA, 25 bp, Homo sapien
gctgcttccgggagtccattccatt

SEQ ID NO: 233223 - DNA, 25 bp, Homo sapien
tggctcccaactttgtggagcttcc

SEQ ID NO: 233224 - DNA, 25 bp, Homo sapien
cttcctgactgctggtcaacagcga

SEQ ID NO: 233225 - DNA, 25 bp, Homo sapien
tcaactaacgggtatctgatcaggt

SEQ ID NO: 233226 - DNA, 25 bp, Homo sapien
cagaatcctctgttgagtgtgttgt

SEQ ID NO: 233227 - DNA, 25 bp, Homo sapien
aatcctctgttgagtgtgttgtggg

SEQ ID NO: 233228 - DNA, 25 bp, Homo sapien
tctgatcaggtaacagaatcctctg

SEQ ID NO: 233229 - DNA, 25 bp, Homo sapien
tatagatgagcgcataggaggcagg

SEQ ID NO: 233230 - DNA, 25 bp, Homo sapien
atgagcgcataggaggcaggccttc

SEQ ID NO: 233231 - DNA, 25 bp, Homo sapien
tagatgagcgcataggaggcaggcc

SEQ ID NO: 233232 - DNA, 25 bp, Homo sapien
ctatagatgagcgcataggaggcag

SEQ ID NO: 233233 - DNA, 25 bp, Homo sapien
gaatgtgagagtgtataagacctgt

SEQ ID NO: 233234 - DNA, 25 bp, Homo sapien
cctgtcgaggtaaaaatcagactgg

SEQ ID NO: 233235 - DNA, 25 bp, Homo sapien
cctgtcgctgactgaatgtacaata

SEQ ID NO: 233236 - DNA, 25 bp, Homo sapien
tgtacaatacctgtcgaggtaaaaa

SEQ ID NO: 233237 - DNA, 25 bp, Homo sapien
caatcaagacactcattggctccaa

SEQ ID NO: 233238 - DNA, 25 bp, Homo sapien
ggacaggtctctgcatctccttccc

SEQ ID NO: 233239 - DNA, 25 bp, Homo sapien
gggccagaccgctgtcctcttcttg

SEQ ID NO: 233240 - DNA, 25 bp, Homo sapien
cctgggaggcaactttagggctgcc

SEQ ID NO: 233241 - DNA, 25 bp, Homo sapien
catcctataacaatggaaatcttca

SEQ ID NO: 233242 - DNA, 25 bp, Homo sapien
tatatggtcttgaccagtccctccc

SEQ ID NO: 233243 - DNA, 25 bp, Homo sapien
ctcgtggagctctcattccatccta

SEQ ID NO: 233244 - DNA, 25 bp, Homo sapien
tcaaggcagatgtgcccaagccaca

SEQ ID NO: 233245 - DNA, 25 bp, Homo sapien
agtgcccttgaatttcaggacggag

SEQ ID NO: 233246 - DNA, 25 bp, Homo sapien
cttgaatttcaggacggaggaaggg

SEQ ID NO: 233247 - DNA, 25 bp, Homo sapien
gggcttcatccccaaagtaggtgca

SEQ ID NO: 233248 - DNA, 25 bp, Homo sapien
cagctgttgccaggatggacacctc

SEQ ID NO: 233249 - DNA, 25 bp, Homo sapien
ctagcagggaatggatgttatgcaa

SEQ ID NO: 233250 - DNA, 25 bp, Homo sapien
ttggctacaattgtaataggtgccc

SEQ ID NO: 233251 - DNA, 25 bp, Homo sapien
cacaagccctttcatctagcaggga

SEQ ID NO: 233252 - DNA, 25 bp, Homo sapien
aaagtcccagatgtcctctcacaag

SEQ ID NO: 233253 - DNA, 25 bp, Homo sapien
aaggtgagtataaggcactatgtgc

SEQ ID NO: 233254 - DNA, 25 bp, Homo sapien
ctaaggtgagtataaggcactatgt

SEQ ID NO: 233255 - DNA, 25 bp, Homo sapien
aggtgagtataaggcactatgtgca

SEQ ID NO: 233256 - DNA, 25 bp, Homo sapien
ggtgagtataaggcactatgtgcac

SEQ ID NO: 233257 - DNA, 25 bp, Homo sapien
caaaagggaccgaaactagcctgag

SEQ ID NO: 233258 - DNA, 25 bp, Homo sapien
ttctgtttctggagggattgtgttg

SEQ ID NO: 233259 - DNA, 25 bp, Homo sapien
caactgcttctcgtcgagtgagtaa

SEQ ID NO: 233260 - DNA, 25 bp, Homo sapien
ctccaactgcttctcgtcgagtgag

SEQ ID NO: 233261 - DNA, 25 bp, Homo sapien
tctgtttctggagggattgtgttgt

SEQ ID NO: 233262 - DNA, 25 bp, Homo sapien
caacattcaatttgtacttggggat

SEQ ID NO: 233263 - DNA, 25 bp, Homo sapien
caatttgtacttggggattgagcca

SEQ ID NO: 233264 - DNA, 25 bp, Homo sapien
gattgagccatcactccatataatc

SEQ ID NO: 233265 - DNA, 25 bp, Homo sapien
actccatataatctcaggaaaggtg

SEQ ID NO: 233266 - DNA, 25 bp, Homo sapien
gaattgcatccaagggcggcccttt

SEQ ID NO: 233267 - DNA, 25 bp, Homo sapien
aaatagggtagtgctctccgcccca

SEQ ID NO: 233268 - DNA, 25 bp, Homo sapien
gatcacgtcccagggcagtgcttct

SEQ ID NO: 233269 - DNA, 25 bp, Homo sapien
ttccacacttgagggctggcgttgg

SEQ ID NO: 233270 - DNA, 25 bp, Homo sapien
aggcgccttgttctccccggccagg

SEQ ID NO: 233271 - DNA, 25 bp, Homo sapien
ccctctcttccacaaccttcaacag

SEQ ID NO: 233272 - DNA, 25 bp, Homo sapien
tcttccacaaccttcaacaggcgcc

SEQ ID NO: 233273 - DNA, 25 bp, Homo sapien
ttcaacaggcgccttgttctccccg

SEQ ID NO: 233274 - DNA, 25 bp, Homo sapien
tggtgaccatcgtttcccagcccag

SEQ ID NO: 233275 - DNA, 25 bp, Homo sapien
atgaggggaggaaataaacgcaggg

SEQ ID NO: 233276 - DNA, 25 bp, Homo sapien
ggatggtgaccatcgtttcccagcc

SEQ ID NO: 233277 - DNA, 25 bp, Homo sapien
aatgaggggaggaaataaacgcagg

SEQ ID NO: 233278 - DNA, 25 bp, Homo sapien
taagggtaccgctgagcagaaagag

SEQ ID NO: 233279 - DNA, 25 bp, Homo sapien
gaaccttccgagctctgcagtagcc

SEQ ID NO: 233280 - DNA, 25 bp, Homo sapien
gctggcaatggtggtcttccatctc

SEQ ID NO: 233281 - DNA, 25 bp, Homo sapien
tgctctccagggatgataagggtac

SEQ ID NO: 233282 - DNA, 25 bp, Homo sapien
cggcatcctaacagcatttcagaga

SEQ ID NO: 233283 - DNA, 25 bp, Homo sapien
tgggcacggcatcctaacagcattt

SEQ ID NO: 233284 - DNA, 25 bp, Homo sapien
tcttctctggatcgttggaattggt

SEQ ID NO: 233285 - DNA, 25 bp, Homo sapien
gccctcgagggatcaatgtttttca

SEQ ID NO: 233286 - DNA, 25 bp, Homo sapien
ataaggaaggtagaatgtgaaaggc

SEQ ID NO: 233287 - DNA, 25 bp, Homo sapien
tgaaaggctgattccatccccatct

SEQ ID NO: 233288 - DNA, 25 bp, Homo sapien
gaccctgcccttaaggctctcatag

SEQ ID NO: 233289 - DNA, 25 bp, Homo sapien
tagctgtaggcactatgagaaacag

SEQ ID NO: 233290 - DNA, 25 bp, Homo sapien
agctgtaggcactatgagaaacaga

SEQ ID NO: 233291 - DNA, 25 bp, Homo sapien
gaaacagaccctgcccttaaggctc

SEQ ID NO: 233292 - DNA, 25 bp, Homo sapien
tgatgctgtccttcgaatcccctct

SEQ ID NO: 233293 - DNA, 25 bp, Homo sapien
cactagagtgccaactctgcaagac

SEQ ID NO: 233294 - DNA, 25 bp, Homo sapien
ggatgggcttgccacgtagatcact

SEQ ID NO: 233295 - DNA, 25 bp, Homo sapien
tctgcaagacactgatgctgtcctt

SEQ ID NO: 233296 - DNA, 25 bp, Homo sapien
tatgttaccagtgggaatttcagca

SEQ ID NO: 233297 - DNA, 25 bp, Homo sapien
tttatgttaccagtgggaatttcag

SEQ ID NO: 233298 - DNA, 25 bp, Homo sapien
ttatgttaccagtgggaatttcagc

SEQ ID NO: 233299 - DNA, 25 bp, Homo sapien
tgttaccagtgggaatttcagcagg

SEQ ID NO: 233300 - DNA, 25 bp, Homo sapien
tgcccagtcaaacgcacagggattc

SEQ ID NO: 233301 - DNA, 25 bp, Homo sapien
ctgcatgcccagtcaaacgcacagg

SEQ ID NO: 233302 - DNA, 25 bp, Homo sapien
catgcccagtcaaacgcacagggat

SEQ ID NO: 233303 - DNA, 25 bp, Homo sapien
ccagtcaaacgcacagggattccca

SEQ ID NO: 233304 - DNA, 25 bp, Homo sapien
gaagtcatagatggatgagtggtct

SEQ ID NO: 233305 - DNA, 25 bp, Homo sapien
aagcttccagaagtcatagatggat

SEQ ID NO: 233306 - DNA, 25 bp, Homo sapien
tccagaagtcatagatggatgagtg

SEQ ID NO: 233307 - DNA, 25 bp, Homo sapien
catagatggatgagtggtctggttc

SEQ ID NO: 233308 - DNA, 25 bp, Homo sapien
aggcctccgggacgcctgcaatggt

SEQ ID NO: 233309 - DNA, 25 bp, Homo sapien
gcaatggtatcctgaattcccctcc

SEQ ID NO: 233310 - DNA, 25 bp, Homo sapien
gtatcctgaattcccctcctagagc

SEQ ID NO: 233311 - DNA, 25 bp, Homo sapien
gacgcctgcaatggtatcctgaatt

SEQ ID NO: 233312 - DNA, 25 bp, Homo sapien
tccaccaaattcaccaatcggttgt

SEQ ID NO: 233313 - DNA, 25 bp, Homo sapien
atgcggcatccacacgaacatcctt

SEQ ID NO: 233314 - DNA, 25 bp, Homo sapien
tcaccaatcggttgtgatatgcggc

SEQ ID NO: 233315 - DNA, 25 bp, Homo sapien
tgtgatatgcggcatccacacgaac

SEQ ID NO: 233316 - DNA, 25 bp, Homo sapien
gaacaatggcacctggacataaggg

SEQ ID NO: 233317 - DNA, 25 bp, Homo sapien
tctggctccacaagaagaactcatt

SEQ ID NO: 233318 - DNA, 25 bp, Homo sapien
gctttcctccacgtggtcgttcagg

SEQ ID NO: 233319 - DNA, 25 bp, Homo sapien
gaaatgagtccctggttggacagcc

SEQ ID NO: 233320 - DNA, 25 bp, Homo sapien
caaatattgccatggctgaacaatt

SEQ ID NO: 233321 - DNA, 25 bp, Homo sapien
ttcaaatattgccatggctgaacaa

SEQ ID NO: 233322 - DNA, 25 bp, Homo sapien
tgtgttcaaatattgccatggctga

SEQ ID NO: 233323 - DNA, 25 bp, Homo sapien
cttgtgttcaaatattgccatggct

SEQ ID NO: 233324 - DNA, 25 bp, Homo sapien
cttctgtttctgctgcgcttgctta

SEQ ID NO: 233325 - DNA, 25 bp, Homo sapien
ttctgtttctgctgcgcttgcttac

SEQ ID NO: 233326 - DNA, 25 bp, Homo sapien
cttctttcccaggactcttctgttt

SEQ ID NO: 233327 - DNA, 25 bp, Homo sapien
tttcccaggactcttctgtttctgc

SEQ ID NO: 233328 - DNA, 25 bp, Homo sapien
ccacccagttaatccaaaaagccag

SEQ ID NO: 233329 - DNA, 25 bp, Homo sapien
ctgctgctaattccattaactgaga

SEQ ID NO: 233330 - DNA, 25 bp, Homo sapien
accacccacccacgcaggtagcctg

SEQ ID NO: 233331 - DNA, 25 bp, Homo sapien
ggttgttttggggatatgccaccca

SEQ ID NO: 233332 - DNA, 25 bp, Homo sapien
aatggaggtaattaccccaatcagc

SEQ ID NO: 233333 - DNA, 25 bp, Homo sapien
aggtaattaccccaatcagccccat

SEQ ID NO: 233334 - DNA, 25 bp, Homo sapien
tctaatggaggtaattaccccaatc

SEQ ID NO: 233335 - DNA, 25 bp, Homo sapien
tggaggtaattaccccaatcagccc

SEQ ID NO: 233336 - DNA, 25 bp, Homo sapien
gagtgagatccattagggaaagcca

SEQ ID NO: 233337 - DNA, 25 bp, Homo sapien
ctatccagagtgagatccattaggg

SEQ ID NO: 233338 - DNA, 25 bp, Homo sapien
tccagagtgagatccattagggaaa

SEQ ID NO: 233339 - DNA, 25 bp, Homo sapien
tgagatccattagggaaagccagcc

SEQ ID NO: 233340 - DNA, 25 bp, Homo sapien
gaaatcgccaaccactaacagagag

SEQ ID NO: 233341 - DNA, 25 bp, Homo sapien
gatattctgcagaccgtccctattg

SEQ ID NO: 233342 - DNA, 25 bp, Homo sapien
ggctgttgctggaaccctcgtaact

SEQ ID NO: 233343 - DNA, 25 bp, Homo sapien
tattgcagcccaagcatctgaagct

SEQ ID NO: 233344 - DNA, 25 bp, Homo sapien
taatttccaagtgtaggccctgctc

SEQ ID NO: 233345 - DNA, 25 bp, Homo sapien
gattagttaaagctcaccctgtgag

SEQ ID NO: 233346 - DNA, 25 bp, Homo sapien
tctaggcatcagaagcatgtcagtc

SEQ ID NO: 233347 - DNA, 25 bp, Homo sapien
ctaatcatctcttaaggcagcaggg

SEQ ID NO: 233348 - DNA, 25 bp, Homo sapien
gcacttcgacacctttgatttcctt

SEQ ID NO: 233349 - DNA, 25 bp, Homo sapien
tcctttgagccttggaacatgaatt

SEQ ID NO: 233350 - DNA, 25 bp, Homo sapien
gatcaaagcacttcgacacctttga

SEQ ID NO: 233351 - DNA, 25 bp, Homo sapien
tggatccaaatcattcccaacatac

SEQ ID NO: 233352 - DNA, 25 bp, Homo sapien
tgagtcgcgacatggataacacact

SEQ ID NO: 233353 - DNA, 25 bp, Homo sapien
tcaacacaggtagtttcaggagtcc

SEQ ID NO: 233354 - DNA, 25 bp, Homo sapien
aaagtccaccatgaattgagtcgcg

SEQ ID NO: 233355 - DNA, 25 bp, Homo sapien
tcagtgtatggcacaccatgggcac

SEQ ID NO: 233356 - DNA, 25 bp, Homo sapien
tcaagaccacgtcctcaggtggtag

SEQ ID NO: 233357 - DNA, 25 bp, Homo sapien
accacgtcctcaggtggtaggtggc

SEQ ID NO: 233358 - DNA, 25 bp, Homo sapien
cgtcctcaggtggtaggtggcactt

SEQ ID NO: 233359 - DNA, 25 bp, Homo sapien
aagaccacgtcctcaggtggtaggt

SEQ ID NO: 233360 - DNA, 25 bp, Homo sapien
tcggggattcatcccccgtggtgca

SEQ ID NO: 233361 - DNA, 25 bp, Homo sapien
tgagaggctgagctcggggattcat

SEQ ID NO: 233362 - DNA, 25 bp, Homo sapien
aagatgagaggctgagctcggggat

SEQ ID NO: 233363 - DNA, 25 bp, Homo sapien
agaggctgagctcggggattcatcc

SEQ ID NO: 233364 - DNA, 25 bp, Homo sapien
agcttttgcgatgcctcccgagaaa

SEQ ID NO: 233365 - DNA, 25 bp, Homo sapien
gtgtggctggagtcaacacagcagc

SEQ ID NO: 233366 - DNA, 25 bp, Homo sapien
agcagcttttgcgatgcctcccgag

SEQ ID NO: 233367 - DNA, 25 bp, Homo sapien
caggtgtggctggagtcaacacagc

SEQ ID NO: 233368 - DNA, 25 bp, Homo sapien
ttcctccggaggagcaacatcttcc

SEQ ID NO: 233369 - DNA, 25 bp, Homo sapien
taacgctcttgggagcagttcagtc

SEQ ID NO: 233370 - DNA, 25 bp, Homo sapien
gttagtgtcgcttctccaatacaga

SEQ ID NO: 233371 - DNA, 25 bp, Homo sapien
ccccagaacagttagtgtcgcttct

SEQ ID NO: 233372 - DNA, 25 bp, Homo sapien
aacaggctttcagagatgaacactt

SEQ ID NO: 233373 - DNA, 25 bp, Homo sapien
ctttccaagaaaacaggctttcaga

SEQ ID NO: 233374 - DNA, 25 bp, Homo sapien
agaaaacaggctttcagagatgaac

SEQ ID NO: 233375 - DNA, 25 bp, Homo sapien
aaaacaggctttcagagatgaacac

SEQ ID NO: 233376 - DNA, 25 bp, Homo sapien
gtgttcgtctcatagtggaagccag

SEQ ID NO: 233377 - DNA, 25 bp, Homo sapien
gttctacttcgtatgtgttcgtctc

SEQ ID NO: 233378 - DNA, 25 bp, Homo sapien
ttccgaaactgctccacatcatcca

SEQ ID NO: 233379 - DNA, 25 bp, Homo sapien
cgtatgtgttcgtctcatagtggaa

SEQ ID NO: 233380 - DNA, 25 bp, Homo sapien
tcgtaatttgtccagccagtgacct

SEQ ID NO: 233381 - DNA, 25 bp, Homo sapien
tccaggatgaagacgacttccggct

SEQ ID NO: 233382 - DNA, 25 bp, Homo sapien
gcaagtgggtgtcagccaaaaacat

SEQ ID NO: 233383 - DNA, 25 bp, Homo sapien
gtgacctaggaattccctaagcaag

SEQ ID NO: 233384 - DNA, 25 bp, Homo sapien
taggctgcggttttcgcttcaggcc

SEQ ID NO: 233385 - DNA, 25 bp, Homo sapien
caccatcataggctgcggttttcgc

SEQ ID NO: 233386 - DNA, 25 bp, Homo sapien
aggctcacacgtggcctgttcacca

SEQ ID NO: 233387 - DNA, 25 bp, Homo sapien
cctgttcaccatcataggctgcggt

SEQ ID NO: 233388 - DNA, 25 bp, Homo sapien
tcagaatgcgtttgtaacagccacg

SEQ ID NO: 233389 - DNA, 25 bp, Homo sapien
agagctgtaacacttaccgggagga

SEQ ID NO: 233390 - DNA, 25 bp, Homo sapien
tcgtgagctggcgagaccatgaacc

SEQ ID NO: 233391 - DNA, 25 bp, Homo sapien
tcagatcttagctgggtacctgtaa

SEQ ID NO: 233392 - DNA, 25 bp, Homo sapien
tgttcagcgtgcatccgccactgaa

SEQ ID NO: 233393 - DNA, 25 bp, Homo sapien
gagcttttcaatatggcccctgccc

SEQ ID NO: 233394 - DNA, 25 bp, Homo sapien
tgcaagtgagagcttttcaatatgg

SEQ ID NO: 233395 - DNA, 25 bp, Homo sapien
actgttcagcgtgcatccgccactg

SEQ ID NO: 233396 - DNA, 25 bp, Homo sapien
gatattatcggagccctgattgcaa

SEQ ID NO: 233397 - DNA, 25 bp, Homo sapien
tgacaatcaatagcagccgggcttt

SEQ ID NO: 233398 - DNA, 25 bp, Homo sapien
gtaagtaagcgctttgaagccgggc

SEQ ID NO: 233399 - DNA, 25 bp, Homo sapien
acattataattcacagggttgcggg

SEQ ID NO: 233400 - DNA, 25 bp, Homo sapien
gacttcaccgaaggcagctactgtg

SEQ ID NO: 233401 - DNA, 25 bp, Homo sapien
ttacagggcaagtcaaagaggctca

SEQ ID NO: 233402 - DNA, 25 bp, Homo sapien
caggaaactgaatcccttgcagggt

SEQ ID NO: 233403 - DNA, 25 bp, Homo sapien
ccagaagggcttagaggagctcaca

SEQ ID NO: 233404 - DNA, 25 bp, Homo sapien
gaatatctgaactaaatgaagcctc

SEQ ID NO: 233405 - DNA, 25 bp, Homo sapien
tatctgaactaaatgaagcctcagg

SEQ ID NO: 233406 - DNA, 25 bp, Homo sapien
cagaatatctgaactaaatgaagcc

SEQ ID NO: 233407 - DNA, 25 bp, Homo sapien
ttcccagaatatctgaactaaatga

SEQ ID NO: 233408 - DNA, 25 bp, Homo sapien
tcttttctaaggagcgccatgacca

SEQ ID NO: 233409 - DNA, 25 bp, Homo sapien
ggaaagccaggcacatcatgtgatt

SEQ ID NO: 233410 - DNA, 25 bp, Homo sapien
aaggagcgccatgaccagaacacat

SEQ ID NO: 233411 - DNA, 25 bp, Homo sapien
ctgtgtcttttctaaggagcgccat

SEQ ID NO: 233412 - DNA, 25 bp, Homo sapien
tgttggctgaggttcctgcatgtcc

SEQ ID NO: 233413 - DNA, 25 bp, Homo sapien
tgcatgtcctctgaattatgatgct

SEQ ID NO: 233414 - DNA, 25 bp, Homo sapien
aacatcatgcttggtcctgaagttt

SEQ ID NO: 233415 - DNA, 25 bp, Homo sapien
aaagaggtttttccattcatgcgga

SEQ ID NO: 233416 - DNA, 25 bp, Homo sapien
gaggaaaatgcttgtagctgaaagt

SEQ ID NO: 233417 - DNA, 25 bp, Homo sapien
tctggcacaatgtatgtttggctgc

SEQ ID NO: 233418 - DNA, 25 bp, Homo sapien
caaagatgaatcatggtatacacac

SEQ ID NO: 233419 - DNA, 25 bp, Homo sapien
gcttgtagctgaaagttctggcaca

SEQ ID NO: 233420 - DNA, 25 bp, Homo sapien
gcctttgagcatgggccctctgcaa

SEQ ID NO: 233421 - DNA, 25 bp, Homo sapien
tcaagatggcaacagtcgagcacta

SEQ ID NO: 233422 - DNA, 25 bp, Homo sapien
tattgttgccatatagagaggaggg

SEQ ID NO: 233423 - DNA, 25 bp, Homo sapien
taatttcaaggtcctagtccagggc

SEQ ID NO: 233424 - DNA, 25 bp, Homo sapien
aaatgacgccccaaaacgagcaaag

SEQ ID NO: 233425 - DNA, 25 bp, Homo sapien
ctggagcccctgaagaagaatgagt

SEQ ID NO: 233426 - DNA, 25 bp, Homo sapien
gaaattccaggcacgaaaatcagga

SEQ ID NO: 233427 - DNA, 25 bp, Homo sapien
catgagcatgctgaagagagacaca

SEQ ID NO: 233428 - DNA, 25 bp, Homo sapien
gcaactggaagacaatacatcacag

SEQ ID NO: 233429 - DNA, 25 bp, Homo sapien
acatcacagaaactttatggtaggt

SEQ ID NO: 233430 - DNA, 25 bp, Homo sapien
tttattgcaactggaagacaataca

SEQ ID NO: 233431 - DNA, 25 bp, Homo sapien
gaagacaatacatcacagaaacttt

SEQ ID NO: 233432 - DNA, 25 bp, Homo sapien
tcagctatgagctcagatggcctca

SEQ ID NO: 233433 - DNA, 25 bp, Homo sapien
caacaggaagggtactcgtgagcat

SEQ ID NO: 233434 - DNA, 25 bp, Homo sapien
gatggcctcaacatacatactcaag

SEQ ID NO: 233435 - DNA, 25 bp, Homo sapien
tacaagtgtatatgcttcccagaca

SEQ ID NO: 233436 - DNA, 25 bp, Homo sapien
ctgatttcagaagtacaacagcaag

SEQ ID NO: 233437 - DNA, 25 bp, Homo sapien
tctgatttcagaagtacaacagcaa

SEQ ID NO: 233438 - DNA, 25 bp, Homo sapien
gtctgatttcagaagtacaacagca

SEQ ID NO: 233439 - DNA, 25 bp, Homo sapien
ccatagacacatcggtttcggctgt

SEQ ID NO: 233440 - DNA, 25 bp, Homo sapien
atagacacatcggtttcggctgtta

SEQ ID NO: 233441 - DNA, 25 bp, Homo sapien
cagcaccatagacacatcggtttcg

SEQ ID NO: 233442 - DNA, 25 bp, Homo sapien
gcaccatagacacatcggtttcggc

SEQ ID NO: 233443 - DNA, 25 bp, Homo sapien
tcgccggtgctctctcaaaggaaga

SEQ ID NO: 233444 - DNA, 25 bp, Homo sapien
taaagcaaccgagctgacgagtctg

SEQ ID NO: 233445 - DNA, 25 bp, Homo sapien
gaattcacaaaggtaggcagatcta

SEQ ID NO: 233446 - DNA, 25 bp, Homo sapien
caaggagttaaccaccatcgccggt

SEQ ID NO: 233447 - DNA, 25 bp, Homo sapien
gatttacacattccgttacaaagga

SEQ ID NO: 233448 - DNA, 25 bp, Homo sapien
tgcaatataaaccaagtccagagtt

SEQ ID NO: 233449 - DNA, 25 bp, Homo sapien
gaaactccagaaacaggaacaccac

SEQ ID NO: 233450 - DNA, 25 bp, Homo sapien
atttaaattagatcacagtgctgca

SEQ ID NO: 233451 - DNA, 25 bp, Homo sapien
tgggctgggacctacgacactaagg

SEQ ID NO: 233452 - DNA, 25 bp, Homo sapien
taaaaatcaattgcaacatctgggc

SEQ ID NO: 233453 - DNA, 25 bp, Homo sapien
tgttcttgggaatcggcctctggca

SEQ ID NO: 233454 - DNA, 25 bp, Homo sapien
tggaacttgcgtcagtagcccttgg

SEQ ID NO: 233455 - DNA, 25 bp, Homo sapien
caatagcaagtaatcgtagacgtcg

SEQ ID NO: 233456 - DNA, 25 bp, Homo sapien
cctgccccgtgtgagtatgtgagat

SEQ ID NO: 233457 - DNA, 25 bp, Homo sapien
gatgtgttcacggttggtttccaaa

SEQ ID NO: 233458 - DNA, 25 bp, Homo sapien
taaatgtatccgagggccaatagca

SEQ ID NO: 233459 - DNA, 25 bp, Homo sapien
aaattctctactgctcttggaggag

SEQ ID NO: 233460 - DNA, 25 bp, Homo sapien
tggaagctaaaagaacacctgacgt

SEQ ID NO: 233461 - DNA, 25 bp, Homo sapien
ctcttaatggtgttcaggcgatctg

SEQ ID NO: 233462 - DNA, 25 bp, Homo sapien
ggaaggaattccaagactaaagtga

SEQ ID NO: 233463 - DNA, 25 bp, Homo sapien
tcaaggtgtcgctcaggttccatag

SEQ ID NO: 233464 - DNA, 25 bp, Homo sapien
taattggaagaagtcctcggccaga

SEQ ID NO: 233465 - DNA, 25 bp, Homo sapien
tccggcagatccaacgaagggagac

SEQ ID NO: 233466 - DNA, 25 bp, Homo sapien
cttgttaaggacacggacaacctca

SEQ ID NO: 233467 - DNA, 25 bp, Homo sapien
caataaggcccattagcacggttcc

SEQ ID NO: 233468 - DNA, 25 bp, Homo sapien
tcagctctcgcaatctaggtggtct

SEQ ID NO: 233469 - DNA, 25 bp, Homo sapien
tcatgaattcgacctgctgtagagg

SEQ ID NO: 233470 - DNA, 25 bp, Homo sapien
cattacctcgtcctggcagatgggc

SEQ ID NO: 233471 - DNA, 25 bp, Homo sapien
caagccctaccagagcatgaagata

SEQ ID NO: 233472 - DNA, 25 bp, Homo sapien
tcacttgggcagttaagaagacaca

SEQ ID NO: 233473 - DNA, 25 bp, Homo sapien
tgcagagtaagttccccaacagtca

SEQ ID NO: 233474 - DNA, 25 bp, Homo sapien
gattttctcaagtaagcgtcccata

SEQ ID NO: 233475 - DNA, 25 bp, Homo sapien
cgtgcgtgcacagggccaatcttca

SEQ ID NO: 233476 - DNA, 25 bp, Homo sapien
gcacagggccaatcttcaggcttat

SEQ ID NO: 233477 - DNA, 25 bp, Homo sapien
cagggccaatcttcaggcttatggc

SEQ ID NO: 233478 - DNA, 25 bp, Homo sapien
gcgtgcgtgcacagggccaatcttc

SEQ ID NO: 233479 - DNA, 25 bp, Homo sapien
gatgcgcatgaacagtccaacgtcc

SEQ ID NO: 233480 - DNA, 25 bp, Homo sapien
gaacccaatgggatggacaacctga

SEQ ID NO: 233481 - DNA, 25 bp, Homo sapien
tgtgctcgccgtgtgacaattccag

SEQ ID NO: 233482 - DNA, 25 bp, Homo sapien
gtccacctcgtaagatgtcatcggg

SEQ ID NO: 233483 - DNA, 25 bp, Homo sapien
tggtcgtaagttcaaaacaaatcag

SEQ ID NO: 233484 - DNA, 25 bp, Homo sapien
gatattgacgttgacatccctgcgg

SEQ ID NO: 233485 - DNA, 25 bp, Homo sapien
gcttttgtaaaacagctgagtgtca

SEQ ID NO: 233486 - DNA, 25 bp, Homo sapien
tgagtgtcaatatgagttctatggc

SEQ ID NO: 233487 - DNA, 25 bp, Homo sapien
gcactgctgtagttgtgatcctcct

SEQ ID NO: 233488 - DNA, 25 bp, Homo sapien
ccttggcgaagtgctggcgcttctt

SEQ ID NO: 233489 - DNA, 25 bp, Homo sapien
caaactcatagtggtcgtcggctga

SEQ ID NO: 233490 - DNA, 25 bp, Homo sapien
aggagggaccctgccgcttctttca

SEQ ID NO: 233491 - DNA, 25 bp, Homo sapien
tgagcgcctaacagaaatgcatgac

SEQ ID NO: 233492 - DNA, 25 bp, Homo sapien
gcaaagatacctgccatgtggtgac

SEQ ID NO: 233493 - DNA, 25 bp, Homo sapien
tctgaagcggctacattaggaggct

SEQ ID NO: 233494 - DNA, 25 bp, Homo sapien
aaaaagcctgctctcgtctgaagcg

SEQ ID NO: 233495 - DNA, 25 bp, Homo sapien
gggttggatcggatatagacactgc

SEQ ID NO: 233496 - DNA, 25 bp, Homo sapien
gatcggatatagacactgccacagc

SEQ ID NO: 233497 - DNA, 25 bp, Homo sapien
ggatatagacactgccacagcgatg

SEQ ID NO: 233498 - DNA, 25 bp, Homo sapien
gacactgccacagcgatgttgcagc

SEQ ID NO: 233499 - DNA, 25 bp, Homo sapien
tgcagaggaccatgtttaactccgt

SEQ ID NO: 233500 - DNA, 25 bp, Homo sapien
cagagggcaataaactacgacttcc

SEQ ID NO: 233501 - DNA, 25 bp, Homo sapien
caactgatcacttgcggagcaggga

SEQ ID NO: 233502 - DNA, 25 bp, Homo sapien
gcctataaggcgtctgtagcactca

SEQ ID NO: 233503 - DNA, 25 bp, Homo sapien
gtgcttccttatcgcgaaagtggga

SEQ ID NO: 233504 - DNA, 25 bp, Homo sapien
tccttgtgcttccttatcgcgaaag

SEQ ID NO: 233505 - DNA, 25 bp, Homo sapien
tccttatcgcgaaagtgggaatagt

SEQ ID NO: 233506 - DNA, 25 bp, Homo sapien
cttgtgcttccttatcgcgaaagtg

SEQ ID NO: 233507 - DNA, 25 bp, Homo sapien
gaggacacgaattaatgcctgcagg

SEQ ID NO: 233508 - DNA, 25 bp, Homo sapien
acacgaattaatgcctgcaggtgcc

SEQ ID NO: 233509 - DNA, 25 bp, Homo sapien
tgaggacacgaattaatgcctgcag

SEQ ID NO: 233510 - DNA, 25 bp, Homo sapien
ggacacgaattaatgcctgcaggtg

SEQ ID NO: 233511 - DNA, 25 bp, Homo sapien
ctgacagcaatggctgtgaagctta

SEQ ID NO: 233512 - DNA, 25 bp, Homo sapien
gtgaagcttattcctggttaggacc

SEQ ID NO: 233513 - DNA, 25 bp, Homo sapien
ggacccatgctccttatgtctggga

SEQ ID NO: 233514 - DNA, 25 bp, Homo sapien
tgcctgtctgttagtgcctggcgcc

SEQ ID NO: 233515 - DNA, 25 bp, Homo sapien
gaggagggtcacttgtagctgaagg

SEQ ID NO: 233516 - DNA, 25 bp, Homo sapien
agacaaggcatctgaccttggacac

SEQ ID NO: 233517 - DNA, 25 bp, Homo sapien
ttttgtggaagacaaggcatctgac

SEQ ID NO: 233518 - DNA, 25 bp, Homo sapien
gacgaagggtggacgccagggaatg

SEQ ID NO: 233519 - DNA, 25 bp, Homo sapien
tgaagaatttggcagggatgggaac

SEQ ID NO: 233520 - DNA, 25 bp, Homo sapien
cgtgatccatttctaagagttctgg

SEQ ID NO: 233521 - DNA, 25 bp, Homo sapien
catgctggcccggtttcctgtaagc

SEQ ID NO: 233522 - DNA, 25 bp, Homo sapien
gaactgttctatggcaccatgctgg

SEQ ID NO: 233523 - DNA, 25 bp, Homo sapien
tgtcaccctcatgggccttgaggct

SEQ ID NO: 233524 - DNA, 25 bp, Homo sapien
cagtagtgacaatctctaccctggc

SEQ ID NO: 233525 - DNA, 25 bp, Homo sapien
cacgctgaggatacggcactggtag

SEQ ID NO: 233526 - DNA, 25 bp, Homo sapien
ccaccagtgagataacagtagtgac

SEQ ID NO: 233527 - DNA, 25 bp, Homo sapien
catcccacatagaaagtgaaagggg

SEQ ID NO: 233528 - DNA, 25 bp, Homo sapien
ctgcatcccacatagaaagtgaaag

SEQ ID NO: 233529 - DNA, 25 bp, Homo sapien
gcatcccacatagaaagtgaaaggg

SEQ ID NO: 233530 - DNA, 25 bp, Homo sapien
cccacatagaaagtgaaaggggaag

SEQ ID NO: 233531 - DNA, 25 bp, Homo sapien
ctggtgcactaggagtctctctgga

SEQ ID NO: 233532 - DNA, 25 bp, Homo sapien
tcctccccagggatttagttgagga

SEQ ID NO: 233533 - DNA, 25 bp, Homo sapien
tttagttgaggactctgatcttttg

SEQ ID NO: 233534 - DNA, 25 bp, Homo sapien
aagtagatgggattaatgggattgt

SEQ ID NO: 233535 - DNA, 25 bp, Homo sapien
tgggattaatgggattgtagaagca

SEQ ID NO: 233536 - DNA, 25 bp, Homo sapien
tgcatggctaaaaaggtaaaggacg

SEQ ID NO: 233537 - DNA, 25 bp, Homo sapien
ggccaggtggtcagctctaagagtt

SEQ ID NO: 233538 - DNA, 25 bp, Homo sapien
ttttctcccatgagctgcaaactgc

SEQ ID NO: 233539 - DNA, 25 bp, Homo sapien
aggtgaggtttaagatcccttccag

SEQ ID NO: 233540 - DNA, 25 bp, Homo sapien
gccctggacatgtcattcttttctg

SEQ ID NO: 233541 - DNA, 25 bp, Homo sapien
gcgagccctggacatgtcattcttt

SEQ ID NO: 233542 - DNA, 25 bp, Homo sapien
ccctggacatgtcattcttttctgc

SEQ ID NO: 233543 - DNA, 25 bp, Homo sapien
gagccctggacatgtcattcttttc

SEQ ID NO: 233544 - DNA, 25 bp, Homo sapien
gaatgtaagaaacctgggactcctc

SEQ ID NO: 233545 - DNA, 25 bp, Homo sapien
tgtgggacagcccacgatgctgtga

SEQ ID NO: 233546 - DNA, 25 bp, Homo sapien
gcatgtagggatcaaaaagagccct

SEQ ID NO: 233547 - DNA, 25 bp, Homo sapien
aaggccagcaacagctctcccaggg

SEQ ID NO: 233548 - DNA, 25 bp, Homo sapien
ggcaaatagaagctgtgtaatgatc

SEQ ID NO: 233549 - DNA, 25 bp, Homo sapien
cctggcaaatagaagctgtgtaatg

SEQ ID NO: 233550 - DNA, 25 bp, Homo sapien
ctggcaaatagaagctgtgtaatga

SEQ ID NO: 233551 - DNA, 25 bp, Homo sapien
caaatagaagctgtgtaatgatcag

SEQ ID NO: 233552 - DNA, 25 bp, Homo sapien
gatacacaagtttggctcagaggct

SEQ ID NO: 233553 - DNA, 25 bp, Homo sapien
gggcccatagtgaaagctactcttg

SEQ ID NO: 233554 - DNA, 25 bp, Homo sapien
gaaggcggctcctgttgaaggtcca

SEQ ID NO: 233555 - DNA, 25 bp, Homo sapien
taaactatgaggcaacacaggaaag

SEQ ID NO: 233556 - DNA, 25 bp, Homo sapien
catttctgagcacgcaaaccaggtt

SEQ ID NO: 233557 - DNA, 25 bp, Homo sapien
tgtcactagttcgaagcagctcctc

SEQ ID NO: 233558 - DNA, 25 bp, Homo sapien
caggatcatctggtggcccgagaaa

SEQ ID NO: 233559 - DNA, 25 bp, Homo sapien
acaggactgggtcttgcgctaggcc

SEQ ID NO: 233560 - DNA, 25 bp, Homo sapien
ggagtgattggcagcggccgcacgc

SEQ ID NO: 233561 - DNA, 25 bp, Homo sapien
gcggccgcacgccaggaaacagccc

SEQ ID NO: 233562 - DNA, 25 bp, Homo sapien
aatgggagtgattggcagcggccgc

SEQ ID NO: 233563 - DNA, 25 bp, Homo sapien
caggaaacagccctcggctcaggac

SEQ ID NO: 233564 - DNA, 25 bp, Homo sapien
tcagactagtagctcgcaaccaaag

SEQ ID NO: 233565 - DNA, 25 bp, Homo sapien
gacaccgcacgtgaattcaactgtg

SEQ ID NO: 233566 - DNA, 25 bp, Homo sapien
tgaagatttccgttccaagtcagaa

SEQ ID NO: 233567 - DNA, 25 bp, Homo sapien
acatgcagacacgtacgtacacctg

SEQ ID NO: 233568 - DNA, 25 bp, Homo sapien
ttctccatacaaactccaagatctc

SEQ ID NO: 233569 - DNA, 25 bp, Homo sapien
cagcctgattttgtctgagggttac

SEQ ID NO: 233570 - DNA, 25 bp, Homo sapien
ttgtccattctccatacaaactcca

SEQ ID NO: 233571 - DNA, 25 bp, Homo sapien
acaaactccaagatctccacaccag

SEQ ID NO: 233572 - DNA, 25 bp, Homo sapien
taaggaacagaatgggacagaaacc

SEQ ID NO: 233573 - DNA, 25 bp, Homo sapien
tcaacatgatcaacatccacagagg

SEQ ID NO: 233574 - DNA, 25 bp, Homo sapien
ccacagaggaatcctgaggcggcct

SEQ ID NO: 233575 - DNA, 25 bp, Homo sapien
gacttagctgagttacggaaggcac

SEQ ID NO: 233576 - DNA, 25 bp, Homo sapien
gccagctgtgacacttaactatacc

SEQ ID NO: 233577 - DNA, 25 bp, Homo sapien
caagtgtcaggaacgtggcttctga

SEQ ID NO: 233578 - DNA, 25 bp, Homo sapien
cacttaactatacccctgtctttct

SEQ ID NO: 233579 - DNA, 25 bp, Homo sapien
cccaagtgtcaggaacgtggcttct

SEQ ID NO: 233580 - DNA, 25 bp, Homo sapien
catccttgcaggttaggccagttac

SEQ ID NO: 233581 - DNA, 25 bp, Homo sapien
caaaagggctggacgttgaaagtca

SEQ ID NO: 233582 - DNA, 25 bp, Homo sapien
tttaactagcaagagggcaaccttc

SEQ ID NO: 233583 - DNA, 25 bp, Homo sapien
gatgtactgaagtgcactggcctcc

SEQ ID NO: 233584 - DNA, 25 bp, Homo sapien
cactgtcttggagccccgttcttgg

SEQ ID NO: 233585 - DNA, 25 bp, Homo sapien
tctgttattcctgtccatgagcgtc

SEQ ID NO: 233586 - DNA, 25 bp, Homo sapien
gacggtgaatgcaaaggtagactcc

SEQ ID NO: 233587 - DNA, 25 bp, Homo sapien
tctgtgacctttgtaggcaccccgg

SEQ ID NO: 233588 - DNA, 25 bp, Homo sapien
actgctcagcaagccatgtggccct

SEQ ID NO: 233589 - DNA, 25 bp, Homo sapien
ctgaggatggatgttttcctgtgtg

SEQ ID NO: 233590 - DNA, 25 bp, Homo sapien
gagccagaacccaaaatgagctgaa

SEQ ID NO: 233591 - DNA, 25 bp, Homo sapien
ctgttttgggtctgaggatggatgt

SEQ ID NO: 233592 - DNA, 25 bp, Homo sapien
tatctcagggggagtattcaaaagc

SEQ ID NO: 233593 - DNA, 25 bp, Homo sapien
cagggggagtattcaaaagcatcat

SEQ ID NO: 233594 - DNA, 25 bp, Homo sapien
gcttgtatctcagggggagtattca

SEQ ID NO: 233595 - DNA, 25 bp, Homo sapien
tgcttgtatctcagggggagtattc

SEQ ID NO: 233596 - DNA, 25 bp, Homo sapien
accggttcccagcagcctatttcaa

SEQ ID NO: 233597 - DNA, 25 bp, Homo sapien
aaacggtcacacgtcttaaagatgt

SEQ ID NO: 233598 - DNA, 25 bp, Homo sapien
tctggaccggttcccagcagcctat

SEQ ID NO: 233599 - DNA, 25 bp, Homo sapien
tcttctctgtagtacgagactggaa

SEQ ID NO: 233600 - DNA, 25 bp, Homo sapien
gaatcaacggtccagctatttgggt

SEQ ID NO: 233601 - DNA, 25 bp, Homo sapien
gctgccagagctacggattccaagg

SEQ ID NO: 233602 - DNA, 25 bp, Homo sapien
catagcctgtcctgatgggtccctg

SEQ ID NO: 233603 - DNA, 25 bp, Homo sapien
gaaaagcactgcactagacatgagg

SEQ ID NO: 233604 - DNA, 25 bp, Homo sapien
aggatggccgggctggaagctctcc

SEQ ID NO: 233605 - DNA, 25 bp, Homo sapien
cagagtcgatcactgtccctgctgc

SEQ ID NO: 233606 - DNA, 25 bp, Homo sapien
tgagggctgtctcaggcgccccaat

SEQ ID NO: 233607 - DNA, 25 bp, Homo sapien
attctaaggtggtgttaggatggcc

SEQ ID NO: 233608 - DNA, 25 bp, Homo sapien
cttgatactccccaggcagatgctt

SEQ ID NO: 233609 - DNA, 25 bp, Homo sapien
gaaccgctttaactttgatgtcttc

SEQ ID NO: 233610 - DNA, 25 bp, Homo sapien
tctccgggcaacaagaaccgcttta

SEQ ID NO: 233611 - DNA, 25 bp, Homo sapien
tctgagtcccttaattctaacgtcc

SEQ ID NO: 233612 - DNA, 25 bp, Homo sapien
cattgccgtcacattcccgaatctg

SEQ ID NO: 233613 - DNA, 25 bp, Homo sapien
gcagctgcctaggaaaaaactcaaa

SEQ ID NO: 233614 - DNA, 25 bp, Homo sapien
aatgacccagaccaagttatgatcc

SEQ ID NO: 233615 - DNA, 25 bp, Homo sapien
tgaagcccaggacaaaggtgacaaa

SEQ ID NO: 233616 - DNA, 25 bp, Homo sapien
ggacatttggggttgccgtggaaga

SEQ ID NO: 233617 - DNA, 25 bp, Homo sapien
gggatggcagtagctcatagccatg

SEQ ID NO: 233618 - DNA, 25 bp, Homo sapien
ggatggcagtagctcatagccatgt

SEQ ID NO: 233619 - DNA, 25 bp, Homo sapien
atggcttgctgatgaccacccaaac

SEQ ID NO: 233620 - DNA, 25 bp, Homo sapien
tctggaggagcaaagagtcgcttat

SEQ ID NO: 233621 - DNA, 25 bp, Homo sapien
ttgctgatgaccacccaaacaaaag

SEQ ID NO: 233622 - DNA, 25 bp, Homo sapien
tgatgaccacccaaacaaaagcagt

SEQ ID NO: 233623 - DNA, 25 bp, Homo sapien
acaggaaacaggctacaaagaggga

SEQ ID NO: 233624 - DNA, 25 bp, Homo sapien
ggaaacaggctacaaagagggatct

SEQ ID NO: 233625 - DNA, 25 bp, Homo sapien
caggaaacaggctacaaagagggat

SEQ ID NO: 233626 - DNA, 25 bp, Homo sapien
aacaggctacaaagagggatctggg

SEQ ID NO: 233627 - DNA, 25 bp, Homo sapien
gcaccttatcattataagtcacctc

SEQ ID NO: 233628 - DNA, 25 bp, Homo sapien
cattgtttcttgcaccttatcatta

SEQ ID NO: 233629 - DNA, 25 bp, Homo sapien
aggatggctgattccattgtttctt

SEQ ID NO: 233630 - DNA, 25 bp, Homo sapien
ggctgattccattgtttcttgcacc

SEQ ID NO: 233631 - DNA, 25 bp, Homo sapien
acaagatatctgacttctttacaga

SEQ ID NO: 233632 - DNA, 25 bp, Homo sapien
cccaacaagatatctgacttcttta

SEQ ID NO: 233633 - DNA, 25 bp, Homo sapien
agagttaggagaatagagatttttt

SEQ ID NO: 233634 - DNA, 25 bp, Homo sapien
ggcagaaagccaaagtaatatccca

SEQ ID NO: 233635 - DNA, 25 bp, Homo sapien
ttcctgtggacacgcacacaggtgt

SEQ ID NO: 233636 - DNA, 25 bp, Homo sapien
tgtggacacgcacacaggtgtaggg

SEQ ID NO: 233637 - DNA, 25 bp, Homo sapien
cctgtggacacgcacacaggtgtag

SEQ ID NO: 233638 - DNA, 25 bp, Homo sapien
tggacacgcacacaggtgtagggta

SEQ ID NO: 233639 - DNA, 25 bp, Homo sapien
attgttccctgctgcgtgtggctgt

SEQ ID NO: 233640 - DNA, 25 bp, Homo sapien
tggcttcctacatttcgggtgagaa

SEQ ID NO: 233641 - DNA, 25 bp, Homo sapien
tgcaatctcaatgaccgtgaggctt

SEQ ID NO: 233642 - DNA, 25 bp, Homo sapien
actgaggcacaagttgagttgagcc

SEQ ID NO: 233643 - DNA, 25 bp, Homo sapien
tcctcagggcgaagaagaattagaa

SEQ ID NO: 233644 - DNA, 25 bp, Homo sapien
aattcgtcacattgattgccgggcc

SEQ ID NO: 233645 - DNA, 25 bp, Homo sapien
tcttgccactctgaccacgggatta

SEQ ID NO: 233646 - DNA, 25 bp, Homo sapien
cacgggattaaagtagctcagcagc

SEQ ID NO: 233647 - DNA, 25 bp, Homo sapien
ccagcactcgtgtctagggaaaaag

SEQ ID NO: 233648 - DNA, 25 bp, Homo sapien
tgtaaccctccttacagtgttcagc

SEQ ID NO: 233649 - DNA, 25 bp, Homo sapien
tttctcaatggagatgaaggttttc

SEQ ID NO: 233650 - DNA, 25 bp, Homo sapien
caggcgccacacactctttattaaa

SEQ ID NO: 233651 - DNA, 25 bp, Homo sapien
caaacattcttggatagtagaggtc

SEQ ID NO: 233652 - DNA, 25 bp, Homo sapien
ctgtccctcgtgtagatcccagaga

SEQ ID NO: 233653 - DNA, 25 bp, Homo sapien
tgctactagcagagtgacctcgggt

SEQ ID NO: 233654 - DNA, 25 bp, Homo sapien
cgggtaggtcccaagatactccctg

SEQ ID NO: 233655 - DNA, 25 bp, Homo sapien
cacaattggctgtacaggtagtccc

SEQ ID NO: 233656 - DNA, 25 bp, Homo sapien
agagactgcgaatgatcaaccaggg

SEQ ID NO: 233657 - DNA, 25 bp, Homo sapien
gacaacataattgcagactgccagt

SEQ ID NO: 233658 - DNA, 25 bp, Homo sapien
gagagtgtttcctgtcaagccagcg

SEQ ID NO: 233659 - DNA, 25 bp, Homo sapien
tgccgccacggaaatgacaaacaga

SEQ ID NO: 233660 - DNA, 25 bp, Homo sapien
gacgctccacggatctactgaccaa

SEQ ID NO: 233661 - DNA, 25 bp, Homo sapien
tatgcaaaagatacgcaggtgggtc

SEQ ID NO: 233662 - DNA, 25 bp, Homo sapien
tactgaccaagtggatcattctcac

SEQ ID NO: 233663 - DNA, 25 bp, Homo sapien
ttctgcacacaaaacacccaagagt

SEQ ID NO: 233664 - DNA, 25 bp, Homo sapien
gctggagttcaggggcgtggtctcg

SEQ ID NO: 233665 - DNA, 25 bp, Homo sapien
ggctggagttcaggggcgtggtctc

SEQ ID NO: 233666 - DNA, 25 bp, Homo sapien
caggctggagttcaggggcgtggtc

SEQ ID NO: 233667 - DNA, 25 bp, Homo sapien
tcccggccgtaagaagctgagcctc

SEQ ID NO: 233668 - DNA, 25 bp, Homo sapien
ggaggtttgtgcatcacgctattgc

SEQ ID NO: 233669 - DNA, 25 bp, Homo sapien
gcaaggtgtattctcaagctctgat

SEQ ID NO: 233670 - DNA, 25 bp, Homo sapien
tccctaatccgtgagagtttaagga

SEQ ID NO: 233671 - DNA, 25 bp, Homo sapien
aacagagtctttggttcagaaacac

SEQ ID NO: 233672 - DNA, 25 bp, Homo sapien
tacaaagggctgatgtatggagact

SEQ ID NO: 233673 - DNA, 25 bp, Homo sapien
gacaggcaaccttaatcatttcaac

SEQ ID NO: 233674 - DNA, 25 bp, Homo sapien
ttcaaagcgaacctctaaggtactg

SEQ ID NO: 233675 - DNA, 25 bp, Homo sapien
taagaattctgaggctcactacatg

SEQ ID NO: 233676 - DNA, 25 bp, Homo sapien
taccatgtaattgccagggtggtgc

SEQ ID NO: 233677 - DNA, 25 bp, Homo sapien
aatcagcaccctatgaactaacagg

SEQ ID NO: 233678 - DNA, 25 bp, Homo sapien
gaataacgtatgtccagcaaagccc

SEQ ID NO: 233679 - DNA, 25 bp, Homo sapien
gattacaatgcgcaagttggccagg

SEQ ID NO: 233680 - DNA, 25 bp, Homo sapien
gctcatttggcgaagctcacccagt

SEQ ID NO: 233681 - DNA, 25 bp, Homo sapien
ctgggaactaacatgggaaactgct

SEQ ID NO: 233682 - DNA, 25 bp, Homo sapien
taatgaggctcataccaaaggcacg

SEQ ID NO: 233683 - DNA, 25 bp, Homo sapien
gggacagtcaaaccactaagtgggc

SEQ ID NO: 233684 - DNA, 25 bp, Homo sapien
gaatttagcatttgagggacctggc

SEQ ID NO: 233685 - DNA, 25 bp, Homo sapien
caaagaggctgaaatgacactgaca

SEQ ID NO: 233686 - DNA, 25 bp, Homo sapien
cagattccatgtgcagggctcgtga

SEQ ID NO: 233687 - DNA, 25 bp, Homo sapien
gctgtgctaaggcagaacggacctg

SEQ ID NO: 233688 - DNA, 25 bp, Homo sapien
cataggtcaccacggtaatggtcgc

SEQ ID NO: 233689 - DNA, 25 bp, Homo sapien
tttttcagaaactagggcaagctcc

SEQ ID NO: 233690 - DNA, 25 bp, Homo sapien
tgaaccccgactatgcttgtgcaga

SEQ ID NO: 233691 - DNA, 25 bp, Homo sapien
tgtggaatggactcaagtatacctg

SEQ ID NO: 233692 - DNA, 25 bp, Homo sapien
cattggatgagttgctcgaggtcac

SEQ ID NO: 233693 - DNA, 25 bp, Homo sapien
aaggtatcacttcggttcagctggg

SEQ ID NO: 233694 - DNA, 25 bp, Homo sapien
gccttatgcatcaggagcttcagag

SEQ ID NO: 233695 - DNA, 25 bp, Homo sapien
tatgcctgtgtgtcacgactcacaa

SEQ ID NO: 233696 - DNA, 25 bp, Homo sapien
gtgtgtcacgactcacaaaggccaa

SEQ ID NO: 233697 - DNA, 25 bp, Homo sapien
tgcctgtgtgtcacgactcacaaag

SEQ ID NO: 233698 - DNA, 25 bp, Homo sapien
ctgtgtgtcacgactcacaaaggcc

SEQ ID NO: 233699 - DNA, 25 bp, Homo sapien
ctattaaatgcctctgaactgtaca

SEQ ID NO: 233700 - DNA, 25 bp, Homo sapien
gcaggagggactgacattagaaaca

SEQ ID NO: 233701 - DNA, 25 bp, Homo sapien
tacatgtggatggtaaaattaggag

SEQ ID NO: 233702 - DNA, 25 bp, Homo sapien
caaaaattaagctgcgagcggtggc

SEQ ID NO: 233703 - DNA, 25 bp, Homo sapien
ctattcttctatgagggggctcctg

SEQ ID NO: 233704 - DNA, 25 bp, Homo sapien
cccttccttctttgtgaaactctgc

SEQ ID NO: 233705 - DNA, 25 bp, Homo sapien
attcttctatgagggggctcctgcc

SEQ ID NO: 233706 - DNA, 25 bp, Homo sapien
cttccttctttgtgaaactctgcac

SEQ ID NO: 233707 - DNA, 25 bp, Homo sapien
atttcagtgatttccccagtttcgg

SEQ ID NO: 233708 - DNA, 25 bp, Homo sapien
cagtttcggactgagccgctgcttc

SEQ ID NO: 233709 - DNA, 25 bp, Homo sapien
tgtttgctactacatctctcactgc

SEQ ID NO: 233710 - DNA, 25 bp, Homo sapien
ctcactgctgtaaacctagctcttg

SEQ ID NO: 233711 - DNA, 25 bp, Homo sapien
gcctaacccaggactggacacacag

SEQ ID NO: 233712 - DNA, 25 bp, Homo sapien
tagaggcccaatactatagtgacgg

SEQ ID NO: 233713 - DNA, 25 bp, Homo sapien
ggccaagcagccttttccaagaagg

SEQ ID NO: 233714 - DNA, 25 bp, Homo sapien
gctaggactcgtggtctgaccacag

SEQ ID NO: 233715 - DNA, 25 bp, Homo sapien
taaggccttaagtgtcagttctccc

SEQ ID NO: 233716 - DNA, 25 bp, Homo sapien
aaataggtctccctcctctacacga

SEQ ID NO: 233717 - DNA, 25 bp, Homo sapien
ccaagaaatgacagcccctctgctc

SEQ ID NO: 233718 - DNA, 25 bp, Homo sapien
ccacccttctgacaaaaataggtct

SEQ ID NO: 233719 - DNA, 25 bp, Homo sapien
ccagaaagcggccactcctaaacgg

SEQ ID NO: 233720 - DNA, 25 bp, Homo sapien
gaactggacaaatagtccccaccca

SEQ ID NO: 233721 - DNA, 25 bp, Homo sapien
tcacagcgaccgagaagcttgagta

SEQ ID NO: 233722 - DNA, 25 bp, Homo sapien
gccactcctaaacgggacagaactg

SEQ ID NO: 233723 - DNA, 25 bp, Homo sapien
cttgaagaaggtactgcccggccag

SEQ ID NO: 233724 - DNA, 25 bp, Homo sapien
gctccatttctcttgaagaaggtac

SEQ ID NO: 233725 - DNA, 25 bp, Homo sapien
ccatttctcttgaagaaggtactgc

SEQ ID NO: 233726 - DNA, 25 bp, Homo sapien
ttgaagaaggtactgcccggccaga

SEQ ID NO: 233727 - DNA, 25 bp, Homo sapien
tttatcctgagcttgatttggctga

SEQ ID NO: 233728 - DNA, 25 bp, Homo sapien
gaaaactgagtagacatcagggatg

SEQ ID NO: 233729 - DNA, 25 bp, Homo sapien
actgagtagacatcagggatggagc

SEQ ID NO: 233730 - DNA, 25 bp, Homo sapien
ttatcctgagcttgatttggctgaa

SEQ ID NO: 233731 - DNA, 25 bp, Homo sapien
gacacacgcatcaacagctccaatt

SEQ ID NO: 233732 - DNA, 25 bp, Homo sapien
catagagacacacgcatcaacagct

SEQ ID NO: 233733 - DNA, 25 bp, Homo sapien
ccagcactaaactcttagtcatcct

SEQ ID NO: 233734 - DNA, 25 bp, Homo sapien
tgctcttccagcactaaactcttag

SEQ ID NO: 233735 - DNA, 25 bp, Homo sapien
tcagtaattcccggatcccacactc

SEQ ID NO: 233736 - DNA, 25 bp, Homo sapien
cagtaattcccggatcccacactct

SEQ ID NO: 233737 - DNA, 25 bp, Homo sapien
agtaattcccggatcccacactctg

SEQ ID NO: 233738 - DNA, 25 bp, Homo sapien
atcatgtgttctctatacccaggaa

SEQ ID NO: 233739 - DNA, 25 bp, Homo sapien
gaaccttaaccattgtgagaaccac

SEQ ID NO: 233740 - DNA, 25 bp, Homo sapien
acagcctgagggtggctcttagcaa

SEQ ID NO: 233741 - DNA, 25 bp, Homo sapien
gcaagatgacgtgatccatcatgtg

SEQ ID NO: 233742 - DNA, 25 bp, Homo sapien
gaaatacgtactcctgctgacagca

SEQ ID NO: 233743 - DNA, 25 bp, Homo sapien
tgcccacaaagtcgtgccagaaacg

SEQ ID NO: 233744 - DNA, 25 bp, Homo sapien
tagtggaaattgctggtactctccc

SEQ ID NO: 233745 - DNA, 25 bp, Homo sapien
tgtcggaggccaaaactaaagtgga

SEQ ID NO: 233746 - DNA, 25 bp, Homo sapien
catttccccaatgcccaccaaactg

SEQ ID NO: 233747 - DNA, 25 bp, Homo sapien
gtcttcttggtactctgctctccat

SEQ ID NO: 233748 - DNA, 25 bp, Homo sapien
gatttgaatgtacttggagttggtc

SEQ ID NO: 233749 - DNA, 25 bp, Homo sapien
ctttccctttcatcgggagagctga

SEQ ID NO: 233750 - DNA, 25 bp, Homo sapien
gacttggaatgtagcttctgtgggg

SEQ ID NO: 233751 - DNA, 25 bp, Homo sapien
atgtgggacttggaatgtagcttct

SEQ ID NO: 233752 - DNA, 25 bp, Homo sapien
tgtgggacttggaatgtagcttctg

SEQ ID NO: 233753 - DNA, 25 bp, Homo sapien
tgggacttggaatgtagcttctgtg

SEQ ID NO: 233754 - DNA, 25 bp, Homo sapien
ggttctgcagggttaggcttctccc

SEQ ID NO: 233755 - DNA, 25 bp, Homo sapien
gcaggctgggattcttatataggcc

SEQ ID NO: 233756 - DNA, 25 bp, Homo sapien
gcagggttaggcttctccctggtta

SEQ ID NO: 233757 - DNA, 25 bp, Homo sapien
tctggtcatcagtgatgtgccagag

SEQ ID NO: 233758 - DNA, 25 bp, Homo sapien
tgggtgctgcggacctgttctgctc

SEQ ID NO: 233759 - DNA, 25 bp, Homo sapien
atgtggagaaaggtcaggccctcag

SEQ ID NO: 233760 - DNA, 25 bp, Homo sapien
ggtgctgcggacctgttctgctcca

SEQ ID NO: 233761 - DNA, 25 bp, Homo sapien
gctgcggacctgttctgctccacgt

SEQ ID NO: 233762 - DNA, 25 bp, Homo sapien
tccaaatgttcacatatgacctcac

SEQ ID NO: 233763 - DNA, 25 bp, Homo sapien
agtctccatgtcaccagcaaggatg

SEQ ID NO: 233764 - DNA, 25 bp, Homo sapien
aggcttttgctgacatccgagagat

SEQ ID NO: 233765 - DNA, 25 bp, Homo sapien
gaaatgcagccacgcattctctcgg

SEQ ID NO: 233766 - DNA, 25 bp, Homo sapien
tggcagcatcacacatctcgttgac

SEQ ID NO: 233767 - DNA, 25 bp, Homo sapien
tccgttcgctggctccattatttct

SEQ ID NO: 233768 - DNA, 25 bp, Homo sapien
gctggctccattatttctgcctgcg

SEQ ID NO: 233769 - DNA, 25 bp, Homo sapien
cgttcgctggctccattatttctgc

SEQ ID NO: 233770 - DNA, 25 bp, Homo sapien
tccattatttctgcctgcgcgtgca

SEQ ID NO: 233771 - DNA, 25 bp, Homo sapien
cctccactaccccttgtctccactt

SEQ ID NO: 233772 - DNA, 25 bp, Homo sapien
cgccacacataaactggtgtccaag

SEQ ID NO: 233773 - DNA, 25 bp, Homo sapien
ccaagagctggcaccgacagcgcag

SEQ ID NO: 233774 - DNA, 25 bp, Homo sapien
agagctggcaccgacagcgcagctt

SEQ ID NO: 233775 - DNA, 25 bp, Homo sapien
tcttatcttagccatcgccacacat

SEQ ID NO: 233776 - DNA, 25 bp, Homo sapien
aagggacacctcgatctaaatgctg

SEQ ID NO: 233777 - DNA, 25 bp, Homo sapien
tgtatcaggaagacctaatctgggc

SEQ ID NO: 233778 - DNA, 25 bp, Homo sapien
taatctgggcactcaattgctacag

SEQ ID NO: 233779 - DNA, 25 bp, Homo sapien
catagtccaccacgaagatgagaga

SEQ ID NO: 233780 - DNA, 25 bp, Homo sapien
ccaaagccacttgcagagcccagta

SEQ ID NO: 233781 - DNA, 25 bp, Homo sapien
tcctcttcaatgctacctggcctga

SEQ ID NO: 233782 - DNA, 25 bp, Homo sapien
gagaaggtatgctacttctctccct

SEQ ID NO: 233783 - DNA, 25 bp, Homo sapien
ccaatcgggtctgagaaggtatgct

SEQ ID NO: 233784 - DNA, 25 bp, Homo sapien
gaaaagtcacttaatgagggtcgca

SEQ ID NO: 233785 - DNA, 25 bp, Homo sapien
tatagggctggtattatgatcctca

SEQ ID NO: 233786 - DNA, 25 bp, Homo sapien
cctttccatgaaacacagggtatta

SEQ ID NO: 233787 - DNA, 25 bp, Homo sapien
tgagctctctgaagacactgacgat

SEQ ID NO: 233788 - DNA, 25 bp, Homo sapien
tgagcatctatacatcgccttcttc

SEQ ID NO: 233789 - DNA, 25 bp, Homo sapien
cgccttcttctcagaacagacattg

SEQ ID NO: 233790 - DNA, 25 bp, Homo sapien
tggatgtttctgagcatctatacat

SEQ ID NO: 233791 - DNA, 25 bp, Homo sapien
gaggacagtcctataattcactatt

SEQ ID NO: 233792 - DNA, 25 bp, Homo sapien
gagaggcggcaaagatcatatagaa

SEQ ID NO: 233793 - DNA, 25 bp, Homo sapien
ctgtgagcagaaccgcggtgaagac

SEQ ID NO: 233794 - DNA, 25 bp, Homo sapien
aaagcagagtatgggcttggaaacc

SEQ ID NO: 233795 - DNA, 25 bp, Homo sapien
tcaactttaaaagagaggcagctgt

SEQ ID NO: 233796 - DNA, 25 bp, Homo sapien
caacaaccggagttctaatgtctag

SEQ ID NO: 233797 - DNA, 25 bp, Homo sapien
aactgctggtggcaggctccaacaa

SEQ ID NO: 233798 - DNA, 25 bp, Homo sapien
ctgaggcgagcctccttgccatcag

SEQ ID NO: 233799 - DNA, 25 bp, Homo sapien
aatgtctagagaccctgcttcatcc

SEQ ID NO: 233800 - DNA, 25 bp, Homo sapien
ccctgtggaacgctaatctaattat

SEQ ID NO: 233801 - DNA, 25 bp, Homo sapien
tgtgtgtgttactcagtgactgtcc

SEQ ID NO: 233802 - DNA, 25 bp, Homo sapien
tgaggcactcatcagactgtctatg

SEQ ID NO: 233803 - DNA, 25 bp, Homo sapien
caatggcctgaaacctaggttgctc

SEQ ID NO: 233804 - DNA, 25 bp, Homo sapien
ctatgggtctccagtctactctgaa

SEQ ID NO: 233805 - DNA, 25 bp, Homo sapien
cactatgggtctccagtctactctg

SEQ ID NO: 233806 - DNA, 25 bp, Homo sapien
actatgggtctccagtctactctga

SEQ ID NO: 233807 - DNA, 25 bp, Homo sapien
actctgaaaataatcccactgtctt

SEQ ID NO: 233808 - DNA, 25 bp, Homo sapien
gggaaaggtgtcattctgtgaatga

SEQ ID NO: 233809 - DNA, 25 bp, Homo sapien
aatgaagatacctggtgaagttgcg

SEQ ID NO: 233810 - DNA, 25 bp, Homo sapien
ccacactgtccttataacgcctgaa

SEQ ID NO: 233811 - DNA, 25 bp, Homo sapien
aagttgcgggtctttgggagctcct

SEQ ID NO: 233812 - DNA, 25 bp, Homo sapien
ccatttccaagcctccaggagttgc

SEQ ID NO: 233813 - DNA, 25 bp, Homo sapien
agggcctctcctccgttaagtgtga

SEQ ID NO: 233814 - DNA, 25 bp, Homo sapien
gatacaccaggtttgagggtctccc

SEQ ID NO: 233815 - DNA, 25 bp, Homo sapien
tttacccatcggaacacgagattgg

SEQ ID NO: 233816 - DNA, 25 bp, Homo sapien
ggaaaccaggtcaccgctgtttcca

SEQ ID NO: 233817 - DNA, 25 bp, Homo sapien
ctggaaaccaggtcaccgctgtttc

SEQ ID NO: 233818 - DNA, 25 bp, Homo sapien
cacctggaaaccaggtcaccgctgt

SEQ ID NO: 233819 - DNA, 25 bp, Homo sapien
cctggaaaccaggtcaccgctgttt

SEQ ID NO: 233820 - DNA, 25 bp, Homo sapien
agatgcactttagcccaggggggtc

SEQ ID NO: 233821 - DNA, 25 bp, Homo sapien
actaaccattggagcaacagcaaaa

SEQ ID NO: 233822 - DNA, 25 bp, Homo sapien
tgaacacttcgttaactgggtataa

SEQ ID NO: 233823 - DNA, 25 bp, Homo sapien
ctgagggggagatgcactttagccc

SEQ ID NO: 233824 - DNA, 25 bp, Homo sapien
taccgactgccctgtaagctcacaa

SEQ ID NO: 233825 - DNA, 25 bp, Homo sapien
ccttttcgctgaaggtctcaagagg

SEQ ID NO: 233826 - DNA, 25 bp, Homo sapien
gtgttagaggctgcccccactaccg

SEQ ID NO: 233827 - DNA, 25 bp, Homo sapien
tcaacccatatcctctgtgttagag

SEQ ID NO: 233828 - DNA, 25 bp, Homo sapien
cgtaggcatgtctttgattctcccc

SEQ ID NO: 233829 - DNA, 25 bp, Homo sapien
gggcagcaaacccaactaacgaatc

SEQ ID NO: 233830 - DNA, 25 bp, Homo sapien
tgggtgtccagtctcgtaggcatgt

SEQ ID NO: 233831 - DNA, 25 bp, Homo sapien
acaggagatcaaaggcaagggcagc

SEQ ID NO: 233832 - DNA, 25 bp, Homo sapien
taaacaatggttacatcaaagacgg

SEQ ID NO: 233833 - DNA, 25 bp, Homo sapien
ctaaacaatggttacatcaaagacg

SEQ ID NO: 233834 - DNA, 25 bp, Homo sapien
aaacaatggttacatcaaagacggg

SEQ ID NO: 233835 - DNA, 25 bp, Homo sapien
gacagagaagctattgcagggagtg

SEQ ID NO: 233836 - DNA, 25 bp, Homo sapien
tctgagacaaaatcaataggatgtt

SEQ ID NO: 233837 - DNA, 25 bp, Homo sapien
gttgctgactttggatactgggttg

SEQ ID NO: 233838 - DNA, 25 bp, Homo sapien
actttggatactgggttgtactggg

SEQ ID NO: 233839 - DNA, 25 bp, Homo sapien
tgactttggatactgggttgtactg

SEQ ID NO: 233840 - DNA, 25 bp, Homo sapien
tgctgactttggatactgggttgta

SEQ ID NO: 233841 - DNA, 25 bp, Homo sapien
tgctgtttgcaagggaagagcctca

SEQ ID NO: 233842 - DNA, 25 bp, Homo sapien
ggactcacaggacacagcgtacagt

SEQ ID NO: 233843 - DNA, 25 bp, Homo sapien
gggactcttcaggtagacaccctat

SEQ ID NO: 233844 - DNA, 25 bp, Homo sapien
cagagcctcagtgcccaagattttt

SEQ ID NO: 233845 - DNA, 25 bp, Homo sapien
cagggttcgggaccccataatggct

SEQ ID NO: 233846 - DNA, 25 bp, Homo sapien
tctttgggtaatctgaggtccgtgg

SEQ ID NO: 233847 - DNA, 25 bp, Homo sapien
gaacagtaagatctcgtagtgccaa

SEQ ID NO: 233848 - DNA, 25 bp, Homo sapien
tgccagggccacagttgccttaaag

SEQ ID NO: 233849 - DNA, 25 bp, Homo sapien
tccaaagcctaaggatacagcagag

SEQ ID NO: 233850 - DNA, 25 bp, Homo sapien
caaacagatgtttcggaggaatcac

SEQ ID NO: 233851 - DNA, 25 bp, Homo sapien
gaatcaccatgctgaatactcgctg

SEQ ID NO: 233852 - DNA, 25 bp, Homo sapien
caagtgggagtcaatggcagctatc

SEQ ID NO: 233853 - DNA, 25 bp, Homo sapien
catccttaggccatagcaaggctct

SEQ ID NO: 233854 - DNA, 25 bp, Homo sapien
taaaaagcaggttcagatccagcag

SEQ ID NO: 233855 - DNA, 25 bp, Homo sapien
cactgagaggtttcaaggctggccc

SEQ ID NO: 233856 - DNA, 25 bp, Homo sapien
aacgcacacgttgcacatccttagg

SEQ ID NO: 233857 - DNA, 25 bp, Homo sapien
acaggtctggcgtctcccaacactg

SEQ ID NO: 233858 - DNA, 25 bp, Homo sapien
catggctgcactctcaacacaggtc

SEQ ID NO: 233859 - DNA, 25 bp, Homo sapien
aagcctagcccctgtcctgtcaagt

SEQ ID NO: 233860 - DNA, 25 bp, Homo sapien
cctgtcctgtcaagtaagatagcat

SEQ ID NO: 233861 - DNA, 25 bp, Homo sapien
tgttcccataaagcaggctctgtcg

SEQ ID NO: 233862 - DNA, 25 bp, Homo sapien
aaggctactttaatactcggcagaa

SEQ ID NO: 233863 - DNA, 25 bp, Homo sapien
gaagtcatcaagagtggtgcacaca

SEQ ID NO: 233864 - DNA, 25 bp, Homo sapien
cacaggcgcactggactttagtcaa

SEQ ID NO: 233865 - DNA, 25 bp, Homo sapien
gctcagcttataaccatgcaaggcc

SEQ ID NO: 233866 - DNA, 25 bp, Homo sapien
cttataaccatgcaaggcctcggcc

SEQ ID NO: 233867 - DNA, 25 bp, Homo sapien
agcttataaccatgcaaggcctcgg

SEQ ID NO: 233868 - DNA, 25 bp, Homo sapien
tgtgctcagcttataaccatgcaag

SEQ ID NO: 233869 - DNA, 25 bp, Homo sapien
cactgtgcaattcttcggcagctgg

SEQ ID NO: 233870 - DNA, 25 bp, Homo sapien
caccactgtgcaattcttcggcagc

SEQ ID NO: 233871 - DNA, 25 bp, Homo sapien
gatgatataagagaggccaccgacc

SEQ ID NO: 233872 - DNA, 25 bp, Homo sapien
gcaaagtagatgatataagagaggc

SEQ ID NO: 233873 - DNA, 25 bp, Homo sapien
tgcagacgttttccatcaccacaac

SEQ ID NO: 233874 - DNA, 25 bp, Homo sapien
tctctggcccctgccggacgcggtg

SEQ ID NO: 233875 - DNA, 25 bp, Homo sapien
caggacagcctctcacaataaacaa

SEQ ID NO: 233876 - DNA, 25 bp, Homo sapien
ctggcaatatctgcagacgttttcc

SEQ ID NO: 233877 - DNA, 25 bp, Homo sapien
agcggtagactcctatctgccacag

SEQ ID NO: 233878 - DNA, 25 bp, Homo sapien
tgcctgccaggtagtaagaaatctc

SEQ ID NO: 233879 - DNA, 25 bp, Homo sapien
ccacagcttgtacgggcagaaattg

SEQ ID NO: 233880 - DNA, 25 bp, Homo sapien
gccctcaaatagagccagcggtaga

SEQ ID NO: 233881 - DNA, 25 bp, Homo sapien
aaatgtaatttggttcagcaccagg

SEQ ID NO: 233882 - DNA, 25 bp, Homo sapien
cgcatcgagccgagaaactttcttg

SEQ ID NO: 233883 - DNA, 25 bp, Homo sapien
gaatgtggactagaaccgagtgtaa

SEQ ID NO: 233884 - DNA, 25 bp, Homo sapien
gaaactgactttggattggtgccta

SEQ ID NO: 233885 - DNA, 25 bp, Homo sapien
catggaggccaaaggtacgtaggat

SEQ ID NO: 233886 - DNA, 25 bp, Homo sapien
gaacagctcagtggacttttccgaa

SEQ ID NO: 233887 - DNA, 25 bp, Homo sapien
tccagatctagattccgaaggcccc

SEQ ID NO: 233888 - DNA, 25 bp, Homo sapien
tgtagattccccaagcaagctggcg

SEQ ID NO: 233889 - DNA, 25 bp, Homo sapien
tccgaagaggtacgggcaagcaacc

SEQ ID NO: 233890 - DNA, 25 bp, Homo sapien
cgtgtggctcagcagatcttccaga

SEQ ID NO: 233891 - DNA, 25 bp, Homo sapien
aactacaaagagacccctcgtgtgg

SEQ ID NO: 233892 - DNA, 25 bp, Homo sapien
taggtcaggcaactctcagtgctgc

SEQ ID NO: 233893 - DNA, 25 bp, Homo sapien
tcttccagagaatgaggcaaaagca

SEQ ID NO: 233894 - DNA, 25 bp, Homo sapien
aaggaaccaatgacatgacccagtg

SEQ ID NO: 233895 - DNA, 25 bp, Homo sapien
aaatactggtctaaaggaaccaatg

SEQ ID NO: 233896 - DNA, 25 bp, Homo sapien
tccctcggggtcacatttggcaaca

SEQ ID NO: 233897 - DNA, 25 bp, Homo sapien
gaaccaatgacatgacccagtgagt

SEQ ID NO: 233898 - DNA, 25 bp, Homo sapien
ggacaggtgggaggtgtattgaaca

SEQ ID NO: 233899 - DNA, 25 bp, Homo sapien
aggacaggtgggaggtgtattgaac

SEQ ID NO: 233900 - DNA, 25 bp, Homo sapien
gacaggtgggaggtgtattgaacac

SEQ ID NO: 233901 - DNA, 25 bp, Homo sapien
agattttgtctatactctgggtcta

SEQ ID NO: 233902 - DNA, 25 bp, Homo sapien
ggtctatgcaccacaacgacccttt

SEQ ID NO: 233903 - DNA, 25 bp, Homo sapien
tgtctatactctgggtctatgcacc

SEQ ID NO: 233904 - DNA, 25 bp, Homo sapien
tactctgggtctatgcaccacaacg

SEQ ID NO: 233905 - DNA, 25 bp, Homo sapien
cccaggttcaagcctctcctgcctc

SEQ ID NO: 233906 - DNA, 25 bp, Homo sapien
cggctaatttctgtacttttaggag

SEQ ID NO: 233907 - DNA, 25 bp, Homo sapien
tcccaggttcaagcctctcctgcct

SEQ ID NO: 233908 - DNA, 25 bp, Homo sapien
gcccaccttggcctccccaaagtgc

SEQ ID NO: 233909 - DNA, 25 bp, Homo sapien
cgtgggccagatacattcatgggtc

SEQ ID NO: 233910 - DNA, 25 bp, Homo sapien
gaacggaatggatcataagcagcac

SEQ ID NO: 233911 - DNA, 25 bp, Homo sapien
tggactaccatatatctgcagtaac

SEQ ID NO: 233912 - DNA, 25 bp, Homo sapien
cattgttattcaaaccgtgggccag

SEQ ID NO: 233913 - DNA, 25 bp, Homo sapien
taaagagctaacagcacaggagttg

SEQ ID NO: 233914 - DNA, 25 bp, Homo sapien
gcagggccctgtgacacaaaggcag

SEQ ID NO: 233915 - DNA, 25 bp, Homo sapien
gatcgttgggcctgattttgaagca

SEQ ID NO: 233916 - DNA, 25 bp, Homo sapien
ttttgaagcaggtccctgaacaccg

SEQ ID NO: 233917 - DNA, 25 bp, Homo sapien
tctttctcaagatcctggccccatg

SEQ ID NO: 233918 - DNA, 25 bp, Homo sapien
cctgataatcccagccacagaatat

SEQ ID NO: 233919 - DNA, 25 bp, Homo sapien
ccatgagcctcagtgtagccctagt

SEQ ID NO: 233920 - DNA, 25 bp, Homo sapien
gctggatacagagtccctgataatc

SEQ ID NO: 233921 - DNA, 25 bp, Homo sapien
gcagtgtgtcacctcccgaggctga

SEQ ID NO: 233922 - DNA, 25 bp, Homo sapien
aatctctaggaaaagcctgctgtga

SEQ ID NO: 233923 - DNA, 25 bp, Homo sapien
aacgcagaatttccccgagcttccg

SEQ ID NO: 233924 - DNA, 25 bp, Homo sapien
tctgtagtagagaagctggacggta

SEQ ID NO: 233925 - DNA, 25 bp, Homo sapien
gcctaagtgtcagtccagcttggaa

SEQ ID NO: 233926 - DNA, 25 bp, Homo sapien
gaagcttgatgcgttatccaggaac

SEQ ID NO: 233927 - DNA, 25 bp, Homo sapien
tattaacttacaaccgaccatgtgc

SEQ ID NO: 233928 - DNA, 25 bp, Homo sapien
tgcgtttcatctgacaatgccgaag

SEQ ID NO: 233929 - DNA, 25 bp, Homo sapien
tcaggtggccctaaataactcagtg

SEQ ID NO: 233930 - DNA, 25 bp, Homo sapien
ccaagatcacaaccagcaagaggca

SEQ ID NO: 233931 - DNA, 25 bp, Homo sapien
tatttgtgctgctggcatgtgacca

SEQ ID NO: 233932 - DNA, 25 bp, Homo sapien
ccagcaagcggaagccaaggtttct

SEQ ID NO: 233933 - DNA, 25 bp, Homo sapien
caactccggatagggtctgcatggc

SEQ ID NO: 233934 - DNA, 25 bp, Homo sapien
tgagagaaagctagagcccagtgtc

SEQ ID NO: 233935 - DNA, 25 bp, Homo sapien
gaggacgtaacttcatttctggtgg

SEQ ID NO: 233936 - DNA, 25 bp, Homo sapien
tccatctaccccagtgaggacgtaa

SEQ ID NO: 233937 - DNA, 25 bp, Homo sapien
aggctctctctcgtgcacccacagg

SEQ ID NO: 233938 - DNA, 25 bp, Homo sapien
gggaatacccagacatgctggaatc

SEQ ID NO: 233939 - DNA, 25 bp, Homo sapien
gagatgcttaaaacgcccaagtctg

SEQ ID NO: 233940 - DNA, 25 bp, Homo sapien
cccaagtctgcctgctgtaagtgat

SEQ ID NO: 233941 - DNA, 25 bp, Homo sapien
gattttgctggattctagaccgtgg

SEQ ID NO: 233942 - DNA, 25 bp, Homo sapien
ggttttcgtgataccctggctggct

SEQ ID NO: 233943 - DNA, 25 bp, Homo sapien
aaactcagacgggaagagcttgccc

SEQ ID NO: 233944 - DNA, 25 bp, Homo sapien
gcttcatgagttgtgctgagccctc

SEQ ID NO: 233945 - DNA, 25 bp, Homo sapien
tcagcatgctgaggccacgcaccag

SEQ ID NO: 233946 - DNA, 25 bp, Homo sapien
cagcatgctgaggccacgcaccagg

SEQ ID NO: 233947 - DNA, 25 bp, Homo sapien
tgtgaattacactgcggtagccagg

SEQ ID NO: 233948 - DNA, 25 bp, Homo sapien
gaagagggacacactagcctgatag

SEQ ID NO: 233949 - DNA, 25 bp, Homo sapien
tcacgaacaggcagagaaatgtcag

SEQ ID NO: 233950 - DNA, 25 bp, Homo sapien
tctccaggcagacatgaagagggac

SEQ ID NO: 233951 - DNA, 25 bp, Homo sapien
gctacttactatgggcagacactaa

SEQ ID NO: 233952 - DNA, 25 bp, Homo sapien
tacgtaccaggaacatacaattctg

SEQ ID NO: 233953 - DNA, 25 bp, Homo sapien
ggtcactaaataagactccaggtgg

SEQ ID NO: 233954 - DNA, 25 bp, Homo sapien
ctacttagtggaagaatcaggacca

SEQ ID NO: 233955 - DNA, 25 bp, Homo sapien
cttggaggcgatgatggctgtcaaa

SEQ ID NO: 233956 - DNA, 25 bp, Homo sapien
tgagaagagggacatgacccagcct

SEQ ID NO: 233957 - DNA, 25 bp, Homo sapien
agtctacaggatgaacaggccttag

SEQ ID NO: 233958 - DNA, 25 bp, Homo sapien
agggagaatcatggcagacttcttg

SEQ ID NO: 233959 - DNA, 25 bp, Homo sapien
gcgacctgattgtgacctatatgtc

SEQ ID NO: 233960 - DNA, 25 bp, Homo sapien
tgacctatatgtcttatggcaagcc

SEQ ID NO: 233961 - DNA, 25 bp, Homo sapien
cttagcgacctgattgtgacctata

SEQ ID NO: 233962 - DNA, 25 bp, Homo sapien
tagcgacctgattgtgacctatatg

SEQ ID NO: 233963 - DNA, 25 bp, Homo sapien
gagcaaaggatacagtaatgacagt

SEQ ID NO: 233964 - DNA, 25 bp, Homo sapien
agtgcccaggctaccaggacagagc

SEQ ID NO: 233965 - DNA, 25 bp, Homo sapien
atgacagtgcccaggctaccaggac

SEQ ID NO: 233966 - DNA, 25 bp, Homo sapien
cagcaatcactgaggccatctgagc

SEQ ID NO: 233967 - DNA, 25 bp, Homo sapien
caaagtcgggtgatccagaaacaga

SEQ ID NO: 233968 - DNA, 25 bp, Homo sapien
tgaatgcgccattgacttactcagc

SEQ ID NO: 233969 - DNA, 25 bp, Homo sapien
gagattcaggaaatactacaagggc

SEQ ID NO: 233970 - DNA, 25 bp, Homo sapien
aatgcacctggagctaagtgttgcc

SEQ ID NO: 233971 - DNA, 25 bp, Homo sapien
tgtttcaatagatctctctcgttct

SEQ ID NO: 233972 - DNA, 25 bp, Homo sapien
caataaggctctttacaactacaaa

SEQ ID NO: 233973 - DNA, 25 bp, Homo sapien
ggaacaataaggctctttacaacta

SEQ ID NO: 233974 - DNA, 25 bp, Homo sapien
tttcagccatatgtttcaatagatc

SEQ ID NO: 233975 - DNA, 25 bp, Homo sapien
gaagaggaccggcatacagaaaact

SEQ ID NO: 233976 - DNA, 25 bp, Homo sapien
tgtggtcttccgaggccaattacag

SEQ ID NO: 233977 - DNA, 25 bp, Homo sapien
tccttatttatgtgtggtcttccga

SEQ ID NO: 233978 - DNA, 25 bp, Homo sapien
caattacagagggtgaaaactttgt

SEQ ID NO: 233979 - DNA, 25 bp, Homo sapien
cttgaacccaaggaacagtccaaat

SEQ ID NO: 233980 - DNA, 25 bp, Homo sapien
tcaagggcggtaagtgaatcctcct

SEQ ID NO: 233981 - DNA, 25 bp, Homo sapien
tttcaagggcggtaagtgaatcctc

SEQ ID NO: 233982 - DNA, 25 bp, Homo sapien
ttcaagggcggtaagtgaatcctcc

SEQ ID NO: 233983 - DNA, 25 bp, Homo sapien
caaggtcatacaaacactgagtcat

SEQ ID NO: 233984 - DNA, 25 bp, Homo sapien
aatggaggacacctgacaaaagtgc

SEQ ID NO: 233985 - DNA, 25 bp, Homo sapien
ctgagtcatcgtgaacaaagcagcc

SEQ ID NO: 233986 - DNA, 25 bp, Homo sapien
tgttaaagggcacgactgtgtctca

SEQ ID NO: 233987 - DNA, 25 bp, Homo sapien
tgagggtgagcgttgttgtcaatct

SEQ ID NO: 233988 - DNA, 25 bp, Homo sapien
acaggactgtgggaataagctgcca

SEQ ID NO: 233989 - DNA, 25 bp, Homo sapien
gactgtgggaataagctgccatttc

SEQ ID NO: 233990 - DNA, 25 bp, Homo sapien
tgagcgttgttgtcaatctcccatg

SEQ ID NO: 233991 - DNA, 25 bp, Homo sapien
tgcagagatggcaggcttgtccaga

SEQ ID NO: 233992 - DNA, 25 bp, Homo sapien
tcataagactcaaccactgctaaca

SEQ ID NO: 233993 - DNA, 25 bp, Homo sapien
tggcaataaatcacacctgcagaga

SEQ ID NO: 233994 - DNA, 25 bp, Homo sapien
acctcagcaccagggtatacaaatg

SEQ ID NO: 233995 - DNA, 25 bp, Homo sapien
cagatacatgcatgcgctgagcgcc

SEQ ID NO: 233996 - DNA, 25 bp, Homo sapien
ggcctagggcatctggccagataca

SEQ ID NO: 233997 - DNA, 25 bp, Homo sapien
catcatcaagagaagtgtacagaga

SEQ ID NO: 233998 - DNA, 25 bp, Homo sapien
acaatgctcaacgtggacatgcctg

SEQ ID NO: 233999 - DNA, 25 bp, Homo sapien
ggtcagaagagctagattccaactg

SEQ ID NO: 234000 - DNA, 25 bp, Homo sapien
gatacctgaagttactattctctaa

SEQ ID NO: 234001 - DNA, 25 bp, Homo sapien
taatcccggggtcccattagcattg

SEQ ID NO: 234002 - DNA, 25 bp, Homo sapien
ccaggaataggatacctgaagttac

SEQ ID NO: 234003 - DNA, 25 bp, Homo sapien
gcataagcctgtttacaagcatgga

SEQ ID NO: 234004 - DNA, 25 bp, Homo sapien
tatgcctgacatacacgaaggtgta

SEQ ID NO: 234005 - DNA, 25 bp, Homo sapien
cacagtgggcccacaagagaaggtt

SEQ ID NO: 234006 - DNA, 25 bp, Homo sapien
gaaagtttaggataccacacaggag

SEQ ID NO: 234007 - DNA, 25 bp, Homo sapien
gtcttttacgggaacatggatgcag

SEQ ID NO: 234008 - DNA, 25 bp, Homo sapien
gttagtgcacaaatctggtccaagt

SEQ ID NO: 234009 - DNA, 25 bp, Homo sapien
taaagctatggaaaatcagcgactg

SEQ ID NO: 234010 - DNA, 25 bp, Homo sapien
tttctccataaatttctgggcagca

SEQ ID NO: 234011 - DNA, 25 bp, Homo sapien
gatatgtttcagactcaagccccag

SEQ ID NO: 234012 - DNA, 25 bp, Homo sapien
cagctatcttgatccggtgcacagg

SEQ ID NO: 234013 - DNA, 25 bp, Homo sapien
tgaagggattttccgagcagctatc

SEQ ID NO: 234014 - DNA, 25 bp, Homo sapien
ggctgaacgcttggcccaggaaaag

SEQ ID NO: 234015 - DNA, 25 bp, Homo sapien
ttccatatcaactgcaaactcgttg

SEQ ID NO: 234016 - DNA, 25 bp, Homo sapien
tccccctctactatagccacgatta

SEQ ID NO: 234017 - DNA, 25 bp, Homo sapien
cttccccctctactatagccacgat

SEQ ID NO: 234018 - DNA, 25 bp, Homo sapien
attcttggagattcgggacttttct

SEQ ID NO: 234019 - DNA, 25 bp, Homo sapien
tcttggagattcgggacttttcttc

SEQ ID NO: 234020 - DNA, 25 bp, Homo sapien
ctggaatgtaaactactaagagtac

SEQ ID NO: 234021 - DNA, 25 bp, Homo sapien
ccatgcccaattaatctctgtattt

SEQ ID NO: 234022 - DNA, 25 bp, Homo sapien
ctaagagtacaaaaagcaagaatca

SEQ ID NO: 234023 - DNA, 25 bp, Homo sapien
gaatgtaaactactaagagtacaaa

SEQ ID NO: 234024 - DNA, 25 bp, Homo sapien
cagtgtgggagctcccgccaaataa

SEQ ID NO: 234025 - DNA, 25 bp, Homo sapien
cactgtgttgaaggcaacttcagtg

SEQ ID NO: 234026 - DNA, 25 bp, Homo sapien
aggcaacttcagtgtgggagctccc

SEQ ID NO: 234027 - DNA, 25 bp, Homo sapien
tgttgaaggcaacttcagtgtggga

SEQ ID NO: 234028 - DNA, 25 bp, Homo sapien
acctgagcatacctgggagcctgca

SEQ ID NO: 234029 - DNA, 25 bp, Homo sapien
tagcataccccaagtgactgggcca

SEQ ID NO: 234030 - DNA, 25 bp, Homo sapien
tatcagggagaatgccatagtagca

SEQ ID NO: 234031 - DNA, 25 bp, Homo sapien
gaaggacctgggtgtacctgagcat

SEQ ID NO: 234032 - DNA, 25 bp, Homo sapien
ttacagaggagcaatgaatgtcctc

SEQ ID NO: 234033 - DNA, 25 bp, Homo sapien
gaggagcaatgaatgtcctctaagc

SEQ ID NO: 234034 - DNA, 25 bp, Homo sapien
gagcaatgaatgtcctctaagctca

SEQ ID NO: 234035 - DNA, 25 bp, Homo sapien
gcaatgaatgtcctctaagctcaaa

SEQ ID NO: 234036 - DNA, 25 bp, Homo sapien
cttgggttccagacacagaggctta

SEQ ID NO: 234037 - DNA, 25 bp, Homo sapien
ttgggttccagacacagaggcttac

SEQ ID NO: 234038 - DNA, 25 bp, Homo sapien
tcctctctttgtccactttcttaaa

SEQ ID NO: 234039 - DNA, 25 bp, Homo sapien
ctgactcctctctttgtccactttc

SEQ ID NO: 234040 - DNA, 25 bp, Homo sapien
gactcctctctttgtccactttctt

SEQ ID NO: 234041 - DNA, 25 bp, Homo sapien
tctctttgtccactttcttaaaaca

SEQ ID NO: 234042 - DNA, 25 bp, Homo sapien
ttattcaatgataaattgtgtctca

SEQ ID NO: 234043 - DNA, 25 bp, Homo sapien
cttattcaatgataaattgtgtctc

SEQ ID NO: 234044 - DNA, 25 bp, Homo sapien
tattcaatgataaattgtgtctcac

SEQ ID NO: 234045 - DNA, 25 bp, Homo sapien
tcttctaatcggatgtcaggcagag

SEQ ID NO: 234046 - DNA, 25 bp, Homo sapien
gctgacactcctgaggaccgactcc

SEQ ID NO: 234047 - DNA, 25 bp, Homo sapien
gttgtagatatccttcactggcagg

SEQ ID NO: 234048 - DNA, 25 bp, Homo sapien
cctgaagggccttggagaaaccgct

SEQ ID NO: 234049 - DNA, 25 bp, Homo sapien
ccttcagcaggagccgacaaacttt

SEQ ID NO: 234050 - DNA, 25 bp, Homo sapien
cgccgagcggcgagaaattgtttcc

SEQ ID NO: 234051 - DNA, 25 bp, Homo sapien
aaaaaggcgacacatgaccaggcag

SEQ ID NO: 234052 - DNA, 25 bp, Homo sapien
gagccgacaaactttcgcgggcgcc

SEQ ID NO: 234053 - DNA, 25 bp, Homo sapien
acaagaggcaccgtcctaaaggcca

SEQ ID NO: 234054 - DNA, 25 bp, Homo sapien
ggccggtggccattacaagacaaga

SEQ ID NO: 234055 - DNA, 25 bp, Homo sapien
tctcaagtgggttgtgcggaacgcc

SEQ ID NO: 234056 - DNA, 25 bp, Homo sapien
aaaagaattacgatgcgggcgaggc

SEQ ID NO: 234057 - DNA, 25 bp, Homo sapien
caagagatgtgagaaggtgtcaccc

SEQ ID NO: 234058 - DNA, 25 bp, Homo sapien
aagtggtggaccagccctgcctgat

SEQ ID NO: 234059 - DNA, 25 bp, Homo sapien
agccaaaggagggcttaatgtggcc

SEQ ID NO: 234060 - DNA, 25 bp, Homo sapien
tgcctgtcggtctatctgaaatggg

SEQ ID NO: 234061 - DNA, 25 bp, Homo sapien
cactccctactgctaacagctgaga

SEQ ID NO: 234062 - DNA, 25 bp, Homo sapien
tgcgattggcctagcctgagtcaca

SEQ ID NO: 234063 - DNA, 25 bp, Homo sapien
tgactttggaagtgggatatctaat

SEQ ID NO: 234064 - DNA, 25 bp, Homo sapien
tgagacaagggacatggtgaaacat

SEQ ID NO: 234065 - DNA, 25 bp, Homo sapien
tattagattcagcagtgcacacctg

SEQ ID NO: 234066 - DNA, 25 bp, Homo sapien
aacgatccccttctgaaaagcctgg

SEQ ID NO: 234067 - DNA, 25 bp, Homo sapien
gactactgggaagaggcaataaacc

SEQ ID NO: 234068 - DNA, 25 bp, Homo sapien
tcaatcaggagggacaaaacgatcc

SEQ ID NO: 234069 - DNA, 25 bp, Homo sapien
cacaaaagcaccaggagtactgatt

SEQ ID NO: 234070 - DNA, 25 bp, Homo sapien
aaagcaccaggagtactgatttttt

SEQ ID NO: 234071 - DNA, 25 bp, Homo sapien
caaaagcaccaggagtactgatttt

SEQ ID NO: 234072 - DNA, 25 bp, Homo sapien
ccacaaaagcaccaggagtactgat

SEQ ID NO: 234073 - DNA, 25 bp, Homo sapien
aaactgtcattttgctccgcggctg

SEQ ID NO: 234074 - DNA, 25 bp, Homo sapien
gacatcctcggtctaaaacgcctgg

SEQ ID NO: 234075 - DNA, 25 bp, Homo sapien
tgtccgtggaaatctggcctcgcag

SEQ ID NO: 234076 - DNA, 25 bp, Homo sapien
tccgtgttggctgcgaccttgaaaa

SEQ ID NO: 234077 - DNA, 25 bp, Homo sapien
tccaaagcacagacatttgacaaga

SEQ ID NO: 234078 - DNA, 25 bp, Homo sapien
gattctcttgaaggtaatgcttcca

SEQ ID NO: 234079 - DNA, 25 bp, Homo sapien
cactccggtagttattgtctgccag

SEQ ID NO: 234080 - DNA, 25 bp, Homo sapien
agtttagaaacaccactgaccctca

SEQ ID NO: 234081 - DNA, 25 bp, Homo sapien
tagaatctcatctcgagaccagcca

SEQ ID NO: 234082 - DNA, 25 bp, Homo sapien
catggcgctcccagatagactgtgg

SEQ ID NO: 234083 - DNA, 25 bp, Homo sapien
tagactgtggtacgacagccaaagc

SEQ ID NO: 234084 - DNA, 25 bp, Homo sapien
gccaaagcattcgttccctcacaaa

SEQ ID NO: 234085 - DNA, 25 bp, Homo sapien
cccaagtttccacccttgtggtctg

SEQ ID NO: 234086 - DNA, 25 bp, Homo sapien
agtttccacccttgtggtctgggtg

SEQ ID NO: 234087 - DNA, 25 bp, Homo sapien
cccttgtggtctgggtgggactgac

SEQ ID NO: 234088 - DNA, 25 bp, Homo sapien
tctctccctttcccagagtccccca

SEQ ID NO: 234089 - DNA, 25 bp, Homo sapien
ccatggagagttagtggtggatcca

SEQ ID NO: 234090 - DNA, 25 bp, Homo sapien
ggactcagtgcacaaatcaacaaga

SEQ ID NO: 234091 - DNA, 25 bp, Homo sapien
gagctggcttttcggtcacttacaa

SEQ ID NO: 234092 - DNA, 25 bp, Homo sapien
gggcagccgcagcttaggactcagt

SEQ ID NO: 234093 - DNA, 25 bp, Homo sapien
taccagattggggtatggatatgca

SEQ ID NO: 234094 - DNA, 25 bp, Homo sapien
tccaaacctgccaagtggaatgcat

SEQ ID NO: 234095 - DNA, 25 bp, Homo sapien
cttccgcagggttggaccaagggct

SEQ ID NO: 234096 - DNA, 25 bp, Homo sapien
ccaagggctaccagattggggtatg

SEQ ID NO: 234097 - DNA, 25 bp, Homo sapien
caacattcaaatcatccaaccttcc

SEQ ID NO: 234098 - DNA, 25 bp, Homo sapien
tgtgggaaggttccctcgccaagcc

SEQ ID NO: 234099 - DNA, 25 bp, Homo sapien
aggtatccacccttggtttgactgg

SEQ ID NO: 234100 - DNA, 25 bp, Homo sapien
ggagggccggaatgagcacagctga

SEQ ID NO: 234101 - DNA, 25 bp, Homo sapien
agcacagctgagaccgtcatcgacc

SEQ ID NO: 234102 - DNA, 25 bp, Homo sapien
tccagcctccagcaacgactgaatg

SEQ ID NO: 234103 - DNA, 25 bp, Homo sapien
cattcaagttgatccgcttaaggca

SEQ ID NO: 234104 - DNA, 25 bp, Homo sapien
gaatgcctctagtctgcagcttcca

SEQ ID NO: 234105 - DNA, 25 bp, Homo sapien
tccattagtatctgtgccttccgaa

SEQ ID NO: 234106 - DNA, 25 bp, Homo sapien
gttccagtcaccacactgatcccct

SEQ ID NO: 234107 - DNA, 25 bp, Homo sapien
tacatttctctcgagggttttctca

SEQ ID NO: 234108 - DNA, 25 bp, Homo sapien
cccctcaggcctacggcaaggtggg

SEQ ID NO: 234109 - DNA, 25 bp, Homo sapien
ttacatttctctcgagggttttctc

SEQ ID NO: 234110 - DNA, 25 bp, Homo sapien
tgaagccaaaatacttggtttacag

SEQ ID NO: 234111 - DNA, 25 bp, Homo sapien
atacttggtttacaggctgggccca

SEQ ID NO: 234112 - DNA, 25 bp, Homo sapien
acttggtttacaggctgggcccagt

SEQ ID NO: 234113 - DNA, 25 bp, Homo sapien
tctgaagccaaaatacttggtttac

SEQ ID NO: 234114 - DNA, 25 bp, Homo sapien
gcctgaggtcagaacacctgtcggg

SEQ ID NO: 234115 - DNA, 25 bp, Homo sapien
taactggcttcaagtgtgaccctga

SEQ ID NO: 234116 - DNA, 25 bp, Homo sapien
accaggaggagtgtctgacagccat

SEQ ID NO: 234117 - DNA, 25 bp, Homo sapien
gaggtagtcagtggcacagacaagc

SEQ ID NO: 234118 - DNA, 25 bp, Homo sapien
tcctcagtccaggaagcagggttga

SEQ ID NO: 234119 - DNA, 25 bp, Homo sapien
ttctccaactgaaggttgctgcctg

SEQ ID NO: 234120 - DNA, 25 bp, Homo sapien
gtcctcagtccaggaagcagggttg

SEQ ID NO: 234121 - DNA, 25 bp, Homo sapien
gggcttctccaactgaaggttgctg

SEQ ID NO: 234122 - DNA, 25 bp, Homo sapien
tcataacacagactgagtcgtggtt

SEQ ID NO: 234123 - DNA, 25 bp, Homo sapien
aacacagactgagtcgtggtttcat

SEQ ID NO: 234124 - DNA, 25 bp, Homo sapien
gaaccaagctgatcatcataacaca

SEQ ID NO: 234125 - DNA, 25 bp, Homo sapien
cagaaccaagctgatcatcataaca

SEQ ID NO: 234126 - DNA, 25 bp, Homo sapien
tgaagccaccctacctgagagtaat

SEQ ID NO: 234127 - DNA, 25 bp, Homo sapien
taaagaattctcctgggccggctgt

SEQ ID NO: 234128 - DNA, 25 bp, Homo sapien
ggttcagaccctagaaaggacagtg

SEQ ID NO: 234129 - DNA, 25 bp, Homo sapien
tgcaatgcatagcaagcgcacagta

SEQ ID NO: 234130 - DNA, 25 bp, Homo sapien
aacttctgtgctcaaccaaacttct

SEQ ID NO: 234131 - DNA, 25 bp, Homo sapien
tctgtgtggtgctcgcacctcagcc

SEQ ID NO: 234132 - DNA, 25 bp, Homo sapien
cttctgtgtggtgctcgcacctcag

SEQ ID NO: 234133 - DNA, 25 bp, Homo sapien
tgtgctcaaccaaacttctgtgtgg

SEQ ID NO: 234134 - DNA, 25 bp, Homo sapien
ggtgtatctctaacacgtgataatc

SEQ ID NO: 234135 - DNA, 25 bp, Homo sapien
tcataagaaggataagccactgtct

SEQ ID NO: 234136 - DNA, 25 bp, Homo sapien
tctctaacacgtgataatcttcttt

SEQ ID NO: 234137 - DNA, 25 bp, Homo sapien
ctggtgtatctctaacacgtgataa

SEQ ID NO: 234138 - DNA, 25 bp, Homo sapien
caaggggcaaagactttccaagcct

SEQ ID NO: 234139 - DNA, 25 bp, Homo sapien
ctgggctgaagggaaccaacttgaa

SEQ ID NO: 234140 - DNA, 25 bp, Homo sapien
gagaatacaccacggccagccagga

SEQ ID NO: 234141 - DNA, 25 bp, Homo sapien
gaaccaacttgaaggctctgggcca

SEQ ID NO: 234142 - DNA, 25 bp, Homo sapien
cttgagaatacaccacggccagcca

SEQ ID NO: 234143 - DNA, 25 bp, Homo sapien
ggtctatgagtcagtccttcagaaa

SEQ ID NO: 234144 - DNA, 25 bp, Homo sapien
gcttgggcgtctgaacactttatga

SEQ ID NO: 234145 - DNA, 25 bp, Homo sapien
tcccatgttgtaagcaccctactgg

SEQ ID NO: 234146 - DNA, 25 bp, Homo sapien
tacaggattctagcctcttaagagg

SEQ ID NO: 234147 - DNA, 25 bp, Homo sapien
catcacaggaaaccatgctgaactc

SEQ ID NO: 234148 - DNA, 25 bp, Homo sapien
aaaatggtttgagaacatcacagga

SEQ ID NO: 234149 - DNA, 25 bp, Homo sapien
gtgtgttgacttttacaccctataa

SEQ ID NO: 234150 - DNA, 25 bp, Homo sapien
tttacaccctataacctggccagct

SEQ ID NO: 234151 - DNA, 25 bp, Homo sapien
cttcactggctggagttttactcca

SEQ ID NO: 234152 - DNA, 25 bp, Homo sapien
cttgtcaacatcagggtagggagtg

SEQ ID NO: 234153 - DNA, 25 bp, Homo sapien
cacagcacatggcaagtcttcactg

SEQ ID NO: 234154 - DNA, 25 bp, Homo sapien
aaatgcagcgcccagttttaaaaca

SEQ ID NO: 234155 - DNA, 25 bp, Homo sapien
gctggctctggaaaacgacgtagtg

SEQ ID NO: 234156 - DNA, 25 bp, Homo sapien
agacacgcacgtcagtgaggcctgc

SEQ ID NO: 234157 - DNA, 25 bp, Homo sapien
acttcccggctcgtcttctcattgg

SEQ ID NO: 234158 - DNA, 25 bp, Homo sapien
tctcattggtgtcataaagggctgg

SEQ ID NO: 234159 - DNA, 25 bp, Homo sapien
ggctggaactttctaccagtatgtg

SEQ ID NO: 234160 - DNA, 25 bp, Homo sapien
gctggaactttctaccagtatgtgg

SEQ ID NO: 234161 - DNA, 25 bp, Homo sapien
ctggaactttctaccagtatgtggt

SEQ ID NO: 234162 - DNA, 25 bp, Homo sapien
ggtgcaatactcaaaaacgaggagt

SEQ ID NO: 234163 - DNA, 25 bp, Homo sapien
aaaacgaggagtgaggcagccccat

SEQ ID NO: 234164 - DNA, 25 bp, Homo sapien
caatactcaaaaacgaggagtgagg

SEQ ID NO: 234165 - DNA, 25 bp, Homo sapien
tcaaaaacgaggagtgaggcagccc

SEQ ID NO: 234166 - DNA, 25 bp, Homo sapien
tgaagcaacgcaacaaaaagctgag

SEQ ID NO: 234167 - DNA, 25 bp, Homo sapien
tagggcgatcatatcatttacggtc

SEQ ID NO: 234168 - DNA, 25 bp, Homo sapien
ccagtggagtcaagctagggcgatc

SEQ ID NO: 234169 - DNA, 25 bp, Homo sapien
tacacacctagcagtcttattttgg

SEQ ID NO: 234170 - DNA, 25 bp, Homo sapien
tgctcccgtcacagaaaagacagag

SEQ ID NO: 234171 - DNA, 25 bp, Homo sapien
tccataatcacgagaatgctggtct

SEQ ID NO: 234172 - DNA, 25 bp, Homo sapien
agcattgctcccgtcacagaaaaga

SEQ ID NO: 234173 - DNA, 25 bp, Homo sapien
tccaggaaaccgaggtcagcattgc

SEQ ID NO: 234174 - DNA, 25 bp, Homo sapien
tctgaacttagaggtcaaggccaca

SEQ ID NO: 234175 - DNA, 25 bp, Homo sapien
gtgcattttctagagggaagaaccg

SEQ ID NO: 234176 - DNA, 25 bp, Homo sapien
cttttctgtactttcggcagtgcat

SEQ ID NO: 234177 - DNA, 25 bp, Homo sapien
agcatctgaacttagaggtcaaggc

SEQ ID NO: 234178 - DNA, 25 bp, Homo sapien
taatacatctccaattagaggaaaa

SEQ ID NO: 234179 - DNA, 25 bp, Homo sapien
tatttcccgatgttggtaggtgaac

SEQ ID NO: 234180 - DNA, 25 bp, Homo sapien
gcaaaatgttaccacgcctcgacag

SEQ ID NO: 234181 - DNA, 25 bp, Homo sapien
gtcacagtcacctcgggccattctg

SEQ ID NO: 234182 - DNA, 25 bp, Homo sapien
cagatcctcatggactccacacagg

SEQ ID NO: 234183 - DNA, 25 bp, Homo sapien
tgtgtctgatacaactgcaggcagg

SEQ ID NO: 234184 - DNA, 25 bp, Homo sapien
ccctgtctgcaaggtcggaggctca

SEQ ID NO: 234185 - DNA, 25 bp, Homo sapien
tgagacagcttgctcctatgtcagc

SEQ ID NO: 234186 - DNA, 25 bp, Homo sapien
ggatatttacccaagcaaggacaat

SEQ ID NO: 234187 - DNA, 25 bp, Homo sapien
cccagattttgccatcgtgcagaag

SEQ ID NO: 234188 - DNA, 25 bp, Homo sapien
tttgactggaatcttgcaactttca

SEQ ID NO: 234189 - DNA, 25 bp, Homo sapien
caactttgcccagattttgccatcg

SEQ ID NO: 234190 - DNA, 25 bp, Homo sapien
catgtacgtagctgttgccatggaa

SEQ ID NO: 234191 - DNA, 25 bp, Homo sapien
taatatagtgcatgccgcctgtcca

SEQ ID NO: 234192 - DNA, 25 bp, Homo sapien
tagagtgccacgctgtgttaattcc

SEQ ID NO: 234193 - DNA, 25 bp, Homo sapien
caaacacagctagggtagagtgcca

SEQ ID NO: 234194 - DNA, 25 bp, Homo sapien
gttttatagatagagccacttcccc

SEQ ID NO: 234195 - DNA, 25 bp, Homo sapien
acattcagttagtatacagttggca

SEQ ID NO: 234196 - DNA, 25 bp, Homo sapien
aaaagttctagccatatgctactgg

SEQ ID NO: 234197 - DNA, 25 bp, Homo sapien
ggtaattcatagcaaccacacgttt

SEQ ID NO: 234198 - DNA, 25 bp, Homo sapien
gaactgtgaagcaagtactgtcagg

SEQ ID NO: 234199 - DNA, 25 bp, Homo sapien
gagccctaccgcacaactgctgttt

SEQ ID NO: 234200 - DNA, 25 bp, Homo sapien
tgagggaaacccacggaagataaga

SEQ ID NO: 234201 - DNA, 25 bp, Homo sapien
agaatgttctcctcttcccggtacg

SEQ ID NO: 234202 - DNA, 25 bp, Homo sapien
tcattgtgacggtgtggttgcctct

SEQ ID NO: 234203 - DNA, 25 bp, Homo sapien
cccttggtgccggaggagcatgtaa

SEQ ID NO: 234204 - DNA, 25 bp, Homo sapien
ccacatgatgaaagcgaagggtgct

SEQ ID NO: 234205 - DNA, 25 bp, Homo sapien
gggaggcagcgtacacagcattatt

SEQ ID NO: 234206 - DNA, 25 bp, Homo sapien
cagacaagctaaggctaaagacact

SEQ ID NO: 234207 - DNA, 25 bp, Homo sapien
aagacaagagtttgggacaaccatg

SEQ ID NO: 234208 - DNA, 25 bp, Homo sapien
aaatctggctatacatatgtaggga

SEQ ID NO: 234209 - DNA, 25 bp, Homo sapien
tctggatagaaacccaaggtctcac

SEQ ID NO: 234210 - DNA, 25 bp, Homo sapien
gaataacagaatccagagtctctac

SEQ ID NO: 234211 - DNA, 25 bp, Homo sapien
cagaaagactgatcccaaggtgaca

SEQ ID NO: 234212 - DNA, 25 bp, Homo sapien
aaccagaactgactaggaaatctag

SEQ ID NO: 234213 - DNA, 25 bp, Homo sapien
taagaaaatagagcctgtactggag

SEQ ID NO: 234214 - DNA, 25 bp, Homo sapien
tatatctgatagacatgaaagcata

SEQ ID NO: 234215 - DNA, 25 bp, Homo sapien
caagttttagcaaagatgtgaagca

SEQ ID NO: 234216 - DNA, 25 bp, Homo sapien
gctgggattaccaacaatggctaaa

SEQ ID NO: 234217 - DNA, 25 bp, Homo sapien
ttaaaaagcctggatcataccaagt

SEQ ID NO: 234218 - DNA, 25 bp, Homo sapien
gatgaagccacggatgtacacatac

SEQ ID NO: 234219 - DNA, 25 bp, Homo sapien
gatctagggctataatccattaccc

SEQ ID NO: 234220 - DNA, 25 bp, Homo sapien
cagagacaaaatagttgttgcctgc

SEQ ID NO: 234221 - DNA, 25 bp, Homo sapien
ggaagcagcttttgcggatgataag

SEQ ID NO: 234222 - DNA, 25 bp, Homo sapien
acctggccttgagaccacgtaattt

SEQ ID NO: 234223 - DNA, 25 bp, Homo sapien
taggaagacatgacaatcatggtgg

SEQ ID NO: 234224 - DNA, 25 bp, Homo sapien
agttccacttggctaggaagacatg

SEQ ID NO: 234225 - DNA, 25 bp, Homo sapien
ggccttgagaccacgtaatttataa

SEQ ID NO: 234226 - DNA, 25 bp, Homo sapien
tgatcaccaaatgagaatgaggtca

SEQ ID NO: 234227 - DNA, 25 bp, Homo sapien
gatttcactccaagtttaaccagca

SEQ ID NO: 234228 - DNA, 25 bp, Homo sapien
ctaaattgttatactcaggctcccc

SEQ ID NO: 234229 - DNA, 25 bp, Homo sapien
caaaaaccactattgtaggcaccag

SEQ ID NO: 234230 - DNA, 25 bp, Homo sapien
tcaatcctgccggtgaagtatttag

SEQ ID NO: 234231 - DNA, 25 bp, Homo sapien
aaccatcaatcctgccggtgaagta

SEQ ID NO: 234232 - DNA, 25 bp, Homo sapien
ccctggtagaaggaaaccatcaatc

SEQ ID NO: 234233 - DNA, 25 bp, Homo sapien
tggtagaaggaaaccatcaatcctg

SEQ ID NO: 234234 - DNA, 25 bp, Homo sapien
tgcacccggccccaatagcttcttt

SEQ ID NO: 234235 - DNA, 25 bp, Homo sapien
ctgcacccggccccaatagcttctt

SEQ ID NO: 234236 - DNA, 25 bp, Homo sapien
actgcacccggccccaatagcttct

SEQ ID NO: 234237 - DNA, 25 bp, Homo sapien
cagaataccagacactaggttattt

SEQ ID NO: 234238 - DNA, 25 bp, Homo sapien
agaataccagacactaggttattta

SEQ ID NO: 234239 - DNA, 25 bp, Homo sapien
gcacccagcaccatgcctggctggt

SEQ ID NO: 234240 - DNA, 25 bp, Homo sapien
ggtcaggctggtctcaaagtcctga

SEQ ID NO: 234241 - DNA, 25 bp, Homo sapien
gtcaggctggtctcaaagtcctgac

SEQ ID NO: 234242 - DNA, 25 bp, Homo sapien
acccagcaccatgcctggctggttt

SEQ ID NO: 234243 - DNA, 25 bp, Homo sapien
tagaatagcctggacatgatgaccg

SEQ ID NO: 234244 - DNA, 25 bp, Homo sapien
cagacatcgaaggtgacaggcagac

SEQ ID NO: 234245 - DNA, 25 bp, Homo sapien
caaaaatacaagtggtagtgcaggc

SEQ ID NO: 234246 - DNA, 25 bp, Homo sapien
tgatgaccgaaccacgaaatgggtc

SEQ ID NO: 234247 - DNA, 25 bp, Homo sapien
tttctggaacgcacagcgctgccaa

SEQ ID NO: 234248 - DNA, 25 bp, Homo sapien
cgcttagtgcatctcgtgtgaccca

SEQ ID NO: 234249 - DNA, 25 bp, Homo sapien
gagcaggttgggtacaccattgccc

SEQ ID NO: 234250 - DNA, 25 bp, Homo sapien
cacatttgggcacacttaggcttct

SEQ ID NO: 234251 - DNA, 25 bp, Homo sapien
tagcgatgccccatgtaggaagtgg

SEQ ID NO: 234252 - DNA, 25 bp, Homo sapien
taagtagctaaaagcccatgcactg

SEQ ID NO: 234253 - DNA, 25 bp, Homo sapien
ctaattctaatcaggtgtgcagtct

SEQ ID NO: 234254 - DNA, 25 bp, Homo sapien
tcagactaaccatggtagcgatgcc

SEQ ID NO: 234255 - DNA, 25 bp, Homo sapien
cccgattagatcagccgccgtggga

SEQ ID NO: 234256 - DNA, 25 bp, Homo sapien
aggtgcgtcacctagtgcttctgag

SEQ ID NO: 234257 - DNA, 25 bp, Homo sapien
caagcaatcccgaagcagatatggt

SEQ ID NO: 234258 - DNA, 25 bp, Homo sapien
gataagtgatccagccccgattaga

SEQ ID NO: 234259 - DNA, 25 bp, Homo sapien
gatgctgtttccttcgctttaaata

SEQ ID NO: 234260 - DNA, 25 bp, Homo sapien
tcaaacgcaatgtataagcccctag

SEQ ID NO: 234261 - DNA, 25 bp, Homo sapien
agcccagtttgagagtaatggtttc

SEQ ID NO: 234262 - DNA, 25 bp, Homo sapien
taccattcagtctaatcaaacgcaa

SEQ ID NO: 234263 - DNA, 25 bp, Homo sapien
gcaacagtcaagatgcagcttctta

SEQ ID NO: 234264 - DNA, 25 bp, Homo sapien
gccgcaccatgcagcatgaatctga

SEQ ID NO: 234265 - DNA, 25 bp, Homo sapien
gaagagaaactcagccccttcaggc

SEQ ID NO: 234266 - DNA, 25 bp, Homo sapien
tattttaagagcaccctgtttctgc

SEQ ID NO: 234267 - DNA, 25 bp, Homo sapien
gatgcttcagaagtagccccagaag

SEQ ID NO: 234268 - DNA, 25 bp, Homo sapien
gacactcaaaaattccggcagaggg

SEQ ID NO: 234269 - DNA, 25 bp, Homo sapien
gccctgtaagcaaactgaagacgtg

SEQ ID NO: 234270 - DNA, 25 bp, Homo sapien
taagccttcatgtttgccctgtaag

SEQ ID NO: 234271 - DNA, 25 bp, Homo sapien
tcttttggtataggagtgtcggctg

SEQ ID NO: 234272 - DNA, 25 bp, Homo sapien
cagaaaagggatcgccttatttcca

SEQ ID NO: 234273 - DNA, 25 bp, Homo sapien
cttcgtgcactgaatggtaagagcc

SEQ ID NO: 234274 - DNA, 25 bp, Homo sapien
gctgtgacctttacgacaggcagaa

SEQ ID NO: 234275 - DNA, 25 bp, Homo sapien
caggagattaggagattcttctctg

SEQ ID NO: 234276 - DNA, 25 bp, Homo sapien
cagtccatgagcagcgctactcagg

SEQ ID NO: 234277 - DNA, 25 bp, Homo sapien
aaacatccgaccactccacagggaa

SEQ ID NO: 234278 - DNA, 25 bp, Homo sapien
gaaaacctccggagagatactgata

SEQ ID NO: 234279 - DNA, 25 bp, Homo sapien
ttgttagttttagaactatctcagc

SEQ ID NO: 234280 - DNA, 25 bp, Homo sapien
ctcctcaattgcatctactctattg

SEQ ID NO: 234281 - DNA, 25 bp, Homo sapien
ttaatatgtctttcacaatctgata

SEQ ID NO: 234282 - DNA, 25 bp, Homo sapien
tctcgttagctttgttatcagaaat

SEQ ID NO: 234283 - DNA, 25 bp, Homo sapien
ggttctcaatgaaagcctaggttgt

SEQ ID NO: 234284 - DNA, 25 bp, Homo sapien
catgaacttgttgaaagctctgcta

SEQ ID NO: 234285 - DNA, 25 bp, Homo sapien
gattcacctagactcagggttctca

SEQ ID NO: 234286 - DNA, 25 bp, Homo sapien
taggttgtttactagggcttctgcc

SEQ ID NO: 234287 - DNA, 25 bp, Homo sapien
ttatcagcatataaagtaatttgcc

SEQ ID NO: 234288 - DNA, 25 bp, Homo sapien
ccaaaacacaggctttatcagcata

SEQ ID NO: 234289 - DNA, 25 bp, Homo sapien
aatttgccacatgcattgtgtttgc

SEQ ID NO: 234290 - DNA, 25 bp, Homo sapien
aaaacaatgttttggatacaaacat

SEQ ID NO: 234291 - DNA, 25 bp, Homo sapien
tacatgtgatgtaaaacgagggcgg

SEQ ID NO: 234292 - DNA, 25 bp, Homo sapien
tgtgatgtaaaacgagggcgggggc

SEQ ID NO: 234293 - DNA, 25 bp, Homo sapien
atgtgatgtaaaacgagggcggggg

SEQ ID NO: 234294 - DNA, 25 bp, Homo sapien
agatacatgtgatgtaaaacgaggg

SEQ ID NO: 234295 - DNA, 25 bp, Homo sapien
taaccccatgcaggtagtagaaaca

SEQ ID NO: 234296 - DNA, 25 bp, Homo sapien
tccataccaggcagaggtgaatcta

SEQ ID NO: 234297 - DNA, 25 bp, Homo sapien
tgagcagcacagttctactgcggtt

SEQ ID NO: 234298 - DNA, 25 bp, Homo sapien
tatagactcctcaactgaactccct

SEQ ID NO: 234299 - DNA, 25 bp, Homo sapien
ctaacgtgtattctttatggacctt

SEQ ID NO: 234300 - DNA, 25 bp, Homo sapien
ggttggcatatacctaacgtgtatt

SEQ ID NO: 234301 - DNA, 25 bp, Homo sapien
ttgctatcagcaaggttggcatata

SEQ ID NO: 234302 - DNA, 25 bp, Homo sapien
tatggaccttttgttataagcaatg

SEQ ID NO: 234303 - DNA, 25 bp, Homo sapien
cgacactggcatttggttggtattc

SEQ ID NO: 234304 - DNA, 25 bp, Homo sapien
tctctacactaatccaaaatcgaca

SEQ ID NO: 234305 - DNA, 25 bp, Homo sapien
gagtgtgtgagtaactagctgacaa

SEQ ID NO: 234306 - DNA, 25 bp, Homo sapien
tagaaatttggcatagccatccaaa

SEQ ID NO: 234307 - DNA, 25 bp, Homo sapien
taagttgcacatggttgtaccacga

SEQ ID NO: 234308 - DNA, 25 bp, Homo sapien
gaaacgaagtgttctgagccaacta

SEQ ID NO: 234309 - DNA, 25 bp, Homo sapien
gaatgaattgtaccactccaaagcc

SEQ ID NO: 234310 - DNA, 25 bp, Homo sapien
tgcagataagaaagctccctacagg

SEQ ID NO: 234311 - DNA, 25 bp, Homo sapien
tttccctggttagcctctgagaaca

SEQ ID NO: 234312 - DNA, 25 bp, Homo sapien
gcaattttgatactgggaacgtctc

SEQ ID NO: 234313 - DNA, 25 bp, Homo sapien
tacaaggttcgatgttgatcctcaa

SEQ ID NO: 234314 - DNA, 25 bp, Homo sapien
tcaaaatttagtacagggcctctgg

SEQ ID NO: 234315 - DNA, 25 bp, Homo sapien
ctgcggcgacgctggactcgcgggt

SEQ ID NO: 234316 - DNA, 25 bp, Homo sapien
cgggtcgcgccgtctcccggccgag

SEQ ID NO: 234317 - DNA, 25 bp, Homo sapien
gcgacgctggactcgcgggtggccc

SEQ ID NO: 234318 - DNA, 25 bp, Homo sapien
cgctgcttctcgcggccgcattggg

SEQ ID NO: 234319 - DNA, 25 bp, Homo sapien
cggatgaactggagcttaatgtcaa

SEQ ID NO: 234320 - DNA, 25 bp, Homo sapien
agtctccgggcgaggccgccaccct

SEQ ID NO: 234321 - DNA, 25 bp, Homo sapien
tcggtcccttgcgaaagcggccgcg

SEQ ID NO: 234322 - DNA, 25 bp, Homo sapien
cagcgccgcgagtctccgggcgagg

SEQ ID NO: 234323 - DNA, 25 bp, Homo sapien
aaaagaaagacattggctccaactg

SEQ ID NO: 234324 - DNA, 25 bp, Homo sapien
tggcacaagatgttcaaaagaaaga

SEQ ID NO: 234325 - DNA, 25 bp, Homo sapien
gaaagacattggctccaactgaact

SEQ ID NO: 234326 - DNA, 25 bp, Homo sapien
ttcaaaagaaagacattggctccaa

SEQ ID NO: 234327 - DNA, 25 bp, Homo sapien
gttggtggcttcagatgacccttca

SEQ ID NO: 234328 - DNA, 25 bp, Homo sapien
gatgtgtgatgttacacacaccaaa

SEQ ID NO: 234329 - DNA, 25 bp, Homo sapien
tcagtgatccatgggtgatgtgtga

SEQ ID NO: 234330 - DNA, 25 bp, Homo sapien
ctgaaggaattcatcgttggtggct

SEQ ID NO: 234331 - DNA, 25 bp, Homo sapien
caataatggctaatgggcggcatct

SEQ ID NO: 234332 - DNA, 25 bp, Homo sapien
tatcacatttattccttcgttgacc

SEQ ID NO: 234333 - DNA, 25 bp, Homo sapien
caaacccgggcttgctttggcaata

SEQ ID NO: 234334 - DNA, 25 bp, Homo sapien
cacatttattccttcgttgaccaaa

SEQ ID NO: 234335 - DNA, 25 bp, Homo sapien
gaacctcacgataggaaactttcag

SEQ ID NO: 234336 - DNA, 25 bp, Homo sapien
gaacacttatacttcatccgttgac

SEQ ID NO: 234337 - DNA, 25 bp, Homo sapien
atccgttgactctagatgacactga

SEQ ID NO: 234338 - DNA, 25 bp, Homo sapien
gatggatcatctcgtttcaaagagc

SEQ ID NO: 234339 - DNA, 25 bp, Homo sapien
ttctgaacgccagggctatgattct

SEQ ID NO: 234340 - DNA, 25 bp, Homo sapien
gaacgccagggctatgattctcaac

SEQ ID NO: 234341 - DNA, 25 bp, Homo sapien
tcctgtcttctgaacgccagggcta

SEQ ID NO: 234342 - DNA, 25 bp, Homo sapien
cgccagggctatgattctcaacttt

SEQ ID NO: 234343 - DNA, 25 bp, Homo sapien
gcttgttgcaaaccccacagttgtg

SEQ ID NO: 234344 - DNA, 25 bp, Homo sapien
gatgcaaacctaacttcccctgtga

SEQ ID NO: 234345 - DNA, 25 bp, Homo sapien
gcaaaggctctagggcttgcaggat

SEQ ID NO: 234346 - DNA, 25 bp, Homo sapien
tgaaccagagccctaattgggcctg

SEQ ID NO: 234347 - DNA, 25 bp, Homo sapien
gaactgcactgccaggtaatttagc

SEQ ID NO: 234348 - DNA, 25 bp, Homo sapien
tagtccatgctcagggacaaatgga

SEQ ID NO: 234349 - DNA, 25 bp, Homo sapien
gcaatgcaagaatccagctaccaga

SEQ ID NO: 234350 - DNA, 25 bp, Homo sapien
gaccttttcttagcgggaactgcac

SEQ ID NO: 234351 - DNA, 25 bp, Homo sapien
ttgtctcctgttggcctaaaaccag

SEQ ID NO: 234352 - DNA, 25 bp, Homo sapien
gccgatgccacaccaatgaatgtca

SEQ ID NO: 234353 - DNA, 25 bp, Homo sapien
tagatgagtagaagaagtcttcagc

SEQ ID NO: 234354 - DNA, 25 bp, Homo sapien
gaggtctttgcaggagccgatgcca

SEQ ID NO: 234355 - DNA, 25 bp, Homo sapien
ctgacagtgcacaatccattgagat

SEQ ID NO: 234356 - DNA, 25 bp, Homo sapien
cctgtaactgacagtgcacaatcca

SEQ ID NO: 234357 - DNA, 25 bp, Homo sapien
tctacctgtaactgacagtgcacaa

SEQ ID NO: 234358 - DNA, 25 bp, Homo sapien
ggagttctacctgtaactgacagtg

SEQ ID NO: 234359 - DNA, 25 bp, Homo sapien
gatcctacacgctgacggtcagtag

SEQ ID NO: 234360 - DNA, 25 bp, Homo sapien
tggaaggctccttttcaatatgtaa

SEQ ID NO: 234361 - DNA, 25 bp, Homo sapien
ggattccagtcaataaccagacaca

SEQ ID NO: 234362 - DNA, 25 bp, Homo sapien
aagagggatgtgaaccttcaggaac

SEQ ID NO: 234363 - DNA, 25 bp, Homo sapien
tacaatggtatcaacagttcatcaa

SEQ ID NO: 234364 - DNA, 25 bp, Homo sapien
tcgatacagagttgatacaatggta

SEQ ID NO: 234365 - DNA, 25 bp, Homo sapien
gataaaaagtctcgatacagagttg

SEQ ID NO: 234366 - DNA, 25 bp, Homo sapien
taaaatcagagtttcacccctcctg

SEQ ID NO: 234367 - DNA, 25 bp, Homo sapien
caggtcttgtgtgcagcaggaactc

SEQ ID NO: 234368 - DNA, 25 bp, Homo sapien
tgtgggctgtctacattcaaaccag

SEQ ID NO: 234369 - DNA, 25 bp, Homo sapien
tatgtgttaagctgcataagcaccc

SEQ ID NO: 234370 - DNA, 25 bp, Homo sapien
caccgtgttggctgtacaaacctgg

SEQ ID NO: 234371 - DNA, 25 bp, Homo sapien
tggcctgtgctctgaactgttccct

SEQ ID NO: 234372 - DNA, 25 bp, Homo sapien
gatacccgtggacacttccttctag

SEQ ID NO: 234373 - DNA, 25 bp, Homo sapien
gagcttcccgggatacccgtggaca

SEQ ID NO: 234374 - DNA, 25 bp, Homo sapien
tgacccatgctgtgcatgagcttcc

SEQ ID NO: 234375 - DNA, 25 bp, Homo sapien
tgtggccaagttgttctgggctcag

SEQ ID NO: 234376 - DNA, 25 bp, Homo sapien
tctgcagacacttatggacccttac

SEQ ID NO: 234377 - DNA, 25 bp, Homo sapien
gctgatctgggcaattctatctgca

SEQ ID NO: 234378 - DNA, 25 bp, Homo sapien
taaacctctgtctagagagaccaac

SEQ ID NO: 234379 - DNA, 25 bp, Homo sapien
aatgatttgccctttgcacacaaag

SEQ ID NO: 234380 - DNA, 25 bp, Homo sapien
ttttccctccatagtgctaaacata

SEQ ID NO: 234381 - DNA, 25 bp, Homo sapien
tccaccatgcaaattaaaggttctg

SEQ ID NO: 234382 - DNA, 25 bp, Homo sapien
cacaaagtcattaggtatacacagt

SEQ ID NO: 234383 - DNA, 25 bp, Homo sapien
tattctctttccgagattaaagaac

SEQ ID NO: 234384 - DNA, 25 bp, Homo sapien
tgcacacgcgtgcagtcttgactag

SEQ ID NO: 234385 - DNA, 25 bp, Homo sapien
cagacgtgcgtatgcgtgtgtgcac

SEQ ID NO: 234386 - DNA, 25 bp, Homo sapien
ctagggtaaaaggatgggacatcag

SEQ ID NO: 234387 - DNA, 25 bp, Homo sapien
cagtcttgactaggtgtggaaaaaa

SEQ ID NO: 234388 - DNA, 25 bp, Homo sapien
ggaaagtctccaagctctcagtcgc

SEQ ID NO: 234389 - DNA, 25 bp, Homo sapien
cctgccacctttcggggcgactcgg

SEQ ID NO: 234390 - DNA, 25 bp, Homo sapien
tgagtggggccgaccggccttgcgg

SEQ ID NO: 234391 - DNA, 25 bp, Homo sapien
caactcagaccccaccagacaaact

SEQ ID NO: 234392 - DNA, 25 bp, Homo sapien
tccatcccggagtgggagctaggca

SEQ ID NO: 234393 - DNA, 25 bp, Homo sapien
tctggtccatcccggagtgggagct

SEQ ID NO: 234394 - DNA, 25 bp, Homo sapien
tggtccatcccggagtgggagctag

SEQ ID NO: 234395 - DNA, 25 bp, Homo sapien
tgggagctaggcagggacgccacct

SEQ ID NO: 234396 - DNA, 25 bp, Homo sapien
gtcgggggaggccatcgggaagcca

SEQ ID NO: 234397 - DNA, 25 bp, Homo sapien
tcgggggaggccatcgggaagccac

SEQ ID NO: 234398 - DNA, 25 bp, Homo sapien
gcgtacaagtattgagtcccgcgcc

SEQ ID NO: 234399 - DNA, 25 bp, Homo sapien
tcattctgcgttgcgccgtcccttc

SEQ ID NO: 234400 - DNA, 25 bp, Homo sapien
ccttccaggtcgagttgacggcctt

SEQ ID NO: 234401 - DNA, 25 bp, Homo sapien
gggcctcgcggctcattctgcgttg

SEQ ID NO: 234402 - DNA, 25 bp, Homo sapien
gagacggcgctcagcaaatttagat

SEQ ID NO: 234403 - DNA, 25 bp, Homo sapien
agggagacggcgctcagcaaattta

SEQ ID NO: 234404 - DNA, 25 bp, Homo sapien
aacgtgggctctcgacctctggtcc

SEQ ID NO: 234405 - DNA, 25 bp, Homo sapien
tttagatgaatgcaacgcttcaacg

SEQ ID NO: 234406 - DNA, 25 bp, Homo sapien
gaggatggtctggagcccgacacag

SEQ ID NO: 234407 - DNA, 25 bp, Homo sapien
atggtctggagcccgacacagcttg

SEQ ID NO: 234408 - DNA, 25 bp, Homo sapien
aggaggatggtctggagcccgacac

SEQ ID NO: 234409 - DNA, 25 bp, Homo sapien
gatggtctggagcccgacacagctt

SEQ ID NO: 234410 - DNA, 25 bp, Homo sapien
taatatttctgtgctcaaccgagaa

SEQ ID NO: 234411 - DNA, 25 bp, Homo sapien
attctgaaatacaggatagccttcc

SEQ ID NO: 234412 - DNA, 25 bp, Homo sapien
caaaaattagggcagcaagccacca

SEQ ID NO: 234413 - DNA, 25 bp, Homo sapien
taatagatagtcataaagcaagtcc

SEQ ID NO: 234414 - DNA, 25 bp, Homo sapien
ctcatagtgatctcaatctttgttg

SEQ ID NO: 234415 - DNA, 25 bp, Homo sapien
aaggcttgcccactgcatcggttca

SEQ ID NO: 234416 - DNA, 25 bp, Homo sapien
ctttgttgcagtcaaagttacgtaa

SEQ ID NO: 234417 - DNA, 25 bp, Homo sapien
tcaatctgttgtgtcttctttctgt

SEQ ID NO: 234418 - DNA, 25 bp, Homo sapien
tgcttgaaatggtaagtccacctcc

SEQ ID NO: 234419 - DNA, 25 bp, Homo sapien
gaatttttagcatatgcttgaaatg

SEQ ID NO: 234420 - DNA, 25 bp, Homo sapien
tcacggaaaatagcttctccagaat

SEQ ID NO: 234421 - DNA, 25 bp, Homo sapien
catcccctcacggaaaatagcttct

SEQ ID NO: 234422 - DNA, 25 bp, Homo sapien
tcagactttttctagactctctaga

SEQ ID NO: 234423 - DNA, 25 bp, Homo sapien
ctctctagaccctgatacgtctttg

SEQ ID NO: 234424 - DNA, 25 bp, Homo sapien
ctagaccctgatacgtctttgaaca

SEQ ID NO: 234425 - DNA, 25 bp, Homo sapien
accctgatacgtctttgaacaccct

SEQ ID NO: 234426 - DNA, 25 bp, Homo sapien
tcattccctgacgacagtttatcaa

SEQ ID NO: 234427 - DNA, 25 bp, Homo sapien
gaaatttgggtttcaattcagatat

SEQ ID NO: 234428 - DNA, 25 bp, Homo sapien
gggcttggccgttttattgcttcta

SEQ ID NO: 234429 - DNA, 25 bp, Homo sapien
ccctgacgacagtttatcaagtgct

SEQ ID NO: 234430 - DNA, 25 bp, Homo sapien
tttgtgcagtgtacaatgcttaaga

SEQ ID NO: 234431 - DNA, 25 bp, Homo sapien
cttttgtgcagtgtacaatgcttaa

SEQ ID NO: 234432 - DNA, 25 bp, Homo sapien
ttttgtgcagtgtacaatgcttaag

SEQ ID NO: 234433 - DNA, 25 bp, Homo sapien
ggcatcatcggaattggtctcatga

SEQ ID NO: 234434 - DNA, 25 bp, Homo sapien
tacaggcatcatcggaattggtctc

SEQ ID NO: 234435 - DNA, 25 bp, Homo sapien
ccgcaaggccatttcctcttctcac

SEQ ID NO: 234436 - DNA, 25 bp, Homo sapien
ggtatgtacaggcatcatcggaatt

SEQ ID NO: 234437 - DNA, 25 bp, Homo sapien
gtcgcaggcaggcaaggtccaaaca

SEQ ID NO: 234438 - DNA, 25 bp, Homo sapien
gcaccggtttgacaactgaggcggt

SEQ ID NO: 234439 - DNA, 25 bp, Homo sapien
acaactgaggcggttgccggcttca

SEQ ID NO: 234440 - DNA, 25 bp, Homo sapien
caggcaggcaaggtccaaacaccgg

SEQ ID NO: 234441 - DNA, 25 bp, Homo sapien
gatggaccctaatgcaatatggctg

SEQ ID NO: 234442 - DNA, 25 bp, Homo sapien
ggagtgagcctaaccataaatgatg

SEQ ID NO: 234443 - DNA, 25 bp, Homo sapien
tacaagccaaagagggaggtctcag

SEQ ID NO: 234444 - DNA, 25 bp, Homo sapien
tgcagacacagggatatgacggcca

SEQ ID NO: 234445 - DNA, 25 bp, Homo sapien
ggttcgtgaaagaaagagtcccgca

SEQ ID NO: 234446 - DNA, 25 bp, Homo sapien
cattgatctgtcttgtcgggacaca

SEQ ID NO: 234447 - DNA, 25 bp, Homo sapien
tgtggacccaattcttttcagtaga

SEQ ID NO: 234448 - DNA, 25 bp, Homo sapien
ccattgctggagagtaggatttcac

SEQ ID NO: 234449 - DNA, 25 bp, Homo sapien
cctgcctactccagtgtggccgatg

SEQ ID NO: 234450 - DNA, 25 bp, Homo sapien
cctactccagtgtggccgatgtatt

SEQ ID NO: 234451 - DNA, 25 bp, Homo sapien
aacccataatcaacccagagatcat

SEQ ID NO: 234452 - DNA, 25 bp, Homo sapien
ccagagatcattggcccaaccacat

SEQ ID NO: 234453 - DNA, 25 bp, Homo sapien
agcagcagtagcatagtcaccacca

SEQ ID NO: 234454 - DNA, 25 bp, Homo sapien
ctgtgagatcaatagttgctatcag

SEQ ID NO: 234455 - DNA, 25 bp, Homo sapien
gagatcaatagttgctatcagcagc

SEQ ID NO: 234456 - DNA, 25 bp, Homo sapien
tgagatcaatagttgctatcagcag

SEQ ID NO: 234457 - DNA, 25 bp, Homo sapien
gatttttgtcctcgtatccaaattc

SEQ ID NO: 234458 - DNA, 25 bp, Homo sapien
aaggactcgatgctcaaagaaaaac

SEQ ID NO: 234459 - DNA, 25 bp, Homo sapien
gagaagcatggcgttttcctcctgc

SEQ ID NO: 234460 - DNA, 25 bp, Homo sapien
tcctgctttacatgtgagtgcctgt

SEQ ID NO: 234461 - DNA, 25 bp, Homo sapien
ctgagtgcatgagcgggcatcctga

SEQ ID NO: 234462 - DNA, 25 bp, Homo sapien
gctctttggacaaagtctaatgacg

SEQ ID NO: 234463 - DNA, 25 bp, Homo sapien
aatgacgtataagccaaatgctgcc

SEQ ID NO: 234464 - DNA, 25 bp, Homo sapien
aggaggtgagcctgcaacctgagct

SEQ ID NO: 234465 - DNA, 25 bp, Homo sapien
ggtcagaaaccaatccgagtcatag

SEQ ID NO: 234466 - DNA, 25 bp, Homo sapien
gctgtgaacacacttccctacggca

SEQ ID NO: 234467 - DNA, 25 bp, Homo sapien
aatccgagtcatagaagaggctgtg

SEQ ID NO: 234468 - DNA, 25 bp, Homo sapien
gtgaacacacttccctacggcaaag

SEQ ID NO: 234469 - DNA, 25 bp, Homo sapien
gatggccaccgaaagcttttgagca

SEQ ID NO: 234470 - DNA, 25 bp, Homo sapien
gaatggcatattacagggttcgaca

SEQ ID NO: 234471 - DNA, 25 bp, Homo sapien
tatggcagaggtagttgtgaacaat

SEQ ID NO: 234472 - DNA, 25 bp, Homo sapien
aaattgatacccgattatggagggc

SEQ ID NO: 234473 - DNA, 25 bp, Homo sapien
tgagagcctggatcctcctaagtag

SEQ ID NO: 234474 - DNA, 25 bp, Homo sapien
gatcaacaaagtcattctgcacaga

SEQ ID NO: 234475 - DNA, 25 bp, Homo sapien
taagtagcaaatccgaggagcactc

SEQ ID NO: 234476 - DNA, 25 bp, Homo sapien
ttggtcaacagacgtccacccttgg

SEQ ID NO: 234477 - DNA, 25 bp, Homo sapien
tctctgcgaccagccatgggtatac

SEQ ID NO: 234478 - DNA, 25 bp, Homo sapien
ctctctgcgaccagccatgggtata

SEQ ID NO: 234479 - DNA, 25 bp, Homo sapien
cctctctgcgaccagccatgggtat

SEQ ID NO: 234480 - DNA, 25 bp, Homo sapien
ccctctctgcgaccagccatgggta

SEQ ID NO: 234481 - DNA, 25 bp, Homo sapien
tatgtggggtctctagacttggaac

SEQ ID NO: 234482 - DNA, 25 bp, Homo sapien
tccataccccctgggtgaaccagag

SEQ ID NO: 234483 - DNA, 25 bp, Homo sapien
tgaaccagagttgattgctccaagg

SEQ ID NO: 234484 - DNA, 25 bp, Homo sapien
cagtgcccagttggccatgtccata

SEQ ID NO: 234485 - DNA, 25 bp, Homo sapien
tatggttggttctagttattctgga

SEQ ID NO: 234486 - DNA, 25 bp, Homo sapien
tgcaccactgctgtctctatgttag

SEQ ID NO: 234487 - DNA, 25 bp, Homo sapien
gttagttctatcagatagcccagtg

SEQ ID NO: 234488 - DNA, 25 bp, Homo sapien
cgtgactacgggagagaggcagagt

SEQ ID NO: 234489 - DNA, 25 bp, Homo sapien
tgctgaacaaaactctacccaaaat

SEQ ID NO: 234490 - DNA, 25 bp, Homo sapien
gcatcatttatgttctgagatcagg

SEQ ID NO: 234491 - DNA, 25 bp, Homo sapien
tatgcatcatttatgttctgagatc

SEQ ID NO: 234492 - DNA, 25 bp, Homo sapien
caggaatcaacaactcaattattca

SEQ ID NO: 234493 - DNA, 25 bp, Homo sapien
ctggaacaattcgtacataaacaca

SEQ ID NO: 234494 - DNA, 25 bp, Homo sapien
ccattgatccgctttgtatttgaaa

SEQ ID NO: 234495 - DNA, 25 bp, Homo sapien
aacacaaaagctactcaatgatacc

SEQ ID NO: 234496 - DNA, 25 bp, Homo sapien
gtgaaaatagtagagggttcccata

SEQ ID NO: 234497 - DNA, 25 bp, Homo sapien
gtttattttttattccgtgatctca

SEQ ID NO: 234498 - DNA, 25 bp, Homo sapien
cttgttaggctcctcttatttgaca

SEQ ID NO: 234499 - DNA, 25 bp, Homo sapien
tagttgtcacatcttgttaggctcc

SEQ ID NO: 234500 - DNA, 25 bp, Homo sapien
gtgatctcatccaggataccaaatg

SEQ ID NO: 234501 - DNA, 25 bp, Homo sapien
agatactcaggaggctaaggcagga

SEQ ID NO: 234502 - DNA, 25 bp, Homo sapien
gaggctaaggcaggagaatcacttg

SEQ ID NO: 234503 - DNA, 25 bp, Homo sapien
ggtgtggcggtacacacctgtaaac

SEQ ID NO: 234504 - DNA, 25 bp, Homo sapien
tgtggcggtacacacctgtaaaccc

SEQ ID NO: 234505 - DNA, 25 bp, Homo sapien
ttatctgctaataatttgtatgata

SEQ ID NO: 234506 - DNA, 25 bp, Homo sapien
aatttgtatgataatgacgcttaat

SEQ ID NO: 234507 - DNA, 25 bp, Homo sapien
tatctgctaataatttgtatgataa

SEQ ID NO: 234508 - DNA, 25 bp, Homo sapien
atgttatgcattccgtacacttata

SEQ ID NO: 234509 - DNA, 25 bp, Homo sapien
aataagagtactgataccagtattt

SEQ ID NO: 234510 - DNA, 25 bp, Homo sapien
tgcattccgtacacttataaataag

SEQ ID NO: 234511 - DNA, 25 bp, Homo sapien
ttcatgttatgcattccgtacactt

SEQ ID NO: 234512 - DNA, 25 bp, Homo sapien
gggaacgtgaacacacatggctaag

SEQ ID NO: 234513 - DNA, 25 bp, Homo sapien
cactaaatgctgagtgtccagcatt

SEQ ID NO: 234514 - DNA, 25 bp, Homo sapien
gcattgctgttcttgctccagtata

SEQ ID NO: 234515 - DNA, 25 bp, Homo sapien
tatagcagttactggagcccagcag

SEQ ID NO: 234516 - DNA, 25 bp, Homo sapien
tgttcttcctctgtatatagcccga

SEQ ID NO: 234517 - DNA, 25 bp, Homo sapien
gcaaacatgtctcttgcccccagta

SEQ ID NO: 234518 - DNA, 25 bp, Homo sapien
tgtatatagcccgagagggcttgct

SEQ ID NO: 234519 - DNA, 25 bp, Homo sapien
tagaccatcctaaagggttctgcaa

SEQ ID NO: 234520 - DNA, 25 bp, Homo sapien
gaaactggcaccattggcaggaaaa

SEQ ID NO: 234521 - DNA, 25 bp, Homo sapien
agtgagtagagcaccgtggcctgca

SEQ ID NO: 234522 - DNA, 25 bp, Homo sapien
ggcctggctgattgcttggaacata

SEQ ID NO: 234523 - DNA, 25 bp, Homo sapien
cagtgatgatttggactcagggaca

SEQ ID NO: 234524 - DNA, 25 bp, Homo sapien
tcgagtctgctgacattacaatcta

SEQ ID NO: 234525 - DNA, 25 bp, Homo sapien
aatctattgatctccccagagttac

SEQ ID NO: 234526 - DNA, 25 bp, Homo sapien
tgatctccccagagttaccaaaagt

SEQ ID NO: 234527 - DNA, 25 bp, Homo sapien
atcattagtagagtcgagtctgctg

SEQ ID NO: 234528 - DNA, 25 bp, Homo sapien
cagggcatattcaaagtctctaaag

SEQ ID NO: 234529 - DNA, 25 bp, Homo sapien
tctgtccatagttcagggcatattc

SEQ ID NO: 234530 - DNA, 25 bp, Homo sapien
gaccatctgaatctcgatctacttc

SEQ ID NO: 234531 - DNA, 25 bp, Homo sapien
caaagtctctaaagctgacgtgacc

SEQ ID NO: 234532 - DNA, 25 bp, Homo sapien
caggtctggtcatctcacggagagt

SEQ ID NO: 234533 - DNA, 25 bp, Homo sapien
tcacataatgaatggcagggcatca

SEQ ID NO: 234534 - DNA, 25 bp, Homo sapien
gaaggaaggtctcatagcacccaca

SEQ ID NO: 234535 - DNA, 25 bp, Homo sapien
tcgtcatcgcatatatacaagcagg

SEQ ID NO: 234536 - DNA, 25 bp, Homo sapien
tgtaatgatgacagcctctcccgca

SEQ ID NO: 234537 - DNA, 25 bp, Homo sapien
agacccgccaattgaagatgtaatg

SEQ ID NO: 234538 - DNA, 25 bp, Homo sapien
ttctcttctgaggagcccgctgctt

SEQ ID NO: 234539 - DNA, 25 bp, Homo sapien
gggatgagaagacccgccaattgaa

SEQ ID NO: 234540 - DNA, 25 bp, Homo sapien
ccgttgtgctgaaactggtgtgcca

SEQ ID NO: 234541 - DNA, 25 bp, Homo sapien
ccagcactaagcattactcccaaga

SEQ ID NO: 234542 - DNA, 25 bp, Homo sapien
gccacgagggatttcaataatgcgt

SEQ ID NO: 234543 - DNA, 25 bp, Homo sapien
tgcatatgacatcctcattccccga

SEQ ID NO: 234544 - DNA, 25 bp, Homo sapien
cactttgaatcgaaccacaggtata

SEQ ID NO: 234545 - DNA, 25 bp, Homo sapien
acacggtctggtccgctgggacaaa

SEQ ID NO: 234546 - DNA, 25 bp, Homo sapien
gcttttctgtccctcgctgaaggga

SEQ ID NO: 234547 - DNA, 25 bp, Homo sapien
tacaacctctagagcactgtacaga

SEQ ID NO: 234548 - DNA, 25 bp, Homo sapien
gggctgaataagacgtgaagatctg

SEQ ID NO: 234549 - DNA, 25 bp, Homo sapien
ttttcacagtcacgcagaattaggg

SEQ ID NO: 234550 - DNA, 25 bp, Homo sapien
aataagacgtgaagatctgtccctg

SEQ ID NO: 234551 - DNA, 25 bp, Homo sapien
gtccctggaatatgcggcaattatg

SEQ ID NO: 234552 - DNA, 25 bp, Homo sapien
tgcgaccagagatgaaaacactaac

SEQ ID NO: 234553 - DNA, 25 bp, Homo sapien
tagaatgtaggcgtataagcgtgct

SEQ ID NO: 234554 - DNA, 25 bp, Homo sapien
taaaatcatccaggtgtaaactaca

SEQ ID NO: 234555 - DNA, 25 bp, Homo sapien
aaacactaactgcacctaaagccag

SEQ ID NO: 234556 - DNA, 25 bp, Homo sapien
tatggtatcttggtcaccctctaag

SEQ ID NO: 234557 - DNA, 25 bp, Homo sapien
aaatggactgtaagaaagggagagc

SEQ ID NO: 234558 - DNA, 25 bp, Homo sapien
tactactataatggctaagtgcagc

SEQ ID NO: 234559 - DNA, 25 bp, Homo sapien
gaagctgtcgcaaaacttcagttga

SEQ ID NO: 234560 - DNA, 25 bp, Homo sapien
tgaaagcatagtggctctggctcca

SEQ ID NO: 234561 - DNA, 25 bp, Homo sapien
gaggtcacaaacatacatcacaggt

SEQ ID NO: 234562 - DNA, 25 bp, Homo sapien
atcataggtgagatgagaaggcccc

SEQ ID NO: 234563 - DNA, 25 bp, Homo sapien
cagaggtcacctaatgaaactggca

SEQ ID NO: 234564 - DNA, 25 bp, Homo sapien
gttgcaaacaacgtgaaatacacaa

SEQ ID NO: 234565 - DNA, 25 bp, Homo sapien
ttctttcttctctggaccgacaaga

SEQ ID NO: 234566 - DNA, 25 bp, Homo sapien
tgcaaacaacgtgaaatacacaaat

SEQ ID NO: 234567 - DNA, 25 bp, Homo sapien
ttctctggaccgacaagagttttcc

SEQ ID NO: 234568 - DNA, 25 bp, Homo sapien
cacatgaacctccaggaaattgatg

SEQ ID NO: 234569 - DNA, 25 bp, Homo sapien
tgtgtccacacagtgtgtaaggctc

SEQ ID NO: 234570 - DNA, 25 bp, Homo sapien
gggctagggaccagacgtcagtact

SEQ ID NO: 234571 - DNA, 25 bp, Homo sapien
cctgtgccatagatgttccacatga

SEQ ID NO: 234572 - DNA, 25 bp, Homo sapien
ggtttttagacttctggtcaatatg

SEQ ID NO: 234573 - DNA, 25 bp, Homo sapien
tatggcagagtaaacacttgctgaa

SEQ ID NO: 234574 - DNA, 25 bp, Homo sapien
tagacttctggtcaatatggcagag

SEQ ID NO: 234575 - DNA, 25 bp, Homo sapien
tggtcaatatggcagagtaaacact

SEQ ID NO: 234576 - DNA, 25 bp, Homo sapien
tcttgagagcctgcataagtcagct

SEQ ID NO: 234577 - DNA, 25 bp, Homo sapien
tcctcttaatttgggtatagatcat

SEQ ID NO: 234578 - DNA, 25 bp, Homo sapien
tagtccgaatcaagttggtgaaagc

SEQ ID NO: 234579 - DNA, 25 bp, Homo sapien
ttgaaagccatttgccaaaaccaac

SEQ ID NO: 234580 - DNA, 25 bp, Homo sapien
cagaaacaataagttctgaattatg

SEQ ID NO: 234581 - DNA, 25 bp, Homo sapien
tcagaaacaataagttctgaattat

SEQ ID NO: 234582 - DNA, 25 bp, Homo sapien
ctcagaaacaataagttctgaatta

SEQ ID NO: 234583 - DNA, 25 bp, Homo sapien
gaaataaatcttggagagggataag

SEQ ID NO: 234584 - DNA, 25 bp, Homo sapien
ttgaatttaaactctactaggcata

SEQ ID NO: 234585 - DNA, 25 bp, Homo sapien
tgtctttgaagatatttcagttgct

SEQ ID NO: 234586 - DNA, 25 bp, Homo sapien
cataaaataagcttatagaaaacat

SEQ ID NO: 234587 - DNA, 25 bp, Homo sapien
tgggaaaaggcaacagactgattca

SEQ ID NO: 234588 - DNA, 25 bp, Homo sapien
gtcatatccgacagagcctctcttg

SEQ ID NO: 234589 - DNA, 25 bp, Homo sapien
tgcatcataaagttcatataagtca

SEQ ID NO: 234590 - DNA, 25 bp, Homo sapien
gaaatcaggtgttgatttagagact

SEQ ID NO: 234591 - DNA, 25 bp, Homo sapien
ctcaaccaatggagcttctgctggt

SEQ ID NO: 234592 - DNA, 25 bp, Homo sapien
aaccaatggagcttctgctggtgcc

SEQ ID NO: 234593 - DNA, 25 bp, Homo sapien
caatggagcttctgctggtgccaac

SEQ ID NO: 234594 - DNA, 25 bp, Homo sapien
ggagcttctgctggtgccaacatca

SEQ ID NO: 234595 - DNA, 25 bp, Homo sapien
tgacatcgtacaatctgtgctgcat

SEQ ID NO: 234596 - DNA, 25 bp, Homo sapien
ccatgtcactgctaatgtactgaca

SEQ ID NO: 234597 - DNA, 25 bp, Homo sapien
tcagatttcccatgtcactgctaat

SEQ ID NO: 234598 - DNA, 25 bp, Homo sapien
tgtactgacatcgtacaatctgtgc

SEQ ID NO: 234599 - DNA, 25 bp, Homo sapien
ccatttgttctattgctatttgcca

SEQ ID NO: 234600 - DNA, 25 bp, Homo sapien
gccttctcatataataattcaacag

SEQ ID NO: 234601 - DNA, 25 bp, Homo sapien
tgttcttatgaacaagatgccttct

SEQ ID NO: 234602 - DNA, 25 bp, Homo sapien
gaacaagatgccttctcatataata

SEQ ID NO: 234603 - DNA, 25 bp, Homo sapien
agtgtagtgcacatgcagccgtgga

SEQ ID NO: 234604 - DNA, 25 bp, Homo sapien
agtgcacatgcagccgtggacatct

SEQ ID NO: 234605 - DNA, 25 bp, Homo sapien
tagtgcacatgcagccgtggacatc

SEQ ID NO: 234606 - DNA, 25 bp, Homo sapien
tgtagtgcacatgcagccgtggaca

SEQ ID NO: 234607 - DNA, 25 bp, Homo sapien
tactccatcaactaagaactgccat

SEQ ID NO: 234608 - DNA, 25 bp, Homo sapien
attaaacagacaaattactccatca

SEQ ID NO: 234609 - DNA, 25 bp, Homo sapien
aacagacaaattactccatcaacta

SEQ ID NO: 234610 - DNA, 25 bp, Homo sapien
actccatcaactaagaactgccatg

SEQ ID NO: 234611 - DNA, 25 bp, Homo sapien
aagcaatgtgcataacattaggcta

SEQ ID NO: 234612 - DNA, 25 bp, Homo sapien
aacattaggctatacatttcattat

SEQ ID NO: 234613 - DNA, 25 bp, Homo sapien
acattaggctatacatttcattatc

SEQ ID NO: 234614 - DNA, 25 bp, Homo sapien
gcaatgtgcataacattaggctata

SEQ ID NO: 234615 - DNA, 25 bp, Homo sapien
tttgacctttcttttgccgagacat

SEQ ID NO: 234616 - DNA, 25 bp, Homo sapien
tgttttgacctttcttttgccgaga

SEQ ID NO: 234617 - DNA, 25 bp, Homo sapien
ctgccttgttttgacctttcttttg

SEQ ID NO: 234618 - DNA, 25 bp, Homo sapien
aacccaaaatgtactttctgccttg

SEQ ID NO: 234619 - DNA, 25 bp, Homo sapien
caaactcttacatcatatgactatt

SEQ ID NO: 234620 - DNA, 25 bp, Homo sapien
tagtgtactcgatcctacttccttc

SEQ ID NO: 234621 - DNA, 25 bp, Homo sapien
tgtcctctgatcattactaaactgc

SEQ ID NO: 234622 - DNA, 25 bp, Homo sapien
ttgttaagctctggtggacaaactc

SEQ ID NO: 234623 - DNA, 25 bp, Homo sapien
tctggagtcataccacctgggtttg

SEQ ID NO: 234624 - DNA, 25 bp, Homo sapien
tattacttgtgggacagtacagcac

SEQ ID NO: 234625 - DNA, 25 bp, Homo sapien
tctctgcaggcaccctgaagtgact

SEQ ID NO: 234626 - DNA, 25 bp, Homo sapien
tataagctctacgacctcttgagag

SEQ ID NO: 234627 - DNA, 25 bp, Homo sapien
ggtcgcgctgctgggggacgcggcg

SEQ ID NO: 234628 - DNA, 25 bp, Homo sapien
tcgcgctgctgggggacgcggcggt

SEQ ID NO: 234629 - DNA, 25 bp, Homo sapien
ctaccaatttcgggtcgcgctgctg

SEQ ID NO: 234630 - DNA, 25 bp, Homo sapien
accaatttcgggtcgcgctgctggg

SEQ ID NO: 234631 - DNA, 25 bp, Homo sapien
tggtaatgcatttcaacgtcttata

SEQ ID NO: 234632 - DNA, 25 bp, Homo sapien
gtaatgcatttcaacgtcttataaa

SEQ ID NO: 234633 - DNA, 25 bp, Homo sapien
aatgcatttcaacgtcttataaatc

SEQ ID NO: 234634 - DNA, 25 bp, Homo sapien
atgcatttcaacgtcttataaatca

SEQ ID NO: 234635 - DNA, 25 bp, Homo sapien
tgaatgaaaacgctgcctgcttctg

SEQ ID NO: 234636 - DNA, 25 bp, Homo sapien
taattaactgccgaaggtacggcca

SEQ ID NO: 234637 - DNA, 25 bp, Homo sapien
catctagcaagaaacgagaagcagg

SEQ ID NO: 234638 - DNA, 25 bp, Homo sapien
tgagaactgcacatgacaggcctgg

SEQ ID NO: 234639 - DNA, 25 bp, Homo sapien
gtcacatagagatcagtttctgcct

SEQ ID NO: 234640 - DNA, 25 bp, Homo sapien
gtacagaagacagattctggtagcc

SEQ ID NO: 234641 - DNA, 25 bp, Homo sapien
ttctggtagcccaaacactttggtc

SEQ ID NO: 234642 - DNA, 25 bp, Homo sapien
tctgcctgtactgtgacatggtccc

SEQ ID NO: 234643 - DNA, 25 bp, Homo sapien
gaaaatccctagaagtccctcagag

SEQ ID NO: 234644 - DNA, 25 bp, Homo sapien
gatgtttctatacctggaagcaggc

SEQ ID NO: 234645 - DNA, 25 bp, Homo sapien
tataagcatgtgcaacaggacaatc

SEQ ID NO: 234646 - DNA, 25 bp, Homo sapien
aagcaggcagatactcaaagaccaa

SEQ ID NO: 234647 - DNA, 25 bp, Homo sapien
tccaatcagcataacagaagagcct

SEQ ID NO: 234648 - DNA, 25 bp, Homo sapien
tacaattgcattcctaagacccagc

SEQ ID NO: 234649 - DNA, 25 bp, Homo sapien
tgatactccacaagttggctgctgg

SEQ ID NO: 234650 - DNA, 25 bp, Homo sapien
tttaaacgtctccagtcatgatggg

SEQ ID NO: 234651 - DNA, 25 bp, Homo sapien
ttcctgatgacagccgaagttaaat

SEQ ID NO: 234652 - DNA, 25 bp, Homo sapien
tgatggcaggcaaagtcaagaaaga

SEQ ID NO: 234653 - DNA, 25 bp, Homo sapien
agttaaatcatgcactgaaaatgcc

SEQ ID NO: 234654 - DNA, 25 bp, Homo sapien
gccagccagaaataccacagggtgt

SEQ ID NO: 234655 - DNA, 25 bp, Homo sapien
aatgattccttgatgcctatgtcca

SEQ ID NO: 234656 - DNA, 25 bp, Homo sapien
caggagattatgattgcacaacaga

SEQ ID NO: 234657 - DNA, 25 bp, Homo sapien
tacgggcaagtacttccgaaagagc

SEQ ID NO: 234658 - DNA, 25 bp, Homo sapien
cagaaaccatagcaaaaggcctgga

SEQ ID NO: 234659 - DNA, 25 bp, Homo sapien
taaaaagcccatattcagtcaacaa

SEQ ID NO: 234660 - DNA, 25 bp, Homo sapien
agagtttaaaaagcccatattcagt

SEQ ID NO: 234661 - DNA, 25 bp, Homo sapien
ccatgcctgaccgtgttattcatta

SEQ ID NO: 234662 - DNA, 25 bp, Homo sapien
tagtctaactttgggattgtgatat

SEQ ID NO: 234663 - DNA, 25 bp, Homo sapien
ccggtaatttgggagccacctgcct

SEQ ID NO: 234664 - DNA, 25 bp, Homo sapien
cggtaatttgggagccacctgccta

SEQ ID NO: 234665 - DNA, 25 bp, Homo sapien
ttccggtaatttgggagccacctgc

SEQ ID NO: 234666 - DNA, 25 bp, Homo sapien
ggtaatttgggagccacctgcctaa

SEQ ID NO: 234667 - DNA, 25 bp, Homo sapien
ttacttcgttccgatatcgttgagc

SEQ ID NO: 234668 - DNA, 25 bp, Homo sapien
tccgatatcgttgagcttccttctt

SEQ ID NO: 234669 - DNA, 25 bp, Homo sapien
gatgtgtcttacttcgttccgatat

SEQ ID NO: 234670 - DNA, 25 bp, Homo sapien
ttcgttccgatatcgttgagcttcc

SEQ ID NO: 234671 - DNA, 25 bp, Homo sapien
aagtatagttttttgtggttcacag

SEQ ID NO: 234672 - DNA, 25 bp, Homo sapien
tctggctatcacagtgagctcaact

SEQ ID NO: 234673 - DNA, 25 bp, Homo sapien
cctcttgaaaatgaaggagtctagc

SEQ ID NO: 234674 - DNA, 25 bp, Homo sapien
ggagtctagcatctggctatcacag

SEQ ID NO: 234675 - DNA, 25 bp, Homo sapien
cattcatttaccgcctcttttctcc

SEQ ID NO: 234676 - DNA, 25 bp, Homo sapien
gcattcatttaccgcctcttttctc

SEQ ID NO: 234677 - DNA, 25 bp, Homo sapien
attcatttaccgcctcttttctcct

SEQ ID NO: 234678 - DNA, 25 bp, Homo sapien
tatttggatttattgaagacatcac

SEQ ID NO: 234679 - DNA, 25 bp, Homo sapien
ttggatttattgaagacatcacaga

SEQ ID NO: 234680 - DNA, 25 bp, Homo sapien
gaagtatttggatttattgaagaca

SEQ ID NO: 234681 - DNA, 25 bp, Homo sapien
cagaagtatttggatttattgaaga

SEQ ID NO: 234682 - DNA, 25 bp, Homo sapien
gagtcagccctgactacttctctga

SEQ ID NO: 234683 - DNA, 25 bp, Homo sapien
actaggcagcccctcatagctgagc

SEQ ID NO: 234684 - DNA, 25 bp, Homo sapien
cataataagcttctcagtaactagg

SEQ ID NO: 234685 - DNA, 25 bp, Homo sapien
taattccaactgaaatgattacagg

SEQ ID NO: 234686 - DNA, 25 bp, Homo sapien
gtgatcttcatcacatgctttaaat

SEQ ID NO: 234687 - DNA, 25 bp, Homo sapien
gggcttgtacccaaacagcattaca

SEQ ID NO: 234688 - DNA, 25 bp, Homo sapien
tacccaaacagcattacaacagcag

SEQ ID NO: 234689 - DNA, 25 bp, Homo sapien
cttggagggcttgtacccaaacagc

SEQ ID NO: 234690 - DNA, 25 bp, Homo sapien
caggtcttatctgcacacccggcag

SEQ ID NO: 234691 - DNA, 25 bp, Homo sapien
tccaggatcagtcattaaccacgac

SEQ ID NO: 234692 - DNA, 25 bp, Homo sapien
aacttggaggtagccgtagtcctgg

SEQ ID NO: 234693 - DNA, 25 bp, Homo sapien
taaccacgaccctttggacaggcag

SEQ ID NO: 234694 - DNA, 25 bp, Homo sapien
cacgtccgcgacctggctctggcct

SEQ ID NO: 234695 - DNA, 25 bp, Homo sapien
agggactggcttcccacgtccgcga

SEQ ID NO: 234696 - DNA, 25 bp, Homo sapien
cctgtgttccgagggactggcttcc

SEQ ID NO: 234697 - DNA, 25 bp, Homo sapien
ttccgagggactggcttcccacgtc

SEQ ID NO: 234698 - DNA, 25 bp, Homo sapien
gcgactacaacaaccgagccccagc

SEQ ID NO: 234699 - DNA, 25 bp, Homo sapien
cgactacaacaaccgagccccagca

SEQ ID NO: 234700 - DNA, 25 bp, Homo sapien
cgcgactacaacaaccgagccccag

SEQ ID NO: 234701 - DNA, 25 bp, Homo sapien
agctaccaccgctttcccagcctgg

SEQ ID NO: 234702 - DNA, 25 bp, Homo sapien
ccaaccagctaccaccgctttccca

SEQ ID NO: 234703 - DNA, 25 bp, Homo sapien
ctaccaccgctttcccagcctggct

SEQ ID NO: 234704 - DNA, 25 bp, Homo sapien
caccgctttcccagcctggctggca

SEQ ID NO: 234705 - DNA, 25 bp, Homo sapien
ggaagccgaacttcaccgcgcaact

SEQ ID NO: 234706 - DNA, 25 bp, Homo sapien
aactccgacgtctcctcccattgga

SEQ ID NO: 234707 - DNA, 25 bp, Homo sapien
caccgcggctcaggaagccgaactt

SEQ ID NO: 234708 - DNA, 25 bp, Homo sapien
gctcaggaagccgaacttcaccgcg

SEQ ID NO: 234709 - DNA, 25 bp, Homo sapien
ttcccagtataggaggacggtcacg

SEQ ID NO: 234710 - DNA, 25 bp, Homo sapien
tctgtgcgcctcaggtacgtgttgg

SEQ ID NO: 234711 - DNA, 25 bp, Homo sapien
taagcttacaggtgcgtggtcccag

SEQ ID NO: 234712 - DNA, 25 bp, Homo sapien
aaagtgagtaggaaagcgcccacca

SEQ ID NO: 234713 - DNA, 25 bp, Homo sapien
ctttgcatagagactcacttgtttt

SEQ ID NO: 234714 - DNA, 25 bp, Homo sapien
gcatagagactcacttgttttacta

SEQ ID NO: 234715 - DNA, 25 bp, Homo sapien
aaaactttgcatagagactcacttg

SEQ ID NO: 234716 - DNA, 25 bp, Homo sapien
tagagactcacttgttttactagtt

SEQ ID NO: 234717 - DNA, 25 bp, Homo sapien
ttttattctcgacacagaagaattg

SEQ ID NO: 234718 - DNA, 25 bp, Homo sapien
attgtaaatagtccttacattcctg

SEQ ID NO: 234719 - DNA, 25 bp, Homo sapien
ttacttggtgcgttctcgtcctcaa

SEQ ID NO: 234720 - DNA, 25 bp, Homo sapien
taatgtgttcataattcttgctctg

SEQ ID NO: 234721 - DNA, 25 bp, Homo sapien
tcttcataagccactcatcctggtt

SEQ ID NO: 234722 - DNA, 25 bp, Homo sapien
gtgtcatcacgtggatgttcttcat

SEQ ID NO: 234723 - DNA, 25 bp, Homo sapien
taagccactcatcctggttgcccat

SEQ ID NO: 234724 - DNA, 25 bp, Homo sapien
gtcatcacgtggatgttcttcataa

SEQ ID NO: 234725 - DNA, 25 bp, Homo sapien
cgcaaatctgtccaaggctgcctgg

SEQ ID NO: 234726 - DNA, 25 bp, Homo sapien
cattggagaagaatggcacccagct

SEQ ID NO: 234727 - DNA, 25 bp, Homo sapien
gatgatccgctcctacgagctcggg

SEQ ID NO: 234728 - DNA, 25 bp, Homo sapien
taaccgctggtctgtacctctgagc

SEQ ID NO: 234729 - DNA, 25 bp, Homo sapien
tctactaacttggtaaatcagtgca

SEQ ID NO: 234730 - DNA, 25 bp, Homo sapien
tctagctggcatgtctcgtacattc

SEQ ID NO: 234731 - DNA, 25 bp, Homo sapien
tgcagttcacagagaaaggtgttaa

SEQ ID NO: 234732 - DNA, 25 bp, Homo sapien
tcaggaagcttaaggaaatctagaa

SEQ ID NO: 234733 - DNA, 25 bp, Homo sapien
tgtagctgtgatctaattgagactt

SEQ ID NO: 234734 - DNA, 25 bp, Homo sapien
tgtgtaggacaacagatgatattca

SEQ ID NO: 234735 - DNA, 25 bp, Homo sapien
tggccccagtacctaattctcaaaa

SEQ ID NO: 234736 - DNA, 25 bp, Homo sapien
acatagaactactttatgacccagc

SEQ ID NO: 234737 - DNA, 25 bp, Homo sapien
tttagctttctctcagcatatttcc

SEQ ID NO: 234738 - DNA, 25 bp, Homo sapien
aaggacagtcctggtagttgaccca

SEQ ID NO: 234739 - DNA, 25 bp, Homo sapien
tctggaacctcttatccctaaactc

SEQ ID NO: 234740 - DNA, 25 bp, Homo sapien
ccctgttatcaggattgacttcact

SEQ ID NO: 234741 - DNA, 25 bp, Homo sapien
tctcctgtgtctctcaacgaatcgc

SEQ ID NO: 234742 - DNA, 25 bp, Homo sapien
cattctctaatcagctctcctgtgt

SEQ ID NO: 234743 - DNA, 25 bp, Homo sapien
gggaaacactgtaatccatgaactc

SEQ ID NO: 234744 - DNA, 25 bp, Homo sapien
ggtcagaccgtgaatgtaaatgagt

SEQ ID NO: 234745 - DNA, 25 bp, Homo sapien
agacatatttgatcccagatgtcac

SEQ ID NO: 234746 - DNA, 25 bp, Homo sapien
tcagacatatttgatcccagatgtc

SEQ ID NO: 234747 - DNA, 25 bp, Homo sapien
cagacatatttgatcccagatgtca

SEQ ID NO: 234748 - DNA, 25 bp, Homo sapien
gttttcgaactgtgctccccggagc

SEQ ID NO: 234749 - DNA, 25 bp, Homo sapien
ttttaagcagctgatgaagatcaca

SEQ ID NO: 234750 - DNA, 25 bp, Homo sapien
catgttggcaccaaggttctctgtg

SEQ ID NO: 234751 - DNA, 25 bp, Homo sapien
agccagggctgtggttttcgaactg

SEQ ID NO: 234752 - DNA, 25 bp, Homo sapien
tcctcgtatggcaaaaccaatactt

SEQ ID NO: 234753 - DNA, 25 bp, Homo sapien
cagcacgtctccactcatatcttgt

SEQ ID NO: 234754 - DNA, 25 bp, Homo sapien
cttgtcccggaccagagtgttgtcc

SEQ ID NO: 234755 - DNA, 25 bp, Homo sapien
tctctgaaatcgcttctggcaccaa

SEQ ID NO: 234756 - DNA, 25 bp, Homo sapien
tgcatcatccttgagagtgagacct

SEQ ID NO: 234757 - DNA, 25 bp, Homo sapien
gcagggattttgttccatgcttctt

SEQ ID NO: 234758 - DNA, 25 bp, Homo sapien
caccaccaggaggtgtacgctcctg

SEQ ID NO: 234759 - DNA, 25 bp, Homo sapien
tacgctcctgattctccgggtgttc

SEQ ID NO: 234760 - DNA, 25 bp, Homo sapien
cagcctcgcagtgtgggtttcccct

SEQ ID NO: 234761 - DNA, 25 bp, Homo sapien
cagtgtgggtttccccttctgctag

SEQ ID NO: 234762 - DNA, 25 bp, Homo sapien
cttctgctaggtggcccctctttct

SEQ ID NO: 234763 - DNA, 25 bp, Homo sapien
caggtagcagcctcgcagtgtgggt

SEQ ID NO: 234764 - DNA, 25 bp, Homo sapien
aggaatctggagactcttggcaaat

SEQ ID NO: 234765 - DNA, 25 bp, Homo sapien
gtccatcatggtcccttctaagtgg

SEQ ID NO: 234766 - DNA, 25 bp, Homo sapien
gaggaatctggagactcttggcaaa

SEQ ID NO: 234767 - DNA, 25 bp, Homo sapien
ttccatgtccatcatggtcccttct

SEQ ID NO: 234768 - DNA, 25 bp, Homo sapien
ccacaggtcatggagcagttcacca

SEQ ID NO: 234769 - DNA, 25 bp, Homo sapien
tggagcagttcaccaagtccttctg

SEQ ID NO: 234770 - DNA, 25 bp, Homo sapien
accaagtccttctgattcatgtttc

SEQ ID NO: 234771 - DNA, 25 bp, Homo sapien
ggtcatggagcagttcaccaagtcc

SEQ ID NO: 234772 - DNA, 25 bp, Homo sapien
ttaagttccttgatgagaaataaat

SEQ ID NO: 234773 - DNA, 25 bp, Homo sapien
tgcgggttaaggatttggatgggaa

SEQ ID NO: 234774 - DNA, 25 bp, Homo sapien
aactgcggataaatgtgcctgtgac

SEQ ID NO: 234775 - DNA, 25 bp, Homo sapien
catgccccgtagagtttgcgggtta

SEQ ID NO: 234776 - DNA, 25 bp, Homo sapien
gctattcgatactccctttcccaaa

SEQ ID NO: 234777 - DNA, 25 bp, Homo sapien
gggctattcgatactccctttccca

SEQ ID NO: 234778 - DNA, 25 bp, Homo sapien
tccattctggggctattcgatactc

SEQ ID NO: 234779 - DNA, 25 bp, Homo sapien
ttctggctatggggccccttgtgtc

SEQ ID NO: 234780 - DNA, 25 bp, Homo sapien
tttagtgatttctgcattaaatgca

SEQ ID NO: 234781 - DNA, 25 bp, Homo sapien
tttctgcattaaatgcaggtccctg

SEQ ID NO: 234782 - DNA, 25 bp, Homo sapien
cacggctctgctcaaagcgcaggta

SEQ ID NO: 234783 - DNA, 25 bp, Homo sapien
gcgcaggtaattgaaacttcacttt

SEQ ID NO: 234784 - DNA, 25 bp, Homo sapien
taaaattcataccaagtgacctgac

SEQ ID NO: 234785 - DNA, 25 bp, Homo sapien
tggcttcctgccgaacatagaataa

SEQ ID NO: 234786 - DNA, 25 bp, Homo sapien
tattgaaattcagatcatgcaagcc

SEQ ID NO: 234787 - DNA, 25 bp, Homo sapien
taaatatgctcttccctgcttagaa

SEQ ID NO: 234788 - DNA, 25 bp, Homo sapien
cagttcttgctgtgcgtggccttcc

SEQ ID NO: 234789 - DNA, 25 bp, Homo sapien
tagtagggaacaccgcatagctctt

SEQ ID NO: 234790 - DNA, 25 bp, Homo sapien
cgccattgggacaaaaaggtagact

SEQ ID NO: 234791 - DNA, 25 bp, Homo sapien
atgccttagcatgagggcccgcctg

SEQ ID NO: 234792 - DNA, 25 bp, Homo sapien
tccgagcataattgagggagtgcca

SEQ ID NO: 234793 - DNA, 25 bp, Homo sapien
tcatgctgtataaggctctgcctca

SEQ ID NO: 234794 - DNA, 25 bp, Homo sapien
gctgtaattccccttgagcaggcga

SEQ ID NO: 234795 - DNA, 25 bp, Homo sapien
tcatctcttagccacacagtaggga

SEQ ID NO: 234796 - DNA, 25 bp, Homo sapien
gaactgctgaaccagttggatggat

SEQ ID NO: 234797 - DNA, 25 bp, Homo sapien
gagaaattcagcgaacaatgttgga

SEQ ID NO: 234798 - DNA, 25 bp, Homo sapien
gctttggtttcatcatggagattaa

SEQ ID NO: 234799 - DNA, 25 bp, Homo sapien
ttgggaggcctataaaatgatacat

SEQ ID NO: 234800 - DNA, 25 bp, Homo sapien
tttttaacacaataggtctgcccag

SEQ ID NO: 234801 - DNA, 25 bp, Homo sapien
aaacttcgtatgtaaggagatgggc

SEQ ID NO: 234802 - DNA, 25 bp, Homo sapien
cattcaggtagcatcagaagaaaca

SEQ ID NO: 234803 - DNA, 25 bp, Homo sapien
tatttctgaaggtaccaaagcagag

SEQ ID NO: 234804 - DNA, 25 bp, Homo sapien
aagagctgggttttcgttgggcata

SEQ ID NO: 234805 - DNA, 25 bp, Homo sapien
cctgagcccacggatcattggcagt

SEQ ID NO: 234806 - DNA, 25 bp, Homo sapien
tttacagcaaggtctggcagcgttg

SEQ ID NO: 234807 - DNA, 25 bp, Homo sapien
ccatggttaggtagggacagcacaa

SEQ ID NO: 234808 - DNA, 25 bp, Homo sapien
ataacagtaacccatgtaacatggg

SEQ ID NO: 234809 - DNA, 25 bp, Homo sapien
gatcaggcctaaaacaataacagta

SEQ ID NO: 234810 - DNA, 25 bp, Homo sapien
cacagtaattactggccaaaagaaa

SEQ ID NO: 234811 - DNA, 25 bp, Homo sapien
tgaagtaaataacctgatggccatc

SEQ ID NO: 234812 - DNA, 25 bp, Homo sapien
gacccttgggtcagtcttagttaca

SEQ ID NO: 234813 - DNA, 25 bp, Homo sapien
gccacatagcttgttagaacctgag

SEQ ID NO: 234814 - DNA, 25 bp, Homo sapien
caaaagtggtgttgtacaagccaca

SEQ ID NO: 234815 - DNA, 25 bp, Homo sapien
tacagtaactcccagtttaagccac

SEQ ID NO: 234816 - DNA, 25 bp, Homo sapien
gagttgcccagaggaatccctgttc

SEQ ID NO: 234817 - DNA, 25 bp, Homo sapien
gggctgtatctctaatgaaccatgg

SEQ ID NO: 234818 - DNA, 25 bp, Homo sapien
tgtgtcttttggagtacgatgtgta

SEQ ID NO: 234819 - DNA, 25 bp, Homo sapien
taagtgcccattgggtggcctgttg

SEQ ID NO: 234820 - DNA, 25 bp, Homo sapien
tactggtgttcccaagagactgagg

SEQ ID NO: 234821 - DNA, 25 bp, Homo sapien
tggacccagctacagggaagccttt

SEQ ID NO: 234822 - DNA, 25 bp, Homo sapien
catgttcttagcactctgagggcag

SEQ ID NO: 234823 - DNA, 25 bp, Homo sapien
taccacagagccagggatattcgtt

SEQ ID NO: 234824 - DNA, 25 bp, Homo sapien
gaaagtacgtgccacccaagagtgt

SEQ ID NO: 234825 - DNA, 25 bp, Homo sapien
tttgccagaaagcaagggagtgctc

SEQ ID NO: 234826 - DNA, 25 bp, Homo sapien
gcctgatgtgcagtatgagagccca

SEQ ID NO: 234827 - DNA, 25 bp, Homo sapien
aagaacgacctctgtccactgggag

SEQ ID NO: 234828 - DNA, 25 bp, Homo sapien
taactgcgggtctcaacacaagagc

SEQ ID NO: 234829 - DNA, 25 bp, Homo sapien
cctagacggcttgggagcaggcttc

SEQ ID NO: 234830 - DNA, 25 bp, Homo sapien
tgtctgtcgctaaggaacacccggt

SEQ ID NO: 234831 - DNA, 25 bp, Homo sapien
tgtgggcagccaggaactcatgaca

SEQ ID NO: 234832 - DNA, 25 bp, Homo sapien
tcatcggtttaatgaccacgtggca

SEQ ID NO: 234833 - DNA, 25 bp, Homo sapien
aatcatcatcggtttaatgaccacg

SEQ ID NO: 234834 - DNA, 25 bp, Homo sapien
catcggtttaatgaccacgtggcat

SEQ ID NO: 234835 - DNA, 25 bp, Homo sapien
catcatcggtttaatgaccacgtgg

SEQ ID NO: 234836 - DNA, 25 bp, Homo sapien
gggcaacttggcctcgcaggcacag

SEQ ID NO: 234837 - DNA, 25 bp, Homo sapien
ggcagcccacattattactatcgag

SEQ ID NO: 234838 - DNA, 25 bp, Homo sapien
aacatttcaaaagccgagttctcct

SEQ ID NO: 234839 - DNA, 25 bp, Homo sapien
cccaaaaagtgtgcaagatgtgaga

SEQ ID NO: 234840 - DNA, 25 bp, Homo sapien
tcctgcatctcatcggggaaatact

SEQ ID NO: 234841 - DNA, 25 bp, Homo sapien
tcctccagcggcaggcgcacccgga

SEQ ID NO: 234842 - DNA, 25 bp, Homo sapien
cagcggcaggcgcacccggagctcc

SEQ ID NO: 234843 - DNA, 25 bp, Homo sapien
actccacggcgtccaggtacaacac

SEQ ID NO: 234844 - DNA, 25 bp, Homo sapien
gccaagcgaggccttctcttttaaa

SEQ ID NO: 234845 - DNA, 25 bp, Homo sapien
tgttcaggaaggacactgaactcgc

SEQ ID NO: 234846 - DNA, 25 bp, Homo sapien
ttaactcgggcagcactgggcatgt

SEQ ID NO: 234847 - DNA, 25 bp, Homo sapien
tgaactcgcaaaagtgagcaaacgc

SEQ ID NO: 234848 - DNA, 25 bp, Homo sapien
tttcagcatctgggctggactctga

SEQ ID NO: 234849 - DNA, 25 bp, Homo sapien
agctacccacggcaacacttccatg

SEQ ID NO: 234850 - DNA, 25 bp, Homo sapien
tctgaccaaatgctgggaaaccagc

SEQ ID NO: 234851 - DNA, 25 bp, Homo sapien
caggctgggacatgatcccaactct

SEQ ID NO: 234852 - DNA, 25 bp, Homo sapien
acagggtatggcgtccatgagccga

SEQ ID NO: 234853 - DNA, 25 bp, Homo sapien
ctggcgggaagttttcgggaagctg

SEQ ID NO: 234854 - DNA, 25 bp, Homo sapien
caggccgggaagacactagctggac

SEQ ID NO: 234855 - DNA, 25 bp, Homo sapien
acactagctggacggagacctggcg

SEQ ID NO: 234856 - DNA, 25 bp, Homo sapien
tttgcccaagggcaattctgaagtg

SEQ ID NO: 234857 - DNA, 25 bp, Homo sapien
ttgcccaagggcaattctgaagtgc

SEQ ID NO: 234858 - DNA, 25 bp, Homo sapien
tctgaagtgctttgtagaatacacc

SEQ ID NO: 234859 - DNA, 25 bp, Homo sapien
attctgaagtgctttgtagaataca

SEQ ID NO: 234860 - DNA, 25 bp, Homo sapien
cagagaggctaaggctacacaaacg

SEQ ID NO: 234861 - DNA, 25 bp, Homo sapien
atgacgggcacaagccctcagctgc

SEQ ID NO: 234862 - DNA, 25 bp, Homo sapien
cacaaacgcccctggatgacgggca

SEQ ID NO: 234863 - DNA, 25 bp, Homo sapien
acatgattagttgacacagagaggc

SEQ ID NO: 234864 - DNA, 25 bp, Homo sapien
ttataaccaaagagccactgagcgc

SEQ ID NO: 234865 - DNA, 25 bp, Homo sapien
tgcttcaggcaaggcccagtctttc

SEQ ID NO: 234866 - DNA, 25 bp, Homo sapien
atcagcgctggagatgccctcactg

SEQ ID NO: 234867 - DNA, 25 bp, Homo sapien
gggacggaactgtgataaccttgct

SEQ ID NO: 234868 - DNA, 25 bp, Homo sapien
gagtacccctgaactaaagcaagag

SEQ ID NO: 234869 - DNA, 25 bp, Homo sapien
cattgaagaccacttggatatgact

SEQ ID NO: 234870 - DNA, 25 bp, Homo sapien
gatttccgaaacgtacaatattcat

SEQ ID NO: 234871 - DNA, 25 bp, Homo sapien
caagaggcctcgaagactgtttcta

SEQ ID NO: 234872 - DNA, 25 bp, Homo sapien
catggcattttcaaacagggcttgg

SEQ ID NO: 234873 - DNA, 25 bp, Homo sapien
gaaagttcaaatacatcctccacag

SEQ ID NO: 234874 - DNA, 25 bp, Homo sapien
ccgatgcattaagccggtctcagga

SEQ ID NO: 234875 - DNA, 25 bp, Homo sapien
tggctgccactgtcgctgcgcatgg

SEQ ID NO: 234876 - DNA, 25 bp, Homo sapien
tcacgtgactctgacacaagctctc

SEQ ID NO: 234877 - DNA, 25 bp, Homo sapien
ggctcacgtgactctgacacaagct

SEQ ID NO: 234878 - DNA, 25 bp, Homo sapien
aaggctcacgtgactctgacacaag

SEQ ID NO: 234879 - DNA, 25 bp, Homo sapien
gctcacgtgactctgacacaagctc

SEQ ID NO: 234880 - DNA, 25 bp, Homo sapien
caaacagtcctgcagtgcgtgctca

SEQ ID NO: 234881 - DNA, 25 bp, Homo sapien
taattaggcggctacaggaatcggt

SEQ ID NO: 234882 - DNA, 25 bp, Homo sapien
cacctgtccagtgtagggcccatag

SEQ ID NO: 234883 - DNA, 25 bp, Homo sapien
gagaacactggtccaactctgggag

SEQ ID NO: 234884 - DNA, 25 bp, Homo sapien
aataaaggcatgacaaggtggaaga

SEQ ID NO: 234885 - DNA, 25 bp, Homo sapien
ggatagcccaacctatccatgcggc

SEQ ID NO: 234886 - DNA, 25 bp, Homo sapien
tgacccctggtccagcgaggatagc

SEQ ID NO: 234887 - DNA, 25 bp, Homo sapien
gacattgcggatgaactcctcgccc

SEQ ID NO: 234888 - DNA, 25 bp, Homo sapien
aggcacacccaagaactgcaggaag

SEQ ID NO: 234889 - DNA, 25 bp, Homo sapien
gaaagtctgatcaaagattgcccaa

SEQ ID NO: 234890 - DNA, 25 bp, Homo sapien
gaggagtaaagccagaaggcacacc

SEQ ID NO: 234891 - DNA, 25 bp, Homo sapien
tcaaagattgcccaatatcatcaaa

SEQ ID NO: 234892 - DNA, 25 bp, Homo sapien
tccccactcctcaaacgctcctggc

SEQ ID NO: 234893 - DNA, 25 bp, Homo sapien
ctcctcaaacgctcctggcactctg

SEQ ID NO: 234894 - DNA, 25 bp, Homo sapien
tggggccttcacttgtgctgatccc

SEQ ID NO: 234895 - DNA, 25 bp, Homo sapien
ggggccttcacttgtgctgatccct

SEQ ID NO: 234896 - DNA, 25 bp, Homo sapien
acaatctccagaggggtgaccacaa

SEQ ID NO: 234897 - DNA, 25 bp, Homo sapien
ctggaagacaatctccagaggggtg

SEQ ID NO: 234898 - DNA, 25 bp, Homo sapien
tctccagaggggtgaccacaagggc

SEQ ID NO: 234899 - DNA, 25 bp, Homo sapien
aagacaatctccagaggggtgacca

SEQ ID NO: 234900 - DNA, 25 bp, Homo sapien
tggacagcttcctgcctggggcgga

SEQ ID NO: 234901 - DNA, 25 bp, Homo sapien
ggacagcttcctgcctggggcggag

SEQ ID NO: 234902 - DNA, 25 bp, Homo sapien
cctggacagcttcctgcctggggcg

SEQ ID NO: 234903 - DNA, 25 bp, Homo sapien
cccctggacagcttcctgcctgggg

SEQ ID NO: 234904 - DNA, 25 bp, Homo sapien
cgccagtgcctctggtcacgggaac

SEQ ID NO: 234905 - DNA, 25 bp, Homo sapien
ttggtcttatcagggcgccagggcc

SEQ ID NO: 234906 - DNA, 25 bp, Homo sapien
gtcacgggaacgctcagcagcaagc

SEQ ID NO: 234907 - DNA, 25 bp, Homo sapien
cacctgggcagagtcttatctttta

SEQ ID NO: 234908 - DNA, 25 bp, Homo sapien
acaagaatgagacttcttcacctca

SEQ ID NO: 234909 - DNA, 25 bp, Homo sapien
ctagacaagaatgagacttcttcac

SEQ ID NO: 234910 - DNA, 25 bp, Homo sapien
aagaatgagacttcttcacctcatc

SEQ ID NO: 234911 - DNA, 25 bp, Homo sapien
tcttcacctcatcagcaaataaaac

SEQ ID NO: 234912 - DNA, 25 bp, Homo sapien
gtgcatccacgccttccagcctcgg

SEQ ID NO: 234913 - DNA, 25 bp, Homo sapien
tgcatccacgccttccagcctcggg

SEQ ID NO: 234914 - DNA, 25 bp, Homo sapien
gcatccacgccttccagcctcgggc

SEQ ID NO: 234915 - DNA, 25 bp, Homo sapien
tggtgcatccacgccttccagcctc

SEQ ID NO: 234916 - DNA, 25 bp, Homo sapien
tcacgctgtcgggtttgaagaaggt

SEQ ID NO: 234917 - DNA, 25 bp, Homo sapien
gccagcctgccgcagaaagtggcac

SEQ ID NO: 234918 - DNA, 25 bp, Homo sapien
ggcctggaacaatgagatggccttc

SEQ ID NO: 234919 - DNA, 25 bp, Homo sapien
ttggtaggcagatctttcacgctgt

SEQ ID NO: 234920 - DNA, 25 bp, Homo sapien
tgccgtccttaacagcagacaaagt

SEQ ID NO: 234921 - DNA, 25 bp, Homo sapien
ttccgtgccaggcaacgcagggtga

SEQ ID NO: 234922 - DNA, 25 bp, Homo sapien
cagggtgagataagatgctgccgtc

SEQ ID NO: 234923 - DNA, 25 bp, Homo sapien
cctcgatggcatacaggccaggact

SEQ ID NO: 234924 - DNA, 25 bp, Homo sapien
agagaattgggatggcaacacatac

SEQ ID NO: 234925 - DNA, 25 bp, Homo sapien
taagagaattgggatggcaacacat

SEQ ID NO: 234926 - DNA, 25 bp, Homo sapien
ggtaagagaattgggatggcaacac

SEQ ID NO: 234927 - DNA, 25 bp, Homo sapien
ctaaggtaagagaattgggatggca

SEQ ID NO: 234928 - DNA, 25 bp, Homo sapien
cacagctgcgtatcccgaggattct

SEQ ID NO: 234929 - DNA, 25 bp, Homo sapien
tccccagaggattcaaccaggttgt

SEQ ID NO: 234930 - DNA, 25 bp, Homo sapien
cactggtataaaggagatgggctca

SEQ ID NO: 234931 - DNA, 25 bp, Homo sapien
ccttgtagccaatgtgtggttgact

SEQ ID NO: 234932 - DNA, 25 bp, Homo sapien
gaagtcccttcccaagatatgcact

SEQ ID NO: 234933 - DNA, 25 bp, Homo sapien
gatatgcactgcttcttagggttaa

SEQ ID NO: 234934 - DNA, 25 bp, Homo sapien
taaaatagcgttcaacctgcttgcg

SEQ ID NO: 234935 - DNA, 25 bp, Homo sapien
tgccaaggcaggagtctcctttcct

SEQ ID NO: 234936 - DNA, 25 bp, Homo sapien
tgtactcccagttcgcaggatctgg

SEQ ID NO: 234937 - DNA, 25 bp, Homo sapien
tgctatatcccctcggtagagagac

SEQ ID NO: 234938 - DNA, 25 bp, Homo sapien
tcggtagagagacttgtactcccag

SEQ ID NO: 234939 - DNA, 25 bp, Homo sapien
gagacttgtactcccagttcgcagg

SEQ ID NO: 234940 - DNA, 25 bp, Homo sapien
caaacaaagcgatgtccagtatcag

SEQ ID NO: 234941 - DNA, 25 bp, Homo sapien
aaacaaagcgatgtccagtatcagc

SEQ ID NO: 234942 - DNA, 25 bp, Homo sapien
gccaaacaaagcgatgtccagtatc

SEQ ID NO: 234943 - DNA, 25 bp, Homo sapien
caagccaaacaaagcgatgtccagt

SEQ ID NO: 234944 - DNA, 25 bp, Homo sapien
tgcggcaacaattaagggagaaaaa

SEQ ID NO: 234945 - DNA, 25 bp, Homo sapien
atttgcggcaacaattaagggagaa

SEQ ID NO: 234946 - DNA, 25 bp, Homo sapien
acttaaaatatcataggtgcttgag

SEQ ID NO: 234947 - DNA, 25 bp, Homo sapien
tcataggtgcttgagaacagcaacc

SEQ ID NO: 234948 - DNA, 25 bp, Homo sapien
ctcagacctgctgctactcgacggc

SEQ ID NO: 234949 - DNA, 25 bp, Homo sapien
tgctgctactcgacggcccatgctt

SEQ ID NO: 234950 - DNA, 25 bp, Homo sapien
ccttttcagaatcggtgtctgtctc

SEQ ID NO: 234951 - DNA, 25 bp, Homo sapien
gtccttttcagaatcggtgtctgtc

SEQ ID NO: 234952 - DNA, 25 bp, Homo sapien
ctgaagactctgatttcagatgact

SEQ ID NO: 234953 - DNA, 25 bp, Homo sapien
tgaagactctgatttcagatgactc

SEQ ID NO: 234954 - DNA, 25 bp, Homo sapien
tattttcagtgccacatattatgtc

SEQ ID NO: 234955 - DNA, 25 bp, Homo sapien
ggcaagaggactgctgaaggtgctt

SEQ ID NO: 234956 - DNA, 25 bp, Homo sapien
gacattattaaaggttggctgggtg

SEQ ID NO: 234957 - DNA, 25 bp, Homo sapien
cacatattatgtcaacatgttgtta

SEQ ID NO: 234958 - DNA, 25 bp, Homo sapien
cagcggtaacccttcagaaacatgg

SEQ ID NO: 234959 - DNA, 25 bp, Homo sapien
tatggatccaacacaaaagcttggg

SEQ ID NO: 234960 - DNA, 25 bp, Homo sapien
tgcttcagtttgttggctcagggac

SEQ ID NO: 234961 - DNA, 25 bp, Homo sapien
cttgggttgctcagccagtctaact

SEQ ID NO: 234962 - DNA, 25 bp, Homo sapien
cataactctacaaccttggtccaga

SEQ ID NO: 234963 - DNA, 25 bp, Homo sapien
agacctcggagggattgagcctttc

SEQ ID NO: 234964 - DNA, 25 bp, Homo sapien
tctacaaccttggtccagaacaggc

SEQ ID NO: 234965 - DNA, 25 bp, Homo sapien
taacaacatcgtacagaagtcccag

SEQ ID NO: 234966 - DNA, 25 bp, Homo sapien
agaaggctttgcagcgccgcggaga

SEQ ID NO: 234967 - DNA, 25 bp, Homo sapien
aggctttgcagcgccgcggagaact

SEQ ID NO: 234968 - DNA, 25 bp, Homo sapien
aaggctttgcagcgccgcggagaac

SEQ ID NO: 234969 - DNA, 25 bp, Homo sapien
gaaggctttgcagcgccgcggagaa

SEQ ID NO: 234970 - DNA, 25 bp, Homo sapien
gagcctcactaagccccgcaaaggc

SEQ ID NO: 234971 - DNA, 25 bp, Homo sapien
ctcactaagccccgcaaaggctggg

SEQ ID NO: 234972 - DNA, 25 bp, Homo sapien
cactaagccccgcaaaggctgggaa

SEQ ID NO: 234973 - DNA, 25 bp, Homo sapien
taagccccgcaaaggctgggaacag

SEQ ID NO: 234974 - DNA, 25 bp, Homo sapien
tacctccgttcttctctatagggat

SEQ ID NO: 234975 - DNA, 25 bp, Homo sapien
cgtacctccgttcttctctataggg

SEQ ID NO: 234976 - DNA, 25 bp, Homo sapien
ccacaggccgtacctccgttcttct

SEQ ID NO: 234977 - DNA, 25 bp, Homo sapien
ggccgtacctccgttcttctctata

SEQ ID NO: 234978 - DNA, 25 bp, Homo sapien
gacttaaacctctccctttgatgag

SEQ ID NO: 234979 - DNA, 25 bp, Homo sapien
ttttgtcaaggttgaggatgcgcct

SEQ ID NO: 234980 - DNA, 25 bp, Homo sapien
agtcttactgttgtggacccaggaa

SEQ ID NO: 234981 - DNA, 25 bp, Homo sapien
ctttgatgaggcctgtgtaagatcc

SEQ ID NO: 234982 - DNA, 25 bp, Homo sapien
gagacgtgctatttcgacttcgact

SEQ ID NO: 234983 - DNA, 25 bp, Homo sapien
catctgagtacaggttacagggtca

SEQ ID NO: 234984 - DNA, 25 bp, Homo sapien
tctcagtgtctggaataggtgtgtc

SEQ ID NO: 234985 - DNA, 25 bp, Homo sapien
tcttgaacaaggtggacgacagccc

SEQ ID NO: 234986 - DNA, 25 bp, Homo sapien
cagtagcattagtaagcccaagaag

SEQ ID NO: 234987 - DNA, 25 bp, Homo sapien
ggatgaactggagtgttcctgagtt

SEQ ID NO: 234988 - DNA, 25 bp, Homo sapien
gtgttcctgagttggtcaccaactg

SEQ ID NO: 234989 - DNA, 25 bp, Homo sapien
gaaaccctaaggctatatacaccag

SEQ ID NO: 234990 - DNA, 25 bp, Homo sapien
tgtagcccagaggtcctttattatt

SEQ ID NO: 234991 - DNA, 25 bp, Homo sapien
gtagcccagaggtcctttattatta

SEQ ID NO: 234992 - DNA, 25 bp, Homo sapien
agcccagaggtcctttattattatt

SEQ ID NO: 234993 - DNA, 25 bp, Homo sapien
tcccttgacgtctacaatatcaact

SEQ ID NO: 234994 - DNA, 25 bp, Homo sapien
aactttcttatagattcgcatatat

SEQ ID NO: 234995 - DNA, 25 bp, Homo sapien
acccattcccttgacgtctacaata

SEQ ID NO: 234996 - DNA, 25 bp, Homo sapien
actttcttatagattcgcatatatg

SEQ ID NO: 234997 - DNA, 25 bp, Homo sapien
cgaattactggaacatggcggttcc

SEQ ID NO: 234998 - DNA, 25 bp, Homo sapien
ggcgaattactggaacatggcggtt

SEQ ID NO: 234999 - DNA, 25 bp, Homo sapien
attactggaacatggcggttccggc

SEQ ID NO: 235000 - DNA, 25 bp, Homo sapien
gaattactggaacatggcggttccg

SEQ ID NO: 235001 - DNA, 25 bp, Homo sapien
aacaaacttgataccagcttggtcg

SEQ ID NO: 235002 - DNA, 25 bp, Homo sapien
gcttggtcgttcatgatgctcgtta

SEQ ID NO: 235003 - DNA, 25 bp, Homo sapien
tacccattatgaaagtagaacgtgg

SEQ ID NO: 235004 - DNA, 25 bp, Homo sapien
gggtcacactcacaattggtacaaa

SEQ ID NO: 235005 - DNA, 25 bp, Homo sapien
cggcctatcagagcgtccttgtcaa

SEQ ID NO: 235006 - DNA, 25 bp, Homo sapien
ttcgcggcttgacgcattgcaggtg

SEQ ID NO: 235007 - DNA, 25 bp, Homo sapien
agacggcgcggctcttttcggccaa

SEQ ID NO: 235008 - DNA, 25 bp, Homo sapien
tcaaactgaacgaggaaagaagcct

SEQ ID NO: 235009 - DNA, 25 bp, Homo sapien
aaagcttttatcaactggcccatga

SEQ ID NO: 235010 - DNA, 25 bp, Homo sapien
cgtgtgtcgccacgcccagttagtg

SEQ ID NO: 235011 - DNA, 25 bp, Homo sapien
gaagtaggtgacgagcactcttaga

SEQ ID NO: 235012 - DNA, 25 bp, Homo sapien
tgctcctggccgagctcaaagcttt

SEQ ID NO: 235013 - DNA, 25 bp, Homo sapien
tgctaagatgatcagctacccagga

SEQ ID NO: 235014 - DNA, 25 bp, Homo sapien
ttgacaaagccttcagcacgttaga

SEQ ID NO: 235015 - DNA, 25 bp, Homo sapien
tagtaaaatcgcttgtctggtcaca

SEQ ID NO: 235016 - DNA, 25 bp, Homo sapien
ggttgtccatagttctctagtttgc

SEQ ID NO: 235017 - DNA, 25 bp, Homo sapien
agtgcagcagaactacgtcacgtca

SEQ ID NO: 235018 - DNA, 25 bp, Homo sapien
aacttaggagaaaaactaacagatg

SEQ ID NO: 235019 - DNA, 25 bp, Homo sapien
gatattgatggagacggacaagtca

SEQ ID NO: 235020 - DNA, 25 bp, Homo sapien
tggagacggacaagtcaactatgaa

SEQ ID NO: 235021 - DNA, 25 bp, Homo sapien
gaatcttttacttacctcttgcaaa

SEQ ID NO: 235022 - DNA, 25 bp, Homo sapien
tgcaaaatgaagacctactttcaac

SEQ ID NO: 235023 - DNA, 25 bp, Homo sapien
atgaagacctactttcaactccttt

SEQ ID NO: 235024 - DNA, 25 bp, Homo sapien
tgaatcttttacttacctcttgcaa

SEQ ID NO: 235025 - DNA, 25 bp, Homo sapien
ttaatacactgtttgggctggccag

SEQ ID NO: 235026 - DNA, 25 bp, Homo sapien
ggctggccagtttttcatgcatgca

SEQ ID NO: 235027 - DNA, 25 bp, Homo sapien
cacacacaaaatctgcatgtattgg

SEQ ID NO: 235028 - DNA, 25 bp, Homo sapien
tgtcccctaaagatcaagctacaca

SEQ ID NO: 235029 - DNA, 25 bp, Homo sapien
caaattcaaaacctattcaaatggg

SEQ ID NO: 235030 - DNA, 25 bp, Homo sapien
aaattgtcatagctggtttactgaa

SEQ ID NO: 235031 - DNA, 25 bp, Homo sapien
atgggttctagttcaatttgtttag

SEQ ID NO: 235032 - DNA, 25 bp, Homo sapien
cttgacgattgagcacagtcaggcc

SEQ ID NO: 235033 - DNA, 25 bp, Homo sapien
gataaaccgttgagacgtggcccca

SEQ ID NO: 235034 - DNA, 25 bp, Homo sapien
gatggtcctcttgtacttcgtgtgc

SEQ ID NO: 235035 - DNA, 25 bp, Homo sapien
tgtgctccgacccatggtgacgatg

SEQ ID NO: 235036 - DNA, 25 bp, Homo sapien
catgcccgtgtatgttggtttagcg

SEQ ID NO: 235037 - DNA, 25 bp, Homo sapien
tgtacatgtaaatgcccacagccca

SEQ ID NO: 235038 - DNA, 25 bp, Homo sapien
cagtagtcacttttgtaagccagtc

SEQ ID NO: 235039 - DNA, 25 bp, Homo sapien
tctgaaccatgacttggagccggca

SEQ ID NO: 235040 - DNA, 25 bp, Homo sapien
tattcaggcagtagagctcttaagg

SEQ ID NO: 235041 - DNA, 25 bp, Homo sapien
gaaatgtagccttctaaccctcaag

SEQ ID NO: 235042 - DNA, 25 bp, Homo sapien
tgctagcaaggcagtgagaagctct

SEQ ID NO: 235043 - DNA, 25 bp, Homo sapien
cattcagggctgatttatagagacc

SEQ ID NO: 235044 - DNA, 25 bp, Homo sapien
tcaaagagcctgattgctgacccag

SEQ ID NO: 235045 - DNA, 25 bp, Homo sapien
actggcatcctgctttagcctgaga

SEQ ID NO: 235046 - DNA, 25 bp, Homo sapien
tgttgagcgaggcaaatggatctcg

SEQ ID NO: 235047 - DNA, 25 bp, Homo sapien
cactgttgccaaggaaggctttttc

SEQ ID NO: 235048 - DNA, 25 bp, Homo sapien
gatatttcagatgggcttttgatgc

SEQ ID NO: 235049 - DNA, 25 bp, Homo sapien
caatattgtaatgaacggctgtgca

SEQ ID NO: 235050 - DNA, 25 bp, Homo sapien
cagaggaatagcttaccacgaaccc

SEQ ID NO: 235051 - DNA, 25 bp, Homo sapien
taatcccctgaagttgtcctgtagg

SEQ ID NO: 235052 - DNA, 25 bp, Homo sapien
ccagcgctgctgtgtctcgtcagag

SEQ ID NO: 235053 - DNA, 25 bp, Homo sapien
ccagctgcctcgtgtgtttcccact

SEQ ID NO: 235054 - DNA, 25 bp, Homo sapien
ggccttttccagctgcctcgtgtgt

SEQ ID NO: 235055 - DNA, 25 bp, Homo sapien
ttagatgtagcaggagaggctgcct

SEQ ID NO: 235056 - DNA, 25 bp, Homo sapien
tttgcttccagaaaggccttttcca

SEQ ID NO: 235057 - DNA, 25 bp, Homo sapien
ctgtggcttcttcggcttttctgga

SEQ ID NO: 235058 - DNA, 25 bp, Homo sapien
ttttctggaactgaggactcccact

SEQ ID NO: 235059 - DNA, 25 bp, Homo sapien
tgtctctcttgtctcgtgccttgcc

SEQ ID NO: 235060 - DNA, 25 bp, Homo sapien
aagcccatggaagggcagatgtcct

SEQ ID NO: 235061 - DNA, 25 bp, Homo sapien
ccggcggcaagagcctcagtgacat

SEQ ID NO: 235062 - DNA, 25 bp, Homo sapien
gggcgccggcggcaagagcctcagt

SEQ ID NO: 235063 - DNA, 25 bp, Homo sapien
gccggcggcaagagcctcagtgaca

SEQ ID NO: 235064 - DNA, 25 bp, Homo sapien
gcgccggcggcaagagcctcagtga

SEQ ID NO: 235065 - DNA, 25 bp, Homo sapien
tgccctggctgcccaagtttctcgt

SEQ ID NO: 235066 - DNA, 25 bp, Homo sapien
tccctcgtccagtgagacttccttg

SEQ ID NO: 235067 - DNA, 25 bp, Homo sapien
tggctgcccaagtttctcgtctggc

SEQ ID NO: 235068 - DNA, 25 bp, Homo sapien
aggccttcctccctcgtccagtgag

SEQ ID NO: 235069 - DNA, 25 bp, Homo sapien
tctttgctgttgcaagggagcaaat

SEQ ID NO: 235070 - DNA, 25 bp, Homo sapien
ccaggagggcatacatcttggggct

SEQ ID NO: 235071 - DNA, 25 bp, Homo sapien
gggtccaggagggcatacatcttgg

SEQ ID NO: 235072 - DNA, 25 bp, Homo sapien
agggcatacatcttggggctggaac

SEQ ID NO: 235073 - DNA, 25 bp, Homo sapien
tcaaggcaagaagggagcattgggg

SEQ ID NO: 235074 - DNA, 25 bp, Homo sapien
caataccaggtctgcataaggtggg

SEQ ID NO: 235075 - DNA, 25 bp, Homo sapien
cattggcctgatttaaccctggaga

SEQ ID NO: 235076 - DNA, 25 bp, Homo sapien
tcctctcgccattgagcaataccag

SEQ ID NO: 235077 - DNA, 25 bp, Homo sapien
cacacagagtcaagtaacccaatgc

SEQ ID NO: 235078 - DNA, 25 bp, Homo sapien
aatgccagaaacaggagactcagaa

SEQ ID NO: 235079 - DNA, 25 bp, Homo sapien
ctgcgacactggttccagcacccag

SEQ ID NO: 235080 - DNA, 25 bp, Homo sapien
ctctgcgacactggttccagcaccc

SEQ ID NO: 235081 - DNA, 25 bp, Homo sapien
tctgcgacactggttccagcaccca

SEQ ID NO: 235082 - DNA, 25 bp, Homo sapien
ggtaatgacggcatcaatcccatgg

SEQ ID NO: 235083 - DNA, 25 bp, Homo sapien
tctaatccaggataccagcttgcat

SEQ ID NO: 235084 - DNA, 25 bp, Homo sapien
gagttcccatatactgtttgcccag

SEQ ID NO: 235085 - DNA, 25 bp, Homo sapien
gttagcatctgacattacctagtgc

SEQ ID NO: 235086 - DNA, 25 bp, Homo sapien
gcttagaacgatgctgcagagctga

SEQ ID NO: 235087 - DNA, 25 bp, Homo sapien
cattagcagggctgatactcagaga

SEQ ID NO: 235088 - DNA, 25 bp, Homo sapien
tgtgactttcggtcagtcactcaaa

SEQ ID NO: 235089 - DNA, 25 bp, Homo sapien
gatcgcattaacgtacagtgcttag

SEQ ID NO: 235090 - DNA, 25 bp, Homo sapien
tgcccgctgccgaatgatggattaa

SEQ ID NO: 235091 - DNA, 25 bp, Homo sapien
cataggcaaccgagacagtgaaggt

SEQ ID NO: 235092 - DNA, 25 bp, Homo sapien
catgtctgatgtaccgaattggcca

SEQ ID NO: 235093 - DNA, 25 bp, Homo sapien
tttgaaactgctatcacaaggctgc

SEQ ID NO: 235094 - DNA, 25 bp, Homo sapien
atgaacgtcctcctcgcagaccccg

SEQ ID NO: 235095 - DNA, 25 bp, Homo sapien
gggttctgccgcagttcacccacca

SEQ ID NO: 235096 - DNA, 25 bp, Homo sapien
cacacactcgcccatgaacgtcctc

SEQ ID NO: 235097 - DNA, 25 bp, Homo sapien
gttccagctgttaatctcgggttct

SEQ ID NO: 235098 - DNA, 25 bp, Homo sapien
cattattattgcctccaccgtcagg

SEQ ID NO: 235099 - DNA, 25 bp, Homo sapien
gattcatccctgttatcccaggatc

SEQ ID NO: 235100 - DNA, 25 bp, Homo sapien
tgtctactggcattattattgcctc

SEQ ID NO: 235101 - DNA, 25 bp, Homo sapien
ccaggatccagtgtagggcttgatg

SEQ ID NO: 235102 - DNA, 25 bp, Homo sapien
gatcatccgctggagcaatcatgtg

SEQ ID NO: 235103 - DNA, 25 bp, Homo sapien
caatcatgtgattagtgggaccagc

SEQ ID NO: 235104 - DNA, 25 bp, Homo sapien
gaccagctggacttgtatctcccaa

SEQ ID NO: 235105 - DNA, 25 bp, Homo sapien
tgctccaaagggcttaacgattcct

SEQ ID NO: 235106 - DNA, 25 bp, Homo sapien
atcagaacccttcggtcagattgcc

SEQ ID NO: 235107 - DNA, 25 bp, Homo sapien
tagtctcagggcttcatatcataga

SEQ ID NO: 235108 - DNA, 25 bp, Homo sapien
aaaaatgtctctatttggtaccaag

SEQ ID NO: 235109 - DNA, 25 bp, Homo sapien
tcatatcatagacaggtccatgttg

SEQ ID NO: 235110 - DNA, 25 bp, Homo sapien
catattcacaatatcaatcatgatt

SEQ ID NO: 235111 - DNA, 25 bp, Homo sapien
tcacaatatcaatcatgattttctt

SEQ ID NO: 235112 - DNA, 25 bp, Homo sapien
tcttgaaactcttcaacccctctca

SEQ ID NO: 235113 - DNA, 25 bp, Homo sapien
ttcttaccatattcacaatatcaat

SEQ ID NO: 235114 - DNA, 25 bp, Homo sapien
tgggcaggtgctgatacctcacttg

SEQ ID NO: 235115 - DNA, 25 bp, Homo sapien
gagcggagcccaattcctgtccgtg

SEQ ID NO: 235116 - DNA, 25 bp, Homo sapien
ggcaggtgctgatacctcacttgca

SEQ ID NO: 235117 - DNA, 25 bp, Homo sapien
ttgcattcttggtatccgtgggagc

SEQ ID NO: 235118 - DNA, 25 bp, Homo sapien
tctcagagctgcggagccgcggcac

SEQ ID NO: 235119 - DNA, 25 bp, Homo sapien
aggagccaagtctcagagctgcgga

SEQ ID NO: 235120 - DNA, 25 bp, Homo sapien
aaggagccaagtctcagagctgcgg

SEQ ID NO: 235121 - DNA, 25 bp, Homo sapien
caagtctcagagctgcggagccgcg

SEQ ID NO: 235122 - DNA, 25 bp, Homo sapien
agggggcaggaagtcttgcaagctg

SEQ ID NO: 235123 - DNA, 25 bp, Homo sapien
gtggggtgagggtgtgacaaagggc

SEQ ID NO: 235124 - DNA, 25 bp, Homo sapien
tggggtgagggtgtgacaaagggcg

SEQ ID NO: 235125 - DNA, 25 bp, Homo sapien
ggaagtcttgcaagctgctgtgtgt

SEQ ID NO: 235126 - DNA, 25 bp, Homo sapien
ggatggggacaggaggggaatggag

SEQ ID NO: 235127 - DNA, 25 bp, Homo sapien
gatggggacaggaggggaatggaga

SEQ ID NO: 235128 - DNA, 25 bp, Homo sapien
acaggaggggaatggagaggctgag

SEQ ID NO: 235129 - DNA, 25 bp, Homo sapien
gggacaggaggggaatggagaggct

SEQ ID NO: 235130 - DNA, 25 bp, Homo sapien
ccaggcacatttagattcagagagg

SEQ ID NO: 235131 - DNA, 25 bp, Homo sapien
gcttgcagaccccttcatctgatgg

SEQ ID NO: 235132 - DNA, 25 bp, Homo sapien
ttccttctctatggcaccaggcaca

SEQ ID NO: 235133 - DNA, 25 bp, Homo sapien
cagttgtgaccttgccagctgctgc

SEQ ID NO: 235134 - DNA, 25 bp, Homo sapien
tacaggatgggggacagccccgcct

SEQ ID NO: 235135 - DNA, 25 bp, Homo sapien
ggacagccccgcctcctccttgcag

SEQ ID NO: 235136 - DNA, 25 bp, Homo sapien
gacagccccgcctcctccttgcaga

SEQ ID NO: 235137 - DNA, 25 bp, Homo sapien
ctgatacaggatgggggacagcccc

SEQ ID NO: 235138 - DNA, 25 bp, Homo sapien
gattagacacctcctgtaagcaggg

SEQ ID NO: 235139 - DNA, 25 bp, Homo sapien
gcagccaccaacgactacagatgaa

SEQ ID NO: 235140 - DNA, 25 bp, Homo sapien
caaataccttgtaactgagggtgca

SEQ ID NO: 235141 - DNA, 25 bp, Homo sapien
gaagcgcatgaacctgtgcctggca

SEQ ID NO: 235142 - DNA, 25 bp, Homo sapien
gtgtggttggaacctaagctgcagc

SEQ ID NO: 235143 - DNA, 25 bp, Homo sapien
acctaagctgcagccggaagcagag

SEQ ID NO: 235144 - DNA, 25 bp, Homo sapien
agcagacgaccagtggccaaggaat

SEQ ID NO: 235145 - DNA, 25 bp, Homo sapien
accagtggccaaggaatcgagtgag

SEQ ID NO: 235146 - DNA, 25 bp, Homo sapien
cgcaggacccccctcagtaccaccg

SEQ ID NO: 235147 - DNA, 25 bp, Homo sapien
gcaggacccccctcagtaccaccgc

SEQ ID NO: 235148 - DNA, 25 bp, Homo sapien
tggccacccgcaggacccccctcag

SEQ ID NO: 235149 - DNA, 25 bp, Homo sapien
gccacccgcaggacccccctcagta

SEQ ID NO: 235150 - DNA, 25 bp, Homo sapien
gacgtagcaaagagacttatgttca

SEQ ID NO: 235151 - DNA, 25 bp, Homo sapien
gaaagacccgataagcaatgaaggg

SEQ ID NO: 235152 - DNA, 25 bp, Homo sapien
cagagcccaactgtaatgcggggga

SEQ ID NO: 235153 - DNA, 25 bp, Homo sapien
cttatgttcattcacgacaagaaag

SEQ ID NO: 235154 - DNA, 25 bp, Homo sapien
ccaccatcacgaccacttcaggcct

SEQ ID NO: 235155 - DNA, 25 bp, Homo sapien
ctggagctacctggggcatgagcag

SEQ ID NO: 235156 - DNA, 25 bp, Homo sapien
cgagcgcacgggtgtttgtattgac

SEQ ID NO: 235157 - DNA, 25 bp, Homo sapien
tgtggatcccatggaatacgttccc

SEQ ID NO: 235158 - DNA, 25 bp, Homo sapien
tgatggatgaacaagcagccacgcc

SEQ ID NO: 235159 - DNA, 25 bp, Homo sapien
gaaggttctccatgtcacattgatg

SEQ ID NO: 235160 - DNA, 25 bp, Homo sapien
tattggtgtgtatttgcgctgagac

SEQ ID NO: 235161 - DNA, 25 bp, Homo sapien
tgtatttgcgctgagacacgggcag

SEQ ID NO: 235162 - DNA, 25 bp, Homo sapien
gagttggaaacatggatttattggt

SEQ ID NO: 235163 - DNA, 25 bp, Homo sapien
atgttctccagctgttagcggcggc

SEQ ID NO: 235164 - DNA, 25 bp, Homo sapien
tgatcaggcagcgtcgcgccatgag

SEQ ID NO: 235165 - DNA, 25 bp, Homo sapien
agcgtcgcgccatgagaggtgatct

SEQ ID NO: 235166 - DNA, 25 bp, Homo sapien
aggtgatctcatgcgccagtctcca

SEQ ID NO: 235167 - DNA, 25 bp, Homo sapien
gccgctcctcgctattccccaggct

SEQ ID NO: 235168 - DNA, 25 bp, Homo sapien
gacggtggagttagctgaccaggca

SEQ ID NO: 235169 - DNA, 25 bp, Homo sapien
ctgggacggtggagttagctgacca

SEQ ID NO: 235170 - DNA, 25 bp, Homo sapien
ccaagacgccctgttaatatttgga

SEQ ID NO: 235171 - DNA, 25 bp, Homo sapien
ggctccctggcagcacgctggtggt

SEQ ID NO: 235172 - DNA, 25 bp, Homo sapien
gtaggacggccatgggcatgcaccc

SEQ ID NO: 235173 - DNA, 25 bp, Homo sapien
ccatgacagcgtcatcaggcactcg

SEQ ID NO: 235174 - DNA, 25 bp, Homo sapien
agaaccacagcactagatgtctggg

SEQ ID NO: 235175 - DNA, 25 bp, Homo sapien
cactcgcaggcagatatgttttggt

SEQ ID NO: 235176 - DNA, 25 bp, Homo sapien
ggtgggcacaaccaggtacgtgcct

SEQ ID NO: 235177 - DNA, 25 bp, Homo sapien
aggtacgtgccttgttccaggaagc

SEQ ID NO: 235178 - DNA, 25 bp, Homo sapien
cacaaccaggtacgtgccttgttcc

SEQ ID NO: 235179 - DNA, 25 bp, Homo sapien
aaccaggtacgtgccttgttccagg

SEQ ID NO: 235180 - DNA, 25 bp, Homo sapien
tgctgggctccttgtgcggtgtgcc

SEQ ID NO: 235181 - DNA, 25 bp, Homo sapien
aattgcgctagcacagggcgctcgg

SEQ ID NO: 235182 - DNA, 25 bp, Homo sapien
tcagcaattgcgctagcacagggcg

SEQ ID NO: 235183 - DNA, 25 bp, Homo sapien
tgaggtgggctcagcaattgcgcta

SEQ ID NO: 235184 - DNA, 25 bp, Homo sapien
ctgttggccttgggagtccaggcct

SEQ ID NO: 235185 - DNA, 25 bp, Homo sapien
tgttggccttgggagtccaggcctt

SEQ ID NO: 235186 - DNA, 25 bp, Homo sapien
actgttggccttgggagtccaggcc

SEQ ID NO: 235187 - DNA, 25 bp, Homo sapien
ctggctagaaacagggctcacctcg

SEQ ID NO: 235188 - DNA, 25 bp, Homo sapien
taagagagggatcatatccatcacc

SEQ ID NO: 235189 - DNA, 25 bp, Homo sapien
gaagccatcgccactattaagagag

SEQ ID NO: 235190 - DNA, 25 bp, Homo sapien
gattggcacgtagtaaagcgcaagc

SEQ ID NO: 235191 - DNA, 25 bp, Homo sapien
gtagcctgatcagtcgcgttcccgg

SEQ ID NO: 235192 - DNA, 25 bp, Homo sapien
ccgctgctgcgtgtccctttctgag

SEQ ID NO: 235193 - DNA, 25 bp, Homo sapien
gctgctgcgtgtccctttctgaggc

SEQ ID NO: 235194 - DNA, 25 bp, Homo sapien
ctgcggcccggctcggtagcctgat

SEQ ID NO: 235195 - DNA, 25 bp, Homo sapien
gtcagctgtttcgagcggcggatct

SEQ ID NO: 235196 - DNA, 25 bp, Homo sapien
ctgctagtggttccgcagtcgtcgc

SEQ ID NO: 235197 - DNA, 25 bp, Homo sapien
cagctgtttcgagcggcggatctgc

SEQ ID NO: 235198 - DNA, 25 bp, Homo sapien
ttccgcagtcgtcgctgggtcagct

SEQ ID NO: 235199 - DNA, 25 bp, Homo sapien
ctttatttagatgtcagcagcttat

SEQ ID NO: 235200 - DNA, 25 bp, Homo sapien
taatacggtgcctttcatccaggac

SEQ ID NO: 235201 - DNA, 25 bp, Homo sapien
tattagctgcatgaggacgtactaa

SEQ ID NO: 235202 - DNA, 25 bp, Homo sapien
gcagcttataatacgaatgtgcctg

SEQ ID NO: 235203 - DNA, 25 bp, Homo sapien
ttctgatggcgtgacccaactgtgc

SEQ ID NO: 235204 - DNA, 25 bp, Homo sapien
tctgatggcgtgacccaactgtgcc

SEQ ID NO: 235205 - DNA, 25 bp, Homo sapien
gatggtgtgacccgactgtgttttg

SEQ ID NO: 235206 - DNA, 25 bp, Homo sapien
tggtgtgacccgactgtgttttgtt

SEQ ID NO: 235207 - DNA, 25 bp, Homo sapien
gtgtgacccgactgtgttttgttac

SEQ ID NO: 235208 - DNA, 25 bp, Homo sapien
ctgatggtgtgacccgactgtgttt

SEQ ID NO: 235209 - DNA, 25 bp, Homo sapien
gtgacctgactgcgctttgttacct

SEQ ID NO: 235210 - DNA, 25 bp, Homo sapien
tgtgacccgactgtgttttgttacc

SEQ ID NO: 235211 - DNA, 25 bp, Homo sapien
atggtgtgacccgactgtgttttgt

SEQ ID NO: 235212 - DNA, 25 bp, Homo sapien
ctgatggtgtgacccgactgtgttt

SEQ ID NO: 235213 - DNA, 25 bp, Homo sapien
tttctgatggcgtgacctgactgcg

SEQ ID NO: 235214 - DNA, 25 bp, Homo sapien
gatggcgtgacctgactgcgctttg

SEQ ID NO: 235215 - DNA, 25 bp, Homo sapien
ctgtttctgatggcgtgacctgact

SEQ ID NO: 235216 - DNA, 25 bp, Homo sapien
gcgtgacctgactgcgctttgttac

SEQ ID NO: 235217 - DNA, 25 bp, Homo sapien
ttccgatagcgggatctgactgcat

SEQ ID NO: 235218 - DNA, 25 bp, Homo sapien
ctttccgatagcgggatctgactgc

SEQ ID NO: 235219 - DNA, 25 bp, Homo sapien
ctctttccgatagcgggatctgact

SEQ ID NO: 235220 - DNA, 25 bp, Homo sapien
ccgatagcgggatctgactgcattt

SEQ ID NO: 235221 - DNA, 25 bp, Homo sapien
ctggacccagggcccgaggatgacc

SEQ ID NO: 235222 - DNA, 25 bp, Homo sapien
ggctggacccagggcccgaggatga

SEQ ID NO: 235223 - DNA, 25 bp, Homo sapien
tcaggccttggctggacccagggcc

SEQ ID NO: 235224 - DNA, 25 bp, Homo sapien
ttggctggacccagggcccgaggat

SEQ ID NO: 235225 - DNA, 25 bp, Homo sapien
aaatgcatgaccacaagtgtgggag

SEQ ID NO: 235226 - DNA, 25 bp, Homo sapien
tgtgggaggaatgttagtggcggga

SEQ ID NO: 235227 - DNA, 25 bp, Homo sapien
acattcctgtctgaaatggtgcagg

SEQ ID NO: 235228 - DNA, 25 bp, Homo sapien
ggaacggccgcagccctaaggctca

SEQ ID NO: 235229 - DNA, 25 bp, Homo sapien
cgcaatgatgactgtgtggccgccg

SEQ ID NO: 235230 - DNA, 25 bp, Homo sapien
ccgccggggagatgcgtggggccat

SEQ ID NO: 235231 - DNA, 25 bp, Homo sapien
ggcccgcaatgatgactgtgtggcc

SEQ ID NO: 235232 - DNA, 25 bp, Homo sapien
cccgcaatgatgactgtgtggccgc

SEQ ID NO: 235233 - DNA, 25 bp, Homo sapien
gatgtcaccttcttagcgaggcttc

SEQ ID NO: 235234 - DNA, 25 bp, Homo sapien
tacactgttagcatggtccacgagg

SEQ ID NO: 235235 - DNA, 25 bp, Homo sapien
tgtgtggcccctgttaaacttctga

SEQ ID NO: 235236 - DNA, 25 bp, Homo sapien
tccctagtcaccttctaaacagcag

SEQ ID NO: 235237 - DNA, 25 bp, Homo sapien
tggttggttcactgtggcccactga

SEQ ID NO: 235238 - DNA, 25 bp, Homo sapien
gaaactaccattgggctggcaaaaa

SEQ ID NO: 235239 - DNA, 25 bp, Homo sapien
taaatattctcggactcaggctttg

SEQ ID NO: 235240 - DNA, 25 bp, Homo sapien
caagagaaacgcacatggcgagagc

SEQ ID NO: 235241 - DNA, 25 bp, Homo sapien
tccaaggctgtcaggaagcactccg

SEQ ID NO: 235242 - DNA, 25 bp, Homo sapien
tccagacctcgtgggctgtcgagtt

SEQ ID NO: 235243 - DNA, 25 bp, Homo sapien
cgccgcatcgttgccctgagcttgg

SEQ ID NO: 235244 - DNA, 25 bp, Homo sapien
aggaagcactccgtagccgccgcat

SEQ ID NO: 235245 - DNA, 25 bp, Homo sapien
gatcttctccgccagactgtagcgg

SEQ ID NO: 235246 - DNA, 25 bp, Homo sapien
ggaggatcttctccgccagactgta

SEQ ID NO: 235247 - DNA, 25 bp, Homo sapien
ccggaggatcttctccgccagactg

SEQ ID NO: 235248 - DNA, 25 bp, Homo sapien
tctccgccagactgtagcggcctag

SEQ ID NO: 235249 - DNA, 25 bp, Homo sapien
tttcatcatcattgcgtttccaagc

SEQ ID NO: 235250 - DNA, 25 bp, Homo sapien
cattgcgtttccaagctgcgcacct

SEQ ID NO: 235251 - DNA, 25 bp, Homo sapien
ccgtgggtcccacctatttcatcat

SEQ ID NO: 235252 - DNA, 25 bp, Homo sapien
gtgggtcccacctatttcatcatca

SEQ ID NO: 235253 - DNA, 25 bp, Homo sapien
cacaacagaaatacccgatgtttct

SEQ ID NO: 235254 - DNA, 25 bp, Homo sapien
cttatgaatatccaaacatgtgtcc

SEQ ID NO: 235255 - DNA, 25 bp, Homo sapien
tggagttcctgcatatgaccaggtc

SEQ ID NO: 235256 - DNA, 25 bp, Homo sapien
ttctcaagaacacaacagaaatacc

SEQ ID NO: 235257 - DNA, 25 bp, Homo sapien
cagagctgcagttgtgctggccaca

SEQ ID NO: 235258 - DNA, 25 bp, Homo sapien
agagctgcagttgtgctggccacag

SEQ ID NO: 235259 - DNA, 25 bp, Homo sapien
gggcctgaaaggtgctacaggccct

SEQ ID NO: 235260 - DNA, 25 bp, Homo sapien
tgaaaggtgctacaggccctggctg

SEQ ID NO: 235261 - DNA, 25 bp, Homo sapien
tcctgtcaggggctatgtccatggt

SEQ ID NO: 235262 - DNA, 25 bp, Homo sapien
tccatggtagaccaggctttctgga

SEQ ID NO: 235263 - DNA, 25 bp, Homo sapien
cccaccaggcctctaagagtgggtt

SEQ ID NO: 235264 - DNA, 25 bp, Homo sapien
ccaggcctctaagagtgggttccct

SEQ ID NO: 235265 - DNA, 25 bp, Homo sapien
ttcccataagctgcagcacagttgg

SEQ ID NO: 235266 - DNA, 25 bp, Homo sapien
tgagtcaccacttctcgggaatttg

SEQ ID NO: 235267 - DNA, 25 bp, Homo sapien
gaaacaccagcacatgtgagtcacc

SEQ ID NO: 235268 - DNA, 25 bp, Homo sapien
ggccgtctgcattcgctgaaatgta

SEQ ID NO: 235269 - DNA, 25 bp, Homo sapien
accttcctgtcagcaggtcacaagt

SEQ ID NO: 235270 - DNA, 25 bp, Homo sapien
caccttcctgtcagcaggtcacaag

SEQ ID NO: 235271 - DNA, 25 bp, Homo sapien
ccttcctgtcagcaggtcacaagtt

SEQ ID NO: 235272 - DNA, 25 bp, Homo sapien
gggtcgaacacggaaggcaaatctc

SEQ ID NO: 235273 - DNA, 25 bp, Homo sapien
cgtccttctgacagaagccagctca

SEQ ID NO: 235274 - DNA, 25 bp, Homo sapien
ggacatgctgccttaagaagggcgt

SEQ ID NO: 235275 - DNA, 25 bp, Homo sapien
ctccagaagatgtgagcgggagcct

SEQ ID NO: 235276 - DNA, 25 bp, Homo sapien
gctatcatggggccccttttccagg

SEQ ID NO: 235277 - DNA, 25 bp, Homo sapien
ctgcgctatcatggggccccttttc

SEQ ID NO: 235278 - DNA, 25 bp, Homo sapien
gggctgcgctatcatggggcccctt

SEQ ID NO: 235279 - DNA, 25 bp, Homo sapien
gcggcaggggctgcgctatcatggg

SEQ ID NO: 235280 - DNA, 25 bp, Homo sapien
atgagagtgacgcagccgacttccc

SEQ ID NO: 235281 - DNA, 25 bp, Homo sapien
tctctgtcagtctgcctggcactgc

SEQ ID NO: 235282 - DNA, 25 bp, Homo sapien
tctacctggcggctgccagattccg

SEQ ID NO: 235283 - DNA, 25 bp, Homo sapien
tgagccagaccacgggctcttggga

SEQ ID NO: 235284 - DNA, 25 bp, Homo sapien
ccacatgagctccctgccggctgca

SEQ ID NO: 235285 - DNA, 25 bp, Homo sapien
gctgctggtagggtcaccggggacc

SEQ ID NO: 235286 - DNA, 25 bp, Homo sapien
acatgagctccctgccggctgcagc

SEQ ID NO: 235287 - DNA, 25 bp, Homo sapien
gagggtgatggggaatcccggtgcc

SEQ ID NO: 235288 - DNA, 25 bp, Homo sapien
cccttgaaatagaacggcagagcca

SEQ ID NO: 235289 - DNA, 25 bp, Homo sapien
tagtcagcagtgtcgttagtcagcc

SEQ ID NO: 235290 - DNA, 25 bp, Homo sapien
tataatttagcaatgccaggcaagc

SEQ ID NO: 235291 - DNA, 25 bp, Homo sapien
ctcagagtggtgtcgttagtcagca

SEQ ID NO: 235292 - DNA, 25 bp, Homo sapien
cagaccctggtaacttgtgagtttc

SEQ ID NO: 235293 - DNA, 25 bp, Homo sapien
aagatgacagaggactgccgaggca

SEQ ID NO: 235294 - DNA, 25 bp, Homo sapien
tgtgagtttcaattcagaccctcgc

SEQ ID NO: 235295 - DNA, 25 bp, Homo sapien
taacacacgttcataacggacagaa

SEQ ID NO: 235296 - DNA, 25 bp, Homo sapien
tcgctgcatgctcttcacgtgggtg

SEQ ID NO: 235297 - DNA, 25 bp, Homo sapien
tctggccgcgcatgtagaggacatt

SEQ ID NO: 235298 - DNA, 25 bp, Homo sapien
ttcccgatgccgatatagacttcag

SEQ ID NO: 235299 - DNA, 25 bp, Homo sapien
tggctaaggcctcttcataccaccg

SEQ ID NO: 235300 - DNA, 25 bp, Homo sapien
gcagccaccactctgatgttcgtgt

SEQ ID NO: 235301 - DNA, 25 bp, Homo sapien
gccaccactctgatgttcgtgttcc

SEQ ID NO: 235302 - DNA, 25 bp, Homo sapien
gtgaggagacagcaacggcacatgc

SEQ ID NO: 235303 - DNA, 25 bp, Homo sapien
gacagcaacggcacatgctttcctg

SEQ ID NO: 235304 - DNA, 25 bp, Homo sapien
cgcccgctctgtcggggctcatgga

SEQ ID NO: 235305 - DNA, 25 bp, Homo sapien
ttcctcagcactcttgccttgacca

SEQ ID NO: 235306 - DNA, 25 bp, Homo sapien
gagcctcacgcagaggccgcccgct

SEQ ID NO: 235307 - DNA, 25 bp, Homo sapien
agggccacatggtcaagtctgcagc

SEQ ID NO: 235308 - DNA, 25 bp, Homo sapien
cagtctcagtctggccctttcactt

SEQ ID NO: 235309 - DNA, 25 bp, Homo sapien
attctcttcttaggccgtcttagca

SEQ ID NO: 235310 - DNA, 25 bp, Homo sapien
tcttagcacctatcttaggccttta

SEQ ID NO: 235311 - DNA, 25 bp, Homo sapien
aagctttaaatgtggaggggctcag

SEQ ID NO: 235312 - DNA, 25 bp, Homo sapien
cgtatgcatacagcacagtctgctc

SEQ ID NO: 235313 - DNA, 25 bp, Homo sapien
tctgctcagggtttacagggtcgac

SEQ ID NO: 235314 - DNA, 25 bp, Homo sapien
tatgcatacagcacagtctgctcag

SEQ ID NO: 235315 - DNA, 25 bp, Homo sapien
gggtcgacagtcactttccatagtt

SEQ ID NO: 235316 - DNA, 25 bp, Homo sapien
agaatagtaaagccacacccatttg

SEQ ID NO: 235317 - DNA, 25 bp, Homo sapien
ctagaatagtaaagccacacccatt

SEQ ID NO: 235318 - DNA, 25 bp, Homo sapien
tagaatagtaaagccacacccattt

SEQ ID NO: 235319 - DNA, 25 bp, Homo sapien
ctaggaaggagaacttgactctgtc

SEQ ID NO: 235320 - DNA, 25 bp, Homo sapien
ctggcctggacactaaaccatactc

SEQ ID NO: 235321 - DNA, 25 bp, Homo sapien
ctaaaccatactccttccctttctg

SEQ ID NO: 235322 - DNA, 25 bp, Homo sapien
tggacactaaaccatactccttccc

SEQ ID NO: 235323 - DNA, 25 bp, Homo sapien
gcctggacactaaaccatactcctt

SEQ ID NO: 235324 - DNA, 25 bp, Homo sapien
tgctccactcttgaggctgctaccg

SEQ ID NO: 235325 - DNA, 25 bp, Homo sapien
tgcagagacgaagccacttccgaca

SEQ ID NO: 235326 - DNA, 25 bp, Homo sapien
agatctgtgccagcgtcatccaggg

SEQ ID NO: 235327 - DNA, 25 bp, Homo sapien
ctgctaccgatgtggcatggacgga

SEQ ID NO: 235328 - DNA, 25 bp, Homo sapien
gtggtaactaccaactcatcataaa

SEQ ID NO: 235329 - DNA, 25 bp, Homo sapien
cattgagagtggtaactaccaactc

SEQ ID NO: 235330 - DNA, 25 bp, Homo sapien
tgagagtggtaactaccaactcatc

SEQ ID NO: 235331 - DNA, 25 bp, Homo sapien
caacattgagagtggtaactaccaa

SEQ ID NO: 235332 - DNA, 25 bp, Homo sapien
ttatcttggacacctgatacagagg

SEQ ID NO: 235333 - DNA, 25 bp, Homo sapien
ctagatcctcaatcgaaaatgttat

SEQ ID NO: 235334 - DNA, 25 bp, Homo sapien
ctgaagaacattctgagccagggtt

SEQ ID NO: 235335 - DNA, 25 bp, Homo sapien
aaaatgttatcttggacacctgata

SEQ ID NO: 235336 - DNA, 25 bp, Homo sapien
aaattctctgtcaacttattcacaa

SEQ ID NO: 235337 - DNA, 25 bp, Homo sapien
aaaataatacgaaaaagcagcagtt

SEQ ID NO: 235338 - DNA, 25 bp, Homo sapien
caaattctctgtcaacttattcaca

SEQ ID NO: 235339 - DNA, 25 bp, Homo sapien
attaaaataatacgaaaaagcagca

SEQ ID NO: 235340 - DNA, 25 bp, Homo sapien
taaatcagtccaacactgcagactg

SEQ ID NO: 235341 - DNA, 25 bp, Homo sapien
gtccaacactgcagactgctggcag

SEQ ID NO: 235342 - DNA, 25 bp, Homo sapien
tcagtccaacactgcagactgctgg

SEQ ID NO: 235343 - DNA, 25 bp, Homo sapien
ccaacactgcagactgctggcagct

SEQ ID NO: 235344 - DNA, 25 bp, Homo sapien
ttgaagaaccagaatgtcctggggg

SEQ ID NO: 235345 - DNA, 25 bp, Homo sapien
gcttgaagaaccagaatgtcctggg

SEQ ID NO: 235346 - DNA, 25 bp, Homo sapien
tgtgcttgaagaaccagaatgtcct

SEQ ID NO: 235347 - DNA, 25 bp, Homo sapien
ctgtgcttgaagaaccagaatgtcc

SEQ ID NO: 235348 - DNA, 25 bp, Homo sapien
cttcggccctcaaagcaggcatatt

SEQ ID NO: 235349 - DNA, 25 bp, Homo sapien
cacttcggccctcaaagcaggcata

SEQ ID NO: 235350 - DNA, 25 bp, Homo sapien
aggaggcgaaggagttagtgttgac

SEQ ID NO: 235351 - DNA, 25 bp, Homo sapien
agtgttgactgtctcttatttcttg

SEQ ID NO: 235352 - DNA, 25 bp, Homo sapien
cctggtgcccgggagttaggacaat

SEQ ID NO: 235353 - DNA, 25 bp, Homo sapien
tgctttctgaggaggcgactccagg

SEQ ID NO: 235354 - DNA, 25 bp, Homo sapien
caattcccatctttgctgtagggta

SEQ ID NO: 235355 - DNA, 25 bp, Homo sapien
taaaaaacataactgctgtcccctc

SEQ ID NO: 235356 - DNA, 25 bp, Homo sapien
gcagtatttgccataagctaaaggc

SEQ ID NO: 235357 - DNA, 25 bp, Homo sapien
tggaatcaactcttaagggtgaggg

SEQ ID NO: 235358 - DNA, 25 bp, Homo sapien
taaaggcacatctaggttgagctgg

SEQ ID NO: 235359 - DNA, 25 bp, Homo sapien
gctaaaggctcaggtcattcaaatg

SEQ ID NO: 235360 - DNA, 25 bp, Homo sapien
catgaaagtatgcttctggagagtt

SEQ ID NO: 235361 - DNA, 25 bp, Homo sapien
aaaaccatgaaagtatgcttctgga

SEQ ID NO: 235362 - DNA, 25 bp, Homo sapien
gggaaggaaaaccatgaaagtatgc

SEQ ID NO: 235363 - DNA, 25 bp, Homo sapien
tgaaagtatgcttctggagagttgc

SEQ ID NO: 235364 - DNA, 25 bp, Homo sapien
ctgcagggggccacacaaaggtatc

SEQ ID NO: 235365 - DNA, 25 bp, Homo sapien
cggggacctgcgtcactgaatgaat

SEQ ID NO: 235366 - DNA, 25 bp, Homo sapien
gagattcggttcttgaaagaggaga

SEQ ID NO: 235367 - DNA, 25 bp, Homo sapien
cacacaaaggtatcgggtttgggag

SEQ ID NO: 235368 - DNA, 25 bp, Homo sapien
gagcttcaaagtaaagactgtcact

SEQ ID NO: 235369 - DNA, 25 bp, Homo sapien
tcagagcttcaaagtaaagactgtc

SEQ ID NO: 235370 - DNA, 25 bp, Homo sapien
gcttcaaagtaaagactgtcactct

SEQ ID NO: 235371 - DNA, 25 bp, Homo sapien
aaagtaaagactgtcactctatttg

SEQ ID NO: 235372 - DNA, 25 bp, Homo sapien
gggaaccattctgatctcggataag

SEQ ID NO: 235373 - DNA, 25 bp, Homo sapien
tgcagcggatgttcaaagtcagcca

SEQ ID NO: 235374 - DNA, 25 bp, Homo sapien
tgtcgggcatgacgctgataagctg

SEQ ID NO: 235375 - DNA, 25 bp, Homo sapien
gatgctaacactgcagggctctgct

SEQ ID NO: 235376 - DNA, 25 bp, Homo sapien
tccagggaaattaaggtccaggcca

SEQ ID NO: 235377 - DNA, 25 bp, Homo sapien
gatagaaattcagttgtacacggtc

SEQ ID NO: 235378 - DNA, 25 bp, Homo sapien
ccagatagaaattcagttgtacacg

SEQ ID NO: 235379 - DNA, 25 bp, Homo sapien
tagaaattcagttgtacacggtccc

SEQ ID NO: 235380 - DNA, 25 bp, Homo sapien
cagatagaaattcagttgtacacgg

SEQ ID NO: 235381 - DNA, 25 bp, Homo sapien
tctggcaaagtaattgtattaagct

SEQ ID NO: 235382 - DNA, 25 bp, Homo sapien
tcgggatcgctgaagtctggcaaag

SEQ ID NO: 235383 - DNA, 25 bp, Homo sapien
ggatcgctgaagtctggcaaagtaa

SEQ ID NO: 235384 - DNA, 25 bp, Homo sapien
gtctcgggatcgctgaagtctggca

SEQ ID NO: 235385 - DNA, 25 bp, Homo sapien
taagaggctgctcccacgtccagaa

SEQ ID NO: 235386 - DNA, 25 bp, Homo sapien
agaggctgctcccacgtccagaatc

SEQ ID NO: 235387 - DNA, 25 bp, Homo sapien
aagaggctgctcccacgtccagaat

SEQ ID NO: 235388 - DNA, 25 bp, Homo sapien
gaggctgctcccacgtccagaatca

SEQ ID NO: 235389 - DNA, 25 bp, Homo sapien
ccagtgtggagagagcattgatgtt

SEQ ID NO: 235390 - DNA, 25 bp, Homo sapien
agtaacggtagctatcttgcaaggc

SEQ ID NO: 235391 - DNA, 25 bp, Homo sapien
tgaagataacacatcagtggcctag

SEQ ID NO: 235392 - DNA, 25 bp, Homo sapien
catattcaattggaaaaacttgggc

SEQ ID NO: 235393 - DNA, 25 bp, Homo sapien
tctgcagcatgtgcttacaagtcag

SEQ ID NO: 235394 - DNA, 25 bp, Homo sapien
ctcggcagagtgactgcaacttcac

SEQ ID NO: 235395 - DNA, 25 bp, Homo sapien
gcagcatgtgcttacaagtcagcag

SEQ ID NO: 235396 - DNA, 25 bp, Homo sapien
cctcgtccgggcctcggcagagtga

SEQ ID NO: 235397 - DNA, 25 bp, Homo sapien
cgtcgtgtgagcttcgaaagcctga

SEQ ID NO: 235398 - DNA, 25 bp, Homo sapien
tgtgagcttcgaaagcctgaacgga

SEQ ID NO: 235399 - DNA, 25 bp, Homo sapien
gcttcgaaagcctgaacggaagtcc

SEQ ID NO: 235400 - DNA, 25 bp, Homo sapien
tcgaaagcctgaacggaagtcccat

SEQ ID NO: 235401 - DNA, 25 bp, Homo sapien
cttattataaagatctccaaaaatc

SEQ ID NO: 235402 - DNA, 25 bp, Homo sapien
tattataaagatctccaaaaatcat

SEQ ID NO: 235403 - DNA, 25 bp, Homo sapien
ttattataaagatctccaaaaatca

SEQ ID NO: 235404 - DNA, 25 bp, Homo sapien
ggcagaagccacgcaggtaggccac

SEQ ID NO: 235405 - DNA, 25 bp, Homo sapien
ggttcggctgggacgataggcagaa

SEQ ID NO: 235406 - DNA, 25 bp, Homo sapien
cgataggcagaagccacatgggttc

SEQ ID NO: 235407 - DNA, 25 bp, Homo sapien
tgggacgatgggcagaagccacgca

SEQ ID NO: 235408 - DNA, 25 bp, Homo sapien
tacggccgggacaagtggcagaagc

SEQ ID NO: 235409 - DNA, 25 bp, Homo sapien
ccatgcgggtatggctggaattata

SEQ ID NO: 235410 - DNA, 25 bp, Homo sapien
ccacggggtacagccgggacgatag

SEQ ID NO: 235411 - DNA, 25 bp, Homo sapien
aagccacgtgggtacggctgggatg

SEQ ID NO: 235412 - DNA, 25 bp, Homo sapien
taccaggctactctgcacggacaaa

SEQ ID NO: 235413 - DNA, 25 bp, Homo sapien
gaagtctcaagaggacactcccata

SEQ ID NO: 235414 - DNA, 25 bp, Homo sapien
ttaatgtttgtagcaggcagcccgg

SEQ ID NO: 235415 - DNA, 25 bp, Homo sapien
gctatgaacgaagagctaccaggct

SEQ ID NO: 235416 - DNA, 25 bp, Homo sapien
tggcaatattacacgaaaaatccat

SEQ ID NO: 235417 - DNA, 25 bp, Homo sapien
ttggcaatattacacgaaaaatcca

SEQ ID NO: 235418 - DNA, 25 bp, Homo sapien
attggcaatattacacgaaaaatcc

SEQ ID NO: 235419 - DNA, 25 bp, Homo sapien
actcagggccatgtcgatgatgttc

SEQ ID NO: 235420 - DNA, 25 bp, Homo sapien
gcttggcggacataccccagagcct

SEQ ID NO: 235421 - DNA, 25 bp, Homo sapien
ggagttggcatcgtcaccttgaagc

SEQ ID NO: 235422 - DNA, 25 bp, Homo sapien
gcgtcatggtaatgcttctgtgctg

SEQ ID NO: 235423 - DNA, 25 bp, Homo sapien
cccaaaataagttgatctgagaaac

SEQ ID NO: 235424 - DNA, 25 bp, Homo sapien
tgcaatgccgcatgcaaagcagatg

SEQ ID NO: 235425 - DNA, 25 bp, Homo sapien
ccaaattcatgtaggaccagacaca

SEQ ID NO: 235426 - DNA, 25 bp, Homo sapien
gagaaacaaattgcaatgccgcatg

SEQ ID NO: 235427 - DNA, 25 bp, Homo sapien
gcatgtggccaacatccccagaaca

SEQ ID NO: 235428 - DNA, 25 bp, Homo sapien
gctggggttaccaccagtgtcttgc

SEQ ID NO: 235429 - DNA, 25 bp, Homo sapien
cctcccagtcagcactcaggaatgt

SEQ ID NO: 235430 - DNA, 25 bp, Homo sapien
gtgctggggttaccaccagtgtctt

SEQ ID NO: 235431 - DNA, 25 bp, Homo sapien
ctgtctggagatggcaagctgcaga

SEQ ID NO: 235432 - DNA, 25 bp, Homo sapien
cagagccaggtagaaagctgcttgg

SEQ ID NO: 235433 - DNA, 25 bp, Homo sapien
ctgcagagccaggtagaaagctgct

SEQ ID NO: 235434 - DNA, 25 bp, Homo sapien
gccaggtagaaagctgcttggtgat

SEQ ID NO: 235435 - DNA, 25 bp, Homo sapien
aggtacagaataggagtgcatttct

SEQ ID NO: 235436 - DNA, 25 bp, Homo sapien
tctctgtgtcgtgctgggacgcagt

SEQ ID NO: 235437 - DNA, 25 bp, Homo sapien
ccatgtgtgcacttggcaaggcgat

SEQ ID NO: 235438 - DNA, 25 bp, Homo sapien
ggtgaagaatccataggccctgagg

SEQ ID NO: 235439 - DNA, 25 bp, Homo sapien
cttatttctaaggtccactcagtat

SEQ ID NO: 235440 - DNA, 25 bp, Homo sapien
ggtccactcagtatatagcagcttt

SEQ ID NO: 235441 - DNA, 25 bp, Homo sapien
caacatgctatccaggctagtctgg

SEQ ID NO: 235442 - DNA, 25 bp, Homo sapien
acgcccagctactaaatggcttatt

SEQ ID NO: 235443 - DNA, 25 bp, Homo sapien
gaaagcccctttggtatgccacagg

SEQ ID NO: 235444 - DNA, 25 bp, Homo sapien
gcaactcgccggacagaaatcctca

SEQ ID NO: 235445 - DNA, 25 bp, Homo sapien
gctaaaatacttgcttcccgtggag

SEQ ID NO: 235446 - DNA, 25 bp, Homo sapien
tgaacacctggctagactgctcaga

SEQ ID NO: 235447 - DNA, 25 bp, Homo sapien
gcaagaagcgcctttctctgtagga

SEQ ID NO: 235448 - DNA, 25 bp, Homo sapien
ctctgaaatgcaagaagcgcctttc

SEQ ID NO: 235449 - DNA, 25 bp, Homo sapien
gtaggacctcctgcatccctcgcaa

SEQ ID NO: 235450 - DNA, 25 bp, Homo sapien
gaagcgcctttctctgtaggacctc

SEQ ID NO: 235451 - DNA, 25 bp, Homo sapien
ggactgtgggaatcccgcagggtag

SEQ ID NO: 235452 - DNA, 25 bp, Homo sapien
tgggaatcccgcagggtagacttag

SEQ ID NO: 235453 - DNA, 25 bp, Homo sapien
gccccaccggatggcacaccagaat

SEQ ID NO: 235454 - DNA, 25 bp, Homo sapien
gatggcacaccagaatgccccagct

SEQ ID NO: 235455 - DNA, 25 bp, Homo sapien
ctgcagactgtacgtgagccccaga

SEQ ID NO: 235456 - DNA, 25 bp, Homo sapien
tttggcaaacttttcagcctcttcc

SEQ ID NO: 235457 - DNA, 25 bp, Homo sapien
ggccttgaactctgacgttttctct

SEQ ID NO: 235458 - DNA, 25 bp, Homo sapien
cacatcaacgacagttttggcaaac

SEQ ID NO: 235459 - DNA, 25 bp, Homo sapien
tggcttcaggcggatacactctttc

SEQ ID NO: 235460 - DNA, 25 bp, Homo sapien
tctggcttcaggcggatacactctt

SEQ ID NO: 235461 - DNA, 25 bp, Homo sapien
ggcttcaggcggatacactctttca

SEQ ID NO: 235462 - DNA, 25 bp, Homo sapien
tcgtctggcttcaggcggatacact

SEQ ID NO: 235463 - DNA, 25 bp, Homo sapien
tggtaccacaggtggaattcctcaa

SEQ ID NO: 235464 - DNA, 25 bp, Homo sapien
gagcaaggtgagcacgggcaatgtg

SEQ ID NO: 235465 - DNA, 25 bp, Homo sapien
gggtgggcatccgaagaccttgagc

SEQ ID NO: 235466 - DNA, 25 bp, Homo sapien
gtgggcatccgaagaccttgagcaa

SEQ ID NO: 235467 - DNA, 25 bp, Homo sapien
aaggtgagcacgggcaatgtgttca

SEQ ID NO: 235468 - DNA, 25 bp, Homo sapien
ctcttccctggcttggggcactggg

SEQ ID NO: 235469 - DNA, 25 bp, Homo sapien
tctctcttccctggcttggggcact

SEQ ID NO: 235470 - DNA, 25 bp, Homo sapien
cttttggtcttttcagtctctcttc

SEQ ID NO: 235471 - DNA, 25 bp, Homo sapien
ttttggtcttttcagtctctcttcc

SEQ ID NO: 235472 - DNA, 25 bp, Homo sapien
tgataagggtgccaagtccattgaa

SEQ ID NO: 235473 - DNA, 25 bp, Homo sapien
ccaaaggaacagaattaagattcca

SEQ ID NO: 235474 - DNA, 25 bp, Homo sapien
taaagatacatatacagaccaaagg

SEQ ID NO: 235475 - DNA, 25 bp, Homo sapien
taagggatccagaaacaaactggaa

SEQ ID NO: 235476 - DNA, 25 bp, Homo sapien
atgtggtctccctaactagaatgga

SEQ ID NO: 235477 - DNA, 25 bp, Homo sapien
ttcccctgtgcctagtaactcctgt

SEQ ID NO: 235478 - DNA, 25 bp, Homo sapien
gcctaggctcacacgactggtacat

SEQ ID NO: 235479 - DNA, 25 bp, Homo sapien
tatacagtggtagtaactgcagcag

SEQ ID NO: 235480 - DNA, 25 bp, Homo sapien
ctggatgtcaaccagactcagcagc

SEQ ID NO: 235481 - DNA, 25 bp, Homo sapien
tagaccacagatgcactctgcagac

SEQ ID NO: 235482 - DNA, 25 bp, Homo sapien
tctgcagactgatgaggcggtcact

SEQ ID NO: 235483 - DNA, 25 bp, Homo sapien
tccaagagcaatggtgagtaagtca

SEQ ID NO: 235484 - DNA, 25 bp, Homo sapien
tcactcttgtgttcaggtatcctgc

SEQ ID NO: 235485 - DNA, 25 bp, Homo sapien
gcctcatagaagacgcagctgcgct

SEQ ID NO: 235486 - DNA, 25 bp, Homo sapien
ggaagccttggcagccgatacaaag

SEQ ID NO: 235487 - DNA, 25 bp, Homo sapien
ttttccctggcctcgggttcatagc

SEQ ID NO: 235488 - DNA, 25 bp, Homo sapien
ctcgggttcatagccagcctcatag

SEQ ID NO: 235489 - DNA, 25 bp, Homo sapien
ataacaacagggcttcttccgtatt

SEQ ID NO: 235490 - DNA, 25 bp, Homo sapien
taatcagcaataacaacagggcttc

SEQ ID NO: 235491 - DNA, 25 bp, Homo sapien
gcaataacaacagggcttcttccgt

SEQ ID NO: 235492 - DNA, 25 bp, Homo sapien
tgattcactaatcagcaataacaac

SEQ ID NO: 235493 - DNA, 25 bp, Homo sapien
acaactccaaggtgggctgtgtaca

SEQ ID NO: 235494 - DNA, 25 bp, Homo sapien
gcagccaacggtgtagctggtcgtt

SEQ ID NO: 235495 - DNA, 25 bp, Homo sapien
cgtttacacagctttggttcggcca

SEQ ID NO: 235496 - DNA, 25 bp, Homo sapien
tgcacaagtgtttccatgttcctgc

SEQ ID NO: 235497 - DNA, 25 bp, Homo sapien
ttaaaatgtccctgctagtgcacag

SEQ ID NO: 235498 - DNA, 25 bp, Homo sapien
tagtgatggctgcaaatggcaccca

SEQ ID NO: 235499 - DNA, 25 bp, Homo sapien
caacccataacctacaagtgaggac

SEQ ID NO: 235500 - DNA, 25 bp, Homo sapien
tgagagcattctcctacttaaaatg

SEQ ID NO: 235501 - DNA, 25 bp, Homo sapien
tctccgagtgagagtgtaggttttt

SEQ ID NO: 235502 - DNA, 25 bp, Homo sapien
gactggcacggtggatcctccagag

SEQ ID NO: 235503 - DNA, 25 bp, Homo sapien
cctttgcggagaggatcgtccagag

SEQ ID NO: 235504 - DNA, 25 bp, Homo sapien
tctctcctgagtagacacgggctct

SEQ ID NO: 235505 - DNA, 25 bp, Homo sapien
caggttttgagtcgttcttgtttca

SEQ ID NO: 235506 - DNA, 25 bp, Homo sapien
aaatcttccgactcctcttgtcaag

SEQ ID NO: 235507 - DNA, 25 bp, Homo sapien
cattcgcaggttttgagtcgttctt

SEQ ID NO: 235508 - DNA, 25 bp, Homo sapien
tgtttcaactgctctgagaagctct

SEQ ID NO: 235509 - DNA, 25 bp, Homo sapien
tgtggacacagaatttgacggtttt

SEQ ID NO: 235510 - DNA, 25 bp, Homo sapien
gacacagaatttgacggttttcatc

SEQ ID NO: 235511 - DNA, 25 bp, Homo sapien
tggacacagaatttgacggttttca

SEQ ID NO: 235512 - DNA, 25 bp, Homo sapien
tgtgtggacacagaatttgacggtt

SEQ ID NO: 235513 - DNA, 25 bp, Homo sapien
ggtttcgtcctgttctatgactctg

SEQ ID NO: 235514 - DNA, 25 bp, Homo sapien
gtttcgtcctgttctatgactctga

SEQ ID NO: 235515 - DNA, 25 bp, Homo sapien
ctggtttcgtcctgttctatgactc

SEQ ID NO: 235516 - DNA, 25 bp, Homo sapien
tggtttcgtcctgttctatgactct

SEQ ID NO: 235517 - DNA, 25 bp, Homo sapien
catgccattccccaactcattattc

SEQ ID NO: 235518 - DNA, 25 bp, Homo sapien
gccattccccaactcattattccag

SEQ ID NO: 235519 - DNA, 25 bp, Homo sapien
ccccaactcattattccagatgatc

SEQ ID NO: 235520 - DNA, 25 bp, Homo sapien
tgagataccactaactggttccatg

SEQ ID NO: 235521 - DNA, 25 bp, Homo sapien
tagaaggctctagtgtatcctaaga

SEQ ID NO: 235522 - DNA, 25 bp, Homo sapien
tctaaaccctgtaatttaatgcagg

SEQ ID NO: 235523 - DNA, 25 bp, Homo sapien
tgggctttagctcaatctctctgca

SEQ ID NO: 235524 - DNA, 25 bp, Homo sapien
acagatttctttattggtgggcagg

SEQ ID NO: 235525 - DNA, 25 bp, Homo sapien
taccactgcaagagggaagatgacc

SEQ ID NO: 235526 - DNA, 25 bp, Homo sapien
agcaaagcatgctcacgtcctggcg

SEQ ID NO: 235527 - DNA, 25 bp, Homo sapien
tgttcactgcagtggactcctactg

SEQ ID NO: 235528 - DNA, 25 bp, Homo sapien
caaaggctaagttgctcaagcacca

SEQ ID NO: 235529 - DNA, 25 bp, Homo sapien
gttgtatctgagacataagcccagg

SEQ ID NO: 235530 - DNA, 25 bp, Homo sapien
tcctcagcagcccataggatacaga

SEQ ID NO: 235531 - DNA, 25 bp, Homo sapien
ttctaagtctaggttacactgagca

SEQ ID NO: 235532 - DNA, 25 bp, Homo sapien
gggcctcttggactccttttcctgc

SEQ ID NO: 235533 - DNA, 25 bp, Homo sapien
tcagccactgaaagggcgatgctcc

SEQ ID NO: 235534 - DNA, 25 bp, Homo sapien
gccactgaaagggcgatgctcctgt

SEQ ID NO: 235535 - DNA, 25 bp, Homo sapien
agccactgaaagggcgatgctcctg

SEQ ID NO: 235536 - DNA, 25 bp, Homo sapien
cagccactgaaagggcgatgctcct

SEQ ID NO: 235537 - DNA, 25 bp, Homo sapien
tctgaagtcctgtttctaggaaaaa

SEQ ID NO: 235538 - DNA, 25 bp, Homo sapien
catttttgaaatagaggacatgggc

SEQ ID NO: 235539 - DNA, 25 bp, Homo sapien
cctagttcttgatcgtggggagcag

SEQ ID NO: 235540 - DNA, 25 bp, Homo sapien
aaacctagttcttgatcgtggggag

SEQ ID NO: 235541 - DNA, 25 bp, Homo sapien
agatgagctgatgagtgctgtgatc

SEQ ID NO: 235542 - DNA, 25 bp, Homo sapien
tgagctccaagatgagctgatgagt

SEQ ID NO: 235543 - DNA, 25 bp, Homo sapien
agccctgcatgagcttgatgagctc

SEQ ID NO: 235544 - DNA, 25 bp, Homo sapien
cctgcatgagcttgatgagctccaa

SEQ ID NO: 235545 - DNA, 25 bp, Homo sapien
tcccctgctttctcataacaggtga

SEQ ID NO: 235546 - DNA, 25 bp, Homo sapien
ggtgatgacatcctgttcccggtcc

SEQ ID NO: 235547 - DNA, 25 bp, Homo sapien
gagatacaggagtgcgatgtcccct

SEQ ID NO: 235548 - DNA, 25 bp, Homo sapien
ggtccacatggagattactggtaga

SEQ ID NO: 235549 - DNA, 25 bp, Homo sapien
cttcaaatgcctccatatctggttt

SEQ ID NO: 235550 - DNA, 25 bp, Homo sapien
ttcaaatgcctccatatctggtttt

SEQ ID NO: 235551 - DNA, 25 bp, Homo sapien
gaatatttgcctaaagtttccttca

SEQ ID NO: 235552 - DNA, 25 bp, Homo sapien
ccttcaaatgcctccatatctggtt

SEQ ID NO: 235553 - DNA, 25 bp, Homo sapien
tatattgtgttgtcccaaggcatct

SEQ ID NO: 235554 - DNA, 25 bp, Homo sapien
tgcatttgcctatttctccttgaag

SEQ ID NO: 235555 - DNA, 25 bp, Homo sapien
tgacatcattgctctaaaacctgct

SEQ ID NO: 235556 - DNA, 25 bp, Homo sapien
gaaacatggatattgcaatccccaa

SEQ ID NO: 235557 - DNA, 25 bp, Homo sapien
tgtgcctatgcagctcagttccaga

SEQ ID NO: 235558 - DNA, 25 bp, Homo sapien
taagtccattcttgagcagaaggcc

SEQ ID NO: 235559 - DNA, 25 bp, Homo sapien
tgtggacactcaaagtctcagctgg

SEQ ID NO: 235560 - DNA, 25 bp, Homo sapien
tcatctagggcagcaatccacagtc

SEQ ID NO: 235561 - DNA, 25 bp, Homo sapien
catctgctctgggtaatgtcctaga

SEQ ID NO: 235562 - DNA, 25 bp, Homo sapien
cctctctatctcgtgggaaaagaat

SEQ ID NO: 235563 - DNA, 25 bp, Homo sapien
cagcagaccaatgggacatcacacg

SEQ ID NO: 235564 - DNA, 25 bp, Homo sapien
ggcaacaaggactgctgagtgcaca

SEQ ID NO: 235565 - DNA, 25 bp, Homo sapien
ttagtggttgactagggctatagag

SEQ ID NO: 235566 - DNA, 25 bp, Homo sapien
agtggttgactagggctatagagtt

SEQ ID NO: 235567 - DNA, 25 bp, Homo sapien
tagtggttgactagggctatagagt

SEQ ID NO: 235568 - DNA, 25 bp, Homo sapien
attagtggttgactagggctataga

SEQ ID NO: 235569 - DNA, 25 bp, Homo sapien
gatattccgactggacaaagtggct

SEQ ID NO: 235570 - DNA, 25 bp, Homo sapien
ttcagatcctagcactcagggaggc

SEQ ID NO: 235571 - DNA, 25 bp, Homo sapien
tatgccgtctacaagaaactctaga

SEQ ID NO: 235572 - DNA, 25 bp, Homo sapien
tagatccacagacataaatacgttg

SEQ ID NO: 235573 - DNA, 25 bp, Homo sapien
ctatattaagaacaataaagccggg

SEQ ID NO: 235574 - DNA, 25 bp, Homo sapien
gtctatattaagaacaataaagccg

SEQ ID NO: 235575 - DNA, 25 bp, Homo sapien
ttaagaacaataaagccgggtgcag

SEQ ID NO: 235576 - DNA, 25 bp, Homo sapien
tattaagaacaataaagccgggtgc

SEQ ID NO: 235577 - DNA, 25 bp, Homo sapien
attctaatgtactgtgctacgacaa

SEQ ID NO: 235578 - DNA, 25 bp, Homo sapien
gctacgacaacatcaaatatcattg

SEQ ID NO: 235579 - DNA, 25 bp, Homo sapien
tgtactgtgctacgacaacatcaaa

SEQ ID NO: 235580 - DNA, 25 bp, Homo sapien
tgtgctacgacaacatcaaatatca

SEQ ID NO: 235581 - DNA, 25 bp, Homo sapien
ggcagttgggcaggtggaaattgcc

SEQ ID NO: 235582 - DNA, 25 bp, Homo sapien
gatgatgctttgctgtgcttccaga

SEQ ID NO: 235583 - DNA, 25 bp, Homo sapien
ggtggaaattgccagatgatgcttt

SEQ ID NO: 235584 - DNA, 25 bp, Homo sapien
ttgctgtgcttccagaatgctgttg

SEQ ID NO: 235585 - DNA, 25 bp, Homo sapien
atgcagcatttagaatgtgccaggt

SEQ ID NO: 235586 - DNA, 25 bp, Homo sapien
tatgcagcatttagaatgtgccagg

SEQ ID NO: 235587 - DNA, 25 bp, Homo sapien
tgccaggtaccacaatcaatgcttt

SEQ ID NO: 235588 - DNA, 25 bp, Homo sapien
tttatgcagcatttagaatgtgcca

SEQ ID NO: 235589 - DNA, 25 bp, Homo sapien
cacccgcagcctgtagggcgggaca

SEQ ID NO: 235590 - DNA, 25 bp, Homo sapien
ccttccacataattcaacttggcca

SEQ ID NO: 235591 - DNA, 25 bp, Homo sapien
gcccacccgggcgtaaatgttcaga

SEQ ID NO: 235592 - DNA, 25 bp, Homo sapien
ctttggtagcgtaggcttctgcgat

SEQ ID NO: 235593 - DNA, 25 bp, Homo sapien
gtgttccttcaggtactgctccagc

SEQ ID NO: 235594 - DNA, 25 bp, Homo sapien
tccagggcggcggtcagatgcttgc

SEQ ID NO: 235595 - DNA, 25 bp, Homo sapien
gatgcttgcggacctcagtcagctg

SEQ ID NO: 235596 - DNA, 25 bp, Homo sapien
tccagcttcgactccccgaggagaa

SEQ ID NO: 235597 - DNA, 25 bp, Homo sapien
agcagaggtgttgcacgcagcttct

SEQ ID NO: 235598 - DNA, 25 bp, Homo sapien
ttctagactgtaaggaggaggccta

SEQ ID NO: 235599 - DNA, 25 bp, Homo sapien
cacgcggctgcccagttaaagacta

SEQ ID NO: 235600 - DNA, 25 bp, Homo sapien
gctgccccgtgactacgttatgacg

SEQ ID NO: 235601 - DNA, 25 bp, Homo sapien
tgctaggcaggtaggtatcggctcc

SEQ ID NO: 235602 - DNA, 25 bp, Homo sapien
taataacgtgtccagctgcaaggta

SEQ ID NO: 235603 - DNA, 25 bp, Homo sapien
tggtgtgaccaacactccatgagca

SEQ ID NO: 235604 - DNA, 25 bp, Homo sapien
gagtcaggccaaagaaatcatccag

SEQ ID NO: 235605 - DNA, 25 bp, Homo sapien
tttcatggtaactgtcttagtgtga

SEQ ID NO: 235606 - DNA, 25 bp, Homo sapien
gacaaacgtgacattcacttgcttt

SEQ ID NO: 235607 - DNA, 25 bp, Homo sapien
ctgtcttagtgtgacaaacgtgaca

SEQ ID NO: 235608 - DNA, 25 bp, Homo sapien
tcttagtgtgacaaacgtgacattc

SEQ ID NO: 235609 - DNA, 25 bp, Homo sapien
ccagaacttgtgctcatgcacccga

SEQ ID NO: 235610 - DNA, 25 bp, Homo sapien
gaacttgtgctcatgcacccgagaa

SEQ ID NO: 235611 - DNA, 25 bp, Homo sapien
aacttgtgctcatgcacccgagaat

SEQ ID NO: 235612 - DNA, 25 bp, Homo sapien
tgcccagaacttgtgctcatgcacc

SEQ ID NO: 235613 - DNA, 25 bp, Homo sapien
gagccggtgcccccaaaagccagga

SEQ ID NO: 235614 - DNA, 25 bp, Homo sapien
tgcccccaaaagccaggaagaagtc

SEQ ID NO: 235615 - DNA, 25 bp, Homo sapien
cattccagggaccatcatagcttga

SEQ ID NO: 235616 - DNA, 25 bp, Homo sapien
gactgcatcttaggacattgggagc

SEQ ID NO: 235617 - DNA, 25 bp, Homo sapien
tcaccagtcaaacggagggaaggcc

SEQ ID NO: 235618 - DNA, 25 bp, Homo sapien
cccctgggaagagagctaagccttt

SEQ ID NO: 235619 - DNA, 25 bp, Homo sapien
tgtcattatgcctacaccgctggga

SEQ ID NO: 235620 - DNA, 25 bp, Homo sapien
gtagggtcggtgctatctccatgcc

SEQ ID NO: 235621 - DNA, 25 bp, Homo sapien
taactgagaagggtccacattttcc

SEQ ID NO: 235622 - DNA, 25 bp, Homo sapien
caggactgtgcaactccgagaggaa

SEQ ID NO: 235623 - DNA, 25 bp, Homo sapien
ctcgatctccgtctccagccgcgag

SEQ ID NO: 235624 - DNA, 25 bp, Homo sapien
ttggcgatgagcttggccgacagct

SEQ ID NO: 235625 - DNA, 25 bp, Homo sapien
gagctcagggatccgctcccactgg

SEQ ID NO: 235626 - DNA, 25 bp, Homo sapien
ggccgacagctgcttgacgagctca

SEQ ID NO: 235627 - DNA, 25 bp, Homo sapien
gccgcggcgccccctcgccgcctcc

SEQ ID NO: 235628 - DNA, 25 bp, Homo sapien
ccgccgcggcgccccctcgccgcct

SEQ ID NO: 235629 - DNA, 25 bp, Homo sapien
gcggcgccccctcgccgcctcccgc

SEQ ID NO: 235630 - DNA, 25 bp, Homo sapien
cgccccgcaggccccaccgccgccg

SEQ ID NO: 235631 - DNA, 25 bp, Homo sapien
gtctggagacctcccagtcctcatc

SEQ ID NO: 235632 - DNA, 25 bp, Homo sapien
gaaagaagtggaggacagctgggaa

SEQ ID NO: 235633 - DNA, 25 bp, Homo sapien
tccttgagaacagctggggtaccag

SEQ ID NO: 235634 - DNA, 25 bp, Homo sapien
aggcaggctgtaggctcattccaaa

SEQ ID NO: 235635 - DNA, 25 bp, Homo sapien
ctgggcaacaagagccagagtccgt

SEQ ID NO: 235636 - DNA, 25 bp, Homo sapien
tctgggcaacaagagccagagtccg

SEQ ID NO: 235637 - DNA, 25 bp, Homo sapien
gccctggaaaagctcagaaggccat

SEQ ID NO: 235638 - DNA, 25 bp, Homo sapien
gaaggtatcaagaaggtggtcgtca

SEQ ID NO: 235639 - DNA, 25 bp, Homo sapien
ggtcgtcagccctggaaaagctcag

SEQ ID NO: 235640 - DNA, 25 bp, Homo sapien
tggtgggcacggattcagaacgaga

SEQ ID NO: 235641 - DNA, 25 bp, Homo sapien
tgtcaaagggtcagcgagaaaacca

SEQ ID NO: 235642 - DNA, 25 bp, Homo sapien
gaaaaccagtcccttggctggttga

SEQ ID NO: 235643 - DNA, 25 bp, Homo sapien
aagccttcgaggctcgcagacctgg

SEQ ID NO: 235644 - DNA, 25 bp, Homo sapien
ctttgtcagaaagcagccttgcgct

SEQ ID NO: 235645 - DNA, 25 bp, Homo sapien
gcacagcgggctttcacagcacaat

SEQ ID NO: 235646 - DNA, 25 bp, Homo sapien
tttgcggaccattcactctgggcgt

SEQ ID NO: 235647 - DNA, 25 bp, Homo sapien
tgacgaggacatagctctccgacag

SEQ ID NO: 235648 - DNA, 25 bp, Homo sapien
tagagtcccaggtgccacagtttgt

SEQ ID NO: 235649 - DNA, 25 bp, Homo sapien
ggcccagctgcgagggtgaagttgt

SEQ ID NO: 235650 - DNA, 25 bp, Homo sapien
gagccaccttctgacaagggaggag

SEQ ID NO: 235651 - DNA, 25 bp, Homo sapien
cagggcccagctgcgagggtgaagt

SEQ ID NO: 235652 - DNA, 25 bp, Homo sapien
tgaagttgtgcccagctgcgagggc

SEQ ID NO: 235653 - DNA, 25 bp, Homo sapien
gcccagtgcgggcaacttcaccttc

SEQ ID NO: 235654 - DNA, 25 bp, Homo sapien
ttatcaggcaactaacagagccggc

SEQ ID NO: 235655 - DNA, 25 bp, Homo sapien
tacccgttgatgctagatgatgtcc

SEQ ID NO: 235656 - DNA, 25 bp, Homo sapien
tttaagagggcacggactccggatc

SEQ ID NO: 235657 - DNA, 25 bp, Homo sapien
gactcatctcagtacggtgacctgg

SEQ ID NO: 235658 - DNA, 25 bp, Homo sapien
cattgcttaccagccattgacctga

SEQ ID NO: 235659 - DNA, 25 bp, Homo sapien
gatggtaataaatccagctgctaca

SEQ ID NO: 235660 - DNA, 25 bp, Homo sapien
ttctacaagggagcaaacaacctca

SEQ ID NO: 235661 - DNA, 25 bp, Homo sapien
gaagggatctgtgggctttctacaa

SEQ ID NO: 235662 - DNA, 25 bp, Homo sapien
gccttttaaataaggatggaattca

SEQ ID NO: 235663 - DNA, 25 bp, Homo sapien
gaacaaaaggtacacatcaaagtag

SEQ ID NO: 235664 - DNA, 25 bp, Homo sapien
gcttacatcttctgaaataacccat

SEQ ID NO: 235665 - DNA, 25 bp, Homo sapien
ccatgattagctccaagttttagaa

SEQ ID NO: 235666 - DNA, 25 bp, Homo sapien
tgtgcaccctattgtaaagaattgg

SEQ ID NO: 235667 - DNA, 25 bp, Homo sapien
tgctgcaatggagtactaaccacta

SEQ ID NO: 235668 - DNA, 25 bp, Homo sapien
tattagtccaatcatgtgaaaccca

SEQ ID NO: 235669 - DNA, 25 bp, Homo sapien
taaattccagttagcctttgctggg

SEQ ID NO: 235670 - DNA, 25 bp, Homo sapien
ttttataggcaacagggagcaaacc

SEQ ID NO: 235671 - DNA, 25 bp, Homo sapien
caaataattgtgctcccggtgagat

SEQ ID NO: 235672 - DNA, 25 bp, Homo sapien
gaagtggccctgataaacaccctag

SEQ ID NO: 235673 - DNA, 25 bp, Homo sapien
cactgcggagaaatcaacaatggcg

SEQ ID NO: 235674 - DNA, 25 bp, Homo sapien
gaaaagggcaatacatcatgaaaat

SEQ ID NO: 235675 - DNA, 25 bp, Homo sapien
gataccacacccagtctaggtctat

SEQ ID NO: 235676 - DNA, 25 bp, Homo sapien
taggtctatcctccttatgatccaa

SEQ ID NO: 235677 - DNA, 25 bp, Homo sapien
tatccattgatatatgaaaagggca

SEQ ID NO: 235678 - DNA, 25 bp, Homo sapien
taaagagatttgtccatacgggcac

SEQ ID NO: 235679 - DNA, 25 bp, Homo sapien
tctgaatgatggttatatgggcgca

SEQ ID NO: 235680 - DNA, 25 bp, Homo sapien
gagctatcacatgggcttcctagag

SEQ ID NO: 235681 - DNA, 25 bp, Homo sapien
aggactgactgggagcctcatcttg

SEQ ID NO: 235682 - DNA, 25 bp, Homo sapien
gccaaagaatgagaattattgtaca

SEQ ID NO: 235683 - DNA, 25 bp, Homo sapien
gcaaataggatagcagtatagtacc

SEQ ID NO: 235684 - DNA, 25 bp, Homo sapien
catgaccagcctcttatgtagttaa

SEQ ID NO: 235685 - DNA, 25 bp, Homo sapien
gcagtgcacatttcacatgaccagc

SEQ ID NO: 235686 - DNA, 25 bp, Homo sapien
taattacataacagggagctgggca

SEQ ID NO: 235687 - DNA, 25 bp, Homo sapien
ggtaatgaacctgtgactccaagac

SEQ ID NO: 235688 - DNA, 25 bp, Homo sapien
taaatatgacaataacaggcgcttg

SEQ ID NO: 235689 - DNA, 25 bp, Homo sapien
tcatgaaacagggtggacaacagcc

SEQ ID NO: 235690 - DNA, 25 bp, Homo sapien
cccatttgagattattcaggcaggc

SEQ ID NO: 235691 - DNA, 25 bp, Homo sapien
tagtattttctaccaggatgcacag

SEQ ID NO: 235692 - DNA, 25 bp, Homo sapien
tcaggcaggctcatcagttgacagc

SEQ ID NO: 235693 - DNA, 25 bp, Homo sapien
ggtgtggctctagtcccaaagttaa

SEQ ID NO: 235694 - DNA, 25 bp, Homo sapien
ccatttgggccagcaaaaagtgtaa

SEQ ID NO: 235695 - DNA, 25 bp, Homo sapien
ttatgtagccatttgggccagcaaa

SEQ ID NO: 235696 - DNA, 25 bp, Homo sapien
aatattattcccaataaccactgtg

SEQ ID NO: 235697 - DNA, 25 bp, Homo sapien
tattcccaataaccactgtggacaa

SEQ ID NO: 235698 - DNA, 25 bp, Homo sapien
aaataaacatgttgggcattatctc

SEQ ID NO: 235699 - DNA, 25 bp, Homo sapien
tgaaattaatgctgctataacctca

SEQ ID NO: 235700 - DNA, 25 bp, Homo sapien
taagcatgattcctgtaaacaaagc

SEQ ID NO: 235701 - DNA, 25 bp, Homo sapien
cagtcctgacatttcacatgatggc

SEQ ID NO: 235702 - DNA, 25 bp, Homo sapien
gcatctcagatggatcccgaataca

SEQ ID NO: 235703 - DNA, 25 bp, Homo sapien
tcctcacattggtgcataagtggct

SEQ ID NO: 235704 - DNA, 25 bp, Homo sapien
taagtggctgactacatgacacaac

SEQ ID NO: 235705 - DNA, 25 bp, Homo sapien
cccgaatacagagtatgggaccttg

SEQ ID NO: 235706 - DNA, 25 bp, Homo sapien
gaaaacctgtgacttacaagcagct

SEQ ID NO: 235707 - DNA, 25 bp, Homo sapien
aaagcataaaagatcgcctcaggca

SEQ ID NO: 235708 - DNA, 25 bp, Homo sapien
ttaggaggcagattccaatgagacc

SEQ ID NO: 235709 - DNA, 25 bp, Homo sapien
ccagtgcttttgaatgaggataacc

SEQ ID NO: 235710 - DNA, 25 bp, Homo sapien
ggtctccgggttattgctgtcggca

SEQ ID NO: 235711 - DNA, 25 bp, Homo sapien
cgcgtctcggtactggtgctagtct

SEQ ID NO: 235712 - DNA, 25 bp, Homo sapien
tagttttaccgtgagaatgagagga

SEQ ID NO: 235713 - DNA, 25 bp, Homo sapien
gaagaatgggaactctcactggaac

SEQ ID NO: 235714 - DNA, 25 bp, Homo sapien
tataaagtgtttataaccatgaagc

SEQ ID NO: 235715 - DNA, 25 bp, Homo sapien
agaaaacgtatctgaggctacagag

SEQ ID NO: 235716 - DNA, 25 bp, Homo sapien
tctcatctcataaggtcattctaaa

SEQ ID NO: 235717 - DNA, 25 bp, Homo sapien
gaacatttgattatgattcctactc

SEQ ID NO: 235718 - DNA, 25 bp, Homo sapien
cacacaggtatgcacggcagctccg

SEQ ID NO: 235719 - DNA, 25 bp, Homo sapien
cacaggtatgcacggcagctccgga

SEQ ID NO: 235720 - DNA, 25 bp, Homo sapien
aggtatgcacggcagctccggaaga

SEQ ID NO: 235721 - DNA, 25 bp, Homo sapien
gtatgcacggcagctccggaagatc

SEQ ID NO: 235722 - DNA, 25 bp, Homo sapien
ctagaatatccggagtcatcagagg

SEQ ID NO: 235723 - DNA, 25 bp, Homo sapien
cttttgtttggatctactgtgagaa

SEQ ID NO: 235724 - DNA, 25 bp, Homo sapien
gtagccattcattgtacctcaagcc

SEQ ID NO: 235725 - DNA, 25 bp, Homo sapien
tcatcagaggattggaggacagctg

SEQ ID NO: 235726 - DNA, 25 bp, Homo sapien
atctttagcctcttgggatacattc

SEQ ID NO: 235727 - DNA, 25 bp, Homo sapien
ctttagcctcttgggatacattctt

SEQ ID NO: 235728 - DNA, 25 bp, Homo sapien
ttagcctcttgggatacattcttcc

SEQ ID NO: 235729 - DNA, 25 bp, Homo sapien
aaatctttagcctcttgggatacat

SEQ ID NO: 235730 - DNA, 25 bp, Homo sapien
gtcaaacttcggtcatgagattgga

SEQ ID NO: 235731 - DNA, 25 bp, Homo sapien
gagattggaagggaacctgtcctga

SEQ ID NO: 235732 - DNA, 25 bp, Homo sapien
atttccaccgcgctggtacacgtca

SEQ ID NO: 235733 - DNA, 25 bp, Homo sapien
gaacctgtcctgacaacattgtgta

SEQ ID NO: 235734 - DNA, 25 bp, Homo sapien
tctaggtgaatttatcatgaggcct

SEQ ID NO: 235735 - DNA, 25 bp, Homo sapien
ccattttgttaatacattttgtctt

SEQ ID NO: 235736 - DNA, 25 bp, Homo sapien
tctgcctctgaaaccctctattgaa

SEQ ID NO: 235737 - DNA, 25 bp, Homo sapien
tgtgattcttgttgaaaatgggacc

SEQ ID NO: 235738 - DNA, 25 bp, Homo sapien
ttggaatgtatgagtactgaatgtc

SEQ ID NO: 235739 - DNA, 25 bp, Homo sapien
tggtggcaggcacaacaacaatgac

SEQ ID NO: 235740 - DNA, 25 bp, Homo sapien
ggcttgcagtaatggtggcaggcac

SEQ ID NO: 235741 - DNA, 25 bp, Homo sapien
gtcctttaagtactcctggaaatca

SEQ ID NO: 235742 - DNA, 25 bp, Homo sapien
ggctttagccgtgcaaatccaaaat

SEQ ID NO: 235743 - DNA, 25 bp, Homo sapien
cattttcatcggtgaacaataaatt

SEQ ID NO: 235744 - DNA, 25 bp, Homo sapien
gctgattatccggtggctttagccg

SEQ ID NO: 235745 - DNA, 25 bp, Homo sapien
ggtcacaggactcatcgtagccgtt

SEQ ID NO: 235746 - DNA, 25 bp, Homo sapien
tgaattacgtaagagatccagtgat

SEQ ID NO: 235747 - DNA, 25 bp, Homo sapien
gctatttttagtccacaactgttgc

SEQ ID NO: 235748 - DNA, 25 bp, Homo sapien
tataacctcaagatgatcagctggc

SEQ ID NO: 235749 - DNA, 25 bp, Homo sapien
ccataaaaggttctcacacttacaa

SEQ ID NO: 235750 - DNA, 25 bp, Homo sapien
gcaccactccaacatcatgcatgtg

SEQ ID NO: 235751 - DNA, 25 bp, Homo sapien
gtgcaccactccaacatcatgcatg

SEQ ID NO: 235752 - DNA, 25 bp, Homo sapien
accactccaacatcatgcatgtggc

SEQ ID NO: 235753 - DNA, 25 bp, Homo sapien
tgtgcaccactccaacatcatgcat

SEQ ID NO: 235754 - DNA, 25 bp, Homo sapien
tttttcttaatgcgctcaaacagtt

SEQ ID NO: 235755 - DNA, 25 bp, Homo sapien
gctgaaacaagcttcctcatgatgt

SEQ ID NO: 235756 - DNA, 25 bp, Homo sapien
atgtagctggcttccgtctcactga

SEQ ID NO: 235757 - DNA, 25 bp, Homo sapien
gttccatcactagaaacgtgtgaag

SEQ ID NO: 235758 - DNA, 25 bp, Homo sapien
caaactcatggagtacgtgaaacgc

SEQ ID NO: 235759 - DNA, 25 bp, Homo sapien
ggatgtagttatgggcacagctgca

SEQ ID NO: 235760 - DNA, 25 bp, Homo sapien
gaaatgttgttcatgggacctgaca

SEQ ID NO: 235761 - DNA, 25 bp, Homo sapien
cagggatgatctaggcaactgtgcc

SEQ ID NO: 235762 - DNA, 25 bp, Homo sapien
tcatgcaacttcacaatattggggt

SEQ ID NO: 235763 - DNA, 25 bp, Homo sapien
cttcacaatattggggtgtccttca

SEQ ID NO: 235764 - DNA, 25 bp, Homo sapien
ttccttttgagtattggcttccatc

SEQ ID NO: 235765 - DNA, 25 bp, Homo sapien
tttccttttgagtattggcttccat

SEQ ID NO: 235766 - DNA, 25 bp, Homo sapien
cacactttcgacaaattgaaaaact

SEQ ID NO: 235767 - DNA, 25 bp, Homo sapien
ggtttgtccttcaaatctaggtcat

SEQ ID NO: 235768 - DNA, 25 bp, Homo sapien
catagtgttgatagaatggagagtc

SEQ ID NO: 235769 - DNA, 25 bp, Homo sapien
ttttttatgcacacactttcgacaa

SEQ ID NO: 235770 - DNA, 25 bp, Homo sapien
caaatatgtcatataagttaccaca

SEQ ID NO: 235771 - DNA, 25 bp, Homo sapien
tggaaggagcaacaaaggaatagcc

SEQ ID NO: 235772 - DNA, 25 bp, Homo sapien
actgaagagggtctatgacagctgc

SEQ ID NO: 235773 - DNA, 25 bp, Homo sapien
gttcaactcccatgtgaaactgaag

SEQ ID NO: 235774 - DNA, 25 bp, Homo sapien
gacagctgcattacgcttgaatagg

SEQ ID NO: 235775 - DNA, 25 bp, Homo sapien
tctcgaatgactggcttaaatggtg

SEQ ID NO: 235776 - DNA, 25 bp, Homo sapien
ctgcgggagaataagtgggatccat

SEQ ID NO: 235777 - DNA, 25 bp, Homo sapien
aatggtgcaggcacttttttggcgg

SEQ ID NO: 235778 - DNA, 25 bp, Homo sapien
ttttggcggctaaatcatcccaatt

SEQ ID NO: 235779 - DNA, 25 bp, Homo sapien
tggaccacatcccaatctcttcttg

SEQ ID NO: 235780 - DNA, 25 bp, Homo sapien
ttaggtctttcgctaaagcactcat

SEQ ID NO: 235781 - DNA, 25 bp, Homo sapien
catcaaaagacgctgaattaggtct

SEQ ID NO: 235782 - DNA, 25 bp, Homo sapien
tgggatctttcatcaaaagacgctg

SEQ ID NO: 235783 - DNA, 25 bp, Homo sapien
cttggggatatggaggctcactttt

SEQ ID NO: 235784 - DNA, 25 bp, Homo sapien
gatatggaggctcactttttaatat

SEQ ID NO: 235785 - DNA, 25 bp, Homo sapien
tatggaggctcactttttaatattc

SEQ ID NO: 235786 - DNA, 25 bp, Homo sapien
gggatatggaggctcactttttaat

SEQ ID NO: 235787 - DNA, 25 bp, Homo sapien
cctcttcccctgagtgccagcaaac

SEQ ID NO: 235788 - DNA, 25 bp, Homo sapien
tcctcttcccctgagtgccagcaaa

SEQ ID NO: 235789 - DNA, 25 bp, Homo sapien
ctcctcttcccctgagtgccagcaa

SEQ ID NO: 235790 - DNA, 25 bp, Homo sapien
gcttgtctggattttcggcattaat

SEQ ID NO: 235791 - DNA, 25 bp, Homo sapien
ctgagacagaaactgggaatcctgc

SEQ ID NO: 235792 - DNA, 25 bp, Homo sapien
tagacaatcctcttctcagatcaga

SEQ ID NO: 235793 - DNA, 25 bp, Homo sapien
gtctgagacagaaactgggaatcct

SEQ ID NO: 235794 - DNA, 25 bp, Homo sapien
taatgtcgatacactgtttcctgtc

SEQ ID NO: 235795 - DNA, 25 bp, Homo sapien
tcaccaatggttgagtgtgtcttgt

SEQ ID NO: 235796 - DNA, 25 bp, Homo sapien
ccccgatgaagatgtgtttgatgct

SEQ ID NO: 235797 - DNA, 25 bp, Homo sapien
gctacaagggacagttgctgctctg

SEQ ID NO: 235798 - DNA, 25 bp, Homo sapien
ctaaataaaactggtgccagattcc

SEQ ID NO: 235799 - DNA, 25 bp, Homo sapien
aaataaaactggtgccagattccag

SEQ ID NO: 235800 - DNA, 25 bp, Homo sapien
aataaaactggtgccagattccagt

SEQ ID NO: 235801 - DNA, 25 bp, Homo sapien
taaataaaactggtgccagattcca

SEQ ID NO: 235802 - DNA, 25 bp, Homo sapien
gaggtgcacactccggccattgctt

SEQ ID NO: 235803 - DNA, 25 bp, Homo sapien
tcttctgcccagtacactaaccagg

SEQ ID NO: 235804 - DNA, 25 bp, Homo sapien
ctgcggccggccacatgaagcatct

SEQ ID NO: 235805 - DNA, 25 bp, Homo sapien
tacactgctgggaagccatctgaga

SEQ ID NO: 235806 - DNA, 25 bp, Homo sapien
gactggcttgttagacgtgcctgga

SEQ ID NO: 235807 - DNA, 25 bp, Homo sapien
gaaccaaactggtctgctggaggtc

SEQ ID NO: 235808 - DNA, 25 bp, Homo sapien
ttagtatgacttttatcgccagacc

SEQ ID NO: 235809 - DNA, 25 bp, Homo sapien
ggtcctcaccgctcttgtacagtta

SEQ ID NO: 235810 - DNA, 25 bp, Homo sapien
tttagactctgggttgactgtagca

SEQ ID NO: 235811 - DNA, 25 bp, Homo sapien
gccaggtctccggtgagagactaag

SEQ ID NO: 235812 - DNA, 25 bp, Homo sapien
cagaggtggcggcaaagaatctaca

SEQ ID NO: 235813 - DNA, 25 bp, Homo sapien
gactgtagcagtagagaactggctg

SEQ ID NO: 235814 - DNA, 25 bp, Homo sapien
agtccctaggcaactgctattctgc

SEQ ID NO: 235815 - DNA, 25 bp, Homo sapien
ttcatccatttgcaagagtataaac

SEQ ID NO: 235816 - DNA, 25 bp, Homo sapien
tcaagaaacaaatatactcatcacc

SEQ ID NO: 235817 - DNA, 25 bp, Homo sapien
ctacgtactgtaatctctcctgacc

SEQ ID NO: 235818 - DNA, 25 bp, Homo sapien
aaggagatgctccagttagtaattc

SEQ ID NO: 235819 - DNA, 25 bp, Homo sapien
gatgctccagttagtaattcataca

SEQ ID NO: 235820 - DNA, 25 bp, Homo sapien
taattcatacattagaacacccaaa

SEQ ID NO: 235821 - DNA, 25 bp, Homo sapien
ccagttagtaattcatacattagaa

SEQ ID NO: 235822 - DNA, 25 bp, Homo sapien
gacaaaatttatgagcctagagcta

SEQ ID NO: 235823 - DNA, 25 bp, Homo sapien
caggcagactaaaatcgtgagagca

SEQ ID NO: 235824 - DNA, 25 bp, Homo sapien
gacatacaaaacacatcaggcagac

SEQ ID NO: 235825 - DNA, 25 bp, Homo sapien
tttccagggcctaagtttcagagag

SEQ ID NO: 235826 - DNA, 25 bp, Homo sapien
aaccattcatcacgactcagacagg

SEQ ID NO: 235827 - DNA, 25 bp, Homo sapien
taaaaggccagggtctcatgcaaaa

SEQ ID NO: 235828 - DNA, 25 bp, Homo sapien
cattgacctcttagtgacagcttaa

SEQ ID NO: 235829 - DNA, 25 bp, Homo sapien
tgcagttttacatgccgtgaccctt

SEQ ID NO: 235830 - DNA, 25 bp, Homo sapien
aatctccccctctgacaatatctgg

SEQ ID NO: 235831 - DNA, 25 bp, Homo sapien
atctccccctctgacaatatctggt

SEQ ID NO: 235832 - DNA, 25 bp, Homo sapien
gtcctgaatctccccctctgacaat

SEQ ID NO: 235833 - DNA, 25 bp, Homo sapien
ttcaatagttccacaaaaggaatat

SEQ ID NO: 235834 - DNA, 25 bp, Homo sapien
attcaatagttccacaaaaggaata

SEQ ID NO: 235835 - DNA, 25 bp, Homo sapien
gtattcaatagttccacaaaaggaa

SEQ ID NO: 235836 - DNA, 25 bp, Homo sapien
tattcaatagttccacaaaaggaat

SEQ ID NO: 235837 - DNA, 25 bp, Homo sapien
tgcaagacttactcattatcatgag

SEQ ID NO: 235838 - DNA, 25 bp, Homo sapien
gatcttgcaagacttactcattatc

SEQ ID NO: 235839 - DNA, 25 bp, Homo sapien
cagtcagatcttgcaagacttactc

SEQ ID NO: 235840 - DNA, 25 bp, Homo sapien
gtcagatcttgcaagacttactcat

SEQ ID NO: 235841 - DNA, 25 bp, Homo sapien
gagttaaacctgaagccaagcatga

SEQ ID NO: 235842 - DNA, 25 bp, Homo sapien
tgagccctgagagttaaacctgaag

SEQ ID NO: 235843 - DNA, 25 bp, Homo sapien
gtatgtcctctagggctaacaggaa

SEQ ID NO: 235844 - DNA, 25 bp, Homo sapien
gaagccaagcatgatagtatgtcct

SEQ ID NO: 235845 - DNA, 25 bp, Homo sapien
tatcctcatccttagctgtgcccat

SEQ ID NO: 235846 - DNA, 25 bp, Homo sapien
tctgtatggtatcctcatccttagc

SEQ ID NO: 235847 - DNA, 25 bp, Homo sapien
tatggtatcctcatccttagctgtg

SEQ ID NO: 235848 - DNA, 25 bp, Homo sapien
tggtatcctcatccttagctgtgcc

SEQ ID NO: 235849 - DNA, 25 bp, Homo sapien
tactcagaccaaaatctgtcagcac

SEQ ID NO: 235850 - DNA, 25 bp, Homo sapien
caccacatggccattagaatcaagt

SEQ ID NO: 235851 - DNA, 25 bp, Homo sapien
tctcaagcttaatatcacgatatat

SEQ ID NO: 235852 - DNA, 25 bp, Homo sapien
taatatcacgatatataatccccaa

SEQ ID NO: 235853 - DNA, 25 bp, Homo sapien
ctccaccttgctgcctgccccttta

SEQ ID NO: 235854 - DNA, 25 bp, Homo sapien
tgctgcctgcccctttagaaatgtc

SEQ ID NO: 235855 - DNA, 25 bp, Homo sapien
accttgctgcctgcccctttagaaa

SEQ ID NO: 235856 - DNA, 25 bp, Homo sapien
tgcctgcccctttagaaatgtcatc

SEQ ID NO: 235857 - DNA, 25 bp, Homo sapien
tctccaacataaatctgcacctcat

SEQ ID NO: 235858 - DNA, 25 bp, Homo sapien
gctctgtgaaacgctctctttgaga

SEQ ID NO: 235859 - DNA, 25 bp, Homo sapien
tctgtgaaacgctctctttgagaaa

SEQ ID NO: 235860 - DNA, 25 bp, Homo sapien
tgagtaaaaagttcaccaccattta

SEQ ID NO: 235861 - DNA, 25 bp, Homo sapien
aagatgagtaaaaagttcaccacca

SEQ ID NO: 235862 - DNA, 25 bp, Homo sapien
gagcagaaccttgggcattcgaaca

SEQ ID NO: 235863 - DNA, 25 bp, Homo sapien
taaattcaggcccatttgcaggagt

SEQ ID NO: 235864 - DNA, 25 bp, Homo sapien
gaacaatggttctagcagggctctc

SEQ ID NO: 235865 - DNA, 25 bp, Homo sapien
cccactaattgctggctggtcgcta

SEQ ID NO: 235866 - DNA, 25 bp, Homo sapien
cacagcttttgtgagatttgccaag

SEQ ID NO: 235867 - DNA, 25 bp, Homo sapien
cagcaagtactgacagcacatggga

SEQ ID NO: 235868 - DNA, 25 bp, Homo sapien
ggaacatcaccttaaagacagcatt

SEQ ID NO: 235869 - DNA, 25 bp, Homo sapien
tctgagaacaggtgccatagctctg

SEQ ID NO: 235870 - DNA, 25 bp, Homo sapien
ggcacagaacttaaggacagcaatt

SEQ ID NO: 235871 - DNA, 25 bp, Homo sapien
gcctcatcaggcagtcggacttgat

SEQ ID NO: 235872 - DNA, 25 bp, Homo sapien
tacatcttgcagtagtgaaccctgg

SEQ ID NO: 235873 - DNA, 25 bp, Homo sapien
gaacctcaaagtatctgcagaccaa

SEQ ID NO: 235874 - DNA, 25 bp, Homo sapien
aaattctgactttctaagtacatac

SEQ ID NO: 235875 - DNA, 25 bp, Homo sapien
aaaattctgactttctaagtacata

SEQ ID NO: 235876 - DNA, 25 bp, Homo sapien
gatttgacttaacgttgaactcaga

SEQ ID NO: 235877 - DNA, 25 bp, Homo sapien
tttgcacatctgatttgacttaacg

SEQ ID NO: 235878 - DNA, 25 bp, Homo sapien
ttaacgttgaactcagaaatctctc

SEQ ID NO: 235879 - DNA, 25 bp, Homo sapien
catctgatttgacttaacgttgaac

SEQ ID NO: 235880 - DNA, 25 bp, Homo sapien
ctaaaatgagatgaagtttggtttc

SEQ ID NO: 235881 - DNA, 25 bp, Homo sapien
tctgtctggaaagcataatgtaatg

SEQ ID NO: 235882 - DNA, 25 bp, Homo sapien
aaatgagatgaagtttggtttctgt

SEQ ID NO: 235883 - DNA, 25 bp, Homo sapien
tctggaaagcataatgtaatgttac

SEQ ID NO: 235884 - DNA, 25 bp, Homo sapien
caaaaatggcgactgcctaatgtgt

SEQ ID NO: 235885 - DNA, 25 bp, Homo sapien
cgttctgtccttgtatgctctgtgg

SEQ ID NO: 235886 - DNA, 25 bp, Homo sapien
catggccacttattttacgaactag

SEQ ID NO: 235887 - DNA, 25 bp, Homo sapien
taatgtgttccaggacttgtcgttc

SEQ ID NO: 235888 - DNA, 25 bp, Homo sapien
tttaaggttatgactcacggaaggc

SEQ ID NO: 235889 - DNA, 25 bp, Homo sapien
tcacccgaagccaatgctaagccag

SEQ ID NO: 235890 - DNA, 25 bp, Homo sapien
aactagctcggaattcactggtgga

SEQ ID NO: 235891 - DNA, 25 bp, Homo sapien
taccgcttgagtgccttagaagctg

SEQ ID NO: 235892 - DNA, 25 bp, Homo sapien
ttatatggaataagtatactcatcc

SEQ ID NO: 235893 - DNA, 25 bp, Homo sapien
tatagatgagttagatggaattctg

SEQ ID NO: 235894 - DNA, 25 bp, Homo sapien
ctaaagcatggaaagtcaggtaaac

SEQ ID NO: 235895 - DNA, 25 bp, Homo sapien
gctatgcataagttaacccactaag

SEQ ID NO: 235896 - DNA, 25 bp, Homo sapien
tccagttcctaggaccttcaggagc

SEQ ID NO: 235897 - DNA, 25 bp, Homo sapien
cctaggaccttcaggagctcaaaat

SEQ ID NO: 235898 - DNA, 25 bp, Homo sapien
ttctcagcatgtcctgtcaaattag

SEQ ID NO: 235899 - DNA, 25 bp, Homo sapien
aaattttctattcccaccttctcag

SEQ ID NO: 235900 - DNA, 25 bp, Homo sapien
ctcttccacctcaagtttctgatag

SEQ ID NO: 235901 - DNA, 25 bp, Homo sapien
cctcaagtttctgatagagtttaga

SEQ ID NO: 235902 - DNA, 25 bp, Homo sapien
ggcaagattccagtaaacaatctta

SEQ ID NO: 235903 - DNA, 25 bp, Homo sapien
ttgcttaagaatggcaagattccag

SEQ ID NO: 235904 - DNA, 25 bp, Homo sapien
tctcagaccctgtgaacatccatcc

SEQ ID NO: 235905 - DNA, 25 bp, Homo sapien
gcttgatgtcaaggcaatgccccca

SEQ ID NO: 235906 - DNA, 25 bp, Homo sapien
tccctatccttaagtgagcttgatg

SEQ ID NO: 235907 - DNA, 25 bp, Homo sapien
cccagtgtacctcccttcatataag

SEQ ID NO: 235908 - DNA, 25 bp, Homo sapien
caatgcccaccaaaggatgacctca

SEQ ID NO: 235909 - DNA, 25 bp, Homo sapien
tgtattctcctatgtcaatgcccac

SEQ ID NO: 235910 - DNA, 25 bp, Homo sapien
tgttctgtggataccagccagtctc

SEQ ID NO: 235911 - DNA, 25 bp, Homo sapien
gctagagctctctaaacaggcaaaa

SEQ ID NO: 235912 - DNA, 25 bp, Homo sapien
caagtcctcacactcgtaacactta

SEQ ID NO: 235913 - DNA, 25 bp, Homo sapien
ctcacactcgtaacacttaggatta

SEQ ID NO: 235914 - DNA, 25 bp, Homo sapien
agtcctcacactcgtaacacttagg

SEQ ID NO: 235915 - DNA, 25 bp, Homo sapien
tcctcacactcgtaacacttaggat

SEQ ID NO: 235916 - DNA, 25 bp, Homo sapien
gtaccttctgctgggtggacagtgg

SEQ ID NO: 235917 - DNA, 25 bp, Homo sapien
tgtaccttctgctgggtggacagtg

SEQ ID NO: 235918 - DNA, 25 bp, Homo sapien
gatcccagtggatattgtcaatttc

SEQ ID NO: 235919 - DNA, 25 bp, Homo sapien
ccagtggatattgtcaatttctaga

SEQ ID NO: 235920 - DNA, 25 bp, Homo sapien
ctgagatcccagtggatattgtcaa

SEQ ID NO: 235921 - DNA, 25 bp, Homo sapien
gagatcccagtggatattgtcaatt

SEQ ID NO: 235922 - DNA, 25 bp, Homo sapien
ccgtttaagcttttgtgccttcaca

SEQ ID NO: 235923 - DNA, 25 bp, Homo sapien
tgtactagtggacacctgaatcctg

SEQ ID NO: 235924 - DNA, 25 bp, Homo sapien
tataggcaatctcagtagaaataac

SEQ ID NO: 235925 - DNA, 25 bp, Homo sapien
gaactgacggacagagctaactttc

SEQ ID NO: 235926 - DNA, 25 bp, Homo sapien
aaaaaccttcaacgctcacaaacat

SEQ ID NO: 235927 - DNA, 25 bp, Homo sapien
tcaaaaaccttcaacgctcacaaac

SEQ ID NO: 235928 - DNA, 25 bp, Homo sapien
aaaccttcaacgctcacaaacatat

SEQ ID NO: 235929 - DNA, 25 bp, Homo sapien
caaaaaccttcaacgctcacaaaca

SEQ ID NO: 235930 - DNA, 25 bp, Homo sapien
tgctcgttagttccttttacctgga

SEQ ID NO: 235931 - DNA, 25 bp, Homo sapien
cgtaagcgctgaagcctgctcgtta

SEQ ID NO: 235932 - DNA, 25 bp, Homo sapien
gaagcctgctcgttagttcctttta

SEQ ID NO: 235933 - DNA, 25 bp, Homo sapien
agaacgtaagcgctgaagcctgctc

SEQ ID NO: 235934 - DNA, 25 bp, Homo sapien
cctgacaggacgcagacacacgtgt

SEQ ID NO: 235935 - DNA, 25 bp, Homo sapien
ctgacaggacgcagacacacgtgtg

SEQ ID NO: 235936 - DNA, 25 bp, Homo sapien
ccgccgtccgcgctggtccccgcgg

SEQ ID NO: 235937 - DNA, 25 bp, Homo sapien
cagctcgtgcttgacagtgaggagc

SEQ ID NO: 235938 - DNA, 25 bp, Homo sapien
tccgcagctcgtgcttgacagtgag

SEQ ID NO: 235939 - DNA, 25 bp, Homo sapien
cagtccgcagctcgtgcttgacagt

SEQ ID NO: 235940 - DNA, 25 bp, Homo sapien
ggcgggcaccgctagtaccgcgcaa

SEQ ID NO: 235941 - DNA, 25 bp, Homo sapien
aggagacagcggacgcccgtcccct

SEQ ID NO: 235942 - DNA, 25 bp, Homo sapien
aagacgagtctctttcccgctctgg

SEQ ID NO: 235943 - DNA, 25 bp, Homo sapien
ctccagaactcggacgcaaagacga

SEQ ID NO: 235944 - DNA, 25 bp, Homo sapien
cctatgtcagactgtgatgtgagca

SEQ ID NO: 235945 - DNA, 25 bp, Homo sapien
ttcaggcctgaccagaaaactcctt

SEQ ID NO: 235946 - DNA, 25 bp, Homo sapien
tacaccgttttaggcataagctagt

SEQ ID NO: 235947 - DNA, 25 bp, Homo sapien
tgggaggactctgaacccctgagtt

SEQ ID NO: 235948 - DNA, 25 bp, Homo sapien
tggaaaatgattaaaggcaggctga

SEQ ID NO: 235949 - DNA, 25 bp, Homo sapien
gaagttcctgttggtatcagcttca

SEQ ID NO: 235950 - DNA, 25 bp, Homo sapien
tgacaattaattgcaagcctcttcc

SEQ ID NO: 235951 - DNA, 25 bp, Homo sapien
catgttctgtaaggttgaagccagc

SEQ ID NO: 235952 - DNA, 25 bp, Homo sapien
taatccttagctttggtctgctcca

SEQ ID NO: 235953 - DNA, 25 bp, Homo sapien
ttagctttggtctgctccactccaa

SEQ ID NO: 235954 - DNA, 25 bp, Homo sapien
tccttagctttggtctgctccactc

SEQ ID NO: 235955 - DNA, 25 bp, Homo sapien
tataatccttagctttggtctgctc

SEQ ID NO: 235956 - DNA, 25 bp, Homo sapien
tcctgcagggcgaatccacccattt

SEQ ID NO: 235957 - DNA, 25 bp, Homo sapien
catcctgcagggcgaatccacccat

SEQ ID NO: 235958 - DNA, 25 bp, Homo sapien
tgcagggcgaatccacccatttccc

SEQ ID NO: 235959 - DNA, 25 bp, Homo sapien
tgcatcctgcagggcgaatccaccc

SEQ ID NO: 235960 - DNA, 25 bp, Homo sapien
caaattccagatattagggtctgtc

SEQ ID NO: 235961 - DNA, 25 bp, Homo sapien
tggctaccttgcaccacttgagagg

SEQ ID NO: 235962 - DNA, 25 bp, Homo sapien
aattgatgttaagaaagatccaggc

SEQ ID NO: 235963 - DNA, 25 bp, Homo sapien
tacttaggacacttgattgcaattg

SEQ ID NO: 235964 - DNA, 25 bp, Homo sapien
atattctggatggtaattattccat

SEQ ID NO: 235965 - DNA, 25 bp, Homo sapien
gctaacagtgcataatcttttcata

SEQ ID NO: 235966 - DNA, 25 bp, Homo sapien
ccagctaacagtgcataatcttttc

SEQ ID NO: 235967 - DNA, 25 bp, Homo sapien
ttattgattaatgagagttctttat

SEQ ID NO: 235968 - DNA, 25 bp, Homo sapien
tcttgaacctctatatcacccttca

SEQ ID NO: 235969 - DNA, 25 bp, Homo sapien
cacagagaatggggggacaatatac

SEQ ID NO: 235970 - DNA, 25 bp, Homo sapien
tggggttgatggtcatccacagaga

SEQ ID NO: 235971 - DNA, 25 bp, Homo sapien
ttgaacctctatatcacccttcagc

SEQ ID NO: 235972 - DNA, 25 bp, Homo sapien
ggtccaagaataacataaatgcaat

SEQ ID NO: 235973 - DNA, 25 bp, Homo sapien
tttgcgttaggaatttctcatcaga

SEQ ID NO: 235974 - DNA, 25 bp, Homo sapien
tgcagctcccgaggaatggaaagct

SEQ ID NO: 235975 - DNA, 25 bp, Homo sapien
aagttgacacgatgcccttcacact

SEQ ID NO: 235976 - DNA, 25 bp, Homo sapien
gctatgtgaggctgaatctgctgcc

SEQ ID NO: 235977 - DNA, 25 bp, Homo sapien
cgacaatcctgctagtaaacactgg

SEQ ID NO: 235978 - DNA, 25 bp, Homo sapien
ttggtgcagcacaaagtccggagtg

SEQ ID NO: 235979 - DNA, 25 bp, Homo sapien
catgttccgtgtgagcagagtccct

SEQ ID NO: 235980 - DNA, 25 bp, Homo sapien
taaacactggtcttcggtgagcaac

SEQ ID NO: 235981 - DNA, 25 bp, Homo sapien
tgcggcatctcacggctcagtgaag

SEQ ID NO: 235982 - DNA, 25 bp, Homo sapien
gagagaagccctcaccatggtaaag

SEQ ID NO: 235983 - DNA, 25 bp, Homo sapien
gattgagattgtaccccgacgtttc

SEQ ID NO: 235984 - DNA, 25 bp, Homo sapien
tgcagagttccatgtagcgagggcc

SEQ ID NO: 235985 - DNA, 25 bp, Homo sapien
ccagttactttgctttatttgcaga

SEQ ID NO: 235986 - DNA, 25 bp, Homo sapien
ccagtctgtatcagtgggaagccag

SEQ ID NO: 235987 - DNA, 25 bp, Homo sapien
gagtcaacacatgtagacttggcaa

SEQ ID NO: 235988 - DNA, 25 bp, Homo sapien
tcttgacagtaaatgagactgccct

SEQ ID NO: 235989 - DNA, 25 bp, Homo sapien
gggctacataaatccattacagagt

SEQ ID NO: 235990 - DNA, 25 bp, Homo sapien
ccagtaaaatcctggactgagttgc

SEQ ID NO: 235991 - DNA, 25 bp, Homo sapien
gactgagttgcatgggctcttcttg

SEQ ID NO: 235992 - DNA, 25 bp, Homo sapien
gtgtggccatttctgccgccttcaa

SEQ ID NO: 235993 - DNA, 25 bp, Homo sapien
tgccgccttcaaacttggtcacttc

SEQ ID NO: 235994 - DNA, 25 bp, Homo sapien
ggaagagaacctccccaagtcatcg

SEQ ID NO: 235995 - DNA, 25 bp, Homo sapien
tgggcatccccgatgaaagggctaa

SEQ ID NO: 235996 - DNA, 25 bp, Homo sapien
aaaggatcaacctcttcaaggctgg

SEQ ID NO: 235997 - DNA, 25 bp, Homo sapien
ggttctgaagaactcgagtcccagg

SEQ ID NO: 235998 - DNA, 25 bp, Homo sapien
gaaggctcaggcctcacgtggagcc

SEQ ID NO: 235999 - DNA, 25 bp, Homo sapien
gctgaaggctcaggcctcacgtgga

SEQ ID NO: 236000 - DNA, 25 bp, Homo sapien
gcctcacgtggagccacccgcggag

SEQ ID NO: 236001 - DNA, 25 bp, Homo sapien
aggctcaggcctcacgtggagccac

SEQ ID NO: 236002 - DNA, 25 bp, Homo sapien
ccgaccctggcgagttaggggtctg

SEQ ID NO: 236003 - DNA, 25 bp, Homo sapien
aaggccgggtggagcttggtcaaca

SEQ ID NO: 236004 - DNA, 25 bp, Homo sapien
ccctggcgagttaggggtctggaag

SEQ ID NO: 236005 - DNA, 25 bp, Homo sapien
ttggtcaacagctcgggctcctcac

SEQ ID NO: 236006 - DNA, 25 bp, Homo sapien
tagtgctcaaagcacacgcggtgct

SEQ ID NO: 236007 - DNA, 25 bp, Homo sapien
gatgacctcctcgtgcatcaggaag

SEQ ID NO: 236008 - DNA, 25 bp, Homo sapien
tgttctcgtacaggaggatgccgca

SEQ ID NO: 236009 - DNA, 25 bp, Homo sapien
tacagctcatcgaggagttgtctgc

SEQ ID NO: 236010 - DNA, 25 bp, Homo sapien
tttgggcctgaaggggccacactcc

SEQ ID NO: 236011 - DNA, 25 bp, Homo sapien
ggcctgaaggggccacactcctcat

SEQ ID NO: 236012 - DNA, 25 bp, Homo sapien
ctttgggcctgaaggggccacactc

SEQ ID NO: 236013 - DNA, 25 bp, Homo sapien
tgggcctgaaggggccacactcctc

SEQ ID NO: 236014 - DNA, 25 bp, Homo sapien
gggctcagggactgggcctgtctct

SEQ ID NO: 236015 - DNA, 25 bp, Homo sapien
ggactgggcctgtctctccaccgcc

SEQ ID NO: 236016 - DNA, 25 bp, Homo sapien
ggctcagggactgggcctgtctctc

SEQ ID NO: 236017 - DNA, 25 bp, Homo sapien
ctgggcctgtctctccaccgccatc

SEQ ID NO: 236018 - DNA, 25 bp, Homo sapien
ggcatcgctggtggtgggcaagacc

SEQ ID NO: 236019 - DNA, 25 bp, Homo sapien
agaaggtggttcaagctctaccaag

SEQ ID NO: 236020 - DNA, 25 bp, Homo sapien
tatagaaggtggttcaagctctacc

SEQ ID NO: 236021 - DNA, 25 bp, Homo sapien
ctgtttatagaaggtggttcaagct

SEQ ID NO: 236022 - DNA, 25 bp, Homo sapien
ttatgagcatgtgcctaccctgagc

SEQ ID NO: 236023 - DNA, 25 bp, Homo sapien
tgctgcagggtagcttacgtctccc

SEQ ID NO: 236024 - DNA, 25 bp, Homo sapien
tgctcccttggtgtagcaagtaagg

SEQ ID NO: 236025 - DNA, 25 bp, Homo sapien
tgggtcacataccaagatgctgcag

SEQ ID NO: 236026 - DNA, 25 bp, Homo sapien
caaatggtcccctatccagggccgt

SEQ ID NO: 236027 - DNA, 25 bp, Homo sapien
atctgcccgcaggaagataaaatcc

SEQ ID NO: 236028 - DNA, 25 bp, Homo sapien
ccagcaatacacaacggtgggtttg

SEQ ID NO: 236029 - DNA, 25 bp, Homo sapien
gaacagctgaagtccgtgatcccaa

SEQ ID NO: 236030 - DNA, 25 bp, Homo sapien
tacttctgagttgcggaagtgtggc

SEQ ID NO: 236031 - DNA, 25 bp, Homo sapien
cgtgctacttctgagttgcggaagt

SEQ ID NO: 236032 - DNA, 25 bp, Homo sapien
cagtagcgtgcatttagacacacgt

SEQ ID NO: 236033 - DNA, 25 bp, Homo sapien
tcagcttgttgtggtgcagtagcgt

SEQ ID NO: 236034 - DNA, 25 bp, Homo sapien
gccgtctacaccatcatcgtctata

SEQ ID NO: 236035 - DNA, 25 bp, Homo sapien
ccgtctacaccatcatcgtctatac

SEQ ID NO: 236036 - DNA, 25 bp, Homo sapien
tcctggtgctgaaccggggacttgc

SEQ ID NO: 236037 - DNA, 25 bp, Homo sapien
cctggtgctgaaccggggacttgca

SEQ ID NO: 236038 - DNA, 25 bp, Homo sapien
gtgctgaaccggggacttgcagcca

SEQ ID NO: 236039 - DNA, 25 bp, Homo sapien
ctgaaccggggacttgcagccagga

SEQ ID NO: 236040 - DNA, 25 bp, Homo sapien
acttccactgttgagctcaggaatt

SEQ ID NO: 236041 - DNA, 25 bp, Homo sapien
gcagtgagccagctctcccctcatc

SEQ ID NO: 236042 - DNA, 25 bp, Homo sapien
cagatctgggggatgtaaaggccca

SEQ ID NO: 236043 - DNA, 25 bp, Homo sapien
gccagctctcccctcatcggtggca

SEQ ID NO: 236044 - DNA, 25 bp, Homo sapien
tcggaatggccggtgcggccgggct

SEQ ID NO: 236045 - DNA, 25 bp, Homo sapien
gccgcggagccagccgagggggcgg

SEQ ID NO: 236046 - DNA, 25 bp, Homo sapien
caggtggccgcggagccagccgagg

SEQ ID NO: 236047 - DNA, 25 bp, Homo sapien
tggccgcggagccagccgagggggc

SEQ ID NO: 236048 - DNA, 25 bp, Homo sapien
ggtggccgcggagccagccgagggg

SEQ ID NO: 236049 - DNA, 25 bp, Homo sapien
ggaacgcagggccaagttgtgctcc

SEQ ID NO: 236050 - DNA, 25 bp, Homo sapien
cacgcagccctgagtgagggtccat

SEQ ID NO: 236051 - DNA, 25 bp, Homo sapien
cttgccagcgcgcacgcagatggcg

SEQ ID NO: 236052 - DNA, 25 bp, Homo sapien
agggccaagttgtgctccgattcca

SEQ ID NO: 236053 - DNA, 25 bp, Homo sapien
cctgcctttcacgctgaccacagcc

SEQ ID NO: 236054 - DNA, 25 bp, Homo sapien
ccctgcctttcacgctgaccacagc

SEQ ID NO: 236055 - DNA, 25 bp, Homo sapien
gccctgcctttcacgctgaccacag

SEQ ID NO: 236056 - DNA, 25 bp, Homo sapien
ctgcctttcacgctgaccacagccc

SEQ ID NO: 236057 - DNA, 25 bp, Homo sapien
tgagccaggacttgacaggagttct

SEQ ID NO: 236058 - DNA, 25 bp, Homo sapien
tgtcagttgccagatcgaggactct

SEQ ID NO: 236059 - DNA, 25 bp, Homo sapien
ttcctgtgtccttagtgcctgtgca

SEQ ID NO: 236060 - DNA, 25 bp, Homo sapien
gcctcgtcttatctctctaggaaag

SEQ ID NO: 236061 - DNA, 25 bp, Homo sapien
agcttgggctgttgccaaaatacag

SEQ ID NO: 236062 - DNA, 25 bp, Homo sapien
tacaggtgcctaaacatatccagtg

SEQ ID NO: 236063 - DNA, 25 bp, Homo sapien
aaatacagacttgggcatttctggc

SEQ ID NO: 236064 - DNA, 25 bp, Homo sapien
ttacttaaagatctggaactggcca

SEQ ID NO: 236065 - DNA, 25 bp, Homo sapien
cagaaattatctcccacattgggct

SEQ ID NO: 236066 - DNA, 25 bp, Homo sapien
tatctcccacattgggctgggctcc

SEQ ID NO: 236067 - DNA, 25 bp, Homo sapien
tctgtctcgcccacagaaattatct

SEQ ID NO: 236068 - DNA, 25 bp, Homo sapien
taataactatctgtctcgcccacag

SEQ ID NO: 236069 - DNA, 25 bp, Homo sapien
ccccagtgccagtgatgtttgcatc

SEQ ID NO: 236070 - DNA, 25 bp, Homo sapien
agtgccagtgatgtttgcatccatt

SEQ ID NO: 236071 - DNA, 25 bp, Homo sapien
acccccagtgccagtgatgtttgca

SEQ ID NO: 236072 - DNA, 25 bp, Homo sapien
ccagtgccagtgatgtttgcatcca

SEQ ID NO: 236073 - DNA, 25 bp, Homo sapien
gtcccgggtgcaggaagcgcggccg

SEQ ID NO: 236074 - DNA, 25 bp, Homo sapien
cgctgaaggtcagccgttcccgggt

SEQ ID NO: 236075 - DNA, 25 bp, Homo sapien
actcacctctgtcgggtcccgggtg

SEQ ID NO: 236076 - DNA, 25 bp, Homo sapien
ttattccacagattggatttgaatt

SEQ ID NO: 236077 - DNA, 25 bp, Homo sapien
ctgggcccgcgggagggagtggccg

SEQ ID NO: 236078 - DNA, 25 bp, Homo sapien
tgggcccgcgggagggagtggccgc

SEQ ID NO: 236079 - DNA, 25 bp, Homo sapien
gagggagtggccgcggggacggcgc

SEQ ID NO: 236080 - DNA, 25 bp, Homo sapien
tctgtcattcccctggcggactctt

SEQ ID NO: 236081 - DNA, 25 bp, Homo sapien
gatggagaggtgacgggcttgcccc

SEQ ID NO: 236082 - DNA, 25 bp, Homo sapien
ggatggagaggtgacgggcttgccc

SEQ ID NO: 236083 - DNA, 25 bp, Homo sapien
gtcattcccctggcggactctttct

SEQ ID NO: 236084 - DNA, 25 bp, Homo sapien
acccctctccctgaggcctttcatg

SEQ ID NO: 236085 - DNA, 25 bp, Homo sapien
ctggtacccctctccctgaggcctt

SEQ ID NO: 236086 - DNA, 25 bp, Homo sapien
gtacccctctccctgaggcctttca

SEQ ID NO: 236087 - DNA, 25 bp, Homo sapien
ccctctccctgaggcctttcatggg

SEQ ID NO: 236088 - DNA, 25 bp, Homo sapien
agcagggtcttagcgttgaaagcag

SEQ ID NO: 236089 - DNA, 25 bp, Homo sapien
ggtgagcagggtcttagcgttgaaa

SEQ ID NO: 236090 - DNA, 25 bp, Homo sapien
ccacaggatcccatggtactgctga

SEQ ID NO: 236091 - DNA, 25 bp, Homo sapien
gagggggcgtgatccagggtgctct

SEQ ID NO: 236092 - DNA, 25 bp, Homo sapien
tccacaagcgctccctttgtaggga

SEQ ID NO: 236093 - DNA, 25 bp, Homo sapien
gacgtgtgatatgtgggatgtgagg

SEQ ID NO: 236094 - DNA, 25 bp, Homo sapien
ctcaggtccaggatgtgacgtgtga

SEQ ID NO: 236095 - DNA, 25 bp, Homo sapien
cctgaaggtcaggagacgctgggct

SEQ ID NO: 236096 - DNA, 25 bp, Homo sapien
ctgtctctggttgcacgtgtaacag

SEQ ID NO: 236097 - DNA, 25 bp, Homo sapien
tggttgcacgtgtaacagcttcccc

SEQ ID NO: 236098 - DNA, 25 bp, Homo sapien
tctctggttgcacgtgtaacagctt

SEQ ID NO: 236099 - DNA, 25 bp, Homo sapien
tctggttgcacgtgtaacagcttcc

SEQ ID NO: 236100 - DNA, 25 bp, Homo sapien
gcctgagcctcgtaagcctgttgtg

SEQ ID NO: 236101 - DNA, 25 bp, Homo sapien
gtttgcgagctcaaccacgagacag

SEQ ID NO: 236102 - DNA, 25 bp, Homo sapien
tgtttgcagaaaagtgagccaggga

SEQ ID NO: 236103 - DNA, 25 bp, Homo sapien
ttcccgacagaagagagtgactccc

SEQ ID NO: 236104 - DNA, 25 bp, Homo sapien
gagacgctccctcgactgcagtcct

SEQ ID NO: 236105 - DNA, 25 bp, Homo sapien
acggtctgcggatccccgccgggct

SEQ ID NO: 236106 - DNA, 25 bp, Homo sapien
ggaggccggactgctctttgagacg

SEQ ID NO: 236107 - DNA, 25 bp, Homo sapien
tggggagccaaatcgggagaccgac

SEQ ID NO: 236108 - DNA, 25 bp, Homo sapien
tgggggcgccttgggcttggtcctg

SEQ ID NO: 236109 - DNA, 25 bp, Homo sapien
agggagaagcgcctcgtgtccagcg

SEQ ID NO: 236110 - DNA, 25 bp, Homo sapien
tgggctcttggccggaagcccctca

SEQ ID NO: 236111 - DNA, 25 bp, Homo sapien
gggaccccgtctccctctgagaggc

SEQ ID NO: 236112 - DNA, 25 bp, Homo sapien
ctcaaggaggcactgcggctggcag

SEQ ID NO: 236113 - DNA, 25 bp, Homo sapien
cccgctggcccggagaaggtcagct

SEQ ID NO: 236114 - DNA, 25 bp, Homo sapien
gactcctgtttgcaggcctctggcc

SEQ ID NO: 236115 - DNA, 25 bp, Homo sapien
ctgaaggcccggctcaaggaggcac

SEQ ID NO: 236116 - DNA, 25 bp, Homo sapien
gggcctcggcctcagtcagtctgaa

SEQ ID NO: 236117 - DNA, 25 bp, Homo sapien
tcagtcagtctgaagtttggcttta

SEQ ID NO: 236118 - DNA, 25 bp, Homo sapien
tcggcctcagtcagtctgaagtttg

SEQ ID NO: 236119 - DNA, 25 bp, Homo sapien
cctgtctcggggccacgctgggtgg

SEQ ID NO: 236120 - DNA, 25 bp, Homo sapien
cattttgacggtgggggccacaaag

SEQ ID NO: 236121 - DNA, 25 bp, Homo sapien
cttcagcggcctcccctccgaggtg

SEQ ID NO: 236122 - DNA, 25 bp, Homo sapien
ggatcgctggcctttcggaagtagt

SEQ ID NO: 236123 - DNA, 25 bp, Homo sapien
ggtcatcccggcaactgggagtgtc

SEQ ID NO: 236124 - DNA, 25 bp, Homo sapien
tgagggttgggtgggtccttggagc

SEQ ID NO: 236125 - DNA, 25 bp, Homo sapien
tggctaaggcagcatgggaccacca

SEQ ID NO: 236126 - DNA, 25 bp, Homo sapien
ctgccttctccgaggcacatgtgcc

SEQ ID NO: 236127 - DNA, 25 bp, Homo sapien
tgggaccgcagttcctgcctgcctt

SEQ ID NO: 236128 - DNA, 25 bp, Homo sapien
taaagatgcaaattctcagcgagcc

SEQ ID NO: 236129 - DNA, 25 bp, Homo sapien
ttagaccgctaacttctcgagggca

SEQ ID NO: 236130 - DNA, 25 bp, Homo sapien
cagacgattcaaacgcacgcctgag

SEQ ID NO: 236131 - DNA, 25 bp, Homo sapien
tctctcgtgtcaactgcaaggctgg

SEQ ID NO: 236132 - DNA, 25 bp, Homo sapien
cagtggtgcaatgtcagcttactgc

SEQ ID NO: 236133 - DNA, 25 bp, Homo sapien
atgtcagcttactgcaacctccgcc

SEQ ID NO: 236134 - DNA, 25 bp, Homo sapien
tcccggtttcaaatgattctcctgc

SEQ ID NO: 236135 - DNA, 25 bp, Homo sapien
tcgctctgtcgctcaagatggagtg

SEQ ID NO: 236136 - DNA, 25 bp, Homo sapien
cgagcagggccgcactccgacgtag

SEQ ID NO: 236137 - DNA, 25 bp, Homo sapien
gggatcaggtcttcgctgctgaagc

SEQ ID NO: 236138 - DNA, 25 bp, Homo sapien
gccgagggcgttgcgtcccggtgtg

SEQ ID NO: 236139 - DNA, 25 bp, Homo sapien
tgcgtcccggtgtgctggcttcccg

SEQ ID NO: 236140 - DNA, 25 bp, Homo sapien
ttctactgctctctaagctacttgg

SEQ ID NO: 236141 - DNA, 25 bp, Homo sapien
tgagctgttgctggatgtgtttcta

SEQ ID NO: 236142 - DNA, 25 bp, Homo sapien
ctctctaagctacttggccgcgaca

SEQ ID NO: 236143 - DNA, 25 bp, Homo sapien
cttttaggttaagaggtgagctgtt

SEQ ID NO: 236144 - DNA, 25 bp, Homo sapien
ggaaatctcacacagaacgccagta

SEQ ID NO: 236145 - DNA, 25 bp, Homo sapien
tgaccaggtatatcccagatgagcc

SEQ ID NO: 236146 - DNA, 25 bp, Homo sapien
tctggaacacatgtggacagccgag

SEQ ID NO: 236147 - DNA, 25 bp, Homo sapien
cacatgtaagggcacgcacctgaag

SEQ ID NO: 236148 - DNA, 25 bp, Homo sapien
taagtagaagctacacgctcagccc

SEQ ID NO: 236149 - DNA, 25 bp, Homo sapien
ctggaagggtgcttgaaggcatgaa

SEQ ID NO: 236150 - DNA, 25 bp, Homo sapien
ccagaactgtgatgcttgggaggta

SEQ ID NO: 236151 - DNA, 25 bp, Homo sapien
aggtagcgaattccccaccactgga

SEQ ID NO: 236152 - DNA, 25 bp, Homo sapien
ctgtggttggggacctcaaactcca

SEQ ID NO: 236153 - DNA, 25 bp, Homo sapien
ctgcctgtggttggggacctcaaac

SEQ ID NO: 236154 - DNA, 25 bp, Homo sapien
tgcctgtggttggggacctcaaact

SEQ ID NO: 236155 - DNA, 25 bp, Homo sapien
gcctgtggttggggacctcaaactc

SEQ ID NO: 236156 - DNA, 25 bp, Homo sapien
tcatggccagatcggtggaggcatc

SEQ ID NO: 236157 - DNA, 25 bp, Homo sapien
tggaggcatctgtgcggtcaaggct

SEQ ID NO: 236158 - DNA, 25 bp, Homo sapien
ctgaagttgagcaagtccgggagcc

SEQ ID NO: 236159 - DNA, 25 bp, Homo sapien
gagcctcgctttggttttagatccc

SEQ ID NO: 236160 - DNA, 25 bp, Homo sapien
caggctgggaaaccacaccatggcc

SEQ ID NO: 236161 - DNA, 25 bp, Homo sapien
gaaaccacaccatggcctagaagca

SEQ ID NO: 236162 - DNA, 25 bp, Homo sapien
gaagaggacattgagaaatgaggct

SEQ ID NO: 236163 - DNA, 25 bp, Homo sapien
ctgggaaaccacaccatggcctaga

SEQ ID NO: 236164 - DNA, 25 bp, Homo sapien
aatctctaacttttctaccatgaac

SEQ ID NO: 236165 - DNA, 25 bp, Homo sapien
gaaatctctaacttttctaccatga

SEQ ID NO: 236166 - DNA, 25 bp, Homo sapien
cttgtgtcttgtgcttttctgaaat

SEQ ID NO: 236167 - DNA, 25 bp, Homo sapien
gtcttgtgcttttctgaaatctcta

SEQ ID NO: 236168 - DNA, 25 bp, Homo sapien
cggaaaaggcccacaactcagtgct

SEQ ID NO: 236169 - DNA, 25 bp, Homo sapien
gatgtcggaggaagaccagaaccgc

SEQ ID NO: 236170 - DNA, 25 bp, Homo sapien
gaaccgcaggcgtttagagagagct

SEQ ID NO: 236171 - DNA, 25 bp, Homo sapien
cacgctggctactttaagcttgaaa

SEQ ID NO: 236172 - DNA, 25 bp, Homo sapien
cctggcccaaggacatgtgcacgta

SEQ ID NO: 236173 - DNA, 25 bp, Homo sapien
tgttgagtgcacctgggatctccct

SEQ ID NO: 236174 - DNA, 25 bp, Homo sapien
aattcgaagtggtggccctgtaccg

SEQ ID NO: 236175 - DNA, 25 bp, Homo sapien
tgcaggcctgggataaataatctcc

SEQ ID NO: 236176 - DNA, 25 bp, Homo sapien
cactcagagggtagcctgtcgctgg

SEQ ID NO: 236177 - DNA, 25 bp, Homo sapien
tctctatggtacctgcacgaatgtc

SEQ ID NO: 236178 - DNA, 25 bp, Homo sapien
cgaatgtcagctttggatattgaga

SEQ ID NO: 236179 - DNA, 25 bp, Homo sapien
acaacaaaagtggttgggcgtggca

SEQ ID NO: 236180 - DNA, 25 bp, Homo sapien
gatattgagatatctgcccggctac

SEQ ID NO: 236181 - DNA, 25 bp, Homo sapien
cctgtgatctgagcggctgagaggc

SEQ ID NO: 236182 - DNA, 25 bp, Homo sapien
gtgggcgtcgcgctcttctgcacag

SEQ ID NO: 236183 - DNA, 25 bp, Homo sapien
gatgagtttgactaaggctttggct

SEQ ID NO: 236184 - DNA, 25 bp, Homo sapien
tgtccacggtggattttaagcgttc

SEQ ID NO: 236185 - DNA, 25 bp, Homo sapien
gtccctggttccctaacatgggctg

SEQ ID NO: 236186 - DNA, 25 bp, Homo sapien
ctggttagaagtagatgtttaggac

SEQ ID NO: 236187 - DNA, 25 bp, Homo sapien
ctggttccctaacatgggctgggat

SEQ ID NO: 236188 - DNA, 25 bp, Homo sapien
agtgggtccctggttccctaacatg

SEQ ID NO: 236189 - DNA, 25 bp, Homo sapien
tcaggacaatgacgctcatgaccat

SEQ ID NO: 236190 - DNA, 25 bp, Homo sapien
gtggggttcaggacaatgacgctca

SEQ ID NO: 236191 - DNA, 25 bp, Homo sapien
ggttcaggacaatgacgctcatgac

SEQ ID NO: 236192 - DNA, 25 bp, Homo sapien
gggttcaggacaatgacgctcatga

SEQ ID NO: 236193 - DNA, 25 bp, Homo sapien
tccttatgtcttcgtaaggcattta

SEQ ID NO: 236194 - DNA, 25 bp, Homo sapien
atgtcttcgtaaggcatttaatttg

SEQ ID NO: 236195 - DNA, 25 bp, Homo sapien
tttccttatgtcttcgtaaggcatt

SEQ ID NO: 236196 - DNA, 25 bp, Homo sapien
cttatgtcttcgtaaggcatttaat

SEQ ID NO: 236197 - DNA, 25 bp, Homo sapien
tcattctcgaagctgccaaggtcct

SEQ ID NO: 236198 - DNA, 25 bp, Homo sapien
tgccagggaccaaagagatatctct

SEQ ID NO: 236199 - DNA, 25 bp, Homo sapien
tatctcttgaatcttgggcgggctc

SEQ ID NO: 236200 - DNA, 25 bp, Homo sapien
catattaacaacacctgggcagtga

SEQ ID NO: 236201 - DNA, 25 bp, Homo sapien
tgcttctgctcctcatggtactgct

SEQ ID NO: 236202 - DNA, 25 bp, Homo sapien
aagcatctggttctgctggctcaac

SEQ ID NO: 236203 - DNA, 25 bp, Homo sapien
ctcaacagctggatctggctcagga

SEQ ID NO: 236204 - DNA, 25 bp, Homo sapien
tcatggtactgctccttgttctcca

SEQ ID NO: 236205 - DNA, 25 bp, Homo sapien
tccagctgcgcgttgttcagtgagg

SEQ ID NO: 236206 - DNA, 25 bp, Homo sapien
gctccttggtgtgggcgtgcagctc

SEQ ID NO: 236207 - DNA, 25 bp, Homo sapien
ccagcttggtcagcgagatgtccat

SEQ ID NO: 236208 - DNA, 25 bp, Homo sapien
tgctccttcagctcgtcgaagcggg

SEQ ID NO: 236209 - DNA, 25 bp, Homo sapien
gccttgcgcttcagcatgtcaccgt

SEQ ID NO: 236210 - DNA, 25 bp, Homo sapien
agcgcctctcgctcagtggtcaaga

SEQ ID NO: 236211 - DNA, 25 bp, Homo sapien
cgcccatggcgagggcgtttgtcct

SEQ ID NO: 236212 - DNA, 25 bp, Homo sapien
agcctctggttctcgcccatggcga

SEQ ID NO: 236213 - DNA, 25 bp, Homo sapien
gattccgatgcagtgtctttaggca

SEQ ID NO: 236214 - DNA, 25 bp, Homo sapien
ctgcgctctgggaactcagcgtgga

SEQ ID NO: 236215 - DNA, 25 bp, Homo sapien
tctccgtctccttggccgtgtggtg

SEQ ID NO: 236216 - DNA, 25 bp, Homo sapien
tcgtaggccgctgtaagttgctcct

SEQ ID NO: 236217 - DNA, 25 bp, Homo sapien
gtttctgcagtgtcaagatctggct

SEQ ID NO: 236218 - DNA, 25 bp, Homo sapien
tgaaggtcacgttctgggtctccag

SEQ ID NO: 236219 - DNA, 25 bp, Homo sapien
agtgtcaagatctggctgctgaagg

SEQ ID NO: 236220 - DNA, 25 bp, Homo sapien
gtctgcagtgtggtgttgtgctcct

SEQ ID NO: 236221 - DNA, 25 bp, Homo sapien
tcgatggcccggtccttcactcgga

SEQ ID NO: 236222 - DNA, 25 bp, Homo sapien
cttcccctggtgactggcggctgtc

SEQ ID NO: 236223 - DNA, 25 bp, Homo sapien
tccttcactcggagaagctccatgg

SEQ ID NO: 236224 - DNA, 25 bp, Homo sapien
catggtggcttccttatggccgggc

SEQ ID NO: 236225 - DNA, 25 bp, Homo sapien
tgagggtctcacactccttctttag

SEQ ID NO: 236226 - DNA, 25 bp, Homo sapien
tggttctgcctgagggtctcacact

SEQ ID NO: 236227 - DNA, 25 bp, Homo sapien
ctctccctggttctgcctgagggtc

SEQ ID NO: 236228 - DNA, 25 bp, Homo sapien
ccctggttctgcctgagggtctcac

SEQ ID NO: 236229 - DNA, 25 bp, Homo sapien
gatttaggctcgctttctcttccat

SEQ ID NO: 236230 - DNA, 25 bp, Homo sapien
ttttcttctttcatggctagtgttg

SEQ ID NO: 236231 - DNA, 25 bp, Homo sapien
gcagctcactctctaactggcgatt

SEQ ID NO: 236232 - DNA, 25 bp, Homo sapien
tctgtgcttctaagagcacaatctt

SEQ ID NO: 236233 - DNA, 25 bp, Homo sapien
tgccgctgtcgtcctcctgcaacag

SEQ ID NO: 236234 - DNA, 25 bp, Homo sapien
tgttgaggccgaccttctccagttc

SEQ ID NO: 236235 - DNA, 25 bp, Homo sapien
agcagctccctgttgaggccgacct

SEQ ID NO: 236236 - DNA, 25 bp, Homo sapien
tgtcactgccgctgtcgtcctcctg

SEQ ID NO: 236237 - DNA, 25 bp, Homo sapien
ccagggatgctcttcccgaggaaag

SEQ ID NO: 236238 - DNA, 25 bp, Homo sapien
ggctacatgtcaggatggatctaat

SEQ ID NO: 236239 - DNA, 25 bp, Homo sapien
caatgaatgcacttgtccagccctc

SEQ ID NO: 236240 - DNA, 25 bp, Homo sapien
gtcccgcccgggtgtgagcaactgt

SEQ ID NO: 236241 - DNA, 25 bp, Homo sapien
tcaacggcggacagtttggcagtgc

SEQ ID NO: 236242 - DNA, 25 bp, Homo sapien
caccgtctggtggagggctttgttc

SEQ ID NO: 236243 - DNA, 25 bp, Homo sapien
tcagtgtccttgcatgcacggtgac

SEQ ID NO: 236244 - DNA, 25 bp, Homo sapien
gcagcgaccacatggctcggttgag

SEQ ID NO: 236245 - DNA, 25 bp, Homo sapien
ctctccagctgggtttgtaactttt

SEQ ID NO: 236246 - DNA, 25 bp, Homo sapien
tctccagctgggtttgtaacttttc

SEQ ID NO: 236247 - DNA, 25 bp, Homo sapien
ggtctccagatcttggttgctctgc

SEQ ID NO: 236248 - DNA, 25 bp, Homo sapien
agggtctccagatcttggttgctct

SEQ ID NO: 236249 - DNA, 25 bp, Homo sapien
gacatcagtcctacgaagtgaacca

SEQ ID NO: 236250 - DNA, 25 bp, Homo sapien
catcagtcctacgaagtgaaccatg

SEQ ID NO: 236251 - DNA, 25 bp, Homo sapien
agtgcagacatcagtcctacgaagt

SEQ ID NO: 236252 - DNA, 25 bp, Homo sapien
cagacatcagtcctacgaagtgaac

SEQ ID NO: 236253 - DNA, 25 bp, Homo sapien
agctccccgcacttgaggccgctct

SEQ ID NO: 236254 - DNA, 25 bp, Homo sapien
gcggctggacgcacattcgttcagc

SEQ ID NO: 236255 - DNA, 25 bp, Homo sapien
ctccagcttcaggatgcggctggac

SEQ ID NO: 236256 - DNA, 25 bp, Homo sapien
tcttgctgagctggtggttctcctt

SEQ ID NO: 236257 - DNA, 25 bp, Homo sapien
gacaagtctgcgttcttggacagct

SEQ ID NO: 236258 - DNA, 25 bp, Homo sapien
aattcgtttcttatctgtgtcccgg

SEQ ID NO: 236259 - DNA, 25 bp, Homo sapien
cagcagctcctcaattcgtttctta

SEQ ID NO: 236260 - DNA, 25 bp, Homo sapien
ttctgtgcaatctcaaggaccatgt

SEQ ID NO: 236261 - DNA, 25 bp, Homo sapien
agctcatggactttatcgccccggg

SEQ ID NO: 236262 - DNA, 25 bp, Homo sapien
caattccaggtcgtgaagcttggat

SEQ ID NO: 236263 - DNA, 25 bp, Homo sapien
cgggcccgagcagcagtcagctgtt

SEQ ID NO: 236264 - DNA, 25 bp, Homo sapien
aaaatgatattatcttctctcagct

SEQ ID NO: 236265 - DNA, 25 bp, Homo sapien
tcgggcaaggacaatggactttctc

SEQ ID NO: 236266 - DNA, 25 bp, Homo sapien
tttttaatcgggcaaggacaatgga

SEQ ID NO: 236267 - DNA, 25 bp, Homo sapien
taatcgggcaaggacaatggacttt

SEQ ID NO: 236268 - DNA, 25 bp, Homo sapien
gggcaaggacaatggactttctctg

SEQ ID NO: 236269 - DNA, 25 bp, Homo sapien
tgaggggcttggccattaagtctct

SEQ ID NO: 236270 - DNA, 25 bp, Homo sapien
ttccggccagcggacacagctttga

SEQ ID NO: 236271 - DNA, 25 bp, Homo sapien
agtctctggattcacctgcgtgccc

SEQ ID NO: 236272 - DNA, 25 bp, Homo sapien
tctggattcacctgcgtgccctcct

SEQ ID NO: 236273 - DNA, 25 bp, Homo sapien
tcccttgaacttcaccgaagacctg

SEQ ID NO: 236274 - DNA, 25 bp, Homo sapien
ccagcttcatggacatcccttgaac

SEQ ID NO: 236275 - DNA, 25 bp, Homo sapien
tcaccgaagacctgcctgtttttaa

SEQ ID NO: 236276 - DNA, 25 bp, Homo sapien
ttgaacttcaccgaagacctgcctg

SEQ ID NO: 236277 - DNA, 25 bp, Homo sapien
ttcctcctgaagatgactgagacct

SEQ ID NO: 236278 - DNA, 25 bp, Homo sapien
tcctcctgaagatgactgagacctc

SEQ ID NO: 236279 - DNA, 25 bp, Homo sapien
ggtgctggccaacaaccctttctgt

SEQ ID NO: 236280 - DNA, 25 bp, Homo sapien
gatgccaaggtctcagacatgcccg

SEQ ID NO: 236281 - DNA, 25 bp, Homo sapien
tgcagagatctattccacggtcccc

SEQ ID NO: 236282 - DNA, 25 bp, Homo sapien
gctcctacatcacaggatgccaagg

SEQ ID NO: 236283 - DNA, 25 bp, Homo sapien
ccttgtagaagtccacgtcgtgcag

SEQ ID NO: 236284 - DNA, 25 bp, Homo sapien
gcagggaatccagctcgtctcgata

SEQ ID NO: 236285 - DNA, 25 bp, Homo sapien
agcttctccttgcagcgggtcagct

SEQ ID NO: 236286 - DNA, 25 bp, Homo sapien
tctcgataggcacgagcagaccggg

SEQ ID NO: 236287 - DNA, 25 bp, Homo sapien
gtccacaagctgctctgtcttatcc

SEQ ID NO: 236288 - DNA, 25 bp, Homo sapien
tccacaagctgctctgtcttatcct

SEQ ID NO: 236289 - DNA, 25 bp, Homo sapien
ggagaaagagtgtgggaggcagctt

SEQ ID NO: 236290 - DNA, 25 bp, Homo sapien
tcttttcataagtttgcaacaccgg

SEQ ID NO: 236291 - DNA, 25 bp, Homo sapien
aactatgtccatccgccactcaggt

SEQ ID NO: 236292 - DNA, 25 bp, Homo sapien
gcaaaaatgttactgactcaaaatt

SEQ ID NO: 236293 - DNA, 25 bp, Homo sapien
gcaacaccggcccttaaactatgtc

SEQ ID NO: 236294 - DNA, 25 bp, Homo sapien
tggcagcaccacacatgtgagtcga

SEQ ID NO: 236295 - DNA, 25 bp, Homo sapien
gcaccacacatgtgagtcgacacca

SEQ ID NO: 236296 - DNA, 25 bp, Homo sapien
acacatgtgagtcgacaccacacca

SEQ ID NO: 236297 - DNA, 25 bp, Homo sapien
tgagtcgacaccacaccagaaacat

SEQ ID NO: 236298 - DNA, 25 bp, Homo sapien
ggtagtcccgttcctgagtgaggtc

SEQ ID NO: 236299 - DNA, 25 bp, Homo sapien
tgcctgcaggtagtcccgttcctga

SEQ ID NO: 236300 - DNA, 25 bp, Homo sapien
tgtcttcgctagagaggctgctggt

SEQ ID NO: 236301 - DNA, 25 bp, Homo sapien
ttggtgtcggccagctctacggcca

SEQ ID NO: 236302 - DNA, 25 bp, Homo sapien
aacctcagcagcaggaccgaggcgt

SEQ ID NO: 236303 - DNA, 25 bp, Homo sapien
cagcagcaggaccgaggcgtctagg

SEQ ID NO: 236304 - DNA, 25 bp, Homo sapien
cctcagcagcaggaccgaggcgtct

SEQ ID NO: 236305 - DNA, 25 bp, Homo sapien
tcagcagcaggaccgaggcgtctag

SEQ ID NO: 236306 - DNA, 25 bp, Homo sapien
actcgtcccgctggtcgatgagcct

SEQ ID NO: 236307 - DNA, 25 bp, Homo sapien
gatgagcctccgcaggtggagcacc

SEQ ID NO: 236308 - DNA, 25 bp, Homo sapien
cactgcaggtcaaacacgttctctt

SEQ ID NO: 236309 - DNA, 25 bp, Homo sapien
aacacgttctcttggttgtgagtca

SEQ ID NO: 236310 - DNA, 25 bp, Homo sapien
tagagaagttttgcctcccggccac

SEQ ID NO: 236311 - DNA, 25 bp, Homo sapien
gaatcaatgtgtctgtggtgtctga

SEQ ID NO: 236312 - DNA, 25 bp, Homo sapien
gctggctgattgatggctatctttc

SEQ ID NO: 236313 - DNA, 25 bp, Homo sapien
tggtgtctgaaacctaagattagca

SEQ ID NO: 236314 - DNA, 25 bp, Homo sapien
cgatgccagcctgggtctcaatgtc

SEQ ID NO: 236315 - DNA, 25 bp, Homo sapien
cacgatgccagcctgggtctcaatg

SEQ ID NO: 236316 - DNA, 25 bp, Homo sapien
ggccacgatgccagcctgggtctca

SEQ ID NO: 236317 - DNA, 25 bp, Homo sapien
ctcctggatatgggccacgatgcca

SEQ ID NO: 236318 - DNA, 25 bp, Homo sapien
gagggttacatgtgttaatggaagc

SEQ ID NO: 236319 - DNA, 25 bp, Homo sapien
agggttacatgtgttaatggaagcg

SEQ ID NO: 236320 - DNA, 25 bp, Homo sapien
ctgcggagggttacatgtgttaatg

SEQ ID NO: 236321 - DNA, 25 bp, Homo sapien
cggagggttacatgtgttaatggaa

SEQ ID NO: 236322 - DNA, 25 bp, Homo sapien
accagcagcagcaccttcttgattt

SEQ ID NO: 236323 - DNA, 25 bp, Homo sapien
cagcagcagcaccttcttgatttcc

SEQ ID NO: 236324 - DNA, 25 bp, Homo sapien
gcagcagcaccttcttgatttcctc

SEQ ID NO: 236325 - DNA, 25 bp, Homo sapien
agcagcaccttcttgatttcctcca

SEQ ID NO: 236326 - DNA, 25 bp, Homo sapien
tgctggatataagaggcacagaccc

SEQ ID NO: 236327 - DNA, 25 bp, Homo sapien
ggcctgagatcagcccaaacagaag

SEQ ID NO: 236328 - DNA, 25 bp, Homo sapien
ggtactgtacccaccacaggagctg

SEQ ID NO: 236329 - DNA, 25 bp, Homo sapien
cactaagaaagcacttaagggcctg

SEQ ID NO: 236330 - DNA, 25 bp, Homo sapien
ggagacagacttatcgggtaggcaa

SEQ ID NO: 236331 - DNA, 25 bp, Homo sapien
cacttactcgagctgctgttcagag

SEQ ID NO: 236332 - DNA, 25 bp, Homo sapien
ccaagaggtaagagagcacgctgct

SEQ ID NO: 236333 - DNA, 25 bp, Homo sapien
caggacggcctgagtcaatagctga

SEQ ID NO: 236334 - DNA, 25 bp, Homo sapien
acagcgcagacacgggtaagaggga

SEQ ID NO: 236335 - DNA, 25 bp, Homo sapien
actgagggtagacccgggacaccag

SEQ ID NO: 236336 - DNA, 25 bp, Homo sapien
gtagacccgggacaccaggcgacag

SEQ ID NO: 236337 - DNA, 25 bp, Homo sapien
gggacaccaggcgacagcgcagaca

SEQ ID NO: 236338 - DNA, 25 bp, Homo sapien
aaaacgatcacgtgttttcactgtg

SEQ ID NO: 236339 - DNA, 25 bp, Homo sapien
caaaacgatcacgtgttttcactgt

SEQ ID NO: 236340 - DNA, 25 bp, Homo sapien
cagtgggtctctgccaatcatcaaa

SEQ ID NO: 236341 - DNA, 25 bp, Homo sapien
cattgggcaaattcattacaatcag

SEQ ID NO: 236342 - DNA, 25 bp, Homo sapien
ccaatcatcaaaacattgggcaaat

SEQ ID NO: 236343 - DNA, 25 bp, Homo sapien
aattcattacaatcagctgctggag

SEQ ID NO: 236344 - DNA, 25 bp, Homo sapien
gagaggcaggacagaatgagtggca

SEQ ID NO: 236345 - DNA, 25 bp, Homo sapien
cagaatgagtggcaggcaggtgtct

SEQ ID NO: 236346 - DNA, 25 bp, Homo sapien
ggtggcccctcacgccccacatgac

SEQ ID NO: 236347 - DNA, 25 bp, Homo sapien
ccccacatgaccctgtatggctcct

SEQ ID NO: 236348 - DNA, 25 bp, Homo sapien
tcacgccccacatgaccctgtatgg

SEQ ID NO: 236349 - DNA, 25 bp, Homo sapien
cacatgaccctgtatggctcctggg

SEQ ID NO: 236350 - DNA, 25 bp, Homo sapien
aaaaacttgcgacacactggaggcc

SEQ ID NO: 236351 - DNA, 25 bp, Homo sapien
tcacacgagcagaagtgggacgctg

SEQ ID NO: 236352 - DNA, 25 bp, Homo sapien
gaaaggctgggtcttatccccgagc

SEQ ID NO: 236353 - DNA, 25 bp, Homo sapien
ctggaggcccacgagagttctgatc

SEQ ID NO: 236354 - DNA, 25 bp, Homo sapien
tttgtttgaagccaatgcgaaaact

SEQ ID NO: 236355 - DNA, 25 bp, Homo sapien
cctcctgcgggggtgtcttgttcac

SEQ ID NO: 236356 - DNA, 25 bp, Homo sapien
tgaagccaatgcgaaaactcaaacg

SEQ ID NO: 236357 - DNA, 25 bp, Homo sapien
caatgcgaaaactcaaacgctgtgt

SEQ ID NO: 236358 - DNA, 25 bp, Homo sapien
ctgcccgcaagaagtttagttaccg

SEQ ID NO: 236359 - DNA, 25 bp, Homo sapien
gggaagatgttcctagggcaccaca

SEQ ID NO: 236360 - DNA, 25 bp, Homo sapien
ctagcactggaaggtgatagcccca

SEQ ID NO: 236361 - DNA, 25 bp, Homo sapien
ggtgcatccaattagaccgaggtgc

SEQ ID NO: 236362 - DNA, 25 bp, Homo sapien
tccaatgaagaggacctagcactgg

SEQ ID NO: 236363 - DNA, 25 bp, Homo sapien
ccagggaagcggaaggtagaccatc

SEQ ID NO: 236364 - DNA, 25 bp, Homo sapien
cagggaagcggaaggtagaccatcc

SEQ ID NO: 236365 - DNA, 25 bp, Homo sapien
tgtgctgcacactacgcactggcac

SEQ ID NO: 236366 - DNA, 25 bp, Homo sapien
gaccttcactattgtgctgcacact

SEQ ID NO: 236367 - DNA, 25 bp, Homo sapien
ctacgcactggcaccgggaggaaag

SEQ ID NO: 236368 - DNA, 25 bp, Homo sapien
atgaccttcactattgtgctgcaca

SEQ ID NO: 236369 - DNA, 25 bp, Homo sapien
aaggctttatgcagccacaggaaga

SEQ ID NO: 236370 - DNA, 25 bp, Homo sapien
cacaagaagtgcacgggccagctgt

SEQ ID NO: 236371 - DNA, 25 bp, Homo sapien
tttccacaaggctttatgcagccac

SEQ ID NO: 236372 - DNA, 25 bp, Homo sapien
agtgcacgggccagctgtcgccact

SEQ ID NO: 236373 - DNA, 25 bp, Homo sapien
catgttcctgagtgtactatattcc

SEQ ID NO: 236374 - DNA, 25 bp, Homo sapien
gcagtgacgcaatccagctactttc

SEQ ID NO: 236375 - DNA, 25 bp, Homo sapien
aagaggcagcttcctaaaagaccag

SEQ ID NO: 236376 - DNA, 25 bp, Homo sapien
agtccgctttccagctactttcttt

SEQ ID NO: 236377 - DNA, 25 bp, Homo sapien
ctccctggctccatttggctgttcc

SEQ ID NO: 236378 - DNA, 25 bp, Homo sapien
tcactccctggctccatttggctgt

SEQ ID NO: 236379 - DNA, 25 bp, Homo sapien
ccctggctccatttggctgttcctg

SEQ ID NO: 236380 - DNA, 25 bp, Homo sapien
ctggctccatttggctgttcctgac

SEQ ID NO: 236381 - DNA, 25 bp, Homo sapien
gaccctgttcccacgaacacggcca

SEQ ID NO: 236382 - DNA, 25 bp, Homo sapien
actgaccctgttcccacgaacacgg

SEQ ID NO: 236383 - DNA, 25 bp, Homo sapien
tcccactgaccctgttcccacgaac

SEQ ID NO: 236384 - DNA, 25 bp, Homo sapien
ccactgaccctgttcccacgaacac

SEQ ID NO: 236385 - DNA, 25 bp, Homo sapien
tgatgacggcgataatgatgttaaa

SEQ ID NO: 236386 - DNA, 25 bp, Homo sapien
ggagagacagtaccggagtccgctc

SEQ ID NO: 236387 - DNA, 25 bp, Homo sapien
tcactggctctctcagaatcactgc

SEQ ID NO: 236388 - DNA, 25 bp, Homo sapien
agtcctcaaggcctcacatagcgaa

SEQ ID NO: 236389 - DNA, 25 bp, Homo sapien
tgcaacacctgcaattaaccctgaa

SEQ ID NO: 236390 - DNA, 25 bp, Homo sapien
ctgcaacacctgcaattaaccctga

SEQ ID NO: 236391 - DNA, 25 bp, Homo sapien
caaccttcaggctgctttatgtctc

SEQ ID NO: 236392 - DNA, 25 bp, Homo sapien
catttcccccgagaaagctctccag

SEQ ID NO: 236393 - DNA, 25 bp, Homo sapien
ttccctgccagtcaaccccaccagc

SEQ ID NO: 236394 - DNA, 25 bp, Homo sapien
aggtgccgctcttccccagaggaca

SEQ ID NO: 236395 - DNA, 25 bp, Homo sapien
ccaccagagcttccacatcctgcat

SEQ ID NO: 236396 - DNA, 25 bp, Homo sapien
gggggccaccagagcttccacatcc

SEQ ID NO: 236397 - DNA, 25 bp, Homo sapien
gggccaccagagcttccacatcctg

SEQ ID NO: 236398 - DNA, 25 bp, Homo sapien
ctgggggccaccagagcttccacat

SEQ ID NO: 236399 - DNA, 25 bp, Homo sapien
ttccttcttctattatacaagctct

SEQ ID NO: 236400 - DNA, 25 bp, Homo sapien
tccttcttctattatacaagctcta

SEQ ID NO: 236401 - DNA, 25 bp, Homo sapien
ccttcttctattatacaagctctag

SEQ ID NO: 236402 - DNA, 25 bp, Homo sapien
cctgaaagcacttgcctgtcacgaa

SEQ ID NO: 236403 - DNA, 25 bp, Homo sapien
gagtcctgaaagcacttgcctgtca

SEQ ID NO: 236404 - DNA, 25 bp, Homo sapien
gaaagcacttgcctgtcacgaatgg

SEQ ID NO: 236405 - DNA, 25 bp, Homo sapien
agcacttgcctgtcacgaatggcac

SEQ ID NO: 236406 - DNA, 25 bp, Homo sapien
agggcccatgccctgcgtatctgct

SEQ ID NO: 236407 - DNA, 25 bp, Homo sapien
gtatctgctgagcagccggcacagc

SEQ ID NO: 236408 - DNA, 25 bp, Homo sapien
ccatgccctgcgtatctgctgagca

SEQ ID NO: 236409 - DNA, 25 bp, Homo sapien
gccctgcgtatctgctgagcagccg

SEQ ID NO: 236410 - DNA, 25 bp, Homo sapien
ccaagatggtcaaattctgaatgcg

SEQ ID NO: 236411 - DNA, 25 bp, Homo sapien
gcgaaggttcacatcattgttgacg

SEQ ID NO: 236412 - DNA, 25 bp, Homo sapien
tattgatgcgttgatttgtgggcct

SEQ ID NO: 236413 - DNA, 25 bp, Homo sapien
ctggtagtaggtcttaatgtttctc

SEQ ID NO: 236414 - DNA, 25 bp, Homo sapien
tccggttgccggagacaatggccag

SEQ ID NO: 236415 - DNA, 25 bp, Homo sapien
cagggccgagagactactaacagcc

SEQ ID NO: 236416 - DNA, 25 bp, Homo sapien
tagcagtactgctcaacgcgatttc

SEQ ID NO: 236417 - DNA, 25 bp, Homo sapien
caggcaaatagcacagtctaggagc

SEQ ID NO: 236418 - DNA, 25 bp, Homo sapien
tttggttcaaaaagatgccgtccac

SEQ ID NO: 236419 - DNA, 25 bp, Homo sapien
ctgccgcttccaaacgggccaaaag

SEQ ID NO: 236420 - DNA, 25 bp, Homo sapien
atccatgtacatagtcaggttgtcc

SEQ ID NO: 236421 - DNA, 25 bp, Homo sapien
gccgtccactaaatccatgtacata

SEQ ID NO: 236422 - DNA, 25 bp, Homo sapien
cggctggtctcagggattcagaaaa

SEQ ID NO: 236423 - DNA, 25 bp, Homo sapien
ccagggacaggagtgaccactggga

SEQ ID NO: 236424 - DNA, 25 bp, Homo sapien
cagtctgttcgctttcccattcggc

SEQ ID NO: 236425 - DNA, 25 bp, Homo sapien
agtggctaaaccccagggacaggag

SEQ ID NO: 236426 - DNA, 25 bp, Homo sapien
ccaggtcaccagcgggctctgcagg

SEQ ID NO: 236427 - DNA, 25 bp, Homo sapien
caccagcgggctctgcaggaagagc

SEQ ID NO: 236428 - DNA, 25 bp, Homo sapien
aggtcaccagcgggctctgcaggaa

SEQ ID NO: 236429 - DNA, 25 bp, Homo sapien
gtcaccagcgggctctgcaggaaga

SEQ ID NO: 236430 - DNA, 25 bp, Homo sapien
aaaacggctccgcagcgagcagcgg

SEQ ID NO: 236431 - DNA, 25 bp, Homo sapien
ggcacaaaacggctccgcagcgagc

SEQ ID NO: 236432 - DNA, 25 bp, Homo sapien
gccgcggcacaaaacggctccgcag

SEQ ID NO: 236433 - DNA, 25 bp, Homo sapien
cccgcgccgcggcacaaaacggctc

SEQ ID NO: 236434 - DNA, 25 bp, Homo sapien
cgctcggggaggaacaatacgggcg

SEQ ID NO: 236435 - DNA, 25 bp, Homo sapien
ccggcgcgccgcctcgcggtgccag

SEQ ID NO: 236436 - DNA, 25 bp, Homo sapien
ccgcctcgcggtgccagcccgggag

SEQ ID NO: 236437 - DNA, 25 bp, Homo sapien
gcgagcccacgttccgcggcttcgg

SEQ ID NO: 236438 - DNA, 25 bp, Homo sapien
gagacttttcccatcctggtgaggg

SEQ ID NO: 236439 - DNA, 25 bp, Homo sapien
tacagtggacaaatgccttctgaca

SEQ ID NO: 236440 - DNA, 25 bp, Homo sapien
gggacattgacaaggccctgggcca

SEQ ID NO: 236441 - DNA, 25 bp, Homo sapien
gcttgactacgccaccaggattaaa

SEQ ID NO: 236442 - DNA, 25 bp, Homo sapien
tgtagcaacaggagaatgaactaat

SEQ ID NO: 236443 - DNA, 25 bp, Homo sapien
gcttcacctaccaccatggttgtaa

SEQ ID NO: 236444 - DNA, 25 bp, Homo sapien
tgctccgccatatgaagatgtgcct

SEQ ID NO: 236445 - DNA, 25 bp, Homo sapien
tatttgtagcaacaggagaatgaac

SEQ ID NO: 236446 - DNA, 25 bp, Homo sapien
tatattcatgagcaaagagatggtc

SEQ ID NO: 236447 - DNA, 25 bp, Homo sapien
tattcatgagcaaagagatggtcta

SEQ ID NO: 236448 - DNA, 25 bp, Homo sapien
cttatattcatgagcaaagagatgg

SEQ ID NO: 236449 - DNA, 25 bp, Homo sapien
tacttatattcatgagcaaagagat

SEQ ID NO: 236450 - DNA, 25 bp, Homo sapien
catgattacagcttgttgcagcttt

SEQ ID NO: 236451 - DNA, 25 bp, Homo sapien
tgattacagcttgttgcagctttga

SEQ ID NO: 236452 - DNA, 25 bp, Homo sapien
attacagcttgttgcagctttgact

SEQ ID NO: 236453 - DNA, 25 bp, Homo sapien
ggcatgattacagcttgttgcagct

SEQ ID NO: 236454 - DNA, 25 bp, Homo sapien
tacagttttctttcagattcatcgt

SEQ ID NO: 236455 - DNA, 25 bp, Homo sapien
acagttttctttcagattcatcgtt

SEQ ID NO: 236456 - DNA, 25 bp, Homo sapien
ctacagttttctttcagattcatcg

SEQ ID NO: 236457 - DNA, 25 bp, Homo sapien
aggtttctatttcagtaaccataat

SEQ ID NO: 236458 - DNA, 25 bp, Homo sapien
ggtttctatttcagtaaccataatc

SEQ ID NO: 236459 - DNA, 25 bp, Homo sapien
caggtttctatttcagtaaccataa

SEQ ID NO: 236460 - DNA, 25 bp, Homo sapien
cagagaagcacacagcgcttgctag

SEQ ID NO: 236461 - DNA, 25 bp, Homo sapien
cagtatagtcttgtttttggtacca

SEQ ID NO: 236462 - DNA, 25 bp, Homo sapien
ggttttctatccaactatgcagtat

SEQ ID NO: 236463 - DNA, 25 bp, Homo sapien
tcaaactggtattccaaagggagta

SEQ ID NO: 236464 - DNA, 25 bp, Homo sapien
tcatccatcctcaattttgatttaa

SEQ ID NO: 236465 - DNA, 25 bp, Homo sapien
ttaatgtaccgtcatttccccaaga

SEQ ID NO: 236466 - DNA, 25 bp, Homo sapien
catccatcctcaattttgatttaat

SEQ ID NO: 236467 - DNA, 25 bp, Homo sapien
taatgtaccgtcatttccccaagaa

SEQ ID NO: 236468 - DNA, 25 bp, Homo sapien
taagaactgtgatgtagaacaaaaa

SEQ ID NO: 236469 - DNA, 25 bp, Homo sapien
aaacaggtaccagcacaacgttagg

SEQ ID NO: 236470 - DNA, 25 bp, Homo sapien
tagtattgcttttgtatgcacatag

SEQ ID NO: 236471 - DNA, 25 bp, Homo sapien
aactataccatctttcataaaactc

SEQ ID NO: 236472 - DNA, 25 bp, Homo sapien
atatactcaacaactaagcatacac

SEQ ID NO: 236473 - DNA, 25 bp, Homo sapien
tatatactcaacaactaagcataca

SEQ ID NO: 236474 - DNA, 25 bp, Homo sapien
ctcaacaactaagcatacactcagg

SEQ ID NO: 236475 - DNA, 25 bp, Homo sapien
caactaagcatacactcaggggagg

SEQ ID NO: 236476 - DNA, 25 bp, Homo sapien
ttctgagtctcaaacatggtccaag

SEQ ID NO: 236477 - DNA, 25 bp, Homo sapien
aaaaatatctgcagtttgaagggca

SEQ ID NO: 236478 - DNA, 25 bp, Homo sapien
tctttaatcaagtagggagaagtcc

SEQ ID NO: 236479 - DNA, 25 bp, Homo sapien
aactgctggcattcttgactagtga

SEQ ID NO: 236480 - DNA, 25 bp, Homo sapien
caatccagagttccacttacaaaac

SEQ ID NO: 236481 - DNA, 25 bp, Homo sapien
cagagttccacttacaaaacccctg

SEQ ID NO: 236482 - DNA, 25 bp, Homo sapien
cagtcaatccagagttccacttaca

SEQ ID NO: 236483 - DNA, 25 bp, Homo sapien
tgccctgttggctttttgtttccat

SEQ ID NO: 236484 - DNA, 25 bp, Homo sapien
ctggagagctcaaaggcttaagtct

SEQ ID NO: 236485 - DNA, 25 bp, Homo sapien
gctggagagctcaaaggcttaagtc

SEQ ID NO: 236486 - DNA, 25 bp, Homo sapien
tggagagctcaaaggcttaagtctt

SEQ ID NO: 236487 - DNA, 25 bp, Homo sapien
gcagaagtcaagtgtaagaggctga

SEQ ID NO: 236488 - DNA, 25 bp, Homo sapien
atgagcagaagtcaagtgtaagagg

SEQ ID NO: 236489 - DNA, 25 bp, Homo sapien
agtcaagtgtaagaggctgatctgt

SEQ ID NO: 236490 - DNA, 25 bp, Homo sapien
gaagtcaagtgtaagaggctgatct

SEQ ID NO: 236491 - DNA, 25 bp, Homo sapien
tcagtcattcacaagagaccactgc

SEQ ID NO: 236492 - DNA, 25 bp, Homo sapien
gagaccactgcgctttgttgtggat

SEQ ID NO: 236493 - DNA, 25 bp, Homo sapien
ttttttcaacaggtactgatcctag

SEQ ID NO: 236494 - DNA, 25 bp, Homo sapien
ggtactgatcctaggccgttgccat

SEQ ID NO: 236495 - DNA, 25 bp, Homo sapien
gctttctttgacaatggtaacgtat

SEQ ID NO: 236496 - DNA, 25 bp, Homo sapien
caatggtaacgtatcttccttatct

SEQ ID NO: 236497 - DNA, 25 bp, Homo sapien
tctttgacaatggtaacgtatcttc

SEQ ID NO: 236498 - DNA, 25 bp, Homo sapien
ttgacaatggtaacgtatcttcctt

SEQ ID NO: 236499 - DNA, 25 bp, Homo sapien
ataatctaccagacccacgaggcct

SEQ ID NO: 236500 - DNA, 25 bp, Homo sapien
taatctaccagacccacgaggcctc

SEQ ID NO: 236501 - DNA, 25 bp, Homo sapien
caggataatctaccagacccacgag

SEQ ID NO: 236502 - DNA, 25 bp, Homo sapien
ggataatctaccagacccacgaggc

SEQ ID NO: 236503 - DNA, 25 bp, Homo sapien
tagtttataatcctagcaaattacc

SEQ ID NO: 236504 - DNA, 25 bp, Homo sapien
aagtagtttataatcctagcaaatt

SEQ ID NO: 236505 - DNA, 25 bp, Homo sapien
ttataatcctagcaaattacccagg

SEQ ID NO: 236506 - DNA, 25 bp, Homo sapien
ataatcctagcaaattacccaggag

SEQ ID NO: 236507 - DNA, 25 bp, Homo sapien
gggactcatcctctagttcagggat

SEQ ID NO: 236508 - DNA, 25 bp, Homo sapien
ttctaggtggcagtaaccaaaggga

SEQ ID NO: 236509 - DNA, 25 bp, Homo sapien
cctttatataagttcaagcggtggg

SEQ ID NO: 236510 - DNA, 25 bp, Homo sapien
gaattcacactatatgcagacttgc

SEQ ID NO: 236511 - DNA, 25 bp, Homo sapien
tgtagtaatagctgccgtctgagat

SEQ ID NO: 236512 - DNA, 25 bp, Homo sapien
ctgccgtctgagatgtatttttagg

SEQ ID NO: 236513 - DNA, 25 bp, Homo sapien
gctggtgaggttagtcttcgttcca

SEQ ID NO: 236514 - DNA, 25 bp, Homo sapien
ttttaggtacggatccaggagagcc

SEQ ID NO: 236515 - DNA, 25 bp, Homo sapien
acagggaaagcttgaaacttgggct

SEQ ID NO: 236516 - DNA, 25 bp, Homo sapien
gacagggaaagcttgaaacttgggc

SEQ ID NO: 236517 - DNA, 25 bp, Homo sapien
gagaatactgtcaatagtcgtcccc

SEQ ID NO: 236518 - DNA, 25 bp, Homo sapien
cgctgggtagaaacattgaagttca

SEQ ID NO: 236519 - DNA, 25 bp, Homo sapien
tagagtctttaaaccgtatgccatc

SEQ ID NO: 236520 - DNA, 25 bp, Homo sapien
catttaactagcttactacgctggg

SEQ ID NO: 236521 - DNA, 25 bp, Homo sapien
tgtcagatggagacactacagcttc

SEQ ID NO: 236522 - DNA, 25 bp, Homo sapien
catcttctagtgttctggcatctct

SEQ ID NO: 236523 - DNA, 25 bp, Homo sapien
tctggcatctcttcgatatctgtga

SEQ ID NO: 236524 - DNA, 25 bp, Homo sapien
gaatttacttattggatccataata

SEQ ID NO: 236525 - DNA, 25 bp, Homo sapien
tacataatctacatcttccagtgct

SEQ ID NO: 236526 - DNA, 25 bp, Homo sapien
cataatctacatcttccagtgcttt

SEQ ID NO: 236527 - DNA, 25 bp, Homo sapien
acataatctacatcttccagtgctt

SEQ ID NO: 236528 - DNA, 25 bp, Homo sapien
gtacataatctacatcttccagtgc

SEQ ID NO: 236529 - DNA, 25 bp, Homo sapien
gtctcgttctggcacctaggttgag

SEQ ID NO: 236530 - DNA, 25 bp, Homo sapien
tccctggccatggacatatatgttt

SEQ ID NO: 236531 - DNA, 25 bp, Homo sapien
tacaaagtaaatgcccaggtcttgc

SEQ ID NO: 236532 - DNA, 25 bp, Homo sapien
tccatgtgcgtatttgttatacggg

SEQ ID NO: 236533 - DNA, 25 bp, Homo sapien
aaagcatgtcacaggccgggtgaag

SEQ ID NO: 236534 - DNA, 25 bp, Homo sapien
aagcatgtcacaggccgggtgaaga

SEQ ID NO: 236535 - DNA, 25 bp, Homo sapien
aagagagaacacacaacagccatgc

SEQ ID NO: 236536 - DNA, 25 bp, Homo sapien
cagccatgcgtattttaaaagcatg

SEQ ID NO: 236537 - DNA, 25 bp, Homo sapien
cttttcattatgtagcggttgtaaa

SEQ ID NO: 236538 - DNA, 25 bp, Homo sapien
tgtagcggttgtaaaactcatcttt

SEQ ID NO: 236539 - DNA, 25 bp, Homo sapien
gagaaatgctttcactactggttca

SEQ ID NO: 236540 - DNA, 25 bp, Homo sapien
agttcatcagattgtagcgggatcc

SEQ ID NO: 236541 - DNA, 25 bp, Homo sapien
tgtttaaatcacataccactcttcc

SEQ ID NO: 236542 - DNA, 25 bp, Homo sapien
aaatcacataccactcttccatact

SEQ ID NO: 236543 - DNA, 25 bp, Homo sapien
ttaaatcacataccactcttccata

SEQ ID NO: 236544 - DNA, 25 bp, Homo sapien
agaggcatggttgtttaaatcacat

SEQ ID NO: 236545 - DNA, 25 bp, Homo sapien
ttatgatgtttgcacttccggaact

SEQ ID NO: 236546 - DNA, 25 bp, Homo sapien
ttccggaactgtgaacctaaagata

SEQ ID NO: 236547 - DNA, 25 bp, Homo sapien
tccggaactgtgaacctaaagataa

SEQ ID NO: 236548 - DNA, 25 bp, Homo sapien
aagataaggattatgaaaatgttat

SEQ ID NO: 236549 - DNA, 25 bp, Homo sapien
tttctttggagatcatggaagtggc

SEQ ID NO: 236550 - DNA, 25 bp, Homo sapien
ttcatgagcaggtagccaggcaacc

SEQ ID NO: 236551 - DNA, 25 bp, Homo sapien
agtcacatcgtcttcggttggcaag

SEQ ID NO: 236552 - DNA, 25 bp, Homo sapien
catggaagtggctcgttaaattgcc

SEQ ID NO: 236553 - DNA, 25 bp, Homo sapien
tgataagtcaaagcctaacaagggt

SEQ ID NO: 236554 - DNA, 25 bp, Homo sapien
tagagctcatgctaatagaccacat

SEQ ID NO: 236555 - DNA, 25 bp, Homo sapien
gaatttgtactccaactttgcgggc

SEQ ID NO: 236556 - DNA, 25 bp, Homo sapien
caaaggaacttactgaggcatttcc

SEQ ID NO: 236557 - DNA, 25 bp, Homo sapien
gctaaagggctacaatgtaagatcc

SEQ ID NO: 236558 - DNA, 25 bp, Homo sapien
gaaacgattgctagacacacctaca

SEQ ID NO: 236559 - DNA, 25 bp, Homo sapien
gatccaaggaacttaataaggccaa

SEQ ID NO: 236560 - DNA, 25 bp, Homo sapien
tgatatctagcctataaagaccgag

SEQ ID NO: 236561 - DNA, 25 bp, Homo sapien
tgcatccaaacacacctcaatgtag

SEQ ID NO: 236562 - DNA, 25 bp, Homo sapien
aatactctcccatgaccaagacaca

SEQ ID NO: 236563 - DNA, 25 bp, Homo sapien
gaattatttccactatgcatccaaa

SEQ ID NO: 236564 - DNA, 25 bp, Homo sapien
caactcaagttaccaattgtgtgaa

SEQ ID NO: 236565 - DNA, 25 bp, Homo sapien
tggtaggtatggtgctccacacaaa

SEQ ID NO: 236566 - DNA, 25 bp, Homo sapien
atgcttcgaggccataagaactagc

SEQ ID NO: 236567 - DNA, 25 bp, Homo sapien
ctccggaggatatccttattaataa

SEQ ID NO: 236568 - DNA, 25 bp, Homo sapien
tgttaacaattccaatacaagtgcc

SEQ ID NO: 236569 - DNA, 25 bp, Homo sapien
tcctcactaggcagcaagcctctga

SEQ ID NO: 236570 - DNA, 25 bp, Homo sapien
gaggttttgccagacaccgtgtcat

SEQ ID NO: 236571 - DNA, 25 bp, Homo sapien
taccaggtaccttagcatgttctcc

SEQ ID NO: 236572 - DNA, 25 bp, Homo sapien
tgattccagtgtgttttgtgcctcc

SEQ ID NO: 236573 - DNA, 25 bp, Homo sapien
gattctggagttacacaaaaagtaa

SEQ ID NO: 236574 - DNA, 25 bp, Homo sapien
taaaggttggaggaatagaacatgt

SEQ ID NO: 236575 - DNA, 25 bp, Homo sapien
ggacttgattctggagttacacaaa

SEQ ID NO: 236576 - DNA, 25 bp, Homo sapien
tatgtgagtgctataattatgctat

SEQ ID NO: 236577 - DNA, 25 bp, Homo sapien
caaattattaagacctctatgttaa

SEQ ID NO: 236578 - DNA, 25 bp, Homo sapien
ttaagacctctatgttaacctgatg

SEQ ID NO: 236579 - DNA, 25 bp, Homo sapien
gactgacttaacaccaactttgaat

SEQ ID NO: 236580 - DNA, 25 bp, Homo sapien
taactgcctcctaaaaagactgact

SEQ ID NO: 236581 - DNA, 25 bp, Homo sapien
tttgctagtaaaggagcagtgagaa

SEQ ID NO: 236582 - DNA, 25 bp, Homo sapien
gttgtatttgctagtaaaggagcag

SEQ ID NO: 236583 - DNA, 25 bp, Homo sapien
tctgttgtatttgctagtaaaggag

SEQ ID NO: 236584 - DNA, 25 bp, Homo sapien
tatttgctagtaaaggagcagtgag

SEQ ID NO: 236585 - DNA, 25 bp, Homo sapien
tgttctctgggtcaactaaagttcg

SEQ ID NO: 236586 - DNA, 25 bp, Homo sapien
caggatctgtatcacaaatcatatg

SEQ ID NO: 236587 - DNA, 25 bp, Homo sapien
tcgaagcaggcccataagctggact

SEQ ID NO: 236588 - DNA, 25 bp, Homo sapien
attggcagtggctagcatgttctct

SEQ ID NO: 236589 - DNA, 25 bp, Homo sapien
ccctaaagtgtggtacagggacata

SEQ ID NO: 236590 - DNA, 25 bp, Homo sapien
tatggccagtgatgtatgttctcca

SEQ ID NO: 236591 - DNA, 25 bp, Homo sapien
tatctgacaggacatatgacagtgt

SEQ ID NO: 236592 - DNA, 25 bp, Homo sapien
gactggtattcctcacctaagtagt

SEQ ID NO: 236593 - DNA, 25 bp, Homo sapien
gctaacgtgagtgtttgtgaacaac

SEQ ID NO: 236594 - DNA, 25 bp, Homo sapien
tcttggcgattttgagaatctaccc

SEQ ID NO: 236595 - DNA, 25 bp, Homo sapien
aggcgcacccttcacattaccagga

SEQ ID NO: 236596 - DNA, 25 bp, Homo sapien
taccacaggctggaattctaaacag

SEQ ID NO: 236597 - DNA, 25 bp, Homo sapien
tttgctctgttaacttcttacttac

SEQ ID NO: 236598 - DNA, 25 bp, Homo sapien
tattttttgctctgttaacttctta

SEQ ID NO: 236599 - DNA, 25 bp, Homo sapien
gctggttattttttgctctgttaac

SEQ ID NO: 236600 - DNA, 25 bp, Homo sapien
cttgctggttattttttgctctgtt

SEQ ID NO: 236601 - DNA, 25 bp, Homo sapien
actctcgtaccatggatggattata

SEQ ID NO: 236602 - DNA, 25 bp, Homo sapien
tatgagaatatatcagtagcagcac

SEQ ID NO: 236603 - DNA, 25 bp, Homo sapien
ttcgcacctgtgtatcatccatgcc

SEQ ID NO: 236604 - DNA, 25 bp, Homo sapien
cctgcatgacaaactctcgtaccat

SEQ ID NO: 236605 - DNA, 25 bp, Homo sapien
gacaaagtcttgaaaaaagcatctc

SEQ ID NO: 236606 - DNA, 25 bp, Homo sapien
gacttctaaagctggtaatatgccc

SEQ ID NO: 236607 - DNA, 25 bp, Homo sapien
atgacttctaaagctggtaatatgc

SEQ ID NO: 236608 - DNA, 25 bp, Homo sapien
tctaaagctggtaatatgcccatgt

SEQ ID NO: 236609 - DNA, 25 bp, Homo sapien
tgtagcgtttgggaaaacgcacaaa

SEQ ID NO: 236610 - DNA, 25 bp, Homo sapien
ctgtagcgtttgggaaaacgcacaa

SEQ ID NO: 236611 - DNA, 25 bp, Homo sapien
tagttgtgcaaacaaatctgtcaga

SEQ ID NO: 236612 - DNA, 25 bp, Homo sapien
atctgttagttgtgcaaacaaatct

SEQ ID NO: 236613 - DNA, 25 bp, Homo sapien
tgtgcaaacaaatctgtcagaaatt

SEQ ID NO: 236614 - DNA, 25 bp, Homo sapien
tgttagttgtgcaaacaaatctgtc

SEQ ID NO: 236615 - DNA, 25 bp, Homo sapien
gcagagccttcatgattgtccggtc

SEQ ID NO: 236616 - DNA, 25 bp, Homo sapien
aatattttgagctttgcggcccatg

SEQ ID NO: 236617 - DNA, 25 bp, Homo sapien
tacccaagcccaattaaggtggcag

SEQ ID NO: 236618 - DNA, 25 bp, Homo sapien
gcggcccatgtgatctctactacga

SEQ ID NO: 236619 - DNA, 25 bp, Homo sapien
gaatagaccaattcacacactggga

SEQ ID NO: 236620 - DNA, 25 bp, Homo sapien
tttcagacaactttacagggtaggc

SEQ ID NO: 236621 - DNA, 25 bp, Homo sapien
ggactgtgatgcaaataccctaaaa

SEQ ID NO: 236622 - DNA, 25 bp, Homo sapien
gactttgactcaggttttgtgcaga

SEQ ID NO: 236623 - DNA, 25 bp, Homo sapien
tgatgtccacggaagggtcctttcc

SEQ ID NO: 236624 - DNA, 25 bp, Homo sapien
cctcattttctagtgccagtgcaag

SEQ ID NO: 236625 - DNA, 25 bp, Homo sapien
agattcatccacaaggtcctgagtg

SEQ ID NO: 236626 - DNA, 25 bp, Homo sapien
tgcaagtttttcacgacgaagaggt

SEQ ID NO: 236627 - DNA, 25 bp, Homo sapien
aagctaagggccaagtcataatttt

SEQ ID NO: 236628 - DNA, 25 bp, Homo sapien
gaaagctaagggccaagtcataatt

SEQ ID NO: 236629 - DNA, 25 bp, Homo sapien
cttgaaagctaagggccaagtcata

SEQ ID NO: 236630 - DNA, 25 bp, Homo sapien
ttcttgaaagctaagggccaagtca

SEQ ID NO: 236631 - DNA, 25 bp, Homo sapien
caaaggccgactgggtatccatcag

SEQ ID NO: 236632 - DNA, 25 bp, Homo sapien
aatatatccttttggcagggtgcgg

SEQ ID NO: 236633 - DNA, 25 bp, Homo sapien
taagcaaggcacaatggtgtatccc

SEQ ID NO: 236634 - DNA, 25 bp, Homo sapien
tcagggtatagccagacatatgctc

SEQ ID NO: 236635 - DNA, 25 bp, Homo sapien
aaagcactttatgaacaagctggta

SEQ ID NO: 236636 - DNA, 25 bp, Homo sapien
tcattggctatatagagcactcatc

SEQ ID NO: 236637 - DNA, 25 bp, Homo sapien
caattaactattttgtatctgcatc

SEQ ID NO: 236638 - DNA, 25 bp, Homo sapien
tttaaagatcaatgatgaagcaaag

SEQ ID NO: 236639 - DNA, 25 bp, Homo sapien
cagtgttaggatttattttcgactc

SEQ ID NO: 236640 - DNA, 25 bp, Homo sapien
tctggtatgcagtgttaggatttat

SEQ ID NO: 236641 - DNA, 25 bp, Homo sapien
tattttcgactctaaaagtagagaa

SEQ ID NO: 236642 - DNA, 25 bp, Homo sapien
ctgttgtttctggtatgcagtgtta

SEQ ID NO: 236643 - DNA, 25 bp, Homo sapien
agactggagtgcactggcacgatcc

SEQ ID NO: 236644 - DNA, 25 bp, Homo sapien
tgcactggcacgatcctcagctcac

SEQ ID NO: 236645 - DNA, 25 bp, Homo sapien
gagacagggcttctctctgtcgccc

SEQ ID NO: 236646 - DNA, 25 bp, Homo sapien
gccaccacaccaggctaatgttttg

SEQ ID NO: 236647 - DNA, 25 bp, Homo sapien
gtaacaggtatgtgctccaagtcct

SEQ ID NO: 236648 - DNA, 25 bp, Homo sapien
cacccggccaagactaaagtatgct

SEQ ID NO: 236649 - DNA, 25 bp, Homo sapien
acagtaagatcccacctcccctgaa

SEQ ID NO: 236650 - DNA, 25 bp, Homo sapien
atgcctcattacatagtggcattta

SEQ ID NO: 236651 - DNA, 25 bp, Homo sapien
cacaaagggagagcataagcaaggt

SEQ ID NO: 236652 - DNA, 25 bp, Homo sapien
gaactttgcaggtatacggctatca

SEQ ID NO: 236653 - DNA, 25 bp, Homo sapien
taacagacacagcatacactgaaag

SEQ ID NO: 236654 - DNA, 25 bp, Homo sapien
gcaatacagtgagaacctttgaaaa

SEQ ID NO: 236655 - DNA, 25 bp, Homo sapien
gcactgaccaccaaattagctgata

SEQ ID NO: 236656 - DNA, 25 bp, Homo sapien
tatcacactatctctagcactgacc

SEQ ID NO: 236657 - DNA, 25 bp, Homo sapien
tgaggcttgaagcatgagaatccct

SEQ ID NO: 236658 - DNA, 25 bp, Homo sapien
tatttcacaggtatgcaaaagcccc

SEQ ID NO: 236659 - DNA, 25 bp, Homo sapien
gctccaagcaaagtttcatgcctgc

SEQ ID NO: 236660 - DNA, 25 bp, Homo sapien
cagatcggattaatcagtgtctttc

SEQ ID NO: 236661 - DNA, 25 bp, Homo sapien
aaaagaacagcacactccggactcc

SEQ ID NO: 236662 - DNA, 25 bp, Homo sapien
ggtgaactaaggcagcagatcggat

SEQ ID NO: 236663 - DNA, 25 bp, Homo sapien
gtagccagacgacacatgcccggtg

SEQ ID NO: 236664 - DNA, 25 bp, Homo sapien
ccactgccggtcctcgttgagcgtg

SEQ ID NO: 236665 - DNA, 25 bp, Homo sapien
agcagggacatgcccttcagccgct

SEQ ID NO: 236666 - DNA, 25 bp, Homo sapien
ttcagccgctccacgtagccagacg

SEQ ID NO: 236667 - DNA, 25 bp, Homo sapien
gccagtagacgcccaggaaaggggc

SEQ ID NO: 236668 - DNA, 25 bp, Homo sapien
gggccccgccagtagacgcccagga

SEQ ID NO: 236669 - DNA, 25 bp, Homo sapien
cgccagtagacgcccaggaaagggg

SEQ ID NO: 236670 - DNA, 25 bp, Homo sapien
ggccccgccagtagacgcccaggaa

SEQ ID NO: 236671 - DNA, 25 bp, Homo sapien
cgaggcgtgagggcgcccgcgagcg

SEQ ID NO: 236672 - DNA, 25 bp, Homo sapien
gggcgaggcgtgagggcgcccgcga

SEQ ID NO: 236673 - DNA, 25 bp, Homo sapien
ggcgaggcgtgagggcgcccgcgag

SEQ ID NO: 236674 - DNA, 25 bp, Homo sapien
ggcgtgagggcgcccgcgagcggag

SEQ ID NO: 236675 - DNA, 25 bp, Homo sapien
gccgcctttcctcgcctccggctcc

SEQ ID NO: 236676 - DNA, 25 bp, Homo sapien
ccagggaccgagctctgggccgccg

SEQ ID NO: 236677 - DNA, 25 bp, Homo sapien
cgccgcctttcctcgcctccggctc

SEQ ID NO: 236678 - DNA, 25 bp, Homo sapien
gcgcagcgcttcgtagcctcccgcc

SEQ ID NO: 236679 - DNA, 25 bp, Homo sapien
ggccgcgcagcgcttcgtagcctcc

SEQ ID NO: 236680 - DNA, 25 bp, Homo sapien
cccgcagcgctaggaactcggggct

SEQ ID NO: 236681 - DNA, 25 bp, Homo sapien
agcgctaggaactcggggctcccgt

SEQ ID NO: 236682 - DNA, 25 bp, Homo sapien
gccgccgccatattttccttcctta

SEQ ID NO: 236683 - DNA, 25 bp, Homo sapien
ctccgccatgatctccgcgaagcag

SEQ ID NO: 236684 - DNA, 25 bp, Homo sapien
atgatctccgcgaagcagcttcccg

SEQ ID NO: 236685 - DNA, 25 bp, Homo sapien
tcccgcctccgccatgatctccgcg

SEQ ID NO: 236686 - DNA, 25 bp, Homo sapien
ttaaacgtcagaagccgacaggcgc

SEQ ID NO: 236687 - DNA, 25 bp, Homo sapien
gcccaagcgacccggactagtggaa

SEQ ID NO: 236688 - DNA, 25 bp, Homo sapien
cgacaggcgcctgatcctgctgcaa

SEQ ID NO: 236689 - DNA, 25 bp, Homo sapien
gccgtctcttccgtcttcctcacac

SEQ ID NO: 236690 - DNA, 25 bp, Homo sapien
gttcgcccctcaaaagcggcgcgcg

SEQ ID NO: 236691 - DNA, 25 bp, Homo sapien
tggttcgcccctcaaaagcggcgcg

SEQ ID NO: 236692 - DNA, 25 bp, Homo sapien
ttggttcgcccctcaaaagcggcgc

SEQ ID NO: 236693 - DNA, 25 bp, Homo sapien
tcgcccctcaaaagcggcgcgcggg

SEQ ID NO: 236694 - DNA, 25 bp, Homo sapien
caggggcggctcgtagccccaccat

SEQ ID NO: 236695 - DNA, 25 bp, Homo sapien
tgcaggggcggctcgtagccccacc

SEQ ID NO: 236696 - DNA, 25 bp, Homo sapien
gctgcaggggcggctcgtagcccca

SEQ ID NO: 236697 - DNA, 25 bp, Homo sapien
ctgcaggggcggctcgtagccccac

SEQ ID NO: 236698 - DNA, 25 bp, Homo sapien
cagcgagaccgggagccttactgcg

SEQ ID NO: 236699 - DNA, 25 bp, Homo sapien
cttactgcggcggaggcttccgacg

SEQ ID NO: 236700 - DNA, 25 bp, Homo sapien
ttaaagagacagcagcgagaccggg

SEQ ID NO: 236701 - DNA, 25 bp, Homo sapien
cgggcgcggagttgccgaggtggcg

SEQ ID NO: 236702 - DNA, 25 bp, Homo sapien
ccgcctttatggctgagtcgggcgc

SEQ ID NO: 236703 - DNA, 25 bp, Homo sapien
gggccgcctttatggctgagtcggg

SEQ ID NO: 236704 - DNA, 25 bp, Homo sapien
cctttatggctgagtcgggcgctcg

SEQ ID NO: 236705 - DNA, 25 bp, Homo sapien
tcccggggccgcctttatggctgag

SEQ ID NO: 236706 - DNA, 25 bp, Homo sapien
gtgggtcgcggactggcgtggccag

SEQ ID NO: 236707 - DNA, 25 bp, Homo sapien
gcgcagccttgggagccgccgtggg

SEQ ID NO: 236708 - DNA, 25 bp, Homo sapien
ggaaggtcgcgggtgtgggcgccta

SEQ ID NO: 236709 - DNA, 25 bp, Homo sapien
tggaaacttgggactgtttgcgatt

SEQ ID NO: 236710 - DNA, 25 bp, Homo sapien
gagctcataaatgccccttctggag

SEQ ID NO: 236711 - DNA, 25 bp, Homo sapien
atgccccttctggagaattcagtgg

SEQ ID NO: 236712 - DNA, 25 bp, Homo sapien
tcagagctcataaatgccccttctg

SEQ ID NO: 236713 - DNA, 25 bp, Homo sapien
gtgagtgagtcctgggaaacaaaga

SEQ ID NO: 236714 - DNA, 25 bp, Homo sapien
gcatctgtaggttccccttctgaag

SEQ ID NO: 236715 - DNA, 25 bp, Homo sapien
tgcaggttcccattctggagcatct

SEQ ID NO: 236716 - DNA, 25 bp, Homo sapien
tggagcatctgcaggttccccttct

SEQ ID NO: 236717 - DNA, 25 bp, Homo sapien
ggttccccttctggagcaactgcag

SEQ ID NO: 236718 - DNA, 25 bp, Homo sapien
ccccagggctcctctaatgctgtag

SEQ ID NO: 236719 - DNA, 25 bp, Homo sapien
ctctaatgctgtagggggcgatgct

SEQ ID NO: 236720 - DNA, 25 bp, Homo sapien
ctgtgagaacctgctctttgtccat

SEQ ID NO: 236721 - DNA, 25 bp, Homo sapien
agggggcgatgctgtgagaacctgc

SEQ ID NO: 236722 - DNA, 25 bp, Homo sapien
cgtgtttcataaggtcactgtgatc

SEQ ID NO: 236723 - DNA, 25 bp, Homo sapien
gttagaatcctgagagcctctgtcc

SEQ ID NO: 236724 - DNA, 25 bp, Homo sapien
ggttagaatcctgagagcctctgtc

SEQ ID NO: 236725 - DNA, 25 bp, Homo sapien
cacctggccagtagtcgtgtttcat

SEQ ID NO: 236726 - DNA, 25 bp, Homo sapien
agttagcactgtccctattgcaggg

SEQ ID NO: 236727 - DNA, 25 bp, Homo sapien
gcatgtaaataccaaaaccgggcca

SEQ ID NO: 236728 - DNA, 25 bp, Homo sapien
gccccgttgggtgctcatgacgcaa

SEQ ID NO: 236729 - DNA, 25 bp, Homo sapien
tatggccagacatggtgactcgtac

SEQ ID NO: 236730 - DNA, 25 bp, Homo sapien
tctggattgcatggctctgtctccc

SEQ ID NO: 236731 - DNA, 25 bp, Homo sapien
gccgctcgggtgtactgttcgctct

SEQ ID NO: 236732 - DNA, 25 bp, Homo sapien
ggatccgagttcttgttccccgaca

SEQ ID NO: 236733 - DNA, 25 bp, Homo sapien
ccagccatggttgactaatttaggg

SEQ ID NO: 236734 - DNA, 25 bp, Homo sapien
gacgcctgtctttggatttttgact

SEQ ID NO: 236735 - DNA, 25 bp, Homo sapien
cgcctgtctttggatttttgacttg

SEQ ID NO: 236736 - DNA, 25 bp, Homo sapien
gatttttgacttggatgagagccct

SEQ ID NO: 236737 - DNA, 25 bp, Homo sapien
atttttgacttggatgagagccctg

SEQ ID NO: 236738 - DNA, 25 bp, Homo sapien
tggaggttgtggttgagaggggagt

SEQ ID NO: 236739 - DNA, 25 bp, Homo sapien
gcagtgcctacagagatctgggtag

SEQ ID NO: 236740 - DNA, 25 bp, Homo sapien
agtgcctacagagatctgggtagga

SEQ ID NO: 236741 - DNA, 25 bp, Homo sapien
tggcagtgcctacagagatctgggt

SEQ ID NO: 236742 - DNA, 25 bp, Homo sapien
ctgtggccccctcggtgatgctgtg

SEQ ID NO: 236743 - DNA, 25 bp, Homo sapien
ctgagggtgatgtgagatggggagg

SEQ ID NO: 236744 - DNA, 25 bp, Homo sapien
tggccaaacgctgagatgaaaatgc

SEQ ID NO: 236745 - DNA, 25 bp, Homo sapien
taagtcgaataccagttgagctcac

SEQ ID NO: 236746 - DNA, 25 bp, Homo sapien
gaagctctcattgcccgtggccaaa

SEQ ID NO: 236747 - DNA, 25 bp, Homo sapien
tggcactgagacaggcaaatcccca

SEQ ID NO: 236748 - DNA, 25 bp, Homo sapien
aaaacatcagcaggggcagcagcat

SEQ ID NO: 236749 - DNA, 25 bp, Homo sapien
aaaaacatcagcaggggcagcagca

SEQ ID NO: 236750 - DNA, 25 bp, Homo sapien
cctaaaaacatcagcaggggcagca

SEQ ID NO: 236751 - DNA, 25 bp, Homo sapien
gacctaaaaacatcagcaggggcag

SEQ ID NO: 236752 - DNA, 25 bp, Homo sapien
aatggtgaatatattgacaagtagc

SEQ ID NO: 236753 - DNA, 25 bp, Homo sapien
gacaattctttaggattttatgtag

SEQ ID NO: 236754 - DNA, 25 bp, Homo sapien
tctaggaattggctgataaaactag

SEQ ID NO: 236755 - DNA, 25 bp, Homo sapien
aagagaaattatgatcaccatgtgt

SEQ ID NO: 236756 - DNA, 25 bp, Homo sapien
cagactttgatctatgaatcagctc

SEQ ID NO: 236757 - DNA, 25 bp, Homo sapien
gactttgatctatgaatcagctcac

SEQ ID NO: 236758 - DNA, 25 bp, Homo sapien
tcttcagactttgatctatgaatca

SEQ ID NO: 236759 - DNA, 25 bp, Homo sapien
tcactcttcagactttgatctatga

SEQ ID NO: 236760 - DNA, 25 bp, Homo sapien
ccttgcagttgaaacataaatgcta

SEQ ID NO: 236761 - DNA, 25 bp, Homo sapien
ttggtttcttctaatccatctttgg

SEQ ID NO: 236762 - DNA, 25 bp, Homo sapien
tctttggaatgtcctccacggatgg

SEQ ID NO: 236763 - DNA, 25 bp, Homo sapien
tccacggatggatgccttgcagttg

SEQ ID NO: 236764 - DNA, 25 bp, Homo sapien
caataagcgtgtgtcctgggaatgg

SEQ ID NO: 236765 - DNA, 25 bp, Homo sapien
ctgttgccacggcaataagcgtgtg

SEQ ID NO: 236766 - DNA, 25 bp, Homo sapien
ggaatggcaatggtgcctcatcaac

SEQ ID NO: 236767 - DNA, 25 bp, Homo sapien
tgtcctgggaatggcaatggtgcct

SEQ ID NO: 236768 - DNA, 25 bp, Homo sapien
cctctgatgccaagtgcatccattt

SEQ ID NO: 236769 - DNA, 25 bp, Homo sapien
cacccctctgatgccaagtgcatcc

SEQ ID NO: 236770 - DNA, 25 bp, Homo sapien
cccctctgatgccaagtgcatccat

SEQ ID NO: 236771 - DNA, 25 bp, Homo sapien
tcacccctctgatgccaagtgcatc

SEQ ID NO: 236772 - DNA, 25 bp, Homo sapien
ctgaaatgacggtcactctaaagtg

SEQ ID NO: 236773 - DNA, 25 bp, Homo sapien
ttacaaaaagttactcctgaaatga

SEQ ID NO: 236774 - DNA, 25 bp, Homo sapien
caaaaagttactcctgaaatgacgg

SEQ ID NO: 236775 - DNA, 25 bp, Homo sapien
ctctaaagtggaaaagttcagagcc

SEQ ID NO: 236776 - DNA, 25 bp, Homo sapien
caccaagaattggttctactaattg

SEQ ID NO: 236777 - DNA, 25 bp, Homo sapien
ttggttctactaattgtttcattct

SEQ ID NO: 236778 - DNA, 25 bp, Homo sapien
ttgagacctgaaggattatacactg

SEQ ID NO: 236779 - DNA, 25 bp, Homo sapien
ctgaaggattatacactgcagcacc

SEQ ID NO: 236780 - DNA, 25 bp, Homo sapien
ttcaagggcatcctcaagaagttca

SEQ ID NO: 236781 - DNA, 25 bp, Homo sapien
tgccttcaagggcatcctcaagaag

SEQ ID NO: 236782 - DNA, 25 bp, Homo sapien
gaagttcaagacttctgatcagctt

SEQ ID NO: 236783 - DNA, 25 bp, Homo sapien
agttcaagacttctgatcagcttca

SEQ ID NO: 236784 - DNA, 25 bp, Homo sapien
agtttccagttgtgcctcatgttca

SEQ ID NO: 236785 - DNA, 25 bp, Homo sapien
tcagtttccagttgtgcctcatgtt

SEQ ID NO: 236786 - DNA, 25 bp, Homo sapien
gtttccagttgtgcctcatgttcac

SEQ ID NO: 236787 - DNA, 25 bp, Homo sapien
cagtttccagttgtgcctcatgttc

SEQ ID NO: 236788 - DNA, 25 bp, Homo sapien
acagtaaccagatatggagattgca

SEQ ID NO: 236789 - DNA, 25 bp, Homo sapien
cagtaaccagatatggagattgcaa

SEQ ID NO: 236790 - DNA, 25 bp, Homo sapien
tggaaacattagcacactgtttgaa

SEQ ID NO: 236791 - DNA, 25 bp, Homo sapien
tccctgcaatccgagaaagcaacag

SEQ ID NO: 236792 - DNA, 25 bp, Homo sapien
tttccctgcaatccgagaaagcaac

SEQ ID NO: 236793 - DNA, 25 bp, Homo sapien
tttgtgcagttacactcctcccgag

SEQ ID NO: 236794 - DNA, 25 bp, Homo sapien
tctgcgttgcgggatttctgcaaac

SEQ ID NO: 236795 - DNA, 25 bp, Homo sapien
caagtattactcagccgcttgccgt

SEQ ID NO: 236796 - DNA, 25 bp, Homo sapien
cagttgcatgggacctagaaagcct

SEQ ID NO: 236797 - DNA, 25 bp, Homo sapien
gccgttcacctcgtgcagttgcatg

SEQ ID NO: 236798 - DNA, 25 bp, Homo sapien
tatataaatcaatagtacagcttgc

SEQ ID NO: 236799 - DNA, 25 bp, Homo sapien
catacagtattaggttagtcccaaa

SEQ ID NO: 236800 - DNA, 25 bp, Homo sapien
gcattatagcaaccaaacagttttg

SEQ ID NO: 236801 - DNA, 25 bp, Homo sapien
cttttaccttcggtgtatttgcctg

SEQ ID NO: 236802 - DNA, 25 bp, Homo sapien
caaagtatgaattaatgtagtcatt

SEQ ID NO: 236803 - DNA, 25 bp, Homo sapien
tccctaagtcttaaagtgtgggcaa

SEQ ID NO: 236804 - DNA, 25 bp, Homo sapien
agtcttaaagtgtgggcaaaactct

SEQ ID NO: 236805 - DNA, 25 bp, Homo sapien
gtcttaaagtgtgggcaaaactctg

SEQ ID NO: 236806 - DNA, 25 bp, Homo sapien
tgctccctaagtcttaaagtgtggg

SEQ ID NO: 236807 - DNA, 25 bp, Homo sapien
ttaggaataaatccacagcttgtgg

SEQ ID NO: 236808 - DNA, 25 bp, Homo sapien
cacattgactggataggcataatgg

SEQ ID NO: 236809 - DNA, 25 bp, Homo sapien
aatctctctgattagactccaacca

SEQ ID NO: 236810 - DNA, 25 bp, Homo sapien
tgcccagactgaaattgattaatgt

SEQ ID NO: 236811 - DNA, 25 bp, Homo sapien
agcagcttccaaggcagcctccaag

SEQ ID NO: 236812 - DNA, 25 bp, Homo sapien
gccttccccagcagcttccaaggca

SEQ ID NO: 236813 - DNA, 25 bp, Homo sapien
attatggccttccccagcagcttcc

SEQ ID NO: 236814 - DNA, 25 bp, Homo sapien
gcttccaaggcagcctccaagtcac

SEQ ID NO: 236815 - DNA, 25 bp, Homo sapien
ttggaaagttcccagtcatgttcac

SEQ ID NO: 236816 - DNA, 25 bp, Homo sapien
ggaaagttcccagtcatgttcacca

SEQ ID NO: 236817 - DNA, 25 bp, Homo sapien
aaagttcccagtcatgttcaccagg

SEQ ID NO: 236818 - DNA, 25 bp, Homo sapien
acattggaaagttcccagtcatgtt

SEQ ID NO: 236819 - DNA, 25 bp, Homo sapien
gctggaggctgaagtatttctgtcc

SEQ ID NO: 236820 - DNA, 25 bp, Homo sapien
tagctgaggttcaggatgttggaaa

SEQ ID NO: 236821 - DNA, 25 bp, Homo sapien
tctgtccctgaaatctatcattgag

SEQ ID NO: 236822 - DNA, 25 bp, Homo sapien
gaaatctatcattgagtacaaacag

SEQ ID NO: 236823 - DNA, 25 bp, Homo sapien
ctgtgtggaagagaacacagttctg

SEQ ID NO: 236824 - DNA, 25 bp, Homo sapien
tgtgtggaagagaacacagttctgg

SEQ ID NO: 236825 - DNA, 25 bp, Homo sapien
tggaagagaacacagttctggtctt

SEQ ID NO: 236826 - DNA, 25 bp, Homo sapien
tgtggaagagaacacagttctggtc

SEQ ID NO: 236827 - DNA, 25 bp, Homo sapien
ttcttgaatgggaccttgtcttcct

SEQ ID NO: 236828 - DNA, 25 bp, Homo sapien
ccttttttctggcactcttctctgc

SEQ ID NO: 236829 - DNA, 25 bp, Homo sapien
ttttttctggcactcttctctgcag

SEQ ID NO: 236830 - DNA, 25 bp, Homo sapien
gtcttccttttttctggcactcttc

SEQ ID NO: 236831 - DNA, 25 bp, Homo sapien
cgaaagtatcaagaggttgggatga

SEQ ID NO: 236832 - DNA, 25 bp, Homo sapien
ttacagacggatgcgttggagcaag

SEQ ID NO: 236833 - DNA, 25 bp, Homo sapien
gaaatatgacctccagaagcgaaag

SEQ ID NO: 236834 - DNA, 25 bp, Homo sapien
ttgggatgaagtgagtcgccgccac

SEQ ID NO: 236835 - DNA, 25 bp, Homo sapien
aacatgtttcttggtatgggtttgc

SEQ ID NO: 236836 - DNA, 25 bp, Homo sapien
tatctgtgagtggaatagcaattcc

SEQ ID NO: 236837 - DNA, 25 bp, Homo sapien
ggtttgctaggatctgcatgataaa

SEQ ID NO: 236838 - DNA, 25 bp, Homo sapien
ttcccatattagatggaggcctgta

SEQ ID NO: 236839 - DNA, 25 bp, Homo sapien
aaaaccctgactgtctttatgaact

SEQ ID NO: 236840 - DNA, 25 bp, Homo sapien
tgtctttatgaactccactaatcca

SEQ ID NO: 236841 - DNA, 25 bp, Homo sapien
tgatgaggttaaaaccctgactgtc

SEQ ID NO: 236842 - DNA, 25 bp, Homo sapien
tctttatgaactccactaatccagt

SEQ ID NO: 236843 - DNA, 25 bp, Homo sapien
tcagtgttggcaccattgtcgtaac

SEQ ID NO: 236844 - DNA, 25 bp, Homo sapien
tagatctgagataactacagctgct

SEQ ID NO: 236845 - DNA, 25 bp, Homo sapien
tagaggctgaccacataataaatgc

SEQ ID NO: 236846 - DNA, 25 bp, Homo sapien
ttgtcgtaacaaagcactcagtaga

SEQ ID NO: 236847 - DNA, 25 bp, Homo sapien
tgtaaaactttgctagctgcagaaa

SEQ ID NO: 236848 - DNA, 25 bp, Homo sapien
acacagtcagtagtggtatttcaag

SEQ ID NO: 236849 - DNA, 25 bp, Homo sapien
taactgtcagtatcatcaaaagtca

SEQ ID NO: 236850 - DNA, 25 bp, Homo sapien
gtcacttcagctgtaacttccaaca

SEQ ID NO: 236851 - DNA, 25 bp, Homo sapien
ctttcaggcatggtagcaatggcta

SEQ ID NO: 236852 - DNA, 25 bp, Homo sapien
tgtacccgggaagcactacagtctt

SEQ ID NO: 236853 - DNA, 25 bp, Homo sapien
catattgttgggtgcactttcaggc

SEQ ID NO: 236854 - DNA, 25 bp, Homo sapien
caatgtatttcacgatgttgaggga

SEQ ID NO: 236855 - DNA, 25 bp, Homo sapien
tcaaaagggaactagacaaacaaga

SEQ ID NO: 236856 - DNA, 25 bp, Homo sapien
agtttatagacatttccagctttat

SEQ ID NO: 236857 - DNA, 25 bp, Homo sapien
tcttctaatccaaagggctctttca

SEQ ID NO: 236858 - DNA, 25 bp, Homo sapien
tctcattcacttcttctaatccaaa

SEQ ID NO: 236859 - DNA, 25 bp, Homo sapien
tgaggacaaaaatcctttaggagtc

SEQ ID NO: 236860 - DNA, 25 bp, Homo sapien
caaaaatcctttaggagtcgtatgt

SEQ ID NO: 236861 - DNA, 25 bp, Homo sapien
ttctgcaataactgaggacaaaaat

SEQ ID NO: 236862 - DNA, 25 bp, Homo sapien
cctttaggagtcgtatgttgcaata

SEQ ID NO: 236863 - DNA, 25 bp, Homo sapien
ttcttatgtaagctcttccagtttt

SEQ ID NO: 236864 - DNA, 25 bp, Homo sapien
tcttatgtaagctcttccagttttc

SEQ ID NO: 236865 - DNA, 25 bp, Homo sapien
ctttcttatgtaagctcttccagtt

SEQ ID NO: 236866 - DNA, 25 bp, Homo sapien
tttcttatgtaagctcttccagttt

SEQ ID NO: 236867 - DNA, 25 bp, Homo sapien
gaaaatgatcatattataatgtcca

SEQ ID NO: 236868 - DNA, 25 bp, Homo sapien
tcatcaaagtgttaacagtcataat

SEQ ID NO: 236869 - DNA, 25 bp, Homo sapien
tctgccttttaggaaatttctatac

SEQ ID NO: 236870 - DNA, 25 bp, Homo sapien
aaaggactaattggcagttcatcaa

SEQ ID NO: 236871 - DNA, 25 bp, Homo sapien
ccttcgtggtggaagggcctagcta

SEQ ID NO: 236872 - DNA, 25 bp, Homo sapien
tattgtgcctcggtcttcccagtag

SEQ ID NO: 236873 - DNA, 25 bp, Homo sapien
gcagcatgcaagacatctaggagtt

SEQ ID NO: 236874 - DNA, 25 bp, Homo sapien
taaactcagtggataggaagtatcc

SEQ ID NO: 236875 - DNA, 25 bp, Homo sapien
ggttcgttctcaggtacatatgcaa

SEQ ID NO: 236876 - DNA, 25 bp, Homo sapien
ttcttgctgtagatcgtttcctggg

SEQ ID NO: 236877 - DNA, 25 bp, Homo sapien
ccatagtgtatattgccgaacttct

SEQ ID NO: 236878 - DNA, 25 bp, Homo sapien
gataatttcatctaaggaggtgtgc

SEQ ID NO: 236879 - DNA, 25 bp, Homo sapien
aaaggctgtgggtggtccactagct

SEQ ID NO: 236880 - DNA, 25 bp, Homo sapien
ggaatcccaagtgatcatagtataa

SEQ ID NO: 236881 - DNA, 25 bp, Homo sapien
gcttcaaagcgacccagagtcagct

SEQ ID NO: 236882 - DNA, 25 bp, Homo sapien
gagtcagcttatgtaggaatcccaa

SEQ ID NO: 236883 - DNA, 25 bp, Homo sapien
aaagtaatagctgatgtataaaaac

SEQ ID NO: 236884 - DNA, 25 bp, Homo sapien
tgcctttgtcgagtaaacctttcca

SEQ ID NO: 236885 - DNA, 25 bp, Homo sapien
gatatcatcatgaaagttagctatt

SEQ ID NO: 236886 - DNA, 25 bp, Homo sapien
ggtgttgccgccatcaactgaaagc

SEQ ID NO: 236887 - DNA, 25 bp, Homo sapien
aagtggcttcggggatgaaatacca

SEQ ID NO: 236888 - DNA, 25 bp, Homo sapien
agtggcttcggggatgaaataccat

SEQ ID NO: 236889 - DNA, 25 bp, Homo sapien
tacaaaaagtggcttcggggatgaa

SEQ ID NO: 236890 - DNA, 25 bp, Homo sapien
caaaaagtggcttcggggatgaaat

SEQ ID NO: 236891 - DNA, 25 bp, Homo sapien
aattttgattgtgaatttggttcat

SEQ ID NO: 236892 - DNA, 25 bp, Homo sapien
tcagggtgctcacagaggcaatggc

SEQ ID NO: 236893 - DNA, 25 bp, Homo sapien
tgatgaaggaaaccgaaaaattgga

SEQ ID NO: 236894 - DNA, 25 bp, Homo sapien
tccaacgggagaagagaatgatgaa

SEQ ID NO: 236895 - DNA, 25 bp, Homo sapien
gtaccacgctcttggtcaacaagaa

SEQ ID NO: 236896 - DNA, 25 bp, Homo sapien
gaagaggtaaactccagtaccacgc

SEQ ID NO: 236897 - DNA, 25 bp, Homo sapien
gcagggtacccattcaagaaatggt

SEQ ID NO: 236898 - DNA, 25 bp, Homo sapien
acaagaaatgttagcacagttggaa

SEQ ID NO: 236899 - DNA, 25 bp, Homo sapien
gtttctctcaaaggtaactgtaaca

SEQ ID NO: 236900 - DNA, 25 bp, Homo sapien
ctcacttagggttctgtttctctca

SEQ ID NO: 236901 - DNA, 25 bp, Homo sapien
cacttagggttctgtttctctcaaa

SEQ ID NO: 236902 - DNA, 25 bp, Homo sapien
ttctgtttctctcaaaggtaactgt

SEQ ID NO: 236903 - DNA, 25 bp, Homo sapien
aagtgctctctgttagcaaaacatc

SEQ ID NO: 236904 - DNA, 25 bp, Homo sapien
cttcaaagtgctctctgttagcaaa

SEQ ID NO: 236905 - DNA, 25 bp, Homo sapien
caaagtgctctctgttagcaaaaca

SEQ ID NO: 236906 - DNA, 25 bp, Homo sapien
gtgctctctgttagcaaaacatctt

SEQ ID NO: 236907 - DNA, 25 bp, Homo sapien
acagttttcctttcacatagtcaac

SEQ ID NO: 236908 - DNA, 25 bp, Homo sapien
ttcaaaaccacaaaagtctgccctg

SEQ ID NO: 236909 - DNA, 25 bp, Homo sapien
tcaaaaccacaaaagtctgccctgg

SEQ ID NO: 236910 - DNA, 25 bp, Homo sapien
caaaaccacaaaagtctgccctgga

SEQ ID NO: 236911 - DNA, 25 bp, Homo sapien
aaatgattcgttaaaaccatatcca

SEQ ID NO: 236912 - DNA, 25 bp, Homo sapien
gatggataacgaagatcttcactta

SEQ ID NO: 236913 - DNA, 25 bp, Homo sapien
atgattcgttaaaaccatatccacc

SEQ ID NO: 236914 - DNA, 25 bp, Homo sapien
tgtggcgtgatggataacgaagatc

SEQ ID NO: 236915 - DNA, 25 bp, Homo sapien
tagatagtctgtgtcatgttaaacc

SEQ ID NO: 236916 - DNA, 25 bp, Homo sapien
ccagaatccaccaaaggttatgcct

SEQ ID NO: 236917 - DNA, 25 bp, Homo sapien
caccaaaggttatgcctatgtaaac

SEQ ID NO: 236918 - DNA, 25 bp, Homo sapien
gttaaaccatgtggtatcataatca

SEQ ID NO: 236919 - DNA, 25 bp, Homo sapien
cttttcttggtcataggtaggaatg

SEQ ID NO: 236920 - DNA, 25 bp, Homo sapien
ttttaaatgtgaggtgctgatctga

SEQ ID NO: 236921 - DNA, 25 bp, Homo sapien
tcactttctggaatcacatccccag

SEQ ID NO: 236922 - DNA, 25 bp, Homo sapien
tcaactattgtatccacaatgaagc

SEQ ID NO: 236923 - DNA, 25 bp, Homo sapien
gaagcctagtaatgccacatcattg

SEQ ID NO: 236924 - DNA, 25 bp, Homo sapien
taccacatgtggatataatttactg

SEQ ID NO: 236925 - DNA, 25 bp, Homo sapien
ccatgatgtaaagtgattcttacta

SEQ ID NO: 236926 - DNA, 25 bp, Homo sapien
aaatatttagtccatgatgtaaagt

SEQ ID NO: 236927 - DNA, 25 bp, Homo sapien
tagtccatgatgtaaagtgattctt

SEQ ID NO: 236928 - DNA, 25 bp, Homo sapien
tatttagtccatgatgtaaagtgat

SEQ ID NO: 236929 - DNA, 25 bp, Homo sapien
cataacctccacctcattattgtag

SEQ ID NO: 236930 - DNA, 25 bp, Homo sapien
ctagagctctagcatcctcataacc

SEQ ID NO: 236931 - DNA, 25 bp, Homo sapien
cattattgtagagttgagtgtctac

SEQ ID NO: 236932 - DNA, 25 bp, Homo sapien
gagttgagtgtctacagtctccaca

SEQ ID NO: 236933 - DNA, 25 bp, Homo sapien
gcaaatggcagttgcggccaaccaa

SEQ ID NO: 236934 - DNA, 25 bp, Homo sapien
gagccagcttcgcgcttaggagaga

SEQ ID NO: 236935 - DNA, 25 bp, Homo sapien
agcttcgcgcttaggagagaatgct

SEQ ID NO: 236936 - DNA, 25 bp, Homo sapien
ctgagcctttgccttgtggtttccg

SEQ ID NO: 236937 - DNA, 25 bp, Homo sapien
gcatattactatctacataaaccat

SEQ ID NO: 236938 - DNA, 25 bp, Homo sapien
tagcatattactatctacataaacc

SEQ ID NO: 236939 - DNA, 25 bp, Homo sapien
ttagcatattactatctacataaac

SEQ ID NO: 236940 - DNA, 25 bp, Homo sapien
agcatattactatctacataaacca

SEQ ID NO: 236941 - DNA, 25 bp, Homo sapien
aaccaaccacaaaatccgatcactg

SEQ ID NO: 236942 - DNA, 25 bp, Homo sapien
tcaaccaaccacaaaatccgatcac

SEQ ID NO: 236943 - DNA, 25 bp, Homo sapien
accaaccacaaaatccgatcactga

SEQ ID NO: 236944 - DNA, 25 bp, Homo sapien
ccaaccacaaaatccgatcactgaa

SEQ ID NO: 236945 - DNA, 25 bp, Homo sapien
tcctgatgtgaacacacttagcatt

SEQ ID NO: 236946 - DNA, 25 bp, Homo sapien
ctattcatgattcccaagctgggag

SEQ ID NO: 236947 - DNA, 25 bp, Homo sapien
ctgggagcaagtcctcctgatgtga

SEQ ID NO: 236948 - DNA, 25 bp, Homo sapien
tggaagatgccattatatgtactat

SEQ ID NO: 236949 - DNA, 25 bp, Homo sapien
tgagggaaccctttgttagaacatg

SEQ ID NO: 236950 - DNA, 25 bp, Homo sapien
aagaaaagatacaacttgattattt

SEQ ID NO: 236951 - DNA, 25 bp, Homo sapien
aaagatacaacttgattatttcatt

SEQ ID NO: 236952 - DNA, 25 bp, Homo sapien
gagggaaccctttgttagaacatgc

SEQ ID NO: 236953 - DNA, 25 bp, Homo sapien
tgagggtataaaaggatccagaatc

SEQ ID NO: 236954 - DNA, 25 bp, Homo sapien
gtataaaaggatccagaatcagcaa

SEQ ID NO: 236955 - DNA, 25 bp, Homo sapien
cttgagggtataaaaggatccagaa

SEQ ID NO: 236956 - DNA, 25 bp, Homo sapien
gggtataaaaggatccagaatcagc

SEQ ID NO: 236957 - DNA, 25 bp, Homo sapien
ctttattatatactattcctgatga

SEQ ID NO: 236958 - DNA, 25 bp, Homo sapien
aaactgaaacatatataagtggcga

SEQ ID NO: 236959 - DNA, 25 bp, Homo sapien
tatactattcctgatgaaaattcaa

SEQ ID NO: 236960 - DNA, 25 bp, Homo sapien
gaaacatatataagtggcgattcca

SEQ ID NO: 236961 - DNA, 25 bp, Homo sapien
tcttccatatagactgagaagaaag

SEQ ID NO: 236962 - DNA, 25 bp, Homo sapien
tgttgactggcttagcactctagtc

SEQ ID NO: 236963 - DNA, 25 bp, Homo sapien
tcaggagccaagttttccctgttga

SEQ ID NO: 236964 - DNA, 25 bp, Homo sapien
gcgcaactagttgtgttcttctttt

SEQ ID NO: 236965 - DNA, 25 bp, Homo sapien
ttggtaacagccaatcagcagctac

SEQ ID NO: 236966 - DNA, 25 bp, Homo sapien
aatcagcagctaccaagtacagaag

SEQ ID NO: 236967 - DNA, 25 bp, Homo sapien
cagcagctaccaagtacagaagcat

SEQ ID NO: 236968 - DNA, 25 bp, Homo sapien
caatcagcagctaccaagtacagaa

SEQ ID NO: 236969 - DNA, 25 bp, Homo sapien
gcagtctgactttgacagcccagca

SEQ ID NO: 236970 - DNA, 25 bp, Homo sapien
cccatgacatagaagagaactcccc

SEQ ID NO: 236971 - DNA, 25 bp, Homo sapien
gcttctagttagagagacaatggcc

SEQ ID NO: 236972 - DNA, 25 bp, Homo sapien
gaggaatacacttggtgccaggcag

SEQ ID NO: 236973 - DNA, 25 bp, Homo sapien
tgcaatcactgaagacaacctccct

SEQ ID NO: 236974 - DNA, 25 bp, Homo sapien
ccaagtagctagagacagaggagag

SEQ ID NO: 236975 - DNA, 25 bp, Homo sapien
gggagaactaagcacctatccaagt

SEQ ID NO: 236976 - DNA, 25 bp, Homo sapien
gcaggtttgccatagtgctgaagac

SEQ ID NO: 236977 - DNA, 25 bp, Homo sapien
cacttgaaagttagggtgacagctg

SEQ ID NO: 236978 - DNA, 25 bp, Homo sapien
aactttgaaaggctagctgctgtca

SEQ ID NO: 236979 - DNA, 25 bp, Homo sapien
tggcagtaaaatccaacatattgcg

SEQ ID NO: 236980 - DNA, 25 bp, Homo sapien
agaaaactctacactcccaacagga

SEQ ID NO: 236981 - DNA, 25 bp, Homo sapien
tgtgagactggaactgcaccatcag

SEQ ID NO: 236982 - DNA, 25 bp, Homo sapien
tctccaagccagaggaaattctcca

SEQ ID NO: 236983 - DNA, 25 bp, Homo sapien
ggtgtaaaccagtgtgcctagccta

SEQ ID NO: 236984 - DNA, 25 bp, Homo sapien
tatacttattaaagggaacagcacc

SEQ ID NO: 236985 - DNA, 25 bp, Homo sapien
gctgataataggtttcaaatgaatc

SEQ ID NO: 236986 - DNA, 25 bp, Homo sapien
catagacatgcatgtaaggctgtat

SEQ ID NO: 236987 - DNA, 25 bp, Homo sapien
atgactggcacaacttggtatggtc

SEQ ID NO: 236988 - DNA, 25 bp, Homo sapien
tggtatggtcataaggctgataata

SEQ ID NO: 236989 - DNA, 25 bp, Homo sapien
tattgtgaccttacagagaatcagc

SEQ ID NO: 236990 - DNA, 25 bp, Homo sapien
taaaacatattgtgaccttacagag

SEQ ID NO: 236991 - DNA, 25 bp, Homo sapien
cataatgaagaaaccctacttctga

SEQ ID NO: 236992 - DNA, 25 bp, Homo sapien
ctgtgaacattatgaatctcataat

SEQ ID NO: 236993 - DNA, 25 bp, Homo sapien
cgaagattggcatatagaacagtca

SEQ ID NO: 236994 - DNA, 25 bp, Homo sapien
aaatacaagctctatgagggcggtg

SEQ ID NO: 236995 - DNA, 25 bp, Homo sapien
tagcacctgaaatgagcggcacaaa

SEQ ID NO: 236996 - DNA, 25 bp, Homo sapien
ggagagccagtgatttttattacca

SEQ ID NO: 236997 - DNA, 25 bp, Homo sapien
tattctccataaacttcccttactc

SEQ ID NO: 236998 - DNA, 25 bp, Homo sapien
ctattctccataaacttcccttact

SEQ ID NO: 236999 - DNA, 25 bp, Homo sapien
ttactcagcaatctttttcaccttc

SEQ ID NO: 237000 - DNA, 25 bp, Homo sapien
tactcagcaatctttttcaccttct

SEQ ID NO: 237001 - DNA, 25 bp, Homo sapien
ggcaaaatcggataaagatctcagc

SEQ ID NO: 237002 - DNA, 25 bp, Homo sapien
taactaccactttactgagccataa

SEQ ID NO: 237003 - DNA, 25 bp, Homo sapien
gatctcagcaatctactaaatttag

SEQ ID NO: 237004 - DNA, 25 bp, Homo sapien
tgatatacattaagctgctaacatg

SEQ ID NO: 237005 - DNA, 25 bp, Homo sapien
tctaggagagacaactacgtaagtt

SEQ ID NO: 237006 - DNA, 25 bp, Homo sapien
tactgtactaggttcaggaatgcag

SEQ ID NO: 237007 - DNA, 25 bp, Homo sapien
gaccctgctttcatggaaattacag

SEQ ID NO: 237008 - DNA, 25 bp, Homo sapien
gactatgtacctcttataggccaga

SEQ ID NO: 237009 - DNA, 25 bp, Homo sapien
ctccactaggagattactaaaactg

SEQ ID NO: 237010 - DNA, 25 bp, Homo sapien
ttcctacaattcttcacccacaaaa

SEQ ID NO: 237011 - DNA, 25 bp, Homo sapien
ttactaaaactgtaggccacattca

SEQ ID NO: 237012 - DNA, 25 bp, Homo sapien
tgtaatcatggtttatagaaatcac

SEQ ID NO: 237013 - DNA, 25 bp, Homo sapien
catggtacttcatatgggcccactt

SEQ ID NO: 237014 - DNA, 25 bp, Homo sapien
ggtacttcatatgggcccacttttc

SEQ ID NO: 237015 - DNA, 25 bp, Homo sapien
tcaaaatgaacatggtacttcatat

SEQ ID NO: 237016 - DNA, 25 bp, Homo sapien
aatgaacatggtacttcatatgggc

SEQ ID NO: 237017 - DNA, 25 bp, Homo sapien
tatgcaccaagataacattagaaag

SEQ ID NO: 237018 - DNA, 25 bp, Homo sapien
tttcctcattacacccaaccaaaca

SEQ ID NO: 237019 - DNA, 25 bp, Homo sapien
tcattacacccaaccaaacacagaa

SEQ ID NO: 237020 - DNA, 25 bp, Homo sapien
gcttatgcaccaagataacattaga

SEQ ID NO: 237021 - DNA, 25 bp, Homo sapien
gaggccatttccctaggagtactgc

SEQ ID NO: 237022 - DNA, 25 bp, Homo sapien
tgaaactgatatacttcagaggcca

SEQ ID NO: 237023 - DNA, 25 bp, Homo sapien
caggctgcagctatttgtgttgatc

SEQ ID NO: 237024 - DNA, 25 bp, Homo sapien
tatacctggctgttgagtacattag

SEQ ID NO: 237025 - DNA, 25 bp, Homo sapien
gatttccttctccttgcgtaagtgg

SEQ ID NO: 237026 - DNA, 25 bp, Homo sapien
tatcagctatcagcgtgaacccttc

SEQ ID NO: 237027 - DNA, 25 bp, Homo sapien
gcctaggcaaatatgaagagaagtt

SEQ ID NO: 237028 - DNA, 25 bp, Homo sapien
ccactgttaggaatgagcactgtaa

SEQ ID NO: 237029 - DNA, 25 bp, Homo sapien
tcaaggaaataaccagcattagtac

SEQ ID NO: 237030 - DNA, 25 bp, Homo sapien
agttgtatcaatacttctgtacctg

SEQ ID NO: 237031 - DNA, 25 bp, Homo sapien
gcattagtacctcctcacctgaaaa

SEQ ID NO: 237032 - DNA, 25 bp, Homo sapien
tataggtccacataaagcttcaagg

SEQ ID NO: 237033 - DNA, 25 bp, Homo sapien
tatagcaaggtatactcctggccta

SEQ ID NO: 237034 - DNA, 25 bp, Homo sapien
taaaaatccatgtgagtactgacct

SEQ ID NO: 237035 - DNA, 25 bp, Homo sapien
caaaatgttcagtggcagagagtac

SEQ ID NO: 237036 - DNA, 25 bp, Homo sapien
cataggagctggaataaagaaggca

SEQ ID NO: 237037 - DNA, 25 bp, Homo sapien
aaagtcttctaaatgccaatagtac

SEQ ID NO: 237038 - DNA, 25 bp, Homo sapien
caagaggtaaacagtggagccaaga

SEQ ID NO: 237039 - DNA, 25 bp, Homo sapien
cctaatcaataatgcctagcactga

SEQ ID NO: 237040 - DNA, 25 bp, Homo sapien
gcactgaaataatggtaaagtcttc

SEQ ID NO: 237041 - DNA, 25 bp, Homo sapien
tcatcctaataatactttgatttta

SEQ ID NO: 237042 - DNA, 25 bp, Homo sapien
tctatcagatacattatataccata

SEQ ID NO: 237043 - DNA, 25 bp, Homo sapien
taagtcttctaaaagaatgtcaagt

SEQ ID NO: 237044 - DNA, 25 bp, Homo sapien
tggtagcaaattgaaatcataagtc

SEQ ID NO: 237045 - DNA, 25 bp, Homo sapien
tataccataattatagcccccataa

SEQ ID NO: 237046 - DNA, 25 bp, Homo sapien
tcaagatggatttaatttgtgccac

SEQ ID NO: 237047 - DNA, 25 bp, Homo sapien
ggatttattactgtctctttccact

SEQ ID NO: 237048 - DNA, 25 bp, Homo sapien
ctgcttcaatgttattactgtcttc

SEQ ID NO: 237049 - DNA, 25 bp, Homo sapien
tgataacaaccttttctggatttat

SEQ ID NO: 237050 - DNA, 25 bp, Homo sapien
ctttccactggttcactgcttcaat

SEQ ID NO: 237051 - DNA, 25 bp, Homo sapien
ctacattcagacagttagttactct

SEQ ID NO: 237052 - DNA, 25 bp, Homo sapien
catttaacctgcttagtcattctga

SEQ ID NO: 237053 - DNA, 25 bp, Homo sapien
tgtacaatcatttaacttgacacaa

SEQ ID NO: 237054 - DNA, 25 bp, Homo sapien
tctgaagactagtttataaggttca

SEQ ID NO: 237055 - DNA, 25 bp, Homo sapien
cattcataccgttaagttgaggctc

SEQ ID NO: 237056 - DNA, 25 bp, Homo sapien
tcttagccaagagaatggaatcacc

SEQ ID NO: 237057 - DNA, 25 bp, Homo sapien
taccagataagccatacggagcaga

SEQ ID NO: 237058 - DNA, 25 bp, Homo sapien
gcagatgaccagcaagaacctttcc

SEQ ID NO: 237059 - DNA, 25 bp, Homo sapien
tcttacagagcttcgactgtaaagc

SEQ ID NO: 237060 - DNA, 25 bp, Homo sapien
cattggaggccttcagtaagcgtgt

SEQ ID NO: 237061 - DNA, 25 bp, Homo sapien
tctgtataagtggaaaaatcatagt

SEQ ID NO: 237062 - DNA, 25 bp, Homo sapien
tcttataaatcaactctcccgagct

SEQ ID NO: 237063 - DNA, 25 bp, Homo sapien
aaggtaccgtgcctcaagaatttgt

SEQ ID NO: 237064 - DNA, 25 bp, Homo sapien
tgatgagcttggaaggtaccgtgcc

SEQ ID NO: 237065 - DNA, 25 bp, Homo sapien
caagtccccaattcaagttctgcat

SEQ ID NO: 237066 - DNA, 25 bp, Homo sapien
tttactgcttgaaaacaagtcccca

SEQ ID NO: 237067 - DNA, 25 bp, Homo sapien
taagggttctgagtgacattgagca

SEQ ID NO: 237068 - DNA, 25 bp, Homo sapien
atttcctgtgtgctaagggttctga

SEQ ID NO: 237069 - DNA, 25 bp, Homo sapien
tttttgaaggtggtgttatatccaa

SEQ ID NO: 237070 - DNA, 25 bp, Homo sapien
tagcaaatacaaacgtttccataaa

SEQ ID NO: 237071 - DNA, 25 bp, Homo sapien
ctggtttgggcaatgtaagtattcc

SEQ ID NO: 237072 - DNA, 25 bp, Homo sapien
tagagggccaacttaaatctctgca

SEQ ID NO: 237073 - DNA, 25 bp, Homo sapien
ttatagaaacagtaggagtgtctcc

SEQ ID NO: 237074 - DNA, 25 bp, Homo sapien
taggagtgtctccataactagaggg

SEQ ID NO: 237075 - DNA, 25 bp, Homo sapien
tgtgatccagatctgttctactgaa

SEQ ID NO: 237076 - DNA, 25 bp, Homo sapien
ccagatctgttctactgaagaatta

SEQ ID NO: 237077 - DNA, 25 bp, Homo sapien
aaactgtgatccagatctgttctac

SEQ ID NO: 237078 - DNA, 25 bp, Homo sapien
gatccagatctgttctactgaagaa

SEQ ID NO: 237079 - DNA, 25 bp, Homo sapien
tgaattataaaaggacaaagatgtt

SEQ ID NO: 237080 - DNA, 25 bp, Homo sapien
gatgtttcaaatgccatgcaatcct

SEQ ID NO: 237081 - DNA, 25 bp, Homo sapien
ggacaaagatgtttcaaatgccatg

SEQ ID NO: 237082 - DNA, 25 bp, Homo sapien
ttataaaaggacaaagatgtttcaa

SEQ ID NO: 237083 - DNA, 25 bp, Homo sapien
ctgggtacactggacaatgaatcat

SEQ ID NO: 237084 - DNA, 25 bp, Homo sapien
actgggtacactggacaatgaatca

SEQ ID NO: 237085 - DNA, 25 bp, Homo sapien
tagatttgcttagcccaggggaacc

SEQ ID NO: 237086 - DNA, 25 bp, Homo sapien
ctggatgaatcgctgagatgagttt

SEQ ID NO: 237087 - DNA, 25 bp, Homo sapien
gaatcgctgagatgagtttgtaaga

SEQ ID NO: 237088 - DNA, 25 bp, Homo sapien
gaagtttgttcgtccttaaatcaca

SEQ ID NO: 237089 - DNA, 25 bp, Homo sapien
catatagaatgggttatacacatca

SEQ ID NO: 237090 - DNA, 25 bp, Homo sapien
ggaaagttctacctttcgatctcca

SEQ ID NO: 237091 - DNA, 25 bp, Homo sapien
tagctaggtccgtgctgggatgaac

SEQ ID NO: 237092 - DNA, 25 bp, Homo sapien
ggaaagcgtcgactcaaatcaggtg

SEQ ID NO: 237093 - DNA, 25 bp, Homo sapien
cagatgagatcaggagcattcaggg

SEQ ID NO: 237094 - DNA, 25 bp, Homo sapien
agatcagatgagatcaggagcattc

SEQ ID NO: 237095 - DNA, 25 bp, Homo sapien
gcattcagggtggtatggccataaa

SEQ ID NO: 237096 - DNA, 25 bp, Homo sapien
tcagatgagatcaggagcattcagg

SEQ ID NO: 237097 - DNA, 25 bp, Homo sapien
ctactgtacattaagttcttctaca

SEQ ID NO: 237098 - DNA, 25 bp, Homo sapien
aataatagcacttaaatgctacata

SEQ ID NO: 237099 - DNA, 25 bp, Homo sapien
tatggagggccaattacatattatt

SEQ ID NO: 237100 - DNA, 25 bp, Homo sapien
ttattgtattatgatcagatttcaa

SEQ ID NO: 237101 - DNA, 25 bp, Homo sapien
cattttgactatttgggactgctgc

SEQ ID NO: 237102 - DNA, 25 bp, Homo sapien
ccatcagatggtaatttggaaagca

SEQ ID NO: 237103 - DNA, 25 bp, Homo sapien
taagataacttaaacttgggcacca

SEQ ID NO: 237104 - DNA, 25 bp, Homo sapien
gcaaataatcctcagtacagccaag

SEQ ID NO: 237105 - DNA, 25 bp, Homo sapien
agaaacatcctccacagcaactctt

SEQ ID NO: 237106 - DNA, 25 bp, Homo sapien
gtgtttttctgtttcaccatagaaa

SEQ ID NO: 237107 - DNA, 25 bp, Homo sapien
ccacagcaactctttataaattctg

SEQ ID NO: 237108 - DNA, 25 bp, Homo sapien
ttcaccatagaaacatcctccacag

SEQ ID NO: 237109 - DNA, 25 bp, Homo sapien
gacacaaacttccaatcttaatatt

SEQ ID NO: 237110 - DNA, 25 bp, Homo sapien
ttccaatatccagcaaaagacacaa

SEQ ID NO: 237111 - DNA, 25 bp, Homo sapien
tacattcaatttccaatatccagca

SEQ ID NO: 237112 - DNA, 25 bp, Homo sapien
ccaatatccagcaaaagacacaaac

SEQ ID NO: 237113 - DNA, 25 bp, Homo sapien
tccatgtacatttgcaactttgagg

SEQ ID NO: 237114 - DNA, 25 bp, Homo sapien
tgtgggaagccgtgatcgcatcact

SEQ ID NO: 237115 - DNA, 25 bp, Homo sapien
ctttgaggtgcaatgttccatgtac

SEQ ID NO: 237116 - DNA, 25 bp, Homo sapien
cctgtaaatcccagtattttgtggg

SEQ ID NO: 237117 - DNA, 25 bp, Homo sapien
gccaagccacgccgcgcctttcccc

SEQ ID NO: 237118 - DNA, 25 bp, Homo sapien
agcccgcaaggcggggccgccctca

SEQ ID NO: 237119 - DNA, 25 bp, Homo sapien
tgagccaagccacgccgcgcctttc

SEQ ID NO: 237120 - DNA, 25 bp, Homo sapien
tgggagaagcgcacctgagccaagc

SEQ ID NO: 237121 - DNA, 25 bp, Homo sapien
ctcgcgcggccgcgcctcgaggtcc

SEQ ID NO: 237122 - DNA, 25 bp, Homo sapien
agtgggcgctctgctgtcgccgcct

SEQ ID NO: 237123 - DNA, 25 bp, Homo sapien
tgtgactccggtcacctcgcgcggc

SEQ ID NO: 237124 - DNA, 25 bp, Homo sapien
tggaggcagtgggcgctctgctgtc

SEQ ID NO: 237125 - DNA, 25 bp, Homo sapien
tctccccatgagagggtgactggtt

SEQ ID NO: 237126 - DNA, 25 bp, Homo sapien
tacactattaaaggccaagtgctga

SEQ ID NO: 237127 - DNA, 25 bp, Homo sapien
tatgccctagtagtggtctccccat

SEQ ID NO: 237128 - DNA, 25 bp, Homo sapien
tctataggaactacagaaatttggg

SEQ ID NO: 237129 - DNA, 25 bp, Homo sapien
tgggcacccgttgatcagatgttta

SEQ ID NO: 237130 - DNA, 25 bp, Homo sapien
tagtctatggttgggcacccgttga

SEQ ID NO: 237131 - DNA, 25 bp, Homo sapien
cagatgtttaccctggtccacttca

SEQ ID NO: 237132 - DNA, 25 bp, Homo sapien
cccgttgatcagatgtttaccctgg

SEQ ID NO: 237133 - DNA, 25 bp, Homo sapien
tgcgtatttattccagctcccttgc

SEQ ID NO: 237134 - DNA, 25 bp, Homo sapien
tttattccagctcccttgcaagtgt

SEQ ID NO: 237135 - DNA, 25 bp, Homo sapien
ttccagctcccttgcaagtgtcagc

SEQ ID NO: 237136 - DNA, 25 bp, Homo sapien
ctgcgtatttattccagctcccttg

SEQ ID NO: 237137 - DNA, 25 bp, Homo sapien
gaccttgcagcactcctagttatta

SEQ ID NO: 237138 - DNA, 25 bp, Homo sapien
tcttaatatctgaagcaaacgtgtt

SEQ ID NO: 237139 - DNA, 25 bp, Homo sapien
gttattgaagtgctgcagttgccca

SEQ ID NO: 237140 - DNA, 25 bp, Homo sapien
gttgcccagaattcagcctgacctt

SEQ ID NO: 237141 - DNA, 25 bp, Homo sapien
tgacctgaacaatgggctgggagct

SEQ ID NO: 237142 - DNA, 25 bp, Homo sapien
ggagctggagttctgcataatagag

SEQ ID NO: 237143 - DNA, 25 bp, Homo sapien
ggaggctgctattccttgcaacgta

SEQ ID NO: 237144 - DNA, 25 bp, Homo sapien
caacgtatttttgtgcagctgagga

SEQ ID NO: 237145 - DNA, 25 bp, Homo sapien
aaatgaatgctaacctccaactgag

SEQ ID NO: 237146 - DNA, 25 bp, Homo sapien
tgtcacatcaccgtaactcctctgg

SEQ ID NO: 237147 - DNA, 25 bp, Homo sapien
acaggattcagggttgacatcgaca

SEQ ID NO: 237148 - DNA, 25 bp, Homo sapien
tcagcaggttacaaaagaaggatct

SEQ ID NO: 237149 - DNA, 25 bp, Homo sapien
acaaggaccccagagctcggtctct

SEQ ID NO: 237150 - DNA, 25 bp, Homo sapien
ggtctctagcaccagactctgtgct

SEQ ID NO: 237151 - DNA, 25 bp, Homo sapien
ccagagctcggtctctagcaccaga

SEQ ID NO: 237152 - DNA, 25 bp, Homo sapien
ggaccccagagctcggtctctagca

SEQ ID NO: 237153 - DNA, 25 bp, Homo sapien
tattgacactgaccacctactatgg

SEQ ID NO: 237154 - DNA, 25 bp, Homo sapien
gcagaagtgactccctctacacagg

SEQ ID NO: 237155 - DNA, 25 bp, Homo sapien
caggagtttgcatttagaaccccag

SEQ ID NO: 237156 - DNA, 25 bp, Homo sapien
tctttagctcacctcagggtgtgcc

SEQ ID NO: 237157 - DNA, 25 bp, Homo sapien
gccaagacttacctaagaaagtgtc

SEQ ID NO: 237158 - DNA, 25 bp, Homo sapien
agaaagtgtctgaagtatgttaccc

SEQ ID NO: 237159 - DNA, 25 bp, Homo sapien
tctgggcaaataacaccccaagggc

SEQ ID NO: 237160 - DNA, 25 bp, Homo sapien
ccaggccacaaaaatgcgttgaaac

SEQ ID NO: 237161 - DNA, 25 bp, Homo sapien
ccagaggcagtggttcggaggcgct

SEQ ID NO: 237162 - DNA, 25 bp, Homo sapien
ttcggaggcgctcggtgcaaagctc

SEQ ID NO: 237163 - DNA, 25 bp, Homo sapien
gcaaagctcacgtaaaccttcagca

SEQ ID NO: 237164 - DNA, 25 bp, Homo sapien
aggcgctcggtgcaaagctcacgta

SEQ ID NO: 237165 - DNA, 25 bp, Homo sapien
ccaagggaatcaccctctgttttat

SEQ ID NO: 237166 - DNA, 25 bp, Homo sapien
tggcctttgcttttcggagccgagc

SEQ ID NO: 237167 - DNA, 25 bp, Homo sapien
ttcggagccgagctgagtgagtccc

SEQ ID NO: 237168 - DNA, 25 bp, Homo sapien
gggaatcaccctctgttttataagc

SEQ ID NO: 237169 - DNA, 25 bp, Homo sapien
tagactccacctcagctatcaggga

SEQ ID NO: 237170 - DNA, 25 bp, Homo sapien
taggatgggagcaccctcagatgga

SEQ ID NO: 237171 - DNA, 25 bp, Homo sapien
tgaagccttgggttgattcctggga

SEQ ID NO: 237172 - DNA, 25 bp, Homo sapien
tccagtggccagttttcagatcgtc

SEQ ID NO: 237173 - DNA, 25 bp, Homo sapien
gaaatgcctaacgtctgtgtcgctc

SEQ ID NO: 237174 - DNA, 25 bp, Homo sapien
gaacatagcatgtgtctgaaggcct

SEQ ID NO: 237175 - DNA, 25 bp, Homo sapien
taaaaacccttcgatcctgctgtgg

SEQ ID NO: 237176 - DNA, 25 bp, Homo sapien
aaaagcaaactagctactcccaggg

SEQ ID NO: 237177 - DNA, 25 bp, Homo sapien
tcagaatgggtactgcgacacatat

SEQ ID NO: 237178 - DNA, 25 bp, Homo sapien
ggtactgcgacacatatatccgcag

SEQ ID NO: 237179 - DNA, 25 bp, Homo sapien
cacatatatccgcagtcggatcacg

SEQ ID NO: 237180 - DNA, 25 bp, Homo sapien
gagctgcctctgaagttgatgacag

SEQ ID NO: 237181 - DNA, 25 bp, Homo sapien
ggagggcgccccataaagttctgaa

SEQ ID NO: 237182 - DNA, 25 bp, Homo sapien
cacctaatgagagatgctcgcggtc

SEQ ID NO: 237183 - DNA, 25 bp, Homo sapien
catggcttagggctgtcacttcacc

SEQ ID NO: 237184 - DNA, 25 bp, Homo sapien
tgtggcttaacacaatccccagggc

SEQ ID NO: 237185 - DNA, 25 bp, Homo sapien
gggcaagtgcaaacttccaagttgt

SEQ ID NO: 237186 - DNA, 25 bp, Homo sapien
ctccagagggagatctgcagagccc

SEQ ID NO: 237187 - DNA, 25 bp, Homo sapien
tcactgcgtgaacaaagaccaagag

SEQ ID NO: 237188 - DNA, 25 bp, Homo sapien
agttgagaaccctgagctagggaca

SEQ ID NO: 237189 - DNA, 25 bp, Homo sapien
cattagtaggcttggtggtgcgaaa

SEQ ID NO: 237190 - DNA, 25 bp, Homo sapien
taatgaaataaacccctgagagccc

SEQ ID NO: 237191 - DNA, 25 bp, Homo sapien
ttagggatactacataaggccacca

SEQ ID NO: 237192 - DNA, 25 bp, Homo sapien
tccacattcggcttttagggcagag

SEQ ID NO: 237193 - DNA, 25 bp, Homo sapien
tgtttgtttctcaacgctcagtgcc

SEQ ID NO: 237194 - DNA, 25 bp, Homo sapien
tgcacacgaatgactgaacgccagt

SEQ ID NO: 237195 - DNA, 25 bp, Homo sapien
gacttgacttgagaatcgccacttt

SEQ ID NO: 237196 - DNA, 25 bp, Homo sapien
gctggtaacggaagaatgcacacga

SEQ ID NO: 237197 - DNA, 25 bp, Homo sapien
tgccaggctgcttaggttcaaatcc

SEQ ID NO: 237198 - DNA, 25 bp, Homo sapien
tgtgtacacgtacgcatgtgggcat

SEQ ID NO: 237199 - DNA, 25 bp, Homo sapien
tacaggcactatacacggcttgctg

SEQ ID NO: 237200 - DNA, 25 bp, Homo sapien
tctagggctcagtgagagacaggca

SEQ ID NO: 237201 - DNA, 25 bp, Homo sapien
ctgagctgccccacaccatagagag

SEQ ID NO: 237202 - DNA, 25 bp, Homo sapien
ttgtgtaaggtctgctgccaggatg

SEQ ID NO: 237203 - DNA, 25 bp, Homo sapien
ccatagagaggaacggggaatgcaa

SEQ ID NO: 237204 - DNA, 25 bp, Homo sapien
gaaaggcccttgtgtaaggtctgct

SEQ ID NO: 237205 - DNA, 25 bp, Homo sapien
caccctgtgagagcaacagctttgg

SEQ ID NO: 237206 - DNA, 25 bp, Homo sapien
tgtgaagtcctcaggcaaatctcca

SEQ ID NO: 237207 - DNA, 25 bp, Homo sapien
gctcctgagggaataccaatgcctg

SEQ ID NO: 237208 - DNA, 25 bp, Homo sapien
tggagtagcaggtgaccaaccacag

SEQ ID NO: 237209 - DNA, 25 bp, Homo sapien
taccattaccgggagggtgacaaga

SEQ ID NO: 237210 - DNA, 25 bp, Homo sapien
agcactaccattaccgggagggtga

SEQ ID NO: 237211 - DNA, 25 bp, Homo sapien
ctaccattaccgggagggtgacaag

SEQ ID NO: 237212 - DNA, 25 bp, Homo sapien
cactaccattaccgggagggtgaca

SEQ ID NO: 237213 - DNA, 25 bp, Homo sapien
gaacatgcctgtgaatcctagggaa

SEQ ID NO: 237214 - DNA, 25 bp, Homo sapien
tgacgtgagagaatgagacaatcca

SEQ ID NO: 237215 - DNA, 25 bp, Homo sapien
cacaggtttgatccaacagcgtgag

SEQ ID NO: 237216 - DNA, 25 bp, Homo sapien
gaattgacgtgagatgtaacccagg

SEQ ID NO: 237217 - DNA, 25 bp, Homo sapien
cttaagaaatacttgtcacatgggt

SEQ ID NO: 237218 - DNA, 25 bp, Homo sapien
ggcctgcataggaggtacttaagaa

SEQ ID NO: 237219 - DNA, 25 bp, Homo sapien
gcataggaggtacttaagaaatact

SEQ ID NO: 237220 - DNA, 25 bp, Homo sapien
tacttgtcacatgggttggttgaaa

SEQ ID NO: 237221 - DNA, 25 bp, Homo sapien
tgccctcattcccagatttgatctg

SEQ ID NO: 237222 - DNA, 25 bp, Homo sapien
tcagcgggaacggagcgtcctgaca

SEQ ID NO: 237223 - DNA, 25 bp, Homo sapien
catgtcccggtacaagatggtaaag

SEQ ID NO: 237224 - DNA, 25 bp, Homo sapien
aaatgtaataggccccagggtagcg

SEQ ID NO: 237225 - DNA, 25 bp, Homo sapien
tcacgtgagaactcaagaaatccat

SEQ ID NO: 237226 - DNA, 25 bp, Homo sapien
gagaactcaagaaatccattccagg

SEQ ID NO: 237227 - DNA, 25 bp, Homo sapien
cgtgagaactcaagaaatccattcc

SEQ ID NO: 237228 - DNA, 25 bp, Homo sapien
gaactcaagaaatccattccaggtg

SEQ ID NO: 237229 - DNA, 25 bp, Homo sapien
ctttacatttgccacgtaggccaaa

SEQ ID NO: 237230 - DNA, 25 bp, Homo sapien
ttctccaagatactttacatttgcc

SEQ ID NO: 237231 - DNA, 25 bp, Homo sapien
atttgccacgtaggccaaatatgcc

SEQ ID NO: 237232 - DNA, 25 bp, Homo sapien
cattctccaagatactttacatttg

SEQ ID NO: 237233 - DNA, 25 bp, Homo sapien
cactggcacacacccatagtcctag

SEQ ID NO: 237234 - DNA, 25 bp, Homo sapien
tgagcagagtatggtgtctcatgcc

SEQ ID NO: 237235 - DNA, 25 bp, Homo sapien
caagacctctggctttaccaaatac

SEQ ID NO: 237236 - DNA, 25 bp, Homo sapien
ggactcctccatctaaaccatccag

SEQ ID NO: 237237 - DNA, 25 bp, Homo sapien
gctgcaggttgcacgtgtggttcct

SEQ ID NO: 237238 - DNA, 25 bp, Homo sapien
ccccttgtaaattgtagcacgtctg

SEQ ID NO: 237239 - DNA, 25 bp, Homo sapien
cagataaggctcctcacagcggatg

SEQ ID NO: 237240 - DNA, 25 bp, Homo sapien
ggttcctgtgctcacattcgttgat

SEQ ID NO: 237241 - DNA, 25 bp, Homo sapien
tggcagcttcggttgtcatccagca

SEQ ID NO: 237242 - DNA, 25 bp, Homo sapien
ttggcagcttcggttgtcatccagc

SEQ ID NO: 237243 - DNA, 25 bp, Homo sapien
cttggcagcttcggttgtcatccag

SEQ ID NO: 237244 - DNA, 25 bp, Homo sapien
gcaggagcagaagtatgtgccgggc

SEQ ID NO: 237245 - DNA, 25 bp, Homo sapien
agcagaagtatgtgccgggctggtt

SEQ ID NO: 237246 - DNA, 25 bp, Homo sapien
ggaactcagagaagctgcactcgtc

SEQ ID NO: 237247 - DNA, 25 bp, Homo sapien
gccgggctggttcacacactcatgt

SEQ ID NO: 237248 - DNA, 25 bp, Homo sapien
gataaatgtgagtaagaggtggtcc

SEQ ID NO: 237249 - DNA, 25 bp, Homo sapien
ccctatgtgggatgctacagagata

SEQ ID NO: 237250 - DNA, 25 bp, Homo sapien
gagtccataaactagtgtgggcaga

SEQ ID NO: 237251 - DNA, 25 bp, Homo sapien
gaggtggtccctattctcaaggagt

SEQ ID NO: 237252 - DNA, 25 bp, Homo sapien
acctctgtcctagaaggtagcccca

SEQ ID NO: 237253 - DNA, 25 bp, Homo sapien
caacatgccaaatcgggtgactgct

SEQ ID NO: 237254 - DNA, 25 bp, Homo sapien
tatccccaagacttgagtcggtgct

SEQ ID NO: 237255 - DNA, 25 bp, Homo sapien
taagtactttctgtgatatccccaa

SEQ ID NO: 237256 - DNA, 25 bp, Homo sapien
taggtgttgacgcaggtttgcacgc

SEQ ID NO: 237257 - DNA, 25 bp, Homo sapien
tatcctgggtcacagcggcagatga

SEQ ID NO: 237258 - DNA, 25 bp, Homo sapien
gttctcggtggcacactcgttcaca

SEQ ID NO: 237259 - DNA, 25 bp, Homo sapien
catcttcctcaagttcatatcctgg

SEQ ID NO: 237260 - DNA, 25 bp, Homo sapien
ccaaggcacattgctgactgtcctc

SEQ ID NO: 237261 - DNA, 25 bp, Homo sapien
gccaaggcacattgctgactgtcct

SEQ ID NO: 237262 - DNA, 25 bp, Homo sapien
cggagtatgcgacgccctgtgctgc

SEQ ID NO: 237263 - DNA, 25 bp, Homo sapien
ctttattatgctgtggacttggcac

SEQ ID NO: 237264 - DNA, 25 bp, Homo sapien
tggcactgccaggtgtattatctgc

SEQ ID NO: 237265 - DNA, 25 bp, Homo sapien
aggtgtattatctgctctttgtcac

SEQ ID NO: 237266 - DNA, 25 bp, Homo sapien
catcctcattgagggtaaaaccagg

SEQ ID NO: 237267 - DNA, 25 bp, Homo sapien
taaaaccagggttgcatgtacaaga

SEQ ID NO: 237268 - DNA, 25 bp, Homo sapien
gctggcagtaaccatagcgacattc

SEQ ID NO: 237269 - DNA, 25 bp, Homo sapien
ggaacattcgcacagagctgctggc

SEQ ID NO: 237270 - DNA, 25 bp, Homo sapien
tggccttccagaagccaatatccgt

SEQ ID NO: 237271 - DNA, 25 bp, Homo sapien
aatatccgtcggtgcaggagcaggt

SEQ ID NO: 237272 - DNA, 25 bp, Homo sapien
tcagtattgatgcagatctgggtgg

SEQ ID NO: 237273 - DNA, 25 bp, Homo sapien
aggagcaggtgtacccgccttcagt

SEQ ID NO: 237274 - DNA, 25 bp, Homo sapien
ggagtgatggatggcaattgtgtgc

SEQ ID NO: 237275 - DNA, 25 bp, Homo sapien
tgtgtgctgggaacaacactgcctt

SEQ ID NO: 237276 - DNA, 25 bp, Homo sapien
gaacaacactgccttaggaatttct

SEQ ID NO: 237277 - DNA, 25 bp, Homo sapien
tggcaattgtgtgctgggaacaaca

SEQ ID NO: 237278 - DNA, 25 bp, Homo sapien
aatgaacacatgaacggcaaacatc

SEQ ID NO: 237279 - DNA, 25 bp, Homo sapien
ctggtgtaatgctgtgtccctggta

SEQ ID NO: 237280 - DNA, 25 bp, Homo sapien
tgtccctggtaatgttcaagaacta

SEQ ID NO: 237281 - DNA, 25 bp, Homo sapien
tgaacggcaaacatcaatccctcgc

SEQ ID NO: 237282 - DNA, 25 bp, Homo sapien
caccacgccaaccactgtcagctta

SEQ ID NO: 237283 - DNA, 25 bp, Homo sapien
ctgtcagcttacacacctgatggag

SEQ ID NO: 237284 - DNA, 25 bp, Homo sapien
gtgtgtgtactttaaaaacagccac

SEQ ID NO: 237285 - DNA, 25 bp, Homo sapien
gtgatctggtacacatcagtgacct

SEQ ID NO: 237286 - DNA, 25 bp, Homo sapien
tctggtacacatcagtgaccttctg

SEQ ID NO: 237287 - DNA, 25 bp, Homo sapien
cagggtgatctggtacacatcagtg

SEQ ID NO: 237288 - DNA, 25 bp, Homo sapien
gggtgatctggtacacatcagtgac

SEQ ID NO: 237289 - DNA, 25 bp, Homo sapien
actgacactaaagggttgcgtcaag

SEQ ID NO: 237290 - DNA, 25 bp, Homo sapien
tgtctctgagttagcttcaatcaga

SEQ ID NO: 237291 - DNA, 25 bp, Homo sapien
caagagtctgctcataagtgcctga

SEQ ID NO: 237292 - DNA, 25 bp, Homo sapien
cataagtgcctgatcaattgggttc

SEQ ID NO: 237293 - DNA, 25 bp, Homo sapien
gagtcaggatacgaactcaaggccg

SEQ ID NO: 237294 - DNA, 25 bp, Homo sapien
cctggtagtcagcatgaatgagtca

SEQ ID NO: 237295 - DNA, 25 bp, Homo sapien
tagtccagtgtttcgccaaatgtgc

SEQ ID NO: 237296 - DNA, 25 bp, Homo sapien
tcaaggccgcctatttgagcccagt

SEQ ID NO: 237297 - DNA, 25 bp, Homo sapien
gacaaagacagacccgagctgatat

SEQ ID NO: 237298 - DNA, 25 bp, Homo sapien
catcaagctgatgctagcacaagtg

SEQ ID NO: 237299 - DNA, 25 bp, Homo sapien
tcttaggtcgattacagctggagct

SEQ ID NO: 237300 - DNA, 25 bp, Homo sapien
tccaccgtgttatgacacagccaga

SEQ ID NO: 237301 - DNA, 25 bp, Homo sapien
caatttcatactgattccggatgca

SEQ ID NO: 237302 - DNA, 25 bp, Homo sapien
tctgttctgtctgacctcactgatt

SEQ ID NO: 237303 - DNA, 25 bp, Homo sapien
tcccatggaaactgttgaagatgcc

SEQ ID NO: 237304 - DNA, 25 bp, Homo sapien
tactgattccggatgcaaagtctgt

SEQ ID NO: 237305 - DNA, 25 bp, Homo sapien
agggcccagcactggctgtccccat

SEQ ID NO: 237306 - DNA, 25 bp, Homo sapien
ccagagtctgtggatgctggctgcc

SEQ ID NO: 237307 - DNA, 25 bp, Homo sapien
ccgccggccccagagtctgtggatg

SEQ ID NO: 237308 - DNA, 25 bp, Homo sapien
tcccctctggcccggctccgacaag

SEQ ID NO: 237309 - DNA, 25 bp, Homo sapien
acattagattgcatctaacactcac

SEQ ID NO: 237310 - DNA, 25 bp, Homo sapien
gcatctttttccattagcccgtcag

SEQ ID NO: 237311 - DNA, 25 bp, Homo sapien
cagtgcttctgtacattagattgca

SEQ ID NO: 237312 - DNA, 25 bp, Homo sapien
cattagcccgtcagtgcttctgtac

SEQ ID NO: 237313 - DNA, 25 bp, Homo sapien
caggacagccacagcgaccatggcc

SEQ ID NO: 237314 - DNA, 25 bp, Homo sapien
tgccgtggtacccagcgtcttgctg

SEQ ID NO: 237315 - DNA, 25 bp, Homo sapien
tgagctgccgtggtacccagcgtct

SEQ ID NO: 237316 - DNA, 25 bp, Homo sapien
cccagcgtcttgctgggtgcaggac

SEQ ID NO: 237317 - DNA, 25 bp, Homo sapien
tctgatgacgggtcagcccagtacc

SEQ ID NO: 237318 - DNA, 25 bp, Homo sapien
tctctctgatgacgggtcagcccag

SEQ ID NO: 237319 - DNA, 25 bp, Homo sapien
tgatgacgggtcagcccagtaccac

SEQ ID NO: 237320 - DNA, 25 bp, Homo sapien
catgggtctctctgatgacgggtca

SEQ ID NO: 237321 - DNA, 25 bp, Homo sapien
cagagtctaagagggccccagagaa

SEQ ID NO: 237322 - DNA, 25 bp, Homo sapien
gaaaggctcgaaagctgcctctgtg

SEQ ID NO: 237323 - DNA, 25 bp, Homo sapien
gatggcagcccaacggataggagaa

SEQ ID NO: 237324 - DNA, 25 bp, Homo sapien
aggtacccaggtagctcttcagcac

SEQ ID NO: 237325 - DNA, 25 bp, Homo sapien
catgaggccagtcagtgcactgaac

SEQ ID NO: 237326 - DNA, 25 bp, Homo sapien
ggccagtcagtgcactgaacctcac

SEQ ID NO: 237327 - DNA, 25 bp, Homo sapien
tgaggccagtcagtgcactgaacct

SEQ ID NO: 237328 - DNA, 25 bp, Homo sapien
gaacatgaggccagtcagtgcactg

SEQ ID NO: 237329 - DNA, 25 bp, Homo sapien
tgccaataaccaaagccatctacca

SEQ ID NO: 237330 - DNA, 25 bp, Homo sapien
cagaccagtgccaataaccaaagcc

SEQ ID NO: 237331 - DNA, 25 bp, Homo sapien
cctcacaagtggagacttggtaggg

SEQ ID NO: 237332 - DNA, 25 bp, Homo sapien
tcccggcaggtgtcagcaggcatgt

SEQ ID NO: 237333 - DNA, 25 bp, Homo sapien
tgctcatgcaatgcctcctccacag

SEQ ID NO: 237334 - DNA, 25 bp, Homo sapien
gctcatgcaatgcctcctccacagg

SEQ ID NO: 237335 - DNA, 25 bp, Homo sapien
actgctcatgcaatgcctcctccac

SEQ ID NO: 237336 - DNA, 25 bp, Homo sapien
ctgctcatgcaatgcctcctccaca

SEQ ID NO: 237337 - DNA, 25 bp, Homo sapien
taactggttggagtccacactctcc

SEQ ID NO: 237338 - DNA, 25 bp, Homo sapien
ctggttggagtccacactctccttt

SEQ ID NO: 237339 - DNA, 25 bp, Homo sapien
aactggttggagtccacactctcct

SEQ ID NO: 237340 - DNA, 25 bp, Homo sapien
ctaactggttggagtccacactctc

SEQ ID NO: 237341 - DNA, 25 bp, Homo sapien
ccatctggtatccaaagcggcatat

SEQ ID NO: 237342 - DNA, 25 bp, Homo sapien
ccacacattggttgctttcatccat

SEQ ID NO: 237343 - DNA, 25 bp, Homo sapien
acattggttgctttcatccatctgg

SEQ ID NO: 237344 - DNA, 25 bp, Homo sapien
tctggtatccaaagcggcatataag

SEQ ID NO: 237345 - DNA, 25 bp, Homo sapien
tcgagtagggccctcgatacacagg

SEQ ID NO: 237346 - DNA, 25 bp, Homo sapien
cacagggtttgtccggggaatgcat

SEQ ID NO: 237347 - DNA, 25 bp, Homo sapien
cagctgctgggtacggacctgagta

SEQ ID NO: 237348 - DNA, 25 bp, Homo sapien
tggagatcgtgggatagtttggagc

SEQ ID NO: 237349 - DNA, 25 bp, Homo sapien
atcatgtctcctcggcaggcctcgg

SEQ ID NO: 237350 - DNA, 25 bp, Homo sapien
gggatggttcggcattcatcaatat

SEQ ID NO: 237351 - DNA, 25 bp, Homo sapien
tcggggatggttcggcattcatcaa

SEQ ID NO: 237352 - DNA, 25 bp, Homo sapien
gcctcggggatggttcggcattcat

SEQ ID NO: 237353 - DNA, 25 bp, Homo sapien
cagcctaggcgacgagagggaaact

SEQ ID NO: 237354 - DNA, 25 bp, Homo sapien
ccagcctaggcgacgagagggaaac

SEQ ID NO: 237355 - DNA, 25 bp, Homo sapien
gcctaggcgacgagagggaaactcc

SEQ ID NO: 237356 - DNA, 25 bp, Homo sapien
ctaggcgacgagagggaaactccat

SEQ ID NO: 237357 - DNA, 25 bp, Homo sapien
tgactggcgatccaggtcaaagcca

SEQ ID NO: 237358 - DNA, 25 bp, Homo sapien
tggcgatccaggtcaaagccattcg

SEQ ID NO: 237359 - DNA, 25 bp, Homo sapien
gatccaggtcaaagccattcgtgca

SEQ ID NO: 237360 - DNA, 25 bp, Homo sapien
ggtcaaagccattcgtgcactgtgc

SEQ ID NO: 237361 - DNA, 25 bp, Homo sapien
tcagcctgctcagagatagggcttc

SEQ ID NO: 237362 - DNA, 25 bp, Homo sapien
cactcggagttttcaggagggatct

SEQ ID NO: 237363 - DNA, 25 bp, Homo sapien
gccactcggagttttcaggagggat

SEQ ID NO: 237364 - DNA, 25 bp, Homo sapien
cagagatagggcttctctcacttct

SEQ ID NO: 237365 - DNA, 25 bp, Homo sapien
catgcagacccgtgggggtcctcag

SEQ ID NO: 237366 - DNA, 25 bp, Homo sapien
acatgcagacccgtgggggtcctca

SEQ ID NO: 237367 - DNA, 25 bp, Homo sapien
gtgtgtctgtggcaacacatgcaga

SEQ ID NO: 237368 - DNA, 25 bp, Homo sapien
gtggcaacacatgcagacccgtggg

SEQ ID NO: 237369 - DNA, 25 bp, Homo sapien
agagccagaatggtaacagtgagta

SEQ ID NO: 237370 - DNA, 25 bp, Homo sapien
agccagaatggtaacagtgagtatc

SEQ ID NO: 237371 - DNA, 25 bp, Homo sapien
gagagccagaatggtaacagtgagt

SEQ ID NO: 237372 - DNA, 25 bp, Homo sapien
gagccagaatggtaacagtgagtat

SEQ ID NO: 237373 - DNA, 25 bp, Homo sapien
gcttgtatggggtggggtgtgctcc

SEQ ID NO: 237374 - DNA, 25 bp, Homo sapien
atggggtggggtgtgctccagggag

SEQ ID NO: 237375 - DNA, 25 bp, Homo sapien
cttgggcttgtatggggtggggtgt

SEQ ID NO: 237376 - DNA, 25 bp, Homo sapien
gtggggtgtgctccagggaggtcat

SEQ ID NO: 237377 - DNA, 25 bp, Homo sapien
tttgatatttgccatggccagattt

SEQ ID NO: 237378 - DNA, 25 bp, Homo sapien
gatatttgccatggccagatttata

SEQ ID NO: 237379 - DNA, 25 bp, Homo sapien
tataaagtgcagagccaaatcccag

SEQ ID NO: 237380 - DNA, 25 bp, Homo sapien
cttataaagtgcagagccaaatccc

SEQ ID NO: 237381 - DNA, 25 bp, Homo sapien
tagtgaactagtaattggcctcccg

SEQ ID NO: 237382 - DNA, 25 bp, Homo sapien
tctgcttgtctatcagccgatgcgg

SEQ ID NO: 237383 - DNA, 25 bp, Homo sapien
tgagaatcccacacaaacatagagc

SEQ ID NO: 237384 - DNA, 25 bp, Homo sapien
gaatgaagcgctgagaatttcgcag

SEQ ID NO: 237385 - DNA, 25 bp, Homo sapien
gggctcgcgggtgttttattccaga

SEQ ID NO: 237386 - DNA, 25 bp, Homo sapien
gccctcagcgcaagcacctggtttt

SEQ ID NO: 237387 - DNA, 25 bp, Homo sapien
tccaagacgcgcgaggaggagatgc

SEQ ID NO: 237388 - DNA, 25 bp, Homo sapien
aggagctcgggcacgtcggcctcct

SEQ ID NO: 237389 - DNA, 25 bp, Homo sapien
ttagccctcttcagtaattcagcat

SEQ ID NO: 237390 - DNA, 25 bp, Homo sapien
cacagctggttcagattacagcgct

SEQ ID NO: 237391 - DNA, 25 bp, Homo sapien
taaacaatgcaaatggggcctcagt

SEQ ID NO: 237392 - DNA, 25 bp, Homo sapien
ttttctaagtatgttaaacaatgca

SEQ ID NO: 237393 - DNA, 25 bp, Homo sapien
caacaatcttggggcgtctgccagg

SEQ ID NO: 237394 - DNA, 25 bp, Homo sapien
cacaacaatcttggggcgtctgcca

SEQ ID NO: 237395 - DNA, 25 bp, Homo sapien
cctcacaacaatcttggggcgtctg

SEQ ID NO: 237396 - DNA, 25 bp, Homo sapien
tcacaacaatcttggggcgtctgcc

SEQ ID NO: 237397 - DNA, 25 bp, Homo sapien
cgagaacgttgtcgcctccggaagg

SEQ ID NO: 237398 - DNA, 25 bp, Homo sapien
gctcggctgcgagcgcccgggcaga

SEQ ID NO: 237399 - DNA, 25 bp, Homo sapien
aagggacttgaactcacgacccacg

SEQ ID NO: 237400 - DNA, 25 bp, Homo sapien
tgcacgcccgcgctgcgtggcaagg

SEQ ID NO: 237401 - DNA, 25 bp, Homo sapien
cctggtagatgttatatcctaatga

SEQ ID NO: 237402 - DNA, 25 bp, Homo sapien
gtaaacagtgaattcctcaaaagca

SEQ ID NO: 237403 - DNA, 25 bp, Homo sapien
tatgtgcacggcctgacgagtactc

SEQ ID NO: 237404 - DNA, 25 bp, Homo sapien
agtcctcttcaccattataactatg

SEQ ID NO: 237405 - DNA, 25 bp, Homo sapien
gaacatacctttagtaaagtgatcc

SEQ ID NO: 237406 - DNA, 25 bp, Homo sapien
ggatttatgtgttgactcacagatg

SEQ ID NO: 237407 - DNA, 25 bp, Homo sapien
ttgtaagtttatcaccaccaccgtc

SEQ ID NO: 237408 - DNA, 25 bp, Homo sapien
tactccgagagtgtctgaacatacc

SEQ ID NO: 237409 - DNA, 25 bp, Homo sapien
tgcccggccagtattatagctttag

SEQ ID NO: 237410 - DNA, 25 bp, Homo sapien
tggtaaaaaactatggcagcgaagg

SEQ ID NO: 237411 - DNA, 25 bp, Homo sapien
tgagcaggtggttcatctctgacac

SEQ ID NO: 237412 - DNA, 25 bp, Homo sapien
ttactaagacggttcagtgagcagg

SEQ ID NO: 237413 - DNA, 25 bp, Homo sapien
gtttagctatgcaatccacccacaa

SEQ ID NO: 237414 - DNA, 25 bp, Homo sapien
tacgttaaaccatgggatgagaggc

SEQ ID NO: 237415 - DNA, 25 bp, Homo sapien
ccaaatttagttctggcctcagcca

SEQ ID NO: 237416 - DNA, 25 bp, Homo sapien
taggagcatataaaaaccaaggagt

SEQ ID NO: 237417 - DNA, 25 bp, Homo sapien
cacatgaatttacacacagggccag

SEQ ID NO: 237418 - DNA, 25 bp, Homo sapien
catatgtcaacaccgcagacggagg

SEQ ID NO: 237419 - DNA, 25 bp, Homo sapien
cagtggccaccgtgataacagttga

SEQ ID NO: 237420 - DNA, 25 bp, Homo sapien
tgcactatgcagagaagccactact

SEQ ID NO: 237421 - DNA, 25 bp, Homo sapien
gaacaaatacatgactttctcccca

SEQ ID NO: 237422 - DNA, 25 bp, Homo sapien
aaattcagagaaagcataattgcga

SEQ ID NO: 237423 - DNA, 25 bp, Homo sapien
aaggccactttgtgataaagtacat

SEQ ID NO: 237424 - DNA, 25 bp, Homo sapien
catacatatagtgttcatggtttct

SEQ ID NO: 237425 - DNA, 25 bp, Homo sapien
cccagcactgttgtcaggtaacgct

SEQ ID NO: 237426 - DNA, 25 bp, Homo sapien
ccccagcactgttgtcaggtaacgc

SEQ ID NO: 237427 - DNA, 25 bp, Homo sapien
accccagcactgttgtcaggtaacg

SEQ ID NO: 237428 - DNA, 25 bp, Homo sapien
caagtccagctgggttaataagagg

SEQ ID NO: 237429 - DNA, 25 bp, Homo sapien
gtccagctgggttaataagaggtac

SEQ ID NO: 237430 - DNA, 25 bp, Homo sapien
ccagctgggttaataagaggtacag

SEQ ID NO: 237431 - DNA, 25 bp, Homo sapien
aagtccagctgggttaataagaggt

SEQ ID NO: 237432 - DNA, 25 bp, Homo sapien
gcgaggagccaaaaacggatttaca

SEQ ID NO: 237433 - DNA, 25 bp, Homo sapien
gccaaaaacggatttacatctgttc

SEQ ID NO: 237434 - DNA, 25 bp, Homo sapien
cggatttacatctgttcttctacca

SEQ ID NO: 237435 - DNA, 25 bp, Homo sapien
aacggatttacatctgttcttctac

SEQ ID NO: 237436 - DNA, 25 bp, Homo sapien
gagcctgccataatgaatttgggaa

SEQ ID NO: 237437 - DNA, 25 bp, Homo sapien
aagagcctgccataatgaatttggg

SEQ ID NO: 237438 - DNA, 25 bp, Homo sapien
gcctgccataatgaatttgggaatc

SEQ ID NO: 237439 - DNA, 25 bp, Homo sapien
gaaagagcctgccataatgaatttg

SEQ ID NO: 237440 - DNA, 25 bp, Homo sapien
gctttctacattcttggagtctcaa

SEQ ID NO: 237441 - DNA, 25 bp, Homo sapien
gattagcaagaaccaccattagtga

SEQ ID NO: 237442 - DNA, 25 bp, Homo sapien
caaccgtccgctctaggcagatctt

SEQ ID NO: 237443 - DNA, 25 bp, Homo sapien
tgataaattttcttgcgtgccagta

SEQ ID NO: 237444 - DNA, 25 bp, Homo sapien
aaactttctggtgcatttgtatctc

SEQ ID NO: 237445 - DNA, 25 bp, Homo sapien
cagaaagctttggtggtggaatgga

SEQ ID NO: 237446 - DNA, 25 bp, Homo sapien
ccagaggtttcatatcatgaacaga

SEQ ID NO: 237447 - DNA, 25 bp, Homo sapien
tcttcttcctggtgaatccagaggt

SEQ ID NO: 237448 - DNA, 25 bp, Homo sapien
aacacctcatggtcagaattagcca

SEQ ID NO: 237449 - DNA, 25 bp, Homo sapien
tctgatggtaacactcacttctaac

SEQ ID NO: 237450 - DNA, 25 bp, Homo sapien
caatttaatcaatagtctgatggta

SEQ ID NO: 237451 - DNA, 25 bp, Homo sapien
gaattagccaactgataatacttat

SEQ ID NO: 237452 - DNA, 25 bp, Homo sapien
caccgccctgatcgtcatgaaacaa

SEQ ID NO: 237453 - DNA, 25 bp, Homo sapien
tcggtgtgtggaaatgaccaatgaa

SEQ ID NO: 237454 - DNA, 25 bp, Homo sapien
tccccattaaccgtaacacttcatg

SEQ ID NO: 237455 - DNA, 25 bp, Homo sapien
cacttcatgacgctgatttttcggt

SEQ ID NO: 237456 - DNA, 25 bp, Homo sapien
gacgctgatttttcggtgtgtggaa

SEQ ID NO: 237457 - DNA, 25 bp, Homo sapien
aatttcttttgtacatcatccagca

SEQ ID NO: 237458 - DNA, 25 bp, Homo sapien
atttcttttgtacatcatccagcat

SEQ ID NO: 237459 - DNA, 25 bp, Homo sapien
caatttcttttgtacatcatccagc

SEQ ID NO: 237460 - DNA, 25 bp, Homo sapien
caggaaatagttgagattaccagtg

SEQ ID NO: 237461 - DNA, 25 bp, Homo sapien
aatttggttatactgggttatatat

SEQ ID NO: 237462 - DNA, 25 bp, Homo sapien
cctcaggaaatagttgagattacca

SEQ ID NO: 237463 - DNA, 25 bp, Homo sapien
tgtgcctgtccctatataaaacata

SEQ ID NO: 237464 - DNA, 25 bp, Homo sapien
aaggtccctacagatgcctcttttt

SEQ ID NO: 237465 - DNA, 25 bp, Homo sapien
cctctttttcttcaagcacccttat

SEQ ID NO: 237466 - DNA, 25 bp, Homo sapien
ctgaaccctaattcaaaccacaatt

SEQ ID NO: 237467 - DNA, 25 bp, Homo sapien
gaatatttctctacaaaaactgaac

SEQ ID NO: 237468 - DNA, 25 bp, Homo sapien
ttaaaagatattatactatttgcaa

SEQ ID NO: 237469 - DNA, 25 bp, Homo sapien
aagatattatactatttgcaatttg

SEQ ID NO: 237470 - DNA, 25 bp, Homo sapien
tttgaggttaagctttacaagcatc

SEQ ID NO: 237471 - DNA, 25 bp, Homo sapien
ttgaggttaagctttacaagcatct

SEQ ID NO: 237472 - DNA, 25 bp, Homo sapien
gcccagttgctcatgcctcttgtaa

SEQ ID NO: 237473 - DNA, 25 bp, Homo sapien
gaatctgtgattggttgaggtctac

SEQ ID NO: 237474 - DNA, 25 bp, Homo sapien
tgagcaacatagacaaaccgtctcc

SEQ ID NO: 237475 - DNA, 25 bp, Homo sapien
tttcttactttcaggcgggagccac

SEQ ID NO: 237476 - DNA, 25 bp, Homo sapien
ctgtgttcaacaggacattatatgt

SEQ ID NO: 237477 - DNA, 25 bp, Homo sapien
gggaatgtatttggcctgtgttcaa

SEQ ID NO: 237478 - DNA, 25 bp, Homo sapien
ttgggtaacaaagcgtctgggaatg

SEQ ID NO: 237479 - DNA, 25 bp, Homo sapien
aaagcgtctgggaatgtatttggcc

SEQ ID NO: 237480 - DNA, 25 bp, Homo sapien
attttccattctcaactcttaggag

SEQ ID NO: 237481 - DNA, 25 bp, Homo sapien
gctgccctttcagatacaggtataa

SEQ ID NO: 237482 - DNA, 25 bp, Homo sapien
tctttgcacaccataaaattcacca

SEQ ID NO: 237483 - DNA, 25 bp, Homo sapien
tttgtattgcttatgaaaactcact

SEQ ID NO: 237484 - DNA, 25 bp, Homo sapien
cactctactgagtttggatatggga

SEQ ID NO: 237485 - DNA, 25 bp, Homo sapien
gattctggaggaactaaatatgccc

SEQ ID NO: 237486 - DNA, 25 bp, Homo sapien
ggaatgctgcctgacccttaatggg

SEQ ID NO: 237487 - DNA, 25 bp, Homo sapien
tagtgcctgataagcatctgtcttc

SEQ ID NO: 237488 - DNA, 25 bp, Homo sapien
tagcataacatatagcactgagttg

SEQ ID NO: 237489 - DNA, 25 bp, Homo sapien
atgagctggttcacaacactgctgt

SEQ ID NO: 237490 - DNA, 25 bp, Homo sapien
tagtctagcccaacccgaagattat

SEQ ID NO: 237491 - DNA, 25 bp, Homo sapien
tgagttgtcacaaagcaatgagctg

SEQ ID NO: 237492 - DNA, 25 bp, Homo sapien
tgcactggccttcgatctaactaga

SEQ ID NO: 237493 - DNA, 25 bp, Homo sapien
tcagttgcccatatgtcttccagat

SEQ ID NO: 237494 - DNA, 25 bp, Homo sapien
gcacaatacagaagatgctaccata

SEQ ID NO: 237495 - DNA, 25 bp, Homo sapien
aggcaaccatttcaacgttagggca

SEQ ID NO: 237496 - DNA, 25 bp, Homo sapien
tagatttagagatcctagcctggtc

SEQ ID NO: 237497 - DNA, 25 bp, Homo sapien
tggtctccatgcgtcagtggttcct

SEQ ID NO: 237498 - DNA, 25 bp, Homo sapien
gacttcctggttgcctctaaatcag

SEQ ID NO: 237499 - DNA, 25 bp, Homo sapien
gtaagccacctgatcactgaaccaa

SEQ ID NO: 237500 - DNA, 25 bp, Homo sapien
taatgactctggtttcactaggacc

SEQ ID NO: 237501 - DNA, 25 bp, Homo sapien
gacagccagggccaacttaatgact

SEQ ID NO: 237502 - DNA, 25 bp, Homo sapien
tctgatggtcaacagggtgacagcc

SEQ ID NO: 237503 - DNA, 25 bp, Homo sapien
caagatgcacgtgaactgataaggg

SEQ ID NO: 237504 - DNA, 25 bp, Homo sapien
caatgaagttggtctcactcaacta

SEQ ID NO: 237505 - DNA, 25 bp, Homo sapien
aatggaagtcacacatcaatgaagt

SEQ ID NO: 237506 - DNA, 25 bp, Homo sapien
gacagaagactacatttgatttaat

SEQ ID NO: 237507 - DNA, 25 bp, Homo sapien
ggtctcactcaactatgccaattta

SEQ ID NO: 237508 - DNA, 25 bp, Homo sapien
gttctgtaagtcttgatgctgaatc

SEQ ID NO: 237509 - DNA, 25 bp, Homo sapien
tctgtaagtcttgatgctgaatcca

SEQ ID NO: 237510 - DNA, 25 bp, Homo sapien
ttctgtaagtcttgatgctgaatcc

SEQ ID NO: 237511 - DNA, 25 bp, Homo sapien
gagtcaacctctacatttcagctgg

SEQ ID NO: 237512 - DNA, 25 bp, Homo sapien
caaactataaggctgagagacatct

SEQ ID NO: 237513 - DNA, 25 bp, Homo sapien
gaccttgggcaaatgtatccaacca

SEQ ID NO: 237514 - DNA, 25 bp, Homo sapien
ccaataagtatcaaaggcagaaccc

SEQ ID NO: 237515 - DNA, 25 bp, Homo sapien
ttttcttccattcagctataagctg

SEQ ID NO: 237516 - DNA, 25 bp, Homo sapien
tgtagttacctcaaagcatagatga

SEQ ID NO: 237517 - DNA, 25 bp, Homo sapien
ttatctgaagtaggttcaacctcca

SEQ ID NO: 237518 - DNA, 25 bp, Homo sapien
aaagcaccttccatatggactagaa

SEQ ID NO: 237519 - DNA, 25 bp, Homo sapien
tcagggtagaactgctctggttact

SEQ ID NO: 237520 - DNA, 25 bp, Homo sapien
ccagtgacagagcatactgctttac

SEQ ID NO: 237521 - DNA, 25 bp, Homo sapien
gcgcagtttcatccctttgcttgga

SEQ ID NO: 237522 - DNA, 25 bp, Homo sapien
gcagcgcagtttcatccctttgctt

SEQ ID NO: 237523 - DNA, 25 bp, Homo sapien
gacagagcatactgctttacttgtt

SEQ ID NO: 237524 - DNA, 25 bp, Homo sapien
gggtgatggtcaaaacacagacagt

SEQ ID NO: 237525 - DNA, 25 bp, Homo sapien
tgccagatctaaagagtcacagact

SEQ ID NO: 237526 - DNA, 25 bp, Homo sapien
cacagacagtttgaatgccagatct

SEQ ID NO: 237527 - DNA, 25 bp, Homo sapien
cactctgagtgcctaccttgggcag

SEQ ID NO: 237528 - DNA, 25 bp, Homo sapien
ctgcagccaaagcttcacgggtata

SEQ ID NO: 237529 - DNA, 25 bp, Homo sapien
tgcagccaaagcttcacgggtataa

SEQ ID NO: 237530 - DNA, 25 bp, Homo sapien
ttgaacgaaattctttgtcacgtaa

SEQ ID NO: 237531 - DNA, 25 bp, Homo sapien
aatctctctagctcttggtttgaac

SEQ ID NO: 237532 - DNA, 25 bp, Homo sapien
tttaaaagctgatttaactctccag

SEQ ID NO: 237533 - DNA, 25 bp, Homo sapien
agggccaacatgacttggtctctct

SEQ ID NO: 237534 - DNA, 25 bp, Homo sapien
tctcctgttgaaacacaactgtctt

SEQ ID NO: 237535 - DNA, 25 bp, Homo sapien
agctgatttaactctccagtcttgc

SEQ ID NO: 237536 - DNA, 25 bp, Homo sapien
gctctaagacactctgcagactggg

SEQ ID NO: 237537 - DNA, 25 bp, Homo sapien
gaggtggcagcaatcgaatcagaca

SEQ ID NO: 237538 - DNA, 25 bp, Homo sapien
aagctgggctgactcgtgttgcata

SEQ ID NO: 237539 - DNA, 25 bp, Homo sapien
tatcaagggttttagggtcagccac

SEQ ID NO: 237540 - DNA, 25 bp, Homo sapien
tttttagcccaacacaattctgcct

SEQ ID NO: 237541 - DNA, 25 bp, Homo sapien
taaggcagaggtattcaaattacgt

SEQ ID NO: 237542 - DNA, 25 bp, Homo sapien
tcatttagggccacttcactttgaa

SEQ ID NO: 237543 - DNA, 25 bp, Homo sapien
gcaagacattcttctaactgatgcc

SEQ ID NO: 237544 - DNA, 25 bp, Homo sapien
ctttgcctccaaattaagtcttaag

SEQ ID NO: 237545 - DNA, 25 bp, Homo sapien
ctctgattgagttcttgttcctttg

SEQ ID NO: 237546 - DNA, 25 bp, Homo sapien
aaacttatgtctcttgtagctgtac

SEQ ID NO: 237547 - DNA, 25 bp, Homo sapien
tatctcagctatcagtgtttccttt

SEQ ID NO: 237548 - DNA, 25 bp, Homo sapien
ttcttgactcagtaatgacttctct

SEQ ID NO: 237549 - DNA, 25 bp, Homo sapien
tttcttgactcagtaatgacttctc

SEQ ID NO: 237550 - DNA, 25 bp, Homo sapien
gattgtcttcagcaagactgttatc

SEQ ID NO: 237551 - DNA, 25 bp, Homo sapien
gtttaaactactcaatctcattatt

SEQ ID NO: 237552 - DNA, 25 bp, Homo sapien
ctggtttaaactactcaatctcatt

SEQ ID NO: 237553 - DNA, 25 bp, Homo sapien
taaactactcaatctcattatttca

SEQ ID NO: 237554 - DNA, 25 bp, Homo sapien
tggtttaaactactcaatctcatta

SEQ ID NO: 237555 - DNA, 25 bp, Homo sapien
cagtgctaggtacttctcagtggag

SEQ ID NO: 237556 - DNA, 25 bp, Homo sapien
tatgagaacaaacagggtaaacacc

SEQ ID NO: 237557 - DNA, 25 bp, Homo sapien
catttactatgaggccaggtgctag

SEQ ID NO: 237558 - DNA, 25 bp, Homo sapien
aatttagcccttgctctcgaagagc

SEQ ID NO: 237559 - DNA, 25 bp, Homo sapien
catcatgagcatagaaaatggtgga

SEQ ID NO: 237560 - DNA, 25 bp, Homo sapien
gacctatggctctaagcactcaggg

SEQ ID NO: 237561 - DNA, 25 bp, Homo sapien
tgtattccctaactggaggatgtgg

SEQ ID NO: 237562 - DNA, 25 bp, Homo sapien
cactcagggctttgcttggatatag

SEQ ID NO: 237563 - DNA, 25 bp, Homo sapien
agaaggctgcaatttactacattcc

SEQ ID NO: 237564 - DNA, 25 bp, Homo sapien
ttccactgatgcactctgggcaaga

SEQ ID NO: 237565 - DNA, 25 bp, Homo sapien
acagtgcttgttgtagtctgaacac

SEQ ID NO: 237566 - DNA, 25 bp, Homo sapien
catagtatcactttgcttcacagca

SEQ ID NO: 237567 - DNA, 25 bp, Homo sapien
gattttagagagatcagtttctata

SEQ ID NO: 237568 - DNA, 25 bp, Homo sapien
gagatcagtttctataactccagag

SEQ ID NO: 237569 - DNA, 25 bp, Homo sapien
tttgcatctcatagattttagagag

SEQ ID NO: 237570 - DNA, 25 bp, Homo sapien
tttttgcatctcatagattttagag

SEQ ID NO: 237571 - DNA, 25 bp, Homo sapien
catcaatttcctgacttcggttctg

SEQ ID NO: 237572 - DNA, 25 bp, Homo sapien
gatgtcgtcgacttatttctgtcaa

SEQ ID NO: 237573 - DNA, 25 bp, Homo sapien
tctgttggtgtgcattctgcagtac

SEQ ID NO: 237574 - DNA, 25 bp, Homo sapien
agtcacttaattcttctcgatgtcg

SEQ ID NO: 237575 - DNA, 25 bp, Homo sapien
tacatatttcactttgatcagagtt

SEQ ID NO: 237576 - DNA, 25 bp, Homo sapien
catatttcactttgatcagagttat

SEQ ID NO: 237577 - DNA, 25 bp, Homo sapien
atcagagttatctgttccttgtgct

SEQ ID NO: 237578 - DNA, 25 bp, Homo sapien
tgatcagagttatctgttccttgtg

SEQ ID NO: 237579 - DNA, 25 bp, Homo sapien
gaaggatgatgactaatcccataag

SEQ ID NO: 237580 - DNA, 25 bp, Homo sapien
agcgaatgaagatgatgcagtggtt

SEQ ID NO: 237581 - DNA, 25 bp, Homo sapien
tgactaatcccataagcgaatgaag

SEQ ID NO: 237582 - DNA, 25 bp, Homo sapien
tggccaacttcagactcaagtcttg

SEQ ID NO: 237583 - DNA, 25 bp, Homo sapien
tagattgctgctttatttgaatctc

SEQ ID NO: 237584 - DNA, 25 bp, Homo sapien
gtttctcttctagatcagtacaaag

SEQ ID NO: 237585 - DNA, 25 bp, Homo sapien
tgtttctcttctagatcagtacaaa

SEQ ID NO: 237586 - DNA, 25 bp, Homo sapien
aagttgatttcggtaacttgtagat

SEQ ID NO: 237587 - DNA, 25 bp, Homo sapien
catgtcagacgcagccgtggacacc

SEQ ID NO: 237588 - DNA, 25 bp, Homo sapien
cgtggacaccagctccgaaatcacc

SEQ ID NO: 237589 - DNA, 25 bp, Homo sapien
acaccagctccgaaatcaccaccaa

SEQ ID NO: 237590 - DNA, 25 bp, Homo sapien
ggacaccagctccgaaatcaccacc

SEQ ID NO: 237591 - DNA, 25 bp, Homo sapien
gaagttgtggaagaggcggaaaatg

SEQ ID NO: 237592 - DNA, 25 bp, Homo sapien
tggaagaggcggaaaatggaagaga

SEQ ID NO: 237593 - DNA, 25 bp, Homo sapien
aagaggcggaaaatggaagagacgc

SEQ ID NO: 237594 - DNA, 25 bp, Homo sapien
gaggcggaaaatggaagagacgccc

SEQ ID NO: 237595 - DNA, 25 bp, Homo sapien
tgacgatgttgataccaagaagcag

SEQ ID NO: 237596 - DNA, 25 bp, Homo sapien
tgaggatgacgatgttgataccaag

SEQ ID NO: 237597 - DNA, 25 bp, Homo sapien
gatgaggatgacgatgttgatacca

SEQ ID NO: 237598 - DNA, 25 bp, Homo sapien
ggatgacgatgttgataccaagaag

SEQ ID NO: 237599 - DNA, 25 bp, Homo sapien
ccacaaacacggtttaacaacaatg

SEQ ID NO: 237600 - DNA, 25 bp, Homo sapien
gaaatggacactaaaactctctaca

SEQ ID NO: 237601 - DNA, 25 bp, Homo sapien
cacggtttaacaacaatgaatgaga

SEQ ID NO: 237602 - DNA, 25 bp, Homo sapien
aaagaaatggacactaaaactctct

SEQ ID NO: 237603 - DNA, 25 bp, Homo sapien
catgcctggccatgtgacagtattc

SEQ ID NO: 237604 - DNA, 25 bp, Homo sapien
gacagtattctttcatcatgtatat

SEQ ID NO: 237605 - DNA, 25 bp, Homo sapien
tgtacaccaacatttacttgatatg

SEQ ID NO: 237606 - DNA, 25 bp, Homo sapien
ggccatgtgacagtattctttcatc

SEQ ID NO: 237607 - DNA, 25 bp, Homo sapien
tatgtagaaggctgaaagcaggtgt

SEQ ID NO: 237608 - DNA, 25 bp, Homo sapien
agaaggctgaaagcaggtgtgtaca

SEQ ID NO: 237609 - DNA, 25 bp, Homo sapien
ggctgaaagcaggtgtgtacacaaa

SEQ ID NO: 237610 - DNA, 25 bp, Homo sapien
aaggctgaaagcaggtgtgtacaca

SEQ ID NO: 237611 - DNA, 25 bp, Homo sapien
ggcttcaatttcctttgtcctagaa

SEQ ID NO: 237612 - DNA, 25 bp, Homo sapien
ctctgatctcaagattgcatgaatg

SEQ ID NO: 237613 - DNA, 25 bp, Homo sapien
gattgcatgaatggcttcaatttcc

SEQ ID NO: 237614 - DNA, 25 bp, Homo sapien
tcctttgtcctagaatcaggtaatt

SEQ ID NO: 237615 - DNA, 25 bp, Homo sapien
gaatttcaacccatgtctctctgat

SEQ ID NO: 237616 - DNA, 25 bp, Homo sapien
ttaggtaaaactgcaaccttctgat

SEQ ID NO: 237617 - DNA, 25 bp, Homo sapien
taatcctctcaacctcacaataggt

SEQ ID NO: 237618 - DNA, 25 bp, Homo sapien
taaaagcccaagctcctaaccttga

SEQ ID NO: 237619 - DNA, 25 bp, Homo sapien
cactgatgcacctttatggcatggg

SEQ ID NO: 237620 - DNA, 25 bp, Homo sapien
taaaatggatttcggtagctcccca

SEQ ID NO: 237621 - DNA, 25 bp, Homo sapien
tctaggatacaaggagcgaccagtc

SEQ ID NO: 237622 - DNA, 25 bp, Homo sapien
gcttagggtctaaggaacagccaac

SEQ ID NO: 237623 - DNA, 25 bp, Homo sapien
ggtgggcgtggatcaaccaaacgaa

SEQ ID NO: 237624 - DNA, 25 bp, Homo sapien
taaactcgacttaacgtaggagcag

SEQ ID NO: 237625 - DNA, 25 bp, Homo sapien
tattctactgtcgaaatatgggcga

SEQ ID NO: 237626 - DNA, 25 bp, Homo sapien
tatgggcgaaatgggcgattataca

SEQ ID NO: 237627 - DNA, 25 bp, Homo sapien
actggcccaatccggagccgaggcc

SEQ ID NO: 237628 - DNA, 25 bp, Homo sapien
cagagactggcccaatccggagccg

SEQ ID NO: 237629 - DNA, 25 bp, Homo sapien
tgatatctggccagtgagggaagcc

SEQ ID NO: 237630 - DNA, 25 bp, Homo sapien
tcagcatatcctttgtaaagtttga

SEQ ID NO: 237631 - DNA, 25 bp, Homo sapien
gggcgatccgaccaaatatccttga

SEQ ID NO: 237632 - DNA, 25 bp, Homo sapien
cagttccgtgggttactcctgccaa

SEQ ID NO: 237633 - DNA, 25 bp, Homo sapien
gtgacacagtcacctacggagggcc

SEQ ID NO: 237634 - DNA, 25 bp, Homo sapien
tgccttcgcgagacaggatacgata

SEQ ID NO: 237635 - DNA, 25 bp, Homo sapien
tttgtgttgtgagggatccaaatgt

SEQ ID NO: 237636 - DNA, 25 bp, Homo sapien
gtgttgtgagggatccaaatgtggg

SEQ ID NO: 237637 - DNA, 25 bp, Homo sapien
gtttgtgttgtgagggatccaaatg

SEQ ID NO: 237638 - DNA, 25 bp, Homo sapien
gagggatccaaatgtggggggagta

SEQ ID NO: 237639 - DNA, 25 bp, Homo sapien
cagctagggtgtcttcatatagttg

SEQ ID NO: 237640 - DNA, 25 bp, Homo sapien
ctagggtgtcttcatatagttggga

SEQ ID NO: 237641 - DNA, 25 bp, Homo sapien
gctagggtgtcttcatatagttggg

SEQ ID NO: 237642 - DNA, 25 bp, Homo sapien
agggtgtcttcatatagttgggaat

SEQ ID NO: 237643 - DNA, 25 bp, Homo sapien
caaagctcagcatccgtaatggtcc

SEQ ID NO: 237644 - DNA, 25 bp, Homo sapien
aaagctcagcatccgtaatggtcca

SEQ ID NO: 237645 - DNA, 25 bp, Homo sapien
tttggccagagttctaggggccctg

SEQ ID NO: 237646 - DNA, 25 bp, Homo sapien
tggccagagttctaggggccctggg

SEQ ID NO: 237647 - DNA, 25 bp, Homo sapien
ctttggccagagttctaggggccct

SEQ ID NO: 237648 - DNA, 25 bp, Homo sapien
gcctttggccagagttctaggggcc

SEQ ID NO: 237649 - DNA, 25 bp, Homo sapien
caaggacaggggacccgtctcctga

SEQ ID NO: 237650 - DNA, 25 bp, Homo sapien
tgtcccgggtcttcagcaccaaatg

SEQ ID NO: 237651 - DNA, 25 bp, Homo sapien
tgagggcaaggacaggggacccgtc

SEQ ID NO: 237652 - DNA, 25 bp, Homo sapien
accaaatgtcacacgcgtccatgtg

SEQ ID NO: 237653 - DNA, 25 bp, Homo sapien
aagtttgatagcatttgagctgaag

SEQ ID NO: 237654 - DNA, 25 bp, Homo sapien
agtttgatagcatttgagctgaaga

SEQ ID NO: 237655 - DNA, 25 bp, Homo sapien
tctcagtagctaatatgttgctctt

SEQ ID NO: 237656 - DNA, 25 bp, Homo sapien
aatatctcagtagctaatatgttgc

SEQ ID NO: 237657 - DNA, 25 bp, Homo sapien
cctgacttgaagtgagccatcggcc

SEQ ID NO: 237658 - DNA, 25 bp, Homo sapien
agccagttcatctgttctgagaaaa

SEQ ID NO: 237659 - DNA, 25 bp, Homo sapien
gccagttcatctgttctgagaaaac

SEQ ID NO: 237660 - DNA, 25 bp, Homo sapien
tgacttgaagtgagccatcggcctt

SEQ ID NO: 237661 - DNA, 25 bp, Homo sapien
gacactgtgatgctgtatcatcccc

SEQ ID NO: 237662 - DNA, 25 bp, Homo sapien
caaccaaacgtaatccaatgaatgc

SEQ ID NO: 237663 - DNA, 25 bp, Homo sapien
aacccatagcatgtaaagtcactgt

SEQ ID NO: 237664 - DNA, 25 bp, Homo sapien
gaaagagcagattcctgacactgtg

SEQ ID NO: 237665 - DNA, 25 bp, Homo sapien
cagctctaatcacactttgaatagc

SEQ ID NO: 237666 - DNA, 25 bp, Homo sapien
cccagctctaatcacactttgaata

SEQ ID NO: 237667 - DNA, 25 bp, Homo sapien
taatcacactttgaatagctatgaa

SEQ ID NO: 237668 - DNA, 25 bp, Homo sapien
gctctaatcacactttgaatagcta

SEQ ID NO: 237669 - DNA, 25 bp, Homo sapien
tgtgttcaacagtgctttggaagcc

SEQ ID NO: 237670 - DNA, 25 bp, Homo sapien
tctaacgaccagacaggaaggcctg

SEQ ID NO: 237671 - DNA, 25 bp, Homo sapien
tgaacttaacgagggagcacacaca

SEQ ID NO: 237672 - DNA, 25 bp, Homo sapien
ctgggtcctgagcaagcggcactgc

SEQ ID NO: 237673 - DNA, 25 bp, Homo sapien
gaaaacattccttgaactatgcaag

SEQ ID NO: 237674 - DNA, 25 bp, Homo sapien
gctattaaacatgccaattacgaca

SEQ ID NO: 237675 - DNA, 25 bp, Homo sapien
cattgctgacatgattagttgatcc

SEQ ID NO: 237676 - DNA, 25 bp, Homo sapien
tgctttgtctatgaatccacaggct

SEQ ID NO: 237677 - DNA, 25 bp, Homo sapien
cccagccgggagatcatcaatatta

SEQ ID NO: 237678 - DNA, 25 bp, Homo sapien
gctcatgcgattcttagcctcctga

SEQ ID NO: 237679 - DNA, 25 bp, Homo sapien
tattaactattgaatcctcgtaaga

SEQ ID NO: 237680 - DNA, 25 bp, Homo sapien
tggtgagcccttggcactctgcaac

SEQ ID NO: 237681 - DNA, 25 bp, Homo sapien
tgtctgcaatgatactcaactggtt

SEQ ID NO: 237682 - DNA, 25 bp, Homo sapien
gcagcagccttttcaaacagtttat

SEQ ID NO: 237683 - DNA, 25 bp, Homo sapien
ttatttggccaagatcctagtatag

SEQ ID NO: 237684 - DNA, 25 bp, Homo sapien
cctagtatagagtttacctgcagca

SEQ ID NO: 237685 - DNA, 25 bp, Homo sapien
gcatcttttcatactggccaatcaa

SEQ ID NO: 237686 - DNA, 25 bp, Homo sapien
cactagtgcttctggatctgcctgc

SEQ ID NO: 237687 - DNA, 25 bp, Homo sapien
cacattcaaacgcatccagtgtgtg

SEQ ID NO: 237688 - DNA, 25 bp, Homo sapien
gatactatggttacttgcactggca

SEQ ID NO: 237689 - DNA, 25 bp, Homo sapien
aaggagacttgcctgcatactatgc

SEQ ID NO: 237690 - DNA, 25 bp, Homo sapien
cctgataaaatgtgtgcagccacac

SEQ ID NO: 237691 - DNA, 25 bp, Homo sapien
tcataaagcatctgggaaagcacat

SEQ ID NO: 237692 - DNA, 25 bp, Homo sapien
ccacacaccaggagggcaatatacc

SEQ ID NO: 237693 - DNA, 25 bp, Homo sapien
gatcccatcgtagggcttaaaacgc

SEQ ID NO: 237694 - DNA, 25 bp, Homo sapien
tcagagtttaggaacgcaccagtca

SEQ ID NO: 237695 - DNA, 25 bp, Homo sapien
tacatgatgtgagccaacttaccta

SEQ ID NO: 237696 - DNA, 25 bp, Homo sapien
aactatatggaaaaagcctgaggcg

SEQ ID NO: 237697 - DNA, 25 bp, Homo sapien
gcctctttggctaatatttggaaga

SEQ ID NO: 237698 - DNA, 25 bp, Homo sapien
tctttaattgctgaatgcctctttg

SEQ ID NO: 237699 - DNA, 25 bp, Homo sapien
tttagtcctacaaccgacgcattgt

SEQ ID NO: 237700 - DNA, 25 bp, Homo sapien
caaagtggaccctatgctgtaatca

SEQ ID NO: 237701 - DNA, 25 bp, Homo sapien
ttctaaagacatggtcacagctgcc

SEQ ID NO: 237702 - DNA, 25 bp, Homo sapien
taaaaggcatcagtaggtatgtagc

SEQ ID NO: 237703 - DNA, 25 bp, Homo sapien
taatcccagatagccaccagtatat

SEQ ID NO: 237704 - DNA, 25 bp, Homo sapien
aagtcatcaaaaggcaagttctcag

SEQ ID NO: 237705 - DNA, 25 bp, Homo sapien
tttcctgcacgtcatataaaaggca

SEQ ID NO: 237706 - DNA, 25 bp, Homo sapien
gcgtgccaccacacctggctaattt

SEQ ID NO: 237707 - DNA, 25 bp, Homo sapien
gtgcgtgccaccacacctggctaat

SEQ ID NO: 237708 - DNA, 25 bp, Homo sapien
aggtgcgtgccaccacacctggcta

SEQ ID NO: 237709 - DNA, 25 bp, Homo sapien
gatggagtctcgctcaactgcccag

SEQ ID NO: 237710 - DNA, 25 bp, Homo sapien
ttgagaaggagttttggtcttgtca

SEQ ID NO: 237711 - DNA, 25 bp, Homo sapien
caggctggagttcaatggcacaatc

SEQ ID NO: 237712 - DNA, 25 bp, Homo sapien
cgtaagccaccgtgtccagcccttt

SEQ ID NO: 237713 - DNA, 25 bp, Homo sapien
gagaaggagttttggtcttgtcacc

SEQ ID NO: 237714 - DNA, 25 bp, Homo sapien
catgatgaatggtgagcaggcctta

SEQ ID NO: 237715 - DNA, 25 bp, Homo sapien
cagataaagtgtgaaggtagcgaac

SEQ ID NO: 237716 - DNA, 25 bp, Homo sapien
aaatcacatggagctcgtatgtcag

SEQ ID NO: 237717 - DNA, 25 bp, Homo sapien
tggtaactgctccttaatccaggga

SEQ ID NO: 237718 - DNA, 25 bp, Homo sapien
ctgaactggtggctggcctttcaca

SEQ ID NO: 237719 - DNA, 25 bp, Homo sapien
ctagatcactcccaagtgctcctga

SEQ ID NO: 237720 - DNA, 25 bp, Homo sapien
cactcccaagtgctcctgaactggt

SEQ ID NO: 237721 - DNA, 25 bp, Homo sapien
ggtggctggcctttcacatggatgt

SEQ ID NO: 237722 - DNA, 25 bp, Homo sapien
catgagaaaaactattcataaggaa

SEQ ID NO: 237723 - DNA, 25 bp, Homo sapien
atgagaaaaactattcataaggaaa

SEQ ID NO: 237724 - DNA, 25 bp, Homo sapien
ggaaaatacattgtttcacgaatca

SEQ ID NO: 237725 - DNA, 25 bp, Homo sapien
aaaatacattgtttcacgaatcaaa

SEQ ID NO: 237726 - DNA, 25 bp, Homo sapien
aaagctcaatttgttggaagtttca

SEQ ID NO: 237727 - DNA, 25 bp, Homo sapien
catggaggcacttgcctgtaaccgc

SEQ ID NO: 237728 - DNA, 25 bp, Homo sapien
taaacatggtgaaagtatcacatgg

SEQ ID NO: 237729 - DNA, 25 bp, Homo sapien
ctctatgatgtatgtctttagacca

SEQ ID NO: 237730 - DNA, 25 bp, Homo sapien
cagctaaatgaactaccacgtctat

SEQ ID NO: 237731 - DNA, 25 bp, Homo sapien
cctgaagcggccatgagcagctaaa

SEQ ID NO: 237732 - DNA, 25 bp, Homo sapien
tgctaacaggcttacaggactgcct

SEQ ID NO: 237733 - DNA, 25 bp, Homo sapien
ccacgtctatttgggaatgcgctcc

SEQ ID NO: 237734 - DNA, 25 bp, Homo sapien
tgctactttaacttgtaccaactac

SEQ ID NO: 237735 - DNA, 25 bp, Homo sapien
atgctactttaacttgtaccaacta

SEQ ID NO: 237736 - DNA, 25 bp, Homo sapien
catgctactttaacttgtaccaact

SEQ ID NO: 237737 - DNA, 25 bp, Homo sapien
gcttctcgtctcttccgaagctctt

SEQ ID NO: 237738 - DNA, 25 bp, Homo sapien
gatgtctgtgtcatatcttgagata

SEQ ID NO: 237739 - DNA, 25 bp, Homo sapien
tcttgagatatgtttctggaactac

SEQ ID NO: 237740 - DNA, 25 bp, Homo sapien
ctgaagtaagatttgtacctgatgt

SEQ ID NO: 237741 - DNA, 25 bp, Homo sapien
gtaagatttgtacctgatgtctgtg

SEQ ID NO: 237742 - DNA, 25 bp, Homo sapien
tcgtctaacattcctgagccatcat

SEQ ID NO: 237743 - DNA, 25 bp, Homo sapien
tgtcaatttcttggcgacttagtgc

SEQ ID NO: 237744 - DNA, 25 bp, Homo sapien
tttgcttctaacactcgttccaggt

SEQ ID NO: 237745 - DNA, 25 bp, Homo sapien
aatagccctgcggagatctgcttcc

SEQ ID NO: 237746 - DNA, 25 bp, Homo sapien
tttgctcttttagttgtgctaattc

SEQ ID NO: 237747 - DNA, 25 bp, Homo sapien
gcagatcacccttaacgacaaatat

SEQ ID NO: 237748 - DNA, 25 bp, Homo sapien
ctgttggaccctaatcatctgcagg

SEQ ID NO: 237749 - DNA, 25 bp, Homo sapien
caataagttttggtcgatgcatctg

SEQ ID NO: 237750 - DNA, 25 bp, Homo sapien
gtgtctgaagaatggatactctgcc

SEQ ID NO: 237751 - DNA, 25 bp, Homo sapien
agtgtctgaagaatggatactctgc

SEQ ID NO: 237752 - DNA, 25 bp, Homo sapien
gagtgtctgaagaatggatactctg

SEQ ID NO: 237753 - DNA, 25 bp, Homo sapien
tgtctgaagaatggatactctgccc

SEQ ID NO: 237754 - DNA, 25 bp, Homo sapien
ccacagtagggtttaaagaatggct

SEQ ID NO: 237755 - DNA, 25 bp, Homo sapien
ttttagccacgtccagctactctgg

SEQ ID NO: 237756 - DNA, 25 bp, Homo sapien
gctactctggtacaggaatggacaa

SEQ ID NO: 237757 - DNA, 25 bp, Homo sapien
gcaggtactggattgattgacgata

SEQ ID NO: 237758 - DNA, 25 bp, Homo sapien
gaaaaacatctatccctcctctcag

SEQ ID NO: 237759 - DNA, 25 bp, Homo sapien
gaagaacagtggcctagaagaggca

SEQ ID NO: 237760 - DNA, 25 bp, Homo sapien
gaacagtggcctagaagaggcaaag

SEQ ID NO: 237761 - DNA, 25 bp, Homo sapien
agaaaaacatctatccctcctctca

SEQ ID NO: 237762 - DNA, 25 bp, Homo sapien
tgttgtaattgagccaagaaaagtg

SEQ ID NO: 237763 - DNA, 25 bp, Homo sapien
ctgttgtaattgagccaagaaaagt

SEQ ID NO: 237764 - DNA, 25 bp, Homo sapien
cctgttgtaattgagccaagaaaag

SEQ ID NO: 237765 - DNA, 25 bp, Homo sapien
tcctgttgtaattgagccaagaaaa

SEQ ID NO: 237766 - DNA, 25 bp, Homo sapien
gacccgtcaagagagaattcaagtt

SEQ ID NO: 237767 - DNA, 25 bp, Homo sapien
tctggacccgtcaagagagaattca

SEQ ID NO: 237768 - DNA, 25 bp, Homo sapien
gtcaagagagaattcaagttaaacc

SEQ ID NO: 237769 - DNA, 25 bp, Homo sapien
tattaattctggacccgtcaagaga

SEQ ID NO: 237770 - DNA, 25 bp, Homo sapien
aaatgcatagtcagtagtttaaatg

SEQ ID NO: 237771 - DNA, 25 bp, Homo sapien
tgtgagaaagtcagaagttccagga

SEQ ID NO: 237772 - DNA, 25 bp, Homo sapien
caaaatatcagtccaacataactcc

SEQ ID NO: 237773 - DNA, 25 bp, Homo sapien
catatctatcacactgatgggagga

SEQ ID NO: 237774 - DNA, 25 bp, Homo sapien
gcactcggccctaattaacatcatt

SEQ ID NO: 237775 - DNA, 25 bp, Homo sapien
taacatcatttatcactaccacata

SEQ ID NO: 237776 - DNA, 25 bp, Homo sapien
catagtaatcctaatttaacccaca

SEQ ID NO: 237777 - DNA, 25 bp, Homo sapien
taaagttaacgatcaatatcatgac

SEQ ID NO: 237778 - DNA, 25 bp, Homo sapien
tgacatcttctgtatttgtcaaaga

SEQ ID NO: 237779 - DNA, 25 bp, Homo sapien
caaagataacgtaattcaaaatgtg

SEQ ID NO: 237780 - DNA, 25 bp, Homo sapien
tatttgtcaaagataacgtaattca

SEQ ID NO: 237781 - DNA, 25 bp, Homo sapien
cagaaagagtctatagtgaaaaata

SEQ ID NO: 237782 - DNA, 25 bp, Homo sapien
tcccaaactgttggcatgagccacc

SEQ ID NO: 237783 - DNA, 25 bp, Homo sapien
cacacctggcccacattttagtttt

SEQ ID NO: 237784 - DNA, 25 bp, Homo sapien
aggctggtctcaaactcctggcttc

SEQ ID NO: 237785 - DNA, 25 bp, Homo sapien
gagacaggacctccctttgttgccc

SEQ ID NO: 237786 - DNA, 25 bp, Homo sapien
gttccttataattgcatataaatga

SEQ ID NO: 237787 - DNA, 25 bp, Homo sapien
taactgtaaaccagtgttccttata

SEQ ID NO: 237788 - DNA, 25 bp, Homo sapien
ctaattttctaactgtaaaccagtg

SEQ ID NO: 237789 - DNA, 25 bp, Homo sapien
tgttccttataattgcatataaatg

SEQ ID NO: 237790 - DNA, 25 bp, Homo sapien
tatgttgtctactggcaaatattat

SEQ ID NO: 237791 - DNA, 25 bp, Homo sapien
caaccatatgaacgtctctgcagca

SEQ ID NO: 237792 - DNA, 25 bp, Homo sapien
tttaaaagatcacacaaccatatga

SEQ ID NO: 237793 - DNA, 25 bp, Homo sapien
gcagcagcttagtgatgctgtgcca

SEQ ID NO: 237794 - DNA, 25 bp, Homo sapien
catgcaccacttatggggtcagctc

SEQ ID NO: 237795 - DNA, 25 bp, Homo sapien
tgcaccacttatggggtcagctctg

SEQ ID NO: 237796 - DNA, 25 bp, Homo sapien
tcatgcaccacttatggggtcagct

SEQ ID NO: 237797 - DNA, 25 bp, Homo sapien
atgcaccacttatggggtcagctct

SEQ ID NO: 237798 - DNA, 25 bp, Homo sapien
gactgttgaacaggattagttctaa

SEQ ID NO: 237799 - DNA, 25 bp, Homo sapien
taggatcgatcctgagcctctgata

SEQ ID NO: 237800 - DNA, 25 bp, Homo sapien
ctctgatactctggactgttgaaca

SEQ ID NO: 237801 - DNA, 25 bp, Homo sapien
tgaacaggattagttctaaacccca

SEQ ID NO: 237802 - DNA, 25 bp, Homo sapien
cccaacagatggtaagtttgagaca

SEQ ID NO: 237803 - DNA, 25 bp, Homo sapien
cattgtgacttattagaattaagga

SEQ ID NO: 237804 - DNA, 25 bp, Homo sapien
taaggaaatccagtctggtaggctg

SEQ ID NO: 237805 - DNA, 25 bp, Homo sapien
taaaaggatggtagcaaggtattgc

SEQ ID NO: 237806 - DNA, 25 bp, Homo sapien
tgggatgtaagcaacacatagtaca

SEQ ID NO: 237807 - DNA, 25 bp, Homo sapien
catagtacatgcttgtgactactta

SEQ ID NO: 237808 - DNA, 25 bp, Homo sapien
tgaaaggctgtgaaacggtgcctgg

SEQ ID NO: 237809 - DNA, 25 bp, Homo sapien
cggtgcctgggatgtaagcaacaca

SEQ ID NO: 237810 - DNA, 25 bp, Homo sapien
tgtcatccatatttccagaaggctg

SEQ ID NO: 237811 - DNA, 25 bp, Homo sapien
tgaatagagaaaaaaccactgtcat

SEQ ID NO: 237812 - DNA, 25 bp, Homo sapien
ctgaatagagaaaaaaccactgtca

SEQ ID NO: 237813 - DNA, 25 bp, Homo sapien
cactgtcatccatatttccagaagg

SEQ ID NO: 237814 - DNA, 25 bp, Homo sapien
ggcccatccttttctaaatggtatc

SEQ ID NO: 237815 - DNA, 25 bp, Homo sapien
gcccatccttttctaaatggtatcc

SEQ ID NO: 237816 - DNA, 25 bp, Homo sapien
agaaatgtgacttagtgagtttaaa

SEQ ID NO: 237817 - DNA, 25 bp, Homo sapien
aaaagaaatgtgacttagtgagttt

SEQ ID NO: 237818 - DNA, 25 bp, Homo sapien
cgtgcgataatcttcactagtaact

SEQ ID NO: 237819 - DNA, 25 bp, Homo sapien
aaaaacgtgcgataatcttcactag

SEQ ID NO: 237820 - DNA, 25 bp, Homo sapien
ctgtaaaaacgtgcgataatcttca

SEQ ID NO: 237821 - DNA, 25 bp, Homo sapien
gataatcttcactagtaactcctcc

SEQ ID NO: 237822 - DNA, 25 bp, Homo sapien
ttctccttgcaataagttattcagg

SEQ ID NO: 237823 - DNA, 25 bp, Homo sapien
attctccttgcaataagttattcag

SEQ ID NO: 237824 - DNA, 25 bp, Homo sapien
tacatggttgggaaaaacatgcaca

SEQ ID NO: 237825 - DNA, 25 bp, Homo sapien
aatgtgtgacagagactacagctgg

SEQ ID NO: 237826 - DNA, 25 bp, Homo sapien
aacctgccccagtagctaagaatgc

SEQ ID NO: 237827 - DNA, 25 bp, Homo sapien
tatatctcagaaactcaaagccatc

SEQ ID NO: 237828 - DNA, 25 bp, Homo sapien
ctccgagaggcggtgatgccgcgct

SEQ ID NO: 237829 - DNA, 25 bp, Homo sapien
cagccctccgagaggcggtgatgcc

SEQ ID NO: 237830 - DNA, 25 bp, Homo sapien
gagaggcggtgatgccgcgctccac

SEQ ID NO: 237831 - DNA, 25 bp, Homo sapien
tccgagaggcggtgatgccgcgctc

SEQ ID NO: 237832 - DNA, 25 bp, Homo sapien
cccgccaccgcgcggcagacagctc

SEQ ID NO: 237833 - DNA, 25 bp, Homo sapien
ctccccaccgaacgcggacactcac

SEQ ID NO: 237834 - DNA, 25 bp, Homo sapien
agctccccaccgaacgcggacactc

SEQ ID NO: 237835 - DNA, 25 bp, Homo sapien
cagctccccaccgaacgcggacact

SEQ ID NO: 237836 - DNA, 25 bp, Homo sapien
gccgaaccaccccctccagctccgc

SEQ ID NO: 237837 - DNA, 25 bp, Homo sapien
ttatttgtctggagccaacggcccc

SEQ ID NO: 237838 - DNA, 25 bp, Homo sapien
ccacgccgaaccaccccctccagct

SEQ ID NO: 237839 - DNA, 25 bp, Homo sapien
gtttatttgtctggagccaacggcc

SEQ ID NO: 237840 - DNA, 25 bp, Homo sapien
ttcatgtttttatttctctcagaac

SEQ ID NO: 237841 - DNA, 25 bp, Homo sapien
tcatgtttttatttctctcagaact

SEQ ID NO: 237842 - DNA, 25 bp, Homo sapien
tcttcatgtttttatttctctcaga

SEQ ID NO: 237843 - DNA, 25 bp, Homo sapien
gattcttcatgtttttatttctctc

SEQ ID NO: 237844 - DNA, 25 bp, Homo sapien
gtgaacattcgataatctagccagt

SEQ ID NO: 237845 - DNA, 25 bp, Homo sapien
tgtgaacattcgataatctagccag

SEQ ID NO: 237846 - DNA, 25 bp, Homo sapien
aaatgtgaacattcgataatctagc

SEQ ID NO: 237847 - DNA, 25 bp, Homo sapien
aatgtgaacattcgataatctagcc

SEQ ID NO: 237848 - DNA, 25 bp, Homo sapien
tccaggtaacttcttcactgggttg

SEQ ID NO: 237849 - DNA, 25 bp, Homo sapien
aacttcttcactgggttgcaattcc

SEQ ID NO: 237850 - DNA, 25 bp, Homo sapien
caggtaacttcttcactgggttgca

SEQ ID NO: 237851 - DNA, 25 bp, Homo sapien
ggtaacttcttcactgggttgcaat

SEQ ID NO: 237852 - DNA, 25 bp, Homo sapien
tcttgcccctcaggcttcctcctac

SEQ ID NO: 237853 - DNA, 25 bp, Homo sapien
actgtggatgctgctcagttctctt

SEQ ID NO: 237854 - DNA, 25 bp, Homo sapien
tgctcagttctcttgcccctcaggc

SEQ ID NO: 237855 - DNA, 25 bp, Homo sapien
gttctcttgcccctcaggcttcctc

SEQ ID NO: 237856 - DNA, 25 bp, Homo sapien
ctgtcttgctaactggaactctctg

SEQ ID NO: 237857 - DNA, 25 bp, Homo sapien
cctgtcttgctaactggaactctct

SEQ ID NO: 237858 - DNA, 25 bp, Homo sapien
tggcaggcatcctgtcttgctaact

SEQ ID NO: 237859 - DNA, 25 bp, Homo sapien
ggcatcctgtcttgctaactggaac

SEQ ID NO: 237860 - DNA, 25 bp, Homo sapien
ccatagggacaagaacatgaaccca

SEQ ID NO: 237861 - DNA, 25 bp, Homo sapien
tatcagaaatacaactgctttgttt

SEQ ID NO: 237862 - DNA, 25 bp, Homo sapien
atagcttttaaattgcatctgggcc

SEQ ID NO: 237863 - DNA, 25 bp, Homo sapien
attatcagaaatacaactgctttgt

SEQ ID NO: 237864 - DNA, 25 bp, Homo sapien
agcttttaaattgcatctgggccag

SEQ ID NO: 237865 - DNA, 25 bp, Homo sapien
tattcacaggcactacagctctcaa

SEQ ID NO: 237866 - DNA, 25 bp, Homo sapien
ctaatacgcctctttgtttgcctgg

SEQ ID NO: 237867 - DNA, 25 bp, Homo sapien
gatgtgatacgatacagagcagaga

SEQ ID NO: 237868 - DNA, 25 bp, Homo sapien
caacagctgattgtttgcaccctcc

SEQ ID NO: 237869 - DNA, 25 bp, Homo sapien
ccagcctgggggatacagcgagtct

SEQ ID NO: 237870 - DNA, 25 bp, Homo sapien
tccagcctgggggatacagcgagtc

SEQ ID NO: 237871 - DNA, 25 bp, Homo sapien
taagctgtgctaggactatgtagac

SEQ ID NO: 237872 - DNA, 25 bp, Homo sapien
tatagcccatgcctaagaaacccct

SEQ ID NO: 237873 - DNA, 25 bp, Homo sapien
taggttactaggtaccagagccatc

SEQ ID NO: 237874 - DNA, 25 bp, Homo sapien
tgaattcaaaatacacctgtgtgcg

SEQ ID NO: 237875 - DNA, 25 bp, Homo sapien
ggtgacaagagtgaatctctgtctc

SEQ ID NO: 237876 - DNA, 25 bp, Homo sapien
agctacttgggctgctgagacggga

SEQ ID NO: 237877 - DNA, 25 bp, Homo sapien
tacttgggctgctgagacgggagaa

SEQ ID NO: 237878 - DNA, 25 bp, Homo sapien
atcgcttgaacccgggaggcggagg

SEQ ID NO: 237879 - DNA, 25 bp, Homo sapien
acttggacgaatgtaagctgctcgc

SEQ ID NO: 237880 - DNA, 25 bp, Homo sapien
tgggtcacatctctacggacgtttt

SEQ ID NO: 237881 - DNA, 25 bp, Homo sapien
acacatgcacagcaccgagggcttg

SEQ ID NO: 237882 - DNA, 25 bp, Homo sapien
tcttctctccagtccggttagcggg

SEQ ID NO: 237883 - DNA, 25 bp, Homo sapien
tcaacccgcgccagtggaagctgcg

SEQ ID NO: 237884 - DNA, 25 bp, Homo sapien
agaccaagggcaacagggaactcaa

SEQ ID NO: 237885 - DNA, 25 bp, Homo sapien
ccagtggaagctgcgacctcgggac

SEQ ID NO: 237886 - DNA, 25 bp, Homo sapien
ctcagcgcctacagcgaccccgaga

SEQ ID NO: 237887 - DNA, 25 bp, Homo sapien
ctgccattcgccgcgcccgcacgga

SEQ ID NO: 237888 - DNA, 25 bp, Homo sapien
cattcgccgcgcccgcacggagcag

SEQ ID NO: 237889 - DNA, 25 bp, Homo sapien
tgccattcgccgcgcccgcacggag

SEQ ID NO: 237890 - DNA, 25 bp, Homo sapien
gcacggagcagaggggtgacgccag

SEQ ID NO: 237891 - DNA, 25 bp, Homo sapien
ttttcctcctcagggttgactcctc

SEQ ID NO: 237892 - DNA, 25 bp, Homo sapien
tttcctcctcagggttgactcctct

SEQ ID NO: 237893 - DNA, 25 bp, Homo sapien
ctgaataaaatttcgctccagacag

SEQ ID NO: 237894 - DNA, 25 bp, Homo sapien
tctgaataaaatttcgctccagaca

SEQ ID NO: 237895 - DNA, 25 bp, Homo sapien
ttctgaataaaatttcgctccagac

SEQ ID NO: 237896 - DNA, 25 bp, Homo sapien
cagcatcggcttttctacgtcttga

SEQ ID NO: 237897 - DNA, 25 bp, Homo sapien
ccaaaatggcggctgccactgtggg

SEQ ID NO: 237898 - DNA, 25 bp, Homo sapien
tcgtctccgccgctagtctccagct

SEQ ID NO: 237899 - DNA, 25 bp, Homo sapien
ttctgccggccggtagtccctggcg

SEQ ID NO: 237900 - DNA, 25 bp, Homo sapien
tggacggcgttgggggaggcctgac

SEQ ID NO: 237901 - DNA, 25 bp, Homo sapien
gctgtggacggcgttgggggaggcc

SEQ ID NO: 237902 - DNA, 25 bp, Homo sapien
ttgggaagggctgtggacggcgttg

SEQ ID NO: 237903 - DNA, 25 bp, Homo sapien
tgggaagggctgtggacggcgttgg

SEQ ID NO: 237904 - DNA, 25 bp, Homo sapien
caagctcccagctgttttgcggcag

SEQ ID NO: 237905 - DNA, 25 bp, Homo sapien
taagctctggacaccgcttaggcgt

SEQ ID NO: 237906 - DNA, 25 bp, Homo sapien
gagaccacgaggttgctaagctctg

SEQ ID NO: 237907 - DNA, 25 bp, Homo sapien
ttggcgctggaagagttaaaccgac

SEQ ID NO: 237908 - DNA, 25 bp, Homo sapien
ttaggtaactcggtggccttctctc

SEQ ID NO: 237909 - DNA, 25 bp, Homo sapien
tattaggtaactcggtggccttctc

SEQ ID NO: 237910 - DNA, 25 bp, Homo sapien
attaggtaactcggtggccttctct

SEQ ID NO: 237911 - DNA, 25 bp, Homo sapien
tggccttgagtagtggtaagaaatt

SEQ ID NO: 237912 - DNA, 25 bp, Homo sapien
tttagttgaggaaacgtgtgaagct

SEQ ID NO: 237913 - DNA, 25 bp, Homo sapien
tgtatctcatatcccactgctttaa

SEQ ID NO: 237914 - DNA, 25 bp, Homo sapien
gcctggccaaccagtttgatttaaa

SEQ ID NO: 237915 - DNA, 25 bp, Homo sapien
tggaaacttgattaatttcagagga

SEQ ID NO: 237916 - DNA, 25 bp, Homo sapien
catttccaatggattatgtcttaag

SEQ ID NO: 237917 - DNA, 25 bp, Homo sapien
ttagaaaaacaactgcaatcacatg

SEQ ID NO: 237918 - DNA, 25 bp, Homo sapien
catgagtgaaatcatggaaaaatct

SEQ ID NO: 237919 - DNA, 25 bp, Homo sapien
aaacactactatcctgtgtggaaaa

SEQ ID NO: 237920 - DNA, 25 bp, Homo sapien
gtctttcttgtgactaaccaccctg

SEQ ID NO: 237921 - DNA, 25 bp, Homo sapien
taaggtcacccaagcagtggttgga

SEQ ID NO: 237922 - DNA, 25 bp, Homo sapien
taactatgtgtggaacaacccagta

SEQ ID NO: 237923 - DNA, 25 bp, Homo sapien
tcttagccgtaagttaggtcctgtg

SEQ ID NO: 237924 - DNA, 25 bp, Homo sapien
ttctcctcattcttgacaacattta

SEQ ID NO: 237925 - DNA, 25 bp, Homo sapien
tgtgggtgaagaagtgtctcactga

SEQ ID NO: 237926 - DNA, 25 bp, Homo sapien
ctttactgttgagatgtaagagttt

SEQ ID NO: 237927 - DNA, 25 bp, Homo sapien
tacagtaattctgcttaaccttttg

SEQ ID NO: 237928 - DNA, 25 bp, Homo sapien
taattactgcctattaagaaaagct

SEQ ID NO: 237929 - DNA, 25 bp, Homo sapien
aattatgtggcatgaggaggattga

SEQ ID NO: 237930 - DNA, 25 bp, Homo sapien
caaacttgcagggagagaattatgt

SEQ ID NO: 237931 - DNA, 25 bp, Homo sapien
atagtataaaaatcagtgtaggccc

SEQ ID NO: 237932 - DNA, 25 bp, Homo sapien
cttaaaatcaggaaaccagcattga

SEQ ID NO: 237933 - DNA, 25 bp, Homo sapien
ctaagttgcaattgtgatgtcccat

SEQ ID NO: 237934 - DNA, 25 bp, Homo sapien
aggatcccttgagattgaggcttca

SEQ ID NO: 237935 - DNA, 25 bp, Homo sapien
gtgacaaattcctaacagctcaaat

SEQ ID NO: 237936 - DNA, 25 bp, Homo sapien
gaagacagcaaggatagactctact

SEQ ID NO: 237937 - DNA, 25 bp, Homo sapien
tgttgcttgttaccgtcagtgtgcc

SEQ ID NO: 237938 - DNA, 25 bp, Homo sapien
tccaaggcacgcgttcagaatgggt

SEQ ID NO: 237939 - DNA, 25 bp, Homo sapien
gttgctcgtgagtagagaagacagc

SEQ ID NO: 237940 - DNA, 25 bp, Homo sapien
cagcacgttgtttggctcatcgaca

SEQ ID NO: 237941 - DNA, 25 bp, Homo sapien
tgcacaggatgccttgtgtaaggca

SEQ ID NO: 237942 - DNA, 25 bp, Homo sapien
ggctcatcgacaaagcaggtgccct

SEQ ID NO: 237943 - DNA, 25 bp, Homo sapien
ccttgtgtaaggcatcggcagcacg

SEQ ID NO: 237944 - DNA, 25 bp, Homo sapien
caggggaagggtcttacagcttgcc

SEQ ID NO: 237945 - DNA, 25 bp, Homo sapien
ggtggccgggacaggccaggtagtg

SEQ ID NO: 237946 - DNA, 25 bp, Homo sapien
ggtcttacagcttgccctttggaga

SEQ ID NO: 237947 - DNA, 25 bp, Homo sapien
cagacttcctgtcccatcagggtgg

SEQ ID NO: 237948 - DNA, 25 bp, Homo sapien
gcagcttccgcggagagcagaagcc

SEQ ID NO: 237949 - DNA, 25 bp, Homo sapien
gagatcactagccacctttggcagg

SEQ ID NO: 237950 - DNA, 25 bp, Homo sapien
ttaaaggatttcaggcgcacggact

SEQ ID NO: 237951 - DNA, 25 bp, Homo sapien
ttgatggctcgctgtcaccacccat

SEQ ID NO: 237952 - DNA, 25 bp, Homo sapien
cactgtcccttggtcaccagcaact

SEQ ID NO: 237953 - DNA, 25 bp, Homo sapien
actgtcccttggtcaccagcaactc

SEQ ID NO: 237954 - DNA, 25 bp, Homo sapien
tcactgtcccttggtcaccagcaac

SEQ ID NO: 237955 - DNA, 25 bp, Homo sapien
ttttatcttcatccgcaaagccctt

SEQ ID NO: 237956 - DNA, 25 bp, Homo sapien
gcaatggcccaaagaatatgccctt

SEQ ID NO: 237957 - DNA, 25 bp, Homo sapien
atctttgctagttctgcaatggccc

SEQ ID NO: 237958 - DNA, 25 bp, Homo sapien
gctagttctgcaatggcccaaagaa

SEQ ID NO: 237959 - DNA, 25 bp, Homo sapien
tcacagcccggctgaaaccaggctg

SEQ ID NO: 237960 - DNA, 25 bp, Homo sapien
atctcatcctggcctgtccgggctg

SEQ ID NO: 237961 - DNA, 25 bp, Homo sapien
caggctgcctcttgcttcgcaatct

SEQ ID NO: 237962 - DNA, 25 bp, Homo sapien
ggcccacactgcaggggttctcaca

SEQ ID NO: 237963 - DNA, 25 bp, Homo sapien
ggcttccttggggatctgacaagtt

SEQ ID NO: 237964 - DNA, 25 bp, Homo sapien
gaactatgtgggtgtagtactggta

SEQ ID NO: 237965 - DNA, 25 bp, Homo sapien
ctggtaatctttgcgatctgtgaac

SEQ ID NO: 237966 - DNA, 25 bp, Homo sapien
atctgacaagttgcggggtcttccg

SEQ ID NO: 237967 - DNA, 25 bp, Homo sapien
cctgcatcgctgttatgtttctcct

SEQ ID NO: 237968 - DNA, 25 bp, Homo sapien
aaccattgggtgaagtgcatctgtg

SEQ ID NO: 237969 - DNA, 25 bp, Homo sapien
tccaggattcctgcatcgctgttat

SEQ ID NO: 237970 - DNA, 25 bp, Homo sapien
ttgcaggcctgtctggccagttcca

SEQ ID NO: 237971 - DNA, 25 bp, Homo sapien
tccctactgtggtggtcactggtgt

SEQ ID NO: 237972 - DNA, 25 bp, Homo sapien
ccttctgtgtaagtagtagtgttgc

SEQ ID NO: 237973 - DNA, 25 bp, Homo sapien
cactggtgtggatgccagatacatc

SEQ ID NO: 237974 - DNA, 25 bp, Homo sapien
tccctatgtgtttggattgggctgt

SEQ ID NO: 237975 - DNA, 25 bp, Homo sapien
caagtagctggctacagcctggaga

SEQ ID NO: 237976 - DNA, 25 bp, Homo sapien
ctggctacagcctggagaagccagg

SEQ ID NO: 237977 - DNA, 25 bp, Homo sapien
aagccgggctggggcggagctgtgg

SEQ ID NO: 237978 - DNA, 25 bp, Homo sapien
caggtcccctggaagccgggctggg

SEQ ID NO: 237979 - DNA, 25 bp, Homo sapien
tgagaggaaggtggcccttaggttc

SEQ ID NO: 237980 - DNA, 25 bp, Homo sapien
gctgtggttctctgacatgaccttc

SEQ ID NO: 237981 - DNA, 25 bp, Homo sapien
tcccgcagctgtgaggtccctgctg

SEQ ID NO: 237982 - DNA, 25 bp, Homo sapien
aaggtggcccttaggttccagagca

SEQ ID NO: 237983 - DNA, 25 bp, Homo sapien
agatctggggactattctgctggca

SEQ ID NO: 237984 - DNA, 25 bp, Homo sapien
ggcaaggacatagcaacccaggaag

SEQ ID NO: 237985 - DNA, 25 bp, Homo sapien
gacatagcaacccaggaagatctgg

SEQ ID NO: 237986 - DNA, 25 bp, Homo sapien
gggaaaagcggcaaggacatagcaa

SEQ ID NO: 237987 - DNA, 25 bp, Homo sapien
catagacgtgcttgttgttgtcact

SEQ ID NO: 237988 - DNA, 25 bp, Homo sapien
agcatagacgtgcttgttgttgtca

SEQ ID NO: 237989 - DNA, 25 bp, Homo sapien
tgccattttgttattggactcttgc

SEQ ID NO: 237990 - DNA, 25 bp, Homo sapien
ccattttgttattggactcttgcaa

SEQ ID NO: 237991 - DNA, 25 bp, Homo sapien
acggttgacttaacaggggcttgtg

SEQ ID NO: 237992 - DNA, 25 bp, Homo sapien
cagtacggttgacttaacaggggct

SEQ ID NO: 237993 - DNA, 25 bp, Homo sapien
gttgacttaacaggggcttgtgttc

SEQ ID NO: 237994 - DNA, 25 bp, Homo sapien
gacttaacaggggcttgtgttcagg

SEQ ID NO: 237995 - DNA, 25 bp, Homo sapien
tccggccgctcaaagttcgcaggag

SEQ ID NO: 237996 - DNA, 25 bp, Homo sapien
gatgctgccgcagcaagtcggcttc

SEQ ID NO: 237997 - DNA, 25 bp, Homo sapien
tgtgctgtgcgtccggcctcttcgg

SEQ ID NO: 237998 - DNA, 25 bp, Homo sapien
actgattgcactctggccgctgaag

SEQ ID NO: 237999 - DNA, 25 bp, Homo sapien
cccttcttgcttttgagctccttga

SEQ ID NO: 238000 - DNA, 25 bp, Homo sapien
gtaagaatgcaggtatttgccattc

SEQ ID NO: 238001 - DNA, 25 bp, Homo sapien
tcatggcagattgcagtggtaagaa

SEQ ID NO: 238002 - DNA, 25 bp, Homo sapien
gggactatgtcctctttgtcgttgg

SEQ ID NO: 238003 - DNA, 25 bp, Homo sapien
gagcaaccctatctggtggtcccgt

SEQ ID NO: 238004 - DNA, 25 bp, Homo sapien
ttgatggagcaaccctatctggtgg

SEQ ID NO: 238005 - DNA, 25 bp, Homo sapien
tggtggtcccgtcctagatgcggac

SEQ ID NO: 238006 - DNA, 25 bp, Homo sapien
gctggatgcatgttgatggagcaac

SEQ ID NO: 238007 - DNA, 25 bp, Homo sapien
caggataggaatccacaacactaac

SEQ ID NO: 238008 - DNA, 25 bp, Homo sapien
gcctccggggagcttccatttgagt

SEQ ID NO: 238009 - DNA, 25 bp, Homo sapien
gggagcttccatttgagttgacagg

SEQ ID NO: 238010 - DNA, 25 bp, Homo sapien
catttgagttgacaggataggaatc

SEQ ID NO: 238011 - DNA, 25 bp, Homo sapien
ctgtaagacgagggggagtacacag

SEQ ID NO: 238012 - DNA, 25 bp, Homo sapien
tgtaagacgagggggagtacacagg

SEQ ID NO: 238013 - DNA, 25 bp, Homo sapien
gtgctttgacgcaagagggtatttg

SEQ ID NO: 238014 - DNA, 25 bp, Homo sapien
tgcccggcatggctggaagccttca

SEQ ID NO: 238015 - DNA, 25 bp, Homo sapien
gctgtgctttgacgcaagagggtat

SEQ ID NO: 238016 - DNA, 25 bp, Homo sapien
ttgagctgtgctttgacgcaagagg

SEQ ID NO: 238017 - DNA, 25 bp, Homo sapien
gagtgtgatattcaccatcagaagc

SEQ ID NO: 238018 - DNA, 25 bp, Homo sapien
atctggagccaagggatggcaagag

SEQ ID NO: 238019 - DNA, 25 bp, Homo sapien
accatcagaagcacaaccgagaggg

SEQ ID NO: 238020 - DNA, 25 bp, Homo sapien
ctaattctgcgctccctccacacat

SEQ ID NO: 238021 - DNA, 25 bp, Homo sapien
ggctgcagggcctccacctggggca

SEQ ID NO: 238022 - DNA, 25 bp, Homo sapien
ctggctgcagggcctccacctgggg

SEQ ID NO: 238023 - DNA, 25 bp, Homo sapien
gctgcagggcctccacctggggcat

SEQ ID NO: 238024 - DNA, 25 bp, Homo sapien
tggctgcagggcctccacctggggc

SEQ ID NO: 238025 - DNA, 25 bp, Homo sapien
catgtttctcatctcgaggatgttg

SEQ ID NO: 238026 - DNA, 25 bp, Homo sapien
tgaccgattatgtaacagaactttt

SEQ ID NO: 238027 - DNA, 25 bp, Homo sapien
actctgccaactgtgcccatggttg

SEQ ID NO: 238028 - DNA, 25 bp, Homo sapien
cccatggttgtggagcattgcagaa

SEQ ID NO: 238029 - DNA, 25 bp, Homo sapien
tgcctgctggatgcagacgccatgc

SEQ ID NO: 238030 - DNA, 25 bp, Homo sapien
gctggatgcagacgccatgccggca

SEQ ID NO: 238031 - DNA, 25 bp, Homo sapien
ctggatgcctgctggatgcagacgc

SEQ ID NO: 238032 - DNA, 25 bp, Homo sapien
cagacgccatgccggcaggtggcat

SEQ ID NO: 238033 - DNA, 25 bp, Homo sapien
tgcagccagaagtgaattcaccccc

SEQ ID NO: 238034 - DNA, 25 bp, Homo sapien
gaagtgaattcacccccatgccgtc

SEQ ID NO: 238035 - DNA, 25 bp, Homo sapien
agccagaagtgaattcacccccatg

SEQ ID NO: 238036 - DNA, 25 bp, Homo sapien
cagaagtgaattcacccccatgccg

SEQ ID NO: 238037 - DNA, 25 bp, Homo sapien
agggggcgtggtcctgctggtgtac

SEQ ID NO: 238038 - DNA, 25 bp, Homo sapien
tcagggggcgtggtcctgctggtgt

SEQ ID NO: 238039 - DNA, 25 bp, Homo sapien
cagggggcgtggtcctgctggtgta

SEQ ID NO: 238040 - DNA, 25 bp, Homo sapien
gatgcttgggataaacagctctggt

SEQ ID NO: 238041 - DNA, 25 bp, Homo sapien
tagcctcgttcagccaggcgggttt

SEQ ID NO: 238042 - DNA, 25 bp, Homo sapien
gaggaatgtgacagccagatgcttg

SEQ ID NO: 238043 - DNA, 25 bp, Homo sapien
ccagagggacaaggtcacggtagcc

SEQ ID NO: 238044 - DNA, 25 bp, Homo sapien
tgaggtcgtgagctgacatgctctg

SEQ ID NO: 238045 - DNA, 25 bp, Homo sapien
aagatgagatttgaggtcgtgagct

SEQ ID NO: 238046 - DNA, 25 bp, Homo sapien
gatttgaggtcgtgagctgacatgc

SEQ ID NO: 238047 - DNA, 25 bp, Homo sapien
tgagatttgaggtcgtgagctgaca

SEQ ID NO: 238048 - DNA, 25 bp, Homo sapien
acctccctgtcccatactgaataaa

SEQ ID NO: 238049 - DNA, 25 bp, Homo sapien
cagctctgatgttgaccagctgctg

SEQ ID NO: 238050 - DNA, 25 bp, Homo sapien
tctgatgttgaccagctgctgccca

SEQ ID NO: 238051 - DNA, 25 bp, Homo sapien
agacagactcatcttccacgccacc

SEQ ID NO: 238052 - DNA, 25 bp, Homo sapien
ctctctcagggagtatgggttgcag

SEQ ID NO: 238053 - DNA, 25 bp, Homo sapien
tctctcagggagtatgggttgcaga

SEQ ID NO: 238054 - DNA, 25 bp, Homo sapien
ctgactctctcagggagtatgggtt

SEQ ID NO: 238055 - DNA, 25 bp, Homo sapien
gactctctcagggagtatgggttgc

SEQ ID NO: 238056 - DNA, 25 bp, Homo sapien
agagaaccccagaaagttctttgct

SEQ ID NO: 238057 - DNA, 25 bp, Homo sapien
gccccagccaaaatgcagagaaccc

SEQ ID NO: 238058 - DNA, 25 bp, Homo sapien
ggccccagccaaaatgcagagaacc

SEQ ID NO: 238059 - DNA, 25 bp, Homo sapien
aggccccagccaaaatgcagagaac

SEQ ID NO: 238060 - DNA, 25 bp, Homo sapien
gccttgggcaaaagtgagatgatga

SEQ ID NO: 238061 - DNA, 25 bp, Homo sapien
ggatagatctgtggaagaggcagca

SEQ ID NO: 238062 - DNA, 25 bp, Homo sapien
aaacaggcaggactcggtgactggt

SEQ ID NO: 238063 - DNA, 25 bp, Homo sapien
tgagggtccaatggctgaagcaaca

SEQ ID NO: 238064 - DNA, 25 bp, Homo sapien
gaccacactcgccgtggcgggacag

SEQ ID NO: 238065 - DNA, 25 bp, Homo sapien
agcgggtcccaagccatgcctggct

SEQ ID NO: 238066 - DNA, 25 bp, Homo sapien
tccgcgggaagatcttcagcgggtc

SEQ ID NO: 238067 - DNA, 25 bp, Homo sapien
aggacccagcatttccgcgggaaga

SEQ ID NO: 238068 - DNA, 25 bp, Homo sapien
ttaaatttcaggctgtgttgatcaa

SEQ ID NO: 238069 - DNA, 25 bp, Homo sapien
tttaaatttcaggctgtgttgatca

SEQ ID NO: 238070 - DNA, 25 bp, Homo sapien
aaatttcaggctgtgttgatcaaga

SEQ ID NO: 238071 - DNA, 25 bp, Homo sapien
taaatttcaggctgtgttgatcaag

SEQ ID NO: 238072 - DNA, 25 bp, Homo sapien
cttcttgaatttgatgtcgcacctc

SEQ ID NO: 238073 - DNA, 25 bp, Homo sapien
tcttcttgaatttgatgtcgcacct

SEQ ID NO: 238074 - DNA, 25 bp, Homo sapien
cttaatgctcttcttgaatttgatg

SEQ ID NO: 238075 - DNA, 25 bp, Homo sapien
tgctcttcttgaatttgatgtcgca

SEQ ID NO: 238076 - DNA, 25 bp, Homo sapien
ctcgagacggattcccagtggtggg

SEQ ID NO: 238077 - DNA, 25 bp, Homo sapien
acggattcccagtggtgggactcag

SEQ ID NO: 238078 - DNA, 25 bp, Homo sapien
cagtggtgggactcagggtgggtct

SEQ ID NO: 238079 - DNA, 25 bp, Homo sapien
tggtgggactcagggtgggtcttcc

SEQ ID NO: 238080 - DNA, 25 bp, Homo sapien
gacagcctccttgggtctggactta

SEQ ID NO: 238081 - DNA, 25 bp, Homo sapien
tgggttccttgccacgtcctctgtg

SEQ ID NO: 238082 - DNA, 25 bp, Homo sapien
cctggctctcgctgtctctgttggg

SEQ ID NO: 238083 - DNA, 25 bp, Homo sapien
tgccggtgctcagtctgggttcctt

SEQ ID NO: 238084 - DNA, 25 bp, Homo sapien
tccagatgccttgctatggtctgaa

SEQ ID NO: 238085 - DNA, 25 bp, Homo sapien
tgttctcctcgaggtatgtatcggg

SEQ ID NO: 238086 - DNA, 25 bp, Homo sapien
catcgtggcggctagaatcagcctt

SEQ ID NO: 238087 - DNA, 25 bp, Homo sapien
tagcggccagtcgattgctatgcat

SEQ ID NO: 238088 - DNA, 25 bp, Homo sapien
cagtcctgtcctgcccctactccct

SEQ ID NO: 238089 - DNA, 25 bp, Homo sapien
acagtcctgtcctgcccctactccc

SEQ ID NO: 238090 - DNA, 25 bp, Homo sapien
tcacagtcctgtcctgcccctactc

SEQ ID NO: 238091 - DNA, 25 bp, Homo sapien
cacagtcctgtcctgcccctactcc

SEQ ID NO: 238092 - DNA, 25 bp, Homo sapien
ttgctgtggagtgatgcttcttttc

SEQ ID NO: 238093 - DNA, 25 bp, Homo sapien
tttgctgtggagtgatgcttctttt

SEQ ID NO: 238094 - DNA, 25 bp, Homo sapien
ttgtgtttgtgtggccgtctgttga

SEQ ID NO: 238095 - DNA, 25 bp, Homo sapien
gtagtccgcatcctttttgtgtttg

SEQ ID NO: 238096 - DNA, 25 bp, Homo sapien
gccgtctgttgagtggcgatgtcat

SEQ ID NO: 238097 - DNA, 25 bp, Homo sapien
tctgtatctctttggtagtccgcat

SEQ ID NO: 238098 - DNA, 25 bp, Homo sapien
agtggacagagatggtgtgtgggct

SEQ ID NO: 238099 - DNA, 25 bp, Homo sapien
caactgtgtagaggtcagagtggac

SEQ ID NO: 238100 - DNA, 25 bp, Homo sapien
aatagttgccaaagcatcctggagg

SEQ ID NO: 238101 - DNA, 25 bp, Homo sapien
tttgcatgaaaatagttgccaaagc

SEQ ID NO: 238102 - DNA, 25 bp, Homo sapien
actaaggatgcccttatcttcggag

SEQ ID NO: 238103 - DNA, 25 bp, Homo sapien
caccgagggcttctgagggatggcc

SEQ ID NO: 238104 - DNA, 25 bp, Homo sapien
gcagtagaggtcaccgagggcttct

SEQ ID NO: 238105 - DNA, 25 bp, Homo sapien
tatcttcggagcagtagaggtcacc

SEQ ID NO: 238106 - DNA, 25 bp, Homo sapien
cttgattttggcacctactacgtag

SEQ ID NO: 238107 - DNA, 25 bp, Homo sapien
gcatgatgcatggaaacagttcaga

SEQ ID NO: 238108 - DNA, 25 bp, Homo sapien
ccagtaaggggtgagtcaaatatat

SEQ ID NO: 238109 - DNA, 25 bp, Homo sapien
cacctactacgtagggataaagatt

SEQ ID NO: 238110 - DNA, 25 bp, Homo sapien
tgcttctgaagcactgaggcagagg

SEQ ID NO: 238111 - DNA, 25 bp, Homo sapien
cttctgaagcactgaggcagaggtg

SEQ ID NO: 238112 - DNA, 25 bp, Homo sapien
tctgaagcactgaggcagaggtgat

SEQ ID NO: 238113 - DNA, 25 bp, Homo sapien
ctgcttctgaagcactgaggcagag

SEQ ID NO: 238114 - DNA, 25 bp, Homo sapien
gttgatgtcacaactccagagagga

SEQ ID NO: 238115 - DNA, 25 bp, Homo sapien
caggaagttgatgtcacaactccag

SEQ ID NO: 238116 - DNA, 25 bp, Homo sapien
gaagagatattgagcaactggatgg

SEQ ID NO: 238117 - DNA, 25 bp, Homo sapien
cagttgctctgggtctccgaggcca

SEQ ID NO: 238118 - DNA, 25 bp, Homo sapien
ctggttgtataggaacacagcactg

SEQ ID NO: 238119 - DNA, 25 bp, Homo sapien
tgtataggaacacagcactgcagaa

SEQ ID NO: 238120 - DNA, 25 bp, Homo sapien
cagaaccacagctggtggaagacaa

SEQ ID NO: 238121 - DNA, 25 bp, Homo sapien
gttgtataggaacacagcactgcag

SEQ ID NO: 238122 - DNA, 25 bp, Homo sapien
tgatggccactctttgatgcacctc

SEQ ID NO: 238123 - DNA, 25 bp, Homo sapien
tgttggactcatggttgaaaggcga

SEQ ID NO: 238124 - DNA, 25 bp, Homo sapien
tgaaaggcgacggttcacctcgtgc

SEQ ID NO: 238125 - DNA, 25 bp, Homo sapien
tcacctcgtgctggcaggtgtttga

SEQ ID NO: 238126 - DNA, 25 bp, Homo sapien
tttttgaagagaggtgatgggtcca

SEQ ID NO: 238127 - DNA, 25 bp, Homo sapien
gctgtctagaatgaggaagtacctg

SEQ ID NO: 238128 - DNA, 25 bp, Homo sapien
gaggctgtctagaatgaggaagtac

SEQ ID NO: 238129 - DNA, 25 bp, Homo sapien
cttcccgcagatgttctctcattga

SEQ ID NO: 238130 - DNA, 25 bp, Homo sapien
tctcattgaacttgaggctgtctag

SEQ ID NO: 238131 - DNA, 25 bp, Homo sapien
taattaatgccactgttttgtgccc

SEQ ID NO: 238132 - DNA, 25 bp, Homo sapien
aattaatgccactgttttgtgccct

SEQ ID NO: 238133 - DNA, 25 bp, Homo sapien
ggaaccgtgctgatggttgtagaac

SEQ ID NO: 238134 - DNA, 25 bp, Homo sapien
gggaaccgtgctgatggttgtagaa

SEQ ID NO: 238135 - DNA, 25 bp, Homo sapien
gccacgggtggcatctctgagagct

SEQ ID NO: 238136 - DNA, 25 bp, Homo sapien
atttgagggccacgggtggcatctc

SEQ ID NO: 238137 - DNA, 25 bp, Homo sapien
cctggtaccaggatttgagggccac

SEQ ID NO: 238138 - DNA, 25 bp, Homo sapien
tctgctgctgggataccctggtacc

SEQ ID NO: 238139 - DNA, 25 bp, Homo sapien
tccacctgctccttacgtgaaagtg

SEQ ID NO: 238140 - DNA, 25 bp, Homo sapien
caaactgccttctccgggatttcag

SEQ ID NO: 238141 - DNA, 25 bp, Homo sapien
tcaaactgccttctccgggatttca

SEQ ID NO: 238142 - DNA, 25 bp, Homo sapien
ctcttgccatgctcccccttgggcc

SEQ ID NO: 238143 - DNA, 25 bp, Homo sapien
gggcctagagctcttgccatgctcc

SEQ ID NO: 238144 - DNA, 25 bp, Homo sapien
gcatggccgggcatgcagggagcca

SEQ ID NO: 238145 - DNA, 25 bp, Homo sapien
ctgctgacctgcaagcaggggctga

SEQ ID NO: 238146 - DNA, 25 bp, Homo sapien
tgagaagaccagtgtgggatcagat

SEQ ID NO: 238147 - DNA, 25 bp, Homo sapien
tggctgagaagaccagtgtgggatc

SEQ ID NO: 238148 - DNA, 25 bp, Homo sapien
gactggcttgttgccacaccataat

SEQ ID NO: 238149 - DNA, 25 bp, Homo sapien
cctcaaactgactggcttgttgcca

SEQ ID NO: 238150 - DNA, 25 bp, Homo sapien
taactaggaatgcaattactgggcc

SEQ ID NO: 238151 - DNA, 25 bp, Homo sapien
tactgggccatatgcttaacttgac

SEQ ID NO: 238152 - DNA, 25 bp, Homo sapien
tttatgcatggtgtagcatgtgcca

SEQ ID NO: 238153 - DNA, 25 bp, Homo sapien
tggacttttcgtgtatgctcagatg

SEQ ID NO: 238154 - DNA, 25 bp, Homo sapien
agcgccggggctgcccgcgtggacg

SEQ ID NO: 238155 - DNA, 25 bp, Homo sapien
tgcaaacaaaactcgcggtcccagc

SEQ ID NO: 238156 - DNA, 25 bp, Homo sapien
tttgcaaacaaaactcgcggtccca

SEQ ID NO: 238157 - DNA, 25 bp, Homo sapien
cgcgtggacgcggccccctccctgg

SEQ ID NO: 238158 - DNA, 25 bp, Homo sapien
ccggccctggtcgagcctagtgctt

SEQ ID NO: 238159 - DNA, 25 bp, Homo sapien
ctcgggtactagagccccgctgggc

SEQ ID NO: 238160 - DNA, 25 bp, Homo sapien
ctagtgcttgggtagggtccagggc

SEQ ID NO: 238161 - DNA, 25 bp, Homo sapien
tggccgtagacggtgaccttcggac

SEQ ID NO: 238162 - DNA, 25 bp, Homo sapien
ttgaagggtagaggatttgctgatg

SEQ ID NO: 238163 - DNA, 25 bp, Homo sapien
ccgaactgtgcggagtctgctgaga

SEQ ID NO: 238164 - DNA, 25 bp, Homo sapien
tccagtgcatcagggacagatgccg

SEQ ID NO: 238165 - DNA, 25 bp, Homo sapien
tcagggacagatgccgaactgtgcg

SEQ ID NO: 238166 - DNA, 25 bp, Homo sapien
tggacggcatgatcatctgggaaat

SEQ ID NO: 238167 - DNA, 25 bp, Homo sapien
ttcatgcagtgtggagatacagggc

SEQ ID NO: 238168 - DNA, 25 bp, Homo sapien
taggcacttcgcagcaggcatgaaa

SEQ ID NO: 238169 - DNA, 25 bp, Homo sapien
tgtgagacctctccgatcattgctt

SEQ ID NO: 238170 - DNA, 25 bp, Homo sapien
ggtatattcggttcctagggctgca

SEQ ID NO: 238171 - DNA, 25 bp, Homo sapien
ttagaagcgtagactctggagccag

SEQ ID NO: 238172 - DNA, 25 bp, Homo sapien
tctaagggaggatccgtcccatgcc

SEQ ID NO: 238173 - DNA, 25 bp, Homo sapien
tcacctttacatgagaccactaggg

SEQ ID NO: 238174 - DNA, 25 bp, Homo sapien
gtgaagctcgccctcccaatgctta

SEQ ID NO: 238175 - DNA, 25 bp, Homo sapien
cagtggtgaagctcgccctcccaat

SEQ ID NO: 238176 - DNA, 25 bp, Homo sapien
aatgcttaccccctgctgtgcgccc

SEQ ID NO: 238177 - DNA, 25 bp, Homo sapien
tgtgcgccccggttcctaccagttc

SEQ ID NO: 238178 - DNA, 25 bp, Homo sapien
ttagctgatcatgggatgacctttg

SEQ ID NO: 238179 - DNA, 25 bp, Homo sapien
gctgatcatgggatgacctttgaaa

SEQ ID NO: 238180 - DNA, 25 bp, Homo sapien
agcctgaggggcttcttctcattgg

SEQ ID NO: 238181 - DNA, 25 bp, Homo sapien
tgatcatgggatgacctttgaaatc

SEQ ID NO: 238182 - DNA, 25 bp, Homo sapien
tctttgactctgctccccggagctg

SEQ ID NO: 238183 - DNA, 25 bp, Homo sapien
tttgactctgctccccggagctgca

SEQ ID NO: 238184 - DNA, 25 bp, Homo sapien
ggagctgcaggcttccccgtcccaa

SEQ ID NO: 238185 - DNA, 25 bp, Homo sapien
aggcttccccgtcccaagagctggg

SEQ ID NO: 238186 - DNA, 25 bp, Homo sapien
tttttctcaatgggtccagtcaaag

SEQ ID NO: 238187 - DNA, 25 bp, Homo sapien
ttttttctcaatgggtccagtcaaa

SEQ ID NO: 238188 - DNA, 25 bp, Homo sapien
ggactgcccgatgacaggggagatg

SEQ ID NO: 238189 - DNA, 25 bp, Homo sapien
ggatcacctggggactgcccgatga

SEQ ID NO: 238190 - DNA, 25 bp, Homo sapien
agatggtggcccacaggaaaggcat

SEQ ID NO: 238191 - DNA, 25 bp, Homo sapien
caagggatcacctggggactgcccg

SEQ ID NO: 238192 - DNA, 25 bp, Homo sapien
tccaacatcacctcaaagccagtgg

SEQ ID NO: 238193 - DNA, 25 bp, Homo sapien
ctttgcaccatctgtgaagaaagca

SEQ ID NO: 238194 - DNA, 25 bp, Homo sapien
tttgcaccatctgtgaagaaagcat

SEQ ID NO: 238195 - DNA, 25 bp, Homo sapien
gtctggtatgtttcccctgaggctt

SEQ ID NO: 238196 - DNA, 25 bp, Homo sapien
gcctggtgcctgttctcacacctca

SEQ ID NO: 238197 - DNA, 25 bp, Homo sapien
ttggagtgcattgggttcggctgcc

SEQ ID NO: 238198 - DNA, 25 bp, Homo sapien
tcacacctcacctcttgagacggtt

SEQ ID NO: 238199 - DNA, 25 bp, Homo sapien
tttgttgggacttcctcaagtccaa

SEQ ID NO: 238200 - DNA, 25 bp, Homo sapien
gcgaggctgtttgttgggacttcct

SEQ ID NO: 238201 - DNA, 25 bp, Homo sapien
ctttgttctagaaaggtgcgaggct

SEQ ID NO: 238202 - DNA, 25 bp, Homo sapien
tgttctagaaaggtgcgaggctgtt

SEQ ID NO: 238203 - DNA, 25 bp, Homo sapien
agggtagccctcgcccttgggtgag

SEQ ID NO: 238204 - DNA, 25 bp, Homo sapien
ggtagccctcgcccttgggtgagct

SEQ ID NO: 238205 - DNA, 25 bp, Homo sapien
agccattcaggttctgagaggccct

SEQ ID NO: 238206 - DNA, 25 bp, Homo sapien
gggtagccctcgcccttgggtgagc

SEQ ID NO: 238207 - DNA, 25 bp, Homo sapien
ccgcatgcagcccagcatgggaccc

SEQ ID NO: 238208 - DNA, 25 bp, Homo sapien
gctgatgtgtatgggggccgcatgc

SEQ ID NO: 238209 - DNA, 25 bp, Homo sapien
cagcatgggacccagaatgtgtgca

SEQ ID NO: 238210 - DNA, 25 bp, Homo sapien
agaatgtgtgcagcagacacgcccc

SEQ ID NO: 238211 - DNA, 25 bp, Homo sapien
gaagataaggtacctgcccgagtaa

SEQ ID NO: 238212 - DNA, 25 bp, Homo sapien
gaccaggtaccgctgagatgtcaga

SEQ ID NO: 238213 - DNA, 25 bp, Homo sapien
tcctccaaggtgaaacgtgcaactg

SEQ ID NO: 238214 - DNA, 25 bp, Homo sapien
ggcctctctgagttaacgtgtgata

SEQ ID NO: 238215 - DNA, 25 bp, Homo sapien
ggcacagtcatgagcctcctgctgc

SEQ ID NO: 238216 - DNA, 25 bp, Homo sapien
tgccccagtgttgcagcatcagcca

SEQ ID NO: 238217 - DNA, 25 bp, Homo sapien
tcagtaagagcccagtcaacaaatg

SEQ ID NO: 238218 - DNA, 25 bp, Homo sapien
catcagcgtctgcaaactgtggccc

SEQ ID NO: 238219 - DNA, 25 bp, Homo sapien
tgtgatcagctacctacagatggca

SEQ ID NO: 238220 - DNA, 25 bp, Homo sapien
gacagatgttcagctcacaggagaa

SEQ ID NO: 238221 - DNA, 25 bp, Homo sapien
tttgaatgcacagccaaatgggcgt

SEQ ID NO: 238222 - DNA, 25 bp, Homo sapien
aaatgggcgtgatctctggtccacc

SEQ ID NO: 238223 - DNA, 25 bp, Homo sapien
atctgggccatcctttggccaaaag

SEQ ID NO: 238224 - DNA, 25 bp, Homo sapien
tagagtaagcaccagtaaccctggg

SEQ ID NO: 238225 - DNA, 25 bp, Homo sapien
aattagtaggaacgtgggattgtcg

SEQ ID NO: 238226 - DNA, 25 bp, Homo sapien
gattgtcggtcaagattcctcaagg

SEQ ID NO: 238227 - DNA, 25 bp, Homo sapien
ccggactggagtgcagtgctatgat

SEQ ID NO: 238228 - DNA, 25 bp, Homo sapien
agtgctatgatcttggcccactgca

SEQ ID NO: 238229 - DNA, 25 bp, Homo sapien
gtctctgtctgtcacccggactgga

SEQ ID NO: 238230 - DNA, 25 bp, Homo sapien
tgctatgatcttggcccactgcaac

SEQ ID NO: 238231 - DNA, 25 bp, Homo sapien
gatctctctatgaccttggccaagc

SEQ ID NO: 238232 - DNA, 25 bp, Homo sapien
aagaaaaaaatcgtcatcctggcac

SEQ ID NO: 238233 - DNA, 25 bp, Homo sapien
ctctgggcccttgatctctctatga

SEQ ID NO: 238234 - DNA, 25 bp, Homo sapien
gaaaaaaatcgtcatcctggcactg

SEQ ID NO: 238235 - DNA, 25 bp, Homo sapien
tgtgaaaataacatgacgctcgtcc

SEQ ID NO: 238236 - DNA, 25 bp, Homo sapien
gccgcactgcatcaagggctacctg

SEQ ID NO: 238237 - DNA, 25 bp, Homo sapien
gtcctaatagccctgagacaccgag

SEQ ID NO: 238238 - DNA, 25 bp, Homo sapien
caaggccacttcctgagggcaagtc

SEQ ID NO: 238239 - DNA, 25 bp, Homo sapien
attttttaagacttgaacacctgca

SEQ ID NO: 238240 - DNA, 25 bp, Homo sapien
acagagcttttcccaccctaatttg

SEQ ID NO: 238241 - DNA, 25 bp, Homo sapien
gagggcccgagcagcggagacttct

SEQ ID NO: 238242 - DNA, 25 bp, Homo sapien
tattttttaagacttgaacacctgc

SEQ ID NO: 238243 - DNA, 25 bp, Homo sapien
tcggtggggcgctcacacttggaaa

SEQ ID NO: 238244 - DNA, 25 bp, Homo sapien
agcacacagtcggtggggcgctcac

SEQ ID NO: 238245 - DNA, 25 bp, Homo sapien
cacacagtcggtggggcgctcacac

SEQ ID NO: 238246 - DNA, 25 bp, Homo sapien
acagtcggtggggcgctcacacttg

SEQ ID NO: 238247 - DNA, 25 bp, Homo sapien
aggcacacgtggtccatggacaatt

SEQ ID NO: 238248 - DNA, 25 bp, Homo sapien
cagcagctgtcactgagaacgtggc

SEQ ID NO: 238249 - DNA, 25 bp, Homo sapien
gcttctggaccctgctgacaaatgg

SEQ ID NO: 238250 - DNA, 25 bp, Homo sapien
tggtgaaccgtgtcaactctgaaga

SEQ ID NO: 238251 - DNA, 25 bp, Homo sapien
gaatgacatcgacctttcaagcgtc

SEQ ID NO: 238252 - DNA, 25 bp, Homo sapien
gtacaaatgtctcaacgcatactcg

SEQ ID NO: 238253 - DNA, 25 bp, Homo sapien
ccagcacgtacaaatgtctcaacgc

SEQ ID NO: 238254 - DNA, 25 bp, Homo sapien
cacgtacaaatgtctcaacgcatac

SEQ ID NO: 238255 - DNA, 25 bp, Homo sapien
cagcacgtacaaatgtctcaacgca

SEQ ID NO: 238256 - DNA, 25 bp, Homo sapien
gaaagaggcacacatgccagggttt

SEQ ID NO: 238257 - DNA, 25 bp, Homo sapien
ttcccaacctttagataatctggtg

SEQ ID NO: 238258 - DNA, 25 bp, Homo sapien
tcctgacagggaactcccgatggct

SEQ ID NO: 238259 - DNA, 25 bp, Homo sapien
tgatatttatggacgatccctcagg

SEQ ID NO: 238260 - DNA, 25 bp, Homo sapien
tgccagcaaggagacgatcttacgc

SEQ ID NO: 238261 - DNA, 25 bp, Homo sapien
cagttgaagcagtgggtccggaagt

SEQ ID NO: 238262 - DNA, 25 bp, Homo sapien
gggtagcagctgtgccccgtgagcg

SEQ ID NO: 238263 - DNA, 25 bp, Homo sapien
gggctctctcggacaggagctgctc

SEQ ID NO: 238264 - DNA, 25 bp, Homo sapien
tatcaatagacataacccaccatga

SEQ ID NO: 238265 - DNA, 25 bp, Homo sapien
gcagcagataccaaagaagtcctat

SEQ ID NO: 238266 - DNA, 25 bp, Homo sapien
gtcctatatgatttacacagctgtt

SEQ ID NO: 238267 - DNA, 25 bp, Homo sapien
cacaagaaaactctgagccaggtgc

SEQ ID NO: 238268 - DNA, 25 bp, Homo sapien
gggcacagctcctttcaccactact

SEQ ID NO: 238269 - DNA, 25 bp, Homo sapien
cacagctcctttcaccactactcac

SEQ ID NO: 238270 - DNA, 25 bp, Homo sapien
ctgggcacagctcctttcaccacta

SEQ ID NO: 238271 - DNA, 25 bp, Homo sapien
ggcacagctcctttcaccactactc

SEQ ID NO: 238272 - DNA, 25 bp, Homo sapien
tggactcctccagatcattggtgtt

SEQ ID NO: 238273 - DNA, 25 bp, Homo sapien
atctcctccgtgagctgcctggact

SEQ ID NO: 238274 - DNA, 25 bp, Homo sapien
tcatgatggtgagaggcacatcagg

SEQ ID NO: 238275 - DNA, 25 bp, Homo sapien
tcagtttccttttcatgatggtgag

SEQ ID NO: 238276 - DNA, 25 bp, Homo sapien
gacgggagaactggctttgcgtttc

SEQ ID NO: 238277 - DNA, 25 bp, Homo sapien
acgggagaactggctttgcgtttca

SEQ ID NO: 238278 - DNA, 25 bp, Homo sapien
tcgatttggctgtagcggtcactac

SEQ ID NO: 238279 - DNA, 25 bp, Homo sapien
gaagggaaaatgctgcaagcgttct

SEQ ID NO: 238280 - DNA, 25 bp, Homo sapien
tagtgggaaggtacaaagcatctgc

SEQ ID NO: 238281 - DNA, 25 bp, Homo sapien
gcatcaagagctaccaaatgggcac

SEQ ID NO: 238282 - DNA, 25 bp, Homo sapien
tttgtttccatactgcatgacgtgg

SEQ ID NO: 238283 - DNA, 25 bp, Homo sapien
tgtttccatactgcatgacgtggct

SEQ ID NO: 238284 - DNA, 25 bp, Homo sapien
tccatactgcatgacgtggctggtg

SEQ ID NO: 238285 - DNA, 25 bp, Homo sapien
catactgcatgacgtggctggtgtt

SEQ ID NO: 238286 - DNA, 25 bp, Homo sapien
gggttggcagcagtagttgcataaa

SEQ ID NO: 238287 - DNA, 25 bp, Homo sapien
gtaggacgactctctggggttggca

SEQ ID NO: 238288 - DNA, 25 bp, Homo sapien
atccagttgacgctgtaccagtccc

SEQ ID NO: 238289 - DNA, 25 bp, Homo sapien
tcttccatccagttgacgctgtacc

SEQ ID NO: 238290 - DNA, 25 bp, Homo sapien
gggcagggacacgtaactataccca

SEQ ID NO: 238291 - DNA, 25 bp, Homo sapien
taggacatcatgctattctggaaga

SEQ ID NO: 238292 - DNA, 25 bp, Homo sapien
gcaaattggcatgcttaggacatca

SEQ ID NO: 238293 - DNA, 25 bp, Homo sapien
tatgggcttactttggtttccagag

SEQ ID NO: 238294 - DNA, 25 bp, Homo sapien
aacctgcttgccagcccaggtcgag

SEQ ID NO: 238295 - DNA, 25 bp, Homo sapien
tccatgtcagcggtgtctgagcaac

SEQ ID NO: 238296 - DNA, 25 bp, Homo sapien
gcggtgtctgagcaacctgcttgcc

SEQ ID NO: 238297 - DNA, 25 bp, Homo sapien
tcagttccatgtcagcggtgtctga

SEQ ID NO: 238298 - DNA, 25 bp, Homo sapien
gatgttatccggcaggtggttcatc

SEQ ID NO: 238299 - DNA, 25 bp, Homo sapien
tgatgttatccggcaggtggttcat

SEQ ID NO: 238300 - DNA, 25 bp, Homo sapien
cattgatgttatccggcaggtggtt

SEQ ID NO: 238301 - DNA, 25 bp, Homo sapien
ttgatgttatccggcaggtggttca

SEQ ID NO: 238302 - DNA, 25 bp, Homo sapien
gggcgaggcccacactgttttaaca

SEQ ID NO: 238303 - DNA, 25 bp, Homo sapien
tagaaaacacagcacccacagttgg

SEQ ID NO: 238304 - DNA, 25 bp, Homo sapien
cagtttccataaagggtgctatagg

SEQ ID NO: 238305 - DNA, 25 bp, Homo sapien
gctaaagccgaaagcctcatcctgg

SEQ ID NO: 238306 - DNA, 25 bp, Homo sapien
ccgcccccacaaggctgccccaagg

SEQ ID NO: 238307 - DNA, 25 bp, Homo sapien
ccacaaggctgccccaagggctgaa

SEQ ID NO: 238308 - DNA, 25 bp, Homo sapien
acaaggctgccccaagggctgaatt

SEQ ID NO: 238309 - DNA, 25 bp, Homo sapien
cccccacaaggctgccccaagggct

SEQ ID NO: 238310 - DNA, 25 bp, Homo sapien
tacatgtaatggatggtctcattca

SEQ ID NO: 238311 - DNA, 25 bp, Homo sapien
gtacatgtaatggatggtctcattc

SEQ ID NO: 238312 - DNA, 25 bp, Homo sapien
catgtaatggatggtctcattcagg

SEQ ID NO: 238313 - DNA, 25 bp, Homo sapien
tgtacatgtaatggatggtctcatt

SEQ ID NO: 238314 - DNA, 25 bp, Homo sapien
ggtgagaatattgtcagaccaacac

SEQ ID NO: 238315 - DNA, 25 bp, Homo sapien
taatcatggtgaagaacataacccc

SEQ ID NO: 238316 - DNA, 25 bp, Homo sapien
tgctggataagccactagtaaagtt

SEQ ID NO: 238317 - DNA, 25 bp, Homo sapien
tgtcgtcacatgttttatgcacgca

SEQ ID NO: 238318 - DNA, 25 bp, Homo sapien
tcaggtctagtgtgatacacccaca

SEQ ID NO: 238319 - DNA, 25 bp, Homo sapien
tggtctattctcaggtctagtgtga

SEQ ID NO: 238320 - DNA, 25 bp, Homo sapien
tactttgtccggagcttttggtcta

SEQ ID NO: 238321 - DNA, 25 bp, Homo sapien
tcttcacccattactttgtccggag

SEQ ID NO: 238322 - DNA, 25 bp, Homo sapien
gtagatccatggtcagtgaagtaaa

SEQ ID NO: 238323 - DNA, 25 bp, Homo sapien
tccagtagatccatggtcagtgaag

SEQ ID NO: 238324 - DNA, 25 bp, Homo sapien
cagtagatccatggtcagtgaagta

SEQ ID NO: 238325 - DNA, 25 bp, Homo sapien
ttccagtagatccatggtcagtgaa

SEQ ID NO: 238326 - DNA, 25 bp, Homo sapien
ctgccaagaaggaatcgggggtcaa

SEQ ID NO: 238327 - DNA, 25 bp, Homo sapien
agaaggaatcgggggtcaatcattt

SEQ ID NO: 238328 - DNA, 25 bp, Homo sapien
gaaggaatcgggggtcaatcatttc

SEQ ID NO: 238329 - DNA, 25 bp, Homo sapien
ccaagaaggaatcgggggtcaatca

SEQ ID NO: 238330 - DNA, 25 bp, Homo sapien
caccagatggcgctgcttcaaagtg

SEQ ID NO: 238331 - DNA, 25 bp, Homo sapien
gaagccaatttggttcaccctcaca

SEQ ID NO: 238332 - DNA, 25 bp, Homo sapien
tgtagtaacttacatgaagccaatt

SEQ ID NO: 238333 - DNA, 25 bp, Homo sapien
tttggttcaccctcacagatgtcca

SEQ ID NO: 238334 - DNA, 25 bp, Homo sapien
tccccgctgggctgatctgtgatca

SEQ ID NO: 238335 - DNA, 25 bp, Homo sapien
gccattgagagaagtgtagtatccg

SEQ ID NO: 238336 - DNA, 25 bp, Homo sapien
tgatccccagacaaggaacgaggag

SEQ ID NO: 238337 - DNA, 25 bp, Homo sapien
tatgaagggacttacgaatgtgcct

SEQ ID NO: 238338 - DNA, 25 bp, Homo sapien
ctcttcaggactttgccggatccta

SEQ ID NO: 238339 - DNA, 25 bp, Homo sapien
ggatcctatgcccttcactgcttct

SEQ ID NO: 238340 - DNA, 25 bp, Homo sapien
ttgccggatcctatgcccttcactg

SEQ ID NO: 238341 - DNA, 25 bp, Homo sapien
aggactttgccggatcctatgccct

SEQ ID NO: 238342 - DNA, 25 bp, Homo sapien
tctcaacacagcaaggaaattttgt

SEQ ID NO: 238343 - DNA, 25 bp, Homo sapien
ctctcaacacagcaaggaaattttg

SEQ ID NO: 238344 - DNA, 25 bp, Homo sapien
acacagcaaggaaattttgtggggt

SEQ ID NO: 238345 - DNA, 25 bp, Homo sapien
tcaacacagcaaggaaattttgtgg

SEQ ID NO: 238346 - DNA, 25 bp, Homo sapien
tgttgatcacaattcctggagtggg

SEQ ID NO: 238347 - DNA, 25 bp, Homo sapien
gttgatcacaattcctggagtggga

SEQ ID NO: 238348 - DNA, 25 bp, Homo sapien
ctgttgatcacaattcctggagtgg

SEQ ID NO: 238349 - DNA, 25 bp, Homo sapien
catcacaacgatctgttcgtcagga

SEQ ID NO: 238350 - DNA, 25 bp, Homo sapien
tgttcgtcaggaatcccattgcggt

SEQ ID NO: 238351 - DNA, 25 bp, Homo sapien
gtcatcgtacatcatcacaacgatc

SEQ ID NO: 238352 - DNA, 25 bp, Homo sapien
tcaggaatcccattgcggtgaatga

SEQ ID NO: 238353 - DNA, 25 bp, Homo sapien
gatttggtgaagttttagatcttgc

SEQ ID NO: 238354 - DNA, 25 bp, Homo sapien
atgatttggtgaagttttagatctt

SEQ ID NO: 238355 - DNA, 25 bp, Homo sapien
gaaatgatttggtgaagttttagat

SEQ ID NO: 238356 - DNA, 25 bp, Homo sapien
ctgggagaaatgatttggtgaagtt

SEQ ID NO: 238357 - DNA, 25 bp, Homo sapien
aacagctgcaggcagtgtctaaaag

SEQ ID NO: 238358 - DNA, 25 bp, Homo sapien
tgttgttactcctgcactgtttggg

SEQ ID NO: 238359 - DNA, 25 bp, Homo sapien
cacccttgagaggtaaatgctttca

SEQ ID NO: 238360 - DNA, 25 bp, Homo sapien
cctctacctttgttaactcagcggg

SEQ ID NO: 238361 - DNA, 25 bp, Homo sapien
tacagacagggactagctcaggaag

SEQ ID NO: 238362 - DNA, 25 bp, Homo sapien
aatgcctcccgtgatttgccgatag

SEQ ID NO: 238363 - DNA, 25 bp, Homo sapien
tcagctaaacaaagacaagtcgaac

SEQ ID NO: 238364 - DNA, 25 bp, Homo sapien
gagttccgctggtcttcctaatgcc

SEQ ID NO: 238365 - DNA, 25 bp, Homo sapien
cagagccctccggaatgacaaacag

SEQ ID NO: 238366 - DNA, 25 bp, Homo sapien
cttgccggtctccttctccctcgct

SEQ ID NO: 238367 - DNA, 25 bp, Homo sapien
tgccggtctccttctccctcgcttc

SEQ ID NO: 238368 - DNA, 25 bp, Homo sapien
ccggtctccttctccctcgcttcct

SEQ ID NO: 238369 - DNA, 25 bp, Homo sapien
ttgccggtctccttctccctcgctt

SEQ ID NO: 238370 - DNA, 25 bp, Homo sapien
ctggtgtgccactcttccctaaaca

SEQ ID NO: 238371 - DNA, 25 bp, Homo sapien
gggacgaatatttcagtctgggcca

SEQ ID NO: 238372 - DNA, 25 bp, Homo sapien
tctgtggagaccgttcttttgaaca

SEQ ID NO: 238373 - DNA, 25 bp, Homo sapien
gggtgaatcggcacaaatctcacct

SEQ ID NO: 238374 - DNA, 25 bp, Homo sapien
gaagggatcattttgccatgataac

SEQ ID NO: 238375 - DNA, 25 bp, Homo sapien
tcctctttacatgggtcaggtctgt

SEQ ID NO: 238376 - DNA, 25 bp, Homo sapien
tgtgtgcgcgggctgctcctcttta

SEQ ID NO: 238377 - DNA, 25 bp, Homo sapien
ggctaacatacaaaaacgattcgag

SEQ ID NO: 238378 - DNA, 25 bp, Homo sapien
gacacatgttttcacctctcttaag

SEQ ID NO: 238379 - DNA, 25 bp, Homo sapien
tcttaaggacatacttaggagcgga

SEQ ID NO: 238380 - DNA, 25 bp, Homo sapien
tggacttttcatggacactccgatg

SEQ ID NO: 238381 - DNA, 25 bp, Homo sapien
gactctttcccaaggtggttgcacc

SEQ ID NO: 238382 - DNA, 25 bp, Homo sapien
tataggaacggcaccaatgcccagg

SEQ ID NO: 238383 - DNA, 25 bp, Homo sapien
gatcatctataggaacggcaccaat

SEQ ID NO: 238384 - DNA, 25 bp, Homo sapien
catctataggaacggcaccaatgcc

SEQ ID NO: 238385 - DNA, 25 bp, Homo sapien
ggatcatctataggaacggcaccaa

SEQ ID NO: 238386 - DNA, 25 bp, Homo sapien
caccttggagttcaattgcagacac

SEQ ID NO: 238387 - DNA, 25 bp, Homo sapien
gcaccttggagttcaattgcagaca

SEQ ID NO: 238388 - DNA, 25 bp, Homo sapien
agctaggcgtggtagcacgtaccta

SEQ ID NO: 238389 - DNA, 25 bp, Homo sapien
acttagctaggcgtggtagcacgta

SEQ ID NO: 238390 - DNA, 25 bp, Homo sapien
cttagctaggcgtggtagcacgtac

SEQ ID NO: 238391 - DNA, 25 bp, Homo sapien
aaaacttagctaggcgtggtagcac

SEQ ID NO: 238392 - DNA, 25 bp, Homo sapien
tattgctccagcctgtgcgtggaga

SEQ ID NO: 238393 - DNA, 25 bp, Homo sapien
taaacattgtcagcccctaagaaaa

SEQ ID NO: 238394 - DNA, 25 bp, Homo sapien
taaccaccagagtatgttgaagata

SEQ ID NO: 238395 - DNA, 25 bp, Homo sapien
gttgaagataacagagagggtttct

SEQ ID NO: 238396 - DNA, 25 bp, Homo sapien
gaaccacgggtctgttcatgtgcac

SEQ ID NO: 238397 - DNA, 25 bp, Homo sapien
tagcggctagtatggcacataacag

SEQ ID NO: 238398 - DNA, 25 bp, Homo sapien
tcgacctgacaagggctcgctgtgg

SEQ ID NO: 238399 - DNA, 25 bp, Homo sapien
gctacaaggcaagattaacggacag

SEQ ID NO: 238400 - DNA, 25 bp, Homo sapien
ctggcctatcttttagtattatgga

SEQ ID NO: 238401 - DNA, 25 bp, Homo sapien
tggcctatcttttagtattatggaa

SEQ ID NO: 238402 - DNA, 25 bp, Homo sapien
ggcctatcttttagtattatggaaa

SEQ ID NO: 238403 - DNA, 25 bp, Homo sapien
cctggcctatcttttagtattatgg

SEQ ID NO: 238404 - DNA, 25 bp, Homo sapien
accgtgagaactcgcggcggctcgc

SEQ ID NO: 238405 - DNA, 25 bp, Homo sapien
acgacgtcggcactgctgtgattgc

SEQ ID NO: 238406 - DNA, 25 bp, Homo sapien
tgagtgaccgcggtggtggcgccgg

SEQ ID NO: 238407 - DNA, 25 bp, Homo sapien
tcacaccaaacacccacgacgtcgg

SEQ ID NO: 238408 - DNA, 25 bp, Homo sapien
tgtagaaagtgctgagctcacagga

SEQ ID NO: 238409 - DNA, 25 bp, Homo sapien
tgagaattccactgaggaaaacaag

SEQ ID NO: 238410 - DNA, 25 bp, Homo sapien
ctcatgggatgacagtacagtgtag

SEQ ID NO: 238411 - DNA, 25 bp, Homo sapien
tgggaagtgcccgtgctcctgtttc

SEQ ID NO: 238412 - DNA, 25 bp, Homo sapien
gcagtcagcactatgcacacacgat

SEQ ID NO: 238413 - DNA, 25 bp, Homo sapien
aagagcttgtagtggggttgaataa

SEQ ID NO: 238414 - DNA, 25 bp, Homo sapien
gatttggctcctgtattctgttgtc

SEQ ID NO: 238415 - DNA, 25 bp, Homo sapien
tgcacacacgatggggaatttcaaa

SEQ ID NO: 238416 - DNA, 25 bp, Homo sapien
tgtgaatatattaccctccatggca

SEQ ID NO: 238417 - DNA, 25 bp, Homo sapien
tgttagaaatgcgagttcctgggac

SEQ ID NO: 238418 - DNA, 25 bp, Homo sapien
tgtggtccttgagccagcatcacct

SEQ ID NO: 238419 - DNA, 25 bp, Homo sapien
tatcttggattacctagtgtaggcc

SEQ ID NO: 238420 - DNA, 25 bp, Homo sapien
aattaaccataggaggatttctctg

SEQ ID NO: 238421 - DNA, 25 bp, Homo sapien
tcccgtagaattaagttgacttgta

SEQ ID NO: 238422 - DNA, 25 bp, Homo sapien
gagagcaaaacctttgtcccgtaga

SEQ ID NO: 238423 - DNA, 25 bp, Homo sapien
gagatcagcatcttaatacattgcc

SEQ ID NO: 238424 - DNA, 25 bp, Homo sapien
ccttatgagtacacatgggacctgt

SEQ ID NO: 238425 - DNA, 25 bp, Homo sapien
gaacagacccctacttgaactccag

SEQ ID NO: 238426 - DNA, 25 bp, Homo sapien
gcagttggtaagtggattcttccca

SEQ ID NO: 238427 - DNA, 25 bp, Homo sapien
ggatgtcactcctaagactgggtta

SEQ ID NO: 238428 - DNA, 25 bp, Homo sapien
tccagcgggttcctggcatccgagg

SEQ ID NO: 238429 - DNA, 25 bp, Homo sapien
tattgatcaacgtccgttccagcgg

SEQ ID NO: 238430 - DNA, 25 bp, Homo sapien
agctcaggatgcagacgggcttcac

SEQ ID NO: 238431 - DNA, 25 bp, Homo sapien
gctgaacctggataagcccctgcgt

SEQ ID NO: 238432 - DNA, 25 bp, Homo sapien
gcccaggattgaggcagcctggaaa

SEQ ID NO: 238433 - DNA, 25 bp, Homo sapien
ccaggattgaggcagcctggaaaaa

SEQ ID NO: 238434 - DNA, 25 bp, Homo sapien
catctcctgcttccgagtcttccac

SEQ ID NO: 238435 - DNA, 25 bp, Homo sapien
tcatctcctgcttccgagtcttcca

SEQ ID NO: 238436 - DNA, 25 bp, Homo sapien
aatctcacagaaaggcagccctgga

SEQ ID NO: 238437 - DNA, 25 bp, Homo sapien
tgcacccagggagctaacttcagag

SEQ ID NO: 238438 - DNA, 25 bp, Homo sapien
tagaggacatcaagatagggacagc

SEQ ID NO: 238439 - DNA, 25 bp, Homo sapien
tgcaggcagtaacacagcagacatg

SEQ ID NO: 238440 - DNA, 25 bp, Homo sapien
gaaggtgtgcctacacccatgcaat

SEQ ID NO: 238441 - DNA, 25 bp, Homo sapien
caaggaagtctatctctctgagagg

SEQ ID NO: 238442 - DNA, 25 bp, Homo sapien
tacagttgactcgaaggcgaaggct

SEQ ID NO: 238443 - DNA, 25 bp, Homo sapien
ccaggaaggcgtgctgtcattttta

SEQ ID NO: 238444 - DNA, 25 bp, Homo sapien
cggcggagccaatcgccatcagagg

SEQ ID NO: 238445 - DNA, 25 bp, Homo sapien
gcgtgctttccaggtaagcagagag

SEQ ID NO: 238446 - DNA, 25 bp, Homo sapien
taagtggtttctgaacggctgcagc

SEQ ID NO: 238447 - DNA, 25 bp, Homo sapien
gcccgaaagccttgtgtttagaaga

SEQ ID NO: 238448 - DNA, 25 bp, Homo sapien
gatgcaattgcaaggagataaaggg

SEQ ID NO: 238449 - DNA, 25 bp, Homo sapien
gaggactaatgaattaactgttccc

SEQ ID NO: 238450 - DNA, 25 bp, Homo sapien
aggggcttaatgtgaaaagcatggc

SEQ ID NO: 238451 - DNA, 25 bp, Homo sapien
ttaaccaaattgctttctattgcct

SEQ ID NO: 238452 - DNA, 25 bp, Homo sapien
gagtaagaacatgggcgtcagaaac

SEQ ID NO: 238453 - DNA, 25 bp, Homo sapien
actgggagtaagaacatgggcgtca

SEQ ID NO: 238454 - DNA, 25 bp, Homo sapien
gggagtaagaacatgggcgtcagaa

SEQ ID NO: 238455 - DNA, 25 bp, Homo sapien
ggactgggagtaagaacatgggcgt

SEQ ID NO: 238456 - DNA, 25 bp, Homo sapien
cagccacaggcagcgccatccattt

SEQ ID NO: 238457 - DNA, 25 bp, Homo sapien
gcagccacaggcagcgccatccatt

SEQ ID NO: 238458 - DNA, 25 bp, Homo sapien
tacacatgtgagcccttacgcctgg

SEQ ID NO: 238459 - DNA, 25 bp, Homo sapien
catgtgagcccttacgcctggctta

SEQ ID NO: 238460 - DNA, 25 bp, Homo sapien
acatgtgagcccttacgcctggctt

SEQ ID NO: 238461 - DNA, 25 bp, Homo sapien
gtgagcccttacgcctggcttaatt

SEQ ID NO: 238462 - DNA, 25 bp, Homo sapien
taaagtgctctgtctagtactgggc

SEQ ID NO: 238463 - DNA, 25 bp, Homo sapien
taaactgtagagtgctccgcacacg

SEQ ID NO: 238464 - DNA, 25 bp, Homo sapien
ggaatttcagccacaagacagggac

SEQ ID NO: 238465 - DNA, 25 bp, Homo sapien
gattcggaaccacccatggcataag

SEQ ID NO: 238466 - DNA, 25 bp, Homo sapien
ggacagcaacgctctcccatgatga

SEQ ID NO: 238467 - DNA, 25 bp, Homo sapien
caaagaaagcgctggatcctgagaa

SEQ ID NO: 238468 - DNA, 25 bp, Homo sapien
aactgggaggcatcgactgttttgc

SEQ ID NO: 238469 - DNA, 25 bp, Homo sapien
tcagctcagggcatgccgataggtt

SEQ ID NO: 238470 - DNA, 25 bp, Homo sapien
acatcatgttcaagagggatcagca

SEQ ID NO: 238471 - DNA, 25 bp, Homo sapien
tgttcaagagggatcagcatgccgc

SEQ ID NO: 238472 - DNA, 25 bp, Homo sapien
atcagcatgccgctggaccccgggg

SEQ ID NO: 238473 - DNA, 25 bp, Homo sapien
gaagacatcatgttcaagagggatc

SEQ ID NO: 238474 - DNA, 25 bp, Homo sapien
tatctgaagacccaatcttgctgcc

SEQ ID NO: 238475 - DNA, 25 bp, Homo sapien
cattgcagatgaacggatcctttcc

SEQ ID NO: 238476 - DNA, 25 bp, Homo sapien
ccagcagcatttcggttgggcttta

SEQ ID NO: 238477 - DNA, 25 bp, Homo sapien
gaaactgacacataccttggaaagg

SEQ ID NO: 238478 - DNA, 25 bp, Homo sapien
tcctggtgaagctcagatggtggaa

SEQ ID NO: 238479 - DNA, 25 bp, Homo sapien
taggcataggagcacctttcaccag

SEQ ID NO: 238480 - DNA, 25 bp, Homo sapien
aatgaagttgcagtcatggtgcctc

SEQ ID NO: 238481 - DNA, 25 bp, Homo sapien
tctaatgacgggaggaattttcact

SEQ ID NO: 238482 - DNA, 25 bp, Homo sapien
catgggagaagcctcgcctgtatca

SEQ ID NO: 238483 - DNA, 25 bp, Homo sapien
gaccccagggacattagtgaagcca

SEQ ID NO: 238484 - DNA, 25 bp, Homo sapien
caaattaagtacgaaccagcttggg

SEQ ID NO: 238485 - DNA, 25 bp, Homo sapien
ctagaaggacaaacgacaggctggc

SEQ ID NO: 238486 - DNA, 25 bp, Homo sapien
ttccagccttctataaagcacactt

SEQ ID NO: 238487 - DNA, 25 bp, Homo sapien
gtcttccagccttctataaagcaca

SEQ ID NO: 238488 - DNA, 25 bp, Homo sapien
cttccagccttctataaagcacact

SEQ ID NO: 238489 - DNA, 25 bp, Homo sapien
tcttccagccttctataaagcacac

SEQ ID NO: 238490 - DNA, 25 bp, Homo sapien
acaaacttgagcaacatgtgtaaac

SEQ ID NO: 238491 - DNA, 25 bp, Homo sapien
ttaaggactgggagtatgacataac

SEQ ID NO: 238492 - DNA, 25 bp, Homo sapien
ggagtatgacataacaaacttgagc

SEQ ID NO: 238493 - DNA, 25 bp, Homo sapien
cataacaaacttgagcaacatgtgt

SEQ ID NO: 238494 - DNA, 25 bp, Homo sapien
gccctgtggtgctctctgatctcaa

SEQ ID NO: 238495 - DNA, 25 bp, Homo sapien
tcagaactaggaaaggtgacgtaca

SEQ ID NO: 238496 - DNA, 25 bp, Homo sapien
ctcagtttccaaaaaagccgggcag

SEQ ID NO: 238497 - DNA, 25 bp, Homo sapien
tctccatggtgtcatgccgaggctc

SEQ ID NO: 238498 - DNA, 25 bp, Homo sapien
caagggtcccggtccacagtggcca

SEQ ID NO: 238499 - DNA, 25 bp, Homo sapien
actggcatggcagccatacgcacac

SEQ ID NO: 238500 - DNA, 25 bp, Homo sapien
gacactggcatggcagccatacgca

SEQ ID NO: 238501 - DNA, 25 bp, Homo sapien
cacagcccgacatgggcaggcttcc

SEQ ID NO: 238502 - DNA, 25 bp, Homo sapien
agagagcaggcggacggccccactc

SEQ ID NO: 238503 - DNA, 25 bp, Homo sapien
taaactcagttaggaggtctgcaca

SEQ ID NO: 238504 - DNA, 25 bp, Homo sapien
tagtagtagcatcgccgttgggagc

SEQ ID NO: 238505 - DNA, 25 bp, Homo sapien
catccagacctagtgttgcaaacac

SEQ ID NO: 238506 - DNA, 25 bp, Homo sapien
cgccggcgttgcagccgagtctctg

SEQ ID NO: 238507 - DNA, 25 bp, Homo sapien
tggaagctgggcgacacgccggcgt

SEQ ID NO: 238508 - DNA, 25 bp, Homo sapien
cgacacgccggcgttgcagccgagt

SEQ ID NO: 238509 - DNA, 25 bp, Homo sapien
ttgcagccgagtctctggtgcggca

SEQ ID NO: 238510 - DNA, 25 bp, Homo sapien
cttggcggtgccgcccgcgtcggcc

SEQ ID NO: 238511 - DNA, 25 bp, Homo sapien
ggggctggcgctgcatgtccgctcg

SEQ ID NO: 238512 - DNA, 25 bp, Homo sapien
gaagaactcgctcacgccctcgtag

SEQ ID NO: 238513 - DNA, 25 bp, Homo sapien
ctgcaggacagtggcgatgtggttc

SEQ ID NO: 238514 - DNA, 25 bp, Homo sapien
ggacagtggcgatgtggttcaggag

SEQ ID NO: 238515 - DNA, 25 bp, Homo sapien
atttcctgaacgtttttgcacctca

SEQ ID NO: 238516 - DNA, 25 bp, Homo sapien
ctcagcagctagcaaggctggcttc

SEQ ID NO: 238517 - DNA, 25 bp, Homo sapien
tcagcagctagcaaggctggcttca

SEQ ID NO: 238518 - DNA, 25 bp, Homo sapien
ttcctgaacgtttttgcacctcagc

SEQ ID NO: 238519 - DNA, 25 bp, Homo sapien
tcaatgacggcgtgctgccctgtct

SEQ ID NO: 238520 - DNA, 25 bp, Homo sapien
cgaagagtgacacgcccagtgcctg

SEQ ID NO: 238521 - DNA, 25 bp, Homo sapien
gatgatgatgtcgatgccgaagagt

SEQ ID NO: 238522 - DNA, 25 bp, Homo sapien
cgaacacgccctcgatcttgtccag

SEQ ID NO: 238523 - DNA, 25 bp, Homo sapien
gggcaccacccacgctccaagtccg

SEQ ID NO: 238524 - DNA, 25 bp, Homo sapien
acgctccgagggacccatgcccggg

SEQ ID NO: 238525 - DNA, 25 bp, Homo sapien
gagggacccacacccggatatcacc

SEQ ID NO: 238526 - DNA, 25 bp, Homo sapien
acccacgctccaagtccgggcgccg

SEQ ID NO: 238527 - DNA, 25 bp, Homo sapien
tgtgtaccctaagccataacagaac

SEQ ID NO: 238528 - DNA, 25 bp, Homo sapien
ggattaaagatctcactacgtttcc

SEQ ID NO: 238529 - DNA, 25 bp, Homo sapien
gagagaccctggtggataccttgga

SEQ ID NO: 238530 - DNA, 25 bp, Homo sapien
aatggcgagatcacaactcaccgca

SEQ ID NO: 238531 - DNA, 25 bp, Homo sapien
ctggagagcttggccaaggacccca

SEQ ID NO: 238532 - DNA, 25 bp, Homo sapien
ttggccaaggaccccatggccacag

SEQ ID NO: 238533 - DNA, 25 bp, Homo sapien
gagcttggccaaggaccccatggcc

SEQ ID NO: 238534 - DNA, 25 bp, Homo sapien
ggagagcttggccaaggaccccatg

SEQ ID NO: 238535 - DNA, 25 bp, Homo sapien
cgtcaggaccgatgacgactccggc

SEQ ID NO: 238536 - DNA, 25 bp, Homo sapien
tccgtcaggaccgatgacgactccg

SEQ ID NO: 238537 - DNA, 25 bp, Homo sapien
gtcaggaccgatgacgactccggct

SEQ ID NO: 238538 - DNA, 25 bp, Homo sapien
caggaccgatgacgactccggcttt

SEQ ID NO: 238539 - DNA, 25 bp, Homo sapien
ctgttgaagaagatggactcacggt

SEQ ID NO: 238540 - DNA, 25 bp, Homo sapien
ttaatggttcccagcgtcgagacgg

SEQ ID NO: 238541 - DNA, 25 bp, Homo sapien
gatacaggataggagcccacactct

SEQ ID NO: 238542 - DNA, 25 bp, Homo sapien
gacacacaggcaaggagtcctcgtc

SEQ ID NO: 238543 - DNA, 25 bp, Homo sapien
gcccagcattttgcaaccagaagga

SEQ ID NO: 238544 - DNA, 25 bp, Homo sapien
gaatatcattattgtgtgggtcccc

SEQ ID NO: 238545 - DNA, 25 bp, Homo sapien
tgacccagggaatagggacatttta

SEQ ID NO: 238546 - DNA, 25 bp, Homo sapien
caactgtttccacctttagagcacc

SEQ ID NO: 238547 - DNA, 25 bp, Homo sapien
catcctggagtctacggtggttcag

SEQ ID NO: 238548 - DNA, 25 bp, Homo sapien
gcctctggaccacggtgtaggactc

SEQ ID NO: 238549 - DNA, 25 bp, Homo sapien
gagaagttcttgagtgagggcctct

SEQ ID NO: 238550 - DNA, 25 bp, Homo sapien
tggatggcgttcaggccctcctggt

SEQ ID NO: 238551 - DNA, 25 bp, Homo sapien
tgatgaaattctggaccacgcaggg

SEQ ID NO: 238552 - DNA, 25 bp, Homo sapien
tgcacagggtctgctctaaggacag

SEQ ID NO: 238553 - DNA, 25 bp, Homo sapien
tgatactccgcaaacaacaggcctt

SEQ ID NO: 238554 - DNA, 25 bp, Homo sapien
catgtgagatcgagctggctgtgca

SEQ ID NO: 238555 - DNA, 25 bp, Homo sapien
tgtctgatgacaacggctgcctctt

SEQ ID NO: 238556 - DNA, 25 bp, Homo sapien
catacttgagggctgagagtcccga

SEQ ID NO: 238557 - DNA, 25 bp, Homo sapien
aagtaccgggcaagtaccagggcag

SEQ ID NO: 238558 - DNA, 25 bp, Homo sapien
aagtcgcacaaatggcaacacacgg

SEQ ID NO: 238559 - DNA, 25 bp, Homo sapien
caacctctgccgatctggtggacag

SEQ ID NO: 238560 - DNA, 25 bp, Homo sapien
gtgagagttggtgccatgagccact

SEQ ID NO: 238561 - DNA, 25 bp, Homo sapien
gccatgagccactctggttttgcaa

SEQ ID NO: 238562 - DNA, 25 bp, Homo sapien
agagttggtgccatgagccactctg

SEQ ID NO: 238563 - DNA, 25 bp, Homo sapien
ctcgtgagagttggtgccatgagcc

SEQ ID NO: 238564 - DNA, 25 bp, Homo sapien
caggtggagctgggatggtacgcac

SEQ ID NO: 238565 - DNA, 25 bp, Homo sapien
tcaggtggagctgggatggtacgca

SEQ ID NO: 238566 - DNA, 25 bp, Homo sapien
cgcacaggctcgtgagctccatgaa

SEQ ID NO: 238567 - DNA, 25 bp, Homo sapien
tccatgaagggtggcgagcagatcc

SEQ ID NO: 238568 - DNA, 25 bp, Homo sapien
aagtcaagccgttcttctccagcag

SEQ ID NO: 238569 - DNA, 25 bp, Homo sapien
gcatggtgtcatccccgcacaggct

SEQ ID NO: 238570 - DNA, 25 bp, Homo sapien
tgctgtgccacccaagggccccacg

SEQ ID NO: 238571 - DNA, 25 bp, Homo sapien
gcccccttgctgtgccacccaaggg

SEQ ID NO: 238572 - DNA, 25 bp, Homo sapien
tgtgccacccaagggccccacgctg

SEQ ID NO: 238573 - DNA, 25 bp, Homo sapien
cacccaagggccccacgctgctcat

SEQ ID NO: 238574 - DNA, 25 bp, Homo sapien
ggcagcctggagtgagtcttcccca

SEQ ID NO: 238575 - DNA, 25 bp, Homo sapien
ctgggtgctgcccagccgtccggtt

SEQ ID NO: 238576 - DNA, 25 bp, Homo sapien
gcctgggtcactgaaaggcagcctg

SEQ ID NO: 238577 - DNA, 25 bp, Homo sapien
ctgaaggcactcaaggccaatggca

SEQ ID NO: 238578 - DNA, 25 bp, Homo sapien
caggcctcaagtagttatttatagc

SEQ ID NO: 238579 - DNA, 25 bp, Homo sapien
accatgacaggcctcaagtagttat

SEQ ID NO: 238580 - DNA, 25 bp, Homo sapien
tagcagtgtgataacagactataca

SEQ ID NO: 238581 - DNA, 25 bp, Homo sapien
tgataacagactatacaccagcccc

SEQ ID NO: 238582 - DNA, 25 bp, Homo sapien
ccagtatttcagagccgctccaaat

SEQ ID NO: 238583 - DNA, 25 bp, Homo sapien
tccaaataccacctccgcgagagcc

SEQ ID NO: 238584 - DNA, 25 bp, Homo sapien
atttcagagccgctccaaataccac

SEQ ID NO: 238585 - DNA, 25 bp, Homo sapien
accacctccgcgagagccccacaga

SEQ ID NO: 238586 - DNA, 25 bp, Homo sapien
ccgatgtctgagtctggcggcagta

SEQ ID NO: 238587 - DNA, 25 bp, Homo sapien
ccactgatttacagccccttctgga

SEQ ID NO: 238588 - DNA, 25 bp, Homo sapien
ggagggctctttctggtagtaccta

SEQ ID NO: 238589 - DNA, 25 bp, Homo sapien
gacagagacaggcatttctgcgccc

SEQ ID NO: 238590 - DNA, 25 bp, Homo sapien
gggtatctcgtccagaagccactga

SEQ ID NO: 238591 - DNA, 25 bp, Homo sapien
caagtggggtatctcgtccagaagc

SEQ ID NO: 238592 - DNA, 25 bp, Homo sapien
cacctggaccaagtggggtatctcg

SEQ ID NO: 238593 - DNA, 25 bp, Homo sapien
tcgtccagaagccactgagctggag

SEQ ID NO: 238594 - DNA, 25 bp, Homo sapien
ctagatgaaggtgcatctctcctgc

SEQ ID NO: 238595 - DNA, 25 bp, Homo sapien
gcagggtgccagccagtcgccatga

SEQ ID NO: 238596 - DNA, 25 bp, Homo sapien
tgtcctccaggcacataccccagtc

SEQ ID NO: 238597 - DNA, 25 bp, Homo sapien
ctgtcctccaggcacataccccagt

SEQ ID NO: 238598 - DNA, 25 bp, Homo sapien
ggaggcctggacctgacaacctctc

SEQ ID NO: 238599 - DNA, 25 bp, Homo sapien
agggctgcgagtaggcctgtgggcc

SEQ ID NO: 238600 - DNA, 25 bp, Homo sapien
cacagaaagggctgcgagtaggcct

SEQ ID NO: 238601 - DNA, 25 bp, Homo sapien
gcacagaaagggctgcgagtaggcc

SEQ ID NO: 238602 - DNA, 25 bp, Homo sapien
tgcgagtaggcctgtgggcctgatg

SEQ ID NO: 238603 - DNA, 25 bp, Homo sapien
ggtccctctccatcagccacagggg

SEQ ID NO: 238604 - DNA, 25 bp, Homo sapien
tcggtccctctccatcagccacagg

SEQ ID NO: 238605 - DNA, 25 bp, Homo sapien
ctatctttgcctcggtccctctcca

SEQ ID NO: 238606 - DNA, 25 bp, Homo sapien
tccctctccatcagccacaggggaa

SEQ ID NO: 238607 - DNA, 25 bp, Homo sapien
acttggagcggtcaagcagggttct

SEQ ID NO: 238608 - DNA, 25 bp, Homo sapien
ttccatgtaggcctcaatcttccgg

SEQ ID NO: 238609 - DNA, 25 bp, Homo sapien
gatggcagggagcgggtccaggacg

SEQ ID NO: 238610 - DNA, 25 bp, Homo sapien
ccggatgagctcataggacttggag

SEQ ID NO: 238611 - DNA, 25 bp, Homo sapien
gccccatgccccgcactgataagga

SEQ ID NO: 238612 - DNA, 25 bp, Homo sapien
ccccatgccccgcactgataaggac

SEQ ID NO: 238613 - DNA, 25 bp, Homo sapien
cggccccatgccccgcactgataag

SEQ ID NO: 238614 - DNA, 25 bp, Homo sapien
cccatgccccgcactgataaggact

SEQ ID NO: 238615 - DNA, 25 bp, Homo sapien
agagtgggatgaggccaggagtcat

SEQ ID NO: 238616 - DNA, 25 bp, Homo sapien
atgaggccaggagtcatcagagggt

SEQ ID NO: 238617 - DNA, 25 bp, Homo sapien
gcgggagagtgggatgaggccagga

SEQ ID NO: 238618 - DNA, 25 bp, Homo sapien
tgggatgaggccaggagtcatcaga

SEQ ID NO: 238619 - DNA, 25 bp, Homo sapien
acctacagcgcaagctctctcaggg

SEQ ID NO: 238620 - DNA, 25 bp, Homo sapien
aagcccatggaatgatgccaacaga

SEQ ID NO: 238621 - DNA, 25 bp, Homo sapien
agagcgtcacggtgcccacctacag

SEQ ID NO: 238622 - DNA, 25 bp, Homo sapien
gaatgatgccaacagagacaactgg

SEQ ID NO: 238623 - DNA, 25 bp, Homo sapien
ccctgtgcagccgaccccagaggag

SEQ ID NO: 238624 - DNA, 25 bp, Homo sapien
gccctgtgcagccgaccccagagga

SEQ ID NO: 238625 - DNA, 25 bp, Homo sapien
aagtcctggcaggtctcgcagcacc

SEQ ID NO: 238626 - DNA, 25 bp, Homo sapien
gtatttgcgggtcccccacagcaca

SEQ ID NO: 238627 - DNA, 25 bp, Homo sapien
agagggtggcagggtttctccccat

SEQ ID NO: 238628 - DNA, 25 bp, Homo sapien
ggacggctgcgcacaaggcaagtcc

SEQ ID NO: 238629 - DNA, 25 bp, Homo sapien
ggctgcgtccaccaggtcttattca

SEQ ID NO: 238630 - DNA, 25 bp, Homo sapien
cagcagaggcccagcgcgtggttta

SEQ ID NO: 238631 - DNA, 25 bp, Homo sapien
agcagaggcccagcgcgtggtttac

SEQ ID NO: 238632 - DNA, 25 bp, Homo sapien
gacacagtgggctttatcacgggca

SEQ ID NO: 238633 - DNA, 25 bp, Homo sapien
tgaggtggcaatgggatttattaca

SEQ ID NO: 238634 - DNA, 25 bp, Homo sapien
gaagacaaaggcagacacagtgggc

SEQ ID NO: 238635 - DNA, 25 bp, Homo sapien
gtgggctttatcacgggcacacagc

SEQ ID NO: 238636 - DNA, 25 bp, Homo sapien
cagtctcatcgtcacacggcaccag

SEQ ID NO: 238637 - DNA, 25 bp, Homo sapien
agggctgccagatgcgtccaactct

SEQ ID NO: 238638 - DNA, 25 bp, Homo sapien
gggctgccagatgcgtccaactctg

SEQ ID NO: 238639 - DNA, 25 bp, Homo sapien
ccagcagtctcatcgtcacacggca

SEQ ID NO: 238640 - DNA, 25 bp, Homo sapien
ggagcaagtgggtcaaccgccatga

SEQ ID NO: 238641 - DNA, 25 bp, Homo sapien
gccatgaagcgctttcgagcagggc

SEQ ID NO: 238642 - DNA, 25 bp, Homo sapien
cagggcttggtaagcggtaactgct

SEQ ID NO: 238643 - DNA, 25 bp, Homo sapien
ggtaagcggtaactgctctgcagtg

SEQ ID NO: 238644 - DNA, 25 bp, Homo sapien
ctccacttcctgcttatcaacaagg

SEQ ID NO: 238645 - DNA, 25 bp, Homo sapien
tgtggacaagctgcacatgcttcca

SEQ ID NO: 238646 - DNA, 25 bp, Homo sapien
tgagaaagtcaagactgacccccgg

SEQ ID NO: 238647 - DNA, 25 bp, Homo sapien
gcttatcaacaaggctggtgagtct

SEQ ID NO: 238648 - DNA, 25 bp, Homo sapien
tccgatcaaggagacagtgttcagc

SEQ ID NO: 238649 - DNA, 25 bp, Homo sapien
gagacagtgttcagcaagtggaatg

SEQ ID NO: 238650 - DNA, 25 bp, Homo sapien
tctccagtccgatcaaggagacagt

SEQ ID NO: 238651 - DNA, 25 bp, Homo sapien
ccacagtctccagtccgatcaagga

SEQ ID NO: 238652 - DNA, 25 bp, Homo sapien
tggagggcacaacgtgggacatgcc

SEQ ID NO: 238653 - DNA, 25 bp, Homo sapien
ctggagggcacaacgtgggacatgc

SEQ ID NO: 238654 - DNA, 25 bp, Homo sapien
gtcagtcagcttgtggatgatgacg

SEQ ID NO: 238655 - DNA, 25 bp, Homo sapien
cgtcagtcagcttgtggatgatgac

SEQ ID NO: 238656 - DNA, 25 bp, Homo sapien
tgaccccaagacaggagcacctgcc

SEQ ID NO: 238657 - DNA, 25 bp, Homo sapien
gacaggagcacctgccaaaagccag

SEQ ID NO: 238658 - DNA, 25 bp, Homo sapien
ccaagacaggagcacctgccaaaag

SEQ ID NO: 238659 - DNA, 25 bp, Homo sapien
ctgccaaaagccagggcagcctgac

SEQ ID NO: 238660 - DNA, 25 bp, Homo sapien
aacggcaaactcgtgaaggcataag

SEQ ID NO: 238661 - DNA, 25 bp, Homo sapien
taactggtttccaattactcggata

SEQ ID NO: 238662 - DNA, 25 bp, Homo sapien
gacccaattccctgatttctgagta

SEQ ID NO: 238663 - DNA, 25 bp, Homo sapien
tactcggataatgggaagaaacggc

SEQ ID NO: 238664 - DNA, 25 bp, Homo sapien
agtcccctcaacctgccagatgagt

SEQ ID NO: 238665 - DNA, 25 bp, Homo sapien
gtgactgtcagagagctgggaaagc

SEQ ID NO: 238666 - DNA, 25 bp, Homo sapien
tcagtgcttgtgactgtcagagagc

SEQ ID NO: 238667 - DNA, 25 bp, Homo sapien
gggaaagccacggaacacacagagc

SEQ ID NO: 238668 - DNA, 25 bp, Homo sapien
gccccaaacctcagtgcttgtgact

SEQ ID NO: 238669 - DNA, 25 bp, Homo sapien
tcctcctatgaaagcagggcctcgg

SEQ ID NO: 238670 - DNA, 25 bp, Homo sapien
caaggtgcttggtgtcagatcccca

SEQ ID NO: 238671 - DNA, 25 bp, Homo sapien
aactcaggctgacgggaagaacgcc

SEQ ID NO: 238672 - DNA, 25 bp, Homo sapien
gaaggatcctgcctacatctcgagg

SEQ ID NO: 238673 - DNA, 25 bp, Homo sapien
tcctgatgggcctgacagggcactg

SEQ ID NO: 238674 - DNA, 25 bp, Homo sapien
gtggctgcagcgctcagagggagaa

SEQ ID NO: 238675 - DNA, 25 bp, Homo sapien
ggggtggctgcagcgctcagaggga

SEQ ID NO: 238676 - DNA, 25 bp, Homo sapien
ctgcatgtcctgatgggcctgacag

SEQ ID NO: 238677 - DNA, 25 bp, Homo sapien
taagccacgcagtttgcagtgacct

SEQ ID NO: 238678 - DNA, 25 bp, Homo sapien
tgttatggcattcctagcaggcaaa

SEQ ID NO: 238679 - DNA, 25 bp, Homo sapien
tatgatatgtatgtgacccaagcca

SEQ ID NO: 238680 - DNA, 25 bp, Homo sapien
atttctgttctcctaagccacgcag

SEQ ID NO: 238681 - DNA, 25 bp, Homo sapien
tatttctgatgacaatacatgtgag

SEQ ID NO: 238682 - DNA, 25 bp, Homo sapien
gatgacaatacatgtgagttcttaa

SEQ ID NO: 238683 - DNA, 25 bp, Homo sapien
tcttaatggcctgaaacctgccaga

SEQ ID NO: 238684 - DNA, 25 bp, Homo sapien
tgaaacctgccagacctatctctgg

SEQ ID NO: 238685 - DNA, 25 bp, Homo sapien
gcagcattcaagatccagggcttcc

SEQ ID NO: 238686 - DNA, 25 bp, Homo sapien
ttccagttgcacttggccaagaggg

SEQ ID NO: 238687 - DNA, 25 bp, Homo sapien
cctgcttcagtgacatgcctgggca

SEQ ID NO: 238688 - DNA, 25 bp, Homo sapien
ggctgactgccgtagaacgcagcat

SEQ ID NO: 238689 - DNA, 25 bp, Homo sapien
agacacagcgcacatcagggccaga

SEQ ID NO: 238690 - DNA, 25 bp, Homo sapien
gaggacacaccaacaggcagctcag

SEQ ID NO: 238691 - DNA, 25 bp, Homo sapien
gtagacacagcgcacatcagggcca

SEQ ID NO: 238692 - DNA, 25 bp, Homo sapien
caggaggacacaccaacaggcagct

SEQ ID NO: 238693 - DNA, 25 bp, Homo sapien
tcttctgagctacctgggtcctggc

SEQ ID NO: 238694 - DNA, 25 bp, Homo sapien
gaccaggtctgcagacaagtccact

SEQ ID NO: 238695 - DNA, 25 bp, Homo sapien
gaggtagagagcatctggtcccacg

SEQ ID NO: 238696 - DNA, 25 bp, Homo sapien
tgccaagcaagtctcggagcacagt

SEQ ID NO: 238697 - DNA, 25 bp, Homo sapien
aaggtcattcttaatgtgctatcag

SEQ ID NO: 238698 - DNA, 25 bp, Homo sapien
tcttaatgtgctatcagctgacgac

SEQ ID NO: 238699 - DNA, 25 bp, Homo sapien
tcagctgacgacaccatcaggtact

SEQ ID NO: 238700 - DNA, 25 bp, Homo sapien
tgaattttgctgcaagcagggaact

SEQ ID NO: 238701 - DNA, 25 bp, Homo sapien
ctgcacaacctccatccctcgcttc

SEQ ID NO: 238702 - DNA, 25 bp, Homo sapien
taaggctaccactgtctcggccctt

SEQ ID NO: 238703 - DNA, 25 bp, Homo sapien
ggtattgattgctacgagccaggga

SEQ ID NO: 238704 - DNA, 25 bp, Homo sapien
tgattgctacgagccagggacaagc

SEQ ID NO: 238705 - DNA, 25 bp, Homo sapien
ctggaagaacttaaggctaccactg

SEQ ID NO: 238706 - DNA, 25 bp, Homo sapien
gatttctgctcaagccagctaaagc

SEQ ID NO: 238707 - DNA, 25 bp, Homo sapien
ctttctgtcgctggccgctgagcag

SEQ ID NO: 238708 - DNA, 25 bp, Homo sapien
tgctcaagccagctaaagctttctg

SEQ ID NO: 238709 - DNA, 25 bp, Homo sapien
ttctgtcgctggccgctgagcagca

SEQ ID NO: 238710 - DNA, 25 bp, Homo sapien
aggcagcgagagtttcctggtctga

SEQ ID NO: 238711 - DNA, 25 bp, Homo sapien
tggtccctggatcccaagcccttaa

SEQ ID NO: 238712 - DNA, 25 bp, Homo sapien
tgattttggtcaaacatttgctggg

SEQ ID NO: 238713 - DNA, 25 bp, Homo sapien
ccaaccacaggcagcgagagtttcc

SEQ ID NO: 238714 - DNA, 25 bp, Homo sapien
ggctccagggagaaatcgattcctc

SEQ ID NO: 238715 - DNA, 25 bp, Homo sapien
ttgtaattacaccaggcccacccag

SEQ ID NO: 238716 - DNA, 25 bp, Homo sapien
gctttctctagttctaaaggctgtc

SEQ ID NO: 238717 - DNA, 25 bp, Homo sapien
cacccaggtaatgcaggaacatttt

SEQ ID NO: 238718 - DNA, 25 bp, Homo sapien
cagcatggccgcaggggtccctgat

SEQ ID NO: 238719 - DNA, 25 bp, Homo sapien
ggtccctgatgggaatggcgggaaa

SEQ ID NO: 238720 - DNA, 25 bp, Homo sapien
tccctgatgggaatggcgggaaaga

SEQ ID NO: 238721 - DNA, 25 bp, Homo sapien
cctgatgggaatggcgggaaagaag

SEQ ID NO: 238722 - DNA, 25 bp, Homo sapien
gtcttgaaaacggactcatcctgta

SEQ ID NO: 238723 - DNA, 25 bp, Homo sapien
ttcctccgcaatcaccatggaaagg

SEQ ID NO: 238724 - DNA, 25 bp, Homo sapien
caacctgcgcctccagtcttgaaaa

SEQ ID NO: 238725 - DNA, 25 bp, Homo sapien
ttcaatgtccaaatcgaaacgctac

SEQ ID NO: 238726 - DNA, 25 bp, Homo sapien
cagatggcctctcagctgaagaggg

SEQ ID NO: 238727 - DNA, 25 bp, Homo sapien
aaagagaatccccaataacactagc

SEQ ID NO: 238728 - DNA, 25 bp, Homo sapien
ttagcttcccaaatacagatataat

SEQ ID NO: 238729 - DNA, 25 bp, Homo sapien
gctggctgattgcatataattatga

SEQ ID NO: 238730 - DNA, 25 bp, Homo sapien
tcagcacatggctacacgggccttg

SEQ ID NO: 238731 - DNA, 25 bp, Homo sapien
cagaggacatctggaagtacctgca

SEQ ID NO: 238732 - DNA, 25 bp, Homo sapien
tcctggctgatgtccactgggtcag

SEQ ID NO: 238733 - DNA, 25 bp, Homo sapien
cttggaagacgagagtagtactggc

SEQ ID NO: 238734 - DNA, 25 bp, Homo sapien
ccagccacggcgcgtgcctccaggg

SEQ ID NO: 238735 - DNA, 25 bp, Homo sapien
gccacggcgcgtgcctccagggtgc

SEQ ID NO: 238736 - DNA, 25 bp, Homo sapien
cacggcgcgtgcctccagggtgccc

SEQ ID NO: 238737 - DNA, 25 bp, Homo sapien
tccagccacggcgcgtgcctccagg

SEQ ID NO: 238738 - DNA, 25 bp, Homo sapien
gtctttccctagaggaacctctgtc

SEQ ID NO: 238739 - DNA, 25 bp, Homo sapien
agtctttccctagaggaacctctgt

SEQ ID NO: 238740 - DNA, 25 bp, Homo sapien
catgtgtccacacctggcagtcaca

SEQ ID NO: 238741 - DNA, 25 bp, Homo sapien
cacttgacgagcatgtgtccacacc

SEQ ID NO: 238742 - DNA, 25 bp, Homo sapien
cacctggcagtcacagcgtggggac

SEQ ID NO: 238743 - DNA, 25 bp, Homo sapien
ttcttcaccacttgacgagcatgtg

SEQ ID NO: 238744 - DNA, 25 bp, Homo sapien
tgcaggaggaactcggtgctccagc

SEQ ID NO: 238745 - DNA, 25 bp, Homo sapien
caggaggaactcggtgctccagcac

SEQ ID NO: 238746 - DNA, 25 bp, Homo sapien
ggtgcaggaggaactcggtgctcca

SEQ ID NO: 238747 - DNA, 25 bp, Homo sapien
gctcccggggtgcaggaggaactcg

SEQ ID NO: 238748 - DNA, 25 bp, Homo sapien
ccttccgggtggaaatagtccagca

SEQ ID NO: 238749 - DNA, 25 bp, Homo sapien
atagtccagcatgtcctccccgcag

SEQ ID NO: 238750 - DNA, 25 bp, Homo sapien
agtccagcatgtcctccccgcagtt

SEQ ID NO: 238751 - DNA, 25 bp, Homo sapien
tccgggtggaaatagtccagcatgt

SEQ ID NO: 238752 - DNA, 25 bp, Homo sapien
caaaggcctctagtggcaaggccat

SEQ ID NO: 238753 - DNA, 25 bp, Homo sapien
agaaaggcaatctcaaggtagccag

SEQ ID NO: 238754 - DNA, 25 bp, Homo sapien
ttattgtcggagatgcccaatcaga

SEQ ID NO: 238755 - DNA, 25 bp, Homo sapien
attgtcggagatgcccaatcagaaa

SEQ ID NO: 238756 - DNA, 25 bp, Homo sapien
tcggagatgcccaatcagaaaggca

SEQ ID NO: 238757 - DNA, 25 bp, Homo sapien
tcacccgtcgtcagtacagaagccc

SEQ ID NO: 238758 - DNA, 25 bp, Homo sapien
cgtcgtcagtacagaagccctgcgc

SEQ ID NO: 238759 - DNA, 25 bp, Homo sapien
tgtctctcagccactaaagtctcat

SEQ ID NO: 238760 - DNA, 25 bp, Homo sapien
ctctcagccactaaagtctcattgg

SEQ ID NO: 238761 - DNA, 25 bp, Homo sapien
cctggtcactggctcaacagttgca

SEQ ID NO: 238762 - DNA, 25 bp, Homo sapien
cactggctcaacagttgcagcattt

SEQ ID NO: 238763 - DNA, 25 bp, Homo sapien
gctcaacagttgcagcattttgcag

SEQ ID NO: 238764 - DNA, 25 bp, Homo sapien
ggtcactggctcaacagttgcagca

SEQ ID NO: 238765 - DNA, 25 bp, Homo sapien
cgatcggtccccgttctcagacagg

SEQ ID NO: 238766 - DNA, 25 bp, Homo sapien
gctcctctgccgatcggtccccgtt

SEQ ID NO: 238767 - DNA, 25 bp, Homo sapien
ggtccccgttctcagacaggtggcc

SEQ ID NO: 238768 - DNA, 25 bp, Homo sapien
tcggtccccgttctcagacaggtgg

SEQ ID NO: 238769 - DNA, 25 bp, Homo sapien
attttcttctcgctcagccagtagc

SEQ ID NO: 238770 - DNA, 25 bp, Homo sapien
agctcggcgaaggcctggaaattca

SEQ ID NO: 238771 - DNA, 25 bp, Homo sapien
tcttctcgctcagccagtagccaac

SEQ ID NO: 238772 - DNA, 25 bp, Homo sapien
cttgattttcttctcgctcagccag

SEQ ID NO: 238773 - DNA, 25 bp, Homo sapien
acgcggaacggggatcggagctggg

SEQ ID NO: 238774 - DNA, 25 bp, Homo sapien
tccggaggaaatcgcccacaggccg

SEQ ID NO: 238775 - DNA, 25 bp, Homo sapien
ctgggtccggaggaaatcgcccaca

SEQ ID NO: 238776 - DNA, 25 bp, Homo sapien
aaatcgcccacaggccgagtctggc

SEQ ID NO: 238777 - DNA, 25 bp, Homo sapien
gctacccggcgcctgtttgtgtccc

SEQ ID NO: 238778 - DNA, 25 bp, Homo sapien
tgcccgccgagaagggcggcggcga

SEQ ID NO: 238779 - DNA, 25 bp, Homo sapien
tcctcggcctggtcctcgcgcgctg

SEQ ID NO: 238780 - DNA, 25 bp, Homo sapien
cgcttgagcccgcggcggcgaggaa

SEQ ID NO: 238781 - DNA, 25 bp, Homo sapien
gaccgagccgctgagtttcggaaac

SEQ ID NO: 238782 - DNA, 25 bp, Homo sapien
atccattgcaactgcgcccggaagg

SEQ ID NO: 238783 - DNA, 25 bp, Homo sapien
aggcgtaggacgtgaccaccagttc

SEQ ID NO: 238784 - DNA, 25 bp, Homo sapien
cttccctcgaggaagcggaccctgg

SEQ ID NO: 238785 - DNA, 25 bp, Homo sapien
tcgctgccctcaaagagtttgcaat

SEQ ID NO: 238786 - DNA, 25 bp, Homo sapien
tagtcgctgccctcaaagagtttgc

SEQ ID NO: 238787 - DNA, 25 bp, Homo sapien
agtcgctgccctcaaagagtttgca

SEQ ID NO: 238788 - DNA, 25 bp, Homo sapien
ttagtcgctgccctcaaagagtttg

SEQ ID NO: 238789 - DNA, 25 bp, Homo sapien
tgagatctggttggcatatacaccc

SEQ ID NO: 238790 - DNA, 25 bp, Homo sapien
aaatgagttacttggcagcacaagg

SEQ ID NO: 238791 - DNA, 25 bp, Homo sapien
catatcccttcgtggttccctgaga

SEQ ID NO: 238792 - DNA, 25 bp, Homo sapien
cacagaaacgacaaagggcttatac

SEQ ID NO: 238793 - DNA, 25 bp, Homo sapien
gaagagcctctaatgcctgtgccaa

SEQ ID NO: 238794 - DNA, 25 bp, Homo sapien
gatatttgacctgcaactccctagg

SEQ ID NO: 238795 - DNA, 25 bp, Homo sapien
gaataacatcaagtgctgggcctcg

SEQ ID NO: 238796 - DNA, 25 bp, Homo sapien
tatacttcaagcattgcagggcagg

SEQ ID NO: 238797 - DNA, 25 bp, Homo sapien
cgaaattcaaagtaatcctccgcgg

SEQ ID NO: 238798 - DNA, 25 bp, Homo sapien
cagaccacaggcgaccaccgaaatt

SEQ ID NO: 238799 - DNA, 25 bp, Homo sapien
aatcttgtcaacgtgccgaggtcca

SEQ ID NO: 238800 - DNA, 25 bp, Homo sapien
atcctccgcggtaccccagagaaat

SEQ ID NO: 238801 - DNA, 25 bp, Homo sapien
gggccacagcgaccgatgccggtac

SEQ ID NO: 238802 - DNA, 25 bp, Homo sapien
acagcgaccgatgccggtactccag

SEQ ID NO: 238803 - DNA, 25 bp, Homo sapien
ccctaggctctgacggacactcggg

SEQ ID NO: 238804 - DNA, 25 bp, Homo sapien
cgtgatctagtgctcgtgcccgcgt

SEQ ID NO: 238805 - DNA, 25 bp, Homo sapien
gatgacagtcgcgagcgggcaccag

SEQ ID NO: 238806 - DNA, 25 bp, Homo sapien
ctgcaacgagaagtgatggggcgat

SEQ ID NO: 238807 - DNA, 25 bp, Homo sapien
tgatggggcgatgacagtcgcgagc

SEQ ID NO: 238808 - DNA, 25 bp, Homo sapien
gggcgatgacagtcgcgagcgggca

SEQ ID NO: 238809 - DNA, 25 bp, Homo sapien
gaggagcgctgagtcgccagaccca

SEQ ID NO: 238810 - DNA, 25 bp, Homo sapien
agcgctgagtcgccagacccagaga

SEQ ID NO: 238811 - DNA, 25 bp, Homo sapien
ctgaggagcgctgagtcgccagacc

SEQ ID NO: 238812 - DNA, 25 bp, Homo sapien
ggagcgctgagtcgccagacccaga

SEQ ID NO: 238813 - DNA, 25 bp, Homo sapien
ctgttttggtctcgctcggggaagc

SEQ ID NO: 238814 - DNA, 25 bp, Homo sapien
tccagcccggattccacctgttttg

SEQ ID NO: 238815 - DNA, 25 bp, Homo sapien
cacctgttttggtctcgctcgggga

SEQ ID NO: 238816 - DNA, 25 bp, Homo sapien
ctggagggacgtgccgccacccgcg

SEQ ID NO: 238817 - DNA, 25 bp, Homo sapien
tgccgtgggaacaggaagattttcg

SEQ ID NO: 238818 - DNA, 25 bp, Homo sapien
taacgcttgccgtgggaacaggaag

SEQ ID NO: 238819 - DNA, 25 bp, Homo sapien
cgcttgccgtgggaacaggaagatt

SEQ ID NO: 238820 - DNA, 25 bp, Homo sapien
tctttaacgcttgccgtgggaacag

SEQ ID NO: 238821 - DNA, 25 bp, Homo sapien
caatgcagattgtttacttaaggcc

SEQ ID NO: 238822 - DNA, 25 bp, Homo sapien
tcaaagtatggctacaggaggagag

SEQ ID NO: 238823 - DNA, 25 bp, Homo sapien
gttactgcctatgaaccgtgacatg

SEQ ID NO: 238824 - DNA, 25 bp, Homo sapien
caaggactctcctttctcgtcggta

SEQ ID NO: 238825 - DNA, 25 bp, Homo sapien
tgacaaaattgtcccaggagaacaa

SEQ ID NO: 238826 - DNA, 25 bp, Homo sapien
tccaaattagagcataagtcttcct

SEQ ID NO: 238827 - DNA, 25 bp, Homo sapien
gtgtgacaataaggatacaacagcc

SEQ ID NO: 238828 - DNA, 25 bp, Homo sapien
gtcttccttaaatgtcctagtgtga

SEQ ID NO: 238829 - DNA, 25 bp, Homo sapien
ccatcgaagttagttctgttatcaa

SEQ ID NO: 238830 - DNA, 25 bp, Homo sapien
cagatggtccatcgaagttagttct

SEQ ID NO: 238831 - DNA, 25 bp, Homo sapien
ggccgttttgcagatggtccatcga

SEQ ID NO: 238832 - DNA, 25 bp, Homo sapien
gtgtttttggccgttttgcagatgg

SEQ ID NO: 238833 - DNA, 25 bp, Homo sapien
tgttgtatgacaatacgttctatgg

SEQ ID NO: 238834 - DNA, 25 bp, Homo sapien
atatttgttgtatgacaatacgttc

SEQ ID NO: 238835 - DNA, 25 bp, Homo sapien
ttgttgtatgacaatacgttctatg

SEQ ID NO: 238836 - DNA, 25 bp, Homo sapien
atttgttgtatgacaatacgttcta

SEQ ID NO: 238837 - DNA, 25 bp, Homo sapien
agatgcaattcttctttcctcgagg

SEQ ID NO: 238838 - DNA, 25 bp, Homo sapien
tcctcgaggctcactttgtccaagt

SEQ ID NO: 238839 - DNA, 25 bp, Homo sapien
ccacttcgcctagcccgccaaaaat

SEQ ID NO: 238840 - DNA, 25 bp, Homo sapien
gtccaagtctgccactctacacggg

SEQ ID NO: 238841 - DNA, 25 bp, Homo sapien
cgccgccacccggtgctgcacttcc

SEQ ID NO: 238842 - DNA, 25 bp, Homo sapien
tgtaccagagggtcgaataattccg

SEQ ID NO: 238843 - DNA, 25 bp, Homo sapien
cgtccaagtcctcgtctggagccgc

SEQ ID NO: 238844 - DNA, 25 bp, Homo sapien
tgcacttccccctgtaccagagggt

SEQ ID NO: 238845 - DNA, 25 bp, Homo sapien
agggtcgccgtcacccggcgcctca

SEQ ID NO: 238846 - DNA, 25 bp, Homo sapien
acccgcagcttctgcggcttccctt

SEQ ID NO: 238847 - DNA, 25 bp, Homo sapien
atctgggccacgccagacaacaggc

SEQ ID NO: 238848 - DNA, 25 bp, Homo sapien
tgcccgacgtactctcccagcagct

SEQ ID NO: 238849 - DNA, 25 bp, Homo sapien
ttccagaacacgacaccgggaagcg

SEQ ID NO: 238850 - DNA, 25 bp, Homo sapien
agcttccagaacacgacaccgggaa

SEQ ID NO: 238851 - DNA, 25 bp, Homo sapien
agcgccacccggaggcggaaatcag

SEQ ID NO: 238852 - DNA, 25 bp, Homo sapien
aagcgccacccggaggcggaaatca

SEQ ID NO: 238853 - DNA, 25 bp, Homo sapien
tagttggacaagtgctagctagtac

SEQ ID NO: 238854 - DNA, 25 bp, Homo sapien
tatcgttggtcgacgtccttgagga

SEQ ID NO: 238855 - DNA, 25 bp, Homo sapien
aatccatagggcatttgcggtgagc

SEQ ID NO: 238856 - DNA, 25 bp, Homo sapien
tgcggtgagctccttgacagctagt

SEQ ID NO: 238857 - DNA, 25 bp, Homo sapien
ggcacacccgggcgagggccctgcc

SEQ ID NO: 238858 - DNA, 25 bp, Homo sapien
gcacacccgggcgagggccctgccc

SEQ ID NO: 238859 - DNA, 25 bp, Homo sapien
gggcacacccgggcgagggccctgc

SEQ ID NO: 238860 - DNA, 25 bp, Homo sapien
atctcgatggaatgggcccaggtgc

SEQ ID NO: 238861 - DNA, 25 bp, Homo sapien
aggcgcccatagacctctcggtagc

SEQ ID NO: 238862 - DNA, 25 bp, Homo sapien
tcaccttcaggatctcgatggaatg

SEQ ID NO: 238863 - DNA, 25 bp, Homo sapien
gaactgcttgatggccggccggctg

SEQ ID NO: 238864 - DNA, 25 bp, Homo sapien
tcttgacccgcggtggggacttctc

SEQ ID NO: 238865 - DNA, 25 bp, Homo sapien
gatgccgaagttcttgacccgcggt

SEQ ID NO: 238866 - DNA, 25 bp, Homo sapien
cttgacccgcggtggggacttctca

SEQ ID NO: 238867 - DNA, 25 bp, Homo sapien
tgccgaagttcttgacccgcggtgg

SEQ ID NO: 238868 - DNA, 25 bp, Homo sapien
agtcccgggacttggcgacaacgtg

SEQ ID NO: 238869 - DNA, 25 bp, Homo sapien
ccagaagtcccgggacttggcgaca

SEQ ID NO: 238870 - DNA, 25 bp, Homo sapien
ccgggacttggcgacaacgtgatta

SEQ ID NO: 238871 - DNA, 25 bp, Homo sapien
cagaagtcccgggacttggcgacaa

SEQ ID NO: 238872 - DNA, 25 bp, Homo sapien
ccttcatggcgtcctctccgcgctc

SEQ ID NO: 238873 - DNA, 25 bp, Homo sapien
cttcatggcgtcctctccgcgctcg

SEQ ID NO: 238874 - DNA, 25 bp, Homo sapien
ccaccttgtactctcatagtgtgcc

SEQ ID NO: 238875 - DNA, 25 bp, Homo sapien
gcaggcagtgacccaccaccttgta

SEQ ID NO: 238876 - DNA, 25 bp, Homo sapien
gcttcctggagaacatttgcccgta

SEQ ID NO: 238877 - DNA, 25 bp, Homo sapien
tctctaggcccaacctccagagtag

SEQ ID NO: 238878 - DNA, 25 bp, Homo sapien
gtcacaggcggagagattaacagat

SEQ ID NO: 238879 - DNA, 25 bp, Homo sapien
ttggtggtttacgaagtcctctgga

SEQ ID NO: 238880 - DNA, 25 bp, Homo sapien
tcagttaactcagcgctgaagggct

SEQ ID NO: 238881 - DNA, 25 bp, Homo sapien
tattagtataccatcatgtccggaa

SEQ ID NO: 238882 - DNA, 25 bp, Homo sapien
tacgtgcagcacaatagtaccgatc

SEQ ID NO: 238883 - DNA, 25 bp, Homo sapien
gtagagactgattttggccaacata

SEQ ID NO: 238884 - DNA, 25 bp, Homo sapien
tcgaagagcaggacttggtaccgcc

SEQ ID NO: 238885 - DNA, 25 bp, Homo sapien
gagtcttacttgcagtaccggcgca

SEQ ID NO: 238886 - DNA, 25 bp, Homo sapien
taccggcgcagtacatgaacatgtc

SEQ ID NO: 238887 - DNA, 25 bp, Homo sapien
gagaaatcagcgttgttgacaccca

SEQ ID NO: 238888 - DNA, 25 bp, Homo sapien
gcttcagagctacatgcagaaagtg

SEQ ID NO: 238889 - DNA, 25 bp, Homo sapien
tgacatgggctggaccggtactagc

SEQ ID NO: 238890 - DNA, 25 bp, Homo sapien
tactgcagttcgtcccctgacatgg

SEQ ID NO: 238891 - DNA, 25 bp, Homo sapien
gaggttgctcaacgacatccaggtg

SEQ ID NO: 238892 - DNA, 25 bp, Homo sapien
tctgtgtctacagcaagctctggaa

SEQ ID NO: 238893 - DNA, 25 bp, Homo sapien
tattgtggctgtacagatcgggacc

SEQ ID NO: 238894 - DNA, 25 bp, Homo sapien
tgtggaatacacgacagatgctggg

SEQ ID NO: 238895 - DNA, 25 bp, Homo sapien
cttgagtgacagtgtggacacaccc

SEQ ID NO: 238896 - DNA, 25 bp, Homo sapien
tcccaggctgtctcattgtcaagag

SEQ ID NO: 238897 - DNA, 25 bp, Homo sapien
gaaaatgaacgtgaagggtgctgac

SEQ ID NO: 238898 - DNA, 25 bp, Homo sapien
tactgtttacgcgacatctcccagg

SEQ ID NO: 238899 - DNA, 25 bp, Homo sapien
tttcacactcggcaagtagactggg

SEQ ID NO: 238900 - DNA, 25 bp, Homo sapien
tcttagcactcgaatctgaatttca

SEQ ID NO: 238901 - DNA, 25 bp, Homo sapien
tgtgccgcagttcctgcagtcgtct

SEQ ID NO: 238902 - DNA, 25 bp, Homo sapien
ttccccgcagttcagggcataggcc

SEQ ID NO: 238903 - DNA, 25 bp, Homo sapien
gcagcatctgcaagaccaaactctc

SEQ ID NO: 238904 - DNA, 25 bp, Homo sapien
tagagcgtgtctggcacattggaca

SEQ ID NO: 238905 - DNA, 25 bp, Homo sapien
aacactgtggcacggcattattgac

SEQ ID NO: 238906 - DNA, 25 bp, Homo sapien
cgttggctacaactgaaggagggct

SEQ ID NO: 238907 - DNA, 25 bp, Homo sapien
cattcgcaagcgcacaagatccgtt

SEQ ID NO: 238908 - DNA, 25 bp, Homo sapien
taaccaggcatttgacttcccacct

SEQ ID NO: 238909 - DNA, 25 bp, Homo sapien
ttttgccgtaaccaggcatttgact

SEQ ID NO: 238910 - DNA, 25 bp, Homo sapien
ggacgaacatagatgccagcatttt

SEQ ID NO: 238911 - DNA, 25 bp, Homo sapien
gagaagagtcgaggacgaacataga

SEQ ID NO: 238912 - DNA, 25 bp, Homo sapien
tggaggagtactaatcaagcctctt

SEQ ID NO: 238913 - DNA, 25 bp, Homo sapien
tgatggaggagtactaatcaagcct

SEQ ID NO: 238914 - DNA, 25 bp, Homo sapien
gaggagtactaatcaagcctctttt

SEQ ID NO: 238915 - DNA, 25 bp, Homo sapien
ggagtactaatcaagcctcttttca

SEQ ID NO: 238916 - DNA, 25 bp, Homo sapien
tgtgtgccagtgaaacgatggttta

SEQ ID NO: 238917 - DNA, 25 bp, Homo sapien
gaataagggtctacttgatctacac

SEQ ID NO: 238918 - DNA, 25 bp, Homo sapien
cacaggagatacaacatcgtacaca

SEQ ID NO: 238919 - DNA, 25 bp, Homo sapien
tcagttaatctagcaccacattgac

SEQ ID NO: 238920 - DNA, 25 bp, Homo sapien
tgttcacactatgggcagtgccact

SEQ ID NO: 238921 - DNA, 25 bp, Homo sapien
tgttcaattcgcacaaaaggtaaga

SEQ ID NO: 238922 - DNA, 25 bp, Homo sapien
tccatgtccaggtcccgtcttttta

SEQ ID NO: 238923 - DNA, 25 bp, Homo sapien
gacttcactgtttataggtaagatg

SEQ ID NO: 238924 - DNA, 25 bp, Homo sapien
tgtgacaggtaagtgcagaatcctc

SEQ ID NO: 238925 - DNA, 25 bp, Homo sapien
cactaacccagtgtggaaactacct

SEQ ID NO: 238926 - DNA, 25 bp, Homo sapien
ccccttgcctagctatgatttagct

SEQ ID NO: 238927 - DNA, 25 bp, Homo sapien
ctgactgaaacaaagctatggcctg

SEQ ID NO: 238928 - DNA, 25 bp, Homo sapien
gatatttaaggatatcttgttcact

SEQ ID NO: 238929 - DNA, 25 bp, Homo sapien
atttaaggatatcttgttcacttgc

SEQ ID NO: 238930 - DNA, 25 bp, Homo sapien
tcagatatttaaggatatcttgttc

SEQ ID NO: 238931 - DNA, 25 bp, Homo sapien
tatttaaggatatcttgttcacttg

SEQ ID NO: 238932 - DNA, 25 bp, Homo sapien
gattctccataaatcaagcccaagt

SEQ ID NO: 238933 - DNA, 25 bp, Homo sapien
tcaggacaatgagacaaggttaatg

SEQ ID NO: 238934 - DNA, 25 bp, Homo sapien
taaagcgtccagttttgatcaggac

SEQ ID NO: 238935 - DNA, 25 bp, Homo sapien
gccatctgtactgcaatcaaagcaa

SEQ ID NO: 238936 - DNA, 25 bp, Homo sapien
tgttgagtcatggtagcagtgtaca

SEQ ID NO: 238937 - DNA, 25 bp, Homo sapien
caatgttgagtcatggtagcagtgt

SEQ ID NO: 238938 - DNA, 25 bp, Homo sapien
gagtcatggtagcagtgtacatgaa

SEQ ID NO: 238939 - DNA, 25 bp, Homo sapien
tcaatgttgagtcatggtagcagtg

SEQ ID NO: 238940 - DNA, 25 bp, Homo sapien
ttagagccatatggatgagaactcc

SEQ ID NO: 238941 - DNA, 25 bp, Homo sapien
aaatgtaaagcttgtcggtgcaccc

SEQ ID NO: 238942 - DNA, 25 bp, Homo sapien
tagtcagactggatagcagtaagca

SEQ ID NO: 238943 - DNA, 25 bp, Homo sapien
aacatccgaagtcatgacctgggaa

SEQ ID NO: 238944 - DNA, 25 bp, Homo sapien
aaaacaccgcttgaatattgtggca

SEQ ID NO: 238945 - DNA, 25 bp, Homo sapien
tgtttcttacacagcaacggttgac

SEQ ID NO: 238946 - DNA, 25 bp, Homo sapien
gactagcttattggtcccaggagga

SEQ ID NO: 238947 - DNA, 25 bp, Homo sapien
cacagtggcaatgagagaggcccca

SEQ ID NO: 238948 - DNA, 25 bp, Homo sapien
cctaggcctgctgaagtattggcaa

SEQ ID NO: 238949 - DNA, 25 bp, Homo sapien
ctagtaggctgcctaggcctgctga

SEQ ID NO: 238950 - DNA, 25 bp, Homo sapien
gatgaaaatctagtttcaatctctt

SEQ ID NO: 238951 - DNA, 25 bp, Homo sapien
attgagtcttttgtagaggtgtggc

SEQ ID NO: 238952 - DNA, 25 bp, Homo sapien
gattgagtcttttgtagaggtgtgg

SEQ ID NO: 238953 - DNA, 25 bp, Homo sapien
tgtgcccggctcaggttaataattc

SEQ ID NO: 238954 - DNA, 25 bp, Homo sapien
ggtactcaattgactagattgatat

SEQ ID NO: 238955 - DNA, 25 bp, Homo sapien
atagcataatgaagggaaagcattc

SEQ ID NO: 238956 - DNA, 25 bp, Homo sapien
tagtgttatctaatacggcatttaa

SEQ ID NO: 238957 - DNA, 25 bp, Homo sapien
gtagtttagaagtggtgttcacacc

SEQ ID NO: 238958 - DNA, 25 bp, Homo sapien
catggtgctaattctataccaaggg

SEQ ID NO: 238959 - DNA, 25 bp, Homo sapien
taatctcaggttctggcacacagta

SEQ ID NO: 238960 - DNA, 25 bp, Homo sapien
gcttgaaaactaggacagcagctgt

SEQ ID NO: 238961 - DNA, 25 bp, Homo sapien
gcatgacagcagttaccacataggt

SEQ ID NO: 238962 - DNA, 25 bp, Homo sapien
gaaatagccttggagaggtagcaac

SEQ ID NO: 238963 - DNA, 25 bp, Homo sapien
tcactgagtgtagagtaggtgctca

SEQ ID NO: 238964 - DNA, 25 bp, Homo sapien
tgacagtagttatcacagaggagtg

SEQ ID NO: 238965 - DNA, 25 bp, Homo sapien
gctacaaactacctgatacatattt

SEQ ID NO: 238966 - DNA, 25 bp, Homo sapien
tagagatatcacttcttgttatagc

SEQ ID NO: 238967 - DNA, 25 bp, Homo sapien
gattctactacaaattaacagtgca

SEQ ID NO: 238968 - DNA, 25 bp, Homo sapien
aatggattctactacaaattaacag

SEQ ID NO: 238969 - DNA, 25 bp, Homo sapien
tgcattacagagtccattttggaac

SEQ ID NO: 238970 - DNA, 25 bp, Homo sapien
cccagtatatatgctaaggtcatta

SEQ ID NO: 238971 - DNA, 25 bp, Homo sapien
caacagtatttatgacaaggatggt

SEQ ID NO: 238972 - DNA, 25 bp, Homo sapien
ttttcagagctgtttacccagtata

SEQ ID NO: 238973 - DNA, 25 bp, Homo sapien
ttgctaattcttcataaatgcacca

SEQ ID NO: 238974 - DNA, 25 bp, Homo sapien
taattcttcataaatgcaccacaag

SEQ ID NO: 238975 - DNA, 25 bp, Homo sapien
taaatgcaccacaagagccataaaa

SEQ ID NO: 238976 - DNA, 25 bp, Homo sapien
tcttcataaatgcaccacaagagcc

SEQ ID NO: 238977 - DNA, 25 bp, Homo sapien
gatgttagaccctggatgaatactc

SEQ ID NO: 238978 - DNA, 25 bp, Homo sapien
cacaggcagtttttcgaggtatgac

SEQ ID NO: 238979 - DNA, 25 bp, Homo sapien
gtggaatacattcccagcagctgcc

SEQ ID NO: 238980 - DNA, 25 bp, Homo sapien
tgaatgcccacaagacctactgtgt

SEQ ID NO: 238981 - DNA, 25 bp, Homo sapien
gcagctgtttgaaagctctgctgca

SEQ ID NO: 238982 - DNA, 25 bp, Homo sapien
cagctgtttgaaagctctgctgcac

SEQ ID NO: 238983 - DNA, 25 bp, Homo sapien
agcagctgtttgaaagctctgctgc

SEQ ID NO: 238984 - DNA, 25 bp, Homo sapien
tataaaatcctacctcaagcgagct

SEQ ID NO: 238985 - DNA, 25 bp, Homo sapien
tatgtaacaggtgctactcagatca

SEQ ID NO: 238986 - DNA, 25 bp, Homo sapien
ggttttagaacctgaactcttgagc

SEQ ID NO: 238987 - DNA, 25 bp, Homo sapien
taaggtcaaactaagacacggtaga

SEQ ID NO: 238988 - DNA, 25 bp, Homo sapien
aatcaagtattaccaaagatcttag

SEQ ID NO: 238989 - DNA, 25 bp, Homo sapien
aataatcaagtattaccaaagatct

SEQ ID NO: 238990 - DNA, 25 bp, Homo sapien
tcttagagctggctgacaattttac

SEQ ID NO: 238991 - DNA, 25 bp, Homo sapien
aattaactcaagataaactctagat

SEQ ID NO: 238992 - DNA, 25 bp, Homo sapien
tggtaatgttgcaaacttcaaattt

SEQ ID NO: 238993 - DNA, 25 bp, Homo sapien
aaagaatgctttctcatacaaagtc

SEQ ID NO: 238994 - DNA, 25 bp, Homo sapien
tggtttcttattaaaaggcatcaaa

SEQ ID NO: 238995 - DNA, 25 bp, Homo sapien
aaaatagtagcttaaactgctactc

SEQ ID NO: 238996 - DNA, 25 bp, Homo sapien
tctcaagtagtctcatgtcacatag

SEQ ID NO: 238997 - DNA, 25 bp, Homo sapien
tttacacgctgtaggctgtggcttg

SEQ ID NO: 238998 - DNA, 25 bp, Homo sapien
gaaggcacatgagtctagcgctaac

SEQ ID NO: 238999 - DNA, 25 bp, Homo sapien
cactgagactggcttaatgttgtta

SEQ ID NO: 239000 - DNA, 25 bp, Homo sapien
gacctattagatttccgacgcttaa

SEQ ID NO: 239001 - DNA, 25 bp, Homo sapien
taagtctacatcagtacaatacttg

SEQ ID NO: 239002 - DNA, 25 bp, Homo sapien
tcgacattttgaaaccttgagtcct

SEQ ID NO: 239003 - DNA, 25 bp, Homo sapien
aaagttcggtctgtgatttcttcac

SEQ ID NO: 239004 - DNA, 25 bp, Homo sapien
ggataattagatgcattagcaccca

SEQ ID NO: 239005 - DNA, 25 bp, Homo sapien
cctaccctcggggaacatgaatgag

SEQ ID NO: 239006 - DNA, 25 bp, Homo sapien
cccctaccctcggggaacatgaatg

SEQ ID NO: 239007 - DNA, 25 bp, Homo sapien
aatgaggataattagatgcattagc

SEQ ID NO: 239008 - DNA, 25 bp, Homo sapien
tcttcagagtataatcccagaggcc

SEQ ID NO: 239009 - DNA, 25 bp, Homo sapien
ttatgaaccttcaaccctggatcca

SEQ ID NO: 239010 - DNA, 25 bp, Homo sapien
ggcattccgtctgcgggttcttcag

SEQ ID NO: 239011 - DNA, 25 bp, Homo sapien
cagtcactcaggcattccgtctgcg

SEQ ID NO: 239012 - DNA, 25 bp, Homo sapien
attttatctatccaccccataaagc

SEQ ID NO: 239013 - DNA, 25 bp, Homo sapien
ttttatctatccaccccataaagcc

SEQ ID NO: 239014 - DNA, 25 bp, Homo sapien
aattttatctatccaccccataaag

SEQ ID NO: 239015 - DNA, 25 bp, Homo sapien
ccttagaatgactttgtatggcaga

SEQ ID NO: 239016 - DNA, 25 bp, Homo sapien
tataaactgcatgcctatggcaggc

SEQ ID NO: 239017 - DNA, 25 bp, Homo sapien
tatataaggcagttctcccgtccag

SEQ ID NO: 239018 - DNA, 25 bp, Homo sapien
cttggaacacaagccctacaggaga

SEQ ID NO: 239019 - DNA, 25 bp, Homo sapien
actctgcccagtctaaattatgtca

SEQ ID NO: 239020 - DNA, 25 bp, Homo sapien
cccagagtagtcagtagggaagtct

SEQ ID NO: 239021 - DNA, 25 bp, Homo sapien
caaatccatattgagggtcacatcc

SEQ ID NO: 239022 - DNA, 25 bp, Homo sapien
ccaaagagtaacaaacccagagtag

SEQ ID NO: 239023 - DNA, 25 bp, Homo sapien
tttttctgttgaggtcttggtgtgt

SEQ ID NO: 239024 - DNA, 25 bp, Homo sapien
tctgttgaggtcttggtgtgttata

SEQ ID NO: 239025 - DNA, 25 bp, Homo sapien
ttctgttgaggtcttggtgtgttat

SEQ ID NO: 239026 - DNA, 25 bp, Homo sapien
tttctgttgaggtcttggtgtgtta

SEQ ID NO: 239027 - DNA, 25 bp, Homo sapien
attgtgcactacagcactcagcctc

SEQ ID NO: 239028 - DNA, 25 bp, Homo sapien
cagtggttaatcctaagtgcaatta

SEQ ID NO: 239029 - DNA, 25 bp, Homo sapien
agaacataacataaagtgataattg

SEQ ID NO: 239030 - DNA, 25 bp, Homo sapien
acccagctaatcttgatacattagg

SEQ ID NO: 239031 - DNA, 25 bp, Homo sapien
cacaaatcagactgggtagtgacca

SEQ ID NO: 239032 - DNA, 25 bp, Homo sapien
gcctggctcataacgaacccttaat

SEQ ID NO: 239033 - DNA, 25 bp, Homo sapien
caggatagcctgcatgtaagaagtg

SEQ ID NO: 239034 - DNA, 25 bp, Homo sapien
caaaatctgctctggtccttgcagg

SEQ ID NO: 239035 - DNA, 25 bp, Homo sapien
cactacatgaaaggtactgagaaga

SEQ ID NO: 239036 - DNA, 25 bp, Homo sapien
cacactacatgaaaggtactgagaa

SEQ ID NO: 239037 - DNA, 25 bp, Homo sapien
ttactgcatttactgacacactaca

SEQ ID NO: 239038 - DNA, 25 bp, Homo sapien
tgacacactacatgaaaggtactga

SEQ ID NO: 239039 - DNA, 25 bp, Homo sapien
taaagacttctggagcaaaactgcc

SEQ ID NO: 239040 - DNA, 25 bp, Homo sapien
gcataaatcagtggcgataaagact

SEQ ID NO: 239041 - DNA, 25 bp, Homo sapien
aataccccaaaggtgctcatagtgg

SEQ ID NO: 239042 - DNA, 25 bp, Homo sapien
gcccaagtttggatctgactctgcc

SEQ ID NO: 239043 - DNA, 25 bp, Homo sapien
gaatcatccaatacacagtatcata

SEQ ID NO: 239044 - DNA, 25 bp, Homo sapien
ggcaaatacatcctttcagaatcat

SEQ ID NO: 239045 - DNA, 25 bp, Homo sapien
tcagaatcatccaatacacagtatc

SEQ ID NO: 239046 - DNA, 25 bp, Homo sapien
ataactacaaggctgggtgatgtgg

SEQ ID NO: 239047 - DNA, 25 bp, Homo sapien
cctccgcctcttggggacaagcgat

SEQ ID NO: 239048 - DNA, 25 bp, Homo sapien
agctgggattataggcacctgccac

SEQ ID NO: 239049 - DNA, 25 bp, Homo sapien
ccgcctcttggggacaagcgattct

SEQ ID NO: 239050 - DNA, 25 bp, Homo sapien
tagctgggattataggcacctgcca

SEQ ID NO: 239051 - DNA, 25 bp, Homo sapien
ttattaccattgtaccaagactggg

SEQ ID NO: 239052 - DNA, 25 bp, Homo sapien
gaaaaagtcacttgcctaattcttc

SEQ ID NO: 239053 - DNA, 25 bp, Homo sapien
tgtaccaagactgggttaacaggga

SEQ ID NO: 239054 - DNA, 25 bp, Homo sapien
ctaattcttctagagtggtgaactt

SEQ ID NO: 239055 - DNA, 25 bp, Homo sapien
tattattctgtcaatgactccagga

SEQ ID NO: 239056 - DNA, 25 bp, Homo sapien
caaatgtgagccagttgtactatag

SEQ ID NO: 239057 - DNA, 25 bp, Homo sapien
cactcaccaggctagaaattctttc

SEQ ID NO: 239058 - DNA, 25 bp, Homo sapien
taatgtcagtcttccccactaaata

SEQ ID NO: 239059 - DNA, 25 bp, Homo sapien
taacagtgctctggtgtagataacc

SEQ ID NO: 239060 - DNA, 25 bp, Homo sapien
gaagacgtgcaattgtagttcacag

SEQ ID NO: 239061 - DNA, 25 bp, Homo sapien
gccattcaagtagtccaacaagcac

SEQ ID NO: 239062 - DNA, 25 bp, Homo sapien
tctgtgctggtatgtgaagacgtgc

SEQ ID NO: 239063 - DNA, 25 bp, Homo sapien
cgccaccagcaccgccgtccgcacc

SEQ ID NO: 239064 - DNA, 25 bp, Homo sapien
cgctgggaccgctgccgtcgcctcc

SEQ ID NO: 239065 - DNA, 25 bp, Homo sapien
ccaggttcccctcgccgccattttg

SEQ ID NO: 239066 - DNA, 25 bp, Homo sapien
ctccgggactgctccaggttcccct

SEQ ID NO: 239067 - DNA, 25 bp, Homo sapien
agtggctcaggctccgggactgctc

SEQ ID NO: 239068 - DNA, 25 bp, Homo sapien
tcctctcctgtcagtggctcaggct

SEQ ID NO: 239069 - DNA, 25 bp, Homo sapien
cgtcgggtcgctgggagtttgcctc

SEQ ID NO: 239070 - DNA, 25 bp, Homo sapien
cggtgcgttcgctggatccatggga

SEQ ID NO: 239071 - DNA, 25 bp, Homo sapien
tatttttgctcgtcggctgggagcc

SEQ ID NO: 239072 - DNA, 25 bp, Homo sapien
gagtgcgcgcgcattatttttgctc

SEQ ID NO: 239073 - DNA, 25 bp, Homo sapien
catgtttccgttcggcggccggcgt

SEQ ID NO: 239074 - DNA, 25 bp, Homo sapien
ccctcgggtggtcgcatgcaatgag

SEQ ID NO: 239075 - DNA, 25 bp, Homo sapien
gcgtccctcgggtggtcgcatgcaa

SEQ ID NO: 239076 - DNA, 25 bp, Homo sapien
cagatggccatttccacgaattcat

SEQ ID NO: 239077 - DNA, 25 bp, Homo sapien
tttctcgagaacaactcttccgcgg

SEQ ID NO: 239078 - DNA, 25 bp, Homo sapien
ggcaccaccttgctacttgtgtagt

SEQ ID NO: 239079 - DNA, 25 bp, Homo sapien
gaaagtcattgctgacagtcctggc

SEQ ID NO: 239080 - DNA, 25 bp, Homo sapien
ggcagtgagcacttgtctatcgtaa

SEQ ID NO: 239081 - DNA, 25 bp, Homo sapien
cctcattcttcatcaccttacttcc

SEQ ID NO: 239082 - DNA, 25 bp, Homo sapien
aaaggatagctctttccaatttgta

SEQ ID NO: 239083 - DNA, 25 bp, Homo sapien
ccttacttccttgaaaaggatagct

SEQ ID NO: 239084 - DNA, 25 bp, Homo sapien
cattcttcatcaccttacttccttg

SEQ ID NO: 239085 - DNA, 25 bp, Homo sapien
cgccactaccgccgcttggccctgc

SEQ ID NO: 239086 - DNA, 25 bp, Homo sapien
ccactaccgccgcttggccctgctc

SEQ ID NO: 239087 - DNA, 25 bp, Homo sapien
gcagcccgctccccgcttcgcccac

SEQ ID NO: 239088 - DNA, 25 bp, Homo sapien
ctgacgcgatatgcctctcctgcgt

SEQ ID NO: 239089 - DNA, 25 bp, Homo sapien
cggcccctgtctgccgcggtgagtt

SEQ ID NO: 239090 - DNA, 25 bp, Homo sapien
cccctgtctgccgcggtgagttgag

SEQ ID NO: 239091 - DNA, 25 bp, Homo sapien
gccagcggcccctgtctgccgcggt

SEQ ID NO: 239092 - DNA, 25 bp, Homo sapien
ctgtctgccgcggtgagttgaggcc

SEQ ID NO: 239093 - DNA, 25 bp, Homo sapien
ttccagagtgcgaaggttggaaccg

SEQ ID NO: 239094 - DNA, 25 bp, Homo sapien
cctgggccacatcgaagttccagag

SEQ ID NO: 239095 - DNA, 25 bp, Homo sapien
tctagcgttttcgataaaatggtgg

SEQ ID NO: 239096 - DNA, 25 bp, Homo sapien
tcggcactgcgaagatctagcgttt

SEQ ID NO: 239097 - DNA, 25 bp, Homo sapien
ggtggaggttgagagagagtttgca

SEQ ID NO: 239098 - DNA, 25 bp, Homo sapien
tggaggttgagagagagtttgcaca

SEQ ID NO: 239099 - DNA, 25 bp, Homo sapien
gaggttgagagagagtttgcacagg

SEQ ID NO: 239100 - DNA, 25 bp, Homo sapien
ctggtggaggttgagagagagtttg

SEQ ID NO: 239101 - DNA, 25 bp, Homo sapien
tcaaatttagcagcaggtggttata

SEQ ID NO: 239102 - DNA, 25 bp, Homo sapien
gtcaaatttagcagcaggtggttat

SEQ ID NO: 239103 - DNA, 25 bp, Homo sapien
aatttagcagcaggtggttatatac

SEQ ID NO: 239104 - DNA, 25 bp, Homo sapien
tagcagcaggtggttatataccaac

SEQ ID NO: 239105 - DNA, 25 bp, Homo sapien
catgtcccaagtcaatcaatggcag

SEQ ID NO: 239106 - DNA, 25 bp, Homo sapien
tactcttcttgtgggcatgactttg

SEQ ID NO: 239107 - DNA, 25 bp, Homo sapien
gaaactaagggagtatcatgcatgg

SEQ ID NO: 239108 - DNA, 25 bp, Homo sapien
catccccgaagagctgacagtagta

SEQ ID NO: 239109 - DNA, 25 bp, Homo sapien
ggaccgcagcgcacagggaagccat

SEQ ID NO: 239110 - DNA, 25 bp, Homo sapien
gagcccatcgcagaggggaggcgag

SEQ ID NO: 239111 - DNA, 25 bp, Homo sapien
agggaccgcagcgcacagggaagcc

SEQ ID NO: 239112 - DNA, 25 bp, Homo sapien
gcagggaccgcagcgcacagggaag

SEQ ID NO: 239113 - DNA, 25 bp, Homo sapien
gcctttggccgcctattaaatccca

SEQ ID NO: 239114 - DNA, 25 bp, Homo sapien
gaagcctttggccgcctattaaatc

SEQ ID NO: 239115 - DNA, 25 bp, Homo sapien
tttcggtctccccgcccacatcaac

SEQ ID NO: 239116 - DNA, 25 bp, Homo sapien
catcaacgcgggcagctccaggagg

SEQ ID NO: 239117 - DNA, 25 bp, Homo sapien
tgcgttttgtccgaatggtagcgac

SEQ ID NO: 239118 - DNA, 25 bp, Homo sapien
taaccttccgggaccgaattctgca

SEQ ID NO: 239119 - DNA, 25 bp, Homo sapien
ttttgtccgaatggtagcgacacgg

SEQ ID NO: 239120 - DNA, 25 bp, Homo sapien
ttgtccgaatggtagcgacacgggc

SEQ ID NO: 239121 - DNA, 25 bp, Homo sapien
gagcagtgtaagtagcagccggccc

SEQ ID NO: 239122 - DNA, 25 bp, Homo sapien
gtgtaagtagcagccggcccggcat

SEQ ID NO: 239123 - DNA, 25 bp, Homo sapien
accatgtccaccaaagcggagcagt

SEQ ID NO: 239124 - DNA, 25 bp, Homo sapien
ccaaagcggagcagtgtaagtagca

SEQ ID NO: 239125 - DNA, 25 bp, Homo sapien
tcgggctccagcgggggtttctcaa

SEQ ID NO: 239126 - DNA, 25 bp, Homo sapien
cggtgctgaaaaataatacggtctt

SEQ ID NO: 239127 - DNA, 25 bp, Homo sapien
tccagcgggggtttctcaagactca

SEQ ID NO: 239128 - DNA, 25 bp, Homo sapien
gttaatggcagcgcggcgctgtccc

SEQ ID NO: 239129 - DNA, 25 bp, Homo sapien
acaccaatgtcaaaaccaaccacaa

SEQ ID NO: 239130 - DNA, 25 bp, Homo sapien
taatgccaacaccaatgtcaaaacc

SEQ ID NO: 239131 - DNA, 25 bp, Homo sapien
caatgtcaaaaccaaccacaaccat

SEQ ID NO: 239132 - DNA, 25 bp, Homo sapien
tgccaacaccaatgtcaaaaccaac

SEQ ID NO: 239133 - DNA, 25 bp, Homo sapien
ggcagcccatagcaccggaggattt

SEQ ID NO: 239134 - DNA, 25 bp, Homo sapien
aacctgctaactccttgtggatgga

SEQ ID NO: 239135 - DNA, 25 bp, Homo sapien
tcccagtaatgactgactgtgtgcg

SEQ ID NO: 239136 - DNA, 25 bp, Homo sapien
actgtgtgcgtggttggaagcaacc

SEQ ID NO: 239137 - DNA, 25 bp, Homo sapien
gttgatgacttgagagttctgttct

SEQ ID NO: 239138 - DNA, 25 bp, Homo sapien
gccttcctttcgtgtcttcctgcat

SEQ ID NO: 239139 - DNA, 25 bp, Homo sapien
aactgccttcctttcgtgtcttcct

SEQ ID NO: 239140 - DNA, 25 bp, Homo sapien
tctgttctgaagacccaactgcctt

SEQ ID NO: 239141 - DNA, 25 bp, Homo sapien
gaaaagacagtcaacggtcacctaa

SEQ ID NO: 239142 - DNA, 25 bp, Homo sapien
tagcaaagctcccaagaaacggtga

SEQ ID NO: 239143 - DNA, 25 bp, Homo sapien
tacttaataggcaccgagggtatac

SEQ ID NO: 239144 - DNA, 25 bp, Homo sapien
tacaatggtgaacaaaaagctcact

SEQ ID NO: 239145 - DNA, 25 bp, Homo sapien
tgtctagttccatggatttcatggg

SEQ ID NO: 239146 - DNA, 25 bp, Homo sapien
ttctccaggaaaccacgtgcccctg

SEQ ID NO: 239147 - DNA, 25 bp, Homo sapien
aggaaaccacgtgcccctgtctagt

SEQ ID NO: 239148 - DNA, 25 bp, Homo sapien
cacgtgcccctgtctagttccatgg

SEQ ID NO: 239149 - DNA, 25 bp, Homo sapien
tgggcgttcaggaacacgtacagag

SEQ ID NO: 239150 - DNA, 25 bp, Homo sapien
gggcgttcaggaacacgtacagagg

SEQ ID NO: 239151 - DNA, 25 bp, Homo sapien
tgggcttgagtgctcagctgggcag

SEQ ID NO: 239152 - DNA, 25 bp, Homo sapien
gctagactaaagatgggtccacagc

SEQ ID NO: 239153 - DNA, 25 bp, Homo sapien
cagctagactaaagatgggtccaca

SEQ ID NO: 239154 - DNA, 25 bp, Homo sapien
agggcagctagactaaagatgggtc

SEQ ID NO: 239155 - DNA, 25 bp, Homo sapien
tgttcagtgtggtacctggctggta

SEQ ID NO: 239156 - DNA, 25 bp, Homo sapien
tagcagagccacttaaggatctggg

SEQ ID NO: 239157 - DNA, 25 bp, Homo sapien
tcagtgtggtacctggctggtagca

SEQ ID NO: 239158 - DNA, 25 bp, Homo sapien
ggtagcagagccacttaaggatctg

SEQ ID NO: 239159 - DNA, 25 bp, Homo sapien
cagccataggtgtctggagcacagg

SEQ ID NO: 239160 - DNA, 25 bp, Homo sapien
ctgcccccacaagcaggccctcaca

SEQ ID NO: 239161 - DNA, 25 bp, Homo sapien
aggacaggctgggaatgcggctcca

SEQ ID NO: 239162 - DNA, 25 bp, Homo sapien
acaggctgggaatgcggctccacct

SEQ ID NO: 239163 - DNA, 25 bp, Homo sapien
ctgtaaggtggccagagcatagttt

SEQ ID NO: 239164 - DNA, 25 bp, Homo sapien
taagctcaaatactaggccggcagg

SEQ ID NO: 239165 - DNA, 25 bp, Homo sapien
tatgtgcagactagagccctggatg

SEQ ID NO: 239166 - DNA, 25 bp, Homo sapien
tacacgcggcacgttgctaagaagg

SEQ ID NO: 239167 - DNA, 25 bp, Homo sapien
tacaggccccaaaacgtggtgatgg

SEQ ID NO: 239168 - DNA, 25 bp, Homo sapien
cttagagggctcgacagtggaacca

SEQ ID NO: 239169 - DNA, 25 bp, Homo sapien
tgcaaaatcaccctgtctccgtggg

SEQ ID NO: 239170 - DNA, 25 bp, Homo sapien
aatgacacacagacagctccgtggg

SEQ ID NO: 239171 - DNA, 25 bp, Homo sapien
cactaggactctgggacaatgggct

SEQ ID NO: 239172 - DNA, 25 bp, Homo sapien
attgacaacaactgcagatggggcg

SEQ ID NO: 239173 - DNA, 25 bp, Homo sapien
tgacaacaactgcagatggggcgat

SEQ ID NO: 239174 - DNA, 25 bp, Homo sapien
aacaactgcagatggggcgatgaac

SEQ ID NO: 239175 - DNA, 25 bp, Homo sapien
gatggggcgatgaacagatgtgtgg

SEQ ID NO: 239176 - DNA, 25 bp, Homo sapien
ctggctgtgccgatggcttctgttg

SEQ ID NO: 239177 - DNA, 25 bp, Homo sapien
ctttgaaaggggacgtctgtctgct

SEQ ID NO: 239178 - DNA, 25 bp, Homo sapien
tctgctggctgtgccgatggcttct

SEQ ID NO: 239179 - DNA, 25 bp, Homo sapien
aaaggggacgtctgtctgctggctg

SEQ ID NO: 239180 - DNA, 25 bp, Homo sapien
tgccacagtagaaagacagatccct

SEQ ID NO: 239181 - DNA, 25 bp, Homo sapien
cgccagtgcgcatgctttagacagc

SEQ ID NO: 239182 - DNA, 25 bp, Homo sapien
gagtgggctccggaccatctttctt

SEQ ID NO: 239183 - DNA, 25 bp, Homo sapien
caatggtttctccttcgggaggctc

SEQ ID NO: 239184 - DNA, 25 bp, Homo sapien
cactcatgggatactcagcaacgct

SEQ ID NO: 239185 - DNA, 25 bp, Homo sapien
cagcaacgctggtgccattttcgtc

SEQ ID NO: 239186 - DNA, 25 bp, Homo sapien
cactgcgttgttcacgtctactcct

SEQ ID NO: 239187 - DNA, 25 bp, Homo sapien
gtctactcctttgttgctctgcgaa

SEQ ID NO: 239188 - DNA, 25 bp, Homo sapien
gtgccagggttgagcccggatctgc

SEQ ID NO: 239189 - DNA, 25 bp, Homo sapien
ttatggtcattatcataggcccagg

SEQ ID NO: 239190 - DNA, 25 bp, Homo sapien
caggctggacacttatggtcattat

SEQ ID NO: 239191 - DNA, 25 bp, Homo sapien
gcccaggagttgattgcttctgcct

SEQ ID NO: 239192 - DNA, 25 bp, Homo sapien
ctgtggcaggtaaggggctcggcac

SEQ ID NO: 239193 - DNA, 25 bp, Homo sapien
gttctccagtctgcacagacttcct

SEQ ID NO: 239194 - DNA, 25 bp, Homo sapien
ttctccagtctgcacagacttccta

SEQ ID NO: 239195 - DNA, 25 bp, Homo sapien
tctccagtctgcacagacttcctac

SEQ ID NO: 239196 - DNA, 25 bp, Homo sapien
ggttctccagtctgcacagacttcc

SEQ ID NO: 239197 - DNA, 25 bp, Homo sapien
gcagctctgtgagtcagctgaggct

SEQ ID NO: 239198 - DNA, 25 bp, Homo sapien
tccggaaatgctagagagagttgtt

SEQ ID NO: 239199 - DNA, 25 bp, Homo sapien
ctgcagctctgtgagtcagctgagg

SEQ ID NO: 239200 - DNA, 25 bp, Homo sapien
agagttgttaggacccagcctggct

SEQ ID NO: 239201 - DNA, 25 bp, Homo sapien
tgccgcgcggacagctccagccgca

SEQ ID NO: 239202 - DNA, 25 bp, Homo sapien
ccacattccctgctcggagtgccgc

SEQ ID NO: 239203 - DNA, 25 bp, Homo sapien
cagctccagccgcacatgccagcag

SEQ ID NO: 239204 - DNA, 25 bp, Homo sapien
ttccctgctcggagtgccgcgcgga

SEQ ID NO: 239205 - DNA, 25 bp, Homo sapien
tgagctgcggcggaactggcgactg

SEQ ID NO: 239206 - DNA, 25 bp, Homo sapien
tgcggcggaactggcgactgtgcat

SEQ ID NO: 239207 - DNA, 25 bp, Homo sapien
ggaactggcgactgtgcatttctca

SEQ ID NO: 239208 - DNA, 25 bp, Homo sapien
tgtgcatttctcatgcttgcatcct

SEQ ID NO: 239209 - DNA, 25 bp, Homo sapien
gccttcggctgaggtctggtggagg

SEQ ID NO: 239210 - DNA, 25 bp, Homo sapien
acacctctgggtagaagggccttcg

SEQ ID NO: 239211 - DNA, 25 bp, Homo sapien
cctctgggtagaagggccttcggct

SEQ ID NO: 239212 - DNA, 25 bp, Homo sapien
gggctggggaacacctctgggtaga

SEQ ID NO: 239213 - DNA, 25 bp, Homo sapien
ctgtccatgactgtccacggtgcac

SEQ ID NO: 239214 - DNA, 25 bp, Homo sapien
tccatgactgtccacggtgcacgga

SEQ ID NO: 239215 - DNA, 25 bp, Homo sapien
cccacaccaaggatgccggcagatg

SEQ ID NO: 239216 - DNA, 25 bp, Homo sapien
ggcagatgaagcaggctcgtccctg

SEQ ID NO: 239217 - DNA, 25 bp, Homo sapien
tgtctgtactgcaagggtgctggcc

SEQ ID NO: 239218 - DNA, 25 bp, Homo sapien
tacgctatgtggctcagctatgcac

SEQ ID NO: 239219 - DNA, 25 bp, Homo sapien
catactgagccccattctaggtgga

SEQ ID NO: 239220 - DNA, 25 bp, Homo sapien
agtggttgcctctcaagaatgtgac

SEQ ID NO: 239221 - DNA, 25 bp, Homo sapien
atctcccctcaacacaggagctctt

SEQ ID NO: 239222 - DNA, 25 bp, Homo sapien
atggaggcaaggtgttcatcctgtg

SEQ ID NO: 239223 - DNA, 25 bp, Homo sapien
gtgggcatcatctcccctcaacaca

SEQ ID NO: 239224 - DNA, 25 bp, Homo sapien
tgttcatcctgtgccagcatgggcg

SEQ ID NO: 239225 - DNA, 25 bp, Homo sapien
cgattctagaaacatcctcttggca

SEQ ID NO: 239226 - DNA, 25 bp, Homo sapien
tcttggaaattcctaggactcgagg

SEQ ID NO: 239227 - DNA, 25 bp, Homo sapien
tgtgttggggccatttacaaagatc

SEQ ID NO: 239228 - DNA, 25 bp, Homo sapien
tcttggcaacctggctctgaaaggc

SEQ ID NO: 239229 - DNA, 25 bp, Homo sapien
ccaaagcgctggaataatcctcgcc

SEQ ID NO: 239230 - DNA, 25 bp, Homo sapien
taatcctcgccacccgctggaagaa

SEQ ID NO: 239231 - DNA, 25 bp, Homo sapien
acaccacataaggatccccgcccat

SEQ ID NO: 239232 - DNA, 25 bp, Homo sapien
tggaataatcctcgccacccgctgg

SEQ ID NO: 239233 - DNA, 25 bp, Homo sapien
cccagagttacagggtcttagagca

SEQ ID NO: 239234 - DNA, 25 bp, Homo sapien
tggttttcaagactaagccgctacc

SEQ ID NO: 239235 - DNA, 25 bp, Homo sapien
gggtcttagagcattgggcctttct

SEQ ID NO: 239236 - DNA, 25 bp, Homo sapien
tggcctcaaagaagcacagacggac

SEQ ID NO: 239237 - DNA, 25 bp, Homo sapien
gctttgtagcaaatgatgacaagca

SEQ ID NO: 239238 - DNA, 25 bp, Homo sapien
agggaggcacagcatacggcaatga

SEQ ID NO: 239239 - DNA, 25 bp, Homo sapien
cacagcatacggcaatgatgatcac

SEQ ID NO: 239240 - DNA, 25 bp, Homo sapien
ctttttatggctttgtagcaaatga

SEQ ID NO: 239241 - DNA, 25 bp, Homo sapien
gtggggcaagaggtagagttgggag

SEQ ID NO: 239242 - DNA, 25 bp, Homo sapien
tcctcagtggggcaagaggtagagt

SEQ ID NO: 239243 - DNA, 25 bp, Homo sapien
cagtggggcaagaggtagagttggg

SEQ ID NO: 239244 - DNA, 25 bp, Homo sapien
ctttcctcagtggggcaagaggtag

SEQ ID NO: 239245 - DNA, 25 bp, Homo sapien
aaaagacaggagcagcctgagtgtc

SEQ ID NO: 239246 - DNA, 25 bp, Homo sapien
ctgaaaaagacaggagcagcctgag

SEQ ID NO: 239247 - DNA, 25 bp, Homo sapien
aagacaggagcagcctgagtgtcac

SEQ ID NO: 239248 - DNA, 25 bp, Homo sapien
gaaaaagacaggagcagcctgagtg

SEQ ID NO: 239249 - DNA, 25 bp, Homo sapien
ggtgacaccaacagaggcgtgggga

SEQ ID NO: 239250 - DNA, 25 bp, Homo sapien
gggtgacaccaacagaggcgtgggg

SEQ ID NO: 239251 - DNA, 25 bp, Homo sapien
tgacaccaacagaggcgtggggagg

SEQ ID NO: 239252 - DNA, 25 bp, Homo sapien
gacaccaacagaggcgtggggaggt

SEQ ID NO: 239253 - DNA, 25 bp, Homo sapien
tgggaccatcatgggtgacactaac

SEQ ID NO: 239254 - DNA, 25 bp, Homo sapien
ggtgggaccatcatgggtgacacta

SEQ ID NO: 239255 - DNA, 25 bp, Homo sapien
tggtgggaccatcatgggtgacact

SEQ ID NO: 239256 - DNA, 25 bp, Homo sapien
gtgggaccatcatgggtgacactaa

SEQ ID NO: 239257 - DNA, 25 bp, Homo sapien
tagcctcgtgctgtctgcaatccag

SEQ ID NO: 239258 - DNA, 25 bp, Homo sapien
taatgagaacccagcattgtaccca

SEQ ID NO: 239259 - DNA, 25 bp, Homo sapien
gagattactccagcggttccgtggc

SEQ ID NO: 239260 - DNA, 25 bp, Homo sapien
tgggcgtggctcattagtgcagtat

SEQ ID NO: 239261 - DNA, 25 bp, Homo sapien
tgcccctctgacacggccgcacttg

SEQ ID NO: 239262 - DNA, 25 bp, Homo sapien
accaccaccagctcgagctcacact

SEQ ID NO: 239263 - DNA, 25 bp, Homo sapien
tgacacggccgcacttgagaaccat

SEQ ID NO: 239264 - DNA, 25 bp, Homo sapien
agctcgagctcacactcccgccgat

SEQ ID NO: 239265 - DNA, 25 bp, Homo sapien
gttcagtaaatggttcacaagtgaa

SEQ ID NO: 239266 - DNA, 25 bp, Homo sapien
tctctctgttgttggcaggtagtag

SEQ ID NO: 239267 - DNA, 25 bp, Homo sapien
tgggcttggcctgggttttgaatat

SEQ ID NO: 239268 - DNA, 25 bp, Homo sapien
aaatggttcacaagtgaatctggaa

SEQ ID NO: 239269 - DNA, 25 bp, Homo sapien
ccccggcctggacatcacagtctgg

SEQ ID NO: 239270 - DNA, 25 bp, Homo sapien
gaggccccggcctggacatcacagt

SEQ ID NO: 239271 - DNA, 25 bp, Homo sapien
ccggcctggacatcacagtctggaa

SEQ ID NO: 239272 - DNA, 25 bp, Homo sapien
ggccccggcctggacatcacagtct

SEQ ID NO: 239273 - DNA, 25 bp, Homo sapien
ttgccacagggcaacagctgccgtc

SEQ ID NO: 239274 - DNA, 25 bp, Homo sapien
ccggtgctgacaagctgcaggaagg

SEQ ID NO: 239275 - DNA, 25 bp, Homo sapien
cttgccacagggcaacagctgccgt

SEQ ID NO: 239276 - DNA, 25 bp, Homo sapien
ggtcacagccggtgctgacaagctg

SEQ ID NO: 239277 - DNA, 25 bp, Homo sapien
gaaacaacctccctcgatggtcaga

SEQ ID NO: 239278 - DNA, 25 bp, Homo sapien
gcctgggcggtaatgtggaagccca

SEQ ID NO: 239279 - DNA, 25 bp, Homo sapien
ttggggacacgccagtcctgggacc

SEQ ID NO: 239280 - DNA, 25 bp, Homo sapien
gactctgactgttgttctgtatcca

SEQ ID NO: 239281 - DNA, 25 bp, Homo sapien
cctggtcatctctggccacacccat

SEQ ID NO: 239282 - DNA, 25 bp, Homo sapien
cagcactgggggtccctggtcatct

SEQ ID NO: 239283 - DNA, 25 bp, Homo sapien
ctgtgacagcactgggggtccctgg

SEQ ID NO: 239284 - DNA, 25 bp, Homo sapien
ccctggtcatctctggccacaccca

SEQ ID NO: 239285 - DNA, 25 bp, Homo sapien
ccccagccgaagcagccatttgttt

SEQ ID NO: 239286 - DNA, 25 bp, Homo sapien
ccagccgaagcagccatttgtttca

SEQ ID NO: 239287 - DNA, 25 bp, Homo sapien
tggcccccagccgaagcagccattt

SEQ ID NO: 239288 - DNA, 25 bp, Homo sapien
agccgaagcagccatttgtttcaga

SEQ ID NO: 239289 - DNA, 25 bp, Homo sapien
tgttcctgcatcacagccgatgctg

SEQ ID NO: 239290 - DNA, 25 bp, Homo sapien
tgctgggaatcgcagaacaatgcca

SEQ ID NO: 239291 - DNA, 25 bp, Homo sapien
gggtgccggagctagcccttgagcc

SEQ ID NO: 239292 - DNA, 25 bp, Homo sapien
gcccaaaggtggagacttttagcca

SEQ ID NO: 239293 - DNA, 25 bp, Homo sapien
ttttgatacaggtctctttgtgcca

SEQ ID NO: 239294 - DNA, 25 bp, Homo sapien
attttgatacaggtctctttgtgcc

SEQ ID NO: 239295 - DNA, 25 bp, Homo sapien
ttctattttgatacaggtctctttg

SEQ ID NO: 239296 - DNA, 25 bp, Homo sapien
ctattttgatacaggtctctttgtg

SEQ ID NO: 239297 - DNA, 25 bp, Homo sapien
ccacaaccggctaaagatcactttt

SEQ ID NO: 239298 - DNA, 25 bp, Homo sapien
cacaaccggctaaagatcacttttt

SEQ ID NO: 239299 - DNA, 25 bp, Homo sapien
accacaaccggctaaagatcacttt

SEQ ID NO: 239300 - DNA, 25 bp, Homo sapien
accccgaggccggaatcaatggcaa

SEQ ID NO: 239301 - DNA, 25 bp, Homo sapien
gatcacagggtagcaaaagacgagc

SEQ ID NO: 239302 - DNA, 25 bp, Homo sapien
tgacatggcccgtgtttgatgccca

SEQ ID NO: 239303 - DNA, 25 bp, Homo sapien
caagcaagggttatacagtgacgag

SEQ ID NO: 239304 - DNA, 25 bp, Homo sapien
aaaacttagccacgtgtggcggctc

SEQ ID NO: 239305 - DNA, 25 bp, Homo sapien
caaaacttagccacgtgtggcggct

SEQ ID NO: 239306 - DNA, 25 bp, Homo sapien
atttattgggcactacttgtgtgca

SEQ ID NO: 239307 - DNA, 25 bp, Homo sapien
cactacttgtgtgcagggttctggg

SEQ ID NO: 239308 - DNA, 25 bp, Homo sapien
ggccgtagctctgacatttattggg

SEQ ID NO: 239309 - DNA, 25 bp, Homo sapien
gattggcagaagttgtggatgtggc

SEQ ID NO: 239310 - DNA, 25 bp, Homo sapien
catggctatgatagacattccctgc

SEQ ID NO: 239311 - DNA, 25 bp, Homo sapien
cctggcctggtagccatgttcttat

SEQ ID NO: 239312 - DNA, 25 bp, Homo sapien
gggcctgaccaaccagcatactcta

SEQ ID NO: 239313 - DNA, 25 bp, Homo sapien
cttccatgccggaggcactccatgg

SEQ ID NO: 239314 - DNA, 25 bp, Homo sapien
ctttaaagatctggccttcggaact

SEQ ID NO: 239315 - DNA, 25 bp, Homo sapien
ttcggaactatccaggccaagtcac

SEQ ID NO: 239316 - DNA, 25 bp, Homo sapien
gacttttatctgattaactgatgga

SEQ ID NO: 239317 - DNA, 25 bp, Homo sapien
ctcatcaaatggagattgactttta

SEQ ID NO: 239318 - DNA, 25 bp, Homo sapien
cagacgtgtcggcagctgtcagtca

SEQ ID NO: 239319 - DNA, 25 bp, Homo sapien
ggcactggcagacgtgtcggcagct

SEQ ID NO: 239320 - DNA, 25 bp, Homo sapien
gccggcactggcagacgtgtcggca

SEQ ID NO: 239321 - DNA, 25 bp, Homo sapien
ctggcagacgtgtcggcagctgtca

SEQ ID NO: 239322 - DNA, 25 bp, Homo sapien
gatgtggagaagtaatgtgggtaat

SEQ ID NO: 239323 - DNA, 25 bp, Homo sapien
aagatgtggagaagtaatgtgggta

SEQ ID NO: 239324 - DNA, 25 bp, Homo sapien
ctggaagatgtggagaagtaatgtg

SEQ ID NO: 239325 - DNA, 25 bp, Homo sapien
tggagaagtaatgtgggtaatgtcc

SEQ ID NO: 239326 - DNA, 25 bp, Homo sapien
ctgcagccagaatcctgtaaatgct

SEQ ID NO: 239327 - DNA, 25 bp, Homo sapien
aaatgctgtagtcctgagagtgggc

SEQ ID NO: 239328 - DNA, 25 bp, Homo sapien
tgaggcacaggtatgtcctggagtc

SEQ ID NO: 239329 - DNA, 25 bp, Homo sapien
tggagtcccctggatttggtacctg

SEQ ID NO: 239330 - DNA, 25 bp, Homo sapien
gaggctacaaataccccagagtgga

SEQ ID NO: 239331 - DNA, 25 bp, Homo sapien
tggatcctcaatgcccaaaacaatg

SEQ ID NO: 239332 - DNA, 25 bp, Homo sapien
gagcacatgaggctacaaatacccc

SEQ ID NO: 239333 - DNA, 25 bp, Homo sapien
aataccccagagtggatcctcaatg

SEQ ID NO: 239334 - DNA, 25 bp, Homo sapien
cagcagccacggcgcagcaccaagt

SEQ ID NO: 239335 - DNA, 25 bp, Homo sapien
gcagcagccacggcgcagcaccaag

SEQ ID NO: 239336 - DNA, 25 bp, Homo sapien
cgaagccccagagcgggtggagcgc

SEQ ID NO: 239337 - DNA, 25 bp, Homo sapien
gggtggagcgcgcagtgcagcagca

SEQ ID NO: 239338 - DNA, 25 bp, Homo sapien
ggccagcggcgcccgctcctggggc

SEQ ID NO: 239339 - DNA, 25 bp, Homo sapien
ctcggccagcggcgcccgctcctgg

SEQ ID NO: 239340 - DNA, 25 bp, Homo sapien
tcggccagcggcgcccgctcctggg

SEQ ID NO: 239341 - DNA, 25 bp, Homo sapien
cagcggcgcccgctcctggggcgaa

SEQ ID NO: 239342 - DNA, 25 bp, Homo sapien
gtacactttagctccgcgcacagct

SEQ ID NO: 239343 - DNA, 25 bp, Homo sapien
gaattcacactcttcttacgcacat

SEQ ID NO: 239344 - DNA, 25 bp, Homo sapien
ccagagccccgcgtgtacactttag

SEQ ID NO: 239345 - DNA, 25 bp, Homo sapien
cttcactgactcttcgtcagtccca

SEQ ID NO: 239346 - DNA, 25 bp, Homo sapien
tgatccccgtgcacacccaccgact

SEQ ID NO: 239347 - DNA, 25 bp, Homo sapien
gcacacccaccgactcctgcctgca

SEQ ID NO: 239348 - DNA, 25 bp, Homo sapien
ctgcgcgcacaaccacagaaacagc

SEQ ID NO: 239349 - DNA, 25 bp, Homo sapien
acactgatccccgtgcacacccacc

SEQ ID NO: 239350 - DNA, 25 bp, Homo sapien
ccccccgcggcagctctgtttccca

SEQ ID NO: 239351 - DNA, 25 bp, Homo sapien
gcgttccccccgcggcagctctgtt

SEQ ID NO: 239352 - DNA, 25 bp, Homo sapien
gtccgcgttccccccgcggcagctc

SEQ ID NO: 239353 - DNA, 25 bp, Homo sapien
ttccccccgcggcagctctgtttcc

SEQ ID NO: 239354 - DNA, 25 bp, Homo sapien
cccggcgctggagcaaaagtttgcg

SEQ ID NO: 239355 - DNA, 25 bp, Homo sapien
agcgcccggcgctggagcaaaagtt

SEQ ID NO: 239356 - DNA, 25 bp, Homo sapien
tggagcaaaagtttgcgcgccggtt

SEQ ID NO: 239357 - DNA, 25 bp, Homo sapien
cagaggaccaggagcggcgtcctcg

SEQ ID NO: 239358 - DNA, 25 bp, Homo sapien
ggtctgtaggctgtcatcccggtca

SEQ ID NO: 239359 - DNA, 25 bp, Homo sapien
aattgatgggacagggctatttgcc

SEQ ID NO: 239360 - DNA, 25 bp, Homo sapien
agtcggctcccggttgatttcctct

SEQ ID NO: 239361 - DNA, 25 bp, Homo sapien
aaaatgagagccgaagcgctgttga

SEQ ID NO: 239362 - DNA, 25 bp, Homo sapien
tgtgtgccggcattactgtggcccg

SEQ ID NO: 239363 - DNA, 25 bp, Homo sapien
ccaaaaacctctgtgtgtgccggca

SEQ ID NO: 239364 - DNA, 25 bp, Homo sapien
tgtgtgtgccggcattactgtggcc

SEQ ID NO: 239365 - DNA, 25 bp, Homo sapien
acctctgtgtgtgccggcattactg

SEQ ID NO: 239366 - DNA, 25 bp, Homo sapien
aacatccagcattaaaccacgaagg
